United States Patent Application Publication US 2024/0084332 A1 - sequence listing, part 2

SEQ ID NO: 3663 - protein, 219 aa, Microcystis sp.
MTVGKTCLGIDAGIESFVATSRGDLIKAPRFLLKVQSKLKLLQRRLKRKTKGSNNWLKLQEKIARLHEKVSNTRRDWHFKLAHYFCDLADNIFVEDINFVSWSRGIVRKQSLDSGIGSFINEILPFVAWKRGKYYLKVDKNGTSQECPNCGAITGKKALSERVHRCDSCGHIEPRDTASAKVIENRGKNAVGLTVLENACGGGRLGVVQLNLFDLVKSL

SEQ ID NO: 3664 - protein, 322 aa, Nocardia sp.
VSGTWTTGHSRNVPAPGAAPHLLCRVGQDAHGLETRPRHYGAHRAVQGSVAGGAAESASRVRQVLAQAGRVSEVQEEGEVEGLGHLLRELLRLPQRADHARQTSRTAEQPVVASATGGRAAVAGHGVEGCGGPLPHLDPGRGNDPRARPTDATVGVDAGITSLYTLSTGEKVSNPRHEKRDRARLTKAQRVLSRKQKGSANRTKARWKVARIHARITDRRRDHLHKLSTRLVRENQVIAIEDLSVHNMVRNRSPARAISDASRSRFRSMLEYKADWYGRTVVAVNRFYPSSKTCSVCGRINDAMPLHVRTGNARAGLVTIGT

SEQ ID NO: 3665 - protein, 568 aa, Burkholderia sp.
MSMAAGALREESRAVGRFGLRNLVAVMYGDMVFAAAVDIEPDAQVLRRHRRALDMPARKSASPRAVPFHLAPDRGRTEFPQREVRRVPLRADCNPLAGLQAGSIEAREKAVIVLLAGVEVEAVVGAIHVAGSFDFLNKGDLLRDVVRRAAPDRRLQQVERAPVRLEGVGVVRGDRTPIGLFAGYPFPSDFAQRNPAIDGGEERCALDRPLLPQVRMAGMILVYRYRVKSLNGLLNKQSRAVNYVWNFCNDTQKHAIKWSKKWPTGFDLNMLTTGSSKALGIHSGTVNATCEQYAKSRSQCRRPYLRYRGRKSLGWVPLKGRDLKREGDAFRFAGHTFRVFNSRPLPDGKIRDGTSFAQDARGNWFLNIVIEMPEVPTRPIRSGVGIDLGLKDFATLSTGEKLPNDQFGRRAADKLATAQRARKHKRHIAKLHAKVANARADFQHKLALELVRRFDYIAVGNVSAAKLARTRMAKSVYDAAWSSFRDKLRYKAIAHGATFEEVDESGSTQSCSACGSKDSTTRPRGIAGLRIREWTCSGCGVVHDRDTNAALNILRCGRASPVVGILHL

SEQ ID NO: 3666 - protein, 94 aa, unknown
  TnpB Polypeptide
MIRNHKLSKSIASVSWAKFFEMLEYKAGWYGNEIHRVPTMYPSSQTCSCCGYRNPRIKNLGIRIWECPKCHAVHDRDTNASINILKKGLQMQSA

SEQ ID NO: 3667 - protein, 268 aa, Ferroplasma sp.
LRTVNGLDNINTFDLSNAVLIKRNNNYYINITAYKNKLNTETNQILSFDLGIKNQLTLSSGLQLKYSIEKTKKEKRIQRILSKKVKGSNNYRKLKVKLNKEHDKTKNRRTDTRNKIVHYLTSNYNIIITQNDSISGWQRIFGKRIESTDIGGIIEALKHKASTLILLYRFIPTTKECSKCHNKYDIKLNERIYKCSKCGLISDRDYNSTLNDIYYGTKTHKFKKLKVPVEYREFKPDRDNASTLKGFNVSPYVSASFVSETGSLNVLT

SEQ ID NO: 3668 - protein, 393 aa, unknown
  TnpB Polypeptide
MKKTYQFRIYPNKNHEVILNRTLGTCRYLYNNALAERKKQAELNRLRKSFDVFPWGKPEWINKYDQMLDLTATKTEYQKEVYGQVYGQVLQDVLKRVDRSFKNFFNGFGYPRFQGRNRYNSFTYPQSGFSIKDGKLNLSKIGNIKIILHRPIEGIIKTCTIKKDIDQWYVSFSCEIEEPIPVEVKTKTGIDVGLIDLITLSNGEQIKPPKFLRESEDKLKQEQKRLSRKKLRSKNRNKQRVIVSKVHRKIGNQRKDFAHKTSKVLVDSYDRIVFEDLQIKNMVQNPRLAKSISDAGWYQLMQFTKSKAECAGKIVEFVNPAGTSQTCICGFRVPKDLSVRVHRCPSCGLVMGRDQVSAILIENSPISTVGTTGINARQGYLSGVSMQRDAPRL

SEQ ID NO: 3669 - protein, 325 aa, Lactobacillus sp.
LYSRNYHKIGYGIPTFHKKRSNWSYQTNCQYIKQDEAYLDNGTVRFIDAKHVKLPKLGIVRIAGLRKLIKKRLLDRIPTRIGTASIKKTADDQFYLSLQLGSDIAFVKDYAKTQKQIGIDLNLDNFLTDSNGAMVANPRFYRRAKKKLAHAQRILSRRERRAKKEGRSLCESKNYQKQRLAVAKLHDRIRRQRQDFLQVLSTALIKNHDLVVAEELRSKNLLKNHALAQSISDAGWRSFLTMLEYKADLHGKKFVTIDPKFTTQRCHNCGNIMGQNGYKKLTLKDRKWTCPVCGSYHIRDWNASVNILEKSKGIWKNPKIKKRSK

SEQ ID NO: 3670 - protein, 487 aa, Deinococcus sp.
VPAPPLAPLRAGALAGTARGRPVHLSEHALSSGVAGGLSCRTLSSMTESDAHAPFFRAGSSGSRPQGGEAEAPGSLLRSMSDAPTPRERLGAWQGGEEPPRMSERPTIRVFRFRLSPTKSQEAAMLETLRLTRRLYNAGLEQRREAYRKQGKTLSAYDQQRELSALKAECPEYAEVYAHVLQDTLDRLDKAYKAFFRRVKRGEKAGFPRFKPAQRWNSFRFKQCWDNKKNDWTACGRPVDDGRRISLPKIGAVRCRFHRPLEGKPKTLQIVLDVDEWYAVYTCEVPVSPLPETGSAVGVDVGTRYFAITSDGEFVENPRHLGKSLRKLRVQQRTVSRRQKGSHRRQKAVRQLAKTYRRIRRSRQDFHHKTARKLVREHDLIAHEDLKVSNLVPSNLARSISDVGWRAFLDILRGKAESAGRVVVRVPPQYTSQRCHACGHTCRENRDNEVFRCVSCGHEDHADHNAAKNILARALPSGENGGSHAVA

SEQ ID NO: 3671 - protein, 673 aa, Deinococcus sp.
LTLTAKLKLNHTREQKAALDAVTLSYRDALNYTSQVAFEMGKSSNAAKIQKEVYATLRERFGLGAQMACSVPRAVGAAYKTLWTRAKQAKAARERNPKARGYKGLDAPPKFVSRTLSYQYGRDYSFKSGQRVSISTLQGRLVLSYEGYAKHLEYIAQGAEVGAGKLWYDKRKKQYFLLVPLSIELSDPEPSTHTQVVGVDVGMRYFAVASSTSNQAFFKSGKETLRQAERYAKARKSLQQKGTRSAVRRLVALSGRERRFIADTNHSLSAQILRSFPQALIGIEELTGARERTERRSRKGSSEKQRKANRRRARWSYAELLGFLAYKAPIVGSVVVKVDAHYTSQTCPQCGHCSQGNRPQKGLMFVCESCGYSLHADLVGARNVGLRALLVRQDWASTGCLSCTPSRPESADPHAGSAGRDVSDAETKAERLQRYSELRWSPDTSPRLEARGHDPKRVALAETPGHVRLCPLVARAGKQLFCGTVFDQVAVQEKGGGVRDPRGLVHVVRHNQDGCDLFQLGHQVLDAGGAGGVERGGRLVHQQEFRLHGERAGDTEALLLPTRKPRCGRFQAVFDLVPESGAAQGPFGHRHEVPAVTHPRELQAAHHIVEDAHRGKGVGLLKDHANAAAHGHRVYSTPVHVLAVQQDAARDPRSGRQVVHAVDRPQEGRLAAA

SEQ ID NO: 3672 - protein, 558 aa, Deinococcus sp.
VKLTLTAKLKLNHTREQKAALDAVTLSYRDALNYTSQVAFEMGKSSNQAKIQKEVYATLRERFGLGAQMACSVPRAVGAAYKTLWTRAKQAKAARERNPKARGYKGLDAPPKFVSRTLSYQYGRDYSFKSGQRVSISTLQGRLVLSYEGYAKHLEYIAQGAEVGAGKLWYDKRKKQYFLLVPLSIELSDPEPSTHKQVVGVDVGMRYFAVASSTSNQAFFKSGKETLRQAERYAKARKSLQQKGTRSAVRRLVALSGRERRFIADTNHSLSAQILRSFPQALIGIEELTGARERTERRSRKGSSEKQRKANRRRARWSYAELLGFLAYKAPIVGSVVVKVDAHYTSQTCPQCGHCSQGNRPQKGLMFVCESCGYSLHADLVGARNVGLRALLVRQDWASTGCLSCTPSRPESADPHAGSAGRDVSDAETKAARLQRYSELRWSPDTSPRLEAWGHDELRSRRGFQGRELLAASGVRHAQVRRQGEAVAFVGLAAAHKGRVHRQDKGPRSCRLGPANDVCTRLTVGVEVELKPEPPGGSCRHRLDGRVAEGRERQEAAL

SEQ ID NO: 3673 - protein, 174 aa, Halobacteriales sp.
VNQLAVTSTGVFWSGHEFDHWRREYEKRRSDLQQCGSRYAHENIQAVGRKEAGRFTMMLHRIANGIITEAVENGCTVIAFEELTGIRDRLSGASWGHEWAFERLYEYVEYKVEMYGITVGQVDPENTSRRCSTCGFTHPDNRDGESFECLKCGYRNHADYNAVAGLRPAGSKVA

SEQ ID NO: 3674 - protein, 408 aa, unknown
  TnpB Polypeptide
MILTERHIIKKQHCLFEECDSLAFLSKNLYNKANYIIRQEFIHNHNYLNYYDINRIMIDTNDVDYRALPVKVANNILQLLHLNWKSFYLSLVAFRKNPKKFNGFPKLPKYKHKTSGRNIVPYEKNAISKRELIKNNKIKLSKTNIVINPKEVNYENLQSARIVPRLGHYVVEIMYNVDIIDAKLNKNNIVGIDLGVNNLATIVSTTTGDSFIVNGRPIKSINQFYNKRTAFLQSKLDNQTYSSHRINKLTNKRNNKINDYLHKASRYIIEYCLTNDIGKIVIGNNKGWKQNINIGKSNNQNFVGIPFYKFIQMIQYKAELLSIEVIVHEEAYTSKCSFIDNEKIGKHTKYKGQRVKRGMFKSENGIIINADVNGAYNIIRKVVSKFNFSKLKNGIEGVAVYPVRYNFS

SEQ ID NO: 3675 - protein, 370 aa, unknown
  TnpB Polypeptide
MQVAKTVRCKIHSLTGIKEQILSDEYNDYQTLCKEVSDCVDNDCMPQLPYFTFKKPHRYSATVWGAIRSIEKKRQFDNIKEQPLHLRNDVFTVVEKQTEVSKHWLRLPTKQRHGGVWLPVIVPRKYESLLKLNVGDSKIARNKNGWFLMLTVRKEVTIRKSYSNILAIDLGEKVIATVCGSFNSQRPEFLGREVRGTRRHYAWLRKRLGKKKLPKVIKQIGQTEQRKANDTLFKIARHVNDLAEEHNAIIVLGDLKGIRNSAKGKRFNRIVSSMPYFKLTQTITHMANWDGRQVIKIDERGRTSHTCSRCGSKGTRPHQGLFGYPHCGYQANADHNGAKRIAQIGLETIPSLDGATLASPITLGAWQRAH

SEQ ID NO: 3676 - protein, 398 aa, unknown
  TnpB Polypeptide
MQRTHKFRMYPSGQQEDQMLWTLDRCRFVYNQMLDGLNNQEKPNRYELQNRLPAMKGQYPELRGVYSKVLQYEPYRLFSALWSLAQLKKNGKKVGSLRFKGRNRFKTFTYNQSGFRIISTGKWCQRLHLSKIGEIPLRVHRKIEGIVKQITIKRYPSGKWFSLISCEVREKPMPTRNRRKVGIDVGLNSLVYDSDGNRADHPRCLNKSLKRLRRVQRKQSKREKGSNNRNRQRIIVARVHERIVNQRDDFLHKLSRYYVNDYGLIVLERLNITNMVKNHHLAKSIMDASWSKLIQMIEHKAECAGVHVVRVSARNTTQKCSQCGNVVEKSLSVRTHSCPHCGFVADRDYNSALEILNNALGREPPESTPVETGPLLLSNQGQVRSWKQEATSKITSIA

SEQ ID NO: 3677 - protein, 450 aa, unknown
  TnpB Polypeptide
MRRANVVKLVVDKGTHERLRELAIATAKCWNEVNWLRMQQFKEGRRIDFNRTEKEVYEKYKHVLKVNAQQVARKNAEAWRDFFSLVKEKKDGKLPKWLRPRPPGYWKGEDGKYRLTVLIRNDRYEVDEGRRVIYLKDFKLALGFKGRLKWRGKQGRLEITYDEARRSWYAFIPVEVENNARAEGRLRASIDLGIVNLATVYVEDGTWYLFKGGGVLSQYESYSKRISIAQKVLARHGQRGSRRLRLLYDKRRRFLRHALNSMVRRIMEELKGKGVGEVVVGYPKEINRNHGNKLTVNFWNYGYIIRRLEEVGEELGIKVVKVSEANTSRTCSLCGEAHDGGRIRRGLFRCPRAGRVINADLNAAINILRLHIPESPGPRGWGQPLARDRGNGLKARPAVYRWTSGAGWALTAPTSYDAVKVKAVNREPMIRPEGALTLQGGEEVSSQAIS

SEQ ID NO: 3678 - protein, 449 aa, Calothrix sp.
MLQKKKGYNIGTKSLQCKLIRNGIELIETRLAYNEVVNFYFALINTYPEHVLSDDSEYSGWRAYELLSNPGSEFALPFDIPSQLKRSAIRKAIGAWESWNTSYQKWKDRPNKKKHHRPPVQPRKFNFSPSYDAGVWKDDFDGNILLKIKNKGQWKWIKFDYQSRSFVHDPTGLNGWHKASPSIVIKGNKAYLTFSLQKYIPATGGIKNQLAKNSVRVLGVDMDLDRNIAILSVLEIDANGVVVEVARHFISQSNHTKRRKRRLGRIAIRMQKTGIINKGFCNRRWEQIHNAEREMSRRVARRIAHFAHDWKCSVIAFEHLTNLKPCRGKYSRRSNQKRAYWLKSKVFQETNRIAYQDYGILTTRVNPRYTSRLDPWNNELYRINLHSGEVAIRMIHDGKLEPKYEPGADFVVNPKNCYSAHSGLNAARNIGLKAILRHRTNAVFVLRKA

SEQ ID NO: 3679 - protein, 506 aa, Calothrix sp.
MSTITYVKGLPTPSSEMNSLGFTQFEMFLTDFSSIFRQATIRAVEIIKKSKNFDKIKGKVNTELQKEFGLNKRQVNGVIALASSKVDSADECRKNHIKQLEGKLKSALTWIKNAEKKLKDSQKFYALENWQKSKTGCKVPLCCDLKLRRSNWHALKFQIHHKKRYIYVLEKKVAHLKTAPIQVKVSSSEIYIVGSSDESFGNQVCQYDGSKLSFRVPYCLEAKYGKYVETVIGGFDRNINRLPDNGAKTWHFFRKNNRFCCACQFTPKPVEKVSRPIQYGAIGIDINPNSIGWAYVDYQGNLRDCGTIPLFSLLGRNFNTQQLVNACLEIASLATKYACPVVCEELDFSKKKEQLREKGRKYARMLSSFAYSKLYQLLESILSNRGISLYKKNAAYTSIIGLTKYSRMYGSGSDIAAALVIARRGMNLSERLPASVSAYLGVNPRKHVWSGWSKLNKLTLTAAIVLSRHDYFSIPNWGMVVKDTTEQVAVKRKRRVVSKQSVALPF

SEQ ID NO: 3680 - protein, 519 aa, Calothrix sp.
VPIDKKATNTSDTKPGACMSTITYVKGLPTKESEMNHLGYTDFEMFLNAFSPIFKDAVCETVDKILASKNFEKEKSKFNTHLQQKYGLSKRHANGVIALASGKVNSASECRANHIKQLEGKLKSAKIWLKNALKRLSDSQKFYAKKNWHSSKTGCKVPLCCDLNTRRSNWHALKFQIHHKKRYIYQLEKKIAYLKTAPIRVKVSSSEIYIVGSKDETHGNLICQYDGNKICFRVPYCLEERFGKHIETEIGNFDRNINRLPDNGAKTWHFFRKNGRWVVGVQFTPKLVEKVSRPIQYGAIGIDINPSSIGWAYVDYQGNLKADGSIPLQSGLGKNFNSQQIVNACLELANLATKYACPVVCEELDFSHKKELLREKGRKYARMLSSWAYSKFYQLLESILFNRGISLFKKNPAYTSLIGLAKYSRMYGLSSDIAAALVIARRGMNLSERLPASVSAYLEVNSRKHVWSGWSKLNKLTLTAAIVKSRHDYFSIPNWGMVVKVQVEQVSVKAERRACSKST

SEQ ID NO: 3681 - protein, 504 aa, Calothrix sp.
LLTNYVYKLQPNVTQSHEMVRWIDMLRSHYNWCLNDRISQYNQKFIQGDYCDIRTKAEACPISCFVSKNGASGEPWKQDNQNTIVPMGEYCLLPYDLNNLPYSGKTPRRSVGDIQITALPVLKVARPWYAEIDSTVLQQNVKRLDTAYENFFNGNGFPKFKNRSNFTSFTYQVGFKVSGNKIYLPKLGWMRFYDSRPIPPGFVIKAATVRKRQDGWYISVRIEDKTVPDYVPLPLSEVNKVIGCDLGIVKLIHLSDGHQIDNPKFATNKKTRRILKVRQRRVSQKKKNSNNQKRASRAVGRLHKKIADKRQAYQWEIADAIVSRKVDAIGVEHLNIAGILRRCKVKIDDNTGRFLPNGQSRKKYLNRAISDASWNELILKIDYLAAKQGKIVVKINPKNSSIECRNCGYIDKASRDNEKFICSQCGHHEHADIGAAKTIRDRVIELIEYQKVHGDCVEPADKTAKRPKKRKEKSARSTLSKRVEPGNPKSKGENPETGIQEDIA

SEQ ID NO: 3682 - protein, 578 aa, Calothrix sp.
MGKSLLSELTHRSYSKAKNPDGTRTAQLRIGVEAKLPYHSFLSDWGDKYQSIMRTALNELQSGKSEDDVEKTFQEKFDIDWAWADSVASDAKGTFDQLTTARTLKIKALDDDLRAGWKSVNDTIELMEQQLANPTRKNMKGFAHRLMGTKSKISRLERKKIEKEELEIAKRLHICFGSSKLFNAQYHLEENGYSSHEQWRIDWEKKRGGNFYSVGKGSVSGNNPVAKIFYINNDIFSVCFTVPRFLRAKYGDTVRLKFEVSGQRKHNLLYALESGKPVTVQCFRREHKNDQWYIHLTTYVQDVPTISSINNGCIGIDLNAETIDVIYIKRDGNPKKCRNALSFPIPTGTTGQKEARLRDFVCEIVKLAQVYQCPIACENLDFSTKKNHLRHSGSREYNRMLSGFVYDKFRSYLVVRAEKFGIEILFKSPFMTSVIGMVKYMGKYGLNSASAAAMVIARRAMGFKEFIPQKWLKILSSFFEPEDSKDGGFAGGWRKISAWLKKFCIRRPQLFELDTVLRLLLDSLVNESQKKTHKKRKLGGSNKSAGRRTGKAKPTEGQVPLERERASVTNIGAVTVAP

SEQ ID NO: 3683 - protein, 542 aa, Calothrix sp.
MIKFSDLTRKSTSKSGGVETRRFLVGIETKIKSVEPQILDFFEEWGALYQKIVRWCTKRLLQGRCKNELLPSVQFTFNIDWAWADSILTDACATIKSAEEIRKLNIENIELDIKSGIEKVENMIDEYNQFILNDEHYKAKRQAFQINNKLARLERRTERLVQLKNSKLSITFGTKELATKQHFLSENNFSNHSEWLKKWRLARSGNFSSVGNANSTGKNRVMKTFHKQDNIFILKIIVPKCLTKKYSQELSLEFSVASRRLPDLLYAVDPKNLRASESKQPITVRCFIREHKKNAWYLHFSTYVPEVPSLNQNNGTLGIDLNANTIDIAYVSQDGNIKKSLVKSFPIPVGTTGQVNALMRDIVNDIVSVASDIGCSISIENLDFKDKKATLRHSGSRNYNRMLSGFVYSKFREFLVVCCEKKGIRVNLVNPALTSTIGLFKYTKSYGLSSGFAAALVIGRRALGFNEALNTDSKTLLTCSGKKEIIPRDKSKNLKLWNKVHRKMKESKIGRTRFYEPSISTIIIAEINSLQKSKKRRKAIYN

SEQ ID NO: 3684 - protein, 518 aa, Caldilineales sp.
MQHPGTYQTRVAVYVGVERKAGDAVLSAYGELYGRVEHKLFAEVAAGRSVVSLKRPYLQRYRIPARMFNAVRVSLEGRMASVRAQQKLRVDSLGQRIAQAERRIRAAAGHGHREQVHQQKRRWAALQSQRAALQADMEAGRVRLCFGSKQLWRKQHHLEENGYASHQEWLRDWREARSDEFFVLGSRDETAGCQLCVATVADDGSLTLRLRLPDCLAPEHGKYLTLQGVRFAYGHAQVLAALESNAEYTRYRREHGEQAVRATVLGQAISYRFKRNAKGWRVFATTDMMEVPVVTDKRRGAIGVDLNADHLAVAETDVSGNPVHAFRVPLVTYGKSRHQAEAIIGDAVARVVAYARAAGKPIVIERLDFRQKKAALKGESRRYRRMLSSFSYGKIKAFFLSRGYRQGVEVRQVNPAFSSVIGRVKFMERYGLSVHQAAALVLARRLLGCSERIPRRRVAPVGHGVQVAFTVPARKRVKHVWTYWGAVSGQLGPALAAQHRLGRRRGPPNPAQAARRVA

SEQ ID NO: 3685 - protein, 390 aa, unknown
  TnpB Polypeptide
MRLAYQYRLKPNKTQQQMLEHLLCIACQIYNDALKERKEAWEKEQRTVTYHEQALKLKDLRATDKEMALLNFSACQHVLRRLDKAFKRFFNGLKEGEKVGYPRFKKSHRFRTLEFTYGDGTKIKPDEKGRLRLYVQNVGLIKVVWHRPLPEGAIIKQVWITHKADGWFVTFALEVPEEALMKPLPKTGKAVGIDVGLENLLALSDGTLLENPRWLKATEEKIAVKQRILSKKVKGSKRWRRMCWQIAKLQLKVARQRRDFYFKLANWLVREFDLIVVEDLNIKGLVQGICSKGVHDAGWSLFLNEILPYKAWSAGKAVVQVSPNGTSQNCAMCGALVPKDLSDRQHCCQHCGFVTHRDINSALLILRLGLERARRDAGFMPASCLQEAVG

SEQ ID NO: 3686 - protein, 456 aa, unknown
  TnpB Polypeptide
MIMAAKVINMPTICLKFRFKENQKVKALMAACASIQQQAVDFAIDNNKTATFTIIKALYPSLKAQHPNLHSLWLQSACRAGATVVHSFKNRKRKRMRQRDNGTTGQRTTGKQGNGQWKTNLQKPKIKRPFLYIHKQLLKVDWDGSKLTLTFPISPHDKEPITLVFRPHHRYCRLLDEWKAGKAEMGEPTLTHNSISIPLRFPEVKPYQPKTVIAIDSNELNLTVYDGARDMGQGKFEGCLREIDTSYAAKVSRDHERRVRKGTKGKQNPKAKRKVAAKHGRIRKEKVKNFWHHITLMLIGWAIQWGAAIVLEDLKGMKERIAKKEKSRRVRQRLLNFWSVMTFHRILAFKAAFYGVPLVFVDAQNTSRTCPVCGRVKEGLRGHVFECPCGLKMGRHEVGAMNIACRGVKTLGGKMLPRQGLVGDPCCLSSGFGLKAQSHDRNTQFNCVSLRLDCQA

SEQ ID NO: 3687 - protein, 396 aa, unknown
  TnpB Polypeptide
MVRYQGFRFRLKPTQADAALLRRFAGCSRFVWNELLVQNEVRLYRRERRLGYAAMCSYLVYLKNEYPFLRDAHSQCLQQALKDLDRAYQHAFNPPLKKQFPRLKKKNDRRGLRFPQGFKINGSGVYLPKIGWIGYRKNRKIEGTCKSVLVSFDGSHWYVSFRTERHVSEPIHGATSAVGIDLGIIRFAALSDGTFIEGANAFKKYGSRIAMLARRMSRKQKFSANWLKARNKVARLSRKIARVRNDMLHKASTTISKNHAIVVLEDLRVSNMSASAVGTVENPGTKVRSKAALNRRVRDQGWGEFARQLQYKLEWSGGSFIRINPANTSRTCSECGYISCENRQTQSVFQCGACGFEANADTNAALNILQRAGQARIACGEPPLGGSEKQAAQLVA

SEQ ID NO: 3688 - protein, 435 aa, Phormidium sp.
MRTAYQYRLQPTYEQRCQMSRWLDMLRHQYNWLLADRFDWWEMNRCPVNACPLVASIAEQREQPDYYGQKRSLVPLKGERPWYKKIHSQVLQDMVKRVNLAFKRFIKGDSSGKHSGKPRFKGKHRDRTFTYPQASHDWIDVNRVNLPKIGAVKFIRHRPLPEGFALKTAAISLKADGWYITFSLEDKSVPETPLPEVVPTEANSLGVDAGLEYFVACSDGTTKTPPKFYRHAEKRLAKLQAKRELRPKGSKARRKLNAKIAKLHQRIARQRRQWHFETAQELVDKADVIFVEDLKVSNMARRNKPKQGEDGTFLPNGQAAKSGLNKSFADAGIAGFLNEILPYKAAKAGRLVVKVNPAGTSQHCAICLNRVPKELSDRWHSCPHCGASMPRDVNSGVLIKKVGLGHRLTIKREGRKTGEARPLREALGSGACHRS

SEQ ID NO: 3689 - protein, 415 aa, unknown
  TnpB Polypeptide
MLRACKYRIYPTDEQKVLFAKTFGCCRFVYNWALNLKITAYKERKETLGNVYLTNLMKSELKVEHEWLSEVNSQSLQSSLRNLDTAYTNFFRNTKAVGFPRFKSRKDKQSFLCPQHCRVDFEKGTITIPKAKDIPAVLHRRFKGTVKTVTISMTPSGRYFASVLVDTSMQEMKPSEPMRDTTVGIDLGIKSLAVCSDGRTFANPKNLQRSLDRLKLLQKRLSRKQKGSANRNKARIRVARLQEHIANSRKNSLHKITHALTHDSQVRTICMEDLNVKGMQRNHHLAQAVGDASFGMFLTLLEYKCSWYGVNLIKIDRFAPSSKTCGKCGYVYKELNLSERSWTCPECGTHHDRDFNAACNIKEFGLKALPTERGKVKPVDCPLVDDRPRVLKSNGRKKQEKRGGIGISEAAKSLV

SEQ ID NO: 3690 - protein, 419 aa, unknown
  TnpB Polypeptide
MEIIKAYKFRLYPTVWQAALARKTAGCCRLVKNLHLEQRSSFSRNGRFVGYVEGASDLPALKAAFPFFKDAPAQCLQQALLDLDTAFRNFFSGRAGYPRPARKYGNESFRFPQPSQFRIGQEFIELPKFGRVAMKKHRAVEGRVLTATVSIEGDRFYVSIVTTIDIEAPLRAVRDVGIDLNVATGAVTSDGLMLVMPKTSSEEMRKLARLQKDHSRRKKGSRNREKARRALIAFHAKVRRRRMDAAHKASRRLADGYSHIAFEALKLRNMTASARGTVAMPGRKVRAKAALNRVVLDSALGAVRRFSKYKATWVGGVTVEVDAAYTSQNCSRCGQHPKSDPATAHMAHGRISRDEFECPLCGFVEHADVNAARNILALGRLQWAAFLTAGGAPAAACGGLRGKTRLRNRKRESKAASAC

SEQ ID NO: 3691 - protein, 218 aa, unknown
  TnpB Polypeptide
MEELTTNAEKEKLTPAKLKKEYPFLKETDSLALANAQRNLERAFRNYFQKRAGFPKLKTKKNIWQSYTTNNQQHTIYLVDDQLKLPKLKSFVAVKRHRPINGQIKSATISARNNTEFYISILCIEEIQPLPKNQRKIALVYHPEVLVEANAQLPFISTNAIKSQQRLARAERKLNVKAKAVKRKKMVLSHARNYQNKKEKFLSYIERIVIKKMNTSIK

SEQ ID NO: 3692 - protein, 391 aa, unknown
  TnpB Polypeptide
MLKGLKYRLYPTNSQKELIAKHIGSSRFVYNLALETKNTAYLGSKHNFSPFDLIKQLPELKKECEWLKEVNSQSLQQSIQNMDIAFKKFFKGAGFPKFKSKHRGKQSFSIPQNVIVENNLLIIPKFKEGINIVLHREIKGTIKSATISVTPTGKYFVSILVDTNTEIPTKTPIIENTTIGIDLGIKDFAITSDGEVFENPKNLRKVQSKLKYVQRKFSKNKGKRTKQRLALLHEKVVNKRKDFLHKTSAKLIRENQTICLEDLAVSNMVKNHNLAQAINDVSWSTFVTMLEYKADWYSKNILRIGCFAPSSKTCSNCGNINKELTLKDREWTCGSCSTVLDRDVNAAINIKSFALKNNLSGEHTLKNQGKLPTLVGALTLEAQPIASGVGG

SEQ ID NO: 3693 - protein, 390 aa, Anaerobacillus sp.
MTKHNKAYMFRLYPTDKQALLIHKTFGCVRFVYNKMLAERKETYETLKEDKEALKKAKHPTPAKYKKEVEWLKEVDSLALANAQLNLDKAYKAFFKGNAKFPKFKSKRHKQSYTTNLVNGNIELMDGHIKLPKLKMVKIKRHRQIPSDHKIKSCTISMTSSGRYYISILTEYEKEVKDKEIKNVVGLDFVMDGLFVDSETGKKANYPRFYRQMLDKLAIEQRKLSRKKKGSSNWNKQRIRVAKIQEKVANQRKNFLHHKSKELVSNYDAIVIEDLDMKGLAQALKFGKSVADNGWGIFTSFLQYKLKEQGKQLVKIDKWFPSTKTCSSCGSVREITLSERTYQCTCGLTLNRDYNSALNIKKEGMRLLAQLPNVDIKLNFNQWGFSFIPH

SEQ ID NO: 3694 - protein, 322 aa, unknown
  TnpB Polypeptide
MRIHTVISILKKEYPFLKEVDKFALTNAIYHLADGYDRFFKHLSRFPKYKSKHKAKKSYTTNITNGNIEIGDSSIKLPKLGWVKAKIHCRPKEDWKLKSATITQNRDDSYQVSILFAYEESISPVAVTEEKTIGLDYKSDGLYVSSEGDTCGMPHYFRQSAERLAKAQRQLKHKTIGSNNYNKQQKRVARIHRHTANQRKDFLQKKSTEIANQYSFVCVEDLNMKAMANRGFGNGKATLDNGYGMFLNMLDYKLRDRGGQLVKVGRFFPSSQLCSHCGFKNTLVKNLSIRHWVCPNCGTTGIDRDVNAARNIKKEGLRLLTA

SEQ ID NO: 3695 - protein, 363 aa, unknown
  TnpB Polypeptide
MQKGIKFRAYPNKVQKELINQTLGCCRLIYNKGLAMRNDAYNNGEKIGYKQTSAMLTELKKQDNFAFLKIVDSIALQQSLRDLDRSFINFFKKLAKHPQFKSKRNNHQSYRTFNQGNNIRIEGKYLKLPKLGYVKIKQSMEVEHINNVTVERTATGKYFVVLNVEFEPKRITTNVGTIGIDVGIKEFYSDSNGKVVHNPKHLEKSMRKLVREQRRLSRKMKGSNNRNKQRIKVALVHEKITNQRNDFLQKQSTILVRENQTICIEDLYIKGMISNHKLAKSIVSVSWSKFFNMLEYKAEWYGSKVIRVPTMYPSSQTCSCCGYKNPLVKNLAIRKWECPKCHAKHNRDTNASINILNKGLAIA

SEQ ID NO: 3696 - protein, 405 aa, unknown
  TnpB Polypeptide
VAYPDIHLSALGKEAPTMEKAYKFRLYPTAKQEELIRKTIGCSRFVYNKTLAARKDAYSAGSSIHMTFKESHSGYDCVKLLPGLKDIYPWLRKVDSTALQASVLHMDQAYKNFFAGRKGRRKAGFPKFKAKHHSKASYTSKVVGKNIQAADKAVKLPKLGWVKARASTPVQGRILNATVSMSRSGKFFVNLCCTEVDIPQLLSTGAAAGLDVGIKDLVITSDGQRYDNPKHLQKAEKKLATLQRRLSRKPKGSRNRKKARLRLAHQHEYIANCRQDYLHKLTTQMVRDYDIICVESLNVGGMLKNHKLAKAITDASWGELARQLKYKAAWQHKMLVEVGAFFPSSQLCSSCGHKNPEVKDLSVRDWVCPKCGAHHDRDQNAAQNLLIEGLRLLPHDFQRKPQASA

SEQ ID NO: 3697 - protein, 520 aa, Oribacterium sp.
MHVLRLSLATTEYDEQVLADRYFMISHIHNVVVKHAKKLLRQLDYNREYQASKDEYTALLKEKKAAESSHSRFPKEKSNRMKELSGVMYSIRQEIGFCKAGLESYIKICGRKYKKHISSQQVQKEADRVWDGVEKVLFGNGEELHFKKYRDFDTICGKSATNGIKFDKESFSIEWNGLHIRCRLPRKHKDVEAGMPYIMESIDHKVSYCEIKRRMFPNGWHYYLNVYLEGDAPRKLKTVGDADNRTGLDLGTSTAATVSDNMATLEELAPKCYEFNRKIRNVSRHMDRSKRASNPNKYKPDGTIDRTNKDKWVLSKTYLKSRDKLKSLYRQKSEYINQSHRQYINRLITDSINFITENMNFSALQKRSKKKAERSDKVSVVAKKDGTEQSIRKFKRKKRYGSSMNNRSPSRFLVLLEQKVKLYGGALYKVDTWNFRASQYDHTTDTNTKINISDRFKSIDGHEVQRDLYSGFLLKNSNGNLNHPNREKCIYEFDSFIKLHDELISNMKADGKSMKACFGF

SEQ ID NO: 3698 - protein, 418 aa, Halorientalis sp.
MLETTRTYSATIRNHQQVCGDLNQCGFAASKLWNVGRHYIQKRWDGNGDIPDEGELKSELKDHERYNDLHSQSSQRVLEELAEAFTSWYNSDDGNNPPGYRKRGNRHPRSTVTWKSAGIKHDGKHGRVRLSKGLNLKDSRSDVILVEYETQPDVTVENIQQVRAVWNGDQWELHLVCRKQIPIEDAPGDNTAGIDLGISNYLAIDYEDGPCELYPGNRLKEDKDYFTRKEYQTEGENGPSNRAQRARRTLSRRKDHLLHTLSKHIVERCIEEGIEKIAVGDLSGIREHGSGKSRNWGKGGNRKLHRWEFDRFTRMLEYKAEEHGILVDRVDEKNTSKTCSCCGQIRDANRVERGLYVCDSCDTAMNADVNGAVNIRRKITQTPPNGDMSNGCLAQPGVYLFDATTGVFHPQEQADCEP

SEQ ID NO: 3699 - protein, 334 aa, Thaumarchaeota sp.
MKIFRAYKTELAPDDVQIAALYNHAGAARFAYNWGLEWKSNVHEYNQLPHPRLKTPTAVDLHRELNRLKEGKLSWMYEVSKCAPQEALRDLDAAFSNFFAHRAGPPNFKSRKRGVGSFTLYGAISVRPAEIHLPRIGWVRLKEHRYIPSRAHINSVTVSARAKRWYVAVNVVEERKEPVTPPGPAVGVDRGLNSLAVVSDGTVLENPRVLRRYERKLRHLQRNLSRKKKGSSNRRNAREALARLNMRVRNTRLDPIQKFTTMLAKTKPVIGVEDLDVKNGRCLGRDLEAAAIQDPLVRVHPNHGGQVVPLDEEVLEVRAREKGCDAPRGAHLPL

SEQ ID NO: 3700 - protein, 489 aa, unknown
  TnpB Polypeptide
MARAATDSFILELKLKTSEEDARFLEKCMYFGWKVHNTLVRHCQKQLASLRQDPEYRELLTAYRKETDRADKQRINRELSTIVAGYGLTEYSLHAFVAKLQHKFRKWIHSAVAQKIATHVWQGVRKVLYAEGKELHFLKYVDFTTLEGKQNITGIVFADNRIRYAGCVIDVRRHRKDGSSARKYECEALRHRVKYCRIIRRVVGQRFHYYVQLVLEGMPPIKHYTGSGTAGLDIGTSTAAVVTDQECILTVLGENVAAIEREKRHIQRKMDRSRRAANPGNYTPDGTVRKGRKVWVKSITYRKLQRCFASLCRKRAAALKQSHQILANHIIAQCDTLYVEKMSFKGLQRCSGKQKDGRSGRKKRFGKSIQNRAPAQFCSILRQKLERLGGQYLEVDTRTFRASQYNHVTDTYSKKPLSRRGNSIEGRWVQRDLYSAFLLKNSADSLRHTDRAKCIGAYPAFLLAHDACIQAIRHSETTIPKSFGFQAFT

SEQ ID NO: 3701 - protein, 404 aa, unknown
  TnpB Polypeptide
MLTFIAFKEAKQSEMIETIKVQLRPSNKQLTKLFQYAGCSRFAYNWTISREQENYKQGNKFLSDNELRKEFTQLKKHKEYQWLSKISNNVTKQAIKDACNSYKRFFKGQSKYPKFKNKKNSKQSFYQDGDRLKFTDTHVKVEGFAISKKKNKQKLNWIKLCEKGRIPTNCKYMNPRFTFDGLHWWLSVSIETENDTNIPQNKGIGIDLGLKDLAICSDGNTYKNINKTLRVKKVEKRKRKLQRSISRKYNMNKEGERYKKTSNIIKREKELLKVIKRLTNIRHNHLHQITSEIVKRKPSFICIEDLNVSGMMKNKHLSKAIQQQGFYEFRRQIEYKSAWNNIPVIIADRFFPSSKLCSCCGEIKKELKLSDRIYRCDCGNIIDRDYQASLNLKQYGENVLKQNL

SEQ ID NO: 3702 - protein, 377 aa, unknown
  TnpB Polypeptide
  misc_feature (73)..(73): Xaa can be any naturally occurring amino acid
  misc_feature (77)..(77): Xaa can be any naturally occurring amino acid
  misc_feature (87)..(87): Xaa can be any naturally occurring amino acid
MIKSLKILLLPTKEQELKMFQTIGVCRFSWNWGLNFSINYYKENKKSISGRSIRDEFTKFKKQEGFEWINEVXSKAXNNEFDLLDIXFKKFFKKQTKFPKFKKKKDTRQSFYVRNDNININQTNCTLNIEKIGRVKYKSDRKIPKNVKYSNPTCSYNGKYWILTFGIEVENQNIQLTDEVIGIDLGIKTLATCSNGITFGNINKSKKVKELKKRLRRLQRSISRKYELNKDGKKFIKTKNIIKAEKKVRLLYKKLSDIRKNHLHQTTNTIIKQFPNRIVLEDLNVKGMMKNKHLSKAIQECSFYEFRRQIEYKAKYYGIEVVLADRFYPSSKTCCECGQIKSDLKLSDRIYSCDCGNIIDRDINAAKNLSQYEIKTK

SEQ ID NO: 3703 - protein, 366 aa, unknown
  TnpB Polypeptide
MPILCDEDQVYVHCEDTSVCRGKRVDVLPWSNYDTSVLRVQGYQFEALPNGGQLRNLRRFAGSCRFVYNQALALNKQRYENKEKRLGYAGMCALLPSWKTAHPWLSDAPSQALQQSLKDLERAYTNFFKRRADFPDFHKKGRKDSFRIPQGFEVDSSNGRISLPKIGWMRYRKSRDIEGQPKNVTVSIVAGKVFVSIQTEREVEPVMHPSTSLVGVDWGVVNFVTMSNGEVIGQCALLEQHARKLVKWQRRLARKKKFSNNWKKAKARISRLHQRIANIRKDFVHKTSDSISKNHAVVVVEGLQVKNLSQSARKNVKAKSRLNRAILDASPFELRRQLEYKMRWRGGLLVAIPPGNTSRCCPEWAR

SEQ ID NO: 3704 - protein, 418 aa, unknown
  TnpB Polypeptide
MGMALRGHRYKLSPTGEQRRQLARWAGCCRYVFNTALAHRQATYVSTGKGISYAALCKQLTAWKKVLPWLKKPPAMLLQQAIRDLDDAFTNFFAKRARYPRFRSRHHWQPSLRIPQDKTTLRVERLSRSVGRLNLPKLGWIRFRWSRIPEGSIRSATLSRDACGDWFVSLLCATEVQDVVETTEVDPEHFRGIDLGITRPVTTDDGLNHNIPTPTKGDRRHAAKLARAVSRKQKGSANRAKAQHRLNRFHRQWRNRRTDAHHKLSNTLIAENQGIAVEDLKIPNMTRRAKRKRVRQKSGLNRSILHQSWGSFLAMLAWKGRAAGVIVERVSARYTSQTCSVCGVIDVASRPTQASFVCTACGHADNADVNAAKNIRAAGLSSIKACGVHVRPCPLRRARQRTMKQVPTGNQRALPLGM

SEQ ID NO: 3705 - protein, 415 aa, unknown
  TnpB Polypeptide
VNLVTTRTITASLTNDREGVVRDLDSLARSGSKIWNVARWTIDRIWNATGTIPDKGTLQSYMKKQPCWEDLNSQSGQAIVEELSGAFQSWFKQDNPGANPPGYRKDGDKRPRSTITFKQGGFKLDTKHQQVRLSKGENLRDSWGDFTLCEYEIGQDNDLTDVENVQQVRAVWNGEQWELHFVCKIAIDTGDQSGEKTAGVDLGICNTAAVSVGNETLLYPGNALKEDAHYFRQEEYDTEGRNGVSNHSKWARHKKSGRQHHFLHSLSKDIIEECASRDVGTIAVGHPKNVRKDSDWGRHGNKRLHDWAFETILDYIEYKAEERGIEVERVDEYQLATSISCCACGTRADSNRVERGLYVCDECGLVANSDVNAAENMRSTVTPNPGKDRSNGCMAQPAVRLFDKSTGRVRPQEQV

SEQ ID NO: 3706 - protein, 136 aa, unknown
  TnpB Polypeptide
LEDPRNAEKSKKLRTYLNRWPYHMYQSMVEYKSPFRTVYVSPGGTSSRCPVCGGRLKHPAWAVSRCDKCGVDYDRNRLASLAILLRGLRLCGQPFAVSAGASWQLLRDEYLYTPALPENGRAGWTEEAAKAPNENV

SEQ ID NO: 3707 - protein, 404 aa, Okeania sp.
LITLTYQYKLKPTQHQEAEINHILDVCKSVYNYALRKRKDWLNSRKSSISSCSIISEYIIPADAPYPNYNHQAKNLTIAKKTNPRLKSANAQVLQQTLKQLDRAFSEMKSLGKGFPRFKKRMRSFVFPAMLKNCLGCGRFKLPQLGWIKLKQSRPYPEEMVVKQARIVKKASGYYLMITFTSSESVPDNPVGERSLGIDAGIESFVATSTGNLIKYPKFLLSSLRELKLLQRRLKKKIRGSNNWLKLQNKIARLHEKIANTRRDWHFKLAHQLCDFTDNIFVEDMNFKSWSQGIVRKQSLDSGIGQFINEILPYVCWKRGKYYYKVDKNYTSQECPLCGHIQKKKLSDRKHNSSSCGYQVNRDVAAAKVIRKRGLIAVGHTVNKKACGDGLAGVQLSLFDLLPS

SEQ ID NO: 3708 - protein, 393 aa, unknown
  TnpB Polypeptide
MLTFEFKIKAKDHQYQAINEAIRVGQFIRNKCLRYWMDAPKEEKVNYASMCKLIVSLCKEFAFANKLNSMARQAAAERAWFSVSRFYSNCKKKVAGKKGFPQFKKFSRSVEYKTSGYKLSSERKYLTITDKTGIGTLKLIGTYDLNYYQVEQIKRIRLIRRADGYYCQFCIDQERLDNVTPTGSSIGLDVGLESFYTDSNGVKVENPRYLRKSERKLKKLQRKLSKTEKGSSNRRKAQNRLARKHLKVSRQRKDFAIKQARCVTISNDIVAIENLNVKGLIKNHKLAKSISDTSWSIFKEWLEYFAKVFEKELIAVNPAYTSQDCSSCGNRVKKSLSTRTHICSCGVRICRDENAAINILNKAKNTVGHTEINASGENPLYLDLETKLSKGTH

SEQ ID NO: 3709 - protein, 532 aa, unknown
  TnpB Polypeptide
MAMSKMLYKSYTPDILAVFNDDFEVYSKEETEEIINSIKQDTIYVSDVSQFLITPELLQEYEVFVNSGKFTTSIPNAVGKLMKITIPQELVRSPQAGRSRLEHMVRDRVVRELSSWSERRKVANGESDKYISPGWSRTVNASQPHNLQPKMSLSATDSQYAKILNNYVEDGFIDMKMVAGGKWYTLRFAYPQERFKGAFKLCLPDVTVNKDGEVTFNFAVGYIKNQPEFNPDYFVVVDVGISDYITAGVVRACDGELVEIMEVSQLLKTLENKVKKTHKQVSTLQKTHRGDEARLHREPNVKRKRELAIQAAAEVADFAFTWGNAAIVVEDLSWINNTMENGRWNRGEFVRWLKHFAELNGSRVMRVNAKDSSQKCPKCGGKVTHPTWGTSCCSHRDCELYHVVQDRDVCSLSVIAQNFIKPGSFEKAVRTRKQSTTKFKKREQRSPRIVRAKVPRRDRTKKKPTQKRGKLRMKRAPFIGVGVRKIGGSRGLTVPEKGCSLHKEVADERMTDIQQPTRKPKVKDYNLYKCSL

SEQ ID NO: 3710 - protein, 380 aa, unknown
  TnpB Polypeptide
LSLSLIPKIIADKETLEQFMYVTVNGKLIPRGNEDYMKLCLLAYRFKQAVKHGINLVLKSTPQREAYKELARLLPTSIYGETAYKYAKLLVEGAKEHLDNGNKVINRICIKRKWLASRGGVTWRGNLNIKLLSTDKVLIRYYDNEWLEFNIRFGSRYVSLIKELIELANQKRISYGVSISFNNGKLYIHIEIPLWLCLKRFSMSKPRGYGLVAGFDFNSDRLNVVVIDGEGNIVAIKTFWYSEIISHGFPKGKARWLRLNVLANALKWCRKIGVDYIVFEDLTRVKNKRFTSNPYANRKITKFPKKQMLRHGVIKALKLGFMVILANPRGTSNSITHKQIMRERGLDRHMASAYIIAYRGLKKLKEQEPSTTPSTTPIIN

SEQ ID NO: 3711 - protein, 382 aa, Proteus sp.
  misc_feature (210)..(367): Xaa can be any naturally occurring amino acid
MKRLQAFKFQLRPNGQQEREMRRFAGACRFVFNRALARQNENYEAGNKYIPYTKMASWLIEWKSDTETQWLKEAPSQPLQQSLKDLERAYKNFFQKRTAFPRFKKRSKNEAFRYPQGVKLDQSNSRISLPKLGWMRYRNSREVVGEVRNVTVSQSCGKWYVSIQTESEATEPQHESTSIVGLDAGVTKLATLSDGTVYPPVSSFKVNQRXXXXXXXXXXXXXXXXXXXXXXXXXXXXXXXXXXXXXXXXXXXXXXXXXXXXXXXXXXXXXXXXXXXXXXXXXXXXXXXXXXXXXXXXXXXXXXXXXXXXXXXXXXXXXXXXXXXXXXXXXXXXXXXXXXXXXXXXXXXXXXXXXXXXXXXXXXXXXXRPSKQEPAEVIQTSV

SEQ ID NO: 3712 - protein, 411 aa, unknown
  TnpB Polypeptide
VTDQVRVIRTERIWLKSNPILGHLCHISKNLFNETNYLVRQSYFTSGKRIKGIDLRNNLQDSLNFRSLPQVTALKIIAVVEEAWKSFFAAVADWKRHPEKYFKQPRPPRYKDKAGEFLLWYSKAQIKSIADLLVIPQASNLTLKPRIASYQTMLGIRIIPQGVGYIAEILYAKYVPAIPKGKPTRVVGIDLGLTNLITMVNNIGKEPIAVKGGVVKSINQYYNKERVHLHSIYSRQEIGNGDKLRKLTAKRKRKLRNHFHEVSSSVTRWCQQHSIDAVVIGHNKLWKQHINLGKRVNQNFVSIPFDWFLNQLKYKLNDVGIRVICVNESYTSKCSFLDVESISQKPTYKGERITRGLYLSSQGRIINSDVNGGYNILKKAVPNAFSMNETVDGIEGVWLHPVRLKQTLATS

SEQ ID NO: 3713 - protein, 420 aa, unknown
  TnpB Polypeptide
MGMRAKKQTHPQLTIRIQMKSKPIFVDLCTRAKNLYNRATYQVRQEFFATGNWLQYTTLYHQLKHEPVYLALKEISDSYLPQQVLRQVEQTWRSYFNAMKVWKKEPSKFLGQPRLPGYKAKNGLHVLSFPRPRVRIRGTEVLFARNLMARGFPSFPVGNLPVSRKTCTGARLVPFYDRFVVEILYETEVKSLSSFKESPRAIGIDLGITNLVATSDGLLVKGGVVKTVNQWYNKQLAYFKSLAKKHNQQHNTRRMQRMHRVRANKISDYFHQTSRTIINHCLQKNIHTLVVGYNSFWKQHCNLGKRTNQSFVQIPFFKLLHMLEYKAKLVGISVIRVSEAYTSQQCSDCGIIDKCNRRSRGLYHCRSCGLRLNADHNAAINILQRSSLDKQVVPSVSSSSICSDQPDRGCVTHPVVTQKV

SEQ ID NO: 3714 - protein, 432 aa, Oscillatoriales sp.
MLKRQKGYSITTKSVKAKLIRSKFDMQETKDAYNEVVHFYFLLIAENPQGVSIPVQSKGGWRFYELLTAGHQFISGFPSPLKRAAIRQAIGAYESWNSTYQKWLHRPKRMRDHKPPVHPRAFRFNPHYDSGMWKEDDGFSIVLKMRVGNSWKWVKHQYQCPNVPTEWTKGSPRIQVQNGSLWLVFPLEKYVPATGGIKGIMSNSAFRTCGIDMDLDKFIIIATVLETNDRGETTEIARHFINQSRHVARRKRDLGQIAIKMRQAKIVSRGFAKSRWDSITAREINFSRAVSRELVEFAKHWKVDVISFEHLGNLRPKKGKFSRRSNQKRAYWLKGKVFEQVKRIAYQDYAIVTTRVSPMNTSRLSPWGEPLWRGAKFPSDSLRFEGYQSGAALVATADGYKAHSGLNAARNVALKAIKRNLLEATLNLKSLK

SEQ ID NO: 3715 - protein, 381 aa, Carnimonas sp.
MTKRAYKYRFYPTPEQESLLARTFGCVRFVYNAVLRYRTDAFYQRQEKIGYVAANSELSRMKKAVDTDFLNEVSCVPLQQCLRHQQTAFKHFFEGRTKYPKFKSKRHRQSAEFTRSAFKYRDGKLFIAKSRTPLDVRWSRELPSEPSTVTVSKDSAGRYFVLCLCEFNAEKLPITPRMVGIDLGLKDLFVTSDGHRISNPRHTAKYASQLTRAQRRLSKKKFGSKNRAKARQKVARLHAKISDCRMDNLHKLSRRLINENQVICVESLKVKNLLRNRTLAKSISDAGWGEFVRQLEYKASWADRQLVAIDQWYPSSKRCSGCGHVMDAMPLAVRDWTCPECLENHDRDVNAAVNIKAAGLAVLALGENVSGMELVSVSNSR

SEQ ID NO: 3716 - protein, 402 aa, unknown
  TnpB Polypeptide
MEEKNITYRTRIHYIIPSQELINEARLSNNLYNQTLYILRQAFTNKEKLPSKFDLVKTLRHKEYECEEYNNFSKMVSCNAEAIIHLATQNFKAFLMTLRAFKKNKSSFTGAPRIPSYNKKEQEFMIIIRDTQCTVKDGMMRFPKKLNLDKIYVGDLDIAHVRILPGKKYKVEVVYKVEALPKRKKGNIAGIDLGLDNLATVAINKRGIRPLLINGRPLKSMNLHFNNKRNKIQSELKKCNDKYISHKLETLYRKRNNRFNTYMHKASKKIIDYCLEHNISQIIIGHNKLQKQESKLKNFVAIPTFRLIELIKYKAEYHGIEIIETEESYTSITSYLDKEEPIKDNADRFRRIHRGLFVSGKGKRINADVNSAYQIMKKVIGDKVIKPIGKGAVFIPKKVTMI

SEQ ID NO: 3717 - protein, 438 aa, unknown
  TnpB Polypeptide
  misc_feature (95)..(95): Xaa can be any naturally occurring amino acid
MKVRKTLKIPVAEEITRGKLCILDRLMARLTYGVQLYLEKIVEENVVSRARAESFRKEIQAKTGLSSAFAQACRDTALWMYRSYLRLHVEWERRXERLRKKLEVKDSKKLKKKLEKLLAREPQPPGVKDKIPVMIDRRMGEIKVEFSRSAKEFKLWLTISTLKRGQRVDIPLHSYPYAEKHLREWEVKSFQIVWNLELKRYEVHVVVEKEVSIKPRSVAGIDLDMRMLIAVHEVGEEGSRALLLHREEFACFFARMRELNNRIARLQRLGKLEVLRKLRRKRKNLARDFRRKLVNLVANSYSGALVFIGLPEHIREEHFRGNQRRRLRKRVHQWAFRELAEMLRLKLLEAGNIAVIISENGTTALCSACGSRKVKVDGINFACQDCGHTEDRDINAARNIMWRGLNQVLRKGAGAAVNLPELPMRWLEKPPKAEAHRF

SEQ ID NO: 3718 - protein, 356 aa, unknown
  TnpB Polypeptide
VQRSIKVSLGLATGAKQRRLNALLREVRSCTQRYIDYLWNKPGRLDAATLNQIAGGSLSYRHRSNCLKIALETISSTRAAVKATGIEASCPQIKGAVRLSSLVAQVEPGKGAFDYVLKISSLVKGDPIVIPFKGHKRLTYWLEKSDAELLQGCTLGIDWAALWIKIPDAELKSGSELGVDIGINKLLVDSTGKQYGTKVKAVCARVRRCKPKSKGRLRASRARKDYINREVKRLPWSTLGSLGVENLNNLKLGKRPGRGKGFRKAIAPWTYRQVIARIEMLAQENRVRLVAVDPRNTSRTCPLCKTVAKESRMGEHFCCVNCGFSADADHVGAVNVLIRAHPNSEQSMVARCFAKS

SEQ ID NO: 3719 - protein, 401 aa, unknown
  TnpB Polypeptide
MRLTEQIIIPTEYFNEIDNISFLSKNLFNASLYEIRQHFFQTEKFIGYCNLDKLMKNNPDYVALPRKISQQVLQQVCKSFISFFRALGSYKKNPEKFLGRPGICHYLEKKEGRNLLIYTDQAFSRVKIKENIISPSGTNLEIKIRDHIKKINQVRIVPKQTESIYIMEVIYEIEPDNLDLDKNRKIGIDLGVNNLLAITSDKQGMTPILVNGRPIKSINQWFNKTRSFYQTLGMTDCKKLRKLSRKRRLKIRHYFHNVSRRLIDYCIHNNIGTIIIGKNDFWKQEVNLKSRTNQNFVSIPFNNLIEMIKYKAELVGIDVIETEESYTSKTSFIDLESMEYHENYNGYRKNRGMFKSTKSQREINADINGSYNIIRKVFPETFGEGIEGFVVIPKVWKFSHF

SEQ ID NO: 3720 - protein, 348 aa, Escherichia sp.
MASWLVEWKNATETQWLKDSPSQPLQQSLKDLERAYKNFFQNRAAFPRFKKRGQNDAFRYPQGVKLDQENSRIFLPKLGWMRYRNSRQVTGVVKNVTVSQSCGKWYISIQTESEVSTPVHPSASMVGLDAGVAKLATLSDGTVFEPVNSFQKNQKTLARLQRQLSRRVKFSNNWQKQKRKIQRLHSRIANIRRDYLHKVTTTVSKNHAMIVIEDLKVSNMSKSAAGTVSQPGRNVRAKSGLNRSILDQGWYEMRRQLEYKQLWRGGQVLAVPPAYTSQRCACCGHTAKENRLSQSKFRCQVCGYTANADVNGARNILAAGHAVLACGEMVQSGRSLKQEPTEMIQATA

SEQ ID NO: 3721 - protein, 403 aa, Holophagaceae sp.
MRQTGSYKLLATPQQTEAFTVLANLFAEACEAMIPFVQERRCWNRVALHHLVYYPMRERFPILGSQMICQAIHRVADAYKTLRGTEGIPMDQPVPALHFSPTSVNFDHRTYSIKGETFSLFTPVGRAGVGFACGPLQKELLATGNPKEARLIKRKGTWYLNLVFDLPDPAPLPGEVTMGLDVGENNLAATSTGKVFGGGKLRHDRDRYLAKRRRLQSNGSRASKRKLKAVSGREQRHVRHVNHEVSKAIVAQALQTGASTLRMEDLTHIRDHVKAGLRVRTRLHRWAFRQLQDFVRYKAEAAGLKVEFVKPAYTSQTCNACGGFGKRVKHRFTCSCGNLAHSDVNASRNIARFAELSSSARGAVNRPEFAHWVRPGVAESSFLLEGVAYGMEKTAKGRLFGVA

SEQ ID NO: 3722 - protein, 374 aa, Chromatiaceae sp.
LWARRHCYNQLLEHFEQKDVKWSKAAAYRHSINIIRPAFPWYNEVSSRVTRNAIDDLDNAFKHFFLRLRENKPANPKAKTFREKFGFPTFKKKGIGDSFALREKPKFSIDGRELRIEKLKTLIKMRQPVRFVGNLNQVTISQSAGKFYASILVETADYNPHAPEKESVGVDFGVKSLAVFSDGTEIPANNALQRNLKALKRKQRRLSRKQKGSNRRARAKFAVAKLHKRISDQRQAVLHELSDRLTRDYKVICLEDLNVSAMVRNRKLARPISDDGFGMLRRMIEYKAELRGVEVSFIGRFEPSSRTCSECGQIHDMPLDKRTMTCDCGNVMDRDLNAARNILARGLDTLRPDLKRTQEWRKTPSLLGAAAVTA

SEQ ID NO: 3723 - protein, 294 aa, Escherichia sp.
VKRLQAFKFQLRPGGQQECEMRRFAGACCFVFNRALARQNENHEAGNKYIPYGKMASWLVEWKNATETQWLKDSPSQPLQQSLKDLERAYKNFFRKRAAFPRFKKRGQNDAFRYPQGVKLDQENSRIFLPKLGWMRYRNSRQVTGVVKNVTVSQSCGKWYISIQTESEVSTPVHPSASMIGLDAGVAKLATLSDGTVFGPVNSFQKNQKTLARLQRQLSRRVKFSNNWQKQKRKIQRLHSRIANIRRDYLHKVTTTVSKNHAMIVIEDLKVSNMSKSAAGTVSQPGRNVRAKSG

SEQ ID NO: 3724 - protein, 395 aa, unknown
  TnpB Polypeptide
LNRKVYKFRIYPTSEQETVLRKTIGCCRFVYNWALDYKKKLWSQNKESISLFSLSSEVKNLRKAEETKWLSEIPCVALHQSLRQLDWSFQFFFRKEKGYPKFRSRKKGGSFKLTGNSFNLKGGKFNLAKIKMPIKISWSRQLVSDPTSCTVSQNTAGQWFASFLCEEEIAKLAPSDKHIGIDLGIETFASTSDGQKFGQPKRIRKLRKKLARLQRLHSRKKKGSKNREKARVKVARLHQRIANVRTDFLHKLSTQLVRENQAIALEDLAVSSMLKDRRLSRCISEQGWRDFRRMLEYKCDWYGRELLVVDRWFPSSKTCSCCGGKASFGLETRQWACGSCGANHDRDVNAAKNILAAGLAVSARGADGRPTENYSRGGLHRSRKTEVKTSEYQPI

SEQ ID NO: 3725 - protein, 423 aa, unknown
  TnpB Polypeptide
MSIKAYKYRIYGNKATTEKLDGVLHRCRELYNAGLQERRDAYEMMVKRHPNYYDDEARKQLTREHAVGYYEQKRELVDIKELRPEYQDIASHVLQDVILRLKHAFDGFFRRVQNGEQPGYPRFQGRNRYDSFCYPDGAGWKLDALARPADKKGIVRVNLKLTKIGTVKLHLHRDMEGTIKMLTIKREGEHWYAVFTCEIGKPEPEPPSYEDVGIDLGVTHFAALSNGEFIDHPRSFRKAEKKLASAQQVLARKKRGSHRRKKAARQVATCHRKIANQRKDFQHKASRKLVNRYQVIVFEDLRVKNLTRAPVPKQDENGKYLPNGAAAKAGLNKSILDAGWSTFTEMVSVKAAWAGRTVIFVDPSKTSQICPNCGTIRKKTLEERWHSCGCGAEMDRDTASAKVILDMGHKALSVGTRPTSATA

SEQ ID NO: 3726 - protein, 271 aa, unknown
  TnpB Polypeptide
MSVSKIGRMPIILHRKINGEIKTLTIKKNKSNQYFAIFCCEEYPSKKVKTKGSVGIDVGLDTYADLSDGTIIENPKYLRESEERLTRLHRELSRKKKGSNNRKKAKLRLSRQYQKIDNQRMDFLHKNTNMLSKNYGLLKVEDLKIQNMMKNHHLAKSIADASWGTFVNMLSYKVVANGGQLIKVDPKYSSQDCSNCGHRMKIPLHIKIFCCENCGLTINRHLNASININGREGHSRTYTLVRDCVRPSNKATVYEARTIFRGNTIENPHHL

SEQ ID NO: 3727 - protein, 398 aa, unknown
  TnpB Polypeptide
MLRAIKLKLYLAKEQEVYINRLLGSCRFIYNQCLNKKINDYKELKINHNLSTLDKFFRNELVKNLNFEWLKEHNTKIFNQSLIDMLDAYSRFFKQGNGFPKFKSKKDKLSCRFPNDAISRKQDFYKSKITLTKQLKNLKFKTSDRYIKYLVKNQKNIKSATLSKNKSNEYYLSILIDGDLLRTLDKPKNEVIGIDLGIKDFVITSKGDKFENLKLVRNNQKKLSFLQKQHSTKKKGSKNKEKARLRLAKYHQRLTNIKENYLHKIVNTLLNENQVICMEDLNVKGLLKNHNLARSIQELSINKFETILKYKSNWYDRYIINIDRYFPSSKTCSDCGYINHDLKLSDREWVCPDCGVIHDRDNNAAINIEQEGLKIYNKLVGNYIPKLTLMESKSLDPQ

SEQ ID NO: 3728 - protein, 385 aa, unknown
  TnpB Polypeptide
MITRTVSLKLVSTPEQVCALSALAHTYAKACNTIVPLAVEHRCWNRVALHHLAYYPVREQLPALGSQMVCQAIHRVADAYKTHKANKGIAKDKPVPAIAFKATSVNFDKRTYSIKGDTLSLFTLTGRAKIQFVCGKHQRNLLASGTPKEAKLIVRKGDWYFNLALDLPDAVPVSGGGTFGVDIGENNLAVSSTGKVWGGAKLRHDRDVYLAHRRRLQSNGSRAARRKLRAISGREQRHVKHVNHETSKSIVAEAVRAGASELRMEDLTHIRANIKAGKRVRTRLHRWAFRQLQDFVSYKAEGAGLYVVYINPAYTSQTCSVCGELGKRVKHRFVCPCGNLAHSDVNAAANIARFAGPIGSVRGCKVTSPEFAHRGFRDVVKSPVL

SEQ ID NO: 3729 - protein, 556 aa, Thermus sp.
VKRGKKKGKKGEPKPYTGLEALLVFPDHGDYVATLGHGRSPYLDLMRRFSSAVRYGYNRLLEGEDRKALKKEDGPLCTLFRLNTRYADDALLKAQALLTAQVELGENPRKVVFGGRRLLVDLARLKKANLPLYERRKREWRERRKGTLYARGDRSKGGNLNLRLVVREGSLFGAPTPQMNLWLRVNLGDRYAWALVKTSHPRLQALLSRVYAHESYNVELVLREGRVYALFSWEEELPPISLTQEGGVLALDVNADPYGLALAVVNPDGSLRRHLTLSLEEVDQAPNRGAKEISLWRMAHRIVSLAQEEGVAIATERLKHLPKGRRGDGLGPAFRRQAHRFAYRSLLGKVHALARKRGIQSLEVNPQDTSTIGMLKYAPLLSLSKDVAAAYVIGRRALGFKEEIPKPLKALLQDPSFHDRTRRFYEGRIAQLRERHREEKNPYLKRRLGRELAQMRKALSTLPSLQGEPGGPAGSTAGRNLQGANAWRALRVGLFLPLLGRKVPRDLSARKIRATPVTKPILLGSWEGWKRGLDPHPGGGSAATDAHLRVGVGSGG

SEQ ID NO: 3730 - protein, 169 aa, unknown
  TnpB Polypeptide
MKTYYFFLKFGCVTLWHDNYLFSLLDLLYLISHYCYNVSIALQSKHQRKDVLHKLSCTLTDTYDLIAIEDLDMSAMKQALRFGKAVSDNGWGMFVSMLTYKAERKGKLLVKVDRWFPSSKTCIACGHIHKELKLSDRTYLCPVCGHAMDRDKQAARNILNEAKRMTGAA

SEQ ID NO: 3731 - protein, 281 aa, unknown
  TnpB Polypeptide
VRKINRAVKIRIYPNKEQITQIEKTIGCSRFLYNRMLADKIRHYQEEKKMLKNTPAGYKKEYPWLKEVDFLYFASLLFDCENQTAEKRQAEKFLGMDFAMHGMCVFSTGERAGYPMFYRNAEKKLAREQRKLSRCEKGSRNYQKQKKKVALYHEKIKNQRKDFQHKLSHSLAEDYDAVCVEDLNLKGIAGGLHFGKGIQDNGYGQFLSMLGYKLEERGKYLIKVDRYFASSKICSVCGHKKKELALSERIYLCECGNRMDRDVNAAVNILKEGKRIYKKCA

SEQ ID NO: 3732 - protein, 509 aa, unknown
  TnpB Polypeptide
MSRIFREKCHVKKAKKQTRRDQRDTPSFSVELPLRTRPRDDHWLRDRVVCGQRLFNVLLQDGFARVAAMRADPAWVQARTTPTPAKKQAAYDAVKAQYGFTSVAFDALVKDHAHAAKFSGRIGSHEMQRIATQVFTALADWVYGKHGRPRFKGRQRPLHSLQGKNNTGMLQWKPELHVLQVEQGWHIPVALPDLGKDEWLWTALQARTKYCQVIWRYIRGERRWFVHLIQEGLSPLKASLLEKLASPDARGGFDLGPSNFAWCTTTDAGIIRLCAEIDRPHALLRRLQRHLDRQRRAANPDNYQPEGTMRKGKKTWTVSNRQRHVEATVQNLSRVEAAVRRSAHGRTVNRLLTKARHWQDDGVSSLALQRSYGTSVNLRAPGLLVSELIRKAERAGGSRTIIESRTLKTSQYDHTTDDCVNKRLSDRWHVFRDGRGMVQRDLYSAFLALHVEGNTHHPARLETAWQAMTSRLRAAGWYVPQGTMDPSGATDPTSRIGRVPRPSIPILLV

SEQ ID NO: 3733 - protein, 390 aa, Limnoraphis sp.
VLKATKVRLYPTPEQELALAKSFGCARWYWNFALNACIQHYQETKKSLKLATYKGMLPQLKKEYPWLKEDCYSSVLQCVAINLDKAYKNFFEGRAKFPKFKSKHHKQSIQYPQNITVNGEFLKVAKIGGIKAVFHREIQGKIKTVTISKTSTNKYFASILCEVKGTEVKESGSQIIGIDLGLKDFAIVHDGESVTKYANPKHFERHQKNLARKQKKLSRKTKGSKSREKFRKNVAKVYERITNSRQDFLHKLSRKLVNESQVVVVENLNIKGMVKNRKLSKTISDVGWGMFVNFIDYKLQQKSGKLIEVDRFFPSSKTCSCCGHVIDELPLNIREWVCPNCNTHHDRDGNAALNIRNEGIRINQGGGNPVSAEGACIRPDNRSCGHGIGL

SEQ ID NO: 3734 - protein, 541 aa, Streptomyces sp.
LGVLREVAAPFVVPGPSGVAVRDRLKQLTAADERVLRLVGDHLGSLASRDLRVRCAAGPEHDSAAWADRKRALTGQSSARWAGSITKASNDQWGLARRAQLAHIQGLEAGVRTIARRLSLPVGEKGRKGTPGGYRSRREWHSKSRRLRVLENRLEAVRADWRAGVVHVVRGGKQLLNKRHHLDAAGLSEAGWRARWEAGRRFLAADGESGKRYGNETIRVSPDGEVSVKLPAPLAHLANAPHGRYVLTARVAFARRGEQWRDRITAHRAVAYRIHEDVLRGRWYLTASWTNPPVNCVPLAAARTRGMLGVDTNADHLAAWRLDTHGNPVGAPLRFGYDRTGTATHRDAQIRHALIRLLHFAKRHSLAVAVEDLDFAGEKTREKHGGRKRFRKLISGLPTARLRARLVGMAAELGIPVVAVDPAYTSKWGAQHWHKPLTSINRATTRHDAAAVAIGRRTLGHPIRRRTAPPLQHQSDAAGHRTVQAGHGSRAREETRPRIPGPRTRCVSPDAERKRATSASKTVRDAPDAQVRVQDSLLLTE

SEQ ID NO: 3735 - protein, 324 aa, Microcoleus sp.
  misc_feature (5)..(5): Xaa can be any naturally occurring amino acid
TKVFXFFEGRAKYPKFKSRHHRQSIQYPQKVKQVNDSLKFPGFLGVVKAKIHRQLDGTIKTVTVSKCSSGKYYASVLMEYEGDYPSSNTDGKVIGIDLGIKDFAITYDSEKVSKYSNPKHLAKYEKKLAKKQRIAARKVRGSNRRKKATRIVARVYEQVSNVRQDYLHKLSRKIVDNNQVVVVENLNVKGMVRNHKLAKAISDTGWGTFVNFLSYKLERSGGNLVEINRWFPSSKLCSNCHYQINELPLDIRTWVCPSCGTHHDRDGNAAMNIRAEGIRMLSSSGTGEANANGEEVRPIRGRKPKMRHSSVKLEAQPSAEGKVG

SEQ ID NO: 3736 - protein, 308 aa, unknown
  TnpB Polypeptide
VIKKQAFKFLLEPNKNHIKDFLVFAGSCRFVYNKGLALINENYESGKKFMNYNQLASELVNWKNEECLAWLKMAPSQCLQQSLRDLDRAFKNFFSGKSQYPRFKKKGRNDSFRVPCQRVRLDQEKHLVSLPKLGWVKYRKSREITGVLKNVTISRKFDKWYISFNTETVVPEPVHPSVSKTKILLNDECFKQLSLNENQAAQFTNIEGDKKLRNLSNILGRKVKYSSNWLKTKKKIDGIKAKSSRRRLDALHKITTTICKKHAIVEFVNLTDPVSDKSNTSRNMIYEFVRQLMYKQEWLGGKVIKLGD

SEQ ID NO: 3737 - protein, 402 aa, Tolypothrix sp.
MQKAFKVTLIPTHNQEVLINKTIGCARFVYNRFLTLRKELYNTEQKTLNYNGCSQQLTLLKKEIEWLKEVDKFALQNSLKNLETAYKNFFSDLKKAKGKKGVGFPRLKKKHGCKQSYKTNLTNGNIQVIENRLKLPKLGWVKFHKSQDITGKLINVTVTCTSSGKYIASILCETEIEKYPQVTQNIGLDLGIKAYLVTSDGEVVDNPKYYRTQKRKLRSCHKKLSRSAKSSSNRVKAKNKLARTYERITNLRDDFLHKLSTRLIKENSIICIEDLRVANMVKNHKLAMSISDASWAKFVVMLEYKALWHDRIVQKIGTFYPSSQTCNHCGFINPLVKDLKLREWSCPTCSNYNLRDNNAALNILGEGLRLIAAVGIPEALNACGELVRPGAIQAEIVETGIA

SEQ ID NO: 3738 - protein, 408 aa, unknown
  TnpB Polypeptide
MLRAYKFRLYPNAAQREAIVSTMGACRFVYNWALEQCKNAREAGEKKPTAFDLNKHLTVMKQENLWLYDHPNQSLQFAIRHMDAAYQNFFRGCAKKQGIGFPKFKSRKNPMQSYQMISGYSIDFDAGRVKLSKIPTPIKAVLDRRFTGTMKTVTVGMTSTGKFFLSVLVDDGAEIPEPQGFTSATTIGIDLGLASYVTLSNGEKVENPKHLRNAEVRLKVLQRRLSRKQKGSTNRKKAVLRVAKAHEKVANQRTHFLHNLSLRLVRENQAIAVEDLNVKGMVKNHSLAKSIGDASWAEFVRQLEYKARWAGKTVLKIGRFDPSSKKCSACGNVVGSLPLSVRSWDCPTCGVHHDRDVNAAINIKQIALDTGRNPPGEPVDSRPMGWSMKQEPLRTRNLERHAASTSGT

SEQ ID NO: 3739 - protein, 362 aa, Thermicanus sp.
MQMVYRFEIRPSKEQQRLMFYILKLCRKLYNDALNERQETYKKNGKSLTYNQQQNALPAFVKENPEYKQVHSQVLQDVLRRLDSAYQRFFAKEAGYPRFKNRDHYTSFTYPQVDKVKKTFSRSGYVYLSKIGFVKMSTHREFPVEAVTRVNVKYHGGKWYANLTADIPDAVASGALDKAVGIDVGLSHFAVLSDQTYIDNPKYFRKMEKKLAKAQRRLSRKKKGSHNRGKAKAKVAKLHAKIANQRRDFLHQVSVRVVRNYDLIVMEDLKVRGMVRNHRLAKSIHDAGWGRFKDYIRYKCERTGKRFILVDPKGTSQTCLCGEPVPKDLSIRVHECPVCGLVMDRDLVSAKLILERGLAAIA

SEQ ID NO: 3740 - protein, 418 aa, unknown
  TnpB Polypeptide
MLIHKAFRYRIYPSDEQIDRLNRWSDALRFLWNLALEQRLMGMHRTDKRYPTAFDQINELTPLRAELPWLADVPRDVSNRLLIELDLAWQRCFKKICRAPQWKKKGDRPLNICNPHVPKWRWKLENGDLRFQKIGHMKAVVHRPLEGSPRSCVLTREADQWVACITCAVEIGDPSPPSGPPIGIDVGITNLLADSEGRRVPNPKHLQASQRRLARAQRAASRKQKGSNNRKKSNTRVARIYRKVRRQRDHVLHVESLRYAKNHSVVVIERLQIGSMSRRTNGSVEQPSANAKAKTGLNRSILAAGWGRFGQMLGYKTIWHGSQLQRKTPKYSSMECAKCHCIDVLNRAGERFLCVGCGNADHADNNAAKVIVSRRTDGGAVCGGSGTGRPVKQKLRVVRRGSRPKGCGIRNPAQRRPT

SEQ ID NO: 3741 - protein, 409 aa, unknown
  TnpB Polypeptide
MKAYKFRIYPDAKRQKEVSESLILAQQLYNKILEKIKSEYKNSKKFVVNKSTLNKYMKEVVYENKDFLKLYSQTRQDIFIRLQKAFQNFFKRHREKKQGRKTKAGFPRFKSADRYCSITYPQYNGSFSVEKAGKSNMLRIARIGRIKIDLHREISGTIKTMTIKKEAGKYYAIFTSANEIEITKTEDTNPVGIDLGLDPFVAMSDCTSIDKPKFVNERKKKLARWQKIVARRKKGSKRREKAKLSLQKEWQYLNNESSDFAHKLSNKLVNSGYTSFAVEDLKIQNMVKNHNLAASIYHASWNKFIQLLSYKAESAGLKVIKVDPRNTTKQCSGCGNIQDMPLSERIYICNRCGLRIDRQLNASINILKKATSGLEGSHAREDSVRPQNRAVVDEPRTYPVIAGEAPTFR

SEQ ID NO: 3742 - protein, 405 aa, unknown
  TnpB Polypeptide
MATVLKGIKLRLYPNKTQECDLRQMCGNDRFLWNKLNEMLQSRYENNKHLYNGDNSKEAKLKRRHVMLSAYDMNYLLPLMKVEFPFLEYSDSSALQVVTSSLNKAYLNFFKNPKIFGLPKFKKRDVCRLSYTGKSTIKILARRNLQLPKLGCIKTSKTGVLKDVKIKRYTIEQDATNRWYISFQVEMSVDEFDKTHKAVGLDLGLTDMVIGSDGFKSGRFLVPELESKIKYKQRVYSKRRHYAKVKIAMDKNKKVINPRTLLDFMNVEKVRVTKAKLQKHLANKRKDFLHKLSTNLVKTYDIIVIEDLKSKNMMRNHKLAKSIGNAAWYDFRAMLEYKCQWYGKQLIVVQPHYTSQECSNCHYNSGKKTLDIREWTCDNCGVYHDRDINAAKNILTKGLKTLQAM

SEQ ID NO: 3743 - protein, 286 aa, unknown
  TnpB Polypeptide
MRFVRAKRLKIEGQTPFSEINAASAEVWKECCDLMDWYQWQRGYGHAHMDFYIGEDCEGWMDKNLTKSQPLHSQSIQAVRASYFKSWVSYSVLKKTGGIKNLKPPNKRKKYRTTHWKKSAITFIESSLFGKRVLLSMGAGRPRLDIKLPKNFDMSTTHQIATIELVYDYGQWELHFTYYETIEKIEAGKGVIGVDLGEIHPMVCFDGQAALIFNGRYIRSLYRLRNKVLAGFNAAISQCERHSKRWWKLTRRKWKRIRRIDNQIKNGLHKHTRKLLDECELRGSGN

SEQ ID NO: 3744 - protein, 232 aa, unknown
  TnpB Polypeptide
MAVTRSDEHWTTSLLVVTRRTDTPPRDARIVGVDLGLKTLATLSDGTVVPNPRNHNRDAARQRRADEAVARAMPGSKRQARAIRHAGRIRRHTANRRRDGLEKLVSALVRRYDVIAIETLNVKGMAANPALRTQVLDAGFATFARLLEARAPLHGAVVHRVDRWYPSSKRCSACGHVRRHLELDERTYICPECGLSIDRDLNAAINLRLVAVGATETKNAREGANQAAAKAA

SEQ ID NO: 3745 - protein, 421 aa, Halorubrum sp.
  misc_feature (139)..(139): Xaa can be any naturally occurring amino acid
LTYERRQNYFGDGDVWDTSEYRGRYNGVVGSATVQQVTRKNSEAWRSFFALKENGEYANPPSYWGNEEDGRELRTYIRCDQYTIEWGKRSRLEIPVGQELKDEYGLGYHERLRLEVRGNPKWDGEQGRLELEYDEVSDXERLRLEVRGNPKWDGEQGRLELEYDEVSDTFRAFQPVTVPDSRLDSPLASHEAALDIGANNLVACSTTTGNQYLYDGRELFGRFRETTDEIARLQSKLQEGRYSSKRIRRLYRQRTKRRDHAQNALVRGLVERLYDEGVATVYVGDLTDMLETHWSVMVNEKTHNFWAFKKFINRLACVCEEYGIRLEAESEAWTSQTCPECGDHEETVRHGDTLTCPCGFEGHADLTASETFLRENSDTEVRPMARPVRFEWDDHNWSGKPHPHERPKEARTNPQVASVGR

SEQ ID NO: 3746 - protein, 487 aa, Streptomyces sp.
MSRKFRPRPGFIVQAYKFTLDANVGQEQGLRSHCGAARAAYNWAVSWVTASWWQRKAEATYGIGEEEMTPWRPWSLPTLRKEFNRIKTTDQRFADWWEENSEEAYSTGLANAAAAFDNYAKSKQGKRKGGRVCVPRLKQRRKARLTCRFTTGTIRVEPDGRHVTLPRLGKIRTYEPTVKLLTRTQGGTARILSATVRHERGRWFVSLQVETARNITRVARPDAAVGVDLGVKHLAVLADSSGEIRYEPNPKHLDSVLNLLRVSSRRVTRRQGPDRRTGQKPSKRWEKANRERNKLHYRVANLRADALHKLTTRVRAEYGTAVVEDLNVAGMLRNRRLARRVADAGFGEIRRQLTFKGQRNACRTIVANRWFPSSKTCSACGAVKAKLPLHVRVFTCDSCGLVLDRDENAARNLVALATACITGTGVAGDQDTPRVSKPRGADHKTRRQRLGQNTGQGGRAGGASLPPQRQKETGDRRQDTKAQLAIW

SEQ ID NO: 3747 - protein, 429 aa, unknown
  TnpB Polypeptide
MLSRVERHVIKRADKNYNNIKELCHRCKNLYNYCNYILRQSLFRGEGLPGEFYLMGLLTRENQDDYRALPAQTSQQVIKLLYKNWKAYFKALKAYQRDKSKFLGCPRIPKYKPRGEKGHSVALFTNQQIRLRDDKIIFPKHTGLLPIKTKASSIEQVRIVPESACFIVEVVYQKEVVQTETTEGAIASIDLGINNFVTFLDNQGYQPFIINGKGAKAWNQYYHKEKARLQSELKQGRYSSNNIQLLSQKRSMFMQNFLHQSSSLVVKALIERKIKTLVIGLNEDWKQGSNMGKQNNQNFVSLPHRKLIDQLIYKCEEIGIEVILTEEAYTSKIDHFVEEEMKHHDKYAGRRVHRGLFRSSTGIYINADLNGALGIMRKVFSEKALALAKLIGDSGVAFTPVIVNPISCHVVSMKATNNCISFCTTKKAS

SEQ ID NO: 3748 - protein, 478 aa, unknown
  TnpB Polypeptide
MLRTYQFQHGINKGKQGKIRSVIKAYRLTAQSIACRQWRLFFENKSGFDKDLDIKYILSSLSGRYKQTCQYQVIGILNSFISNRQNDFVQTVYRSNLNDIIRQKLFYINYHGFWYSNTASVIKTRLEIDVETLKLARRIFNHILKRHRRPSMKHINMALDNKVAVISEARPDGARSFDYWVRLSTLEKGYPVMLPVIGNPYYENIKGTRRSFCQINLTEDDEITVSFIKDVPRLEYIPITPKFALDLGLVYLFASDKGDLFGRQFYEVLQRYDALISKLTSNRQRQGFPIRNKRYRKLIHNLRQYMKNEINRVLNRTIELYKPAEIVVERLNFQNANLSRRMNRLLSWFGKSCVTQKLQSIQEEYGIIVTYTNPAYSSQECSSCSYVDKDNRKTQAEFQCKICNTSIHADVNGARNHLVRSSDKVIDIYKSKGTVLRVLTERFLLVAERIPRLYSKAKDLLPGNPYFRDTLAQSKGFL

SEQ ID NO: 3749 - protein, 369 aa, Leptospirillum sp.
MHNMRKTYKFRLYPTRKQETLLNRQMEECRWLYNHFLEQRRDSWKQDGVSLSLYDQIKTLPSLKNERPSLETVYSQTLQNVAVRVDLAFQAFFRRVKNGENPGYPRFKGKGQYSSLTFPQWNSGCDLTGKGLRLSKVGTVPLVLHRPVEGKIKTCTVLRSSTGKWWVMLSCENVPERVLPANPRPVGIDVGIRTFATLSDETVIENPKFLKRSAKRIAQAQRKLELQEKGTSAREKVKKVVAKVHERVAFRRTDFAHQESRKIVNAYGRIFVEDITVNEMNSHRCLNRSIRDVAWSQFFSFLSYKAESAGREFRKVNPAYTSQTCSSCGHRQKMPLSDRTYSCPCCGMEKDRDLNASLNILRLGLESRG

SEQ ID NO: 3750 - protein, 382 aa, Proteobacteria sp.
MSYRTVEIRWIPKTAAEWRVFTASRKEAARLWSDLVTRHHRLRRRALTWPSKARWERWGKGRYPGLSAQSTQQLIGEFCEAVHSARQLRTTGHADARYPWKKPRYHDVVYTNQDARVRNGCLLLPHGTSGRLRLLLPRALPGRLMEVRLSLATVRLICEMEEVPRPQQRVIGVDLGVNTLIAATDGDKALLISGRAVKATVQYRNKRLASCRQAQSTKTQGSRRWQRLQRRRAKMLAQTHRRVRDLLHHATRQVAEAFPGATCYVGKPFYDAAEHSGRRHAHQVSSACHAQLIGHLDYKTCGAIQVDEQYTSQTCPVCGERNKGRRTYRCRQCGLTAPRDVIGSVNILAVGRHHALAPGRSVPNAVHWVHPVKYPGPKPGSS

SEQ ID NO: 3751 - protein, 641 aa, unknown
  TnpB Polypeptide
MPPESDGIRTVGCSLVKLVPCAEYLNKIQDAVAATHKATILATELLNIHLRKCMQDNPDQDLAHFFNGSWLLNAYNEVTHGKRKVTIVPELRNTRDLLMPTFQPPDRAGIQQCLLYDARNLATVAATNIWLHFQPRMLSHVRQVFGLEDKVYHALSKDEKRKRKLELLQVASDMCRLPSQDLESPHHYHDWIRSERKRLNIIKALGTFKGESFAYHVKARPHRFIYTLFIISQEREAAGKGAFALYPLRRNYVPRHVRFDQKALRDLLGLGRSDYIKEKAKQSKKQKTSVGDTAASQTMPKRRTKEEMKDENEELFQIVLDLQAAKVQRRHLFDYAFTTDGVCARVQMKAASKNSKGVTSRGLWAIDELKHQYRLQDLHTVGVDPGKRELIVGVDMDDPVSASPVRYTQSQRLRDLRSRQYTDENRRERTQGVKDAETALAGYNSRSTDLVTFCAYCSKRHETLEQCLASYSTLSYRKRRWKTNVKTQQSEERLYKRLEKLQNDSRPLVLAYGSWGLVAGRTGMACNRGNPPCIGVGLMRKLSKRFLVSPTPEAYTSKTCSRCLGECGPCFETEAFMKKNIRGLRRCTQRDCMLFLNRDKNGATNIGTNFKRLFEDKVPIRSMTDEDLAFHRAMLCLECAE

SEQ ID NO: 3752 - protein, 253 aa, Clostridioides sp.
MYCGQHIKLPKLGMVKVRDKQVPKGRILNATISKEPSGRYYVSLCCTDVDIEAFENENTNNQIGLDLGIKEFCISSCGEFIENPKYLKKSLNKLVKLQSELSRKTIGSLNRNKARLKVARLQEHIANQRKDFLQKLSTKLIKENDIICIEDLQVKNMIRNRKLSRLISDVSWSEFIRQLEYKANWHGRQIVKVGKFFASSQICNKCGYKNEEVKDLNIREWICPSCNETHDRDINASINILKEGLRLITIQNK

SEQ ID NO: 3753 - protein, 477 aa, unknown
  TnpB Polypeptide
MKDVKKKGSKDNSMSIKTCYVIGIQCQLDAKENKKTNTLDVSGRHKVDDSLMRQTAEYCREAIKFCTSAILSEWDFLQSVPKKLWRSAVDKLIHTTAGNKARYPEFDKKFKTMPGYTRRMVIADALGMVRSYKENHAKWEALKPAECGAEPTLGIPPRYELTFYDQERRMSRLSKGQIGLKLYDGKKWDWYYFQISASDAAYLARIGKSRKMLSPTVQKIRGRYEVRFCFEERKELVQNDRKLDYKILAVDLGINAAASWCVMTADGTVHAKGVIHLTCEEDRLNRMINRKRQYQQAGKKSSCVYRWVKEANRQLSIATAKALTSIASEQKVDCIVFEHLDGKGKIHGGRYRERIHMWRKNDVQARITGMAHRLGMRISRVCAWGTSKLAFDGSGQVDRHSVYHFEHGKKVYNYSLCRFQNGKIYNCDLSAAQNIGARFFLREYERAGAMGMFPGTPQRTLNTLIMFIKNGLPEKAV

SEQ ID NO: 3754 - protein, 389 aa, Paenibacillus sp.
VIRCVKTAFQASKADLDRLFACNRISAEIWNQCLIVSKNYTLQHKRKWIGKTELQAALKHHFPLHSQSVQAVCHKYLFARDSAKQARSQGLNPKYPYKNKKYFNTKWVDQSFKIKGNAITLSLGVQNGKRQQPITILVPRIPDAAIKEIELVFDRKLMVSMSYDDGKAAAVNEGREVAGVDLGEIHSIAATTTANQSIVITGRKARSIHRLRNKKLAELQKLMSKCKKGSRQWKKYKKAKIYVLGKSERQLQDVIHKTTKQFVQWCVESDVKEVVIGEVEGVQRHTKKKKRKIVSQKLSNWSFGKIRKQLAYKLEKHGTSIKAIDESYTSQQCPCCGRMKKSSARIYNCSCGYCEHRDVHGSKGILSKYLHAEIRYLGETQTIKYLRIA

SEQ ID NO: 3755 - protein, 255 aa, Paenibacillus sp.
IRITADSKHVRIPKIGEIRIKLHRQIPNGHTIKSATISRNSGGSYHISILTHYEIDVKPIVPQPNKVLGLDYSSKGLYIDHTNTAANYPKYFRKMEVRLKSEQRVLSRRKKGGSNWNKQKLRVVRLHEKVSNQRKDFLHKLSRQLAETWEAVVVEDLNMKAMSQALSLGKATMDNGNGLFRTFLGYKMAERGKRFVRIDKWFPSSKRCGACYKINKTLTLKERVWVCEGCGGIHQRDENAAGNIRAEGLCLLGLA

SEQ ID NO: 3756 - protein, 432 aa, Pleurocapsa sp.
MILNYVYRIYPDNNQIDHLNEWLETCRVSYNYALRELKDWIASRKCPIDRCSLESEYIMAADYPFPGYHQQQNNLPKAKKQFPRLKIVPSQVLQTNIRRLHDAWDFFQKRGYGFPRFKKYGQMKSILFPQFKTNPLTGWQIQLPKLGRVQINLHRPIPDGFVIKQVRVIKKAMGWFAVVAIESDIEIPSPVPHGHAIGVDVGLLSYIATSDGYTESRPKFFKTAHRRLKVLQKRLSKKQKRGKNYEKARIKVAKQHNHIAFKRTDYQFKLAHKLCDMANTIFVEDCDFRIMAKGMLGKHTIDASFGQMRTILEYVARKRDVFVGRVDHRGTSQTCPNCRTEVRKDLSIRLHECHECGYVVDRDIASGQEICNRGQETYRGTPEKQEIGSQVVLSGNFVLDKWRNSTSVVRGARSISDNGSPRCIKNEALAEF

SEQ ID NO: 3757 - protein, 408 aa, unknown
  TnpB Polypeptide
MHCDKSCVSFVGNTVNILLTLERSDNMTVVQKGVRVRLYPTEEQEILINKTLGCCRFVHNKILEDCQRFYEQTQHFPSKNERIKNIVPLKEENEFLKEVDSTALQQSVRDLNSGMGNFFKNRNHFGFPQFKSKHNSKQSYRTPYNGGSADVLDNKHIKLPKLGRVKTKRFDMPDEYKIFNITVEKTATGKYYASICIETEVQSLPKTGKQVGFDLGLIDLLIGSDGSRYERPKFSYAFKDKLAQEQRKLSKMRTKLERVNTNLDECKNYQKQKHKVAKLHEHISNCAKDFNHKLSRKLVEEYDFIAMENLNVEGMKKNHRLAYSISDVRWSQLLSFIRYKCLWYGKEFKQADRFYASSKICSECGTYHKDIVNSLSVREWICPDCGTHHDRDINAAKNILIKALSVGV

SEQ ID NO: 3758 - protein, 392 aa, unknown
  TnpB Polypeptide
VPPPLRYKTIYHNRVNMYVLKSFKYRIYPTKAQTTKMERTLDLCRWVYNETLAYRKTLFETEGKSSSKYATNALLPTWKVDKPDLKEVFSQTLQNVQERVDLAFKAFFRRIKAGEKPGYPRFKGKGWYDSFTYPQMGFKLDNGLLKLSKIGNIKIKLHGPIEGKIKRLTVRRTATGKWFACFSVEIEDQPKPPWKDGSLVGIDVGLESFATLSNGEKISNPRFFREEEHELARVQRILSRAPKGTPERKKALEIVERVHERIANKRYEFAHQISNQLVNRYGLIAFEDLNIKGMMQNHNLAKSIGDVAWNMLVTLTSYKAASAGSMVVLVDPRNTSKMCSRCGILVQKDLSERVHNCTQCGLSIDGDWNAAINIHRLGLQSVGIQSVQARPL

SEQ ID NO: 3759 - protein, 384 aa, Actinobacteria sp.
  misc_feature (341)..(341): Xaa can be any naturally occurring amino acid
MSRYRLLPAPAQEAALRDHCGHARYVWNLAVEQHSHGHPGRASAPGYLEQCRQLTQARKEYPWLAAGSQTVQQQALRDFTQAMAAFLDPKNPARRPSWRKAGRNEGFRIVGRGGQWDVRRVSRHVGQVWVPKAGWVRFRWSRAVPAGAKSYRVTWDRAGRWHIAFAVIPAPVPAPGNGQIVGIDRGVAVSAALSTGDLLHAPRLTVRERARLRRLQRRLARATRGSNRRSRAKHAIGRLKARETDRRKDWAEKTSTGIVRRFDVIRVEDLKIANMTRSAKGTRENPGRNVRQKAGLNRGILGSGWGLLVRRLEDKAPGRVEKINPAFTSQRCSACGRVDRXANLNCCSHRRSSWNPSPSGGGGCQPRIIECCCQAMLGNREVGA

SEQ ID NO: 3760 - protein, 385 aa, unknown
  TnpB Polypeptide
MIKTHKIALDPNRDQIAWFYQQCGYAKFAYNSALSDFKAELSAGNFLSMYDLNKRFNQKKKAFDWTQAQDQRAAMYAVHHLGSAMDNWKARRAKFPKLKKRGCKHSYTTDEQAVRMKGKHIKLPKIGWIKTFEELRFSGDQIVSVTISRTAHRWFASISVEVEEPIHRCPASSEFVDWLASKVEVGTPYQMERSIYPTIGIDVGISTLATLDDGTKYENPKALKRYERKLAREQRKLSRKVFLSQNWYKQKRKVERLHYRIACIRRDAHHQATTAILKCASKIGIETLQVTNLLKNRKLAKALSDAALGGFLEKLKTKATSLGISIVRSDRFFASSKNCSTCGHKKDDLTLSNRQYHCSHCGTSIDRDVNAAINLRTLAAGHAES

SEQ ID NO: 3761 - protein, 418 aa, Moorea sp.
MEFKAILKKPQELAVNEAIRTARFVRNKVLRYWMDNRGVKKKELYRYNTQLRDEFEFVKDLNSHACQASVENVERAIKRFFDNCKKKVPGKKGYPRFKKHSRSVEYKQSGWKLSPDKKSINFTDKKGIGKVKLKGTWDLWRFDSAKPTLREQKLIKRVRIVQRADGYYVQFCVKIDNLKRLGATGFTVGLDVGLKEFYTDSDGYSEPNPRFYRKSEKRLKFYQRRVSRKKKGSSNRKKAVNRLGRHHLKISRQREEHAKRLARCVIRSNDLVAYVRAACRRQDLRIKNLVKNHCLAKSINDAGWYKFREWLEYFGQKFGRITVAVNPAYTSQNCSSCGEVVKKSLSTRTHVCKCGCRLDSPKATLRERDHNAAKNILTRALSTVGHTGTLLNAWGDLSSTFPDSGLVKQDGSMNQESP

SEQ ID NO: 3762 - protein, 431 aa, unknown
  TnpB Polypeptide
VDERTAQSSTVELTATISTNLVHLHSMQCKPTLKAYKYRIYPTDAQVVFFAKTFGCCRLVWNKMLDEKKQAYKKKERIPRITPAKYKDEFPFLKEVDSFALCNVQLQLEKAFKDHFRNRKQFKLPKFKKKREKQSYTTNSVRDSIRVDFEKNFLYLPKLREGVKIELHRRFDGRIKSVTVSKTNDGKYYASILVETEDPRNKVVEPKSKACGIDLGLEHFVTVTNDFGSYKVEHPKYLLRGEERLKRLQRSLSRKQKGSKNSEKARLRLARQHAYITNARNDFLHKLSKAIIDENQVVVVEDINVKGLLKSRLAKSIADSGWSKFLTYLKYKAEWYGRAFIQVDRFFPSSKLCHHCGHKKEDLALHDRTWCCPSCGETHDRDVNASINLYYVGLGRPEVTPVEQALVDDRSPYGLPKKPSRDEAGSATSYG

SEQ ID NO: 3763 - protein, 493 aa, Methylocaldum sp.
MHMVVLAVHLYQLRLEVGADLGEDRAQSVNGVAVEHVATVFRHKDQMDVHLENAVPSMPNIVVIAHRPNYTARMRRLQAYQYELRPDGQQERQMRRFAGSCRVVFNEALNLQKRRYEQGEKKLGYAGLCKELTAWRNGTPLPSGRTAPWLADAPVHPLQQAFKDLERAYANFFAKRAAFPRFKKKGRSDSLRYPDPKQIKLDQGNSRIFLPKLGWLRYRNSRKALGTVKNVTVSAIGGKWFVSIQTEREVPEPVHPSTSIVGVDLGVANFAALSTGEIIAPVDAMKRHAQRLARYQRAMSRKQKFSKNWIKAKARIQKLHTRIGNIRRDHLHKLSTTISKNHAAVVIEDLQIRNMSRSASGTVEQPGKNTRAKAGLNRSILDQGWFEFRRQLEYKQAWRGGIVVAVDPRNTSLGCPVCGHVAKENRITQSRFECAHCGHTAHADVNAAVTILAAGHAVMACGGDVRPCLHLGAGRAAPAKQEPAEATHAAYAA

SEQ ID NO: 3764 - protein, 384 aa, Methylocaldum sp.
MNVVQRAYRYRFYPTAEQETILSQTFGCARFVYNHFLRARTDAFYQEQRRIGYNETAKLLTKLKQQPDMAFLQEVSNVVLQQSLRNLDAAFKNFLQGRAQYPTFKKKHGKQSVRYTRSGFRWKDGQIYLAKMDEPLNIRWSRSFKGEPSSVTVSKDTVGRYFISILVEEEIKPLPVVNKMVGIDLGLKDAVILSEEEKIPNPSYLRKAERKLARAQRRLAKKQKGSKNRAKARLKVARLHAKIADSRKDWAHKLTSRLVNENQVLAVESLQVKNMVKNPNLAKAISDVGWADITRLLEYKANWYGRTFVQIDKFYPSSKRCSTCGHILDTLTLDVRSWTCPECGAEHCRDVNAAKNILSAGLAILAGADALRLHEKSTAGHAGA

SEQ ID NO: 3765 - protein, 426 aa, Lachnospiraceae sp.
MKNCHHRRNLYKTSYPYCVYFHADCTDSGSIRNRYRRTRKLLKSYKTEINPTPEQRLKINRTIGVCRFVYNFYLAHNRELYESGKKFMTGKDFSKWLNNSYLPDNSDKAWIKEVSSKSVKRSLEDGYAAFRKFFDHKAGYPRFKKKDVSDPKMYFVRNNPGDCFCERHRIKIPTLGWVRLKEKGYIPTAKDGYSIKSGTVSKQAGRYYVSVLIDIPSPERDKNNYADQGIGIDLGVKELAVCSSGTVYRNINKTAKVKQLEKQLHRAQRSLSRMYGNLKKGGATQRKNISKQKLKVQRIYKRMNDIRTDYMNKTISETVKTKPPYVTLEDLNVRGMMKNRHLSKAVAGQKFHEFRTRLTAKCHQNGIEVRIADRFYPSSKRCHCCGKVNRGLKLSDRIFRCECGYVADRDFNASLNLRDTEAYSIA

SEQ ID NO: 3766 - protein, 224 aa, Lactobacillus sp.
LSIEAAVLAEKRPIRRVTGVDVNVGKFDYRTASGYAIQPTIPASLPALYARITHYQKQLARKRTTNPKRFNSATYRATRTKLKRNYQRVERIQMDLLNKFTTKLIVDNDLIGIEDLDNQHMRMNRRLAKNLHRSMFGKFKIMMQYKADWNGSTLILADPMFPSTQRCSKCGYIKTGEEKLTLHGNAKYHTGHDDYICYQCGARMRRDENAVDNLIDYAKSKVQG

SEQ ID NO: 3767 - protein, 386 aa, unknown
  TnpB Polypeptide
MLRVYRYRLYPTTAQAERMEWTLWRLRELYNAALDERITAYRRAGKSLSGYDQMREIKAVREARPEYAAIHVHLLQDVLTRLERAYRAFFRRIKAGEKPGFPRFKGRGSYTSFTFKDAKNRNGVAFDAKTKRLRLTGIGEVKVKLHRKPEGTLKQVTVTLGGDGHWYACLSCDDVPTKPLPATGEAVGIDVGITTFAALSDGTMVANPRHYERTQAALRRKRRVVARRKRGGNRRRKAVVVLRAHHDRVRRTRLDFHHKTALGVVRRFDRIAVEDLNVTGLAMGRLAKQVQDAAWAQFTRILESKAECAGREFVRVDPRGTSQRCSGCGAVVPKKLSVRVHDCPSCKLVLDRDENAARNIKRLGHSRRGGMSSGSPGEPRSPSLAF

SEQ ID NO: 3768 - protein, 150 aa, Calidithermus sp.
VNHTIAKRIVEKAQRTNRAVALEDLRGIRQRVRARRPQRSTLHSWAFHDLGQKLGYKARRAGVPLVFVDPKNTSRECPACGHTGRANRPDQSTFACVVCGFAGLADHVAAVNIGRRAIVNWPNVGEANRVPHGSVPASPDPNPLGFGGGS

SEQ ID NO: 3769 - protein, 437 aa, Streptomyces sp.
VKKFQPQPGFVVQAYRFALDPNAGQEAALRSHCGAARAAYNWAVGWVMASWWQRKAEESYGVPEAQLTEWRPWSLPALRKAFNAAKHADPGFAGWWEENSKEAYCTGLANAAAAFDNYAKSRQGKRRGRKMGAPRFKPKRKARRACRFTTGTIRVDRDGRHVTLPRLGTIRTHEPTGKLLRRVQAGTARILSATVRHERRRWFVSFQVEVAREITRVARPNVAVGVDLGVKTLAVMADSTGEIRTVPNPGHYDHTLKQLRRASRVVSRRQGPDRRTGRKPSKRWEKANAAYNKLHHQVANLRADALHKLTTSVTAEYGTVVVEDLNVAGMLKNRRMARRITDAGFGEIRHQLDYKTRQRHGTHMVVADRWYPSSKTCSGCGAVKAKLPLHVRTYECDTCGLVLHQQQAGRSVPSVTRAVTFRLLHQAEHVDGPRRAR

SEQ ID NO: 3770 - protein, 396 aa, Acaryochloridaceae sp.
MFVLETKLRGNPTQFATLDDAIRTAQFIRNKCVRYWMDNQGVGQYDLSKLCTGLAKEFPWAGKLNSMARQASAERAWASIKRFYDNCKAKKPGKKGFPKFKKNCCSVEYKTSGWKLSEDRKHLTFTDGFKAGTFLLMGAEDLHFYPISQIKRIRVVRKADGYYAQFCIEIDREETIRPTGKAVGIDLGLKYFYKATDGTEVENPKFLRKSERKLKRLQRRVSKKQKGSKNRTKAMNHLGRQHLKVSRQRKDWVVKQARALVMSSDFIAYENLQVRNMVRNHHLAKSISDAAWRLFVDWLKYYAQIFGKVQQPVPPQNTTIDCFDCKQPVQKTLSTRTHVCPHCGSVRCRDENAALNILEKGLKLAGLSTVGHTGINASGQNDRYLNQVIGLDKSAG

SEQ ID NO: 3771 - protein, 448 aa, Mycobacterium sp.
MTEPGVGLPQGGKANTARRYRLYPTEDQGDRLVAWSHTCRAVWNTALMQRQWAYRSARRVTLHAAEQCRDLTELRGAYDWVRELPAQCGQQVLRQLDQAYANFWNPLHPAGFPQPKRKRDHTIAVPFPGQAVKVRRVSRRIAQVWLPKLGWVRFRLSRPLAGAIRNATVSRDGLGWHIAFGVYQPEPQHMPVNEGEPVGVDVGIACSVFVSDENSPRQRPDTLTTGEKKRLAGLERRKARQLTYAKKHNAGRYSNRLRRTITEIAALKARQARRRLDWNHKLTTDLAHNHGTVAVEDLKVANMSKSAKGTVSQPGQRVAQKRGLNRSIADQGWFEIRRQLGYKTRRHGGQLISVPAAGTSQTCSQCGTRDPESRQGCGRLFACVHCGHTEHADRNAALTILAKAFSTAGRAGLTPCGSGESQSTRSPKGQGTQRGSRLREPTIPGTTA

SEQ ID NO: 3772 - protein, 234 aa, Psychrobacter sp.
MREALRFDGKILSAKVFSKGSRWFVSIAVEIAKITTATKKTGKQTGIDLGITNLISLSDGITVKAPKPLKTKIKKLKRLSRQLSRKQKGSNNRAKAKAKLSRLHLQISNIRKDALHKLTTGLVSEYDVIAIENLNTKGMMQNRKLSRAIGDLGFYEFKRQLVYKANQYGKTVKELDRWYPSSKTCSNCGHLLDKAELPLSVRQWQCPSCQQAHDRDINASINILHHADKVLTHH

SEQ ID NO: 3773 - protein, 231 aa, Psychrobacter sp.
LYNLNTLEIVQDSRNRWYACITVKDYPKQTRGNGSVGIDLGLTESATTSNGDKLTIKQTQKWADTLAIAQRANNKKRVKAIHAKIKNSRLDAIHKFTTQLVKDNALIVVGDVKSRSFTNKKTKLAKSTYDAGWFEFKRQLEYKCKHAGCQFEIVNESYTTQTCSHCRKISDSSPKGRASLGIRGWICAECGTWHDRDINAAENILAVGLDRLDVGIPFREGRKSNGPLTMK

SEQ ID NO: 3774 - protein, 379 aa, unknown
  TnpB Polypeptide
VEVYLGVPFGYEPDDEMRKLLEDFREMINFCIDYAYKRRITSYARLRRGVYGEWKRRWNYSTHFCHSACKIALAMLKKHRKKHKKGKPEAKKLFMQLDPQLYRFYGDKIRISVRPRKFIFINLKFGEYQKKFIDAWREGKLKTGEITVNENKIIIPFKKEVDLQNPREWIAIDINESNVTAVSSNPHVLRVDHELRTIHTTYFIIRRKIQKLARYKPKTARRLLKNYSDREKNRTRDLCHKISKEIVNFARQNNLGIVMEDLKGIRKRIRYGRQMNRRLHSWNFRDLQFYIDYKARLNGLPVEYVNPRGTSSLCPICGGKLAPNGHRLLRCLRCGYESDRDVTAGINMLRMRGAPLPLKAINEDSSPLLSEMERIVIKC

SEQ ID NO: 3775 - protein, 407 aa, unknown
  TnpB Polypeptide
MMWKAYKYRLYPTKSQEVLLAKHFGCTRYIYNYGLERKIKSYAETQKSISRFTIQADLPKLKKSDDTKWLSEVNSLSLQAALLNLDMAFTRFFKEKKGFPKFKSKHDHNQSFQVPQNTTVDYEFKRVSIPKFKEGIKCKFDRRFSGKIKTSTVSRTPTGKYFISILVETDETIPNKKPIDENKAVGVDLGIKTFATLSDGTEIQNPKNLKKLLKKLKRMQRSVSRKVKGSNSRKKAVNLLAIQHEKVTNRRKDFLHKTSRFLVDRYDTICLETLSVKNMMKNHKLAQALSDISIGTFNAYIDYKAEWYGKNIIRIGRFEPSSKMCSCGHIYKELTLKDRVWTCPCCGSVNHRDFLAANNIKKFAFKSNNTARTVGIYAGGDMNPVREATPEITQADVVETHTSLACG

SEQ ID NO: 3776 - protein, 364 aa, Burkholderia sp.
MACMILVYRYRVKSLNGLLNKQSRAVNYVWNFCNDTQKHALKWNKKWPTGFDLNRLTTGSSKELSIHSGTVNATCEQYAKSRSQHRRPYLRYRGRKSLGWVPLKGRDLKREGDAFRFAGNTFRVFSSRPLPEGKIKDGTNFAQDARGNWFLNIVIEMPDVPARPIRSGVGIDLGLKDFATLSTGEKVPNDRFSQRAAEKLAKAQRARKHKRHIAKLHAKVANARADFQHKLALALVRRFDYIAVGNVSAVGLAKTRMAKSVNDVSWSSFRYRLRYKAIAHGVTFEEVDEYGSTQSCSACGSKDSTTRPKGIAGLRIREWACGGCGVVHDRDTNAALNILRCGRASPVVGIGRLWADEDIKRKET

SEQ ID NO: 3777 - protein, 230 aa, Nitrospirae sp.
MVVSGRGIRSIKRLHSKQLGEIQKLRSRCKKGSRRWRKLGNTRARLTLHHERRVRDLRHKGTRQVVDFCKDRGIEAIFIGNPDGVRRKDSGRHHNQRMSQWEYGKDIDYLQQKSEQDRIVCFTGDERGTSSRCPVCGHRHKLKGRNWRCKACGFEGHRDIVGAVNMHQIAYNQVVPFPKRITYLRPGVLRRSSSPGTGQRCLAELRTQAPQQECLKRVPPWDSPQTANLG

SEQ ID NO: 3778 - protein, 362 aa, Effusibacillus sp.
MKIHKAYRFKLEPTKEQIRLLKQACGCQRFVYNHYLKKNMEQYEQDKTFVFYHAMATDLPNLKQQFPFLRDAFSQSLQTTLRHLDRAFKNFFKGAAEFPAFKKKNRHDSFTCPQKFRIAEKVIFIPKIGEVRYRKSRQMEGKVKSITITQNCGRWFVSVLTEQEIVEPTPTYENPVGIDVGLKEFVFLSDGTSIANPKYYRQYQEKLAKEQRKLAKKQKFSKNWHKQLRKVQNVHYKIRNSRQDFLHQVSTKIVKNHDIICMEDLHVKGLVKNRKLAKSIADAGWDMLKNMIAYKASWANRTLVQVERFYPSTQECSACGGRKLMPLHLRTYVCESCNTTIDRDYNASLNIERRGLEILGFA

SEQ ID NO: 3779 - protein, 225 aa, unknown
  TnpB Polypeptide
MLRFGYHVHRSYAPHGRGDFIKLPKLGWVKAKIHRRPKDDWKLKSATVTQNRDDSYQVSILFAYEESISPAVVTKETTIGLDYKSDGLYVSSEGDTCGMPHYFRQSADKLAKAQRKLRHKTIGSKNYNKQQKRVARIHRHIANQRKDFLQKKSTEITNLYSFVCVEDLNMKTMANRGFGNGKATLDNGYGMFLTMLDYKLRDRGRSADKSRPVLSIQSVMQPLRF

SEQ ID NO: 3780 - protein, 404 aa, unknown
  TnpB Polypeptide
MYLTEQHIITVNDKRYKDLDRICFLSKNLYNAALYIIKQEFLISGKWIRSVELNKKMVAENNVDFRAMSGSSSQQILMALDKNLKSYFSAIKAWKRDNKKFTGCPKFPKYKHKTKGRNVFSYSYAQFKHRGGYIYFPKKEGLQPLKTRCKEGTVKQIRFVPKADCYVIELVYESEIKEQLPDNNRYMSIDLGVNNLASIVTNTSNKAVLIDGKKLKSVNQYYNKKKAKIQSQLKKTNGKENSRRLMNLTRKRNNKVKDYLHKASKEVVNMCLKDNITTLIVGHNDGWKQEVNMSKRNNQNFISIPFETFISMLRYKSERQGLRFVEINESHTSKCSSLDLEEVKHHDSYVGKRVKRGLFRTRDGILLNADINGAYNIMRKVKGDAAMPPYRGFGYNPVKKFINK

SEQ ID NO: 3781 - protein, 550 aa, unknown
  TnpB Polypeptide
MSFIRTSKILFKPNYTNQIKLDELSNFIDLCSDALNFYVVYFAKYYKLDKLLFVGAKDKNNKIFAPNSNLTKLNNIFYELRYDEKQNRDCFGLKLKFYPDEILEVKSVDLLDSNELNGPIDQKFRSIAKLSARTLKSVKTQSMGIIRSWVQQILQSYQFGYFNRDQYKKSHRKNIRKYCNDKRKVIKNIIKGEAKLNIEKFEFNSVNCQLLRAVIDDSFELSKNSEFCFDLLFSLHSMYTKEYSRINYPDRKNQLHIPLRSHHHFNELKSGIVSNVQCKLVEIAKSILVSKEGIEVRFKFKPLARKAEFKNKIVGIDQGQRKLFSAVSSASTAIDVDSNQHDNDKYKYLAEIDLINQSQRSDSTQSSAYAYNYAHCYNEVCDKIARKQKGSKGFKRAKEHRKNLINQAVNILAQIFNFEDDVAEVRLEKLRRLGEGKNKSRKLQAFNYADLRYKLERKCIETNVRITETSNAYRSQRCSLCGFVHKKNRLNGGEEFVCLKCGFTLDADFNSAINQIAELPQLYYNRKLYPNNSTGFYWLSSGVTYLDTTA

SEQ ID NO: 3782 - protein, 557 aa, unknown
  TnpB Polypeptide
MNLTSRIKITKEIKEYDVDTSAQIDAMMAEQMNLFHTVFNKAWFAFMAEEEFSNKEIHQFDNSTYLEKHGYSFNTKYAYSIARDAADKAKMAYESYKYQLDDIDKRIKQFSKNIKKDEKKLNKLLKKYKIDDINLNDSLKKNKINDKDAATIKKLRSNLYWNNRKIEKEQKKRKQIASYTFGSKRLQRKLSKDNISTEHWRNIRNNRILSCAKASVSYGNDNIKLINENTLLIKLTKEKQIKLDVDLTKLHLSKEIFSMEQLKLFCQIIRRHEKHGRKGNQATKSNTEQNAQQRQEQRKSKIYRTKPDYYLYVSVDYKNDNKQNSVDVTVQNSLTAGIDFNSGFITIACNKNKSGIQNEKLVSKKNGLFKKTDLVEYFAKMKLNQDLEHERSLNIDNATSVPLAELIPLPQNYICDLLNDEATETAKFDFFVHNETKMNSQQLSDSMRKTIKSALNYVKEIGCSQVNIEQLNFDDKKRDISCSSQYNLTQDYNHMLHSLPYSLFKKIMEVECYKSDITLKQVNPAYTSRNTYINSIAKNKDELKIRHFGAALIISML

SEQ ID NO: 3783 - protein, 324 aa, unknown
  TnpB Polypeptide
VHKDANQRPFTHLQDAFTRFFHGEAGYPTFKKQGVHDSFYVSNDKIIVEGMRLGIPRLGWVKMREAVQFQGKILGVTITREAGRWSVSIQVDVGAYARPRTADGVVGVDLGVSTLATLSTGEKVESPKPLTRLLKRLQTLQRRVSRKQQGSRNRRKAIQRLARLHRRISNIRHDVLHKLTSQLTSENQVVAIEDLNVQGMMANHHLARAISDMGFYEFRRQLTYKAKLTHTEMIVVDRWYPSSKTCSRCGKYLEHLTLAHRTTGCDCGPSMDRDHNAAINLARVGYTRSHAYGDASGGGTMATSVYESCIVEAGTTPCARLRTR

SEQ ID NO: 3784 - protein, 452 aa, Deinococcus sp.
MAKQVNATDGVFGVRRLLLHLPKSDLRLLEYLGLQAKKLYNAGNFVARQLFFKRGKIVSRFDLLYADGVRDSLHLKAMPSTTAQQTLLSVSEAWSSFRELRNLWFKGGCPPDRKPRPPAYLERGLFKLAFPNSGGGKPKIVDIGGKSMIRFPLGQLNSVWFGVRELLIPAPSDFDLSQVREYTFVPQNGAWYLELSYRKPKPAGVNVDPALMLACDLGTSANLVAAVGTDESNLLIDARQLKAMNQGYNRLVARRKAGKPEGYWDAYLDRLTRKRNDRMRDGINKAARLVLNHCLERGIGAVVVGWNSGIKNRVDLGSRENQKFVQMPLARLKDRIGQLCEEYGLAFWEQEESYTSVSSHLDGDTPPVYGQKPDGWTPSGRRVKRGLYRTERKEKINADLNGAANICQKWHVARKPVEGSLQPDRRGRPCLTTAKRVRLWALPGARSASASR

SEQ ID NO: 3785 - protein, 191 aa, Burkholderia sp.
MILVYRYRVKSLNGLLNKQSRVVNYVWNFCNDTQKHALKWGKKWPTGFDLNVLTTGSSKELDIHSGTINATCEQYAKSRSQHRRPYLRYRGRKSLGWVPLKGRDLKREGDAFRFAGNTFRVFNSRPLPEGKIKDGSNFAQDARGNWFLNIVIEMPDVQARPIRSGVGIDLGLKDFATLSTGEKLPNDQFGR

SEQ ID NO: 3786 - protein, 428 aa, unknown
  TnpB Polypeptide
MIIILFHATNIRKYLVIYKTIINFVSNMRKINRTYKFRLYPNKAQTELLARHFGCARYVYNYFLNQRKEQYRLTGKSDNYYAQAKVLTGLKKQEDTAWLKEVNSQSLQFALRSLETAYTNFFQKRAKFPNFKSKRSKNSFTVPQLASIACDRLFIPKFKEGIKCRIHREIKGKIGKVAISKTPSGKYFVSVFTEEEYISPLEKTNKSVGVDMGLKDLLITSDGETFKNNRYTRKYERKLARAQQHLSRKKKGSRRFENQRLKVARLHDKTANCRADYLHKCSIALVRRYDTICIEDLNVKGMERNHHLAKSITDASWGRFVSMLTYKAEWNDKKIVKIDRYFPSSQTCNVCGYVNKQTKDLSVREWECPVCHTHHNRDVNAAINILRVGLNHISAGTVDYTGGEEVRADLWESRSSVKPEAHKSLARG

SEQ ID NO: 3787 - protein, 391 aa, Leucothrix sp.
  misc_feature (181)..(181): Xaa can be any naturally occurring amino acid
MKTLKLRIRDKHTAKLNRLSGWVNFVWNYVNDLSYKHLQKTGKFFSAYDLNEYTKGSGELLGLHSQTIQAINETHAKSRKQFKKAKLNWRTNNPNAKRKSLGWLPFKQSAIKHIATHQTGKKGLKSTLQLSLAKGQKLVIDLWDSYNLSLYQINTLEIVQDSRNRWYACITVKQYPKTTCXLVQDSRNRWYACITVKDYPKTQCGTGSVGIDLGLKDSATASNGDKLQIKQTLKYAKALATAQRAKNKQRVKAIHAKIKHTRQDLIHKFTTQLVKDNALIVVGDVRTTQFNSKKGKLAKSVYDAGWFELKRQLTYKCENAGCRFEIVNERYTTQTCSCCGDMSSSLSGRAGLRIREWTCATCGTRHDRDINASRNILAVGLDRLTEGIPLL

SEQ ID NO: 3788 - protein, 380 aa, Methanoculleus sp.
LSRRRNRPFAYHDTLSPRTAVLYAGGSPTERCMQSVTKLRLFASPGERQMLFATMERYNAACNAASPVAFSERQFSDRGLQARLYRHIRESFGLSAQMTILALRKVAGSYRSTREAIKEQNKVLAALGKPLKVLTELSFQEHGAICYDWPGALPRPKPGERLDTGRPAQTPVYPTSVFPGGRDRQADGSRLPGRRLLALRDRGDPGRRAADPPEYLGVVNIATTSDGATFSSDATEKVRQRYGRLRGFLQKTGTKSAKRRLQKISGREHRFKTDTNHVISKKIVCAAQDTKRGIALEDLTGILLRTHGYEASARATPQVGVPSTPILHRVQGSQGRSPGEDDRRGVRASSAVAAGSSTPTTARPRRRSAAGSAGIPRTPI

SEQ ID NO: 3789 - protein, 461 aa, Mollicutes sp.
MSKDDTNIITLKLKYSTDENSKSRILEYIKNYNNVLRFTYNRLHENKDLKTKEITVLQKIMNNIFVDSHFKNSAIFDSKTLLHNDKVIFGGKKLFIDRCQNKISKEEFKIKKLRPIYSVGESPQKANRKFSIITENHIIFKPTKEEHFLLEINPSKNYQKYLSRLSDLANQKKIPIDFKLDLNYVYITFDLNKLKFERIISDKIKDRYFAIDMNPNYVGYTVIDWIDGQNYKIIDKGCFSLKKLNDYDDSLKGKGFSSESKERKYISNKRNYEISDIAHKLERITNHYKCEFFVMEDLSIPSKDNGKGKRFNRLCNQQWCRNRFCNIIKKLCKLDKIKILEVIPNYSSFIGNLVYRKEKLPDFVLASIEISRRGYEFNHQYILKDKEIKKNIVFGNFDEDEVVYIQSLEELGISEQFSSFKELYDKVKKSKVRYRFPLENSSLAVFSKNSIRNYQTLYKFI

SEQ ID NO: 3790 - protein, 508 aa, Mollicutes sp.
MIKKKQFRLDLITINYIYNNKKWKLQNYHFSEQTKNLRILRMSKEETNIITMKIKYRTETKEDSDRIFQMMVNYNNIVKCTYNYLLKHPKASTAEISHYQNSLNNIFLDTHFKGSAIYEAKGLINRIGENKLIFGGKKLFIQRCQNKITKEEFHKQKQIPIYRVGQSNKKGNTKFSIITEECILFKPNKNEHILLTLESVGKNYQKRLLELSELANQNKIAIDFKLDTEYVYISFDLNKLKSEKVISDKIKDRYFSIDLNPNYIGYTVIDWIDGQNYKIVDKGCFSLKKLNDYDDFLNGKGFSSESKERKYISNKRKYETINISHKLVKIAEHYKCEYFIMEDLVISSKDNKKGKKFNKKCNNQWDRNLIVSQIKKVCKLSKIKVLEVAPNYSSFIGNLVYRKEQLFDPCLSSIEISRRGYEFVHQYIIKDKEIEKNIIFGNFEKDKEVYEQSLEELGVNFPFETFQELYSQIKESKVRYRFPLESCKNLAVFSKNSIRDYQTLYKFI

SEQ ID NO: 3791 - protein, 529 aa, unknown
  TnpB Polypeptide
VATNIDALRIRHVLGRSRYGPPEPFGPDGWRFVTVGRQGAVIVTRADVDDVDWVHASMSWVDRLPTWDELGRLRDAVFGDGWAYQVFAPSSRTSKGNPWLQPWGGMWIRRVSGTGIAHRRWASHTRYNGRVKRAYRFRFYPTPEQASELNRTFGCVRYVWNWALDSRTRRYRVDGERVGYHQLSAELTALKKTGPASFLGEVSCVPLQQVLRHQQTAFNSFFAQRARYPRFKSRDGRQSAEYTSRAFRWRGGRLFLAKLNDPLDLRLSRPVPDGDPSTVTVSRDRAGRWHVSMLFDEVIRPLPPTGQAVGIDLGLKDFAVTSDGEHIPHPQHLRRKEKRLVRYQRMMARKVKGSANRAKARVKVAKTHAKVTDARRDFLHKTSTAIVAKNDVIVIEDLNVAGMVKNHRLAKSIGDSGWSEFRQQLEYKAQWYGRHLVVVDRFYPSSKLCSHCGHLLSRLSLGTRHWTCPTCRTRHDRDVNAAKNILAEGLSVASDGEACGADVRPAGATPGPSAMNQETHSVRSGIPRL

SEQ ID NO: 3792 - protein, 235 aa, unknown
  TnpB Polypeptide
MVKIRDKQIPQGRILNATISKEPSGKYYVSLCCTDVEIANLENANNNIGLDFGIKEFCIISNGETIENPKYLKKSLNKLSKLQRELSRKSKGSSNRNKARLKVARLQERISNQRKDFLQKLSTKLIRENDIICIENLQVKNMIKNEKLAQSISDVSWSEFTRQLEYKSNWYGRKLIKVDKFFASSQLCSKCGYKNEEVKDLSIREWICPECGANHNRDINAAINILNEGLRNMTI

SEQ ID NO: 3793 - protein, 356 aa, Acinetobacter sp.
MKTLKLRIKDKHCKVLDQLASEVNFVWNYVNDLSFKHLKRTGDFFSAFDMAKYTKGTSKLCGLHSQTVDAIREEYAAKRKQFRKAKLKWRVSNKKSARRSLGWIPFKKSGLKYAEGWVEYGKTKFGLWDSYGLNKYAVRTGSFVEDSRGRWYVCLVVDSPKLDKPTATKAIGIDLGLKDIATCSDGTVISNPKFYRKYEQKLGTAQRAKNKKRVRALHAKIANCRKDHLHKASTMLVKENALIIVGNLSAKKLVKTKMAKSVLDTGFSELKTMLKYKCENASVLFEEVNESFTTQICSCCGEITASSPKGRADLRIRVWECENCSSVLDRDLNSAKNILALGHKRLAVGITLLSGG

SEQ ID NO: 3794 - protein, 444 aa, unknown
  TnpB Polypeptide
VQKRKFTVVTQLHDKNNHDIIEYIESSRRDYAKAVRETFYTIKHSGFNKSRYNTYLQHKYGIVKRTANSIISDAQGRFNALKELNEYKRKQLERKIAHLEHKIIPKLVEQRNYNSTMLRTGGFISLVKQRNLRLKIVAKKAKLNRIKQKLNNLSYQLESGKLKFCFGTKRLLKKNYNRFIEQRDNQMTFVGAKEEPSCNQNLQLTYNRKDNQFLIQLRKDFGGYKSANSKDKYAYGKVYCNHHKDHLISILKFKTSPLSYKIIKKNNRYYLYCTFEIQVNKNNFVTHSDYGTIGLDFNKGFITLSETNKYGHLIQTQFLPYRFKSGNRTKTDLHDIANYVTRLANQAGKDVCIENLNFNATKSKTETKQGKRYNEMIHSLAYRQFSDIIESVTYRNKVNLIKVNPAWTSWLAKRLYCSTMKLNSHVGASFVIARRGQGYKDTLN

SEQ ID NO: 3795 - protein, 249 aa, unknown
  TnpB Polypeptide
MYQVLRLRIYRKHNAKLNKLASAVNFVWNYVNDLCLQMWRRKRVFPSAYDISEYTKGAGEELGLHSQTIQFIGEKHYQSRKQHKKVKLAWRTNRQDAKRKSLGWIPFKASAVKVLRTYSTGKKALKSQVQLSCGKEKLILTVFDQYDLRRYSDFRTAEVVQDSCGDWYLCLLVKVEEKTCTATGEIGIDLGCKTAATCSNGNKLETKFTKQYAEKLATAQRARKKNRQNGYTAKSRTNVPMQHTSLPLG

SEQ ID NO: 3796 - protein, 446 aa, unknown
  TnpB Polypeptide
LKAFKTFSTILEENNAKEIIEYFEETTQSYGFLKRCTLHILRNCPEISRNDLNKLLQERFSVAARTASSAIYEVEEIISSALALIPLNIEKLEARIEGKIKIIEKKRKEMAKIHASRKTNTKRLGKLKFHIYNIQNSINRIKQKIENLERQLNEKKPNICMGTKKLARNNMEAFKQHRDSQINYIGRACEKQGNMNFQLQYVKKENFFTMKVRRDFGKWKDDRSPERFAYGKCHFKYGGRQLRDAMKDNASPVTVSIIRKNDRYYLFVTVAVSYESSAIVTRKEHGVIGIDFNKGFVNICETDEKGNIVGIEKVKYPFGKAGTTNARLADVISRICSKAIKKGKSIVAEALSFEKKKRKTKKAVTPTEKERMRMLHSLPYSRYAQILENLTFNRKIELIKVNPAYTSRTTEQKFCNQMKLNIHNGAAYVIARKGMGIKDKYLKKTG

SEQ ID NO: 3797 - protein, 424 aa, unknown
  TnpB Polypeptide
MVSIKSVRQKHQASKDLLKLLDEFRRMVNVCVAIGIEENISSRMTLSLASYHRLSRDILGYYRLGAIAIATGILRNYRKAVRKNPWTRVPFARKLMLTTCYGFKIRNGLLRLPVKPREYVYLKLNDHTLQAISALSVRSVTLTPGWVSISYSKEMVEIEPEEYLGVDCNLDNVTTASVNGTAQGFDLSKATRINADYRSVKSRFKRNDIRIRTRVFSKYGEKQRNRIQPLLHCVSKRIVEEAKTRRYGIVMERLTGIRRLYHRGSGQSRNYRARMNSWSYGELQRQIEYKARWEGVRVIYVPARNTSKRCSICGYKTLESTHRRLWCPHCGAILDRDENAARNIAAGGLRFSPNGPPGEAMVDEREPKNETLILKVDGGKLSLQQRSTTRTIQPTKNQRNLIRPLFLGRDSREVFLAGAFRTRL

SEQ ID NO: 3798 - protein, 460 aa, Cyanobacteria sp.
MSMRLTYKYKLKPTKPQITLFQNWIELCRRQYNFRLSQRFNWYEQTRTPINACPLICSVVRVDDIYKDIPLEKELYKGKRKGEFKPLINQGYVDWATIQKDDLTSTKKLFSEYRNLHSQVLQDVIKRVDFSFDRFTKPDKNGNRSGKPKFKGRHYYNSFTYPQLDNSDITVSEHGRNCVNLPKIGLVSFVLHRPIPDGFSVKTGTIIREADGWHISITLEDKDVPVMVAEIQPTEENSIGIDLGIENYAALSTGVMIEHPEFLRKSASSLAKLQQRLAKREKHSRPWKLLKSRIAKLHQYIVRARLDFQFKLAYSLFGKYDVLIIEDLKLNNLTRRAKPKLDNDGTWLPNNQRAKSGLNKSMLDAAHGQFIQVLKFVAWKLGKTVKAVNPNGTSQHCWNCLSQVPKLLKDRWHSCPCGVECHRDENSGKLIKRIGIVGMDIASLKTALRISSSRSQRFTS

SEQ ID NO: 3799 - protein, 533 aa, Firmicutes sp.
MNWSKGTEDPLATEMRLYCACIRWAFNRLLEGKTREALKKQGQEVFGLNSRYCDDAILKAKEIIGSQQELLAVEIEETETKLARAKKKLGWAEKDLAKAVNTGDAVKIAKAKLIVHGRKARVKKLAAKLGELQAHRDNGTIPRVVFGGRTLWKRVCKGKATKEEWRNARQNRLYARGDETKGGNPNMKISYHNGGFTLEVTISHLSTQTGVDSLGRPMMTRAPRVEGKLWLAEKHRKKTWILLLSGAPYTIELIRDKDGRYRAHITFTVTAPKTLTNPNRGYLGMDTNPDGVALASISYTGQPEPWPQGFTLPYPKALHKFAGEFQTTIHPNGFLYIKLPELAHSREYRRTYLIGVLAKVVVDIAKELGKPIAVENLDFGKDRLDTNRKFNRMAANFPYRTMIEAVMRRAFKEGIGVKPVWPAHTSTVGYYKYMRRYGIIIHHAAAYVIARRAIGFKERITIELKQKIQAVREKLNQKANSLPGEGKGMTRKVKQLFKRLDGKVPVHNGLVRYQQESFYSAWHDLKQLALLSR

SEQ ID NO: 3800 - protein, 403 aa, unknown
  TnpB Polypeptide
MLKTYKVRLEPNNKQHSRMMQYAGAARFAYNWALDREREAYESGNGFIDGNELSRLFTKHKAENDWLYNISSKVTTQAIKDAIIAYQGRSNFPKYKSRKRSKPSFYQGGDRLLCDDKYIKLEKISDSKRKNKKKLNWIKLSEANRIPFVDTYQNPRVTFDGLHWYISVGVEHPDDSVRVPTNQGIGIDLGIKELAVCSDGHTYGNINRTDRIKRLEKQKRRKQRQISRKYLLNKQGNDYVKTKNIEKAELELLKLNHKLTNIRKNYINKLTTEIISREPKFIVLEDLNISGMLKNKHLAKAVQEQSFYKFREILTYKAERAGIKLIIADRFYPSSKLCSNCGSIKPDLHLKDRDLNASLNLCRLGSSTVSSTGINVCGVPHQTGVATAKQGTMKQKLNIKSIE

SEQ ID NO: 3801 - protein, 400 aa, Aphanothece sp.
MYATQKNQLRRLSKQEFNALAVLCRLSKNLFNVALYECRQYFFTERKRLTYESNYHICKSNENYRMLNTDIAQQTMKVVDRSMRSFLGLLKAISVGRSDQKPQLPKYLPKEGYFPLIIPRIKLKDGVFNIPMSCEFKKEYGEVKIQVPQRRHDKNIKEVRIHPKYNARWFEIEYIFEDEEIETSVDINQAISIDLGVDNLAACIDTDGHQFLIDGKRIKSINQWYNKRNAQLQSAKDKQGIKSLTHKQARLYQWRNNCVRDYLNKTARIIINHCLKYQIGKLIVGYNPGIKQEINIGRSNNQNFVQIPFWQLRQKLKALCSRYGIEYLEQEESYSSKASFYDQDKIPVYNADNPRQDKFSGQRVKRGLYQTKDKHLVLADINGSANILVKSKHRLNFERV

SEQ ID NO: 3802 - protein, 414 aa, Aphanothece sp.
MYATQKNQLRRLSQQEFNALTALCRLSKNLFNVALYECRQYFFTERKRLTYESNYHICKKNENYRMLNTDIAQQTMKVVDRSMRSFLGLLKAISVGRCAPYPQLPKYLPKNGYFPLIIPRIKLKNGFFKIPMSQQFKQEHGEVKIQFPERLKDKNIKEVRIHPKYSARWFEIEYIYEDEKIEASVNSSKAMAIDLGVDNLAACFDTDGHQFLIDGKRLKSINQWYNKCNAILQSAKDKQGIKSFTHKQARLYQWRNNCVRDYLNKTARIIINHCLTKEIGKLIVGYNPGIKQEINIGRSNNQNFVQIPFWHLRQKLSALCSRYGIEYLEQEESYSSKASFYDQDKIPVYNADNPSNKKFSGKRIKRGLYQTKNKHLVSADINGSANILVKSKHRLSFERVTSGFLANPLRMKIS

SEQ ID NO: 3803 - protein, 335 aa, Aphanothece sp.
MLNTDIAQQTMKVVDRSMRSFLGLLKAISVGRSDQKPQLPKYLPKEGYFPLIIPRIKLKDGVFNIPMSCEFKKEYGEVKIQVPQRRHDKNIKEVRIHPKYNARWFEIEYIFEDEEIETSVDINQAISIDLGVDNLAACIDTDGHQFLIDGKRIKSINQWYNKRNAQLQSAKDKQGIKSLTHKQARLYQWRNNCVRDYLNKTARIIINHCLKYQIGKLIVGYNPGIKQEINIGRSNNQNFVQIPFWQLRQKLKALCSRYGIEYLEQEESYSSKASFYDQDKIPVYNADNPRQDKFSGQRVKRGLYQTKDKHLVLADINGSANILVKSKHRLNFERV

SEQ ID NO: 3804 - protein, 373 aa, Paenibacillus sp.
MNKAFKYRIYPSVEQEVLINKTFGCVRFVYNRMLANRKDIYKQFKDDKEALKRQKYRLPADFKKEFEWLKEVDSLALANAQLHLQTAYNNFFRDPSVGFPKFKSKHQDKKSYTTNNQGGTIRLIDPTTIRLPKLKDVRIKLHRSLPKEAAIKSATISKTPTGKYYVSVLVEYEANIKSVEPTPETVLGLDYSSPSLFVDSQAKPADYPKFYRKAEAKLKKAQRKLSKRKKGSKNREKQRLKVAKLHEKVANQRKDFLHQLSRQIANAWTAVAIEDLNMRGMAQGLKLAKSTNDNGFGMLKTFLSYKLAEQGKSLVVIDKWFPSSKLCRFCQTAQSELALSARVWNCSCGAVLDRDTNAAINIKNEGCRMLGIA

SEQ ID NO: 3805 - protein, 395 aa, Microcoleus sp.
MLVIEAKLKGTRSQYSKLDEAIRTGQFIRNSCLRYWEDNKGVSRNDLQKLCSKLAKNKETPWAGKLNSQARQAHADRAWAAISRFYENCRLGKQGLKGYPTYKKFNRSLEYKNTGWALSADRKQITFTDGFKAGTFELWTSRDLVWYSEKQIKRVRVIRRADGYYAQFLIDWNRQETHEFKGEIVGIDLGLKEFYTDSNGETVNNPRYLRKSEARLKKLQRRTSRRHIKGKKQSKRYHKARKALAKQHLKISRQRKDKAVKDALALVKSKDLIVYEDLKIQNMVKNHHLAKSISDASWYQFTQWLHYFAKIHGTIVIAVPPHNTTIDCSVCGAKVQKTLSTRTHQCGECKTVLDRDMNAARNILSKGLKLLAGYLNGTEGHSETDPFMGERSGTA

SEQ ID NO: 3806 - protein, 408 aa, Microcoleus sp.
VLHRAVKVRLYPTSEQEVLLAQHFGCARWWWNYALNKSVETYRDTGKGLGRSALNALLPKLKKDEETAWLVECYSQVLQAVTLNLTKAYKNFFDGRARFPRFKSKHSRQSIQYPQNVKVEKGAVSLPGKVGIVKAKIHRSIEGTIKTVTVSKDPSGKYYASILTEVEGEPPTPSVEGRVIGVDLGLTHFAITSDGSKVSKYENPRHLAKHEKNLKRKQKKLARKLSRSNSRHKYSSVVAKVYERMSNSRADFLHKLSRKLVNENQVVAIENLHVKGMVRNHNLAASISDAGWGTFTNFLAYKLEKKGGVLVEIDRWFPSSKLCSNCYYQIDELPLDAREWSCPHCVTRHDRDGNAATNIRAEGIRMLKVDGTSISADGGEVRPKAGRKSVLRHSPLKSETASALRLRQ

SEQ ID NO: 3807 - protein, 370 aa, unknown
  TnpB Polypeptide
MKRTINLKLTLTPKQSDSLLETQKVFASACNSVVPFSVGNRCWNRVALHHFCYYPIRKLFPSLGSQMVCNAIKKVCTSFKVLKVKRDQDIPVINFRENGSVHYDKRTFALKGDVLSLFTVNGRIKCSFKLGDFQREYLKDSVVKEAELIRKGRRWFFNVVLDIPDVPTKKDGNIIAIDVGENNIATTSNGTIHKGNELRHERDKFLARRGKLQSNGSRSAKRCLKRISGKESRRVKETNHIVSKALVKEAVQSDAKVIVLENLKNIRKRIKGNKRMRTRLHRWAWYELHQFVEYKAMAHGINVVYVNPAYSSQICSICGFLGSRHKHLFKCSNCGNYQHSDRNAAGNLLKFGESVVSSMAPVNVPMVAVS

SEQ ID NO: 3808 - protein, 488 aa, Mycobacterium sp.
  misc_feature (17)..(19): Xaa can be any naturally occurring amino acid
  misc_feature (30)..(30): Xaa can be any naturally occurring amino acid
  misc_feature (81)..(81): Xaa can be any naturally occurring amino acid
  misc_feature (84)..(84): Xaa can be any naturally occurring amino acid
  misc_feature (198)..(231): Xaa can be any naturally occurring amino acid
  misc_feature (251)..(256): Xaa can be any naturally occurring amino acid
  misc_feature (260)..(267): Xaa can be any naturally occurring amino acid
  misc_feature (274)..(281): Xaa can be any naturally occurring amino acid
  misc_feature (350)..(351): Xaa can be any naturally occurring amino acid
  misc_feature (437)..(437): Xaa can be any naturally occurring amino acid
  misc_feature (449)..(450): Xaa can be any naturally occurring amino acid
  misc_feature (452)..(467): Xaa can be any naturally occurring amino acid
VRPAVRQARCAEPGQAXXXGRRRRVGGCLXAKFEIPEGWMVQAFRFTLDPTAEQARALARHFGARRKAYNWTVATLKADIXAWXATGIQTAKPSLRVLRKRWNTVKNDVCVNIETGVVWWPECSKEAYADGIDGAVDAYWNWQNSRSGKRDGKRMGFPRFKKKGRDPDRVTFTTGAMRVEPDRRHLTLPVIGTVRTHXXXXXXXXXXXXXXXXXXXXXXXXXXXXXXXXXXVLVQRPQQPKVTDPGSRVGXXXXXXRLAXXXXXXXXVLERVPXXXXXXXXLNELRHVCRARSRCTKGSRRYRERTTEISRLHRRVNDVRTHHLHCLTTHLAKTHGRIVVEGLDAAGMLXXQGLSGARARRRGLSDAALGTPRRHLSYKTGWYGSQLVVADRWFPSSKTCHVCGHVQEIGWAEHWQCDSCSASHQRDDCAAINLARXEDTSSVVGPVGXXVXXXXXXXXXXXXXXXXEARKGSSRKAAEQPRDGVQVA

SEQ ID NO: 3809 - protein, 459 aa, Mycobacterium sp.
  misc_feature (35)..(36): Xaa can be any naturally occurring amino acid
  misc_feature (40)..(40): Xaa can be any naturally occurring amino acid
  misc_feature (47)..(48): Xaa can be any naturally occurring amino acid
  misc_feature (51)..(51): Xaa can be any naturally occurring amino acid
  misc_feature (154)..(154): Xaa can be any naturally occurring amino acid
  misc_feature (158)..(159): Xaa can be any naturally occurring amino acid
  misc_feature (184)..(184): Xaa can be any naturally occurring amino acid
  misc_feature (192)..(203): Xaa can be any naturally occurring amino acid
  misc_feature (383)..(383): Xaa can be any naturally occurring amino acid
  misc_feature (386)..(386): Xaa can be any naturally occurring amino acid
  misc_feature (388)..(441): Xaa can be any naturally occurring amino acid
MARLKVPEGWCVQAFRFTLNPTQTQAASLARHFGXXRKAXNWTVTAXXADXKAWRADGTESAKPSLRVLRKRWNTVKDQVCVNAQTGQVWWPECSKEAYADGIAGAVDAYWNWQSCRAGKRAGKTVGVPRFKKKGRDADRVCFTTGAMRVEPDXRHLXXPVIGTIRTYENTRRVERLIAKGRAXVLAITVRXXXXXXXXXXXXLVQRPQQRRVALPDSRVGVDVGVRRLATVADAEGTVLEQVPNPRPLDAALRGLRRVSRARSRCTKGSRRYCERTTELSRLHRRVNDVRTHHLHVLTTRLAKTHGRIVVEGLDAAGMLRQKGLPGARARRRALSDAALATPRRHLSYKTGWYGSSLVVADRWFPSSKTCHACRHVQDIGWXEKXQXXXXXXXXXXXXXXXXXXXXXXXXXXXXXXXXXXXXXXXXXXXXXXXXXXXXXXKATGHPAGEQPRDGVQVK

SEQ ID NO: 3810 - protein, 378 aa, Microcystis sp.
  misc_feature (277)..(296): Xaa can be any naturally occurring amino acid
MKARYQYRLYPTNQQKRLLSQLFGCVRVVWNDTLAYCQELYQQGEKKPKYTELSKRLTQIKKTEEKNWLTEVSSIPLQQSLRDLETAYSNFFASCKGERKGNKVKPPKFKKRKSKQSARFTDNGFTINQHHVTLAKIGDLKVVWSRPLPSKPSSVTVIKDAADRYFLSFVVEIQPETLPDNEQAVGIDLGIATFATLDTGEKINAPKPLKKRLKRLKKAQRNLSRKQKGSKRREKARKRVAKIHAKIKDTRTDFLHKLSTRIVRENQTIVLEDLNTXXXXXXXXXXXXXXXXXXXXRWEPTSQRCSCCGNIGGKKALNIREWECLFCGTFHDRDINAAVNIKVAGGHSETLNGRRGKRKTSVKEAASREASTPLTRPF

SEQ ID NO: 3811 - protein, 366 aa, Pelotomaculum sp.
MIINRAYRYELKPNISQRILLAKHAGCARFAYNWGLARRIELYQAEKKSTNAMAQHRALNKLKQTDFSWMYEVSKCAPQEALRDLDRAFKNFFTGLKAGEKIGFPKFKKKGVHDSFRLTGAIKVEEKAVQLPRLGIIRLKEESAIGGRILSATVSREVDRWFVSFSCEVAIPDPEPVFGDAVGIDVGLHHFAAMSDGTKIEAPKPLGKYLKRLKRLSKKHSRKQKGSNNRKKSALDLARLHRRIRNIRQDFMHKLTTELAKTKSEIVLEDLNVRGMLQNDRLSRHIADVGWGEFRRQLTYKTVWYGSVLTLAPRFYPSSKTCSCCGHVRDSMPLSIREWDCSSCGAQHDRDVNAAVNLKKYTRSLA

SEQ ID NO: 3812 - protein, 126 aa, Pelotomaculum sp.
VAENTAAGSQIMGVDLGLKVPAVAVLEDGKTRFFGNGRQNKFIKRKHRSVRRKLGKLKKLKAIKKLHDKEQRWMTDQDHKISRQIVRFAQENNVTTIRLEQLSGIRQRQEQAVKTKRICIPGAFID

SEQ ID NO: 3813 - protein, 366 aa, Pelotomaculum sp.
MIINRAYRYELKPNVRERILMAKHAGCARFAYNWGLARRIALYQTEKKSTNAIAQHRELNKLKQTNFPWMYEVSKCAPQEALRDLDRAFKNFFAGLKAGERVGFPKFKKKGVHDSFRLTGSIRVEDKAVQLPRLGVLRLKEETGIAGRILSATVSREADRWFVSLTCEVEIPEPEQVTGEVIGIDVGLNHFVSISDGTKIEAPKPLGKYLKRLKRLSKKHSRMQKGSNNRKKSALGLARLHRRIRNSRQDFIHKLTTALTKTKSGIVIEDLNVHGMLQNDRLSRHIADVGWGEFRQQLAYKTVWYGSTLIVAPRFYPSSKTCSSCGYVMDSMPLSIREWDCPCCGAHHDRDVNAAVNLKKYAISVA

SEQ ID NO: 3814 - protein, 421 aa, unknown
  TnpB Polypeptide
MANIGKRSALATFCIEYRRMLQVILDDVWENGYDYMTTKGEAAHFSVSENKLHAPLYIDYKKYSNLTFLTARALSSLTDQLCGILKAAVEKQRKRVYVLTTKKGTSRKGYRLLVRKIKTNIPQKPCVDNIRPELSSKCAEWIQEDNPDAEFDGFLWLKSIVKSGDEIILPVKFTKHSNKLKSLGGRMMGSFLIGQHNIDLRWSIPVPELRTEGVTVGADQGLKDVITLSDEQRAGKMDIHGHTLDSILDRMCRLKRGSNAMKRAQDQRENFVNWSLNQLNLTNVKEIRLEHIWNISYKHRTSVKLSHWTNTLIRDKVESLCELNGVRLTLSASTYMSQRCNACGRVRKANRKGKVYMCDHCGNEVDADLNAACNHALNLPEVPYTLWKLQLNRKGFFWNLNGFSDAEGRSLEFLPPVEQSA

SEQ ID NO: 3815 - protein, 408 aa, unknown
  TnpB Polypeptide
VSNLTKTIKIRIHVTPEQEILFRQMTEQYRQACNFISQYVFDNGFELNSNAIQKVLYKDIRSLFGLKSQLTTSSFKTVTARYKTVKTQLSQKPYKYKNEDGNWQYIPKTLEWLWKPVFFGRPQADLVRNRDYSFVDDGQVLSINTLGKRTKCTFEGEHFAEYLDGSYQLGTAKLVELKGRWYLHIPVTKAVEDFQKENVRHVVGIDRGLRFLAVSYDEQGKTEFISGKKIATKRHKFQEVRKQLQAKGTKSAKRKLKAISGRENRWMSDVNHQLSKTLVQKYGKDTLFVLEDLTGVSFEESNLSRTAKQNYDLRSWSFYQLEQFLTYKAHENRSEVLKVSAKYTSQRCPKCGTIRKANRDHHKHLYSCQCGYKSNDDRIGAMNIQLLGTMWISGDPHPRYERIITTLE

SEQ ID NO: 3816 - protein, 392 aa, unknown
  TnpB Polypeptide
MKRAYKYRLYPNKTQQVLLRQTFGCCRFVYNATLDAKIKAYKTDKTSLSEFDCINLMTGLKSDYAWLCDIPSVCLVQSVRDMYSAYRMFFRTRQGFPKFKSKHRSKLSCRFPGQSCSVDQETHHVKLLKIGLVRYKQDRVFKGQLRNITVSCDGCGRFWASCLVETGVQEPKPEPLTSQSKCVGLDLGLKDFIVTSDGRKIPNPHFAEVLDRRIARLQKIESRRQKGSRHRASIRLKINKLYAKKRNLIHNFIHHIVNDILGENQAIFIEDLNVKGMMGNHRLAKSIQNICWSEFVRVLEYKARWLGRTVMKIDRFFPSSKTCGCCGYKNDSLTLKDRSWTCPACRTVHDRDFNAASNILRGGLARILPSVGRFDGRGDGGYEVGEAPICAV

SEQ ID NO: 3817 - protein, 282 aa, unknown
  TnpB Polypeptide
VTAGVPVASYETGTGPDPDKVAGVDLGIIHPFALAGPDQGLLVSGRAIRAEHRLHLADQKARARALSKRAPTKGQAGSRRWRKSRARTRKLEEAHRRRVTQATHEGARAVVDVAVAAGIGTLVVGDPRGLLDKDAGRRQNLAVNNGRPGQAIAALSDKAARAGIGVELVDERGTSSTCPNCRVKVAKPKGRRFSCAACGLVAHRDVVGAANIASRGSRGGESFDPSGLELMHRRAGRHLPGRTRRDPRRVEMDHRRDSVGPWPAVARPEPLGESLDRDAPAA

SEQ ID NO: 3818 - protein, 282 aa, unknown; identical to SEQ ID NO: 3817
  TnpB Polypeptide

SEQ ID NO: 3819 - protein, 395 aa, Cyanobacteria sp.
MKSFKTELHLNNKQRTLIGKHAGVARHAYNWGLATCIELHEKGEKRPSAITLHKRLVAEVKSQNEWYYEVSKCAPQQALRDLERAFTNFFTVKIRGFPRFKKKGVNDSFYLEGNIQIKGNQIKLPRIGWVKTYEKFLPPILIKSHSNVTISRQADKWFISYKVDAEPQPIDHPKGCVGVDLGVKTLATLSNGMTFPSVKAYRKAKKKLASLQRNVSRKVKGSNNRKKAIKKLAKAHYQVACIRQDATHKLTSYLAKNHSEVVIEDLNVSGMLKNHRLAQAIADGGFYEFRRQLEYKCQWYGSQLTVVERFYPSSKTCSDCQEVKKDLKLSDRTFICPSCGFFLDRDLNAAINLSKAGSSPVLACGVSNKRNTSVKRTPRSKKKASNYVQLTLSLS

SEQ ID NO: 3820 - protein, 369 aa, Staphylococcus sp.
MLRAYKVEIQPNQEQIKTINKTIGTCRWVYNKFVEINQIRYKNKLKYMSGYDFSKWLNNYFIPNNPDKLWIKESASKAIKQSIMNAHRAYQDAFKKQKGFPKFKKKQSNGSYYLIGTIHVERHRIRLPNLKWVKLKEKGYIPNKNTKSVTVSKEFDRYYISILVDEEPKTIFKSLQTEGIGIDLGLKDTLFTPEGVKITDLRKNKKLVKLNKSLKRQQRKLSRKQKKSNNWFKQLLKVQRLYRKISNLKKDIKRKSILSIIKENPQYITIENLNIKGMMKNRRLSNAFQQIGLGYIVEWFKWKCYEYGIELRQVDRFYPSSQICNQCGNRQKMPLNKRVYKCENCGTIEDRDINASINLKQAKEYTVLV

SEQ ID NO: 3821 - protein, 365 aa, Pseudoalteromonas sp.
VILIAYKYRVYPNNEQALMLTHTFGCVRFAYNSALGYSKEQYDLGNKTNYNDWSKNLTQLKKNPDFAWLKDVSSVPLQQALKHLDKGFKSFFKSGFGYPKFKNKQGNQSVSYMSNGFKWEADKQSLTLAKMKQPLKIKWSRSFTGKPSSLTVSKTKSGKYFISILVKEDIKKLPVANKTVGVDVGIKDLAICSDGTKFNNPRLTNKYASKLAKAQRKLAKKKKGSNNFNKQKRVVAQIHEKIANSRKDFTQKMTTKLVNENQVIGIESLKVKNMVKNRKLSKHIHDANFGEIVRQLEYKADWYGRKVSAISQWFPSSKMCNECGSLYSGKWSLAIRTWSCECGAIHDRDHNAAINIHNEGLRLIA

SEQ ID NO: 3822 - protein, 391 aa, unknown
  TnpB Polypeptide
MLRRYQYRLYPTTDQRILIAKHLGCCRYVYNWALDLKNQTYHDEGISLSRYDLMNQLPALKEKYPWLKEVNAQSLQQSIHHLSRAFTNFFEGRAEEPTFKKKHDPEQSFTVPQSYTVDFKGRSVRLPKISAIKTVFHRTFTGKIKTATIIRRSTGRYFISIVVEDGQKPPTAADPIPDQTVGIDIGLSHYAVLSTGDAVANPKYLRNAQARLTVLQRRLARKQKGSKNRNKVRLKVARCHQKIADQRRDFQHQLSSRLVRENQALAVESLNVDGMVKNHKLARAISDAGWGTFLSMLGYKCQEAGKTLLKIGVFEPSSKTCSICGYRKADLTLKDREWTCPDCGTTHDRDLNAAINVRNFALAGAERAEEPVDSLPLGRGMKQEAPCGSGG

SEQ ID NO: 3823 - protein, 424 aa, unknown
  TnpB Polypeptide
VKVRKAIKFRLYPSKRQEKLLKDVLGTCREIYNSFLHWRRYDCDLFGTSPSRYDQQAALPLWKGDHPELSSVHSQVLQDVCHRVDLAYESCFDRLADYQMRQAQGRLKITSGEVEKCPGPPRPKGKGCYDSITYAQASSFTVGEGCISFSKLATIKAILHREIPGVPKTCTIRRQSGKWFATISCEVEQGLLPVSDKSIGIDVGLETFATFSDDTPPIENPRFFRTDQKALAKANRKFDKVKNKHRSPPRRKAKRTVGRIHERIRNRRHNFHHQEARKIVNVYDIITVEDLSIANMSKSPAPKRDADTGKYLPNGHAAKAGLNKSILDAGWYSFRMILKSKAESAGREFYEINPAYTSQDCAQCGHRPPKEKRKKLSDRWHKCPQCEYSVPRDKNSAVLQDKIGVGLHTVRHRSIEAPRFIAGE

SEQ ID NO: 3824 - protein, 391 aa, unknown
  TnpB Polypeptide
MLLSKKIRIEVSAQEAEALEFMQGKCRGLYNWWIGKLRNGERWNLERAKKSLRESKVFDPDLRFVYGKLLAEVYFHLDKAMQAFFKRVAAGAEKPGFPRFKPRHQFFTLCYPAMYLEREGNTVILPTGGGRNWGPKRYPNIRARLTETPPQHFREVAVSRDARGNYYCSFVYENTEQQVSEHGIVAFDLGIKTLATGYTDHGRFYHIGGFKPYRWYNKQLDKIRSKRDKCKKKSRRYIHLSRVYKRVSEQKRNKHRDCLHKASHLIAGRLAERAVVIGDLSQRQMVIKKKEDETPKERRKRQIRNRMVYNDWGLYSFVQMLKYKCLRFGKELHIISERGTTKTCHGCKRKKDMPLWQRTYRCENCGLVMDRDENSAINIYQRFLARLGPHT

SEQ ID NO: 3825 - protein, 383 aa, Nocardiopsis sp.
VKIVVQVKLLPDSAQEATLWETLKLCNQAANRASRSAHESGVKAKTPLQRLVYDDLKAMGLSAQPAIHCARKVAGAYATLKANLKAGNHGCEGSKRRTRVENTPVRFRKDAAQPFDDRCLSWQIDARTVSIWTVHGRVKGMAFACSPDQAKVLTEFRKGESDLVKRGDNWYLYATCEVPEADEYTPEGFVGVDLGIANIATTSDGTVHSGKQVNQVRHRNRHLRRRLQKKGTKSAKRVLRRLSGREARFAADTNHRIAKQIVTEAQRTSRGVALEDLGGIRKRVRLRKPQRVTLHSWSFAQLGAYIAYKAKRVGVPVVYVDPAYTSQGCSACGHVDKRNRPSQATFRCTSCGFAGHADVNAARNISSRGVAGWAVSHAADDAA

SEQ ID NO: 3826 - protein, 424 aa, Nocardiopsis sp.
MRTAYKCRAYPDPAQAAQLGRTFGCVRLVWNKTLADRHTAYHQHGEKTSYKQTDQALTGWKKTPELAFLSEVSSVPLQQTLRHQHSAFANFFAQRARYPRFKNRSGRQSTHYTRSAFRLRDGALFLAKHQRPLKVAWSWPETDLAALDPTTVVISREADGRWYATFSVDTDDPDPVPDTGSEVGVDLGVKDFATLSTGEKIANPRHLERKARNLKRYQRRMARKVKGSNNRRKAKRRVAAAYRKVRHARQDFLHKTTTRLVREHDLIAIEDLNVRGMTSSARGTVVQPGRNVAQKRGLNRSVLDAALGEFRRQLEYKAERYGRTLVVVDRWYPSSKTCSKCGYLLDRLSLGTRSWTCPSCRTRHDRDLNAAKNVLAAGRVAAREAVSGDACGAGVSRQGASLPLSAAKQETGPVRVAARAAPGF

SEQ ID NO: 3827 - protein, 189 aa, Nocardiopsis sp.
VPRAPAGRPDPSPRARPRPGRGTSDGRVMAGRQINRYRRRQLRLRQKLQAKGSRSAKRLPNKRLRREAQYARNINHQISKRIVAEAERTGRGISLEDLRGIRARVRQRRPQRVTLHSWSFHQLGAFIAYKARLKGVPVVFVDPAHSSRECAACSYTHKANRVSQALFVCRDCGVVAHAGRKSHVPPDHP

SEQ ID NO: 3828 - protein, 559 aa, unknown
  TnpB Polypeptide
MNKEVLKMLREKKSNSNFITVECLLAFDKDEDEGRVLSTMRKFSSMIRFAYKRLLEGAERKELKKLLSQKYGINTRYSGDAILLAQRALVSCVERGQNPKKIVFGSRKLFEKLKKKHLTGKRRDELRQKWEERRYGILYSRGDKSREGNINLRLVNLNNQWRLRVNLGNGEYVWTKVIRTAKRKTDKWTGFISSLEHAAKTGDWFPYTVRLKLKNGKIYAQFSREEKLPEVAIKKDNGVIGIDINAYPFHLAVVHTAKDGNLEKYERVSLDELLEGNSEKREYLSWQVAHQVVEIAKRERKAIVVENLERLPKGKRGDGLPKLRQKLQKWAYKGLLQKIEIVARRNGIQVIKVNPAYTSIIGKLKYAPLYNIDKDTAGAYVIARRGLGFKERLPKNYRKLLEDNEFLSYSVAIVEDRIAKLRKEIGEEKNEYKRSKLRSDLRRLKEKLKLLLRSLLDSGESESAAQQAVNRELKPMRGMAQALQKSWQVLSVALAFSCLESFRDFSPLKRVILTRDWVGVAKRASPSLPGQGTNALNMYSFVQFCTVWVTRVIRIIPNS

SEQ ID NO: 3829 - protein, 391 aa, unknown
  TnpB Polypeptide
MITSINVRLHPNNKQLTKLFQYAGCARFAYNWAINREQENYKQGNKFLSDNDLRKEFTQLKKREDYKWLNNISNNVPKQAIKDACNAYKRFFKGQSKHPKFKSKKHSDLSFYQDNVAIQFTDTHVKVEGFAVSKKRNKQLLNWIKLCEKGRVPPNSKYLNPRFKYDGLHWYVSVGIELPDSTDIPTNEGIGIDLGLKDLAICSDGYTYKNINKTHKVRKIEKRQRRLQRSVSRRYEKNKKGERYCKTRNLIKRQKELLKVTKRLTNIRRNHLYQTTSDIIKRKPSFICIEDLNVSGMMKNRHLSKAVRQQSLYEFRRQIEYKSAWNHIPVIIADRFFPSSKLCSCCGMIKKDLKLSDRIYKCECGNIVDRDFQASLNLKVYGENVLRQSMT

SEQ ID NO: 3830 - protein, 402 aa, unknown
  TnpB Polypeptide
MDESTRLEKNRRIAQSQKETRERRKNKDILVRTVKIQRNKLSRAQLEALERLFLEGKWFYNTALAHGRFDEEFRRSLDNTVEVKLPTGEIERRQLTVLGGQIQQGILARMRDNLKGLKVLKYHGRKIGGLRFISEMTSIPLKQFGGTHKIRGSKVKVSNVPGWMRVNGLSQFNMEHDDFANAVLIKRGHNFFVAFTVYREKAEHSSLATKMFVPDTTIGLDMGVSTHITFSDGSTVNARVEEPDRLKRLSRKLSRQQKGSKAFAETKRHIREEYEKVVNRRNDAANKVVSWILGHEHVFMQDENISSWRQRSSIARGSRAIQYGILGRVKTKLIGHPRVTVLKRNVATTATCVCGVKTPHDLSQREFECPSCGYSAPRDIHAARNMFLLATPDNIKINGYGT

SEQ ID NO: 3831 - protein, 406 aa, unknown
  TnpB Polypeptide
MTKNEKIKQKRQETIERHKNMSCKVFCCKVDYSHLSKAKKEHLKRLFLEAKWLRNYLISQEDIFKETYKHSVVTILNKDKEKEEREIRHLSSQMKQGILNGIKDNIKGLSSKKNKGKKVGKLKFKSRINSINLQQNNITYRLENDKYFRLQGFKGSFRVNGLNQIPDNAEIANAKLLRKESGYYLSVTCFIPKEERIKTGKEIGLDFGIKSHITDSAGNKYKWNFQDSRRSKRLQRKIGKTYKKGTKSSSNRNYRKHLNRLENERLFYKKKDTINKFVSNLKRNYDLIGIQNESIHAWHSSKRKGWGKSIQYSIMGGIISGIKRFPQTTVIDKWEPTTQICLSCGKKTKHELSERMFHCPRCDYVEDRDINSARVILKISKGLRNTMPGENLTNTGEYPNGYSLAS

SEQ ID NO: 3832 - protein, 435 aa, Archaeon sp.
MTKQKQKEKKEIKIAYQVPVSSRITRRKKTILEDIINRFPKMVQWLLTIYYKEDMSFSEKSITHSRKLVKELAYPTKSHGTPYNCKRAVYGHHSHFYDTAITESIQKWSSFSTWKEKRKKAGKETGKQFPDIESYAPLFDSTMFSLDLENEWVILHTERGKENIYIPITVPNKKRYKNLEQEKIKSLRLKRNKNDELVFIFNQTVMCSSFSPSSSSSPEGDNPSPLALVGMDLGERFLASSVTITPRNQLSKIEIQRVRFHDSSELRETNRKEMEIRKNLQNKGLGSEIPKMSWSYQNKKQERVREIVDEETKWIQKLIENNREVYVFVGDLSTPTPPNRGSLSRRLNSFPYRELKNQLKHRLKREGAHVHLVNEYNTSKTCPSCGSTDTDRVNQARFKCLSCGYRANADYVGAWNIVGRGISQLSIPELEGAVP

SEQ ID NO: 3833 - protein, 665 aa, unknown
  TnpB Polypeptide
MKKSKPKVKEKNKEEENFDYMKTNKDNIKNVLKDQTILPIISDLVNRTNKIVIHAYQFIKLYCIFLYENKLKFPVIDKEFICDVFKVLTIRKCGSGGYTENNMPEQLQELTEFYREHYSNTISNNETIYYDKLSYVLPYEAIDMITNINNNIQEHFIDHLNKYVNIVFSIKEKSAKITTETKDKIIRKQLHKQVYDEIGKVKKDLMNFGNLTSDEKYHKWIIQERIKLYPNKTKFDNDNIYYDLKSNTQDFLHSMFHISIELEKLNEIRIQNEEKQIRLFNVLPLRTNIISKNICIDTCGLISNFLGDEPTTKHLRDYKKDNNQVNLWNKFFKLNKRVFKKGQKYTFSHMIRTDGVSCCVLFVRVDANGKPLPKTWKNKKCCEEENIDYIEKVELTEELKNMKVVCADPNYSDLIYCGSKDEHGNLQTFRYTQNQRRLETRLKKYNKIIDKINKETKIENKSIKEIETELSLLNSKTCDYEKFIYYCIEKNNINYKLYSHYEQTFFRKFKLNRFTNTQKSELKMVNNFSNKYGKPDKTIFVMGDYDKGDYHMKGKEPVICKKFRRIFRNAGYNTFLVNEFRTSKLCNCCNGELEYFLERPSQKPKLKKENKTEICHGLLRCQSVKHKSEIFHNRDKNAVQNMLNIVKSVFDTGKRPNIFCREINS

SEQ ID NO: 3834 - protein, 370 aa, unknown
  TnpB Polypeptide
MCADLYNACLEERIDCYKKTGKGRSYYDQCRALTEVRADDPEYESISVQVFRGVVGRIDKAFQSFFRRVKAKEKAGFPRWQSKYRWHTIEINDQCWRMLKSEGDKTVLKIKGLPRIVVKPSRELPPNGLLKAVRITRKPLRTEVALSYKLPDVETVKGTTRPVGIDVGISKRLALSDGEKVAKREIDRKKLVRLQRSMSRKVKGSNNRRKAASLLAKEWQRVTDKERNYLHRLTAELVKMYDFIAVEKLETKNMLRNKQLAKNISEQAWGRFITLLNEKAESAGVKMVRVNPKNTSQKCSSCGATVKKNLSVRTHKCSCGLEIDRDLNAAINILHRGISIAGGNLSRMVGRMETKQGSGLVRPRTVEVTV

SEQ ID NO: 3835 - protein, 534 aa, unknown
  TnpB Polypeptide
MDITRKKYDVLYNFAVLIRNHKNTVSQYVNDNLFHYLDCRKFQFLKEIRERFKGVISSSFYDRLYTDVFTCYQNKFDAIQRKLKFEVHEFNGFEFYQRDSKNHKKGELKRILIKKKQTHLSNCLTYLIRYGNENIIEYIKGNIDKCDNKKREFYNNILRCCDKFGFDRLYNLALSKRKRILNHYAEHPIEFKSLSFGGRSRKKYIVDFNKNFGSKINSFISLSGFNRKTLDIPVKYHKGYHGNMRDYRKDNPEYEYVITFDEKNHQVKVNICKDGERYIPEPNGKTIGVDVNCKHNLFSLSNETTYDYDRKLVNDYCKLLRDIDNLKSKDKDYSIGKRKQRKLDKLKEKVIKFEQQTISTMCKDLKANGFGHIVMENLDNGFGKCYVTDNDNENVNYNRKVKFLGLSSLKQEVEHIARKYDIAVSTVHSSYTSKMCPVCGCIDDGNRPTQESFKCIECGHKDNADFNAAKNIRNRVLVTVLREKLLKQLDNGAYEPKTLKREKVKDVLLSFRRDLQKFARNKCIESSLTTFEYI

SEQ ID NO: 3836 - protein, 447 aa, unknown
  TnpB Polypeptide
VIVHQAYRFALDPTRRQQGALASHVGGARFAYNWGLELVKRRLGERAAGQDVEVPWTLPALRREWNEAKAAVAPWWADNSKEAYSSGLDALARGLRNWADSKQGRRAGTGVGFPRRKRKGHGRLACRFSTGAIRVEADRHHVTLPRLGCLKTHESTRKLGRRLEQGTARILAATISQQGGRWFVSFTCQVQRVQRCPRRPAARVGVDVGVRHLAVLSSGEQVANPRPLAAALRRLRRINRQLARQRGPRAPDGTLRPPSAGWRTTQRELARRHARVANLRAEALHQLTTSLAAEYGTVVVERLNVAGMVRNRQLARAIADSGMGQVRRLLGYKCRWAGGRLMEADTFFASSKTCSGCGTVKAKLSLAERTFRCPACGLEVDRDVNAARNLAALVDGIQQIEQVVAGSGPETVQNACVRDCQPTGIGGRSGSSDIGREAAGSQQSIRM

SEQ ID NO: 3837 - protein, 414 aa, unknown
  TnpB Polypeptide
MNVGKNYPKTINMLKAVKIKLYPNKTQQVYISKLLGCYRFVYNKCLDKKKSAYVNNKSNLGLNELGNYFHQDLTKSEDHKFLTEHNTKVLKQSILNMLDSYKRFFINGSGFPKFKSKHNNKQSCRFPLEAISHKNDYQSGKLMLTTQLKNLKFRCSNKDKNYLTKYKDGIKSATLTKTKSGNYFLSILVEGLIERQLPKAQNDIIGIDLGIKDFIISSNGKTYENIKIKRNNEKKLIKLNRQLSKKVNGSKNKNKARVKLAKYYEKLNNQKENYLHWVSNQLLNENQIIAMENLSVKNMMSNHKLARSIQELSLNHFKSMLIYKADWYGRYIVEVDRWFPSSKLCSNCGYKNDELILSNREWICPICKTHHNRDLNAAKNIEKEGLRIIGCRTSESTLEDCHNIDRLKQEILND

SEQ ID NO: 3838 - protein, 308 aa, unknown
  TnpB Polypeptide
MDIAFKKFFKGAGFPKFKSKHKGRQSFSVPQNVIVENSLLIIPKFKEGIDIVLHRPIKGTIKSATISVTPTGKYFASILVDTNEIAPPKKPINESTTIGLDLGIKDFAITSGGEVFENPKYLRKAQSKLKYVQRKYSKYKGKKTKKKLALLHEKVVNKRKDFLHKTSTKLIRENQTICLEDLNVAGMVKNHNLAQAISDVSWSTFVTMLEYKADWYGKNILRIGRFAPSSKTCSCGVINKDLKLSDRTWTCKSCGVTHDRDILAANNIKTFALKNILSGTDRKNQGKLPTLVGALTLEAHPIASGVGG

SEQ ID NO: 3839 - protein, 374 aa, unknown
  TnpB Polypeptide
MPIMKTAYKFRMYPNKQQEAMLDVTLETCRHLYNTALADRKNCYELEGISRSYEDQAATLTLEKKEGKWQGVFSQVSQDVLRRVDKAFKAFFRRVKSGEKPGYPRFKGEGWYKSFTYPQAGFKIEGSKLALSKIGSIRIFKHREVEGKIKTCTIKKDHLGHWYAILVSEIEDIPQVEPKIAIGVDVGLKSLVAISTGETIQYPRYYVQSQAKLAVAQRNLSRKKKGSANRRKAKAKVAKISQDVQNHRDEFLHQVSRKLVDSADLIVFENLNISSMLKNHHLAKHIQDHAWGKLIQFTQSKAAKAGKIVELVDARYTSQKCSQCGTIVPKTLADRTHHCPKCGLEMDRDLNASLNILTLGLRGRAYRDTAKADQ

SEQ ID NO: 3840 - protein, 453 aa, unknown
  TnpB Polypeptide
MQQIITAKLKLITASEQFQALRETQLAYRDALNAVSSYAFEHGKTSSNITLHKGMYAELRTHYHLPSQLACSVERQVAATYKGLWTKLKKNAEHRRKKMTKKRFKGLDKPPKYSSPTVQYTYERDYTFQRNQQVSVGTLHGRITIPYQGYDKHLALIRQGATLGDAKLWYDRPKKRFYLLVSLTIDLASPTPAQLNEVVGVDVGIRYLAVTSTEIGKATFHSGKRVRHKANHYARLRKRLQQKGTRGAKRRLRRIEQRERRLKLQANHSIAKQIIKQHPHALIGLEQLTDIRERTKRRKRTHKKNGKGTERVSVKARKANRVYSQWSFAQLHALIRYKAALSGTLAINVDADYTSKACPMCGHTAGENRPRKGLLFVCQNPLCRYTLHADLIGARNITLRTLLVRQDWTRTGCLSITPDTSDNEAKAARLRRYAELRWSPDGTSLRLEAGGAD

SEQ ID NO: 3841 - protein, 499 aa, unknown
  TnpB Polypeptide
MSRATKTISQQLDYRPEIAGWFEETKVLFNKVAAFYFDVIEAHPEVLKLDGNGPRDALEHLTHRTKANPDPKIPLTAVADNVPALMRRTAIKVTLGAAHSFHSNLARWQREKEQTLDKGKKFRKRPPVPPHRWNKSVTFYAGMWKERTATGILLKLWTGTSWCWVKLHVLGRELPEDWKAGSVQVVQHGKRWWLHTFVEKDVSIPATVKEQVMSTHDMRVCSVKLSVNETLAVCTIQTREGTALATRFIGGGHRLNGLRKSLLGRVARRRADTGLIALGEADNAHLWSKVRNLDEYEAHRISRRIVEFAQVNGAAILVFEYLPPRHLKKGTYSQRENEKRASWLCSKIYRFCRYKAWAEGMVTCQVSSRQNNLECANCKSLVARYSEGQAASGYTPGAPLVHCEKCGMHGNTDRNASLNIGRRLFARYQKQEKPQTRPLAGRLSKERGVPFSKFAKSGKRPRTEPARQGEWDGHGTAQDQRCGVARAGQVFLAQYDPEE

SEQ ID NO: 3842 - protein, 368 aa, unknown
  TnpB Polypeptide
MILSLKIRLKLTEEQEVLCRKSVGVARFIYNLMLSENNKIYKEYLLNGKQGTAPFISGYGFSKRITVLKKTEEYSWLSEVSAQVAVHSCIDCDTAFKRFFKGLSDYPKFKKKGTNNSFYVKYNSIKATQRGFKCEKLGEIKTSEPIPKVNKYHNPRIIYDGKYWYITFGIDVPEKVNENNSGKILGVDLGIKTFATISDGTVIPNINKSKNSKSIYKRIKYFQRKLARCKKGSNNRINVAKKLKLLHRRLRNIRSNHIHQATAMLVKTKPIKIVIECLNVLGMLKNRNLSRAISQAGFYEFARRLEYKCKLHGIEFLTADRFFPSSKLCSKCGCKKDKLKLSERIYHCKHCGNIMDRDLNAAINLSYL

SEQ ID NO: 3843 - protein, 387 aa, unknown
  TnpB Polypeptide
MELRMYQYRLYPSRKQTELLFNSFKTCKTIYNELLELSIETYKTSGKTLKCYDYNKHLTGKHRELHSQVKQNISDRVYKSFQNFFRRAKDSLYKKKGFPRFKSSIHSITYPQSGFKFISQRRLHVSKIGNVPIVLHRIPKGKIKALTIKRNKAGQWFAIFSCEIDIKPVKHKSKEQVGIDVGLEQFATISNGIAIDNPRHIKKAEERLNRLQRRVSRKIKGSKNRRKAIHLLAVQHLKVANQRTDFLHKLSKEITQKYGFIAVEKLNINGMVKNHHLAKHITDASWDTFIRMLEYKAVTSGSRLVKINPRNTSKTCSKCGAIADISLNQRQFNCPACGFVCHRDLNASINILKVGRDSPEPNACGHGVRPSHLKAVVDEAGTTQGNI

SEQ ID NO: 3844 - protein, 118 aa, Burkholderia sp.
VRRFDYIVVGNVSAAKLARTRMAKSVYDASWSSFRNKLRYKAMAHGATFEEVDESGSTQSCSSCGSKDSTTRPKGIAGLRMREWACDGCGVVHDRDTNAALNILRCGRASPGVGITCL

SEQ ID NO: 3845 - protein, 385 aa, unknown
  TnpB Polypeptide
VYKGYKIRIYPTKEQIQSLNKHIGHCRFIWNYMLETQIKRFENKEPRLKFSKMANLITSLKKELPWLCEVSIHSLQNICRDLDTAYDRLFKGTSKRPKFKSKRKAKPGFPVSCDKHIFYFKDGLVQVPKVGKLKYKADYPNLDLEKVTAFHNVRISFVNGKWILSFSIEHENQVLKENEKHGSLGIDLGVGRLAVVAYEGTKREYININKTSVVRNLNRKLTHVQKVLSRKYEAAKKAGKDPKEKSNQILKYEALLKRIYHKLACIRLNQRQQITRELVNLHPERIVVEDLNVRGMMKNRHLARAIGEMGFYDFINILSYKCEELGIELVKADRFYPSSKTCSHCGCINKGLKLSDRIFICPDCGFVIDRDYNAAINLMNYSNSL

SEQ ID NO: 3846 - protein, 355 aa, unknown
  TnpB Polypeptide
LSAASRQEINKQIGTACKSIKSNIKAGNIKHTKGLSFVSEVNSVAFRQFGNSWKFDGTKIKLAGLKKPLKVFGLEQLNIDGIEFANARLVQKPTGYYIQVTCYVPKQERQHNYQTIGIDFGCETSFTTYVEETKESRKLNYCFEQSENEKRVQRKLSRRRSRKFSNRTNKGLRLTKKNRKQKQKRSNQKKDATNKLVFWLKQFETVVIQDEMLANWQASGHGKKIEKGILGHVKAILKTLSNTFVLDRSLPTSKYCFDCFHKNDDLKVWEREFVCPSCGVITDRDVHAAQNMIAFYKLIQMVPMECRDPKRIKVSLIDIEKRVEINPSRSLEEAIRLVIQGLSMKHEATDAKTSW

SEQ ID NO: 3847 - protein, 318 aa, unknown
  TnpB Polypeptide
MFSMITKLKADGEHDYLKQVPIHTLQASVDNLLTSYDRFFAKLSGFPKFKSKHESKQSFTVRCSPSIIRNCRFDNNRVWIPNLKKLIKFKQHRKIEGVVKSYTITRESTGKWYISFLCQTVAPQKIERDGVVGLDFGVIDFFTDSNGNKVRARKFLRSMESKLKKMQRALSKKVRGSNNYKKLKQKIARLYDYISNCRKDANQKLSSLLVNENQVISIEDLAISKMSRNHKLAKSLLDEGWYQFTNMLEYKMKWYGGSLVKIDRFFPSSKTCSACGYKASKMPLNIREWVCPDCGCVHDRDINAAQNILTEGLRLLSL

SEQ ID NO: 3848 - protein, 408 aa, Halococcus sp.
VNCTYRFRLNPTPEQRERLAWTLDTCRQVRNHFLHRMNQLEDSSYTPEQNRLPKLKEWWIDLKSVHSKVLQMVVRRLYKDRSNLSKKAKKGYNVGKLKWKGVGDYFSFTYNQTGFELKKTSGRDRLHLSKIGDVPVVAHRDLPDDATVTGVVVKREATGRWYASLQLDTDTEAPPKPDEPERCVGIDVGILKYTHDTDGTAVGSLDLSDEQERLKHEQRVLSRKEHGSNNYREQQRKVARRHADIKRKRRDFLHKLSTWYAESYDLVAVEKLDTKGLLELPSNSHSRASAAWATFRKLMKWKCKREGTHFAEVRPEGTTKECARCGVETDKPLWIREHSCPACGFEADRDENAAWNVLQRGLDKLGMGCAESTPPETAVPTDTSFQQVSANRVVERGSPTLNERVSAK

SEQ ID NO: 3849 - protein, 339 aa, Halococcus sp.
MDYTLRFRAYPDDDTASEAWRHLDIHRQIRNHAVRDYYRADYNDCPTAYDQHSKLTGWKQEWPVFAEVSGHAAQRTVSQIHKDLQVLKQHRKNGHKTGRLKWQGAGEFRSVAYEHEGFNVNHTTGQVFGMLTLSKIGTVRFRAHRTVPATDDIKRVVLKKERTGEWFVCLTVDVEPTAKPDPAEIDTADCVGIDLGILSYIHTSDDLVVGCLDLGTEYEQYAREQRALDRKEHGSANWEKQRQKVARAKRRIKRKVLDFQHKLSTWLVKEYDVVCIEDLDVMPMLETSQSAKNKQDAAWSQFLALLEYKEGVIELLSHPDDRAPRIVSTLVVGDHDNES

SEQ ID NO: 3850 - protein, 408 aa, Halococcus sp.
VVDEYVRRTAVTRLSVRDEQRELLEATIDAYRDGCQIAADIAWPEKKSKRDIHPLAYDSIRNDTELTSQHAILATHQAAEAIASCHERRSKGLKTSKPVFTAPTVTYDTRTMTLFEDDTVSLSTVGGRIRCPLVLPEDDDGYQWQFIENERWEMTESTLTARDGAYYLHMGFRRFRTEREREANQETAEDGTVLGVDVGVNNLAVTSTGLFVSGGELTHWQNEYEKRRGSLQRTGTRWAHENIQSVGRKENGRCTILLHEASNVILEEARENDCTHLAFEDLTDIRERLPHATWHHRWAFRKLFAFVSYKAVEDGITVRQVNPQYTSRKCSYTDCGFTHVDNRDGDSFECLKCGYAIDADYNAAKNIAVKYAKKLRRSHMPSDGGVSVDIPLNSGSLTVEGSTTVVVA

SEQ ID NO: 3851 - protein, 468 aa, unknown
  TnpB Polypeptide
LAVAESKPSQINSPAEAYMQTATLKYRATASSHGYRQLEQAMLDMGNLYNALIRHRNTATGSHRRRWSLKLQNAHLTDLNRNDPVYNRYARRLLASAARRVNTSFSEYFKRPERGRPRTSSPYRLNTMEISEPAVGHLKLSEDGRKGYVHIKGLPRLQFKPNNRLPEGVQPRIIRITRTPSRYNVLLVFNQEITPEPAPNQSVGIDPGVKHLLTAVNQTGQVAQVPGLKDREHRKVMRRLRRKMQRQRDSALKDGRARFVSHKLSNSRTRRRFRWTDGPSHNYLKSLAMLRRVEQKRQDSLAGLQHRITSQLVKDHQVVCIEDTRISNMVRSARGTVDKPGTNVRQKSGLNRSILFQGWYGIRQKLEYKCQWYSRSLVPVPAINTSRLCGKCGSIDEANRRSQALFKCTDCGHTANADVNAAENIRRQGLNLLARAENRPSGRPGRAAGSPTGKQAHKAGLEALASRP

SEQ ID NO: 3852 - protein, 449 aa, unknown
  TnpB Polypeptide
MTDHNRQVKTTLRYRATASRHGYRQLEQTMLDMGYLYNALIRHRLTATGSHRRQWTLKLQNAHLTDMHRNDPVYNQYARRLLVSTAKRVNTSFSEYFKRPERSRPGTNNPYRFNTLEISEPAVAHLKLSKDGRNGYIHVKGLPRVSFRTDERLPPKEQPRIIRITRTPRRFNVLLVFNQEVARVPAPKNSVGIDPGVKHLLTSVNESGETTQVPGLKDNQHRKVMRRLRRKMQRQRDSALKDGRARFVSQRLGNGRTKRRYRWTEGPSRNYLKTLAQLRKVEQKRQDSLAGLQHRITSQLVKDHQVVCIEDTRISNMVRSARGTVENPGTNVRQKAGLNRSILFQGWYGVRTKLEYKCHWYERDFIAVPAINTSRLCGQCGSIEAGNRRSQSLFKCTDCGHTSNADVNAAENIRRQGLNLLARAENDPSGPPGRAAGIPKEKSAPGRKA

SEQ ID NO: 3853 - protein, 395 aa, Salinibacter sp.
MYLTRKFHIEGTEQLERLSRSSADLWNSICKWYWRTVDRQDHWISKTAMRRWHCKGHDVLPSQTAQEVAGQFYKAIGSWHDNDRKGNPPKRCDKTYNVLRWTYQSVTLREDGVLRLSTKRGEDSILIDWPAREEPRTVEIGKTSGGFVVRAQYDTEPVDRTTGDKVAGVDLGEKHLAAVFTGDDAFTINGGELRALRHYQNSLKAKLDSKIDRKERGSNRWKKLVETKRKQLEHIDSKITDLLHKLSRKVVDMLLDRCVSTIVLGDVRGIRDRIDYGTKMNQRLHQWVYGEFARMIEYKARLVGITVERIDEAYTSQECPQCGHRQKPSGREYSCGECDFHGHRDVVGAANIRRKYVGSDGQTRLPGVMASPSGVRFHPHLSCSSRSRRRTQSES

SEQ ID NO: 3854 - protein, 389 aa, Veillonellaceae sp.
MQRAVKIRLLPTKEQEILFWKSAGTARWAYNYFLTANEQAYKEGRRITDGEVRKYITNVLKKTTHTWLKEVGSNVMKQGVKDANLALQRYIKGISGKPKFKSRRKSKISFYVNYESLVRRPNGFQGEKLGVVKTATALPKLPKGRKYANPHISFDGKHWYLSVSYEVEQKKVELTGESVGIDLGVKELAVVSNQDASRTKFYKNINKSAKVRRLEKKLRRAQRKASRKLEANSKSRDKNHRPIWKRPLRECRNIQRQNKAIRLLHKKLTDIRNNHLHQITAEIVKTKPSQIVMEDLNVKGMMKNKHLSKAIAKQKFYEFKRQMKYKAEMYGIKVVEADRFYASSKTCSHCGHIKKDLKLSDRTYVCPVCGAKLDRDLNAAINLANYKTA

SEQ ID NO: 3855 - protein, 386 aa, Halomonas sp.
MTTVHRAYRYRFYPTSEQADQLARTFGCVRYVYNHFLRQRTDAWFERQERMGYNATAKALTTLKKQPDTAFLAEVSNVCLQQSLRHLDRAFSNFFKGQARYPTFKKKQRKQSATYMANGFRWRDGKLWLAKHKDPLDIRWSRYFSGTPSSITVSCDTAGRYHVSFLVEEAVTPLPVTPKMVGIDLGLTHRVITSDGDKIPNPRFLHRTERKLARAQRNLSRKQKGSQNRAKARHRVAKVHAKLADQRRDATHKLSTQLIHENQVIAAESLPVKNLLKNRSLAKAISDVGWHQLTQQLAYKAERYGRDFVQIDKWYPSSKRCFHCGHITEKMPLNVRTWDCPHCGTQGIDRDVNAARNILQSGKAILAGADKLRQHEKTTTVGLTGG

SEQ ID NO: 3856 - protein, 406 aa, unknown
  TnpB Polypeptide
MKYTEKYRAYPDREQERWVYAEFKHQKRLFNYMLQMRSQMYHYGGISVSKIDQINHLKKLREGNTYYSDHPQDMQVSTIKRLDQAYDHFFRRCKDPKEKKKGCPKFKGFVHSVTWELRKYTLKSGERVRQNPIRETGNQRHNLLKVPKLGEVKIRQHRPLRGDPKEVTLKKTARGWYCFIVCEVPDTLKCVPKSACGVDVGTKDFLTDSTGAPVPNPRFRQREEKKLAELQRQLARKEKGSKRYWKARNALAKQHDKIACQRLDSIAKTAYKLFHHKGFDAVVAENLDVKRMVKHKGFAKSISDVAWGEFFHWCQWIAKRDGKHFHTVPPEHTSKTCSNCCQRVKKKMRVHIRTFKCEHCGFEIDRDHNAAINILNRAACALRGSEVWDTILAETRNPLLQQACWG

SEQ ID NO: 3857 - protein, 384 aa, unknown
  TnpB Polypeptide
MIKTHKIALRPDRDQIAWFYQQCGYAKFAYNAAASDFKAELADGNFLSMYALKKRFNQKKKAIDWTQAQDQRAAMYTIHHLGTAIDNWQAKRAKFPKLKKRGCRHSYTTDEQSVRMEGKRIKLPKIGWVKTFEELRFRGKIVSITISRTAHRWFASVSVEVEPPIHRCPVSSECIDWFASHTDIGTPHQIERSIYPIIGIDVGISTLATLDNGTKYENPKPLRRYERKLAREQRKLSRQVFLSRNWYKQKRIVERLHYCIACIRKDAHHQATTDILKCASKIGIETLSVTNLLKNRKLSKALSDAALGGFLEKLKTKAKALDIPIVQADRFFASSKNCSTCGHKKADLVLSDRQYHCIHCGTSIDRDVNAAINLRTLAAGYAES

SEQ ID NO: 3858 - protein, 682 aa, unknown
  TnpB Polypeptide
VAPEVTQPWIDEAVLFVSRAMRAASMALNITLLDVLRKHNGRLPFEVDFTDHTLFNQLISVVVKGSDDTKKEIRFISEVKRIIAEYPRLFPAIKDLLNSRDIRHEARLTYQTSFINHHVLNIEQRMKTYIRVRLGPTTWNRVKKIHGLVYRLYGYVLNSNDELPCNRVLEEHYSWIHRIRKHYMNYKNLRDARYNKETPESLQTIVEFTYRLGCRVEQLRLIEEASQKDNPSTEDDNKPDDLRDIKEFQQKRSWSIAPIQSIKRHFVTFSATGLMLFFRTRMQTAMNTLDGKEIPWDMWSAARLKTTKKRKRGDSKPVYEIPESADLWPSIFKKDLFDLRKSKKVGWQFDQYVRTDGVSICCNFRSLYQRACSHKASSKKNKCGCGVCSGGDIPSQQPKQLVAIDPGCINLFYAVCKNEDGSYRVWKYRNKVYYDHGGKFRAREIAQKHLNRSMKAFKAMSKTRCKTIHFGDHLAYWRACAIHDTFLWLRLFTRIRAKMAFETYSRGMKTLDAFLKTLRDPEIAHEDFVIAYGAGLQTGTYNHAGTLSSPTSKAFKRTKRMYRTMLVNEDYTSQCCPHCSQRMVDKLVPWTFKDGRRGHKVVRSVKLCKSEECIERAKSDHVHPDVRQIAHQYGVCEVSRDGAGAKNILTCAECLIADGSRPTYFTRAGQADYEKQRGIMIV

SEQ ID NO: 3859 - protein, 442 aa, unknown
  TnpB Polypeptide
MPDFLVSGKSGGSRKEKLLQYNVVTSYRSLQERIKAANGESSKYVSQGWKRTANGAAPTYGEDYVNLGAVDKWYAAIENDPFSDGEIILKMVIQGTWHRLIFNFDNKRFTEGKVTLPVVKVQDGQPVFIFTVVTDNPVVQFSGDYVIGVDVGINDYATVVVRSVETGRIVHQTTLSQRVHSLWNSVRASQRQVRDLRKKAATLLHDRQARMAALDEAQLHREAASRKKRELAIMAAQEIADLSHTFDNAVVAVEDLGWIANTMQNGRWNRGELVKWLTHYISQNGGWVVAVNPSNTSQQCHKCGAKVSHPTHKDSVCPEHGSMDRDVNAATNIAARAVPRVVKARATRAKNRKLRPQAPLRTPVARTSLRYPGRDRTKKAPTPKRKSRRRTVREVNLPVCPARAQAQRLDVRVLADGGTYGVAGTSEAALKQDCVTYNCMLL

SEQ ID NO: 3860 - protein, 437 aa, unknown
  TnpB Polypeptide
MSSYEAVKVRLDPTPRQERLMASHAGAARFAYNAGLAHVKEALDNGEPADWSHYSLRRWWNANKDELAVNPTTGEVWWSQNSKEAYSGGLRDLAQGFSNWSKSRKGKRKGKRVGFPRFKSKNHAMRFEYSTGFTAPTAGDPYGLKLSRIGRVHCMENVYRRVAGAHIVRVSVSRRAGCWYASLTVGRESAAPESVSALKGGVVGVDLGVKNLATLSDGTVIPNPRALGARLKALRKAQQALSRKVKGSARREKAKGRVARLHARVADVRADAINEATTMIARNYSVVCIEDLHVAGMVKNRSLARSVSDAALGEFRRQLEYKAARSGAVLRVVDRWFPSSKTCSNCGVVKAKLSLSERVFNCDACGLPIDRDLNAAINICVAGSAPETLNARGEDVRRTNVLLGNADLGEARTKQAQKSAVRLGAGLGNEAMQPSVS

SEQ ID NO: 3861 - protein, 505 aa, unknown
  TnpB Polypeptide
MDLNGELLDAAIVMGCLASEIRDISAYATYVVRNDARLGSELAHITAPSPAEAGRQAGVTMPDFLYSGLTGRSRKERLVRHNVVTSYRSYQERVKVANGESSKYVSQGWKRTANATPPSYGEGYVNLGSVDELYALVENDPFADGEIVLKMVIQGEWYRLIFDFDNKRFTEGKVARPLIKVQDGQPVFIFTVVTDNPVVQFSGDYVIGVDVGINAYATVVVRDTKTGRIVHETTLSQRVHSLWNSVRASEQQVRDLRKKAATLLHNRQARVSVLDEAQLHREAASRKKRELAILAAQEIAYLSHVWGNAVVAVEDLSWIVNTMRRGRWNRGELVRWLTHYVSQNGGWVVAVSSFNTSQLCHKCGAKVAHPTHDVSACPEHGTMDRDVNAAANIAARAVPRVAKARVTRAKNRKLRPQAPLKTPVTRNSLRYPGRDRTKNKPTPKRKNNRRVPREVILPLSPARAQAQRLAARVLADQGARGALGTSRAAINWGNATCKCGLYSPN

SEQ ID NO: 3862 - protein, 390 aa, unknown
  TnpB Polypeptide
MVVRKVSQRIPFTPSKTQAALLEQCFGARRFAYNQQVEVFNAYDKETNPRPTYPNVTDMKNENEWLRDNPIPSNALSNAIQDFRKSQAAYFRKAQYGKNRPRFASKGDAVQSFRNCSPMRHMEGKRYPLSRKLGSVRIRRRDRIRYPLESLSSWTVKRENGVYYLVLLFGVDVQPKPPVDGQVGIDLGVKDFLTLSTGEKINYPDKIHQLEDRVRWEQRKLSHRVKGSSNYRKQKAVVAKANAKLRHYRENFQHQLSRRLIEDNQFIGMETLAVQNMTRRAKKKLDESGMPTRNGQSAKRTMNRSILRNGWSSLVDKLAYKSQWCGRTFVQVDRFYPSSRLCHSCGHKYDGLLLSEREWMCESCGTSHDRDVNAALNILGEALRLSQVTQ

SEQ ID NO: 3863 - protein, 398 aa, unknown
  TnpB Polypeptide
MLKTHKIALNPNNIQCRWFAQQCGYSRFAYNTALADFKSSLNNGKFLSVVELNTRFNVAKKEHTWTKGMDQVVANKSIFGNLSAAIRNWVDKRSKFPKFKKRGKRDAFTTNNQCVEVKGKNIKFPKIGWVKMFEKLRFIGKIIKVTISRTAHRWFVSITVETTENTEAVDTSTHPVVGIDVGINTLATLSDGTKYDNPRPLKRYERKLAREQRKLSRKMLKSNNWIKQKWKVTRIHYRIACIRVDAHHKTTTDIVSKASAISIETLKVTNMLKNRKLAKALSDSALGGFLTMLKTKAETHGIPITEADQFFASSKTCSNCGYKKNDLTLKERTYHCSQCGISIDRDVNAAINLKNVAVGHTETQNACGVQVRPNSSEDVQARETEAGKAVWQQQVLPI

SEQ ID NO: 3864 - protein, 434 aa, Selenomonas sp.
LHLSYHVKLKKTIAAHFDNTVYWYRRALDFYIDFCLEKWDLISGIRGIKYQIKFIEEQTIAVNARVLTVPDESNFKQQFPDFPPYLRRVAMRQARGLVSAYFKRLNKWNTMSDNNRSKRPGRPSAGKAYPYLYRKYMFQRIDLYRVKIKVYNNGKWEWCEVDLCRSDVNYIEKNCSDGKEKMPKLFRKGAKWFLKFPFEFDSKVMSVPLDKQIAIGVDLGVTNICTCVAMDAKGNIIARRFLHRGYANEIMASIGSKKRRNPQISIGNMIKRGRHQICKRAGKFILDFALEYGGNVVVFEKLDNRERSNKVFFTMSKKIQKMVERKCEIKGIKTEYVCAWNTSRYAYDGSGTVKRDKDNPSICTFKSGKVYNCDLSAAYNIAARYFIREIYNTLTEEDRRSIAAKVPKCVHRASSTLNTLLLMQAALADGASSH

SEQ ID NO: 3865 - protein, 379 aa, unknown
  TnpB Polypeptide
VRTYVFKLYHAKRNRRLHQTINIAGCIWNHLIALHRRYYRRYQKSLNVSRIQLHITKLKRTKRFAFWNSLGSQAIQDVAQRIDQAYKLFFRNLKHGLKTAPPNFRAIKKYRSFTLKQAGWKLLPGNRVVIMGKEYKYFKSRQVAGKVKTVTVKRDAVGDLWLFFVVDEGQVPVEVRSGEIVGLDFGLKTFLITSKGERLESPLFFKRNMELLKFLSRNLSRKKPGSNQSRKARLALARAYRRTANQRRDFHFKTALALVMEYAVVAVEDLDLKAMQRLWGRKISDLGHTAFLNILRWECSKNGSQLLKIDRFYPSSKTCSECGHVLAELPLSVRSWQCPTCASIHDRDLNAAKNIERVGASTLKGEDVRPDVSGCLCRS

SEQ ID NO: 3866 - protein, 353 aa, unknown
  TnpB Polypeptide
VRKFIERYRTLGSHLYWCKRLGLEPSKEVIEELWQEVPSYWRWNLLDQKSPLYLFKNVERTPLPYKTIIRLPLMDALHERKGAYIKGNRLILRLHKKLELKIPERALRWLEKRLAENPDRKYVRVFERDGQLVVQIVLHKLNKKIEKPRDPLLVVVDINSSYGIVVHFWDGKLIKTLKLRPPNRGNKWRHVKKLMSLRDNLYNQGCITQRQINIYDVLVRKTLSGSLKGWIQQSVALVVKRIRRIAKRHGKQPLVLIDVPEYESIHRTPLQRTLYSFRKYLENVLSWYGVYWEEVRLYSTKCPFCGSRMRLVEKTKRQRIMKCISCRFKEERDNIPLYWALKHLPALKDEASI

SEQ ID NO: 3867 - protein, 338 aa, Methanonatronarchaeum sp.
VKATKTIQSGLVNITKTKKDILNQEYDNLQKYLQDGEDVELYSANKQQAERYYNKIKEDREYPISIRKDLIDVQECETDVCDYYVNIPVKGRYGGVNVPVNTHDEIPDDAEICESKLYREDGRFYLNITVKFDVEPVEEYDGVLGIDLGLRNPVVGVALSVAEPSQEIFFKGNNIKQIQTRYSYLRRQTKNGKKWKDREHNKVRDKLHKLTTEIANYAEENNLIVVVGELTGIQKQDKGREMNRKLHRFPHHAIRKMLEYKCKDRGIEYREVSEAYTSQRCCKCGKKGVRKKGLFKCGGSEMNSDVNGAWNISKRALGKPEIRSMLGAGAPVTVPKTP

SEQ ID NO: 3868 - protein, 351 aa, unknown
  TnpB Polypeptide
VLRTYVRNDQYTIEYGERSRLEVPIGSDLKDEYGFGYRERLRLEVAGDPKWSGEQARLELVYDETAESFRAFQPVTIPASRLDSPLASHEAAPDVGANNLVACTTTTGQQLRYEGRDLFEQFRETAERIAHYQSLLEDQRKTSKRIDRLRRKRTNRRNHAQDALVRDLVERLHADGVSTLYVGDIEGVLSTHWSPVVNEKTHNFWAYRRFINRLESVCEEYGIAVADESEAWTSQECPGCGKREETIRHEDSLTCPCGFEGHADLVASESFLRRQTNAVGSMARPVYLKWNNHSWRGDHSPPSIAVETTANEEYTNEYRIEREYRSRGLGRLRLPPEEASPFRAGRMSTPR

SEQ ID NO: 3869 - protein, 806 aa, unknown
  TnpB Polypeptide
MAKAWIRDRWLKSKAVVDGVELTPTTGMKRQVAANPDTADVPAALRTADYGRGMRWQVCWRADGRQHRESLPTREAAEARAAELNDDIRSGRYVDPRGGNRTLDEVFPLWLADHTGVRPATIDNYIRHYNGMVRPRFGSTRIGDIDERAVKAWVADLDSGAIRTKYGEPYTKGAIKTGVRRLLGSMLRYAVRRRWIMADPTAGVRLPRAPMQRVDAFTPAEARAIADAAGKLRTPTGRPCGRPMDRLIVLHLASTGMSPGEMAALDVRDVDLAHGTINVDKTMTKAEAGHYRYVQGDTKTPKGRRRLPIPPFLRDGLEELVAGRDGGEPLFTSPRGERLLYAQWSKRVFRPAMAAAGIDPDGRTLTLYSLRHPKTKRCPVLQGGGGRSLPGRIEPNMETIRRYNYRAYPTRGQREALSRLFGACRYAWNWYLDQRKVAWWLHLPIPSYAELSRRFTEFKREPENKWLWMVSSGPMAQALRHAETAYSRAYAHKAGYPRYKSRHCGEQAATFTRSDRCHIRHERNSRWMFLRLPKIDGEIRLRWSRDLPSTPSSVTVMLHADGTYEASFVVKVEPKAPPKPRHNACGIDMGLESLASIVYSDGTREKVAPLRAMRKAERRLRKLDKELSRRKRGSNNYSKTRQAKARLYAHIGAQRRDLAYQLASRVAGENQAVAMETLCVKGLMRTRMGKSVADAAWSTFTDRVDALCAQWGRRAIHIDRWCPSSQVCSQCGRRDGPKPLDVREWKCPQCGAFLDRDWNAALNILDAAGLAESLNARGGDVRRRLASAGRNAIAREAGTHRTARLH

SEQ ID NO: 3870 - protein, 358 aa, unknown
  TnpB Polypeptide
MKINKAYKFRLEPNAEQQIILNNLVGSARFVWNQMLAISFEMFAKNEFINATNLVNKIMVLKNNPDFDFLRTHANAVSLQQKVRDLASAWSRFFDPKVHARLKENKKKFRKPKFFKLSDGTEIQLRQLMPRFKRKSDGCDSIRLVQFDKYCRVEGNRVKLPNGVGFVKFKKSQDIIGTIKNVTISKKSGHWYVSFGTERALSENPTHPSKSAIGIDLGITKLITTSDGQYIKPKNSFKANQIKLAKLQRQLSKKVKFSENWKRQNRKIQKLHNHIANIRHDYLHKITTAISKNHAMIACEDLKVANMSRSASGTMEKKGRHVKAKSALNKSILDQGWGMMVNMFEYKQQWQGGLQTVK

SEQ ID NO: 3871 - protein, 379 aa, unknown
  TnpB Polypeptide
MPIINRAIKYRLYPTEEQKVFFAKTFGCVRKVYNLMLSDQIKSYQNTGKFCKATPAMYKEKYPFLKEVDSLALANAQMNLQAAFSNFFGRTRKKKSGFPKFKSFKRSKRSYTTNNRNFAIAIQNNSIKLPKIKSVKAEIHRMPDEKWILKSATISQDRDGNYYASILFAFEEEKPTYKTDTNNAIGLDYASDGLYVDNNGNIGTNHKYYRESHAKLAKAQRRLSRMKGSKKNEHKSSNYLKQLRKVNKIHRHIANQRKDNLHKLSAEIANRYDVVCVESLNMKAMSNKGFGNGKATMDNGYGMFLPMLEYKLNDRGKYLIRVDKWYPSSQLCHACGTLHPEMKDLKIRTMRCDCGLVIGRDQNAAINILNEGLRILATQ

SEQ ID NO: 3872 - protein, 407 aa, Lactobacillus sp.
MFDIILKRKEGTNVLKGIKLRLYPNRTQQNQLEQMFGNDRFVWNQMLAMMNERYQNNKDLPFLGKFKLNYLLKPLKKEYPFLKNSDSSSLQVVNEFLTQSWKNFFQDKTGQIGKPRFHSRKYLKKSYTGKSIIKTAGKRYLKIPKLGYVKTSKTGVLQNTKIKRYTVLLESTGKYYLSLQVEISEPEKYSLTGKRVGIDVGVADLAILSNGLKYPSFDSSYFEKKAQVWQKKYARRRHLAKLLVLQDRNKKVLCPRSLESFANWQKAQKSKAKCQAKAANQRRDYLHKLTTHLVKQYDVIAIEDLKTKNLQKNHHLAKSIANASWRIFRQMLEYKCEWYGKKLIAVDPKNTSRICSKCGYNSGAKPLEIREWTCSKCQTKHDRDINAAINILHKATPTGQGLAMVTS

SEQ ID NO: 3873 - protein, 263 aa, Lactobacillus sp.
LKNSDSSSLQVVNEFLTQSWKNFFQDKSGQIGKPRFHSRKYLKKSYTGKSIIKTAGKRYLKIPKLGYVKTSKTGVLQNTKVKRYTVVLEPTGKYYLSLQAEIPEPEKYSLTDKQVGIDVGVADLAILSNGLKYPSFDSSYFEKKAKVWQRKYARRRHLAKLLVLQDRNKRVLCPRSLESFTNWQKAQKSKAKYQAKAANQRRDYLHKLTTHLVKQYDVIAIEDLKTKNLQKNHHLAKSIANASWRMFRQMLEMRMVWQETNCS

SEQ ID NO: 3874 - protein, 188 aa, Lactobacillus sp.
VTLTKDSADRFFLSMQLASDESFVKVSKATHGHVGIDLNTDNFLTDSEGNIVPNPRYYRTIKGKLAKEQRILSRRQQRAKKEHRSLRDSKNYQKQRLLVAKLHAKVMNQRHNFLQQISTALIKNHDLVVAEELRSKNLLKNHAWHLVFLTLAGEHFLACWLIKQSFMGVNLSQSTQEILPKHVAIVAL

SEQ ID NO: 3875 - protein, 408 aa, unknown
  TnpB Polypeptide
MKATLRLKLHTDASTQSILHETMRQYTACFNAVCRYGWESGERNGTRLHQATYHALRRQHQLLPSQLVVSARMKATEALLSVHECKKQGKKVSCPQSDLCAVHYDARSYWTKLQEGSASLATTCGRVVVSFRLPECYHQYLTWRTCSADLCYDARKKRFYLHVVVDTQAPEFSPKGQVVGCDLGIRRIAVTSTRQFFSSARMHTRARQHQHLKTQLQAKGTQSAKRHLQKVSRRWTRFQACTNHQIANAILARMQAGDTLALEDLTGIRERCKLRKGQRGLFHRWSFAQLGAFLSYKAERKGVLVIWVDPRNSSRTCSRCGYCDKQNRKNQSLFRCQQCGYTTNADFNAAQNLRQRGISSLARLLSESQSQPTAHSSSLAQAPEKALYDECRGETQRAASPQALAVGI

SEQ ID NO: 3876 - protein, 340 aa, Tenericutes sp.
MKAFFGSMRSKKSKKVKLPRYLKKDGFFSLVDRMVYKPNDHEYILPRGNFIKKISKDFEDISKQLSKHALSLLEIETLSLKIDTPKCISNKRIKEITIKEKYDGKYIEVIHVYEDDDVINEHKIKKEVMGIDFGYNNLAMCALTSGHHLSIDGLRLKSMNQRYWKRISKIASLRENQHVLTKRMIGLMEKRNHQMTYGIYKAAKLIIEHAKKENVKEIIIGYNEGFKDAKTSKKNNQWFKSIPIARLRDRIISLAEANDMSYQVINESYTSVASFIDQDAFHQKEYSGRRIKRGLYESKKGILINSDLNASLNMIRKCNPDALGTGFKGWNTPKRTYLFG

SEQ ID NO: 3877 - protein, 361 aa, unknown
  TnpB Polypeptide
MKLVAAIKLLPSREHAAVLKATLKRCNDACTALAAKGFAAGILRQFDLHKLTYAEIRADFGLTAQAAVRCISKVADAFKVNRDVAPVFRSLAAQPYDDRILSFKGDDTVSIWTIEGRIKLKFVAGQKQRDLLAFRKGEVDLCFVRGKWFLACTCDIPETESFKPSDWLGVDLGIVSLAADSDGKVYTGDEVERARRKFAKRRKGLQSNGSKAAKRRLKKMSGKQERFQKHTNHVISKAIVIDAERTLRGIALEELTHIRTRVTARRKDRNRLHNWSFGQLRAFVAYKALRAGVPVTYVDPAYTSQGCSCCGTIDKRNRPNQATFSCVSCGHSEPADLNAARNIRARATLTTPESSQAAQAA

SEQ ID NO: 3878 - protein, 392 aa, Synechococcus sp.
VLLRYRYRCQPTPGQRIALAQAFGCARVVWNDALALSQEFYRQGEKYPGGTALMQRCITQAKRTPERSWLGDVSASMLQQSVRDLDKAFRNWWNGKGKVRAPRFKRRSNAQSIRICGKESRTTDHGVRFPKVGDLKLRWSRDLPAPPTSLTIIKDTRGRYYASFVVEVERPKLQANSKAVGLDLGLTSLAVTSDGEKISPPRFLRSALKRLRRLQRNLKGKVKGSNRLAKAKRRVARLHGKIADRRLDVLHKLSTRLIRENQTVVVEDLNVSGLSKNRKMARSIADAGWRLLRGLLEYKAELHGRALRVISRWEPTSQRCSACGDRGCKKELAVRSWTCPACGTEHDRDVNAAKNILAAGLAARLNGRGAESKTGVPASASTRLDREVCYAS

SEQ ID NO: 3879 - protein, 236 aa, unknown
  TnpB Polypeptide
VCKRKFPNQRASACGKPRRLRRGGGHRKRSRRRDHAVNALLRDLVERLYNDGVETIYHGDLTGVLGKYWSVEANLKARTFWAHRQCLDQLANVCEEYGIEVASFSEAWTSQTCPECGERERTRRHRETLRCPCGFEGHADLVASRTLLEQATNTAVRPTARPVRFQWDDHQWYPIEGDAVAPNELRTDPQGARRGVAVTPASGRSVNAEWMSIRWSLAFRADKNSVSPEPAVRTDV

SEQ ID NO: 3880 - protein, 297 aa, unknown
  TnpB Polypeptide
LHDDTRRLRRLLTKHRAKICFATISYHGGRWWCALNVEAADLHPLQQHPAHTDDVGGWVGVDRGLSAFLVAAADDGTEVARVSDAPKALAAGLKRQRRLSKSLSRKKKGSHNRNEAAAWLARHHRRVANVRRHFLHQVSGELVKTHDRIVIENLNVAGMLANRRLARAISDAGWSEFARLLKYKQAWRGGQLVEADRWFPSTRLCPECGVVDNAMTLADRVFTCGCGYSADRDTNAAANLARWGHTHHDDDLHRSPDPQAGGRATNVRRRDGAGQHPRVGETSSDDAGTDVHTAPAA

SEQ ID NO: 3881 - protein, 260 aa, Chloroflexi sp.
KPLDCAIKGATFKRDTQGHWYVTLTAEFEMPDVPLPPANPERVVGIDLGLKDFAVLSDGTRIAPPTFYRKAERKLRRAQRELSRKQKGSKNRDKARHRLNRVHIKIRNQRQDWLHKLTTGLVQKYDGLCIEDLNLKGMAKTKLSTSVLDAALGEFRRQLAYKAVWHRKHLSVIDRYFPSSKLCRECGTINQNLALSDRVWTCGCGAMHDRDLNAALNIRAEGIRAIPVAVGHPETQNAWGEGVRPTQRRPSSSNQESHVL

SEQ ID NO: 3882 - protein, 376 aa, Chloroflexi sp.
MNTTLIVKLAPTNEQHTLLLATMERFNEACNWIADVAFKHRTAGKYKLQKMLYHEIRDSFGLSAQMTVRAISKVAEAYRRDKRIKPTFNPHGAIVYDQRILSWKGIDRVSLLTLEGRELIPVIMGGYQADRLAAYGKRGQADLIYRDGTFYLAVVVDIPEPPPSEGTGVLGVDMGIANLATDSDGETYSGEQVDAKRRHYERMRAGLQRVGTKSSRRKLKRIRRRERRFKRNVNHTISKRLVAKASDTGRDLAIEDLGGIRERTTVRKAQRSRHSKWAFGELRQFLTYKAALAGVRLHVVDPRNTSRTCPICGHCDKRNRPDQATFRCTSCGYAGHADVVAAANIAARAAVSQPMVSDEAFASAPGTSPRALAVGN

SEQ ID NO: 3883 - protein, 382 aa, Chloroflexi sp.
MRKAYTYRLYPTKGQIRILNRMLEATRWVYNEALATRKRAWEERQESLGLYDTHSLLPRWKAERPSLKIVHSQVLQNACVRVDLAFKAFFRRVKAGEQPGYPRFKGPGRYDSLTYPQYGNGVRLEGRHLILSKIGSVKVVLHRPLEGTIKTVTIRRASTGKWYACFSVEVEPSPQPVPDAAVGIDVGLEHFATLSTGEHIPNPRFFRRDESERRSGAAPQQAKAQRKLSKAEKGTPERRKRRKIVARIHERIANKRRDFAHQLSRNLVNRFGIIAFEDLNVQGMLEGRSGAAPQRLAKSIADAAWKQFVQYTMSKAAEAGRRVVLVDPRNTSQRCSRCGQLVQKDVSVRVHSCPVCGLVLDRDENAAINILALGLQCLGASP

SEQ ID NO: 3884 - protein, 412 aa, unknown
  TnpB Polypeptide
MKLTLKMKLILDEATFNALREISEYSGKFYNMVNYDFRNGNFMSFYDMYDYYKDHTRCNYLQAHTYENALKQFSKDYKSYQGLLKNYKKNPKKHNQPSIPRYKHANNPMDAIFAKTAIRIREGKLLLSIGKKMKKEKQIKSLQIILPEKVLALLEDKNIKMIKFQYNLKTNEFTTLVIYEIEEKPLKKTGDLMSIDLGVKNLAAITFMNQKHQYLIDGNVLKCQIATYNKWLKEAVSKEMKNTGSKYFKATKKVRKKFKNKKNYIKSYIHRASRKIVDIAIDLDVKTIVIGDFKHIKNKNKIKYFVEIPHGNLKEQIAYKAKLEGIEVVFINEAYTSIVSSIDLEKVNQSNANKKRRITRGLFKSSKGIINSDINGSLNILRKYDRYKNIPMLIKLVRDKGYQEYPIRLKVV

SEQ ID NO: 3885 - protein, 376 aa, unknown
  TnpB Polypeptide
MLRTACIRLNVTPEQGQRLSALRTAYADACNRLVPLVQKTRCWNRVALHQLGYRHLRQETFLGAQMACNAIFSVCKAYRAQRALGRIAEDTAVPALCFNRASVHFDHRTYTLKGEAVSLNTLQGRMLVPMILGDHQREILQSGRPKEAELVFRRGGWFFNLVVEADEAETVASGPVMGVDVGENTLAASTGRIWGGEDLRHRRDQHLALRRRLQSNGSQSARQTLGQVSGRERRRVRHINHETSKGIVAEARRIGAAKIVTEDLTHIRERIRAGRRVRTRLHRWAFRQLQSFVEYKARAVGITVEYVNPAYTSQTCSVCRQLGTRRKHRFECSCGFRAHADLNASWNLARIGATAVTPRAAVSTPDVGCVACHASP

SEQ ID NO: 3886 - protein, 362 aa, Kitasatospora sp.
LAAANLTEAGWRQRWEASRWFVSADGESGKRFGNETIRVTPDGEVSIRLPAPLAEYANARSGRYVLAAKVSFPHRGTEWADRIEGNRAVAYRIHLDVSRGRWYLDASWTRPVVQTMPLATARAQGMVGVDTNADHFAAWQLDVHGNPVGNPRRFSYDLTGSADHRDAQIRHAITRLLHWAKRHSVHAIGLENLDFTAETTREKHGRKKRFRQLISGMPTGKLKARLVSMAAESGLAIVAVDPAYTSMWGAQHWQKPLATPRRKTTRHDAASIAIGRRALGHPIRRRTTPPHHDQSDRRGHRTVQAAPGGRGREETRRPVTDRSHEPRARTGPTRTRATSAPKTVRAARSAKTWVQDSLLPTD

SEQ ID NO: 3887 - protein, 299 aa, unknown
  TnpB Polypeptide
LEWLWKPVFFRRPQADLVRNRDYSFVDDGQVLSINTLGKRTKCTFEGEHFAGYLDGSYQLGTAKLVELKGRWYLHIPVTKAVEDFQKENVRHVVGIDRGLRFLAVSYDEQGKTEFVSGKKIATKRHKFQEVRKQLQAKGTKSAKRKLKAISGRENRWMSDVNHQLSKTLVQKYGKDTLFVLEDLTGVSFEESNLSRTAKQNYDLRSWSFYQLEQFLTYKAHENRSEVLKVSAKYTSQRCPKCGTIRKANRDHHKHLYSCQCGYESNDDRIGAMNIQLLGTMWISGDNHPRYERVMTTLE

SEQ ID NO: 3888 - protein, 387 aa, Bacillus sp.
VKDLRAYKTEIVINEKQRVKLINTFGVCRFLYNAFISHNKDLYEKEDKFCSGMEFDKYVNNVLSIEKPWIKDVSSKARKKAIMNGDTAFKRFFKGTSKFPKFKKKNKQDVKVYFPKNNKSDLLVERHRIKVPTLGWVVLKEKGYIPTNAIVSSCTIEQKANRFFISVFVKEETKANLQEQCQHQAGVGIDFGIKELAVTSDGKKFKNINKTKRIKRLEKRLRREQRSLSRKYEFYKKGGKSATEERTNLHKNILRVQKIHHRLTNIRNAYLDYVIRELTKTKPPFITLEKLNVKGMMKNRHLSKAIANQKFYEFKTRLINKCKKLKIELREVPLFYPSSKLCSACGKKKTSFSLSERVFTCECGHVMDRDENAAINLQEAKTYTILT

SEQ ID NO: 3889 - protein, 370 aa, unknown
  TnpB Polypeptide
MRKAFKYRLFTNKTQESKLNSLLDSARFLYNCALEHRIICYKQWRKSINYYDQANGLKEIREFDEDIAQLNYSVSQNTLRQLDKAFQSFFRRIMSGDKPGFPRFKGKDRFNSITFPSYGNGIQIKNGKLYIQNVGHIRIKLHRNLEGKIKTVTIKRKNGRFYASFSCNEVPQNILPISDKEIGIDVGIKSFAVMSNGQVIENPKYLKQSEAELKEIQSQYSKKRSKNLKRKLARLHEKVSNQRKDFQHKLSKEIVDNFGYIFVEKLQPKQMVENNYRIMSKYINDTAWAQFFNFLRYKAESAGRTMIEVNPKNTTQACSRCGKIVPKDLSVRIHDCPYCNLKIGRDLNSAYNILRRGQRLVSKTEAVCLN

SEQ ID NO: 3890 - protein, 579 aa, Nocardiopsis sp.
VRWFFGHTPVVFATAVSNTATHGRDREVGVQVSQVSKARLRSIQAPFLVPAPTGVTVRDRLQGLTAQDEAVLHVVGSHLGSLVSADLAARCAEGTDHGKDSWAARKRELTPASSSRWAGAITRASNEQWALARRGHLAHLHRLQAGVDTLWHRLSQPLGAQGTRHVPGGYRTRQEWHAKSRRLHALQSRHAAAVADWETGRVRVVRGGERLARTRHHLGEAHLTQTQWRQRWEAARSFLQAEGEAGKRYGDETIRITPGGEVSIKLPTPLAEYANAPHGRYVLSCRVAFAHRGTEWADRVEADRAVAYRLHHDTDRDRWYVTASWIHQTVRQVPWEAALAHGVIGVDANADHLAAWRLDTHGNPVGDPRRFDYVLSGAASHRDAQVRHALTGLLRWATGCGVAAIAVEDLDFTAEKTRERHGRRKGFRRLISGFPTARLRARLVSMAHAVGVAVIAVDPAYTSRWGAAHWKKPLTSKHRKVSRHDAASIAVGRRAQGYPVRRRAVPPPHHRSDGVGPRTIQAGPGISGREELRRPATERAHDAHRRAEGTRTRRTSASNTVRNAPVTQVWVQDSLLDTV

SEQ ID NO: 3891 - protein, 261 aa, unknown
  TnpB Polypeptide
MNLTFEYKLEPTIEQAAEMDEWLEICRRVYNYALAERRDWIKSRKCEVNSCSIRNEYIISADAPKITYASQCKSLTQAKKSYPELTTVYSQVLQQVLNTVEKAFVGMWEQGRGFPRFKKPGRMRSFLFPQFAASPVKVDEIELPKLGRIRIRLHRPIPEGFVVKQARVVKRASGWYVMLSLFCDVAVPDVSPHGHSLGLDVGLDAFVATSGGELIDRPRFFVDAQHKLKLLNRDVAKKQKGSKNQQKACQKVARHYEKVAN

SEQ ID NO: 3892 - protein, 479 aa, Clostridiaceae sp.
VKITIKALLINETNEQIKIIDNMMLIFSTATRYSFKRILKGEKIEDLEKEVAYKFNLNIRQAKDAVESARQTIASQKELVKMNYENYLKKVTTIEKILKDKKKNLSEKKGASLLKKLDKRQRKANYFKRFVDTNTIPSVVFGTKQMFLKRCKGLISNEEWKACRNNRIYSRGDKTKKGNPNLRVIIINGVSYLQISTLEKTENNRSIKIDVPIYLPQKLSKKTGKVNGTNYRELFFNHLAAGDAYQVEMIKKKSKYYCHITFELPKADVVYTGHSGIVGIDTNPNGFALIMIDNKGNYKWNTYLKQHELMYARNNRRLNLCGELVKKVILIAKSYNCCLAIEDLKFKNDTDVQRKIARIKHGFIYSKLLTMLEASCYKEGIELIKVKPQYTSKIGLYKYCHQYGMAVHNGAAMVIARRSYKFKERVPKILKYKLVDNIELFDQKSNWSKWNYINKIIKRKVGENPDSWIVNRKQILGIA

SEQ ID NO: 3893 - protein, 628 aa, unknown
  TnpB Polypeptide
MAKTQTLSFPIRLPDGMQAEALRLLDASREAINEIITDLWDKLDQFAGDRTGPAWKQVERHLLKKSGHGSRQERNEMESAGRLLRAQASRKQVFQTILPLLSEGLIRPADEKHPPCKDHRHIKEQVRALRTQMQEDGEDVDSFTAMTTLLEQACNGYLRTETFPTTYEQMQSPPVLSVGHLTFAGDDGMKLGQTYRARIEITQFCDLSTRQEQHHAALVLRLRTPDEQGKWAWGTWSQEIALPEVVFSYLDQGAVPQAPTLREIRSDDGNRTSVLDLILEVPARLVPPLEQESRVLGWDWGVRSLITVSILEKPEEPTEPYRQISRPVFLDTGGIDGRQARLRREIDQFKACKERYEKLIAEAATRHKEQGTPLPAHFEGWQQRVRKYQERITQCWKKYERRNKELAHLASNLLILLALLQECHLICGENLTTLKTEGRGRGVRGRFRNWRNNTTVRGDLWRVLKYKCHLLGLRARQVEPRGTTHTCPRCHHPAKTYVSPAKADRKKAVDWGPWLCCENPDCLWSGARDYAASLNIAALGMAFLLTYHQTKRYPSYRMTSKEVNSCSYSGQEATLLLPSQRVTPRPVEGKHIYYAGWSYSIRLCTSHPKSMLSLLSASRLRKNVLMRA

SEQ ID NO: 3894 - protein, 409 aa, unknown
  TnpB Polypeptide
MRVKVTARVKAVTPDPSHYYKLLQFLRAYRDWIQYVIDQIWNLDHIPSMKELHYRFYRILRERGFRAHHCHKIEHRAREVVKATKKNKGSKPILRKLTARLDYQDYRLDIKNKTLRVVVLNNEWIELKLLWYDYLNKYFNGEWKLKEILVSYKSEEMWVYLTFEKEVILRKPRTIMGVDINFNNITYTIIDKDGKLVSMGIIPFNGLKRALTHKIISEKIQKKYPKKWRFVKGIRESIRRHGRRAKNILLDSCHFVSRKVVEIAKEYNAMIVLENLNKLRERANGTKKFNKKLSLWTYCRIQSYIYYKALIDGIKVVYTNPRGTSKTSPLGGKLTFINYRWVKLPSGVITTRDVVASWNLGLKGLKSLTRDVGSRGFVETLKAPDQMQTQEGMKEKPVQVPVVSKISKG

SEQ ID NO: 3895 - protein, 390 aa, unknown
  TnpB Polypeptide
VQVTSLSLGLVSHVREATLLTYGYIIDGILQSASLLTHSQLDVSVHGRNIVIYTAAAISELRCNLHVALLKSVDGLHSAHAYLVAHVLDLGCQGRDCLLNLSFSTIELSSEITECITIATDCIHKQGTTIVIVDLVGKATISKTPSGKYFVSVFTEEEYVTPVKKSGKSVGVDMGLKDLLITSEGEIFKNNRYVKRYESKLAKAQRHLSRKKKGSRGFENQRLKVSRLHEKIANSRADYLHKCSISLVRRYDTICIEDLNVKGMEKNHRLAKSITDASWGIFVSMLTYKAEWNGKKVVKIDRYFPSSQTCNVCGYVNKHTKDLSVREWECPVCHTHHDRDVNAAINILRFGLNHTSAGAVDYTGGEEVRADLSESRSSAKPEAYKSLACG

SEQ ID NO: 3896 - protein, 484 aa, unknown
  TnpB Polypeptide
MPLELIPIYDFLQNELNFILSNDETRTLLDMIDLSKHRGDVWRELRDNLKFRIKDWPLHNKTWHSYILFENIRREIQSKQEAIIIWNELVKNDYNINEELFKSLHKLNLYPTRSRIANIKRSNSMPELARSAVFSLDYTISEKQFFRMKTNNICEIKIGKKDWIEYEIVFPSSIDSRFTGVIAKPRFIKRKKDNQYIGICSYEYEVGNYDLEDKILGVDIGKVKLFSSVVVDREGNFSNEFINTKRSQETEYKINRLYGNKQILYNKIKAYEDLKLTNLPKYEVWKNLYSNITNKITNTKDYQAKLLSSEIVKLALEQKCKTIHIENLSWLNSQGGKWNHSQIHSKIIEKASMYGIEVKKVSAFNTSKEHPITKEIGVVKDRIVEFTTGKIDRDLLAAINIAIRSTNIKLKKSLSKRVKTKRIKSKSNKKEIKEKVNKIKGNGQIVSFLTNVLDSTIQVELGVRPLNEVLSYNSLIYYYNKLQR

SEQ ID NO: 3897 - protein, 498 aa, unknown
  TnpB Polypeptide
MKKKQVQWKSFNINMPSELIPIYDFLQNELNFILSNDETRALLDKIDLSKLRGDVWRDLRDSLKFRIKDWPLHNKTWHSYILFENIRRELQSKKEAIIIWNELVKNDFNINEELFDSLHKLNLYPTLSRIANIKRSNSLPELARSAVFSLDYTVSEKQFFRMKSANICEIKIGKKDWIEYEIIFPSSIDERFTGVISKPRFVKRKRDDKYIGICSYEYEVGNYDLEDKILGVDIGKIKLFSSVVVDSEGDFSNEFINTKRSQETEYKINRLYENKQILFDKIKSYEDLRLTSLPKYEIWKNLYSNITNKITNTKDYQAKLLSSEIVKLALEKKCKTIHIENLSWLNSQGGTWNHAQIHSKIIEKAAMYGIKVDKVPAFNTSKEHPITKEIGIVNGRTIEFTTGKIDRDLLAALNIAIRSTNIMLKKSLPKKAKTKRVKPKSNKKVIKEKVNQIKGNGQIVSFLTNVLDSTIQVELGVRPLHEVLPCNSLIDYYNKLQM

SEQ ID NO: 3898 - protein, 605 aa, unknown
  TnpB Polypeptide
MPDCLGQTLTDRTADGFAACSLDRLGMTAAQIVQRVEGETRGVVHITRDGQVLDRQRRRDKDGTRVQTVRKTRHSKATRGRTKDDSKVDTFVRKVRLDLRDGDAAVLDGQSKILNSGYNRLVETMRNAERRLAELGALLYGWTGTKDDEAEHNRVPEHEALAFCWLDADVRDELRRERYDLLTMLTSKTGLRDCLPGMKSAQPYLRAVHSSPLKNAAMRLSAARADWKSGKLSGGKPAGRPRFRAWKRSWFSIEYDEPTKGWSVENGTQLTLTFGTNEAKERMARTFVLYKPPPGLSSAKAVRIVKEGEDYHAVFIVWRARRDTRQDKGDVVYIDPNSSNLGYLADSKGRLLEIENIPGVKELDRQIDVVKSLRDSCVRKSKKVEFIREDGTTHVHWEPSKRWKRYDGAVECLQKRRRDLIKHALYALANHLFRNYAVVGLGDWVPENESVDMGFGPAADRNANRKLRNTTFHGMMRNIIAWVARRSGRLLAVVEEEGTTRGCHVCGCEVAGGVPPGVKHWTCPHCGTHHGRDENAAINGLTRVGRAVAALSGGNPIDVRPSLAQASLRGVTRFGRTRSWETSPVKTNREIKHRDWEPGGLRDQV

SEQ ID NO: 3899 - protein, 442 aa, unknown
  TnpB Polypeptide
MLSKTLTRAVAVNCFGNKLTRRILRSAEDAYKRMVEEMVEYAVRHNASQATLHKVFYAKFRAEYPWLPTRLIKGAYRDAARRAKSFRDAKKRGKAYTEAPEVKRVALTFSDAQDWRLEGGVLKLRIGGRWIELRCSNHKQLHRYLYGGWRLAEELKLKRVGKHWVAYLTFKRDFDVDPDPRNVVAVDVNENNVTAAVFVGGMLREVWRLETGLGHMVIAYAERRKRITKGRHTSDREVKTKLKKLRERRRKLDVARKAAKFIERLAEEHNAVVVVGRITHRAKEKMAEDKCKKLRHRIHKWSVRTLAKLLDEKPIQVVEVSESRTSSRTPSGVRITFSPLVIRTAVRGTSGRVRPVKIRLRVGKARGEVWERDVLGAVNIGLRYLQMGGFVASAPTGAHAARVTLVSPRLGPTPLAEISTVIGRYRQWGNVSPSIHCVIGFG

SEQ ID NO: 3900 - protein, 434 aa, Bifidobacterium sp.
MLEAVRVALDPTPRQERLLESHAGAARFAYNAGLAHVKDMRGRGDEPEWSYYGLRRWWNQVKNTLAVDETTGEPWWPENSKEAYNSGLESLADALKNFSKSRKGRRKGRRMGFPRFRSKDRAVPGFAYTTGSFGLIDHDPYALKLPRIGRVHCMENVSRRVDGAKVLRMSVSKRGGRWQASLTVERADLPIPSPPKGGSVGVDLGVKELATLSDGTVMHNPHALRSNLRRLKEAQRNLSRKRKGSNRRRKARAQVARLYARVANLRSDALNKTTAMLARTYADIGIADLNVAGMVGNHRLAQSIQDAAFAGFRRLLTYKTARTGARLHVIDRWYPSSKTCSNCGTVKAKLPLSERVYHCEECGLVIDRDVNAAINIQVAGSAPETSNARGGSVRQAHPKGGTMRHPAKREPSGGESRVRLGAGLGNEAMQMTSP

SEQ ID NO: 3901 - protein, 459 aa, Pleurocapsa sp.
VVYNYQYRLKPTTEQKLVLNDWLRICRYWYNRQLGERFDWWERNRTYTDRCPLICHLPELKDKPEFYGQKKQLPVIKQDLVSVLWSGELLDFNCVPSQTLQEVGKRVELSFIRYIKGDINGKRSGKPRYKNTERFRSMVFEGVKLHSCSVGGKWLYLSLPKMGIINVRHHRPLPDGAILKQAQVIKKADGWYINLKLQDNSIPDFQSNLDPTWNNSLGMDAVLHEDDYLATSEGVKLPSLKSFRKSQDKLAKISKLKSSKKKGSKSRRQLAKREAKVHQQIARARKDHAYNTVQSLLDTGKKVFFHEKLSIAGLSRRNKAKTDTDGKFLPNGQSAKSGLNKSWADAAFGQFFNILKFKAEKAGALVIPVNPQYTSQLLPYKDEFIFTDTSIREYWDEEYQLLIDRDISAGLNVKRVGLDLFPTIKRRKGNPVVVASTTNSTLKEVLSTLRSLGKPALYR

SEQ ID NO: 3902 - protein, 383 aa, Ruminococcus sp.
MVTHKGYKYRIYPAKAQIHLLAQIFGCCRFVYNYFLDLRKSTYLSEKRNMSQYECMRLVTALKRTYPWLAKCDSMALQESIKDLNKAFVNFFSKRTGYPRFHKKANAQSYRTRNQSNGIRIDGNYIILPKLGRVKAKISRLPNGRILNATIERTSSGKYFVSLCCEEELVPKPNAGGMIGLDLGIKDLYVDSNGCIETNPKHLAKYEQKLRREQRSLSRMLEANISGYTKSRRPIYKKPLSECSNIQKQRTKIARIHEKIRNCRTDTLQKVSSRLVNENQVIALETLNVKGMVKNHHLAKAISDASWSRFGAMLEYKAFEHGCEIRKVPTFYPSSQTCSCCGFKNPKVKNLKVRHWVCPECGTAHNRDHNAAKNILAKALETA

SEQ ID NO: 3903 - protein, 337 aa, Kitasatospora sp.
LIRAYKFLMRPTVGQQQALSEMLRDHCSLYNGALQERRDAWRHVSRTTVRYGGQSAQLKEIRAFDPECQGRWSFSSQQATLRRLDKAFAAFFRRVESGEKPGYPRFRGVNRFDTVDFPGNGDGCRWDSTPHDPVTRVRFQGVGHVKVHRHRAVVGTVKTVSVKREGKRWYVVLTAEQARPDPLPATGSVVGIDMGIANFLADSDGEFVANPRHGRKAAAKLEAAQQALSRCKRRGNRRRKAVETVAGLHRKVRRQRLDHAHKTALGLVRAHDLIAHEDLKIRNMVKAPAPKPDPEQAGAFLPNGAAAKAGLNRSISDAGWGCSSRSCTPRLKAPDGK

SEQ ID NO: 3904 - protein, 399 aa, Kitasatospora sp.
MIRAYKFLIRPTVGQAQALAEMLRDHCSLYNGALQERRDAYRHVSKTSVTYGQQSAQLKEIRSFDPECQGRWSFSSQQATLRRLDKAFAGFFRRVKSGERPGYPRFRGVGRFDTVDFPKDGDGCRWDSTPHDPVTRVRFQGVGHVKVNRHRPVAGKVKTVSVKREGRRWFVVLTVEQTTPEPLPKTGSMVGVDMGIANFLADSNDGFVPNPRHGRKAGAKLEAAQQALSRCKRGGNRRRKAVQRVADLHRKVRRRRLDHAHKTALDLIRAHDVIAHENLTIRTMVRTPAPKPDPDRPGAFLPNGASAKAGLNRSISDAGWGVFLTILHAKAESAGREVIAVDPRNTSRTCPHCGHVAKENRPTQEAFHCVACDHEAHADTVGAINVLRAGLVRRDARKG

SEQ ID NO: 3905 - protein, 452 aa, unknown
  TnpB Polypeptide
MPREGVYPVETKNRRTNVVRLLPNGHQDRKLRKLANACARLYNEINYERRQQFFNGEKVDFKGTWDKYYEKYKGVLGVNAQAVMQKNNEDWNSFFTLLNLMKEGKLPPHIKHVSPPGYWKDEETGRRRLIIVIRQDRYEVDEQRRVIILKDFNMEIRFAGKLRWYGKQGRLEIIYDESKGAWYAHIPVEVGVEVTKTGKKAKHIVNGERRTIQIATPRGNRIASIDLGINNLASVVVDDGTWLLYKGVRTKEDYFYFQRRIAEIQSLRDTLKDKLLDDAIDELNHEMRRLYGKLMRRLLHLYRSFAKHLIEQLHELGVSTIYLGYPLNIAQEKGNKFTVNLWSYRKLMEAIELKAQEYGIRVFEVVEYNTSRVCAYHNVEVKRQPRGVVHCPKGHRLHSDLNGALNIMKRATGKIPLVIKKPLSFIVGHNRVAPTKGEVTPKTPGKTAHQGG

SEQ ID NO: 3906 - protein, 346 aa, unknown
  TnpB Polypeptide
MGCYEAVKVRLDPTPRQERLMASHAGAARFAYNAGLAHVKEAIDNGEPADWSHYGLLRWWNANKDELAVNKITGEAWWSQNSKEAYSMGLRSLAQGFSNWSKSRKGQRKGKRVGFPKFKSKNNVARFAYSTNFTAPTASDPYGLRLSCIGRVHCMENVYERVAGAHLVRVSVSRRAGCWYASLTVERESAASVSVSAPKGGAVGVDLGVKNLATLSDGTVIPNPRALNAKLRTLRKAQQALSRKIKGSTRREKAKARVARLYARVADVRADAINKATTMIANTYSAVCIEDLHVAGMVKNRHLARSKPVYEGRRAETYENQRRLALAGRTHHCRIFHHLRHHYSVP

SEQ ID NO: 3907 - protein, 380 aa, unknown
  TnpB Polypeptide
MFKAFVFRLYPSKSQRRRLEAVRETCRHFYNDLLRQRKDAYTLHGVSITKTEQLRLVKVEKDTSPYADGIHSHILQNVVADLDKAFQAFFRRVKAGEDPGYPRFKGRNRFAGFGFKEYGNGFKIDGRRLKLSGIGRIAVRWHRALEGTIKTARIYCRAGKWFVAFACVVEKPEPLPKTGAEIGVDVGLLRLATLSDGGKVENPRWYRKVLRELRVLQRKIACVVWGGRNRRKLVRRLQRLLAKVANARRDFLNKFADQLIKRFDRIVLEDLRAAALARGRFALSILDAGWSYLVSRLTHKAESAGREVVLVDPAYTSKTCSGCGVVFEHLSLSDRWISCACGVSLDRDHNAAINILQRGRNRPLGAKLSAGRVCPETAEL

SEQ ID NO: 3908 - protein, 405 aa, unknown
  TnpB Polypeptide
MIVTTKVKLYPNEAQKVLLEKHFGSCRFIYNYFLAKRDEYYITHKDAKKSSLSYLDTQNMLVELKGQYPWLHEVNSQSLQMSLRFLDNAFKNFFHKNANHPKFRKKGKNDYFAIPQHVKIEKNRIYFPKFKVGIYFKGSRERLKELKEINQIIITKDAGEYFCSIIYEKDEELPEKKELSAENSIGIDLGIEKFATLSNGMAVENPRFIAKKEKRIKRLQKQLSKKKKGSNNHRKQKLRIQRKYMKLRNMRKDFLDKVSTAIAKQYDTIIMEDLNVQGMQQNHHIAKSITDVSFYNFKQKLMYKADKYGKNIILIGRFDPSSKLCSKCGNIKHDLKLSDRIYHCNVCGLIMDRDYNASKNIKKIGLIKVGLVQSEFTPVETATSGLCGIYPYRQMSVVESGSSEA

SEQ ID NO: 3909 - protein, 407 aa, unknown
  TnpB Polypeptide
VSDDLDALGFAASKLWNVGRWTCSRIWDEIGHIPNHNELTTYLKKHERYDDLHSQSSQRVLQELAEAFNGWYGKRRNGDTRANPPDYRKHGDEHPRSTVTFKAAGFKLDTQYNRVRLSKGSNLKEYWSDFVLCTYQTRPDVDLPTVENVQQVKAVWAGDEWELHFVCKVEIEVSESPGEKTVGIDLGINNFAALAYENGHSELYPLNCLKQDDYYFSKRLARCDDSNSEQATRLNQKKSSRRTHYFHTLSKHIVERCVEENVGTIVIGDLSGIRKDDEDGESKNWGKDGNLDLHSWAFDRFTELLTYKAEMEDITVEGVSERNTSKSCSCCGRKCDANRVERGLYVCDECGTTANADVNGAENIRQKVSPSSPNLSVNRSNGWLAQPSTFLFDKETGAFAPQEQATS

SEQ ID NO: 3910 - protein, 449 aa, Lachnospiraceae sp.
MRTKKYRKLLQLYGSTEDKKKRKTFADQLNEMQEQYNVTWAFCRASMIPIGKKYGIDAIFALTKAEDVWRGVEKCLYGNGRTLHFSKYGDFPCIRAKQINRGIPMSVKNNELQFKLGKTVFGIQVKDRFQTDEVNAVLDYLAQPGVIDYKAVKTLHDEACCISTYRPCYATLVPKFIRGKYRVYLHLVIEGKAKPKYDSSGNPRHKYGRGIIGADIGTQTVAYTSDTETGLKNLSERGNSIQKSERLERLYYRAMDRSRRATNPQNYNADGTIKKGKKKWTYSRHYKRLKAKHAELCRINATNRQLAINEDVNHLRSLGDIFVTEPKNAARLMKRAKETTVNNKGRINRKKRFGKSVKNRCPGGFQAAVENKFKTSGGTYIEVPNNYRASQYDHTADDYIKKKLSDRMYKLADGTLVQRDWYSSFLLYEFIEWIKANKIKVLNSGIKTA

SEQ ID NO: 3911 - protein, 358 aa, unknown
  TnpB Polypeptide
MLLVYRYRVKSLTGLLNAQARACNFVWNFCNDTQKHALQWNKRWPSGFDLNRLTAGSSKELALHSGTINAVCEQYANSRSQRQLPFLRWRGRRSLGWVPLKGRDLKRAGNAFRFAGNTFRVFNSRPLPQGQIKDGTSFSCDSRGHWYLNIAVQVAQSDARPVRSAIGIDLGLKDFAALSNGEKIENPRYLRQLAARLSTAQRARKRRQAANIHARIGQARRDFQHKLSTRIVREFDHIAVGNLNAAGLAKTRMAKSVLDAGWSSFGNMLRYKALAHGAWYEEVNESFSTRVCSSCGCETGPKGVAELGIRSWICSECGMSHDRDINSARNILFRSGHRTPAEGIPALTWTPPPCQAFL

SEQ ID NO: 3912 - protein, 387 aa, unknown
  TnpB Polypeptide
MEKRYKFRIYPSKEQERLIHVNFKCSRFVFNHFLAKQIETYNGNGTYTGLFDNAKELPTLKRTEGYEWLNEAVAEALTYALCDLDNAFKMFFKRVKQGGIAPGFPKFKSKKNSHQSYRCKNKIPKPPKVAHSITVGETKIRLPKIGWVECRVTKQPEGRILSATVLQAPSGRYFVSLYCTDFEINPLPQTNHAVGLHLGIENLAVSSEGETFENHRYLEKSQKKLIRLQKKLSRKSNGSNNREKARKKLARAHEKISNQKTDNLHKLTTELVRNYDTICVRDEQVAEKQRDKVFSKQLADANWGELVRMLSYKSEWYGKELVKIKKTSPSAQLCSACEYKHKDLKPYHYEWDCPKCGTHHDRRVNAAANVLNEGLVKSTKNQAEDTF

SEQ ID NO: 3913 - protein, 386 aa, unknown
  TnpB Polypeptide
MATTKRNFQYRIYPTGKQERQMEFVLYSCRRLWNHFLDQKIIAYKDDKKSISCYTQINEIPKLSSRDESLKEVYSQTLQDVPRRLEKAFQAFFRRCKTGEEPGFPRFKGKDRLNSFTYPQNNGSFKIDEKNGRIYLSKIGHVKIKYHRLAKGKWKTCVVKKSSTGKWHVVISTEIEFAKVKNDRPSVGIDLGLKEFAVLSDGSRIKRERFFKTEEKALAKSQRRLAKQARGTPERKKAKKVVARIHERIADRRSNFTHQNSRMIADKYGTICVENLDISGMMENKTITVNGKKLSAKPTHRSINDVAWNQFVNQLSYKAEEAGGLVIQGNPKGTTQKCSACGRVVPKDLGEREHKCSCGFETGRDFNSSLNILAVGLHSLDVRKTA

SEQ ID NO: 3914 - protein, 408 aa, Megasphaera sp.
MSNLTKTIKLRIHATPEQETLFRQMTEQYRQACNFVSQYIFNNRFNMTYQSLNRELYSDLRSQFGLKSQLAQSSIKTTIARYKTVKQQLFQNPYRYKDENGNWQRIAKTLEWLWKPVFFSRPQAELVRNRDYSFVDSGQVLSINTLGKRTKCTFEGEHFAEYLDGAYDLGTGKLVELKGLWYLHIPVTQAVEDFQKENVRHVVGIDRGLRFLTVSYDEQGKTEFVSGKKMATKRHKFQEVRRQLQSKGTKSAKRRLKAISGRENRWMSDVNHRISKTLVEKYGKDTLFVLEDLTGVSFEESHLSKTAKQNYDLRSWAFYQLEQFLTYKAHENRSEVLKVSAKYTSQRCPKCGTIHKENRGHHKHLYRCQCGYRSNDDRVGAMNIQLLGTMWISGDNHPRYERITTASE

SEQ ID NO: 3915 - protein, 454 aa, Megasphaera sp.
LSGFNARKKHKNAVTHLENHHYFPHNNHIIKKEVKNVYLTQSNVIRNLSKEDYAMLREMCQYSNNLYNVALYNIRQYYFQEKKFLKYEENYHVCKENENYGLLQAGVSQQILKVADRSFKSFFNLIKKAKSGEYRFKDIKMPHYREKGGMFNLILSTNAINVKDGFLTIPMSRGFSKRHGRKQIKIPFPARLKEKTIKEVRICPIYNGRYFKIQYCYLQEKEPQDVSPDNVLAIDIGLENLATCVTNTGTAFIMDGHKLKSINQYWNKQKAYYQGIADKQGQKKTHRLYALARKRNNRTQDYLRKVARYIINYCIEHRIGTIVCGYNGDFKRSIDLGRITNQQFTQISFGNLRETLEGLCERYGMRYIEQEESYTSQASCLDLDDIPVYNPEQPYTGTFSGKRIHRGLYQFADGRMANADVNGAYNILRKSKQNFDFEGLCKGLLDSPLRIRIS

SEQ ID NO: 3916 - protein, 217 aa, Okeania sp.
MRTAYQYKLKPNQEQVSTIELWLDLLRRQYNYRLGERFSWWSENRCPVNACPLIMPIPQLKNNPDYYSQKKDLVNTKDKFPEYKLVHSQVLQDCIKRVKLAFERWLKADKNGQRLGKPSFKGIGRYRSFTYPQIKQNCIEGNKINLPKIGKVKLIQHRSLPEGFQIKTVTIIRKADGYYVTRSLEDKSVPKFNSDVEPTTENTLLIDMGLKNFLVTS

SEQ ID NO: 3917 - protein, 427 aa, Actinobacteria sp.
VFPFHCCIGWRKRSRLGTTNSIRSAGNPEMLTAHKIALEPNDRQATYFAKACGTARFAYNWALAEWKRRYDLHRADPNQPKPTEGFLRRELNAVKRKDFAWMLEVTKCAPQMAIKQLGRAFENFFAGRAKYPVFRKKGVHDRFTISNDQFEIKDQRIRIPNLGWVRLRERLRFEGKILSATISRTADRWFVSVAVETEEPHPGVAPDSEAVGVDLGVATQATLSTGEKLEGAKPHRVLLKRLQRLSRGLSRKEKGSRNRHKAKTKLARLHARISNIRRDGLHKLTTDLTRRFHTIGIENLNVSGMLKNRRLARSIADQGFHEFKRQLTYKAERRGNLVVVASQWFASSKTCSACGHTLETLPLSARKWTCPECGKVLDRDVNAAVNLKKYAVSSTVSARGAEGAGGGRKAAVKPSATKRESNGKTTA

SEQ ID NO: 3918 - protein, 401 aa, unknown
  TnpB Polypeptide
MIISRAYKTEIKPNNKQRTLLEKSAGVARFAYNLGLAERIALYDSEKTSLTAIDQHKSLCAIKKEKFPWMYEVSKCAPQLALLDLDKAFKNFFRGLKKGKKIGFPKFKSKHKSTPSFHLDNINFSVSSKYIRLAKIGIVRLKEKGYIPVEDVKYNSLTVSKIAGKWFVSINCEVEVLDSVNQIGTILGIDVGIKTLATCSDGKVFKNNKYLRKSKKRLAHAQKNLARKKFDKKTKRSSNNRYKLRIRVQKIYYRISNQRKDAIHKMTSILAKTKPRYIALEDLNVSGMMKNHKLAGALSDASFSEIKRQALYKTSWYGGEVIDVNRFYPSSKLCRICGSIKNDLKLEDRVYICECGHIEDRDLNASINIENFGINTLSSRGIQACGESVRLLEKSDLRAVS

SEQ ID NO: 3919 - protein, 377 aa, unknown
  TnpB Polypeptide
MLIIRASKGRAYFNKTQLNIAGSTLNSCRYIYNEMLARNQKVYERRGEHLSYNDMQNLLPVMKKYKPWLKKADSQALKYACRQVDTAYQKFFKHETGFPQFHSKKGRQCYTTTNASSIHIKDGKAKLPLLGWVKLRGMKPIPPDAKICYASVSREPDGTYYISITYKEECFVIPQKTENILALDYKSDGLYVDSDGKCTDMPHWFRENQAKLARQQRRLSKKQGSRKGEKKSAGWSKQHHKVAKLQRKTANQRLDYLHKKSLELAAGYDVIGVETLNMRTMSNKGFGNGKATLDNGYGMFLTMLNYKLEERGKYLVKVDRWFPSSQICSCCGYQNKELKNLQIRKWTCPVCETHHDRDHNSAINIKHEVIRILKDAA

SEQ ID NO: 3920 - protein, 452 aa, unknown
  TnpB Polypeptide
MLVVKTVKIPVHYAVTKHKLSIVDSLTARTTYGVWLWSKLFKKHKLKGSYGDRRLFYEQVKRDAKLGTMAQCCFDTAAWMWKSRREAHKTWRREVAIARREGDRKWLRKLLRREPQEPFTNGMKGKVPIWFDNRFGAIERAKHLKLCSYVARISTLRRGVKLTIPLNPARYHLGMLEQGTMKSFQLVKRDGKYYVHVKAEFQVANQPVYAVRGIDLGVKRSIASVMLRPNQPLRSSDFTIRQDGLKRDRLNRLEKQIEELQQARKWAPLKRIRHKRLHVSEQYDRLAAKQVATTSQNSLVVVGHPKGIKYENPKGNGKPHLRKKLASWAYGRMVQFIQQECTKQGIPTEAPNELWSSRTCHRCGSRHTERLTQSVFRCWNCELIYNADYNAAINIGSRFLPKATTRQATDDLAYTRNEPPREIVGGEPRSPHPFMGGSQSRAMYKTVVCRTR

SEQ ID NO: 3921 - protein, 370 aa, unknown
  TnpB Polypeptide
MRKAFKYRIYLTNGQRRILEQHLEACRWVYNETLAERTRAYAEDATSLRLYDTQALLPLWKLTRPALKDVHSQVLQNVQVRVDLAFNAFFRRVQAGAAAVGYPRFKGQGRYASLTYPQYGNGVRLDGDRLILSKVGAVHVVLHRPLDGTPKTVTLTRSRTGKWFAAFACEWESQPLPPTGTVIGVDVGLASFATLSNGEQIANPRFYRRDEADLQRVQRRKDAAKNAENWPENAKQKTILAKIHERIANRRRDFAHQEARKLVNRFGFIAVEDLNVAGMLKNHCLAKSIADVAWSQFAQILIVKAEEAGRRVVQVDPRNTSKRCSRCGQRVDKALSERTHTCPHCGLVLDRDVNAAINILQRGLQTLRLA

SEQ ID NO: 3922 - protein, 342 aa, unknown
  TnpB Polypeptide
LKVKKTIKGKILELRKGKEELLKREYENFQRYLHGDKTAPLYSATKQEAERFLKRLNGKIKPNKEYPLILRRDVYRANTKLTPYWLKIPVYGVWGGINVPIKTHEPITEDMVCREAKIIRKDNEWFVHIVVEKEVEERNPKSILAIDTGIRWIATTVNSNEPKPKFYGKELRRIKGHFFYLRRSLSLKKAYKTIKKIGNKERRVVNDMLHKISRTIVNEALKNDSMIVLGNLKGIRKNGKGRKFSRKLNIGFPFYKFSKFIEYKAKWLGIKVIKISEKYTSKTCHKCGNKGLRVGSLFTCSNCNYQCNADYNGAMNILKRAMGYMPMVGAGLTQPELGSMKP

SEQ ID NO: 3923 - protein, 444 aa, unknown
  TnpB Polypeptide
LRRGDPGLQAGEETPLLLSACHVHRSGFGRIRFLVVRTAYKCRAYPDPVQASVLNRTFGCVRVVWNRTLAWRRRRHQEDKTGTTFAQANGYLTAMKATEELAWLNEVSSVPLQQTIRHQQAAYTAFFAKRARYPRFKSRNGRQSAEYTRSGFRWRDGRLFLAKMDAPLAFTWSWPGIDPATVDPTTVTVSRDPCGRWYVAFAVDVPDPDPLPATGRVAGVDLGVTDFAVTSDGQRITNPRHLERRARNLARYQRRLARCQPGSANRAKTRAKAARAHRKVRAARTDFLHRTSTSLVRDHDVIVLEDLAVKNMVRNRRLAKAISDCGWGTFRAMLEYKAARTGRHLIVIDRWYPSTKTCSACGYLLASLSLNTRTWQCPSCGTRHDRDHNAAKNILAAGRAVAGDTPGHACGADVRHSGSSRVQSAVKQEPRPVRAGIPVHQGGE

SEQ ID NO: 3924 - protein, 317 aa, Lactobacillus sp.
MTIRKRKSDLPEYGVKIRLYPTLVQQAKLRQFFGNDRFLWNQLVSLYQERYKNNKSLKLLTEFDLNNLLPALKNEYPFLKASDSSSFQIVTRNISDAWEAFFAGTRRKPRFHSKHNAKQSYTGKSSSIRIMGKRNMFLPKLRRVRSSKTGVIDGKIKCYTISIDACGRYWLSLIVEKKSAFLPKTGKAVGIDVGLTHLAILSDGRKFDRFSSDFCEKQAEIWQSKSSKRRHLAFVKSQQEANKKVLGAKSLSDYRNWQKANVAKNRYMSRITNQRDDYLHKITDQLVKKYDVIVIEDLKIKNMTKNHHLARSILRQS

SEQ ID NO: 3925 - protein, 416 aa, unknown
  TnpB Polypeptide
MIRTQIVPCHLQRARADALNLESGRIYTGILVRHWRIVRKKGIWLSEKSGTKLSDLSTDAPMHAHSIDAAQQGFYKACKTAKALKRIDPDAKYPHWTKKFRTTVWKNTAIKRRGDALELSTGRDNPKIMIQLPAALQDALRFVEVRLVYDKRARRYNWHIVVENGKEAKQALGVNTVSVDPGEIHPAVVGDETSATVITCRERRSIQRGHAKNLAFFSKALSRKTKGSRRYKKLLRSKTRCKAKYDLVMRDMEHKISRAIVEEAVECKASTIVYGDVRDIADGIDKGKAHNQRMSQWNHGKVRSFVEYKAAAEGISVVLQDEHYTSKTCPNCGTRHKPKGRIYKCPACKFQSHRDVVGQINILSAYKFGEPGKIPVPAQVKYRIPHNVRVLRKCRDTGQGSSPVARESIFREAAGL

SEQ ID NO: 3926 - protein, 402 aa, Thermoplasmatales sp.
  misc_feature (241)..(242): Xaa can be any naturally occurring amino acid
  misc_feature (245)..(253): Xaa can be any naturally occurring amino acid
MYKAYRFRMYPNEDQKILIEKHIGSCRFVWNHFLDMRNSRYTETGKGMTYRETTLLLPSLKKEYPWLNEINSQSVQQVVMHLDSAFHGFFKKITRYPRFRKKRNGGSFSVPQHFSIDGNHLTLPKFKAPLRMIMHRDIEGKATSLTISKTDSGKYYVSILAETPNEIPESREIKPSTSVSMDVGITEFITLSDGIQISNPRNLKKSEKKLAKRQRQLAKKQKGSKNQDKARIKVATLQEHXXNQXXXXXXXXXDILTRQYDTMITEDLNVSGMMKNHHLARSISDAGWSSFFTMLKTKALSRGKNIIEIGTFDPSSKMCSGCGHIYALKLSERTWTCPRCNTTHDREWNASINIKKFGLIKTGIPTDSGELTPVDTVTSTLSLLEKEGIKQVKWLKQEAHVI

SEQ ID NO: 3927 - protein, 322 aa, Lactobacillus sp.
  misc_feature (260)..(263): Xaa can be any naturally occurring amino acid
MMLRTQKVKLYPNQTMKKVLDNLCDYRRYCWNQGLALWNDMYDASVILADKKQRPNERKVRDELVANKADWQFQLSARCLQLAISDLGKAWQNFFDRAQPDWGKPHFKSKKALRQGFKTDRAKLVNGRLRLDKPHEVKETWSDIKFKGARNLTGELKVVSIYRENGQYWASLPLEVMVPAKPKTGVKTAVDVNVGHLDYTAGRVNTLPSHLQKIYKRIKHYQRVLAHKRKVNGRLATQSKNYAKTRAKLQRDYRRVANVXXXXFYPSTQRCSVCGHIKRGDDKVTLVGNHKHHTKHDEYICYQCGATLDRDANAVANLLALL

SEQ ID NO: 3928 - protein, 301 aa, Thaumarchaeota sp.
MLRVPQGDRRYFDISLNGHTQKVLSEEGLKVRSFTLTTSSVNLTLSKEVKEIECTGTAGLDRNLRNLTYGNEERVIQYDLSKAVKIAETTREIVGSFRRNDARIRRRIASKYGRRRRNRVNHLLNCATRQVVEEAYNRREAIVVEDIRGIRRLYARGNGQGRTFRGRMNSWSFGEARRQVEYKAKWRGVPIIPLTKGETRGTTKECARCGERLQVAQRDDVRHRRELWCPRCKGWVDRDVNAVTNLSRRGRLRFDRSLPKGAKGEAGEAMKGNPTTPVILRVDASKMTRWDNLQSYQNLRG

SEQ ID NO: 3929 - protein, 390 aa, unknown
  TnpB Polypeptide
MTMRKVAQRIPFTPSKTQTVLLERCFGDRRFAYNQQVEAFDTYDKESNPTPSYPNVTGMKAANEWLKNSPIPSNSLSNAIMDFHKAQSAYFRKAQYERNRPRFASRNDNVQSFRNTMPIRHLDGNRYPLSKKLGSVRIRKRDRLRYPIESLSSWTVKRESGKYYLVLLFNVDVQPKKPAEGRIGIDVGVKDFLTLSTGEKIDYPDRMKALEENIRREQRKPSRRRKDSSNYHKQKAVVAKAYARLRHYRENYQHQLSHRLIEENQFIGMETLMVRNMTRKAKKKLDANGKPLRNGQSRKRAMNRSILRDGWRGLMDKLSYKAEWYGRTFIQVDRFYPSSKLCHECGAKYAGLRLSEREWVCGQCGIAHDRDVNAALNIRDEAIRISQENR

SEQ ID NO: 3930 - protein, 400 aa, unknown
  TnpB Polypeptide
MNLTEIHQIRPNHELYSICDELCFKSKNLYNAALHEFRQSYFDKDLKAVNWQIINKNFNQSNQHDYRELPAKVSNTVIRKLGNNISSFWTLVKKSDYNKKVRLPKYLHKTEGRFIVEFNKQTFSNKRDENNNLIICKSTLNLRIPTKVKNPQQVRIVPKKWYYVIEVVYKVKENSIKQNQRVASIDLGLNNLVTVVTNDGDNPILTSGKKLKSINQYYNKKTSKEKSQLPKNIFTSKSLDRLWLKRNNKITYEIHKITKFLANYFDERDISKVIIGNNSGWKNGINIGRINNQNFVNIPHITFINQLTYKCKLLGITVITREESYTSKASFLDYDKIPNYKDEISYKFSGKRIKRGLYRSTTRKINADVNGAYNIMVKENPNYIISKREQLGFNPTLIKL

SEQ ID NO: 3931 - protein, 217 aa, unknown
  TnpB Polypeptide
MVGLLTERSYGLCGNILGGFKGSKWYDRQLDKIRSKRDKCKKKSRRYTHLSKVYKRVSEKKRNKQHDSLHKASHLIGHKLVERTVVVGDLSQRQMVTKQHHEKNKARNRAIYNDWGLYTFTLMLTYKCQLYGKDLVILDERNTSKMCSGCEHLQDMPLWKRTYKCSKCGLVMDRDENSAVNILTRYLARLGPHTPSECGVLQEDGLDVAGTEPAQVA

SEQ ID NO: 3932 - protein, 342 aa, Lactobacillus sp.
  misc_feature (143)..(146): Xaa can be any naturally occurring amino acid
  misc_feature (320)..(341): Xaa can be any naturally occurring amino acid
MVLKGIKLRIYPDSYQKGLIEYNFGANRFVWNNMLDMMIKRHENNPDLKSLKAFDLNYILTIFKKEHTWLKKAESTSLQVSNKDLFEAYKGFFSKKRKFPRFKSKKFPKQSYQCKFVNNNIEILDDSYIKLPKLGVMKYKNKXXXXAIPSIIKYVTIRKSSTNKYYAILTVDEEIVQLPKTNKSVGLDMGVCDLVICSDGSEYKTIRFDKKLSPKKHYWEKRLARRRAQALKDIQYKKKFGLIDPKPLEQYSNYMKAKLMVAKYSEKIANQRKNYLHKITRELVENNDLIVIEDLKTKNLLGNHKLSRAITNQSWRALRXXXXXXXXXXXXXXXXXXXXXXS

SEQ ID NO: 3933 - protein, 436 aa, unknown
  TnpB Polypeptide
MAITAEQLPDGTFRFHGRANDITRQKNKALEPFGKQVLNYGQVLRLLPTQEQAQALNQQIGNARFVRNRYLKERIRLYQEKKETLSAADYKKHLPELKEENPFLYQSDKFALESAIEHVDSAYQNFFSRKSSFPKKASRFKPNGNRYTTKQTNNNLSLVLDKDGLPYIKLPKVGKIRIVLPAGKIFSDLCPSGTSIKKATFSRQGDRYEVSLGMETVIDQIHPVEEVSVSEILSADMGLKDFAVLGDNDSFLKIRNPRWIRVHEKRLRRFQKALSRKQYDCKTHTGSKNWYKAKKKVAKEQRKTADQRKDFQHKLSRCIADSCRVFVCEDLNIKGMMKNRHLSKAVASVGWYGFFQKVKYKLERTGGRFIQVSKWFPSSQTCSCCGYKNTDVRSLTVREWTCPECGSYHDRDGNAQQMILKEGIRLLEEMDVKVAM

SEQ ID NO: 3934 - protein, 435 aa, unknown
  TnpB Polypeptide
MKINKAYKFRLEPNVEQQVILNNLVGSARFVWNQMLAMSFKMFANNEFINATNLVNKIMDLKNNPDFEFLKSHSNAVSLQQKVRDLASAWSRFFDPKVHAKLKENKKKIRKPKFFTLADGTEIQLRPLMPRFKRKSDGCDSIRLVQFDKYCRIEGNRVKLPNGIGLVKFRKSQDIIGTIKNVTISKKSGHWSVSFGTERELDQNPIHPSRTAIGIDLGITRLISTSDDQHIKPKNSFKSNQVKLAKLQRQLSRKVLFSQNWQKQNRKIQKLHHHIANIRHDYLHKITTNISKNHAMIVVEDLKVVNMSKSAGGSAVQHGRNVKAKSGLNKSILDQGWGMMVDMIEYKQHWQGGLLIKINPRYTSQTCFECKHIAKENRQTQAKFECVKCRYVANADFNAARNILAAGHAVLSAEGGCGKGRPMKQKTCGLREKAT

SEQ ID NO: 3935 - protein, 399 aa, unknown
  TnpB Polypeptide
VRAYRYRAYASKTTAGVLEAQLEVACKLYNALLHTEEEEYKKNKHSMSRNELRQLALDLRKRNAEFQALHSQVVQQVAERLYQARQRFFEGLANKPKKKKAHRYLSLVYPQSGWRLSNIRVVGQGENKDNKKKARVYLSKIGFFTLVMHREFPLNRVSQVCVKLNPSGKIFVVFLVDEPVGEGPREPTGEAGKAVSVDVGVTRLATLSDGRFLENPRLLERSLDRIRALQRSLSRRRKLSKNWFKAKRRLAKEYEYVGDFRRDLFYKLGALLAAEYDLLVLEDLNVVGLVRRGETGKRKMRLYDSSFSELRRALEWEFEKRGKAVLAVPAYNTSRECFLCGRINQGLTLEDRIFRCPHCGFTLDRDLNACLVLLKRAGRVGATRLVCLRSSAQYLPHHP

SEQ ID NO: 3936 - protein, 516 aa, unknown
  TnpB Polypeptide
VSRKNKNIDSDEEIMQLHSVRTSCRIANTEKRKAFQNVDYFVKELKNEMSKYIYNNFQLMLDDYDEFIRSYNKFNNDFISAWETQAIFQDICKSYNNTLKQKRKQLDTSIQFGYRITKYKRKTTLKRGIVKERGDVKEFKIKKQWTDLTKITKLLTFLDCDNLEKYKGQDIYTVILFWQKHKHWNKILKVAKQLSYCIKERINLIEYTTGTYRKLLNGKEFIFDETNGKYQYWFYHKNHYYPLQLEFKNYHLDLNKLIKDKNKQVFVKVIDDRIDFIFTTEYSPIFKEFDKVIALDINIKHNFCTSSNRDTRDYNRGYIQEFITEIKKIDEIGYKNITNEQRKHLSSIVGKNEWYFKKLISEILDDFEREGITDIVMEDLQTNNFKYSIVSSNEFKQRYTRLIRLLRLGSISKWMKGQGEKRGIRVHLTTPAYSSQECSDCHYIDRDNRPTQELFHCVKCNHENEADFESPINLLKRFTSDVLKEKLHTLDKFGRMIPKKLRKETVKEILSSFCSV

SEQ ID NO: 3937 - protein, 472 aa, unknown
  TnpB Polypeptide
LTSFESATFGGYSTRRCTWSSSPWASTRRASNSWQMWAKIARNVSCAASVKTFLRYLVTNTRWTCNTKTQCLPVRKSVVFFIDQFYNRSMQIRKGHKYRLKTNRSTGSKCVRFAGACRFVWNKILAINEHRYFAGVPRLSYAEACELVAWWKQSEEYGWLKEGHSQVLQQCLKDLERAYANLFAGRAAPPQYRKKLLADSFRYPQGFKLDGRQVYLPMIGWVEFWESRPLAGTIKNVTISRQGQHWFVAFQVEMDIETPGHPATADVGIDLGIATFAAFSDGTLHPPLNAYRRVAKKKARLQRRLAGMVKYSCNWKKQQRRLTQLDIWIANCRHDFLHKLSTETSKNHAVIVIEDLQVKNMSRSAKGTVEEPGVQVAQKAGLNKAILDQGWGMFRQMLDYKQAWRGGELRAVNPRYTSQTCPECGHVSKANRPQQALFSCVACGYTYHADIVAAKNILALGHRERLNAFAPR

SEQ ID NO: 3938 - protein, 394 aa, unknown
  TnpB Polypeptide
MIINKAYNFRIYPSDNQIEPLAQHFGSCRFIYNYFLRKRIDFYTENKGKEKQGLTYHDTAIILTQLKRAPEYVWLNGVNSQSLQQSLRRLDVAYNNFFNKRADFPNFKKKHSKQSFLVPQRFDIDFENGLLHIPNFEPIKIILHREIEGTMKSINISKTPSGKYFASILCEIEKVVKSKKRGNHIGIDLGLKSFLVASNGDRVNAPQYLRKSEHKLIKLQRHLSRKVKGSNRRNKARIKVACIHDKISNQRNDFLHKLSHRLVSENQAIFAEDLNVKGIMTNHHLAKSIADSGWSEFVRQLKYKSEWNGVYFGQIDRFFPSSKRHFSCGWINETLSLKDREWTCQGCGQVVDRDFNAAQNILLFGQKTVGQELSELKRSWRGGAVKPLVEARSP

SEQ ID NO: 3939 - protein, 293 aa, unknown
  TnpB Polypeptide
MDLQSAFSKFFKENNVGYPKYKSKKYPKNSYKTMQTSGYLVTENDIKITKLGKLKIVNHRHKTGIAKSCTISLTPTGDFYIAILWKDEEVSERLDPVDKEIGIDLGLKDLAICSDGEKFPVLQSLRKGLPKLKREQRKLSKMERGSNNYNRQKLKVAKLHQHIANQRKDCLHKISYKLTNENQVIALENLNVKGMMRNHHLALSISDVGWSEFVNMLEYKALDKGRTVQKIDRWFPSSQICSCCGCITGKKPLWIREWTCPECGEVHDRDVNAAKNILTEGKRILGASSCPDR

SEQ ID NO: 3940 - protein, 383 aa, unknown
  TnpB Polypeptide
MEPGQGRGGALVGGELQGSVRLGPGRAGERAAQLGRFQTGPPRRRPCRLPTPQAQGPGRQACRFTTGAIRVEPDRHHVTLPRLGRLKTHESTRKLARRLEQGTARILAATISQQGGRWFVSFTCQVQRAEQRPRRPAATVGVDVGVAQLAVLSSGERIANPRPLTAALGRLGRTSRQLARQQGPRATDGTPRRPSAGWRKTQRELARRHARVANLRAEALHQLTTSLAADYGTVVVERLNVAGMVRNNRLARAIADSGMGQVRRLLGYKCPWAGGRLVEAGMFFASSKTCSVCGMVKAKLSLAERTFRCQACGLVLDRDQNAARNLAALVDGIQQIELMVAGSGPETLENACVRDCQPTRHGGRSGNPDPGREAAGSQQPIWV

SEQ ID NO: 3941 - protein, 379 aa, Sneathia sp.
MKQLKAYKFRIYPSDEQKIFFSKTFGCVRLVYNLMLNDRIKAYEESKGNSDKKLKYPTPAKYKKEYEFLKEVDSLALANAKMNLDKAYKNFFRDKTIGFPRFKSKKNTVQSYTTNNQNGTVNIVGKHIKIPKLKSLIKIKIHREIKGIIKSVTISRVASGKYYVSILCETEINELPKTNSNIGIDLGLKDMMILSNGEKVGNKKFSRKLERKLRREQRKLSRKQEVAKKEKRDLKECKNYQKQKIKLVKIHEKIMNSRNDFLNKLSTEIIKSHDIICIEDLNTKGLLQNHKLARSIADVSWYKLINKLEYKAKWYGKEIIKIDRWYPSSQICSVCGENTGKKALSIREWTCPFCNTTHDRDINAAKNILAEGLRIRQAV

SEQ ID NO: 3942 - protein, 396 aa, Aphanothece sp.
MKVSSDLAKDIDDTLLTFAVACDWINQNTPAKLTNKQAMQSLVYQDVRAKFGLSSNLAIQAVRRVCYNRKTAKQKGKTVKEFSPTSISYDARIFSFRESDWTVSLKLLHKRHKFELLIGNYQRGILKGTEPTSATLVKRKNGHYYIHINLDKPVPKLIETDDVIGADFGRTDICVTSVGDYWSGKQITDLRNHYAILRAVFQKKALKGTRSTRRRCRQLQQRLSGKEKRFQKHINHVISRKLVNNAVANKKAIAIEDLTGIRERTNQNPRSKKDKRLGNNWAFYQLRQYLTYKCLLAGVKLILVNPAYTSQTCHKCFVIGDRNGKRFTCSSCGSFDADWNGSKNIAALGSLINRPRGTGLSCEIKRKVQYIQLTLFDALGLPKTPSSSRGNQAKVG

SEQ ID NO: 3943 - protein, 345 aa, Shigella sp.
  misc_feature (221)..(302): Xaa can be any naturally occurring amino acid
VKRLQAFKFQLRPGGQQEREMRRFAGACRFVFNRALALQNENHEAGNKYIPYGKMASWLVEWKNATETQWLKDSPSQPLQQSLKDLERAYKNFFQKRAAFPRFKKRGQNAAFRYPQDVKLDQENSRIFLPKLGWMRYRNSRQVTGVVKNVTVSQSCGTWYISIQTESEVSTPVHPSASMIGLDAGVAKLATLSDGTVFEPVNSFQKNQKTLARLQRQLSRXXXXXXXXXXXXXXXXXXXXXXXXXXXXXXXXXXXXXXXXXXXXXXXXXXXXXXXXXXXXXXXXXXXXXXXXXXXXXXXXXXRCLLFRQRTQASVARAVVIQRKKTACHKVNSDARYVDIQRTPM

SEQ ID NO: 3944 - protein, 412 aa, unknown
  TnpB Polypeptide
MLLVEQHVIRCGDPRWNALDQAAFASKNLYNAANYLLRQAFFKTGKRPGYATLAKQMKASPDYCALPRKVSQQVLKQLDHDWQAFFAAQKAYQLSPAAFRGRPRLPKYKHKTAGRNLLTYTIQAISTPALRRGDVRLSGLPIAIQTRQPRVRQVRIVPHTTHYAVEVVYDQEPSVAPNLNPAWYAGVDLGLDNLAAVTSNQPGFVPFLVNGRPLKATNQFYNQRRAELQARLPVGGSSKRLDRLTDRRNRRIQAELHLASRRIIDHLARAGIGTLVIGKNPEWKQDIRLGRRTNQNFVSIPHARFVDLLTYKAELVGIRVVVREEAYTSKCSFLDLEPIEKHDVYAGRRVHRGLFVSAAGRRIQADVNGSYNILRKEAPCAFDAAGVEGAVVRPVRLALTNTKTRKSGQRHQ

SEQ ID NO: 3945 - protein, 375 aa, unknown
  TnpB Polypeptide
MYKAYKFRLYPNDKQKELIHKTFGCARFIYNHFLYECKENGYQKAYDMCKKLKELENNYPFLKEVDSCSLRNSIFNLEDSYKNYFSKRSEYPKFKSKFNKQSYRTTCIRSSYKGKDYSNIEIDLINRKIKLPKLGLVDIRGYRNLENINRRIINVTVEKETTNKYYVSVLVEETEVKKEKVIPSNIVGIDLGIKDLVVTSDGEKYRNPKKTEKREKRLKRLQRKLARQIKGSNNYNKTKIKIARIHSKIKNSRKYNLINIVNKLVNEHDIIVSEKLKVSEMVNNHKLAKSLLDASFNKICDLLKWKVNLQGKYYYQIDTYYPSSKTCSCCDNKSEETKNLSIREWECKVCGNHNDRDLNASINIMFEGLKIHYQN

SEQ ID NO: 3946 - protein, 307 aa, unknown
  TnpB Polypeptide
MFWPRTLIGGPEVAPPRFRSRKDRRQAIRFTRNARFTITAGGKLCLPKIGEVEVRWSRDLPSEPSSVTVIADATGRYFASFVVQAGDDPLPDAGTEAGIDLGLTHFAVLSDGRKVASPRFLRRAERKLRKAQRALSRKAKGSSNRDQARVRVAKVHARVTDSRRDWLHKESTRIIRENQAVYVEDLCIRGLARTRLAKSVHDAGWSAFTEMLEYKARKHGRTFAKIGRFEPTSQVCSACGVKDGPKPLRIREWTCSACGVTHDRDVNAARNIVTAGRAGTLNACGDGTRPALAVAAVGETGTHRGAA

SEQ ID NO: 3947 - protein, 488 aa, Flavobacteriaceae sp.
  misc_feature (287)..(287): Xaa can be any naturally occurring amino acid
  misc_feature (376)..(376): Xaa can be any naturally occurring amino acid
  misc_feature (421)..(421): Xaa can be any naturally occurring amino acid
  misc_feature (443)..(444): Xaa can be any naturally occurring amino acid
  misc_feature (453)..(453): Xaa can be any naturally occurring amino acid
MINSFKIPEKFSFRTRLFVVMILMLFVAGLLILGTTSIQYESQRENYHLGRLDRKEIQIKRHIDYLVNKHNLINASDSLWNKYASDFEKINEIHNVQYSLFNLEGRPLFIYHSPLEVIANDYILDAILLNKILNSSQGKYLENYSSDIDKFHASYRLLKDRFQRPYGILFFPYFEDVSFSENELNTFLQNLYQVYIILLIGVIFIAYFLSKFVTRSLETIRVKMGKMGLEKKNEKIYLKNATREIDSLIKSYNKMVDDLEESAEKLAKTERENAWQEMARQVAHEIXNPLTPMRLTIQSFEHTFNPDDPDSNQKLREFSKLLIHQIDTMSEVAEAFSNFATLPKPTMRESDLVEVTQMAINIFQQDYIVFSSNEAXIFHKMDQTQWIRVITNLIQNALHSVSKKKTPQIGVQILTEPTQTXISVSDNGSGIPEKLKSKIFEPXXTTKSAGMGXGLGIVKNIIKSHKGKISFISTQKKGTTFSIVLPKV

SEQ ID NO: 3948 - protein, 226 aa, unknown
  TnpB Polypeptide
MEKAYKFRIYPNKAQEELIQKTFGCTRYVYNYYLVKRKTAYEERKETLNYNACSADLTQMKKATEWLKEVDATALQSSIRDLDEAYQNFFRRVKNGEKPGYPHFKSKKDNKKAFKSKCVGTNIKVLDKHIQLPKLGLVECRVSKQVEGRILSATVSQNPSGKYFVSVLCTDVEWQPLDPTGAIVGIDLGLKEIAITSDGQHIPNPSRQVTEETCQTPTAAIPKTKG

SEQ ID NO: 3949 - protein, 134 aa, unknown
  TnpB Polypeptide
VARLHEHIANQRLDKIHKMTTILVQDYDLIAMETLMPKNMVKNRKLAKAISDAAWGEVARQLEYKTRWYGKCQVKVDRFFPSSQTCNRCGFVNKATKDLAIREWDCPQCGEHNDRDINAAKNILDEGVRIVNAA

SEQ ID NO: 3950 - protein, 549 aa, unknown
  TnpB Polypeptide
LDAITVVKTIRKKGTLARNQTYRAFVARPSHILDFNGEVLDAERIMSELASEVRNLSAYATYVVRNDAKLKGKLSRVSTTAPAEAGRQAGVVMPDFLVPDKKDENGEPLKDKNGEPIKLKTGKSRKERLFRHRVVTAHRSWQERINAANGESDKYVSQGWKRTVNASAPSYGEDTVNLGTVDKQYATIENNPFTDREIILKMIVHGNWYRLIFNFDNTRFTEGKVTLPLVKVEKAQPVFIFSVVTDNPVAQFSSDYVIGVDVGINDYATIVVRNSATGRIVYQTTLSQRVHSLWNSVRASERQVRALNKKADKLLYQRQAHMSAIDEAQLHREAASRKKRELAIVAAQEIAYLSHSYGNAVVAVEDLGWIRNTMQNGRWNRGAFVQWLTHYVTQNGGWVVVVNAANTSQVCHICNEQVTHPTHQLSVCPKHGEMDRDVNAAANIAARAVPRVEKARKTRAKNRKLQAQTPLKTPVARGSLKYPGRDRTKRAPTPKRKRRVAREVNIPSSPARVVMTSVLADCGTYGAVETSKAAINQGNITCECAGYTA

SEQ ID NO: 3951 - protein, 485 aa, unknown
  TnpB Polypeptide
MAQLASEVQGISAYSTYVVRNDEVLGAELMRITATAPAEAGRQAGVAMPDFLVSGRGKSRKEKLLQYNVVAAFRSWQERIAAANGDSSKYVSWGWKRTVNASAPSYGEDTVNLGAVDKQYAVIENDPFIDGEIILKMIIQGEWYRLIFDFDNTRFSEGKVTLPVIKVENSKPVFIFSVVTDNPVVQFSGDYTIGVDVGINDYATVVVRNSTTGRIVQQTTLSQRVHSLWNSVRASERQVRALNKKAEKLLYDRQAHMAAVDEGQLHREAASRKKKELAVLAAQEIAYLSHQYDNAVVAVEDLSWIRNTMQNGRWNRGAFVQWLTHYVAQNGGWVVAVSAANTSQVCHLCGEKVEHPEHKVSLCPKHGEMDRDVNAAANIAARAVPKVVKARKTRAKNRKLQSQAHLRTPIARASLKYPGRDRTKRVPTPKRKRRVVGEVNLPISPARVNTTRVLADCGAYGVAETYQAAINQGNVAYKCKLCNLN

SEQ ID NO: 3952 - protein, 416 aa, unknown
  TnpB Polypeptide
MAIQVTRSYVGSIQNRQQVCDGLDSLGDSASKLWNVARWTAGRVWDEIGKIPDEGTLKAYMKNQACWKDLNAQSSQKVIEELSDAFQSWFDVRQNDKKANPPGYRKHGDTRPRSTVTFKVDGFKHDPENNRVRLSKGSNLKEYWSDFVLCEYQTRPDVDLSEVNTVQNVRAVWNGDEWKLHFVCKVDLETTDSAGDEVAGIDLGITNLATVAFPDEYVLYPGNALKQDKHYFSQAEYDTEGENGPSEKSKWARRKLVARETHFYHVLSDAIIEECVERNVGTLAVSWPENVRESDWGTTGNKKLHTWAFNRLSQYLAYKGEERGVEVLKENEWDTSKTCSQCGDTTKSNRKHRGLYVCSSCELVANADCNGAENMRQKITPSPHGEDRSNGCVAQPSVHLFDRESGTFRSREQVVS

SEQ ID NO: 3953 - protein, 417 aa, Streptomyces sp.
LCSSEPTGKGGGPGDPCVQVPHAAHRGPDDCARRDAARPLLALQRSIAGTPGRLAACFEDDSPVRAAVRAAQGDPAFDPERQGRWSFSSQQATLRRLDKAFAAFFRRVKSGETPGYPRFRGVNWFDTVDFPKDGDGCRWDSTPHDAVTRVRFQGVGHVKVNQHRPVVGKVKTVSVKREGRRWYVILTAEQTPPEPLPQTGSVVGIDMGIASFLTTSNGEHVANPRHGRKAAAKLEAAQQALARFPRVRRDKRTANHRRAVQKVADLHRKVRRQRLDHAHKTALDLVREHDFMAHEDLKIRNMVKAPAPKPDPETPGGFLPNGAAAKAGLNHSISDAGWGVFLTILRAKAESAGREVIAVDPRNTSRTCPECGHVSTENRPTQEKFHCVSCGHIAHADTVGAINVLRAGLVRREAKLA

SEQ ID NO: 3954 - protein, 442 aa, unknown
  TnpB Polypeptide
LKIYKAAKLKILGSHIIEPTIRIYREALSFVIDVCYKEKAGWLTLGGKDRYNFVEKLIHTTSDNPNPKYAEFDKKFYKMPSYLRRSIVAEAIGIVISYLSSQDRYTDKKTKALNEGKKFTDKPPRLSLNHYSFPVLYKNGMFDSFNFNGTCRIKLFIDNDWKYVNISFDKRALYSSKTFRFDGYTMDSPSLVFKSKRFYLNVPFYKNVELSKEQDIVIGVDLGITNSAVVSAVMKDGTVIDRLFINQPKEKDHLKYQLERLSEANSFSGCKNKKPNIWRKINNLIGAIATQTANDIVDFAKKNNAKVIVFEHLHFKDRKSDKKKKKLRSKSQYWTKSRIQEMVKNKAHSMGIRFSRVDARNTSALAFDGSGYVTRNTKGDIATFTTGKIYHADLNASYNIAARYFLRELERAKVPVRIDRTSQTLDTLINLAMMPHHPSKVA

SEQ ID NO: 3955 - protein, 456 aa, Thermocladium sp.
  misc_feature (140)..(140): Xaa can be any naturally occurring amino acid
  misc_feature (307)..(307): Xaa can be any naturally occurring amino acid
MPSPGQFLGNEERRPIPPAIPGEDIKEVEFKNRRTNVVRLLPNGFQERKLRRLANTSAKLFNEVNYERRQQFFHEGRVDLKGTYDKYYEKYKDELGSANTQQVLNKNNEAWSSFFSLLKLRKENKLPPHMSRVSPPRYWXDGETGERKLLLVVRQDRYVVDEQKLVLKDFHLKIDFTGRLRWHGKQGRLEIYYDEVGNAWYASIPVEVGVEKTKKGRRSKHVVRGERKSIQVKSPKGSKMASIDLGINVLASVVVDDGTWLLYKGVRAKEDYFYLGKRIAEAQSSADKAKNIEEYEAYEELNRERRXLFKKLIRRLLHLYRNFASHLMRELHERGVSTIYLGYPFNIAQDKGNKFTVNLWSYRKLMEVIELKAQEYGIRVFEVIEYNTSKYCAYHGVEVERGPRGVVNCPKGHRLHSDLNGALNILKKATGIVISTIKRPLSFIVDHNRVAPVKGA

SEQ ID NO: 3956 - protein, 307 aa, unknown
  TnpB Polypeptide
MQLVERHIIKDDRFMDICVKSKNLYNQSLYYWRQSIFGKIQYFSEYELTKLFAEYDEENYRDLPAPTSQQISFLIDGKGLKSINQGFNKTRGKMKSILPLLPKRYKTKTGNRIQKGTSNKIQALTQNRNNRVNDYIHKASRLIINEAKKQNITKIIIGKNEKWKQNIDIGVKNNTSFCSIPHAALIDKIRYKAQMEGIEVILTQEAYTSKCSAIDLEPVKKQQTYVGKRVKRGLFRTGNGLLINADCNGSLNIARLGLGLSGLDLSALSVSGNEIEISESLVRCVSQPKKVNVLDNKTKLLEQLYNR

SEQ ID NO: 3957 - protein, 485 aa, unknown
  TnpB Polypeptide
VAKFEVPEGWTAQAYRFALDPSPSQVRAFRSHAGAARKAYNTMLALVRAVMGQRQAERSYGIAEEDLTPVLNWSLAGLRREWNRRKDDVAPWWAENSKESYNTGLDALARGLDAWSKSRKGERAGAAAGFPNFKPARSRRSVRFTTGTIRVEAGRHHVTLPRVGRIRVHESTRKLARRIEAGTARILSATLAEDSSGRWHVAFQVIVRRTAAAPAHVGAGVPAVGADAGVKADSLLVIAAPGGREIRRVPAPKSLTAAQARLRALQRRAARQHGPWNPETRTRQPPSKRWAQTNRRIGRVHARAAAVRRDVLHKETTALAQRHQVITVETLNASGMRSAGGARKRGLNRALADASLAEVRRMLTYKCPWYGSRLVQAGRFYPSSKLCSACGRRKPSLTLADRTYNCDHCGVRTDRDLNAAINLARLGEPHLGEHGPAGSGPVAGRGATRETEPARAGDAGGRETSTPHQRPLGKTGTASPQGEAA

SEQ ID NO: 3958 - protein, 444 aa, unknown
  TnpB Polypeptide
MHSPNSELNCGGLLVQAKTNGAGIPLYYDERTHPTMCYKVVKMRIEPNSSQRKVIDDTIDYNRYVFNFLITANKLTYAKESRLLSEFEMNNLCTTLRKRWSCFRVMHSMTHNDVSRRVHQACRKCMDNAVSKKRRAVAKGAMSAEDPLPMTWPRYRNHNRYDSYAHLSNRDFGIVESTNESGKMVRRLKLGKVKGTVRCYNQGTPIPGIPKTCIVTRKDMGTHTEYYACISYEIAESEQRHPDNPKAVGIDLGIRHIAATSEGKLYDHQNDMREDLRKLKKLSNRLSKDSHDSRKRRKSLSRLKHHHKRMVNKRKENIEHISKEIVEDHDIVVMERLKVKKLWEKSLGRSMTRGFVNSSLGMLRRRISDKAECAGVKVIEVDPRGTSQTCSQCGEHVGKTLNTSIHRCPVCGYTADRDINAAINILLKGLTGNPVPARDESPAA

SEQ ID NO: 3959 - protein, 330 aa, unknown
  TnpB Polypeptide
VYKRPQADLVRGRDWSFVNDDNGGLLLSIATLTGRTKVRFLVKGFDDVINDSDIPGLNIEDPKWKFGEAKLLSSGGKWFIHISVTAKLQATSNEDISNIVGLDRGLVNIVTAADQSGFTARYSGDDARKIRARYNKTRTSLQKKGTRGAKRVLKRLSGRENGYMNDVNHCLTKALCENYPEDTLFVLEDLAGVSFEERNFHSKEQANELRSWTFYDFGEKLKYKAALRGQQVIEVDAYKTSQRCPHCGRYDKAARHRDTHEYICPACGHVENDDEVGALNLMFLGAEYLKGDKKPSFTKMEPKSKKGKANANAAKKNAENTIAENAFVLI

SEQ ID NO: 3960 - protein, 158 aa, unknown
  TnpB Polypeptide
MQGMAVFSEEIELEKAGFFRRNEKRLAREQRKLSRCVKESRNYVRQKKKVASCHEKIRNQRKDYLHKLSRRITDQYDIVAVEDIDMKAMGQCLHFGKSVQDNGYGMFRNMLDYKLTWKGKKLVKIDRFFPSSKKCSKCGKIKKRAGIIRKSIPLHVWK

SEQ ID NO: 3961 - protein, 415 aa, unknown
  TnpB Polypeptide
MKIIKKSLIQNSQAWKPSLYEGVLVKSNSWFSIRKKQNCRFNLPPKLITTDNIRCKKIHIKPTIKQGNILLTWFELARIAYNISIKNLRKNNRTTFREMRNIVKQEMRNNLYTNGLIKNSEVYQQTLDNAVKDVFKARKTAISNIKAKNIKFFRLRYKKKSHHIKNMVLETDAIHKSGNGLKKRDLQNLRPSESIKNTKILRIGYNTRTHKFVIYMPYDKQTNKQVKRNKICALDPGIRTFQTLYSPSGITYQFGDEKNIIRKNIDRIENVKNFKLKSWYKKYVSRLREKLKNRIADLHWKVSSFLCKNFDTILVGNMSTKGIVSNRLHLHSKTKQMTYTLSHYMFKERLSSKVIEYNCSFKVVDESYTSKTCGKCGELNQSLGGSKQFNCPRYMCLYRMDRDIHGARNIYIKNC

SEQ ID NO: 3962 - protein, 558 aa, Kutzneria sp.
MPEWSPAPPASPRCGRSATPRTPDGCSAGTAAGGRQPPAATSGRRANAAPTPARRRPRGSRRCRRKPVQDRKDDPQSPAPPPSRPDGRPPPRGPPPGWRGPACRRCSRRSCLTSEETPVSRPGRNRTPAKQDRNSRFGAWPKRRPPSARRQIATGGRDSLRTVTTHVKRAFKYRFHPTEAQAVELSRTFGCVRKVYNLALAARSEAWTRRERINYSQTSAMLTAWKRTEELAYLNEVSSVPLQQALRHLQSGFANFFAKRARYPRFKSKRKSRASAEYTSSAFRFRDGCLTLAKMSQPLDIVWSRPLPEGVVPTTVTVSRDAAGRWYVSMLCEDPGVQPYPATGTVVGVDVGLDHLLTLSTGEKVVNPRHERTDRARLAKAQRNLARKREGSNNRDKARRVVDRVHARLADRRRDHLHKLTTRLVRDNQTLVIEDLTVRNMVKNRCLARAISDASWTEFRRMLEYKAAWHGREVVAVDRFFPFTRLCSVCGVLRNRMPLNVRTWTCDCGATHDRDVNAARNLLAAGLAVSVCGAGVRPQRNTPSGQSATKQKALQREP

SEQ ID NO: 3963 - protein, 398 aa, Kutzneria sp.
MVISMKQVVPVRLLPTPEQALALADTLHACNAAASWLSEQMHTERVLRKFDVQKRFYTQLRERFGLAAQPAIRVIGKTVDAYSTLNANLRAGSYGLPGSGRRRTVENTPIVFRLRAGQPFDARCLSWQLGDAGHEGTVSIWTTAGRLRNVRIVGSRAHIALLRSRPIGETDLLHRDGVWLLHAVIDTPVTPQREPVNGFLGVDLGVVNIATTSDGDRRCGLRLNRYRKRQLRLRKRLQAKKTSSARRLLKKRRRKEARFATDVNHQISKSIVAEAERTGRGIAIEDLGGIRARVRLRKPQRAMLHSWAFAQLGRLLTYKAQRAGVVLVQVDAAYTSQTCHVCGHVDKRNRRSQAAFHCGRCDFVGHADHNAALNIAARGVKCWGEVMRPDAAPILAAS

SEQ ID NO: 3964 - protein, 380 aa, unknown
  TnpB Polypeptide
MLRAIKVRLYPNKEQEQELNKVLGAYRFVYNHMLAKRKNAYESDKTFLKVTELSKWFHGTLLKDEQYAWLKEQNTKVMGQATRQMDDAYQKFFNHNKGFPKFKSKKDKQTALFPCGAVSKRNRFGTKHITLINSLKNLRFRCSDLYHKRLQKYKDKIRSATLSKTKSGNFFLSILVDIPESELIKFKKTNKQVGIDLGVKDFAITSDGAVFENKHFFKGAERKISKLHRQLSRKKRGSNNRNKQRVRLAKAYERMTNRRNNYIHSVVNEILKSYDVVFMEDLNVHGMLRNHNLAKAIQEVGFARFKSVLKTKALQNDKQVVLIDRFYPSSKTCSCCGYKNQGLKLSERFWTCPECGEHHDRDINAARNILLEGQRRLQAG

SEQ ID NO: 3965 - protein, 400 aa, unknown
  TnpB Polypeptide
MKGLSIVKTDSNMMLIAYKYRMYPDEEQREMFLKHIGACRFIYNLSLEQKIKTYETDKTTLSCYDLNAMLPDLKKELEWLKEVNSQSLQQTNRNLDSAFKQFFREKKGFPKYKSRKNPLQTFSIPQHYKVDFDNNRVKLPKIGWIKTKFSRLFEGLSKTATVSMTATDKFFISILVEDGRETPEKEPFGYDSTIGLDVGIKDFVTMSDGTKTDNPKFLRASIGRLKVLQRRVNRKKKGSKNRDKAKYQVAKQHEKITNQCKDFLHNVSSKIVSENQAIAIETLNVTGMMKNHRLAQAIGDVSWSEFFRQLEYKCEWYGKTLLMVGQFEPSSKICSVCGSSNNDLKLSDREWTCAGCGTRHDRDVNASINIKKFALQDQNLIGVIAPAGSRGEPVGDVIDG

SEQ ID NO: 3966 - protein, 443 aa, unknown
  TnpB Polypeptide
VKIIRGFKTELDPNDRQRTLFLQHAGAARFTYNWGLQRCIESRTNGEKKPSAMELHRELNALKDTEFPWMRESSKCSPQESLRNLDKAFANFFRKCKLKKQGKHKGKVGFPQLKSRKKGIGSFRLTGSIHASETHVRLPVIGAVRLKEHDYLPTSDVKVLSATVSERAGRWFVSLQVEIENQDLHRKRDERHPVIKDEDHPIVGVDLGIKTLAVCSDGTEFENPNALRSNLRQLRRANKSLHRKVRGSSNRRKAARRLGRLHWRISNVRSDVLHKITTRLTRIKSVIVIEDLNVSGMLRNHHLARSISDVGFGEMRRQLTYKGEENGCLIVLADRFFPSSKTCSDCGWVNGGLKLSDREWVCLECGVVHDRDLNAAVNLENWGMRFLESEFPILAVSSTERQNACGGISSGSDLGRCETDSDRGSILGEAGIRLEICRAGMFQ

SEQ ID NO: 3967 - protein, 403 aa, Ruminococcus sp.
MYTNIFTERKIMKLLKSFKTEISPTSEQKNKINRTIGTCRFVYNFYLAHNKEIYEQENRFVSGYDFSIWLNNDYIPDNPEFSWIKEVSSKSVKQSIMNAQKAFKNFFDKKASFPKWKKKINSNIKMYFVRNNKTDCQCMRHKINIPTLGWVRLKEKGYIPTSKDGYVIKSGTVSCKAGRYYVSVLIEMPENEKSVLNNFGMGVDLGLKDFAVCSDGKVYKNINKGSRIRKLEKKLKREQHRLSRKYESLKKSKNNLKGEVTRQNIRKQKLKVQKLYHKLDCIRTNYINKVISKLVKTKPKWITLEDLNVKGMMKNRHLSKAVAQQKFFEFRTKLTSKCKEYCIELRVVDRFYPSSKLCHKCGCIKSDLKLSDRTYICSKCGYITDRDFNASLNLRDCFTYRIA

SEQ ID NO: 3968 - protein, 591 aa, Scytonema sp.
VLTLPNLSISVIGFIDAHALDVSVAESTKSYTDQIDFWHWGELFTISNLMDSARHHCLSMILVGKSKLDCNKELQRLFNINKRYSNSIYTEVQGIVTNVNKNRANHIKFLEGQIKSIKSDMKKRSKQIKEFAKQENILKNQKKGFKTSKTKIKKACSIYARQRQTTQLQDAKFGLHQKKRRLHLLQSQLAHLKSTSPKYVLPDNDSFILVGSKDESSGNQLAQFDYIEKTDNFVLSIRTPYALEERLGGDYIRIDGLNFKYGKHNLVESISERCYKVKTKDGTEKWAIGYSAVTLRFYWKDNCWYVAATTDVNLPEITSEYLSGYVGVDLNADSIGWAVCDVQGNLLEYGDYKLDLHSTSSDRREAILRDAATFIALKAKKYNFPVGSENLDFSEKKKQLKEKGKKYARMLSSFGYTQWNEALDNACSKYGIYHKKVNPAFSSTIGMLKFMSMYGMNSASSAAFVIARRGRRFSERLPKQHHLLHSKSAYTDKKVKHVWSHWSKVAKSVKGTPRHQYFNARPHRTRVVTSHCHPTYSVGGDGLLLNPIQLELFELGENPRGNDTVTVAVSRSRKPRRCGQTSFTQISLDLN

SEQ ID NO: 3969 - protein, 363 aa, unknown
  TnpB Polypeptide
MKQVLDENCDYRRFCWNKGLETWNDMYQASKTSGDKTLRPSHYKVRNTLVAAKEDWQYKLSSRILQQAVADLDKAWQNFFDKAQPDWGKPKFKSKRAQRQGFKTDRAKIVNGKLRLDRPRKTPHEWSDIKIKGLRVIDGELRLVSIYREGNHYYAALTFKTSRQTQSPSNLETAVDCNVGHFDYSEGKVSILPSRLKRHYAKIKHYQRQLSRKVKTSHNYAKTRTKLQREYAKVSAIQHDLVQKFTTHLVTTYSKIVIEDLDVKRMQMSHVASKGLHRSLFGYFREVLTYKCDWYGNTLIVADRFYPSTQRCSACGFVKTGDDKITLTGNAKHGTKHNEYICYECGYRDDRDRNAVKNLLALA

SEQ ID NO: 3970 - protein, 366 aa, Heliobacterium sp.
VKINRAYRYELKPNVAQRILLAQHAGTARFAYNWGLARRITLYEAEKKSTNAIAQHRELNQLKQTEFPWMYEVSKCAPQEALRDLDKAFKNFFRGLKLGQKVGFPRFKKKGQDDSFRLTGAIKVNGKAVQLPRLGVIRLKEEPWIRGRILSATVSREADRWFVSLACEVEIPDPAPVLGPIVGIDVGLNHFAVLSDGTKVEAPKPLDKFLKRLRRLSKKHSRKQKGSTNRKKSALALARLHRRIRNIRQDFLHKLTTNLAKTKSEIVMEDLNVRGMMRNGSLARHIADVGWGEFRRQLGYKTAWYGSKLTLVHRFYPSSKTCSACGYVREELPLSVREWDCPSCGVHHDRDHNAAKNLKNYAKGIA

SEQ ID NO: 3971 - protein, 483 aa, Heliobacterium sp.
MKITARGEILALSDEAKTAVDDLMRIFSSAIRYSFQRLIEGSMSVGDIEKDVAFRYGLNIRQAKDAVEDARQTLISQRKLLPEYVKNYAKKAEAVEKKLKHVKSEKKRKALLSKLAKRQRKRDYYQQFITANTIPPVVFGGKKTFHQRCAGTISIEKWRDKRSNRVYARGDKTKKGNPNLRILYHDEKLFLEISTLAKTPSGRSVKVTVPLYIAQKKSKKTGRVNGRNYRQMLIDYLHTGDAYQVEILRRKGRYYVHVTFDEAAVRAYKVEYKGHAGLVGIDTNPDGFALTHIDRTGNYRHHTAIARHELTYARSNRRENLIGEMVKEVIQYAKDRQCGVAFEDLKFEHDQDSQRKFSRIRHNFIYRQMLTMLERACIRNGIEYTKVKPAFTSKIGLYKYTHQYGLDVHHGAALVIARRAYGMKEKVPRLLREKLLPTKSPSTEWKRWAMIHQRIEKEAKIITKGSVTPEFWRSHRKEILGLT

SEQ ID NO: 3972 - protein, 386 aa, Bacillus sp.
MIVKKAYKFRIYPTKEQEILIAKTIGCSRFIYNYFVGRQKQKDAYWYIVNEMVQNGQLLKNNWKGECFNKHKSIKALPNLKEHYPFLKEVDSIALQKSVEIVHDAYTRYYKKQNNEPRFKSKKNPVQSYTTKYVNGNIAILDQHLKLPKLGLVRFAKSKEVDGRIINVTIRRNATGKYFVSILVETEVQSLDKTGSAVGIDVGLIDFATLSDGTIYKNPKFFRTLEEKLASAQRILSRRKIGSSNWHKQRVKVAKIHEKITNARKDMLDKISTHLVKSHDIIGIEDLSVSNMLKNGNLAKAISEVSWSQFRTMLEYKAKWYGKQVITVAKTFASSQLCSNCGYQHKDVKNLALREWTCPCCGIHHQNRDLNASINLRNEALRLIGA

SEQ ID NO: 3973 - protein, 515 aa, Scytonema sp.
  misc_feature (315)..(465): Xaa can be any naturally occurring amino acid
MEKAYRYRCYPTLEQESLLRRTIGCVRLVFNKALAARTEAWYSRQERVDYVQTSALLTNWKKEDDLQFLNEVSSVPLQQSLRHLQTAFTNFFALRAKYPNFKKKRSGGSAEFTKAAFRWKDGQVYLAKCSEPLPIKWSRHLPNGCEPTTITVKLEPSGRWFVSLRINDPTDEKLEPVDKSVGLDVGITSLITLSTGDKIANPKGFDKHYQKLRKAQKSLSRKQKTSRNRDKARLKVARIQAKISDSRKDHLHKLTTRLVRENQTIVVEEQGSLRTWSKTQNLPVLSVMPVGVSLLGSWNTKPSGMVVRAASPFGXXXXXXXXXXXXXXXXXXXXXXXXXXXXXXXXXXXXXXXXXXXXXXXXXXXXXXXXXXXXXXXXXXXXXXXXXXXXXXXXXXXXXXXXXXXXXXXXXXXXXXXXXXXXXXXXXXXXXXXXXXXXXXXXXXXXXXXXXXXXXXXXXXXXXXXHHDRDINAAQNILAVGHTVTVCGANVRPDGHKSKGQLRKSGNGKKQKPKS

SEQ ID NO: 3974 - protein, 315 aa, Scytonema sp.
  misc_feature (315)..(315): Xaa can be any naturally occurring amino acid
MEKAYRYRCYPTLEQESLLRRTIGCVRLVFNKALAARTEAWYSRQERVDYVQTSALLTNWKKEDDLQFLNEVSSVPLQQSLRHLQTAFTNFFALRAKYPNFKKKRSGGSAEFTKAAFRWKDGQVYLAKCSEPLPIKWSRHLPNGCEPTTITVKLEPSGRWFVSLRINDPTDEKLEPVDKSVGLDVGITSLITLSTGDKIANPKGFDKHYQKLRKAQKSLSRKQKTSRNRDKARLKVARIQAKISDSRKDHLHKLTTRLVRENQTIVVEEQGSLRTWSKTQNLPVLSVMPVGVSLLGSWNTKPSGMVVRAASPFGX

SEQ ID NO: 3975 - protein, 358 aa, Pseudomonas sp.
MTDMKSTKTLKIRVRDKHAAQLREWSRAVNFVWNYVNELSSRSIREHGRFLSAFDLHKYTNGAGKELNLHSQTVQGISDEYVTRRKQFKKHQLRWRCSGGAKRSLGWVPFKSGAASWKGGQVYFNKQHFKVFDSYGLANYKFRSGSFNEDSRGRWYFNVVVDVDRQLSAGQSDVGIDLGLKTTATCSDAEKLDSGRFYQGLEKALGVAQLAGRKARVMAIHAKIANRRKDALHKFSNALVDRCGLIVVGDVSSQKLVKTNMAKSVLDAGWGQLKTMLEYKCGHAGIAFMVVNEKNTTQTCSSCKSLPDSRPRGIAGLGIREWTCCECGATHDRDVNAAKNILALGHERLAVGIPFQIN

SEQ ID NO: 3976 - protein, 567 aa, Pseudomonas sp.
VLTGIRFKAYPDAEQAETLSQWIGCARVIWNAKCDEDEYLRTFARKYMPKGTFAPLNKEYSHFKGEETSWLKECPSQLLRNSATIWHKTYSDFLKGRCGRPQRKTREKGNYIWITRELFQIERVAGVWQLRIGSKTNTIGILPVRWHRKPKIMPNSIWIKVTNGRWSVSFSYENGQDESELNTLDEHLAWLRGATPAQLDEWVVGIDRGVARPVQTPDQFFASDAKALAKQAKRERHTKRLQRRLARQKDKKSHKRKTTKLKIASLHRKTRQVREDFLHQTSRTLVDQSKVIVLEDLKLKNMTRRAKPKQCPDTGKWLRNNASAKSGLNKALLGVGLYKLEAFLSYKMHWANKPLFKVSAYNTSRECAVCGHTHEANRPNQATFHCQSCGHTDNADRNAACVIKKHAILLIKHSGTELSERGVLRLSPTLGRALNGSKTGTGKPATARRARSKNTAVVLKETAWPEARVLQPRVVHLQVHVYQLLGPSIGAQQRHDLLILVGVADRQARGHDLVDALVDEGIHLVGCRQVIRGVDVAEFRVLDQLTGDRNGVARPLAAVGTTRSPDC

SEQ ID NO: 3977 - protein, 366 aa, unknown
  TnpB Polypeptide
LPKVLRYRIYPTKSQRSKMANTLELCRWAYNETLAIRKNIYEQEGKSVSYYETKKLLPQWKEEKPELKEVHSQVLQEVVRRVDLAYQAFFRRVKDGEDPGYPRFKGRDRYDSITYTQSGFSLKPGKLWLSKIGDIKIKLHRAIDGEIQRLNLRRLPTGKWFVSFLVEVEPDDPLPKTGLSTGVDVGLKSFIALSNGEHVDNPRFFVHEEKALAKAQRKLSRGEKGTPERAKALKVVHRVHERITNKRDDFIQKLSLKLVESYDLIAFEDLNIRGMVKNHCLAKHIADAAWNKLIITTSYKAEWAGKRVELVNPNSTSQICSGCGQVVQKDLSERVHRCSFCGLILDRDHNAAINILRLGLQSVAKV

SEQ ID NO: 3978 - protein, 331 aa, unknown
  TnpB Polypeptide
MTYLTWAHDEDTVLSSWRVKVPVFDPEKGRGNSIWCPAHVPRKDAQLVREGNLRDSELVRRDGDWYVHLVVKRSVTVQDGYDDVLAIDMGARWVATCVFLSDRKTTFYGEEVRCIREHYKQLRKSIGKAKPRQGQQVVERIGDAEARKVDDRLHKIARQIVEDAEERNAVIVVGDLGGIRKDNDKGRYVNDKTHKMPFARLLNYIEYKAHDAGIDVQLVEEYDTSQTCNRCSCEGVRATQGRFKCPECGLDDNADKNGVFENLRFSDVCEPSVRNTLNIGKRALGKFSKPLSEAGAVPAQPETQVIVQRDDEPANLPLLVDSTPGGGTPRL

SEQ ID NO: 3979 - protein, 376 aa, unknown
  TnpB Polypeptide
MFRTIQVKLPFENSLVETAVAFNKACQIVVNYGSQHKIHNKDKLNKATYRQVREAIPNFPSALVQTARDQASEMLKRTNYAKIVKKRLSVRYDNRTFKFYPETNHVSLTTVQGRLNFPFNHYSYLDTWKGAYTNAQLIIRKKQALLNVQVDVPDVEVKATGKVLGIDRGVLNVAVCSDNTFFDSKHSRAVKGRYRYLRRRLQHVGTRSAHRKLQRLSGRERRFVLNINHCISKAIVNKPCDVFALEKLRITRTKENGKRFNRLLGSWSPNELERFIDYKAESRGKLVLLVNPYKTSQRCSKCGFVHRWNRHALDFHCGSCGFSLNADLNASRNIEMLGKAEHLRLCVNQPIVVSDEALPTDNGDDSYKPCLSRHSS

SEQ ID NO: 3980 - protein, 394 aa, unknown
  TnpB Polypeptide
MRRAYKFRLRPTARQHVALGQSLTSHRELYNTALQERRDAWRLKKIAVSYGDQSAQLKEIRKTRTDVAVWSFSSQQATLRRLNRAFVSFFRRVRAGETPGYPRFKPAHRFDSVEWPKDGDGCRWLPEARRLYLQGIGHVKVSIHRQVEGRVKTIQVRREGRRWMPVLSCADVPARPLQPTGAAVGIDVGIASFAITSDGRQVINPGFGRAAAAKLATARQAVARKRRGSDNRRRAKEALAARHRKIANQRRNFHHRAARALVARYDLLVLEDLKIRNMARRPAPRPDLDRPGRFLPNGAAAKTGLNRSIHDAGWARFVLILRAKAEEAGHVVIDVDARHTSDRCEACGHTAAENRASQAVFSCRACGHTVNADEHAARNILRAGLARLAAISAA

SEQ ID NO: 3981 - protein, 414 aa, unknown
  TnpB Polypeptide
MILRGFRYKLEPTPEQGSLFRQFAGVCRLIYNLALEQRRDWYRHFERQTGKKLNYISQARELTALRSEYDWVAAVSQTCEQQALRDLDKAFSRFFKGAAGYPAPRKKGSHESFRFQGRELETKRLNAKWSAVRLPKIGWVKYRDTRALPSAPVNATVTCAANGWHIAFACEVEAKASAGTGASVGIDRGVANTLSFSTGERLSVPTSLAKVDKLKRRAQRTASRRLRGSKRRALSLQKVAKLSAQAARMRRDWHHRVALDIAQRFELVVLEDLRIKNMTASARGTAEAPGKNVAQKAGLNRSILSQGWGGFEAILAYKLEDRGGALICVNPAFTSQTCSECGVIDRESRESQAVFSCRHCGFRGHADNNAAVNILRRNTASMRMEEGHQLSVEVRSGRGLRPPEKLPASAGSGC

SEQ ID NO: 3982 - protein, 639 aa, Rhizobium sp.
MIRVFETRISRDEAFTGKGLEGFAHLMSMAERKIHAFLMAGNEWTAENYASIYQKLGLSSTAFRSAKTSYEGKIDSVKELVKLNIATLEGKIKAKEKQAKEKLKENEALAGKVEKSVLKLKGLKGKIAEQKEKLDALPVVKVVPREKALARLKKLLDKADIERAKIKELRVATKKNRNDIHAHNRRIGNLQAKLDVAEARLQNPSIAFGSKTLFRKQNNLAKNGYNSHKEWLNDWRQTRKSSFFLVGARSAPGGNELVRLSLLPDGNFTLELRLPPKLASQATAATKVNGRVIPSIVFNGLNFNHGHDVLVDALAAQQPLSFRFIRDEKSWKVMVTVDEALPDAGTIDWSFGALGVDFNADHIAASLVDRFGNPVETWRFDFCPEGKTSDQNLDAMRKIAKEIALLAKQHGVPVVSEYLDFAKKKEQLGAAFGKAYAYMLSNLAYSAFDKALTSACARHAVHLRRVNPAYTSLIGRTKFARRYGLSVHAAAAVTIARRAIGLSERVPFVVQRNVLVPLDTGDHVTLCPPARTNIRHVWSSWSDLQRQYKKATAKAYAEAGRAEGSTSRSKARRPTRKGRQSLRDRWANGPSSLSGSGVAPAMERNTRARACLGGISSIETIRLPLDGFGWSQRSTEVSG

SEQ ID NO: 3983 - protein, 600 aa, Rhizobium sp.
LAEAVKAEKRVLRVPILDRELTAVALALTREAKNLYNTCTFFIRQINSAYAFDPESRNYRLKDDLHDHQRDAIAALNQVIGSVNAKRKLKQNEKTRLVASLESVMTVSPLYVALDVTVLDNVVKSHVDHEGQIVYRRLPGAAAQQVVHSVIDIWKASLSAQRDFAKNPGKYTGRPKFPSFQPKDGHFPLEMPYANMTRGLPKPTVLKELGDATVDQMKRFYAYDLKKAAVDACEKRGWLDAKPQHIRIVADGAAKVKIEVVVALNRTYPKGSLLHRIAKEHQTAFTDLKTVEDRETLILNHVRRADLKLNLAGVDFGQTNIATVGFSTGHRAIVHSGERPNEIVNRYHMRMDERLAACATPRMKELQRLKQELTDKGEKLGKDQRIELRKELQKGFADPEYRNLSARLNRIKSDFEHKISTDIVDQCVKRKIDLIVIGKNKGWKSDIDSGREQNRMFHAIAHARLISLIRYKAEAVGIAVVTTEESYTSQSSFIDGDELPVHAKLKTKKEKSQNTQTEADRSVPQHRFSGKRSAKNRTWFVRHNVVADKRFARIHADVNGAFNIIRKVFENFCHHTGLTYKFTVRWISPRRGAVVPIACL

SEQ ID NO: 3984 - protein, 601 aa, Rhizobium sp.
LAEAVKAEKRVLKLAVPNKEWAVVALALTHEAKNLYNTCTFLIRQINSAYLFDNETKTYRHRDDLHEHQRIALMAFNRVIEQVNAKRRAKQNDKPRYVASLKPVMSVPPLYVVLDVTVLDNVAKAHVDHEGQIVYRRLPASASQQVVRSVIDVWKASLAAQRDFAKHPEKYTGRPQFPGFKPKDGHFPLEMPYAMMVRGLPKPAVLKSLGDVTTDQLNRFYAYDLKQAALTACEKRGWQNAKPQHIRIIAEGASKVKIEAVVALSRTYPEGSLLHRISEEHQGNFTDLKTVEDREKFILNHVRRSDLKLKLAGLDCGQTNIATVGFSTGHRAIVHSGDRPNEIVERYHQLMDKRLAACATPRMMELQRLKQELVDKGEKLGKAQRIELRKEQQKGFADPEYRNLAARLNHIKSDFEHKITTDIVSQCVKHGIDLIVIGKNKGWKSDIDSGNEQNRKFHAIAHARLISLIRYKAEAYGIAVITTEESYTSQSSFIDGDELPVHATVKSETKKEKSTTQTEADFPVPQHNFSGKRSAKNRTWFVRHNVVAEKRFSRIHADVNGAFNIIRKVFTNFCHHAGLTYKFTVRWISPRRGTVVPIACL

SEQ ID NO: 3985 - protein, 408 aa, Rhizobium sp.
MLLTYRFKLAPTKAQYAALSQLCEDQRQLYNAALQERVEAWKKQQISITKLDQFNSLSEIRSFDRTYSSVPSRLSRWTISRVDDAFKGFFSRVKRGTKAGFPRFKPRSRWKSFGFSEWSGIRLNDEKLLFSGLTGRLKVRLHRPIPDGASLKACTFTRTGRFWYVAIQMDVPVAEGHAKPETIVGIDVGIEHLAFLSDGTYIENPRIGKAHQRKVRVAQRALTRCKRGSKRRIKVKEKLALLKRKTANARATYLHQASAKITRNYAFIGVEKLNVKNMTGSAKGTVEEPGKNVRQKAGINRAMLDASVSRLISFVDYKAERAGGQMVKVNSKNTSQECFFCESIVEKSLDERQHQCPHCGVDLPRDYNSALVVLKRACKAHGRAMPPRDANLGHQPVRCPGKMVAEAA

SEQ ID NO: 3986 - protein, 485 aa, Rhizobium sp.
MQTISIPYRCSSEDRTFIAAVQRVYSAAVRTGFANALDSKGNLVPEKALRELVKDRHAGDLIDAWSLHCATLEARDLHKSGQPQHMVFGGRKNLERRRKRLITRDEWKALRLRPFASRGDKSFGGNRHFKLSLDGTNCTFTMMEPQGDASSRKGMKWRKVHLDLAIMTGNAGEIICQAAMLASLKKINVMFRIDQKKLHITVDPVDLTAHPERRSSVRAVKGRAVGIDLNPESIGVSAVENTAAASDLKLTKLLDHFITETSAPGSTTNEVVREMLAKTCDRIIRLCRKWGAGVIAVEKGLGKLRSAGRSKDTNRKNNFWTRTVFVHMLMRKARLAGMEVVELWGGYSTTIGNIAFKAPDAAAAGAEMARRALARQAKIEETLPVFDGEIWDYLQKDFPSLEDFNDVTSWQGAHQAIKAAKIGYRRPHPEVLSPGPDDRGRRSASLGHAVLRLGHRGRPGLVFRPVTIQVQADSPVKRVYTRKSG

SEQ ID NO: 3987 - protein, 399 aa, Brasilonema sp.
VLTAIKVRLYPSHEQQVALSKSFGCARWYWNYALNACIQHYENTGKTLPLKSYKGLLPQLKVEYPWLKSDCYSAVLQCVAINLNKAYANFFEGRARFPRFKSKNHKQSIQYPQNVTIVGDCLNIPKVGEVKAVFHRSIEGKIKTVTISKTPTDKYYASILVEGNSKNNQISGDKIIGVDLGIKDFAIVHDGEQVTKYSNPKHLKRHERNLARKQKKLARKVKGSKSRNKFRKLVAKVHERVSNSRQDFLHKLSRKLVNESQVIVVENLNVKGMVRNRKLAKSISDVGWGMFVNFIDYKLKAKDGQLVEIGRFFPSSKTCSCCNHIVDEMPLEVREWDCPACKTHHDRDENASKNIRTEGIQILSMGGGNPVLVAQRRSKTNKPQGGRASVDEAGSPHFC

SEQ ID NO: 3988 - protein, 312 aa, unknown
  TnpB Polypeptide
LVGSELKDRYDHTGRLRLEIAGEPNWPEYEKQGRLDLWYDETDSTFRASQPVTISDDARETPLADEKAALDIGANNLVACTTTTGEQYLYEGRDLFQRFRETTREIARLQSKLREGRYSSKRIRRLYRKRTRRRDHAQEALCRDLLERLYAEGVDTVYIGGLTDVLETHWSVETNAKTHNFWAFKQFTERLVCTAEEYGISVEVRSEAWTSQECPQCGSTDRTTRHQDTLTCLCGFEGHADLTAFARRGASCVPTRTFGSRDVRNVPEAAHRESSQADGTARAVRVGRPQLVGVTTLSSSQRTAHRPEYRPP

SEQ ID NO: 3989 - protein, 368 aa, Bacteroidales sp.
VKSVEKAYRYRIYPNKKQKEIIAKTFGCCRFVYNHYLNKRKEIYQNDKTTFTYNMCANDLTKLKSELEWLKEVDSTALQSSLRNLDDAYKDFFNGAGYPKFKSKKTHRFSYKSKCVNGNIQYCDKHIKLPKLGIVKTKNKLVPQGRILNATISQEPSGKYYVSLCCTNVDIKPFEKTGNQIGLDLGIKEFAITSDGEMIPNPKYLKKSIDKLAKLQRELSRKTIGSSNRNKARMKVARLQEHIANQRKDFLQKLSTEIIRNNDIICIEDLQIKNMVKNHKLAQAISDVSWSEFVRQLEYKANWYGRQVVKVDKFYASSQTCHVCGYVNKETKNLSVREWDCPCCNTHHDRDINASINILNEGLRLLSA

SEQ ID NO: 3990 - protein, 376 aa, Serratia sp.
MKRAYKYRLYPTPEQAELLAQTFGCVRFVYNSILRWRTDAYYERKEKIGYLQANARLTALKKEPEYTWLNDVSCVPLQQSLRHQQSAFANFFVGRAAYPTFKSKRHKQTAELTASAFKYRDGKLYMAKSKTPLDIRWSRALPSAPSTVTISRDTAGRYFISCLCEFEPVSLPITAKTVGIDVGLKDLFVTDTGFKTGNPRHTAKYAKRLALRQRRLSRKKKGSKNRAKARLKVAKLHAKIADCRQDNLHKLSRRLINENQVVCVESLKVKNMIRNPKLSKAIADAGWSEFVRQLKYKGEWAGRSVVAIDQFFPSSKRCSCCGFSMKKMPLDVRKWTCPECGEAHDRDINAARNIKAAGLAVLAHGEPVNPESQHAV

SEQ ID NO: 3991 - protein, 364 aa, Crenothrix sp.
MKPLIKTLSVRVRDKHASLLNRMAFDVNQVWNAANAFSAEYSWVPIPEVGYMNCGTSAFDLMKDLKGIRKERGMIIDSTAVQETIAVHAKARKQFKKNKLNWRCSGGAKKALGWIPFKSGAAKWVNGCVRYAGFYFKVWDSYGLSKFAFRSGCFSQDARGRWYFNIVVQVETVERHADGGQVGIDLGLKTTATCSNGECLARQDCYRNLELKLGKAQRARDKKRVKAIHAKIKNTRKDAIHKFTHKIVKENSLIIVGNVSSKKLAKTKMAKSVLDAGWFMLKTQLEYKSIATQGVFLEVNESYTTQTCSCCGCISSNSPKGRTGLRIREWTCAECGTTHDRDINAAKNILALGHKRLAVGIPLL

SEQ ID NO: 3992 - protein, 431 aa, unknown
  TnpB Polypeptide
MQRLQAFRFELMPNGQQERQMRRFAGSCRFVYNKALALQKARYEQGEKKLGYAGLCKLLTEWRNSAETAWLADAPVHPLQQTLKDLERAYTNFFAKRADFPRFKKKGRSDSFRYPDPKQIKLDQGNSRIFLPKLGWLRYRNSRKVLGEIKNVTVTFSAGKWFVSIQTEREVAQPIPKGGAVGIDMGTKRFATISDGTFYAPLNSFKRHEERLRKAQQALSRKVKFSNNWKKAKARVQRIHARIANARRDFLHKTSTAISKNHAIVCIEDLQVRNMSQSAAGTVDAPGKNVWAKSALNKAILDQGWYEFRRQLEYKLACNGGHLIVVPPQNTSRTCPCCGHVSADNRQTQARFECVECGYQNHADVVGAINILSRGMQQLRDEGRDTTDASVGIQVGGLLESARMACGSNGVGRRKQEPTETTTHGHLCVAW

SEQ ID NO: 3993 - protein, 357 aa, Paenibacillus sp.
VLKAFKYRIYPNPEQQQYLAKAFGSVRFIYNKMLGDKMEYYKQTKKMLRNTPAQYKKEFSWLKEVDSLALANTQLSLEKAYKNFFRDPTIGFPKFKSKKNRRDRFTTNNQNGTIAIEEGKLKIPKLKTRIKVKMHRCLHGKIKSCTISKTASGKYFASLLVETVIEPLPRSQNKIGVDLGLKDFAIPSTGDVITNPKHLRRSEKRLARLQRELSRKQKGSRNRDKARLKVARLHEKIANQRKDFLHNVSTRMIHDNQVIVMEDLRVKNMMQNHKLAKAISEVSWSMFRSMLEYKAAWYGRTLIIAPKNYASSQLCSCCGYKNVEVKNLALREWMCPSCQTVHDRDRNAALNLLQLAN

SEQ ID NO: 3994 - protein, 279 aa, Paenibacillus sp.
VADSYESFFKKQNQAPRFKSRKHPIQSYTTKFTNGNIAIEGSRLKLPKLGWMHFANSRKLEGRILSATVRQNASGKFFVSLVCEVEKNPLPQVDAHIGIDLGLKEYAVCSNGERYANPRFYRQHEKTLAFWQRRMARRTPGGSNWKKAKQHVARIHERIANKRNDFLHKLTTKLIRENQTISIEHLRVVNMIQNPKLSKSIADASWGEWVRQLKYKALWYGRILRIADPFEPTSQRCHVCGMIHPEVKNLAVRQWTCIACGTLHDRDENAAHNIAQAAV

SEQ ID NO: 3995 - protein, 405 aa, Kitasatospora sp.
MRRAYKFLLRPTECQTRVLTEMLADHCSLYNGALQERRDAYRHPSKTSVKYGTQSAQLKEIRAFDPERQGRWSFSSQQATLRRLDKAFAAFFRRVRSGETPGYPRFRGTSWFDTVEFPKDGDGCRWDSTPQDPVTRVRLQGVGHVRVHQHRPVKGRVKTVSVKREGRRWYVILSCDDVPAEPLLATGATCGIDMGVVHFLTTSEGEHVPNPRHGKRSADALARAQRALKSFPKVRRDKRSARHRRAVEKVAVLHRRVRRQRVDHAHKTANTMLASYDVIAHERLSIANMVRASKPKPDPERYSGFLSNGSTAKAGLNKSVLDAGWGVFLGILAYKAESAGRGLIPVDPRNSSRTCPRRHCGHVSAENRPTQQKFQCVSCGYTANADRVGALNVAIRAGLVLPHVA

SEQ ID NO: 3996 - protein, 363 aa, unknown
  TnpB Polypeptide
MQKGVKFRIYPNKEQQNLINQTLGCCRLVYNMGLDIRNKAFENGEKVNYSKTSAMLTKLKKSDEFSFLRDVDSVALQQSLRDLDKGFVNFFQKHARHPRFKNKHNNHQSYRTMNPRNNIRIVGKYIRLPKLGYVKVRQSMDIGKINNATVVRTPSGKYFVVLNVEFEPEAKQNAGGSIGIDVGIKEFYSDSNGNVVSNPKFLKKLSKKLRREQRRLSRKKKGSNNRNKQRIKLAKVHEKITNQRNDFLQKISSILISENQVICIEDLKIKNMVRNRRLARCISSVSWGKFFNMLEYKANWYGNDIVKVPTMYPSSQTCSCCGYKNPLVKNLAIRKWECPNCHTKHDRDTNASINILNKGLSIA

SEQ ID NO: 3997 - protein, 366 aa, Cyanobacteria sp.
  misc_feature (346)..(346): Xaa can be any naturally occurring amino acid
DALLASFADGCNYTNETIKPSVTSKTTIQSLVYQTLREQFGLSANQAVRVCARVGANRKTAKLKGKPVKAFRPTSADYDARIFFFREKDWTVSLTLLGCRERIKLNLGNYQQGKLKGRAPRSAQLCLHKDGQYYIHIQLKDEPPKPIKSDKVIGVDFGRRDAVTSKGDKWDGKPIDKVRDKYPKARESIQRKASKGTRSSRRRCRKLLQRLSGKERRYQAWLNHNISKHIILDAKTNAAIVAIEDLTGIRERTNQQRRSKTERRRSNSWAFYELRYFLEYKGIKYGVEVVAVPPAYRSQTCHQCNHLGLRSEKRFKCANKACGWHGDADFNGSMNIANIGAVVTGXPGFEVRSLLAVLWATILQGC

SEQ ID NO: 3998 - protein, 399 aa, unknown
  TnpB Polypeptide
METEDIDYKNYVLKIRIYPNLEQKSYLHKAFGCSRFIYNYFLDKSQKAWNENKEYFNCIASERELTKLSKQIDYNWLKEVDSQCLKVTLKHLDTAYKNLYQARKEKRNYNLRFKSKKIHRESFTSTCINSNVKIDFENKRIKIPKLKSWIKYRDEREAFDYKSIQKITIKKTPAGNYFAAIHFRIPKTINTYEAKLDKSIGIDFGLKNFITLSNGEKINSPECLKKSLRKLKRLNKSFSKKKTNSIDGKKVFSSNKEKARIKLAKCYEKISNQRKYFNDCLSKRLLDNYDFIFIEDLNIQSMQKLWGRKVSDIAWSQFVNMLTYKALERNKYVFKIDKFYPSSKLCHNCGYKNEALSLNDRKWICPVCHSELDRDINASKNILKEGLRKLSDTDAQSGI

SEQ ID NO: 3999 - protein, 239 aa, unknown
  TnpB Polypeptide
VEDQLHWFQASLKMELQSSQIPVTYNVEENNISDICNVVGIDRGINFVVATYDSNHKSGFVSGKAIKQKRANYSKLRKKLQMRQTPSSRRRLKAIGHRENRWMQDVNHCVSKALVENNPKHTLFVLEDLSGIRNAIERVKTKDRYVSVSWSFYDLEQKLIYKAKQNQSSVIKVDPHYTSQCCPICGHTEKSNRNKKIHLFTCKNCGYKSNDDRIGAMNLYRMGINYLVDSQVPNTVVTE

SEQ ID NO: 4000 - protein, 367 aa, unknown
  TnpB Polypeptide
MLKAYKYRIYPNDEQKVQIAKTFGCCRFVYNQTLAYRKETYEQYKKSVNKTDCNNYCNRELKKKYEWLKEVDKFALTNAVYNMDAAYQKFFKEHAGYPKFKSKHDSHQSYTTNFTNGNIAVDFEDGKIKLPKLKAVKVKLHRKFDGQIKSATLSQVPSGKYYVSILVETEHAELSHTSQTIGVDLGIKDLCITSDGKKYENPKNIRKYEKKLIKLQRQLAHKEKRSQNYYKIKKKIALCHEKITNTRKDYLHKISHEIISENQVIVSENLQIKNMVKNHHLAKSIIDASWYELTRQLEYKAKWNGREYIKINTFYASSQLCSVCGYQNTGTKKLSVREWVCPVCGTSHDRDINAAKNILEEGLRQIA

SEQ ID NO: 4001 - protein, 523 aa, unknown
  TnpB Polypeptide
VIQLAYVVERRLYPNPYQEDFLNKKFRICHKIYNTAIRHYKKVIDEIQQDRWFLYNRDMYLTFIEDKKKSKEYANEISVCMAAYGLNEYDIHAYIGAQKTAAFANAIGINIVQKLGTSVYQAIKKVLFSTGKGIHYRKKGHTISFEDKKANSGIIYKESNDSVKVMGMEIMLKPIRWNDRYLMEAMKSKIKYCRIIRKPFKTGYKFFLQLVMDGCPPKKIRIGSGRIGLDPGISTIALYGDHTMGFHVLANGVEKYDQLIKQASMKYERRRRLNNPDHYNPDGTAIKGAKNWTYTHGMYRALFELKDAYRKKTAFVKQSHGNLSNEIVEHCSEIIKEPMNYQALAKKAKETSRQMKATSVKTATGIKNIRKYKRKKRFGTSINRRSPGAFISMLTNKMIQYGGVVIDIDLLKYKASQYNHVTKKAIKVPLSCRVKEIDGFLVQRDLYSAFLLYGMKQLQLQVEELVTENDTAQLHIESSVNLDEVYEIATQELGMVHPSKEQILLYDKSELEYVKQNEDIPKH

SEQ ID NO: 4002 - protein, 512 aa, unknown
  TnpB Polypeptide
MEQVLSAKLKLTPTTEQKNWLRAVSLAYRDALNYAARVAEFRRSRLCVTLARYAKSACSASVNANDKAKVPKGTKLQKLVHYSIYPIYGLPAQIAFDTTTAFFAWEPQANSAFGHFRSYKAFLGLSTHGLGTSLVGLPREILLTLPYASARGILGSTIALTRRQLPTPCQRCISPQAFDCISEVQFRRGTPYCSNLKLLVLWCLVLEVFTHTSFPVWNPITAVFKVHGVARHSGCFRSFRHLRGAIVPETADYLLVSLKLELSEITSAEKKRVVGVEVGCWYLAVATDTQERLRVSSFGAAPLAHKERARLAHKRDAVASKDLGCRSVAHCPRQSQFFSGKQVIHKASCYQSTRRRLQRRSTRLAKQQGRANRPKGKWSFAELLGFIDYKAVLSGSFAIKVDADYTFQSYPGCRSVTGANRPKKGLLFHCENYGFEQHAALVGDRKIPLRVVLTWQDSSRTGCILAIADVSSVDSKTDSKRQLFRAEVGHRSEAERLRRPTIPVLKEVGQDS

SEQ ID NO: 4003 - protein, 401 aa, Streptomyces sp.
LLSVATTCVKRALKYRFYPTDAQAAELSRTFGCVRKVYNLALAARTEAWARQERVNYNQTSAMLTEWKKTEELAYLNDVSSVPLQQCLRHLQTAFTNFFGKRAKYPRFKSRKKSRRSAEYTTSGFRFREGKLTLAKMTEPLDIVWSRPLPPGATPSTVTVSQDAAGRWFVSMLCDDPGVKPLPAADTAIGVDVGLDHLLTLSTGEKITNPRHERRDRARLAKAQRELSRKAKGSNNRAKARRKVARVHARIADRRRDHLHKLTTRLVRENQTLVIEDLTVRTMVRNRSLARAISDAAWAQFRSLLEYKAAWYGREVIAVDRFFPSSRLCSGCGALQDKMPLHVRTWTCGSCGTTHDRDVNAAKNLLAAGLAVTVCGAGVRPQRSTPGGQSATKQKPSQRKP

SEQ ID NO: 4004 - protein, 373 aa, unknown
  TnpB Polypeptide
LPSRVIEGAYIIAGRIVKSFRKRKKKGLTRKDKPEYKRVMITIPNTINWRFNKVSVSVLTHKGWVEIPLRVTKQFTHYLYEGWRVSQELKLRLVGRKVLVWLTFEKEVEVETKEGNHISIDVNENNITVAVFEDFKLRELRRYETGLGRIVANYSLRREEITKGNSTKNELVKKKLRRLREKERKIDVLRKSVKRITDIARSLNAKVIVGKFSLRAKEKMEGDKNAKLRHRIHQWSVVKFVEMLKTQPIDVAEVSESYTSSINPFDGKRLRRGKQIVEKVIRVFNPYLMTGAAHEGGGIKVFKVYARYLESGEVLLERDSIAPLNLAKKVDGRVVVFPSTSPNELRVTVYDPLRGVPVAELEVIKSKEKLRHG

SEQ ID NO: 4005 - protein, 349 aa, unknown
  TnpB Polypeptide
VQFKLLPTAEQDALLRETVAEYVSSANDLLDYCCGQTERQKLSTASFNAALPSAVKNEVVNTVKSILRKHERGACRTLPVLRKPVATWNNQNYKLATAGIMFPIWSGGKSKRIAVKAAIYDYQLERLGGKLGSLRITLKNDKWVAQVAVETQAETQPGNGVMGVDLGLKVPAVAVTDAGKTKFCGNGRMNKYVKRNYRSRRKELGEAKKQKAINQMENKEQRWMRDQDHKISREIVRFAVSQGVGTIRMESLKNIRQTARTSRKNKKNLHTWSFYRLTSFIEYKANMAGIKTEYVNPAHTSQVCPSCGLLNHAKDRKYLCPCGYSTHRDRVGALNIINAPVVDGHSRPA

SEQ ID NO: 4006 - protein, 475 aa, unknown
  TnpB Polypeptide
LPIQLKIQQESPDKIRRGMRPLFAVLVLNIFFYNLPAHMCYNIIRTQEGGVPMKKVKEMPYHIGFKVKIYPSNEQKHLIAVNDGAARATYNHLVATSNEKYRLSKTAAFVPSDRDRISYLESVTGAVKNIKNALPYLYEDDVDEQAIANAKLNYASAWKNQKERHTGVPVFKKKSYEQVYHTNAHYYLNKDGVMISNVRFEDRNHVTLPKLGRIRFGGSPKRVDMILKRKDDIRIGKITISRDSVGEYWASFSLNSEVPFFDELPKTGKQVGIDLNLLELVNDSEGKSSENKRFYVKAQAALCKSQRIQSRRAERAKKEKRPFKDASNYQKQRNKTAYLHRKVERQRNDYLHNISKKTVENQDFISAEDLKVRNLMKSHHLAKAIADASWRKFLTMLQYKGTFYHKIVILVPPQNTTQTCSHCGYVMKGEERLTLAIREWDCPQCKTHHHRDTNAATNVLNRGLQIAKESGLIQI

SEQ ID NO: 4007 - protein, 260 aa, unknown
  TnpB Polypeptide
MKIPFNVPQYGKYAIGYPPASADLMFRKHKFYLHVVVTLPDVEFVSNGKAIGVDLGVTRPAVSSDNKFHGNRHMKEVVKRIFRLRRDLQANGSKSAKRHLRCLAGREQRFRRDCDHVISSSIVKDIDAGTTIVLENLTNIRNRVKVYHGEANRRLHSWSFRQLRSFLEYKAEARGCQVVLIDPRKTSQRCFRCGFTSRGNRRSQSEFRVASVVFTLMQISKPLVISVTNTLSVGVYLLPMRSCQRAYRLALSQRGRAGTS

SEQ ID NO: 4008 - protein, 391 aa, unknown
  TnpB Polypeptide
LRGVPNKSIIRKLYKTYEYRLFTNRSQHAKLLSSLAESRHLYNEMLEMVKSHYDGTGKFLSRYDLTYRFKGRGGEHVPQTTVQTLADRLDKALKRFFHRRELGCKVGFPRFKGANRWHSIQLRQYGSGRDVFLNSETKRLHVPKKLGGRLKVKQHRPLEGTPKTVHLVLRADGHWYVLIVSDMGDAPEKRNGDAVGLDVGLKNFVADSYGNTVENPRCFRRGAKKLRRLQRKTARRKKGSNRKRKASKQAARQHLKIARQRKDHAHKTARKYVDKYAFIAVEDLRVSNMLKNHRLAKAIADAGWSAFKNLLMLKAESAGARVVEVPARFTSQRCFKCKEIVQKSLSVRTHLCPHCGYVEDRDVQAAKNILEAGMRPSGDKVGGCAVPSPRS

SEQ ID NO: 4009 - protein, 407 aa, Streptomyces sp.
VEAQGVIRAYRFLMRATARQAVALGEMLRDHCSLYNAALQERRDAYRHSSKTSVKYGAQSAQLKEIRAFDPERQGRWSFSSQQATLRRLDKAFAAFFRRVKAGQTPGYPRFKGVGHFDTVVFPKDGDGCRWGPTPHDPVTRVRLQGIGHVRVHQYRPVQGRVKTIGVKREGNRWYVVLSCDEVPAEPLPSTGVMVGIDMGVTHFLTTSDGEHIPNPRFLGAAAGELAAAQRHLATFPKRTRRRTKAHRAAVRRVAKLHAKIRRQRVDHAQKTARALVRDHDVIAHERLNVASMTRAPKPKPAPDRPGVFLPNQRAAKAGLNRRILDTGWGVFLAILTNKAESAGRIMIPVDPRNTSRTCPDCGHVAKENRVTQARFKCSACGFTAHADHVGALNVLNRAGLALCDAA

SEQ ID NO: 4010 - protein, 395 aa, Streptomyces sp.
MQLRYSFRIEPTPGQRMALSRAFGCARVVWNDCLRARRDARAAGEPFLKSAELSKRFITEAKKTTGRGWLGEVSAVVLQQSLRDLDAAYSNFFASLKGTRKGPRVAEPRFKSKRDNRQSVRFTANARWSVTGDGKLSLPKIGPVKVRWSRRLPSVPSTVTVIKDASGRYFCSFVVETDPADELLPALETDQGIDLGLTHFAVMADGSRVTSPRFLRRAERKLKREQRRLSRKAKGSRNRNKQRIKVAKAHAKVADARRDFHHKLSTKLIRENQAVSVESLNVKGLARTRLAKSVHDAGWSSFVTMLDYKATRYGRTLTRVDRAFPSSQVCSACGRRDGPKPLHIRSWTCSACGTRHDRDHNAGQNIKHEGRRIRAAQQAVPPTPGPGALARQRTR

SEQ ID NO: 4011 - protein, 444 aa, Streptomyces sp.
VADDAEGKADSRTRGCCRSTGPQGHRLPCCPSRAGRASSTQDVLPGVEELLGGPRRRPELQGPVAHGDVRGRPSGPGPEHRARAPPLGHGQHSQGGPAPVPVDQGPARGQARRRGEPDHRARLVKDALGWHIAFRVQSVEVKPEPHQGPEVGIDVGVTVPLALSDGGTYEHGEWLTEKEKARLLHLERRAAQRKQHRKPGERTSRRLHRTYDQIAGLRAKAKRRALDWRHRPHIRHRRGRSTHHHEHGQVGQGNHRGAREERCPEVRAEPLHQPGGMGPHGHHADVQDRPARRHPAQGPRPRHLPTLLGVRLHHARQPGEPGRVRVQEPRLRLVGQRRPQRSPERLAPVPDGPRAHPGCREGSRQACEARQARCRKVSRNLPAPAGRALQEERLIKPAHTDAPGRHAIRSSTGRRGDARRRRSQPAGGIRRGHCHRGRVRRSHR

SEQ ID NO: 4012 - protein, 524 aa, Streptomyces sp.
MAVRDRLKHLTPQDEKVLRAVGEHQGALASRDLKVRCADGLEHGADTWASRKRDLTAQSSSRIAGAITKATHDQWALARRCQAAHIRKLEAGIRMLRHRLSLPIGEPGTKRAAGGYRSKNEWFRKSRRLAALEARHAAAVRDRQAGRVRVVRGGKRLLNTRHHLTQARLTKDQWRERWEAERWFIAADGESGKRFGNETIRVTPDGEVSIKLPAPLAHLANTRHGRYTLTSTVAFAHRSVEWADRIETNRAVAYRIHLDTKRGRWYLTVSWQRPVVQTIPLETARARGVIGVDTNADHFAAYHLDPHGNPIGDPRHFPYDLSGTTAHRDAQIRHALTRLINWAKQAGVAAIAIEDLDFTTEKTREKHGRKKRFRQLISGIPTGRLKARLVSMAAEQGLSMVAADPAYTSMWGAQHWQKPLATRKRKMSRHDAAGIAIGRRALGHPIRRRTAPPPHDRSDRAGHRTAQAPPGTRGREGTRPPATDHAPRDVPPNGTRKRQPSASNTVRNAPRTQQWVQDSLTHTG

SEQ ID NO: 4013 - protein, 480 aa, Streptomyces sp.
VLFRLSDDWIGGTDVTNSADQPIRVTAAAAKRVKREALGIPDRRKHRGRVPTQLKSRTKEPGTYQRVYRYRFYPRPAQAEQLEKTFGACRWVYNEGLALRANAWERHKISVGFAESCRALTEWRHAAETSWLQEVSSTVLQQSLRHLDAGFSRFFKKSARYPKRKKKRRSRDSATYVRTGFRWVEDPERPGTGAVTLAKQSAALDVRWSRPLPVGVVPVKLSVTRDRASRFFLSVLVEERIEPLPSVFVSDGQEPKAAGIDLGLAALVTLDDGTKVDHPHLLRKYEKELVRLQRGLHRHNKGSKNRGKARVRIARLYALIGDVRRDMLDQLTTRLVRENQVLVVEDLAIANLMRAAVGKGRRRKSRLNKSISDAAWGELLRQLRYKCAWYGRTLVIVDRFFPSTRRCSCCHAKGPSLDVSVREWTCAECGATHDRDVNAARNLRDEGMRLYWLVASALPPGRVPPPTIKASELSKVLPAA

SEQ ID NO: 4014 - protein, 469 aa, unknown
  TnpB Polypeptide
VGLVATVRLAYRFALDPSPAQERALRSHAGAARFAWNWGLARCKERYAAERKWYSAPELHKLWNAAKKADPALGWWAENSKCCYQEAFRNLERALGDFVKSRRGERKGRKVGFPRFKKRRKCRDSFRLTGTIRCDGSAVTLPRLGTIATHESTQKLAGRVAAGTARVLSATVTRTAQRWYVSFTVEEDRDVPARHARSGTVIGIDLGVKALITGADSAGNVITVPGPRPLKAALRGLRRASRAHSRKQPGSTRRRRSAARLARLHARIASVRADALHKATSMLAARYETVVAEDLNVAVMTRNRRLARAVGDQGFGRLRRMLGYKTAWRGGTLVTAARFYPSSKTCSGCGAVKAKLPLAERVYTCECCGLVMDRDVNAARNLLKLAASGAESLNARGGAVRPGTAGRAPQKREPGAPYGGRPGPSPGNGRPRHEHHQALSRNGSHIHGRNVASRDRCLTCRHVLPSYDQ

SEQ ID NO: 4015 - protein, 414 aa, unknown
  TnpB Polypeptide
MEKRRTVPVRLTVNSDDAALLRDTVDEFLWAANHVTRHAFQGEYVTTSKTTLNNDTYDDVRDETRLHSNHVQAARNTAADACKSVVKKWKNGKKASMPHFSSPHIVYDHRTATFHDEYVSLATVDGRIEADYVLPDEDSDTPHADYLFSDEYETTGAELHSTNGNWMLHIHCKTDVEPDTPEQAPTGNGTVLGVDLGVNQLAVTSTGTFWTGDEFDHWRREYEKRRGNLQEHGTRWAHETIQSVGRKETGRFTMTLHRISNQLVAEARAHGCSVIAFEDLTDIRERTGASWGHKWAFNRLYEYVEYKAAEYGIGVEQADPENTSRRCSTCGFTHPDNRDGEDFECLKCGYQNHADYNAAKNIGLRYLRRNQTGSGGGAPVGVRLNSGTVNVNGEYEPPAEVSARTGVHAESPRL

SEQ ID NO: 4016 - protein, 392 aa, Escherichia sp.
  misc_feature (335)..(335): Xaa can be any naturally occurring amino acid
VKRLQAFKFQLRPGGQQECEMRRFAGACRFVFNRALARQNENHEAGNKYIPYGKMASWLVEWKNATETQWLKDAPSQPLQQSLKDLERAYKNFFQKRAAFPRFKKRGQNDAFRYPQGVKLDQENSRIFLPKLGWMRYRNSRQVTGVVKNVTVSQSCGKWHISIQTESEVSTPVHPSASMVGLDAGVAKLATLSDGTVFEPVNSFQKKQKKLARLQRQLSRKVKFSNNWQKQKRKIQRLHSRIANIRRDYLHKVTTTVSKNHAMIVIEDLKVSNMSKSAAGTVSQPGRNVRAKSGLNRSILDQGWYEMRRQLEYKQLWRGGQVLAVPPAYTSQRCXCAASLSTSSSGVAVRCLLFRQRTQASVARAVVIQRKKIACHKVNSDARYVDIQRTPM

SEQ ID NO: 4017 - protein, 267 aa, Bifidobacterium sp.
MRTYTLGEFARLTGKATSTLQRWDRTGVLAAHRTVTNRRYYTHDQYLSVMGLPPEPETTRGKRTVIYTRVSSRGRRGDLDNSDGTVFDNADTSGRIRKLERRKRRLERSLARSRRANQGKDKEHGWHNYRKILLRKRCVEQRLANIRTERMRRVCDELARRQPSSLTIEHLNVKGMMKNRHLAPALHKQALATFLELVEHTCHRHNIELRQVDRWYPSSRLCHECGWKNTGLTLNMRVWRCPMCGSRHDRDVNAALNLRDATEYQLI

SEQ ID NO: 4018 - protein, 376 aa, unknown
  TnpB Polypeptide
MLKSLKYRLYPTKSQRSKMERTLDLCRWTYNQTLVYRKDTWEKEGRSTSKYETHNLLPGWKTENPELTEVHSQVLQNVQERVELAFKAFFRRVKSGKRPGYPRFKGKGWYDSFTFPQSGFKLVSGKLRLSKIGDVKIKLHRPIEGEIKRLTIHRASTGKWFACFSVEVDHPPKTPWKDGLMVGIDVGLERFASLSNGEKIDNPRFFRSEEKALAKAHRRLSKGEKGTPQRGKALKVVQRIHERIANRRYDFAHQISNQLVVKYGLIAFEDLNIKNMIQNHHLAKSISDAAWRMLVTTTSCKAESAGSMVVLVDPRNTSQLCSRCGLKVPKSLSDRVHGCPQCGLVMDRDENAAINILRLGLQSLPKARSSALQGGE

SEQ ID NO: 4019 - protein, 339 aa, unknown
  TnpB Polypeptide
MFGKYIPVGKMKKHFTKRIKRNLLHSQTTQEILERLDESYNRFFKKLAKRPSKFKSPEKFNSFVFKQGGFTLNGNCLTINKGKKRFRFSYSRAYKGNIKQIRIVRETCSRFSLIIVADYNPFSSNRKTHDGASVGLDFGLKTYLTASDGSKIDSPLFFKQYQNKIKKCNRCISRSKIGSNNRKRRRFELQQTYREIENLRNDFQWKLAHELCKKYDFIFLETLNIEAMKRLWGKKISDLSHSSFVDKLEYIATKYGVTVHHIDKWYPSSKTCECGYVNKNLSLKDRTWVCSRCGSVNDRDLLAAQNILRKGISELESMGNSSSRNTGVPCVCIQESHAL

SEQ ID NO: 4020 - protein, 329 aa, unknown
  TnpB Polypeptide
LLETNWTSFFNSIKDWSKNKDKYLGKPKLPKYKPKDGKLVLIVTNQQVRQRGDLLHFPRSFCGFTVKPRCVTLENFEKINQVRIVPKGQSFGLEIVYSVSVEFELRSDNGRYMSIDLGLDNLATVVTNTGLNPIIVNGKGLKSNNQYYNKKKAQYQSVAKQMNNQHYTNRLYRLTQKRNLKVEDYLHKASRYIVDFALENQINTIVIGNNKNWKQSGSLGKVTNQTFVSIPHQKLIDKICYKAQLCGIQVRLTEESYTSGTSFLDNELPEKIYYNKKRRVNRGLFVSNRGIKINADVNAAFQIMKKVSPNVFTDGIEGVVLHPVRVGIV

SEQ ID NO: 4021 - protein, 520 aa, unknown
  TnpB Polypeptide
VLAKNQTYRAFSARPSHVLDLNGEVLDTELVMCQLVSEVRDISAYATYVARNDTQLEAGLAQAGAVQPAVAGRRAGVTMPEFLSSGKTGRSRKEWLLRHRVVTEYRSWQERINAVEGVSSKYVSQGWKRTMNASAPTYGGDYINLGAVDRQYAVIENNPAADGEIILKMVIRGAWYRLIFSFDKTRFPEGKVTLPLVKVENGAPVFIFTVMTENPVVQFSGDYVIGVDVGINDYATVVVRNTSTGQVVHETTLSQRAHSLWNSVRASERQVKQLKKKADRLLYQRQARMSALDEAQFHREAASRKKRELAILAAQEIAYLSHLWGNAVVAVEDLSWITNTMSNGRWNRGAFTQWLTHYITQNGGWVVAVNAANTSQICHACGEKVKHPEHKVSICAKHGAMDRDVNAAANIAARAIPKVEKARNTRAKNLKLQPQVALKTPVARDSLKYPGRDRTKHAPTPKRKNHPRISKEVTLPSSSPARVTMTTVLADCHTSGVAETDTAAINQGNIIYKCRLYSLN

SEQ ID NO: 4022 - protein, 215 aa, Sharpea sp.
VLFEFDKVENAYIVDKANAIGLDYASDGLYVDSNGNAGTNHKYYRESHDKLARAQCRLSRMQGSKKHEDKSNNYIKQLRKVNRIHRHIANQRLDNLHKISTEIANQYDVVCVESLNMRSMANRGFGNGKATLDNGYGMFLNMLEYQLSDRNKYLVKVDKWFPSSQICSCCGTLHPEMKDLSKRKMICDYGLTISRDHNAAINILTEGLRLLSEAA

SEQ ID NO: 4023 - protein, 358 aa, Oscillatoriales sp.
MLLSIKTKLKLNKIQATVMSKHAGIARFTYNWGLATWSNLYKDGLKPNKYLLKKFFNNHVKPEFTWIKEAGICQKITQYAFDNLGDAFTRFFSKKGEYPKFKKKGHHDSFTIDAGGKPIPVDGTSINLPTIGWVKTQVGLPHTTCKSITISRTADSWFIAFAYEQEHEPTVKQHDAVGVDLGVKELATLSTGVVFPNPKHYKTHLNKLRRLSKELSRKTKGSSNRFKAKQKLAKHHAKIANLRKNTLHQITTYLGKNHATIVVEDLNVSGMLANHKLAQVIADCRFYEFKRQLEYKAKKFGCEIIIADRWFPSSKTCSNCGHIQDMPRAERTYNCGSCGHSMDRDLNAAINLSRLAKT

SEQ ID NO: 4024 - protein, 431 aa, unknown
  TnpB Polypeptide
VESNFLNEWKYRVLREVEEYQRKIVNEMIGVILSEGLPTTKKRLHERFYSDYKEKYPFLPSRVIEGAYIVAGRIVKSFRERRKKGLTRKDKPEYKKVLITIPNMVNWRLNKVSVSVLTHKGWVDIPLKFTKQFIHYLYEGWRVSQELKLRLIGRKVLVWLTFEKEVEVESKEGNYISIDVNENNVTLAIFENFKLKELRRYETGLGRIVMNYSLRREEITMGHSTKDELVKKKLERLRERERKIDVLRKTVKRIVELARDLKAKVVVGKFSSKVKEKMEGNKTAKLRHRIHQWSVIKFVEMLKTQPIDVEEVSESYTSSINPFNGEKLKKRKQVVEKVIKVLNPYLLTGTAHEGGGIRVFKVNARYLEGGEVLLERDSIAPLNITRKVDGRVVVFPSTSPKDLRVTVYDPLRGVPVAELKVIKSNDKLRHG

SEQ ID NO: 4025 - protein, 381 aa, Pediococcus sp.
MTLKGIKVRIYPNQNQQNKIRANFGYARFVWNQMLNMMVTRYENNTEAKFLSVFTLNNLLPALKLEYPWLKDAESTSLQVVNHDLIEAYKKFFKEHQGFPKFKSSKCPKQSYQSKAVNHNIFVIDNRHLKLPKLGVLRFKSGKKITGKIKNVTIRLSSTNKFYAILLVDTEISELPKTNNSVGIDMGVADLMITSDEAKYPTIRFDKILARKKHYWEKLLVRRRLQAKKEIAWDKHNQVAEPRDLSNFKNYQKAKMMVAKYSEKTTNQRNNYLHVLTKTLVKQYDVIKIEDLKTKNLLKNHKLARAIANQSWRKLRSQLEYKCAWYGKQLVIVNPHKTSQICSNCGYDDGKHNLEVRHWICPKCGINNDRDVNAAKNILSA

SEQ ID NO: 4026 - protein, 337 aa, Alicyclobacillus sp.
MGKSKKPIKTIRQTLEHRFPEWFMLTEKQFNEITAFYFGIIQGHEMILELTNEEALTRLEKLTHKTKTNPSPLFPLAEDVPAMFRRACINTAIGSARSFFSNLQRWRNAKARAESKGKKFADRPPVPPREWHKHTVFYAGQYKEYTGQSIMLKLFDGKTWRWVKYRLTGRPIPDGWETGCPKRSLTGVLNPDEQDNRSLWNKIRNMDLYEAHRISRRIVEFAQEHGASIIVFEHLGRFRPVKGNYSKRANVKRAYWLRGKIFHNTKYKAWEYGMITSRVNPKDTSRKCAGCNSWVARYGENDPPEGYRPGAPLFACPVCGSNGVRNIAKKFLARYAA

SEQ ID NO: 4027 - protein, 164 aa, Lachnospiraceae sp.
VETARFIIDIAVKYQADVIVFEHLDLQGKKKGSKKQVLHFWKARAIQKMVIDKGHRNEMRIRRVNAWGTSKLAFDGSGTVQRGVYHQNGKEYYNYSICVFSNGKTYNCDLNASYNIGARYFIRERLKPLSETRRLAILEKLPECAKRSTCTLSSLINLHVALIA

SEQ ID NO: 4028 - protein, 387 aa, Lachnospiraceae sp.
MVIKSQAVRLYPNVRMKNVLDALCDYRRYCWNLGLETWNAMYDAYTIYKDENPKPTEREVRDELVRLKADWQYQLSSRVLQLAISDLGVAWSNFLNKALPDWGKPKFKSKRAARQGFKTDRAKLVDGQLRLDRPREIPKEGWSDIRVKGLRWMNGEVNLASIYRENGRYYANLSMECEEDDPLESTGKDTAVDVNVGHINYTEGMINTCPKKLTNLYQRIKHQQRLLARKREVNGKLATKSHNYVKTRAKLQRDYKKVANIQKNLMHQFTKQLVTEYDRLVIEDLDVKRMKMSHIASKGLHRSMFGLFRRQLTYKSLWYGKQVILADRLYPSTQRCSNCGHIKTGEDKITLSGNKKYGTKHNEYICYECGYTNDRDANAVLNLLALL

SEQ ID NO: 4029 - protein, 295 aa, unknown
  TnpB Polypeptide
VIHIDSSRFESIQVNDHTLRALSEPTSRVRSFTLTTKSLSLCIAKDVRKAEPKDPNGVIGIDRNLTNLAVGNGEEVTFYDMNKVVAIGKITRDITKSFKRDDVRIRKRLFSKYGKRKHERIEQILHLVTKEIVERAKVRNRAIVFEDIRGIRSLYRKRNGQSRSYRDKMNSWPFYEVKRQVEYKAAWEGIPVVTLTRSQTKGTTADCPRCGKRSQVPVRGDGKHHRQLWCEGCKRWMDRDLAAVLNIFRRGWLRFDHSSKEGEAVEAVKGNAEHEGESLILRVDASKLRHQGLTQ

SEQ ID NO: 4030 - protein, 220 aa, Prochlorothrix sp.
  misc_feature (220)..(220): Xaa can be any naturally occurring amino acid
MKVRYQYRIYPTPQQVKGLNQLFGCCRVVYNDALAIVRSVPQGAKWPSNAELQKLVITQAKKTAERKWLADVSAVPLQQSVQDLGAAFKNFFESRSGKRKGSKVGFPRFKKKLNQQSARFVRTGFSLKGNKLELAKLGRFKVKWSRPLPSEPSSVTIIRNTAGQYHASFVVEIGSINIEPLRPSIGVDLGIKTFAFLSTGDRVESPGYNRLDRKTRRFQX

SEQ ID NO: 4031 - protein, 509 aa, Mycobacteroides sp.
MAMTARFEIPEGWAVQGYRFALDPSPAETRALESHCGAARFAFNHMLAHVKMILDQRAAERSYGVPDSELTPSIAWSLPALRKAWNLRKDSMAPWWQANSKEAYSTGLHGLARALENWAASQSGARAGASIGFPRFRARHRRAKSVRFTTGTIRVEADRHSITLPRLGRIHTLESTRKLARRLEAGTARILSATVTFAAGRWWCALQTVVEGKARPAHAIRSRCAIVGVDAGVKNLLVVATPEGVEVARLPAPKSLSHAQARMAALQRRAARQQGPYDAVAKVRREPSNRWLRTQARIINTHARAANIRGDAIHKVTTQLAQQHEVVVIEDLAVKHLTRHGRANKRGLNRAIADAALGRIGIQLRYKTAWYGSKLIVAPRFYPSTQLCSRCGSKTKIRLDERVYHCRNGCPDIDRDTNAAVNLARLSDIPNLGDGMRTGTGSGPAANHWVGHGRGADPKTRPATTVTGRQEAVKRQPRDRVRRGLHLGNEELPEINRMHNHISGNGGGE

SEQ ID NO: 4032 - protein, 418 aa, Megasphaera sp.
MYLTQANVIRGLSKEEYSILREMCQYSNNLYNAALYNIRQYYFQEKKFLKYEENYHVCKENENYGLLQAGVSQQTLKVADRSFKSFFNLIKKAKSGEYRFKDIKMPRYREKGGMFNLILSTNAININNGFLTVPMSREFSKLHGGKQVKIPFPKRLEGKTIKEIRICPIYNGIYFKIQYCYLQVEEPQDVSTDNVLAIDIGLENLATCVTNTGTAFIMDGRKLKSINQYWNKQKAYYQSIADKQGQKKTHRLYVLTRKRNHRTQDYIRKVARYIINYCIEHRIGTIVCGYNGNFKRSMNLGKITNQQFTQISFGSLRETLKGLCERYGMKYIEQEESYTSKASCLDLDEIPVYKPEQPYMGAFSGKRVHRGLYQFADGRMANADVNGAANILRKSKQNFDYEELCRGLLDSPLRIRIS

SEQ ID NO: 4033 - protein, 386 aa, Lactobacillus sp.
VLKGIKLRLYPNKTQQDQLWQMFGNDRFVWNQMLAMMNERYKNNKDLPFLSKFKLDYLLKPLKKEYPFLETSDSTSLQVVNEFLNQAWKNFFNDKTGKVGKPHFHSRRYLKLSYTGKATVKIAGKRYLYLPKLGYIKTSKTDVLKDSKIKRYTVSLEPTGKYYVSLQVEVVRLNRFRRTNKKVGIDVGVTDLAILSNGLKYPSFDGSYYEKKAISWQQKYSRRRHFAQMLCLQDKQRKALCPRSLDSFFNWQKAQKTKASYQAKVAAQRKDYLHKLTTHLVKQYDVIAIEDLKVKNLKKNHHLAKSIVNASWGMFRQMLEYKCRWYGKQLVVVNPKNTSRICSNCGHNSGEKPLDIREWTCSKCNAHHDRDINAAINILNKAKSVL

SEQ ID NO: 4034 - protein, 267 aa, unknown
  TnpB Polypeptide
VPTELNIEAADLHPAHHHPPRDPADNGGWFGIDRGLSAFAVAATADGTEVARIADAPKALASGMARQRRLAKSLSRKKEGSHNRRDAAARLGRHHHRVASVRRHFAHQVSNQLVKTHDRLVIEDLNTAGMLANHRLARAISDAGWAQFARRLLYKQHWRSGQVAVADRWYPSSQLCSICGHRRTDLSLADREFTCRGGHCLDRDTNAAVNLARWGQIHYNSPRSPDPQAGGRATNARRQDGPDQHPTSAGETSLDDAGTDIHTAPAA

SEQ ID NO: 4035 - protein, 416 aa, Lachnospiraceae sp.
MYLTIKQQLKHLSKDDYRTIKELCHIAKNLTNEAIYNIRQYYFTEGEYLRYEKNYVLLKNSPNYKALNSNMAQQIIKEVDGSFKAFFGLLKLAKKGKYSFKDCRLPHYMPKDGHATLVIGFVRINGNKLILPFSQSFKKTHKPVEITIPPVLADKKIKEIRIIPKADARFFEVQYIYEAECIQRNLNKSNALALDFGINNLVTAVSSTGSSFIIDGRKLKSINQWFNKENSHLQSIKDKQHFGKRPTNRQKAIARDRNNKVNDYMNKAARMIINYCINNDIGVLVVGYNETFQRSSDIGKINNQTFVNIPYGKLRKKLEYLCELNGITFVKQEESYTSKASFWDKDVIPVYNNDNPKEYVFSGNRVHRGLYRTTDGYTFNADVNGALNILRKSSVVDLTVLYSRGEVDTPVRIRVA

SEQ ID NO: 4036 - protein, 418 aa, unknown
  TnpB Polypeptide
MYLTKKIIYKPSELELNVLNSFAFSSAKLWNIANYEKKNYKDLGFPKFPDWYDQKKRLKDNFWYKNLPSQTAQDVLDKLQKSWKSYFELNKTKGIKNPKPPRFKDTLFNFIFLNNGFKRTDGTTINFTVSKQQKEYLKNEYSFDSKYLSLKIDSFSAIKGNIKTIEFKPLKDKRYQINVVYEKEEPKLREENNHYLSIDMGVSNLFTCYDNEGSSFIVSGSKYLATSHYFNKKISHFQEIANSQQISDGRKYVTSTKRINSLHKKKQLQLYHYFHCATKEIVKYCVKHDISKVVIGNIKHIRKNANLGKINNQKFHFLPYDKIYSLLEYKLKLEGIELIKIKENYSSQVSPFAPEVSKKYATKNKRKYRGLYVDQMTLFNADSVGAFNILRLYEQKENKGLLIPIKGLSNPQKINVAV

SEQ ID NO: 4037 - protein, 402 aa, Streptomyces sp.
VTRQVKRAFKYRFYPTDEQTAELSRTFGCVRLVYNKALEERTQAWYGEQRRISYVQSSAALTEWKKTEELAFLSEVSSVPLQQALRHLQTAFGSFFAKRSKYPRFKSRKKSRASAEFTRSGFKWREGRLTLAKMAEPLDIRWSRPLPEGAEPTTVTVSRDAAGRWFVSLLCEDDITAAPATDAAVGLDAGITSLVTLSTGEKIANPKHGRRDRVRLAKAQRELSRKAKGSANREKARRRVAKVHARIADRRRDFLHKLSTRLVRENQTVVIEDLTVRNMVRNHTLARAISDAAWRDLRMMLEYKCAWYGRELVVVDRWFPSSKLCGACGTVCGTLPLNVREWTCGCGAVHDRDVNAAKNILAAGLAVSACGDGVRPQRESSRTGQSSMKQKASPARVGIPRR

SEQ ID NO: 4038 - protein, 429 aa, Bacterium sp.
MKLALKIRLEVDEKVEEILDSQSKILNWTYNHLLESANTMRKDYKVSLSQELATTLYSERGLRDVVPGLKTIYPFLKTVYSSPLKNVALRLSQAIQEYQKGQKGKRKDKVKWPKFRSWKRKYFSLQYDEPWKGYSLEAKSLKLQLGVNAEGKRLSVIVRLVESFPIEQCRVKQLRIVKESGKFYAVFTIEKEVIEVEKENLLKPLCVRIIALDPNHKNLAYGVGTDLRAIEIDNLTKLKNIDERIDYLKSRRDRCVLDSKLVEYKREDGSIHKHYEPSRRYKHFDKLLQKAIVVRREQTKTYLYTIANKLCKEYEVIALGDYVPHGGGITTKMRRAMNNRSLIGRFKQIVEWVAIRSGRIYLEYEEKGTTRTCHKVDCSYVVDGGLAPDIRQWVCPKCQSFHIRDENAAQLSFLSTNSSNKFYTYNILI

SEQ ID NO: 4039 - protein, 250 aa, Deinococcus sp.
LDLIPAEPNDMTILARLAAKTSNSFAAMMQSAVEQLTRQQESKPLPAPVYLPIGMYITRCPDMNGHMLTLSFTQPDIFYPKDQVLGIDWGLTYLLSVAPTDDINEVQYFTLPPAALDWIKRTPVSDGAEWQIIRAFTAKRLEPALAYIVQHGAVVRSENIKTKHMDQGISAKLQKLGLIDFQRAILPQAIYTSGGRSERIAPVGTSVTCHKCAQVGERSGTTLTCPQHGDVNADGNAAIWMLRGGVASGC

SEQ ID NO: 4040 - protein, 396 aa, unknown
  TnpB Polypeptide
VKLAYKYKAHPTIKQQEELQRQFKTHATIFNKALETLDDEWIPKYKMYNQLPTWKQENPNLKTVHSKAAQETVGRIYRAISGLSAQKQNGRKVGRLRYKNSLNSIEYNQSGFKVNDDTVYLSKIGDIPITKHRPVEGNVKGVTIKQSQTSEWYISVIVDVETTKEIPIEDIEEDNVVGIDVNVSNLFADTEGNKLESLYTFLKPELERVRKEHRNLSRKEYESNNWYKQKQKLAKAYDNLVNKRDDMLHKLSRWYVEKYDLIALEDIDSKELSEKGNGLGKYIRSQAWSRFAEFVSYKASQAGTHVVQVDPAYTSQDCSNPSCDAREKKSLSEREHSCSECGLSMDRDVNAAWNVLFKSFDKIGQGLAELTPVETGTADETLVSLSSVVDAGSLDA

SEQ ID NO: 4041 - protein, 404 aa, unknown
  TnpB Polypeptide
MNRAHKIRIYPNRRQATFLAKNCGCSRKMYNWALAKVKTDNPKREIKEGEEKPKFVYDRYALQKEMTAYKNTEPYMKRVCSYAIVNCPSDNLHDGLQRLRVGLNKFPKFHGKEHGESFRLDGALIKYNRLKKTIKLPTPRSTKDLGEIRMSERIRFKFTKINNIVISRKANMWYCSFNLDGVPDAKLCDDLTKEVGIDLGRGENNLMVCSDGKVIANHVVGKKDRACQRIRNKKRSRREIKGKSHSKNWWKAHRLCQKVENHIARLRAEYMHYMTNMICKRYGTVCLEDLNVKGMMSNPNGAKNQADAAFGEIRRQLTYKASKVKLIPTFEPSTNRCSVCGTKKAGDEKLGLGERIFTCNNCGHTEDRDLNAAKCILKYAVESENKVKKIGKKHMPKTKMGVAA

SEQ ID NO: 4042 - protein, 444 aa, Streptomyces sp.
VLGIGGRRKHHAREAAPLRPHAKDSEARHRLYRYRFYPTAEQAEQLNRTFGACRWVYNEGLALRSGAWERYRLRVGFAETCRALTGWKLVAGTAWLKEVSSTVLQQSLRHLDQAFGRFFKGEGCCPRRKRKGRSRDAAVYVRTGFRWVEDPGRPGTGVITLAKQSQPLDVRWSRALPAGVVPVRLSVTRDRAGRFFVSVLVEERIRALPPVFESGSSVPKAVGLDLGLASLVTLDDGTKVGHPRLLKRHAGRLARLQRELHRKVRGSRNREKARGRIARLYALISDVRKDLLDQLTTRLVRENQVLVVEDLSVASLVRAARGGSRRRKARLNEAICDAGWGELLRQLRYKCEWYGRTLVIVDRFFPSTRRCSSCHAKGPRIDVSVREWTCGECGAVHDRDVNAAVNLRDEGMRLYWSVAAGLPPGRRVPAVIKASEVEKILSVG

SEQ ID NO: 4043 - protein, 482 aa, Mycolicibacterium sp.
VARFEIPPGWTAQAYRFALDPTPTQLRALASHAGAARFAHNHMLALVKAVMDQRAAERSYGIDETQLTPGLGWSLPALRKAWNQRKVSCAPWWGENSKEAYNSGLDGLARGLDAWSKSRTGKRKGPVVGFPRFTSAQAPKSVRFTTGAIRIEADRRHVALPRLGAVRTHESTRKLARRIEAGTARVLSATVRQDSARRWHCALAVIVQAKTRPAHARRSAHAVVGVDVGVKADSLLVIATPDGVEVDRIAAPKSLSAAQSRLRALQRRAARQHGPYDRAAKAKRTPSKRWRRTQARIGRTHAHAAAVRRDVLHKATTALAQQHQVIVVETLNAAGMRAKGGARKRGLNRALADAALAEVRRMLGYKTRWYGSALVEADRYFPSSKMCTACGRRKPNLTLADRIFDCDGCGMRIDRDLGAAINLARLGVPTPVVGEQSPAGSGPVAGRGATRETEPAPAGEAAGDEASTPHHHQVDQTGTASP

SEQ ID NO: 4044 - protein, 468 aa, unknown
  TnpB Polypeptide
MAGFVGGAWDPAVVRTAYRCRAYPDAAQQQVLARTFGCVRVVWNRTLAERRRRWQQERRGTSYAETDAALTVLKKDPELAWLNEVSCVPLQQALRHQQQAFAAFFGRRARYPRFRSRHGRQSAHYTRSAFSMRDGELRLAKMAGPLAFVWSWPEANVGVLDPTMVIVSREPDGRWYVTFGVDACEPEPLPAAGRSVGIDLGVTSLLVMSDGRKIANPRHLERRARGLARYQRRLARCQQGSANRAKARAKVARAHRKARNARRDFLHRTTTGLVRGHDTGMWIGYALAADHPDRVDRLAVAEAAMPGVSASPPLFGSTQANNQLWHFPFNRLAEVNNQLAAGREDIYFGFQFAKAANKLPEHVVRYYVDALSDPDALNGSFQAYRALDTTIAQNEQRKARRLTLPVLAIGGAAGIGEGAANTMKLAADNVHSVVIPGCGHYCLEEAPEEILKALTEFLAPYRDGSAVG

SEQ ID NO: 4045 - protein, 445 aa, unknown
  TnpB Polypeptide
MSKVSRIIESVNLNTLKYLLLVEQAKLLGLLKKEVWQRFGSINGVGVCFRKIRNDWVKTRSFLPLPAKSWKETLRDTLDDIKLYEESAKEKVRKIIYKRKDNKELFKLLKNNRWINNNYLCRLMRKYKKHGKTTVNNQIILEAGVYGQFTGKNGNTWLKIPSFIRGKPICVPLNSNIKLQGMLRLILKDGIVFVHYTINQKQYQACGDQIIGVDKGYTEAFADSEGNFYGENFGKLLGKYTDKVNNRGKARNKLKVIADKLSERVDTNPKIRKKLDNIYQFNLGTRKLHKNNKKQKALIRNTAFQAVHAIVDIAKEVRTEDLTNPIINKEKWKNYNRRMSSWAKGTLAEALESVTKARGSCLRLVNCAYTSQMDSNTNFLSGKRVSDKFYHANGEVSHADINAARNIKHRGDDTEITRYTPFIKVKKILLNRLMAIGGVSYPNGQ

SEQ ID NO: 4046 - protein, 438 aa, Thermococcus sp.
MKRTVTVKLQPSREQEKILFELAYATAVIWNKLNYERLKQFKEFGKIDFSTTEKEAYHEFKNWIGGSTVQQLARKNAEAWRSFFTLNRKKKNGELPEWFKPRPPKFIREKNGRKLFIILLRNDQYRINGNVIELRRLGKFGKLKLQFKGKIHLKGKQGRLEITYDEVKRKWYAHLSFTVEEKLEGENWIKLPRTPRGSLSAGIDLGVNNLMAVYVENGESFLVNGRPLKSIDFYWRRKIADYQSKLNKSGAKASRKLKRMHEKAKLQAKHYINTAVRQTVRRLYDLGVSRIVVGYPKGIARNSERGAKQNFLLSHVWRFNYVIKRLTEVAEEYGIVVEVVNEAFTSQTCPLCGQCHSNGRIFRGLFKCHREGVVMNADLVGAFNILKKVVKTITPNLGGLYAQGRGNRGKTVPEGFEEPFSRVTLMRTPQTSLPLVRG

SEQ ID NO: 4047 - protein, 423 aa, Thermococcus sp.
MPSETIKLTAKFKLKKTPEGLDVLFKTYREIVNFLITYAFENNVTSFYRLKKETYKSLRKEYPELPSHYLYTGCQMATAIFKSFRKRRKKGKAKGKPAFKKEVIMLDDHLFKLDLEKGTVKLSTPRGRIQLEFYPAKYHEKFKGWKVGQAWLVRTPKGTFLNVVFSKDVEVKEPKAFVGVDLNENNVTLSLPNGEFVQITTHEREIRTGYFVKRRKIQQKIRAGRKRKELLEKYGRREKNRLNDLYHKLANKIVELAEKYGGIALEDLTKIRESIRYSAEINGRLHRWSFRKLQSIIEYKAKLKGVRVVFVNPAHTSSLCPVCGGKLSPNGGRIVKCLNCGFEADRDVIGSWNVRLRALKMWGVTVPPESLLMSGGGRLSATFGTCEPIVADNQNGYGITSLKSLKNSSKCSLLTWGIMTILM

SEQ ID NO: 4048 - protein, 389 aa, unknown
  TnpB Polypeptide
MMKLKRAYKIEINPTQEQKTKIHQTIGVSRFIYNFYIAYNKEVYEREGKFISGMDFSKWLNNEYIPNNQDMKWIKDVSSKSIKQAIMNGDKAFKDFFKKIKGFPKFKKKKNQDVKAYFPKNNKTDWALERHRVKIPTLGWVRLKEFGYIPTNSVVKSGTVSQKANRYYVSILVEEDDIKISNCTNEGIGIDLGLKDFVICSDENKFKNINKTSRVKKVEKKLKREQRKLSRKYESLKIRNKIEERRAIGQNIQKQVVKVQKLHQRVINIRTDYINKIISSIVKQKPSYITIEDLNVKGMMKNKHLSKAIASQKFFEFRKKLNSKCKQNSIELRVVDRFYPSSKTCSECGEIKKDLKLKDRIYNCSCGFTIDRDLNASINLKNAKEYKIA

SEQ ID NO: 4049 - protein, 871 aa, unknown
  TnpB Polypeptide
MESEPDPRHAKRTRVQDDKPSKKRKTLAKPNQLKDCRTTVSLSLRKCLASVGTKANSDIVAIERMVAAVTWASQRTMWFANLVVLKCLEGERDPPPLTRKFLYQCFQYSCQANVSAARAARPHDYRPREMLKTQQVKANKFRKEQGLPPLKSPQDDETISKQVLDPDEVEVSNARAVHIMRQIADEFRLVEQCTADFEAVRVEGHFDDGDLWRPESAQPHMTKATKTQTSRPMIGTFCVPGLGTHMEAMIESEMLDNCCTYIQTTFVARRRLYLEDAIARHFPTPAHRSRVVTLLQSYLNDVSGTPLRPDTVIDWTPVISRIRTAALVASFETELSTALDGGLIGDCARLLAQLGQTLPATTDNLKTHPHLFLRQMHTIQVARDTVLLDLQEVMSKQAGDAEVEDCTLEGEIEQLAARLDYQDRIQYRKVFALLPNRGGQSAFIFIDKNRAAAMKTLQTDSVGRWYDNIFNLSPALGRGKMSKVLPTSFRTDGVQLKVGLKRPGSTSDLMVKRGFGSLRDRRCESIECERRGIFELNETVAQDTVVLQERGLVGLDPGRKDVYSSVMNLTEHANRGHHLSNEQWAQLQRTRMIRQKDRKWRRVSKIARLQSGGQSVLDGLSMASLRTGTFVSMARSVHYRLLNAQIISDYQTRRNRNVFRFSRLLATQSATARVCNAIAIMHHSSVLPRVPSTTRRKSRRIGNRFNPIVVFGGGQYASGGNGLASVPRKALIRELGHKTVVVIADEYKTSQVCCKCGTKLTDPDLRPFRRGIRIGEKRVFAPRDSRRLRQCQSEACCISESSDDDVTKKYAMHWNRDTNAAINILQVGVEWWLRGVRPEPLRRSTPTTPASVDSLLPEGILEDINLLSEQQ

SEQ ID NO: 4050 - protein, 330 aa, Trichococcus sp.
LHSQSIQAVAHKYLNARLAAKEAKTAGRKDVRYPYKEKFFFNTKWVGKAFSIEGNVVTLSLGIRNGKRQPPLKLQVSGLDGIAVKTIKEVELCHDTHYYLSITYDDGIENPPLKQQQAASVDLGEIHSIASFAEDGASVLISGRKVRSIHQLRNKKLAELQRLQSKCKKGSRQWKKYQKAKNFVRTKSTRQLQDALHKTTKNFVDWCVAQQVSTVYVGDVEGVERNTKGKKRKKVTQKLSNWSFGKLMAYLTYKARTEGIDIQKVDEAYSTQTCPVCHTRKKHNGRNVRCSCGYTSHRDIHGAKNILSKTLYGDFLPWAVEEQTKYLRPC

SEQ ID NO: 4051 - protein, 262 aa, unknown
  TnpB Polypeptide
MMQTLKVKLDTSAEDNRALLETMHQFNAACNYVGEKAFELHTANKIELQKIVYRDIREMFGISAQMAVRAISKSCEAYKRDKSIKPKFDPNGAVIYDQRIMSWKGLDRVSLLTLDGRIKLPVVICDYHAPRLDRIRGQADLIFQNGTFYLCVVVDVPEPKKSVPQNVLGVDLGIKNIAVDSSGEEFSGEKIEKVRSKIDNLKADLQSCGTDSAKRHLKKLSGKEARFHRDVNHCISKKLVAKAIDTVYRLQGCHSWCARDLH

SEQ ID NO: 4052 - protein, 452 aa, unknown
  TnpB Polypeptide
VLKTLERTIKLESDPLNEWKYRALREVEEYQRKIVNEMIDVIISEGLPTTRKRLHERFYSHYKERYPFLPSRVIEGAYITAGRIVKSFRERKRRGLTRKDKPEYERVTITIPNMVNWRFDRASISVLTHKGWVEIPLRVTNQLIRYLYEGWSVSQELKLRLVGRKVLVWLTLEKEVEVGTREGNYISIDVNENNVTVAIFEGFKLKELRRYETGLGRIVVNYSLRREEIARGNSTKDELVKKKLRGLRERKRKIDVLRKTVKRITDLARSLNAKVIVGKFSSRAKEKMGGDKSARLRHRIHQWSVIKFVEMLKSQPIDVEEVSESYTSSVDPFGGGKLKKGRQVVERVVRVFNPYLMTGPAHEGGGIKVFKVNARYLEGGGVLLERDSIAPLNLMRKVDGRVVVFPSTSPSDLRVTVYDPLRGVPVAELEVIKSKERFRHGQTRSLGAPGTR

SEQ ID NO: 4053 - protein, 445 aa, unknown
  TnpB Polypeptide
VTFQFTLDPNVTQKILLAKCAGARRFTVNHHLARVKANLDARTAERDALYESGDPCEPPTPSLSWSGFSFINEFNAWKNGEADDSPVNEDGSCGLAWRHELPNDIFECASVDAARALENFSASRRGERSGTSVRFPRFQAKGKVTPSFRLRNRATPGREPSGQPIRFTDPSHLRLPKFGPVKVFGPTRKLRWMIDAGRFHVYSATLTQRAGRWTVSLTGVAAQLDRPERSRTSRHAVAVGVDRGITSLCVAADAHGVPFESFEGVKTLKQALCQLKAANQALARTTPGSKGRQRARARLAKTHRKVANTRRHLVHQSSRTLVDRAQILVIEGLNVAGMMRNRHLARSLSDSGMGELSRQILYKARWHGVEVRVADRFFPSSRTCSGCGELKCDLDLSARTYSCGACGLVIDRDLNAAINLAHWRPKEPSTVTLLPPMPPPLLSTA

SEQ ID NO: 4054 - protein, 445 aa, unknown; identical to SEQ ID NO: 4053
  TnpB Polypeptide

SEQ ID NO: 4055 - protein, 388 aa, unknown
  TnpB Polypeptide
MKAYAYKLYTNAKRGLLDDQIDRFGVVYNHCIALHRRYYELTGKQIRVYDLINHITKIKHRPRWEATFKNLDAQAVQNVAERIDKAYKLFFRNLKHKVRTNPPKFKSVKKYASYTLKQCGYKFDGNKVRLNGRWYGFHKSRDWKGKIKTATIKRDRCGDFYVVITTDWNDVERLPTSGKSVGYDFGMKTFLVASDGKDVEAPQFLQLAKRENEKVSRAISKKVKGSNSRRKAVLRKARFMRRLANQRADFQWKLANRLVREYDVLCFEDLSLRGMASQARKSGKKHGRMRFGRKVSEYALYSFLQKLQYLAAKHGKEVRFVNRFFPSSKTCHVCGWKNAELKLGDREWTCHECGTHHDRDRNAAINILSVGTSTDWRDSVRPVPKGAA

SEQ ID NO: 4056 - protein, 404 aa, unknown
  TnpB Polypeptide
MKLTSVFLVEGDYKILEELAKITNGLWNKAVHLEREKLKEGKFAFYAELCNTLKNDPLYQLLPSQTAQAVLQKLDGALRSYVKLKRSGRKARIPGYHKPKTAWIVPYKTQQFRFEGDTLKLTLSTAYRREKGAEWLTLKTYGKRREGKAKYLELYPRGGLWFASVVSEFKPTRIKTHGNITIDLGIVNQAATWNGEKSELYKGGEVSAIIRYRGKENGRLQAVLATHKEKTSKAKKEMNRRLTGQARHAVHALTKTLVEKAVQEKKGIIVGNLTGILDQKRSRKANQKLHSWMFRLMIFQLGYKCRLAGVPFRTKSEKNTSRNCVVCHIKHRGGRIHRGLYRCKLHGQYNADSGVAYNLNVSPIPAGVGVVAALAQPAVALWNGHRWLSRDETNPLNREEPHTL

SEQ ID NO: 4057 - protein, 396 aa, unknown
  TnpB Polypeptide
MAELTLTMCVRLSPTRRQADALAALCSTFADCCNDVADYVDSTHTLSQKKINKAIYHQLRETHGLLAQMTQSAIRRVIANYKAIHTRIANLREESKGKKNGKRRKRRKIPAYYSIKPQYAPDGADLLWNRDYSYSTKTGLFSLPVMDGRIKVKAEWASIPDQYRHGRFGTARLIRKRDKWHLLIPVTIPTPDATEHPKTIVGIDLGIRFLATSYDGERTVFYDGKEVKHRRGKYKELRKQLQHRGTRSARKRLKAIGSRENRWMTDINHQVSKALVNQYGKDTLFTLEDLTGIRNTAETVKVQQRYVQVSWAFSNSARSSNTRPPATGRHDSSGPSVHEPDMPPMRIRVPQEPQQGNAHVPLPQLRLPVERRPDSRDEPASQRLRPYRDAVRRQHA

SEQ ID NO: 4058 - protein, 401 aa, unknown
  TnpB Polypeptide
MLIYEYKLQGNKAQYAAIDEAIRIVQFIRNKALRLWMDTRGTNRNDLQCLCAILAQQFPFVASLNSQARQAAADRAWAAISRFYDNCKAHKPGKKGYPCFQHDNRSVEYKQTGWKLEPNGKHITFTDGCGTGRLRLVGSKNQRIEEFPLQQIKRVRLLRRADGYYVQFAVDADRHIEHVPTGKQAGIDMGLRDFLTDSEGNTVANPRPLRKAEKRLKKLHRRLSRKQKKSSNRKKARKQLAKAYLKVQRQREDFARKTASTLISSHDLIAFENLKIANLVKNRKLAKSISDASWGRFLSWLSYYGQVQSIPVIAVEPTFTSQDCSACGSRVKKSLSVRTHICSRCGLVLDRDHNAAINILQKAVDRTVGHTETGTPSSVQNASGQTASTCSGRARSGKRAG

SEQ ID NO: 4059 - protein, 383 aa, Neobacillus sp.
LIKRAYKFRIFPNKQQEILIAKTIGCSRFVYNHFLNKWNDTYKETGKGLSYNKCSSRLPSLKKELPWLKEVDSTAIQTSLKHLSDSFDRYFKKQSNAPRYKSKKNNVQSYTSKQTNGNIAIVGNKVKLPKLGLVRFAKSREIKGRILNATIRRSPSGKYFVSILTEEEIEPLVKTGSIVGIDLGIKDFAILSDETTYKNPKFFRSLEEKLIKEQRILSRRKEQALKQHKPLAEARNYQKQKLKVARLHERIANTRNDYLHKTSTEIIKNHDVIGIEDLQVSNLLKNSKLAKSISEVSWSQFRTMLEYKAKWYGKKIVVVSKTFASSQLCSECGHPNKEVKNHLNLRKWDCPICGTHHDRDINAGKNLRNEAIRLLTVGTAGIA

SEQ ID NO: 4060 - protein, 192 aa, unknown
  TnpB Polypeptide
MRPVSADSPPSWDWIGVDLNTTGYTAVVAHPASGGVVMLGEREQTEDGCGGALKRKKNRMIRSCELAVRRNQNQKIASEIVKMARHLQCGIKLEDLSGAGFAGRQKPGVPLPFSRRDGSFYHLQNLVEARAHDAGVPVVLVDPALTSRCCSRCGERGIRRRKQFLCPHCGYTDHADANAAFNIAAAPGTGRT

SEQ ID NO: 4061 - protein, 379 aa, unknown
  TnpB Polypeptide
MNIKRAYRFRFYPTPGQETVLAQTFGCARFVYNYMLRLRTDAWYERGGRISYHETSALLTALKKKPEYAWLNEVSSVPVQQSLMHLQTAFKNFFAKRAGYPTFHSKHGKQSASYVATAFKWDGKALTLAKMKEPLRIRFSRTLPKAAKVTTVTVSKDTAGRYFVSMLCDDAVSPLPKREEAVGIDLGLTHFAALSTGEKVAAPNAFRKNEKKLAKLQRRLAKKQKGSKNRAKARLKVARLHAKIADARKDFLHKLSTRLIRENQTIAVETLAVKNMQRNRRLAKSIGDASWSEFVRQLTYKARWYGRTLVGIDRWYPSSKRCSGCGFVVSKLPLSVRSWSCPECGSTHDRDVNASRNILAAGLAVSALGESVSPTQAFA

SEQ ID NO: 4062 - protein, 403 aa, Methanoculleus sp.
MQSVTKLRFFASPDERRMLFATMERYNAACNAASPVAFSERQFSNIGLQKRLYYSIRETFGLSAQMAQLAIRKVAGSYRSTTEAIKEQNKVLAALGKPLKSLSEISFREHGAVCYDARVLSIGQNRVSIWTLDGRIHLRYSKPDHFPAVATVKQTDPVYRDGAFWLYATVETPDVEIEPPTEYLGVDLGVVNIATTSDGEIFSSAATEKVRRRYGRLRGILQKMGTKSAKRKLRQISGRERRFKTNTNHVISKRIVCATQGTKRGIALEELKGILLRTTVKKFQRERHHKWAFYQLRSFIEYKARRAGVAVKVIGGAYTSQQCSVCGFVHPDNRSSQAAFRCLACGYTENADQNAAKNIAARAAVNRPIAVRSPGDGGEVESQACKEHGATYSIMPPTSVGGS

SEQ ID NO: 4063 - protein, 383 aa, Actinomadura sp.
VQLRYNFRLYPTAGQRRALARAFGCARVVYNDGLRARREAHERGLPYIPNAELSRRVITEAKKTPQRAWPCEVPAVVLQQALADLNSAHRAFFASITGERAGARIAEPRYKSRKDSRQSIRFTRNARFAITAGGRLRLPKIGDVPVRWSRSLPSEPSSVTVVKDAAGRYFASFVVEVDAEPLPKTAGEVGLDLGLTHFAVLSNGRKVTNPRWLRRAERRLKKAQRALSRKVKGSANWTRVRLRVARAHSQVADARRDFAHKLSTRIIGDNQAVYVENLCVSGLGRTRLAKSVHDAGWSQFVGMPAYKAARYGRTFAKVDRWFPSSKTCSSCGTLAESMPLHVREWACPCGAVHDRDVNAAKNILAAGRADRLNACGGTVRPVA

SEQ ID NO: 4064 - protein, 400 aa, Actinomadura sp.
VKLVVWVKLLPTPEQAAALAETLHACNSAAGFVSRVAFERKVFSRARLQELVYGEMKARGLSAQPALHVIRKVADAYTVLRAQIAAGLLGEPESPRRVKAEGKPVRFRPDAAQPFDDRCLSWQVDARTVSIWTVRGRMKNLAFTGEPSQLKTLAEHRQGESDLVYRDGKWLLAVTCEVPEAPLNTDPADWIGVDRGIVNLATTSDGDNHQGRGLKRYRRRMARVRAELQAKGTKSAKRKLRRRARREARHAAHINHTIAKTVVADAQRTGRGIALEILDGIRDRVRLRRHQRATHSSWPFHQLGEFIAYKARRVGVPVLEVDAAYTSQTCPRCGHVSRMNRPSRDAFCCVVCGLAGPADHIAAVNVRTRARTAWVFVNTPDAAVSPSYRRGQSRAANPPR

SEQ ID NO: 4065 - protein, 394 aa, Actinomadura sp.
VRRAYKFLLRPTSRQTVALVACLEEHRQLYNAALEHRRTAYRMAGAKIRYGDQSAELKHIRGDDPGGQGRWSFSSQQATLRRLDKAFAAFFRRRKAGQTPGYPRFKGRGWFDTVEWPKDGDGCRWDSQPGHPTATFVRLQGIGHVRVHRHRPVRGRVKTIAVKREGRRWYVILSCEDVPAESLPATGAVAGIDLGVASLVTTSDGDHLANPRHLAASADRLAAAQRDLARKKRGSRRRRRAAARVAALHAKIRRQRLDGAHKAALRLVRDYDVIAHEALRITNMTRSAKGTAEQPGRGVAAKAGLNRSILDAGWGVFLRILAHKAESAGRELIAVNPAGTSRTCPRCGHCAAGNRVTQAEFRCQGCGHQAHADVNAAINFLRAGLALRDAAQAA

SEQ ID NO: 4066 - protein, 399 aa, Actinomadura sp.
VRTAFKCRAYPDPEQAAVLNRTFGCVRLVWNKTLAERSARYRAEGRRTSYRETDAALTMWKRTPELAFLNDVSSVPLQQALRHQHSAFLSFFAGRARYPRFKSRTGRQSAHFTRSAFRIRDGQLLLAKMSRPLRVVWSWPQVDLAALVPTMVVVSREPDSRWYVTFAVDTADPEPAPKTGHEIGVDLGVREFAVISDGDRLANPRHLERKARNLARYQRRMARKRLGSANRRKAKEKVARAYRKVRNARRDFLHKTSTRLVRMADTIVIEDLAVEHLIRNRRLARVISDCGWSEFRRQLEYKCERAGRRLIVVNRWYPSSKICSRCGHRLPQLSLSIRVWTCPDCGTRHDRDLNAAQNILAAGRAVTACGADVSHAGVPGVRSATKQETHPVRGGLSHS

SEQ ID NO: 4067 - protein, 458 aa, Actinomadura sp.
MVRVKLVKPIKGRSSRVLREEFPHLKSQLPTLWTNSSFVATVGGAPLSEVKRYVEQQKSWQMLTGRRYLLAFTPGQETFAELVGDACRMVWNTGLEQRRAYRRRGAFIGYVEQARQMAEAKKDFPWLAEAPSHTLQQTLRDLEKACKTHGTFKVRWRSKRKNAPSFRFPDPKHIAVERVSRRWGRVRLPKLGWVRFRWTRPLGGMVRNVTVLKDGGRWYISFCVEDGLAESTPNGKPPVGVDRGVAVAVATSDGWMRDREFVTLGEAVRLKRLQQQLARQRKGSARRSATKAKIGRLNARVRARRTDFVAWTANRLTRDHGLVVVEDLKVKNMTASAKGTLEQPGSRVRQKAGLNRSILAKGWGGLLAALEHKARCNGSRIVRVPPAYTSQTCAACGHCAPDNRESQAVFRCRACGHQANADVNAAKNILAAGLAVTGRGDLAAGRSAKRQPPETEAV

SEQ ID NO: 4068 - protein, 402 aa, Actinomadura sp.
MVRQVKRAFKYRFYPTDEQAMELLRTFGCVRLVYNQALEERTRAWYTEQRRLSYAESSARLTEWKKTPELAFLNEVSSVPLQQALRHLQAAFANFFAKRAEYPRFKSRKKSRGSAEYTRSAFTWRDGRLKLAKMREPLDIRWSRPLPEGAEPSTVTVSRDASDRWFVSLLCEDTVPAAPASDRAVGIDAGLTALVTLSTGEKVTNPKHERRDRERLARAQRELSRKQKGSANRVKARRKVARIHARIVDRRRDFLHKLTTRLVRENQTVVIEDLAVRTMLKNRSLARAISDAAWHQMRAMLKYKAAWYGRELVVIDRFLPSSKLCGACGTVHGQLPLDVREWTCDCGAAHDRDINAARNILAAGLAASACGADVRPQRESSRMGRSAVKQETQRATAGLPRL

SEQ ID NO: 4069 - protein, 382 aa, Actinomadura sp.
VVFNDGLRIRQEARAAGLPYVSDGELSKRVITQAKKTPERSWLGEVSAVILQQSLADLNAAYRNFFASLSGGRKGAKVAPPRFRSRKDDRQAIRFTRNAKFKITASGRLRLPKIGDLSVRWSRSLPSEPSSVTVIKDRAGRYFASFVVELADEPLPETTTKVGIDLGLKHFAILSDGRKITNPRFLRRAEKRLKRAQRALSRKQKGSRNREKARLRLARAHVRVADARREFHHQLSTRLIRENQAVAVENLAVKGLARTRLAKSVHDAGWAQFVAMLEYKAARHGRAFIRIGRFVPTSQVCSACGLGDGPKPLHVRRWTCPRCGAVHDRDVNAAINVAKAAGLAVTACGAQVRPGSVPAQRGEAGTHPKQPTPRWKQAGSPV

SEQ ID NO: 4070 - protein, 383 aa, Actinomadura sp.; identical to SEQ ID NO: 4

SEQ ID NO: 4071 - protein, 408 aa, Actinomadura sp.
MDWSERAIRNRWCGDNAGMAQTVKRAYKYRFYPTPEQAEQLARTFGCVRLVYNKALEERTRAYRLQGRRISYGETSAWLTAWKRTEELGFLAEVSSVPLQQALRHLQAAFKNFFAKRAGYPSFKSRKKSRSSAEYTHSAFTFRDGRLTLAKMDAPLDIVWSRPLPEGVQPSTVTVSRDAAGRWFVSILVEETIRPLAPVRGAVGVDAGLTSLVALSSGEKIPNPRHERRDRRRLARAQRALSRKQKGSANRAKARLKVARVHARITDRRRDFLHKLSTRLVRENQTVVIEDLTASNMLGNHRLARAISDAAWRELRTMLEYKAQWYGRHLVAVDRWFPSSRLCGVCGMLAERMPLNVRAWTCRSCGTGHDRDVNAARNILAAGLAERRNACGADVRPQRETSRAGSRR

SEQ ID NO: 4072 - protein, 404 aa, Actinomadura sp.
VQLRYNFRLYPTAGQRAALARAFGCARVVYNDGLRLRAEAHERGLPYIPDGELSRRVITEAKKTPQRAWLGEVSAVVLQQALADLNTAYRNFFASLTGRRTGPKIAEPRFRSRKDSRQSIRFTRNARFTVTAGGRLRLPKIGDVPVRWSRSLPSEPSSVTVVKDAAGRYFASFVVEVDTEPLPKAAGEVGIDLGLTHFAVLSDGRKITNPRWLRRAERRLRKAQRALCRTAKGSANQAKAQVRVARAHARVADARRDWAHKLSTQIIRDNQAVYVEDLCVKGLARTRLAKSVHDAGWAQFTAMLAYKAARHGRTFAKVDRWLPSSRTCSACGALADSMPLHVRTWACSCGAGHDRDVNAAKNILAAGRADRLNACGGTVRPTAQRRAGPGETGSHQRCRTHGTD

SEQ ID NO: 4073 - protein, 418 aa, Cyanobacteria sp.
VKDRVSNDIGTKEPLSPLPDNYALGQRLDWLHRTRCQIDRCSIVCEPIGDVTDIVDYLRQASELRQTKQLFPKYKNIYADCQQQNLMRLDKAWKRWLIPDKTGKRGGRPRFKKRGNICSFTFPRVNCPKAGAHLVGNILKLSKIGEIEVILHRPVPGGFTIKQATLLRKADGWYVSFSLEDGTVPDPRPVDEIKRAVGIDVGLEKFLATSDGQAVEIPQFYRKSQQQLARQQRQLARMEKRSKNYQRQSNKVARLHLHVARQRKEFHYQVAHWLCSQYDLIAFENLNIKGLARTRLGLSILDAAWRSFLNILQAVAVKCGKWAIGDDPRGTSIECSGCSEGLLKTLKDRVHDCPHCGLVIDRDWNSGINILNRVKRTLGLAFAGCGGYLVTSPMRQQLSIVSLGSPHQIKDYGGGGCH

SEQ ID NO: 4074 - protein, 403 aa, Nocardiopsis sp.
MRTAYKCRAYPDPEQAAQLGRTFGCVRLVWNKTLAERHTAYHQRGHTTSYKQTDAALTQWKKTEDLAFLSEVSSVPLQQTLRHQHSAFANFFAKRARYPRFKSRGARQSAHYTRSAFRIRDGRLWLAKQEAPLRLAWSFDDVDLASLKPTTVIVSREADGRWYATFAVETTDPEPAPHAGREIGLDLGVKDFAVTSEGENIANPRHLERRARNLARYQRRMARKRRGSANRRKAKAKVAAAHRKVRHARQDFLHKTTTRLVRAADLIAVEDLNILGMVKNRRLARVISDCGWGEFRRQLEYKCERASRTLVVIDRWFPSSKTCSACGHLLATLSLGTRHWTCPACRTRHDRDVNAAKNTLAAGRAAARETVSGDACGAGVRRQGSSLPRPATKQETAVVRQPA

SEQ ID NO: 4075 - protein, 334 aa, unknown
  TnpB Polypeptide
  misc_feature (301)..(314): Xaa can be any naturally occurring amino acid
MVANRAYKFRIYPNDEQKILFAKSFGCVRMVYNHWLDRKIRQYEENKTNVAYTICAKEMATMKKTEEYGFLKEVDSIALQQSLRHLDTAFQNFFKQPKTGFPRFKSKKRSKNSYSTVCINGNITISNGYLKLPKIGQVHLKQHRIIPEEYSLKSVTVSQTPSGKYYASILFEYENQVQEKEMQNFLGLDFSMHELYRDSNGKEPAYPRYYRNAEKKLAREQRRLSKMQKGSSNRNKQRIKAAKLHEKVSNQRKDFLHKQSRQIANAYDCVCIEDLDMKAMSRSLNFGKSVSDNGWGMFTTXXXXXXXXXXXXXXQAVRPVVFVVTKMQKRKILP

SEQ ID NO: 4076 - protein, 336 aa, unknown
  TnpB Polypeptide
MFADRKDQKMNSLVVEIGPERAQLRGVITRPEKELSLVGRCVILGEDYGFTNTSSIVVVRSASPISQDVLDFIDGNPGKAATRAYLEGHISDDEDIEVLERWQISGKNFLDLVKSHASKVDDLRGEIDRCYNRLNRIRKEINRSAGLPLDTLVPQEAATVLGSTVEQERYSKMHGRFFRLLAGISKLKARRRDVYRKVAAIKASWLGHVANIKIRLAEKHGAAVVSEDLTILTIPKDDPNYKGRTFNKMINNGAKGQYIRRSEDKMKWRGIAHLRVPSFYSSTTDWRTAIVDKKQRNKDIFTARDGATWDADLHAGEMLARWLFLKPKNEREIPVL

SEQ ID NO: 4077 - protein, 466 aa, unknown
  TnpB Polypeptide
MFYKVSINVITLKISHNPDNFELLRQYQYDYSKLLRFTYNRVKDCNNLLSQKELRDKQLEMNNQPLDSYFMNYAQYEARAMHASDKASSSNSRVFGGLLNNQRRSKKLISKEEYIENRLLPITCIGNATNNGNCKVQIIDSQTILFKPTKKDHIFLHLKGLSKNYKNYIEQLILHQEKKDLPITYKIDQNYVYISFDLNKLEPVIDERIWKKDRIFAIDLNPNYIGYTVCDWKDSSNFKIQASGSFSLKFLNDKDYELKKKHTPSTDPEKIYYTNKRKYEIIQICKKLITLAVHYQCESFVMEDLSIASKDNGKGRHLNKLINTQWCRNLFQNQIRKRCSLNWIELFEVAPNYSSFVGNLAYRSLHLPDYCLSSIEIGRRGYEFNHQYKLKNKDKKKNIILNTDPEVLKAMILSLEELGYSCKSESILELYDEVKKSGLQYRFQLADCNAVFSKFYLKRLWEFNSF

SEQ ID NO: 4078 - protein, 304 aa, unknown
  TnpB Polypeptide
VYLDLSKRYFPLPQEVSSAGLGEPVITPEKIHLPVHYEDDAQSGKPAVAWDFNLLSLNGYSPETGWVRIDTKKLASVHISSFEKRRSVQRKASKSKKAKKILAKYSRRERNRARKHQLESARVIQSVAGVVGLEELKKHGMYTRSRLWNRMISRSDWRSISRILKERLGEAKVKELDPYGSSSYCSRCGWENKDLNGAVFECGGCALRINRQLNAAINLYMRMSFGYIVKWVGGRKRVQLKMDGASQREWWDTVVLPSLLGGCVLTGGKWSGASEPVRSLYDAVKPKLCYAYDRYNDMYLRIPT

SEQ ID NO: 4079 - protein, 400 aa, unknown
  TnpB Polypeptide
MFKAYEYRIYPTKEQVSIFNKTLGLCRLYYNIIVKNKNENHKILIEGYKPTFTKFKPEALEWVKEIDTIPLTQTWMDIRGAYSNFYKSLKSNKPSTFSHQPTYKCKRNEKVSFRYHIQNNSAYLSKKGLYVTRKLGYIPIHASSQFCKGKWKNITFKRSASGKWYVKICVELKEEQTKIQNGKAVGIDWNCSDDSFLTLSDGTKVKCPRFLTRKERQLEKYQQVQSRRFVKGKDVQSKRYYRAKSKVARLHEKVVNQRRDWLHKVSRDLADRYQYVFVEDINLQKMSSEEEHGKVVSDQGFGLLRQYLSYKTNLVKVPAQYTSKTCNVCGNVNPEVVLGVKRWVCPVCNAEHDRDVNAARNILYLGVKKTLGGGPAEVLNNARLQNRECPKPSATNVAVS

SEQ ID NO: 4080 - protein, 408 aa, unknown
  TnpB Polypeptide
MFRMAYNRLQEGCSENTTWHKIKEIFGVNCWLASSAAKEAHGVVTLNKGKKVLFGGKWNLKQYLKGLITKEQFKHKRLVPLCSIGEKQYAGNRLFDFDFNNRTVVFKPGNGVRKEIQFCPVKKKLAQELAKVQELAEQKKMPVTVKFTDKHLYLTYDESLIYNEAYKNLKHNRVLGIDMNPNYVGVSVIEFDKNDEFKILHKVVFDLTALTKPSGKASTDKKSKYFTNKLKHETIAIAHKINKLVDYWKCSKLAIEDLSIKPKDQNKGRTFNRLCNNRWERQLFVNKLKMLANIHRYELVEVNPAYSSIVGNFAYGSPDTPDMVASSIEIARRAYKKFEKGWFYPGFNVERTDEQWKQTLSGVKTWKELFRKVKETGLKYRFLLSDYVGNVVLSIFYSKQKWKLLLFN

SEQ ID NO: 4081 - protein, 396 aa, unknown
  TnpB Polypeptide
MPETEVYARVSKHFQVNCWIILSATKEAHNLFDSVKSRHIVFGGIHNLKQYLTKHITREQYTYNRMNPVCSVGCKNHKGNRLINFDLTHNRIEYKPSSSIHKEIQFCPVKKKLADELAKVQELTDQKKMPVTVKFTDKHLFLTYDESLIYNEAYKGLKHNRVLGIDMNPNYIGVSVIEFDNHDEFRVLHKEVYDLSRLTKPSGMASTDTKSKYYTNKLKHETLAIAHKINRLVDYWKCSKLAVEDLSIKPKDQKKGKTFNRLCNNKWEKQLFINKLKMLAGIHKYELVEVNPAYSSIVGNFAYGSPTTPDMVAASIEIARRAYKKFEKGWFYPKFNVERTDEQWKQTLSGVKTWKSLFLKIKESKLKYRFLLSDYIGNAVLSKRNHSQKWERYLFA

SEQ ID NO: 4082 - protein, 371 aa, unknown
  TnpB Polypeptide
MIELRTYKYKLYNRDALKYLDDILVVAGRIYNHCIALHRRYYALYHKSLNKYGLSRHLTKLKKHHPEWAKVPSQAIQDITDRIDRAYRLFFSNLKQGIKTNPPHFQKANKYHSFTTKQYGYKFHDNNKVRIGAKEFAYWNSRNFDGKIKTLTVKRKSNGYYIYVVVEQESKAENIAKSGKIVGFDFSLNSFLVSSDGSDCCIPKLLQKNLKSLRNLSRKYSKSKGKRGSLRTLQKLHEKVTNQRADLHWKLAHRLCKTYDVMVFETLDLASMDKRFKKSINDFGFNAFLSILEYVAHKTGKTVMYADKYFASSQLCSSCGFKNTALKDVNIREWVCPECGAHHNRDLNAALNLQKVGTSTFSKKHPISGAC

SEQ ID NO: 4083 - protein, 412 aa, unknown
  TnpB Polypeptide
MVITKGIELRLDPTKAQKIYFNKCIGSERVAYNAMLNTKITLYRNYGVKNFSPNWSSLKDFYPWMKDVDSRCLNYAKIEVETAFKNWFRSLKNGGNVGFPKFKKKAHAGKYHNTSMPSTPDRLFKGNRIFIPVIKWVKFRGYKNLDLKHIKKIRNLTIKRTNTNKYFVSVCCDVEVQEYEHTGSCVGLDLGVKDLIITSSGEKFENKHLLKNSEKRIKHLQRILSKKKKGSKNREKARLKLATAYEKLGNKRKDYLHKLTTKIVRENDIICIEDLNVRGMLKNHKLAKSISDCSFSMIRFMLSYKCGWYGRKLVVIDRWSPTSKCCSCCGHVIPVIGLGVREWVCPKCGVCHDRDVNAAKNILDEGLRLLDVGCVPPEFKPGENPPMDDRLAIDLKSSGSAKQESCTALKCG

SEQ ID NO: 4084 - protein, 412 aa, unknown
  TnpB Polypeptide
MVVTKGIELRLNPTKAQAVFFNKCIGAERVAYNAMLNTKITLYRDYGVKNFSPNWSSLKDFYPWMKEVDSQCLNYAKIELERAFKNWYKSLKKGGDIGFPKFKKKTHAGKYHNTSMPNTPDRLFKDSKIFIPVIKWVRFRNYKNLDLSKIKKIRNLTIKRTNTNKYFVSVCCDVEVQEYEHTGSCVGLDLGVKDLIITSSGEKFENKHLLKNSEKRIKHLQKVLSKKSKGSKNREKARLKLATAYEKLGNRRKDYLHKLTTRLVRENDIICIEDLNVRGMLKNHSLAKSVSDCSFSMIRFMLSYKCGWYGRKLIVVDRWSPTSKRCNHCGHVMSSMALNVREWVCPKCRVHHDRDINAARNILDEGLRLLDVGCVPPESKPGENPPMDDRLVIDLKSSGSMKQETCTTLKCG

SEQ ID NO: 4085 - protein, 465 aa, unknown
  TnpB Polypeptide
MARFEVPDGMVVQAFQFTLDLTGKQVSIVRRQFGGRRYAYNWTVRTMKADIAAFQADGAEAPAPSMIALRKRWNQAKDTECADVATGEVWWPEVSKEAFADGIAGAVDAYWNWQKSRAGNREGRRMGFPRFKKKGRDRDRITFTTGAIRAGPGRRHVTLPRIGTVRTHENTRRLERLITKGRARILAATVSRKGTRVVVAFRVLLTRPQQPHVARPDSAVGVDVGVRVLATVGAPDGTIVERIPNPRALQAALKQMRHLGRERSRRTIGSRRCQVTQDRLTRLHRRVADIRAHHIHVLTTRLAKTHGTIVVEGLDAAGMLRQKGLTGAKARRRGLSDAALAEPRRQLGYKTSWYGSRLVVADRWYPSSKLCHLCVHKQDIGWAEHWTCDQCGTRHQRDDNASVNLARYEATAAMLAAGSAVGPVGAAVKRGADRKTGPRPAGGREARKGSRHKPAEQPRDGVPRR

SEQ ID NO: 4086 - protein, 395 aa, unknown
  TnpB Polypeptide
MASDEYHRRTLITRLDIRSERDEQLLLDTINEWRDGCNIASDLAWETCHTKSDVRTHAKDTIKEQTELGDQHATLACHEVAGAIKSCIERRKQGKKASQPQFTSRSMAFDRRTLTVFPDQEKITLTTLGDHSRVHADLALPENPDGYQYDYLHSDEWEYTESTLHYRNGEWYIHLGYRTPKDADESTIKNGTVLGVDFGVNQIAVTSTARFFDAGELNHYRREAERTRGQLQQTGTQSAHRTIEQLSGRERRYVRHVLHSVANGIVEEALEHDCEGIILEDLEGIREDLSFAQWHAEWAFRKLTDFVEYKAEYEGLFVDTIDPRNTSKRCNECGFVHGDNRHSGDFECRRCGKRNHADYNAAKNVAELYLLRGHQPPRGRSVSQYALKSGSRTPS

SEQ ID NO: 4087 - protein, 316 aa, unknown
  TnpB Polypeptide
LAYDLSARYLQLAIKDLANAWKNFFDKSQPDWGKPKFKSKKAPRQGFKTDRAKIINGKLRLDKPINISKDNWFDLASYAALKINQVKVISIFKENETYYAALSYEEEVTAKTKTHQKTAVDVNVGHFNYTEGQINVLPAKLQKLYKRIKHYQRMLARKREINGKLAIKSNNYLAVRIKLQRDYRKIANIQKDLLQKFTTKLVNNYDQIVIEDLAVKEMMMRYVASKGMQRSLFSRFRQILTYKCDWYNKKLILTSKTYPSTQRCAKCGYVKKGDEKITLQGNQKHGTKHNEYICYQCGYNNDRDENAVLNLLALAK

SEQ ID NO: 4088 - protein, 379 aa, unknown
  TnpB Polypeptide
MLCYNKEKLEAVMLVAYKYRLYPNKEQRIYFSKCFGCSRFIYNKMLSDKIEYYKLNKKTLNNTPAQYKKEFEWLKEVDSLALANVQLNLNQAFSNFFKRPEVGYPKFKSRKNNHFSYTTNNQTGNIRIEGKYIKLPKIGLVKLKQHRDFIGTIKSVTISQEPSLEYYVSILVETELQQKPNTGGIVGIDLGIKEFVITSDALKINNPKFLRESEKRLAKKQKDLSRKVKGSNNRRKARIKVAKIHTKIKNQRKDFLQKLSTRIINENQIICLEDLSVKNMVKNHKLAKSISDCSWSEFISMLKYKAEWYGREIIFIDRFYPSSQLCNKCGYKNTEIKDLSIREWTCPQCDTLHDRDVNASINILNEGLRIRTVGTTGIA

SEQ ID NO: 4089 - protein, 209 aa, unknown
  TnpB Polypeptide
VSRKQQGSANRIRASRQLSREYARITNQRRSFLHEVSGQLAKTHSRLVIEDLKVANLMVNRHLARAIVDAGWTDFARQLTYKAQWFGAELVVCDPWFPSTKACHACGVVRGRVGLEERIFRCGSCGLVVDRDRNAAANLAAWADRNYAPRTAKQAAGSPTPLEGLGLAAGRPMAEPVPRKGEPTFGPASEPKTSEKDGAGSPSKVIGAL

SEQ ID NO: 4090 - protein, 478 aa, unknown
  TnpB Polypeptide
MLVRHAFKFRLYPTGEQCQQLAVQFGHARHVYNWCLARRQAYYADTGSTLSYFDLKRAVTALKFDPDHLWLKEADSQVLQAKVEDLARAYKGFFERGTGFPTWKRKKDRQSVRYPQRVRFKDRRIYLPKVGWVRAIFHRELIGIPKSVTVSKTASGAYYASVQCEREMEPPVHTGPAVGVDVGLKDLAVLSTGERIPHPRHLRRAEKRLARLQRALLRKVKGSKNRDKARHLVARQHEHVANARRDTLHKLSHRLTRDFGTIRMENLNIRGMLKNHTLAKGIADSGWGMFVGFCQYKAQWRGGVVAQIDRFYPSTKTCHVCGHKHNTLTLKDREWTCAECGTLHDRDVNAAQAARNLAAAGAHLCGALSIGGTSWTLGGIDLDVLPSRARWISRAFATGRPWQGTLLIDLPYLVLMKLAAVRHQDETDIAAMLAHASDDVLAKVRRVVVADAPERVEDLEAYLYIGRAERAGKGGVMR

SEQ ID NO: 4091 - protein, 356 aa, unknown
  TnpB Polypeptide
MRVTLDQCRWLFNRLLEERKLAWEEAGMSVRLYDQVNRIPILKGERPALGSVHSQVLQNVATRIDLAFQAFFRRVKAGEKPGFPRFRGYGRYDSFCYPGSGHKVEDDKGRVFLSKIGHVTAIIHRPMEGTVKTCCVKRTSTGKWYVTFVCEVEDAPLPATESAVGIDVGLSAFATLSDGSDVANPRFFRKDETALAKAQRRLAKEPKTPKGEHSTPARRKRRKVVARIYERIANRRTNFAHQESRRIVDAHDTIVVEDLSVNRMVHNHCLAKSISDAAWSMFSAFLSYKAASAGRRFIAVNPAYTSQDCSRCGHRQKLTLDDRVYRCPCCQLEIGRDHNAAINIVTLGLQSLGARP

SEQ ID NO: 4092 - protein, 384 aa, unknown
  TnpB Polypeptide
MVLVERHYIKGNKEIIRLCKSSKELYNRCNFLIRQAWFNQKQLPNISTLWKATKELECFKEINNTKVAIQTVRICLSDWSNYFKSLKVYKKDKSKFIKCPKPPNYKTKLAQIIFYNQTIKKGSSKNKPTTLTANNNCFSVPYKENYKQVIITPKTFGFIIEVQYENKEKPKKSKLNKDKICTIDIGLNNLAAITLDQQRPILINGRIIKSINQWYNKRQCKSRLRKRYFRLENYFHHTSKLIIDLCVKYKIGKIIIGKNTGWKQNINLGKKTNQAFCSIPVNLLLEKIKYKANIVGIEVIFTEESYTSKASFYDNDTLPKYGENKSEFSGKRKYRGLYLTKDNFALNADVNGSLNIGRKVIPEFLGIRDRSLATRPVTINPLKV

SEQ ID NO: 4093 - protein, 360 aa, Acidobacteria sp.
VVTERPTAPGARAARRNGEARYVGWQCRLYPNRTQARLLARCREGLRELSNALLGASNLRYSRTGRHMTGKQFRAAAQDWCGRRANRDPFPSTAIYQTAADMHAAFRNWHRKPRPAQGLPRFKPEGRAPGIYVASAATRFDGDRVRLPKFGWMRWRGGSLPARRLEGPASRATLGMVYGRVWRDAGERWMLSCVFECGPLDTAAPTAGVAVVRQDGARVAVELDGRLVETPGPDERADADGRRLRRLQRRLGRSAEGSKRRARVLERFRNVARDVRNRERDRHHKLTTMVVLAAGTIVVEGVRGELLRQLEYKARWHGRQLQVRRGPPEPGARERPERARRPATPVRSAKRESSNEGRGV

SEQ ID NO: 4094 - protein, 365 aa, Nocardia sp.
VVKRAYKYRFYPTSEQAEQLARTFGCVRLVYNKALEERARVYATEQRSMKYTESSAALTEWKKTADLAFLNEVSSVPLQQTLRHLQTAYANFFAKRARYPRFKSRKKSRASAEYTRSGFRWRDRQLTLAKMSTPLDIVWSRPLPEGAEPTTVTVSRDSAGRWFVSLLVEETLEALPAIDGMVGLDAGLATLLTLSTGEKITNPRHERRDRVKLAKAQRGLSRKEKGSSNRAKAGRKVARIHARIVDRRTDHLHKLSTRLVRENQAVALEDLNVSGMVANHSLARAISDASWRQLRTMLEYKCAWYGRDLLLVNRWFPSSKMCSACGALRAAMPLNVREWTCACGTVHDRDINAAKNILAAGLAER

SEQ ID NO: 4095 - protein, 377 aa, Clostridium sp.
MILSKKVRLYPTEIQEQKLWQSVGTARFIYNWTLNRQQENYKNGGKFIKDGDLRKEITLMKKIEEYKWLSEVSNNVAKQAVKDCCNAYKNFFKGLKDKPCFKSRKKSKPSFYNDNVKLKVKTKLVNIEKVGWIKTKEQIPMNVKYTNPRVSFDGKYWYISVGIEQEQPKIELTNESIGIDVGIKDLAICSNGMTFKNINKSKEVKRLKKVLKRKQRKVSRKYEMNKIKKGGENRCQFKKTNNIIKLEKEIKLLHRKLANIRSNHIHQATNKIVKTKPSRVVMETLNIKGMIKNKHLSKAVSEQCLYDFKVKMQYKCEFYGIKFVEADKWYPSSKTCSCCGSIKKDLKLSDRIYKCDCGLTIDRDFNASINLSRYKLA

SEQ ID NO: 4096 - protein, 465 aa, Hapalosiphonaceae sp.
LLLNYQYRAYPDTNQKQDLNEWLRICQYWYNKQLGDRFNWWENNRSRIDACSIISCPLPQLRDNPDFYSQKKQLPNLKEDLLKVAYSGELLDFTCVPSQTLQDVSKRVDKAFSRFIQGDSNGKRSGKPRFKNAVRYRTMRIEGQAITPTRIEKDWLFLSISKLDGWVKVRLHRPLPNDFVLRNVLLTLKADGWYLTICLEDPNVPVFTPDEITPTWDNTLGLDAVLHEDDYLATSENTKLPSLKSFRKSEKRLARISHRKSAKKKGTASRRKLAKREAREHQRIARARKDHAFKTAHAVVRTNKKVFIHEDLNLKALSKRNKAKLDVNATYLPNGQSAKSGLNKSWNDAAFGQFFTILEYIAGKAGARTIAVKPAYTSQLLAYRDEFIFTDCDIREYWDEKELLWVDRDINAAINLKRVGLGLFPTIKRRKGNPIVGDSTTNSTSKEVLVVLKRQKPTLTSTLAV

SEQ ID NO: 4097 - protein, 289 aa, unknown
  TnpB Polypeptide
LDASWQTKATQPPAPDELRRSRALGVDLNADHLACWVLDSSGNPVGRPHTIPLYLDALSTSTRDGRLRVAIAALLRLARTNGCRSIVVEDLDFTDARLTGRETLGRGRRARCFRKTISGMPIRRFRSFLAGMAANADLWVIAVDPGWTSKWGQRYWLAPLNRSTKSSIAITRHHAAAVVIARRGQGVGARRRQGVAGHDQRIVAGELPARPDQRLPDHKGPGPPGGQRAAARPWKTRPAERSKLGNQVVQDRSGPPGRPYVLLNSVGTVPERSRRLTTLLTPSACMETP

SEQ ID NO: 4098 - protein, 406 aa, Hyella sp.
MIVYEAKLEGTKEQYGKLDEAIRTGRFVRNSLIRAWIDRQVKSRNGAYKYCKVLADNRSFPWAKKLNSMARQAHAERAWASIERFYRNCQAKIKGKKGFPKFAKYQVRASVEYKTSGWKLSECRRYLKFTDGFKAGNFQLWGTRDLHFYQLNQIKRVRVIRRCDGYYAQFLIDVDRRIDKELTGVERDLDVGLNHFYTDNFGEKIDNPRFLRKDERKLKKLQRRLSRTQKKSQNRVKARNRLGRAHLSVSRRRNDWVCKLAQRVIKSSDLLAIENLQVRNMVKNHQLAKSINDASWRKFREWLEYFGVVYGVPVIAINPSYTSINCSNCGEPVIKTLSTRTHCCNSCSYIADRDENAARNILKSSLKQLSDTVGRTVINNASGENDLCSVVETQPNKSARRKRKSL

SEQ ID NO: 4099 - protein, 389 aa, unknown
  TnpB Polypeptide
MIKNYKFRIYPNKMQNNALQTTLKQVRFVYNKQLELKIKIYKDESKNLSQFELNDYLIELKKKYPFLLKLHSQVLQNINQRINLAFKSFYLRAKRGEKPGFPRFKGKNRYDSITYPQSGFSLNDKLYISKIGEINIVKHRYIKGRIKTMTIKRTATNKWFAFFTAMQENKPSKIINRQIVGIDLGLSHFYADSRGNIINNPRYLRNSEQRLIKIQRKHSRKRKGGHNRKKSRLKLAIIHEKITNQRNDFLHKESRKLANDYSFVAVEKLSIKDMSKNRYLAKSIADVSWHKFLQMLAYKVEETGGKLVKINAHGTSQHCICGNKVEKTLAIRTHRCNNCGVEIDRDIMSAIIIEKLAFFGTTAGSAESNAWGYERMLSSVNQELSLHSS

SEQ ID NO: 4100 - protein, 287 aa, Bacillus sp.
FDHFFRKDAKYPKQKKYKDYNSMTFPQFGFKPNGKHRYAMSFSDHGKLYNKKLGEIEILLHRPLEGAIKQLILKRQGKRWYAIFCVERQVVPSDIDTNRAIGIDVGLHKYAVLSNGSEFENPRFLREKEKQLQKAQRKLSKKKKGSANFIKQARRVRKLHEKVANQRRDFLHKLSYNLAKEHSVIVVENLNIRNMVKNRKLSKSISDAGWGMFRNMLAYKCENHGGVLIKVEPQYTSQDCSVCGNRVKKSLSIRTHICTKCGTVLDRDYNASRNILQKGLEELLATN

SEQ ID NO: 4101 - protein, 548 aa, Mycobacterium sp.
MAPTPAVVPVRKPRARKRAKDAPTHVRSWPLRPTGAQGREIGTRFFTGVRVYNAVLGEFIGRSHAVKSDPAWTAARELPHRSPAEHQIRRAAFRAVEQAHGFTLDAAQSFASSLRRSWVREYLPAQETQNLGARAFDAVRQWHVGTKGKPRFKSVKRGLHSLAAKDGNGALRPKTDEAGALVGLQWGAGFVVPIAPPAVSGRRGREQQAELAEIEALIAAGKVLSTRFVRTLINGRDTYRMQLVMDGRPTQRHPLGEGRVSFDLGPSQIAVAVQHRDGSWSGWVEPLADAIRLDTMRLRRTQRHLDRQHRAGSPDCFNRDGVHTTGRCVWRRSAAAQRTMVGVGELHRRLAEHRKTLHGALGNRLMGHGTDIACEHLDYVSWQKNFPRSVRDRAPGLLVEMVRRKAESTGGQPLYEYNPHTTALSQTCLCGTKKKKPLSQRVHRCECGTNEDRDLFSAYLGLHVHTQVDGVDRLDLPAAREGWGRRQDVDESPKSSRRASACKRRGRRHPPSRRSVARINARRKAKTVMRQSRSARTSTTDQPTAIAA

SEQ ID NO: 4102 - protein, 373 aa, Bacteroidetes sp.
MNQVSKVLYDHGKPMGSGKIQKLVYNDVRGIGLKSQMTCNICRQVSGTYKTLQEQVKIDQAEWQLIQYKPTNVTFSYKRDFTITDKWVSITTLDGRKKYPFHMYKNAEPYFDGSWEYVASKLVKHKDGYYFHLCVSKEVPDAPTLVESSTFMGVDVGMNWLSVVSTTDKECKFFCGGEAKHIRNTYKNMRRRLQAKGTRSAKRMLKHLSDKEKRLMANLNHVVSKQIVQFAVQNEVTCIGLEDLTGIRTDTMYKCKKKNRYHKSSWPYYQLQFMIDYKAKEAGILTEYVDPDYTSQTCPRCNHIDKSSRKGLTFACNCCGFILHSDLVGARNIEFRTRNSRYTLELQGCEVSHPDECPEFLQSLKPVTSVMGN

SEQ ID NO: 4103 - protein, 508 aa, Paraliobacillus sp.
LKIKRKEIRKEPKPMARKTGPTYTIEFPLHIPVWQQHRLEKKFKIARMVYNSCLGEVLKRHQAVKSDKVYLKLLKQPKSKNRDKKLSNIRENYGFSEYGTHNFVKSVQNKFKEHIGSLEAQKLATRSFQTVEKLHFGKSKKVHFKKMTDNISVENKSNKTGLRYSEGAILWGDKPTKKNPKPKNWLLMPISPKPNDEYADLALMDKTKYVRILKREVRGKVRYFVQLIQEGYPPQKKNRKICNDETKRVGLDIGTSTIAICSEDQVKLQELAPDCVYNEKELRRIQRKMDRSKRSMNPNNFNENGTIKKGKLNWIYSKKYEELRKKRKEIYRKITVQRKMSHEKLANVILSFGSDVRVETMRFQSLQKRAKNPTRNKKNGKINCKKRFGKSIAKRAPAMLLTIIDRKLSYQNRSLKKIDTYATKASQFNHITKEYSKKQLSERWNVFGDVRIQRDLYSAFLICNTTKTLNAVDVDLCNTKWDEFVKLQNIEVNYLKKAQSKTLRWFVA

SEQ ID NO: 4104 - protein, 387 aa, unknown
  TnpB Polypeptide
MVKAIKVMLIPNNIQKTKMFQYAGASRFAYNWALAREKESYEKEGRFLSDSELRKEFTRLRNSDEYAWLRNISNNVTKQTIKDACTAYKNFFKGLQNYPRFKSKKKSTPKFYQDNMKIRFCDTHVKFEGFAVSKKKNKQKRNWVRLAERGRIPTDAKYRNPRISFDGLNWWISVCVEVPDCKKRLKDDGIGIDLGIKDLAICSDATKYKNINKSQTVKKLEKRRRRLQRNVSRKYEQNKEKGKYCKTNNIVKKEKLLLKVNHRLTNIRKNYLHQTTSEIVNRKPRFICIEDLNVSGMMKNRHLSKAIQNQGFFEFRKQLEYKCKNNGIPLIVADRFYPSSKYCSCCGKIKKDLKLSDRIYRCECGNVIDRDFQASINLRVYGEQFVS

SEQ ID NO: 4105 - protein, 370 aa, unknown
  TnpB Polypeptide
MKLIRSTKCSLKFSTQKKKDELQIILNEYSKVVNIFIEYFWLNPDKASKGELLKPIVDIPETWLSARLRKVAAREGIDMINAAKVRWKEKAVIPVHKGNRMYVSCTIADLVNTKGTTEFDGWLHLASVGNKMIMDLPIKYHKHFNNYNNIGKRLNSYIITNKYVQFSFEIVTQSKLTGKKCIGIDTGINALASLNNGKQYGTDIKVCIERVKRCKQNSKGQGVARRALKQRIDEIAKEIIVTESPDLIVVERLKNMGKKSKAKRLLAKSIRRSIGTWNWKYWLNRLEAQCEINRVSFRSVAPYYTSTTCPVCGQSDRGNRNGEVFLCLSCGHTDNADINAGKNILNRFLTGQYGVCYKEINTESTACRLC

SEQ ID NO: 4106 - protein, 417 aa, unknown
  TnpB Polypeptide
LKIILEKNETNSKIYSIIDMILKTYKYRIYPNSIQKELIHQHFGCARWIYNYALNKKNKTYQETGVGLSRFDIQKDLPILKKQEETSWLKEVNSQSLQYSLENLDNAYTKFFKKQGGFPKFKSKKDNKQSFGIPQNTYVDFENEKLDIPKFKSSIKIKIDRIFEGITKKSTITRTSTGKYFISILVEIPSELPKKKPISEDKAVGIDLGIKTFAVLSNGTEIENPKNLKKSLKKLKRIQRKVSKKVKGSNNRKKYVKKLSIIHEKVSNKRNDFLHKVSKELVTTYDTICLETLKPSNMIKNHKLSQSLSDISISNFNLYLDYKSEWYGCNIIRIGQFEPSSKMCSCCGYIKSNLKLSDREWICPNCNTKHNRDQNAATNIKKFSFVKNNTAGTAEIYACGDMKLVTGSAQETTKSLV

SEQ ID NO: 4107 - protein, 425 aa, Cyanobacteria sp.
LYNACIAHRRYEWRASQKTVTYFEQQNCLPAFKKEWVEFAYLHSQALQATVKRVDLAYGAFFQGLRKRPKFKSIRDYSGWSYPAKSGWKVNSNGKHGSVTLNDLGITVRMRGQSKQWGVPSTLTIVYKPGTNQWFASFTVEVPTPETKFGSDSDLNYESIVCFDLGTETALTLYDGKHFTALENPRFTQRCEQLIKRKSSSLRRKRAPSRRKKVKASRRWRKTRKQVSRLQRKVANQRKDWQHRVTSDIASHYDIGVTEQLNTKSMTRKAKKGSKRKKQKAGLNKSILSVGFGTLNQMMAYKIEQKGGLMLMLPTKQIKPSQRCPNCGVVHKDWADLSNRYHVCGDCGFEIPRDRGSVMVLYNVVTDAQPGLGTRLVDCGCLGSTNSTSKRKHTGSMRQLGQRKRRKSCLNLDGELETPSSYEAG

SEQ ID NO: 4108 - protein, 445 aa, Actinoplanes sp.
VTEVEAAPRVSGQILLAACDRQQVTVERDPDRPDTHLQLRILLPACAHPRSHRDWQWLTLPVRIPPTVPAQASVHTPTLRLVEGRVRVDVPWRIPVPAAEPAGHVHALGLDWGNTTLLTGSIARLGTDRQGRRRVLADNTPLSFDAAGVSAKLLRLRTIAEQVRAKTDQHARLLTGRPDPVLQTRHDLLEREHQRVQAKIRHLNGSLAWAAARWAVDHAITAQVSVIYIEDLATLETRGLGRSMNRRFGAHVRGQIFDALRHLAGKAGIAVVTVPARGTSAGCPRCGHLLRHVKAPDRVTSRGHKWAHCPHCRLSADRDHAASQRIVARGLLGQQHTTGTRAGTLAIRATIDGPVRAVRDKTRPTPPRPPRQQSRGFRVSSPAPSRHRVPAPPPPRPVRWDSVRRDDPPRPGPPGRARGRPRDQTTRPAATTIAAGPSAEDSTGT

SEQ ID NO: 4109 - protein, 386 aa, Actinoplanes sp.
MTRVKLVVQVKLLPTPEQASALDATLRACNTAASEVAATAREIGCYRNYDLRKHTYQNIKTGHRLGAQAAQHVIKKVCDAYKTLTANLLNSRYGKPGSRRRRTVETNPVTFRWDAAQPYDARMLSWQYDTRTVSIWTVGGRVKNLAFTGSPDQLKALATLPVGECDLVHRDGMWFLYASVEVPEPDLIDPAGFLGVDMGIVNIAYDSDGTRYAGAKLNGYRRRQQRLRQRLQAKGTQSAKRLLARRRRKEARHAANTNHVIAKTIVTEAARTGRGIAVEQLTGIRDRVRLRKPQRVTLSSWSFHQLGTFLAYKARRAGVPLAEVDPRYTSQTCNRCGHRDKRNRLNQETFTCRSCGVVAHADHNAALNIAHRGAESWGAVSRPHVA

SEQ ID NO: 4110 - protein, 387 aa, Actinoplanes sp.
VSERAVKRAFKFRFHPTPEQADLLNRTFGCVRKVYNLALEARTTAWYQRRERVNYNATSAMLTAWKKTEELAFLNEVSAVPLQQGLRHLQGAFAAFWEKRARYPRFKSKHKSRASAEFTPSAFRWNNGELTLAKTATPLDIVWSRPLPEGQSPSTVTVSRDSAGRWFVSLLCQDTIEPLPTVENAVGIDAGLDHLITLSTGEKITNPRHERADRERLARAQRELARKEKGSRNRDKARLKVARIHARISDRRRDHLHKLTTRLVRETQTLVIEDLTVRNMVKNHTLARAISDAAWTTFREQLTYKCQWYGRNLVVIDRWYPSSKVCSACGHLTEKMPLNVRSWTCPCGAAHDRDVNAARNILAAGQAVSAYGAGVRPQRKPPSGAAG

SEQ ID NO: 4111 - protein, 322 aa, Actinoplanes sp.
LGAQAAQHVIKKVCDAYTTLQANLTAGRYGRPGSRRRRRVEAGPVVFRWDAAQPYDARMLSWQHDARTVSIWTTTGRLKDVAFTGSPAQLKAVATLPVGECDLLHRDGMWFLYASVEVPEPQLIEPAGFLGVDMGIVNIAYDSDGTRHAGAELNGYRRRQARLRQRLQAKNSQSAKRLLHRRRRKEARHAADINHVIAKTIVTEAARTGRGIAVEQLTGIRDRVRLRKPQRVTLSSWSFGQLGAFLAYKARRAGVPLVEVDPRYTSQTCHRCGHRDKRNRPNQETFTCRSCGVVAHADHNAALNIARRGAESWGAVSRPHVA

SEQ ID NO: 4112 - protein, 383 aa, Actinoplanes sp.
VKLVVQVKLQPTAEQASMLEATLRACNTAANEVAQVARRARVYRNYDLRKHVYAGIKADHRLGSQAAQHVIKKVCDAYKTLTSNLRAGNYGPPDAKRYRRVSTEPVRFRWQAAQPYDARMLSWQHDARTVSIWTVAGRMKNIAYTGSPDQLKAVAELPVGECDLVHRDGMWLLYATVEIAEATPVEPAGFLGVDLGIVQIATDSDGTVYAGEQLNRYRRRQIRLRAKLQAKKTESARRLLVKRARRESRHATNVNHVISKSIVAEAERTSRGIAVEDLTGIRARVRLRKPQRAALHSWSFAQLGGFLTYKARRAGIPLVQVDPRYTSQTCSACGHRDKRNRPDQATFICRSCGVVAHADVNAAVNIAARGVDVWGAVSRPYVA

SEQ ID NO: 4113 - protein, 533 aa, unknown
  TnpB Polypeptide
MYERLTLYIIVPKKVPIVQVRRNYKLQPNKTQQGLMSEWLVTLRKHRNYCLAERKRGYEGNNLDSSEIVEYSYGAYCDIESRIEYGAYCPLACSVVKHGVLPDSISLEQSIKFSKPNRETGEIKISWDSVGGVQSKRTTQLRSESYFYSRINSDVLQGNLAKLDVAYAGFFKHQRGFPAFRQVSNFNSFQYKPGQCKFTVNDSSPKNRFYSHVYLPGIGVMRYLDNQEWSISSDAEIRTVTVKKLADGWYISVLLNTADILPEIADIETVESAVGIDLGINRLVALSDGSFVENPRHSTNKRIRRRLRIRQRRISRKVKGSSNRRKGGIEVAKLHKKIADKRNDTNWKAANKVVRAADAVIREDLNIKGMKSRCKPKRVSGRFMPNGQSAKRGLNRSISDASWGDLTQKIEWVAAKSGKPVLAVNPKYTSQECSSCGHVSKDNRDGEKFICQGCGHIDHADTQASRTILKRAKLKFVSTDAKSLRGDSAKVTLVRNYDAASNGERHQGKNGTFKATVPEKPISVKVRQLSIFD

SEQ ID NO: 4114 - protein, 481 aa, Thermoanaerobacter sp.
MIVIQAKLIFLNQEDKQIVLDLMRRWSSCMRFAYKRLLEGYDRNTLKRDLQGTFNLNSRYADDAIMKARSTLESSKELGSNPKKVIFGGRKLFKKLQKRHINGKAYKKLKIRWHEKRKGNLYSRGDKSKKGNLNTRIEVRKNGTFLRINVGERKYVYAKIQVGWKKNKNREEILQEIAKSNMPYSVELKLKNGNIYAYFAIEEEYPEIKITKEKGAIGIDINAYPDNISWAETNEKGNLISYGNMSMPELASGNKDKREYFRWQYAHEIVKIAKEKGKAIVIEELEIKDKGKRGDFSGRKSRRIRHNFSYKSLLSKIKTLARRERIEVIEVNPSYTSIIGMLKYAPQYMITKDIAAAYVIARRGLGLQEKIPDNYIKFLNALTVDELEELKEHVKKTVRNKHLKKKHLREINKAIEFLQSLESKPGRVLEPLDGTSFSTYDFWRVLKVAVVTPLSPERVLRDVSALKGVLHSGQVGRPVRT

SEQ ID NO: 4115 - protein, 534 aa, Mycobacterium sp.
LRVNDTDAALLYQVGGFLGSLAGRDLAARCREGLLDAKGKAESRKVRKQALTAESSSRWAGAITRTSEDQHRLAVQNMWVERASLAARIRTITARLAAPVGGATGTGKRAVRGYPSKAERHSKTIRLQALTTRLAAVEADLASGDVHVVRGGKALLHHRNNLAHAGLTPGQWRQRWDAGRLFLTADGEKDKAWGNETIRWNPNQGWLEIRLPTALAHLANQPNCRYRLACPIAFTYRGDEVAAQAQTGAVRYDISFDPVSGRWYLDASWRMPEQVTPTVDHLRQHPVVSVDVNDGHLAVSAVSTDGNILDQPRTITLDLAGLPTTTRDARVRSVITDILTQAEQIGARAIVIENLDFADARAQGREKHGNRPSRGKKGRRFRRQIAAIPTGKFRDRLTQMAANAGLAIIVIDPAYTSKWAAQHWLNPLREHHPQISGHHAAALVIGRRGLGYRARRRVTANLTAPAEAVQVNNRDTRTIPATKTAPPERPTSPRDVRQPPGAKTARTHRTRQAVQATHDRSGPPTEQDSLLLSV

SEQ ID NO: 4116 - protein, 472 aa, Bacillus sp.
VEIIFPKETTYALDGQSKICNWLYNQLIQAAQNDYENGSPLKLLEGRNLRNYATTLKKIHPFLRTVHSSPLKNTALRLKDAYDRFFKKQNGYPKFRSWKEKWFSLYFDEPNKGFKLLDSKTIRISFGKDISGKQLTVNGTLREPFFIKEKEEIKTFRLCKQQGNRFYGIFTIERYKTMEKEQKQIEKTFKELKKKLLHTHSIYHSKKKKKQSKTKERFPKGTKWVSLDPNHKNFFVAVDYKGVSYEMSKIYQTEFWDQKIDEIKSKRDFCERKSIKIETEHGNAYWQPSKRWARYNNTLNKAYHTRREQIKVALYSIAHWLYNHYDLVIIGDYTPTNGTARSKNMKRSMLNQTHIGEFRKILQWVASKRGKQYKMVNERNTTKECCVCGHKEKKEPEVRLFICLSCGHTIVRDLNSAINMAKKIQILSGSDWVKKWKLACITYAVRYDLFANHEKPIASVRNSGANKLNPMA

SEQ ID NO: 4117 - protein, 390 aa, Bacillus sp.
MLVNKAYKFRIYPSKKQTELINKTIGCARFVFNFFLGKQKEKDAYWYIVEEMVQNGQLLTNTWKGGCLNKYQTVKELPDLKKQYAFLKEVDSIALQKSVENLADSFDRYYKKQNKYPRFKSRKNPIQSYTTKHTNGNIAVIDNDIKLPKLGLIRFAKSREVEGKISNATIRRSPSGKYFVSIGAEVEIAEFPKTNSAVGIDVGLKDFAILSDGTIYENPKFFRSLEEKLAKAQRIMSRRTIGGANWYKAKIKVARIHEKIMNARTDYLQKISTEIVKNHDIISMEDLSVSNMLKNHNLAKAISEASWSEFKTMIEYKAKWYGKQIVTVAKNFPSSQLCSCCGYKNKDVKNLALREWTCICGAHHQRDINASLNLKNEAIRLLTVGATGLA

SEQ ID NO: 4118 - protein, 517 aa, Cyanothece sp.
MKASTPSFVTELPLVVDSLTERELLARFQAARQLYNACLGETKKRLQRARASLEWQEAKSLPKSAKNKSKRNRLYKDAKAKELYSDYDIQSYATQTAKASDWIAEKIDAQCQQKLATRAFNAVERTVFGGAKKLRFKVPSRFKSVEAKSNKQGLRWKDNQVVWGKLKVPAIIDIYNEVICHGLSSRVKFVRLLWRILNGKRCWYVQLICEGVPFVKEKNKVAEGSIGIDLNISNVAYVSDEDAGLLPFAENVPTYQKEIARLQRKMQRSQRANNLDKFEPDFEAKKGRKTVTKKGKVKKGAKTKPWNRSKTYQRIRAKKAEIERKRTAYAKSQNRRLVNEVLRHGKQIKTEKVSVKGWQKRYGKAIKDKSPSFFMSELTRKAESAGGLVTRFSTQKTALSQTHLTGTRIKKSLSERIHKDESGFEMQRDLFSAFLSRHVYDDTLSLRDAQSEYPGLEPVLMVAWEANKSCEMSRRVQKSGEVIVPLEQLAITSETDRQIAPFRDATSGRLLQESQSL

SEQ ID NO: 4119 - protein, 358 aa, Scytonema sp.
MLLSIKTKLKLSKTQEIVMSKHAGIARFTYNWGLATWNNLFKDGLKPNKYILKKFFNNHVKPEFEWIKEKGICQKITQYAFDNLGKAFERFFKGNDGYPKFKKKGINDSFTVDNGGKPIPVGGKSVKLPTIGWVKTYEGLPHTTCKSITISRTADSWFIAFAYEQTHEPIVKQHEIVGVDLGVKELATLSTGVVFPNPKHYKTNLEKLRRLSRAYARKSSGSNNRQKSKLKLAKHHLKIANLRKNTLHQITTYLCKNHAKIVVEDLNVSGMLSNHKLAQVIADCGFYELKRQLDYKAKKFGCEIIMASRWYPSSKTCSNCGHVQDMPLKERTYHCENCGHSIDRDLNAAINLSRLAKA

SEQ ID NO: 4120 - protein, 496 aa, Nostoc sp.
LATKSFFIKNKEHYGIIGVALNHNTHSANRMKVTYQYRLEPKSNQKLILNKWLRICRYWYNRQLGERFSWWENNRHAINSCPIFVTRLPQLLDRPNYFTQKLQLPVIKKDLNIVQWSGELLDFKNVDSTVLQDVCKRVDKAFERFVIGDSQGFRSGKPRFKTEASFKTMTFATANNEWIKLKRINWLYIRLPHLGMFKVRMHRPITDGFTLKQTSVTRKADGWYIQMVLEDVTIPSQTIDFIPNWDNSMGIDAVLQGNDYLATSVGEKLPSLKPLRKNQAKLDRISVKRNKRKRGSKSRRKLAKREAKQHQKIARSRKDFQYKTAHKLVRSGKKFFFYEDLNLKGLTRRNKAKQDENGRYLPNGQSAKSGLNKSWADGAFGQFFEILQRIAEKAGAVVVSQNPQYTSMILSYRNEIIFTDCSIREYWDEKNTLMVDRDINSAVNLKRLGLGIFPSIKRRSGKLDIVGTMDDSTTKEILHTLHWAVGSLHCNRLGSV

SEQ ID NO: 4121 - protein, 361 aa, Oscillatoriales sp.
MLLGFKTELKLNNSQRVMLAKHCGVARHAWNWGLWLTKNILDRNKANPDEKLKFPTAIDLHKLLVALVKSENQWYYECSKSTPQIALMALREAWKRCFKKTAGVPKFKKKGRRDSFTLEGTVKILGSNKIQVPVIGILKTYERLPQVSIKSCTISRQADRWFISFRFDVEQQELGNTTIIGVDLGIKSLATLSTGSVALGAKSYKKYAAKLSRLQWLNRHKIMGSSNGNKAQVKIARLHRKIANIRKDTLHKLTTLLAKNHGVIVIEDLNVSGMMKNHKLAASVADMGFFEFRRQLTYKCELYGSKLVVVDRWFPSSRTCSNCSSKKETLSLGERVFECGNCGFVIDRDLNAAINLSKTVS

SEQ ID NO: 4122 - protein, 338 aa, Oligella sp.
MADGCARSPVATTLKDLERAYSNFFARRADFPRFKKKGQSDSFRYPDPKQIKLDQANSRVFLPKLGWLRYRNSREALGTVRNVTVSQSCDKWFVSIQTEREVEQPVPQATTAVGIDMGVTRFATLSDGTFYAPLNSFKRHETALRKAQQAMSRKTKFSNNWKKAKARVQRIHSRIGNARRDYLHKCSTTISQNHAMVCIENLQVRNMSKSAAGTADAPGRNVRAKSGLNKFILDQGWFEFRRQLDYKLAWNGGYLIAVPPQNTSRSCPCCGHVSAENRQTQARFECVECGFEENADLVGAINVLRAGHARFACEVSGAVMPPAAGTHRSDSGAAQCRS

SEQ ID NO: 4123 - protein, 370 aa, unknown
  TnpB Polypeptide
MRLVVNLKLKPTREQHAIFRCTLEHANAVCTEISTTAWNQKIFGQYALHKLVYHAMRASSGLTAQVVVQCIKKVADAYKLDRKARKTFRLLGAIAYDDRILRFKSDDRVSIWTVDGRQVVPFACGERQRALLARRKGETDLLFVRGIFYLSAVCEVDDPELIKTTDVLGVDLGIVNIATDSDGNIHSGAAIEENRRKTAHRRRNLQRKCTRSATRKLLKVSGKQARYQKDINHKISKTLVSNAQRTGRGIALENLKGIRERVTARKRQRARLSNWSFFQLHSFVSYKARLSGVPVTFVDPRNTSRECPSCGHIEKANRKSQSKFLCRSCGLAGLADHIAALNIRARATVNRPMVANVHASRSPSATSRHL

SEQ ID NO: 4124 - protein, 452 aa, Nocardiopsis sp.
VVGQAGGGRLAEQVLVQVHAPILPSGDGECPALTPEVNRIRAGRLGSRRRSPVSGFVVGGRQGVAVQLRYQYRLYPDEAQRAALARLFGCVRTVWNDALVQVKPVKASNKLLGPPKARTAEGPYQRVPKSPDLSRELIAGAKKTPQREWLDQVSAVPLQQVLRDADKAWAAHEDSKTGQRKGPKVGHPKFKSRRDHRQSARFTANAKWKITPAGKLSLPKIGDVKVTWSRDLPSAPTSVTVVKDAAGRYFASFVVETGDEPLPETTPEVGIDLGLTHFAVLSDGTKIANPRFLRRAERKLKKAQRILSRKQEGSANRDKARVKVARAHAKVADARREFHHQLSTTLIRENQGIYVEDLAVKGLARTRLAKSVHDAGWAAFVHMLEYKARRCGRTFAKVSRFLPSSQTCSECWAVDAPKPLHVREWTCKACTTTHDRDVNSARVVLAAGRADR

SEQ ID NO: 4125 - protein, 565 aa, Scytonema sp.
MLHREKRCKFSKSQKKHLETGTKPEGLPLLELLRGIEDTTLTQFSLRNQQELEKQSSIAESVLINSETTLIDKPITSSHSSQKVKSSKKSAQDSITSEKVYKPFWDKFCLEMSNKLYAVTKTGLQDLELNSSTTSVSKTIVNSWFSTALISLQKESSLKTSWQLSTSSRCLVPNFTDSESINKKSKKIRIYPETKLRTVYRKWFAACRWCYNQAIAYQRDCFVRNEKQPTKYQLRDAILKSCPDWVSECPYSPKEESVFDAKIAFLKTATKNKSAPRFQSCRSPVKSLRIGAKYWGAVSAGRGKSKQVVGFTHYTTNQSVVNNESIAIKDLQLNPVEPLCEEMPSEFTILLDKGKWFICFAVPFEIQVNLRKNCIGLDPGVRTFLTGFDGEKILEIGNGSISNVAILCQRLDQLQSQITKAKGRDNKRLRWKLRRQSEAIRTRIRNLTNEVQNKASVFLTKNYKHIFLPTFETSQMVVKKKRKLHSKTARNMLTWSHYRFKQTLKFHALKRNCVVHDITEEYTSKTCSRCGHVHEKLGGNKKFKCPKCNHEIARDWNGAINIFIK

SEQ ID NO: 4126 - protein, 514 aa, Scytonema sp.
MATLTYVKRLPTPAEELNSLGLTEFEMFLAAYSPVFHKAACETANYLLAGNSFSKSSWNTHLQTTYGISKRHANGVISHAQGAVDASKEHRKRHIRTLEGKLKSINSWITKSKKKLTDAVKFYAKKNWQNSKTGCRFPLSCSLQFHKTNWKNLRFQIHNKKRRAYQLTKQIEHLKTAPIQTVILRNQAFVVGSKDENFGNQVCQWDGEYLKFRVPACLESKFGKYVQTRLGNFDRNINRLPSYGSRTWHFYRKDGEWNAAVQFTPAPVKRVWWHSAYGCIGIDMNPGSIGWAYVDHDGNLKAHGQIPLQMGLPQGAQDAQIVDACLQLATLVDTFACPIVCVRAASPSGEELDFSTKKEQLKERGRKYARMLSGWAYSRFYELLESVLANRGIYLMKVNPAYTSVIGLVKYARQYGLASDEAAAMVIARRGMRLKEKIHGSVSAYLSVKDGKHVWSQWNQLNKALKSRTDIRSRHSYYSISNWGLVVNASRLKSGNPPMALAQEPESRGKGTKP

SEQ ID NO: 4127 - protein, 344 aa, Cyanobacteria sp.
LQATTLNLITAYKNFFAGRAKFPRYKSKHRQQSIQYPQNVKVLDGFIRFPGKVGKVKAKLHRNIEGAIKTVTVSLEPSGKYFASILTEAEGDNPIVSTDGQVIGIDLGLTHFAITSNGSKVSKYDNPRHLAKHEKNLKRKQKKLAKKEKGSNSRNKAKKTVAKVYERVAKSRQDFLHKLSRKLVNENQVVVVENLNVKGMVRNHNLAKAISDAGWGSFVNFIAYKLEKKGGKLLEIDRWFPSSKLCSNCYHQIDELPLDIREWTCPHCGTRHDRDGNGATNIRAEGIRMLQTDGTAVSANGGEVRPKRGRKSVLRHSPAMLEAHTLSRFDLVWVVHSLISTFKR

SEQ ID NO: 4128 - protein, 451 aa, Gammaproteobacteria sp.
MKNINSCIIENFLSIFRDKDQVYMHVKYTMSSRSNVVDFIHRPNYITIMKRLQAYKFELKLSRGQKRILKGFAGSCRYVYNKSLALQKERYEKSEKKLNYAGLCKQLTAWRHDLKLDWLSRTPSQALQQSLKDLERAYENFFKKRSEFPRFKKKGRQDAFRLPQGFKLDQINSRVFLPKLGWLCYRNSRKVEGKLCNVTISQSCDKWFASFQTEREVIEPVHPSTTAIGVDVGIAQFATLSDGHIFHPVHSFQSRQSSLIKWQRRLSKKKKFSKNWKKAVFQVSRVHRKIAHVRQDYLHKITHTISKNHAMVCVEDLQIKNMSQSASGTLARPGKQVKAKSGLNKAILDQGWYEFRRQLEYKQRWRGGMVIAVSPHYTSQKCSECNYIDSGNRLTQSEFKCINCKYENHADIVAAINILRAGHAQLACGEMVRLDHSMNQEPTEVTQAKVA

SEQ ID NO: 4129 - protein, 524 aa, Streptomyces sp.
MALRRLGWVVAPPEGVKVNDRIVRMAQETAGRTLRSAKWRADLTVGVLKTWPVDPARRTPHEWDAVREAVPGGRFLPSSVIKSRTRQVAAFVRKHRRLPADVFELEPSPRIARMLLLSACDGQQASIERPGEPRRALLRLQLPTRPDPASYKDWTWVASPITLAPTVPADAVLHLPTLRIHQGSVRADLAYTHAVPKTRQSGHTVALGVDWGLNTLLSAGAARLDDGGRITGLGSGAQFRAAGVVAKQHRLRRLSEYLHAKADRYRRLIAEDEQHPLIAKHRVLTDEIRHVGERRSNLNDALARAAARWAVDQAFAAGASVIYLEDLRSMEAKGMGRTMNTRLSQQVRGQIVDHMRHLAAEAGIAVVIVPAHNTSKHCPQCLTPLRHRKAPTGPPLPAGRGPSARTALVAGGRATATKGHGGELPHAASPTRPRLSRTVPAAPWSSAPWLKRRSRRQSSLRLRRPAETTGPRPAPPGTVPHAPRPGDAGHPPPAAPQDRRASVRRDTHQRAGTGYPAQPTGTRT

SEQ ID NO: 4130 - protein, 325 aa, Streptomyces sp.
DADGRHITLPRLGTIRSHEPTAGLLTRVQAGTARILSVTVRHERGRWFASFQAEVKRDVERVTRPDVAVGIDLGVKSLAVMADSTGEIRTVPNPRHYEGALKLLRRACRTVSRRQGPDRRTGRKPSKRWEKANAARNKLHHRVANIRQDALHKLTTAVTAEYGTVVVEDLNVAGMLRNRRLARQIADAGFGEIRRQLGYKTHQRHATRTIVADRWYPSSKTCSGCGAVKAKLPLHIRTYACDACGLVLDRDDNAALNLAALARACSTGTGVAGDQDAVKASKPRGADQKTRATRHSRKATAGRAGGATLPHQRQTQARDRTHAEA

SEQ ID NO: 4131 - protein, 380 aa, Streptomyces sp.
MTPGTSGMTNFAADVRNSGKRNAGKHYPWPGDIVQLKAWTSAPLQLPGLSGCFAASCTGPGVWCARVVWNDCLRDRKEAHAAGRPYVKSAELSRLRITQAKHTEERAWLADVSAVVLQQALRDLDSAYKNFFDSVMGKRQGRRVGPPRYKSKKDTRQSIRLNTNAFSSKDDFTVHVAKVGHLKVRWSRPLPAAPSSLTVTKDSCGRYFLSFVVDTEPAILPRLETESGIDLGLSAFAVLSDGTKIHSPRFLRRAEKKLKRLQRELSRKAMGSKNRAKARIKVAHQHAKVADRRRDWHHRPPHRSFARTKRCSWRTLRCPVSGVPGSPSLCTTRMVGVRRHAGVQGGSVWPHLRQGGSGFPLLAGLLGLRIAGRPQAAARP

SEQ ID NO: 4132 - protein, 384 aa, Streptomyces sp.
LPSEGVPAAARVRGAGVPVRARPEHLPGGRVALPLRCGRAAYNWAVGWVSASWWQRRAEETYGVAEAELTQWRPWSLPSLRKAFNEAKKTDPRFANWWEENSKEAYNTGLSNASAAFDNYAKSKNGERRGKRLGAPRFKSKRKARLACRFTTGTIRVDVDGRHVTLPRLGTIRSHEPTAGLLTRVQAGTARILSVTVRHERGRWFASFQAEVKRDVERVTRPDVAVGIDLGVKSLAVMADSTGEIRTVPNPRHYEGALKLLRRACRTVSRRQGPDRRTGRKPSKRWEKANAARNKVHHRVANIRQDALHKLTTAVTAEYGTVVVEDLNVAGMLRNRGLARQIADAGFGEIRRQLGYKTHQRHAPAPSWPTAGTPPPRPAPGVAR

SEQ ID NO: 4133 - protein, 691 aa, Streptomyces sp.
VDAREDTELGVIRLPQDVQDPGARHRVEGLFSAMWSVKRALQRDARDAVDAYWAGDVRRETDAKARRLELGLSREGMEHRAYRHMKMSKHLGHHVTKALVMHDADEVFETSVSRHLFPDSSGRRHGRPQVGRWWDYTRIPGRARSHTTARKWETFRLHGTLAGHLAAYRHRTLAPTVATPEQAAALSPGAQVLEQPGRMPAPVRPSGRIATGEVAAKGKPKTRAATWWDHTGALSIVFTGGADSIRGNLVLPVRVPSGSGRWPRLLHFLNNPETWHKIDLVRRRDASALGGWVYEAHLMVLAGGYASPAMKARRAAAAELERVGGVDGNVSNLSIVSFPSAFDPAQGDVEATRITLTDDESRALAKARQKERGRKRALDRSRRVSNPGQYGPSKGQQARAGRRAAAGLPERAVGVPNGARAANRAGVSRQAYRRDALAGGYRLNRARLAEAAATAAAAKDHRARRIAQDIVAAHGANLTVEDCDIRTRYRLWGKALQATTPGRLITALAREGEKTGGRMLRASTFTTRLSQTCFCGEKVAKTLADRIHACTVCGLVGDRDMVSAALAAHVHLTNPDDPSTARLDSVQARNTQIMFHEGLQEALSSQPQRGTRPTQGRTHAAAHKPDTSGGRGPLLGKTPPTGTGQTPNETRPAITRHKAHVGTAGCTDKRPTGAPVPHRHRTDITALRDDS

SEQ ID NO: 4134 - protein, 380 aa, unknown
  TnpB Polypeptide
MKITKALKMRIYPNKEQALKIDKTISSCRYVYNHMLARNNKIYTRRNEHLSYYDMQNLLPNMKEYLPWLKEVDSQALKHACRQLNTAYDRFFKKKSGFPKFHSKRMNRQAYTTTNKCQIAYDSGNREVKLPFLGRMRCSDNRILSNPDFKYATVSRQNGKYYVSITYGIEKVVHPVAVSENQALGLDYKSDGLYVDSNGNMAGMPKWFRDSQAKLKREQRKLRNKVGSQKGETKSHGYLKQLQKVRNLHEHIANQRLDYLQKESTRLADRYDAILIEDLDMKAIANKGFGNGKATFDNGWGMFTTMLDYKMTERGKCLQKIDRWYPSSQTCSVCRCVNSETKNLSIRKWTCPHCGAEHNRDVNAAINIKREGLRLLNEAS

SEQ ID NO: 4135 - protein, 488 aa, unknown
  TnpB Polypeptide
MGKSTTSSFVVSLRLLTTKEDEQELEYRFRAGAHLYNLCVKEAQKRVHKLLKDAEYKARRKAYSGTKEEQEVLFEIRARYGLAGSYSLEPYIKEGRKKFAKHLDSSTCAKISQAVWRATADFLFKDGERIHFKKVRDFRSMESKDNIQGIRFRENRVKWLGLCIHVRVRKKDIYAKQCLQNYRIKYCRIHRKWHKHKWRYYVELVMEGIPPLKERRMGKGRVGIDIGTSTIAAVSEADILFKELNDGIEPIDREIKRLNRKADRQRRTNNPDNYNENGTIKKNSRNFHKRWKVSHNQKLTYDKIKELYQKRSNKLSQFQNQLANEIIAIGDEIVIETMNFQALQKKAKKTEKSKKTGRYKKKKRFGKSISIHAPSQLVGKVQRRLAYFGGTLLEIKTTKMRASQYNHITGEYMSSDLNKRWKELIPNLCVQRDLYSAFLLFNVKDEETIDDELCMQTFDNFYDSHNRLISELKQQKKEGKHFPSCMGI

SEQ ID NO: 4136 - protein, 378 aa, unknown
  TnpB Polypeptide
MNKAIKYRVYPTTEQRILFAKTFGCCRKVYNLMLSDKIEGYKATGKFPALTPAKYKKDYPYLKEVDSLALANKQMDLQSAFRNCFSKSRKKKNGFPKFKSAKRSRKSYTTNNQKGTVAIIDNRYIKLPKAGKVKAVIHRIPNDNWIIKSATVSQESDGKYYVSVLFEFDEAENTYIADKTNAIGLDYASDGLYVDNNGNVGTNHKYYRESHDKLAKAQRKLSHMQGSRKGEEKSNNYWKQLRKVNKIHRHIANQRLDNLHKISTEIANQYDVVCVESLNMRSMSNKGFGNGKATLDNGYGMFLKMLEYKLADRGKYFVKVDKWFPSSQICHKCGSQHPEMKDLKIRVMDCDCGLHIDRDQNAAINIRNEGLRLLSEVA

SEQ ID NO: 4137 - protein, 398 aa, unknown
  TnpB Polypeptide
MKKLLKAYKTEINPTIKQKIKINQSIGICRYLYNSYLAKNQELYNQFKDGLLDKKSSFISANDFDKYINHEVKTLEEYNWINICGSKARKKAICNAETAYKRFWKGQGYFPRFKKKSKSDVKLYFPKNNKTDWKVERNKINIPSLKWVHLKEKGYIPANANIISGTVSEKANRYYVSVLIEVADKNNISNNQGIGIDLGLKDLAIASSGEIYKNINKTRKVKKLEKKLKKEQRKLSRKYENLKVRNKKYKKEGGTATRQNIQKQIVKVQIIHKLYNKRENYLNQTVNSIVKQNPNFITIEDLNVRGMMKNRHLSKAISKQGFNMFRVKLTNKCKEFGIELRIVDRFYPSSKLCNSCGCIKKDLKLSDRVYKCECGYSEDRDLNASFNLRDAEIYKIAL

SEQ ID NO: 4138 - protein, 470 aa, unknown
  TnpB Polypeptide
LEAGEGRGTTAEATVVAADVTKLRTYTVNHGADPEALLPLLEAYRDAVNRVLEELWGQVEWEQRRIPQKKQWRLLPKFKVDVHSNEYRRELRGRILADWPFAAHWVDSAIKTGYSIFKSWRKNYEKGDRKRRKPVARRLFARVKQTLVKLEGDKLRLTVKPGVYVYLDLSHRYFELPGEVSSTGLGEPVITPEKVHLPIHFEDGAQSSGKPAVAWDFNLLSLDGYSPETGWVRIDTSRLASVHIASFEKRRSVQRKASRSKKARRIMAKYSRRERNRARKHQIGIVRVVRSLCGSVGLEELSKERMFTRSRIWNRRITRSDWRSIARMLEEKLGEDKVAELDPYNSSTFCSRCGWFNRDLNGAEVFECGGCGLRIDRQLNAAINLYMRMRFGYTVSWVAGKKYIHLKMGGAPHIAWWDQVVLPSLLGGCVPTGAELKGPDELVRGLYDAVKPKLYYAYDRYADEYLRIHT

SEQ ID NO: 4139 - protein, 299 aa, Oscillochloris sp.
VWKASGLRVRDGGLLLSRARGLEPIMVALPPALASLPKPAFVEMRLVYAMIAKRHQWHLVVDDGVDVSLRVEGQTLAADLGEIHPTAVANEQGQVVIFTARDLRALHQYRNKRLASLQAALARKQQRSRRWKRLARRKTFLLARNNRQRRAIEHKVTRAITNHAQAEGAKRLVVGDVRNIAHGKRLHANAQQKVSGWSHGRQIAFLVYKLAAFGIALERQSEAYSSKTCPCCGATNKPKGRRYRCSACGFDVHRDAVGAINQVSKAVYGAFGHVPPTSTMYRRPFRRRSSPDTGHVARA

SEQ ID NO: 4140 - protein, 418 aa, Dolichospermum sp.
MVIGYPLYYLINRSKKNNKMRISYQYRLKPTKEQAEKIEKTLEMLRFQYNYQLAQRFHWYEENRSPVDRCSIFVCHLPELKDQPNRFSQQASLTQLKKDRPWYKEIYSQVLQEVPKKVELAFDRWLKGDSNGKKSGRPRFKSAGQYKTFTFPQFKQHHFINNKITLSKIGDIKVIVHRQIPDGFNIKTVSVTKKADGYYVTLSLDDKTVPTIKPDFNANNIVGIDVGLIDFIVTSDDERIAAPKFLRKAERKLKSAQRRVSRRKKGSNRRKKAIKKLGIQHKKVSDTRKDFHFKTTNNLLKKYDVIAVEKLNIKGLARTWLAKSINDAGWGQFIAILSNKAGNAGLKVIAVNPNGTSQECSNCDALSLSKGGSKVIKPLSQRMHNCPVCHASLCRDLNAAINIKARGTHALKAQSMSS

SEQ ID NO: 4141 - protein, 431 aa, unknown
  TnpB Polypeptide
MEYTHRYRAHPNSEVAAELHRHINIHRQAYNYTRHEYTNLPDNTDAIGSAYKHHNRLTDWKDDYPVFGDVHSKALQRTVTRFYDNLSNLKNKKDAGYDVGWLKWKSPREYRSMTYSQSGFELKNTSGQTATLWLSKIGDIPLRYHRDIPAEATIKEVTVKHETIGEWFVSFALDVNDDHLPEKTPVDELEASGCVGVDLGIQNYIHTTDGLSVGKLDVEAEYERLRKAQRTLSRREQGSTNWEKQRQRVAAIKRRIRRKVLDFQHKLTTWLVTEYDAVFVEDLDVKRMLEGSQNARNKQDAAWRQFIQLLEYKADLYGCHVRQVQPADTTKMCSKCGVKTDKPLWVREHSCPSCGFELDCDWNAALNVLERGLLKLGLGQPEVQRLLETGATVGDSSDCSESVSASSIVETGTPTERNGSPSLNEAAVAAE

SEQ ID NO: 4142 - protein, 444 aa, Halorubrum sp.
MLIQAFRMLEVHRTHQAKILNHSQGEESLDRHGWSASKLWNVANHHSRKVWKETGEIPGHGDLKDELKTHPKYNGLHSQSSQRVLEELAEAFNSWYGSDDDRDNPPGYRKENYYDDQGRRVHEEHPRSTVTWKQNGIKHDTTNNRVRLSKGANHKEHPRAWEYILVEYETRPGVTVENLQQVRAVYDSTKERWELHLVCKDEIETPNAPGNETAGVDLGISNFAAVAYSTEDADLYPGNRLKQDGYYFPKEIAKCDDSGGDRATRLHHKWAERRTHFFHSLAKHIVERCVEKEVGRINVGDLEGVREDENGSSKNWGKHGNLDLHGWAFDRFSSILEYKARVEGIEVLEVSERDTSKTCCTCGKTDDSQRVHRGLYVCDECDAAFNADVNGAENIRLDSNESNSESAPDLGGDRSTGWLAQPGVYLHDLSRGFQPRTEVVDCKP

SEQ ID NO: 4143 - protein, 402 aa, unknown
  TnpB Polypeptide
MIKGYKYRLDPTQEQIIHMEKTFGCCRYVYNWSLNLKIKTYQSEKRSLTAVDLCKQLTLLKKDENHLWLNEVSNECLQQSIRCMDRAFTKFFREHAGFPRFKSKHRDKNVFKNINSVKFDFEDNRIKIPVIGWIKFFSNRIFEGKIGTVTISKSSTGKFYASILVDDGIPLPDKFVIDSDTTVGVDVGIKDFAVLSNGQVFGNPKYLESSQKRLGCLQRRVSRKKKGSNRYKKAKYNFAICHERIRNRRQDFLHKVSKRIISENQTIIIEDLNVSGMLKKHCLAKGIASASWSEFFRMLQYKSDWRGTNLIRIGRFEPSSKMCGCGYIHRDLKLSDRIWICPECGSVNDRDLLAANNIKKFGLEKQNLLTQDNINKTPVVNRGGDVELSALAGAVKRQNILM

SEQ ID NO: 4144 - protein, 416 aa, unknown
  TnpB Polypeptide
VKLCFKFCPHLNDLQRSIIEELSYHTTKLYNIANYECREHGFKSYYALEKMLKINWHKEFLHSHTYQQTLKVLEQDWKSFLTTHKDYQLHPNKYKGMPKPPKYKNIEKRKNQIIFTNLAIRVKRNILMLSLSKKMQSMFRVESLNFVLPESVQKHINMDALQQVKIIWDNSKKCWYLIIIYKVEEQSLTKNFHNIMAIDLGLDNLCAITFKDSKEQFLINGRPLKSKNAYYNKEIARLTSVTMKQTGSSKFKRTKKILNLQKKRNNYIKDYLHKVSRLVINLALKHKCHTIVIGDIKGIKQGSSIKGFVQIPIQRLVEQIKYKAKLVGVEVKLQKEEYTSGVSAYDLEPITKKYYNKSRRVKRGLFKTNQGYLVNSDVNGSLNILRKYLKDNVVPMSIFRLRDNGILDMPVRIRVA

SEQ ID NO: 4145 - protein, 418 aa, unknown
  TnpB Polypeptide
MMHKTFKFRLLPTSAQETALCQTLETCRGVYNSLLHQRKHDYELFGRSPSCSEQQKQLPLWKQTHPELREVNAQVLQNVAVRVDLAFTAFFRRVKAGENPGYPRFKGKGQYDSLTYPQVGEHGGAHLADEGLYLSKLGILKIVLHRPLEGKAKTCTLRRQGEKWYACFCCEVQAQPLPPSQKQVGMDVGLEKFAALSTGECVENPRFLRKDEKALAKVQRKFDKVQLTPRSKAHRKAKKVVRRIHERIRNRRHDFVHQTARKLVNTYGLIAVEALHVQHMSRRPAPKQDEASGEYLPNGRAAKAGLNKSISDASWSRFRSVLMQKAESAVRVVIAVNPAYTSQDCSECGNRVPKALTERVHVCLCCGLVLDRDVNAARNILRIAQSVLEIAVGQHSVPDGQERSPNIFVWGVVTISET

SEQ ID NO: 4146 - protein, 372 aa, unknown
  TnpB Polypeptide
MVNDCIDIGLASDTTAMKRLSILSYGKLERYGGYSGYRLNAISKAAGILAARKKSIRRGYPTKTPALSKPLLVSSYGFKVEDGKLRFALKAGGFQLISLTPHTMRVLSEPNLRIRSFTLTQKSLSVCISKQALEVECEGTVGVDRNLRNLTVGNEHCVIQHNLSKTVKIAETTTRIIGSFRRDDVKVRRRLASKYGRRRRYRTQHLLHNVTKQIVTQALTRREAIVLETIEGIRRLYRRGNGQGRSYRRRMNGWSFGEAQRQIEYKARWVGLPVIRLSRSETKGTSVVCSQCGERLQEDKRLRRKLWCGKCRTMTDRDVVAAINLSQRGRLRFDRSRAHEGPQGGVVEAVKGNPTTTVLLRVDAPKPSQRKT

SEQ ID NO: 4147 - protein, 230 aa, Pusillimonas sp.
MGIARLATMSDGSYLAPLSSFKKHEARLRRAQQAMSRKTKFSSNWKKAKAKVQRIHTRIGNCRRDYLHKATTTISQNHAMVCIEDLQVRNMSQSAAGNTERPGKNVKAKSGLNKAILDQGWFEFRRQLEYKLAWAGGWLIAVPPHNTSRTCPACGHVHADNRKTQARFACVRCGYEENADVVGAMNILARGHRVAACGEDVSRARPARAKRAASAKQEPTEATHSSLAPL

SEQ ID NO: 4148 - protein, 403 aa, unknown
  TnpB Polypeptide
MKQRKAYKFRLKAKPYQKAIFQKQAGCCRFLWNKALASQKERLDAGEKVLRYVEMAKLLTGWKREEETTFLAEAPSQTLQQTLKFLDHALMEAFDKKNPKQFPVFKKKGRTTDSFRYPQGFKLDGDRMYLPKIGWVRFIKSRDIEGIARNITVSRRGEHWYLSIQTEMEVAEPVHPATSAVGIDLGIARLATLSDGSFLEPLNSFKGKAKRLAVAQRSLARKVKFSANWQKQKAKITRIHIKVADARNDYLHKASTTISKNHAIVVLEDLRVKNMSASAKGNVEAPGRNVRAKTGLNKAILDQGWFEFRRQLEYKQAWRGGEVIAIPPQYTSQTCPACGHIAACNRKSQAKFACVSCGFHEHADLVAACNILAAGLAVSACGESALSGHSVKQEPTEGLRLVA

SEQ ID NO: 4149 - protein, 438 aa, unknown
  TnpB Polypeptide
VVFGGKRLFEKLCKNHLSGKTREKLKKQWRELRQGTLISIGSKSDKGNRLMRFEDLNGQLCLRITTGNREFVYAKVLREPSNSKDKWLTFMTMLLESWQTKSYFAYTVELKLKEGEFYGSVSFELPTPEVKYTKENGVIAIDTNASPIHLAITEVSKTGELVSYQTISLHHFLELSQNSKDYQEWMLAHQIVDLAIQRNKAIAIENLKKLKRGVRGDGKATLRKRLHQGNVKKFLQKLKRVAVLKGVEVVEVHPAYTSVIGMLKYAPQLSIDKDIASAYVIGRRALGFKEDMPENYEKLLKDKAYLEFALKRYEEREKELRELIEKESNEYKRNALESELKVVENSKKLLVNLIQSLQSEPSSCEGANGRNPEQGRGNLASFVAWQVLKVALLFPILGKVLPRDLSPLKPVLVEGVWDRVRSSLVPLEAGGTVPIRDF

SEQ ID NO: 4150 - protein, 387 aa, Okeania sp.
MAKEIDATMESFANACQYIHDNSDKKLTNRVAMQSLMYDAVREKFQLSAQTTIHAIRRVCANRKTSKTNKIKNESSLTFTPTSVDYDSRTFSLDTKIWIVSLKLLTKRTRFELLIGNYQRGILKGSKPKSAVLNKRKNSTYYINIHVDNIAPEPENTYKVIGIDLGRTDIASTSEGESWSGKNVTSKRNHYSQMRAVLQKKASKGTRSSRRRCRQLQQRLSGKERRFQKHINHEITTYLVKKAATNKFSIAIEDLTNIRQRTNKQRRSKKERRLSNNWAFYQFRMFLAYKCVLNGVKLILVNPAYTSLTCHKCLHIHPTKGKSYRHGKDYHCQHCGWKGDADYNGAKNIAALGLNVNQPGGSWLSCKVSNLDFIPRQLTIWDVLEGY

SEQ ID NO: 4151 - protein, 372 aa, Herpetosiphonaceae sp.
MTRKAYKYRIYLTKGQRRILEQQLEECRWVYNETLATRKRAYEDDQRSVDWYATKRMLPEWKADRPSLKTVHSTVLQNVTQRVDLAFQSFFRRVKAGADTAGFPRFKQLGRYDSMTFPQYENGVRLDGDRLILSKVGAVHVVLHRPIDGTPKTVTLTRASTGKWYACFACETDAQQREPTEQIVGVDVGLLSFATLSNGQQIANPRFYRQDEADLKRVQQRKDAAKNAENWDENRKQKRILSRIHERIADRRRNFAHQRSRELINDYQLIVFEKLAPQDMGARKGRGMRKSIMDVAWTQFIAMTISKAADAGRTVILVDPRNTSKLCSRCGEKVEKKLGDRVHTCPECGLVLDRDHNAAINILQRGLQTLQT

SEQ ID NO: 4152 - protein, 409 aa, unknown
  TnpB Polypeptide
MLYKAFKIRLEPNMAQATLFAKHAGVARHAYNAGLAYCKDLREKGENTPSAFDLHKWLVATLKKENDWYYEVSKCAPQKALTDLDTAFKNFHRIQKKSQYTLKNKKGLLQGFPRFKKKGNKDKFYLEATVRIENNKIKLPKIGWVKLSEKFDDVVLKNCTVSRKADEWFVAFKMEHTPKITQKKFDVVGVDLGVKTLATLSNGEIYENLRPYKKAKQKLRRQQKEVSRRYNKDVDAKNQSANYKKSVLKLAKTHAMVANVRKDMLHKLTTYLAKNFETVVIEDLNVKGMVKNHNLASAILDGGFFEFKRQLLYKKEWYGGSVIIANTFYASSKICSCCGNKKQDLKLSDRKYVCTNCSTVMDRDLNASKNLEKLAVSSTVTANGDKSSNPEGLQLVCEVGIKHKLFKFV

SEQ ID NO: 4153 - protein, 573 aa, unknown
  TnpB Polypeptide
LGVAEILGDFLFLRIRDPGEARGHVEDQLQRRAVLVLQCLHVAGVEEPPRAGFRALDRAARHHARLEEVGVYADLVALAPAHRLVEVVEFAGRHAPDVERAAPRGYVDQLHLIVLGAEDRVARQQHHDRRVLRLRLPAIVPLLLRVSLHDAAPLSCPLRPMRGHCPASIDNAKTRRIWYTCRMDRTLRVCLQPTPEQATLLAETTRQFTAVFNAVCAHGYAAGEQNGVRLHHATYYPQKAIWPALVSDHHIQARVKATEAVKSALALAKKGRKVSAPRSRSCPPRYNVHTFKVDWARGVVRLSTTGGKQDVWFTVPAYAAPYVGGKVCTADLIHRDGKWYLHIVVDLPAPEVAPTAEVVGVDLGLAQPAVTSQARFLGKKAWRNTEARYFKQRRALQARGSKSARRHLRRVKGKQLRFRRDCDHVLSKRIVQSVGPGATIVVENLTNIRARIKPRQGKQARRIHGWSFAQLRGFIEYKAESRGCTVAGVDPRHTSQACSRCGHIARNNRRSRSLFCCRQCGYTAHADHNASVNIAAKYRASIGWPLASGRSVNPPIVSDSGTSPEVPGTSSRL

SEQ ID NO: 4154 - protein, 342 aa, Caldalkalibacillus sp.
  misc_feature (145)..(145): Xaa can be any naturally occurring amino acid
MQKAYRFRLYPNQKQQTLIHKTFGCCRFVFNHFLAKRKEVYETERKTLGYNACSSLLTQLKTELDWLKEPDATALQTELRHLDDAFKRFFREKKGYPRFKSRKNPVQSYTSKNNNGSIAIQGNRIRLPKLGWVKFAKSRDVEGRXQLLPACDSKVGVDLGVKDFATLSTGEVIPNPKYLKKYEAKLIRWQRKLSRRKNGGSNWHKARLKVARLHEKVANCRKDFQHKLSTRLIRENQVICLEDLSVQNMQKNHRLAKSIADVSWSTFCTMLEYKARWYGRTVVRVDKTFPSSQTCSVCNYRHKEVKKLGLREWTCPLCGTHHDRDINAAKNILQEGLRLLAS

SEQ ID NO: 4155 - protein, 370 aa, unknown
  TnpB Polypeptide
VKVVEKAYKYRIYPNKNQKEIIAKTFGCCRFVYNTYLAKRINAYEESKETFSYVQCANDMKKLKTELEWLKEVDSTALQSSLRNLDIAYKKFFKEHTGYPKFKSKKTHRYSYKSKCVNNNIQYSGRCIKLPKLGMVKTKNKLIPQGRILNATISQEPSGKYFVSLCCTDVEIQPLPKTENAVGLDLGIKEFAITSDGEMIPNPKYLKKSLDKLAKLQRELSRKSKGSSNRNKARIKVARLQEHIANQRKNFLQKLSTKIIQNNDVICIEDLQVKNMIKNHKLAQSITDVSWFEFVRELEYKSNWYGREVIKVDKFYASSQTCNVCGYINKDTKNLNVREWDCPCCHTHHDRDINAAINILNEGLRILGVA

SEQ ID NO: 4156 - protein, 226 aa, unknown
  TnpB Polypeptide
LHTPLEKHFRSPPTIEHQVTTNTATTICAVDLNLNEHLAVCTIQTVEGTILATTFIGGGRRISGFRKKQLGWIARNRRKTGIIAQGEQDNVHLWGKITHVDEQIAHLVSARIVQFAKEHGAKILVFEHLGSLKPARGTYSRRGNSKRAYWMKGRIFTYAKYKAYNEGMLTSRVSPRNTSRECARCHRLVARYAAGQPAEGYTSGAPLVFCQACGMRGHADRNAARP

SEQ ID NO: 4157 - protein, 414 aa, Moorea sp.
MRAAYQYRLRLTKSQEAEVEKWLDMLRCQYNYLLADRFNWYEQNRCSINSCPLVCHLPALRNNPDYFSQKKTLPQLKKDRPWYSSVQSQVLQDCVKKVDLAFKRFLKGDVNGRKSGRPRFKGKNRYRSFTFPSLGKTPINGNILTLPKFGKVKMIYHRPIPEGFKIKTATITRKTDGYYVTLSIQDDTVSEIIPIDKVDNPVGIDMGLKSFLVKSDGSEVPIPQYYRKAQKRLKKIQKTVSRSKKGSNNRKKAVSKLGKAHKKVADTRKDFHFKTAKNLLDNHDLVAHEKLNIKGLAKTKLAKSVLDAGWGQFLSILSVKAVRVAWPTALNAGLIAKAVNPRNTSQNCSNCGTKVPKELKDRIHSCPHCGFTADRDVNAAINILNLAVGRPVRSKACRVTEGVPGVGKKPALSR

SEQ ID NO: 4158 - protein, 391 aa, Moorea sp.
MEFKAVLKEPQKLAINEAIRTARFVRNKVLRYWMDNRGIGKKELYRYNTQLRDEFNFVKELNSHACQASVENVERAIKRFYDNCKKKVPGKKGYPRFKKHCRSVEYKQSGWKLSPDQKSIVFRDKKGIGKVRLKGTWDLWRFDNKQIKRVRIVQRADGYYVQFCLKVDNHDQLEATGNTIGLDVGLKDFYTDSEGLAEPNPRFYRTGEKLLKFYQRRVSRKKKGSANRKKAINKLGRTHLRISRQREEHAKRLARCVVQSNDLVAYEDLKVKNLVKNHCLSKSINDAGWYQFRKWLEYFGNKFGRITVAVNPAYTSQNCSDCGEVVQKSLSTRTHVCKCGCQLDRDHNAAINILKTALGTVGHTETLLNAYGDLASTFLGSDLVEQVESVK

SEQ ID NO: 4159 - protein, 396 aa, unknown
  TnpB Polypeptide
VDADGVAEVVVTGLEWRGEVCQHVFEEPAVDCGRALAAWSDSRSGKRKGRRIGFPRFKKKIGETPSFRLRNKHPKGRQPAIRVGDHDRPRSITLPGIGQVAVHDDTRRLRRMLANGRAKILFATVSHHAGRWWVSLNVEAASLHPARQHPVRDPGDDGGWVGIDRGLSAFVVAADADGREVARINDAPKALAAGLKRQQRLGKSLSRKQKGSRNRKDAAAKLGRHHHHVANVRRHFLHQVSNELVKTHDRFVIENLNATGMLGNHHLARAISDAGWAEFARILAYKQAWRGGELAVADRWYPSSKLCPQCGAVRDDLTLADRVFNCGCGHSADRDRNAATNLACWGQTHYLDPRTPKHGGRATNARRRDGADQHPSCAGETSPVDAGTDVHTAPAA

SEQ ID NO: 4160 - protein, 380 aa, unknown
  TnpB Polypeptide
MNKAFKYRLYPTTEQAVMFAKTFGCCRKVYNLMLSDKIESYKTTGKFVFVTPAKYKKDYPYLKEVDSLALANTQLNLQDAFKNRFSKSRKKNNGFPKFKSAKHSRKSYTTNNQHGTVALTDNSIRLPKIGFVKAVIHRKPDDSWLIKSATVSQESDGKYYISVLFEYDAPVNTYIADKTNAIGLDYASDGLYVDNNGNVGTNHKYYRESHNKLAKAQRRLSRMRGSKKNEVKSNNYIKQLRKVNKIHRHIANQRLDNLHKVSTEIANQYDIVCVESLNMKSMSNKGFGNGKATLDNGYGMFLSMLKYKLAERNKYLVKVDKWFPSSQICHCCGTVHPEMKDLALRKMTCDCGLTISRDHNAAINILNEGLRILNETFIVA

SEQ ID NO: 4161 - protein, 167 aa, Okeania sp.
IKVARIHAKIKDSRGDYTHKLTTQLIRENQTIVVEDLAVKNMVKNHKLARAISDANWGEIVRQLEYKAEWYGRELIKIDRYFPSSKRCSNCGHVVEKLPLKIREWDCPECGSHHDRDINASINILAAGLAVSVCGATVRSEGNKSQRTGAMRQKAPNSNARESRAVS

SEQ ID NO: 4162 - protein, 259 aa, Actinobacteria sp.
VERSWLGEVSAVVLQQSLRDVETAYRNFFASLKGGRKGPKMGAPHFKSRKDKRQSIRFTANARWSITDSGRLNLPKIGAVKVKWSRTLPTTPSSVTVIKDAAGRYFASFVIDTDPAADQARMPETDRTIGIDLGLTHFAVLSDGTKIDSPRFLRRAEKKLKKAQRELSRKQKGSKNREKARLKVARAHAKVADARREFHHQLSTKLICENQGIAVEDLSVAGLARTRLAKSVHDAGWSSFVKGRSYSLPAACCRTGSRA

SEQ ID NO: 4163 - protein, 404 aa, Nostoc sp.
VFHLTYEFKLKPTRAQIGIFEDWLEQCRRVYNYALCERKDWIKSRSCRINACSLHSEYIIPADTPRPTYFNQSERLTQVKKKYPELSTVAAQVLQQTLKRLEKAFVAMWELKHGFPRFKKLGKMRSFVFPLLKGNSIQKRRIKLPKIGWVKFHQSREIPDSGVVKQAHIIKRASGWYVLLIVQWNVDVPQPIPHGEAVGIDVGLTSFIATSNGLTLKRPRFFVDAQSKLKLLQKRVSRKRIGSNNSKKAQKKVAKFHEYIARCRKDWHSKLSHQICNDVGMVFVENLNLVGLSRGILGKHCLDAGFGQFFNILQQTCLKRGVYFQKVDSRKTSQICPNCGTDTGKKELSERTHICLNCGYSNDRDVAAAQVVLVRGLAAVGHTVKMLAEGKFVGIPKTQESPNF

SEQ ID NO: 4164 - protein, 374 aa, unknown
  TnpB Polypeptide
MVSYKFKLYKNKKNKNIHKQINISARIYNHCIALHKRYYRLYGKSLNYYQLKKHITKLKKLRKYVYWNELNSQTIQNIVERIDKAYKLFFRNQKHGIKSAPPSFKKVKKYKSYTLTQTGYRLLDGNKIQIGKQIYKYSKSREIEGTVKTITIKRDVLGDIYIIIVCKKEMNEVIPRTGKIVGYDFGLKTFLKASDNNDIKSPEFFKHSQNKIKKLNRKLSKKKKGSNNYKRAKRELAKTHKKIADQRRDFHFKLASQLSVEYAVICIENLNIKAMQRLWGKKISDLSHSSFVNILKHQCTKNGSQVIEIPRFYPSSKTCHVCGTINEKLTLSDREWTCECCNTIHDRDYNAALNIERVGASTLGVEIIRPALVG

SEQ ID NO: 4165 - protein, 443 aa, Lactobacillus sp.
MPKKNKEVPRNSVQYSHLSSEYLIPATALLDQFSHASHDLYNRALYDLRQGFFKKRYVKGYGGLDSLFKQRYQARESMLYHDLGYVQSAQQTLKEVNTVWQAWLKALKAYKANPGRFTGRPRMPRYLRKGQRHTFFVTNQNAKVKDGCLVIPKLGFKLKLAPQIKAIQRVAFKPIYDGYKVVVQYKIDQKITYLPDNGKYLGIDPGVDNAFACVTNTKNAPLLINGRGIKSVNQYYNKERSRLKALQARYRQLESIIDTKQGKKPVYQETKAMKRLTAWRNAKIREFAHKATKRIVDYALSCETNTIVIGNNKSWKRSSDMGKKSNQNFISIPHKVMIEMLQYKANLAGISVIRTNESYTSQTSALDHEQPCWQNGNKSRKKQGKSPVNRRISRGLFRSNDGRLINADVNGAFQITRKAFPKVSLANGIADVVLRPVKWSALI

SEQ ID NO: 4166 - protein, 433 aa, Acidithiobacillus sp.
MERIRIVSLKGLSRRQETIVREGQMEAARVWSECRDMHLKARQEHTPWPGRNEYHKATRGGRFALHSQSVQQVFRAFDAAVESTWENRRAGRKEMRYPYKDKRFFPLMWPAQAMGLEEKRIVLPMGRGRPSLVFPRPQWLTGKAACKVVWNGVHNELHISLEEAGAEPVGIGATEKHATVDLGQIHLAAVVTNGGEALVVSGRGIRSLKRLHSKQLGEIQKKRSRCTKGSRRWRKLGRTRARLTLRHERRVRDLRHKGTRQVVDFCKERGVEALFVGDPDGVRRKNSGRHHNQRMSQWEYGKDISYLEQKSEKDRIVCFTGDERGTSSRCPVCGHRHKPKGRNWRCKACGFVGHRDIVGAVNMHPIAYGQVVPFPKRITYHRPGSLRRCSSPDTGLPQVNSGSCLAQSRNQAPQREVPLRVPSGNRPQTASIS

SEQ ID NO: 4167 - protein, 649 aa, Streptomyces sp.
VCNTALEERTRAWYGEQRRISSVQSSAALTEWKKFARRAKYPRYKSRKKSRASAEYTRSAFKWGDGRLTPAKVAEPLDVRWARPLPEGAEPTTVAVSRDSTGRWFVAMLFEDTGAPAPATSAAVGPDAGITSLVTLSSGERIANPRHERRDRARLAKARRELSRKGKGSANREKVRRKLARVHARIADRRRDFLHKLSARLVRENQTVVIEDLPVRNLLKNGKLVRAISDAAWTDLRMMLEYKCAWYGRELVMVDRWFPSSKLCGACGTVREKLPLNVREWTCGCGTVHDRDVNAACDILAAGLAASACGDGVRPQRESSRTGRSSVKQKPSGRPLESPAFRRGRKSTGEPFDEAAEDPGVAVPLLAERRGCPVRGAVGGEDRRPSRTVLGHRHQGVAAQGGQDLGAWTRPDAVVAEQRRPFAGHPAEGGMAGTDGRRTAARGEFDAVVLGQQLDRQHLVQRGVAVGGLALETGEGEIATDHQQPAAVADPSAQCVDPVGPRRAPLEHLGGELEGVRPDVGENDDVVAGERLGVARELPGYQMRGQVRDLVPAALQRPAQRLDAGHIGTGGERVDPLDVCGLGDPALTGYQDAGHRLLLRDGDGAKLRDGGQDAAACSNSRAGLVCSRPVAVRRGTPCSTSRERNGSGT

SEQ ID NO: 4168 - protein, 418 aa, Streptomyces sp.
MRTYVLLVADRDEGAGQLTCLSHGRTIVWGVKLVVQVKLLPTPVQAAALDATLRACNRAADQASRVAYETGVTSRNDLQKAVYTDLKARYALSAQPVVRVVKKVVDAYTTLRANLKAGHLGPADSKRYRRATGSPIAFRPQAAQPFDDRCLSWRMDARTVSIWTVHGRLKNIGFAASPDQLKTLVAYRKGESDLIFRDGKWFLAATCEIPDPEVFEPVDWIGVDRGIVNLATTSDNTNYQGQRLSRYRRWQARKRAELQAKKTRSATRRLARRAKREHRHATHVNHVISKEIVSVAQRTGRGMAVEELGGVRDRVRLRRDQRGTLSAWPFHQLGQHLAYKARRAGVPFLEVDPAYTSQRCPRCGHTGRANRPDRDHFRCRRCGLAGPADLVAGVNVRDRARSAWVFVTMPVAPGPTPA

SEQ ID NO: 4169 - protein, 202 aa, Streptomyces sp.
LSIRYKPVRRQGGPAFTPKLAKAPRELARKAKGEGANRAKARRRVARVHARIADRRRDTLHRLTTRLVRDNQTIVIEDLTVRNLLKNGRLARAISDAAWSAFRSMLEYKAQWYGREVIAVDRWFPSSKLCSHCGTLQDKMPLSVRTWTCGSCGVTHDRDVNAARNILAAGLAVSACGAGVRPQRSSPGGQSAMKQETPRREP

SEQ ID NO: 4170 - protein, 398 aa, unknown
  TnpB Polypeptide
MIVLEFKLAGAASQYTAVDDAIRATQFIRNKCVRKWRDERGVKPYDLNMYCAILAKEFDFARKLNSQARQAAAERAGAAILRFYKTCREKKPGKKGYPQFQKDCRSVEYKQTGWKLDEGRTRLTLTDGFKAGTFRLKGTRTRDLLGYALDQIKRVRIVRKADGYYGQFGIDADRRASVEASGKAVGIDLGLSHFYTDSAGATIENPRHLRRSEKALTRLQRRVSSKVKGSHNRAKARERLGRKHLKVSRQRKDFAVKTARALVMSNDVIAYEDLRVCTMVKNRHLAKSISDAGWRACVAWLGYLAHVYGKVVVAVPPAYTSQDCSGCGARVTKALSDRTHACPRCGLVLDRDHNAARNILALGLRYIEETTAGHAESNAWGQSARYLPDASPLDKAAG

SEQ ID NO: 4171 - protein, 454 aa, Oscillatoriales sp.
LATRRQTFRLYPNKTQENKLFESRRHHAYLYNACVAHRRYEWRANQKNVTYFEQQNCLPDFKKEWVEFAYLHSQSLQATVKRVDLAYGAFFQGLRGSPKFKSIRDYSGWTYPAKSGWKVNSNGKNGNVTLNDLGITIKMRGKAKQWGTLTTLTIVYKPSRNQWFASITVELPTVESKFGSKSDLSYESIIAFDLGTETAITLYDGENFIEIENPRFTQKVARVIKQKYKALRRKVAPNRNKKVKGSRRWKKARKQISKIQRKVSDQRLDWQHKVTSEIASRYDIGVSEQLNTKGMTRKAKKGSKRKKQKSGLNKSILSVGFGTLNKMIADKIEQKGGLMLMLPTKQIKPSQRCPECGAVHKHWAELSNRYHTCDACGFEIPRDKGSVMVMYNVATLKQPGLGTSLEDCRCLSSTNLTGKRKHTGSMRQLGQKKRQKSCRNSDGNLETPSFYTAG

SEQ ID NO: 4172 - protein, 397 aa, Catellatospora sp.
VKRAFKFRFYPSDVQAAQLARTFGCVRLVYNKALQARTEAWTLRQERINYNATSALLTGWKKTDELAFLSEVSSVPLQQALRHLQAAFTNFWAKRAKYPTFKSKKRSRRSAEYTASAFRWRDGTLTLAKMTQPLHIVWSRPLPEGCTPSTVTVSCDAAGRWFVSLLCEDVITPTGASGAVGIDVGIDSLLALSTGEKITNPRHERADRQRLACAQRDLARKQKGSANRAKARLAVARIHARIADRRRDHLHKLTTRLVRETQTIVIEDLAVRNMVKNHRLARAISDAAWRQLRTMLEYKAAWHGRDLVVVDRWFPSTRLCSACGALAQPMPLDVREWTCRCGSVHDRDVNAARNILAAGLAATACGDDVRPQRESSRTGQSSAKQEDPRATKGVPVL

SEQ ID NO: 4173 - protein, 411 aa, unknown
  TnpB Polypeptide
MNLIYSFYIPRTEELVKLCNVSNNLYNQALYLFRQTLKNEDKWLWYEDMDKLMKTTYNLEGEINYRLLKAQVSQQILKVLDKNVKSYCKAIKDFKAHPEKYKGMPQLPSFRKRGGLFNLYYPNQSAKIEEGKIYLSKDLSIDIPQLDKYKEHIQNFQQVRILPSGDDKLKVEIVYRSKPKDAGLDKSKYASIDLGIDNLATMVTEQESFLYSGKFLKSYNRDFNKTLARLQSIKDKQGIEKSTKRIRRLYEKRDRYFEDVFHKYSRMITDYLIENRIGNLVVGYNTGWKQSVNIGKQNNQKFVQIPFARLVSYLKYKCEMAGINFVGNEESYTSKCDALAKEKIGKHDAYSGKRVKRGLFRSSTGKHINADVNGALNILRKVVGDFDCVNRIIGNGRLLRPIRYSTPFEVA

SEQ ID NO: 4174 - protein, 183 aa, Enterococcus sp.
MLDDRMKAYEKTRRDSSKKMSFPTPAKYKQDFPFLKEVDSLVLANAQLNLDKAYKNFFHDKSVGFPRFKSKKNHVQSYTTNNQNSTIALIDHKFVKIPKLKSLVKITLHRQPKGLIKSATISRHSSGKYYISLLCKEEVSELPKSNSAIGIDLGITDFAILSNDQKWKRNSNVNSVSCQGVYY

SEQ ID NO: 4175 - protein, 441 aa, Halobellus sp.
MLEVHRTHRAKILNHSQVAEMLDVHGWSASKLWNVANYHSRQVWDETGEIPDHGDLKDELKGHNKYKGLHSQSSQRVLEELAEAFNSWKEKRKSDKRANPPGYRKKNYYDQEGRRVHEEHPRSTVTWKQNGIKHDSKNNRVRLSKGANHKEHPKAWEYVLCEYETRPGVTVENLQQVRAVYDKAKQRWKLHLVCKDEVETPTAPGEETAGIDLGICNFAAVTYSTEEADLYPGNRLKQDGYYFPKEIAKCDDSGGKEATRLHRKWSERRTHFFHSLAKHIVERCIEKGVCRINIGKLSGVREDGNGESKNWGKHGNLDLHGWAFDRFSNILEYKAKVEGIEVVEVDERDTSKTCCVCGTEDENQRVERGLYVCEGHDDAFNADVNGAENIRLDINNSESNSESSASLSDDRSTGWLAQPGVYLHNLSSGFQPQEQVVDCKP

SEQ ID NO: 4176 - protein, 505 aa, Caldivirga sp.
VFFLLLLLRRSVAIELEVAKELNKLLYSVESAYLSIVREVVAYAVEHNVTSATQLHRVFYYRYRREYPGLHAHLITQAIKQASEIAKSFVKRRMRGFVDKPYPEVRSVSIRFTERAWSYEQFARSIAPVRLSLSLLGGRREVWLRLHKRFWLYWWKVLNGEAELARTLIVKRKANKWYAVFVFEIKPREERPQSIVAFDINENTVAVSRIDLPSTVDKVVNWNRQYLTPQLYMIRTDFGRLARRYERIRDAIIDRLKPHFALPSGNYVNITNTREFRKRVKRLREEERKVGRVRYVASELTKNPAIIITEELGDNPQESMINEIRRNETRHRIKQIPFKAVERAIVDKALERGSKLFHASSYRNSRVCPIHFTRLERTDDWHFLKCPLGHLVHRDYASILNMAWKTTPEAWTKGVWWDLKREKMNWKVREGDSNPIIPYPIVQYLHAILKTFTASEESPAVLARGSPMNPAREANEDWARTPPRFKATPTPQNGEEASSETTSWW

SEQ ID NO: 4177 - protein, 411 aa, unknown
  TnpB Polypeptide
MIVQRVEKHFIKQNNLYYPMFCDFTHKSKNLYNHANFLVRDEFIRNNRWLRYGEINKILKADLEFDDYRQMPTAQSAQQILRLLEKDWKSFFKAIRDWSKNKDKYLGRPKLPKYKAKDGKHILILTSQNARLKDNRLVFPKAFCGFTIQPQFIKLDHFVSFQQVRFIPNYKSFTVELVYNIEVPDDALSDNGRYLSVDIGLDNLATIVNNAGLKPVVINGKGLKSINKYYNKKISYYQEIAKRMNGRDYTNRMNHLTMKRNHKIDDYMYKAGKYLIDYALVNHFNTIVIGNNKEWKQKSAMSKIVNQSFVGIPHRRFIEMVQYKAQNAGLNVILTEESYTSGTSFLDNEDPVEADYNKTRRIHRGLFVSNNGIKINADVNGAYQIMKKVFPNAYADGIEGAALHPVRVSVA

SEQ ID NO: 4178 - protein, 379 aa, unknown
  TnpB Polypeptide
VSRYRLYPSPEQEAVLREHCAHARYVWNLTWNLHQFGTHGYPSRRKRHMNEGFRITDFNFGLHVRRLNRRWGQVRVPKVGWVRFRWTRAVPACKSYRVALDRTGRWHVAFAVVPEPVSAPGTGEAVGIDRGVVITAALSTGEKLHCPGMSGRERARLRKAERRKARAPKGSPEQQAERARIARLRAREADRRKDWREKVSTGLARRFDLIRFEDLRIKNMTHSAKGTARNPGRNVAAKSGLNRAILAQGWGLLVRRTQDKAPGRVETVRAAYTSRRCSACGWVDQNSRDSQAGFCCATCGFTCNADINASINIAAGHAGGTPVSAREPQLLASLTGQDAVEISPVRGRGCQPPILPCPTDISGQPRGRRRHRGFVGMTL

SEQ ID NO: 4179 - protein, 412 aa, unknown
  TnpB Polypeptide
MPTVGFRFRAYADEQTLRVLKARLRLVCEVYNTLRWVDVYFYHRDGGGLTQTELRQLALDLRKQDEEYQQLYSQVVQEIADKFYNARQRLLEGLAERFTRGKKPHRYYSLTYPQSGWRILQVREIRTGSERSRKRLIVLRLSNLGIFKVIAHRDFPLDKVKRVTVKLTKSEKVYVSFIVDGYEFPKLPRTGRVVAIDVGLEKLLVTSDGEYLPNLRAYRKALKRIRRLHKVLSRKQFLSHNWFKAKVKLARAYEHLANLRRDLYMKLGKYFAEHYDAVVIEDIDVKQLIGKANRALRRSLQDAAFGMMRSIIKYQVEKYGKRLILVDPRDSSKTCAKCGYVREDLTLSDRVFECPKCGWRTDRDYNSALNHLRRAGWEPAAVPVELHPLPVALGHGQGGARKRETPPLPGAG

SEQ ID NO: 4180 - protein, 380 aa, unknown
  TnpB Polypeptide
MIRPQAYKFQIRPNGEQVRKMKQFVGCCRYVYNRALAEHNEAYEADHSVHFNYFEIANKLPLWKAELSWLKECNAQILQQSLKNLAQAFTNFFEKRANYPKFKCKGDRDSARFPQGVKLDEANNRVYLPKIGWMRYRNSQCVLGTIKNVIISQKCGKWYMSIQTEREVVTPTPKGGEVGIDLGVVRPVTLSTGKYFEPIDTYKKIRGRIAKLQQQLKNKTKFSKNWKRLQSRINKLYHKSANIRKNYLHQITSQISKNHAIVYVEDLQVENMTKSAKGTVENPGKNVKAKSGLNRAILDQGWGEFRRQLDYKLLWNGGYLIAVPPQNTSRTCPMCGHVSKENRQTQAKFVCVCCGFSENADVVGAMNVLKRGQLQLAAEK

SEQ ID NO: 4181 - protein, 253 aa, Micromonospora sp.
VGIDLGLSHFAVLSDGTKIAAPKFLRRAARKLRRLQQKLSRKQRASANRKKAVIKVTKVHAKVADARRDWQHKLSTTLIRDNQAVYVEDLCVVGLGQTRLAKSVHDAAWAQFVQMLEYKTVRYGRTFAKINRFTPTSQTCSTCGRIDGPKPLGVRSWNCPCGAVHDRDINAAINVLAAGCAERLNACGAQVRPAPVPAPRREAGIHPGAAHRSTRSAEGIPALQGGENVNSGSVRTPRRAVCSANGWAGVSGR

SEQ ID NO: 4182 - protein, 334 aa, Sharpea sp.
MQLSETVKLYMTGEQKSLIVATMTEYINTVNSLVSDAANGISISKYTTADVKANLPSALTNQCIRDAKSIVKKYNKACRDADRKNDKLAKQGKNITVTATLPVLKKTCCYVNNQNFKINGDYIEFPVMVNGKSKRLSVKTKMSDKQKSVFANSKLGTMRIVYKGNKIVAQVVYETIEPTYTTEGNVMGVDLGVKCPAVSYISDGSVKFYGNGRKNKYMRRHYRCLRKKLQKAKHIDAVKRINDKEQRIMKDIDHKLSHDVVETAVAHNVKTIKLERLANIRSTTRTSRKNNHSLHNWSFYRLAQFIEYKAKMAGIAVEYVNPAYTSQTCPVCYL

SEQ ID NO: 4183 - protein, 356 aa, unknown
  TnpB Polypeptide
MLLTIKSKLVTTQEQHDQLLRTMVSFNKACNHISEFAYYNRIFSKYQLQKHLYYEIREKFLLSSQLAVRAFGKVAESYKVDKKIFHQFKPHGAVVYDQRILSLKDNIASILTLDGRIKMEIKYRKDQNINNRKGQADLIYKNRKFYLQIVIDQPEAVTVNSEEFLGIDLGIVNIATTSDGKMYSGKKCTEIRQKYSKIKAKLQSAGTYSAKKHLKKISKKERRFKKDTNHIISKDIVQTAKDTNISIALEELTGIRERTTVRKADRDKYFKWAFNELRQFIEYKSKINGVIVRFVNPAYTSKQCSVCGHISGKNRKKQDTFSCQKCGHTENADYNASKNIASRAAINQPIALCSAN

SEQ ID NO: 4184 - protein, 578 aa, unknown
  TnpB Polypeptide
MMQVRTFQARIDGPPTLDATAALLSRAERCLWAEMAKGRKPNDCKSEFLRRFGITARQFNALAVAAKGKASSLKEIGKLRIRELDARIKATLKTIRKLEKRKASAAKLHQKKRRLGILRDRQKAIRAEMKRPAPALCFGSAKLFNAQHHLEANGYADHAEWQDAWRDARSSQFFCIGSRDEASGNVSCTATLTAEGAIMLRLRLPDAVRDGGPKYAEIGPVSFGYGHDVVTDAIQAHATGQGEALSWRFVRDAQGWRVFVSLFQALPDTVPDFARGCLAVDMNAGFLAAAFLDAHGNPKGRFTVPMLTQHRRTDQVEAAIGNAAARLVSLAKRRGVPIVIEDLDFEAKKTRLREEARPRMARLLSAFAFNGFRTMLERRAAREGVAVLAVDPAYTSFQGRARFMERYGLSVHHAAAVVIGRRAMNSSERLPLSLALPAGDIPAARKRNQSHVTLVRPARIGRRHVRDQWARAMGAWKAALKGLRPTGRHKAAGPSPAKTARAAPAWDRSLEEDAAFLANPVFPPRTHDGAIDAAFLANPTFPPRTHDGAIPSREPAAKLLGGRPCATLLRDEQRCAGF

SEQ ID NO: 4185 - protein, 387 aa, unknown
  TnpB Polypeptide
MWKLLKSFKTEINPTQEQKVKINKTIGTCRYIYNFYLAHNKALYEHGQKFMSGKHFSVWLNNEYLPNHPEYQWIKEVSSKSLKKSIEDGCTAFRRFFKRQSAFPNFKKKGKSDVKMYFVKNNPLDCLCERHRIKISTLGWVRLKEKGYIPTSKDGWNIKSGTISVKADRYYVSVLIELPDTRITNQNNEGIGIDLGLKNFAIVSNGKTYKNINKTAKLKKLENQLRREQRCLSRKYENLKKGETTQRKNIQKQKLKVQKLYHRINNIRTDYINKTIAELVKTKPSYITIENLNISGMIKNKHLSKTIASQKFYEFRTKLKSKCNENGIELRVVDRWYPSSKLCHNCGCIKKDLKLSDRIYKCECGYMEDRDFNASLNLRDAMTYEIA

SEQ ID NO: 4186 - protein, 547 aa, Streptomyces sp.
VTELGGLREVAAPFVVPGPSGIAIRDRLKGLTPEDEEVLRLVGGLLGSLASRDLKARCRDGLEHDSDRWAQRKQALTGQSSSRWAGSITKATHDQWALARRGQLAHIQSLQAGVDTITRRLSLPIGEKEKGTKRAPGGYHSERERFHKTRRLHVLQERLERVRADREAGRVRVVRGGKRLLSTRHHLEEAQLTETQWRHRWEASRRFLAADGESGKRYGNETIRVTPDGEVSLKLPAPLAHLANAEHGRYVLAAKVSFQHRGDTWRDRLAANRAVAYRIHEDVQLGRWYLTASWTIPPAQTVPLQTARAGGMIGVDTNADHLAAWRLDEHGNPAGQPRRFDYDLSGTADHRDAQVRHALIRLLHWARRHNLAIAVENLDFTGESTREKHGRRKKFRQLISGMPVARLRTRLVSMAAELGLPIVAVDPAYTSKWGAQHWQKPLTSTTRKTSRHDAAAVAIGRRALGHPIRRRTTPPPHDQSDRAGHRTVQARPGTPGREGNRPRIPGPRTRCVPPGRGANAVDQDAQHRSGRPAEHRSCQQDSLPLSL

SEQ ID NO: 4187 - protein, 344 aa, Erysipelotrichaceae sp.
MYLTSKIILHPTEQQENTLKNLISIYKSEVNECLKKFILNKKLTWIPYSSLNRHLPWESKKEVIKEASKIFRDRFKLQGTINQQVSFTGDYCKWHCNSFTFASKLNLQIGQQSRMIVEYYADEYQKHLLSSGYLTSLKITKIEKKWICYIKILKPDPQPFGEYVLGVDLGIKVPAVAATNVGKIRFFGNGRELRYICTHQTNRLSKLMKDKNFKIIRKMNKRWGNKLLNIDHRISKAIIDFAVDENVGTIYLENLNHIQKKSDAGRRISTWSYTRLKSFIEYKAQTKGISVKLINPHNTSKTCPKCNRLNQSLTRQYTCPCGYKNHRDIVGALNICNYNSRRSN

SEQ ID NO: 4188 - protein, 398 aa, unknown
  TnpB Polypeptide
MVVEHASAIQYHIAWCVKYGHKESEVKLVEKSYRYRIYPNKNQKEIISKTFGCCRFVYNKYLAKRIEMYEHNKETFSYVQCANDMKKLKSELEWLKEVDSTALQSSLRDLDYAYQKFFKEHLGYPKFKSKKTHRASYKSKCVNGNIKFCGKHIKLPKLGMIKTKNKLIPQGRIINATISQEPSGKYYVSLCCTDVDIDPFAKTENTVGIDLGIKDFCVTSDGEMIQNPRHLKKSLDKLARLQKELSRKSKGGSNCNKARIKVARLHEHIANQRKDFLQKLSTKIIKNNDIICIEDLQVKNMIKNHRLAQSIADVSWSEFVRQLEYKANWYGKQVVKIDRFYASSQTCNVCGYVNKDTKELSVREWDCPYCHTHHDRDANAAINILNEGIRALEVSRVM

SEQ ID NO: 4189 - protein, 373 aa, unknown
  TnpB Polypeptide
MMKGFKIRLFPTEGQAVKLWQAIGTSRWVWNWGIAYNNDLYSREKKIAFEYELKREFTKVRNSGEFPWLKDVAAKVPAITLLTLGKAYKQCFSKRKNGLTAGLPKFKKKGKSKDSYGLDAETVLFYDDGVQILKVGHVKFKSDIPLADLQSTKIYNPRITFSDGKWALSFSKEVTTSPVQLHEYSVGIDLGVKTLAVVSCDGKIYKAKNINRSYRVVRLTRQLKHKQRALAKKQKGSANRRKALHAVQKCYQRITNIRRNYTHQATRKIVDLNPKTIVMEDLNVQGMMKNKHLARAIAEQNFSTFREFVRYKAEEKGIEFRLADRFYPSSKTCSSCGHVVENLPLSQRTYRCPVCGLEIDRDENAARNLEKAV

SEQ ID NO: 4190 - protein, 595 aa, unknown
  TnpB Polypeptide
MSMCSWLARANSKPSITSSLPFTDLPSSFFNVISFLSIIVQILDLLLVFPSYFFSMILLSSVFSVSKLISGFSVGVSVPSSRKALMYPSISVMCCISFFSFPVAFIAMISWIFFTMGAGIIFFISFSASTNLMGGVLFLLITYLAFTISLARKPTSLGVGGLASMRLYLRMESLYLIGIGAMKTVTRTIRLNVLRPTANKLDKLDALSGEYLEACNIFLQALKSNTVKSKYTLQHLRYTDIKESTQLQAQLIVDACKDVWIQRDKVEKIREFKRMPIRFNAPRSGSFGETGRGNPVVSFATLQGRETLPVKQDGSYERFNAFQEQGYRFTQFALQQRDKRWTVLVTLKKRFNVSEPETTQNVLGVDVGTNTLAAVSVYSPAEKKVLKQLYLGRDVSQITRNISVRRSKLQRSEKTSYRARRALRKLRGYELRHTKTRCFEIAHRIVNLARDYNATIAIEDLKHLNKTRLRRKSNRKVKRMPYAIFRQALESVAWQNGVAVTAVNPRNTSKTCSRCGAKRSVSGRTFKCECGYTANRDRNASVNIAQRAVNSFNPNAISDQNSLGWAAVNQPARHNDSVVECSQHINPPMNASPLL

SEQ ID NO: 4191 - protein, 447 aa, Oscillatoriales sp.
MSNYGCQQNLISPNRELRSVLEFVCEESNKLANSGTYYCRQLYFKTGKIPGKYDLHKLFKENLHFKALYSHVAQQTLTSVAESFKSYIGLLKGIKSGTVTQHPKLPKYRKNSLKLVTFPKADVKLKNGQLRFPLGSKVKLWFGIGEFYLPMPSNLDYKTIREIRILPRNGEFYAEFVYQLQSTAIKLDTNKALGIDPGLNNWLTCVSNAGTSFIVDGRHLKSLNQWYNKRVAAIKEHRPQGFWSKRLALLTEKRNRQVRDAVNKAARLVLSHCLENQIGTIVFGWNKGMRQEINLGSKTNQSFVQIPTARLKDRIFQLCEQYGIQFVETEESYTSKASFLDSDELPKFGEKTEGWKESGKRVNRGLYRSKDGSKINADCNGAANILRKVAATLGLCLKGVSRGALISPLKVRIWTLQKSPSRSGLGSINCDSVLAEGTEFAIALPLV

SEQ ID NO: 4192 - protein, 401 aa, Mastigocladopsis sp.
MQTISVKCKLQVPVEFCQEIDVTLQGFANACNQIYEVAKRENCWNTTKLHHKVYKPVREATGLKANHVCQAIRRVTGNAKAVKQVHEFRPTSLNLDIRTFQYIEELQTVGVTLMCGRVKFKLSIGNYQLALLKGQSPTAATLNKTRRGDYYINICVDLPTNPTGKTPVLKSFAPGNPDAQTFRKVIGVDLGRRDIATTSTGKSWSGKQIQNTRDRYSKVRANVQSKRTRSSRRLLRRLSGREQRFQKWLNHNISKCLVQHGERSNAALAFENLTNIRESLNQKPRSKTERRRTNNWAFYQLRLFVEYKANIASVPVVFIPPAYTSQTCSRCGHIHPVKGKFYRSGKSFKCGHCGFEHDADINAALNIAALGLSVIQPESPGISCQLEGQLNLFPTSLFELG

SEQ ID NO: 4193 - protein, 384 aa, unknown
  TnpB Polypeptide
MRTAYKCRAHPDSEQASVLNRTFGCVRAVWNRTLAWRQARYHTEHASTSYAQASAYLSMMKATEELGWLNEVSSVPLQQAIRHQQAAFTGFFSGRARYPRYKSRSGRQCAEYTRSGFRYRDGQLFLAKMSLPLAFNWSWPHIDPASLDPTTVTVSRDPCGRWYVSFAVEVPDPAPLPPAGAVAGVDLGIKHFAVTSDGHKIANPRRLARREHSLARYQRRLARCQPGSANRAKARAKVARAHRKVRASRADFLHRTSARLVRDHDVLAIEDLNVSGMVRNRTLAKAISDCGWGTFRRMLEYKAARAGRRLLVTDRWYPSSKTCSACGLLLAELSLSDRAWHCPSCGTRHDRDVNAAKNILAAGLAVTACGADVRHSGPPGCGRL

SEQ ID NO: 4194 - protein, 380 aa, Proteobacteria sp.
MSTASKILKLPFLRLNRAKAAEFARLQALNTATANTILALPHDVRRTLTSKSFVHVEIGSAWINQTIRNTNARTKVRQFRGLPLETNNQNWTLHKVGATYSVSFGVRRGIKKRLPLAVHQAAHQPWLEAILAGRASPGSIKLWCSRKGLWYACLSVSMEVPDAEPTGKWLGIDRGHTIPLAAATPQGPVMFWKAKRLRHIRRVYAKRRQRLQAAGKQRAVTKLERHEGRIITHINHCLSKEVVGLAQRCGAGLRLEDLSGIRSRSRQRQTTKTDAGQNRDYWPFYQLEQFITYKAQLARVAVEKVPAAYTSKSCHRCGALGTRKHHAFDCPRCHYHAHADANAAQNIRDWQGLCCPLVLEAPADGAHDLPLHMVRKTAGS

SEQ ID NO: 4195 - protein, 211 aa, Oscillatoria sp.
LIIAKIIIKTLATVSNGKTFPAVKAYRKAKRKIARLQRSVSRKVKGSNNRRKALLRLQKAHYRVACIRNDATHKLTTYLAKNHSEVVIEDLNVSGMMKNHRLAQAIADGGFYEFRRQLEYKCQWYGSKLTIVDRFYPSSKTCSHCGHIHKELKLRDRTFICPNCGFFLDRDWNAAINKREGGKLSRVSLWSIKPTSCLGGSDTSKQEKNAK

SEQ ID NO: 4196 - protein, 337 aa, Anaerolineaceae sp.
MRLRHLNRSEYEQIRSLSHIAKNLYNQSLWTILDHYKRTGEYLTYCQMDKKMKQIPNLEGNINYRLLKAKVNQQILRKLDKNWKSFFRALKDYKSNSHKYSGQPKPHRFVEDSFYHLIYDYQAFQVRQGKAVLDENLSIGIPEMLHDKRIVQIEIIPTWKTFDVVCVYEDKQTYQSVPQSERTMSIDLGLDNLATCVTNGVCKPFIIDGKQLKAINQYYNKKLAHQKSILDKRTSQKWSNQLQSLTDKRNRKVRNYLHKASRLIVNSCLEQNISQVVIGNVSYSTNKINLGKKTNQNFVNLSIGQLVSILQYKLEQHDIQVTLVDESYTSLHRLPPS

SEQ ID NO: 4197 - protein, 310 aa, Methanohalophilus sp.
MEQLYQVQYLKFDTEVHSQVKQDVIRRLGKSFDSFFRRCKKGETKVGYPRFKGKNRYNSFTYPQSGFSISGKKLKLSKIGEIRIVQHREIEGKIKTCTIRRDGKQWYATFSVVIKNNVKPVEPIAFIGIDVGLNSIVTLSDGAQVNSPKYYCNTEIKLKKQQHELSRKKKFSNNWKKQCDKVNKLHRKIRNQRNDFNHKLSRELINVYDCIVFEDLNIKDMVKNSRLSKSIHDASWSNLIQFTKYKAEEAGKFVKLVNPCNTSQICSNCGQNVKKSLATRTHNCPHCGLIIDRDHNAAINILNRAVGTTV

SEQ ID NO: 4198 - protein, 381 aa, unknown
  TnpB Polypeptide
VKGFGKSRQVIIVNKAYRYRLYPTNEQKIMFAKTFGCARFIYNKMLSDRIDYYKKTGQKLNNTPAQYKEEFPWLKEVDSLALANAQINLNKAYNNFWNNRKHFGKPRFKSKKTGRASYSTNNQKGSVRIEGNKIKLPKIGWVKLCQHRPLPENSIIKTVTISKTPSGKYYISMLVEYESQILPVIPKTFLGLDFAMHGLYVASDEEAAKYPDFLRTAEKKLAKAQRKLSKKQKGSHNREKQRLRVAILHERVSNQRRDFLHKKARYLADRYDAIGIEDISVKAMAKRKKGGKFSFGKSIADNGWNLFMNILEYKLAWQGKQLIKIDKWYPSSQLCHVCGYQNHETKNLSIREWDCPKCGCHHNRDKNAAINIREEARRISV

SEQ ID NO: 4199 - protein, 399 aa, unknown
  TnpB Polypeptide
MLVFEAKLEGEKHQYEKLDEAIRTARFIRNSCIRYWMDNKEIGRYELSAYCKVIAKKFPWAGQLNSMARQASAERAWTAIARFYDNCKKKAKKKGFPRFKKHQTHGSVEYKTCGWKLSEDRRTITFTDGFKSGSFKMWGTRDLHFYQLEQIKRVRVVRRADGYYVQFCLDVERVEKREPTGKTIGLDVGLTHFYTDSDGQTIENPRHLRKSEKALTRLSRRLSRTQKGSKNRAKSRNRLSRAHLKVSRQRKDFVVKKALCVVQSNDLVAYEDLMVRNMVKNHKLAKSISDAAWSAFRQWLEYFGKVFGVVTVAVPPHYTSANCSNCGESVKKSLSQRTHRCQHCGFVLDRDWNAAINILELALRTVGHTGTNASGDIDLCIGEETPQCKPSRGKRKPKQ

SEQ ID NO: 4200 - protein, 510 aa, Thermodesulfobacterium sp.
VREQVLSYELTLPQRIYSHLDRLFSVFKNQVNSYIPRLWNEKGFELLSQKGSAMGILKEVFSTPQGLPSRVFRNVLELTGQIVRSQIKRKEIFESLLKGEEVTGYDENFLLNVKRQLEKLKKKGKEVNSYFDFPYPKFNGQVVITSADDNLEKGQFKRLRISGSFLEFSIKVPTQDGWKWIKVRKLLPNRLRKALLKAKKIEAPLIKKQRLKSGYTVYRLVIPLSFEVTEPKEIDRVLALDLSSQEKRLGVAVIMDKEFVSKPIFFKTELIRKVERIYKETCNLERKIDDVYNAIRNTGSRKVKQELAKRLNHLFGEQKRKQRKCKELRKQILENFTNFVIAHAKAYHCQVIAIENLAFKEVPNWQSSKALRLFTQWFYSRFTKRLEEKARVSGLKVLKINPANTSRICAKCGKEGRLEKLTFECSCGTYDRDYNASLNVAQRALRLTKSRAYTVRDIPGRIPSRLVRAEGLALLTVISLFKLLAWLKVVQTCYLKPQNLIRWINSDKYD

SEQ ID NO: 4201 - protein, 481 aa, Actinoplanes sp.
MPRRRDVGTGPVVHRTARVGLRLTRHQQHRCFGLLRSAGDVWACVLEVNAWHRRRGDKPVAGYQELCRLLAASGPGIFGELDTTGARSVLRRYSDAWFSAAARRKAGHAEVRYPRRRRGLMPIRWYHGTFTLTGRRLRLPVARGGDPLWVRLDRLVPYPPETVRSVTLLVDAGRLWIDVTAELPITTYPPGTGPDPARVAGVDLGIIHPYGAAHPADGSALLVSGRAIRAEHRLHLTDTRHRRRATATHTPAKGRRGSRRWRKIRRRARLVEGRHRRRTRQALHEATKMLIGWAVSKRIGTLTVGDPRGVLDISAGRRHNLRLRQWQIGRTLAMLQDKAALAGIRVHLVDERGTSSTCPACHQKISKPRGRRMVCPHCAFTGHRDIAAAFTIATRTPGGATTPHPPACTGVVTHRRAGRHLPGARPARRDPRRRPLAASGSLGRRRPAPPPPVMGSRSFTIVTEDPQPHRTQTGQRSWTPH

SEQ ID NO: 4202 - protein, 286 aa, unknown
  TnpB Polypeptide
VEDYVRGYKYRICPTQEQEAKFNQMFGNARVVFNYFLGVRQRAWKEEQRSVGYSETSRLLTELKRQPKFTWLNLSDSMSLQESLRDLDNGFQRFFAGDARYPKFKSKHNAKKSYRTRNQNNGIRIKGNKIHLPKIGWVKIKLSRIPNGAILNATISKTPTGKYFVSLCVREDWNNVLKRNSGGEVGVDVGIKSFYVDSNGNVVENPRTFTKFQRKLARQQRKHARRKDGSRRKQKARAAVAVVHEKIANIRRDFLHKESTKLVSDNQVIGIEDLNVQGKLQYGSTL

SEQ ID NO: 4203 - protein, 242 aa, unknown
  TnpB Polypeptide
LHVTVTNETAKLGAKIVAETVIGVDMNEDCVALSALTESGIEDSVVIDYPEINEERHRYFTMRKRMQEAGQTVFNDVFRDKEQQFVHDHLHTVSRRVVEWIQRFDSPVIVFEDLEYIRDDIEYGARMNCRLHSLPFAKLRDFISYKAAWRGIPSDDVDPEYTSQQCPICGHTERANRHKKRFKCCECEHQDHADRGMYQCRTGVAAKARGQKCACSQHTPAGAEVGVATAGIGACGRPDRGL

SEQ ID NO: 4204 - protein, 502 aa, unknown
  TnpB Polypeptide
LDLNGEVLDTELIMSQLVSEVHGISAYATYVVRNDTQLETGLAQAGAVQSAVAGRRAGVTMPDFLAVGRTGRSRKEWLLRHRVVTEYRSWQERINATNGESRKYVSQGWKRTADASAPTYGGDYINLGAVDKQYAVIESNPFTTGEIVLKMVIRGQWYRLIFSFDNVRFPEGKVTLPLVKVENSQPIFIFSVVTENPIVQFSGDYIVGVDVGINNYATVVVRNTSTGQVIHETTLSQRVHSLWNSVRASERQVRALKKKSDRLLYDRQARMSALDEAQFHREAAARKKRELAILAAQEIAHLSHVYDNAVVAVEDLSWVGNTMQNGRWNRGELIKWLTHYVTQNGGWVVAVNSANTSQVCHVCGEKVKHPEHKVSICTKHGAMDRDMNAAANIAARAVPKVEKARKTRAKNRKLQPQAPLKTPTARHSLKYPGRDRTKHAPTPKRKNHPRDVKEVILPSSSPARVNMTTVLADWDVFGILETSKAAINQDYVTRKCRLCSLN

SEQ ID NO: 4205 - protein, 391 aa, unknown
  TnpB Polypeptide
MLKGFKYRLYPTNSQKELIAKHIGSSRFVYNLALETKNSAYLGSKHNFSLFDLIKQLPELKKECEWLKEVNSQSLQQSIQNMDIAFKKFFKGAGFPKFKSKHKGRQSFSVPQNVIVENGSLIIPKFKEGIEIVLHRPIKGTIKSATISITPTGKYFASILVDTNEIIPQKVAIKEETAIGVDLGIKSFLVTSNGLEIENPKYLRKAQDKLKYAQRKYSKNKGKRTKKKLAKLHEKVVNKRKDFLHKLSSKLISENQTIALETLAVKNMVKNHNLAQAITDVSWSTFVTMLEYKADWYGKNILRIGRFAPSSKTCSCCENINKELTLKDREWTCSVCTSVLDRDVNASINIKSFALKNNLSGEHTLKNQDELLTLVKVLTPEAHPIASGVGG

SEQ ID NO: 4206 - protein, 382 aa, unknown
  TnpB Polypeptide
MLKAYKYRIFPSEEQQGLLANIFGQTRFVYNLGLETKITAYAGNKKNIDCFDLIKQVKELKDNECPWLKEAPSQALQMALRNLDNAYTNFFKGKGFPKYKNKHGKQSFQLPQGVSLSEDNKQVFIPKLKYVGIDLHREFKGNIKTVTVSKTVTNKYFVSILVDTQKELPSKKPITDSSAVGIDLGIKDFAITSDGKKFENKDFFKSTQRKLRVEQRSLTRKTKGSNHYKTQKLVVALLHEKVRNQRQDYLHKISSYLVNNYDTICLEDLAVKNMVKNHCLARAISDMGWGEFRTMLEYKAVWQGKNISVIGRFEPSSKTCSCCGHINKELTLADREWTCVGCGVVHDRDVNAANNIKTFGLRNQSSVAQSDGIPCACNVEAH

SEQ ID NO: 4207 - protein, 377 aa, unknown
  TnpB Polypeptide
MKLTLKIKLLPTDEQANLILDTMREANTVCNSMSDVAWEKKIFNNFKLHHEVYHPYKATFKLSSQILVRCIAKVADSYKLDKKTKRQFRPLGSIGYDSRIMTYKPNDIVSLWAIGGRIKIPFVCHNRNYLPYIKGEADLVYKKGKFYLFQTVDVPDADIMDIEEFIGVDFGLTDIAVTSDGVKHSGEWLNNYRETKQRIRSSVQSKGTKGCKKLLKRLSGREKTTAIIQNHTIAKSIVKSAKEQGKGIAIEDLTNIRFTSKRRNKKFRTKLGKWNFSQLRSFLTYKSLLNGVPLVVVNPRYTSQTCNSCKHIGKRTNKVFKCVNTNCEVDTIDADFNAAQNISLLGVAINQPEKSTMFCSLHSLLGLKPIPSLCVGG

SEQ ID NO: 4208 - protein, 449 aa, unknown
  TnpB Polypeptide
MQKRKFTVVTQLHEKNNSDLIKYMESSRHAYAKAVRETFYTIKYDKFDKTKYNTYLQHKYNIVKRTAGSIISDAQGRFNSLKELKQYEAKQLEHKISHLENKLIPKLVEKRNNGSRLLQDGASVSLTKQRNLRLKIVAKKAKLNRLKQKLNNLNYEIESGKLKLCFGTKRLLKQNYNKFVEQRDSQMGFIGAKEETCCNHNFQLRYNRKSNQFLIKMRKDFGGYKSVDIKDKFIYGEVYFNHHKNRIISILKNKNSPLSYKIIKKNDRYYLCCTFEIQVDTNNFITCSEYGTIGLDFNKGFVTLSETNQYGHLVRTQFLPYRFKAGNKTKTDLQKIANQVTVLACQTGKSVCIENLNFKATKSKTETTGTKHGKQYNDMINSLAYRQFIDIIESAAYRNNVNLVKVNPAWTSWLAEKLYCPTRKLSVHVGASYVIARRGQGYKDTVKSL

SEQ ID NO: 4209 - protein, 423 aa, unknown
  TnpB Polypeptide
MNNVTLVSESKLYLKDNLSLYNYFDDYSKLFNFLVRRTVHHLKHKLNGESESKYRTRLMLEFGITNRMAKAIVNTAKTQLSLLKELSCYQYGRLYKRRRSLQKKIEKLKLSLNSSRLKRKKLAKVRLFWTQMKLNKVNQLISNGLKLYLTFGTKHLLKTNKTKFLAKRDNQVIYMGSKYETCGNQQFQIEFDPKRNHFNYKLRLDNKWISGPSKYIFGSFVLKNKEAKVNILQTLSTKLSNPLTYRIIKRDGTLYLQIMYRREVLHITQDTNGVLGVDFNKGFVSVSEINQNGKLQYLTRYNYLHKGKATKTKTSMLELVSKLVSQAVSVGKDIVIEDLVSLDSNKKQDKTTSKIYNHMINSLKFGLFKRCLLSKATKEGVFIHRVNPYNTSKIAKKNYTNKMKLNVHDAASYVIARRFYQYD

SEQ ID NO: 4210 - protein, 398 aa, unknown
  TnpB Polypeptide
LSEITVIKPSNRRLYKACDEVCFLSKNLYNAVLYIQRQNYQEGKSYIGFFDMLNLLREQNNPDFYNLCSYAAEYVAKQVNTAYKIFFSKLKSKKEGNFAKKVSLPRYKDKVKGRNVTTFYKKALLKRTYKKEGLIHLSQTKIKFKSKIPLEQIQYVKVLPKNGFYELHVVYIVKEEKPVETENYAAIDLGFNNLATVVTTNSSPFIVNGRPLKSINHNWNKRVAKLKSKLKKGARTSKKIRSITNKRTRRVNDYLHKASRALVNELRKLSISKVVIGHNNGWKENINLGERNNQNFVQIPHSRFIEMITYKCMLVGIKVVLKEETYTSKCSFLDNESVKKHNVYLGKRVKRGLFMSSNGTLINADVNGAYNIMKKHLRIEPSVLDLVQVCITPKVLKF

SEQ ID NO: 4211 - protein, 431 aa, unknown
  TnpB Polypeptide
MLTIKAQIRADAATERILRDAMFCATKVYNGLMWHLRLQQEETGRVNVRRSNLNRILAALPRAKGYYSMSVQLTRDEVRQAWRSFFALRRNGRTKQNAPGFRPKSMLSPLKYVQSGFRVEGDSLTLSLGTGREDGVRYVTFRISHRPGVEYERVREVTITYDKMFGRLEARLVVEIKPRKNHGIGRAAVDLGETMLLATVFEGGVALLYSGRFIKAIRRYWQKVRSHVKPPSKDHPRKSRRFRQIARRERRQADHLLHIVTSHFIRECVKHGVGEIAIGDPTGIRDRIDYGARINQRLHAWPYRKIIDMIRYKAALVGIVVRNNVDERGTSRTCHACGAVRESSRVHRGLYRCPCGWMAQADVNGALNIYERAFQVSPVKGSSGRVARPVVLSFQVGWHTVHEPKRARCPACIRLRMPPNEFGGGRHALEF

SEQ ID NO: 4212 - protein, 340 aa, unknown
  TnpB Polypeptide
MKLAEWARGNGVHPQTAYRWFREGKMPVPARRLESGTIWVEAAAERTAGHRLLAKDRARILAVTVSRKGTRLIAAFRVLMQRPQQPRVTNPDSRIGVDVGVRVLATVATSHGDIIERVANPAPLVDALRQLRHLSRRKSRRSKGSRRYNETTHQISRRHRRVADIRGHHIHALTTRLAKTHGEIVVEGLDAAGMLRQKGLTGVRARRRGLSDAALGEHRRQLAYKTRWYGSHLTVADRWYPSSKTCHACGRVQHIGWAQHWTCDLSDGGCGTAHQRDDNAAINLARYEIPTTGDSAVGPVRAAVKRGADHKTRPSRAGGREARKRPSPRAGKQPREGVPA

SEQ ID NO: 4213 - protein, 404 aa, unknown
  TnpB Polypeptide
MLVNRVEQHQINKNHPMFKVIDEFCFKSKNLYNCANYIIRQEFINNHNYIKYRAMDVMLQPTKEYKALMSQASQCLLQVLDRSWKSFFVAIKDWSQYPEKYLGKPKIPKYKKKEGRFTWFLKNNQTYIKAGQLSFRLKIFNGYKFKTNAQGRLISVRFVPKGSIYVMEIVTEIDVSESISEVQNICSIDLGINNFVTMVNNIGLQPIIINGKGLKSINQYYNKKKAKLQSELQIRHKQHWSKKLNNLTLKRGNKIKNIIHHTSHYIMEYCSEHNIDTLVVGLNKTWKQECSLGDKTTQNFTYIPYDMLIKQLEYKCQDNGVQLIMTDESYTSGTSFIDNERPIKENYDKSRRIQRGLFKSNSDQLINSDVNGAFQIMKKVFPNAFADGIKGCLTPVIINVVKTA

SEQ ID NO: 4214 - protein, 208 aa, Mycobacterium sp.
MRHVSRARSRCTNGSRQYRERTTEMSRLHRRVNDVRTHHLHVLTTRLAQTHGRIVVEGLDAAGMLRQKGLPGARARRRGLSDSALGTPRRHLSYKTGWYGSELVVADRWFPSSKTCHGCGHVQDIGWDEKWICDPTDGGCGVTHQRDDCAAINLARYEEPVSVVGPVGAAVKRAADPKTRPGRTGGDEARKATGHPAGEQPRDGVRVA

SEQ ID NO: 4215 - protein, 424 aa, Halorubrum sp.
VQKSLTSTLVFQLDINEGSQQLLDSGQVEARRVVNEIFRLDAQGYDWETIEDEVVERSNHVQNTTQRLFDKATDALERYYDEDDYGHPRQNHEELFPLRMNHGEGYQLFVDEESESISFRVTALKRNFVRGTLQSSQHYIERLKTALTNDDWRVGTAEVVRTRNRHELHVNVTHKTAEVADKEHAKTFIGVDVNEDCVGLAAVTGSGVEDSVVIEYPEIKKERHEYFTIRKRMQSVGQTTLEHEIRDKEKRFVHDQLHQVSRDIVEWAKQFENPVIVFEDLKDMRDDINYGTRMNRRLHSLPFAQLQDFVSYKAAWSGIPSEKIDPEYTSQECVDCGHTTRSNRQGKRFQCVQCGFQDHADRKAAMLIGTRGLEKLNRDVPALNSPPIVRVRRHGNGLSEPADHDPVSTVRDYQTDGETGSVRN

SEQ ID NO: 4216 - protein, 378 aa, Streptomyces sp.
MLTDHCDLYAALQERRDAWRHSSKTTVRYGDQSGQLKEIRAFAPEQARWSFSSQQATLRRLNKAFEAFFRRMKSGDTPGYPRFRSRTRFDTVDFPKDGDGCRWNSTPRDGTTRVRLQGIGHVRVHQHRPIKGRVKTVSVKRQGRKWFVVLSCDDVPLEPLPATGREAGIDMGITHFLTTSDGVHIENPRVLAQATAELAAAQRNLNQFPKRCKAKDRTKKHRQAVRRVANLHAKIRRQRLDHAHKTANFLVHDADVIAHERLDIAGMTRRPKPRRGGAYTFEPNGAAAKAGLNRAILDAGWGVFLTVLAAKAECAGRQLIAVDPRNTSRTCPLCGHVSAQNRDGEGFECTACGFLEHADTIGALNTAIRAGLALCAAA

SEQ ID NO: 4217 - protein, 347 aa, Acidobacteria sp.
MPATIEFFTDPHGPKYIKTMLRRQAYRFELRPSGQQLRNLRQFAGSCRFVYNKALALNTARYNKKEKRLGYAGLCALLPNWKKEHPFLSEVPAQALQQTLKNLERGYTNFFEKRSEFPKFKKKGQRESFRVPQSFGNGRIKLPKIGWLGYRKSQEVLGEAKNVTISESCGKWFVAVQTEREVETPLHRSTSVVGLDWGVVRLYTLSNGEYREQCQPLKRCLPKLAKLQRRMAQKIKFSHNWKKAKAGIARLHQRIANIRKEFLHRSSNEISKNHAVVFVEDLQVRKMCKSSKGTKDQPGKQVAQKSGLNRAILDGSPFELRRQLQYKTEWRLVFSTPCRRIPAAPAR

SEQ ID NO: 4218 - protein, 543 aa, Streptomyces sp.
VVGGLRELAAPFVVPGPCGVAVRDRLKHLTPQDENVLRLVGEHQGRLASRDLRARCADALEHSADTWASRKRDLTAQSSSRIAGAITKATHDQWALARRCQAAHIQTLEAGIRTLRHRLSLPIGEPGTKRAAGGYRSKSEWFHKSRRLAALEARHAAVVADRQAGRVRVVRGGRRLLNTRHHLTQARLTEGKWRERWDAERWFIAADGESGKRFGNETIRVTPDGEVSIKLPAPLTHLANAKHGRYTLTARIGFAHRGQEWADRITTNRAVAYRIHLDTDRGRWYLTASWQRPAVQTIPLEAARARGVIGVDTNADHFAAYHLDRHGNPVGDPHRFPYDLSGTAAHRDAQIRHALTRLIHWAKQTGAAAIGIEDLDFTTEKTREKHGRRKQFRQLISGIPTGRLKARLVSMAAEQGLAIVAVDPAYTSLWGAQHWQKPLAAPKRKMSRHDAAGIAIGRRALGHPVRRRTAPPPHDRSDRAGHRTAQAGPGTRGREGTRPPATDHAPGGVPPNGTRKREPSASKTVRDAPSTQQWVQDSLMHTG

SEQ ID NO: 4219 - protein, 564 aa, unknown
  TnpB Polypeptide
MKPKKKDIIKKVKPSYKDNPNYISLKNNILQYQHTVYNPDFKKSNIKNKLNINSCFNIDFYNDNINSNIPILKDNLFLENNTKKMTISQKIILTLNDKQKHILKIWFKSNDLMYNETIKYLKDNYLSMKTEFSDNIFITEYIFFCDASIKDISTIKKNFNTNKKSLKKFEKDDINIYKNELINVLKKNIILDLKIFILNNNMKNKRKDIEKYLKNKPYTISNNKFKLNFQNIRTYFLKDIRNNIIKTCNSNIINKDIKIKTHILDATIKIACANFQSSITNFENGNIKHFRIRYWKDKRDKRVLEIEKCYFTKGSLCPSIFNNINGYIKKNGKKQKYDFNNINSTVKLQYNKKIDEYTIFLSKDIECLENKNDNKKNLISIDLGLRTFATCLSENQTIDICKTDDTKLKKLINKRLEYKNILKNYNTKKNNKKLRMVNKRIKGLIDEVHWKTIKFLTSNYKNILIGELSTKGIVCNNKSILKSYNKELAYAYSFYTFRQRLEYKCIVNKCNYKGVNEYYTSKTCSACSEYNEKLGSSKVFNCPSCKNVFDRDVNSCRNMILKCV

SEQ ID NO: 4220 - protein, 476 aa, unknown
  TnpB Polypeptide
MLVRQGFQYALRLNAQRAAVLRRWVGCRRFVFNEALAHQRSEVAAGRYRPGYAELSARLPQLKSQYPWLCEPPAQALQQALKDLCTAWTARYTARFGAPRFKKRGEGDTLRLPQGCRYDPTSGTLSLPKFGPIRLRHSRQALGTLKNVTLRQDRSRWVAALQTEREVEVLAPAAEESVGLDFGAATTIMPSNEVLAPIELPVRIGRYERRMKRQQQAVSRKKKGSRNRAKARGRLAACHGRIAAMRRDFLHQATTRLVAGHSLIAIEDLAVKAMTASAAGTIVEPGTNVKAKSGLNRVILRNGWSMARGMLEYKSAWRGVMLVIVPAGYTSQECSACGFIDAENRRSRDKFACLGCGHAENADRNAAKNIQRRALKQLGGGDPPVALPGGCPASTAGYAGTQACEGAAPLRRRPRPAAQGATLVAPVAGTPSELGLSGTLQMERAALGWSGYQSLSGLVELHRVPGTLDSSRNGSP

SEQ ID NO: 4221 - protein, 334 aa, Proteus sp.
MLRATKVRIYPTPEQTEYLNAQFGAVRFAYNKALHIKKHVYQRHGVNLNPRKDLKPLLAVAKKSHRYGWLKEYDSIALQQAVINLDVAFSNFFNPKLKARFPTFKSKHGKQSSYHCVGIKVIDGAIKIPKIAPIEARLHREITGTLKSITLSRSTTGKYYASLLCDDGMEAPEKPALISNVTGLDMGLTHFAIKSDGYKIANPRPLINASHNLRRKQKALSRKKKGSTNRRKARIQLAAVHERVANARADFQHKLSRAIVDENQAVIVETLKAANMMKKPSGSCDRRCGMVWVHHKTGIQSSRERRASGEAGSMVRQFKNLSLLRSQNAGDAVK

SEQ ID NO: 4222 - protein, 312 aa, Proteus sp.
LQQAVINLDVAFSNFFNPKLKARFPTFKSKHGKQSSYHCVGIKVIDGAIKIPKIAPIEARLHREITGTLKSITLSRSTTGKYYASLLCDDGMEAPEKPALISNVTGLDMGLTHFAIKSDGYKIANPRPLINASHNLRRKQKALSRKKKGSTNRRKARIQLAAVHERVANARADFQHKLSRAIVDENQAVIVEMLKAANMMKNHHLARAIGDAGWSGFITKLEYKAAEKGVHLVKLDQWFASSKTCHCCGHKMPEMPLNKRIWQCPECGIEHDRDINAAINIERKGILELQAAGLVVSAHGGQRKSVTQTVAV

SEQ ID NO: 4223 - protein, 246 aa, Proteus sp.
IKVIDGAIKIPKIAPIEARLHREITGTLKSITLSRSTTGKYYASLLCDDGMEAPEKPALISNVTGLDMGLTHFAIKSDGYKIANPRPLINASHNLRRKQKALSRKKKGSTNRRKARIQLAAVHERVANARADFQHKLSRAIVDENQAVIVETLKAANMMKNQHLARAIGDAGWSGFITKLEYKAAEKGVHLVKLEQWFASSKTCHCCGHKMPEMPLNKRIWQCPECGIEHDRDINAAINIERKGIL

SEQ ID NO: 4224 - protein, 428 aa, Peribacillus sp.
MTVGLSQSNLFANIRSLVNNNYKGVKPMFVNKAYKFRIYPTKEQLVLINKTIGCSRFVYNFFLGKQNEKDAYWYICEEMKQNGQLPSNEWKGSFLNKYAIIKELPALKKEYSFLKEVDSIALQKSVENLADSYSRYYKKQNKSPRFKSKKNPVQSYTTKQTNGNIGMIGNQIKLPKLGLIRFAKSREVEGRIINATIRRNPSGKYFISVLVETDVQVHPKTNRSCGVDVGLKNFAILSDGTVYQNPKFFRTVEKKLAKAQRILSRRQDIALNQNKPLAEAKNYQKQKRKVAILHEKISNARMDYLHKVSTEIIKNHDVIGMEDLQVSEMMKDHKLAKAISEVSWYQFKQMLEYKAKWYGKQIVTVSKTFASSQLCSSCGYQNKDVKHLNLREWDCPFCSTHHDRDINAGLNLMIEAIRLLTVGTTGIA

SEQ ID NO: 4225 - protein, 468 aa, unknown
  TnpB Polypeptide
MPLQTITCTFKFELMPDKDQRAALSLNAGCRRFAYNKMLELLNERKEADEHIPNYSEMSHILTGWKKEPDTAFLREAIAQSLQQGIYDLSVAVKNYFRKPDDPAKKGWPRFHEKNVHDGFRLPQPKSSDVDEINGRVNIPKIGWIRYRQSRLMRMKECDGREVEGKLLQIRINKDVDKWYVGFVMEFHLEQPDPNELEIAIDIGIVHAVTTNEGHFFDLDVDRIRELEEKIQKNQRKLSLNANSRKKLVALGKTAPIDKHKPSRTRRELQEKIQKLHRKIRNIRADFRKKLAHTLAQEYGCVYAEDLRVRNLTASAKGTVENPGKNVKQKSGLNRAILRIGWYGIREEIEWAQRKTGGRLIVVDPKNTSRTCPGCGHVSAENRRSQALFKCVKCDYTKNADVVGALNVLRKGRTKKAEEVTLPVLPSAHIQKKRIARVVNGFRGGVCEAPLGAVISGNHPMSVPQGAG

SEQ ID NO: 4226 - protein, 425 aa, unknown
  TnpB Polypeptide
MMQLVEKHLIRKTDPRFAFIDRAAFASKNLYNAALYEIRQHYIFVGKYLTYNQMDKLMQKHEAYRALPRKVSQQVLKLLDKNFQSYFAALRAYEEDPYKFLGRPKLPGYKDKKEGRNVLVYTIQAISQKSLRVGIIKPSQLGIEIRTRQRNIDQVRIVPKKSGCYAVEVVYTQDEEQKEVSLSLVAAVDIGVNNLVALTSNKRGFAPRLVNGRPIKSINQCYNKQISKLQKRMSSNHHTSRELERVAAKRTRRIDYSMHTASRRIIDLLVREGIGTLVIGKNPNWKQESPMRKKDNQHFVQISHARFIDMLTYKAKLVGIHVLLQEESYTSKASLLDLDHIPVYGKEGETKPVFSGKRVSRGMYQSKSGQEINADVNGSGNIMRKALPNAILAHGIGDANGMFESLVVHPERIVVPLRTQKSRFR

SEQ ID NO: 4227 - protein, 434 aa, unknown
  TnpB Polypeptide
MQRRKVTFKLYPNASQRKRLDGWVRLHAELYNAALQERMEAYRKAGVSISYYDQQNALPSIKQFRPELVELGSHALQETLRRLDRAFQAFFRRVKAGQSPGFPRFKSSARFSGFTYPDPAGWKLLQQGPRGGTLRLGSGKGAMMIRLRGRHRFAEFTPNDLTLSRRRNPATGEDQWYASITLRVPEAACARQRAGEDQVGIDFGLAHWANFDDGRQTDNPRWLRESLPRLADLQRQRARKKRGSHRYHQLSQQIARLHQRIADRRRDFIHKQTSALVQRCALIATEALAPQNMSRSARGTVEAPGRRVRQKAGLNREILSAGLGMAHQMLTYKAQEAGSVLHLAHTRQLKPSQRCSGCWALVPKALKERWHLCPHCGCSLPRDQNSARVVLLDAWTPQDTPGTGVAARLKPLPAQAGKPRSKTRETPTTTASAV

SEQ ID NO: 4228 - protein, 394 aa, Streptomyces sp.
MLEARHAAAVSEWQAGRVRVVRGGKRLLNTRHHLTQAQLTEEQWRQRWEAERWFLAADGESGKRFGNETIRVTPNGEVSIKLPVPLAHLANARHGRYILSSRIAFAHRGAEWADRIEANRAVAYRIHLDTGGGRWYLTASWQRPIVQTVPLATARARGMIGVDTNADHFAAYHLDRHGNPIGDPHRFPYDLSGTAGHRDAQIRHALTGLIHWAGRVGVAAIGIEDLDFTAEKTREKHGGRKRFRQLISGIPTGRLKARLVSMAAEQGLAIVAVDPAYTSLWGARHWQKPLVTSHRTMSRHDAAGIAIGRRALGHPVRRRTAPPPHGRSDRAGHRTVQAGPSTRGREGTRPPATDHAPGGVPPSGKRKREPSASKTVRDAPSTQQWVQDLLTHTG

SEQ ID NO: 4229 - protein, 568 aa, unknown
  TnpB Polypeptide
MDYIVTIYSDRMYNLEPDICDTIDKTLYIFNRAKLSSYNMAFLKEIDPLTYALKYGNKSIYNIIKEKYKMDTYYTNSAVNEGVGSFKSQVELNKLYKTQKEEAIKAIETKLKEETKKLEKYIILRDNLIIYRHELKEESKAKKLKTSFPNISYNGYNIIVRSLKNKKIKTYEYGLYSFEYDYLNPKIKYLKSKISKLKYRLNNTKTKLKNLDKIKHIRFNKNTKYNSYLISGRSDGAYKNFVFKATPHEKDNYFYFDINTLFPGGFNYTFKDILFKYRGKELKEALNHKYPIAIGFIKKKDGEGKIYYQFKVAFNLGETSSLNKSKENGIVGIDFNYGFLAISDIDSKGNMVNSFTIPYEITDNSKQNELNLRYALNKIGEYIKRKGKTLVIEDLDTSKSKMKNTYKDPKLNKILHSFPYEKYIQITKYTGIKYGFLVKLVSPKYTSIIGLLKYSYKMKLNSHIAASFVIAHRGLGIQEKVPFCYKHLIPKEIRYKHNWSKWNKLNSINKSNIKELKKKDKKNKEYKNYKNTVTLYNGSEKVHYLTKEDIKLKKEKEYNQKLNKILLF

SEQ ID NO: 4230 - protein, 446 aa, Cyanobacteria sp.
  misc_feature (407)..(425): Xaa can be any naturally occurring amino acid
MIIYEFKVKGKDAQYRAIDEAIRASQFIQNKCLRYWMDNEKVGRYRARFAIGKYDLNKYCSVLAAEFPFADELNSMARQAAAERAWSAIARFYENCKRKIKGKKGYPKFKKHCRSVEYKTSGWKLSSNRKAITFRDGKNIGTLKLKGTYDLNYYDIKQIKRVRLVKRADGYYAQFAIDVKVRVETKPTGQAVGLDLGLKFFIADSKGNTELCPQFYRKSECQLNRVNRKKSKKFVRGAKPQSKNYHKARNRYARKHLRVSRQRKEYCKRVAYSVIQSNDLVAYEDLNVKGLAKNRHLAKSISDAGWSTFRQWLEYFGFKYGKQTIAVAPHNTSQNCSCCGKKVKKSLSTRTHVCPHCGFVEDRDVNAAINILKLALCTVGHTGTYAWGDLPSWAIGAILSSNGESVXXXXXXXXXXXXXXXXXXXRGVSSYEVTALDEAIAIVFFD

SEQ ID NO: 4231 - protein, 422 aa, Methanobrevibacter sp.
MSSVIDENKYYGGEQDVTDVVKVKLYPTNEQKCKINQNIGNRGFIWNKMLRKIKCEKVKPTMKNLNKILKELQIEYPFLKNSESSSRQQVFIDLIQAYNKHKKEGRGFPKFKTRKNSNSSFRIQANNNNIRLNERKNRIQVPTIGKIKFKTSKEHKQKIEESKINNITIKYENGIYYGIININTKHTPMKHHFEAIGIDIGIKRPLTCSDGLKIEELNLIKEEKNIKHYQREMSKKEPGSKHFLIAQKKYWKAINKKINKKNDYWHKITHDIVKNNQIIALERLNIKGWFKNNRWAPKLQRISLYEILRQLKYKSERNNRKIIQVGRFFPSSQKCSNCGYQYHNLKLGEEDWTCPECGKHHDRDLNASINIKNEGLRLITEKIIKIIPVGYCHGLRCAGIGSKILTFHSSKSMLINRESPTS

SEQ ID NO: 4232 - protein, 501 aa, Micromonospora sp.
VKRFQPRPGFVVQAYRFALDPGGRQEKALRSHCGAARAAYNWAVSWVSASWWQRKAEASYGVAEKELTPWRPWSLPALRKEFNQAKKTDSRFADWWQENSKEAYNTGLAGAAAAFDNYAKSKRGQRKGQRMGVPRRKSKHRARMSCRFTTGTIRLEPDRRHVTLPRLGVIRTHESTRKLERRVANGTARILSATVTFERGRWFCSLQVEVNKNERAAARPGVVVGVDLGVKCLAVMADSAGEVRYVPNPAHYDTALTTLKRMSRRVSRRQGPDRRTGQKPSKRWLIANAERNRAHHRVANLRQDGLHKLTTAITAEYGTVVVEDLNVAGMLRNRRLARKVADAGFGEIRRQITYKTGWTGGVTVATDRWYPSSKNCSGCGAAKAKLPLHVRTYICQTCGLILDRDENAARNLAALAAHSTTGTGVAGDQDAQASKPRGADQKTRATRPSPKGRGGAGRWRNPAAAATAGNARPSSGHRSSHASVTPSRTFRMETPGMLTFH

SEQ ID NO: 4233 - protein, 386 aa, unknown
  TnpB Polypeptide
MELTLQLKLLPTDEQATALAATMARFNEACTWLATQAFAKQLSNKLTLQRMYYQELRTRFALPSQMAVRCLARVAGTYRRDKTICPTFRPDAAMPYDQRIMRFHGLDQVSLLTLQGRVFVSFLIGAYHQQRFDVHEPRQCHLVVRGDGQWFLLVVVQVPDGTPFPPTDFLGVDLGVINLATTSDGISHSGEEVEACRTRYTTSRRQLQRAAHVAQLAGKRPKNIRRALKRHARREARFRRDTNHCISKKLVAAATGTGEGLALEDLTAIRTRTRFRKPQRAKMTGWAFAQLRFFVEYKAQLAGVPVMLVDPRHTSQECSACGHIAKANRQSQAVFSCKQCAYTTNADYNAALNIRARARVRWPIVAVRPPKQLLLGLAEPATSSVL

SEQ ID NO: 4234 - protein, 361 aa, Escherichia sp.
  misc_feature (3)..(3): Xaa can be any naturally occurring amino acid
  misc_feature (231)..(231): Xaa can be any naturally occurring amino acid
VEXLERAYKNFFRKRAAFPRFKKRGQNDAFRYPQGVKLDQENSRIFLPKLGWMRYLNSRQVTGVVKNVTVSQSCGKWYISIQTESEVSTPVHPSASMVGLDAGVAKLATLSDGTVFEPVNSFQKNQKKLARLQRQLSRKVKFSNNWQKQKRKIQRLHSCTANIRRDYLHKVTTTVSKNHAMIVIEDLKVSNMSKSAAGTVSQPGRNVRAKSGLNRSILDQGWYEMRRQLEXNMSKSAAGTVSQPGRNVRAKSGLNRSILDQGWYEMRRQLEYKQLWRGGQVLAVPPAYTSQRCACCGHTAKENRLSQSKFRCQVCGYTANADVNGARNILAAGHAVLACGEMVQSGRSLKQEPTEMIQATA

SEQ ID NO: 4235 - protein, 225 aa, Thermococcus sp.
LGVAHFVVDSDGNAFENPLFLEKSLERIKKIQRRLSRKQKGSKNWERERIKLAKAYEKLTNQRNDFLHKLALYYVRNYDIIVVENLKPKNMVGNGNKSLNRRLLDSSLGAFIRILSDKAERAGRRVVFVEPAYTSRTCSRCGFVVEELPLPERVFRRSKCGLVMDRDLNASLNILKRGLDEGLGRPGLPVEGRPLPPRVVPYEAVITGGQVFLMKQEAPPERTGG

SEQ ID NO: 4236 - protein, 212 aa, Thermococcus sp.
VEEKLINGKWVKLPREPLGNLSAGIDLGVNNLMAVYVENGESFLVNGRPLKSIDFYWQKRIAEYQSKLNKSGAKKSKKLSRMHQKAKLQAKHYINTMVRQTVEKLYHLGVSRIIVGYPKGGIARNSDRGRKQNYLLSHVWRFNTVIKRLKEVAEEYGIQVLVVNEAFTSKTCPVCGKPPTMGGRDLFGGVCLSVPQRGGLSSMQTSLERLTF

SEQ ID NO: 4237 - protein, 416 aa, unknown
  TnpB Polypeptide
MEYSHRYPAYPTQQVAAQLEHHIDIHRQAYNYTLYEYENVDGDDIGSAYKHHYRLPGWKDEFPVFSEVNSKALQRTVARFYQNLDGLSEQKQNGRTVGKLNWKSPREFQSMTYSQSGFELKNTSGRRATLWLSKIGDIPIRYHRDIPEKADIKEVTVKKETTGEWFVSFGLETDDADLLEKPDVDTLDASNSVGIDLGILKYIHTSDGTTVEWLDLDDEYDRLRREQRTLSRKQKGSNNYEKQRLEVAKVKRHIRRKVLDYQHKLSTWLVREYDAVFVEDLDIKEMLEQSHNARNKQDAAWRQFITLLEYKAELYGTHVVQVDAAGTTKECASCGVATAKPIWVREHACPSCGFECDRDANAAMNVLQRGFSELGLGWPEDTPVETALPTDTTSVSAKRVIEAGSPTLYEAAPVAE

SEQ ID NO: 4238 - protein, 601 aa, Rhodococcus sp.
VTGSGSTVPRQFSFTTRAYTAVDDATGEPIGLDDVDTRVGWLLDLIAAAGGELVSRLWHPATFDVLAAGLDRQDRRLPAQGHVAAARLGWAPIYPAGVYVPSRVSRVVTAQVVATLRTLTYRDTAIMALSALFDPATGVVAPPIGSGDHVSAGFARGVQRQLVAFSRRSDGAQSTRLRITDLQGPPQTSAMARLSAADRQLARITVADRELVLTVKLPTSPAPAGRAQWRRVRLTATIPKHLHGRAITDWHLPTLVLDHRGLLWRCAATELAPAADLMAGTVAVGVDWSPSTLGAAATVVEGPAGLSSDYRGWTYDDRGLGIKLARLQAEGQLLHRKAARLTRLAATAPQEVRAQLEEKIAVLNEHREAVGVKRGKINRELSFHFARQVTDYAADAQAQVIAVEDLTTLETRGHGRVNNNRAAQSARRQAAAALAHTAAGAGIAVVSVPARGSSAWCPGCDAPLARPGGYHDAWCPRCRVGGNRDHIAGVNLAKRALLGKGKVTRRRGQSPAVRVAEHAPVRRCRDKNGPTRRRPRHRRVRRSRPIVTPRLGVTPNKHVPASQASVWDTVKSTPPQGDAGSRDTRISQAPATPVADSVRST

SEQ ID NO: 4239 - protein, 379 aa, unknown
  TnpB Polypeptide
MKLTLQLRLLPTPDQKTDLLATMERFNEAATFAAKVGFEAGVYGQVTIHKLAYHQIREQFGLSSQLAVRAIAKAVECFQRDKTKCPVFKPRSAICYDQRVLSFKGLTTVSMWSLSGRLLIPFVCGAYQKDRQGRIKGQADLVYRQGKFYLLCTIDIPENAPVEPTDVLGVDLGIVNLATDSSGETFTGEKVEGVRRHYARRRATLNRVGTKSARRRLSKVRKREANFRRNENHRISKQVIAKAKATGSAIALEDLKGIRDRVSVKKPQRNRHAGWSFNQLRSFLEYKAQLMGVPIVLVDPCNTSRTCPECSHCEQANRKNQAEFECRHCGYSANADFVGARNVRARGIVKCPTVGVDEAKTGNGTAAETAYKPPALAVG

SEQ ID NO: 4240 - protein, 319 aa, unknown
  TnpB Polypeptide
LQRFLQTKEDLGLYSANKQQAQRFYKVVKAGKECPVSVRCDLLKIKRVGNKVSEYWAKIPVKGTRRLWVAIKPHRAFPEGFKICESKLYRRNGRFYLNVAVKGEVALNASFRKILAVDLGERTIASTVLLCDGQISHPHFYGKDVRGIRRHYAWLRKRLGERKVLKTIRKVGHTEKRKVNAVLHRVSKAIVAEAKRENAVIVIGNLRGIRERANGKGKRFNRIVGNMPFYRLSQMIEYKAVQQGILVVSTGEAYTSRNCHVCGCDGDRKSQGLFVCRHCGEYNADLNGAINIGKKFERDLGYMPLFGVACEPALNSNCS

SEQ ID NO: 4241 - protein, 623 aa, unknown
  TnpB Polypeptide
VAKTQTLSFPIRLPDGQQAEALRLLDASRPAINQMVVDLWPQLDLFVGERTGLAWKQVETHLVTRSGHGSRQERCEMEQAGRILRAQATRKQVFLSVLPLLSEGLIRPAEGKRPAKKDYQAIKEQVRKLREESEDADTLMAMTNVVEQACNRFLDTGIFPTSYEELQQVPVQEVAQLTFAGDDGMNAGQTYRARVSVARFCDVTSHQEHERASLRLLLRSPDQQGQWSWGEWSEEIPLPQAVCSYLWQGAIPQAPTLRETTRDDGNRVAVLDLILEVPAKYVSALDQETRVLGWDWGVRSLLTVTILEKPEGDEPYRQVSRPVFLDTGGLDGRQARLRREIDRLKACQERYDTRVKQALKANREQQTPLPLHFPGWQEHVKAYETRITTCWKKYERRNRELAHLASNLLILLALLYECRLICGENLTTLKTEGRGRGVRGRFRNWRNNTTVRGELWRVLKYKCYLLGIRARQVEARGTTHTCPHCHQPAKTYLSPAKQDRKKASDWAPWLCCNNRACLWNGARDYAASLNIAALGMAFLITYHDTKRYQAYRMTDSSVKPASYIGAGATLLLPSQGITPRPPEGNHVYYAGWSFSISLRTSQKKYLLSSLSTSRLRKRVLKSA

SEQ ID NO: 4242 - protein, 438 aa, unknown
  TnpB Polypeptide
MYRTDRIYVSKQHEMFPYFDGLAHKAKNLYNASLFRIRNAFTAHDKTNVTSNEKEVLDELALLKGQKTYRVLGYEVLQRLMRVTQNPDFFAGLPMQSAQATVKHACSDFQNWLSALKKYKQNPALFTGKPRMPGYCKGDITTLALTNQDAVIYGDELKLPKTKQRLRIRKRHSARLQEVKVCPVSGGYDILLVYQVKEPSAETGTHSAAVDFGVDNAMAVVADTGDSILFKGEYIKSINQYFNKERAWRVSVMSKGNVTATRVWSKKLDQLSAYRTNYIRDCFHKMSRLLLEWCKSHEVRYLVLGSNKFWKQKADIGKQNNQNFVSIPFEMLKSMIELKSNEYGITVIRQEESYTSKASFLDLDFIPVYSEEEPDKKYHFSGRRIHRGLYKSADGTLINADINGAANILRKAGHDVSNIKIARLLDPAIIHFKDLNCK

SEQ ID NO: 4243 - protein, 417 aa, Yimella sp.
MSIRQRMYPSPVEAEAMMLHCAQARYVWNLALEQWNLYRPDKASRGVQVPNNAVRMKQLTEARSEFGWLRAGSSVVHQGALRDFDRAVHGFFGGHKQRPTWRKASDSRQGFVIRDLTIHRISRRKATVLVPKVGPVTVITTRPWPEVQAATSARVTFHNGQWHIALTTPPAPPIVTGTGAVVGIDRGVSNTIATSDGGFEHIPGFTRGEQARFVALQRQLSRQHPGSNRRQVTKNKLARMRQRLTDRRTNWVETTTTQVARAYDLVVLERLNTVGMTKRPSPKPDPDNDGSFLSNGARAKSALNKAILASCWGTFATRLGHKLPEGHLVFVDPRNTSRACPCGHVAAQSRKSQAVFVCVECGWSGHADTNAAGNILGRGLATVGVGTQPEDIRGLGRNRGTPTTASTARGRRRSVAP

SEQ ID NO: 4244 - protein, 427 aa, Helicobacter sp.
MLQLTHKIELNPNNKAKTHFKKAFGCARLAYNWGLAKWKENYEKGIKSNHLALKKEFNALKKTNYPFVYEVTKYATAQPFTHLNLAFQKFFRDLKLGKVSYPRFKRKREYQGSFYIGGDQIKIIQGGTKDYLKIPNLPKIKMTERLRLQGKINGATISQKGDKFYVSIQTDITQEEFNRTHKPIANNHTLGIDTGIKAFASLSNGLQIQAPKPLNRLTRRLKRLSRQLSKKRHSKTKNDGVKKSRNYLKASLRLNRLHTRIANTRNNFLHKLSTALVRHAKTLCMESLKVSNMLKNSKLAKALSDVSISAFNTLLEYKAKYYGRKILRADAFYPSSKTCSSCGSVKKDLTLSDRVYRCDVCGVAVDRDFNASVNLVKHLVSGVPTEFTPADMTALLVDLSKSQLITSMVETGIQQKPLKIFSIDRIL

SEQ ID NO: 4245 - protein, 519 aa, unknown
  TnpB Polypeptide
MSSVTRTYSLRPYSCCETKTGTGLDFYTILEEVRNDVAFCATETFKHITLENLTIISQYDGLKPAEAGRQIGIKLSSPGRGTGRSRFEKMVQEYAVTMLRSWGERQKVHAGNTNNYVSAGYRRTNNNNKPDFLKPHLALSATDKQYHAIRLQGSIIELDMVVNQRWVTFKFKTPSRFLDPGIKIIAPTISIDGRDRVIFNWYIEIPVERAEFSAKYVVGVDVGINNHATAVVRDITTGEVIEASFMNRRVRSLENKIKRAKTQIAVLKKHGRDKETEPHRLALSNRRKELAILIGQEVADLSWRYGNALVAVEDLSHITNTMKHGRWVRGMIIDRITEMVESNGGRVMTVPAAYTSQNCHRCGESLDMTDYHTPTCSSCQTAWDRDENAAANIASKLKEKNRHKKACTTRKKHASKKRRRNSKGSLHSLKHPLKKTVPTPKAPQNQPKKRENTHHVHHKHMVVKKRGGGVFPVLCAAGRSLRDSSVRVPAVAHAHGSDKKPHDYPNNKHRFDDVCLPKE

SEQ ID NO: 4246 - protein, 311 aa, unknown
  TnpB Polypeptide
LKKGIVSYPQFKRKKDNEGSFYIGGDQVSLSDTNRNSKAFRKIPHNGKQKHQYLKVPNLGWVKMTERLRFIGKINGVVISQQGNKYFASFSVQATEDEYKRTHPNADTDKGVRMAGIDLGIKSALILSGGVAVENPKPLKKNLRKIKKISRQLDKRVHARNKQERLEGKKKSNNYRKLSVRLSNAQRKVANMRRDFTQKVTTILTTHYAHIALEDLNVKGMVRNHRLAQSVSDVAFGELCRQIEYKSLLNGVKVLKADRFYPSSKTCSVCGHIKQNLRLSDRIYHCAKCGAIIVRDYNASLNLLSLIIKNK

SEQ ID NO: 4247 - protein, 363 aa, unknown
  TnpB Polypeptide
MGIRPIIQTFTVERYITSINQSDYLKLAKLVVAKNYEEDKELWAWYHQPNQSFLYTFLARELVKIRRQNKGKLNFRSVDKIQPNFNVRCDTFPSKKRPSRIYLKDNGKLQIPTIGEIPFGSIRQDFDLSCKKQVANISFDGKYWYLSYVEDIENQVADLPNYTEGVGVDLGVKTLATISDGTTVPNIKTFRRVRILEKRLKRLQRKVARKNLINKCNKHNKTKNIIKLERQIKLIYRSIRNIRINHIRKFVSDLVKQQPEFIAVEDLNVKGMMKNKHLAKDIANCSFYTIREHLIRKAKERHIAVRLVDRFYPSSKTCSYCGSYKKDLKLSQRVYHCDNCQERIDRDFNAAINLANTDKYVLA

SEQ ID NO: 4248 - protein, 153 aa, unknown
  TnpB Polypeptide
MLSVKLRKLKKKLKRLQRQVSRKYEANKNGNNYIKTNNIIKLEKTIKLIHRKLYNIRNNHIHQATSSIIKLKPYRVVMEKLNVMGLMKNKHLAEKIAEQKFYEFVRQMKYKCEFNGIEFIQADRFYPSSKLCSSCGSKKEGLKLKDRIYICDK

SEQ ID NO: 4249 - protein, 250 aa, unknown
  TnpB Polypeptide
VRLIYSRPIEGKIKTCRVVRDVDQWFVVLTCEQEQPQVTKSTNPAVGVDVGIKTFVVLSDGECVENPRHFKKSEQQLAKQQRRLSRKVKESQNRNKQRTKVARVHRKIRRQREDFLHKVSRSLVENYGCIVFENLNIKGMLRNHKLAKHISDCAWRKLIDYTTYKAEEAGVEVRLVNPKNTTQICSGCGELVPKTLADRIHCCPHCGLEVDRDLNAAINICSVGITQSYAYGDLTSTQGYCVPEQAKSLK

SEQ ID NO: 4250 - protein, 282 aa, Moorea sp.
LPRFEIHFLVDHGTVEIPSELKSVGVDKGYTEAFYDSDGHAHGKGLGKETTKKSDRICAKNRNRGKLWALHRKLEELNPSRSARILKNNLSRKTENKRYRQNQSELTAIIGAASKSLFNGESLKVFAEDLTQPIKNKRQSKAMSRKLNSWMKGQMRDSLQKWANWTGSVVTEVQPSYTSQIDSVTGTLLGKRSGDSFTRFNGVVLQADHNAAKNVLSRGTDQDITRYMSKTEVQAVLLRRTARFLEGMGLSLLDAIELGLLDCKHELCSGFQGTPGRDARNV

SEQ ID NO: 4251 - protein, 488 aa, Moorea sp.
MCPVYGKMGNAREVIQVYGCQQVLLNPDRELSAILNFLCIQSHRLTNMGIYFARQIYFKANRYISKFELEKEYKLNRHYKAIHSQAAQQILRSVYESFKSYKELIKAYRKGKIEHRPRLPKYRKKGGLALVSYPKQALRLIDGNIRIPLGRQVKCWFGLDSFRLPLPSNIEFDDIRELRILPKNRCFYVELVYKKEIETPIVEPDNVLGIDPGLDNWLTCVSNVGTSFIIDGKQIKSMNRWYNKQISTIKQGKPQGFWSKHLGAITEKRNRQMRDGINKAARIVINHCLKNKIGRVIFGWNKGGKNEIGLGKKTNSEFVPIPTARLKERIAGLCQQYGIEFIETEESYTSKASFLDGDYLPKYGEKPKDWKPSGRRTKRGLYRTAMNWYVNADCNGAANIIRKVSRTLGINLDELGRGVLTRPHRVFLWSVNKKTVFRDADSSPRRNILIRIPRHLCGGVVKPSSSSIALSSIDSSASGSAIGTITNQ

SEQ ID NO: 4252 - protein, 397 aa, Dactylosporangium sp.
VKRAFKYRFYPSPAQAAELARTFGCVRLVYNMALQARTEAWTLREERVGYNATSAMLTAWKQTDDLAFLNEVSSVPLQQALRHLQAAFTNFWAKSAKYPTFKSKKRSRRSAEYTTSAFRWRDGRLTLAKMAEPLDIVWSRPLPEGASPSTVTVSQDAAGRWFVSLLCDDVIDQTPATGAVGIDAGLDSLLTLSTGEKITNPRHERADRARLARAQRNLARKEQGSVNWAKARLQVARVHARITDRRRDHLNKLTTRLVRENQTIVIEDLTVRNMVTNHSLARAISDAAWRQLRTMLEYKAGWHGRNLVVVDRWFPSSRLCSVCGALAEPMPLHMRSWTCRCGQTHDRDVNAARNILAEGLSVIACGGGVRPQRESSRTGQSSVKQETQRATAGTPRL

SEQ ID NO: 4253 - protein, 198 aa, Salmonella sp.
LKDLERGYKNFFQKRAAFPRFKKRGQNDAFRYPQGVKLEQANSRISLPKPRWIRYRNSREVTGEVKNVTISQSCGKWYVSIQTEYEVADPVHNAGSMVGLDAGVTKLATLSDGTVYQPVNSFKVNQRMLVTLQRQISRKVKFSHNWQKQKRKIQQLYSRIANIRRDYLHKVTSEISKNYAMIVIEDLKVKNMSGQNRA

SEQ ID NO: 4254 - protein, 455 aa, unknown
  TnpB Polypeptide
VSYLLITRKTPGFSALTHRAKNLYNIASFYIRNAYSASIKSNADRFPHEIQVLEELNGVVDELNVIRQKHHSTPIHIIDHEHRFVSMQHLDGFFKLRDQIDYRALPAQANQNVLHMLYRDWKSFFVALADYKAHPDKYEAIPHIPRYADKDGYKPLIFTNQICKLRKDKHGWYVKFPKAVLQAGCVRDRYDLGKLDLHEQKLKEVRLIPHGDNINLEIVCEIEIKEPTIAIHEATRVAGIDIGVDNLAAIAFTSGHRPVLIKGNEIKAVNQFYNKQIAHYRSQLRTGKKDSKGIHHTKRMNRISEKRNRRVKDILHKASRKIIDLCEKEGIEVIVVGNNAGWKKRIHMGKKNNQTFVQIPFRTLIEMIKYKGEAAGIRVVVCEESYTSKASSIDEDQIPVYGKDVTHTFTGKRIKRGLYRSKNGILMNADVNGASNIIRKVYPCMPKRERFVEVL

SEQ ID NO: 4255 - protein, 414 aa, Campylobacter sp.
MLSRKIRIDNFISDKEKEEIYQYSKSLSAIYNECLDLLKENLNFKDLSKITKGGSKATGLHSKHIQNTSREVINAVKSYLVKKKNDKSARFPKLHREYSPIIMVANLSSKTEEIVNSRTGEAILEKKYYPGGGFKLEGKKINFTSIGFELDLSKCPYYDIELINYETLKQIVIKIDENKRIDCIFVFSEKKQEKAPNQNFLSIDLGISSIASCYSNKIDCLKIQTKRFKGLERTINELKSKRDKKKKDSRAYKKLNKTIRRKQAKLTNKRKDYLHKASKTVVDLCILNGIDNIICGDIKTKKLKKDYKTSLNKSTQNEGLLSRFKGFLKYKAENKGLNFLLVNEAYTSQTNCLTGKRELDSNLSIREVELSPGFKVDRDINSAVNIAKICGDLWLSHIFEKNRLLKIQKMNITL

SEQ ID NO: 4256 - protein, 441 aa, unknown
  TnpB Polypeptide
MKVTKTLEVKLFKPNAHKREKFRETCREYQKALDDAFDSDCGTQSEANDVVVDYDLSGYAKNALKKYIPQLVRDGTQELDNGHPVRFTNEGVRIDYKPQNSIEWYVKIPHHEDYHLWCPAIINPEQRDWIEAVYSDDAELGEVRMFPRGGGWYLHLTAHREVEETEVSESCTPIGVDIGETALATVCHLDERGSPTAPKIFSREGSKVRQLREEYFTTSKRLQERGSEKLLEERGDEIWRRIDDIIHTVTRRVVEYAERLEDGVLVLEDLTYLRENMDYGSYMNRRLHGWAYAQIHAQIRYKAEEKGIPVETVNPRDTSKRCYECGEEGSRPHQATFRCSNDDCWVSEFQADVNGAANIAQRYLENRRFSTSTRIVGKRSFPYVRKSSISEHSDSLDLHGESHQQKTEGDDSVEDGADLTQPQDSPTEGETRPTTLETDAS

SEQ ID NO: 4257 - protein, 381 aa, unknown
  TnpB Polypeptide
MPVQKLNRAIMYRAYPTPEQQVLFAKTFGCVRFIWNQMLMDAQRFLEEAGAFFIPTPAKYKTEFPFLKEIDSGALCNTQLDLKEARKRHREDPKTVGSPKLKSKRKSKMSYTTNIHSYKTNDGRVVHTLALEYDSIKLPKIGWVKINKHREPGTNWVLKSATVSCTRSGKYFISLLYEFEKDIQPIKPTKETSLGLDYSSHDFYVDSNGNVANYPRFYRRSEEKLARAQRRLSRMQFGSHRYDKQLYRVRVLQEHIANQRKNFCHTVSTAIAKQYDAVFVEDINLRGLAGSLKLGKSTNDNGFGMFRTMLEYKLTSQGKTFAKIDKWYPSSKTCSVCGFIKDDLTLADRVWTCSACGTTHNRDHNAAINIRNVGLLGLYPA

SEQ ID NO: 4258 - protein, 434 aa, Haladaptatus sp.
MDVRRTAVVKLADSDEQRDALHRTAKQYRYCANRTADYCWSNTSYTECKTNKRKIRDALYSELREETELQAQLVQASIRRAVEAVKGVVERWKKGQRVSCPTFTAETMDYDTRSATFYRNKASLATVEGRVEPSFILPADSPTPYERYVLSEDYEFRESTLRYDAATDEFYLNISTRRIDGVDETCVSSAHQNASRSGDGDAEVPADTGHPDQTVLGIDLGVNSLAVASTGTFWQGDDYDHWCREFENRRGEMQQRGTQAAHNALLRLGKREDAWRKQYIHTVANELVTEAVEHDCDIIAFEDLTDIRERLPQAEWHHVWAFRRLFEYVSYKALEQDVSVEQVEPNHTSQRCSRTDCGFTHEDNRHGEHFECQKCGYEVNADYNAAKNIGLRYARKRTYRLRSSPTSESGDAQVDVRINGGTLNGESYRPIAGD

SEQ ID NO: 4259 - protein, 400 aa, unknown
  TnpB Polypeptide
MKIIKGYKTELDPNNKQRTAFLRHAGAARFIYNWALADRIERHERGEKTNMYEQKKRFNALKHEQFPWLHQVAYAVVENAFRNLDTAYTNFFRRIKNGDAKKGFPKFKSRKNGIGSFTLRGCIHSVSGGIKLPRIGWVRLKEHDYIPADGIKILSVNISEKARRWYASVQCEQDIADVTATGPVIGVDLGIKSLAICSNGKVFENPKALQYYEKKLRRLQRQLSRRQKGGKNYAKTKQAIAKLHVKIANIRRDAIHKVTHYLTATTKPSVVVIEDLNVSGMLKNHSLAKAIADASFAEFRRQLEYKAHWYGVDLLIADRFYPSSKTCSECGNVKPLLRLSERTFVCEKCGVVIDRDFNASVNLANLAVKPTVTACGDDKVTAESLAVVVSEAGSEQRNYA

SEQ ID NO: 4260 - protein, 419 aa, unknown
  TnpB Polypeptide
MNLLMGYRTELDPNNVQRTLLLKSAGAARFAYNWGLNRKQEVYAMNQLPVPHIKNPTAIDLHRELNRLKKPNFPWMYEVSKCAPQEALRNLDNAFDRFFKGLGKYPKFKSKKNGIRSFTITTGAMKVSSDHIEIPRVGNVRLKERDYIPVDLEVKSITVSEKAGRWFVSVRVKEETGEPVPIKGPVAGIDVGSMKLATVSDGMVFENPRAFRRNERKKARLQRSLARKKKGSNNRRKARMKVSRIEVRIANIRKNAIHELTTYLAKTKSVNVIETLNVNGMLKNRNLAKSIADAALGEIGRQMVYKCKWYGSLLVKADPFYPSTKRCSGCGYIKDEFPLDERIYKCEVCGLVIDRDLNAARNLEQYYTKNLGPNYALTVAASSTETINACQRREVAGHRETGGQCSPVKQELNTIGRMS

SEQ ID NO: 4261 - protein, 535 aa, Streptomyces sp.
  misc_feature (225)..(284): Xaa can be any naturally occurring amino acid
VRVIGAEAGRVKREVLGVPDRAKHRRKAAVPVRRRAPEADTRQRVYRYRCYPTPTQTAQLTQTFGACRWAYNEGLALRDRAWREHRVSLGFAESCRALTGWRNAEGTRWLQEVSSVVLQQALRHLDAAFGRFFQGTARHPRRRKKGRSRDAATYVRTGFRWTEDPERPGTGLIALAKQAGPLRVRWSRPLPEGARPVKLTVSRDRAGRFFVSVLVEERILSLIHXXXXXXXXXXXXXXXXXXXXXXXXXXXXXXXXXXXXXXXXXXXXXXXXXXXXXXXXXXXXEMCIRDSTGGAPKAVGLDLGLAALVTLDDGEKVEHPRLLKKYGAKLAARQRSLHRKKKGSNNRNKARQEIARLYALIGDARRDALDRLTTRLVRENQVLVVEDLSVASLVRSPRGEGRRRKAGLNRAILDASWGELLRQLRYKCAWYGRTLVVVDRFFPSTRRCSACGAYGPKTDLAVRGWSCGACGAAHDRDVNAARNLRDEGLRLYGLVASALPAGRAVPSMIRASETPDCVRVRVREDVRAGPTGRRP

SEQ ID NO: 4262 - protein, 402 aa, Streptomyces sp.
VIRAYKFLLRPTVRQAQSLREMLADHRSLYNGALRERRGAWRHSSKTSVTYGGQSAQLKEIRAFDPERQGRWSFSSQQATLRRLDKAFAAFFRRVKSGENPGYPRFKGVGHFDTAIFPRDGDGCRWDSTPNDPQTRVRLQGVGHVRVHQHRPVKGRVKTIAVKREGSRWYVILCCDQVPTEPLPATGAAVGIDMGVTHFLTTSTGEHIVNPRFLQAAAESLAEAQRNLATFPKRTKRRTKKHRAAARKVAKIHAKVRRQRLDHSHKAALALVRSHDTIAHEKLNIAGMTKKPAPKPDPVRPSVFLSNQRAAKAGLNRSILDAGWGVFLAILANKAESAGRAVIAVDPRNTSRICPFCGHVSKENRVTQANFQCTACGHSANADHVGALNVLDRAGLVLCEAA

SEQ ID NO: 4263 - protein, 382 aa, unknown
  TnpB Polypeptide
MARRGNKATRATVSMKIALSEPLLALVNNYVKALRFVLFWLKENVPNPNEKGVLSKVHEELYEKLREEYNLPSKVAEDCYREAIATYRGWYNNPRRGRFPRLYKPTVWLTPKASYNVNFDKMTVRIASVGELPILGYPRNLREYLSWRMKEARLVIKDGKAFLKVVFEKKKEKVEPKESIAVDINMNEVVVGKDDKHYVRIPTRLHEVHHWKSLAENLQKKYPRRWRENKRILWRIRSFHQKAKRIMEDFARKVGKWVVEIARDFGTNVIKLESLKNLIKNVDKLPKEFHDKLYLMQYRRIQYWIEWQAKKHGILVQYVNPSYSSASCPKCGRKMKEVSHRWFRCNCGYENDRDVIAIVNLNRRGSLTLSTAPQMRDVNPNR

SEQ ID NO: 4264 - protein, 345 aa, unknown
  TnpB Polypeptide
LHGLVRNDLYEFDWSEDKSTLEFGVGDVLKDKYDFAYQERVTLEVSGNPQWNDDDSRLELIYGETADVFRVKHPVRIQPDKLEAQRLDAFTHTLDSENTTHSAAIDVGANNTLAIVTSTGDTAVYHARPEFEQFQHHSERIAELQAELSESRYSSRRIQRLYDERTRKRDHSRNAAVKHAAEWLLDRNVERVYVGNLTDVLSTHWSSTVNEKTHAFWSHGQLTDRLALTLGDVGITVKQVSEAGSSSECPECGSENVHRDSDAFRCHECELDAHSDVAGAWNVLQSEVGPMARPTALSAERGRDAPSEGTYWEWNDHEWTPADFGEHLCSLDQTSLSKPASSQPG

SEQ ID NO: 4265 - protein, 361 aa, Syntrophomonadaceae sp.
MLVNKAYRYELKPNKSQLVLLKKHAGCARFAWNWGLAERKRLWEEEGKSTNAIEQHRELNRLKKTDYPWMYEVSKCAPQEALRDLDRAFRNFLEGRASFPKFKKKGIHDSFRLTGTIKVFPKHVQLPRLGKIRVKEETAKFKGKILSATVSREADRWYVSLAVEAEIPDPLPVPGEPIGIDMGLNHFAVLSTGEKIEPPKSLEKNLKRLRRLSRQHSRKQKGSNNRKKSALKLARLHRKIRNQRRDFLHKLSTGLAKTKPVNIVEDLTVKNMMRNKHLSRHIADAGWGEFRRMLEYKTKWYGSRLVVVPRFFPSSRRCSECGYVLPELKLSTRRWLCPECGAIHDRDINAAVNLLQYLNSA

SEQ ID NO: 4266 - protein, 395 aa, unknown
  TnpB Polypeptide
VSKIEMIRSLNLVLIPNKEQEKYLKNACGTARWAYNFALGCKNDYYDRYNQNLKGGYIRKRITEMKNEMEEYSWLKDISNNVTKQAVKDCDRAFLNFFRGKARHPKFKKKGRSKESFYVEKIKFIRVGNQLYVKIEKLKQPILLSKEATKYKNIENVEGIFNNPRIKFNGRRWEISFSIKFREPIKELTEEVIGIDLGITNTAICSNGRIYKNINKTSNKLKRLEKRKKKTQRRISKKYEMNKQGGKFNKTNNIIKEEKKLSRINHTISNIRKDYNHKISKDIVNELPRAIVMENLNVRGMMKNKHLARAIQEQNFYTLLTFIKYKAESQGTKFIQVPRNFKSTQLCSKCGDEYKIRLSERTYQCSSCGLEIDRDLNSALNLRNYGLNHLNSQTA

SEQ ID NO: 4267 - protein, 400 aa, unknown
  TnpB Polypeptide
VIRALKTTFRTTKKDLKRLFACNRNSAQVWNDCLQYANEHHLNTGNWINKSELQQLTRGRYNLHSQSIQSVQERYLQARTNAWKAKQQGYNHIRYPYKEKKNYPTRWKKDGFIINPDGRIELKMCLFNGKRQPPIKVKVAKLPPGQIKEIELTWDRQLMLAISYEDGYQPQENNNEGMAAIDLGEIHGIAGFAENGHSIIITSRKLRSLKRLRNKKTGDLQNKISRCQKGSRRYKKLRRAMAKTSRKTERQQRDILHKTSYKFVKWAEANKVNQVIAGDVEGVQRETKAHKKNPRRRQKNRMTNQKLSQWPFGLLLTYLAYKLQFKGIALTKTDESYTSQTCPVCNRKKKVSGRTFRCYCGYTEHRDIHGAKNILAKYKYGAIKDLGIKQTKVTYLRPAV

SEQ ID NO: 4268 - protein, 371 aa, unknown
  TnpB Polypeptide
MITQKFRLYPNKQQEQKLLETLDKCRFVYNKMLDGLNEQDKPNRLELQNSIPKLKEEYPELKEVYSKVLQYESYRLFSNLRALARLKKNGKKVGRLRFKGKGWFKTISYNQSGFKIIETEKRLDLLHLAKIGDIPIRTHREVKGKIKQIVIKKYNSGKWYACIQVENSIELEKKPIEKKVGIDVGIKYFSTDSDGLQIENPKFLDKSYKRLRREQKELSRKKKGSKNRQKQRIRVAKVHEKIVNQREDFLHKVSRYYADSYDFIAVEDLNIKNMVRSHLAKWINDASWNRFIQFLSYKVENTSGIVVKVNPRGTSQEYKFGELDRDYNASLNILERGLEKLGMGQTEVTPIETEPLLVRASSVVEVGSSLR

SEQ ID NO: 4269 - protein, 374 aa, Desmospora sp.
MIKAFKIRLSPNHKQRTQLEQSAHVARWAYNWALNQKKDHYEETKKSYSQGDLRKHLTQLKQTDEYKWLYNFSNNITKQAIKDCDEAFKRFFKGLSKFPRFKSRRRSKWSFYNDPHKVKLEPDRIRLEKIGWIRLAETGYLPEEFKPLSYRISKEGIHWFVSITVEIPDYVDHSKPTNQPVGIDLGIKTLATLSNGTIYKNINKSGKMKRLEKRFKRLQRRASRKYQLNKEGNRYRKTRNLIKLEKSIAKLRSRIHHIRKDYIHQMTTEIVKTKPSHVVIEDLNVKGMMKNQHLAKHIQQCNFYEIRRQLEYKCKWYNVELIIADRWYPSSKTCSSCGQIHKELKLSDRWMKCDCGLHMDRDFNAAMNLAKLAS

SEQ ID NO: 4270 - protein, 397 aa, unknown
  TnpB Polypeptide
VTPEQSDALRNTLTLCNEAADIASALGFDRGVTGVRSLQRLTYKTVKAVGLSAQPAIHVIQKVAGAYAALDANIKAGNLGRPGSKRFTAAISKPVTFRADAAQSFDDRSLSWNMDTKAISIWTVAGRIKDIPFGGAPEHLAVLATHRRGQSVLVTHRGNWYLHAVVDIDTPAVAEPNGFIGVDLGIVNIASTSTGQNFSGAAVNQVRHKNLRLRQKLQRKGTQSARRLLRKRSRREARFITDTNHVIAKKIVTEAKRTGKGIAVENLTGIRSRVRLRKPQRVALNSWAFAQLGGFLAYKAEAAGVAFVRINPAYTSQECSECHQIDKKSRIDQATFICQSCGVSLNADINASRNTAYRGAASWGALNLPNAGRTSHPVVTGTASQPLKRPVVDSVAG

SEQ ID NO: 4271 - protein, 368 aa, unknown
  TnpB Polypeptide
MPSSGQLLKHEEREPISPAIPDKGIYEVNYKNKRTNVVRLFPNGFQKRKLKRLANISSKLFNELNYERRQQFFHEKKVDFKGTWNKYYKKYKEELKVNAQAVVQKNNEAWSSFFSLIKKKGKLPNRMKHIKPPGYWIDKDTKKRRLLLVVRQDRYVMDEQNHKLILKDFNLEIDFAGRLKWYGKQGRLEIYYDETENAWYASIPVEVGVEKTKKGKESKYIVYGEKKTISVELPKGNKVASIDLGINNLASVIVNDGTWFLYKGIRTKEDYFYLEKKIAQVQSLADKTKNIGEYEAYEELLKEKKKIFKKLTKRLLHLYRNFVFHLMKKLHELGVSTIYLGYPFNIAQEKGNKFTVNMWSYHKLINGN

SEQ ID NO: 4272 - protein, 384 aa, Streptomyces sp.
VQLRYSFRVYPNSPQRATLARTFGCARMVWNDALRICKDAYKADVPRPKAGDLSKRVVTEAKRTEERAWLSEVSAVVLQQSLRDLEAAYSNFFASKNGTRRGAKMGPPKFKKKTSRQAVRFTTNARFSITADRKLRLPKIGDVEVRWSRELPSAPSSVTVIKDAADRYFASFVVEAEDKPLPELDLDDTETGIDLGLSTYAVLRGRKITSPKFFRRQEKKLRRAQRTLSRARKGSANRRKAKLAVAKIHAKIADQRRDFIEQETTRITRESQAVYLEDLNVKGMGTRNSNRVKSVHDQSLGMFARTLAAKCHRYGRTFAKVSRWFPSTQLCSACGSIEGPKGQEGLKIRHWVCSCGMAHDRNENAELNLRREGRRIVAEGRPDT

SEQ ID NO: 4273 - protein, 412 aa, Actinomadura sp.
VVVQLRYNYRVYPDAAQRVALARAFGCARVVFNDGLRLRQRAREAGEEYICDAELSRRVITEAKRTQDRAWLGEVSAVVLQQALADLNTAYRNFFASLSGRRKGRAVAPPRYRSRKDNRQAIRFTGNARFKVLVNGRLRLPKIGDVPVRWSRSLPCEPTSVTVVKDAAGRYFASFVVTADDWPLPPVESKIGIDLGLTHFAVLSDGTKVTAPKFMRRAARRLKRLQQDLARKQRGSNRRKKAVVRVARAHARVADTRRDWQHKLSTAIIRDNQAVYVEDLCVAGLARTRLARSILDAGWADFTAMLEYKAARHGRTFGRVDRFFPSTRMCSRCGRINQKMPLDVRSWACPCGAVHDRDVNAAINILAAGQADRLNDRRARVRPGLVPAPRSEAVTYPDAARSTRSVEGISVP

SEQ ID NO: 4274 - protein, 519 aa, Actinomadura sp.
LPQGRSPPRPDCPIRRGPRPRGGAAAGSPPAGGCLRRPPTWPTPPVRLHRLGRSGPAVRSRRRAVASGGRRATGPRRSVRWSSDTCSVEALSFRAGRERGLVRHGDRPGFVGGCLYVVRMYRYRLCPTSLQEAGLLEHCGHARFVWNLAVEQQSWWTPRRGPAPGYLAQARQLTEARAANPWLAAGSQTVQQQALRDFAQAMSNFFAGTHRRPTWRKAGLHEGFRIVGVRRRQWDVRRLSRRTGEVRVPKVGWVRFRWSRPVPEGVKSFRVTRDRAGRWHVAFAAVPDPVPAPGNGQAVGVDRGVAVSAALSTGETSTVAGLTPGEAERLNRLLRCLARAKRGSNRRNRIKAAMARLKAREADRRKDWVEKTSTDLARRFEVIAVEDLDVRAMTRSAKGTIGAPGAGVRHKAGLNRGILANGWGQLAARLEHKAPGRVIRVNPAYTSQTCNPCGHRAPENRESQAVFRCVACGHQAHADVNAARNIRDTAVGRTVAARGALQPEGGAVNREPQSLLLPA

SEQ ID NO: 4275 - protein, 428 aa, unknown
  TnpB Polypeptide
LRATKSVSLSIDGEGLRGLLGECLTLIYNAVNYAQEHGIDNRKGMKEFYRTLKDVKLPSCYKTAAIGRACEVVASRTKSENREAETKHLKPLKDKVCIVSGFFVTMKGRLFIPLARDRYFDVQLNPHVTETLEGKNTRRLTITPDNLSFCYSEEVEAASVKKVYGVDRNEKNLTFGDKDGVNQVDMAKAVKIRQTTREIVGSFKRNDIRIRRQLARKYWKRCHNRTDQMLHATTNFIVDTASRNGAALALEDLTGIRRMYRRRNGQGEDYRFRLNSWPHWKVKKMLEYKAAWKGLTTIPLTRSDTYGSSSECSACGERTHSPVKGDVAHQRMLWCQTCKTWMDRDVNAALNLSKRGLARFASSRPKPQGRSQQADLVATEKGLAGEAMRGNPTRTVILRVDASKLSDGHHLMVNSLGHHPKTQQNQNH

SEQ ID NO: 4276 - protein, 428 aa, unknown; identical to SEQ ID NO: 4275
  TnpB Polypeptide

SEQ ID NO: 4277 - protein, 542 aa, Streptomyces sp.
VGGLREVAASFVVPGPSGVAIRDRLRHLTAADEKVLGLVGDHLGALASRDLKARCAAGPDHDADAWAERKRALTGESSSRWAGSITKATHDQWALARRGQLAHIQSLQAGVATIAHRLSLPVGEKGGKRAPGGYRSRQEWFAKSRRLHVLADRLNAARADWQAGAVHVVRGGKQLLNTRHHLDTAGLTEHQWRRRWQAGRRFLQADGESGKRFGNETIRVTSDGEVSLKLPAPLAHLANAPHGRYVLTARVRFAHRGGQWRDRVTAHRAVAYRIHEDTVRGRWYLTASWTIPPVQTVPLATARANGLIGVDTNADHLAAWRLDEHGNPVGTPRRFGYNLTGTADHRDAQVRHALIRLLRWAKRHGLAIAIENLDFTAEKTREKHGRRKRFRKLISGMPTSRLRARLVSMAAELGIPLVAVDPAYTSRWGTQHWQKPLNSKNRTTTRHAAAAVAIGRRALGHPIRRRTTPPPHDQSDRAGHRIVQARPGIPGREGNRPRIPGPRTRSVRAGRGANAVDQNAQHRSGRSAEHESSKQDSLPLSP

SEQ ID NO: 4278 - protein, 194 aa, unknown
  TnpB Polypeptide
VEVSEEYGGVIGVDFGVRWVATSVALPSRNTEFYYGREIRRIRRHHHDLRTRLQEKGAYGTLQSVKVKEYRQVNDRLHKISRAIVEEAKECDALIVVGDLEGIQNQDLGAEMNRRLHSMPHHTLKTYIEYKAMFAGIAVKSVNEYMTSQTCWRCGEQEATTRKGQGQHLCHECGLDDNADGQERCDEHRKERIG

SEQ ID NO: 4279 - protein, 450 aa, unknown
  TnpB Polypeptide
MSVKANRTVRIPLIVPDDRVDDLHATYSPYQHCQNRTVDWCFPDTPTQPDDLTTSKGDAEDALYHELREETDHNLHANLVQKAIKDAVGAVGSVKTSWENGDRISKPVFKSRDDSSYTMTYDNRAATYHRYKASLAVVNGPPVECQYELPAALDGTPYKQYVLDARWSFSTSKLVFDGERFWLHAVMKRHYADDPVYSPTTTGLDTQEDLTRVLGVDLNVDGYTAVTSAGGFHGNADYLNHRRAEHEALRGDLQQTGTRSAHLRLHSRHGLEWKWFDQYAHDVANSIVAEAVRVRATQVVFENLTRIRTRISNAPKFQHWLFRRVQEYVEYKLEEFGISVELVGSYYTSQACSRTDCECVDEDNRDGKHFECIECGYVLNADLNAAKNIGLTLLDELPASHMCSSGKATSQLALVSGTLTPSGEFSPRDWGSTDKPHPQRASGGSASRAK

SEQ ID NO: 4280 - protein, 275 aa, Okeania sp.
MHEDLKLVNTKFRSAKIGKLKIVWSRELPAAPSSVTVIKDSAHRYFLSFVVEIQPETLPQTDNSVGIDLGIKTFATFSDGTKVDAPKPLKKRINKLRKLSKSLSHKTKGSKRYEKARVRVAKFHAKLKDTRTDFLHKLSTEIIRENQTIVLEDLNVSGMVKNRKLSRAISDLGWRTFRTFLEGKAEKYGRDFRVINRWEPTSQTCSSCGFKGGKLDLQVREWECLNCGSKHDRDENAAINILVAPWAFGDKKAHRTRAAERRKGTRSKKRTWRQV

SEQ ID NO: 4281 - protein, 516 aa, unknown
  TnpB Polypeptide
MSNDNNEQLPLFDTGEESFAVRKGPTIFLRKAVKFIDSDNALDSLRELARGIVNEVNSKVIEMVASGEIVSIDGPYNDVVVKEITKFGEELEKKFTASNFIDRFFPHLAKMAKENKNKSHIRSIVTGVLRKWKGHYEKHGEFPSTIAMKSYNLVMGDGFFSFDGKIKNGWLVAKNLDGSELKIKYRTKSRCERIQKNALKYLNLMDPNSKFGATVIFPRKKGGKNVIVASVEVPYQFSYRPQRFIGLDFNKANENWIYFSEPIDGVEKIDKNLLEGVLIAEAELKKANKNAKVHSSIQDRIDEDGTPIRTGKRSYWRKHVKLVHKLHKRVIAAAPFPGKETKLIDTLVSYVKDNSLGLAIDSVTTGKSNGSFGQDKLKELLQDACLEQGVPFMVVPTFFTSRRCTSCGCVNTPDCRDRKTNIFTCSECDYSENADLAGAKNQAEYATCLTKLNFWNGTLIDKWIKIKNEGNILHSPQDKAGNVSRPEEETKQTQTPLIEEKSESETTQQNDESDQN

SEQ ID NO: 4282 - protein, 411 aa, unknown
  TnpB Polypeptide
MSTISGPTGASPGGFSTRGSGSRPSPCGTATSGGYGRRPTGPGSATRRCGSRRSSPASAPNTVCGRLISTGSGSRRHGRSGPHLSGGSGLSGRAGGCLTSSVRRNSASSRTDSESSQSGRCGRLTSTTGLRLSSSHQTSVTKSLIRGYTRLPSRGWDFAPPTSSSSGTPAKTTSLRPGDSGCRRCMYGRHGSATAPEQRPRWVYGAPVTSLFLYMGAMKRGMPHSADTPLPDDWIGVDLNTTGHVAVIAHPASGGVVMLGDLPEHRESGSAGRGGSARKPQDHERANQNQKIAKEIVKMARQLWCGIKLEDLTGAGFAGRKKRGTPLSFSRREGSFYHLQKLIEVRAQDAGIRIVYVDPAFTSRCCSRCGAPGIRKGKEFFCPQCGNAVHADVNAAFNIAAAPPGTGVGVS

SEQ ID NO: 4283 - protein, 425 aa, Bacillales sp.
MEIFTKKCSGFTKKYYLCINQNYLIVRMKTIFRTYQFELQPTQEQKVLLDKHFGCVRFVFNHFLNERKEQYQADKKSDNYYKQAATLTELKKKEETAWLKEVNSQSLQFALRCLDTAYVNFFRGSAKFPRFKSRKKKNSFTVPQFAKLEGGRFFAPKFKEGIKVNVHREVKGEIGKCTLSKTPTGKYFVSILSEEQYQPKEKTCAICGIDLGLKDFAITSDGIKFKNNKYTKQYEKDLAKAQKHLSRKQKGSSSFERQKRKVAKIHEKISNTRQDVLHKVSHQLVSDYDIIALEDLNVKGMMSNRKLSKHIADASWGTFVRFLEYKADWNDKQVVKINRWYPSSKTCNVCGWINQDLNLSVREWTCKNGHHLDRDENAAKNILNEGLKIISSGTGDYTGGDGVRSSNTQLSVKPEAYPIAFGVGG

SEQ ID NO: 4284 - protein, 399 aa, unknown
  TnpB Polypeptide
MTKKNEEKLYRGYTVRLLPTPEQEERMRKHIDNCRFIWNYMLEVQTNRYNINKKRYMSKYEMCAEITYMKKHEEYSFLKETPLHSMQQVCGDLDEAFQMFFKKLHNYPNFKRKKDTKMSYPLDPDGMSTYFKNESVVHIQRVGDVKCKTDRKIPTGRGSKICDPQIHYEKSSGKWLLTFVLPKDKKDVELTGNVMGIDLGIENLAIVSFGEEKIVFPNINKSKSMKKLDKKQKHIKRVIDRKYRTYNGYGTPNKGQSWEKSKNIEKYEQILREIDRKRSNIRHDYIHKITRQLVDMKPKRVVMESIVVSEVVKNKPFAKDILEANWFYFINTMKYKCEEYGIEFVQADRWFPSSKLCSNCGYKNKDLKLSDRNWTCPVCNTKHNRDYNAAINLMNYTGK

SEQ ID NO: 4285 - protein, 303 aa, unknown
  TnpB Polypeptide
MFRPTSRFLSNVGRNSRVAKSVKSDNTLMPPSFTRTLRLKVRAEACPWLDAAAVEVNEVYNYCNETSYKAATRTDNLRKWLSCFDLCNLTAGASQYFDKIGADTIQSICTHYAQKRDVARRVKLRWRVSRGSRRSLGWVPFKAASLKRKGVCVRLAGKCFRVFETERLDGVKWREGCFAQDAVGDWWLCLPVNVEAEETIAPLEAVGIDLGLKAIAVTSNGERLEGGRWTKGYARKLASAQRRGHKRQAKRIHRKAARCRADALHKFSRKIVDRYLGSIGRCNTFYNCEGGEGYAQVSEVFSA

SEQ ID NO: 4286 - protein, 181 aa, unknown
  TnpB Polypeptide
MSSVSDIVTPYDLPYQAKAALCNYVPKLRKTYNAQDLDDEHPIRLTNQAAKFDHSEERDYEFTWWVPRPGRGTNFWMPLRINPEQEDLWHDLVSEDAKAGEIRLQQHRKNWVLHVTVEYPVEEPAADGDATHIGLDIGETALITGCALKDGSPTDPFVCSGSRAKHLRKRDAHDPETTARA

SEQ ID NO: 4287 - protein, 384 aa, Acidimicrobiaceae sp.
VRRRSPASKSPKTTGSAPRTSACCICGQSTATNWPRGGAKTVRAPTTTRPSACRRPLPTFEKAARSSPTSSTRGKVDRCGSWDRLSDSHHLRVARIGEIKTYESTRKLYRHLDRGTGKIVAATVSEHSGKWRVSFTVEVARQVPVTRTPERVIGIDVGVVTLYTGASPEGEQVLEVANPRHFVTAEKRLAHAQRIASRRQGPKPGVAPSKRWKKSNCRVQKIHRDVRNARKNLIHETTTTLAKNYDVIVVEDLNIAGMVKNHSLAKHVSDAAWGEFARQLEYKTKWYGSALVRVDRFYPSSKTCSHCGTVKATLSLDDRVYHCGTCGLTLGRDANAAINLARQGLAGTSSGTGRGGEVRPAQQKLVATAHPDEASTETPTFVGA

SEQ ID NO: 4288 - protein, 384 aa, Bacterium sp.
MAGKRETRYTVIKFRLHPSAEQIELMEKTFGCCRWLWNQMLSDAQEFYAATDQHYIPTPARYKQGAPFLKEVDSQPLCTVHQTLRKAFLDFFRAPSQFGYPQFKAKKDKKDSFTVYCRQYRTGPSIYLTDKGIQMPKLGLVPAVLYRRPLHWWSLKLVTVSKTPSGKYFCSVSFGYEVNAPERIAPTPERTLGLNYSLSRFYVDSRGRSPAPPALEQSREKLARLQSGLARMEPGSHNYEKQLQRIRLLHEHMANQRRDFIHKESRRIANAWDAVCVRETDLAALSRKLKQGGVTDSGFGLFRSCLRYKLERQGKTYITVSRLAPVAKTCNRCGHVHQQLNAHDKQWICPGCGEAVTRAVNTAQNLRDMGLAQFHSQTKETSAA

SEQ ID NO: 4289 - protein, 356 aa, Methanothrix sp.
MYRTLNIKLDKSNELIRTAKLWNAACQDVIDYGFAAHDYNKTRLNRATYKDLRSKYPTLPSALLQTARDQASDMLKRLKFGTKPFKHPLGAVRFDVRTMKVFLESGYCKLTTVFGRLRYDFQLPEYYKKYASWKVTNAQLKIAKNACYLNVQVEQPDPEQIVGDKRIGVDLGINNIAVCSDNTFWESGPVKAVKGKYQFLRSRLQSIGTRSAKRKLCKLSGRERRFQRDLNHSIANWIVSKPYDIIALEDLTNIRNGKKNKKLGKWSFAELRSIIEYKAAAIGKKVVAIDPRYTSLTCSRCGFQKKENRNGRTFKCKSCDFQVDADLNASRNIATFSRSDRSRLQCQPAKCDTISS

SEQ ID NO: 4290 - protein, 416 aa, Streptomyces sp.
VGRRTQPKGGGPDDPCVQVPHAAHRGPAGRARRDAARSLLPLQRSLAGTPRRLPACLEDEHHVRAAVRAAQGDPGIRPGAAGPLVVQLAAATLRRLEKAFAAFFRRLRSGESPGYPRFRGVNWFDTVDFPKDGDGCRWNSTPHDPVTRVRFQGVGHIKVNQHRPVAGTVKTVSVKREGRRWYVVLTAEQAQPQPLPPTGSVVGIDMGVANFLADSRGEFVPSPRHGRRAAAKLEAAQQALSRFPRVRRDERTANHQRAVDKVAGLHRKVRLKRLDHAHKTALDLVRKHDVIAHEDLKIRNMVKAPAPKPDPDRPGGFLPNGAAAKAGLNHSISDAGWGVFLTILHAKAESAGREVIAVDPRNTSKTCPTCGHVSAENRPTQEKFHCVSCGHRAHADTVGALNVLRAGLARRDAQPA

SEQ ID NO: 4291 - protein, 511 aa, unknown
  TnpB Polypeptide
MRKKKNNNNTILSYALRFDSKFKPGLRFLSRNMTRHVNLLWHDSQLCSFLLNDNRQFVYKSLEAYKANNYNQYFPSRVKRSMLETEGRVLRSQIDKQELFNSLVKLSDKPKEWTFDFLKKHGLYKKRQYINNIRRQVTGFIKNNKRLPENYQELVPNFRIGNFITLAPDDNQFIKYNCIDKSLSGQMKTYVEEEKKWKWLPFETLIPDHVLQKTEKGKIRKPDIRMDKDGNIFLDFKVEVKNCEHVENNRILCVDYGLNTLLTFTCFEIEDGNPVQISRPYFFKVDGIQKKIERIYQEIDKIKTKISISKDKRKIKVLKREQKSKWKKIKKLSKELEHLSSNIVLEFAQNFGCSVIVIEDLKGMNGKPYCKQLNKRLYRTIRARLFEKLKYKASVKGIKVKEVFAAYTSKSCPKCGKKGSHPTYGQFKCSKCTYSANRDFVATQNIARRYLKISLNDATQIGYKPGRVKDTVNLEGSFYRIKKWLNAWKDCIEITPISNKQKKLKPILKSG

SEQ ID NO: 4292 - protein, 404 aa, unknown
  TnpB Polypeptide
MVRIAYRCRAYPDQQQQAVLNRTFGCVRVVWNRTLAARQARWRAEHKSTSYAQTDAALTAMKKDPGLAFLREVSSVPLQQALRHQHQAFTAFFARRARYPRFRSRRGRQSAHYTRSAFTMRAGQLRLAKTAGPLQFVWSWPGVDLAALDPAMVIICREPDGRWYVTFTLDTPAPEPLSATGGAVGVDLGVRDFAVTSDGDKIPNPGHLERRARHLARYQRRLARCRKGSANRARAAAKVARAHRKVRNARQDFLHKVSTHLVRSADTIVIEDLNVAGLVRNRRLARAIADCGWGEFRRQLAYKCERYGRSLVVIDRWYPSSKTCSACGYLLAELSLSARYWRCPSCGARHDRDINAAKNILAAGRAVTACGAGVRHSGSSRVRLAVKQEPRPVTGGIPVLQGGE

SEQ ID NO: 4293 - protein, 481 aa, Lampropedia sp.
VLVQIDAVNGTVGILRVVAFQVDVLQSGSLGHWQCVLGGAQQHRSMYWRTMEIGALPQDEAKYDGCMQQLQAFQYELRPDGRQERQMRRFAGSCRFVFNKALALQKERYEQGEKKLGYAGLCKLLTEWRNSPETSWLADAPVHPLQQTLKDLERAYGNFFAKRAHFPCFKKKGQRDSFRYPDAKQIKLDAGNGRIFLPKLGWLRFRQSRDVLGTVKNVTVSQSCGKWFVSIQTEREVEQPIPKASSVVGIDMGVIRFATFSDGSYLEPLASFRQHEAALRKAQRCMSRKKKFSNNWKKAKARVQKIHSRIGNARRDYLHKATTAISQNHAMVVIEDLQVRNMSKSAKGNADKPGKSVKAKSGLNKSILDQGWFEFRRQLEYKLQWSGGMLVAVPPKNTSRTCPQCGCISKDNRQTQARFACVECGYEENADVVGAINVLRAGHARIACGEDVSRAKPAKARRAASVKQEPAEATQPSQMLV

SEQ ID NO: 4294 - protein, 421 aa, unknown
  TnpB Polypeptide
MQTTRRTHVCRIQNHSQVANALNRHGWSASKLWNVANYYARQQWDETGEVPDETQLKRELKTHPTYNGLHSQSSQKVLEELSEAFSSWFGSDDDRDNPPGYRKRNYYDSDDNRVHEEHPRSTVTWKQRGIRHDTKHDKLRLSKGSAHKQGHDFILCEYDAPPEIELTNIQQVRAVRNTTKDRWDLHVVCKHEIATESPGDAVAGVDLGICNPAAVALPNDALLYPGNRLREDKHYFQQEEYRTEGDHGPSKNAQWARDKLAKRKDHFLHALSKDIVERCVDHDVGTLVVGDPSGVADSDWGRHGNKRLDNWAYKRLLNLIDYKARERGIEVEQVDERGTSSECSVCSHEDDADRVERGLWTCSRCGSVAHGDINGADNIRQQSLTVTPPLGQVDSGTGCLAQPRVIHFSRTHGFQPRAPAG

SEQ ID NO: 4295 - protein, 395 aa, unknown
  TnpB Polypeptide
MHAAHARFVFNLGLEQRKMWHPFKRGTFKVSYISQARELTESRKAFPWLAEGSTVVQQGALRDLDRAYKNWWSNPSHFGAPTYRSRDRNQGFIVRDLTVRRLNRKWATLTVPKAGVVKFRLTRAWAEITTATSARVTVSPSGQWHVSLTTPPAFFERTSTGAVVGIDRGVAQTISTSDGAHASIPTLTHGEQGRFLALERRLARQVKGSARREATKKTLNRLRDCLRNRRTDWIEKTTTALVRDYDLIALEALQTRNMVKAPAPKPDPENEGAFLANGARAKAGLNRVILASCWGEFARRLTDKAAMAPEHHPVHVVLVDPKNTSRECHGCGHTSKENRKSQAVFHCTRCGHTAHADTNAARNILARALNTLPPDGRSTDASATSRCSVKPEKAA

SEQ ID NO: 4296 - protein, 396 aa, unknown
  TnpB Polypeptide
MFKTIKIQIYPNKYQLNIINSTLGCCRFVKNNYIAYNINRYNNGNKFITGTEFNNIINRLKVENSKYSWISYYSEDAIKEAISAEEKAFNTYVRRYNKLPSLISKKHINRESYYFIDRSYNYYTNNINKVKLPTLGKIRISSGYRLPLESSIFSGRIIREYNKYYVVFIYRKCKPRLLKNDIKLGIDLGVKDYAIIYDGYNSYKVKHYKNDPRYRKLNDKVSKLHSIIQNKVKINSNKKYDKSVIPYRSSNIVRLINKLRRYILILNNIRNDFIKKLCNKILVKFKPKCITIEKLAIKYLLEKDSNHSLHNRIQYSDFYKFKFVLMNKCLEYNVKLRVLDRYYPSTKLCSRCGSKKYMSLSDRIYKCPICGLSIDRDINAAINIYNAKDSDCNIYA

SEQ ID NO: 4297 - protein, 416 aa, unknown
  TnpB Polypeptide
VIKSIKLRIYPNKTQLKIINNTLNACNSIKNKYLEYNINNYKENKKFIKGYDFINYVTKLKKEDDKYSWLKGISSKAIQHAIMDKEKAFISFFKNKKGFPKFKSRKRINKESYFFIKDSIHYISNNIIKLPKLKKVRITNSDSLPNKDTITSGRIIRHYDKYYVMFIYNDEDNDNKDIIKNDIKLGIDLGVKDYAVIYDGYEYHHYKHFKDYNNYKKLNKRLDKLQKVVSKKVEYNYGKLLNEYLDKYHKEPNEIQKRIMKGKAYNSSNIRRIFIKINKNKVKLTNIRDNFIKQLVNILTARIKPSKINIEDLDISNMIEDNDTTHKLHRLVQESNFHKFRMHLINKCIEYGIKIRLVDTYYPSTQLCSNCGHKNNHIRLIDRTYVCDECRLVIDRDENSAINIYNCKSKNYIEIA

SEQ ID NO: 4298 - protein, 434 aa, Armatimonadetes sp.
MRVLQAFRYAIDPTPAQERACRSHLGARRFAFNWGLALVKARLDAKARGEDVRVPYTLPALRREWNRAKDNAAPWWPENSKEAYSAGLDGLARALKNCFESRAGKRAGQRVGFPQFRKKVRRQSVRFTTGAIRISDRTHLVLPRLGRMRTHEPTTVLAECIQAGTARILSATLSIDCARWYLSFTCEVERGERQPTRPTSVVGVDAGVRYLAVLSTGETVDNPRPLPKAHRQIARLNRALARRQRGSGRWKDAARRLGRAYARVAHIRADAMHKLTTRLARTHGTIVVELLNVSGMLRNRRLARALADASLGELRRQLGYKCFWYGSQLIEAPTFFPSSKTCSGCGAVKATLPPSAQVFRCDHCGAAMDRDLNAATNLAALAAVSVTGSGPEALTARGRDVRLAEHGEQSQMNREAGSADAQKTGAAVLQGAAA

SEQ ID NO: 4299 - protein, 398 aa, unknown
  TnpB Polypeptide
LKEFYDMLTSLLPRDELPKSAFRYREEWEDSFIEVIHNRLATGKWLRPAKKRKRGRKKVKRKKGKPIPKRPPFLLTVRFILQSGERRGRRDAPVVVDLRARELRIPCIGVTIPLPERLVKALEEENNLTPRPDFVVQLCSDGRLRIIAKRAPEPRPPEVPLRVIAIDENSRYGFVVAVFDFDERGYCRLTRFEVFKPPNHGYREKVASALKSYADKPAGALESLRELLPLTPTPGDAERLARKTLARKRRLNDAFIETLVARVRGLVREALRRGAAVAIVVDPINSESLQGTPLQGTLLRVRERLRNLARYEGAHFAELRASGKLCPLCGAEGVENGHRVFKCPSCGIVWDRDRAAIANLVLRYLRGLYKEECQDANLIRLADALLAWLKRHGGFLLR

SEQ ID NO: 4300 - protein, 403 aa, unknown
  TnpB Polypeptide
MLVRSLVFRLECPLPIDAKFLIEDFRLAVNETIRIGLGSKVTSRYSLCKPAYKDLRKEHPDMYSQHLVSAFEVAGSILKNHRRMLRKGRARNVPYVRRLFMKAENQAYKLDRENGIIDIPIRAGLHVELKLIMSEYHHRYLNDDSISLGSLTLLPDKVIVAIRKHPPKQYAPESILSLDTNERGLDGVLVKEGDVNVVRADFPDVSTIQERHHSRRRNLQKKKSHDRRTSKRLCAKEGKREHNRIDYRLHEVANAVLKLAEERKSKIVLEDLTGIRPRWSKKMNRRISIWPRRKLHQIIEYKAEWLGIPVVKVDPSYSSRRCPVCGRIQDSRKGADFSCKCGWRINRHINASINLLRTAAPEAAGGLRVDPSAFQHDTVMVLCGPNKAVRPEPNGTSGIRAIA

SEQ ID NO: 4301 - protein, 167 aa, Blautia sp.
RASYPTFKSKHNRFQSYRTVNQKDNIRIAGRYIKLPKLGFVKIRQSMEVEKINHVIIEHTPAGKYFAVLNVDFEPEPRSNAGGTIGIDVGIKAFYSDSNGNTGSNPRYLERSMRKLIREQRRLSRKQKDSHNREKLRIRVARVYEKVTNQRNDFLQKQSTMLVRENQ

SEQ ID NO: 4302 - protein, 181 aa, Alteribacillus sp.
MNSLFVDSKGKKANYPRFYRQTLEKLAKEQRILSRRKKGSHRWYKQRLKVAKLHERIANQRKDFLHKESHKLAKWYDCVVIEDLNMKGMSQALHFGKSVADNAWGMFTTFLQYKLEEQGKKFVKIDKWFPSSKTCSHCGRAVESLSLSDRIFQCECGFVADRDWNAAINIKKEGIRELGIA

SEQ ID NO: 4303 - protein, 392 aa, unknown
  TnpB Polypeptide
MIRAHKIRLNPTPEQANYFARAAGTSRFVWNWALAEWNRQYAAGEKPTAFKLKKQFNAIRREHFPWTWEVTKNASDQPFLDLGKAFRAFFEGLKNGKRKGRPRFKSKKRSKASFYLANDQCQLGDHRIWIPKLGWVNMSENLRFKGKVTGARITKTAAWWFVSLTVEMPDERQSARPAAIGIDVGLNRLASLSTGEGYENQAFLRTALKKLRQANKRLHRRVKGSKSREKARCQVARLHYRITCLRDDVLHKLTTRIADCYGIVGIEDLNLKGMLKNRHLSRSFSDAALGRLVTLLTSKVEQRGGQVIKVGRFFPSSKTCHSCGWKWEEMELSDRVFVCQNTHCAYWQFAQDRDHNAALNLLIEALRLIGPIDQAVDGIGSDDDVNLAVDAG

SEQ ID NO: 4304 - protein, 428 aa, Okeania sp.
MENMSKRTKKQAKSYGCQQVLLHPDKDLRAVLEYLCGEANKVFNCSVYYARQVWFKENQFVKKGELCGQMKWNRHFNAMYASSAQQICNGVVESFSSFKELLKLFWKGELTDKPKPPNYRKPGLFTVSYPKKWLKLTEVGIRVPLGRKVKAWFGLEAFYIPMASNLDWDSIKEIRILPRHGCFYTEFVYEIKTQSVKLDAGQALSIDHGLDNWLTCVDTQGHSFIIDGKHIKSKNQWYNKQIATIKENKPQGFWSKRLARITEKRNRQMRDAVNKTARLVINYCLKHRIGTVVFGWNKGQKQSIELGTKTNQKFVQIPTARLKDRIEQLCNLYGLQFVETEESYTSKASFLDNDVLPKYGEKPDNWEPSGKRIKRGLYQSVAGYLINADCNGAANILRKVSGRLKLNLSQLTRGALTTPLRIHFWTAS

SEQ ID NO: 4305 - protein, 463 aa, Photobacterium sp.
LSLKYHSCIFIQHSIGDNPLSIRGFSINISERLTPSQAQFFAQWVGAANVMRNQKISEFKSLIAANDSEEFPTFTQGYADIKAIPELFFLRDMPVQLLRNAATEAYQDTVKAKNQLAKFPRIKNKYKKRSVVITKELFKLEPFGDGSMLTIVEHAKKKPRKVFSIRLPHKPEQLSNQFRISRQGRRFSLSGSFNDGNKERKIEQILADYAHLSESKLYDKITGVDRGIALHLCSSDGYAVKYSPEEVERKKQRAKRKARYQRILARKKRLNGNKSKRCESKRQEKLQRKISRIDAKSADCRKNHNHCISKKLVEVSRDIIGLEKLNLKGMTRKAKPKRTASGRKFVKNHAKAKSGLNRSLLNVSLGQLATFIEYKALDAGKVAINDINAVNSSRECSCCGSLNTARPTQAEFICLDCGNKQNADENASFVLRKRTVTYIKEEMFAETAKTRKKVVHRRQKLAA

SEQ ID NO: 4306 - protein, 319 aa, unknown
  TnpB Polypeptide
MLRNTPAGYKKEYPWLKEVDSLALANAQLHLESAFRKFFREPACGFPRYKSKKHARNSYTTNALNGNILLQDTYLKLPKMSVIRIKLHRQIPSDWKLKSVTVSREPSGKYLASLLFCCENQTVEKRPAERFLGIDFAMQGMCVFSTGERAGYPMFYRKAEKKLAREHRKLSHCEKGSRNYQKQKKRVALCHEKIKNQRKDFQHKLSRELAERYDAVCVEDLNMKGMSGGLHLGKGVQDNGYGQFLFMLGYKLEECGKHLIKVDRYFASSKICSVCGHKKKELALSDRMYVCECGNRMDRDVNAAVNIREEGKRIYKECA

SEQ ID NO: 4307 - protein, 489 aa, unknown
  TnpB Polypeptide
MNGMAQKGKKIDAPVLPPEVRRRRVRASAAVLMAQEGAAQVRNDVTSALCCAHEKRQALPSVKAIRNQLKTAPAGIAVGRAKQVQYAIDDAFAMFRSYRSNFFAWAKDPASRPGKPRPPRFYRRGQRARLCFDYQDFRVVDNRLNLPASMGLGPLTLVERGGEPLLNLGDRLVEVRVEPCRSRQWVHLDLVIRRSEPARKTASSGNLLVDLGVENLAACLDDKNLVAFLISGGVAKAILQRAAKWHAQLKSEAALGARHGKARAAALAARGARQMEDLMKKAALLLVTYCVANGIARMAVGRNKEWKQGVNLGKKQNQLFSFIPHGKLTLALRSKCARAGIEFVETEESFTSKTDHLAREEMGPKPEGYHWLGSRSSRGCFRSSMGFVLQADVNGCIGVGRKVGGEKWLGDLIGRLGSSPGTRLVPRKLHVNGRHVPAPSPGVRMPHPRGLSSRAWISTKVALAKAGLIPGLQRVASATHKPQVFPKAA

SEQ ID NO: 4308 - protein, 431 aa, Actinophytocola sp.
MRALHCGLHAAAPKIVRTWWRAIVWKVDRTQVKRSYKYRFYPTEQQRQELSRTFGCVRKVYNLALDAKTHAWFTQQRRLNYGETSAMLTMWKQTDQLAYLNEVSSVPLQQTLRHLQGAFVSFFDRRSDYPRFKSRKRSKASAEYTKSAFRWRDGQLTLAKMREPLNIVWSRPLPEGAEPSTVTVSRDAADRWFVSILVETRVEQHAPSQDTVGIDAGITSLLTLSTGEKVTNPRHERRERSRLVRAQRELARKQNGSANCEKARRKVAHVYARITDRRRDHLHKVTTRLVRDNQVVVIEDLNVRGMLRNSALARAISDAAWAEFRSMLEYKCAWYGRELVVIDRWFPSSRTCSECGRLTESMALAVREWMCAGCGATHHRDINAAKNILAAGLAVSACGAGVRPQRESSGMGQPAVNQEPSGVSRMGIPQQ

SEQ ID NO: 4309 - protein, 442 aa, Lactobacillus sp.
VSKVIKGIKLRLYPNQSQREQLWQMFGNDRFVWNQMLGMAKERYQNNPNSLFVNEYGMNYLLKQLKCEYAFLRESDSTSFLVVNHNLAQAFKMLFRHRGGYPHFKNRHSLRQSYTGRSTCKVLARRRMQLPKLGSIRTSRTMLFRHRGGYPHFKNRHSSRQSYTGRSACKVLARRRMQLPKLGSIRTSKTGLVGDAKIKRYTVSYEPTGRYYLSLQVETEVNQLPEMHQSVGLDMGLADLVISSDGVKYGSFNAEWLKKQAVRWQRKYARRRYLAQCQVWKWNHNRFDHLEELDDYSNWQRARVNKARCQKRIANKRRDYLHKLTTDLVRNYDVIVIEDLKTKNLQKNHHLARSIANASWYQFRAMLEYKCAWYGRQLVVVKPDYTSQICSNCGFSSGKKPLEVREWTCPKCGIHHDRDVNAAVNILHKGLKAIGQGLALVK

SEQ ID NO: 4310 - protein, 424 aa, Selenomonadaceae sp.
MAEGGENMLKRMDKYQYHYGLKVRLYPSTKQKQVITASSNASRFVYNKMVELGKEISKFGKPDIYIKVVDERLARLKDLKSSTTTLKNTYPWLCAKDIDTLAIENAKQSYGKAWNMYRKVYNIAPPNFHKKSYEEKYQTSAQYDKKKVSVATMNNGRCRFSKNHVVLPVLGKIRYVGSRKMMEKLFAMCEVRIGTVTVAKNGCDEYYASFQLASDESFVIEAPKTGSQVGIDLNEENFYADSDGHIEPNPHYYRRARKRLAKAQRILGKRTARAKKEHRPLKTAKNYQKQRKLVARITQSVMNRRRNFLHNQSTTLINNHDLVVAEELRSKNMMKNHALAMSIQDNGWRTFLNMMTYKAALYGKTFKTVNPRNTTQTCSACGHVLKGEHKLTLKDREWTCPVCGVHHASRDVNSAKNILTKGLT

SEQ ID NO: 4311 - protein, 350 aa, Burkholderia sp.
MILVYRYRVKSLNGLLNKQSRAVNYVWNFCNDTQKHALKWGKKWPTGFDLNVLTTGSSKELGIHSGTVNATCEQYAKSRSQRRRPYLRYRGRKSLGWVPLKGRDLKREGDAFRFAGNTFRVFNSRALPEGKIKDGTNFAQDARGNWFLNIVIEMPDVQARPIRSGVGIDLGLKDFATLSTGEKLPNDQFGRRAAEKLAKAQRARKHRRHIAKLYAKIANARADFQHKLALDLVRRFDYIAVGNVSAVKLARTRMAKSVYDASWSSFRNKLRYKAIAHGATFEEVDERGSTQSCSACGSQDSTTRPKGIAGLRIREWACSDCGVEHDRDINAALNILRCGRASPDVGILSL

SEQ ID NO: 4312 - protein, 369 aa, unknown
  TnpB Polypeptide
MQRFKIQALPEIIRTFKIFKKGMQFCINKGWKNKINNNIRLHPFVYKHLRSIGLPSQIAVSCIKQSCGILKKAKTKPIIKKCSIKYNFPRNALINGNLLSLSTVKGRVKVPFSIPKCYAQYFSWNLCESLLRIDRKGRAFFLFCFKKDISLRQINSAIGIDVGINNLAVVSDNQFFRNGSTKQINRKFNYLRSILQTKGTKSAKRLLKKLSGRQKRFMAWRNHNISKEIVSNCKAGTIIMEDLKGIKKRRKGKRMNKILHGWSFLQLQNFINYKAEREGIKVIKINPYMTSQICSKCHKVGTRIFGFFHCVCGYSLNADLNSAQNLAQGIAFVQQASVTKPNVSDYDSKVPLREIADEFRGKFLKYPRL

SEQ ID NO: 4313 - protein, 440 aa, Lactobacillus sp.
MAQKKKKVDGIISKSRVYKLYPNELMETVLLKNCDYRRFCWNKGLEIWNREYQEYVMNAPEGLIKEMKKSDGRKLTPEWKEILKAFPKPSEYQVRDLMVAQKQSWQKRYSSRILQLAVKDLAEAWSAFIKHTQARQGKPKFRSKRSSTQSFKSDQVKFKVVNGQAFLHLDKPREYTGEWSDIRMSERPLEGKYGVATIKKQADGWYLSLAFDVSEPEPRKKTGKATGVDVNISHFDYIDGTKRFLYKSSRLAKEYRRIIHYQRQLARKRVENGTPNAYRSKRYQKTRIKLQRAYQRVKRLQEDEMQKFTTELVKEYDAICIETLSVKGMLMSHRVSKGVHRAMFGRFKSILEYKCKWHGCELVMADRLYPSTQRCAACGNVKKGDDKITLYGNKKHGTKHDEYVCYNEKCPNYNKVVDRDRNAMMNLTLLIDHPELNRAL

SEQ ID NO: 4314 - protein, 449 aa, unknown
  TnpB Polypeptide
MTDSTATTIERAYRVRLRPTPAQARTLSRLFGARRYVWNWAIGRKDEAWRANGTNLSGVDLSRAFTALRADGETAWLGTLPREPFNQTLRDFDRAWTNFFAGRARRPRRKRFGTVNSARFTLDQRREGLVRWRDAAGACLRTGSVQLDGIGRVRLRVTEAMPGRLRSVTVRRDSAGRWHATFTADGVETAAHTDPPRATLGIDMGLRDTAILSDGRRIAAAKSLARHQARLRRYQRHYTRQRDAAARRQGLDPTRPLPKGTRIEASNRMRRTRRTIGRLHATITDQRRDHLHQTSAAAVATAKVIAIEDLAVKALARGMGRRAFRRSVADAGLGELRRQLTYKAKWTGRTLSVVDRYFPSSKLCSACGARNDALTLRDRTWTCPACQTEHDRDDNAATNIEREGVRLLAGTGPDGRTPRSGVRPSGPVSASRRSAAFTSPHALQVLLDG

SEQ ID NO: 4315 - protein, 493 aa, Frankia sp.
VALCGGGVNLKEWAAVNGVGSALDGPRREFLALLRDPAVTTIVVERRDGFAWFGAGSVEAALAASGRGLVVVDPADQVDDLVWDMTEILTSMCARLYGHQTAADRAARAVAAVPWTLPALRLAWNEAKSTVAPWWSACSKEAYSSGLDQLARGLKNFTDSRTGKRKGKRVGFPRFKKRGRARDSFRYTTGAYGPASNLQVKLPRLGRVKVHEAMGALTGRLAAGSARLLGATVSRTAGRWFVAFTVEIDREIPQNPSARQRAGGAVGVDAGVKHLAVLSTGEQVDNPRPLTRSLRRLRTASRAYARSKPGSAGRRQRAAALGHLHAHIAHQRRDGLHKLTTRLTKNHDVIVVEDLHVAGMVRNRRLARAVSDTGMAEIRRQLTYKTVWYGSRLVVADRWYPSSKTCSGCGWRNPSLTPADRTFACQSCGLVIDRDLNAAINLRNLVAASTSETENARGADRRTQPAGRVAVKREPGTARAGQTGGASPRGEAA

SEQ ID NO: 4316 - protein, 381 aa, Bacteroidetes sp.
MRKTYKYRLYRHERNKHLVQSIELASEVWNHFVALTRRYYEIYGEYPGYYALKRHLTKLKKRDKGHWYNLNSQALQDVIQRLDQAYKRFFEIGSAGRPGFKKREKYTSFTLTQSGWKLLGGNRVRIENHNYKFAKSRPIQGEIKTVTIKRDACGYLWICFSACKEAPTPELPRTGNAVGLDFGLKCFLVTSDGDRIEAPQPLKQSLEEVQNLHKELSRKQRGSNNWWEAKRRLAKKYRQIDNQRKDFHFKLARRLFSRYDVVCIENLDIGAMKQLWGRKVSDLGFSGFASILEHVAQKEGKEVRKIDRWFPSSQTCSGCGNKYEDLSLEERVWECERCGSVHDRDQNAAHNVLERALSMKDRNGPSEAGMRPPGAAACVAT

SEQ ID NO: 4317 - protein, 356 aa, unknown
  TnpB Polypeptide
  misc_feature (277)..(308): Xaa can be any naturally occurring amino acid
MQIISSYGVELRKQNIPVRQTLEIYRSAVSYLIGIYVQVWEKLAEIPDAKRRFNAAEHLVHTTKKNHACFDFDIRFPKMPSYLRRSAIQHALGTVSSYKTRLDLWEKTDGKSGKPKLVYENHAMPVFYRDVMYREGAERKDEAYLKIYDGHDWKWFCVRLEHTDMEYLRKYWSGKKASAPTLEKRHHKYFLRFTYTEEVTLTKTPVKEQVICSVDLGINTDAVCTIMRADGTVLGRKFIDHPSEKDRMYRALGRIRRFQREHGSAQTQGRWTYTKRXXXXXXXXXXXXXXXXXXXXXXXXXXXXXXXXERKSRNCTCGESGISKDAVNIRHTGKGCGYPGSVHGTPADWLMMVPGR

SEQ ID NO: 4318 - protein, 351 aa, Streptomyces sp.
VRYGQRSAQLKEIRAFDAECQGRWSFSSQQATLRRLDKAFTAFFRRVRAGQTPGYPRFRSAGRFDTVDFPKDGDGCRWNATPHDPVTRVRLQGVGHVRVHQHRPVTGTVRTVSVKREGKRWCVILTAEQAAPQSLPATGSTVGIDLGIANFLATSHGRFVPNPRHARTAAARLEAAQQALSRCKRGSRRRRKAVQKVAGLHRKVRRQRLDHHHKTALHLVREHDVIAHENLKIRNMSKAPAPKPDPEQPGAFLPNGAGAKAGLNRSIYDAGWGVFLAILTAKAESAGREMIAVDPRHTSRRCPACGHTAQENQPTQATFHCVACGHTAHADTVGALNVLRAGLARREAPPA

SEQ ID NO: 4319 - protein, 374 aa, unknown
  TnpB Polypeptide
MKATVKVRLIPNKTQERLFIKFANAARFVYNYTLNLKNSGYAYGEYLNLSDLMREMRLYKYAEGNEWLLEVPEAVQKQAVKDMLMAFSQFYKRGYKGFPKFKKKDRTKLSFYQRTDNLRRIDSRHIKLTGIKTPVKVNEDIGVVNYQNPRVTFDNKYWYLTFSCDVEELGLPDLNGVLGVDLGVRKLAVTSDGTVYKNINENYRVKMLEKRKVRLQRKLSKKYQINKQGNKFIKTNNIIKLEQQIKLVDRRLKNIRETYIHTVTSDLVKTKPSMIVVEDLDISQMLKNKYLSKSIKDCCFYKFRIFLEYKCRYAGIRFVIADRYYASSKLCSSCGSTNNYLGSSETYVCPNCGKVFDRDLNAAINLKNYGSIMK

SEQ ID NO: 4320 - protein, 382 aa, unknown
  TnpB Polypeptide
MITAIGFKICLFPTKQQEQLFWLFSNHSRGLYNILLEEAILAYKQESIPVSFNYLYNYYKEIKMLSEYSWLQEMPEACGKQVCKDLVTTFQRFFKSNFGYPKFKKKSKCKPSFYQRTDGMYFTNNNKVKLTGIGFVKHQKGDYPTTGFCNPRITFDGKHWYLSFSVKGNFSEEVTPITDGIGIDVGIKEYVTASNNMTLHNYNKFPELKRLHDKLVTLQQVVSKKYEINRKGIYYVKTNNIIKLEKKIRLLQRHIKNIKLNFTHSYSNTLVRIKPSFIAVENLNIKGMKEAKNNFSKSIQKVNWYEFSRQLEYKCNYFCIPFVKVATRFPSTKLCSHCGNKQNVTIEERTYICKRCGYIIDRDLNASINIREEGRRILLSST

SEQ ID NO: 4321 - protein, 369 aa, unknown
  TnpB Polypeptide
MLQTLMVRLDPSPEQHKLLLDTMHRFNEACNDIAGTAFFMHKANKVELHKTVYYPIRERYGLSSQLTVRAISKVVEAYKRDKSIRPKFRPDDAIVYDPRILTWKGLERVSLITLEGRHLIPVRVGVYQKARLDRVRGQADLILVKNIFYLGVVVEVPEESPYDPVGVLGVDLGVKNLAVDSDGEVHSSQQIRNTRKSSDVLKGRLQQCGTKSAKRHLKKLSGRMARFARDVNHRISRGLITKAKDTLCLISLEDLKGIKRRVTVRKSQRRDHHSWSFDQLRQFLTYKAAVAGVPLIFVDPAYTSQECPICHCVSKSNRPTRDDFRCICCGFSGPADNIAATNIAARVAVNLPIVSRFFAEAQALPFRVG

SEQ ID NO: 4322 - protein, 282 aa, unknown
  TnpB Polypeptide
MKHTLRFRAYLPDDVASEAWHQIDILRQIRNHAVRDYYNSDYNNRPSDSDQLSKLKHWGDNWDIFAEPSQHAAQQAIRQIHSDLVTLQERRNNGYNVGRLQWQGRGEFRSVSDNQSSRFNVDHNTGDDRYVRFRLEKIGWFKVRANCDVPPADEINQVILKTETTGEWYVSLVTTVEDTPKKPPLSEMKPQNCVGIDLGITSYIHTSENLSVDTLELSDEYDRCAREQRKLDRKEHGSGNWEKQRRKVAQAKRKIKRKVCDYQHKLTTWLVQEYDVVAVEDP

SEQ ID NO: 4323 - protein, 395 aa, unknown
  TnpB Polypeptide
LYSSILIFTFIITEEVTKTARTRLCIESGERSWLKDARYTARDIANDTLRLKQQGYNKTEIQREVDRDGFLRNNKCAVVGKALQAWDSYKELLEWWDDQDDTHVGKPSPPATDKKGAYPLVMAHTEGYRLTYTDTDTNEDEDDRVQFRVSPKPYKKVKGHLRGRPEDLNLIESAFTEDEWSLGQAELLYRDGVYYLHVTVKTEVEVPEPEDADTVVGVDINERNIAFTAVNRETMDTLGTLVVDYGSVKAERQRYHTITKRCQEHGQHSIHDQLGVKEERYTEWILHRMSRVVVEFAKQFLNPVIVFEDLSEIRDAINYGTYMNRRLHKLPFNKFEQQVRYKATWNRFRVRWLSRRTIRSRARVVVIGDIVRVGGSGVRMIRVKFSKTMLTGTQV

SEQ ID NO: 4324 - protein, 349 aa, unknown
  TnpB Polypeptide
MVTVTVTAKFHNPSLSRRKEWQQGTRLYRDTKQFCIKGWENGNFGKSVTTSSIDNALYSAIQNQAIREAKSDHSKNGEVEYRESQPFAVNNQNWEIDTTNNGTVVIGFPCVSQWWYTPIELYDDIADSVNQLLVGDADKSRLQVYRRGDDWYCTFNTEYDTDTSNGTSIGVDIGERHILAATAYSEDESMLVSGDEAKYVRRKYRSLRDSLQQAGALRARNRVGDKEQRRIKDLNHKLSRRLITFAEQFENPVIKLEDLEDIRKNSSWSGIHSWHFYQLQQFITYKAERAGIRVEKIDPYRTSKLCSECGSIGTRDEDHFSCSECDRGRHADLNASENIAQREGEPCTA

SEQ ID NO: 4325 - protein, 234 aa, unknown
  TnpB Polypeptide
VGTSPRLQARNRNSRPTRHRDCWYRSRFGICNFAAVAVAYSTEEADLYPGNRLKQDGYYFPKEIANCDDSGGEGLLDSMRSGRSAEPTSSTASRHTSFSDASKTVLGASTSEISLVSAKIIIGESKNWGKHGNLDLHGWAFDRFSNILEYKAKVDGIEIVEVSERDTSKTCCVCGRTDESQRVERGLYVYVCEEHDDAFNADVNGAENIRLDINDESNSESAPDLGGDRSPGCG

SEQ ID NO: 4326 - protein, 149 aa, unknown
  TnpB Polypeptide
PERIAKCDDSGGEEATRLHAKWSERRTHFFHSLATHIVERCIENGVGRINIGKLAGVREDETGESKNWGKHGNLDLHGWAFDRFSNILEYKAKGEGIEVGEVSERDTSNTCCVCGTEDESQRVERGLYVCEEHGTTATATATGMRSTLT

SEQ ID NO: 4327 - protein, 320 aa, unknown
  TnpB Polypeptide
VTWKRKGIRHDTSNGRVHLSKGANHKEHPHILVEYETRPGVTVENLQQVRVVYDRAKGRWELQLACKHEAETPDAPGNETAGIDLYPGNRLKQDQYGYGYYFPKEIANCDDSGGQQATRLHAEWSDRRTHFFHSLVKHIVERYVEQEVGQINSGKLAGVREDDNDNSKNWGKHGNLELHAWAFDGFSNILEYKAKVEGIEVGEVSERDTSKTYCVCGTEDDSQRVERGLYVCEECDAAFNADVDGAENIHLDINNTESNSESAPDLDGDSSTGWLAQSSVYLYELSRGFQPQAQVVDCKPSYPNQAVGFPPPSDMGGCQS

SEQ ID NO: 4328 - protein, 419 aa, unknown
  TnpB Polypeptide
VLNRNCEVKLTELESKDEDLLDETFEQFRHAAQHVADYGWSDNPANIIDSKSKLHDATYEDVREQTDLTANHVQAARSLAAEAVDSCSELYFEEDQSISKPTFHGSVVVYDARTVTFTDEHCTLSTTDGRVSAEYVLPEDTTDTPFETYWNNPEWERNSATLHKRGGTYYLHVNFQKEPETDVSAVENGTVLGVDFNVDGYLAVTSTGAFLGNADYLNHKRDQYERKRGDLQETGTRSAHLTIQSMGDRFRNWSEDYLHRVALVIVQEARRYDCDAIAVEKLKRIRERISNGKKFQQWAFKKLQSLLAYKAEIHGILIDDMKPQYTSQRCSHSACGFTHSDNREGDEFECLDCGKALHSDYNAARNIAWNLVQNWLKSGSGRADCQVALNSGTVNGNGEFSPTTTSSGQTGSPLTSPPI

SEQ ID NO: 4329 - protein, 390 aa, unknown
  TnpB Polypeptide
MKAYKYKLKPSAKIIAIFESWLAILCELYNAALQERRDAYKINHLSIDYPAQAKQLPEIKAERGDLARIHSQVAQNVLKRVAFAFDNFFRRVKEGQKPGYPRFRSRSRYNSFTYSQSGFSLKSNKLHLSKIGKVKIHLSRPIEGEIKTCAIKREADGWYAIFAVENSKKEVALAPKESVGVDVGIESFATLSDDEAAPIENPQYFRRAEGDLKRAGRQVSRRVKGSKRRKKAVRLLAKKHLKVKRQRRDFHFKEARKLVSQYQSIKVEDLNIKVMVKNHHLAKSISDAGWGQFIMIVVFKAEEAGRTVIKVNPSYTSQDCSSCGHRNQIRLATRIYRCSRCDLVIHRDRNGAKRIEQKGRAVPSGSRRGVACGEPRTYQAADLESPAITR

SEQ ID NO: 4330 - protein, 453 aa, unknown
  TnpB Polypeptide
MIVWLMKRTNTFAVRPLSDTGEQLLRDLLDASAALWNEVNYQRLMRYNDADGFEGDVWDADTGRLEGQYKGMLGTSTAQQVIRKNSEAWRGFFRLKEQYHDDSNTSVTEHPEPPGFRGNEEEGRQLKTVIRNDAYTVEWSKRSRLEILVGSELKDRYDHTGRLRLEISGDPNWPEYETQGRLDLWYDETDSTFRASQPVTVSDDARDTPLADETAALDIGANNLVACTTTTGQQYLYDGRELFQRFRETTREIARLQSKLEDGQYSSKRIRRLYRKRTRRRDHAQEALCRDLVERLYEDGVDTVYIGGLTDVLETHWSVDTNAKTHNFWAFKQFTERLSCTAEEYGISVEVRSEAWTSQECPQCGSTDRTTRHQDTLTCPCGFDGHADLTASETFLKRHADQTVRPMARPVRFEWDDHNWSELPCSPARDSPKEQRTDPSTVHHDGNLASGDS

SEQ ID NO: 4331 - protein, 469 aa, unknown
  TnpB Polypeptide
MQLTYKFTSKHTNINKLESIRTLAKAYKSYYNIVTSKSMHDFYKNGMFPKYLPVIENFFNKNFSERYKQTCGQQAKANIDSLLSNIKNRITPVITSSSLNDDTKIILHYVNKYHLWFQKSVKIRGQEVPQELMKLGQRLFKQYRGKAPKLRSVTLCLDSKVAKIEKSDNSFDYWIKLSTLDKGHPIYLPIESYHYFENAAGILKKYVQIIVRDAIEYGFVKESDDKELRVENERDKMIGIDLGMVNLLASSSGNQYGQALYTKLKHYDEIITRVTKRRQKNGLKNNSDRIDRLYSKVRNLIKNEVGRVLNRFLDKEKPHVVVMEDLTGLTQDTTSNKKLSKKMRRLLNNCGISKIPKRMEIKQKRIGFRLESVNRAYTSQECPICHNIDKENRKDQAHFKCIKCGYKRQADYVASVNIRNRRSIPEVGIHAPYRSVRGLIERHYMSINQSFGNRPKYRLAVASELLAGS

SEQ ID NO: 4332 - protein, 388 aa, Lachnospiraceae sp.
MPKIKKGFVIRLYPNAEQMQQIRRTAGCARWLYNEIVAANQKRRDLDPKASLLYGRNLNYLLPRLKEEHPWLKEVDSTSLTGVADNISSAYTRWLSGLGRKPKFKKRSTHTDSFISKCVNGNVVVIDAHHIRIPKIGVIYYKSGRMSHGRICSVTVRILPSGKINASVLCEYEEEELSKTGKTIGIDLVLKDLAILSDGTKYELPRWDKESADQLYYWQRTASRRLLRAKEAMKKDSTLTLADFKNYQKARQMAAKIQERIANQRKDYLDQLTTSLVRDFDVIVIENLKPSRMVHNHNLASAIHNAGWGMFAQMLTYKCAFYGKRLVTINPAYTSQTCSDCGAVNGRLGYNAYGWLKVREWTCPVCGAHHDRDINAAINIMNIGISAA

SEQ ID NO: 4333 - protein, 700 aa, Nonomuraea sp.
MGEVVSTATCRAFRAVLESSGEVVGERVLAERVGWLVAVVRQVAAGVVAERWNRADLDLLKAGAGLDGRALPAKGWMAVRRLGWGADVPVGVYVSDRVRRCAEEEAARALRLALHRGAVLAAITASWPADPRRRTDAEWTALRAALEAEGVAGGVSAAVIRNRTRQLRAYLDERGLSLAGLTGRAGVVEVEGPPGVAAQVLLAAADRQLIILERIGASEARLRVQLPLCARPATRRDWAWHVLAVPLPAQVPADARLRTPTLRVMDGRVRVDLPFTTAVPYAPVGGHTVAVGFDWGVNTLLTGAVGRLHAADPQDGRMRDGRVEGDGRPLIYDATPISAKLHRLRGHREALAARRDHYAALQAGLTTRAASRNTAPQYAPHAARDTARYEQVAALHERADREHARVCARIRRLNNALSWSAARWAVDQAVALGASVIYLEDLTTLEARGHRKGNATLSGQVRGRVADAIRHLAAKTGLAVVTVPARGTSRYCPRCGTGTAPLRHTPAPDRLNERGWKWAHCTRCGLSRDRDQAAAERIVTRGLLAQTHTITDRATGARTIRTVMEGNLSRVRRPRKPTRAARRARRTGTDLHPRPQSRHDRTRQNRTRRDRAKTGPTGKQPTTKTFSQMPDRRPVPAPTLTVGQRPAGQAPQANSPTAVRTGLVRDPHHRTGFHKVKATPVLALAEYGSGRHHATPARKA

SEQ ID NO: 4334 - protein, 656 aa, Nonomuraea sp.
MLMGEVVSTATCRAFRAVLEASGEVVGERVLAERVGWLAAVVRQMAAGVVAGRWTRADLDRLDAGVGLDGRALPAKGWMAVRRLGWGADVPVGVYVSDRVRRCAEEEAARALRLALHRRAVLAAIIATWPADPGRRTDADWTALRAALDAAGVAGGVSTALIRNRTRQVRAYLDEHGLSPADLTGQNGQAGRAGQVDVVEVEEPPVVAAQVLLAAADRQLITLERVGGTGVRLRVQLPLCARPAGRRDWAWHVLPVPLPAQVPADAELRSPTLRVVDGRVRVDLPFTVPVPYAPATGHTVAIGFDWGINTLLVGTVGRLHDGRVEGDGRPLIYDATPVSAKLHRLRGHREALAAKRDHYATLQAGLTPSDAARHPARDAARYREVAALHERVCARIRRLNNALSWSAARWAVDQAVALGATVIYLEDLATLEARGRRRGNATLSGQIRGRVADAIRHLAAKTGLAVVTVPARGTSKYCPRCGTGTAPLHHAPAPDRLDQRGWKWAHCPRCGLSCDRDQAAAERIVSRGMLAQHHTVTDRVSGTRTIRTVVEGNLTRARRPKKPTRAARRARRTRTDLHPRPQSRQDRTKTGPTPQRPTGKNPARGLSARCPTGVWCPPPPLRWDSVRRAKYPRRTAQRPSAQDLYAILTNGPASTT

SEQ ID NO: 4335 - protein, 439 aa, unknown
  TnpB Polypeptide
VAGKQKSGAKGAGRAKDGVVPLNAWAEKPDAVEVWRTDVVRLFVDQRQEEKLLEVAGAVEQLVELENERRRRVYEETGRIDTSVIQAYRNPEYAEIKRVLGSVNFDETLRYVSEAWRSFGALLHAGERGELPAWLEPRPPRRLGRLLVFVRFDNYRVDAQSGTIELGYYNLRLKFRGGLRWWRQRVQQGRLVMAFDDVKRAWYGHIASRVVLKRSTASGLKCGIDMGQIHLVAAVLESGAALLYRGSVLKSDYHYLRKRVSELDKVGLLDEFDRAVWLEKRRALHHHLKQRRVKLIQGVAAHLATLLSRLGVAEVYIGYPRYIAQEKPCERNSAWPYWRVAREVARACENAGVAVFLVPEERTSSFCAYHGCGVVRGPRGLVRCPLGHTLHSDLNAALNILKQAGGRLPERVRVLSFTPTPSGVTERRRKAYSPAQKAG

SEQ ID NO: 4336 - protein, 353 aa, Thermoplasmatales sp.
VLKTLQIKLLPDDNQKVILTDTFRQFNAACNFVSEIAWNRKIFNKVLLQKIVYHDIRDKFGLASQLAIRVIAKVVETYKADKATFHEFREYGSIVYDQRVLSFKGMDEVSINTVHGRIRIPMTIGKYGEIPFRRMRGQCDLVRKNKLFYLMVAVDVPEEPQIEPKDIMGVDLGRVNIAVDSTGKYYSGDKIEKVRNRYSALRADLQSAGTTSARRHLKKLSGKESRFMKDENHVISKGIVQKARGTSSAIAIENLTGIRERTTVRKSERYQHNSWAFYQLRSFIEYKARIMGVPVIPINPENTSRECPSCHTIDRRNRPERPKFKCISVVLREKPISLLPSTSGTGLQSISPS

SEQ ID NO: 4337 - protein, 396 aa, Bacteroidia sp.
MEKFRWFYDSSLTVLNLEAIRTGKKLEDNHSFSYPFLRDYIVKKYRYTEEQVDHMVFCDYVYDDENAEMMCPEWMTGIHSRLQRGAIQKLSENINSALSNKRAGNIGNFNLKMLSKKSPTEFIHFEDKSFPVAIKEIDSRFWFTDKSRKRQSISFKDVFNNTTKKGIEIIHDKTTDTYSLHYPVDVDYFPTTDRRGDNQARYEVAEENRFISLDPGVRKFMVGYDPKGKCVIFGEGANKELSSLLYKIDASEDSQMRNRLFRRIHNLVEELHWKTITYLITNYDTIILPDFRISGMVKGKKLAKITKRLLYMFSFNSFRQKLEWKCRIYNKKLVIVDESYTSKTCGGCGVLNNVGSSEKYTCKKCGFNCDRDVNGSRNIMIKNLTLRLIPDFPVSK

SEQ ID NO: 4338 - protein, 413 aa, Cyanobacteria sp.
MSYNVIMTQSLSVKCKLIVPVEYRPKVDETLQGFADACNQILEVAKQDNCWNTTKLHHKVYKPVREVTGLKANHVCQAIRRVIGNAKAAHKIHKFRPTSISLDVRTFRYIEAQQRVGVTLKCGRVDFDLSIGGYQIALLRGQTLTSATLKKSRQGDYYINLVVEIDTPPTGKTPKVIGVDLGRRDIATTSTGKSWDGSQIQSVRDRFSKLRANVQSKRTRNARRLLRRLSGRERRFQEWVNHNISKQLVQEAKQSNSALAFEDLTGIRDSLNTKPRSKTERRRTNNWAFYQLRIFVGYKAAIAGVPVVFVPAAYTSQTCSRCRHVHPEKGKSYRNGKKFKCGHCGLEHDADVNAAINIAELGASVSAPGSPGMTCLLEGQLPLFRLCMIRAEAPSIYCGVAYIRGERGERERV

SEQ ID NO: 4339 - protein, 342 aa, unknown
  TnpB Polypeptide
VFNHFLAQRQEQYKETGKAPTRFQQDKSLTTLKQEYPWLKEVDSTSLQATLQDLDAAFQNFFRRVKRGEKPGYPRFKSKHDHRQSYKSKCVGTNIKVLDKAVQLPKLGLVKCRVSKEVKGRILSATISRSPSGKYFVALCCTDVEIEPLPNTDAAVGIDMGIKSFAVTSDGVEYRNHKYLTKNLRKLARLQRQLSRKTKGSNRREKARVKVARLHEKIANQRNDTLHKLSTALVRDYDLIAIEDLSPKNMVRNHKLARSISDASWSEFRRQLEYKAAWYGKAVVRVDKFFPSSQLCSACGAQWPGTKDLSVREWTCPVCGTVHDRDINAAKNILNEGLRLLA

SEQ ID NO: 4340 - protein, 397 aa, Clostridioides sp.
MIKAIKVRLYPTKRQEELMFKSAGIARFSYNWGLAFLNKYYEENNKTLSIGELRKEFTNIRNDEEFSWLKEVSSEIPQQALKDLGESFKKFFRKESSFPRFKKKGKCEVSFFHLNNKFIVKDKYIKLEKIGYVKMKDEGRLPIGNYKKDKIKVLNPRIKFNGRFWYLSLALEVEDKAYTDLKDESIGVDLGIKDLAIVSNIDNPFKNINKSKEVKRLNKKLKRLQKQVSRKYDMLKSGNTFKKGEKFSKTQNIIKIEKQIKIVHKKIADIRLNHIHQTTNTIVKTKPCRVVVEDLNVKGMMKNKHLSKAISEQCFNKFIAILEYKCKWNGIEFVKADRFYPSSKICSCCGTIKKDLRLKDRTYICSNPKCNLVIDRDKNASINLANYKSNHQHDYLN

SEQ ID NO: 4341 - protein, 443 aa, unknown
  TnpB Polypeptide
MQKLKLTIVTQLHEGSNRGLIEYMEASRRDYGKAMRETFYAIKRGGFDKSKYNTCLQHRHGIVSRTANAIISDAQGRFYALKALKECERKQLERKIKYLESTVIPKLVEQRNQNSTKLQDGVFVSLIQQRNLRLRVVSKKSKLNRLKQKLEVLKYQLEIGKLKLCFGTKRLLKQDQEKFIEQRDSQMTFIGAKGELACNHNLQLRYNRRSNQFLVRLRKDFGGYKLVKGEDRYVYGKVYFNHHKGQLVSILRSKTSPLSYRIVKRKGRYYLHCIFEFQVGNSGIVTRSSYGTVGLDFNKGFVTLSETNQYGHLVKTEFMPYCFESGSKTKTDLQDVANHVVKLALRTGKDICIENLDFRRTKAKTETKIGKKYNAMLHSLAYREFSDAMGSVCYRNSVGLHKVNPAWTSWFAERIYCKPMKLNIHTGASYVIARRGQGYKDAI

SEQ ID NO: 4342 - protein, 457 aa, unknown
  TnpB Polypeptide
MVLLGYVVLWRGIEMCSRKFTVVTQLHERNNRGVIEYIESSRRDYGKAMRETFYAIKRGGFNKSRYKTYLQNKYKIVSRTANSIVFDAQGRFNALKELKEYERKQLEQKIKHLEDIVIPKLVEKRNQNSIKLQDGLSVSLIQQRNLRLKVVSKKAKLNRLKQKLATLEYQLKSGKLNICFGTKRLLKRSYKKFSEQRDSQMSFVGARAETACNQVLQLTYNRRSNQFLIRLRKDFGGYKSAKGDARYAYGKVYFNYHKAQIVSILRSKASPLSYRIIKKNSRYYLCCAFEFQVDNGEVVTRSSYGTVGLDFNKGFVTLSETNQYGHLVQTQFMPYRFKSGNKTKTDLQVVSNYVIKLALRKGKDVCIENLDFRAKKSKIEAKVGKKYNEMLHSLAYQEFIEVIESVAYRNRVGLNKVNPAWTSWLAERIYCNPMKLNIHTGASYVIARRGQGYKDAA

SEQ ID NO: 4343 - protein, 420 aa, unknown
  TnpB Polypeptide
MEASRRDYGKALREAFYAIKRGGIDKSKYNTYLQYKYGISNRTANSIILDAQGRFNALKELKEYERKQLERKIKYLENTVIPKLVEKRKQNSIKLQDGVSVSLVQQRNLRLRVVSKKAKLNRLKQKLAVLKYQLETGRLKLCFGTTRLLKQDHDKFIEHRDSQMTFIGDKEKTACNQVLQLTYNRRSNQFLIRLRKDFGGYKSAKGDNRYAYGRAYFNHHKAQLVSILRFKTSPLSYRIIKRNGRYYLYCVFEFQVRDGDVVTRSSYGTIGLDFNKGFVTLSETNQYGHLVKTQCMPYRFKSGNKTKTDLQGVANHVVKLALQTGKDVCIENLDFRVTKSKTEAKMGKKYNDMLHSLAYREFSDTMERVTYRHRVGLNKVNPAWTSWLAEKIYCKPMKLNIHTGASYVIARCGQGYKDAV

SEQ ID NO: 4344 - protein, 420 aa, unknown
  TnpB Polypeptide
MESSRSDYGKALRETFYAIKRGGVNKSKYNTYLQYKYGISSRTANSIIYDAQGRFNALKELKGHERKQLERKIKYIESVVIPKLVEKRNQNSAKIQDGAYVLLGQQRNLRLRVVAKKSRLNRLKQKLKALEYQLKSGMLKLCFGTKRLLKQDHDKFVEQRDSQMTLIGAKEKPACNPVLQLTYNRRSNQFLIRLRKDFGGYKSARGEDRYAYGKVYFNLHKTQLVSILRYKTSPLSYRIIKMNGRYYLYCIFEFQVSAGDIVTRSSYGTIGLDFNKGFVTLSETNQYGHLVKTQFMPYRFKSGNKTNTDLQAIANHVAKLALVTGKDVCIENLDFRAKKAKTESKIGKKYNEMLHSLAYREFSDAMKSVAYRNRVRLNKVNPAWTSWLADRIYCKSMKLNIHTGASYVIARRGQGYKDAV

SEQ ID NO: 4345 - protein, 398 aa, Streptomyces sp.
MTTAHVKRAFKYRFYPTDAQAAELSRTFGCVRKVYNLALAARTEAWARGERVNYNQTSALLTVWKKTEELAYLSEVSSVPLQQTLRHLQVAFTNFFGKRAKYPRFKSRKKSRKSAEYTTSAFRYRDGRITLAKMTEPLDIVWSRPLPEGVSPSTVTVSQDSAGRWFVSILCHDPAVKPLPATSAAVGIDVGLTHLLTLSTGEKLANPRHERRDRARLALAQRRLAKKAKGDGANRAKARRKVARIHARITDRRRDHLHKLTTRLVRENQTLVIEDLTVRNMVKNRSLARAISDAAWSDFRNMLEYKAAWYGREVVAVDRFFPSSKLCSACGTIASKMPLHVRTWTCGCGITHDRDVNAAKNLLAAGLAVSVCGAGVRPQRSSPGGQSAAKQKTPRREP

SEQ ID NO: 4346 - protein, 279 aa, Streptomyces sp.
VEANRAVAYRIHHDVQRGRWYLTASWQIPTPKTIPLDAALADGVISVDINADHLAAWRLDTHGNPIGNPRRFSYDLSGSADHRDAQVRHALSRLLNWAKTCGVKAIAVEDLDFTAEKTREKHGRRKRFRQLISGMPTGRLRARLTSMADATGIAIIAVDPAYTSQWGTQHWQKPLASKNRTTTRHDAAAVAIGRRAQGHPIRRRTAPPPAHRSDGQGHRTVQARPGAVGREGPRPRLPGPRTGCVPPDAASTRATRTSKTVRDIRSDQVWVQHSLLFTD

SEQ ID NO: 4347 - protein, 503 aa, unknown
  TnpB Polypeptide
MSQKAKITRAQVGGSPVYLGDVTQPDGTVAPVWSADPARVLDWLCDGFRFRFNQRRSTRCRYLTCRGRCGNQVVVTDSSGQPVLVPIGNTVTDISEAEARLRHSFLAAMPGYVLEATLKTECTDWFSAAKRRKTNTANGRKPGAMPGFRRRDTDQRFVCWFNGGRNAVFTRTGRRSGMVTISGANPAAHRAPGVRPDDKPHKLAWQITLHVRLPQPIRPYTSVRVNWTRRQLVFVNQPLPVANKTRTGEVIAIDRGVAHTAADDRGRFYDAPDTADLDKQRKFHQRRMAKSKLIATRRGRRFWESKRYQAHKTAAASVTAKQARVREDFAHKRSTRLVRGHDFIGIEKLPLDRMIRRAKGTGAAQKRGLNRALRHAALGKLAKCIQYKAQLAATPFVEVPAAYTSQRCHQCGHTGKGNRESQAVFRCLSCGWTGNADTNAAINVREEALTRWAAHAQQLAGTSAQAGGVAVSQAGSKSKTDPHTGPAPGPAASAMNRKPPKAA

SEQ ID NO: 4348 - protein, 503 aa, unknown; identical to SEQ ID NO: 4347
  TnpB Polypeptide

SEQ ID NO: 4349 - protein, 459 aa, unknown
  TnpB Polypeptide
MFSCKELIGSLPSTETFGPLSTAFIGTSDRGIRMPGRLVRSLVFPVGEIPPPLRALLPEFRRLVNRSIRIALHEDARSRSRLTKIAYRMLSAEHDVYKQYIPSAFEIALAVLKAHRRRVRKGRPTNVPYLRRLVLKAENQSYRLDRETGRLRIPIRGTEGVQLTLPLSDWHRTFLSDASWGLGSLTVTTDRITIVVRKGAPRPYEPAAAIALDTNESSLDGVAAEGVEARLVTVPFPEVRIVQATHVRRRTRLARRKANDRRVMRRLLRREGRRERNRISQRLHVVTKSLVASAREQRAVIVLEDLRMPQGGGRGRKMRRRLSSWPQGELHRQIEYKALAAGVPLIKVHPAWTSKTCPACGARRRDRVGQDFVCVVCDWELDRQHNAGLNILKSALASDEALARGVQFHLGALRRDVVIPLSDLPAREGAREEPSGVELRLAGHIATSRGQNRRPVSMT

SEQ ID NO: 4350 - protein, 421 aa, unknown
  TnpB Polypeptide
MFGCQQIRINPDKELKAVLEYLCSESNKLNNCAIYYARQLYFKTEKVVNKFALINELKQNPHYGAMYSQSAQQAVLSVAESFSSFIGLLKGIKTGSVDQRPKIPNYKKKGGFALVAYPSQAVKLKPEGLRFPLGNKVKVWFGLDAFYLPMPSNLDYKAIREYRILPRNGEFYLELVYKVETIQANVDSSKVLGIDHGLDNWLTCISNVGTGFIVDGKHLKSLNQWYNKRVSVLKENQSQGFWSKQLARVTETRNRQMRDAVNKSARLVINHCLENQIGTVVFGWNKRQKDSINLGANTNQKFVQIPTGRLKERIKQLCEQYGIKFVETEESYTSKASFLDSDELPTFGEKPEGWQESGKRVKRGLYRTANSGDINADCNGAANILRKVAATLGLNLSGVSRGALTTPLRPRFWTLKESHAL

SEQ ID NO: 4351 - protein, 412 aa, unknown
  TnpB Polypeptide
MPTPEQAAALLETLRQSSECFNAVCKYGWQYNTKNGVDLHKATYYPLKAEHPNMPCQLLCAARVKATEALKSAFALKKKDGKVSCPKGQEVPIRYDARSFRLLPDKRIASLASVSGRQEVAYRLYSHAAKAFAEASGFDSADLVHRKRKWHLHIVLTIPTPEFVDNAQAVGVDLGLNRPAVTSNRQFLGKRRWRETSNRYFRLRRKLQSKGTKSARRRLKALSGKQTRFRRDCDHVLSNQVVQSVLPGTTIVVENLTDIRTGTKQRGRQSRRRLHSWSFAQMRSFLTYKAEAKGCQVAGTDPRYTSQKCSRCGYIHRGNRKSQSVFLCRQCGYELNADLNGAINIARKYLDAVGISECVGLPSAEGLILSESPLSQTPVSSAVVSWPENHTDAARGAEQGLETSPSALARGI

SEQ ID NO: 4352 - protein, 281 aa, Moorea sp.
MIVLEFKTYGKKKQYQSIDEAIRTVKFIRNSCIRLWIDNKGIGKYDLSKYSKTLAKNFPFANELNSTARQAAAERAWSSIARFFDNCKNKVPGKKGFPKFQKHCRSVEYKQSGWKLSPDKKSIIFTDKKGIGKLKLKGTWDLWRFDKKQIKRVRIVKTADGYYVQFCVSVDVNEQLKAADATVGLDVGLKDFYTDSRGKTEPNPRFYRTGEKRLKFYQRRVSRKKKGSANRKKAINKLGRQHLKISRQREEHAKRLARCVIRSNDLVAYVRAACRKARFES

SEQ ID NO: 4353 - protein, 119 aa, Gammaproteobacteria sp.
ASARLKSAHKFSRTLVNCCGEIYVGNVSSLKLVKTTMAKSVLDAGWGQLKTMLDYKCAHAGIVFKEVNEAYTTQTCSCCGAVPDSRPKGIAGLEIREWTYSACGVTHSDRDINAARNIL

SEQ ID NO: 4354 - protein, 125 aa, Gammaproteobacteria sp.
MAKSVLDAGWGQLKTMLDYKCAHAGIVFKEVNEAYTTQTCSCCGAVPDSRPKGIAGLEIREWTYSACGVTHSDRDINAARNILAVRHGRLAVEISASLGREDVKQSNTRETVPGDPLALTLDSLH

SEQ ID NO: 4355 - protein, 661 aa, Kofleriaceae sp.
VVASSEKRTRGPNKQKPWARSAEDGASVLRLALDVSDPVQRARIEAMFEGAYSLRRALQRDARDRARAYWAAKHERAKNPTATRERLGLSRDALEDAAAAHVNAAPHLRRFVTKALAMHLADSVWTAIERHLFVAAKGKRFGMPRVGRWYDFRRLPGRARSHTRARKWETFRLHGSLAGHRAAYTGPDGDFFQPGRMPPVHADTWWTYDGPLAVVFSGLCDGTLVLPVRLPTAPCNQPVLDHHLADPSRWHKIDLVRTPDPSAPGGWRYEAHLMVLTQLYVSPSVAMRRANVALGAADRVAGIDVNVSNIAVASHEGDGRKMHVTRIERDATQKQRDRSRSRRERRRMRELERSRRAMNRAQYQVSKRQEKRARRRAERGLPPVETIPMGPRVANAAGVPLQSFKKDILSASYRRLRAAQAADAAASTQARRDRARDVAADVVATHGYQLVVEDVSVAAWSRSWGRAVAAFSPAALVAAIDREARAVAALAGGRGGIERASTRTTALSQHCPCGARASKRLADRTHDCARCQLRGDRDEVAAVLASFVVIEQVGDPSSERVDYDAARRALPEIRRALSNPLSGWQDTLSESTGLFAREGSSLTWWTPTLDSVAVARRIVGMAPYPTLDETGSRWTTPDRARRRTNRSGKYDRVWSDLRDGS

SEQ ID NO: 4356 - protein, 442 aa, Cyanobacteria sp.
LVSYKRYAENPSNSFRRFWLRASFNLPVLHPTGYNANSRVIKSLPMEKAFNYRFYPTREQESLLRRTLGCVRLVYNRALHERTQAWYERQETVSYGQTSFLLTRWKKQEELDFLNQVSSVPLQQGLRHLQAAFTNFFAGRAKYPNFKKKHQGGSAEFTKSAFKFKDNQLYLAKCVQPLAIRWSRQIPQGCQPSSVTIKVHPSGRWHISIRFDEPTLKPLPPNDKAIGIDLGLSSLVITSDEEKIPNPKPLKKHYRKLRRLQKSLSRKQKGSNNRYKARVKLAKANLKITDTRKDHLHKLTTQLVRENQTIVVEDLAVKNMVKNRKLAQSISDASWGELIRQLEYKCQWYGRNLIKIDRWFPSSKRCSNCGYIVEKMPLNIRQWDCPKCQSHHVSEAFRRNRDINASKNILAAGLAVSVCGASVRPESSKSAKATAMKQKPKL

SEQ ID NO: 4357 - protein, 182 aa, unknown
  TnpB Polypeptide
MHGLFVDSEKGKTANYPRFYRQALEKLAKEQRILSRRKKGSTRWHKQRLKVAKLHERIANQRKDFLHKESHKLVKQYDCVAIEDLNMKGMSQALNFGKSITDNAWGMFTTFLGYKLEEQGKKLVKIDKWFPSSKTCSRCGRVKESLSLSERTFHCDCGFVADRDWNASINIKHKGLRLVALA

SEQ ID NO: 4358 - protein, 387 aa, unknown
  TnpB Polypeptide
MIRAHKIRLHPTSEQANYFARAAGTSRFVWNWALSEWDRQYHAGEKPTAFKLKKQFNAIRRAQYSWTWDVTKNASDQPFLDLGKAFTAFFEGRARRPRFKSKKSSKASFYLANDQFELGDHRIWIPKLGWVNMAEKLRFTGKVTGARITKTAEWWYVSLTVELPEERREQRPAAVGIDVGLNHLATLSTGEGYENQAFLKTALKKLRQTNKRLHRRVKGSKNREKARRQVARLHYRITCLRDDVLHKLTTRLAECYGIVGIEDLNLKGLLKNRTLARSFSDAALGKLLDLLSTKVEQHGGQVVKVGRFFPSSKTCHACGWKWDEMDLSDRVFLCQNPRCAYHLFPQDRDYNAALNILCEALRLIGLLDQAVNDIGSGDDVNSAVDLT

SEQ ID NO: 4359 - protein, 378 aa, unknown
  TnpB Polypeptide
VKAIKVKIYPRKWQKELIEKHFGCCRFTYNYGLERKIKTYTETKKSLSVYAIQKEIPKLREEKEWLKEVNAQSLQQSLVDLDSAFSHFFKKNNSFPKFKSRKNPKQSFRVPQSFEISKDHKSIKIPKLKWIKFRDKFNLPKKVEFRNVTISRDGNEYFASICYDDKKELPNLKPIQEKKTLGIDLGTRHLAIFSDGNKIENPKYFKKYEDKLATEQQKLSKKENRETKSYQKQKEKVQKVHKKIRNTRKDFLHKLTTSLVENQDWTSYAMEDLAVKQLEQYNSTSMSRAIGDAGWRMLRTMMEYKCKENGKNLLIIGRFDPSSKACSVCGHIYQELKREEKEWVCCSCNTKHDRDINAARNIRQFALIKSLGKDFSEA

SEQ ID NO: 4360 - protein, 380 aa, unknown
  TnpB Polypeptide
MNNLKTYKLKLIGDFTNVSNVSNSYLQAINYMSEIIYNKHKDIPIKDIKPDNPNKLSKQYYAIIRDKFKLTSQLTQSLFRHLMGTYWSMKSNGNWELAVYKKPTIPICWKRDFNVSNRNGLTIWKNKFTYQSRKIPEGKWKDSKLKLIKGQWYLILTMELKSSELKTEGNVIGVDRGIKNILVATNLSTNKTLYIKGGKLNHKRRCIRQTRSKVASVGTRSAKRLLKRLSGKEKSVTQEMLHLASKKLVTFAQSQNAKTIVMEKLTHYRKKQKSQGKTLNRMKHSWPYAQTGFYIEYKSLDKGMEVQYVNPKDTSRGCPKCGNVSKENRNGLEFCCVSCGYKDNSDRNGSINISMRSVLLRQAKEERASINRLIVAESNL

SEQ ID NO: 4361 - protein, 211 aa, unknown
  TnpB Polypeptide
MRKAFKYRLYPNEEVGIDLGLLHFASLSDGTFIDNPRYSRKAEKTLEKRQQALSRKKRGSHRREKARRFVAKTHRKIANQRRDFLHKQAKRLVERYQTIVFEDVQTEPVVKRPKPEQDENGNSLPNGASPKAGLNKSIQDAGGGMFVEMVSYKAACAGRNVVKVNPYKISQICSACLRECPHKELDERTHICIHCGVVLDRDTNAARNILV

SEQ ID NO: 4362 - protein, 446 aa, unknown
  TnpB Polypeptide
MTSGECPAFSPGRNPAPREAGQGNRAPTARIPRFDGQACHSVSVRTAFRCRAYPDQAQQVMLARTFGCVRVVWNRTLAARHARWHAERKGISYAESDRALTQLKKDPGLAFLNEVSSVPLQQALRHQDKAFTAFFGKRARYPRFKSRRGRQCAHYTRSAFTMRRGVLRLAKTEAPLRYAWSWPDLDPAGLDPAMVMVSRDPDGRWYVTFTVDAAAPAPLEETGNAVGVDLGVTDFAVTSDGNRIANPRHLERKARTLARYQRRMARCQRGSANRAKAAAKVARAHRKVRDARRDFLHQASTRLVREHDVIVIEDLNVAGLVRNRSLARAISGCGWGEFRRQLTYKCQRAGRTLVVIDRWYPSSKTCSGCGHLLAVLRLSTRTWQCPSCGARHDRDVNAAKNILAAGLAVAACGGDVRHSGSSRVRSPAKQEAQPVTAGVPALHGGE

SEQ ID NO: 4363 - protein, 425 aa, unknown
  TnpB Polypeptide
VEREVIKGRPITRKVHIYPNQQQKKQFRQYFGTHRHFYNETVKYINEQYAIRKQEFNASPTCILCTNPKVNNNEWLCLTHKASKKVKIPWNISLELSSVRSNVMKLNRELSDDEMWQKEIPFSTKEYGIIEALTAFKSAITNKKCGNIDRFDVGLKSFRDIRKTFLVDKRAISNKSGNLVIFKTKMPDAIKVTKRNKKLLPEVFDFNCQVLYDKKQYFLLVPSDEPIQTKKPSKYESIALDPGVRTFQTGYSAEGVLLKSGEAVSAELEKLYDRLDCLKSQKSKNKGIKKNKLKDRIWKLQTKIKNKINNLHNQFGNFLTTNFENILLPEFGTSKMQESDILPSETKRRMAALSHSAFKAKLKGLCCRDGRQLYIVNECYTTQTCGVCGTLNQIGGSKVYSCKCGYEMDRDSHSARNILLKHIRE

SEQ ID NO: 4364 - protein, 390 aa, Bacillus sp.
MYRGQRVHFSASNGTIQQLMECNRISAQIWNDCLTEARNYYLTHQKWIGKSQLQKRLKGKYHLHSQSIQAVAHKYLFARDSTHKAIQKGIKTAKYPYKQKKYFNTKWVDKAFTISENGKITLSLGTHGGKRIPPLVVYAKNLPKGTIKEIELCYDNGLYLSVSYEDGQEPLPYTPHHSAGVDMGEIHTIASFCDHGESVLLSGRKLRSIHRLRNKKLRELQKLQSKCKKGSRRWKKYQRAKRYILSKSERQLRDALHKTTKAFVDWCIQQGVSDVYVGNPEGVQRHTKKKRRKNVNQKLFNWRFGKIKKYLEYKCQNKGIQVTFVKEAYSSQTCPVCKRKKKVRTRMYHCHCGYTSHRDIHGAKNILSQALYGSFEPWGQEKIPTYLRPA

SEQ ID NO: 4365 - protein, 380 aa, unknown
  TnpB Polypeptide
MKQLDAANAASASVWNECLKLKEMWDYAHGYQTISKACELWMDRMLSKRQALHSQSIQAVRARYFQCWQGFFALRRNGDKKSRPPYKQKQFQTTTWKKSAIRVKNDVLILSMGKSNQPIKIPIGKYSDKIKNAVVINLVYNRGQYELHFVYKIDDCDSSKAEGIVGVDIGEIHPIVSHDSVNTMIFNGRYIRSLYRLRNKVIASFGGKIDRCKRHSKRWWHLVKRKRKRIKKIDNQIRDCLHKHTTKFVKLCESRNIGTIVIGDLTGIRDTIDYGKRVNQRLHQWAFGKVTQLITYKAKALGVKVALIDEAYTSQTCPACAQKHKPMNRNYICKCGFTYHRDGVGAINIRQKYLGCFSNPVAADMTPPVGIRLEVRRCPA

SEQ ID NO: 4366 - protein, 403 aa, unknown
  TnpB Polypeptide
MALLAHKTALQPNKAQKKVLNQHCDFARNAYNAALSDFKAGLDNGEFRSVYDLKKLFNARKREAFPEIDGNLSMNAGKNAIHNFHDAVKRWQSGQNNFPKRKKHNSRSSFQIDNGVGSVKVSEDGNQHVILPKIGKVRLAEKPRWTGKVRRAVISRTAHRWQISMLFEVDEPEPPDTSRLPAEGCDVGISQLATLSDGTTFENPRALRVQERKLKRLNRSLSRKTYRSGGWWKAKELLARLHLRIRHIRMDAHHQATHRILQGISALGIESLSVKGLMKNRKLSKALADASLGGFLVKLKYKAVRRGIRIVEADRFWPSTKRCSSCGYVKKKVSLSERDYHCGVCGFQADRDVNAAINLKQLASSTDERLNAVGASITPTAVGWTRGRRKVKPNQTLIDFATA

SEQ ID NO: 4367 - protein, 389 aa, Methanobrevibacter sp.
MPEVLSCKCRINPNWDLKIAFWDAFGASRFVSNNVRQKVRQARIHNKIIDKNCPESKDEKIRINRSFYNDCLRELKHENPFLYEIDSTALQDATERLQRAYQRYDKRLSGEPKIKTLKNPVQSFTIKNINNSIRLKDNYIRLNKYGFIKLRGLRPILGRIQTVTILYDKGRWYAILTYRIEIRIDPLTLTGKAVGIDVGLKNYITLSTGEVIAKPDTRDLDDKIKKQRKIVSRRFQSSPYGSNYLKAVEKLQQLEHKRNNIINDFHHKISKKIVTEYDIIVMETLNIKGMLKNHHVSSGIHDAAWYKLKQKIKYKAELYGKTFIEIDQWFASTKTCHKCGHKNNNITLKDRQWNCPKCGTQHQRDHNAAINILNEGLKTLKTEPRGPRG

SEQ ID NO: 4368 - protein, 502 aa, Paenibacillus sp.
LGEGEGEVMADAKATYRTYQVWVKPGHRLFGYLDEACQNAKNLYNTTNFYIRQVFTAWGRQEDLQPLQQQVMDMLAAQIGAMNERRSEKNRLHPFELPSPDKPFVSYAFLDALFKVMEQTDYRALPAQSSQGIMKVVFQNWKAFFASMKDYRKHPEKYTGKPNIPGYARGTAKEIVFSNQDCVIKGGRFLKLPKTKLQLNIGKLGRTEGQLMQVRVVPSHGRYVVELVFACPVKKEEDVNHSDLLMDENAPHLLMAVNHSDLLMAIDLGVDNLATIVTTSGSKPMIMKGRIIKAINQYYNKMKAYYTGILRQGKEPRKGAYTSKRLERLHLKRHRRIKDLFHKASHHIIKLAVEQQIGTIVIGYNDGWKQESAMGRRNNQSFCHIPHQILVDMIQYKAEEQGITVILTEEAYTSKASFLDQDSLPCYDEGRTVTFTGKRICRGLYRSPRGWIHADVNGAANIMRKVFPNVSLYGANGIEGLDGNQTINVSTPLVLSILKKSG

SEQ ID NO: 4369 - protein, 362 aa, Paenibacillus sp.
MLQHKAFKFRIYPKLEQIVLLRKTLGCSRFVFNHFLAKWKESVQAAGKGLSYNACAAQLPALKQEFSWLKEVDSIALQSAVRNLADGFQRFSKKQNDAPRFKSRKHPVLSYTTRYTGGNIKVSANQLQLPRLGWVPFAKSREIEGRILSATVRLAPSGKWFVALVCETDIHPLPKTNRILGIDRGIKHLAVPSEGPVLINPRYTLRYERMLAKWQRTMARRVPGGSNWHKAKRNVARIYEKMRNSRLDVIHKQTTMWIRENQTICIEDLRITKMMKNRHLAKHIADAAWGEMSRQLHYKAKWYGRTIKEAPAFAPTSQTCHICGSKQAEVKDLSVREWTCQVCQTVHDRDRNAAQNIKKMAL

SEQ ID NO: 4370 - protein, 392 aa, Paenibacillus sp.
MILAQIVHFQASKRNMDRLFACNRESARVWNECLQLSKEHYTTHGKWITRSELQKQTKGRFHLHSQSIQSVCHKYLFARDSANQSVQRGVKTARYPYKNKKHYNTKWAKDGFKVTENGTLFLSMGNHHGKREEPIVIHTAGLPYGQIKEIELCYDNELYLAVSYEDGFESKHYEKKQMAGVDPGEIHTLSAFCEDGESLMITGRKVRSIHRLRNKKLADIQRLQSKCKKGSRQWRKYQKAKRYILSKSEKQLRDALHKTTKLFVDWCVQQSVSDVHMGNVEGVQRNTRKKNRVNRKQAQRLSNWSFGKVKQYLTYKLEQQGIQLHSIDESYTSQTCPVCTKRNKVSSRNYRCACGYKEHRDIHGARNILSKALYDKMVHFDVDAQVKYLRIA

SEQ ID NO: 4371 - protein, 293 aa, Duganella sp.
MILVFRYRVKSLSGLLNQWCRAVNFVWNYCNDRQKDALRFERPWIKGRDLHREGDAFRFAGHTFRVFNSRPLPEGKIKDGTCFSQDSRGNWFLNIVIEVAESPVRPIDHGVGIDLGLKDLAVLSDANRISAPGFYRKAEAALAAAQRAHKRRRIKAIHAYTARRRLDSLHNASLQIARSFDHIVVGNINAAGLAQTSLAKSVLDAGWSSFRKMLAYKAVKHGARYVEVDERFTTQTCSNCGALPDSRPRGIAGLGIREWACSDCGAVHDRDLNAAKNILRRGRATLAAGIPAL

SEQ ID NO: 4372 - protein, 565 aa, unknown
  TnpB Polypeptide
MPKAKKRKDTGFEASQTKSVFLYGHPNKEKASIIASIQKLFTRLVNNNIQGINNCEWMHVQLIKNDKKDPQVRAYEKSIRPKGVNSAFCQAAFDTAFTHLSNRLNTIKDDMYREHDDVFTSSKVLFGMALDHATKAEMIDAMLKISLEAKTKRKAKAAKEGKPEPEDKEDFYEKCAKTLSEMPDEEFAFRMEEINDSFAMLSLEYKVPVISKARIPLDSRLMKLEESNDIKAPYVIEVTNPTEKGKRITVPLDTSKHSLHKAKSCKMVRAVTCSIDKGVLRIGWSYTKTVAKPATSKVNGVDTGIADLFYLSDGKHFGSMREVLDFYHKEVEKSFGEFSSLRNKKRKIRHFLRKHKNLPDDVRRSLIKKMDKLNRMIQKANAPYRKKRHYYQMLDKEIKDAVLSYVSSLDKETITVLELLDIREFNKSRRVNGMFSCFARGKAQQKLMQTLNWKGFDFVEVVPDYTSQVCPECSNLDKANRNGKSFLCTCCGYKGDADHTAGINIKARYLDKNLSKICEDNKYNHKVLQSKLSGYYSRKNELYKQQHPEKFVKKQNSEEQAASAT

SEQ ID NO: 4373 - protein, 448 aa, Streptomyces sp.
VARFRMYPTSEQEQQMLLHCAHARYVWNLAVEQHSHWRRDNAHHRPDGKRSGAPSFAEQCRQLTEARAASEWLRAGNQTVQAQALKDFAKAKAARFTSGFGEPTWRKKFVHEGFRVIGDDRVPEYEPDGRPRINPKTNKQVMGRAVTVQRLNRRWAQVKVPGCGWVRFRLSVKGKGARLPAAKTFRVTYRNGQWHAAFAVIPEPIDKPGTGEVIGIDRGVTITAALSDGRTLTCPQLTTRERAQVRKHQRRAARAPKGSERKTAAYAQVAKLKAKEANRRKDWCEKTSTMLARTYDLVRFEKLSIKAMTAKAKAKPDPDQPGQYLSNGRAAKAGLNRGILAQGWGLLRQRTGDKAPGRVEDVPAPYTSLRCSACGWIDKNSRKSQAEFVCSSCGFTCNADTNASINVAAGQGGIPRPRQSAGAGGVTTATSRSSAREPQPTWVGIPLF

SEQ ID NO: 4374 - protein, 477 aa, unknown
  TnpB Polypeptide
MKRTVKIKANCSNNEDEILLIGTVQRNIKNYVWSRYSGIGSLLKQSGWTIRDELIQKDLLSKKITKTFSRVAVEKSASIIKTNWIITKKKVKRAIAQNENLTKDDKHYLYLCLKHTPTLYNILNYKKVDYQTDYLKDLKIDVHRLNNLLRRYVRRYNTKSHTNKANVVLTSNLYKFNPSNNEFSFTGKKRNSKVKITLIGNIPKLKGTLELVRNQKSNQYYLHVPLNRIITKKNMTNESEILGLDVGITDLITLSNGSVYGANSAELFYTLSDNLVNKNRSRLFSYKRRLEQRILIEQDISKKSILEQKLNNLENNNLGSKKRISKISKYKSRIASHINCELNKMVKEEDIQEIVREDLNWSSKKSKKKNKRNVSKKQQNRFSTWSKGLLLERLSVKLAEKGIKETIVNPAYTSQVCCKCNHLGDRKGKEFKCSNCNLSIDADFNASINIKKRKFISEINIDTPYKEVKKYYENISV

SEQ ID NO: 4375 - protein, 369 aa, unknown
  TnpB Polypeptide
MSDRRRRRGGAVRCYELALLPNAGKAEAARHAIWWATRLCLDYVRRLYWLPDEAYVSTAGRGTLDNQAQARARNALRAGRAAARATGEPFGLPESVGELTEAEIRPARDSSFAYWVKVPCGPYLPAQPHRAFSRALRAGAALRPRCEIRRGRRGGYVARVFVEYSQCASAERTRDVIGVDVGVNVGVATSDGRCSRSLRPILQRTRERNAERQRQGHRTRAVRSAIKQHLDREARRLVASAIRGHKTIAVETLRVVGNLKPSGSIGGWARRHFGERVRQIGEEAGCVAVVEVHPAYTSQTCPRCDHIDRLNRSGMEFRCVTCGYVAHADVIGARNVARKARGTFPNVWGEHKGRDINTTGGQVPPSRGA

SEQ ID NO: 4376 - protein, 364 aa, Cupriavidus sp.
MEATRTLKLRIKDKHAKAMLAMARDVNQVWNFCNETQFRSLKRYCNRPKVWLSGFDLQKLTNGFSKCEGVSIGSATQQQVCEEFATRLKQFKRQRLNWRVSDRKSPKYSLGWVPFKARALTYKNGQVRFNGINIGLWDSYGLSKYELKAGSFNEDSRGRWYLNVAVKVQIEEKRVPDGASVLGIDLGLKSLATYCSGEKFEPKQWYRDSEAALGIAQRARKKKRVKAIHAKIANQRKDAIHKETSALVKRHAAIFVGNVNAKALAKTNMAKSVLDASWTTFRTQLKYKAIRQCVVFAEVNEAFSTQTCSCCGVIPPSSPKGRAGLGIRQWKCSDCGAVHDRDTNAARNIARLGLQALTEGISGV

SEQ ID NO: 4377 - protein, 386 aa, Glycomyces sp.
VKQVVVVKLVPDAGERAALLETLRICNTEANRIAAVAFAHRDKDTGQVEREYALRGRVYAEAKATGIGSQLAQHAVKKVRDAYSVVYAQVKVGLLRGNQAVKALGKPVVFDPGSAQSFDDRCLSWDLEARTVSIRTVAGRRKRIAFACSKRDLEALRAHRKGESDLFERDGELFLAATVDIPEAEQFEPVDFIGVDRGIVNLATTSDGVNYQGKGLERYRRRQARIRAELQAKATKAAKKKLKQQARKEARHAAHVNHKIAKEIVSAAERTDRGIALEDLEGIRERVRLTRSQRGRISNWPFYQLAQYIAYKAKRAGVPVVVVDARHTSQKCPLCHHTERANRRNRDDFECRGCGLAGPADVIASVNVRARGRMAWAVSQGSRAAA

SEQ ID NO: 4378 - protein, 386 aa, unknown
  TnpB Polypeptide
MDQQSVRKTFKYKLKPTPQQERTMAFVVRRCRELYNAALQERRDAWRMCGVSITAASQGTQLPDIKAVRPEYRDIHSQVLQDVLSRLDRAFQAFFRRVKAGEKPGYPRFKGSACYDSFTYKQFGNGATLDNGILVLSKIGRLALRWSRPLEGMPKTVTISREADGWYACFSCEQVPCQPLPATGQETGIDLGLESFATLADGSQIANPRIFRVAERNLKRVQRRVSRRKKGSKRRRKAVKLLAKAHLKVRRQRQDFHHRQALALMRQHDAIYHEALQVANMVKNHHLAKSISDVGWSQFLSILSFKAACAGRRVVAVPPAFTSQACSGCGVIVHKGLSVRWHSCPECGTNLHRDHNAALNILRLGQQSGLGQSPQALTWPDGASVV

SEQ ID NO: 4379 - protein, 383 aa, Enterococcus sp.
VNFVERLKAYKFRIYPTEEQEIFFAKTFGCVRKVYNLMLNDRKKAYEEVKNDNSKKMTFPTPAKYKKEFPFLKEVDSLALANAQLHLDKAYKNFFRDKSVGFPRFKSKKNPVQSYTTNNQNGTVALIDSKFIKVPKLKSLIRIKLHRQPKGMIKSATISRHASGKYYISLLCKEEINELPKTNSAIGIDLGITDFAILSDGQKIDNNRFTSKMEKKLKREQRKLSKRALLAKNKGIPLSEAKNYQKQKRKVARLHEKVMNQRTDFLNKLSTEIIKNHDIICIEDLNVKGMLRNHKLARSISDVSWSSFVAKLQYKADWYGREIIKVNQWFPSSQICSECGHKDGKKPLDIREWTCPICHTHHDRDINASINILIEGLRIKTLA

SEQ ID NO: 4380 - protein, 343 aa, unknown
  TnpB Polypeptide
MVAMKQVLTIVVKLQPTPEQAAKIEATLQAFAAACNYVNEHTDPKLTNKIAIQSLTYQTIKSEFNLVANMAVRACARVAANRKVAKHKGKPVKWFAPTSIDCDKDLFRFREHDWTVSLATTHGRERVKLKVGNYQRGKLKGRNPTSAHISKHRDRQFYLHIQIKDDAPYSPITDKVIGIDLGRRDIAVTSEEKKWDGKHIQSVRDKFSQVRASLQKKAPKGTRTTRRRCREVLKRLSGRERRYQQWLNHNISKSVVKRAVELSASIAIEDLTGIRERTNKQPRNKTERRRSNSWAFYQLRLFIEYKSLGAGVQVIPVSPAYTSQMCHNCLHIHPVKGIPTLLM

SEQ ID NO: 4381 - protein, 387 aa, unknown
  TnpB Polypeptide
MADDNVAYRAIKYRVYPTDAQCEKLSQTFGCVRKVYNDALSLQNGLYEADMPAFGKIELNAYCNRVWKKEFPFLTEVDKFALTNSLYALCTARKNFFEKRAGYPRYKSRRGEEQTYTTNYTNGNIEVVSKGKRGYVKLPKVGKVPASIHRIPKKNWVLKSATVSQQVNGKYYISVLYRLPDTFVEPAPLPTEDSTLGLDYSSPKFFIDSNGNEAGVMHWFRKSEERLAKEQRKLSHCKRGSNRYFKQKARVSEISRSVANQRLDFCHKLSRKIANSYDAVCVEDLDLRAMAQTLRFGKAVSDNGFGMFRTFLQYKLAEQGKYYIIVDKWYPSTKTCRQCGHKNPDVQLGQTGWVCPHCGAVIDRDINAAINIRTEGLRIFYAERIPA

SEQ ID NO: 4382 - protein, 360 aa, Helicobacter sp.
MLIAYKQKLYNSSKNKHIGKLLRLYGICYNHCIALHKRYYKLYKKHLSFYTLKRHITKLKKTTRFAFLKTLGSQTLQELVERINKAYKKFFKKQGRPPRFKKIHSYKSFTFSQCGYKIQDNIISFNGYAFKFVKTYDLVGKPKTLTIKRDNLGDYFLCLVCEVQDNPKPAGGNSVGLDFGLKTFLTCSNGTQIPSPLFFSKFLPMMRACSRSLSKKKRGSHNRLKARLRLARLHRKIKNLRTDFFYKLANSLSKQYATIFIEDLNLKGMVKLWGRKINDLAFGEFVAILERKTQVIKIDRFYPSSKTCSSCGNIKEDLSLKDRVFHCHSCGFSLDRDLNASVNIHRVGASTLGVEAVRPA

SEQ ID NO: 4383 - protein, 362 aa, unknown
  TnpB Polypeptide
LQITVKIKLQPTKEQADHLKTITAEYICLVNQIVVNYVEADMNLKYSSKDVNANLPSAVKNQAIQDAKSVFARYKKAVHTNGKLKPEDQKQIKVPVLKKPVAIWNNQNYSLKGNILSFPVIVDGKSKRIKVQAILTGYQRERLTGKLGSLRITQKSGKYIAQIAAEVSEQQVEADKIMGVDLGLKIPAVAVVEDGKTRFFGNGRQNKYVKRKHRSVRRKLGKLKKLKAIQKRHDKEQRWMKDQDHKISRQIINFAKENDVSTIHLEALSGIRQTARTSRKNEKNLHTWSFYRLAQYIEYKAYLQGIKVLYVDPKHTSQKCPKCGEFNKAKDRKYKCGCGYKAHRDRVGAMNIVSATVADGVA

SEQ ID NO: 4384 - protein, 398 aa, unknown
  TnpB Polypeptide
MKVHRCEQHNVKKTHELYKIIDQYCFYSKNVYNEANYIMRQEYIVNHKILSAFDIQKKMQSMDCYKECGSQAAQKTIQMLCNNWKSFIKANKDYTKYPDKYLGKPKIPKYLDKNGRYVFTLKNIQCSINDGIFRISFKPFKQYTVKTRAAGKLIQCRFIPKGSHYTMEIVYEIDVPECLPYSNRIAAIDVGVDNFITMVNNMGENPIAVKGGVIKSINQYYNKQKAKIQSELKKKNGMNWSKRLQKLSDKRFEKIKYQMHCISRYVVDYCVLYDVDTLIVGHNDQWKQETKGMQNFTYIPYDMFLKMLQYKCENNGIRFMLVDERYTSGTSFLDEEEPVKENYNKKRRVHRGLFRSNKGKYINADVNGAYQILKKVVPNAFADGIEGAGSHPTTIKIA

SEQ ID NO: 4385 - protein, 365 aa, unknown
  TnpB Polypeptide
MANKAYKFRIYPTLEQRIIFAKTFGCVRFIYNQMLSDKIKHYEKTRQKLNNTPAQYKKEYEWLKEVDSLALANAQMNLQTAYNNFFRNPKAGFPKFKSKKTNHKSYTTNGINGNISIENGCIKLPKVGLVKWKRHRFIPTDYKLKSVTVSQTPSGKYYASILFEYENQVQEQIPQTFIGLDFSMHELYKDSNGNEPQYPRYYRQAEKKLKREQRKLSLMQKDSKNRNKQRVKVAKMHEKVSNQRKDFLHKQSRQITNAYDCVCIEDLDMKAMSQCLNFGKSVSDNGWGMFTTFLQYKLADMGKKLVKVDRFFASSQTCNVCGCKNTATKNLSIRAWDCPECGAHHDRDVNAAINIRNEGMRIVFT

SEQ ID NO: 4386 - protein, 392 aa, unknown
  TnpB Polypeptide
MKIQLGMKFRIYPNQTEKARLSVQFGHARFVYNSTLAARKEHFELTGKGLSKAACDKRITTLKKDENFIWLKDADSQVLQQKSADVDTAYKNFFRHTAGYPSFKHKSNKQTIRYPQRVKFIGNTTYLPKVGYIRTKFHRPLRGSQKSVPVSKTTTNKYFISVLCEYEIDQPVHSGPSVGIDLGLKDFLITSEGAKTKHPKLLKKKEAQLKKSQKALSRKKKGSNNRTKAKLRLAIQHEKLTNARKDFLHKESAKLTTDFGFIGTESLRVCNMVKNHCLAKAISDSGWGEFVRQLEYKSAWTGGYVVKVGTFFPSSKTCNICKHINSNLQLSDRTWTCSNCASVLDRDVNAAINILEEATAGAAGLKACGEDVRLNSFLGAKLTSVKQEAQGL

SEQ ID NO: 4387 - protein, 402 aa, unknown
  TnpB Polypeptide
MKKAYKYRIYPTKEQQEYFAKTFGCCRFVWNKMLAKKLSAYEKREPIPRITPAKYKKEFLFLKEVDSLALANVQLQLEKAFKNHLKNPKHFRLPKFKRKKDKQSYTTNNVNDSIKVDFEKGLLYLPKIKNGIKIELHRTFEGKIKSTTVSKTKDGKFYISILVETEEPRNKVIEPKNKACGIDLGLEHFATITNDFGIYKVEHPKYLRWAEKRLKKLQKDLSKKQRGSKNYEKVRIKLAKLHAYISNARNDFLHKLSKAIIDENQVVVVEDINVKGLMQSNLAKSISDSSWSKFLTYLRYKTEWYGRTLIQVDKFFPSSKLCHCCGYKRENLALHERIWSCPVCRTVHDRDINASINLYLVGLERPEVKPVEHALVDDRIPYGIPKKPSCVEAGSSIFCKVE

SEQ ID NO: 4388 - protein, 434 aa, unknown
  TnpB Polypeptide
MLEAVKVALDPTPRQERLLESHAGAARFAYNAGLAHVKDMLERQEKPEWSYYALRRWWNANKDALAVSMETGKPWWPENSKESYNSGLESLADALKNFSKSRKGQRKGRRMGFPRFKSKDKAVPGFAYTTGSFGLIDCDPYALRLPKIGRVHCMENVSKRVDGAKVLRMSVSRHAGRWMASLTVERKDGPMPTPLKGGSVGIDLGVKQLATLSDGTIIRNPRALDSNLRRLRREQKNLSRKRKGSNRRREARTRVARLHARVADLRRDLLDKTTTMLARTYADISIEGLNVAGMVRNHRLARSVEDAAFAEFRRQLEYKTARTGARLHVIDRWYPSSKTCSNCGTVKAKLSLSERVYHCEECGLVIDRDLNAAINIQVAGSAPETLNARGGSGRRADASRRATRHPVKREPSGGVSRVRLGAGLGNEAMQMTSL

SEQ ID NO: 4389 - protein, 390 aa, Streptomyces sp.
MWNLVHDWWTMLPKDKRNLAAADQAIRQGRKDLPWLGALPAQAAQQVLKTYFRAWVNCWEGRAEAPTFKSRFRSRMAVDIPQGRDLQIVRLGRRWGRMWAPKIGHVLFRWTKDLSVGKRADKLNKVTGARLVREADGWYVVFRVQTEVPEPELHAGPTVGIDRGIAKPLALSDGSFREHGPWLTPGEAERLRRLEKAKEHKRRTRKKGEEISNRLARTYDQIAQLRATAKRRAVDWQHKTTTELAETFSRIGVEDLTITNMVKSARGTVENPGAQVRQKVGLNRAIAQEAWGRTVTLLEYKTAERGGQVVKVPAPNTSRRCSACGFITPGSRETQARFVCKADGCGYEANADTNASRNIDHAAGSTVSGRGDFGVARSAKRQPLTTPHAA

SEQ ID NO: 4390 - protein, 265 aa, unknown
  TnpB Polypeptide
LKLWNGKKWIWTECGLTGRSFPANSALLSPTLVHEGKWLMLHVPVKQENSDARTAKERMKEGCRVCGVRFTNTDSFAVCSVLDERSRPVSVKNCHGGNAYRYHCKTLLKKIEASKVFTDKDNVDQPNKKYYMRYKHLNEHYAHQVSREILDFCKENQAGIIVLPEYDEDFSRMTMYRSGNDSPLHLSTKIRNYLKYKAWAEGILVLELRADGTEKYCSICGSPGKKQSKLFICQNGHQINRFLNGSRNLACKCQQSFQKRSGSKS

SEQ ID NO: 4391 - protein, 431 aa, Oscillatoriales sp.
MYAVQKDVWHLKGFHKIIVEQLLRWSNNLFNVGTYESRQRYFKDQGAIKYPDLYKIAKTNENYGLLYSQVAQQSLKSVAESFSSFRALEKLAKKGELNQKPRLPKYRTPGGMYQISYPGQALKIVGNQVRLPLGNKGKEHFGTDALWIPLPERLKDCQIKELRLIPRNGQVWVEYVHKSLTEQAPSCSLEVTGVLGIDHGINNWLTCVSSNGKSFIIDGHKLKSWNQGFNKEKARVQSEHARHKLPKGFSSTRLQQLSDTRTRRMRDAVNKAVRAIVDYCENSQINVMVFGWNKGQKQEVNMGGVTNQNFVQIPTAKVKDRLQQECDLRGWRFFEQDESYTSKASFLDQDLLPVKVGEKPDNWQPSGQRIKRGLYRSSTGLLINADVNGAANIIRKSKVATDSIIERLGRGLLTNPLRIKLWVDSSPKVCP

SEQ ID NO: 4392 - protein, 420 aa, Nostoc sp.
MLNMTWEFKLKPTPKQIDIIEGIFDVCRKVWNFALRERKDWLNSRKSPVNACSIVQEYILGADEPYPSYHTQAKRLTLAKEQFPLLKQVHSQVLQQVLRTLDRAFEDMRAKKLGFPRFKNKYRMRSIVFPQLGKNPIQGSLLKLPQLGWIGLRLSRPIPEGFEIKQARIVRRASGYFVMLALQLDVSLPDTPISGHPRGLDLGFDKFVATSDNEQINRPRFLQTLQRELQLLQRRLKHKKKGSNNRHKLNRKIARIHQRITDTRKDWHFKLANRLCDGAGMIFVEDIDFRCWARGMFSKHSADAGFGQFVHILQWVCFKRGVFFAKVDKNYTSQQCPECGTHTGKKELSQRIHCCPVCFYTTSRDVAAAQVVRNRGLELVSSSAAGLVVEVKQNVCRPDAAGTSSNVSLAGTGRSRKLNK

SEQ ID NO: 4393 - protein, 437 aa, unknown
  TnpB Polypeptide
MIILEFKAKGNKHQYFAIDEAIRTVKFIRNSCLRYWMDNKGVNKFDLNKYSAVLANNFPFANELNSTARQSSAERAWSSIIRFFDNCKKKVPGKKGFPKFQKNCRSVEYKQSGWKLSPDKKSITFSDKKGIGKLKIKGTWDLWRFDKKQIKRVRIVRRADGYYVQFCISVDIKEELEPTGTAVGLDVGLKEFYTDSTGNTEPNPRFYRTGEKRLKFYQRRVSRKKKGSSNRKKAINRLGRHHLKISRQREEHAKRMVRSYRKIVEPYYKRFNPFMQSRTPIKAPLSKVSSPARCVVRSRSVGFAESNDLVAYEDLRVKNLAKNHCLAKSINDAGWYQFRKWMEHFGTKFGKVTVAVNPAYTSQNCSNCGEVVKKSLSTRTHTCKCGCELDRDHNAAINILKRALSTVGHTGTWVVKNLNASGDPTSTLPGSGQLYAS

SEQ ID NO: 4394 - protein, 455 aa, unknown
  TnpB Polypeptide
MLMGIKLQAHPTEDQKRILSQWMGCARFIWNAKCQEDKYLTTFARKYLPVNTYAPIDQAFSRYKDKELSPWLFHCPSQILRNSTVNWYQTYRRFTKGLCGKPHIKKKCNGGSIHLTKELFRFEVCGDGITRLFIGSKTNNIGYLSIKNHKKFKQPQSIYVKKKNGRYTVSLAFDDEKDIKDLIDQESYLNLLSQYPRQYLEKITMAIDRGVVRPVQAGEDVFDFTPGQKKNKHGKEKYLKRLARRLSKQKKGSNRRNNTKKKICRAHEKIANIRRDFCHQTSRSLVNKEEIKVYVFEDLKTKNMSASAKGNVAKPGKNVKAKAGLNRAILDKGWHMLEAFTKYKAYRAGKVMFKVPAHYSSQECADCGHTHPDNRKSQSKFLCQCGNADNADNNAQKVLKKRAINLIMDSGTELSKRGVLLLNKGRGANGKPHKVKAICAHGWETSKNMKSAYTA

SEQ ID NO: 4395 - protein, 493 aa, Filamentous sp.
MATITYCKGLPTPADELNELGFTDFEMFLEAYAPIFRAASIETVNYLLLNTDFKKSDWNTHLQQTYGINKRHANGVISAAKGRVDGAKEHRILHVKTLEGKIKSIGAWIKKAERKLILARKFYIKKKWQDSKTGCNFPIACSLQHKSTNWQNLRFQIHHKKRRVTLLVNKLEHLRVKPFKVFVPHGDIFVVGSKDESFGNQVSQWNGSRITFRVPKCLESRFGKTVSSEIGDFSRNIDRLPECGGKTWHFYRKNGKWVIAVQFTPKPVNQASRNRMYGCIGIDMNPGAIGWAYTDTEGNLKAKGQIPLQMGLPNGKQQAQIVEACLQLAAKAAEFECPVVCEELDFSAKKQSLGEKGRKYARMLSGWAYSEFYKQLCSILSNRGIELIVVNPAYSSIIGLVKYLRMYGLASDESAALVIARRAMKLGEKIPRSLTAYSGVNPEKHVGREWNQLNRKIERSAVISRRCDYYSVSNWSFLVNLDTEEAQALRKNV

SEQ ID NO: 4396 - protein, 385 aa, Nitrosococcus sp.
MVTQRAYKFRFYPTPTQKRQLTIEFGHTRFVWNWALETRTKAYKEHGESLNNLNLSRQLTELKKTECSWLSEATAGCHIQKLRDQDTAFKHFFAGRTKYPRFKTRHQAQSVRYQLDQRHVEKNFNAKSQRLKLPKLGALKLKWSRRIGGIPKMVTVSKDPAGRYFASMACEVEIAALPTRKNAVGVDVGIKEVVITSEGYKSGAPKYTYHSARQLRMAQRRLSKKKKGSNRRRKQQQRVARIHARIADSRRDFLHQQSSKLINENPVICLEDLNIKGMLRNSRLSKAVADCGLYELRRQMEYKAQWYGREVLIVDRWAPTSKACSECGTIHESMPLKVREWVCPDCTTRHDRDINAAINVLNFGTAGSAGTDKARGAVKTPRAVA

SEQ ID NO: 4397 - protein, 395 aa, Nitrosococcus sp.
VTIHLQYHRIMVAQWAYKFRFYPTPTQKRQLAIEFGHARFVWNWALETRTKAYQEHSKSLNYSGLSRKLTALKQTECPWLGEATASCPTQKLRDQDTAFKHFFAGRAKYPRFKKRHQTQSVRYQLDQRHVEKNFNAESQRLKLPKLGALKLKWSRRMTGIPKMVTVSKDPAGRYFVSLVCEIEILPLPTRKNVIGVDVGVKDVVITSEGYKSGAPKYTYQYARQLKQAQRRLSKKRKGSYRRRRQQQRVARIHARIADSRRDFLHQQSSKLINENPVICLEDLNIKGMLRNRHLSKAVADCGLFELRRQMEYKAAWYGREVLIVDRWAPTSKACSECGTIHESMPLKVREWVCPDCTTRHDRDINAAINVLRLGTVGSAGTDKARGAVKTPRAVA

SEQ ID NO: 4398 - protein, 320 aa, Nitrosococcus sp.
MVTQRAYKFRFYPTPTQKRQLTIEFGHTRFVWNWALETRTKAYKEHGESLNNLNLSRQLTELKKTECSWLSEATAGCHIQKLRDQDTAFKHFFAGRTKYPRFKTRHQAQSVRYQLDQRHVEKNFNAKSQRLKLPKLGALKLKWSRRIGGIPKMVTVSKDPAGRYFASMACEVEIAALPTRKNAVGVDVGIKEVVITSEGYKSGAPKYTYHSARQLRMAQRRLSKKKKGSNRRRKQQQRVARIHARIADSRRDFLHQQSSKLINENPVICLEDLNIKGMLRNSRLSKAVADCGLYELRRQMEYKAQWYGREVLIVRRGGAI

SEQ ID NO: 4399 - protein, 289 aa, Nitrosococcus sp.
MKLKANIKTLKVRVKDKHKPVLERMAFEVNQVWNAANEITADYSYVPVPGAGYIRNNFTAYELQKLLKSIKLERGFIIHSTSVQEVIAAHHKARKQFKTDKLRWRVSGGPRRSLGWIPFKKGAAKWKKGQVYFAGHCFKVGDSYGLSQYVFRSGSFSQDARGRWYFNIVVEGAIEPSTATGQVGIDLGLKDTATGSNGLKLEAYRFYRNGEAQLAKAQRANKKKRVKAIHAQIKNRRLDALHKFTTLGVRENAFIVVGHVSSSRLAKTKAAMNILAAGHRRLAEGIPLL

SEQ ID NO: 4400 - protein, 415 aa, Nitrosococcus sp.
MKAYKLRFYPTLAQRRQLGKEFNACRYVWNWALDRRTKAYKENGESLYAVALSRELTLLKASQPFLKAASATALTYILKSQDEAFQKFFKKQARYPKFKKRGAMRSCTFQIDKRRGDKVFLPGEFLRLPKLGPVRVAWSYRDILVMPNSATVSKNAAGQWFISLQCDCIDVINPPATDKTIGLDLGVSTLVAMSDGRKEKPKRFLKQSLRRLAHAQRDLSRAKKGSCNRRKQKSRVARLHQRIANKRANFLHGLSTEIVRENQAIAIEDLNVRGVMANGKLARSVGDCGWHELRRQLTYKAKWYGRPLTIVPRFQRTTGVCPDCGVIGEKLPLSVRSWTCEHCGSEHDRDIAAARVIDQVGNTLGSRGTEACGWAHQPDDSGTTRDNMGLDEAGKAQRVRPQGRGHVAISHDHER

SEQ ID NO: 4401 - protein, 485 aa, Methylocaldum sp.
MQIGHRFRCYPSPAQEQILLRWLGCQRFIYNAKVGEDRYFRAFARKALALTGTQPPVDQAYSQFIGPDTAWLRDVPSQVLRNGAARFAQAYQRFFKGLAGRPRIHRRHGPQSLWLTSELFAFEPIVSTQTGEILGHRLLVGTRKAPVGPIVFTAHKDYGLPASIRLVLDGGRWYLTFSAEDGAPEPDENDTLSRLRQLSEEELLPATFGGDRGVGIPLAGNHGQRFDFSLVQRARIAKKEARARRWQRRLVRRRKGSRNREKAKRQVAAAKRYTRNVRQDFAHQASHQLVADGRYVLYVFEDLKIRNLTAAPKAKPDGAGGWLKNGARAKAGLNKAILASAWGRIATFTHYKARRAGKLCLRVPPHHSSQECASCGHIHPENRISQSEFVCQRCGHTDHADHNAGQVIARRGVRLLLSGEYQPPRRTRCALRRQTERKLGPERSEVTPGESPVSRPAGNGRTQRTRNQEAKAARPETPATTAPAV

SEQ ID NO: 4402 - protein, 491 aa, Microcoleus sp.
MPSLTYVKGLPTPESELNALGFSQMEMFLTAFAPIFRLAAIETVHQLLTCTEFNKSKWNSHIQVTYSINKRHANGVIAYAKGKVDGAKEHRSLHIKTLTGKAKSIEIWLKKAEKKLKAANKFYSKKNWPGSRVGGNFPLSCSLKYKETNWQNLRFQIHHKKRKLFLFQNKLTTLKALPIKVFVPRDQVFLVGSQDETLGNGIAQWNGSTLKIRTPRCLEGSFGKGVSAEIGNFDRNINRLPQDGAKTWHLFKKDNKWKVAVSFTPSPVKSQSLDRAYGCIGIDLNPGSIGWAYVDTDGNLKASCQIPLQMGLQKGAQQAQIVDSCLQLATLALMYQCPIVCEELDFSDKKQRLGETSHKYARMLSCWAYNEFYKQLSAILANRGIELITVNPAFTSIIGLFKYLKMYGLASDEAAALVIARRGMRLGEKLPDSITAYVEVNSNKHVWGQWAQLNRKTKQSGMVNRRHDYYTVSNWSFLVNPKEVCGEVFAH

SEQ ID NO: 4403 - protein, 448 aa, Mycobacterium sp.
MGHRRSPGMWRSAWILRRTGRWWSRFRCCSSFMTATPTVMPRPGGRVPNCRRAGWSRRRMMMAYPQRAGLVRSHFGARRKAFNWGLAQVKADLDAKAADPAHESVDWDLKSLRWAWNRAKDDVAPWWAENSKECYSSGLADLAQGLANWKAGKNGTRKGRRVGFPRFKSGRRDPGRVRFTTGTMRIEDDRRTITVPVIGPLRAKENTRRVQRHLVSGRAQILNMTLSQRWGRLFVAVCYALRTPTTRSPLTQPTVRAGMDLGVRTLATVATLDTATGEQTIIEYPNPAPLKATLVARRRAGRELSRRTPRFRQGMKAKLARLDRRCVHLRREAAHQLTTELAGPCARDRRPRRGRDETQHAPAGVSPIGLRCRNGFGRAAAGLQNGQVQRRADGGGPLVCLQPNPPRLHQPRRHTVPAARQGPHRQTPALPCNGRGSRPRQKRCFESP

SEQ ID NO: 4404 - protein, 412 aa, Candidate division WPS-2 bacterium
VASRFDGQLRWLHKVRLYPTCAQERALVAMLRATRELYNALLMQRRDAWTTRRVSVPSRDQYAQLTELREAEPRFACVYRECEDAVLHRLDLGFAAFFRRLKRGETPGYPRFKRAARWNQLEFSHGNRALKFDTLQGRVRIPGAGAVRLRKGRTVPEFGRAFLVTKNGRWYAVFEAHRAPSPLPTTGCRVGIDRGIRVLAALSDGTTIENLRSGSRRRAVVERHQRSLDTATRKDAAGHVLNRRDPVRVAASRRLSRAKEREANARRDWLHKASGEIVGRYDRIALEALNLRGMARSTRGTTEKPGTNVAQKAGLNRSILDAGFGMLASLIREKAAYAARMVIEVNARYTSQTCAACGRVCKESRKGPRFVCVRCGHAADADVNAAQVILLRAESPPKRAPGTARGRQHGAA

SEQ ID NO: 4405 - protein, 342 aa, Bacillus sp.
  misc_feature (248)..(330): Xaa can be any naturally occurring amino acid
MGVKRMMINKAYKFRIYPNQAQATLINKTIGCSRFVFNHFLSLWDNAYKETGKGLTYGTCSAKLPAMKKEFVWLKEVDSIAIQSSVRNLADAYTRFFKKQNSAPCFKSKKNNVQSYTTKQTNENIAVVGNKIKLPKLGLVRFAKSREVKGRILNATVRRNPSGRYFVSLLVETEVQELPKTHSYIGMDVGLKDFAILSDGTTYKNPKFFRSLEGKLAKAQRILSRRMKGSSRWNKQRVKVARIHEYMXXXXXXXXXXXXXXXXXXXXXXXXXXXXXXXXXXXXXXXXXXXXXXXXXXXXXXXXXXXXXXXXXXXXXXXXXXXXXXXXXXXHTMIGILTQVSI

SEQ ID NO: 4406 - protein, 322 aa, Bacillus sp.
  misc_feature (248)..(316): Xaa can be any naturally occurring amino acid
MGVKRMMINKAYKFRIYPNQAQATLITKTIGCSRFVFNHFLSLWDNAYKETGKGLAYGTCSAKLPAMKKEFVWLKEVDSIAIQSSVRNLADAYTRFFKKQNSAPRFKSKKNNVQSYTTKQTNENIAVIGNKIKLPKLGLVRFAKSREVNGRILNATVRRNPSGRYFVSLLVETEVQELPKTHSYIGMDVGLKDFAILSDGTTYKNPKFFRSLEEKLAKAQHVLSRRMKGSSRWNKQRVKVARIHEYMXXXXXXXXXXXXXXXXXXXXXXXXXXXXXXXXXXXXXXXXXXXXXXXXXXXXXXXXXXXXXXXXXXXXXGDSLIN

SEQ ID NO: 4407 - protein, 853 aa, Limnoraphis sp.
VSRGYYVQFLISAENQVETQRHLLQLWEPEQRSGSPTGKTIGLDVGLKEFYTDSNGHSEPNPKFYRTGEKRLKLYQRRVSRKNIGSANRKKAINKLGRVHLKISRQRQEHAKTLARCVIQSNDLVAYEDLRIKNLVKNPCLAKSINDAGWYQFRKWLEYFGVKFGRITVAVNPAYTSQECSNCGAIVKKSLSTRTHVCECGFVLDRDWNAAINILKIALSTVGHTGTWILDPKASGDSTSTHVGAILSEQVGSANEESPRLKGWGVSIKHLTRTITVLYLAEVQKQRSFGLGGGRAELKLLACQRGENNWTAVTGDEVIPAEDANNFKDGALVLVDLNSSKHVQRIQDAARQLVSILQDFSRLQEKFKTQQEEIEQWKESLTYQSQELNRREMEMEAQREQLEQLEEEFERLEQQRQEIESARQQGERLRSELDQSQAEIEQTRQQLQQQIRQLEDQQAGLKSAPALSQEQSQQLQSLLAQLSTPVALDALQRQLEQATDRLEAGQSTLQHHWQQLQEKQTSAEQLQDQVDATRQSLQTQWQNWYESQDDLTQLKSNLQGEYTQLTAKQELAETWQTQLQNRQTLLSQLEKLAAQFDETQSVGVVINVSALEAMPIEKLKEEVDKLQQEWDRWFRMVKEQEDELKYKREDIEQLQQQLVQARDGERSRLESELTDENDAYDMLNRTIGGQRRTLREREAILIQHQAVLLKRQGLPANVNPDGLVNFERVLSSLNAQHQDQQQKLEVLEAEISQIQTAIQQLEETVNRQTDEQQQKRQQLEAEEHSWREQYQAVSQLWGTVSLYQQMLQPLQNNWNELKQKVETTTTELNQLEHTRQQQSQKIEQLQQIVSHLT

SEQ ID NO: 4408 - protein, 401 aa, Clostridium sp.
VIKKNKGYRFRLKPNKEQMIYLEKAFGCSRKMYNLYVDMLYKQLHEKNFINGKIDYKAIDLPTPAIIKKDYEYMKEIDSLAFANVQLNFRDAIKKYNSEFDGKTYSKKALKQVETLGKELTFKDLKGIPNFKSKRKNQDSFTTNNQNGTVSIVDEKYVKIPKLKEPIRFVNHRQLPKNSIIKSVTLSKNCRNQYYISFIVEYYTPEKQTPSKIILGLDYSQHDFYVDSQGRKANYPKYYKKTEEKLKKEQQKLSRKVLKSNNWIKQKRKISKIQNKISEQRKDWLHKKSYNLAKAYDAIIVEDINLRAVGQCLKLGKSLADNGFGTFRNFLKYKLEDKGKQLIKIDKWFPSSKMCSNCGAMKEKLQLSDRIYKCENCGCIIDRDYNAALNIKEAGSALLAW

SEQ ID NO: 4409 - protein, 396 aa, unknown
  TnpB Polypeptide
MSRYRLLPTPAQEAVLRGHCGHARYVWNLAVEQHAHWRPGRAGAPGYLEQCRQLTAARAEHVWLAAGSQMVQQQALRDFARAMAAFFDPGNPVRRPTWRKAGRDEGFRIVGRRGRQWDVRRVSRNVGEVRVAKAGWVRFRWSRAVPEGVKSFRVTMDRAGRWHVAFAAIPEPVPAPGNAKVVGIDRGVTVSAALSTGELLHASGLTGCERRRLRCLERKLARAKRGSNRRGRVKLAIARLKARETDRRKDWAEKASTGIARRFDVIRVEDLRIEPMTRSARGTRDRPGRNVRAKTGLNRSILRSGWGLLVRRLEDKAPGRIEKINPAFTSQRCSACGHVDANSRESQARFACTACGFACNADVNASRNIAAGHAVTARGGFRDAGPVNREPQLLAS

SEQ ID NO: 4410 - protein, 424 aa, unknown
  TnpB Polypeptide
MLLTFKTDITKTNDIQKNIINELKWHIEKVYNSLLYEIRENNRYIDLNKSLNILSSGIYKEYRCNNWHSKYLHSHMLQQVVLNVIQNYKSYIGLKEIYEKDNSSLKGKPRMPKYKHEKDTKEIVFTKYAIRINNNEIKLSIPKEMQNKFQVKSLNFLISNKLKRLVDLSKIKVIKIICVSGKITMNIIYERDEQELTNDNTNICAIDLGLNNIVSMTNKENTNTLLVSGKEAKSKNKYILDKIKHLQQINMKMLKNSKKHKNTKQIRKLYEYRNNYMKTFVHKVSKIVVDYAIENKCNKIILGDLKGIKEKMDYNKEFVQLPLQQLVQKIEYKAKLKGIEVAKISERYTSGVSALDNEQIIRENYNIKRRIYRGLFITNTGKKINADINGSLNILRKYITNYIPNLEIAMDNGREQRPIKKRVA

SEQ ID NO: 4411 - protein, 560 aa, Streptomyces sp.
VGEVREVAAPFVMPGPSGGAVRDRLRHLSAGDEEVLRLVGDLLGTLAARDLRVRCAAGLEHDGERWAERKRTLTQDSSSRWAGAITKATHDQWALARRGQLAHIQSLQAGVRTIAHRLSLPVGEKGSKHAPGGYRTRQEWFAKSRRLHLLSDRLRAARADREVGVVHVVRGGKRLLNTRHHLKAAQLTEPQWRQRWQAERRFLQADGESGKRFGNETIRVTPGGEVSIKLPAPLAHLANAPHGRYVLAATVRFAHRGEQWRDRVTAHRAVAYRIHEDTVRGRWYLTASWTIPPVKSVPLDAARANGLIGVDTNADHLAAWRLDEHGNPVGEPLRFGYDLTGTAGHRDAQVRHALIRLLHWAKRNDLSIAVEDLDFAADKTREKHGRRKRFRKLISGMPVSKLRARLVGMAAELGITVVAVDPAYTSKWGAQHWQKPLTGKNRKPTRHDAAAVAIGRRALGHPIRMGAPPRPLRHWGRTAPPPHDQSDRAGHRTVQAGTGTPGREGNRPRIPGPRTRSVRAGRGANAVDQNAQHRSERSAEHESWQQESLRSVTRNGSLFL

SEQ ID NO: 4412 - protein, 407 aa, Streptomyces sp.
MQLRYAFRLYPEPGQRLALARAFGCARVVYNDAVRAREDARRAGEPFPTAGVLSQKLITQAKQTPGRSWLGEVSAVVLQQSLRDVEAAYRNFFSSRKGTRNGPKLGAPRFKSRKDARQSIRFTANARWSLTPQGRLNLPKIGEVRVTWSRTLPAVPSSVTVIKDAAGRYFASFVIDSDPATDLERMPDNDASVGIDLGLTHFAVLSDGTKIDSPRFLRRAEKKLKKAQRELSRKQKGSKNRNKARLKVARAHAQVADARREFHHQLSTKLIRENQAVAVEDLAVKGLARTRLAKSIHDAGWSKFVNMLAYKAARYGRAFIKIGRFEPTSRVCSTCGANSGPKTLDVREWTCTACGSVHDRDHNAAINVKHAAGLAVSACGAPVGPEPVLAQRDEAGSHGSPPDARAA

SEQ ID NO: 4413 - protein, 162 aa, Bacillus sp.
MKLPKLGLVRFAKSREVKGRIVTATVRRNPSGRYFVSLLVETEVQELPKTHSYIGIDVGLKDFAILSDGRPYKNPKFFRSLEAKLAKAQRVLSRRMKGSSRWNKQRVKVARIHEYISNARKDYLDKISTEIIKNHDVIAIEDLQVSNMLKNHKLAKAISEVS

SEQ ID NO: 4414 - protein, 403 aa, unknown
  TnpB Polypeptide
MQRAILLQTTATKTKQNALKEFSREAIELANDLLKQRKSKRLMDLHRATYSASKKNTSFGSQVICDIERNVARSKATAIRQITVKFNIPRNCKVFETKANFFVEFRMYPKKRLAVPIKRNRCFQRYCSLVGSGWLCKTYGLVGNGQVVAYLSKEETELPQRKNVLGIDINSKCFAVSVLSPNGKVLKQTYFGKDLWIKRKKIFERKERLQSLADKRSHKAKQSLEKLKIREHNFVKNRLGEIVREITSMALQFDAGIAIENLKRFSPKGKRFNKEVMRIPFYSFKQLLEARCFDKQIALNVVDAYHTSKWCSHCGALANGHSSNYALFKCKCGQVVNSDRKASLAVTVKSLLVRKKHCSDQTVFFQFTSRRVPVNALLRSNDGFETNDAVHNISTPTESHLTC

SEQ ID NO: 4415 - protein, 399 aa, Dictyobacter sp.
MQLVEQTVIGKNDPRYQTIDAAAFASKNLYNAALYEVRQSFIRTGIYFSYNEMDRRMKTHEAYKALPAKVAQQVLRGLDKNWKSFFAATKEWSLHPDKFQKRPGLPRYKDKANGRNVLVYTDQAISKKALRKRRMIVPSGLPIEVPTQQTTIDQVRIVPRIGYYVLETVYEQESIQADVHPDLIAGIDIGLNNLATLTANKDGFVPRIVNGRPIKSINQWYNKERARIQSQLAGNRYTTNRLERLTNKRTRKIDHYLHTSARRIIDLLVAEGIGTLIIGKNDQWKQQANMGRRTNQNFVSIPHARFIAMLTYKAQLVGITVQVTEESYTSKCSFLDNEPVKKHDIYLGKRVKRGLFRAADGRVINADVNGASNIIRKVAPAAFGQGSRGPVVGPVRLAV

SEQ ID NO: 4416 - protein, 543 aa, Verrucomicrobia sp.
MKKKKKKLSDFEDKPQLPLNQDLQYIYNYNNFIKKFTYISFNYRYKNDIEYLSAKKFISFFIDKNCIPFWNDNVAKMSAEIFLPHDENIEENKFLNFKFNKNKWFQSQFYNSKSETNKNISYKSNIYENNKNITKTRKIQFYPNKIQKSILKELFGIYRYYYNRTIQFMNNYNSKNKTSSYLVYINDNKSKKEFIDLPQNIYNMYKLRNYIKINEPKWINKIKLPSHEIDKAIKEAVDNIKTNFKKREKTGKNFIMKFKTKKDIYHTINIEKQTISKSNTIFSGIKIDNNYIFKKGIRLKEDVSKYNYGDSNISRDVKSNKYFLNLSYNEENIGRDINKYETCGIDPGIKNFITIYDESSVANIGIRCENKINKICKEIDIIRSHINKKKFINKNKELKMNANRRRNLRKAIRRKELYLKNVIDELHKQIIKYLTERYSRIIISPFESQKLDKILSRKQTRILKCLSHYKFKERLIIKAKEKNVKIDIREEYYTSITCTKCGNINYDLGNNDIYKCTDVRCKISLGRDYNGARNILLRNINNI

SEQ ID NO: 4417 - protein, 966 aa, unknown
  TnpB Polypeptide
LGREPGRPGADRGRPAAAGRRPGGRAGGRPPAGPQPRRRPGPPARRGPGHGVALRPGHARHPGQPRRLAGPRPRRPRPRRHRLRDRPAVAAAAGRRRDRAPAPGRPGRAPSGPGRRPRPRRPAPDGGRHPPELRPRPQPDPAPRPPGPPGRARRPPAAAGRPQPVVAAGPPGVPSRLAAPGPRGHLPQPPPRVGGPDGPARPHPGRRGRLPLPGHPDRQRPRLRPPGGGGGARLVLSLGPVEPGLVRLREEQVAGDLELAGHEQLHAVGGPGDQAQEVGQGDAQADPRALGPALVDLAAPVGDPHGVLVAAVGAGDLVLDDRLLAGCLLRVERPRHAGEHFLEDPVDPALLLLDVADQLLVRPRLHGALQRGEIRGVDLAHAGWPSLLGGGRQPRRPYGPKPTATDTLSTSPSGRARRSAPAGDPLRHLASLATPQSNKRDPEVSQPWRFRRKLSHLAHSIRSVMRYTTFRFALDLTPTQRQLLSRYAGASRFAYNQCLRLLADARTKHQRDPSVDVPWSGFDLINSFNAWKRSEAAGRVFVVARDGSTTKQVTGLAWRHEVSAQVFEEAAVDLGRALAAYSDGKVHKRNGGSVGFPKPKKKGRCRDSFRLRNRFRKDGHCQIRVGDSNPRSVTLPNIGIIRVHDTRRLRRMLRPPRHLDVTTGREFTEPRARIMFATIVRHADRWYVSLTVHAHDLHPQRRHPARRAGAEQGFVGVDRGLRQFVVTATADGSEISRWSAPRSLTGRLQRLRDRSRAVSRKQQGSANRIRASRQLSREYARITNQRRSFLHEVSGQLAKTHSRLVIEDLKVANLMVNRHLARAIVDAGWTDFARQLTYKAQWFGAELVVCDPWFPSTKACHACGVVRGRVGLEERIFRCGSCGLVVDRDRNAAANLAAWADRNYAPRTAKQAAGSPTPLEGLGLAAGRPMAEPVPRKGEPTFGPASEPKTSEKDGAGSPSKVIGAL

SEQ ID NO: 4418 - protein, 416 aa, unknown
  TnpB Polypeptide
VKTHCFRIFPTKEQERLLMGLSSIKNEIYNYFLEVQQKRFEEKQPLLSVYNMHKMVTSLKKSKVCSHWKKLQAKAIQRVITELDGGYKSFFRLIKKDHTARPPQKRTCVNEQFSTIIYNQSGWSFKKNYIVEINGIPIKYSATHLPGIKSMEIKELRLKKRNNKWLCDICVEESRVFLDITTNNKVLAIDLGLEKLGTGIGSDGKVVIINNKARKISKYYSKIINEIKSKQSKKEKYSRKWKHLQQRKKFFYNKKNSQVKQALHTQSKNLLSMNYDIIVVGDLNVKRLMQNPDSKLKKMSRSFGQSNVSMFLSFLKYKAEMKNKHVVKTDERQTTQLNSLTDKLFKEKVELKDREVNLSTSIRIDRDLNSALNIYRRWHQNHIAAVAPPLESFLSGVLDKNNIFIKKSIDSISTKV

SEQ ID NO: 4419 - protein, 372 aa, unknown
  TnpB Polypeptide
MIKTYKYRIYPTKKQTQILEHNLELCNQLYNHLLEERINTYKETGKSISKYDQQKKLTVFKKLFPEFQEIYSHILLDVTDRVDYAFKGFFRRVKTGKEKPGFPRFKSEDRYHSFTYWETDGWKLAENRIKLSKIGSIKCKLHKPFQGKGKSLIVKRTPSNKWFIYIPSEVPLPTPLPKTNKQIGIDVGCESFLTTSEGNKIENPRFFKHSQELLKKRKQKLLWKKKGSNRRKKVNVLVAKVHEHIDNQRRDFHFKVAKKLVTQFDMICVEDLTHWIAEWRSLRKSISDVAWFQFFSILTFKAEEAGRKVVRVDPKNTSQRCSGCGVIVPKELGDRIHNCPHCNLVLDRDHNAALNILQAGLACRNVNALPKS

SEQ ID NO: 4420 - protein, 404 aa, unknown
  TnpB Polypeptide
MRFRLYPTPGQEQKLQDHCCQARCIWNLALEQHNYYRLLLRPSPNSKEQSKQLTKLRAAHDWLAAGSATAQQQALRDLDQAFRNWWDNPRHFGRPTWRVKGRHESFRVVGAPAKRYERLSKHRARVNVPKVGWIDFRWSKSPGNPKSYRIKQDTAGRWWISFAVKPEPLKGPGDSSSIGIDRGVAHAFITSEGAFHDLPKLQLTEKKRLLRLERKLARQQKGSGRRERTKQAIAKIKHREINRGKDLIEKLTTSLAQDYDQIYLEDLKTQAMTRSAKGTVEQPGSNVRAKAALNREILASGWGLFTRRLEDKAPGRIIKINPAYTSQTCNACGITDRNSRQSQTLFRCRTCGHENNADINAALNIQAAGQAVSGRGGTVRPVVASAAAGKPDEISTTGNVLCAA

SEQ ID NO: 4421 - protein, 585 aa, unknown
  TnpB Polypeptide
VRLPDEAQADALRLLDASREVVNGALALLWPHLDDFQADRVGPAWKQVGKYMGSPQYHGDRQWRCESEVIGRVLRAQAARKQAFEQVLPILTDGFIRPKTEQRPAGKQRAAIKEALSTLQHNLEEEETSFVALQNVVEQCCNFFFAHDRFPWTYEELQPVPLLKVGMLTYAGDDGREKGQAYRLALDLDGGVARFRFRYPDEAGVWSWRKVDTIIPLPEAVCERLKEGELMAPTLREEHRADGSRMAVLDFIVEVEKADLPAWESVERVLGADWGVHTLLTATAVDERNEQVGKPFFLNTGGFDGRQARTRRQIDQLKQKVATYEHERDALPPDHSKRLWFNEKLALLRREMDRCWRKYEQRNRSMAHLASNVLLLLSRVHDCSLLSMESLKTLKSTGRGKGVRGRWRNYRNNSTIRGEIWRLLRYKCHLIGLRFHTEQPRSTSHTCPRCGHPAKTYREPSDRKAAVKWGRWMYCDDCQYHGDRDYCASVNVARLGVAYLVQMKHTGKARPCSISDPRVKPASYTGTGAVLLLPPTGNHPARNIRGKICYYPGWLGSAFLQSSQEKSVFLRLCGELNLVYNSTRF

SEQ ID NO: 4422 - protein, 337 aa, unknown
  TnpB Polypeptide
VSWLEPGPHYRLCGREKEDIPMKNYQVRRVSLGKADQLDELARECGRLYSQTLVSFWRTVRKQGIWLKPKHLMRWHTSPNLHAHTADACVQAFFAALSSWRERKKAGDPDAKPPHKRKWYFRIEYKASAMRHKDGMLILSNGQGNAPLVLVWPWETPQTVVIHWTGTQYEAIATYKQEPLYGPFPVGKVAGIDLGEIHMAVSHDGTQTFILNGRLLRSKVQYRNKLQATLNSRIDGHMKKGSKRRKRVIRSKKKQLKKIKQQIHEIEHKQTTHLITTLHEAGVQTLVIGDVRDLRQGNDVGSMNNQKIHQWSHGSVRFKLTYKAARLGMEVFLQEES

SEQ ID NO: 4423 - protein, 443 aa, unknown
  TnpB Polypeptide
MKQRKKPRSVPGTPQQITKAVTHIRLEAANAGKLTALDELAQAYLSLCQQYVTLFCTEELPDKFHTPVFATPLSERWHRVAIQQAAGIAHSWRTNREQACQGYLDDLLGYHEQEAVGTLDEQAKAPAWREWDVPTLHQVCIQANANVVKLEPSQDSSFDYWLKISTLERYRPLLLPVRLAPYHRQTLAGKTLNSSVQLNQRADGWWLTLSYDEVVKVHTEPDAPVIGIDVGIANFVTTSDGKHYGTFHGRLRQRQKRDRVKRRRKAKLRACLQKKGVEKLPSTSSRSGQRLIRHVKQEINRAVKECFTEHPDAQFAYEHLSVATMKYKARAMNAYLRASNLAHIPEQIEWNAAKGGVQATKVKSAYTSQACSVCYYVDKQNRPDQHTFCCLVCGYQAHADLNAAINIGRRVADEELRACRDRHAIKAVLMQRHAAWRKVQGWP

SEQ ID NO: 4424 - protein, 337 aa, unknown
  TnpB Polypeptide
MRTFEYRLYPNKEQSRLLMGCLAESRKLYNEMLQEMKQQYEQEGTFPTKYDLTARFKNRGGEHVPATTVQMLADRLTKSRKRYLAAKELGIPDVGFPRFKKPNRWHSIQLRQYGTSRDVWLDADNKHVHVPAKLGKLLKIKLHRPVEGTPKTVHLVHRADGHWYALIVCETEPYTGHEPTTCEHPDIGIDVGLKSFLTDSESHTVENPRFYRTSQKTLRRKQRQLCRRKKGILNMVQNHSLAKSIMDASWGAFLDILSEKAERAGHTVVRVNPRFTSQKCHQCGEMVQKSLSVRTHICPFCGYIADRDVNAAQNILKLARPGHGLQEPTYTDGCRVS

SEQ ID NO: 4425 - protein, 382 aa, Chloroflexi sp.
MLLCKKIKLEVSEQDAATLEFMQGKCRGLYNWHVMRLRHGEKWPGASWAKKTLQDSKRHDPELEQVYGKLLHEVYYRLDSAMQAFFRRLAKGEKPGFPRVRPRHCFFTLCYPAMYLKIEGKTLILPTRGKGKNKQYPNVQAVLTEMPPESFREVAISRDARGNYYASFSFREQEEPQQSGKVVAFDVGIKTLAVGVNEQGKIYHVGGFKGSRWYNKQLDRIRSKRDKCKKKSRRYIHLSKVYKRVSEKKRKKQRDSLHKASHLISHKLGERTVVVGDLSQRQMVMKEHQERNKHLHRAVFNDWGLYTFIQMLTYKCQLYGKDLQFLDERNTSKACSGCGHLQAMPLWKRTYCCAECGLVMDRDENSAINILTRFFARRGPHT

SEQ ID NO: 4426 - protein, 462 aa, Chloroflexi sp.
MLLCKKIKLEVSEQDAATLEFMQGKCRGLYNWHVMRLRHGEKWPGASWAKKTLQDSKRHDPELEQVYGKLLHEVYYRLDSAMQAFFRRLAKGEKPGFPRVRPRHCFFTLCYPAMYLKIEGKTLILPTRGKGKNKQYPNVQAVLTEMPPESFREVAISRDARGNYYASFSFREQEEPQQSGKVVAFDVGIKTLAVGVNEQGKIYHVGGFKGSRWYNKQLDRIRSKRDKCKKKSRRYIHLSKVYKRVSEKKRKKQRDSLHKASHLISHKLGERTVVVGDLSQRQMVMKEHQERNKHLHRAVFNDWGLYTFIQMLTYKCQLYGKDLQFLDERNTSKACSGCGHLQAMPLWKRTYCCAECGLVMDRDENSAINILTRFFARRGPHTPGECGVLHIERGNTFYHVLKGRGKIDENTDCFNAQERSSSRHYRHNRALFAGRKKYGRPLLNLCGPYHLCPHNRRSRSGH

SEQ ID NO: 4427 - protein, 365 aa, Thermococcus sp.
MKFTLKMKMRPLTRSKEWMLEQSIEAFKSCVNDWLSAIVQLGIKPNRGNLHRFAYREIRGKYPQLHSNIVQDAMNLAIEIYRSWLKNGGEFPEFRSNVIYFKGVDVKVENNGLVVPLMGKRVYLPLYVPKRYKKCLQHKHGRVIIKRIGRDWYAFVSIEVPEKEPIKPVGTIGVDLGYYNLLVASDEKGREVMRVRGDVLIKHKEHLEKLTARRQQRLMKKFGIHAKTNHKDKKFVNDLNHKIAKELVLKARQLNRVIVLEKLKGIKRQKRPKPLRKILHRWSYADLIAKITYKAKLYGVPVIFVSPRGTSKTCSNCGYYVRNFKDERVFKCPKCGFEIDRDYNASINIARKVLNALKSGLSSPP

SEQ ID NO: 4428 - protein, 430 aa, Thermococcus sp.
MKVRKTVVLKSERLPKKVFRIFTELEGMYREMILQTVLFAVRNEVTSFVKLKAEKYSFLRKLYPQLPSHYAYTVCQDSALRAKSFLKRKKKGLAEKEYPEVRNVSIWLDDHLWRAGLTFIKIATHKGWVEVDLELHKHYWKTANSGWRLASQARIKLDKKERRLIVYLTFYKNVEEYKPKSWIPIDVNEDNVTALIDFTPVIFETGQKEITLGYYYRRKRIQEKWDKKLGSRNKKKRRILRKLREGSKKRDIREKLARIIVVEARKRNAGIVLERLPKNVPRKMLEKIGDKQLRHRIYQSAFLGVQRVIEEKAREYGVPVIKVSPKNTSRICPIHNAVVRYENGSRFGVCSAGGEVWHRDVLAVWNLYLRVLQSDGSDAPSSGGVFVNGRPVPLASTATSEAIWIEKSRWLRWNSLPLIQSDTSLHKMKR

SEQ ID NO: 4429 - protein, 324 aa, Streptosporangium sp.
LGGYGLAAQAAQHVIKKVADAYATLHANIRAGNLGKAGSARRVRAESTPIVFRAEAAQPFDDRCLSWQIDARTVSIWSVAGRLKNLRFTASAEQLKTLSAHRKGEFDLAYRDGMWFLIATCDMPAPRVKDPEAFLGVDLGIVNIATTSDGARHCGRALNAVRHRRRELRRRLQARRTKSAKRLLKQRRRKEARFAANTNHVIAKQIVTEAERTGSGIALEDLQGIRDRVRLRKPQRVTLHSWSFHQLGGFLGYKAARAGVAVVYVNPAFTSQQCSSCGHVDRKNRLDQASFSCTSCGFAEHADVNAARNIAARGETGWAVSHAA

SEQ ID NO: 4430 - protein, 370 aa, Streptosporangium sp.
VKFVVQVRLFPAPAQEAALADTLRLCNEAANLVSRLAWETKTFRNYDLRVHSYGDLKAMGLSAQAAQHVIKKVSDAYTTVKAQVSAELRKPLAKPIAFRPDAAQPFDDRCLSWQVEARTVSIWTTGGRMKGVRFACSDDQARALAAYRKGESDLIHRDGMWLLIATCDVPDVDVTEPDAFLGVDLGIANIATSSDGERHSGRHLNAVRHRNRELRRRLQAKQTKSAKRLLKARRRKESRFARDVNHRISKSIVAEAQRTGRGIALEDLQGIRERVRLRKPQRVTLHSWSFHQLGRFVAYKARRAGVAVVHVDPAYTSQGCSACGHVDKRNRPDQETFACTSCGFAEHADVNAARDIASRGVTSWAVSHAA

SEQ ID NO: 4431 - protein, 275 aa, Clostridiales sp.
  misc_feature (251)..(251): Xaa can be any naturally occurring amino acid
VDSIALQKSVENLADSFERYYKKQNKYPRFKSKKNPVQSYTTKHTNGNIAVEGNYMKLPKLGLVRFAKSREVHGRILHATVRRNPSGKYFVSILAETEIQPLKKAESSIGIDLGITDFAILSDGRKMDNNKFTSNMEKKLKREQRKLSRRALHAKNKAINLFDAKNYQKQKRKVARLHERVMNQRDDFLNKFSTEIIKNHDIVCIEDLNTKGMLRNHKLAKSISDVSWSAFVSKLEYKAKWYGKTIVKISXNAHITFFGQHATINVKSLDCTKES

SEQ ID NO: 4432 - protein, 434 aa, unknown
  TnpB Polypeptide
MQNENLHSRQTIDFIGFVKSKIITKGGLIIKVNRVEKHRIKNKSPAWEIIDKLSFKSKNLYNYANYYVRQEFINNKKYIGYYDLKKILKTHEPYKEYGSQTAQQTLVVLNQNWQSFFAAIKDWRKNPSKYLGRPKLPKYKNKEKGRFPVIITNIQFAILDEYIRFSWKPLQSLNNMFKTNIKDKLMQIRFVPKGADYILEIVYEINIPEINQHNQRITGIDIGVNNLATVSNNIGVMPFIINGKPLKSINQYYNKKKAQIQSDLKKNHNKNWSKRLEKLTAKRTNKIIDYMHKTSKYIVNWCNKNNIDLLVVGYNKKWKQSSKLSERVNQNFVQIPYQMFINQLKYKCQNIGIEFVISEESYTSGTSFLDNEQPIKEYYNKDRRKYRGLFISNKNIKINADLNGAYQIIKKVAPNVFNNGVEDVCLHPIRVNII

SEQ ID NO: 4433 - protein, 433 aa, Halorubrum sp.
MEDVIRTVKVKLNVPTNRCDDLHQTKDQFLHCANTTAEWAWRHPDEYCVTSKQQAENALYERLRDETDLTANLVQKGIRRAIEATKSGVARLKNGETTSQPHFDAWSVVYDKRSATFHRDHVSLSTVNGRVECPYVIPDDPEQTPIGEYLLNEDYEFRESTLQYDRSSETFYFHARMRRTTDDYERAAVASSDAEHRTVLGVDLNVDGSLAVTSTGAFIGNADKMNHRRREFEKTRGSMQQAGTRSAHLAIQSMDDRERRWVQDELHCASNEILTEARKHSCTHVVFEDLTDIRKRMAGVKRFHAWAFRCLYQYVEYKAEALRIGVEQVSPAYTSQRCSKCGFTDEMNRRSKHTFACQKCEYELNADYNASKNIARKLLKRLHSGPTSSDGGAPCQCALKSGTLTLNGEFHASVSSTVEGESTDKPTTEIVGY

SEQ ID NO: 4434 - protein, 430 aa, Halorubrum sp.
MTWDVTRTVRVRLDVPDDRKRDLHATNGRFQHCANRTSEWAWRYPDEDCVTSRSAAEDALYADLREETDGLHANLVQKAIKRAIKDIDNAVNRLANSENTSQPEYDTFSIVYDKRAATYYRNKVSLATVNGRVECEYDLPENPKGTPHGEYLLNEDYSFSTSTVHYDSDADEFYLHATMERELDVDSPEKAEDSSVLGVDCNVDDHIAATSTGRFIGSADYLNHQRREYEKRRASLQQIGTRSAHLTCQRIGDRFGRWSRDYLHRCSKAIVEEARRHECTHIAFENLERIRERISDGKKFQQWAFNALQTMVAYKAEAYGVVVDTLNPQYTSQQCSKCGCTLEENRDDQHFECLDCGYTSNADYNAAKNIARKLALKLQQGQKSPAGGAFCQYALKSGTMTVNATAVASDQYVSAERESTDKPTAEAVGS

SEQ ID NO: 4435 - protein, 301 aa, unknown
  TnpB Polypeptide
MPAQPIKTFSRVYNGTQGLRRKRNQCLNSIKIQFRDTHVKFEGFSFSRKANKQKLNWVKLAEHGRIPTDAKYGNPRVSFDGLNWWISVCVEFPDCRDRSNHDGIGIDLGIKDLAICSDGNTYKNINKSQTVKKLEKCKRRLQRSVSRKYEHNKKGGSYCKTNNIVKKEKLLLKVNHRLANIRKDYLNQTTSEIVNRKPRFICIEDLNVSGMIKNRHLSKAVQNQGFFEFRKQLEYKCNDRGIQLIVADRFYPSSKRCSCCGKIKKDLRLSDRTYKCECGNVIDRDFQASLNLKAYGEQFAS

SEQ ID NO: 4436 - protein, 250 aa, unknown
  TnpB Polypeptide
MANRAYKFRIYPNDEQKILFAKTFGCVRMVYNHWLDRKIRQYEENKTNVTYTICAKEMAAMKKTEEYGFLKEADSVALQQSLRHLDTEFQNFFKQSKTGFPRFKSKKRNKNSYSTVCINGNITLSNGYLRLPKIGQVQLKQHRSVPSEYRLKSVTVSQTPSEKYYASILFEYEDQVQEKKLQKFLGLDFSMYELYCDSKQPDLFCLWLQKCKNEKTCVKRVGLSAVRAHHDRDVNAAVNIRNEGMRLVNA

SEQ ID NO: 4437 - protein, 468 aa, unknown
  TnpB Polypeptide
MSDHLSLPIRLPDEDADRCERLATLTQRVANHVLKSHWTPSHLDGITDSSHQAWKYFDEHEPFEVLDLYLPSRFRRCILQKVGGTLRSHADRRDAFRSIQTVLPDHKIRRIHRRRIKKQLWGGGEYLTSGYVDILIDQLNSYYDRHGTYPDTYFEMQSCPEYDSGVLPFSADDGPTSGQAVKYQYDSDSETLTIRLKTPDTLNPDTRGDWSWTEYERDGYGAFHDLLSHGDLSAPEFQPSCRKNGDAYYELAFSVEVEHAEATDGTDCILALDAGMRKDMTAVVVTEDGEQLSTPHEIREVVLERGFNEEINSFGRSFESDELLDASALRIPLVGFLPFDDPRVQGTIDAVRERLTTEEGLVHRYEGEDGLPGDEGAFVLCSFWLVDCLALSGEVEEAEQLFENILEYTSPLGLLSEEIVPEAGEPLGNYPQAFSHLGLINSAIYIEAAKNEESTVDIDYPAIDARLE

SEQ ID NO: 4438 - protein, 384 aa, unknown
  TnpB Polypeptide
VTAMPVQKLNRAIKYRAYPTSEQQVLLSKTFGCVRFVWNHMLTDAQQFFDEAGTFFIPTPAKYKKEFPFLKEVDSLALANAQLDLKEANKRCQKSPKAVGSPKLKSKRKSKMSYTTNNQKMRRKNGEIKNTIYVVGNLVHLPKVGDVKVKKHREPGTNWVLKGATVSCTHSGKYFISLLYEFKEDIHPIKPTRETSLGLDYSSHDFYVDSNGNVANYPRFYRQSEGKLAKEQRKLSRMQFGSHHYDKQLHKVQLFQEHIANQRKNFCHTASTAIAKRYDAVFVEDINLRGLAGSLKLGKSTNDNGFGMFRTMLEYKFTSRGKTFAKIDRWYPSSKTCSVCGFIKDDLTLVNRFWTCSACGTTHNRDRNAAINIRNVGLLGLYPA

SEQ ID NO: 4439 - protein, 370 aa, unknown
  TnpB Polypeptide
MFTRSYKYRLYPNKSQAKLLEATLNICSNLYNDLLAIKRDNWKEENISVSKYDLDKTITSMKSQNEDLKSVHSQVLQNISERVDLSYQSFFRRLKSGGNPGYPRFKKFGRYKSFTFPQAGYKIIDDSVLKISKIGLIKIKLHRPIPSKPKRLHIKRSSCGKWWAIFVCEVCPPDDRFISSDKIYGFDLGLSSILTRSDGKIYRRKRFYKQDAKDICRLQRKCERNNYNDKSKVSLAKAYSRSNSRRNDYLHKLSIDLVRENQVMVFEDIEAKSLMKGNLKSINKSLKDASWGKLIRNIQYKAEEAGRSVILVDPRNTSKECSSCGRIKNKKLQERTHDCECGISLSRDHNAAINILRRGLSSLVMAKAIT

SEQ ID NO: 4440 - protein, 415 aa, Brasilonema sp.
VLHKAVQVRIYPSKEQGILLAQTFGCARWWWNFALNKSIETYKETGKGLSQVALNSLLPKLKKEEDTKWLADCYSQVLQATTLHLTTAYKNFFDKGAGFPKFKSKHGKQSIQYPQNVKIVEGNVKLPGNIGVVKAKIHRPIEGKIKTVTISKAPSGKYFASILTVSEAGGQRPTVEGETPTTAEGKIYGVDLGVKDFAIVTDGEKVSKYSNPRHLARHEKNLKRKQQKLARKQKGSNSRYKHRKIVAKVYERVSNSRQDFLHKLSYKLVSDSQAVIVENLHVKGMVRNHKLAKAISDCGWGTFTNFLAYKLERKGAKLVEINRWFPSSKLCSNCFYQVGDMPLDVREWTCPNCGTHHDRDGNAAINIRAEGVRMLRADGSAVSAVGGEVRPKMGRKSHLRHSPMSTEAPSAYAAG

SEQ ID NO: 4441 - protein, 218 aa, Rhodococcus sp.
MLVVSTTSRSSSRTPSANSSRSIGWSGSTPGSRACTRCRRGRRSPTRAMSAGIVSGWRRHVLARKQKGSRNRAKARLKVVKIHGRIADRRRDYLHTLSTRLVRENQVIAIEDLSVRNMVKNRSLSRVISDASWSEFRSMLEYKADWYGRRVVVIDRFCPSSKTCSVCGVIASTMPLDVREWACRCGVVHDRDVNAARNILAVGLTVAACGDGVRPPRT

SEQ ID NO: 4442 - protein, 363 aa, unknown
  TnpB Polypeptide
MNKSFKIRIYPNQEQQILINKTFGCIRYVYNYMLNLKQKAYNIFELKINFVKTSSILTRLKQRKSWLCEVDAVALQQCLRDLDAAYTKFFNGSGYPNFKSKRGKNSYRTNGKTITLDQNNKKIKIPKVGWIKFRDKTNFIGLIKINNITISKSSSGKYFASILAEVDITAFAKTKKSCGVDLGLKDFCILNNGTKFENPKFLVRNERRLRLLQKSLSRKVYGSKNYEKARIKLAKFHEYIANCRKDYLHKISLFLVKNYDIICAETLQVKNMLKNRKLAKAISDVSWYEFCRQLEYKCLWYDKKFVQINTYFASSQLCSNCGFKNSDVKNLDVREWTCPECGQHHDRDINAATNILNQGLTLI

SEQ ID NO: 4443 - protein, 546 aa, unknown
  TnpB Polypeptide
MPIVLCTYLVVRLALSWEFMQTHCGDGQMKEKFDTSGQPGVNASMTVQASNKAVVRKRTTATAASHRQSKRTTSKGKSVSCQKDTQTTPFSKMLGLVSISKENNFSSCLKNVQWEGLEKLSLPTETDFADLDLNCLNGSSLKTLSNSWFSNNKNYRLNRSLLQTSSQLSRTFQVEFTDSENTVQRSRKIRVYPTQEQKKILSNWFGASRFAYNKTVEFLKQPDTKAQWKSVKTNLLHEMPEWAKEVPYQIKSVAIRDCCQAVSNAKKKFKQTGKFQEVKFRSKKRGDNNLFIPQSAVSENGVYHTILGKLKTAEPLWKPVHDCRVVLQNGRYFVIIPIDVAVKRPENQRLSACALDCGVRTFQTVFSKELILKVGEHDFQRIFRYCYALDKLISRKKKERSNKFNKAMQRIRWRVRDLIDEIHNKLAIALCRMFEVIYIPTFETHDMVSKLKHKTSRAMLGWAHYRFKMKLKAKAEEYSCKVVDCTEQYTSKTCGNCGLENQIGGNEVWTCKHCGCMHDRDINGARNILLKQIFLAMRDSSTSCLA

SEQ ID NO: 4444 - protein, 458 aa, Leptolyngbya sp.
MPTRKPIIRTDKWSLNPTAVQRLLFDKTVKVYRRLCRHLVSVVFTHWKELGGLSSKNVIPAVERLVHQTVQNPNVKYASIDRVFRKFPSYYRRAAIAFAVGQVSSFVTRYQEWQSGVRGRRDAKPPILTANAGCYPALYRGQCYKLHGHDQIEIKVFTGTDWVWTNVHISGLRERHTVDSNKQLSPSLIFNEQACHLSVPFECHPEKRQPDYNVVAVDLGINTTATVSVVTFDGTVIWREFIHPGRDIDRRDKRLKSVSVRASKTMGKGGRLQKGFCSNTYRKCRNINQQIAHIVSKRIVNIAKQFNAGAIVFEHLKGWKAKGGRKGSNLRQRFHGWLKAMIHDYTELKWQEVGGKTIDVVAAYTSKLAYDGSGVVKRDSKNYALAKFASGKRYNCDLNGSQNIAARGLLKLTCRKDSEEWSGKSSRHSPRSWACLCDLWTRNLQVSTDTTTSREQLV

SEQ ID NO: 4445 - protein, 143 aa, Allobaculum sp.
MQKGSKNREKQRKRVAKRYQKVANQRKDFLHNKADSHTIVCIEDLDRKAMAQCLNFGKSVADNGWGMFVTFLRYKLDEQGKKLVKVDKFFASSQTCNVCSYKNPETKNLSVRAWDCHECGTHHGRDVNATINIRNEGMRLVNT

SEQ ID NO: 4446 - protein, 423 aa, unknown
  TnpB Polypeptide
MSIKAYKYRIYTNTTTTNKLQWVLDRCRELYNAGLQERRDAYELVVKRHPGYYDEETRKQLTREHTIGYYEQQRELVDVKELRPEYQEIASHVLQNVILRLKRAYDRFFRRVQNGEQPGYPRFQGKNRYNSFCYPDGAGWKLEAQERPAVKKGIVRVNLKLTKIGTVKLHLHRNIEGTIKTLTIKREGEHWYAIFTCEIDQPEPLPTSHEDVGIDLGVTHFAALSNGEFIDHPHYLRKAEKKLVKAHQALSRKRRGSHRRKKAVQQVVKCHRQIANQRKDFQHKASRKLVNRYQVIVFEDLQVKNLTKAPAPKQDENGKYVPNGAAAKAGLNKSILDAGWSMFTAMVSVKAAWAGRTVIFVDPSKTSQICPNCGNIRKKTIDERWHSCECGCELDRDTASAKVILDLGRKHLLVGTRPTSATA

SEQ ID NO: 4447 - protein, 431 aa, Hadesarchaea sp.
VQSVSSARFITPPLTRRKRELLEYLLDQFAASVNFCIQKCLEHGVTSRASLHRIAYEEWKARFNLATHWFHSAGQVATQTLRSWRKLCRQGQADPKKPPVYEARTMRLELWGDGNASGVCRFHGKAVQIRIRRGEHLWLLLIVTEHHELRYLKDWREGKLKVGEITISAFGNRANVFVPFKREVEPKKIEGICGVDINERSVDLTILKPNQEPRHLSIDVSELPAIRHSMQLKRKSIQEKLDKPRRPLQKRRLKAKYWRRERNRTNQVMHVVSKGIAEIAERERVALAFEGIRGIRRSMGRPKNGGTLHKDMRRRLNQWPFRKLQFYIGYKVQRLGLPVVEVSNYRKSKLCPRCGRYNRPKGHAYRCEACGLEASRHLVASWNIAKDGARHVPADCWRMKPVVEEPVAPAKPSVEPERIPCQSGVRFDTGF

SEQ ID NO: 4448 - protein, 446 aa, unknown
  TnpB Polypeptide
MREDSCYHEWSRQHRPRRMAQPTRRTATLQGRPHNEGAPMMVHRAYRTELDPNNAQRTHLLQHAGVARFTYNWGLGRKMEVMRINQLPIPRIKLPTAFDLHRELNRLKQTELPWMYESSKWAPQLALRDLDSAFKNFYQGRAGFPRFKSRKHGAGSFTLAMPIHVKGGCIRLPRLGWIRFKEHGYLPIEAHINSATVSELAGRWFVSLNVVEEREDPEPIIGAAVGVDRGLKNLAVVSDGVVIENPKAMARCERKLKQLQRAVSRKQKGSSNRRKAVQRLARCHSRISNMRKDALHKATTALATTKSVIVVEDLAVRSMMANHHLAKAIGDAGWSEFVRQLEYKSKWYGSRLVVAGRFFPSTKRCSKCGGVKDSMALDKRTFVCEFCGFTADRDLNAALNLEQWPSVGRTLETPVEEGVQVKKPQPSYESGTEMVQNDHESGNEGV

SEQ ID NO: 4449 - protein, 182 aa, unknown
  TnpB Polypeptide
MHGMCVFSTGERAGYPMFYRNAEKKLAREQRKLSRCEKGSRNYQKQKKKVALYHEKIKNQRKDFQHKLSHSLAEDYDAVCVEDLNLKGIAGGLHFGKGIQDNGYGQFLSMLGYKLEERGKYLIKVDRYFASSKICSVCGHKKKELALSERIYLCECGNRMDRDVNAAVNILKEGKRIYKKCA

SEQ ID NO: 4450 - protein, 395 aa, unknown
  TnpB Polypeptide
VYLVRTLKLGQSKTLDALALESGRIYTLAKVRFWRIVRRKGIWLSEGALQRLVSNGQPTGLHSQSAQKAIQCFMAALRTWRKARKINPELKPPRKRKRFYKIVWKDQAIKVRDGRLVLPNANGTTPVVIDDWIHAKPVQVEIGWDGKQYELRASYKTEPLETSQGFVASVDLGEVHPAVMGTEGVHVLLNGRLLRSKRRYRERLKAKLSAKIDRKKKGGKRRGRLIKSKKRQLRKLDNQIRDIEHKLTAAGIKALHEAGVRKLVFGDLRGFRVGYDKGRVQNQRMHQAPLGRIRSYLEYKGARLGWKEPDFQNEAYSSKDCPCCGWRNNPTGRHYSCASCGFKAHRDVVGQVNILQKYRGVRSNHVIGAMASPIGIRWKPHLRCSSKLIGMSHAV

SEQ ID NO: 4451 - protein, 540 aa, Hydrogenothermus sp.
MITLQCKLTFENEKDRQELQKLTRRFSSCLRYAYNRLIEGHKRKELKKHLQKVFNLNSRYCDDAIFKAQSLINSCLERGQNPKKVIFGGRKLFEKLKKKHINGEQREKLKQKWEERRRGCLYSRGDKSKKGNLNTRIIPEKDGLKLRINSGKRNWIKANIKRTVNRENDKWIEFITKLIEAEKTREYFPYSVEIRQINGSLYAFISFEEQLPNEPIITKEEGIIGIDINANPFHLALATVKAEGNLEGYQKISLHKLINKTKNQREYISWQIAHQIVETAIIQDKAIAIERLKGLHKGKKADGNKKLRKIKQQWIYRGILEKIKAVAKREGVEVIEVNPEYTSVIGMLKYAPQHNIDKDISGAYVVARRALGYKEELPKNYKKLLQDKDFREYVMNKLEEEKQKTKDKLQKERNEYKQKPLRRRIKQLSRDIKLLKSLSSEPQTQEPVNQRKEQVRGWYYTSYKLWQVAKVALTIPVLGRSLPRDLSPLKPILVEGDWDRVVKGLVPVSWDRDEGDRRNTASWGVPVAVKAEYKYPSPKC

SEQ ID NO: 4452 - protein, 450 aa, unknown
  TnpB Polypeptide
MSRKRKIATEPTIQLSHRIALVPEQEQAIYFGMACGTSRFTWNWALAEWNRQFDAGLRPNSALIKKEFNAIKYQQYPWLTEIHRDAHAEPFNNLGRAWAKFFKDCKEGKPAHAPVFKKKGMWRDSFYVANDKFKIYGKEIILPIVGKVKMTEDLRFKGKLLGATVSRSADRWFVSIQVEMPAHQAMRKRTGANIEGADLGITAAVTLSTTEKILSPKPLKKVLRRLKIKGRSVSRKLEAAKIEAGIKPGEAIPKGTRLPVSSNRKKASARVAKTHYRVTNIRKDFTHKLTDRLCRENQALGLEDLNVAGTLKNHRLALAISDVGFGEITRQLKYKAPLYGTTLVFADRWFPSSKMCHVCWFVHKDLKLSDREWTCPNCGVKHDRDVNAALNLKQLATVETALPAASSGVIQGTDVAHAASGGKVTPVSYDAVLKKDQGRKKNVHLCAHSE

SEQ ID NO: 4453 - protein, 392 aa, unknown
  TnpB Polypeptide
MENLRFTRKFVIETTAEQRKLLTDWSRWTKAALNYLAKAEGGVIHKHLKNDMYKTYLGEDSPKDIVKRLNIPVKRHHLLGIQSKLIASIKVPTYRSPFITAVTQESKIEQRGADFYLLVKHPIKDSENVWLEFLIRSTDRNGRDRSNELTPLIGKDFAYELHFSRRAHRWILSLIYNETCVDSVAPSAVMGIDLGIRNIAWAVVRPLNDPGRVIWSRRWSIGQVREMGRVLRRRHRDIRTDGKRAKLPTLSGLRKNLYQTIAHTMVQKAKELNAVIVLEELHPAEMMRKKEPGQGDKMERGFRRALSGAAMDELSALIEHKAQMIGNDGLPSVMVEYVSPSWTSRTCPKCGTRETGNGSGHGIIFKCQHCKYENNYDFIAPWNIAGRSKFMA

SEQ ID NO: 4454 - protein, 253 aa, Clostridioides sp.
VAVVEKAYKFRMYPNKKQQELINKTFGCCRFVYNKYLAKRIEVVSLCCTDVDIEVFENTNNQIGLDLGIKEFCISSCGEFIENPKYLKKSLNKLAKLQRELSRKTIGSLNRNKARLKVARLQEHIANQRNDFLQKLSTKLIKDNDIICIEDLQVKNMIKNHKLSRSISDVSWSESIRQLEYKANWHGRQIVKVGKFFASSQICNKCGYKNEEVKDLNIREWICPSCNEIHDRDINSSINILKEGLRLITIQNK

SEQ ID NO: 4455 - protein, 372 aa, Microbispora sp.
MMCGVAQTVKRAYKYRFYPTPEQASELARTFGCVRLVYNKALEVRTRAYTLEGRRVSYAESSAALTAWKRTEELAFLAEVSSVPLQQVLRRLQAAFANFFAKRAKYPTFKSRKKSRASAEYTRSAFRYRDGQLTLAKMDAPLDIVWSRPLPEGAEPSTVTVSKDAAGRWFVSLLVEETIRPLDPCGKTVGVDAGITALVTLSTGEKIPNPRYERVDRRALARAQRALARKAKGSANRAKARVKVARLYVRIADRRRDHLHKLTTSLVRENQTVVIEDLTVRAMVKNHCLARAISGASWRELRSMLEYKARWYGRELVVIDRWFPSSKLCSACGTLQDVMPLHVRTWECACGAVHDRDVNAARNILAAGLAER

SEQ ID NO: 4456 - protein, 511 aa, unknown
  TnpB Polypeptide
MSPNSVVSRTYPRTPYAAFDKDGGPLDLNDVLDGIRKDAELVAHYALEEMTEQNLALSTYFDRYKPAEAGRQMNLKLPTEVKKKFRSGASRLEKMFQEQVVTNLRSWAARSEVVSGKYTDYVSAGWKRTAGKSKPTSMSPRLALSATDKGYYYKNFSVTPDHISLDMVVQGQWMTLHFPTPPRLLENGCDPGVPDIWIGRDNRVMFGFHGKTDPGRPKFSERYVIGVDVGLTHPAAYVVWDTEKKEIVEESLLGQRARSLNNKIKRTQTQVSSLKRQGRDEEAVSHREHLSNKRCELSILIAQELANVSWHYSNAIVSFEDLSHIKNTMKYGRWFRGEVLRRTRDMVEADGGRVFKVNCAYTSKKCHMCQSDLEMSNYSQPRCTTCGITHHRDINAAANIAQRANVKKACETRKKHATKTKRVRRSKCQVEPLKHPGTKNRPTPKAPQNQKKTQTRTYPPLPSREVSKRICPADSRVSAVDHNAWFQTTSGTTNPKENLSTSTVDWCYPKE

SEQ ID NO: 4457 - protein, 343 aa, unknown
  TnpB Polypeptide
MYLTVKQQVKHLSKEDYCSIKELCHAAKNLMNEAIYNIRQYYFTEGEFLKYEKNYSLLKNSTNYKTLNSNMAQQILKEVDGSFKSFFGLLKLAKQGKYAFKDCKLPNYIQRNLNTNNALALDLGVNNLVTAVSSYGKSFIIDGKRLKSINQWFNKENTRLQSIKDKQSFGKKTTNKQKAIARDRNNKVNDYMNKAARKVIDYCISNDIGTLVVGYNETFQRKVHIGKQNNQSFVNIPYGRLQNKLQYLCDLNGIKFVKQEESYTSKASFWDKDIIPVYNNDNPKEYEFRGSRVKRGLYKTSSGKIFNADVNGALNIMRKSRVVDMNILYSRGEVDTPIRIRIA

SEQ ID NO: 4458 - protein, 371 aa, Actinomadura sp.
MQLRYAFRIYPTRRQQQDLARAFGCARVVYNDALRAREDSRAAGLPFVKAAELSAAMTAAKRTPERAWLGEVSAVVLQQSLRDLEAAYRNFFDGLAGKRPRMGAPRFKSRKNRRQAIRFTANARWSITPGGKLSLPKIGDVAVRWSRRLPRTPSTVTVIKDAAGRFFCSFVVETSDVHDPPDTTAEVGIDLGLEHFAVTSDGRKITSPRFLRRAEKKLRKAQQALSRKQKGSANRDKARLNLARAHAKVADARREFHHRLSTELARDNQAVYVENLRVKGLARTRLARSVHDAGWSAFTAMLEYKTARYGRTFARVDRTFPSSQLCSGCGHRDGPKPLHVRQWTCEQCGAEHDRDINAARNILHEGRRITT

SEQ ID NO: 4459 - protein, 442 aa, unknown
  TnpB Polypeptide
MAVKLVEKTNLQNRALKLRIYPNQEQEILINKTFGCVRKVYNSRIAEKQAFYENVIKPEQDLQKRKELWKTAHYSSEKELKEQFPYMKEVSAQALCSATLNAETAYSNFLNSLTGKRKGRKAGKPKFKSRKSHDYSYRECQPSKTAWNRGNKTIKIPKLGEVKYRHGKINDFFTAKGAVLKSITVRKNSAGEYYAVLLFEREYIRKPKVYSGNESKAVGLDFSPAGLYIDSNGNSGKDFGYIAQKQAHSKQEKQLKRRLARKQKDSKNREKARIKVARLENHIGNSRLDFIEKETLRLVREYELIGVEDLNLQGMSGFLRNAKNMVDTSWGMFVNKLIWKASKNEHNCQVIRVSRYFPSSKLCSKCGFKYEGLKLSERKWVCPSCGTEHSRDLNAAINLKGESIRLARSEFRSVEGHLHGSFTLKADPMKQKTGNREIPQAV

SEQ ID NO: 4460 - protein, 426 aa, Actinomadura sp.
VDGVHEPLLPKTLIDHGPLQYGSNMRTAYKVRVYPTPEQAAVLNRTFGCVRKVWNEVLEWRTKRYWAEQTTTSYAQTDRYLTELKRDPEFVFLCEVSSVPLQQTLRHQYTAFVNFLAGRARHPRFKSRVGRQSAAYTRSAFRYQDGELRLAKMSGPLRFVWSWDDIDPATIDPTTVTVSRDPDGMWHASFAVAAHAPEPLKTAGTRVGLDLGINDFAVTSDGERIANPRHLERKQRNLARYQRRAARKRRGSANRKKAARKVAAGHGKVQRAREDFLHKTTTELARRYDVIVVEDLHVAGMVRNHRLANRISDCGWGTFRALLEYKTARWGRRLVVIDRWFPSSKMCSQCGHLLARLSLSTRHWTCPDCGTRHDRDANAAKNILAEGLSVSACGADVRRAGTSRTRSAAKQEAPRSDPGRAGGGRP

SEQ ID NO: 4461 - protein, 557 aa, unknown
  TnpB Polypeptide
VIVGMRTCKQAAKVAELIGGGQLGGKPRKDATVPPSRYVEVGGNFEAHRAAVESVSVLFELYEGNADSYAQTGSPGEKLASGWLLTAAKFEVEWPAEEDRRAAVRSHFGARRFSFNWGLAQVRADLDARKADPSHESVGWDLGPLRKAWNQAKNDVAPWWADNSKECYSSGLADLAQGLANWTASKNGARKGRRVKFPRFKSARRDTGRVRFTTGTMRVEDDRRTITVPVIGALRSKENTRRVQRHLAAGRARIVNMTLSQQWGRLFVSVNYALRTTNTAPMVASATVRAGMDLGVRTLATVATVDTITGEQAIVEYPNPAPLTATLMARRRAGRQLSRRIPGSRGHRAAKAKLTRLDRRCVHLRREAAHQLTTELAGSYGHLVIEDLDVAAMKRSMGRRAFRRSVSDAAIGAVKPQLAYKTARYGTVLTVADRWFPSSQIHHGCTRGDGTPCRLIGKGRIDKHLVCPITGQVVDRDRNAALNLRDWPDHASCGPVRATAPSVPGPTEQVGTGHGADAGPTGADGASVRPHLREARSGEARTGSTQSVVKEPRKRSA

SEQ ID NO: 4462 - protein, 302 aa, unknown
  TnpB Polypeptide
LVLKRRRGKWFAIFVFDVAPERKPPAEVAAFDVNENSVAVARLSLLSTVDAVAQWNRQHLDPAVYSIKTDFGRLAKRYEAVRNAKLEELKQRYPFAGRDEEEKRQNVADTREFRKFARRLRERRRKEGRVRQTARQMTKSPAVIITEELGKNPQEEMIGVEEKKVKKRELRHRIKQTPFKKLVKAVEEKAREAGSVVVYVSPYRNSKVCPIHFALLKNGGGWHVLRCPHGHVVDRDAAAVLNMLWKTTPTGWVKGIWWDVKEARKRLKKVVPKEVVKKANPIIPRPVVHAVWASLMALKASP

SEQ ID NO: 4463 - protein, 456 aa, Streptomyces sp.
VARKRGRKRQLRAIAAPFTVAVPSGARIRDRLKGLAAADVKVLALVGEHLGHHQRADLAARVRMGNVAAKQTGRAGRKKHLTAVSSSRWAGAMTRASEDQYQLSMRCLIDERAGLRRRIRKIEQRLAVPCGRRHGRVRGYTDRNERFQKQRHLGVLRARMMVVERQIEQGRPSIVVGGRRLAKARHHLGDADLTGAGRRERWDAVRLFLTADGESGAPHGNYTITVDPGSAEMSLVLPEPLRHLANRPRGRYRLSCKVTFSHRRDEWLDRVTAHRAVRYDIVCDPARDRWYLDASWSADKTVLPSPEEIRASGGNLLAVDLNADHLAACVLDPHGNPVGEPYTIPLELTGPTSTRDGRLRQAVTRLIAITQEHHCTAVVVENLGFADARATGRETMGRGRRGKRFRRTVAGIPTARFRERLRGMAHHQGLVGARSTARPRSSSRPSPRSPGTTVPR

SEQ ID NO: 4464 - protein, 399 aa, unknown
  TnpB Polypeptide
MESTSTTTLRRVYRFRLEPTPTQEEGFRRYAGARRFVWNWALAQRQAYYKATGKGLSRVALSAAFTALKKESDTAWLSEVDSQLPQQAIIDLYKAFEAFFEKRARYPRFKSKKWDTARFRIPQRVTLTDGYLSVPKIGRVKVRQSQAVEGVTKSATFKRDACGHWFVSLVAEMEMPTVALPAPVEERVVGVDLGLKDAVVTSDGDRVAAPRFYRAAQRQLRRAQRSQSRKQKGSKNRAKARQRVARVHQKIASRRNDFCHKLTTALVKNRDAVCIEDLNVKGLAKTKLAKSILDARMGTIRRQLVYKGVWYRTHIIAVDRFYPSSKLCHECGYKHDGLTLADRVWACPSCGCVLDRDLSAACNIKREGLRILAAGHADSQNACGECVGRPMGAALAILA

SEQ ID NO: 4465 - protein, 393 aa, Streptomyces sp.
MDHVCTISGVQLRYNFRVYPTPGQRQSLAKAFGCARVVFNDGLRLRQQAHANGEPYIKDTDLQKQVITAAKKTEERAWLGEVSSVVLVQALADLHTAYRNFFTSTTGGRKGPKVAAPRFRSRKDGRQSIRLTRNGFSLRPNGRLYVAKVGEIPVRWSRSLPSDPSSVTLTQDASGRYFASFVVRTDPAEILPETTGEIGIDLGLTHFAVFSDGRKVSSPKFLRRAGRKLKKAQQALSRKQKGSANRTKAVARVARLHAHIADARRDHHHKLSTRLIRDNQAVYVEDLAVSGLGRTRLAKSVHDAGWSQFLGMLEYKAGRFGRTFAKVDRWLPTSQTCSVCGVIDGPKPLQVRTWTCGACDTDHDRDVNAARIILAAGRAERLNACGGAASPSA

SEQ ID NO: 4466 - protein, 405 aa, unknown
  TnpB Polypeptide
MTTILKGVKLRLYPNKEQECDLRQMCGNDRFLWNLLNGMLQSRYENNKHLYNGDKSKEAKEKRKHVMLSAYGMNYLLPLLKDEFPFLEYSDSSALQVVTSNLNKAYSNFFKNPNHFGLPKFKKLGVYKLSYTGKSTIKVLARRYLTLPKIGCIKTSKTGVLKNVKIKRYTIEYDSTNRWYISFQVEAQVDEFAKTNKIVGLDLGLTDMVIGSDGFKLGRFLVPELEEVIKSKQRVYSKRKHYADVKISMDKNMKVINPRTLLDFMNVEKARVTKAKSQKRLANKRKDFLHKLSTKVVKTYDVIVIEDLNSKNMMKNHKLAKAIGNASWYEFRTMLEYKCKWYGKQLIVVPPQYTSQECSNCHHNGGKKTLDIRDWTCNNCGIHHDRDINAAKNILAKGLKTLQTL

SEQ ID NO: 4467 - protein, 285 aa, unknown
  TnpB Polypeptide
MVTKDEWACRANTYDWLRRTRQRIVGAWCQDAGVSLVRYRFRAYPTGAQVQMLARTFGCARVVYNDCLRVRQDAHAAGEKVSDTEVQRRVVTLAKQTPEREWLGEVASVALVQACQDARRAYRNWFDSLSGKRKGRKLGAPRFRSRKDNRQSVRLTRNGFVVRPNGRVYVAKVGDLRVEWSRPLPSVPSSCTVIREADGRYYVSFVVDRAEQPFGPRQPSGPSGEPVRRRSGADETGPQRAGHGLVHAGSVDRGEGRPSRPDRRQGRAWVPVVATVLELWAPRRA

SEQ ID NO: 4468 - protein, 425 aa, Calothrix sp.
MYALKFELKLNNKEQTYLRGCAGYKRFVWNFALELLKASWQFEGVSASDAKRLKEIKKVFNNYLKTLPEYSWMNDYPSTIYQSVFQDLGKALTNCREGRANIPVRKEKKKGDSFTVYRTSGTYLEKGQPPLPFSNRQVLQPGKKITLPGLGTYRLKEKIPFICSSQTFTVTRVADKWFVSFNIDAEKIPPIIHLVATATGIDLGVKTFATVVNSTGDYKDVEITAPKPMNQAKTKLGKLQYHNRNKQLGNRNLGVKASKRAKRFYAKLARQHRHIANQRSCFLHKTTFDLAFVYAHLRIEDLNVVGMIANHKLSSCISDLGFYEFRRQLTYKCEWYGSKLEIVDRWYPSSKQCALCDTKNNELTLSDREFWCINPNCAFHHERIDRDKHAAYNLSVAPDEYVRLAKSEDMPVDKKEPTPLEEPAR

SEQ ID NO: 4469 - protein, 386 aa, Calothrix sp.
  misc_feature (76)..(79): Xaa can be any naturally occurring amino acid
  misc_feature (381)..(384): Xaa can be any naturally occurring amino acid
VPIDKKATNTSDTKPGACMSTITYVKGLPTKESEMNHLGYTDFEMFLNAFSPIFKDAVCETVDKILASKNFEKEKXXXXQKFYAKKNWHSSKTGCKVPLCCDLNTRRSNWHALKFQIHHKKRYIYQLEKKIAYLKTAPIRVKVSSSEIYIVGSKDETHGNLICQYDGNKICFRVPYCLEERFGKHIETEIGNFDRNINRLPDNGAKTWHFFRKNGRWVVGVQFTPKLVEKVSRPIQYGAIGIDINPSSIGWAYVDYQGNLKADGSIPLQSGLGKNFNSQQIVNACLELANLATKYACPVVCEELDFSHKKELLREKGRKYARMLSSWAYSKFYQLLESILFNRGISLFKKNPAYTSLIGLAKYSRMYGLSSDIAAALVIAXXXXVF

SEQ ID NO: 4470 - protein, 434 aa, Haloferax sp.
MYYAYKYRLKPSDTHREELDRHRDICRQLYNHALYRFDQIPVDAGTLNQRVRSIRDEIPSLKDWWTDLSDVYSTVLQTTVMRIEQNVKGLSKLKDNGYGVGQLTWKPPREFRSFTYSQSGFKLDKKGGQTVLSLSKLADIPIRLHRAIPDVHKSDSSCAAHQKSLISEDDATLKQVTVKKEPTGEWFATFGVEMDREPPAKPKNPEKCVGIDVGILTYAHDTDGTAVGSLDLTDERDRLEREQRKLSRKQHGSNNYETQQRRVAECHAALRRKRRDFLHKLSAYYAREYDLVAVEDLNVKGMMESPSNSRNTASAAWRTFLSLLEYKCEREGTHFVAVNPRGTTKECASCGVSTEKPLWVREHSCPACGFEADRDANAAWNILSRGLEDVGVGHSEQTPVETALPADTNSVSAKRVVEAGSPTLKERTASAVSE

SEQ ID NO: 4471 - protein, 373 aa, unknown
  TnpB Polypeptide
MLKAYKFRAEPTKEQLAVLIRTFGCVRYVWNYMLSLRRQEYFLEGMFPGRNVCSEELTRMKADKMHQWLNEVDAIALQTVLEYQLDSYQRFFRHQGGRPRYKSRKEHTDAYTTKRVGNNIRLDGNLLRLPRVGWVRLRLSRTVEGKIQRVTVSMNPARKIFVSILCEKSDGPTLPSGSGDVGIDVGISDLAVLDNGIKYPGPHALAKSLQRLKREQQSLSRKTRGSNRYEKQRLRVAKLHERVANIRRDYSHKLSMELVRTYDRIMAENLMIREMLGTSDETRARGIMDSGWREFLNMLEYKSAWYGRTFVRIGTYYPSSQLCSVCGYKNTMVKDTRIRNWTCPECGAVHDRDVNAAINIKKEGISLLTHSPR

SEQ ID NO: 4472 - protein, 553 aa, unknown
  TnpB Polypeptide
MSPSDGTLLLLDVLAQDADRCPADRAREVGARPQPVRPPVMPHQVGELLPHPAGGHALEAVDEPGRGDRGREVHQQVHVVALAVELGQFTPEVRAHVPHDLLHAFQVPGREDGMPVLGDENQVDMQDENAVPASAYVIVVGHETKYTERVQLRYNYRLYPTPGQRAALARAFGCARVVFNDGLRARQDAHAAGLPYLTDAELSARLTAAKATPERAWLGEVSAVVLQQSLADLNAAYRNFFASVTGRRKGPRVAPPRFRSRKDRRQAIRFTRNARFTRNARFTITAGGKLRLPKIGDVPVRWSRDLPSEPSSVTVIVDAAGRHFASFVVETGEDPLPEVGTEVGIDLGLTHPAVLSDGRKIANPRFLRRAERKLRKAQKALSRKAKGSSNRAKARIKVARVHARVADTRRDWLHKESTAIIRDNQAVYVEDLCVAGLARTRLAKSIHDAGWSAFTGMLEYKARKHGRTFARIGRSEPTSQVCSACGVKDGPKPLSVREWTCPACGTTHDRDVNAARNIVTAGRAGTLNACGDGVRPGLALAAVSEAGSLRGAA

SEQ ID NO: 4473 - protein, 391 aa, unknown
  TnpB Polypeptide
MKIQKAYKTQIYPTIKQQKMLANHFGCVRWIYNHFLQHKSEQYKRTKRSDDYVQMCAELTKIKKQDDLKWLNDVNRVALNNSIVDLDRAFTNFFRKKSEYPKFKKKFHKQSFRLTNQRFSMKERGMETAMMGVIKCSLDGLPEEYKLLSMTISKEPTGRYFAAISFETDIPNPKIDKSKPIIGLDFGLKTFIATSEGKKIDHIQSYKQEEKRLKKIDRKLARQGRGSNRRRATKKRRALLFEKIRNRRSDFLHKLSRQMVGENQAIYLEDLSLKGMQQRWGKKINDLGWREFSRQLEYKGKWYGCKIQKIDRFFPSSKMCSTCDYINNNLTLSDREWICPSCQTHHDRDVNAAINVLTYGRAGRNVAEKPKRTGRAGPVRTLQRTVKPRIR

SEQ ID NO: 4474 - protein, 490 aa, unknown
  TnpB Polypeptide
MATLTYCKGIPTPATEMNALGYTQLEMFLAAYAPVFRQAVCDTVQVLQCDGELNKSGWNTYLQKVYGINKRHANGVFAAASGAVESAKECRANHIKTLQGKLKSTLQWVKKSLKKLKDARKFYAKKNWQKSKTGCNFPLSCSIQFKGTNWQNLKFQIHHKQRKAYLLERKIECLKTAPIRVSIPRNQAFVVGSKDETMGNQACQWDGNQIRLRVPQCLESRFGKHVTSSIGDFPRNINRLPATGAKTWHFYRKDEKWCVAVQFTPALVERVSRHSRWGCIGIDMNPGSIGYSIVDRDGNLKAHGKIPLQMGLPTGKQDAQVVDACLQLATLATLYGCPIVCEELDFSRKKTQLREKGRKYARMLSGWAYSRFYELLQSILDNRGIYLMTVNPAYTSVIGMVKYAKMHGLSSDCAAGLSVARRAMRLSENIPSSITASLDVKSGQHVWSLWNQLNKKIQQLGIKRHAFYSNWESLVMPNKSQGLFGKLQST

SEQ ID NO: 4475 - protein, 179 aa, unknown
  TnpB Polypeptide
MARKQPGSTNRAKARAKVARAHTKVRDARADFLPRTSTRLVRDHDLIVIEDLNVKDMIRNRHLARAISDCGWGEFRRQLEYKTQRYGRRLVVIDRWYPSSKTCSACGHLLAALSLSTRHWTCPGCGARHDRDVNAAKNILAAGRAVSACGADVSPQGSSLRRSAVKQEAQPARVGIPGL

SEQ ID NO: 4476 - protein, 134 aa, unknown
  TnpB Polypeptide
VARLQERIANIRKDFLHKESTRLVRENQLIAVENLKVKNMLRNHKLAKAISDVSWAEFFRMLEYKAKFYGCDVVKVDTFYPSSQTCSCCGYQNKATKNLGIRKWTCPQCNTQHDRDVNAARNILRKALEMQKSA

SEQ ID NO: 4477 - protein, 419 aa, Sphaerisporangium sp.
MKQTRAHVARLELSAAQAAVLDAQAHTARTLWNLLHEYFTFRQGRFATLKQCDEAIRAARREIDWMGQLPAQAAQAVLKTYRQAWVNHFDPDHPAKRPAFKARLRSRAAVDVPQARDLQIKRVNRRWGAVSLPKAGRVRFRWTRHLPGVTRGGPAGRITGARLVKNAFGWQIVFRTQTMAAPVTGPHPGPAVGIDRGITVALALSDQTMREHGPWLTGGEREHLRRLEKKSARRRAARTPGQRTSHRLIRTYDQMARLRAKAKRRAVDWQHQTTTELAGTFSVVVVEDLKITNMVRSAKGTIEHPGRNVMQKAGLNRAITGEAWGRTVTFLEYKTRDRGGLVVKVPAPGTSQTCHRCGHRDAASRDGTRFSCASPACGWTGHADTNAAINIRNAAGTVVSGRGDLGAARSVKRQPPRAA

SEQ ID NO: 4478 - protein, 407 aa, Richelia sp.
VRTSYQYRLKPNKEQREIIDNTLDMLRHQYNYQLAQRFNWYEQNRSSIDRCLLVCHLPELKDKPNRFSQQASLKQLKKERPWYKAIHSQVLQEVPKRVEIAFDKWLAGDSNGKKYGRPRFKGAGQYKTFTYPQFKQHHFVGNKITLSKIGDVKVIVHRPIPDDFVIKTVSVTKKANGYYVTLSLDDKTVPTIKPDFNAGNIVGIDVGLIDFYVASDNTRIAAPKYLRKAERKLKSAQRKVSRRKKGSNRRKKAIKKLGIRHKKVADTRKDFHFKTAKQLLSKYDVIAVEKLNVKGLAKSRLAKSIHDAGWSQFVNILSIKAENAGLRVIAVNPNGTSQECSSCGHVVKKPLSQRMHNCPVCHTSICRDLNAAVNIRNRGTHDLSNQAKSMSSKKSRLEAHTVISDSV

SEQ ID NO: 4479 - protein, 418 aa, Nocardiopsis sp.
MRTAYKCRAYPDPEQAAQLGRTFGCVRLVWNKTLAERQAAYRADGTKTSYKQTDQALTAWKKTADLAFLSEVSSVPLQQALRHQHTAFGNFFAGRARHPRFKNRNGRQSAHYTRSAFRIKNGALSLAKHKRPLHVAWSFHDIDLAALNPTMVIVSREPDDRFYVTFAVDTDDPGPALGTDSEVGIDLGVKDFATLSTGEKIANPRHRDRKARRLAWYQRLMARKQRGSNNQRKAKRKVAVAHRKVRHARNDFLHKTSTRLVREHNVIAIEDLNVRGMTASAKGTIDVPGKKVRQKAGLNKSVLDAAWGEFRRQLEYKAERAGRALVVIDRWFPSSKTCSGCGHLLKKLSLGTRMWTCPTCRTRHDRDVNAAKNILAAGRVAAREYASGDACGAGISRRGSSLPRSVEKQETAAVRRSA

SEQ ID NO: 4480 - protein, 374 aa, unknown
  TnpB Polypeptide
MKTLKFKLYEHKRNKHLKRMINAAAVIDNHCIALHKRYNRMWGKHLSCAKIQSHIAKLRKRNPFWQSVGSQAVQDICQRIEKAYKLFFKHQNKKVRPPNFKKVRRYKSFTLKQAGYKLLGGNRIEIGNRVYQYWNSRAIEGTVKTLTIKRTTLGELFMVIVVDSVNEPKTKFETSRIAGFDFGLKTFLTCSDGSKIKSPQFLKQSLNAIKKASRNHSKKRKGSSNRERARKNLVRKHEDICNRRRDWFWKLAQQLTDKFDVLFFETLNLKGMQRLWGRKISDLAFGEFLQILEWVATKKGKQVVFIDRWYPSSKTCSHCGQVLKELAIDVREWRCPSCQSVNGRDENAAINIQMVGASTIGLGDVRRATPAVTV

SEQ ID NO: 4481 - protein, 418 aa, unknown
  TnpB Polypeptide
MKLTFKFKPNFSHKQLEIVKELSWHCSKLYNTVNYQIKNNEEVKPVYTRLENNFKSNWHTDYLHSHNRQQLFKQLAQDWKSYFNSIKDYNNNPNKYQGQPKPPNFKYLNSNPSEIIFTNLATRIREGKLLISLSREIKSKYNVKSLEFQLPTAIESIIDLDKIQQVRIKKDNLSDKWYLLVIYKIEVKDKEKGSNIMAIDLGLNNLATLTFKDNVDNYIINGKSIKSKNSYFNKEITKLQAIKMKQTGSKNFKDTNKIKKLRIKRNNYILDYLHKASRKIINLAKEYQVSKIIIGDIKQIKQNMNYNKSFVQVPMQRLKELIEYKAKLEGIELITINEAYTSGCSALDLERLNRDNYNKSRRIERGLFKSDIGLTINADVNGSLNIMRKFLNKKCIPKLVNQARDNGVVNPPSRLRIA

SEQ ID NO: 4482 - protein, 436 aa, Mollicutes sp.
MENKNLKKNKQISQTISETRKKRQNQICRVFHVKIQENKLSKLQKEQLQMIFVEGKRYKNHIINWSNQDKENNKIWNFDTKIKEITISDKDKNLSQYKLQYIPASIKQTILDEMCANIKTLSSLKKKGYKVGKLKFCKELKSVTYKQYGVTHKIVSSKRIKLQGIKGTIVVNGLNQFINENVDYADFKLLNTPCGYYVSITTFTDKEKINKKKTNGETVAIDFGCETSFTFSNGEKINVQVQESERIKKLSVKLNRRMKKGSKNYIKTVKQLRKAYRKLSNRKDDLANKIVAHLNEFENIVIQDEQLSNWQKNGHGKKVQHSVMGRVKSKLKQNPKTSILAKSVPTTKLCTNCGVFHDEMTVKDRMFVCGCGVSMDRDLHATHNMLWFYKNNIGMERTNYKRVEMKALVDSALECSNHNYGESSNQQSEKHEAYSL

SEQ ID NO: 4483 - protein, 371 aa, Clostridiaceae sp.
VEKSYKFRIYPNKEQEILIQKTFGSTRYVFNHYLAQRIEQYKEVGKAPTRFEQDKQLTELKQELIWLREVDATALQSSLQNLDTAYQNFFRRIKQGGKPGFPKFKSKRDKHKSYKSKKVGENITVLDKHVKLPKLGLVKCSVSKRVEGRILSATVVQNPSGKYFVSICCTDVDISPFESTEAAVGIDLGLKDFAITSDGEIISNPKYLAKSQKKLAKLQRQLSRKSIGSNNRNKARIRVARQHEKVFNQRQDFLQKLSTNLIRNYDLICLEDLQVKNMVKNHKLAKSISDVSWSEFVGQLQYKADWYGRYILKVDKFFPSSQLCSNCGTKWSGTKDLGVREWVCPECGTNHDRDINAASNILKEALRLLSA

SEQ ID NO: 4484 - protein, 313 aa, unknown
  TnpB Polypeptide
MRRLLKSFKTEIDPTEEQKIKIHKTIGTCRYIYNFYLFHNKERYDAGERFMSGKSFSVWLNNEYLPRHPEYSWIREVSSKSVKNAIENACTAFSRFFHHQSSFPRYKKKGRSDVKMYFVKNNPKDCLCERHRIKIPTLGWVRLKEKGYIPTSKDGYVIRSGAVSVKAGRYYVSALVDIPAPEAAGNFTDGIGIDLGLKDFAVVSNGTVYRNINKTARIRKLEKQLRRAQRKLSRKYENLKKGESTQRANICKQKLKVQKLHHRIENIRTDHINKVISEIVKTKPSHITIEDLNISGMMKNRHLSKASCVPEIL

SEQ ID NO: 4485 - protein, 399 aa, unknown
  TnpB Polypeptide
MKETKRQNIIKSLQETKEKRKTQKCLVFELKINYSKLNKVQKETLKMFFVEAKWLYNFYLSTDDIFNQSDKIEKVIIKDKDKKDIEKKLQYLPAQVKQTILKQLKQNVYNLSRAKKKNNKVGKLKFKSEINSIDFNQYGNTHRIINNNLFKIGRIKKYIKVHGLNQIKPEYEIANAKLIKKASGYYIKLTCFENLNSKDFNFINNKKGDVGIDFGIKDNIVTSDGEFFNIKIQEDEHLKRLQRKFARQKKGSKNFYKTKQKIKRCYEKISNKKQDQVNKLVNYLCTSYTSIYMQDENLKGWHLGLFGKQVQHSALGSIKQKLFKQKNVIIINRFEPTTKLCHECGAINKDIKLSDRIFKCACGYEEHRDIKSAKTIRFIGRFKNNYIPTEHRDFKPVEK

SEQ ID NO: 4486 - protein, 373 aa, unknown
  TnpB Polypeptide
MKTYCYKLYNNKNLKYLNNQINIAGNIYNYCINMYKMYYKLYGKSLNIFQLQKHLTKKKKYFKYWNELNSQTIQDITDRIGRAYQLFFRNLKHKIKTAPPSFKKSKKYKSITLKQTGYKLLENNKIKIQNKIFKYSKSRDIQGNIKIVTIKRDNLGGFYIYIVTDFVDSKPTMTGKSAGCDFGLKTFLTLSDNIKIESPLFYKQSQKKLKKSSQSLSSKKKGSNNRKKAILNFARIHQKIYNKRKDHHFKLAKELTQDYDYLFFETLNLKAMQRLWGKKISDLGFYSFLKILESQGNKYNCKIHSIERFFPSSKLCSKCGQIKKDLKLSDRIYKCDCGLEIDRDLNASLNILREGASSLGVEFVRPAIVGKFC

SEQ ID NO: 4487 - protein, 420 aa, unknown
  TnpB Polypeptide
MENMKLVERHKILKDNPNWKKLDYFSFISKNLYNQALFYIKQTYLETGKYLRYNAVEKYLRKENNENYKILPNNTSQQILMLLDKNIKSFFQLLKKYKKNKKSLNGCPKFPKYKDKEKGRNILIFTSNQFRLKDTFIHFPKKMNLKPIKTKVKENIKQVRIIPNSSCYVIEIVYEYKKEDKNLSKDNYMSIDLGVNNLCAIITNQPELKPILINGKQIKSFNAYFNKKLSKEKSQLKKNHNKDTSKKVQRMYLYRENWISNYLHHVSKIIIQYCIDNSIKNIIIGKNKEWKTNLNIGKVNNQKFVMIPYDKLIKQIQYKSEKIGINVIIQEESYTSKIDHLVFEEMKHQKKYLGKRIKRGLFQSSTGKAINADVNGSVGILRKVIGDSFVKKIFDIGFGYNPVKINFNEYRNFVLGQKSI

SEQ ID NO: 4488 - protein, 427 aa, unknown
  TnpB Polypeptide
MYNKTFKVRLYPNKTQQKTILQTIGNCRFLYNQILNEKIQVYKKLKENKEELKKYKYKTEKEYKEEFEFLKLGSSRALQQARGNLDTAYQNFFKNLKKKNKNVGFPKFKSKKKSKNSYREPQVGEKSIEIDLEKNKLKLLKLGWIKFKGLDKNFKGKMKSVTIEYTKTGKFFASILVELEKNSIKIRKSNNILGIDFGLKEFVTCSNEEQITGIKNELKVIENKIKKQQKHLSRKFSTNKKNKIENSKRQEKCRLKLAKLFEYRTNFINHFHWHLANKLCNENQVISLENLNISGMIKNKKLAKSIQNSNWYSFLMKLEQKAKEYGTTIHKVNRFFPSSKLCSKCGQIKKDLKLSDRIYKCDCGLEIDRDLNASFNLKNNFLFENNLSEEYSEYKRGEEIRPKKIIYDPKGIFYEAFTNKIGKNNCL

SEQ ID NO: 4489 - protein, 434 aa, Fischerella sp.
VIYLYGCQQILIHTDKILKAILEFICSESNKLSNGAIYYARQVWFKAKRYITKFELDSEMKSNRHFQTLYSQAAQQLCRSVYESFASFKQLNVLYKRGELVDKPKPPKYRKNGFNLVSYPKQALKLKDGQIRIPLGSQVKSWFKLDSFTLPMPSNLKFEDIKELRILPRNRCFYAEFIYKSNTVNSDVDKSRVLGIDHGLNNWLTCVSNVGTSFIVDGRHVKSLNRWYNKQVAIIKESKPQGFWSNKLAAITEKRNRQIRDAINKVARLVISHCLNNRIGRVVFGWGQGIKQEINLGQKRNQQFVQIPTARLKQRVEQLCQQYGIEFVETEEANTSAASFVDGDTLPKHGEKPDNWKSSGRRVKRGLFRTALNWYINADCNGAANIIRKVSTTLGLDLSGVSRGALTHPTRQYIWVTAKKKAIFADLSRCVASF

SEQ ID NO: 4490 - protein, 368 aa, Mycobacterium sp.
  misc_feature (61)..(64): Xaa can be any naturally occurring amino acid
MASRVRSRRTGTGRPPAPANAPVNGSGFPVSNAKAATRIECRSRPERCVWNPTAVTSPCRXXXXHLTLPVIGTVRTHENTRRIERLIKAGRARVLAISVRRNGTRLDASVRVLVQRPQQPKVVHPGSRVGVDVGVRRLATVATADGTAIEQVENPRPLGAALRELRHVCRARSRCTKGSRRYRERTTQISRLHRRVNDVRTHHLHVLTTRLAQTHGRIVVEGLDATEMLRQKGLPGARARRRGLSDAALGTPRRHLSYKTVWYGSALVVADRWFPSSKTCHACRHVQDIGWDEQWQCDRCSVVHQRDDCAAINLARYEETSSIVGPVGAAVKRGADRKTGPRPAGGCEARKGSSPKAAEQPRDGVQVA

SEQ ID NO: 4491 - protein, 551 aa, Mycobacterium sp.
MIVALRTRVQAGKVADLTGGVHMPGKPKPDGTHVLSRYVDVGADFEAHRVAVESVSVLFELYSGDAGGYAASGLLGEKVPSGWTITAAKFEVEWPADEDRAGLVRSHFGARRKAFNWGLDRVKADLDATSADPDHESVGWDLGSLRKAWNRAKDEVAPWWAANSKEAYSAGLADLAQALSNWGDSRSGRRAGRRVGFPRFQSARRDRGRVRFSTGTMRVEADRRTITVPVIGGLRSKENTRRVQRHLASGRARVVNMTLSQQWGRLFVSVGYALRTPDTARTVTEPTVRAGVDLGMRTLATVATIDTATGAETVVEYPNPAPLKATLVARRAAGRELSRRIPGSNGHRAAKAKLSRLDRRCVHLRREAAHQLTTELASRYGHVVIEDLDVAAMKQGMGRRAFRRSASDAAMGVIRPQLAYKSIRHHSTLTVADRWFPSSQIHHGCWQADGTPCRLVGKGLIDKHLVCSITGKVVDRDRNAALNLRDWPDNASCGPVGTTAPSVPGPITPVVGTGHGADTGSSGAGGASIRPRTHGAGHGEAKTPTPQGDAA

SEQ ID NO: 4492 - protein, 375 aa, Citricoccus sp.
MLLNQKYEIFPSPEQIEILETWLSYCRLTYNSALLDKQRKYRQSKESYSRFDMQKQLKQDKQEWEFLKKIPSQALQEVFRRLDHAFTKFFRKEANYPKLKKHKDYNSMTFPQFGFKPNTHHRYAASFTENGKLQLSKLGQIPIHLHRPMEGTIKQLIIKRQGSRWYAIFSVEGQAYPAPINRDLAVGIDVGLHKYAVLSDGKSYENPTFIRKTEKKLKRAQAKLSKMKRGSANYAKQVSKVHLFYEKVANQRRDFLHKLSYHLAKDYSIIAVEYLDIRHMVKNKRLSKSISDAGWGMFRNMLSYKCERNGGILLKVDPAFTSQDCSTCGTRVKKSLSIRTHICKGCGTILDRDHNASLNILRKGMEQLDQMVVID

SEQ ID NO: 4493 - protein, 368 aa, Erysipelotrichaceae sp.
  misc_feature (326)..(349): Xaa can be any naturally occurring amino acid
MQIGETIKIRLTSENSTNLLFFQTAYQYMLGCNFVSEWIFQHGFCINSNEVQKHVYYDLRELFGLKAQMAVSCIKTVTARYQTVDTQMRKNPYRFTADVKHYSFHRDMTWLQKPIAFKRPQCDLVRNRDYSFVHNKIDGHMQLSINTLGKRAVCDFMLPEYMQKFFDGSWSLGTAKLVELNDIWYLHTSATKNIDEFERGDVKHVVGIDRGLRFLASVYDEQQKTQFFSGKEILRKRDKFDAVRAQLQAKGTRSAKRRLARISGRENRWMSDVNHCISKALVRRYGSGTLFVLEDLTGVSFEEENMHGAKQTHDLRNWSFYDLETXXXXXXXXXXXXXXXXXXXXXXXXNPQFDKIKLIEPAESVSVN

SEQ ID NO: 4494 - protein, 377 aa, Paraburkholderia sp.
VEIKRAYRFRFYPTPEQKMVLARTFGCARFAYNHMLQFRTDAWYQRQERIGYHETSAALTALKKTPEYAWLNEVSSVPVQQALRHLQTAFANFFAKRAKYPNFRCKDGMQSAEYTTSAFKWDGKALTLAKMREPLAIRWSRTIPKGCKVTTCIVSKDAAGRYHVSMLCKDVVCPKSEVDAKVGVDLGLTHFAILSTGEKIGAPNAFRKSEKKLAKLQRRLAKKQKGSANRNKAKLKVARMHAKIVDARRDFLHKLSTRLINENQVIVIESLAVKNMQKNSRLAKSISDASWSEFLRQLKYKAQWYGRTLVRIDRWYPSSKLCSDCGHTAAKMPLSVRSWTCPECGSIHDRDINAARNVLAAGLAVSAHGESVNPMSL

SEQ ID NO: 4495 - protein, 189 aa, Lyngbya sp.
MRLDKASKGWLIPDKNGKRGGRPRFKKRGDICSFTFPRVNCPKAGAHLIGNILKLSKIGEIKVILHRPIPDGFTKKQVTLVKKADGWYASFSLEDDTVPEPLPVDKIKFAVGIDVGLEKFLATSDGQAVEIPQFYRKSQQQLARQQRQLARMEKGSKNYQRQANKVACIHLHVARQRFGVSLSSRSQAV

SEQ ID NO: 4496 - protein, 461 aa, Klebsiella sp.
MLTGIKLRANPTPAQRQTLSQWMGCARFIWNAKCDEERYYRTFARKYYPIGTFAPVDQTAAHFKDAELSPWLSSCPSQILRNAAVNWYQTYQKFMKGICGRPKRHPKTDRASMYLTRELFRFDTCADGNMRLFIGSKTNNIGYLSFKAHGRFNLPNSLYIRKERGQYYVSFCYENGKPETVSHADNLAILSGCSREWLEENTVGVDRGVAVPVQAGDKGYDYSVEQKKQLTKATRYIMRLQRRLARQVKGSNRRNKTKHRIACYYAKQGNIRADFAHQTSRKLVNSARVIIFEALATQRMTKKAKPKQDANGKFIRNGAKAKSGLNKSILNVGWHRIEGFTKYKAKAVGKACFRIPAPYTSQECAECGHTNPDNRKTQAAFICVSCGHTDNADRNASRVIKKRAIELIINPGTGLTNDNELVTGRQLTGSKTRGGTTSARTRSTVKKDKGGVTLPLEALPL

SEQ ID NO: 4497 - protein, 416 aa, Peptostreptococcaceae sp.
MYLTMKQQVKQLTKEDYKNLKLLSHIAKNLANEAIYNIRQYYFHEGEYLNYQKNYALLKSSPNYKMLNSNMAQQILKEADGSFKSFFGLLELAKKGKYNFKDIKLPKYLPKDGFTTLIIGFVRIKGNKLIIPYSNTFKRDHKSIEINIPPKLVGKKIKEIRIIPKSKARFFEIQYIYEIKELQSNVDKNKALAIDFGINNLATCVTSTGKSFIIDGRKLKSINQWHNKENARLQSIKDKQGYKSKYTNRQLKNTRKRNNRVNDYMNKTARTIINYCVENNIGNIVCGYNETFQRNSQLGKKNNQTFVNIPFGILREKIEYICRLYGINFVKQEESYTSKASFFDKDIIPVYNDDNPKEYEFSGKRIKRGLYQTKEGKLLNADVNGALNILSKSKVVDLDVLYNRGELDTPVRIRVA

SEQ ID NO: 4498 - protein, 431 aa, unknown
  TnpB Polypeptide
MKTAHRIRMNPTPEEVVYLKRACGTRRFLYNWGREQWEKQYQAYKAEQETVPEEQRVLKPPNALALKKQFNEIREQEYPWTYQVTKCVVEGAFDDLKSAYDNFFAGRANYPQYKKKGKSHESFYLSNDKFTLGSQWISIPGLGRFILDSRHTTKDRGKLKRQLGTVNLAEKLRFVEEGKATVRTSKRKQRKQVLCSAVKILGATVSCEAGHWYVSIQVEIQRERSKTPEAVVGVDVGVKQAAVVSDGRRLENQRPLALHLKKLGKLQRKLSKKQKTKDPETKRTIFSKNYEKQRLKVARKHQQIANIRRDSQHKFTTELARTCGVIGIEDLNILGMMANRNLARAVADAAMGQLLQFLKSKVANAGGDLLIASRWFPSTKRCSCCGHVKKRMPLKHRTYLCLVCGLVIDRDLNAALNLLWFATEQLRQLRA

SEQ ID NO: 4499 - protein, 377 aa, unknown
  TnpB Polypeptide
MLKAYKYCLLPTEEQKQQLAKFFGSCRFVYNLGLECKLQAWASARKHLTCIDLANQMKELKDTEAEWLQECPSQTLQMALRNLDNAYTQFFKGGGFPKFKSKHHRQSIQFPQGVKTDFENGTIFLPKLKNVACVFHRQFKGDIKTVTVSKTSTGKYFVSILIDNQKELPKKKPVKEKTAVGIDMGVKTFATLSDGTTFDNPKHLRCNLRRLRVEQRKLSRRFKRGAKEQSKSYLKQKLVVAKLHEHIKNQREDYLHKVSINVIRSYDTICLEDLNIRGMMQNKKLALAIGEVGWHKFKTMLEYKAEWYGKNILYIGRFQPSSKLCNTCGTIFKELSLKDRSWTCQSCGTHHERDENAAKNIKSFGLRIKPSTVNVSH

SEQ ID NO: 4500 - protein, 390 aa, unknown
  TnpB Polypeptide
MYKAFKYRLYPTEPQKELISKHIGSSRFVYNLALETKNAAYISAKHNYSAFDLVKQLPELKKELPWLKEVNSQSLQQSIQNMDIAFKKFFKGSGFPKFKSKRKGKQSFSIPQNVIVENDLLIIPKFKEGIKMSLHRPTKGTIKSATISVTPTGKYFVSILCDTKEEIPTKVPIKESTTIGIDLGIKDFAITSEGEVFENPKYLRKAQNKLKYVQRKYSKYKGKCTKKKLAKLHEDVANKRKDFLHKVSTQLIRENQTIAIETLAVKNMVKNHNLAQAISDASWSTFVSMLEYKADWYGKNILRIGQFAPSSKTCSCGVINKDLKLSDREWTCKSCGTTHDRDILAACNIKSFALKNYLSGEHRLKNQDELPTLVGVLTPEAQPIASGVGG

SEQ ID NO: 4501 - protein, 464 aa, unknown
  TnpB Polypeptide
MAEKPYVWHLGFKTKLVPTPEQVQYFARACGVARFAYNWALEQWHEQYRAHKAEPESVPLPNECALRRKLNKIKRQEFPWMLDVTKCAPQFAIKSLGKAYDNHFRNPKHFGFPKFKRKFRNDSFTISNDQFKLEGSRICIPKLGWVRMCEPLRFKNAKVLSAVISRQADSWYVSLNCEVSDLDHLVPAENQGRIGIDLGISKLATLSNGLEFEAPKPLKNLLGKLKKKQKKFSRAKKDSNNRSKLAVEIARLHRRIGNIRKDALHKLTTFIAANYSEVVIEDLNVKGMMANHCLARAIADIGFYEFRRQLEYKIELRGGRLIVADRFFPSSKICRFCHKKNDGLQLSDREWVCPHCGAKIESRDLNAAINLCHYPESVYWWSESTADYAPPAVAHHEKSEPDVSPVSLQGDRGGQCRSQTRGKQSRGRQERSTVMDAALVGEKSSSNCDPKIGEERVGFICSDI

SEQ ID NO: 4502 - protein, 257 aa, unknown
  TnpB Polypeptide
LHPLSQPSPFHPGCIVTHPSRAGKPVDPRFLRKAEQKLKRWRRRVSRKQKRSKNRQKAMKRLAKAHLRVSRQRKDFAVKTARALVISSDMVAYEDLKIAHLVKNHRLAKSISDASWGLFLSWVRYYGQISNVPIVAVSPRFTSQECSGCGFRVQKSLSVRTHVCLGCGLLLDRDWNAALNILLAALASLAAKHRRASCRSDRALDEEIALSGRRQGTGKGDSRGRLSVMLSRPLLSGPVRGPAPGQKAGSHAPSAAP

SEQ ID NO: 4503 - protein, 241 aa, Escherichia sp.
LSFRFHRALALQNENHEAGKKYIPYTKMASWLVEWKKDTETEWLKDSPSQPLQQSLKDLERAYKNFFQNRAAFPRFKKRGQNDAFRYPQGVKLDQENSRIFLPKLGWMRYRNSRQVTGIVKNVTVSQSCGKWYISIQTEREVSTPVHPSASMVGLDAGVAKLATLSDGTVFEPVNSFQKNQKKLARLQRQLSRKVKFSNNWQKQKRKIQRLHSRIANIRRDYLHKVTTTVSKNHAMIVIED

SEQ ID NO: 4504 - protein, 417 aa, unknown
  TnpB Polypeptide
MYLTIKQQVKHLTKEEYNILRELCRTAKNLTNQAIYNIRQHYFQEKQFLKYESNYHELKNSDNYKLLNSNMAQQTLKDVNEMFKSFFALIKLAKQGKYNFKYIKLPNYLPKNGYANLIIGMINIKDDMILTIPYSYTFKKKYETKIQIKVPKVLEDKKIKEIRIIPKFNARFFEIQYTYEIQEEKIKLNINNALAIDLGVNNLCTCVTNTGKSFIIDGKKLKSINQFFNKQNAKLQSIKDKQNILRQTKQQFLISRKRKNRVDDYINKTCRYIINYCLINDIGTLVIGYNQSFQYKPNLGKKNNQIFTQLPFGRVREKLEYLCRRYNINYILQEESYTSKASFFDNDDLPIYNMDNPQTYEFSGKRIKRGLYQTKNGYLFNADCNGALNILRKSSAVDLSILCSRGELDTPKRIRIY

SEQ ID NO: 4505 - protein, 375 aa, unknown
  TnpB Polypeptide
MKLILKIKLLPSKEQYDLLVTTMKDANAACNAISNISWDCCIFNQFKLHKEVYHHLKATTNLSSQIIIRCISKVSDSYKLDKKRKRLFKPLGSISYDSRIISYKDNDTVSIWSIGGRLKIPFICHNRSYIPFIKGEADLIEKNGKLYIFQTIDIPNKDTEVVESFIGCDFGLTDIITTSDGLRYSSDWINTYREFRQNIRSSIQSKGTRNSKKLLKRLSGKERTTATIQNHTISKRIINNAKLQHKGIAIEDLTYIRFTSNRRNKKITTKMNRWSFRQLRSFMEYKAALNGVKLIIVEPAYTSKTCSNCHHIGTRKNKHFKCDNCGHNEDADINASKNIATLGALVNMPEKSDMYSCSVHYLGLKSASTALAVIG

SEQ ID NO: 4506 - protein, 310 aa, unknown
  TnpB Polypeptide
MNKAEKAKAYREELKAEGYCPRCYKRKAVAGKLHCKECEKYYYAYYHAHKAQRLEYAKQRREKLKAAGLCTQCGKRQQEKGLLSMGVEKINNVTIEHTPTNKYFAVLNVKFEPQPMSNKGGKIGIDVGIKEFYSDSNGNVVCNPKYLEKSMRKLIREQRKLSRKEKGSTNRNKQRVKVALVHEKITNQRNDFLQKQSTMLIRENQTICIEDLKVKNMMRNHKLAQHIGSASWSKFFDMLSYKSVWYGNDIVKVPTMYPSSQACSCCGFKNPLVKNLAIRKWECPECHTKHDRDTNASINILNKGLQMQSA

SEQ ID NO: 4507 - protein, 395 aa, unknown
  TnpB Polypeptide
MKAYKTEIYPTKDQIKLIHQTCGNTRYIYNQFIAFNFERLEKKKPVVSGYDYSKMINHDPNIPSWLKTVSSKALKQAIMNANGALWAYLKGKKGKPNFKKKSKDNSFYLIGTSFKVERHRIFLPTLKWVRLKEYGYIPKDISSVTVSVKNGRYYISCLSKTETDERIVTSGEGIGVDFGLKEQFITKDQTIPSINKSKKVRQLEKKLRQKQRSLSRRYESNMANKVYYKSGAKKGQLKSFEWIRPLHECKNLRKQQLIVNKLYERLSRIRTDYNQKTLQSILKRKPSFIVIEDLNVKVKGLMKNKHLSKVISQAQWYQSRVFLQQQCEKLGIELRLAPRFYPSSKLCSNCGYKNVVLKLKDRSWECPDCHIVHDRDKNASINLEKCTDYTVLTAV

SEQ ID NO: 4508 - protein, 368 aa, unknown
  TnpB Polypeptide
MIKQKAYKFRLYPNLEQRIFFEKTFGCSRFIWNQMLSDRIAHYKETGEYLKNSPAQYKKGFPWLREVDSLALANVQLNLNKAYKSFFQSKFGFPNFKSKKTAQSYKTNNQKGTIAFLDGKVKLPKVGWVKVKLHRQVKGVIKSATISKTATGKYFISILCEEEIVPLPKANSNLGIDLGLENFAILSTREKIGNPKFLTSLSKKLAKEQKVLSRRGLLAKKKGVKLSESSNYQKQKLKVARLHEKIANQRKDFLHKLSTNLIKNHDVICVEDLASRNLMKNHRLARAIGDASWTEFVRQLRYKADWHDKKIVTISRWFPSSQLCSSCGESSGKKPLSVREWTCENCGTHHDRDINASLNILKEGLSIA

SEQ ID NO: 4509 - protein, 130 aa, unknown
  TnpB Polypeptide
VARIHEAISNQRRDFLNKLSTELIKNHDVICIEDLASQNLMKNHHLARAIGDVSWYEFVRQLTYKADWYGKKIIQISRWFPSSQLCSICGFSSGKKPLSIREWTCEHCGTYHDRDINASLNILKEGLRLA

SEQ ID NO: 4510 - protein, 255 aa, unknown
  TnpB Polypeptide
MEGKAKTATIKREGEHWYVVFACEVEAQKKLPSTDLPIGIDMGLKHFMTDSNGDVVDNPRFFRKSHGLLKKKQQRLSKRRNKSTRRRKSAQLVSKAHKTVRNQRRDFHHKQSRRLVDTFGTIVFEDLSMHHMVKRPKPKQDENGKYLHNGAAAKGGLNKSILDAGWASFIELVKHKAEWAGVTVYEVDPYKTSQICSACGEEGEHKDLSVRTHVCIHCGVVLDRDHNAANNILDRGLGRSPRETASAGTFRRAIA

SEQ ID NO: 4511 - protein, 302 aa, Oscillatoriales sp.
MYKAYKYRIYPTSEQETLLTKSFGCARWFWNYALNLCQETYKNTGKGLSRGYIQGLLPALKKEYEWLKDPYSQCLQVVALNLFTAYKNFFGKRAILPRFKSKHGRQSIGYPQNVKFNGDYINLPKIGLVHCRLHRGFEGNIKTVTVSRNPDGKYLVSVLVDDGKANPELLSVDKAIGVDVGLTHFAITSDGSKFYNPKYFVKRQRNLKRKQQKLSRKQKGSQNRKKARLAVAKVHSKTARCREDFLHKLSRKIVNENQVIAVENLNIKGMVKNHNLAKAISDVGWGMFCTMLKYKTESDGKT

SEQ ID NO: 4512 - protein, 454 aa, Oscillatoriales sp.
LLKNYVYKLRPNQTQDSKMSCWLDMLRSHYNWCLNDRITHYNQQFIQGNYCEIRTQSEVSPLTCYVSKNGATGNPWKDSKTDASGKTKNPRRSAGDIQITALPDLKIARPWYSGIDSTVLQQNVKRLDIAYKNFFEGRGFPKFKNRSNFTSFTFVMGVKIQGNKIYLPKLGWMRFYNSRSIPDGFTIKACAVRKRQNGWYVSIRIEDKSIPDYLTKSLVDVVKIIGCDLGITKLVHLSDGHQIKNPKFATNKKAKRTLKIRQRRVSRKVKGSKNRKKAAKKVGLFHQKISDKRQAYQWKIARKIVGRNIDAIALENLNVSGMMRRCRVKIDKKTGRFLKNGQSRKKSLNRSISDAGWSELTLKIEYLAAKQGKVVIKVNPKYSSIECRNCGHIDKSSRDGEKFICTECGYHEHADIGAAKTIRDRALKMVRGDSAKPGIFFNPQTLEELVARQG

SEQ ID NO: 4513 - protein, 527 aa, unknown
  TnpB Polypeptide
MNPRMPKGAAPKLFLGVHARLVFPDHRDEAAVLDLMRRFSSATRFAYNRLLEGQDRKELKREDSSLCRLFGLNTRYADGAIEKAQAALDSAKELGQDPRKVVFGGRKLFEQLKRRHLSGKARERLRREWKEKRQGFLYSRGDATKKGNANLRLEPQKDALWLRVNLGNGAYVHALVRTSHPQREAVLERVHASLPYNVALQLKDGKLYAHFTWSEGLPSPVHTKANGVLGIDVNGDPYHLALAVVSPDGNLRRYLALSLEEVDRAPNKGAKELLLWKVAHQVVALAEEHGVAIATEKLKRLRKSRRGDGSGRSFRRKQHRFAYHALLEKIHSLARKRGVEVLEVNPQDTSTIGMLKYAPGLSLSKDVAAAYVIGRRALGIEEKLPKGYGALLKDDAFLAHVHGFYGNRLQELQSLRSAEKNPYLRRRLSRDMGKAKAALTLVSSLQGSPGSREGVTEGRNPSGAHPWRVLRVGLFLPLLGLEVPRDLSPLKPILNLASPKHGSWKGWKVGSGPHPGGGPGCANVHFC

SEQ ID NO: 4514 - protein, 542 aa, Crocosphaera sp.
VKQYVKFLCIVVTSGKYNVRMMWISTVYSTIKLTTLILGYCYKLRPNISQSDKIDRWIDMLRANYNWSLADRIDTYYQRYICGDYCDLRTKVVITPLTCLLGGATGNPWSNKGKKKNPVNIQITEIPLLKRARPWYDEIDSTVLQQNLRRLDNGYNNFFQLNRGFPKFKNRSTFRSFTYATGVKIKGNKIYLPKLGWVKFYNSRPIPNGFKIKSVTVRKKADGYYVSVRREDKSVPTFPETKLEEIKTVTGLDMGLGKLIYCSDKSAINNPKFATNKTTKRLQKIRQRRISRKKRHSNNRRKAQQRLSIFQHKIAIKRDSYQWEVAKRIVHKSDAIAIEDLNIAGMIKRCKPKRDEHTGRFLKNGQSAKRALNRLIADASWYSLTQKIEYMAVKSGKIVLRVNPRHTSQECSVCHYIDPDNREGEKFFCTNCGHVDDANFQASINIKNKAINQYGLNIIKKVRRDLPEPKQLTLFETPTPELTEVKRRKQSARSGATPAIRNRLLVAHQDNGKRVVPGNLSEYTFQLSLFNQENNHPDRDSL

SEQ ID NO: 4515 - protein, 395 aa, unknown
  TnpB Polypeptide
MQAAEQITLKWARPLSSLCHLAKNLYNEANFYFRQFFFHLGEQINYYDLQFALQESACYRALPAQTAQQTLKLVIQNWASFFAARREYRRDPAQFLGCPRPPYYKARDGECVAIFTNQNTRLKGGYIHFPKKCSLRPVKTRVETYHQIRIIPKECGYTCEVVYDRPEHDLGLDKTRAIGIDLGLRNLATGANNIGLAPFVVKGGLAKSVNQFYNKKNAAMQRKKDVQKQDFQTRRQQQLLKWRNNKVRDIFHKISRKIITYCTAHDIGTIVIGHNKNWKQGLRLGARTNQNFVQVPLSRLVQMVTYKAQLAGITVVEVDEAYTSKCSALDNEAIGKHACYAGKRVSRGLFRTATGHIINADANAAANILRKAVPEAFRAYGIEGLALVPQLLAIS

SEQ ID NO: 4516 - protein, 453 aa, Moorea sp.
LPDSVLKFSTDWPEATLSAEPTLRERERKWYNSKVILTYCYRIKPSDEQIATMDRWLELLRRHWNYALGQRLDWLNRTRSPVDRCSVSYEPIGEIPHPVNYYTQQAALKETKLLFPEYKQIYAETQQVNLQRLNKAWDRWRKPVKRGKRGGRPRFKKSGELRSFVFPRVNNSRAGAHLIDGVLKLSRIGSMPVVMHRPLPDGFTLKQCTILKKADGWYCCISMKDDTVPELLPVDSVKSAVGIDVGLEKFLTTSDGEAIPIPQFYRKALDRLAQAQRVMSRRVKGSKNWKKAKHKVALLHLHLTRCRKEFHYQVAHWLCSKYDLIAHEDLNIKGLARTKLAKSIHDAAWGAFLEILQAVAVKRGLLVQFVNPRGTSIECFNCGSRVEKSLSERVHCCSSCKVEIDRDWNSGINILNRGLMAVGLPLNGCGKSIQDIEEQQVSFVSLRSLHHNL

SEQ ID NO: 4517 - protein, 529 aa, unknown
  TnpB Polypeptide
MRTMERFEPCDCRQDSGSTMLNRMCKPESEVSLLSVTAGYPVGSKLMISSGKRSSCGVSIPERKSCRTLEVASTSEGRDCGPYWNEYCAGISSNLWLPTETVLRDSDSSLSSSLLGETLVGSWFSTEQWTAPKQSLPGTSFRFSMSSLVESTGCESTVMKSRLIRLYPTAYQEKLMREWMGASRYCYNRAIDYRKAEQPCWDWMVVRRCFMPYLPRWTDAIPFQIKGIAFKEAFETVQRCIKVWKRTGVWAEPKFRSRKEPKQSCFIPKSAVSQDGIYPTILGKIRFAETLPDEIGDCRLVSYGGRWYLSVPHRVKRAIAESQGGRFVSLDPGVRTFITWYSAESCGKIGAHDFGRIQRLCHYLDDLLSRSAKVSASARRRMRKAADRMRWKIRDLVNELHHKAARFLCENFDVILIPTFETSEMVSRSCRKIGTKSVRMMLTFAHYRFKSFLKQKAFELGKTVIEVNEAYTSKTVSWNGEVIEKLGGRKTIKSSDGVRMDRDLNGARGILLRALADSPLLEQAFVKIH

SEQ ID NO: 4518 - protein, 348 aa, Streptomyces sp.
VKLRYNFRVYPTASQIPLLAKSFGCARVVFNDGLRARSDAHGRGEPFIPDNELQKMVTTLAKKTPERSWLAEVSAVVLVQSLADLHASYRNFFASRRGDRKGPRVQPPKYKRKSGRQAIRLTRNGFRIREGGALYLAKIGEVRVKWSRPLPVEPSSVTILKDSSGRYFASFVVEVNLGLSTYAVLRGRKIASPKFFRRQEKKLRRAQRHLSRCKKGGSNRRKAKLAVARIHARIADKRHNFIEQETTRIVRESQAVYLEDLNVKGMAARRAKCGRYGRGFVKVSRWFPSTQMCSNLNCGEISGPRGRRQLHVRSWTCSACGITHDRDENAEINLRREGRKLAAGHAER

SEQ ID NO: 4519 - protein, 400 aa, Methanobrevibacter sp.
VIIKKKMENSVKLRAGFMVKEINKGLKLKILPNGSMVEVLEQNMGNARFIWNNLLGMYFNLYLLFNFHGYPLYPNIRNFNAMLKMLKQENAFLYEGESTSQQQVFRDLNKAFTKFFKEGAGYPRFKSKKNPKQSFRIQKNGNNIRITNRRIRLAKLGYVHYRTSTEYKKLLKTSKINNVTIKRENGKYYAIVNITTTVEELEKTGKSIGIDLGLKNLATLSNGQEITNLDLKREDKMIQKYQKKLSRQKYMSKNYQKTLKKYYKWTNRKNNKIQNAYHQLSKYLITQYDIIAMENLNIKGMFKNKKWAPKLQKISLYKLLNMIKYKAEWYGKTFIQVNRFYPSTKTCNTCGYKNKNITLKTRQWTCPICKTKHHRDINAAKNILNESIKQNNLIKKRIKI

SEQ ID NO: 4520 - protein, 415 aa, unknown
  TnpB Polypeptide
MLRGFRYRLYPTPEQERLLAQHFGSCRFVYNHFLSLRQTSYRETGTSPSTNECMSQLTILKQEKPWLYAVNAQALQQALHHLDAAYQRFFRKLGNYPRFKTRHAGWHSFLVPQAFRIDQHHLVLPKFREGIRLVLHRPLGGIPKSVTITRTPSGKTFASVLCEVPDPVHPTPTSTPMACTGVDVGLTSLAVTSTGIVVPGGRFLRTQLGRLRRLQRAVSRKHTGSRNRGKANQQVARLHEYIASQRENLLHQVSRRIVDESQVPVLEDLHVTGMLRNHCLALSLSDAGLAALRRLICYKAAAVGKPVLLADRFFPSSKRCRRCHRVNHTLTLAERHWTCVVCGAVHDRDRNAADNLEDHGIAGHARTASAVPKERLPSARSRWGAGRAARRPAVRDSVHLAGSVKQEAVPTGLQG

SEQ ID NO: 4521 - protein, 415 aa, unknown; identical to SEQ ID NO: 4520
  TnpB Polypeptide

SEQ ID NO: 4522 - protein, 454 aa, unknown
  TnpB Polypeptide
MRDGAPQRAACSAGRAPNRASQAPDSAVRQACQRRAAPCSGSGRSPFSGAEASAFRPRRKRRSLVGCLRRATPMALKLVATVKLLVSPEERERLLATMRRVNEACSWLAERAFEVKSADKIGLQRAHYRELRDRFGLSAQHAVRAISKVCEVYRRDKSKRCIFRPHGAIAYDQRLYTFKSGLDRVSLLALDGRIVVPCAIGDYHRARLDGARGQADLVYRKGKLFLFVTVDVPDGSPIDPEGWLGVDLGIRNLAVDSDGEAHSGEKTLAVRSRIARLRAGLQSAATKSAKRHLRKLRRRERGFHAHTNHIISKSIVRKAKDTGRGIALEDLHGIRDRVTVRRAQRSTLHSWSFFQLRAFLSYKAALAGVSFVAVDPRNTSRTCPECGNIDKANRRSQAEFACTGCGFASNADHVGARNIASRAQVIAPIGSAVRLGIEHVLSSPQLCQVQSSAL

SEQ ID NO: 4523 - protein, 394 aa, unknown
  TnpB Polypeptide
VSNLAKRYDSNALYKAIKYRIYPTPEQEIQITQTFGCTRLVYNELLSLEMGLYEAEMGFMNQFELINYTNKVLKDCYPFLRDIDKFALDCTCKNLVEAYTNFFEGRTKFPKFKSKKDTYKSYTTNYTNNNIEVGVKQVKLPKLGKVEASIHRTPFKGATIKCATISKDCRNRYYVSILFKLKKTKEEIKQTKPTLDKTLGIDYSSPHFYVDSNNKSVDAPHWYRQREKRLAKEQKRLSRMIKNSKNYEKQKLRVANLHEEVSNQRRDFCHKLSREIANLYDVVCVEDINLQNLSQSLRFGKATHDNGFGLFRNYLKYKLEEQGKYYVVIDKWFPSSKTCSCCGTVNKDLKLGQQTWTCPNCNTTHSRDYNAAINIKNEGFRVLTTMLKPTEVTE

SEQ ID NO: 4524 - protein, 378 aa, unknown
  TnpB Polypeptide
MRRGYKFKLEPTQEQAILINKTLGCCRWVYNNALERKQKAYERRGKSLSATFLKNQLPALKKAKPWLAEVDSTALQQAIDHMDAAYQNFFKGTAKYPKFKSKHNELQSYKTVSTSLRIEDNKHVNLPILGVVRCRMHRQPKGTIKSATISRHAGNYYIGILCEEDEPAKLPTTANMIGIDLGIKEFAVDSNGLVYENPKYLKKSLDKLKLEQQKLSRMTKGSNNYYKQKKKISKLHLHIANQRLDHAHKLSTKLIRENQIISIEDLDIKSMLKKEDKTTKTRSTKDNNKARAILDAGWGQFIQFLEYKTTWYGRTLIKINRYVPSSQMCSHCGTINPAVKDLSVRSWVCPNCNTAHDRDYNAAINILREGLKAAASTT

SEQ ID NO: 4525 - protein, 439 aa, unknown
  TnpB Polypeptide
MKQIITAKLKLHTDPAQFAALRATQLAYRDALNFVSRYAFEHGKMSSGRALQRDTYDEIRLRYKIPAQMACNVPRQVGATYKVLWKKVKQNAALRKAGKTRKRYKGLDNPPTYVSPTLTYNYQRDYSLKPDKQVSILTLQGRVIMPYTGYSKHIALIQHDAHMGAARLWYDKPHKQFYLLVSLEVEGTEPTPETHKAVVGVDVGQRYLAVTATTRDETTFYSGKQVRAKADHYARLRKRLQKKGTRSATRRLVVISGRERRLKQAVNHMISHRIVDQHPHSLIGLENLTDIRERTKRKHGKQASKKQRRANQHASQWAFAELHGYIAYKALLVGAMAVKVDAHHTSQACPMCGYTSRANRPHHSLLFVCQSCQYTLHADLVGARNIALRTLLIRQDWVSTGVLSVRPDVSDAEAKAARLSRYAELRWSPDTSPCLPGMG

SEQ ID NO: 4526 - protein, 419 aa, unknown
  TnpB Polypeptide
MMTMNFRYRIYPDAAQQDTLFGWMEVSRSVYNYALREIKDWCNSRKCMIDRCSIVQEYILPANLKFPSEVNQLNALPDAKREYPRLAEPPSQVLQQTIKQLHRAWENFQERGFGFPRFKKYGQLKSLLFPQFKESPVTGLHIRLPKIGVIPINLHRPIPEGFVVKQVRIIKKADRWYASINIQCDVNIPNPMPHGYPIGVDTGLEKFLATSDGVLVKPPKFFKQMQSELKLLQRRLSRKQKRSKNYEKQRLKVARMHYTIDNTRKDFHFKQAHALCDVADMVFMEDLDYRISAKGMFGKHMLDGAFGQFRTLVKYVCWKRGKFFAEVDARGTSQECPECGGEVRKDLRVRVHCCPKCNYTTDRDVASGQVIRNRGIALISTAGHAGMETVCAVDLPKAGAIPSRQEAKPRKGKTRKASK

SEQ ID NO: 4527 - protein, 462 aa, Scytonema sp.
LYRTIPVKARFTDIEQAFWIDQCEHANSLINCAIYHTKQAHYVRLEESGSAFTTYWRGDELRHGWKTYKCFTTYPELDKVLKDNPHYKALAAQASQQTLKSVGESIASYNGLVNAYYKGEVDKPSLPKYRKKGGLAAVTFPRQALNYRDGNFYPSISKETKPQMLTEIKLHLPDFIDLDWVKEVTIRPYYGELWIDWVIDDGKEPIELNPNLDYTQAWSFDHGGTNWLTGVSTLGRSLIIDGRKLKSMNQGYCRLVAKYKQGKSDFYWDSNLDRVQRKRNNQMRDAINKAARFIVNRCQLDRVGNLVIGWNEGQKNGSDMGKRGNQNFVVIPTGRLIERLKQLCPEYGIVLTVTEEAYTSRASFLDGDLLPKFGEKPEGYKTSGTRITRGTYKTKNGVLVNADCNGAANILAKVARQLGVSLVKLGSAVLTLPHRYDLFRDLKKTFRTTGLCVSLDHGATSM

SEQ ID NO: 4528 - protein, 388 aa, Salmonella sp.
MKRAYKYRFYPTPGQVELLAQTFGCVRFVYNSILRWRTDAYYKRQEKIGYTQASARLTALKKEPEFAWLNDVSSVPLQQALRHQQAGLSNFFAGRARYPTFKSKRHKQAATLTDAAFKYRDGRLYMAKSKAPLDVRWSRPLPSVPSTVTVSKDAAGRYFVSCLCESEPASLPLTSSMVGIDVGLKDVFVTDSGFRSGNPRHTAKYAARLALLQRRLSKKAKGSKNRARARLKVARLHAKIADCRMDALHKATRKLINENQVVCVESLKVKNMLRNPSLSKAIADAGWSEFVRQLRYKGEWAGRSVVAIEQFFPSSKRCSCCGFTMKKMPLDVRKWHCPECGADHDRDINAARNIKAAGLAVLACGGPVIPEPLNAAQVRLRETRILVL

SEQ ID NO: 4529 - protein, 406 aa, Lactobacillus sp.
LVKLGRTIKLRLYPDTNQAEQFLAMSKEYQRLANIVSQWIFDHDFQLSWLKINHHLYKIFRQKSELNSQMIQSIFRTVSARYKTVREQMRQQSYRYKNEEDKWVQVPRDLTWLVKPIRFRRSQADLVRQSNYSFVDGMRQISITTLGKRTKLGFTNKGFEKYFTEAWKLGTAKLVHTGDKWFLHIGITKKVSDFNPKDNPQIVGIDRGLRFLATVFDSKGKTLFFNGQKILRRRKKFLEIRRQLQSKGTRSAKKKLKQLAQRENRWMTDVNHRLSKTLIALYGPHTLFVLEDLTNVTFNTDDLPKPLRNSHRSWSFFQLESFLTYKAQAIQSTVVKVSPAFTSQRCPKCGLIEKTNRHHETHEYWCQQCQYRCNDDRLGAMNIGILGQDWLNGVKHPKIRKLTTAG

SEQ ID NO: 4530 - protein, 585 aa, unknown
  TnpB Polypeptide
MLTVEFKLDLNQSQQTKVDDWLNVQRWVWNRGLHLLEEFESFTSWDKVSKAWTASCPIPWSYYKDDDNGQLVPFTRLAQTKPYRMSCPIPQAYRQPELESPNHFGLLYYFAQKNHEDKPWFCEVPSKVVAGTLKSLADAWSEYKAGKRKRPRFKRYKDKLKTLINNNSKSVKISGKQITLPKLGKVTVKTLDKRWDATVPIATLKIVKEPSGYYLQLTGELPKKRFKPSKKAVGLALGYRDLFTTDGGKVVEPPAYYQKMERRLQRLQRKLSRQQNLSPITTYNAELGEHFLSCPINPHKGANQAKTQQKISRQHEKIRRARKAFNHKISTKVVREYGAIATTKSSVRRITRRPKPIVNKEGTGYDQNGAVIKSQFNKMVLASGLSQFTTLVEQKAAVNGREYIEIAPKDLPDEPRQRAEHYSKRLQLPRALHLSAFPPGIYRPWGWEVAPAESLVTLKQEVSKETPLGDAKTTSNSSSEPTNPHGLVGVPQPTFTVDTSNHQQSGLSAVGGGELTRATAQNRLVTESEPATSSNSEPAKQHQTSQRRRTAPSTSENKSGKRKRRRAVENDSALVVEVARQQHPD

SEQ ID NO: 4531 - protein, 380 aa, unknown
  TnpB Polypeptide
MIAYKYKLYRTKQTKHLDAMLREASWIWNHALALQKRYYRMYHGYIDVVRMQKKWVRWYKTENSRLNSNTIQEILQRLDMTFIRFFRHIQTRPPKFKKAHSFSSIILRGGGFKLNENVLTLNKINKRFKFSLSRPYEGLGKIKRVALKRNKIGEYFVVITIDAESKPIGKSHNGASVGIDFGLKTYMTLSDGRRIKSPRFLKQGMNAKKNADRKVSRCEEGSNNRLRARHSKNRVEERITNRRDDWQWKLANELCRKYDVICIEDLHLKSMSKMWGRKMQDLSHGKMVLKLQYLAPRYGVKVKKVSRKFPSSKLCDCGYVYKELTLHDREWTCPMCGRHHDRDLHAANNILRQGIASLGSPNKTRKSVTATVQGRKYKKL

SEQ ID NO: 4532 - protein, 398 aa, Kribbellaceae sp.
MSRYRLVPTPAQVSGLLEHCRHARYVWNLGLEQRTMWRPGRPATPGYVAQSAQLTDARAAEPWLKAGSHTVQQQALRDLDQAWRNFWSGTHGRPTWRRQGVHEGFRVVGAQVQRVEKLSRKWGRVLVPKVGWEKFRLSRKLPDAKSYRVTRDRAGRWHLAFASIPEPIQPPGNGEIVGVDRGIAVSAALSTGELLSCPSLSRREQQRVKQLQGELARARPGSKRHEKIRAAIGRVKAREADRRKNWVERTSTDLARRFDLIGVEDLRVRDMTKSARGTTEKPGRNVRQKAGLNRGILAQGWSMLVERLEQKAPGRVEKVKPAYTSQTCSACGHVASENRENQAEFRCVACRYEANADVNAAVNIAVSIAAGRAVNARGETAVLVSEKREPQHTPPMVV

SEQ ID NO: 4533 - protein, 233 aa, Neisseria sp.
MKNVTVSRKCGKWYISVQTEFEQKTPQPKGGEIGIDMGIVRFATLSSGECFEPINAFKNLKGKLAKLQRRLKNKVKFSQNWQKLKAKIAKLHHKIAHCRKDFLHQTSSKISKNHAVVYVEDLQVSNMSKSARGIAEEHGKNVKQKSGLNRSILDQSWFEFRRQLAYKLAWNGGHLIAVPPQNTSRICPCCGYTAKENRQTQADFECVECGYTENADAVGAINILRRGQEILAA

SEQ ID NO: 4534 - protein, 388 aa, unknown
  TnpB Polypeptide
MLKAFKYRLYPTSSQAALINKHIGSVRFLYNLALETKQIAYAGNLINLSRYDLQVQLKDLKNELIWLKDINSQSLQVALMNLDAAYLRFFKGQNNFPKFKSKNRSNQSFNIPQNVNIDFEKNKLFIPKFREGIKIVLHRKFKGNIKQATINKTPTGKYFASILVDNNIPIPTKKPVKENTTVGIDLGIKSFLVSSDGKTFKNPKHLRKTQSKLKYVQCKYSKYKGKRTKYRLALAHEKVINKRKDFLHKTSTQLIKSHDSIAIEDLNVNGMLKNHNLAQAITDASWSAFVLMLEYKANWYGKNILKIGRFEPSSKTCSNCGTINKELQLKDRKWTCKNCGSVLDRDVNAAINIKNFALKNHLSEGRRLKNRNELPRLRGVLTSEAPCS

SEQ ID NO: 4535 - protein, 307 aa, Ruminococcus sp.
VRKINRAVKIRIYPNKEQITQIEKTIGCSRFLYNRMLADKIRYYQEEKKMLKNTPAGYKKEYPWLKEVDSLALANVQLNLEGAFRKFFREPGVGFPHYKSKKYSRKSYTTNMVNGNICLQDRFLKLPKMQPVKIKLHRIIPEGWKLKSVTVSREPSGKYFASLLFDCENQTVEKRQAEKFLGIDFAMHGMCVFSTGERAGYPMFYRNAEKKLAREQRKLSRCEKGSRNYQKQKKKVALSHEKIKNQRKDFQHKLSHSLAEDYDAVCVEDLNLKGIAGGLHFGKGIQDNGYGQFLSMLGYKLEERGNI

SEQ ID NO: 4536 - protein, 404 aa, Symploca sp.
MKARYRYRIYPTPRQQLALAKLFGCVRVVWNDALAFCITQYKTGAKKPKNAQLHKQFITQAKRTTQREWLSGVSCVPLQQALNDLEKAYRNFFKSCKGQRKGKPVKPPKFKKRHAKQSARFTQRGFTIRGDCLKIAKIGKLKIVWSRPLPAEPSSVTVIKDAAGRYFVSFVVEISPDVLPKNEDSVGIDLGIKTFATLDDAQKIDAPKPLKKRINRLRRLSKNLSRKNRGSKRYERARLRKAKLQAKLKDTRTDFLHKLSTQIIRENQTIVLEDLNVAGMLKNRKLSRAISDLGWRQFRTYLEGKAEKYGREFRVISRWEPTSLPCSCCGFRGGKLDLSIREWTCLNCGTTHDRDVNAAKNILVAGGHSETQTGRGGRRKTSVKEAVTCEASTHREYVQLTLFG

SEQ ID NO: 4537 - protein, 383 aa, Hormoscilla sp.
MQLVQQHIVNRNHPYWSYFDQQCFLSKNLFNLANYHMRQHFFGTRRVMSFTALYHLVSKSQAYYLLPNTKVAKQVTRRVHKTWLGYKAAHKDWQKHPEKYIGEPRIPKYKDKTKGRYMLVFPLETVSKPPLRKGIVKLTPCPIQFSSGLLDVAEVRVVPKSGCYVVEIVYEKQEANVVYGDAVAGVDLGLVNLVTLTTNQPGVAPLLIKGGALKAINTYYNKRKAKLQGDLETRHSLKVSSLLDALSMKRNNRVKNYLHTTSRRVIDWCVNHNIKTLIIGKNDGWKNGIQIGRKNNQQFVNIPHAKLVSQLVYKGILVGIEVITTEESYTSKASFLHLDELPLHGDGQKQKFSGRRVKRGLYKSALGLLNADVNGSYNIIRKV

SEQ ID NO: 4538 - protein, 394 aa, Mycobacterium sp.
MSRFRLVPTPHQEEVLMLHCRHARFVWNLAVEQSRHWRPGRRSPNYVDQCAQLTEVRAEHAWLRAGSQTVQQQALRDFAQAMQNFFRGTHRRPKYRKARVNEGFRQVAVKPRHIRVLNRRFGQVWVPKVGWVRFQLSRPVPDGVKSYRVTCDRVGRWHISFAHIPSAIPGPADGSVVGIDRGITVSAALSNGELLSVPGLSRGESRRLRLLQKRLSRAAPGSNRRRKTRNAVARLQAREVDRRKDWIEKTSTDLARRFDIIRVEGLDIRAMTRSARGTIERPGVGVARKRALNRAIRRSGWGQLVLRLGHKACGRVEQVPAAYTSQRCSVCGHIASGNRKSQAVFECEVCDAGPCNADVNAARNIAAGRAVTARGDLADGQSVNREPQLANPAA

SEQ ID NO: 4539 - protein, 413 aa, Janthinobacterium sp.
MERYQAYRFELRPTGEQERAMRRFAGSCRFVYNKALALQKENHAAGNKFIGYVAMAKHLTGWRNGTQTPWLKAAPCHPLQHALKNLEKAYKNFFEKRANFPRFKRKGSGDSFRYPDPKQFKLDQANDRIFLPKLGWLRYRNSRDVLGELRNVTVSQSAGKWFASIQTRREVDLTLPKAATAIGIDVGIARFATLSDGSFIAPLNSFKKHQQRLARYQRRMGRKVKFSSNWRKAVAKVQRIHTRIANARKDFLHKTTTTVCQKHALVCIENLQVGNMSRSAKGTAEQPGKKVSQKSGLNRAILDQGWGEFKRQLDYKMAWSGGMLLAVPPHHTSQTCPTCRHISKDNRQTQAKFLCVNCGCANHADVVGAANVLERGHRLLACGEMAQSGRSKKQEPLEACSNSSRRAVEIPVL

SEQ ID NO: 4540 - protein, 424 aa, unknown
  TnpB Polypeptide
MNKNETIKATLKATKAKRRTQMCRVYETKLDLSHLNHATQEHLYRLFLEAKWFYNYILSQHKIFGMDDKVHEVPVKVKDIFEIRDLRCLSSQMRQGLISRTQENIKSLSERKKKGHKIGKLKYKSEVRSIPLKQFGNTFKILDKRYITIQGLKQKLKVIGLKQIPEGADIANGALIHKNGSYYLSITTYQEKTKQIAVVEKSVGIDFGLSRQLMLSRTGIAIQYTIPVSPKLRKLAQKLSKQELHSKNWNKTRIKLNKEYDKATNIKQDIKNKVVSFLKDKYGTVCFQDENVKAWQRIWGRKILTTSIGGIISTLNKKVHTPIEVPKMYPSTKTCSKCGNIQDIALDERVYVCKNKKCSNIMDRDYNSSINIENEGLKRVGMVRTELTPVEIESSTLLFLRYFNSIPYVKASSVNESGSFTALA

SEQ ID NO: 4541 - protein, 211 aa, Burkholderia sp.
MILVYRYRVKSLNGLLNKQSRAVNYVWNFCNDTQNFATLSTGEKLPNDRFGQRAAEKLAKAQRARKHKRHIVKLHAKVANARADFQHKLALDLVRRFDYIAVGNVSAVKLARTRMAKSVYDASWSSFRNKLRYKAIAHGATFEEVDESGSTQSCSSCGSKDSTTRPKGIAGLRIREWACSGCGVEHDRDINAALNILRCGRASPGVGIFRL

SEQ ID NO: 4542 - protein, 425 aa, Thioclava sp.
MKTIRGHVYRLKPTPKQEILLARTAGVTRLVYNLALEQRRTWGGRRYAGGVTRSFGAMGMSRELSELRLSFDWIGAVSQTAQIQALIDLDRAFTNFFEGRAGYPRSRKRGEADSFRHVGREIALRKLNAKWSEVRIPKIGWIRYRDTRPLRANADGTVEIRNATLRRRPDSGWEISIATRCEIEERPVSAAAVGIDRGVAVPYALSTGEMVHLPNTVKRRRAAIRRAQKTLSRRNRGSARYARARRRLANLRARDARVRAHLSQVLSRRLARDHGLVAIEDLKIGAMTRSARGTAEAPGRNVAQKAGLNREILNVGWHALERMLGYKLQETGGILIKVPAAYTSQTCAVCGHVDARSRESQALFACTACGAQINADINAAKNILSRALAQDEDQRGNTPLLDVEAQASAAHEASTHLGPERFDAA

SEQ ID NO: 4543 - protein, 427 aa, Streptomyces sp.
VTTERAQKERRFGHRARLALTPAQVRLVDAQAHAARATWNLLHDWWTLLPKGKRTLAAADAAIRQARKEVGWLAALPAQAAQAVLRTYLQAWRNCWQGRADAPNFKARFRSVMSVDIPQGRDLQITRVHRRWGMVNIPKVGRVRFRWTKDLPVGKKADAGNRITGARLVKDALGWHIAFRVTTLEDTPEPHAGPEVGIDLGVTVPLALSDGTTRTHGEWLTGKEQARLLRLERRAAHRNSFRKRGERASRRLQRTYDQIASLRATAKRRASDWQHQTTTELARTYGVIVVEDLAITNMTRSARGTIENPGRNVAQKSGLNRSISGEAWGRTIALLTYKAARLGGALYKVPAPGTSRRCSACGFTTPDSRESQAVFVCKNEGCGWSGNADHNAARNILHLYRTGLALVPAAGRAVVRRPRGVKPATAR

SEQ ID NO: 4544 - protein, 206 aa, Okeania sp.
MPSNLMFNDIKELRILPRNQCFYAEFIYEIEGQKVKLNSDYVLGVDPGLNNWLAAVSNVGISLIIDGKHLKSVNRWYNKQVSIIKDGKPLGFWSKRLAKITEKRNRQMRDAVNKAAKMVINHCLDNQIGVIVFGWNKEQKKESNLGKKTNQSFVSIPTAKLKERIAQLCSQYGIKFIETEECYTSKASFLDNDWLPIFGEKPVCVA

SEQ ID NO: 4545 - protein, 937 aa, unknown
  TnpB Polypeptide
MSESLREYAEPRGFWPSQEVQSIEFADFVRGYGIHLSSWKRSRGCTEEQIFPTIKSFQQQQQQQPKRRFVVNETYEPPSELEERAKRRKIELKKAMERKKEEKRKKKKARIVVVSEQTKPIGRIERGQRYQYYAIVYPVRKVVRTFESALEVVKGVTGQHWRGFNSEERALEYLCDWERIDTECISFNREKRKTRWTKMEKIVSEYPSGPKSCTKFVDPTVKDGYKYFPCENEYNTEEPIALGGKEESWSATKLSNREFGHTRSQTRDLEAVESLQQMSADKQLENEQKKAAKVDAATSLFVLRDVEKEKGKALHFARSRSLDGVVKVYKCALYPTPKQKVVLKKFMEAETTQSYNFVVREVNKLQKEINKLYEEKKKKSQEKDVEEVEKKIEKEKEKLYSFSYFWKIFSHSGEGGENIPVDFFVTGLRKAHAALLSNVRKNMKAKEEGKKVTKFTLHERTPKVYRCTFRFGQGAVKRITRGPAKEVELNFGHNAKNKFYKELGIVRCVEQSSGDLDKKVNYGDNTGYHGRKEDRKFCQKEDISFEFDSRNGRWYAVFLFDAEKDPPAMLPHEAKKICSLDLGVTEPVVVYDFDGAIITGLLAPKEVWKERLKKLAKFQSYIARLSWARENEKKRKRFEYLFSIARGPFAGWKLGQKYVFENKNGKVVYMKKTPRQFAKWKRQLEKRYAGECAKFARWVRHQHRTAAAWLANNYDVIVAPKIDFHEFNFGVSFSSRGKKNTNRIAQSYSLCAFIDCVRYAFLARGKIVVSDKAVEAGTSKTCGNCFGWNEKLPLSGDRLVQCKWCKFKIHRDWNGARNNGLCMCTAGGYYRTLAGNNENGKIAKSKKYLFLNSVSGTKKGEGKKERHTQNVVTRATNATRVRPEDDSTYVTTSTKPAKGKYEVGIRVFDFTHRYRQKLTKLTKLTKERRTEDERRKK

SEQ ID NO: 4546 - protein, 372 aa, unknown
  TnpB Polypeptide
MVKAFKYRIYPKKSQQSRLNQTLDECRWLYNHLLEQRKTEWEAHQHSLSCFEQQRMYTTLKTERPSLRDAHSQVLQNVAVRIDLAFQAFFRRVKNGEKPGYPRFRGKHRYDSITYPQYGNGAKVNSNGSLFLSKIGCVKMIYHRSIEGTPKSVTLRRSATGKWYATIACEVEFQRLPDNPHEIGIDVGLTHFAVLSNGEKIDNPRFFRTEETELTKAQRKLSKAKEAKNQRLVERFKKIVARIHERIAFKRHNFIHQHSRKIIDANGLIAVEDIQVNRMVHNHCLAKSIHDAAWSGFFSTLSYKAEYAGRKFVAINPAYTSQNCSNCGHRQKMELSERVYRCHCCHIELDRDLNASLNILALGRQCLLEKSN

SEQ ID NO: 4547 - protein, 435 aa, Proteobacteria sp.
VRPNLRTPSRKEPGQACPSSRRSRPVRRAFKVEVQPTPTQLKALLQHAGNARWAYNWGLAQHQAAHAAWVAEGKPAKWDGWRTAIDLHKDLNALKKADPENGGVPWMYEASKCAPQEALRDLDRAFKNFLEGRAKYPRFKSKSRGIGGFQLTGTIQVAQKTVQLPRIGRLRVKPGDHGYLPWGRHSAVCVTERAGRWFVSIVGPQIADAANKGLPAVGLDLGVARLATLSDGTVIENPKALAAGRRKLDRLQREVARKKKISSNRRKARTKVAKAYARVAKVRSDALHKATTTLAKSHGRIVIEDLRVKNMTAGGGKKKRGLNRVLLDASLGEFRRQLEYKGKLYGCEVVAVAAQYTSQRCSLCGHTDRGNRPSQAGFCCLSCGFEINADLNAAINILVAGSCPETENACGAGVRRGGPRVTSQPAVKQESAVAR

SEQ ID NO: 4548 - protein, 417 aa, unknown
  TnpB Polypeptide
MEKGYKFRIYPNKEQKIQIEKTCGCCRFVYNHYLAKRIEVYKEQEKKLTLNECNKDLTLLKQAEETIWLKDVDKFALYYSLDNLDKAYDNFFREKEKGNSNQGFPNFKKKHKSKKRYKTAYTNGNIEVGEDIVKLPKLGKVKAVIHRSLDGRIINATVEHSSSDKYYVSIGCSDILCHNISPSDIIIKSVFPYILEIPYLIYMNINAYERIKSKDNSIGVDLGIAHFAIDSNGIKYENNKYYRKEEEKLSYEQKKLSRKQIGSKKYRKQRIKVARLHEKIRNQRRDYLAKLSSKLINENQVICLEDLAVSNMVRNENLSKAISEVSWAEFRRMVEYKAHWYGKQVVIVDRFYASSKTCSNCGYKLEVLDLSVREWLCPTCKLLHDRDINAAKGLVKEGLNILRGRNCPRGEPVELPR

SEQ ID NO: 4549 - protein, 354 aa, unknown
  TnpB Polypeptide
  misc_feature (24)..(55): Xaa can be any naturally occurring amino acid
  misc_feature (322)..(353): Xaa can be any naturally occurring amino acid
MQRGVLMLQNIWYILRRKTMPVLXXXXXXXXXXXXXXXXXXXXXXXXXXXXXXXXDLWEKTDGKSGKPRLVYENHAMPVFYRDVMYREGAEGKDEAYLKLYDGHDWKWFCVRLEHTDMEYLRKYWSGKKASAPTLEKRHRKYFLRFSYTEEVTLTKTPVKEQIICSVDLGINTDAVCTIMRADGTVLGRRFIDYPSEKDRMYRTLGRIRRFQREHGSAQTQGRWAYTKRLNTELGKKTAGAIVRYAEENHADVIVFEYLEMQGKISGKKKQKLHLWRKRDIQKCCEHQAHRKGMRVSRICAWNTSRLAYDGSGAVTRDWENXXXXXXXXXXXXXXXXXXXXXXXXXXXXXXXXF

SEQ ID NO: 4550 - protein, 377 aa, unknown
  TnpB Polypeptide
MIMLKAYKYRLYPNNKQINMIERTFGCARKVWNLMLADKIAYYNETGKSLTVTPAKYKRMAEYAYLKEVDSLALANVQLDLQDAYKSFFDRIKKGKKAGFPKFKSKKAGRKSYSTNNQRGSVRIENSKIRLPKIGFVKLVYHRPIMENSKIKTVTVSKTPSGKYFISVLTEYENQILESIPKTFAGLDFAMHGLFVDSDRRSAEYPNFFRQNEKKLARLYHRFSRTDKNSHNHAKMRLKISRLHEKIANQRNDFLHKTAKDLADRFDCIAVEDISVKAMAKRKKKGRFSFGKSVSDNGWSKFVEMLRYKLAWQGKTFIKVDKWFPSSQICHNCGFQTDITKNLSVRKWTCPKCDMTHDRDYNAAVNIRKEGKRIALA

SEQ ID NO: 4551 - protein, 488 aa, unknown
  TnpB Polypeptide
MSQKTIITRVRVHGHPYIGQVNGVDSWSDDPNTVMEWLCDSWRYRFNTLRSREWKYWYINEDNRYNTGVYPTTGEPRVFKRKSLNDNPDWRSDSEIRADVSWCESVPAMILHSAEKIEKTEWITAVKRRKTLRERNLNPGAYPGFKRRKDDKRFVSYHKNGSCSNANLTLVNKNHGYITITGRNKVIHRYEDESLNWCIQIKVKLTEEIRDYTSIRVNWTKRELVFTNEPVSCLRDDDPMDGIIGLDPGIAHFMTDSDGNYHDLPVDKLKSIDRRIRLLQRAQSRAMRMAGYDNEKDYRKAGVSRRFRNRETEIKNLYKHAHNIVEDYAQKLSTQLVREHAIIAIEDTRLANLMKSPAPVEDPLKPGHYLPNGRTAKRGLNRLLSMSRLGAFRDMLVYKAAAAGRVLIQVPSAFTSQVCSECGYTDAGNRESQAVYHCGKCGCIMNADVNAAVNMLLYAVALLNHEVNQGDSILNVTRTVRTAPGGAL

SEQ ID NO: 4552 - protein, 218 aa, Okeania sp.
LSYEFTSISTPKTTEVVGVDLGVKSLATLSTGIVFPGAKSYKKFESKLSKLQYLNRNKKIGSANWKAAQLKIAKLHTKVANIRKDVLHKLTTYLAKNHSVVAIEDLNVRGMLANHKLAKSITDQGFYEFRRQLEYKTQWYGSELVVVDRFFPSSKTCSNCGYVQDMPLNLRTYECPDCGISIDRDLNASINLRDAVGLTVNACGRSAADSSGGLRSIP

SEQ ID NO: 4553 - protein, 536 aa, unknown
  TnpB Polypeptide
MDADEYKKLLKKFHKLSDRHILVAEADMSYPDVQKVVNLSDRIRKAGNELVSLMKKNYEQLMRTKKYRKLLQLYGSTEDKKKRKIFAEQLNEMQEQYNVTWDFCRKSMIPIGKKYGIDAIFALTKSEDVWHGVEKCLYGNGKTLHFSKYGDLPCIRAKQINRGIPMSVKNNELKFKLGKLVFGIQVKDRFQTDEVNAVLDYLASPETTDRKAVQTLLEEACCISTYRPCYATLVPKFIRGKYRVYLHLTIEGRAKPKYDRFGNPRHKYSTGIIGADIGTQTVAYTSDTETGLKNLSERGNSIQTSERLERLYYRAMDRSRRATNPENYNADGIIKKGKKKWTYSRHYKKLKAKHAELCRINATNRQLAINEDANHLRSLGDTFVTEPKNAARLMKRAKETTVNNKGKINRKKRFGKSVKNRCPGGFQAAVENKFKTSGGTYIEVPNNYRASQYDHTADDYIKKKLSDRMYKLTDGTLVQRDWYSSFLLYCYNYRTNDIDKKKCAAKFKKCYSMEKDFIEWIKKHKINVLNSGIKIA

SEQ ID NO: 4554 - protein, 382 aa, Escherichia sp.
MRRFAGACRFVFNRALARQNENHEAGNKYIPYGKMASWLVEWKNATETQWLKDSPSQPLQQSLKDLERAYKNFFRKRAAFPRFKKRGQNDAFRYPQGVKLDQENSRIFLPKLGWMRYRNSRQVTGVVKNVTVSQSCGKWYISIQTESEVSTPVHPSASMIGLDAGVAKLATLSDGTVFGPANSFQKNQKTLARLQRQLSRKVKFSNNWQKQKRKIQRLHSRIANIRRDYLHKVTTTVSKNHAMIVIEDLKVSNMSKSAAGTVSQPGRNVRAKSGLNRSILDQGWYEMRRQLEYKQLWSGGQVLAVPPAYTSQRCACCGHTAKENRLSQSQFRCQVCGYTANADVNGARNILAAGHAVLACGEMVQSGRSLKQEPTEMIQATA

SEQ ID NO: 4555 - protein, 403 aa, Trichocoleus sp.
MIVLEFKAKGKTTQYSAINEAIKTAQFVRNKCIRYWMDNQGVGQKDLYRHNTALRAEYPFVKALNSHACQASVERAYSSIARFYDNCKKSVPGKKGYPRFKKNCRSVEYKTSGWTLSENRKQVTFTDKKEIGKLKLKGTWDLNFYQIDQIKRVRLVKRADGYYVQFLIRSENFHSIKPTGNTIGLDVGIKEFYTDSHGYSEPNPKFYRSGEKRLKLYQHRASRKKKGSANRKRAVNRLGRVHLKISRQREEHAKKVARCVIQSNDLVAYEDLRIKNLVKNHCLAKSINDAGWYQFRKWLEYFGVKFGRVTVAVNPAYTSQNCSNCGNCVKKSLSMRTHACKCGFVLDRDWNAAINILNLALSTVGHTGTWILDPNASGDLVSTVLGESLSRQAESLNEESPHL

SEQ ID NO: 4556 - protein, 395 aa, unknown
  TnpB Polypeptide
MKLITYQYRLYPNKTQAVLLEKHFGCNRFIYNYFLQRKITHYKETKKTIGWCELANELPKLKKEHEWLNEVASHSLQQSIIHLDNAYTNFFRSNMAFPKFKSKKNNRHSYTIPDFLSIRPDFENKRLYIPKFINTKNKDNRLKCIFDRKFEGNIKQCTVSRHVDKYYVSILVEENVELPKKPNMNRDKAIGIDFGVRTFCTFDSGTKIDSPKYFKQSQDKLAKHQQELEKMKTGTTEYKSKKEQIQKLHAKIARQRKDFLDKLSHKLTHDNQVETICIEDLSIKKMQKDNYKPTNRIIGDLGWYNFTRLLQYKSDWYGINFIKIGRFDPSSKTCSVCGNVYRELSRDEKEWTCQKCNFHHDRDINAAQNIKDFAFTNMCFKKGRDYPIETPRSLV

SEQ ID NO: 4557 - protein, 655 aa, Micromonospora sp.
VSGKLRLAEGEAARTACARALLRTGVDEETGEVLSAAVLAQRVGWCADLVAGMVAALIGEHWNTADVEVLAAGVNAGGRRLPPNAWMALRRLGWTVAPPGGVRVNDRVVRMVQEQAGRALRSAAWRADVTAGVLATWPADPRKRTPVEWEQVRASIPGGEHLPSGVIKGRTRQAAAFLTANGRVPADVFELEGVPRIPRMLLLAACDRQQATLERCATDPGRALLRLQLPVRPDPRAYGDWTWVACPIILPPTVPAGAVLHLPTLRVMGGRVRADVAFTHAVPNAQRTGHTVGLGVDWGVNTLLSAGALRLQADGRITALGAGAQFRAAGVLAKQHRLRRHGERLHTKVDHYQRLIGLDSRHQLVGKHAVLRDEIRHVSERRQNLNNALAWAAARWTVDQAIVAGASVIYVEDLRSLEARGMGVTLNTRLSQQVRGQIVDRMRHLAAEAGIAVVTVPARNTSKHCPQCLTPLQHRKAPDRPTVAGWKWAICPNTGSCGWQGDRDHGAWRRIAARGLTHQAKTVTDKTNGHMIIRAVVDTLEATAVITRTSRGDRSKTGPTRHKATRPAPRRRRAPSPARPHGQAGKRPEGHAPTDRTRLPRAAHRHQGVNTISTPTTGHRPRGAALGAGFHLNAHATPPRWETIPETQSDSRSLS

SEQ ID NO: 4558 - protein, 454 aa, Acidimicrobiaceae sp.
VPSKYQPPEGRVVQGFSFALDPTDEQMVLINRFFGARRFAFNWALSQIKDSIEHHRATCESTTAPSFYSLRKQWNTEKNTVCANDETGEVWWTDISKEVFADGVRGANDAYWRWQKSRKGMIAGQPVGFPRFKKRGRDRDRFSFTTGAMRLESDRRHLTLPVLGTIRTHENTRRLERLIVLDRAKVLGVTVSRHGDRIIAAVRVSIVRPQQAGVSQPDSVVGVDVGVRRLATVATVDTVIAELANPRALEGRLKELRLLQRQRSRRTRGSRQYLVATQKIARLYADAALIRQHTFHVFTTNLAKTHGVIVVEGLDASAMLKQKSLPGARSRRRGLSDAALGEIRRQLRYKCPWYGSTLIEADRFFPSSKTCHDCGHVQDIGWSEQWNCEECSSSHQRDDNAAINLARWASLGSVGAPVKRGAEHQTESHSAAGEDTRKGGLESFRPNNSVRRAT

SEQ ID NO: 4559 - protein, 424 aa, unknown
  TnpB Polypeptide
MMLRALKIRLYPNGEQTTRFNRVLGCYRFVYNQCLERKMNAYKDEGASLGLTDLSKWFHGTLLKDDKYAWLREQNTKVMKQSIRQMLTAYANFFKLHRGFPKFKSKHDTVLSALFPIDAISKRNTFDDRKITLTGDLSDIRFRCSKLYTNRLKMFKDGIRSATLSRTKTGKYFLSVLMDIPDDELVKFKRTGNSVGIDLGVKDFVITSDGEVFENKHFLKRTEHRIKVLQKQLSRKAKGSNNRFKQRIRLATAYERLGNQREAYIHYVVDSLLKNYDTVFMEDLNVKGMLKNHKLAKAIAEVGLYRFRTVLTDKATVNHKSVVFVNRFYPSSKTCSVCGYVKKDLTLNDREWTCPECGTHHDRDLNASINILNEGKRIVGVRSTELTPVDCPTMDDRSAMNLKSSGRMKQEGETDLLGFSIRLR

SEQ ID NO: 4560 - protein, 472 aa, unknown
  TnpB Polypeptide
MDNAKHKNINNMWTQVQMCPKAIIKTFGGFHPQRLSALYAERTVLRFLLVEEMLRALKIRLYPSGEQQTKMNKVLGCYRFVYNQSLERKINAYKEEGNSLGLTDLSKWFHGVLIKDERYDWLKQQNTKVMKQAIRQMLTAYNNFFKLHRGFPKFKSKHDIILSALFPLEAISSRNTFDDHKITLTKDLNDIRFRCSKLYHNRLKMFKDSIRNATLSRTKTGRYFLSILMDIPDEELIRFKRTGNAVGIDLGVKDFVITSDGEVFENKHFLKGTEHRIKVLQKQLSRKVKGSNNRMKQRIRLATAYERLTNQREAYIHYVVNSLLKNYDTVFMEDLNVRGMLRNHKLAKAIAEVGLHRFRQVLTDKATLNGKSVVFVDRFYPSSKTCSVCGYVKKDLTLNDREWTCPECGTHHDRDLNASVNILNEGKRIVGVRSTELTPVDCPTMDDRLATDLKSSGRMKQEGGTDEEHSFS

SEQ ID NO: 4561 - protein, 416 aa, unknown
  TnpB Polypeptide
MMLRALKIRLYPSGEQQTKMNKVLGCYRFVYNQCLERKMNAYKEDGSSLGLTDLSKWFHGTLLKDDKYAWLREQNTKVMKQSIRQMLGAYNNFFKLHRGFPKFKSKHDTVLTALFPIEAISSRNTFDDRKITLTKDLYNIRFRCSKLYHNKLKLFKDNIRSANLSRTKTGNYFLSVLMDIPDEELVKYRKTGNSVGIDLGVKDFVITSDGEVFENKHFLKRTEHRIKVLHKQLSRKVKGSNNRMKQRVRLATAYERLTNQNEAYIHYVVNSLLKDYDTVFMEDLNVKGMLKNHRLAKAIAEVGLYRFRQVLTDKAMLNGKSVVFVDRFYPSSKTCSVCGYIKRDLTLNDREWTCPVCGTHHDRDLNASINILNEGKRIVGVRSTELTPVDCPTMDDRCASNLKSSGRAKQEGGTDE

SEQ ID NO: 4562 - protein, 405 aa, unknown
  TnpB Polypeptide
MEQSPKKPFVKGYKYRIYPTDEQKQFLAEVFGANRFLWNQLLKESQEAYKLYEFQKSQTPEVEVNSPDTSGYGFVNKIPALKELHPWMKLYSNVAFQQTAITLGTAFANFFRGRKLHKRVGKPKFKKRSNDQGFHLTTSGFRLKGKELYIAKLDTPLKVIWSRELPSEPNSITITKNASGDYYVSFTCEYTPQKTAGETNVGIDLGIKTYATLSTGDKLENPRWLQNHLKSLKRHQKSLSRKIKGSKNRTKARIKVAKLHQKVTNARHDWQHKATRTLVNNSHVIGVEALAVANMIRNRKLSRAIQDAAWSSFFTKLQYKVVESQHATLIYMSRFFPSSHICSLTGKQLERKLSLDERTWDCPFCGNTHDRDLNAAANIENKAMELYATLPTSKSHHGEVAVVAG

SEQ ID NO: 4563 - protein, 358 aa, unknown
  TnpB Polypeptide
MIRKSTINLKFVNKGKLKKLKIIAEEYKRVVNIFIDRLWKEQQFSGSFVKDTNVDSWLSASLKQITAKHALSIVKSQRKKKKKSKPTFNKLTMELDSKVIKIKQDINSFDIWIKFLIISNKYDNKFGKRFSLNLPSKKHIHFNKFLEENWTIKKSIRLRITEKGYFIDVFFEKEAPIIKIKGKQKAVDIGYKKLIVSSDKEFIGDFKIYEKIARKKQGSKAFKRALIERDEIVNISCKALDLDNVKELFAEDLKNVKYKSKGKIRKKFNHKLQRWSYVKVLQKLTMLCEESGILFKKIPPQYTSQRCSCCGEIHKKSRKNEFFKCVSCNFESDADYNASLNILHIGQYGAYALQKPIL

SEQ ID NO: 4564 - protein, 403 aa, Lyngbya sp.
MIVYEFKAKGKPYQYKAIDEAIRTAKFVRNSCLRYWMDNRDLGRKELYRYNTELRAMYPFVKDLNSHACQASVERCWSAIARFFENCKKSSLALLNKGEIKGGIGYPKFKKYSRSVEYKTSGWRLLDPKQIEFTDKKGIGKLKLVGTWDLAFYPVEQIKRVRLVRRADGYYVQFCIQVDVKIETQPTGKTIGLDVGLKEFYTDSNNNTEPNPRFYRKSEKQLKFCQRRVSRKKKGSANRLKAIKRLGKVHLKISRQREEHAKKIARCVIQSNDLVAYEDLRIKNLVKNHCLAKSINDAGWYQFRKWLEYFGSKFGRVTVAVHPAYTSQNCSNCGTIVKKSLSTRTHVCRCGCELDRDHNAAINILNSALSTVGHTGTWILDPNASGDSTSTVIGGILSQQVES

SEQ ID NO: 4565 - protein, 427 aa, Lyngbya sp.
MLLTQTVRLKLNQSEKDNLANLCHLSKNLFNVGLYTIRQDFFQENKYLSYESNYHLCKENENYQLLATDCGQQTLKYVDRCFQAFLKLLSMKKEGVLQEKINLPRYLPKDGFFPLIIPIRARHNFAKDNWKIKIPTSRKYTREQGAVYITIPPNLRGNRIKEIRILPKQKGRLLDAAFIYESNQQPADVNPEKAISIDLGLNNLATVVSSTSESFIIDGRWLKSVNQWFNKRRARLISHQEKQGIEHFTKQEAWLSYRRKNQVNDYLNKAARYVVNFCLSRKIGTIVVGYNPTLKQNTNLGKRNNQNFVQIPIFTLRAKLKSLCERYGLNYVEQEESYTSKASSLERDEIPVYNADNPAQPKFSGKRVKRGLYRTKSGHLINADANGSCCIGLKSKHKLSFERVSRVCLTQPVRVNVLRESKTIAQA

SEQ ID NO: 4566 - protein, 385 aa, unknown
  TnpB Polypeptide
MQRTICLKLTPAPAQADAFADTSRLFTAAFNAVCHVGWKQQITNGVVLHHATYYATKAAYPTLVSDLLVQARVKATEAVKSAFALQKAGRTFGMPQSDACPPRYNRHTYRLDWASQTVRLSTTGGRQTMRFAVPDYCAHYAGYPVDTADLITRDGVWWLHVVVTLPAPAVEPTDEVVGVDLGIAQPAVTSNNQFLGKRVWKDVEGRLFFLKRKLQRKGSKSAKRHLRKVRGEQARFRHDCDHVLAKQIVRSAAPGAMLVLENLTDIRTRSTLRKRTATSRRVHSWSFAQLKSFIVYKAEERGCTVAGVDPRHTSQTCSCCGHVARNNRRSRGRFVCRTCGFELHADLNAARNIAAKYHASAGRPLTGGLPVNQPIVSVPVPQHQE

SEQ ID NO: 4567 - protein, 485 aa, Erysipelotrichaceae sp.
MSRYERTDSFILTLEADITDRTFIEKYFRVLDQIYNGCLDVALKRLHKLQMDPEYQSLVKDKTIKGRNKKIHQKQLEYGYTEYQFHEKAAEMKHHFSDIVGIDECQKQATKAFRAVEKLRFREADHIRHHSRNDDTSVEGKSKNSALNYRNGLLYIGRNHRYEVIVKPDDEYAKEALQNSRLKYVRLIRKIIRGKTRYFVQLVLRGRPPKKHEYGSDTVVTGLDIGVSTVAEVSNKHVQLHELAPEIPLIDAEIRKINRAMDRSRRSTNLFNYSDDGTIRKGIKLHWAYSARYDRLRKRRKELYRKRAALIKMAHEKLVNEILERSTTVICETMNYRALQKRSKNTTRSTKNGRFNRKSRFGKALANHAPSMFERILDQKLQYIGKELIHTDTARIRASQINHVTGELIKKDLGVRLFEIDGNIVQRDLYSAFITGHTLYSSEGSLKPDTVDYESCANDFENFINLQNKELERLTSEKKLSWYIN

SEQ ID NO: 4568 - protein, 388 aa, Methanobrevibacter sp.
MLNFSRGVIFMCLVVNKGLKLELLPSKSMIQFLEQNIGNARFIWNNILGIYCDLYELFKFHGCPLSPTINNLNAILKMLKQENSFLYDGESTSQQQVFRDLNKAFTKFFKEKHGFPKFKSKKNPKQSFRIQKNGNNIKITNRRIRLAKLGYVHYRTSSKYKKLLKNSKINNVTVKRENGKYYAIVNITTTVEELEKTGKHIGIDLGLKNLATLSTGQEIVNLDLTHEEEMIHKYQRKLNRQKYMSNNYKKTLQKYYKWLNRKNNKIQNAYHQLSKYLVRNYDIIAMEDLNIKGMFKNKKWAPKLQRISLYKLVKMIKYKAEWYKKTFIQIDRFYPSSQLCNNCGYQKHDLTLGIREWTCPVCKTKHNRDINASKNILQKAIQENIVNS

SEQ ID NO: 4569 - protein, 301 aa, unknown
  TnpB Polypeptide
MRLDKRLYSKFNRKSIALCSGKACKRAVADIVGYDRLESLFVQYTTADPLIFMRNGRFFLSITFNVPDVPLYDDNCIGLDMGERRFAISSDGIMFHDKEYNKRKRKLRYLKRCLQKKGTKSAHRHFRKLSIKEHNQSTDMCRKIANAVIQSTAASIIVMEDLSGIKQKTSKSKEGFKRKSHNRRMYQIPFYKFKQILSYKAPLYGKTVETVSPFMTSQTDCTTGKKEGTRKNRRFYCKNGTVLDADWNAAINIARKSKHPSSFKTPLDGALRTWKAGCMSTAQSYISLPAVTTGAVQAHAL

SEQ ID NO: 4570 - protein, 441 aa, Patescibacteria sp.
MITRRATYRLYPTSAQEDQLYKWRKMHQYLYNAAIANRKTQYERFKHGVDYFEQQNCLPAFKQVWPEYKALGAHALQATLKRVDMAYQRFFKKLGGYPKFKSIRHYSGWMYPDRDNWKAHTIGDNGYLEISNLGSIQMRGKAKTWGKPTTCTIVYRSGKWYASITINCEPAAKDLGTGSIGIDFGVNAAAAVADGEKGYFIENPKWFKQTLPKIKKASRNKRRKRAPNWKKRIKASRRYKTVQKKVVRLHHKAANQRQNWIHHQAAQITSSNSLVATEKLEVKNMTRKAKSGSKRKRQKAGLNRSILDVGWGMLTAAIKYKLEEGGGVFVEVPTKTVKPSQTCPRCLHQKKKELSERIHLCLECKYTTDRDLASAEVMLLWATGSGAFGTSVLRRGANGSTSQTKERKNCGSMKQLGAMKRQKSLSADGHSETPSSRSRAG

SEQ ID NO: 4571 - protein, 370 aa, Actinomadura sp.
VQLRYSFRLYPTAGQQQALARAFGCARVVYNDALRAREDAREAGLPFPKAAALSAAMTEAKKTPDRCWLGEVSSVVLQQSLRDLEAAYRAFFDGLAGKRPRIGAPRFKSRKDRRQAVRFTANARWSITPGGRLALPKIGPVKVKWSRALPSVPATVTVVKDAAGRFFASFVVETDDEPLLAAEAEVGIDLGLEHFAVTSDGRKITSPRFLRRAERKLRKAQRDLSRTQKGSKNRDKARTRVARAHAQVADARREFHHTLSTMLVRDNQAVYVEDLCVKGLARTRLAKSVHDAGWSAFTAMLEYKAVRHGRTFARVDRAFPSSQLCSGCGYRDGPRPLHVRRWTCGECGAEHDRDVNAARNILDEGRRITT

SEQ ID NO: 4572 - protein, 414 aa, Streptomyces sp.
MQLRYNYRAYPDTSQRRALASAFGCARVVWNDCLRDRKEAHAAGLPYVKSAELSRIRITQAKRTAERAWLAEVSAVVLQQSLRDLDTAYKNFFDSVTGRRQGRKVGPPRYKSKKDTRQSIRLNTNAFSLQENGTVYVAKVGNLKVKWSRRLPAAPTSLTVTKDSPGRYFLSFVVDSEPDVLPGLETDTGLDLGLSAFAVLSGGRKIDSPRFLRRAEKKLKRLQRELSHKAKGSKNRAKARIKVARQHARVADRRRDWHHKASTQIIRDNQAVYVEDLAVSGLGRTRLAKSVHDAGWSAFVGMLEYKAALHGRTFAKVGRAFPSSQVCSACGFRDGPKPLRVRRWTCGECHAVHDRDHNAARNVLFEGRRIVAAGRVETPNACGVPIRRARVPAQRGEAGSPRKGQTTQAGIPGL

SEQ ID NO: 4573 - protein, 554 aa, Streptomyces sp.
VGDLRSVGASFVVPGLSGVTVRDRLKGLTAHDERVLRLVGDHLGSLAARDLKARCAVGPEHDNEAWAARKRELTGLSSSRWAGSLTKATHDQWALARRGQQAHIRQLEAGVDTIRHRLSLPLGEKGSKRASGGYRSRWEWHAKTRRLRVLEDRLERARADWAAGRVRVVRGGKQLLNTRHHLDQAQLTEEVWRGRWEASRRFLQADGESGKRYGNETIRISPDGQVSIKLPAPLTHLANAPHGRYVLTTRVAFAHRGETWRDRVEANRAVAYRIHEDTGRRRWYLTASWSIPPAQTVPLAAVRAGGVIGVDTNADLPHARLRSRGGTPTAAWRLDAHGNPVGAPRRFDYILSGTSEHRDAQVRHALTRLLHWARRYQLAIAVEDLDFTAETTREKHGRRKHFRKLISGMPVARLRARLVSMAAELGIPLVAVDPAYTSKWGAQHWQKPLTNSKRTTTRHDAAAVAIGRRALGHPVRRRTAPPRTHQCDGHGHRTVQARPAAPGREETRPRIPGPRTRSVPPGRGANAGDQNTQHRPGCSAEHGFWQQDSPPLSP

SEQ ID NO: 4574 - protein, 148 aa, Lactobacillus sp.
VTLPLLSLIPKLTVKLALILIWITSTLIKNHDLVVAEELRSKNLLKNHALSQAISDVGWRTFLNMLAYKAELYGKQFKTIDPKYTTQRCHHCGSIMGQNGYKKLTLKDRKWTCPVCKNKHIRDWNAAVNILEKGQGIWKNPKIKEKAA

SEQ ID NO: 4575 - protein, 626 aa, unknown
  TnpB Polypeptide
MRKNNLMSNFSSLKKLYKQTIDNLFIKHNNVVGFSDFKDILTKYSIKKRQAKKDFSLFRENNGLSKQDIKDILITLNKANHFTISTSNINKLSSRISQIYTYYALQQYNNWTTCFRKMPEKRIRIKPKTPSFTHEFRLNPSNHAIRKYNIKFKALQELYNTVLGEIFKRHDHMLSDSCHQEARELHKSDDTKKKAKQLFSKLQNTYGLSKNDLQKFAKLTKDNCYMKDHLDSDSIQVLSDRVFDTYMRYCCNQGGKPRFKSWKNGVKSIQGKKNACLSFNKGVFSWLGIKSKIVIENNDKYGVQAHALTSKVKYCRIVRKLIKGRACFYLQLILEGIPKLKSNQIIGKGQNGVDIGVSTVASVGKEKALLAPFCQELNDIEKEIGVLQRKLSRSLRINNKDNFEDDFFIKINNHFKRKKGQNIKGKKEWSKSNNYLQLESELKELYRKQANKRQYLHNTLANKVIQNGNNIIIEANPYKAWQKGWFGKTIGKKAPSNFVQTLKRKALKSDGTFEEVSTWETKFSQYCHVCNGYHKKSLSDRTHSCGENDIMQRDLYSASLMYYYDSKEKKVDRNSMLNHWEDGLETILNEALLTLKKSRNMGNIPTCLISKDVEKRDMLQKSLGVL

SEQ ID NO: 4576 - protein, 385 aa, unknown
  TnpB Polypeptide
MKRTYKFRLYPLASQQTTFTQWLTTCRLLYNTALAERKKAWETQKRSVTYGEQARQLKDAKKTNPLLKTVHSQVLQDVLKRLDKTFKNFFRRIKKGEKSGYPRFKGQYRYDSFTYPQSGFVLDYQKKKLRLSKIGGISIKLHRPIPTDGIIKTCTIKRDVDNWYACIVVALPDSVPHTQQRAIQQAIGVDVGLKSLITCTNGDTIANPRWLRHSEKKLAKEQRKKDRKVKGSCNHHKQNMKVARIHRKIRNQRKDFHHKLSRSLVDSYDLIVYERLTITNMVKNHHLAKSINDAGWGQLMCFTEYKAEEAGTLVEYVSAYHTTQRCSRCGKLVPKTLATRIHRCPYCGLVLARDHNSAIMVLQQSTHYVKARSSAPGQELPVEPD

SEQ ID NO: 4577 - protein, 320 aa, Clostridioides sp.
MQAISDKFSANRKTIAELRKKGNTKAKYPYKEKKFYVIPFKNSAINTNSMGNLKFSMSKGRHLELDFNIENIKTAEIVWRNGYYLYYTFDNGLDEVVAEGTNIIGVDLGEIHSIASVTNEGNGLIISNRTGRSVKQFRNKMYAYISKRLSRCKKGSRQSKKLWKLKNAIRTKTDNQLRNLYHQATKKFIDFCVEQQVCEIVLGDIKGIEKNTKKKKRLNRINRQKISQMEYGRIKDYIKYKAKEQGIEVKLVKENYTSQTCPKCSKKHKPIGRIYSCTCGYKTHRDIVGAWNILNKKHKYNLVDFSINHKQPINLKVSTI

SEQ ID NO: 4578 - protein, 369 aa, Fischerella sp.
  misc_feature (197)..(200): Xaa can be any naturally occurring amino acid
  misc_feature (269)..(352): Xaa can be any naturally occurring amino acid
LKVKGFESISKKKFKNGGGISKVKFRSRKDPIQSCYIPKSAVSDKGIYHTILGEVIFKEALPQSFGDCRLVKAYGDYYLTVPEEVSRQQSENQGRVVALDPGIRTFITFFSESNFGEIGISANIQIQKLCFRLDKVISKIAKAKCKSKRRLKLAATRLRGKIKNLVDELHKKTARFLVDNFDIILLPTFETSRMSKXXXXLHKKTARFLVDNFDVILLPTFETSRMSKKAKRRIRSKSVRQMLTLSHYRFKQFLKHKAFETNKVVIDVXXXXXXXXXXXXXXXXXXXXXXXXXXXXXXXXXXXXXXXXXXXXXXXXXXXXXXXXXXXXXXXXXXXXXXXXXXXXXXXXXXXXNAKGSKWCARDFPSRIG

SEQ ID NO: 4579 - protein, 397 aa, unknown
  TnpB Polypeptide
MLKAIKIRIYPNQIQDNYMVNLLGSSRFVYNNCLAYRIDRFNNYDETIGFGELGKYLTSLKTKEEYRWLKDVHSKVLQQSIINLEAAYKSFFKNGTGFPKFKSKHNNKQSCRFPSDAIGKIKGNRINIILPLKNIHYKCSINDEKYLNKQQKNIKSATLTRTKSGKYYFSILIDKPNKVLPKPKNDVIGLDLGIKDFIITSNNDVYKNIKIRRNNQKKLIKLNRQLSTKVNGSNNKNKSRIKLGRFHEKLNNQKENYLHQISNQLLNENQVIVIEDLNVKGMMKNHHLAKSIQELSLYRFKEILTYKAKWYNRDLIQIDRFFPSSKLCNNCNYKNNNLELKHRKWQCPECGIQHDRDYNAALNIKKEGKRLLKITEDKLGLSSPELTPLESISIETQ

SEQ ID NO: 4580 - protein, 401 aa, unknown
  TnpB Polypeptide
MSRYRLLPSPAQEAALREHCVHARYVWNLAVEQHQHWRRGRKSAPGYLEQCRQLTAARAEHPWLGAGCQMVQQQALRDFAQAVTAFFDPANPAGRPSWRKAGRDEGFRIVGRRGRHWDVRRVSQHVGLVRVPKAGWVRFRWSRAVPEGAKSYRITRDRAGRWHVAFTAIPVPIASPGNGQIVGIDRGIAASAALSTGELLTAPRLSGQRKKRMRRLQRRLARARPGSHRRGRVKLAIARLRAREADARKDWAEKISTDMAHRFDVIRVENLRVKKMTHSARGSGGNPGRSVRAKAGLNRAILASGWGLLVRRLEEKAPGRVEKISPAFTSQRCSACGHVDAKSRESQARFVCTACGFACHADVNAARNIAAGHAVTARGGDGVARPVNREPQLLASLTGRE

SEQ ID NO: 4581 - protein, 374 aa, Methanolobus sp.
MRKTYKFRIYPNKPQQKQMEQSLEICRQVYNRTLAERKTAYDERGETLSKYTLNKLLPDWKKENPEYKDVFSQTLQEVQERVDLAFKHFFRRVKNGEKPGYPRFKGKGWYDSFTYPQMGFKLDGNLLYLSKIGNVRVKAHREVEGDIKRIIVRRSACKKWYISITTECEDIEIPECNMEHVVGIDMGLSSFATLSDGTAIPNPRFFRLEEKELAKAQRKLSTAAKFSPERKKAIKVVRRVHERIANKRYNFIHQLSRRLVGDYSFIAFEDLNIKNMLKNHCLAKSISDAAWNMLISATKYKAESAGSLVALVNPANTSKMCSRCGLLVEKTLSDRTHKCNSCGLVLDRDHNAAINILRLGLQSVGIESVEAHVL

SEQ ID NO: 4582 - protein, 342 aa, Methanolobus sp.
MQKSYKFRLYPTKQQEVTLIRTLGVCRHIYNEFLADRRNAYERCNQGLSTMEQLYQVQYLEFDIDVHSQVKQDVIRRLGKSFDAFFRRCKNGEAKVGYPRFKGKNRYNSFTYPQSGFSIFGKKLKLSKIGEIKIVQHREIEGKIKTCTIRKDGKQWYATFSVVIENNVTPVEPVTFVGIDVGLNSLVTLSDGTQIDSPNYYRNTEDELKRQQRNLSRKKKFSNNWKKQCDKVNTSHRKIRNQRNDFNHKLSRELINAYDFIAFEDLNVKNMVKNSRLSKSIHDASWSNLIQITKYKAEEAGKFVELVNPCNTSQLCSNWSKSRKIISSENTQLSSLWINSGP

SEQ ID NO: 4583 - protein, 412 aa, Calothrix sp.
MYRAIKVRIYPTDEQESYLAQCFGNTRWLWNYMLNATTTAYKETGKGLSKAAMDKLLPGLKKEYEWLGLAYSQVLQRVTFNLSSAFVNFFEGRAKYPNFKSKHGKQSIQYPQNVKLMPDDSVIKFPGSLGLMKAVFHKQLPDAKFTTVTISRNADGKYYASIVFNQEDEPVTAINKAIGVDLGLKNFAITSDGSKYDLPKRRLAKLEKNRKRKQKKLARKKDKTSNKRQKARRLVAKISSKIPRVREDFLHKLSRKIAYENQVICVEDLAVKNMVKNPNLAKAISDQGWGMFLTMLKYKAERFGHTYQEIGRFFPSSQLCSETLLPIPVLQNGYDSLGVRFVYCPHCQKQHDRDINAAINIRNEGLRLLELGTSSSALGGDVRPKSSGRKKSTKVEAIPNELGSLHSPVRGV

SEQ ID NO: 4584 - protein, 548 aa, Actinomadura sp.
MASHISAWESVSSPLVWTPIETIPVPITSAKYPGLRLATACSTAPRRSPVRSLITNPPKATPGALGQVGFVVSQLRSEGVGTVRHRLSSTHGRILRTSTFTFCNVPVMRTAYKCRAYPDPEQAAILGRTFGCVRLVWNKALAERHRAWRSEGRRISYKEADAALTAWKKTEELAFLSEVSYAPLQQVLRHQYAAFAAFFAGRARHPRFKNRASRQTAHYTRSAFRIKDGELWLAKTTAPLPLVWSFDEVDLATLNPTRVVVSRDPDGRWYVTFAVDTDVPAPMPAIGHAIGIDLGVKDFAVTSDGDRIANPRHLEKKQRSLARYQRRMNRKQPGSNNRHKARTKFARASRKVRDARADFLHRTSSNLVRRADVIVIEDLAVANMMRNHRLARAISDCGWGEFRRQLEYKAGRAGRVLVVIDRWFPSSKTCSACGHLLETLGLSTRHWTCPGCRTRHDRDINAAKNIVAAGRAVAGQAPGEVCGADVGRQGISPPQSARKQKRPRRKPRESPPCEGRESNQYGTPILRHFRPPVPGSGGGAARRSRYTT

SEQ ID NO: 4585 - protein, 574 aa, Nonomuraea sp.
MALRRLGWTVGPPEGFRVNDRIVRMAQEQAGRLLRSAQWRAELTAAVLAAWPGDPHKRTAEEWEQVRANLPDGKVLPGGIIKARTRQIAAFLRAHGRLPADVFELESAPRAARMLLLAACDRQQATLDRSDTDPRRALLRLQLPARPDPRSYKDWTWVACPITLPPTVPVSAVLHLPTLRPASGRVAVDLAFTHAVPQVRRSGHTVALGVDWGLNMLLSAGAARLHPDGRITTLGAGACFRAAGVLAKQHRLRRLSERLHAKAGHYQRLTGGAEEHELTAKLDLLRREIRHVSARRSNLNDALAWAAARWAVDQAIAARASVIYLEDLRSLEATGMGRTLNTRLSQTVRGQIADHLRHLAAQTGIAVVTVPAKNTPRHCPHCLTPLRHRKAPDRPTVAGWAWAVCPNGACGWQGDRDQGAWRRIAARGLAHQAKTVIDHDTGQMSIRSVTGRLEARAVITPSTPTTCRTDRSKTGPTRRRTTRPASRRRGAPSPTRLQSTVGQRPEGHAPTGRDRLPRAAHRHQGVTTISTPAKRRHHPCGAELGAGFHLHAHASPPRWASPMPDATTDAGSLS

SEQ ID NO: 4586 - protein, 281 aa, unknown
  TnpB Polypeptide
VRKINRAVKIRIYPNKEQITQIEKTIGCSRFLYNRMLADKIRHYQEEKKMLKNTPAGYKKEYPWLKEVDSLYFASLLFDCENQTAEKRQAEKFLGMDFAMHGMCVFSTGERAGYPMFYRNAEKKLAREQRKLSRCEKGSRNYQKQKKKVALYHEKIKNQRKDFQHKLSHSLAEDYDAVCVEDLNLKGIAGGLHFGKGIQDNGYGQFLSMLGYKLEERGKYLIKVDRYFASSKICSVCGHKKKELALSERIYLCECGNRMDRDVNAAVNILKEGKRIYKKCA

SEQ ID NO: 4587 - protein, 382 aa, unknown
  TnpB Polypeptide
MRTVRTAQQNYRSTTEILDLFDVFRAMVNYCLHVGLSENVTSLKSMSLRAYRDLGSFDAMSYYRLGAISAAVGILRNYRKASRKGQRSAFPYARKLGLTTCYGFRINNGNLFLPVKPSIHVTIPLTKHTLETLSGHEVRSVTLTPSKLSIAFAKYVEEVTPQGFIGIDRNLNNVTVATACDEIQQIDLTKLVEIKSMYLNIRSKFRRNDTRIRRGISHKYGVKERAKVQQILHHTSRLIVNEAKKKQYGVVMEKLTGIRRLYRRRNGQGAKYRFRLNSWSYGELQRQIEYKARWEGLPVIYVHPHGTSARCSKCGSRMIPEESRMVRCAACGLTIDRDVNAARNILARGVRFAPVRPPSEAMVQEPLKRKVILTICETCRLG

SEQ ID NO: 4588 - protein, 420 aa, unknown
  TnpB Polypeptide
MLRAVKVRLYPTKQQEQAINKLLGCYRVTYNQALVRKINQYKEHNFTENRTSLGHWFHNELLHNPDFEYLKEQNTKVLKQAINDMLSAYKNFFTLHRGYPKFKSKHNNKQSCRFEIGAISKRNDYTSYKLSLANIKNIKFRCSKKYAEYLQKNKANIRQATLSKLPCGEFYLSILVDGDLTHNGVKDTDNCVGIDLGVKDFVITSEGEVFNNLHFKKNEATKLKKLQKQLSRKQKGSNNRNKARIKLAKVYKNINNKKQYYLHQVSNSLINENQVICMEDLNVKGMLKNHKLAESITEMNFGEFKRILEYKARWYNRKIVFVDRFYPSSKTCSCCGFKYKDLKLSDRFWTCPECGTPHDRDINAAVNILNEGMKLIGNSTTEFKLVDYPTMDGDLEMNQKSSDRVKQEVNKEQSTNLFKF

SEQ ID NO: 4589 - protein, 338 aa, Calothrix sp.
LLRDGVIKANWKKVKGSILANLPDWCKDTPYQIKSIAIKDACKAVSNAKLKFQNTGVFSDFNFKSRKDPKQSCYIPKSAVSEKGIYHTILGSVKYTEPLPQNFGDCRLVCAYGDYYLAVPGESLQLETENQGRVVALDPGIRTFLTFFSESSFGWLGKDANIKIQKLCFKLDELCSVISKSTGQVKRRFKKAANRIRAKIKNLVSELHKKTALFLIKNFDVILLPTFETSQMAKKGKRRIRSKSVRQMLTLSHYKFKEFIKHKALEHNKIVIDVSEAYTSKTVSWSGEIVKNLGGSKIIKSESTGQQMDRDLNGARGIFLRALVDTPFLRENLRLCIC

SEQ ID NO: 4590 - protein, 437 aa, unknown
  TnpB Polypeptide
MIKVYKLRIYFQDVNIEKFNINCGIRKFIYNLFIIKNKTNYENGEKFLGYMEFEKWLNHEFLLDNPEYKWIKNASQKNLKDGMRCAEIAFKRFFKTKEGYPNYKRKRDNVSFYFVNDNHIKVERHRIKIPIFGWLRIYEYGYLPKNCKILSGNLVKEANNFYICLRVEIKETEIDNFVKSTDGVGVDLGLKEFAVVSDGRVFENINKTSTKIKKLEKKIKHLNKELSRRLGKKKSKKEREKKFRRDESYKKQYKKLSKEEKKKLKKESMYSFDNKRFIKKEIANKKTISKNALKTIAFLQKTYYKLTRIRTEYVRSVVNSLVKLNPKFITVENLNIKGLVKNYKLAKSILNSKWGYFKEFLEYQCKKKNIELIKANTFYPSSKTCSRCGCKKKSLKLSERTYVCFHCGNEIDRDLNASLNLKYLGLTGEFTPNILIR

SEQ ID NO: 4591 - protein, 411 aa, unknown
  TnpB Polypeptide
MNISHKIEIKPNNKSISYFKKAFGCARFAYNWGLAKWKEAHEKGEKKTHLDLKKEFNSLKDKEFPFVYEVSKYVTQQPFINLGKAFKKFFKDLKNKKISYLQFRRKKDNEGSFYIGGDQVKVNGKYLGIPLLKNKIKMTEELRFKGKINSVTISYDGNKYFASFQLEIDNNEYKKTRKVKYNGLAVGGDIGVKAFLTLSNGLQILFPKEKIKKQEKKIIKLQRQLSKKVHPKTKGDKTNKSNNYIKHSKKLNKAYKKLKNIKNDFLHKLTTVLINNFQYIAVEKLNVSGLLKNHKLAKSIQELSFFEFRRQLEYKALFNKREIVKADTFYPSSKTCSRCGKKKDLTLSDRVYECECGLTIDRDYNASINLLNLIKDKVREVLPEFTSVDLTALLDDLSLNCLATSKVEAEI

SEQ ID NO: 4592 - protein, 395 aa, unknown
  TnpB Polypeptide
MISYKCQLIFSSTKEEDNILEFLNESSKVINRCFELLYQYKDKNLSLKETHNICYNKVRKEFPNLPAQTIIKSYKEAKAIYKSIKSNKHKIDKPPVRKSPKLNLDKRLYSNFTSLGIWLTNPFTKNKRLKVSFMLYPKLIKMFNKYETGDPSLIIKNNKVYLNIPFKTPEIILSNLETIGYDLGAKRLAVSSTGIVLDDKEYKKNKRKIRYLKRCLQSKGTKSAKRKLKKIKNKEKNISNNFNHCLANKMLNCKEAIIVLEDLSNLKQNVKKFKNSNIKNTKNNNKLNQISFYKLKEILSYKALLIGKQVVTVSPSYTSQNDCRGIEQGIRKGRRYYTSDKLVFDSDWNAAINIQQRYKKTPFSVLPLDGTLKRQAVCQPANRSESLLLTTSQAL

SEQ ID NO: 4593 - protein, 402 aa, unknown
  TnpB Polypeptide
MLVKKIEVKLNKTQQNQFFVDQNNLRFMHNFYLFYQDLNYEQYRLGNSYVKFISAYEFMKLFNNEILKLNPDLNFIKNTNSKAVKQVIINLDETFKKFFKNQSGFPKYKKKSNLWKIAIHLMNKDTKYQWKMSERKVKLPSYGWVKLKEKDYLLKDDHIRSCVLKQEGNRFYCCFLIDSESQIKDPIKSDLRKVEINSNNNSLGIDLGIKTYATCSDGQTYNFPKKKVKKLNKNIKRVNKKLSRQFLKNKNKKEWRKKNVDKTKLKLRILFNKKQRLVLGFIQMVVNNLVKTKHQNLIIEDLKISNMIKNKHLSKQIQERSFYSFKQKLINKCSKVGKTLFSANTFYPSSKTCSYCGSLKRDLKLSDRVYKCEVCNQEIDRDLNASINLSYIGGYAENLSLV

SEQ ID NO: 4594 - protein, 395 aa, unknown
  TnpB Polypeptide
MIDKRIKKKLETIEHHSKMTCKVFQCKFTNLSKDQELYFYRLFKEAKYFYNDLLLSNNIFNYDCKNNICIIKNVLTNNYECRHLFELSSQMKQEIYKRFKTNIKSLSTKKKKGKVNEVGKLKFKSEINSIPLKQYGVTYKIKNNRIYIQSCKLKKGFRLLGLHQIPDNADICNATLYKNNKDYYIYITTFIPKEIKQRKGVIGLDLGLRTTVTDSNGNEYKWLFEETKKLKYYQQKMQRQKYHSNNWFKTYKLFKKEHLRIINRKTDAVNKFIHELDQYKLVAYQNDNIHAWAKSRMRGWGKKIQHSIIGRIKSKIEKLETSYKIDRWVATTKLCPCCNTKNEIKLQDDENLYYSCKCGYLEKRDIHSAKNILNIALKATGMDRACELGSGSLNF

SEQ ID NO: 4595 - protein, 402 aa, unknown
  TnpB Polypeptide
MLVKKIEIKLNKTQQNQSLVDQNNLRFMHNLYLSYQDLNYEQYRLGNSDLKYISAYEFMKIFNNEILKLNPNLSFVKNTNSTAIKRVIINLDKTFKKFFKNQSGFPKYKKKSNQWKIGIHLMRGDTKYQWKMSERKVKLPSYGWIKLKEKNYLTKDDHIRSCTLKQEGNKFYCCFLINSEVEIKEPIKSDLKIVTKTDNPDSLGIDLGIKTYATCSDGQTYHFPKQKVKKLNKKIKKVNKKLSRQFLKNKNKKEWKKKNVEKTKLKLRILFDKKQRLVLGFIQHLVNNLVKTKHQNLIIEDLQIKNMIKNKHLSKQIQEKSFYLFKQKLINKCSKIGKTLFLANTFYPSSKTCSCCGSLKKDLKLSDRIYRCEVCGQEIDRDLNASINLSYIGGYAENLSLV

SEQ ID NO: 4596 - protein, 395 aa, unknown
  TnpB Polypeptide
MISYKVQLIFQNEKEENDIKDFLFESTKVINRCFELLYHLKDKKISLKEAHQICYNKLKEEFPNLPVQTIIKSYKEVIGIYKSIKSNKHEIETCPVRKKIKLQLDKRLYSNFTINSIWLTNPKTPNKRIKVSLLLYNKLIEMFNKYEIGDPNLIIINNKIYLQIPFKLPELTLKNLDTIAYDLGIKRLVVSSKGEIIDDKNYKKQKRKIRYLKRRLQSKGTKSAKRKLKKVKNKEKNHSKNFNHLLANKMLNCNESIIVLEDLTKIKQNTKNFKGTKIKNTKHNNRLNQVSFSALKNILLYKALFLGKEIVTVSPAFTSQDDCRNIERGVRQGRRYFTSDNKVFDSDWNAAINIQQRYKKTPFSVLPLDGTLKRQAVCQPANRSESLLLTTSQAL

SEQ ID NO: 4597 - protein, 402 aa, unknown
  TnpB Polypeptide
MLVKKIEVKLNKTQQNQFFVDQNNLRFMHNLYLSYQDLNYEMYRLGNSDIKYIPAYEFKKIFNNEILKINLDLNFIKNTNSKAINQVIINLDSTFKKFFKGQVNYPKYKKKSNLWKIGIHLMHNDTKYEWRMSERKVKLPSYGWVKLKEKNYLTKNDHIRSCVLKQEGNKFYCCFLINSKNQIKEPIKSNLKKVNINSNKDSLGIDLGIKTYATCSDGQTYSFPKKKVNKINKKIKKVNKKLSRQFLKNKNKKEWRKKNVDKTKLKLRILFNKKQRLVLGFIQMVVNNLVKTKHQNLIIEDLQIKNMIKNKHLSKQIQEKSFYLFKQKLINKCSKIGKTLFLANTFYPSSKTCSCCGSLKKDLKLSDRIYRCEVCGQEIDRDLNASINLSYIGGYAENLSLV

SEQ ID NO: 4598 - protein, 397 aa, unknown
  TnpB Polypeptide
MIKNKRLEKRKQTQERHSKMVCKVFQCKLTKLDKKKEEYLHRLFLEAKYFYNDIIAADDIYKYDYRNTLCVTKNFVSKTYECRHLFILSSQMRQGILDRLKSNVKMLSTKKKKGREDEVGKLKFKSEVNSIPLQQLDATYKLLNNNISLQGCKYIFKIKGLKQIPKNAEICNATLVKKPSGYYIYITTYVEKDYTYKRVKRGNIGIDLGLRTTATDSFGNEYSWLFEETDVLKKRQAKLANQKYSSKNWFKTLKLIKKEYEKIKNRKEDVANKFINILKKYELVAYQNDNIAGWAKSNMKGWGRKIQHSIIGRIKSKIKKLVTSVEVDRWTATTKICPCCNIKNDIKLQNEENLYYECSCGYKEKRDVHSAINILNIALKATGMDYACGLDPRSQSL

SEQ ID NO: 4599 - protein, 422 aa, unknown
  TnpB Polypeptide
MKIVRSVKLKLFGTKSKQERLAAFIDEYKRVANYVFENYNVNDYIKKSDFLDSKNYNKLKQETNTWLMSHPLQDILNFCWGQLKAYNSLVINYKEECNNLALERVRNKKEKERLLKKDKLIYSEEKRLKYLKKILSKKPKYLNPPSKPFLSDKASIMLSTQCVKMELSRSKSFDMFLHFWSLGCGSFDIPTKFTRMYNKYFEIGKRNTSVFINKNYIFMSFEIETGKKKEEGKLSSIDTNFSNLAFYNQEVNKLILTDLLSLVQKVRRKNFGSKRYYRAKIELKEYINYHLKKDIDWNSIRLLVVEDLKRIKFKMSVKDRLTKNIRSVFQNLSFSYILEKLELLCEENRVSFRKVKPFYTSIICSNCSHVEKRNRLNQASFKCCKCGFTINADLNASRNILNRFLNGKYGSVFKTDFVENYL

SEQ ID NO: 4600 - protein, 439 aa, unknown
  TnpB Polypeptide
MVKGYKTEILFSPENIRLFNKNCGVKKFVYNLFITVNKQRYEKTEKYLSAYDFSKWLNNEFLKDNPEYNWIKEVSSKNIKETIIEIDKAFKRFFKTKEGYPNYKRKRDNVSFYFVNDNHIKVERHRIKIPIFGWLRIKEFGYLPNRYKILSGNVSREGNKYFVSIRCEFEGGIIDLGKKTGGIGVDLGIEKLATVSDGRVFENFNKINKKLIKLEKRIKHLNKELSRRLKRKKTNKEKLEEIREKEIYKKWYKSLSKEEKEKIKKEKKEQARLEKERRKESSYFFNNKKLNKKESVNKKVNKSKNVIKTILALRETYRKISFIRTGNVKLIVDSLVKKNPQFIVTEDLNIKGLAKNKHLSKAILNCKWGYFLEYLKYKCEKFGIVYKKADRFFPSSKKCSNCGNIKKDLKLSDRIYHCDNCGLEINRDYNAALNLCTVG

SEQ ID NO: 4601 - protein, 492 aa, unknown
  TnpB Polypeptide
MAPRKPHAKVMDDKARLAKNKRIAQSQKQTRKRRKSMDVVVRTVKVQRNKLSKTQLEALQRMFLEGKWLYNTAIAHDDFSENFRKQLANTAEVKLPSGDVEKRQLTVLGGQLQQGVLARIRDNIKGLAALKKKGKKVGKLGFISEMNSIPLKQFGRTHKIRGSKMKIANVPGWIRVRGLDQINLDTDECASAVLIRRNNDFFIALTIYKRKGEHASLATKKYKPGTTIGLDMGVGTQITFSDGTSVNSRIEESDRLRRLSRKLARQQKGSKTFEDTKKLIRDEHNKVASRRTDAANKVSSWILSHEHVFMQDENISSWRRRYSKARGSRAVQYGILGRVKAALVAHPRVTVLKRNVATTATCVCGVKTPHDVSKRVFSCPSCGYTDNRDVHAAKNMYRLAVPENIKENTTVERSQTPVEIGVSRFGKEPHGFLDKVRSVGEAGSGTVFSRSVVHDNYDESTSTSTSMSSQKRDTMGETFSNDIASQGAITNG

SEQ ID NO: 4602 - protein, 383 aa, Pleurocapsa sp.
MKQLRGFKYRFYPTSAQRLELAQTFGCTRFVYNWALALRTNSYYQDNVSMSYTDTSNALTKLKKDPEKPWLKKVSAVPLQQGLRHLNTAFTNFFAGRNKYPRFKKKNNRQSAHYAPNAFKWVDGKLTLAKMSQPLKIRWSRYFTGEPSSVTISKDPSNRYFVSFLVEEELEQWDKTNGKIGVDLGVKDVMVTSSGFASGNPKLTHKYQARLKTLQRRLAKKKKGSNNRYKARLKVARLHAKIADCRKDFLHKLTTQLVSENQAIYTETLAVKNMMANHKLAKAIADCGWGEALRQFQYKCKWHERELGAIDRWFPSSKRCNPCGHILDKLPLAVREWVCPSCNSCNLRDKNAALNILAVGQTAFACGSGTGGEIDLLSLAIQG

SEQ ID NO: 4603 - protein, 368 aa, unknown
  TnpB Polypeptide
MEKAYKFRLYPNKEQSILIQKTFGSCRFVFNRYLDKRISLFKEEQKTLNYNACSNDLTQIKNEFVWLREVDSTALQSSLKDLDEAYKHFFRRVKQGGSKAGFPKFKSKRESRKSYKSKMNIRLVEGAIQLPKLGLVKARISKHIEGRILSAAVSQNPSGKYFVSVICTDVIIKPLPQTGAVVGVDLGLKSFAITSDNEVIKNPKHFSKSQHKLAKAQRCLSRKTKGSNNRNKAKIKVARLHEKVVNQRNDFLHKLSTRLVKDYDFISIEDLSVQNMVKNRKLAKSISDASWSEFMRQLEYKALWHDKQVQRVGTFFASSQTCSVCGTKNSQVKDLAVRNWVCPSCGIAHDRDVNASINILNEGLRLTA

SEQ ID NO: 4604 - protein, 387 aa, Erysipelotrichaceae sp.
MKRIAYKYRIYPNTEQKLFFAKCFGCVRFFYNKSLSDMNEIYKSTGKFKNITPASYKEDYSFLKEVDSLALSNAQLNRNTAFKAFFSHRSGFPKFKSKRNNQSYTTNMVNGNIKISTSNRYISIPKCPRIRIKKHRDFIGKIKSITVSMTTDNKYYISLLVEEETKPMEPIDKMIGLDLGIKDLIVDSNGKKYKNHKYLTKSQEKLAKEQRKLSKMVKGSSNRNKQRIKVAKLHKHIQNQRNDYLHKLSKKIIDENQIICIEDLKVKDMMNDSKLARNISDVSWSRFVSMLIYKADWYGRKVIKVPVTYPSSQLCSLCGYQNKEVKNLKIRKWTCPKCGTIHDRDINAAKNILSKGIETLTKDGTHPDSLFMLGSLESSMSLYLLMI

SEQ ID NO: 4605 - protein, 381 aa, unknown
  TnpB Polypeptide
MRMRSWKFRLYPSRQQENILDSYLIAGKDLWNALLEYSKKYYEETGKFPGRNRLNAFTKGTPLFSQVAQNVSDRLAKSIRGMATRKRAGMKAGFPRFKPIERMKSFTYPQFGFVLNNKLELSGIGGICIKKHREIQGKIKTLTVKKSPSRKWFAVFTSEVEKDALGRKEGPAAGMDLGIEHFAYLSDGTVIENPKHLKYAEERLRESQRRLSAKKKGGKNRKKARLDVAIIYEKLSNKRRDFLHKISRRLVEKYSFIAMENLNIEGMARSFLAKSVLDCGWAEFSGMLAYKAEEAGCEVVLVEPALTTQTCSKCGSVRKKSLAERWHECACGASLHRDLNAAINIFRRATAGHAGSQASGEETSAHQKWASVFDERGSPAL

SEQ ID NO: 4606 - protein, 409 aa, unknown
  TnpB Polypeptide
VQEEKMKENKNIVHRTRIHYIIPSQELIDEARLSNNLYNQALYILRQAFINKEKIPSKFDLSKILLHKEYECEEYDNIHKMVAANAQAICYLAAQNFKSFLMALKAFKKNKSNFTGIPRIPSYNKKDHEFMIIITYQQCTVKEGMMRFPKKLNLDKIYIGDLDIAHVRIFPGKKKYKVEIVYKVEALPKRKKGNIAGIDLGLDNLATVAINKRGIRPLLINGRPLKSMNLYFNNKRDKVQSELKKCNDRYMSHKLETLYRKRNNRFNTYMHKASKEIIDYCLEHNVSQIIIGHNKLQKQESKLKNFVAIPTFRLIELIKYKAEYQGIEVIETEESYTSITSYLDKEEPIKDNADRFRRIHRGLFVSSKGKRINADVNSAYQIMKKVIGDKVIKPIGKGSVFIPKKITMV

SEQ ID NO: 4607 - protein, 409 aa, Methylobacterium sp.
MIARGFRFKLEPLPEQEALFRQFAGVCRLVYNLGLEQKATWGRKHRLGYVAQAADLTRLRSEFEWVRAVYVSCQQQALRDLDRAFQNFFAGRASFPRPRKRGVDDSFRFPGREAAVKPMNAKWSAVRLPKIGWVKFRDTRPMRGVLKNVTVSNDALGWHIAFTCEIDHEATAPNPEAVGIDRGVATTLALSTGEMLTLPASLERIEAQKRQAQRVVARRKRGSNRRRRAQARVARLQARQARIRRDFHHRAALDIAKRFGVAVLEDLKTRGMTASAKGTVAEPGRNVRQKAGLNRVILNAGWHQFATILTYKVEERGGQVVSVPARFTSQTCAACGVVDARSRESQAVFTCISCGHSDHADTNAAINIKRRWNTPLLDVEGSHQRPVEASTGRDLTVSENPLPSGRGRC

SEQ ID NO: 4608 - protein, 427 aa, Pleurocapsa sp.
MLTLNYTYRIEPTVEQQGMMLDWLETCRHLYNRCLRDLKDWIASRKCSLYSCSINREYIMSADISFPSYLEQKRQLTQWKKTNPRYKQVHSQVTQDVVKRMHNTWEAFKNRGFGFPRYKKYGRYQSFLFPQFKLNPIENGIVKLPKIGEIKINQHRPIPDGFKVKGVRIVARARGTIWYAVVTIQCDVKVPDPLPFGRGIGIDIGLESFLVTSDNFRVEPALFFRELQSRLKVLQRKVSRKKKRSKNWEKAQLKVARVHHQISNTRKNFHFQTSHLLCDMADMIFVEDINFKMTARGFLGKQMLDGGFGQFRDLLSWICWKRGKYFQQVDHKYTSQICPECNAHTGKKQLTQRVHNCPECGYSTTRDHASGRVILQRGLKSVPTDCREWKLSGSGVLSGISYLDKCRSRNANLRELEAYVCTAKQSA

SEQ ID NO: 4609 - protein, 427 aa, Pleurocapsa sp.
MLTMNYTYRIEPTVKQQAMMLGWLETCRRLYNRCLRDLKDWLHARKCSLYSCSINREYIMSPDIPFPSYLEQKRQLTQWKKTNPWYKQVHSQVTQDVVKRMHNTWEAFKNRGFGFPRFKKFGRYQSFLFPQFKENPINNGMVKLPKIGEIKINQHRPIPDSFNVKGVRIVARARGTIWYAVVTIQCDVKVPAPLPFGRGIGIDIGLKSFLVTSDNFRVEPARFFRDWQSGLKVLQRQASRKKKRSKNWEKAQLKVARYHHKIANSRKNFHFQTSHQLCDQADMIFAEDIDFRLSAKGFVGKHMLDGGFGQFRQLLSWVCWKRGKYFQEVDHKYTSQICPECNAHTGKKELNQREHICSECGYQTTRDHASGRVILQRGLSKVRLDESERKLPGNGVLSGVKCLDKCRSRNFNLRKLEAYACTAKQSA

SEQ ID NO: 4610 - protein, 417 aa, Pleurocapsa sp.
MIVLEYKIRAKQYQLTAIDEAIRTGQFVRNKALRYWMDNKGVNKYDLNKYTAVIAKEFDFANKLNSTARQSSAERAWSGIARFLDNCKKKIKGKKGFPKFKKHSRSFEYKRSGWKLDETTKKHITFTDKNNIGRVKLVGSRDIYYYGADLIKRVRLVRRADGYYCQFCISIEEKEILEPTGRVIGLDMGLKYLYADSFGHTEENPRFYRKSEQRLNRLGRRLSRKYRNPNKGKSGKLMIKNPQTRQSNNYHKARVTKAKQHLKVSRQRKDHAVKLARCVCASNDCIVYEDLSVRNLVKNRKLSKSISDAGWTQFRNWVEYLGWKMGKITIAVPPHYTSQDCPACGKRVKKSLSTRTHVCECGYVEDRDVAASINILQKGLNTVGHTGIYAWRDLPSWAVGATLLSNGESLNQESHCF

SEQ ID NO: 4611 - protein, 391 aa, Pleurocapsa sp.
MLQAVKVRLYPNSEQRRHLAQSFGCARWYWNYSLALTQKNYQETAKGLSRGAIQGLLPQLKKEYEWLTEPYSQCLQVVALNLSNAFINFFEGRGKFPRFKAKGNKQSISYPQNVKVLDGYIKFPKLKLVEAKISKPIEGTVKTVTISQVPSGKYYASILVDDGVDTPEASSEGKCIGLDVGISEICVTSEGSKYNNPRWFKKHQKNLKRKQQKLARKQLGSKNRYKARKLAAKVYEKVSNCRLDFLHKLSRRIVDENQVIAVENLNVKGMVKNPKLALAISNVGWGMLNTMLKYKAEWSGKVYMQIDRFFPSSKLHNKCLYQIDKLPLDVRFWDCPKCGEKHIDRDINTAKNIRDEALRLLALGRKATAHGGTVRLRSGREKSTTEQVLRK

SEQ ID NO: 4612 - protein, 489 aa, Pleurocapsa sp.
MALRRYTFRLYPNKTQERELFAARRLHGYLYNACIAHRRFEWKKNQKTVDYFQQQNCLPAFKKEWVEFAHLHSQALQSTVKRVDLAYNSFFKGLRGLPNFKSIRNYSGWTYSSKSGWKTSTNGKHGTVTLNDLGITLKMRGQAKSWCTPTTLTIVYKPRKKQWFASFTCNVSVKEAKFGSVSDLKYESIVAFDLGTATAITCFDGIKFEEISNPRFTQVAEEKVKQESKKLRRKRAPNRKKGIKASNRWKKARRRVSKLQRKVALQRADWQHKITSDIASRHDIGVTEKLNTKGLTRKAGGNAASQAAYSTPVRRAKKRCDPASSHDARERAPRQGGKRKKQKAGLNKSILSVGFSTLNQMIAYKIEAKGGLLLQLNTRRVKPSQRCPKCGIVHKNWADLSNRYHVCDNCTFEIERDKGSVLVMYNVATNQQQGCGTHLLDSGCLSSTSLTSKRKHTGSMKQLGQMKRQKSRLSAEELETPTSASAKLG

SEQ ID NO: 4613 - protein, 432 aa, Pleurocapsa sp.
MILNYRYRIYPDTQQIELLNEWLETLRVSYNYALRELKDWIASRKCQIDRCSLESQYIMAADYPFPSYHQQQNNLPKAKKKFPRLKAVQSQALQTNLKRLHDSWDSFRKRGYGFPRFKKYGQMKSMLFPQFKTNPLSDWQIQLPKIGKVRINLHRPIPEGFVIKQIRVVKKAVGWFAVIAIQSDLKLPSPVPHGHAIGVDVGLLSYVATSDGYTEDRPKFFKTAYSRLKVLQKRLSRKMKRGKNYEKARIRVAKQHNHIAFKRTDYQFKLAHKLCDLADTIYVEDCDFRIMAKGMLGKHTIDASFGKQRDILEYVARKRDVFVGRVDHRGTSQICPNCRSKVRKDLSVRISDCQECGYVVDRDIASGQEICNRGQETYRGTPEKQEIGSQVVLSENFVLNKWRNSTSVVRGARSISDNGSPHCNNFKAKAIK

SEQ ID NO: 4614 - protein, 426 aa, Pleurocapsa sp.
MLLTQTVRLKQNNVEKDILTNLCHLSKNLFNVGLYMVRQYFFQEQKYLSYESNYHLCKENENYQLLATDCGQQTLKYVDRCFKVFFKLLSMRKEGTYQERVNLPRYLAKDGYFPLIIPIRKRHDFAKDDWKFKIPTSRKYTRENGSVYITVPPNLREYRIKEIRILPKQKGKFLDAAFVYESNDQPVNVDKSSAISIDLGLNNLATVISTTNESFIIDGLWLKSKNQWFNKRRAKLVHHKDKQSIKHLTKQEAWLSYRRKNQVNDYLNKSAKYIIDFCLNRKIGTIIVGYNPTLKQNSNMGKRNNQNFVNIPIFTLRVKLESLCERYGLNYVEQEESYTSRASAIDKDDIPVYNADNPSKRKFSGVRVKRGLYKSKDGHLINADCNGSLNIGFKSKHEGFSRVSRVCLTQPVRVNVLRESPVIASA

SEQ ID NO: 4615 - protein, 455 aa, Pleurocapsa sp.
LYLTTEQKLVLNDWLRICRYWYNRQLGERFDWWKRNRSYTDSCPLVCHLPQLKEKPEFYGQKKQLPIIKQDLVTVGWSGELLDFNSVPSQTLQEVCTRVKLAMERYIAGDAKGKRSGKPRIKNTARYRSMVFEGAKLHSCSVGAKWLYVSLPKIGPIKVRHHRPLPDGAKLKSVQVIKKVDGWYVNLRLEDISVPNFQADIVPTWDNSLGMDAVLHENDYLATSEGVKLPSLKSFRQSQHKLAKVSGRKSNRSVGSKPRRQLAKREAKIHQRIARARKDHAYKTAHKLMATGKKVFFHEKLNLAGLSTRNKPKQDSKGKYLPNGQSAKSGLNKSWSDAAFGQFFNIMKYIGEKTGASVVAVNPAYTSMILPYKDEFVFTDVSIRKYWDEELKLWVDRDIASSVNVKRVGLDVFPTIKRRRGNPVVISSTTNSTSKLVLSSLRGLEKPTSVCEASV

SEQ ID NO: 4616 - protein, 206 aa, Pleurocapsa sp.
LKIYLDDRKNYTDNRGNKVENPRHLRKSEKALKRLQRRVSRKVKGSNKRKKAINKLGRKHLKVSRQRKDFAVKLARCVVKSNDLVVFEKLTVPNMVKNRRLAKSISCAAWRQFFEWLEYYGQVFGKIVIAVPPQYTSQECSSCHRIVKKSLSERTHACECGCILDRDENASRNLLAKGLEYLSRGGHSRINAQGHLNLCQISESEL

SEQ ID NO: 4617 - protein, 428 aa, Pleurocapsa sp.
MHLGFRCRLFTAMITYAYRYKIKPTPNQIRQFEQYLSICRSVYNFAHSERKAWIESRKCQVDRCSINSEYIIPAEKPFPNYNIQAKALTEAKKKLPHLKLVNAQCLQQVLKRLDRAWIDFFKMPSRGFPRFRNANRYRSFKFPKPNTVCLDAGRVKLPSIGWIKIRQSRPYPVGFTPKQLQIVRKSSGYYLVIYFESSESVPDAVPGDKSIGLDAGIESFVATPTQLIKSPRFLNHKARKLKLLQRRLKHKTKGSNNWKKLQNKIARLHEKVANTRRDWHFKLAHQVTQNIDNIFVEDIDFKSWSKGLFCKQSLDSGIGGFINTVLPYVASKQGKFYLKVDKNGTSQECCKCHAYTGKKELGQRIHVCTNPACLHTESRDTCSAKVIQHRGELAVGHTVKQGKTVKNACGGDATGIVQLSLFNLVGSR

SEQ ID NO: 4618 - protein, 408 aa, Pleurocapsa sp.
MMIDMIRVAQKIRIYPTFGQQQQLAKAMGCCRWWWNYALNVCNQTYKETGKGISRSGLNALLPKLKKEYEWLKTDVYSQSLQQTTLNLSRAFINFFEKRAKYPKFKSKHKKQSVGFPQSVRIEGDYIYLPKIKLVKAIFDRRYVGKIKTVTVTLDSDDRYFASIIYEVEACFRSGNSDKILGIDLGIKDFAIVHDGTKTSKYANPRHIKKHEKNLARKQKKLARKQLGSRTRQKAKKLVAKVHTRISNSRQDFLHKLSRKLTNDSQVIVVENLNVRGLVRNLKLAKAISDVGWGMFVNFLSYKLRREDKKLVEIDRFFPSSHICPECLTQQPKMDLSVREWICINSACNAHHDRDEAASKNIRAEGIRILQADGAAVSASGGSVRQDRGRKTKVVQHPAKLETTCSTK

SEQ ID NO: 4619 - protein, 385 aa, Pleurocapsa sp.
MANYTVRKLKLKYFEQLNELAHAAGELYSQTLVSFWRTVRKKNVWLSGYTMEKWLVSNKLHAHSSDAVTQSFFASLKSWRARRKTDPNSRPPRRRRWYYKLTWKSSAIKLKDGKLRLSNGKGNQPLIVNWCWDKPKQVELGWNKGNKCYELRACYSEPKVRLVKNGRVSGCDLGEIHPMVFTDGVDTDILNGRLLRSKRQYQNKLKAKLSNLIDTKKRGSQRRQKIIKSKQKQLAKVVNQIKDIEHKLTSKAVSMLQERSIQTLVIGDVRDIRKNIKYSKKVNQKLHQWNFGSIRAKLEYKCAKAGINTELISEAYTSQEYLSCRKRNKPRNREYKCLCGFRWHRDGVGCSNIRAKYLGEIPVVGLMASPSGVRFEPHLQCNPKH

SEQ ID NO: 4620 - protein, 291 aa, Pleurocapsa sp.
MLVLEMKIQAKPTQYDAMDEAIRTAQFIRNKALRYWMDNKGVGKYQLSAYCKVLAAEFPFAHKLNSMARQSSADRAWAAISRFYQNCKHKTPGKKGFPKFKKHSRSVEYKTTGWKLSENRKQITFTDHNNIGRVKLKGTRDLNWYDIKQFKRVRIVRRADGYYGQFLVDADNRERVEPSYSEIGLDVGLNYFYTDDKGNQIENPRFYRRGEKALNRLNRSKSKKYVKSKKPQSKNYHQARKRYALKHLKISRQRKDHAVKLARCVITSNDVVAYEDLRIGKMVKITILPSR

SEQ ID NO: 4621 - protein, 400 aa, Pleurocapsa sp.
MKQLRGFKYRFYPTSAQRLELAQTFGCTRFVYNWALALRTNSYYQDQVSLSYTDTSNALTKLKKDPEKPWLKQVSSVPLQQGLRHLNTAFKNFFAGRNKYPRFKKKNNRQSAHYAPNAFKWEDGKLTLAKMSQPLKIRWSRYFTSEPKSVTISKDPSNRYFVSFLVEEELEQWNSSTEEIGIDLGIKDVVVASNGFASGNPKHYQKYQARLKTLQRRLARKKKGSNNQYKARLSVAKLHAKIADCRLDFLHKLSTKLVSENQAIYTETLAVKNMMANHKLAKAIADCGWGEFLRQLEYKAKWHDRKIGAINRWFPSSKRCYTCGHVLDKLPLEIRKWTCPSCNSHNLRDQNAALNILAIGRSLGGFPHTRPNQEAVGQTVFACGSSSGGDVSLTDLAILG

SEQ ID NO: 4622 - protein, 391 aa, Pleurocapsa sp.
MLVLEMKIQAKPTQYDAMDEAIRTAQFIRNKALRYWMDNKGVGKYQLSAYCKVLAAEFPFAHKLNSMARQSSADRAWAAISRFYQNCKHKTPGKKGFPKFKKHSRSVEYKTTGWKLSENRKQITFTDHNNIGRVKLKGTRDLNWYDIKQFKRVRIVRRADGYYSQFLVDADNRERVEPSYSEIGLDVGLNYFCTDDKGNQIENPRFYRRGEKALNRLNRSKSKKYVKSKKPQSKNYHQARKRYALKHLKISRQRKDHAVKLARCVITSNDVVAYEDLRIAKMVKNHNLAKSITDAGWYQFRVWLEYFGYKFGKVTVAVPPQYTSVNCSGCGAKVTKTLSTRTHKCKCGCVLDRDENAARNILSLGLSTVGHTGSKAWGDETSILADENLSG

SEQ ID NO: 4623 - protein, 565 aa, Streptomyces sp.
VKRGTDGRKRKGALRVPTESFTVSPPRGARIRDRLRLSARDAEVLLIVGDHLGRHARADLAERIRIGIVPLSENRRADRKRALTRMSSSRWAGTITRASEDQYQLSLRCLLDERGSLRRTISKITQRLAVPCCQRAGGVRGYSTQQERALKQRRLQVLAARLAELEQRIDAGRPAIVVGGRRLATVRHNLADTNLSESDWRKRWDAQRMFLTADGESGAPHGNYTITVTPTGGAVTLVLPEPLRHLANTPRGRYRVSCTVAFSHRRDEWLDRVMANKAVRYDITYDAERGRWYLDASWSTVCATPPTPTELAATGVRLLAVDLNADHLAACVIDAHGNPVGLPSAVPTHLIGPSSQRDGRLRAAITELVSLAKVNGCAGLAIEDLGFADARATGRETMGRGGRGKAFRRIVAGLPTARFRERLRGMAHHAGLVVVAVDPAYTSRWGTQHWKQPLQQQSKTFVVTGHHAAAVAIGRRALGHGARRRPGVTAHDQRIVVRRATGQTVPHPRARGTTSSPRTTGTPLQGTKTCRDRSDQLALFPVSQHPSGRQTANPAGVPADSGRHR

SEQ ID NO: 4624 - protein, 521 aa, Streptomyces sp.
LADPFTVPAPAGARIRDRLRPSARDVEVLLAVGDHLGRYARADLAHRLRIGSVSGKDTRRTESKRALTRVSSSRWAGSITRVSEDQYRLSSRRLADERSALLRAVAKIRSRLAVPCGRKVDGVRGYPSQAERAQKQRRLQVLTSRLAEAERRIGAGRPAIVVGGRRLAKARHGLVDEGLTENEWRERWTARRMFLTADGESGKPHGNYTISVDPAGGAVAVVLPEPRRHLANAPRGRYRLACTVRFSHRRDEWLDRVTADRAVRYDIVRDPGRGRWYLDASWSAPKAALPTPVELAARSARLLAVDLNAGHLAVCVVDVHGNPVGTPVSVPTDLTGPASRRDGLRSAISTLIGLARDHGCAGLAIENLGFGATWATGRETMGRGKRGKAFRRTVAGLPTARFRERLRGMAHHAGLVVVAVDPAYTSRWGGQYWKAPLQQQSKTTVVTGHHAAAAAIGRRALGHGIRRRQGVTAHDRRIVRRRATGQTASWPRVRGTAGPPRTTGMPVEGGRPAGAGAIARC

SEQ ID NO: 4625 - protein, 564 aa, Streptomyces sp.
MARGRGKRKRALRELVAPFTVSAPAGARIRDRLRVSAEEARVLRVVGEHLGGCARADLAERVRIGKVAVRENRRAERKRVLTRVSSSRWAGAITRTSEDQYQLSLQCLFHERASLRRATSKIRQRLAVPCGQRAGGVRGYPSRAERAQKQRRLQVLTARLADVEARIDAGHPAVVVGGRRLAKVRHHLTDAGLSESGWRERWEAARLFLTADGESGAPYGNYTISVDPVDGTVTIVLPEPLRHLANAPRGRYRLTCTVTFHHRRGEWLDRVTAHRAVRYDITHDPDRGRWYLDASWSTPNTVLPSPVELAATGVRLLAVDLNAGHLAACVIDAHGNPVDQPVTVPTNLTGPASQRDGRLRQAISELIHLAKTNDCAGLAIENLGFDDARATGRETMGRGKRGKAFRRTVAGLPTARFRERVRGMAHHAGLVVVAVDPAYTSRWGAQHWRQPLQQQSKTTVVTGHHAAAVAIGRRALGHGLRRRPGVTAHDQRIVVRRATGQTVPHPRARGTTSPPRTTGTPHQGTKTCRDRSDPLALLPVSQDRSGGQPASPVYGDPANSGQHR

SEQ ID NO: 4626 - protein, 316 aa, Streptomyces sp.
MRADAGRKYRAYPRADQERILIEWGHDARALRNLALDHRLMVGRKHDGSWVWSAEQCVLLTEIRNDADPSVNWIRDLPAQSGQQILRRLDRAFANMANSDHPAGPPAFKRRGDRMGIPFTGQAVQFRKLNRHWAEIRFPVLGWLRIRLSRAVGGAIRNATIACDGLGWHVSLGVHSGAKPAAPNGGPGCGVDFGVSISAWVSTEPTGRSMRPTLTAGEEKRLTALEQRKERQLTYAEKYNRGARSKRLMRTIAAIGALRARQARRRLDFTHNQRCSGQHSWRTASPTGIQMPPVWERSTSGPPTGNIPDVPFLQEA

SEQ ID NO: 4627 - protein, 504 aa, Burkholderiaceae sp.
LSDHSAGNALEAVHERQHRDLRRVVHQHWSSSPSNSTSSDSKSRQTLAKMPRISSRISLVNTSRRNLVTRTKWTCIRKTQCRPCRMSWFVLIGQLYNSQMRRLQAFKFELMPTGEQQRDLRRFAGSCRFVYNKALALQKTRYEQGEKKLGYAGLCKALTEWRNGADTPWLSDAPVHPLQQTLKDLERAYQNFFAKRSAFPKFKKKGQSDSFRYPDSKQIKLDQCNSRIFLPKLGWLRYRNSRDVLGTLRNATISLSGGKWYVSIQTEREVEQPVPSAASAVGIDMGIARFATFSDGTFLAPLNSFKRHEARLRRYQRAMSHKTKFSNNWKKAKARVQRIHTRIGNARRDYLHKATTTISQNHAMVCIEDLQVRNMSRSAAGDTEAPGNNVWAKSGLNKSILDQGWFEFRRQLEYKLAWNGGWLIAVPPANTSRTCPCCGHASADNRTTQAKFACVACGFEENADVVGAINVLARGHRVAACGEWVQSGRSAKQEPTEAIAHLIA

SEQ ID NO: 4628 - protein, 416 aa, Lactobacillus sp.
MKSMAQMKCHYGLKVRIYPSDRQKKIIKINSDASRFIYNEMVAINKELMQLRRVKLPIDIVQDRIKQLTMRQNAKQMSNHYQFLEDKRIDSLTKANAIQNYRKAWNAFRKVHATGVPKFHRKSYHWRYQTNCQYPGQKTALLTNGTVCFLDNSHVKVPKIGLLRVAGSQARLLKRICETRIGTVTLTKDSADRFFLSMQLASDTPFVNWPQNTGKQIGIDLNTENFLTTSNGDTVANPRYYRIIKGRLAKAQRILSRRARRAKQEHQPLRTSKNYQKQRLLVAKLHAQVFERRRDFLHNVSTTLIKNHDFVAAEELRSKNMLKNHALAMSIADVGWRTFLGMLAYKAELYHRQFLTVDPKNTTQACHECGFVMGTAGTEKLTLADREWTCPKCHAHHVRDHNAAQNILTKGIIKLA

SEQ ID NO: 4629 - protein, 416 aa, Lactobacillus sp.
MKSMAQMKCHYGLKVRIYPSDRQKKIIKINSDASRFIYNEMVAINKELWRLKQVKLPIDTIQNRIEQLELRQSAKQMSNHFQFLEDKRIDSLTKANAIQNYHKAWNAFRKVHTAGVPKFHRKSYVWRYQTNCQYLKQKAAYLTNGTVHFEDSKHVIVPKLGRLRVKGSHQRVLARSAETRIGTVTIVKDASGRFFLSMQLASDTPFVNWPQNTGKQIGIDLNTENFLTTSNGDTVANPRYYRIIKGRLAKAQRILSRRARRAKQEHRPLRTSKNYQKQRLLVAKLHAQVFERRRDFLHNVSTTLIKNHDFVAAEELRSKNMLKNHALAMSIADVGWRTFLGMLAYKAELYHRQFLTVNPKNTTQACHECGFVMGTAGTEKLTLADREWICPKCHAHHVRDHNAAQNILTKGIIKLA

SEQ ID NO: 4630 - protein, 465 aa, Leptospirillum sp.
MEPMKINPAAKFRFSPKPEQEVLLTKTFGCIRFVWNAVLAAREEAWEDFGIATVFPDASALLTDLKNDPDFAFLGELSSVPLPQTLRHQQRASGHFFSGRAGTPRFKRKDDSQRAVFMDNAFDLSGRRLVLAKRKEPLDIRWSRCLPKGATGSSACVTKDPAGRYFVSLHFEDEVAPKPEIETKVGIDLGLSSFATLSTGEKVLAPEFFREEEKKLAFWQRKLAKKKNGSKNRRKARRKIARIHARIADRRNDFLHTLSTRLLNENQVIVVEDLSVKDMRKNRHLSKSIADASRSEFLRQIDDKATWSGRQVLSCGRFFPSSKTCSHCRFVLPELSLSVREWICPDCGATHDRDANAARNILTAWLAGCACGGSVRLPVPAWSRVGKQLPGEPGIADHEVGKPLRVRRGGCQGRELQRFSAFFHFPERFPEGTFAPEYSFSNKNEFFSKNPEPQVVMQVNLPMTP

SEQ ID NO: 4631 - protein, 335 aa, unknown
  TnpB Polypeptide
MANKALVYTIYPNEKQNIQCQKTFGCCRFVYNQMLDVQKERHENGEKHLSKTKANTYCNQHLKKKYPFLKEVDKFALTNAIYHLEDGYDRFFKHLSRFPKYKCKHKAKRSYTTNITNGNIEISDNSIKLPKLGWVKAKIHHRPKEDWKLKSATVTQNRDDSYQVSILFAYEESISPAVVTKETTIGLDYKSDGLYVSSEGDTCGMPHYFRQSADKLAKAQRKLRHKTIGSKNYNKQQKRTAKIHRHIANQRKDFLQKKSTEISNYKLRDRGGQLIKVGRFFPSSQLCSHCGFKNPLVKNLSIRHWDCPNCGTTGIDRDVNAAKNIKKEGIRLLTA

SEQ ID NO: 4632 - protein, 389 aa, unknown
  TnpB Polypeptide
MLKGVKLRLYPNAKQCDQLLQMFGNSRFIWNIMLNMANERYKNNPSSSFVGEYDMNYLLKRLKIEYPFLKESEARSLQISNHYLNQSFKMLFKHQGGYPRFKSRKATKQSYTGDGSRGGCHIIAKRYMRLPKLGSIKTSKTGRLEGLKIKRYTVTLDPTGRYYLSLIVDDPNIQLLEKTGAVVGIDMGVADLAITSDGYKYPKFEANWYEQQANKAQSRFSKRRHRALVGVRQWNHNHKDIKMELEDYSNWQKARISKSRYQAKIANKRKDYLHKITTELVKSYDVIVIEDLKTKNLLKNHHLAKSISNNSWYLFREMLEYKCEWYGKKLIKVSPNYTSQICSNCGYHSGKKPLNVREWTCPKCNTYHDRDINASINILNRGLKELNIN

SEQ ID NO: 4633 - protein, 394 aa, unknown
  TnpB Polypeptide
MIKGIKLRLYPNAKQRDQLTQMFGNARFIWNIMLNMANERYKNNPSSKFVNEYGMNYLVKQLKVEYPFLKESEARSLQISNHYLGQAFKMLFKHQGGHPRFKSRKATKQSYTGDGTNCKVLAKRRMKLPKLRCIKTSKTNRLKDCKIKRYTVTLDPTGKYYLSLIVDDPNIQSLEPTRSVVGIDMGVADLAITSDGYKYPKFVTPYLDNKVVEAQSKFSKRKQRVLVRVRQWNHNHKDIKMELEDYSNWQKARQQKARYQAKITNKRKDYLHKITTELVRSYDVIVIEDLKTKNLLKNHHLAKSITNNSWYLFREMLEYKCKWYGKQLVVVKPNYTSQICSKCGYHSGKKPLDVREWTCPKCNTHHDRDINASINILNRGLKELKKLKKIKARD

SEQ ID NO: 4634 - protein, 240 aa, Anabaena sp.
LGLTHFAITSDGSKFDNPRILNKHEKNLKIKQQQLSRKQKGSNNRNKARKKVARVHRKITNCREDFLHKLSRRIVNESQVIVVENLHVKGMMQNHCLAKSIQQVGWGMFCTMLKYKAENEGKIYQEVDRFFPSSKTCHVCLNQVSSLPLDIRFWTCEKCQTKHDRDVNAAINLRDEGLRILTSGTGDKAMKCGLGGFPHEQLHQEACRPEVSRSNRGRKKSTTVLSVGQEAHTVPSGQCG

SEQ ID NO: 4635 - protein, 390 aa, Symploca sp.
MTQKAFKYRFYPTTEQEQLLRKTLGCTRLVYNRALAARTQGWYERLERVGYKETSAMLTGWKKQPELQFLNEVSCVPLQQGLRHLQKAFSNFFAGHTKYPNFKKKRSGGSAEFTKSAFRYKQGNVYLAKFSEPLPIRWSRKLPDGVEPSTVTVSLTPSGRWYVSLLVDVEIPPLPKKVKNIGIDLGITSLIATSDGDKVVNPKAFKAKYRKLRRAQKALSRKLFGSRNREKARVKVANVHAQIVDARTDFLHKLTTQLIRDNQVIAVEDLAVKNMIKNRRLASSISDASWSELVRQLEYKSEWYGRDLVKIDRWFPSSKRCSNCGHIVEKMPLEIRQWECPECSSKHDRDVNASLNILAAGLAVSVCGATVRPEQSKSVKAGAMKQKPKS

SEQ ID NO: 4636 - protein, 361 aa, Burkholderiales sp.
MKLIAQLKLQPTPEQHALLKQTLETANAACNYASAVAWEQQVFGQFALQKLCYKAIRQQFDLGADVVVRVFAKVADAYKLDNQTKRGFKPLAAFPFNERLVSYKLTPQVVSIWTMGGRQKMPFVCGEQQLALLQGLRGECDLVYRKDEFYLFQTCDVEEAPEIEADEFLGIDMGIANIAVDSDTTFHQGKGIKHVRYRHRALREKLQAKHTDSARRKLKRLSGQERRYATNVNHVIAKQIVKTAQDTGRGIALENLKGIRKRVTARRGQRTVLHSWSFGQLRSFMEYKAKRVGVCCKAVDPRNTSRTCPNPDCRHVDKANRKTQDQFLCIRCGRAGHADYFAALEIRRRAEVNPPNVGTSA

SEQ ID NO: 4637 - protein, 705 aa, unknown
  TnpB Polypeptide
MHCETTCRVDTQNPQPLAENSDLTSGPCVSGAMRAESPSSRSWANGTTTSPQSPSTPTAPSQTQPRSTHSEASTSSMGASQHASSDPISTASSSDSQTSTPTAPSSATAQAASISNARASRRFYNSRLRGVYAQCTLPTKTASAVSGTSLSSSYLKSTEQISSWTNTTRTPPLQSANSPTTSSLSSPFSALASTGNAAAATEPPGSKKKAKSATNPATPTPIEPLDTDAKRKKKPIPFTRKAPLEGYLRTYKIKMLPTPEQVVELKRTFSAARFAYNWSLGEVKKGNVKPTSTAPRDHFRKNAPMPAWATGEHAVASRILAGACKQVSDAYASNFAKKKKNSTHTFDIKYRSIRRTASEVVKIDKDTAAAKQSPLNRFEAVQRPYERSRRSIYRHNRSECLAFLGNNLKSVGGIVLQDKPHVIEKLLAEGKRLKEDAKIIFDKRTQHFYFMWTFEQPKLPDPDPTFQTKRIAANDPGVRGFQTWYSPTSGEYGELLEGFQEQIEVRLQKLDRLTSRVARRYERKAAKKNGKVCNVLKPPPDGCNRTRRQRYRTTRALAQKLSRDRQRHVGWVQSAHYFAANSQLRNHDLIIQPWLHCAALVPKSSRVLGCKTVRTMLTMSHFKYRERLQCAATRYAGRHVLITEEPGTSKTCTNCGHWKADLGAAKTYKCNNCSIEVDRDVAGARNNFFAAYGDAVRIGWDGCSG

SEQ ID NO: 4638 - protein, 396 aa, unknown
  TnpB Polypeptide
LETNLQVVQKQNLPPTFCPSFTSSLVESTDSENIVTKSRKILIYLSADQRRLVRKWFGVSRYIFNKTVALLKNGDVKANWKAIKTGLLSDLPEWAKEVPYQIKSTAIKDACVAVGAAKKTYKKTGKVQQVRFRSRKNLIQSCYIPKTAIKDRGVYPTKLGQLTYSQRLPDNLCDSRLISNNGNYYLCVSHKVAASPAENQGRVVALDPGVRTFITFFSETSVGKIGIGDFSRIQRLCQHLDNLKSKISKAIAGQKRRMRKAARRMVIKIQNLISELHHKTARFLVDNFDVILLPTFETAQMSKKGSRKIRSKTVRNMLTFAHYRFKEFLRHKAQEAGKIVVDVCEAYTSKTVSWTGEIVNIGGSKRIKSKVDGRTMDRECVSFSQNLVIGGKLVFV

SEQ ID NO: 4639 - protein, 330 aa, Bacillus sp.
  misc_feature (191)..(218): Xaa can be any naturally occurring amino acid
  misc_feature (299)..(308): Xaa can be any naturally occurring amino acid
MLCQASCHEERVCLAKRSGQYCDSVVCSQPCGCVYTLFQKTNSAPRFRYKKNNVQSYTTKQTNENIAVVGNKIKLPKLGLVRFAKSREITGRIVNATVRRNPSGRYFVSLLVETEVQELPKTSSYIGMDVGLKNFAIMSDGTTYKNPEFFRVLEEKLAKAQRVLSRRMKGSSRWNKQRVKVARIHEYISNXXXXXXXXXXXXXXXXXXXXXXXXXXXXEDLQVSNMLKNHKLAKAISEVSWSQFRTMLEYKAKWYGKQVIVVSKTFASSQLCSCCGYQNKDVKNLNLRTWVCPSCQTHXXXXXXXXXXNASINLKHEAIRLLTARTAEIA

SEQ ID NO: 4640 - protein, 397 aa, unknown
  TnpB Polypeptide
MTSGLIGKARRWRKGRSLIQTYRFRLYPTSQQEQTMIETIETCRRLYNDLLDDRIRNHTGTFEQKRNLTIRRKENKYLSQVHSQVLQDVTLRLGKAFAAFFGGLTKFPKFKRRGRYSSFTYPQHGGFKIVEGKLYLSMIGKVRIVLHRDVEGKMKTCTIIRDIDQWYACITGEKEGTESLQNIKPSVGIDLGVTALAALSNGMILPAPKLLEKSATEIRTLQRSLSRKQRCSKNREKAMITLEKAWRRLRNRRNDFAHKTSKFLANNYGTLVFEDLNIPNMVKNHHLASAILDACWGKTRRLAAYKAERRGGRVILVNPSGTSQECSGCGRVVEKALSKRTHSCPFCGLELDRDVNAARNILARGLEQAPVETQPLPVIRIGKFGQGSKKPTAFRHG

SEQ ID NO: 4641 - protein, 406 aa, Nonomuraea sp.
VSDRQGLRLELAPTLEQRARLGRHAGLSRVVENFCLEKVKAALEQREAEKTYGVPDKDLTPVPWSAPALERLWRLEHRDRYPWFTEEGLSSRVPKEACRVRAAGFKNFFDSRSGKRKGRKIGFPDWRKRKHGSRFRYDADRARPESPRIIRLPGVGKVRTLEDMSWLTDRIADGRARVVGSTVREQAGRWWVSFQLQIDRTGINEKRAVSSDAPACGIDVGVKTFATIVDDDGTVTELHAPKPLKAALRKLRKAGKAVSRKKSGSSNRAKAVKRLARVHLEVAHRRADFLHKTTTMLARSKRAIAVETLNVTGMVANRRLARAISDLAFGEFFRQLEYKTRWYGSSVWAADRWFPSSSLCGGCGAINRDLTLADRAWKCGCGLEHDRDVNAARNLLNAMTLEQSAA

SEQ ID NO: 4642 - protein, 397 aa, Nonomuraea sp.
VRRSFKFLLRPTRRQEIALTACLYDHRDLYNAALEHRRTAYCKAGVTIRYGDQSAELKEIRKADPDGQGRWSAGSQQQTLRRLDKAFQAFFRRVKAGQAPGYPRFKGRRWFDTIEWPALKNGAAWDSQPHDPVTRVYLLGIGHVRVHRHRPVKGTVKTISVKREGSRWYVVLSCDDVPAETLPATGAVAGVDMGVASLVTTSDGTHIASPRHLAAIADRLAMAQRDLARKKRGGKRRRKAVARVAVLLAKVRRQRLDGAHKAANALVRDYDLIAHEALQVANMTKRAAPKPDGEGGYLCNGGSAKSGLNRSILDAGWGVFLTVLAHKAESAGREVIAVNPANTSRTCAQCGHCAKENRVSQAGFRCQRCGHEAHADVNAAINILRAGLALRASAQAA

SEQ ID NO: 4643 - protein, 413 aa, unknown
  TnpB Polypeptide
MQRLQAFKFELMPNGEQQRDMRRFAGTRRFVYNKALDIQKINYTAGGKFIGYVAMANLLPEWKKEFEWLKQSPSHSLQQSLKDLDRAFKNFFEKRADFPRFKRKGTEESFRYPDSKQFVIDQANSRIKFPKLGWVRYRNSRDILGAAKNITISQSGGKWYASIQTEREVEQPIPTATSAIGIDMGIVRFATLSDGSFIAPLGSFKKHETRLRRYQRKMSRKVKFSKNWHKAKRKVQNIHTRIGNARKDFLHKATTEISKNHAMVAIEDLQVRNVSKSSKGTTGAPGKNVAAKSGLNKSILDQGWFEFRRQLEYKLNWNGAILVPVPAHYTSQTCPACGYVAKENRQTQAKFSCVDCGHEENADVVGAMNVLARGHRVAACGEEGSGLARKRKTKPASVKQEPTEVTMHEVTHV

SEQ ID NO: 4644 - protein, 145 aa, Bacillus sp.
MKQYKPKEFSEMLNVSVKTLQRWDNQGVLTAYRNPKGRYFVSVLCELEEMATKLALNKIGLGIDLGVKDFATRSDGIVHENINKTIKVKKIEKRLKREQRSLARKFENLKKRGEKSVTNRRVNIDKNVLRVQKLHARLANIRIEY

SEQ ID NO: 4645 - protein, 392 aa, unknown
  TnpB Polypeptide
MIKSLKVRLNPNNKQLTKLFQYAGCARFAYNWAIAREQENYNQGNKFLTDNELRKEFTQLKKLPEYKWLSEVSNNVTKQAIKDACNTYKRFFKGQCKCPKFKSKKYSTLAFYQDNVTIQFTDTHVKVEGFSISKRRNKQKLNWIRLCEEGRIPPNCKYMNPRFTFDGLHWYVSVGIEMDDNTSLPLNEGIGIDLGVKDLAICSDGNTYKNINKTPRVKKIEKRKRRLQRSISRRYEKNKKGVNYCKTSNSIKREKELLKVNKRLTNIRRNYLHQTTSEIIKRKPSFICIEDLNVSGMMKNRHLSKAVQQQGLYEFRRQIEYKTEWSNISVIIADRFFPSSKLCSCCGIVKNDLKLSDRTYKCECGNIIDRDFQASLNLKVYGENVLRQQSVI

SEQ ID NO: 4646 - protein, 412 aa, unknown
  TnpB Polypeptide
MAHRYRLTPAPEQEAALGEHCAHARFVWNLAVEQQSWWWPGRGSTPGAAVRMRQLAEARAAEPWLREGSSSVQQQALRDFDKAMAAFLDPQNPAGKPSYRSKRGTQGFVIRDTKVHRLNRNHAEVFVPKCGYVRFRLSRDLPADLGMTRVTMDRAGRWHVSFQGPQPALDREPTGGAVGIDRGVRTALVTSDGQHYRVPRISDRRAARYLALQRRMARQQKGSRKREKTRRAMARITAKVTDRRKDWAEKVSTRLVEDHDLIVFEKLNVKGMTRKPQPKPDPEHAGNFLPNRRRQKAGLNRGILASCWGYLARRTEQKAAASGAAVTYVDPKHSSQECRSCGHIASSSRESQAVFRCVSCGHEDHADANAARNVLARGLAWLAVPAQAPGPRGVRPRKTPANGAAGTTRQAA

SEQ ID NO: 4647 - protein, 499 aa, unknown
  TnpB Polypeptide
MTGIRKSPEERTALETEVLHDVFTGIQKANREAEERFLSKLERLVKAGGMKSAVQRSKLIQTVFSYPTKDKWFLNYETLDAIFKETSHPVYRRMNSQVNQNAIRKTVKSWIGYFKSMKEYAACPEKFLGKPKQPGYIRTQQATAWWTKQTARLTFQAGKAYLQFVNLKEMFCIGKESQYRGLKYIKTEIKPFHGQFRILITLNDHVKEPELPENPKRILGIDPGLDNLLTVAGNFGKAPFVIRGGVVKSINQRFNKRRAKLIASLTRGYDSSHSHKDSHALDALSRKREDALRDIFYKCAWYLVRYAKVHKVEVIVIGYNPLQKQEISIGKQNNQSFVSIPFQKLRETIRIIANREGIPVAMQDESYTSKASCLDQDPVPDYKKGEVPPEFSRKRTRRGLYRSANGILINADVNGAANIIRKRYPDVFEGQYMDYLYKTTESVNVQNWYFPYKERRNLRKHVCSKISMVRHGDRSERRAELMKAFGGTRKVWTPVKTAA

SEQ ID NO: 4648 - protein, 473 aa, unknown
  TnpB Polypeptide
MRDQLNFLLRDREYQTWRKEYVTLVKKKEPTADEKRRKKVLSDQMKTRRLELEISKSDLEKYIKICGARYRKLLSSQQVQAEAARVWKGVEKFLFSDGKEVHFKKFMDFRTISGKSNTNGIKYDPAARTLTWLGLEMQCYLQKKNWEHILESLDHKISYCMLKRQMFSGGWRYYLVIVLDGNAPKKQIEAKNPNPQDTVMGIDPGVSTIAGVSDETCVLEELAPDADRYEKQIQQTLQKMDRSRRMSNPGKYNPDGTINRKNKDRWKNSKNYLRLLRKLRVLYRKKSDYIRTSHRTLCNRLLQIASSFLVERMNFKALQRRAKETKRQEQVSEVKKKDGSVVQVQKFKKKKRFGKSLNRRAPSLFLTELKRKVMAMGGSYEEVKTETFKASQYDHSTGECKKVSLATRMKVIDGQEVQRDLYSAFLIRNADLSLEYPDRERCMYEFEHFVEMQRKLIESMKRSGISMKQCFGF

SEQ ID NO: 4649 - protein, 317 aa, Streptomyces sp.
VSPEFESDGSPKLNTKGKQVMGRSVVVQRLNRRWARVKVPGCGWVRLRLTRAQLPAAKTFRVTFRNGQWHIAFAVVPEPIEAPAAGEVIGIDRGVTITAALSDGRKLNCPQLTVRERAQIRKHQRRAARAPKGSEAKASEHAKVARLKACEANRRKDWCEKTSTMLARSCGLVRFEKLNIKNMTRSAKGTVEQPGKNVRHKAGLNRVILAQGWGLLRQRTEQKAPGRVEDVPAPFSSLRCSACGWIEKKSRKSQADFVCVSCGFTCNADENASINVAAGQGGIPRPRRTAGAGGVTAAASRSSAREPQPAWVGIPLF

SEQ ID NO: 4650 - protein, 398 aa, unknown
  TnpB Polypeptide
VKQVLTVSCKIEVNPEQSAKIDATLQAFADACEYVNKTVEPKLTNELAMQSLVYHDVRARFGLPAQLAIHAIRRVSSNRKTAKQKNKPVNKFAPTSATYDQRTFNLREKDWTVSLTMVGKRERFILAIGNYQLGLLKGQNPKTATLVKRQNGEYYVNIQLESESPIPEKTKKILGVDLGRTDIAATSEGDSFSGAAISKMRDKYSTLRANIQQKASRGTRSSRRSCRKLLKRLSGKEQRFQSHVNHVISYRLVQRAKLTNQAIALEDLTGIRERTNTMPRSKTERRRSNSWAFYQLRQFLTYKSVKFGVKLILVDPRYTSQTCHNCLHIHPTKGESYRSGKKFACGHCGWVGDADVNGAKNIANNAAVINLPGSSELACSLSDHVLGLLKTPSLYRVG

SEQ ID NO: 4651 - protein, 382 aa, Lactobacillus sp.
MLRAQKVRLYPNRHMAKVLDSLCDYRRYCWNKGLAIWNDMYDLHTIEHSNPRPSAYSVRNELVAAKADWQYELSARTLQLAIADLGKAWQNFFDKSLPDWGKPRFKSKRAPRQGFKTDRAKFVNGKLRLDKPRGTKIWYDIRLSKHVNLTGTLKVVSVYRENGQYWASLPFEVTVAAKPKTGESSAVDVNVGHLNYTGGVVNTLPKRLQRLYQRIKFYQKRLARKRVVNGKTATKSNNYQAMRAKLQRDYRKVTNIQHDIMQKFTTQLVTDYDKIVIEDLSVKKMQMAHVASKGLQRSMFGYFRQILRYKCEWYGKELVLADKHYPSTQRCSACGHIKSGNDKLTLQGNATHKTKHHEYVCYHCGVTLERDENAVANLLALI

SEQ ID NO: 4652 - protein, 229 aa, unknown
  TnpB Polypeptide
LEKGLEIQLSKPLIGKNIKQIEIIPKHKFFQAVFVFNDDDCFTNQKVKFFKTVEQVELNKLDKNGEFVVKQFAIHKKVMSIDLGLNNLATCVTNGVIKPFIIDGRRLKSINAYYNKRKAKMQSKLEKRGKKWSRRLQNLTDWRNAVVNDYMHKATSYVVKTCALNGISKVVVGDVVKSLNHINLGKRTNQKFVNLSQGQFVEKLSYKRRKTRYRISGGRRELYFKSEFC

SEQ ID NO: 4653 - protein, 399 aa, unknown
  TnpB Polypeptide
VEQLRVYRFQMQPNAAQGMLLSRFAGARRFVWNWALARRIAYDKENGTGISRLALSAELTALKSQPGTVWLREVDSQALQQVLIDLYRAYDNFFERRAHSPRFKSRKRDEQRFRIPQRVGVRDGAVIVPKIGAIRIRQSQTIEGKTKSATFKRDATGKWYVSLVASFAMPDVALPAPNPDEVVGIDLGLKDFAVLSDGERIATPKFYRRRQRKLRRVSKAFSRTVKGSSGRVKAKHRVALVHRKTANQRRDFLHKLSTRFVTRHGGLCIEDLSLKGMVRTKLSKSVSDAGMGEFRRMLEYKSLWHRKPIAVISRWYPSSKTCPVCGTIDDGLTLSDRLWKCDGCDITHDRDLAAAVNIRREGLKQMVAVGHTETENAGGLAVRLPHREHAGVNPESHAL

SEQ ID NO: 4654 - protein, 233 aa, unknown
  TnpB Polypeptide
VRTGRTISCSCSTWTSSRKRRPRAVSASTWASRISSRCPPARKSTIRTGYADWRPTLNGSSANCPTERKGRTTTADRRQSVAKAYAKLRHYRDNFQHQLSHRLIEENQFIGMETLMVRNMTRKARKKLDADGMPMRNGQSRKRAMNRSILRDGWSGLVDKLSYKAEWYGRTLVQVDRFYPSSKLCHDCGHKYKGLRLSERGWVCERCGIPHDRDVNAALNIRDEALRLSREQA

SEQ ID NO: 4655 - protein, 459 aa, unknown
  TnpB Polypeptide
MNKKKGIDLSTINADDTPILRKRQKKRLVEEKKEEPSSTTSPIDTLQNIKTNNEEIELGKAGEIVEPDEDVIIEMFEEPITKNTSEEPEPEGEVTGENLPEFDPEYILVDDIEDAPDEEIPKEKPKKGFFKQLKEEYKKTSKGTKIFGVISILFSLIFLAVGLFFYHKTTKVKEEQPQQPQPQVEQKQEQPKEEDNTSEKDKLQNKLEESVKSVNTPTKVTTEELFGGYILGSTTYYPDDPQKLYIDFTIKAPKEKQPQADDETALKILKTLKSPKSNPLSFRIIKRNEILQLQIMYRITSESKTRNSNGVIGVDFNKGFVAISEIDQNGKLLNLDRIDYIHKGKSGVTKNSIHHLVKNLVDIAIKSGKDIVIEDLKSLNKNKIEKTERKHYNRMINTLKFGKFRKFLETRCDKLGVGLSLVKPNNTSKIANNKYCYDMKLNIHSGASYVIARRFYNLD

SEQ ID NO: 4656 - protein, 401 aa, unknown
  TnpB Polypeptide
MKNKKYIRSSTTSLKFANKEKLSKLRKIILEYNRLLNEFIKYYWCKNLSNLPKFCSSVDYKQFQSEILNSRMLNTCGKQALAIVRGTFQKQKQRLFVYNKLLVTGRIAEASKLKKKIDSVNISCPVLNKIVPIQLDKNTCQIFLENPNSFDGWLKVQSSKIVDGKLKKLSILIPFKRTKHFNKKFKNGKLLKGVRISLNDISFCFEFQTQYKTKGETLGIDLGISDLYNCSDGQKSGMLNGKNLSQIQKELSRKRKGSKAFSHKQKERENYIRWSIKQLDLSNVSLLRREDLKDVFKYKKTCRFMQAWAYAQIISYLENYCEEQNVSVLPVKPSYTSQRCFLCGWVQKSNRKGKVFRCKSCGYTADADYNASCNISLSLQALPASLRQTKVNIKGFYWQKV

SEQ ID NO: 4657 - protein, 835 aa, unknown
  TnpB Polypeptide
MGVRRTAPVKLVVPDEYRDDLHETADQFLYCANEASDYCWDNTDHEDCITSNVKARDALYDRLREETDLTANLVQEAIRRAVHAVDSGVDRWKKGKRTNKPAFTSWSMVYDKRSATFSRNKISLSTVNGRIECNFELPAASPTPYEEYVLSKDYEFRTSTLQYDQATDEFYFHIKTRKIDNDGEAVEIEGSDDTGHQTVLGIDLGVNSLAVASTGTFWSGDEYDHWIREFEKRRAEMQQRETEAAHNALLRLGKRERAWRKQYIHMVANEIVTESVEHDCDVIVFEELTDIRERLPQADWHHVWAFRRLVEYVEYKAPERGVAVEQVEPAHTSQRCSHTDCGFTHEDNRDGEQFECLKCGYEINADYNGAKNVGLRYMRKRQHRLRSSPTSGSADAPVDVRVNGGTLSGDGYRPTAESCSPGVHIKAQPSTSEPVRVSEVGWGSLQDAHLFEPLGQVRVRDEVEAACREGLLLGLLPDVELEFDLFLPEVRLEARILEFALEGVDVGVGQRVGREVVLDDVLRADADVLGVGRREVLREVGRLDGAVRNRAVDSVGPRVTVGEHHDGEVEFVAHPLDEPAGRPGGLPPEVDDDTVVLVVEPVLHESVPHTTGLHGDDEVGVVVEELDGVRVVRDLVAALADVLLAVDFAVAPLGLLPEEQRPHHLRARLLGPHVEVLPFDVAHDLEVLDEVVRLVLPVELGLLVVPGFGQVVQLTERRRPVLLELLGEELDRIHRLQELPCPTHRVRRPRRLPVAVHPDVLVLVEHDVALRTRRQPHLRDLPALELVVELGREVYELLLSFRVGVCSVTHWSFTVSFGPSISETERSYDASASTV

SEQ ID NO: 4658 - protein, 356 aa, unknown
  TnpB Polypeptide
MNCTKTLRLRIKDKHARVLCAMAREVNQVWNYCNETSHRAISERRQWLSGYDLQKLTNGFSKCDGVTVGSPTVQQVCEDYAKARRQFKRSRLRWRVSNPRSSKYSLGWIPFKARALQYKAGQIVFAGQRFGLWDSYGLSDYELRAGSFSQDTRGRWYLNVVVKVQAKASGGTASVGIDLGLKEAAVASDGQRIEGRFYRTLEADLSMAQRARKKRRVKAIHAKIKNQRRDMLHQFSTQLVRNNAAIFVGDVASAKLVKTRMAKSTLDAGWAMLKTMLEYKSQQAGVVFEVVSESYTTQTCSCCGSIPASSPKGRAGLGIREWTCSECSAAHDRDVNAARNILAAGLRRLAEGISGV

SEQ ID NO: 4659 - protein, 481 aa, unknown
  TnpB Polypeptide
MQIGNRFRCYPTPAQAQILLQWIGCQRYVYNAKVGEDQYFRRFARKSLAHTGQFAPIDQQYSHFKTELTPWLFGVPSQILRNGAVLWKQAYSRYFQKLGGRPKIHKKHGKQAVWITSELFEFVPMVNADTGEITGHRLHVGTKKHPMGVLEFKAHKGYKPPASLHISIHAGQWHISFNSDDSAMEPSETETTDWLMQFNASELRKMTVGLDRGVALPLAGSDGQQFDFLPVQAKRLAEQEKHKKRWQRRQARRTKGSGNWVKAKRKVARYQRYGGDVRRELAHQTSHTLAVDERYKLFVFEALKVKNMTKKAKAKKDEQGKWLRNGAAAKSGLNKAILASAWGQTKVFLQYKARRQGKLVIEVPAFYSSQECGPCGHIHQDNRVSQSGFVCQSCGHIDHADHNAAKVIAGRGVRLLLSGELVKKKVKRCAINRKKVGAEGSEPGAAMCPTLGETAVSRLGGNTPALWSLTQETPAITPLGV

SEQ ID NO: 4660 - protein, 410 aa, Photorhabdus sp.
MPMLILKAYKFRLRPTVAQSQRLRQLCGCARFVWNYGLAETQRILASGGKLPSSFELNRMLTVWKGMPEHTFLQAAYTDNLQQKLKDLHGAWQRCFDKKLTAKAPVFKRKNDGRDSVRFVNFEKYCRLESRRVKLPAGLGWMKFRPSRDISGKIKNATISQQAGHWYISFQVEIDVPEPQHPSTSIVGLDVGVAKLATLSDGTIFEPVNSFKTRQRKLARLQRQLSRKIKFSANWQKQKRKIQRLHAHIGNIRRDYLHKTTTKISKNHAMIVIEDLKVSHMSKSAKGTAEQPGRHVRAKSGLNRSILAQGWYEMRRQLEYKQRWRGGRVLAVPPAYTSQRCSCCGYIAKENRRSQSQFACQVCGYTANADVNGARNILAAGHAVLACGGRVRSGRPLKQEPDTEQSAVTH

SEQ ID NO: 4661 - protein, 354 aa, unknown
  TnpB Polypeptide
MCADLTKLKKVKEYQWLKEVNSQSLQQSLMHLETAYKRFFKKLAEPPVFKGKHNRQSFTVSQRFRIEDNKLFIPNFREPIRMFKHMEYRGEWRNITISQEPSGKYYASILVLETDPDVQQMPKAEESAIGIDVGIASFATLSDGTKIEKPKHIVQSEKKLKKAQRKLSRKKKGSQNRRKQRVKVARIQDHIANQRKDFINKVSDALTRSYDTIGVEDLSIMGMMAGNHRRAKAIADAGWYTFRQMLKTKASRRGKNYIEIGRFEPSTKMCSNCGYTKPEMKLYQRRFICEECGYTNDRDVNAAINIKRFALISEGVPTESGELTPVDRGTTALELLEREGIRACTLVEAGSPVR

SEQ ID NO: 4662 - protein, 456 aa, Haloferacaceae sp.
MGIEEVTKTARTRLCIESGERSWLKDARYIARDIANDTLRLKQQGYNKTEIQREVDREDFLRNNKCAVVGKALQAWDSYKELLNWWYNQDDTNVGKPSPPATDKKGAYPLVMAHTEGYRLTYNDETHRVQFRVSPKPYKKVKGHLRGRSEDLNLIESALVEDEWSLGQAELLSRKSKIFDESSKCRGTSRYRDGVYYLHVTVKTKIQVPEPEDADTLVGVDINERNIALTALTRETVETLGTLVLDYGSVKAERQRYHTITKRCQEHGQHSIHHQLGEKEERYTEWILHRLSRVVVEFAQQFSNPVIVFEDLSGIRDAIKYGTYMNRRLHKLPFHKFEKQVRYKATWNQIPCETVESPYNSKSCSCCGHRGYRQGRRFRCTNDSCAVQQDHADRNASVNVAWRAWAKHAGVDVELVNYRTHKTQPQVRLVRLSGSGRSVNRPSSSREIASRGVLSA

SEQ ID NO: 4663 - protein, 475 aa, Streptomyces sp.
  misc_feature (475)..(475): Xaa can be any naturally occurring amino acid
VAIRSRLKGLTGQDEAVLRQVGALLGSLASRDLKARCAAGLEHDGEQWARRKRALTGESSSRWAGGITRFTHDQWALARRGQFAHMQSLRAGVETIAHRLAQPVGARGAKGVPGGYRSEREWFAKSRRLHVLGDRLVRVRADWEAGRVRVVRGGKKLARARHHLQAAGLSEARWRLRWQAERWFLQADGESGKRYGNETIRVTPGGEVSIRLPAALAGLANAPHGRYVLACRIVFRHRGEQWADRVAAHRAVAYRVHYDPDRGRWYVTASWQTPPVRTVPLSAARAGGLAGVDMNADHLAAWRLDTHGNPLGAARRFDYQLDGTAQHRDAQLRHALIRLLHWTARHGLALAIEDLDFTAEKTREKHGRRKRFRKLISGLPTARLRARLVSMAAELGVTVVAVDPAYTSRWGAQHWQKPLTSKNRKPTRHDAAAVAIGRRALGCAIRRRTAPPPHDRSDRVGHRTVQARPGTPGRX

SEQ ID NO: 4664 - protein, 457 aa, unknown
  TnpB Polypeptide
MDNIMTIVSAEGSETMVLTEEHRIKKCGNRKLYHEIDMYCYRAKNLSNTVQYLISQCYRIHRKLKDGEILDSWEKSLIYRINCAIWKYNIGRKGKKLKYIDEQNGFIADAYFLSWHMKTLDVYKDMPYATCSQICIQEKCREWKSFHHALSAYRKAPHGFMGCPHKPGYLDPTTGRGRLVITSQNFSVDRDGYIRMPKFLEGIQLHARHSGIHQIRIRTEKTEILIQIMYEQREQPLIKGGNVMGIDLGVGNLVTISMDSEAHPIIINGRPLKSINRYYNKKKTLLQKQAKKSNHRNTTNRIERLTQKRNRKIKDYLHKTSRKVIETALQTKTRLIVIGNNRGWKQHVALGNRTNQTFVSIPYKVLIDMICYKAQLVGIDVRVVNESYTSGTSYLDGENPEKQCYDNSRRVSRGMFRSNKGKLINADVNAAYQIIKAAGIKNLAVKENETVTRVNVA

SEQ ID NO: 4665 - protein, 400 aa, unknown
  TnpB Polypeptide
MKQTIVYRLNPNFEQERHLHNLCSIATKLYNTDNYMRREAWEKIGKIPSVYVQKKVLKDNVWFKLLPSQTAQEVCFVLQQNYKSWFSLRKKDATANPPMFRRKDKLSPIAFYQQFKVVDGTIRLSMSRKYSQENKIKFLQIPFIKWKSETGIAKFCQIIFDNGKWFAHLVFEISESQPVLNDGVMAVDLGIIKNAVTVDTAGRSRIYSGGQILAIQHYFNKEKAKLQSVLQKQFPKRHLSRALRILQDKQNKQINQSLHTYSKAIVNDCLNHHIRTLVVGDIKDIRKDKNFGSVGNQKLHSWSFSKFTQQLEYKCVRVGIRFVRVNEAYTSQTCSVCGIVKKSNRKHRGLYVCKSCGSILNADVNGASNILKKYLRDFLSKSIGVVAMPSVARITNVCPS

SEQ ID NO: 4666 - protein, 403 aa, Gloeocapsopsis sp.
VQKAFKVTLIPNHNQEVLINKTIGCARFVYNRFLARRKELYNSEKKTLNYSGCSQELTQLKKEIEWLAEVDKFALQNAIRNLETAYKNFFTDLKKPKQKRRFGIPKFKKKHRFKQSYKTNLTNGNIQLRENYLKLPKLGWVRFHKSQEITGNIVNVTVTRTTTGKYVASILCETEIEKHSQADKNIGLDLGIKSYLVTSDSEGIENPKHYRQSLRKLRQANKKLALSVKGSNNRVKAKTKLARVYERITNLRDDFVHKLSTRLIRENSIICIEDLRVANMVKNHKLALSIMDASWSKFVAMLEYKALWHDRIVQKVSPFFPLSQTCSCCGFINPQVKDLSVREWDCLKCNTHQLRDCTAAINILNEGLRILQAAAGSTEAQNACRDEVRPGDSQALVGEARIA

SEQ ID NO: 4667 - protein, 535 aa, unknown
  TnpB Polypeptide
LAKNQTHRAFTAHPIYVSDLNGELLDSAPVLTQLASEVRDISVYSTFVARNDTVLGVELAKIAVPQPAEAGRLVGVKIPDFLVPDKKDEDGKPLKDKNGEPIKIKTGKSRKEKLIQYNTVTAYRSWQERIAAVNGESSKYISQGWKRTMDASAPSYGEDTINLGAVDKRYATIENNPLKDGEIVLRMVIQGKWYRIIFPFDNARFSEGKVTLPLIKIQDNQPVFIFTVVTSNPIVQFSGDYVIGVDVGINNYATVVVRNAKTGRIVRQTTLSQRVHSLWNSVRASEKQVKQLNKKADKLIYQRQAHMSAIDEAQFHREAASRKKRELAILAAQEIAYLSHQFNNAVVAVEDLSWISNTMQNGRWNRGAFTQWLTHYVTQNGGWVVAVNSANTSQLCHVCGAQVSHPKHKVSACPKHGMMDRDVNAAANIAARAVSKVEKARKTRAKNRKLQRQARLKTPPARASLKYPGRDRTKNCPTPKRKKRIAREVNLPISPARVVVTRVLADCGTCGAVETDMAAINLENIAYECRLCNLN

SEQ ID NO: 4668 - protein, 516 aa, unknown
  TnpB Polypeptide
LDGEVLDTELIMAELASEVRSLSAYATYTVRNDKILGTELAQVTTIAPAEAGRQAGVAMPDFLVPDKKDENGEPLKDKNGEPIKLKTGRSRKERLFRHRVVTEYRSWQERIKAANGESSKYVSQGWKRTVDASAPSYGKDFVNLGAVDKRYAVIENNPIVDGEIVLRMVIQGKWYRLIFSFNNARFTEGKVALPLVKIENGKPVFIFTVVTDNPVIQFSGDYTIGVDVGINDYATVVVRDSKTGQIVRETTLSQRVHSLWNSVRASGRQVRALNKKADKLLYDRQAHMSAIDEAQFHREAASRKKRELAILAAQEIAYLSYSYGNAVVAIEDLGWIINTMQNGRWNRGAFVQWLTHYVTQNGGWVVSVNSASTSQLCHACGSKVAHPEHKVSVCPKHGVMDRDVNAAANIAARAVSKVEKARKTRAKNRKLQSRAALKTPPTRESLKYPGRDRTKNAPTPKRKNRVSKGVNLPFSPARVNLTSVLADCNTHGVVGTYKAAINLENMTYECRLCNLN

SEQ ID NO: 4669 - protein, 369 aa, Helicobacter sp.
MKVNKGFKFRLYPTKEQESKLQHCFFVYNQAYNIGLNELQKQYQTNKDLPPKERKYKKSSELDHAIKQCLRARDLPFSTVIAQQSRMNVERAFKDAFKVKDRGFPKFKNSKFAKQSFSWNNQGFSFKESDDERLKVFTLMKMPLLLRMHRGFPPNAKIKQITISCSHRKYFVSFSVEYEQDITAIKNPKDCVGLDLNVLDIACSCGVNNPEKLTDFKRYIQDMKELLGLEIDEKTDPKRLIPTCSKLYSLKKYSEKFKRLQRKQSRRVLKSKQNKTKLGGNFYKTQKELNQAFDKSSHQKTDRYHKITSELSKQFEWIAVEDLQVKNMTKRAKLKNVKQKSGLNKSILNASFYQIISFLDYKQHIMANC

SEQ ID NO: 4670 - protein, 378 aa, unknown
  TnpB Polypeptide
MISYKYKLYRTKKTKHLDKMLREACYVWNHALALQKRYYKLYHKYIPRFTMYKHFSKCYKPTLLNCQTVREVLDRLDISYKRFFKHDAKRPPKFKKAIEFGSFAFQQNGYSLSGNEFVINKIKKSFKFSLSRPYDGKVKRVSVKRNKLGEYFIVLCLDKQAESYGKSHDGASVGIDFGLKKYMTLSDGREIDNPQFLKTDLLELRRRSRNLSKCKKGSNNRKRKKLELERLYQNIVNKRSDFQWKMAHELCKRYDLICLEDLNLEGMKRNWGRKMSDLAHGDFVVKLEHVAKKYGVQVHKIDRFFPSSRLCTCGYKNDKLSLGDRIWTCPSCGAVHPRDLFAAENILRQGIAELGSGSKSPKQSQGCSHVSHPTIPCK

SEQ ID NO: 4671 - protein, 234 aa, unknown
  TnpB Polypeptide
VIPDPVPAPGTGGVVGVDRGVAVAVALSAGEMTSPGGLSLKEAERLLRLQRRLARAAAGSNRRHKMKALIAGLKAKDAGRRKDWVERTSADLPARFDVIRVENLNIKAMTLSARTTVAELGRNVARKAGLNRGILKSGWGLLVARLEQKVPGRVEKVKAACRSQTCNPCKHIASDRRKSQATFVCVAWRHRANADVNPARNIAAGPGVTARADRRVLARSVEREPQHGRPPQVA

SEQ ID NO: 4672 - protein, 234 aa, unknown; identical to SEQ ID NO: 4671
  TnpB Polypeptide

SEQ ID NO: 4673 - protein, 444 aa, Streptacidiphilus sp.
MIRAYKFLIRPTVGQAQALGEMLRDHCSLYNSALQERRDAYRHVSKTSVKYGQQSAQLKEIRAFDPERQGRWSFSSQQATLRRLDKAFAAFFRRVKSGEKPGYPRFRGANWFDTVDFPKDGDGCRWNSTPHDPVTRVRLQGVGHVKVNQHRVVVGKVKTVFVKREGKRWYVIVTVEQSEPEPLPATGSVVGIDMGIANFLADSNGGFVPNPRHGRTAAAKLEDAQQALSRFPRVRRDTRTKNHQKAVQLVGDLHRKVRRQRLDHAHKTALGLVREHDFIAHEDLKIRNMVKAPAPKPDPETLGSFLPNGAAAKAGLNRSISDAGWGVFLTILASKAESAGREVIAVDPRNTSRTCPECGHVSAENRPTQEKFHCLACSHTAHADTVGAINVLRAGLVRREAGTGITRSPRLQPEEESPNCGPREGRLGLARLYDQCLAAVRDGG

SEQ ID NO: 4674 - protein, 414 aa, Halobacteriales sp.
MEKRRTVPVRLTVDSDDAALLRDTVDEFLWAANYVTHHAFQGEYVTTSKTTLNNDTYDDVRDKTRLHSNHVQAARNKAADACKSVVEKWKQGKKASMPHFTSPHIVYDHRTATFHDEYVSLATVDDRIEPDYVLPSNKQDTPHADYFFTDEYETTGAELHYTNGNWMLHVHCKKDVEPDTAEQATPENGTVLGVDLGVNNLAVASTGTFWTGDEFDHWRQEYEKHRGDLQEHGTRWAHQNMQAVGRKETGRFKQTLHRISNELVAEACDHGCSVIAFEDLTDIRERTGASWGHKWAFNRLYEYVEYKAAEYGIDVEQVDPENTSRQCSHCEFTHPDNREGENFACLKCGYENHADYNAAKNIGLRYLRRNQTGSGGGAPVGVRLNSGTLNVNGEYEPSASTEARTGVHAESLRL

SEQ ID NO: 4675 - protein, 466 aa, unknown
  TnpB Polypeptide
MAYKKAEKHEQRVFKQTVEYDEVLDRMLRDSVSIYDQTLYYYRLEYFRCRDLNWTELPKYPSCFDAMNLVKIRDAFINSKMDINIKQQCITQASEAWTGYIRSKKKYKEHPKEFTDEPQMPRYKYRKQVYNVITVNKTRFRGSSDKYIKLPCTDYNVRIPDGLKKEWIDQLKISHRYGKFHIVFIYNYELKREFERQQRKEKTVQLNPKESLGIDLGQKLFVAGMTYGCDNEQSFIIRGSEIKQLIKDTNDSIARLTSAALISKNPEITKISKKNGQLKLSKNSRHLSGIWEHYNNSSDNFVHCTSNMIIDFCTENCIGNIVIGHNEFWKQNSNIGKKNNGIFCKLPHTELIEELKYKCKSAGIRLIEVEESYTSKCDHLANEDMCHHDTYLGKRKGRLYYSSTGKRLHSDINGCIGMLRKANVIQDASCLLDRGDIVSPVVLNIRGYQPRKQRSPKKTDIIDNTL

SEQ ID NO: 4676 - protein, 564 aa, unknown
  TnpB Polypeptide
VKNKEYITQTEMQSLHFPLTVMRTLKSRIHFKGKTTEEKEEILAFFNQSLGNARFVWNTLLNHSQQHYFDYMQLSDEQKSEKIIISYKNKNNEDITKEVNKYKSFLTRSDLSDMLTKMKKHSDYHFLNCSHSQSLQDITERQSETFLNVIKKRITGEKVKVNFKSKKDDSSFTIKQVKPEYINFKKNTILLPKLKKTIGFICTNKIKNNEKVKTLQIVKENKNWYFCFTLETVETEKEKLNRLERYIEKIDELRFNNNNEIKGFDYGVNTFLTGNDGQKITIPAKIKKRIEKLTARLHRIQRVTSSIQLIKNNIIKNAKEKYKDECGHEKDFNIKNFNKVKYHYISIDSLKQSKNEKQLYDLQRKLYKKITQIKNDFLHKTSSFLSKNNACIVMEKLNIKGMTKSQRRINLEKSVEYKEKLKQKMNNNPAFARRWKKNRLNREMLSFPFGKLTSLMRYKMQRENHVFVQVDPAYTSQTCHVCLHVEKANRPKTSLFICQKCGHTDHADVNAGKNIRDKGFPLLHILYNEMIDLKNKLLNHKSAVGTTVTLKISPQGEKIQLLPL

SEQ ID NO: 4677 - protein, 318 aa, unknown
  TnpB Polypeptide
MIKKQVKLAETVCKECLDGKINNYTISKESNGEWYVSISYTYDETAIKNNLTSNGIAGYDLGVKSLITKNDGTTYLNAKIFRKHAKALKRYQRRMSRRRKGSSKYKRVKKLFNKKNSYVANYRKDAIHKATTEMVRDNMVIAIEDLNVKGMMSNHRLASAIADCGFGMIRRFLEYKCRKLGTLLLFVDRWFASSKTCSGCGGRKEDLSLSEREYICEECGLAIDRDVNGAINILAEALFCELKIRFNTDVARRKFTPADLVALATSLSGCGETTEETPQLCGTDAQCILTSDGRAALVDEFFNRLRNHVVNTTVNCYV

SEQ ID NO: 4678 - protein, 365 aa, Clostridium sp.
VRELLKAYEYRIYPNSEQRLYLAKTFGCTRFIYNKMLADRIRLYEENKDLGIKKVKYPTPAQYKKEFPWLKEVDSLALANAQLNLHKAYKNFFRDKSIGFPKFKSKKSNYHSYTTNNQKGTVCIENGYIKIPKLKSMIKIKLHRQFNGLIKSCTVSKTPSNKYYVSILADTENIKLPKVENKIGVDVGLKEFAICSNGDRYDNPKWLRKSEKRLKKLQKDLSRKKKGSNNLYKARLKVARLHERITNQRKDFLHKLSTKLIRENQTIVIEDLKVKNMMKNDKLSKAIGEVSWFEFRRMLEYKAEWNDKKIVIAPSNYASSQLCSDCGYKNKEVKNLGLREWTCPKCNTKHDRDINASKNLLKLAI

SEQ ID NO: 4679 - protein, 394 aa, Geobacter sp.
MEIKRAYKFRFYPTPDQETILARTFGSARFAYNYMLKARTDAWFNEQRKVGYHETSAMLTALKKDPQYAWLNEVSCVPVQQALRHLQTAFGNFFSRRAGYPSFHSKHGTQSAEYTSSAFKWEKNTLTLAKMKSPLNIRWSRTIPKAAKVTTVTISRDCAGRYFASLLCDDSAVALPKTTGAIGIDLGLTHFAILSTGEKIASPKTFRKNQGKLAKLQKSLARKQKGSKNRAKAKTRVARIHAKIADARKDFLHKLSTRLIRENQTISLETLAVKNMSRSAKGTIEAPGKRVGQKSGLNKSILDAGWSEFVRQLQYKALWYGREIIGIDRWYPSSKRCSDCGFVVQSMKLSVREWCCPSCGSVHDRDINAARNILAAGLAVSALGEAVSPDLAYA

SEQ ID NO: 4680 - protein, 379 aa, unknown
  TnpB Polypeptide
MTITVKCKLGLTDGQRSAIDKTMEAFAAACNDALDVGREAGTTSNVKIHDRCYYDLREDHGLPANLAVRAIARAAGILKVRERRHSTVRPTSIDYDARTFSFKEADWSISLSTVEGRQRPIALDIGDYQRNLLEGQKPKSAVVFKKRINGEWTYYAGIHIDVEEPPSDLEEEHGWIGVDLGIVQLATLDDGTSFSGEEVDRVRDRYNRTRASLQSKGTRGARKLLRRLSGRERRFQKSINHRISKRIVEKARAEGKGVRVEDLSGIRDRMRVRRSQRYRHHSWAFYQLREFLEYKCALAGVPFEAVDAAYTSRTCPECGHEEKANRKSQSRFVCQACGHEENADVVGARNISFGGVVNRPEVALEASGSSTFSGRRAAA

SEQ ID NO: 4681 - protein, 367 aa, unknown
  TnpB Polypeptide
MEYSYKFRIYPTASQSQQIQRIFGCCRFVWNYYLSKRKELYETDGKTLNYNGCSSDMTQLKKSLEWLRDADAHALQNALKDLDAAYKNFFRRVKNGERPGFPKFKSKHNHRQSYRTNCNIKIFDKSIQLPKLGKVKCRVSKQVRGRILSATVSQNPSGKYFVAICCTDVEIELLPKTGATVGLDMGIKSFAITSDGVEYLNHKYLVQSEKKLAKLQRSLSRKTKGSNRWNKARIKVARAHEHVANQRHDTTQKLSTQIIRENDVICIEDLAPKNMVQNHCLAKSISDASWGEFRRQLQYKADWYGKKVVAIDRFYPSSQLCSCCGTQWTGTKDLSVRDWVCPVCGARHDRDVNAAQNILNEGLRLLA

SEQ ID NO: 4682 - protein, 239 aa, unknown
  TnpB Polypeptide
MAQLEYHYGLKIRIYPSDYQKQIIKVNSDASRFVYNEMVAIGKELWQLNRIKLSIDTVQDRIQQLKLRQNAKQMSNHFQFLEDKRIDSLAKANAIQNYHKAWNAFRKVHEAGVPKFHRKSYAWRYQTNCQYPKQKTARLDNGTVCFEDRKHIVVPKLGRLRIKGAQQRLLDRQGETLIGTVTISKDAADRFFLSLQLGSDTPFVPKLSRTNRQIGIDLNTENFLTASNGRTIANPRYYR

SEQ ID NO: 4683 - protein, 325 aa, unknown
  TnpB Polypeptide
MKRVERHRLKPSSPFYAMLREFCHRSKNLYNHGNYLIRQTFIEDGKWLRYGEVDRLLKADKDSPDYREMPTAQTAQQTLRLLDKNWTSFFAAIKDWKAHPEKYKGRPKLPKYKAKDGYFPLVLTNQNCKLKDGVIRFSPNLPRIHGKGHLRQSTRCCVQAGTHHPHGGEIDLELVYELPEVEEKADNGKYAAIDIGVDNLAALAWNTGERPVLLKGTPLKSVNQYYNKQMAKRRSICELMNGRHSSKRIARLTAKRNRKVEDYLHKASRKVIDLCAEQDVSVLVIGKNKAGSKKRNLAAGSTRVSYSCLSPASSRCSSTRLSRWA

SEQ ID NO: 4684 - protein, 370 aa, unknown
  TnpB Polypeptide
MEYSYKFRIYPTTAQAQQIQRTFGCCRFIWNRYLALRKELYEQDGKAMNYIACSGDMTQLKKTLSWLKEVDATALQSSLKDLDIAYQNFFRRVKQGQKPGYPKFKSKHNRRRSYKSKCVGTNIKVLDNAVQLPKLGLVKCRISKAVKGRILSATISQNPSGKYFVALCCTDVEMEPLPPTGGVVGIDMGLKAFAITSDGVEYPNHKYLTKSQKKLVKLQRQLSRKSKKSKRWEKARVKVARLHEHVSNQRTDMLHKLSTDLVRNYDLIAIEDLAPENMVKNHKLARSISDASWGEFRQQLEYKAAWYGKHVITVDRFFPSSQLCSACGAQWSGTKSLSVREWTCPECGTTHDRDVNAAKNILNEGLRLLA

SEQ ID NO: 4685 - protein, 375 aa, unknown
  TnpB Polypeptide
MVKGFKIRLYPTKEQEALFYKHIGCQRYVYNWALNLNNELYKLEERKYSSTDLGKMLTQYKKEMTWLNEVSATTLKQSIRDLDKAYTNFFKKRARLPRFKSKKKSKISFYSRYDRIKFYENDTVNLEKIGKVKYKSSYDIDFTKESSFKNPHVSYNGRCWVLTFGLEVENKVDKLTKNIIGIDLGIKYLATCSGGVVYKNINKEIIIKKLEKKLKRLQRKASKKYLKNKKGGRYIKTNNIKKLEKDIKHIHQRLKNIRLNHLHQTTTDIVKTKPYKVVMEDISVTNMMKNKSIAKQVSKLGLYEFIRQMKYKCKWKDIKFIQIDRYYPSSKMCSKCGNIKHDLKLSDRKYTCKCGLNIDRDFNASLNLMNYGLSH

SEQ ID NO: 4686 - protein, 571 aa, unknown
  TnpB Polypeptide
MIKLKKKLIMRIIENIKSEEKQLMKHKLAYKIGFPENLKEIYEYLQLELNRVLSNDETRKAIEGLDSTLLKAKYWKELRNLIGEDTQYKWKRENRMPNPAWYFCSFAEQIRQIHKGSKDQIKLYQALQLFNNKASSEFYQYCIDNNIKFSRTKAQNMQRCKEEPGLPKEARFVLDFAFINKQASYIYDNSIFKYLINKEDGTTEWYSFPILIHSSSRYQSGARISKPKFSRDKNGNYYGVIAFDYEGKDFEDGNIGAIDLGKINLYTFSYIKPDGTYSKDYYKHSKYLDRLNKKVDSLYLDRNILIEKNKEVDRLFLYSDYIPKEALLKWKKRSGHIERINTKISNLKETIAMHMANEILELCQANNCTTLFMEELNWLESTGGKWNHNAQQSAISRILITHGIEVYKVNAKNTSKEHPITGELGKVSGRDIVWSNGDRLNRDYLSTLNQVQRTGKKKEKQGNRIRTKKKNGYKITKLRDKHSSTPKQMKKKKSNRKEKIALINSLLNKNNNRTNQMVLVRTGSSEQLLNDNNLVPTCSYLIVEDKETTKETYNSMLCRFVNKKQYLYSLN

SEQ ID NO: 4687 - protein, 370 aa, unknown
  TnpB Polypeptide
VRQYYFETKLYRTWQSQKPIFTKNKNTDYYALQSHVAGEVLMQVGRQFIGFFNNKSNKKKRIPKYKDKNGYNVVTFPKLTISRQVDFDNVKKIYTYTLCKRSYNLKIQSSKPNIKQIKFVYDEANDFIKCYKTYEVEQPKLKEDNSRYFSIDPGLNNIVSIYNNIGIRPLLYNGRPIKSINQYYNKTTAKLNSELPANIKSSKRLKQLSLKRANKIDYEMHKISTHIINEAVKNNISKIIIGNNVGWKNEINIGRKNNQNFVNVPHTKLFNQLLYKGLLNGIEVIFTEESYTSKASFFDKDELPIYGENDNYKFSGRRISRGLYKDSKGNLWNADLNGGGNIMRKISDKAAYKGIRKTEEMMKRPILITL

SEQ ID NO: 4688 - protein, 381 aa, unknown
  TnpB Polypeptide
VTTVKKGVRVRLYPTEEQEVLIDKTIGCCRFVHNQTLADCNKSYEQTQHFPSGKERSANLVPLKEEYRFLKDVSAVALQQSLRDLEAALNNFFKNRNHFGFPKFKSKHNRKQSFRIPYNGGIADVLDNKHIKLPKLGIVKTKRFDMPEVYKIFNITVEKTNTGKYYASICIETEVPPLPKTGKQVGFDLGLIDLLVGSEGTRVERPKFDYVNKAKLTKEQRKLSKMRTKLERANLNLDECKNYQKQKHKVAKLYEHTANCAKDFNHKLSRKLVEEYDFLAFEDLTVSDLVKNRKLAYSINDVRWSQLLNFIKYKCLWYDKKFVQIDRFYASSKICSCCGIYHKDRVNSLSVREWTCPDCGTQHDRDVNAAKNILIKALNVA

SEQ ID NO: 4689 - protein, 398 aa, unknown
  TnpB Polypeptide
MMRAFKFRLYPTSKQRDALGMMCAAHAELYNAGLQERRDAWRMRGKSIGVYSQMLQLKEIRADRPDQQMWSAASQNQTLRRLDKAFTAFFRRAKAGETPGYPRFRAAARFDSVDFIHGDGIKLHPEEKRLYVMGVGHVRVRQHRPLPEGAVLKTVTVKREGSGPRARWFVVVPLEVAPTPLPPSGAITGIDMGVASFATTSEGEFLPNPRFGKSAADKLAAAQRALSGRKRGSNRRQKAAERVAALHGVVRRQRLDHAHKTALKLVQDHDVICHEKLRIRNMTRRAKPKPDPDNPGTFLPNGQAAKSGLNKSILDAGWGLFLGVLTAKAEKAGRETVPVPAANTSRTCVECGNCEKANRPSQAVFVCQLCGFTGHADVVGAINILRAGTALRQAAHAV

SEQ ID NO: 4690 - protein, 413 aa, unknown
  TnpB Polypeptide
MLAWYKVTNMEITRTARVKIGLPVEVAETFIAAYTAACQFASDVAFTLKRPSDIKELNTRCYGAIREKFNLSAQVTCSCLRVVVGRYSALKVLKRPPTKPVVFTGEPVSLQGGERGRDFSFTKKGLISLTTLEGRAKVSFEGPPTLPTFIKDWTLGGALLQVKDGAVYLLISFDKEVAEVTAPNNAVVGGDRGINNLLVGTDGKKQVFFGGGHVLHRKRHYQDVRASIQSQKAKRPTRSIRRLLKRLGDREARFMKNTDHVVSKQFVAFAANCGSPVIALEGLGGIRESSLDKGKWFRREIHRWSYFRLELYITYKANDLGFTVMPVDAAYTSQGCSRCGYIAKANRKGNQFHCQACHYQLHADLNAARNIRLRCILARQARAGMGPLSVAPKVPSLLGTSPLHSSNELGGGN

SEQ ID NO: 4691 - protein, 374 aa, Bacillus sp.
  misc_feature (243)..(276): Xaa can be any naturally occurring amino acid
MEVKRMMINKAYKFRIYPNKAQAVLINKTIGCSRFVFNHFLSLWNHAYKETGKGLTYGTCSAKLPAMKKEFVWLKEVDSIAIQSSVRNLADAYTRFFKKQNSAPRFKSKKNNVQSYITKQTNKNIAIVGNKIKLPKLGLVRFAKSREITGRIVNATVRRNPSGRYFVSLLVETEVQELPKTHSYIGIDVGLKDFAILSDGTPYENPKFFRSLEDKLVKAQRVLSRRMKGSSRWNKQRVKVARXXXXXXXXXXXXXXXXXXXXXXXXXXXXXXXXXXKNRKLAKAISEVSWSQFRTMLEYKAKWYGKQVIVVSKTFASSQLCSCCGYQNKDVKNLNLRKWDCPSCRTHHDRDINASINLKNEAIRLLTAGAAGLA

SEQ ID NO: 4692 - protein, 432 aa, Acidovorax sp.
MHDMNCTKTLRLRIKDKHARVLSAMARDVNQVWNFCNETSHRAIRERRQWLSGYDLQKLTNGFSKCDGVLIGSPTVQQVCEEYAKARKQFKRAKLRWRVSNHQSSKFSLGWVPFKARALQYKVGQIVFAGQKFSLWDSYGLAGYELRAGSFSEDSRGRWYLNVVVKVHAQASTATACVGIDLGLKETAVASTGERIEGRFYRKLEAQLGIAQRACKKQRVKAIHAKIQNQRKDMLHKFSTDLVRNNAAIFVGDVASGRLVKTKMAKSTLDAGWASLKTMLEYKGQQAGIVFEVVNESYTTQTCSCCGSIPASSPKGRAGLRIREWTCSNCGAAHDRDVNAARNILAAGHRRLAVGIPVLEGGEDVKWDDRVSLVLTDKLQLRKVDYLDTVFDGRVGDRGVFDADFAIATGEIERLVPDLVQALGGELASASR

SEQ ID NO: 4693 - protein, 224 aa, Burkholderia sp.
MILVYRYRVKSLNGRLNKQSRAVNYVWNFCNDTQKHALKWSKKWPTGFDLNVLTTGSSKALGIHSGTINATCEQYAKSRSQHRRPYLRYRGRKSLGWVPLKGRDLKREGDAFRFAGNTFRVFNSRPLPEGKIKDGTNFAQDARGNWFLNIAIEMPDVRARPVRSGVGIDLGLKDFATLSTGEKLPNDRYGQRAAEKLAKAQRARKHKRHIAKLHAKVANARADF

SEQ ID NO: 4694 - protein, 459 aa, unknown
  TnpB Polypeptide
LITLKIKYEIEKAKKDRIFEYIKNYNSVFNCLLNYFQDLNKVLSTKDSFVFIKSLNNIFIDTIFQNSVLYDVRQVFKIFGDKRLVFGGKKLFLDRIKNLVSKKEFQLKKLRPLQVVGAAYTKGNCKLQILSESEILFKPTRKEHFILQLKNVGKNYQKKLKALILEQEKCSIPITYKLDLEYVYITFDESAINKVNIRPKLKDRIFAIDLNPNYVGWTVVDWKSENNYKLIKSGLISLKLLNDYENNLKVSSDSPEKKYVVNKRKFEVIKIGYELAKLASYFRCEVFGIEDLRIASSDKSKGKNFNKLCNNQWNRRLLVHILEKSCKLYQIYFQKIIANYSSFIGNLVYREEKLPDPCLSSIEIGRRAYEFYYQHILKNKNKEKNIIFDKLENVRNRIVKSLEEFDYSDTFESLSDLYYILKKRKCNYRFSLEKALEAHQKSFSSSKHSKSYIIFYNFV

SEQ ID NO: 4695 - protein, 441 aa, unknown
  TnpB Polypeptide
MTEQERLAKNKQISQTKRNTIDRHSKMLCRTYSVKVQYSSLSKEQKENIQRMFLEAKWLKNYIISWTGFLTKDEEYKKAHKIYDFDAQGCKLITKKDANFKDVEVELSLHSMIKAQIKQDLCSNIKTIKTLKTKGFQKSGGALKFVKEVNSIPLKKYGYTHKIVSSKRVVIAGLGRKGLLVNGLKQFTNIEGLEIANARLLRKANGLYIQFVTYQPKADYIEPKNGKIIGIDFGCSTSFTTSEGEKIDVKIQESERLKRLQRNLSRKEKGSKNFYKNVKLIKVEYLKNTNKKNEQANQLVHKLSKYETVVIQDEMLPKWQQSGHGKAIQRSILGRVKAKLKLLPNVYIIEKSFPTTKLCRKCGAVNDSLKLFDREFRCDCEVIENRDIHAAKNMVHVYNIRKIRAGTAQITPVEIEINGSKNSILTSKKQSQKQEGARSLV

SEQ ID NO: 4696 - protein, 401 aa, unknown
  TnpB Polypeptide
MLKAIKIRLYPNNEQSNYINNLLGCSRFVYNNILNYRINEYKINNKSVSFGEQGKKLVQLKSEFEWLKDAHSKVLQQSIIDLNKAYNSFFKNGSGFPKFKSKHNNKLSCRFPSDAISNIKGNRINIIKKLSNIHYKCSRRDEILLNKYQKSIKSATLTKTKSGKYYLSILIESNINKQLPLTNNIIGIDLGIKDFVITSEGETFDNIKIKRNNKKKISKLHKQLSRKKKGSNNKNKCRIKLAKYYEKLNNIKENYLHKISNQLLNENQVIVMGDLSVSNMVKNHKLASSLQELSLYRFKEILRYKSEWYGRDLVEIDKWFPSSKLCNKCNYKNSELTLKDRTWICPECGESHDRDINAAINIRNEGIKMLNNKIGLSSPELTLQERITLVNSMNEETNVIS

SEQ ID NO: 4697 - protein, 226 aa, unknown
  TnpB Polypeptide
MSELGIALDPGVRTFMTGFDGQQVLEIGKYDIGRVYRLCRHLDKVMSRIGMSKGSAFKRLRYRLRKAACKIRVRIKNLVSELHNKTAKYLCDKYKVIFLPTFETQQMIRKGKRRLATKTARAMVTLSHYKFKQTLKHQASKHGVSVMDVTEEYTSKTCSRCGHIHSKLGGSKVFTCPSCGHKLGRDLNGAFNIMLKALRDTSKAGAISSYQVLPYTVTLDGQELPG

SEQ ID NO: 4698 - protein, 386 aa, Acidimicrobiaceae sp.
MHCSNARFVYDLGLEQRNLWRKDRTAKINYPTQAKELAEARQAFTWLKEGSSAVQQQALRDLDKAFKNWWNNPAHFFRPTWRKAGDNEGFYVRDLSVRKLNRNWGEILVPRAEWVKFRITRNWNDIETASSARVTKDRSGRWFVSFTRPAPQIERESTGAIVGLDMGIASSVTTSDGMHLHMPKLLSPAESQRKRRLQRKLSSQQKGSNSRARTKLSIAKLAAKESDRRKDWVEKTTTQLVRNYDLNVLEHLKVKNMVRSASGTKENPGKNVAQKKGLNREILNQSWSFFRKRLKDKANSSGVVVTQVNPKYTSQTCSVCKHCTRQNRKSQAVFSCVACGYQADADINAAQNILAAGLAVTGCGGTPQALSHSDPMKRQPLEEEVA

SEQ ID NO: 4699 - protein, 391 aa, unknown
  TnpB Polypeptide
MRSYKFRLYPGKAQEKELWHHLWVSKELWNEMLTFTKEIYGHHGKFPTKTSLREFVRNSGLFSQVGQELVDRLYDALHKKIKMKRNGVKCGFPRFKSIERMKSLHYPQFGFELGEKLRVTPFGELSIVKHRRIAGKIKTLTLKREPTGKWFACFAVEQEKVLPRENNGKKVGVDLGLKSLATLSDGTVISNPRHLLEHEERLAFLQRRLSRARKRGTNRLKAKLRVAMVHERISNMRKDFLHKTSVQLVNDYSFIALEKLAAREMAEHRFGKSINDAGWNMFANMLTYKAESAGCRVVFVNPKNTTKECSSCGNLTAKELGERMHNCQFCGLSMDRDLNAARVIVKLAEYPALRAGMNAKRQLHDNFPNEPSYPAHCAGSLASAREALRKI

SEQ ID NO: 4700 - protein, 311 aa, Paenibacillus sp.
MLKNTPAQYKKEFDWLKEVDSLALANAQLNLDKAYKNFFRDKSVGFPKFKSKKTNSHSYTTNNQNGTVSVADGYIKLPKLRKLIRIKLHRQFIGLIKSCTISKTPSGKYYVSLLVEAEIQPLPKRDDKIGVDLGLKSFAITSDGDTIKNPKCLRKSEKRLAKLQKDLSRKKKGSANRYKARLKVAKLHEKISNQRQDFLHKVSSKMISENQVIVMEDLRVKNMMQNHKLAKAISEASWSLFRSMLKYKANWYGRDLIIAPKNYASSQLCSCCGYKNVDVKNLGLREWTCPECNSHHDRDINAANNLLKLAM

SEQ ID NO: 4701 - protein, 222 aa, Methanogenium sp.
VSVTPTSQFYISILVDDGQEQPVVQHFDENTTVGVDVGIKDFAILSNGEKIGNPRYLKKSLLRMKVLQRRLSRKQKGSNNKNKAKQAMAKLHEIIHNQRNDFQHKLSFRLVCENQAIALETLNVAGMLKNHKLAQHIADASWSSFVTQLEYKAQRHGKTILRIGQFEPSSKICSKCGYYNRKLSLADRDWVCPDCGTHHDRDINAAINIRKFALDKQNSIGI

SEQ ID NO: 4702 - protein, 439 aa, Moorea sp.
  misc_feature (405)..(405): Xaa can be any naturally occurring amino acid
MRIAYQYRLKPTKEQKATIDNWLSMLCCQYNYLLADRFNWYEQNRCSINACPLVCYLPELRENPDYYSQKKSLPNLKKTHPWYKNMHSQVLQDVVKRVKLAFDRFIKGDSNGKRSGRPRFKKRHRYRTFTYPQMKEGCLEGNLINLPKLGQIKIVLHRSIPNGFKIKTASITKKCDGYYLVLSLEDKTVPVRAASASPKVKPDINPDLIVGIDVGLKEFLTTSEGETIGIPQYYRKCQKRLKVIQKRISRRKKGSNNRLKAIKQLGRQHKKVADQRKDFHFKTANYLLSKYDVVAHEKLNVKGLAKSRLAKSVLDAGWSRFLTILSSKALNAGLLAVAVSPKNTSQNCSNCGKKVPKKLHVRWHDCPHCGCSLDRDHNAAINIRNRAAGQSVLKAQRLLRDTRIXYPMSNCRGLPHERLPWFPRGLQGADAGSAHSPSP

SEQ ID NO: 4703 - protein, 147 aa, Planktothrix sp.
LEDLTGIRERTNQKPRSKDDKRLGNSWAFYQLRQFLTYKAIKEGVKIVFVDPRYTSQMCHNCFRIHPIQGKSYRDGKRFKCGHCRWSGDADYNGSCNIAILGKVTINSPGGTGLSCSLNRDDSGLLKTHCSTQSQWVVYKLLFLMMM

SEQ ID NO: 4704 - protein, 399 aa, unknown
  TnpB Polypeptide
MIRTITKTAYLSRGGHRNLSALLSQLRYLYNESLAERKEAWEKHKESVSLYDQCKTLTRRREDSEWSRYPVRAQRSVLRRLDRAYKHFFKRGGYPRFKSWRRGIRSFELDQVPKIDHNGNMYSVVIKGVGRFKFKPPLLEGEIKLLRVVKSPRRVKVQFVVELPDPGVLDIREAVGVDMGIKSRVVLSTGYKVPKRVVDREELKRKQRILSRSVRGSKGRDKKRVSLAKEWDKVRERERGVLHELTADLVKHHSAKFVVEDLKIPNMVRNKHLSRSIIEQQWGAFVAYLTYKAESAGGWVRKVDPRNTTQQCSSCGAMPEYSIGLGDRWYDCYSCRLSLDRDVNAARNILSKGLSLGLAGTVAEVQGDLPAAQDAAQAGEKHSGPSAEDPTAQKNIPVS

SEQ ID NO: 4705 - protein, 465 aa, unknown
  TnpB Polypeptide
MGNDPFPSLLEVNSMQQIITAKLKLLTTREQFEALRRTQLAYRDALNAVSRYAFAQGKTSSVTKLHEGMYTELRARYRLPSQLACSVERQVSATYKGLWTKLKKNVEHRRAKITKKRFKGLDWPPHYSSPTVQYTYGRDYTFQCDSRVSIGTLNGRISVPYQGYEKHIALIRQGATIGDAKLWYDRPKKRFYLLVSLTVDLPDPTCEHFTEVVGVDVGIRYLAVTSTSTGKAGFHPGKRVRHKANHYARLRKRLQQKGTRGAKRRLRRITQRERRLKLQANHVIAKQIVKQHPHALIGLEHLTDIRERTRRRKRRRKKHGKGTELVSQKARKANRVYSQWSFAELHTLISYKAALVGSLAVKVDAHYTSKQCSMCGHTADENRPRKGLLFVCQHCGYTLHADLVGARNITMRTLLVRHDWIRTGCLSITPDASDGETKAARLQRYAELRWSPDVTSLRLKTGGAN

SEQ ID NO: 4706 - protein, 380 aa, unknown
  TnpB Polypeptide
VKARRAISQRTTDPAERKRLFTALKAGEWAGDPYLSRLMRKHWRRGHSHVTNQIIIRADNVRTFTLTEGGGVWLAVPGLLPRTSVKIPLDTTVAPSGTLRVILRGGRAEVHYQIDGSALKSSARPHGDRSIGVDKGYTEVLTDSDGVRHGPGLGVLLSAESDRLKVKNRRRAKIRAVAERAAKRGDHAKAGRITRCNLGTAKKTCARRRFEAKARTLTFEAVHAVTDKASSVVAEDLTRVFAGRRNLGRNMNRRLAAWTKGLTAEALSSVPERRGSALVLVNAAYTSQADPVTGTLSVRKGDRLYCESGDVYDVDYAAAINILQRASDPGITLFTPHTRVKQILQERADRQRARLPAQDSSPESGGGERNIPIGSGVSNE

SEQ ID NO: 4707 - protein, 343 aa, unknown
  TnpB Polypeptide
VQAATLSYKLKLFPTANKADTLALLTGLFARHHAACTTALREESRCPSTKGMGEFAGRAYRRAFNDWRRTRKAGHMPGALKAELIDAAQVQQPRNAIAFDLWIMVQGVGKLYVPARKHRAINRALAYPSATLCEQGEVFRKNAKWYCRVAVRVPLPEVTPARTFVGVDVGVRASVVRSDGYRGPDLRPILKRQRNRRAMDQRRGIERRVETSPQRQLLAREARRTVLVALKSGRGVAVEDPCRLIRWKAHAARYFGTRVALLASLMGVPANVVNPAHTSTTCPECGFVERRQRHKGTFRCWRCGYTHNADFAASRNVCHRATYVSCTSRNGSLSPCSGGGIVE

SEQ ID NO: 4708 - protein, 361 aa, unknown
  TnpB Polypeptide
MYPKKSQQEKLWRHANKLNWLYNQFLEQKINAYKEEKRSISRYDLQNQIPNIKKEDDVLGEIHSQVIQQVTYRLDKTYKSFFKRGFGFPKFRSCRKFFGIIYPQSGYSINDNVFHTKVYGNMKFIKHRNVKGNIKTATIKSENNRWFLCITTDVERENKGSGIVGIDVGITNLVALSNGIIIKNKTHAKYFDSQINKLKSRRDSQYKKGSRKSKYLSQVVKRLYGVKNRKVDDFQHKVTCSLSREFDIVVVEDLDTKKMSESKITGLNRELRNSKLSSFINKLEYKVNQMIKVNPINTSKTCNSCGRLKKMPLSKRTYACTCGYREDRDINAAKNIICLGQAILSGECTVGSTIQEALSFR

SEQ ID NO: 4709 - protein, 270 aa, Clostridioides sp.
MHIKNSLKKKQDFLNLNQRKLIDFHIKLTLQMETKIRDKQVPQGRILNATISKEPSGRYYVSLCCTDVDIEVFENTNNHIGLDLGIKEFCISSCGDFIENPKYLKKSLNKLAKLQRELSRKTIGSLNRNKARLKVAGLQEHIANQRNDFLQKLSTKLIKENDIICIEDLQVKNMIRNRKLSRLISDVSWSEFIRQLEYKANWYGRKIVKVGKFFASSQICNKCGYKNEEVKDLNIREWICPSCNETHDRDINASINILKEGLRLITIQNK

SEQ ID NO: 4710 - protein, 419 aa, Methanomethylovorans sp.
MKKGNVYRIYPDKEQKTLLEQHFGATRFIYNRSLSIKNLMYDKFRINVTEIDLNNNLSSLKETFPWLKDINSQSLQQANRNLLTGFKNFFDGNGSFPTRKKKKDNHFSFQVPQNYQINLTASLIYLPKIGWMKIVIHRDFLSKEFIENNLVLKEVNGEKILDQKLNKEFRILKTLTVSRTLAGRYHVSILVEDNEPYPEPESFTEETTVGIDVGIKLFAVLSTGEVIENPKFLKRSLKKLVKLQRSVSRKQKGSKNRKKTVAKLAKHHQLIANQRNDYQHKVSMKIISENQAVCLEDLNVKGLVRNHCLAQSISDVGWSEFIRKLIYKAEWYGKTILRIGRFEASSKSCNVCGYKKDNLTLDIREWECPSCKTLHDRDLNASINIKKIALNNLNTAGTAGRAYGLTGISQRYEVGSHPF

SEQ ID NO: 4711 - protein, 403 aa, Methanomethylovorans sp.
MKKSYRYRIYPNKEQKTLLEQHFGGTRFIYNRSLFIKNLMYSKFKINVTEIDLNNNLKLLKELHPWLKDQNSQSLQQANKNLLTGFKNFFEGNGAYPTRKNKKDQNFSFQVPQNYQINLTTSKIYLPKIGWMKIVLHRDFLDKEFIENELVTKEVNGEIILDQKLNRKFDIFKTLTVSRTSAGRYHVSILIDNHVPEPEPVEFDEKTTVGIDVGLKSFAALSTGEIIDNPRFLNTSLDRLKKLQRDVSRMKKGSRNRKKAVLKLAKHHQLIQNQRNDFQHKLSMKIISESQATCIEDLNVKGMVRNHCLAQSISDVGWSEFIRKLTYKAEWYGKTILQIGRFEASSKLCNVCGYKKDDLTLDIREWECPSCKTLHDRDINASINIKKIALNNLSTAGTAGRAC

SEQ ID NO: 4712 - protein, 448 aa, Methanomethylovorans sp.
MGFCMQLTLPIKIDVTLEQESVLWNLSEKCRLIYNFGLKERHDAYKNKIKISYIQQQNKLPELKQQFPEYKWVYSKVLQGTLKCLDNDYRSFFNLRKNKDVKARPPGFKGKKYFTTMIYNQSGFEISDTKGNILVSKSMDTRIHKQEVEYSDVDKIFIGLSHKHPSGIPLIFELPATLLEERIFSTATDIVQISVYQKDNDFYISITYEIPAVKHSNNDCYLAIDIGTIKQTMVNSYGQFNELVNRRPDKYWEPKIQQIQSRRDHCKKNSRKWKRLHNNLGRMKRKSSNQLKDNQHKITRNIVENTDANTIIIGKLDVKQMASSKPKTSKKDRSTNRGTHNSGHIGRFAQFLTYKAESLGKRVIRIDESYTSKKCCVCGTIKNMSLNDRTYECSYCGNILDRDCNSSVNILLRYFKHNALWTSYQNIIDNLRQTGLLIGIIPNRMILR

SEQ ID NO: 4713 - protein, 387 aa, Methanomethylovorans sp.
MILTKTVILKIVNPDNDLVETMQKYSDGMNYASSVVFQNGKTIGSYKLQKIVYGYLREVIGLKSQMSCNIPRQVSGCYKTLKEQIKERKVIWKEITFSPYSMTLSYKRDFSISQDLVAITTINNGRKPYKIQSYDNAQQYFDGTWKFTASKVVRHKDSNHSFHLSIEKEVPEKELEYSSNYMGIDLGMNYLAVASTTEKNCRFFAGGHIKDIRNQYMSMRKRLQSKGTLSARKMIKHLSDKEKRLMRHVNHMISKQIIKFAIENKVFLIGLEDLKGIRENKVRKVRKDKRYHQSSWTYRQLQDFITYKAKEAGIKVHFVDPAHTSQECNRCNHISNTNRNRLKFICKKCGYENNADLNASMNIERRTRDFGYISLSQGCLSATQTNA

SEQ ID NO: 4714 - protein, 387 aa, Methanomethylovorans sp.
MILTKTVILKIVNPDNDLVETMQKYSDGMNYASSVVFQNGKTIGSYKLQNIVYGYLREVIGLKSQMSCNIPRQVSGCYKTLKEQIKEGKVIWKEITFSTYSMTLSYKRDFSISQNLVSITTINNGRKPYKIQSYDNAQQYFDGTWKFTASKVVRHKDSNHYFHLSVEKEVPEKELEYPSNYMGIDLGMNYLAVASTTEKKCKFFAGGHIKYIRNQYKSMRARLQSKGTLSAKRMLKHLSGKEQRLMRDVNHIISKEIVKFAIDNDVSVIGLEDLNGIKESTIHNVPKKKRHNHSSWAYRQLHTFIEYKAREAGIITHFVDPAYTSQTCIRCNHISKNNRHRLEFRCEICGYENNADLNGAMNIEHRTRDFRYILESQGCVSATHTNA

SEQ ID NO: 4715 - protein, 381 aa, Methanomethylovorans sp.
MLKTYKFRLYPTTQQVFVLNKTLDVCRHIYNEFLADRRNAYDRCNQSLSTMDQLYQVQYLEFDTDVHSQVKQDVIRRLGKSFDAFFRRCKKGETKPGYPRFRGKNRYSSFSYPQSGFKISGKKLKLSKIGDIKIVLHRKIEGKIKTCSIIKDGKSWYACFSVEVKPKRSIEPAKSIGVDVGLNAVVTLSDGTKIEAPGYYRKIEDKLKRQQRSLSRKKLYSNNWKKQSDKVSHAHKVIFNKRSDFNHKLSRILVDNYDLVVFEDLNIRNMVQNSKLSKSIHDAAWGKLIQYTMYKAEEAGKIVELVAPHNTSQNCSSCGIKVSKTLATRIHRCPNCGLVLDRDHNAAINILNLAVGTTVKACGVEPLGSAMKQEATCFNRW

SEQ ID NO: 4716 - protein, 370 aa, Methanomethylovorans sp.
MLKAFKFRLYPTPTQAVQLNQHIGSCRFVYNWALDQKIKTYEQTGKSVSRFDLNKMIPALKASNEWLGEVNSQSLQGMTKQVESAFTRFFREKNGFPRFKSKKNPIQSFPVPQHYTVNFENSTVKLPKIGEIKAVLHRMFEGELKTATVSRSCKGHYYISVLTEDGKDLPVKQAFSDSTTIGIDVGIKDFAVLSTSEKIENPKYLKNSLKRLKVLQKRVSNKQKGSNNRTKAKQRLAALHDKIANQRNDFQNKLSFKLVSENQAIALETLNVNGMVKNHNLAQSISDSAWGSFVTKIEYKAEWLGKTVLRIGQFEPSSKLCSVCGYHNKELQLKDREWQCPECTTTHDRDINAAINIKKFALIDQNLIGL

SEQ ID NO: 4717 - protein, 407 aa, Moorea sp.
MLLAERHIIKKGHPFWAEIDNLSWQSKNLYNSANYLIRQNFIYGHGYLSYNQMASLMKETEQYKALPAKISQQVLRGLERNWKSFFEATDEFKNEPSKFRGKPKIPGYKDKKKGRNLLVYTIQATSKVARRKGIIKLSGTSIEFPTLVADRIAEVRIVPKCDCYVIEVIYEEKEQLLTPNEKIAAMDLGIDNLMAVTSNQLDFTPLLINGRPLKSLNQFYNQRRAKLQSLLKGNRQSSQRLSRLTRCRNQKIDNYLHRASRYLVNLLVDQEITTLVIGKNDGWKQEVNLGKVNNQKFVTIPHGRLIDMIIYKCQLVGIKVIIQEESYTSASNFLNLDPLPVYGQITKRPIFSGKRIKRGLYRTDKGVLVQSDVIGSYNILRKAFPNAFTRYGIERCVVHPRRINLSK

SEQ ID NO: 4718 - protein, 279 aa, Okeania sp.
MKSIHTKLKLNNKQKTLMAQHAGYSRWCYNWGLSLWNAAYKDGYKPNVRKLREVFTNHTKPLIPWMKKLSSRVYQYAFIHLDAAFKRFFKGLGKYPKFKKKGRSDSFTIDNCGKPIELNGWSHKLPFIGIVKTYEAIEATTKKITISRQAGDWYLSCSYEFNATTTPKKTDVVGVDLGVKTLATLSDGKVVTSVKSYRRFETKLSRMQYLNRHKEIGSANWKAAQLKIARLHRKVASIRKDALHKLTTYLAKNHGKIVIEDLNVRGMLANHKLAKSISR

SEQ ID NO: 4719 - protein, 454 aa, Halorubrum sp.
MKPTQDSPNHHHDYRLDIHREIQLFTTITVHDSIMADRVVTRTFKASIRNPSQVRADLDSLAFAASKLWNVGRWHIQRIWDAIGHIPDHNELTSYLKRHERYRDLHSQSSQRVLQELAEAFNGWYASNDPDDNPPGYRKRGDEHPRSTVTFKQRGFKLDTEHGYVRLSKGQNLKEHRSDFVLCSYETQPGVDLAEFESVQQVRVVWNGDAWELHFVCNVALERSDTPGEKTAGIDLGISNAAAVSIGDETLLYPGNTVKEDVHYFRHVEYDTEGEAGPSKKAEWARQKKQRRRKHSLHALTQDIVEQCAARGVGEIAVGHPKDVRDDAEWGRHGNKKIHDWPFDTIIDMIEYKAEERGISVTRVDEAGLRTSKTCCACGTSAPSNRVERGLYACDECGLVANADLNAAENMRATVTPSPAKDRSNGCLAQPAVRLFDKHTGVVAGREQVADCKP

SEQ ID NO: 4720 - protein, 431 aa, Halorubrum sp.
MNNPQGLVKTLDFQLDIQSDNEGLLYDATLEARRVYNETIRFAKDGVDWNSISPRLEDDADLVKNTTQRIVAKALGAMENYYEYDDFGKPSHTKDGTYPLRANYEEGYNLSLTDDGDVAFRISAAPYKHVKGVLEGSDAHLDLLKTALTGDEWKVSTSETLWRDGEPELHVNIRNTKQTVRDKQDSRTVVGVDVNEDNVALTALSTDGVEDTLVIDFPEIKFERHRYFTMRKRVQNAGKDSMHDTLEGREERFVRDRLHKVSRHIVEWSQQFERSCIVFEDLKEMRDSIDYGTRMNRRLHHLPFRALQFYTSYKASFEGIPTGWINPEYTSQRCPMCGHTERANRNKKRFKCKDCEHQDHSDRGASVNIAVKGIEKHQDWNVPALNSLPQVRKVRRQASGAVDAPTATHSSVRDDRDPSRGMASRTVGVSD

SEQ ID NO: 4721 - protein, 352 aa, Gammaproteobacteria sp.
MEKTKTLKVRIKGKQIVQLKAQAKAVNFVWNYINDLSLRNIKERQKFLSAFDMHKYTKGAGKELGLHSQTLQVIAQEYVTRRKQFKKSKLNWRKSKGSKRSLGWIPVNTGAASFKHGQVFFNGQYYKVWDSYGLSQYKFRSGSFNEDARGRWYFNVVVSYTPEQSQGKKAVGIDLGSKDTATDSTGYKIAGREYRKLEEKLGKAQRANKKKEVKNIHAKIKNRRQDSLHKYSNKLVKDNAAIFVGNISSLQLVKTNMAKSVLDAGWGQLKMMLEYKCDHAGVHFEVINEAYTTQTCSHCGSLPPERPKGIAGLGIREWLCSECGVSHDRDINAARNILALGHGRLAVGIPVL

SEQ ID NO: 4722 - protein, 473 aa, Okeania sp.
MLLKYKYKLKPHKSQTIIIANWLEMARKQYNYRLAERLNWFEATRTPVNACPLNISVVPVDQIYQNIPEFRIQTRDGRKKDSNGNPITKKGDQHPNIVSGYVVWETVQLADLAQTKKLFPEYKSMHSQVLQDVIQRVQTTMDNFTKPDQKGKTSGRPKFKGRHYYNSFSYPQFSNANIVKNANGRFCINLPKIGLVPFVYNRSIPLGFKVKTGTVIREVDGYYISFTVEDKTVPVEVAEIQPTLKNSKGIDLGLLHYAVTSDGEFIEVPKFFRFSENKLSKLQVRLAKKQKHSQPWKILKGKIAKLHQLIARQRLDWQFKLAYHLLSDCQVIFLEDLQIASLVRRCKAKLGDNGQFLPNGQSAKSGLNKSLQDAAFGQFVQVLEYVAWKLGKRIIKVDPKGTSQHCWECLNKVSKSLSDRWHSCPKCGQELDRDYNSALLIQKIGLLSTQEEDITSVKTAVSFSLAEESLFFP

SEQ ID NO: 4723 - protein, 402 aa, Escherichia sp.
VKRLQAFKFQLRPGGQQECEMRRFAGACRFVFNRALARQNENHEVGNKYIPYGKMASWLVEWKNATETQWLKDAPSQPLQQSLKDLERAYKNFFRKRAAFPRFKKRGQNDVFRYPQGVKLDQENSRIFLPKLGWMRYRNSRQVTGVVKNVTVSQSCGKWYISIQTESEVSTPVHPSASMVGLDAGVAKLATLSDGTVFGPVNSFQKNQKTLARLQRQLSRRVKFSNNWQKQKRKIQRLHSCIANIRRDYLHKVTTTVSKNHAMIVIEDLKVSNMSKSAAGTVSQPGRNVRAKSGLNRSILDQGWYEMRRQLEYKQLWSGGQVLAVPPAYTSQRCACCGHTAKENRLSQSQFRCQVCGYTANADVNGARNILAAGHAVLACGEMVQSGRSLKQEPTEMIQATA

SEQ ID NO: 4724 - protein, 227 aa, unknown
  TnpB Polypeptide
LIIVTDYNPANSYRKTYDGASVGLDFGLKTYLTKSDGNKIGSPLFFKQYQNKIRKLNRKFSNAKKGSNNRKRRLFELQQAYRKINDFRSDFQWKLAHELCKRYDYIFIEDLNIEGMKRLWGKKISDLSHSSFINKLTYIASKYGVIVHKIDKWYPSSKTCECGFVNKNLSLRDRTWCCPKCESINDRDVLAARNILRKGISELESKSNSSDSNIGVSCVYIQESHLL

SEQ ID NO: 4725 - protein, 380 aa, unknown
  TnpB Polypeptide
MPETVRTTYTTYTTYKTYKEKLRPTPAQEQALDTVLWRCRDLYNAALEQRITAWQRCHISVSRFDQAAELKAMRAAFPDYAAIHSHVLQDVLARLDKTYQAFFRRVQRGEKAGFPRFKGRSRFHSFTFKECGNGARLDNGTLVLYKFGRISVHWSRPLEGTPKTVTISREADGWYVAIFCADVPCTPLPPTGQETGIDLGLESFATLADGCPIANPRIFRVAEMALKRAQRRVSRRKKGSHRRRKAVKLLAKAHQHVRNQRHDFHHQEARKLVQLYDVIYHEDLRVRNMLKNHHLAKSISDAGWGGFLSILTFKAASAGKRVQAVNPAFTSQACSGCGVIVQKGLSVRWHTCPDCGTRLHRDHNAALNILRLGQAQTRAQ

SEQ ID NO: 4726 - protein, 203 aa, Kibdelosporangium sp.
VPVNGFLGVDVGIVNIATTSDGDRMSGARLNRYRKRQQRIRKRLQAKKTSSARRLLKKRRRKEARFAADVNHQISKRIVAEAERTGRGIAIEGLRGIRAVSYDVYKRQLHSWAFARLGQFLAYKAQRVGVVLVQVDPAYTSQQCHRCGWIDKKNRRSQASFICGRCGFVGHADHNAAHNIAARGVVRWGEVMRPHAAPTLAAS

SEQ ID NO: 4727 - protein, 327 aa, Enterococcus sp.
MNFPKPTKYKEEFPFLKEVDSLALANAQLNLDKAYKNFFRDKSFGFPRFKSKKNPVQSYTTNNQNGTIALIDNKFIKVPKLKSLLRIKIHRQSKRIIKSARISRHSSGKYHISLLCKEEISELPKTNCAIGIDLGITGFAILSDDQKIDNNKFTSKMEKKLKREQRKLSRRALLAKNKGIKLFEAKNYQKQKRIVARLHEKVMNQRNDFLNKLSTEIINNHDSICIEDLNTEGMLRNHKLAKSISDVSWSRFVTKLQYKADWYGGEIIKVDKWFPSSQICSECGHKDGKKTLEIREWTCPVCHVHHDRDINASINILNEGLRIQSLA

SEQ ID NO: 4728 - protein, 212 aa, unknown
  TnpB Polypeptide
VVEVLAVKAVRHRNQASPDLLRLLDEFRRMVNVCIAIGVEENVSSLKTLSLKSYHRLNRDTLSYYRLCAISTATGILHNHQKAKKRNPQTASPYAKKLMLKTCYGFMIEGDLLRLPVKPRQYVHLKLNNHTQRTLSGLNVHSVTLTTDSLSISYSKEIVELKPEGYVGVDRNLDNVTAATTDGTVKNIRPVKSDQDQIDLPVCQQPVQEKRY

SEQ ID NO: 4729 - protein, 479 aa, unknown
  TnpB Polypeptide
MLAGEMSRHTTFRFCLDPTVEQREVLARYAGASRFAFNQCLHMVKTALTQRKNDPDIQVLWTGFDLINAFNAWKKTEDAGRVFTVNTRGEAEIVVTGLRWRSEVCQQVFEEAAVDCGRALAAWSDSRSEGKGNRVGFPRFKKKTSATPSFRLRNKFRKSRRPAIRVGDNDRSRSITLPGIGQIGVHNDTRRLRRMISNGRAKILFATVTHHGGRWWISLNVAAAELHAAHLHPVRDPGDAGGWVGIDRGLSAFAVAATRDGEEVARITYAPKALNAGMKRQRRLAKSLSRKQKGCRNRRGAAAKLGRHHNHVANVRRHFLHQVSNELVKTHDRLVIENLNVSGMLANHRLARAISDAGWAEFARQLSYKQAWRGGEVVIADRWYPSSKLCPACGAIHVNLMLADRVFTCGCGRSADRDLNAAVNLARWGQQHHLDPRTPKQRGRATNARRRDGADQHPTRAGETSPVEAGTDVHTAPAA

SEQ ID NO: 4730 - protein, 488 aa, Oligoflexus sp.
MLTGIRLKANVTDHQRLVLSQWMGCARFIWNAKCDEYRYHSTYARKYFPIGTFAPIDKKYSHFKNDELSPWLSDCPSKILANSACNWFDTYQNFKQGRCGKPKRKKKTGSGSIYLTRDLFRFEVCPDGVKRLFIGAERNNIGFLSLKLHKGFKEPASLYIKKRHDEFWVSFCYDDGKDEGELLSQADHLKYLRGQSQEFLQNHVIGIDRGVKRPIQAGEQCFDFTPEQKKSMDRSRRNLVRYQKRMSRQVKGSKRRHKTKVKLSNTHNDIANIRKDFCHKASRTLVDQKDSRVFVLEDLRTRQMTGRAKAKKDDSGRWLKNGAKAKSGLNKAILNVGWHRFEEFLKYKANRAGKAWFKVPAFQTSQECAACGSTHPGNRKSQALFKCESCGHTDNADHNAAEVIKKRAIGLISNSGSELSKRGVLSLSDSGRGAMGKSRRAKSSRAPGEKGLPSEYFSDGLQEASKKKKKDRMALPLDFSFEASPLQG

SEQ ID NO: 4731 - protein, 429 aa, Oligoflexus sp.
MHLTLKLKIQPDAEAQSKLWEVSHRCTELWNACVEQRKDSRSWGKVNVFSQKKELPALKKECPEFKVPSSQVLQNVVFDLDSAYKMFFTKRRQGDQNVGQPRFKSRKYFYTQEYSQPKTSFVLDDGTLRLAYGKGPKDWISVTLPDYSWSLLGTPKTMKIGIDELSKDWFVCLSHEIREERPRESGHVVLFDPGCKTALTGIKTDGTFWEYDLSPLKKFNMSTYKLIDEMRSRLDLLKSRTSNAARRLRKLIKKMFRKIGTRTKTYLHALANQILLDHRDTKEFKVGDWDKRETLADTGCSFANRRINRAVQNNNPLQKLIDILKYKAQRLGQKLQKVDERGTTRTCSNCDHKLKNGLKPEIRAFSCPKCGFQFPRDHQSCLNLLKRYESAVWHRLPGIYPGRSRRVSLAPFSCKLQESWKILPGLSAS

SEQ ID NO: 4732 - protein, 535 aa, Oligoflexus sp.
LARSTSKSFVFETELLSSPDGFRSLSQSEEHGRKLYNAVLGELLKKLARMKNSREYRDTLLFNKSDPKRKADFAQLRIEYGLTEFAAVSLASKLRTGSVDFDLFVPSKVAQEIGKRAFRAVERKMFGKAKRCRFKSKGQDFSLRGSSNKESPQIKVVGETVLLVFRKKEYLLKMDWRNPWHRHALGCRIKNSQVFKRSIGGRVRWFVQICLEGEAYRDTEKERKHKVRLAARFGEDFRGQNVSVDFGPKKIAISNGIVSYERLIVSDWLKGLIAESKVIQRRMSRSLRLNNKKAFQDGVLKKGTRLSRTEKYRKLSRKKQDIERRIAAFRKCIQGHLSHEIMQLGSVVKLEDISYKALQKRYGKSVGESAPASLKASLFRTAEKLGGRGELINTFQTRLSQTCLCGEVRKKELRERTHACRVCGLVLPRDILSAFLGCFTHNQVQKKGRKEIINSSLDLAAARSAAVGHKTLSFPGSLAAGTPSENLKGDCKRGNREVASSLERSGKRQSRFQQEPRSPQDQGSAERPNAENLHS

SEQ ID NO: 4733 - protein, 536 aa, Oligoflexus sp.
MLSHSKTKSFIFETEIQASRDGFSSLLKSEDHGRRLYNAVLGKLLRQLRKMRASRDYEGARLLKKDDPKRRAAFDQLRIDNGLTEYASISLASRLRTGSVDFDRFVPSKVAQEIGKRAFRAVERKMFGKAKRCRFKSRGSDFSLRGSSNKESPQIKVLDDSARLVFRKKEYPIRIDLQNPYHRHALSCRIKNSLVFKRRLGGSERWFVQMTLEGEAFRDSEKERKHKASLRERFGEDIFSQNVSVDFGPKRIAVSNEKMAYERAIVSDHLDGMLRESRSLQRRMSRSIRLKNPTAFKDGSLRRGSRLLKTKNYFRLANQKRDVDRRVAAYRKCIIGHLANEIMQLGSIVKLEDISYKALQKRYGKSVGKSAPASLKASLFRTAEKLGGRAELINTFHTRLSQTCLCGEVRRKRLSERTHECTECGLRVQRDILSAFLGCFTQNSVVKKGRKEFIHSSLDLAAARSAAKGHQTLSSSGSHMAGTPSENLKGECISMNREVASSLEGSEKRRSRPRQEPLNRMARGSAASRIAENLQS

SEQ ID NO: 4734 - protein, 573 aa, Halobacteriales sp.
MSDHLSLPISLPDEDADRCERLATLTQRVANHVLKSHWTPSHLDGITDSSHQAWKYFDEHEPFEVLDLYLPSRFRRCILQKVGGTLRSHADRRDAFRSIQTVLPDHKIRRIHRRRIKKQLWGGGEYLTSGYVDILIDQLNSYYDRHGTYPDTYFEMQSCPEYDSGVLPFSADDGPTSGQAVNYQYDSDSETLTIRLKTPDTLNPDTRGDWSWTEYERDGYGAFHDLLSHGDLSAPEFQPSCRKNGDAYYELAFSVEVEHAEATDGTDCILALDAGMRKDMTAVVVTEDGEQLSTPHFIQFTDREKMRRLNRERAQLNDRLSALRQDGRAHTDEFAHIQSEYERVNSKIQHKREQLTHDVANHVLALALLYDVDAIVHEDLRSLSSPRGEGTLSWELSSWARRDVIENIEYRAECVGLAVERVYPQGTSRSCPRCGSTGHTCKSPDHHEELWWGGHFRCDNSRCGFEGDRDYVGAVNVARVFFSETDTLEHGFTSSYTGDAEIVLAGRSAGTRHTFGTGIIAYEPEQAEATAGGGSAVIAPAVAVPESNADGSDGRGPAVQQCTRFIRCTTENY

SEQ ID NO: 4735 - protein, 519 aa, Bacillus sp.
MKTTRACKINSITKEQTEALITLIRTFESAKRYSFNRLIEGENEKELIKKLQLKYLLNKRFCEDAVLQAQTILSSQKELLPVYLENNQKKLEKTLQKTLQKKDDYESGRKNPKKVSLEICLIGLRKRQQKLEQKIEMYETHIKNGTLPPIIFGGRKNFYERMKDKISNQEWKDLRTRQLYSRGDKSKKGNLNMRITVDDCGQGWLEIANPLERTNGKTKSPRIKVPIMIPYRFYHQITNVVMGKQIGVNSKGKPIIEHQKYSVEIIRKQNEFYVNITFDETKIGRVLDFKETPQSDVIAGIDVNPDRIAVSLCTKQGNFKGSKIFYLHNLNTFSTNKRATIIGQIVQPIKTWLLENNVGGIVLEDLKFQQSHDTDKYSNRNFHQFTYKKMLNSLIRMALRNGFSVKTVNPAYTSVIGKLKYSKNFGISVHEAAAFTIARRGLELQEQLPQEIILLLKNQITTKLRILVASMEESKKNTQKVYKKWLQTIQTWKEYHNWKLWSILHKIVYMNNQQFVFKI

SEQ ID NO: 4736 - protein, 402 aa, Salmonella sp.
MKRLQAFKFQLRPGGQQELEMRRFAGACRFVFNRALALQNENHEAGNKYISYTRMASWLVEWKNATETEWLKDSPSQPLQQSLKDLERAYKNFFQKRAAIPRFKKRGQNDAFRYPQGVKLDQENSRIFLPKLGWMRYRNSRQVTGVVKNVTVSQSCGKWYVSIQTESEVSAPVHPSASMVGLDAGVAKLATLSDGTVFEPVNSFHKNQKKLARLQRQLSRKVKFSNNWQKQKRKIQRLHSRIANIRRDYLHKVTTTVSKNHAMIVIEDLKVSNMSKSAAGTVSQPGRNVRAKSGLNRSILDQGWYEMRRQLEYKQLWRGGQVLAVPPAYTSQRCACCGHTAKENRLSQSKFRCQVCGYTANADVNGARNILAAGHAVLACGGMVQSGRPLKQEPTEMIQATA

SEQ ID NO: 4737 - protein, 370 aa, Streptomyces sp.
MVLGRGYASPSVRRMRQQAAGLDRIGGVDGNVSSLSVVSFPANLAPSTGTAVSSEIVLTDAERARLEKEAKKRRGRARALERSRRSTNTGQYGLSKKQARRAERRATKGLPEKIVTAPGGARDSWIEGVPKQAFRRDRLSHGYRELRARQAEAAASAAEYRRHRARAVARDIVAAHGPRLTVEDCDIRTWYRLWGKRLSQTTPGMLISALEIECRAASGRLVRASTWSTALSQHCLCGERVIKTLRDREHKCTACGLVGKRDLVSAALAAFVDLIDPDDPKTARLDSARSRHAQITYGEGLEEALRESTTPCQNTPRGAGRVAVPAQRVTSAHRTAERRDRTTPDEPRHLRDHAGAPGTRTACSPQLTIW

SEQ ID NO: 4738 - protein, 551 aa, Streptomyces sp.
MAAPFTVAAPSGARIRDRVHAAGRDDEVLRLVGEHLGHHQRADLARRVEIGKVRVKDNQRTERKRALTKVSSSRMAGAMTRASEDQYQLSLRCLYDEASSLRRAIRTITRRLAAPCGGKKGEVRGYRDQAERFQKQRRSQSLTGRLARVEQRIASGRPSIAVGGRRLVKARHNLEKAQLTERKWRERWDAERLFLTADGESGAPFGNYTICVDPNDGSVTVVLPEPLRYLANRPRGRYRLSSAVRFSHRRDEWLDRVTANRSVRYDFVHDPVRGRWYLDASWSSGTAVLPAPEEIRGFGERTIGIDLNAGHLAAYVLDPHGNPIGQPQTIPLDLVGPASQRDGRLRDAITQLITLARQHGCAGIVVENLNFDDARATGRERMGRGGRGRKFRRTVAGIPTARFRERLRGMAFHAGLLVIAVDPAYTSVWGERYWKNPLQQTNKKTTVTRHHGAAVAIGRRGLGHRIRRRPGVTASDQRIASRRATGQTVFVPRPRGTAGPPRTASAPLPGGKTRQCQGDQLTLFPDPEDRSRGHRITDPDRRGSADTGQSA

SEQ ID NO: 4739 - protein, 410 aa, unknown
  TnpB Polypeptide
MIISKSFKYQLRLTREQESLCNQTAGSCRYVWNRGLALKKELWEEKKQNLSRFDLDKLLTEWKKELDWLSLCPSQSLQQVNKDLDQAFKNFFRGRGYPRFKKKAIHNSFRLPQGITLMNQLSKKVAQVQLPKLGIVRFTKSKEIEEKIKHVTISKSCGKWFIAFNCEVVIPKPQQKPQSAIGIDRGIKTFAQCSDGTPIHGVSPLKKNLERLARLQRKLAKKKKFSSNWRKTRQKIEKLHYHIANLRKDFLHKTSTQLAKSHSLIVMEDLNTKDMAKSAKGTKENPGNNVKAKSRLNRSILDQGWHMFQSFLSYKLNWRSGELILISPKNTSLKCRICGHIAEENRKSQAEFHCVQCGHTENADLNASINILVPKLRDDSLWSGGVGFHSEAGTPNTKTSNGISWRIPCL

SEQ ID NO: 4740 - protein, 455 aa, unknown
  TnpB Polypeptide
  misc_feature (376)..(432): Xaa can be any naturally occurring amino acid
MNPGMPKGKPSKVFQGVHARLVFLDKEDERAVLDLTRRFSAATRFAYNRLLEGKTREELKRETGPLCTLFGLNTRYADGAIEKAQAILDSTRELGQDPRKVVFGGRKLFEQLKRGHLSGKALLALKREWREKRQGLLYSRGDAAKKGNANLRLESENGTLWLRVNLGNGDYVRALVKTSHPQLNALRERVYASLPYNVTLQLKDGKVYAHFTWSEELPPPVHTKANGVLGIDVNADPYHLALAVVSPDGNLKRHLTLSLEEVDQAPNRGAKELILWKVAHQVVAVAEKHGVAVATEKLKYLRKSRRGDGSGRAFRRQQHRFAYRSLLEKIHSLARKRGVEVIEVNPKDTSTIGMLKYAPLLHLSKDVAAAYVIGRXXXXXXXXXXXXXXXXXXXXXXXXXXXXXXXXXXXXXXXXXXXXXXXXXXXXXXXXXESEPSGLFREPEGVYQRKEPLRR

SEQ ID NO: 4741 - protein, 392 aa, unknown
  TnpB Polypeptide
MLKGFKTEIRVTEKHINKINQSIGICRFLYNSYLVKNQELYELFKNGEIDKKSAFMSANDFDKYINNEVKVLDEFKWIDNCGSKARKKAIVNAEMAYKNFFKGQSKFPKFKKKKNQDVKIYFPMNSKTDWIVERHMVKIPTYGFIELKEKGYIPTNAKVVSGTISIKAGRYYVSVLCDVADYNDYSNIHNEGIGIDLGIKDFAIISNINEPYKNINKTINVRKLKRKLRRLQRQVSKKYEMNKDGKKYNKTNNICKLENKIRVIYKKLSNIRLNYVHNITNTLVKTKPEYITIEDLNVMGMMKNKHLSKAISEQNFYEFRKQLTYKCLWSTIELRIVDRWFPSSKMCSECGSIDKDLKLSDREYICKKCGSIFDRDKNASINLKNAKEYKVV

SEQ ID NO: 4742 - protein, 399 aa, unknown
  TnpB Polypeptide
MNKTHKAIKYRIYPTAKQQQLIAQTFGCCRFVYNNMLAISKEAYEKGENICSRNKFNYLLTDLKKRNAWLKDVDSTALTAANDALADAFSNFFAKRSGYPNFHKKKSSGSYTSKRIKGSKNIALESNAIRLPKLGIVKAKIHRLPKTDWEIKSATVSQSSDGKYYVSVLFEFESDVPTNIIDINNSIGLDYASDGLFVDSNGNIGSNHKFYRKSHKKLTKAQRKLSRMIESNITGYKIIDNKRYPIYKKDISECKNIQKQKLKIAKISRHTANQRLDNLHKLSAEIANQYDVVCVESLNMKAIANKGFGNGKATLDNGYGLFLNMLEYKLADRNKIFVKIDKWFPSSQMCHSCGTLHPEMKNLKIRTFECDCGVKINRDQNAAINILNEGLRILVQKAS

SEQ ID NO: 4743 - protein, 409 aa, unknown
  TnpB Polypeptide
MFVIEYKVKASKTQYTAIDEAIRTTQFVRNKCVRHWMDNQGVNKYDLSKLCKQLGNEFDFAKKLNSQARQVASERAWSAIHRFYQNCKAGIKGKKGYPQFQKNNRSVEYKATGWKLDPNTKKHITFTDKNHIGRVKLIGSRDIYFYSPDQIKRVRLVRRADGYYCQFLINIEVKERLEPTKKTIGLDVGLESFYTDSDGHKEPNPRFFREGEQKLKQLQRCLSRKQKGSSNRRKARQKLAKAYLRISRQRSEHAKRLARCVVRSNDLIAYENLKVSNMVKNHCLAKSISDVGWYQFRVWLEYFAEKFGKVAVAVPPQYTSQECSSCGRIVKKSLSTRTHACECGARLDRDENAAINILREGLRTSGHGETAGFKPESTLGERPASTPSDSSRNCLAEQADSSADLVVGG

SEQ ID NO: 4744 - protein, 443 aa, Lachnospiraceae sp.
MILTEEHRISRSRHKELFRKMDRYCYLAKNLSNSVNYLLKQCYRIHRKLAQGEILDSWEKGMIYRANCAVRRYNRARPGKRPLKYIDGNSSLTADAYFLSWYMKTWEVYRAMPYATCSQICIQERCREWRSYFRGLQEYRRDPRGFYGRPNAPGYLDPVRGRGRIVITSQNFSVDDKGHVRMPGFLSGIRVRARHRDVRQIRIQTGPGGIRIQLMYEREEAAPVDRPHAMGIDIGVNNLMAVSFSSGKGPVLINGRPLKSINQFYNKRRASLQGTAEKSNRRSRTRAMDRLTQKRGRKVRDLMHKASRKIIDLAVQEDVGTIVIGRNAGWKQRSSMGKRKNQNFVSIPYHILIEMIQYKAALAGITVKLTVESYTSGTSYLDGEYPDRGHYKKSRRIKRGLFRSNAGIFINADVNAAYQIMKAGGVRDIPVKVGEQVRRINAA

SEQ ID NO: 4745 - protein, 468 aa, unknown
  TnpB Polypeptide
MTTFQLGFRTKLDPNKAQANYFARACGVARFSYNWALEQWQKQYQAHKKDPSLPKPNEAALRRQINSIKKTEFPWMLEVTKCAVQYGIKNLGKAFQNFFKNPKHFSYPQFKKKFQHDSFTLSNDDFKVEGSRIRIPRIGWVRMHEALRFENAKLLFATISRVADDWYISFQLELQDLKHLTPAKNHGRVGVDLGVKQMVTLSDGHVFEAPKPLGKYLQKLKRLQRKMSRTKAKGSNRAKLGKVIARLHRRIADIRNDALHKVTNFIASNYSTVVIEDLNVKGMLKNHKLARCIADVGFGEFRRQLSYKMQLRGGELIVADRWYPSSKTCRFCHRKNEDLTLSDREWVCPHCGSKIEDRDLNAALNLCEYRESWGSDDAWASKDPSESSPDLAPPVVVCRQDELVGGIDSLRNNASTDEGASMLKGHPEVNASVDWGRKPTIEPSKLQLGRNSWVFSNGEFSEKRRIEY

SEQ ID NO: 4746 - protein, 558 aa, unknown
  TnpB Polypeptide
MFLDVGLPHSRERIASMSRRLRAIAAPFVVARPAGIRIRTRLRLSATDQAVLREVGEYLGHLAGRDLAERCGLGLGESTRFRRKRALIGEATSRWAGTISRTSDNQWQRSYRNLLDHRTGLRRAIRRLQARLAAPVGGRAGRIRGYASRAERWEKQRRMDLLTGRLARVDARIAHGRVSVVRGGRRLLRARQHLEEARLTEPQWRRRWEAARWFLTADGDAEYPLGNGTILVHPEEGWCELKLPRPLANLANRPRGRYRLSCGVGFSYRADAWATQVTSGAVRYDFVYQPERDRWYLDASWTHPRRPVPTLDELGAWPRLAVDLNAGHLDCVVLDPFGNPVGAPHTIPLDLEDQCSTTRDGRLRAAISQLIALAKAHGCRSVAVEDLDFAEARAEGRETLGRGQRGRRFRRTVAGIPTGRFRDRLTQMCANQGLWAIAVDPAFTSRWGREHWFLSLSSTRTATAVTVHHAAAAVIGRRSLGYRARRRPGVAPTHRWMGAGESYRPGRTLDQAGAGPDPPARRPGGPSRDVRPAAATGSGLGSRRPRTVRGHPSATGSG

SEQ ID NO: 4747 - protein, 230 aa, unknown
  TnpB Polypeptide
  misc_feature (101)..(107): Xaa can be any naturally occurring amino acid
MGNEGLLTLTVNVKVSPEPDSYKKLVDLMKSYREALNYSIKVIIENKAIGLGKAHRLLYKVLKEKYGLPSKIAQDCYREAIAIAKSWLRNLDKGKIPIVRXXXXXXXQYEVAREDLTGLVENLRKLPKEHKVSLLILSYRRLEHWIDWQCEKHGVPSIIINPKGTSSICPICGSKLVEVGYRRFKCTKCGFEADRDTIAVLNIEKKAYKKMGGSLTTPTAPQMTDVIPNR

SEQ ID NO: 4748 - protein, 396 aa, unknown
  TnpB Polypeptide
MKKAYRYRIYPTKKQERILNAQLALCCELYNAALQERRDAYRMCGQTISFTQQSAQLPEIKAMRPEYEAVYSQVLQDVLHRVDKAFKAFFRRCKAGEKPGHPRYKSRLRYDSLTYPQAGFGIDEQGKLSLAKIGHIKMVQHRPFKGVVKTCTITRSATGKWFVCFACDEVAPAELPSCQAQVGIDVGLKTFAYLSTGEHIENPHFFREEEKALAKAQRQLSRAKIGTPQRAKRRKVVARVHERMRWRRENFVQQESRRLVNRFGLIAVEALVVRTMVKRPKAKQEQATGAYLPNGASQKAGLNKSIADAAWSAFFKALLTKAEEAERTVIKVPPAYTTQTCHDCGHRQSMPLSVRVYSCEQCAGVRDRDQNASLNILHAALGRQGQGARPQEVPGF

SEQ ID NO: 4749 - protein, 276 aa, unknown
  TnpB Polypeptide
LAKIGNVNPVWSRGLPSEPSSVTIIKDCANRYFLSFVVDVEPIQIDAKNQNIGIDLGIKTFAFMSDGTKAESPSYTKLDRKIRRLQRKLARQEKSSKHRNKTRIKIAKTHNKIADTRKDFLHKLSTKLVSENQAIILEDLNVSGMMKNRKLSRAISLQGWRQFRVFCEGKSVKYGREFIVINRWEPTSQVCSECGYKWGKLDLKVRSVQCMNCGATHDRDENAAKNINKVGMGNRHDSKCTSRRKKTTLVASVDEACESPYLDSRGVFQKIFTFSL

SEQ ID NO: 4750 - protein, 458 aa, unknown
  TnpB Polypeptide
  misc_feature (57)..(57): Xaa can be any naturally occurring amino acid
MKSAVKILLQVGEGEAAVLDSQSRIANWLYNTLLERANALRTQYRASQDKSVGKTLXTERGLRNLIPALKEQHPFLKSVYSSPLKNAALRLSQAIRAYQDGKHGRRAKALNWPRFRAWKRSWFSLQYDEPWKGCQLEGRRLTLSLGRDEGGKQLKLTLTLAEALPHWVNHDHIRQCRIVKEGHLYSVVFTVERKLPNRQPLSPTKVVALDPNHKNFAYAVDSHGKATEIHPPYFLKTLDKRIDQLKAKRDRCKKQAKRMTRPDGSLFWLPSRRWRYLNARLQDVYRKRREQTKQFLYTVANRLYHDYDAVGIGDYVPHGGGITRKMRRSMNNQSLNRRLKQVLSWVALRSGKQVLEWAEGGSTRTCHDCGYVVEGGIPPEVREWDCPGPGCTRHPIRDENAARNGLRRTFKALELPCSGRREVSSRWTWRFNGLGFTLRGPLTDSATGISFQEIKSFP

SEQ ID NO: 4751 - protein, 388 aa, Bacterium sp.
MLVYEFKLKGKPYQYQAIDEAIRIVQFIRNKAVRYWIDNRGAGKNDLYKLAASLPKEFEFSDKLNSTARQQATERAWSAISKFFENCKKKIPGKKGYPQFQKDNRSVEYKQSGWKLVDGCKRIHFSDKCGIGTLKLIGKQCLNSFQDKIKRVRLVRRADGYYAQFCLDIERKEHLTSTGSIVGLDMGISHLWTDSNGNILENPRTLKQAEKALKQAQRRVSRKQKGSSNRKRQIKRLAKKHLKVQRQRKDFAIKAARALYQSHDLVVIENLQIKNMLKNHNLAKAISDASWHQVKRWLEYFSQVFSKGFVIVSPHHTSQDCSSCGKRVAKSLSERVHHCESCGLELDRDHNAALNILSKGIGLVGTVGHTETRHLKDVETPVERRTAA

SEQ ID NO: 4752 - protein, 402 aa, Serratia sp.
MKRLQAFKFQLRPNGQQERDMRRFAGACRFVFNRALARQNANHKAGNKYIPYTKMASWLIAWKSAAETQWLKGSPSQPLQQSLKDLERGYKNFFQKRAAFPRFKKRGQNDAFRYPQGVKLDQTNSRISLPKLGWIRYRNSREVIGEVKNVSVSQSCGKWYVSIQTEYEVTDPVHNAESMVGLDAGVTKLATLSDGTVYQPVNSFKASQRKLAMLQRQLSRKEKFSSNWQIQKRKIQRLHSHIANIRRDYLHKVTSEISKNHAMIIIEDLKVSNMSKSAKGTAEQYGRNVRAKSGLNRSILDQGWYEMRRQLEYKQLWRGGQVLAIPPAYTSQRCACCGHTSKDNRLSQSRFECRECGYTENADINGARNILAAGHVVLACGGRVQSDRPLKQEPTEVSQARV

SEQ ID NO: 4753 - protein, 342 aa, Escherichia sp.
  misc_feature (64)..(64): Xaa can be any naturally occurring amino acid
  misc_feature (74)..(74): Xaa can be any naturally occurring amino acid
  misc_feature (111)..(139): Xaa can be any naturally occurring amino acid
  misc_feature (166)..(166): Xaa can be any naturally occurring amino acid
  misc_feature (181)..(181): Xaa can be any naturally occurring amino acid
  misc_feature (184)..(184): Xaa can be any naturally occurring amino acid
  misc_feature (191)..(191): Xaa can be any naturally occurring amino acid
  misc_feature (258)..(258): Xaa can be any naturally occurring amino acid
  misc_feature (284)..(284): Xaa can be any naturally occurring amino acid
  misc_feature (290)..(290): Xaa can be any naturally occurring amino acid
  misc_feature (305)..(305): Xaa can be any naturally occurring amino acid
  misc_feature (322)..(322): Xaa can be any naturally occurring amino acid
VKRLQAFKFQLRPGGQQECEMRRFAGACRFVFNRALARQNENHEAGNKYIPYGKMASWLVEWKXATETQWLKDXPSQPLQQSLKDLERAYKNFFRKRAAFPRFKKRGQNDXXXXXXXXXXXXXXXXXXXXXXXXXXXXXPVNSFQKNQKTLARLQRQLSRKVKFSXNWQKQKRKIQRLHSXIAXIRRDYLXKVTTTVSKNHAMIVIEDLKVSNMSKSAAGTVSQPGRNVRAKSGLNRSILDQGWYEMRRQLEYKQLWXGGQVLAVPPAYTSQRCACCGHTAKEXRLSQSXFRCQVCGYTANADVXGARNILAAGHAVLACGXMVQSGRPLKQEPTEMIQATA

SEQ ID NO: 4754 - protein, 435 aa, unknown
  TnpB Polypeptide
MKIFSTYSVKIKHYNHVLKETVDIYQAAVDFYISVCLQEWDNIVSITGANSRQMYVEQLSHKTKKRPKVKYDFSKEFYKFPSYLRRSAISEAVGKVSSYKSNLANWEADPAGKAPSVPRAGRVYPAMFRDNMYVRIDDYTAKIKIFIRNTWDWLTVSLKKSDVDYILHRCTTRKECVPTLQKRGKEWFLDFAFEENIKLADVPVGERIAIAVDLGINNACVCSAMQADGTVLGRHFLSLPEEKDRLSHAINRIKKAQQHGARKMPRLWAKAKGINYDITVKTAQFIIDTACLYNADIIVFEHLDVDGKKRGSKKQKLHHWKCRDVQSIVMDKAHRLGMRISRICAWGTSSLAYDGSGKVTRDEDNYSMCTFANGKRYHCDLSASYNIGARYFIRELLKSVPETVRLAMEANVPSCAKRSTCTLSTLISLNAVLAA

SEQ ID NO: 4755 - protein, 388 aa, unknown
  TnpB Polypeptide
MKVISSYKVKILHYNHIFDETVSAYRKAVAFFLDVCHKEWNDIESLKLKERNNYMERLTIRTKRNPEPKYDFNQCCYKMPSYLRRAAIQEALGDYSSYVSNHKNWIQDGQKGKEPTLAYHRNTMPVLYKPHMFLCTDRLTARIKVLHRNDWVWLEVSLREQDIRYIEKHCKLDKMQSPKLKKQGKCWYLAFPFERNVSFADAPIEERLICAVDLGLNKNAVCSIMQSDGTVVARKFIDFPTEKDHLYKALGRQKKAQQHGNRKTPVLWKHVNDINREISRKTAKAIMDFAVLYNVDVIVFEHLDSNGKKRGRKKQRLALWRKQEIQGIVEHNAHKNGMRISRICAWGTSKLAYDGSGRVERGAMFKMAKPNITIRCVSSQMERPIIVI

SEQ ID NO: 4756 - protein, 368 aa, Nonomuraea sp.
VAQIVKRAFKYRFYPTPEQAEELARTFGCVRLVYNKALEERTRAYTLQGRRVSYVESSARLTAWKRSGEYDFLFEVSSVPLQQALRHLQAAFANFFAKRAKYPTFKSRKKSRASAEYTRSAFRWREGRLTLAKMEAPLAIAWSRPLPEGVEPSTVTVSKDAAGRWFVSLLVEEKISPLPPAGQSVGVDAGITALAALSTGEKIVNPRHERADRRKLAKAQRALARKAKGSANRAKARARVAKVYARIADRRRDHLHKVTTRLVRENQVIAVEDLTVRTMVKNRSLARAISDASWREMRGMLEYKAAWYGRTLVAVDRWFPSSKLCSACGALRETMPLKVREWMCACGAVHDRDVNAARNVLAAGLAES

SEQ ID NO: 4757 - protein, 164 aa, unknown
  TnpB Polypeptide
VRGDCLPNGVKHKHKTKARRKAKKVVARIHERIAFRRYDFVHQTARRLVNRFGVIAVEALQVENMMARPKAKPDPENAGQFLPNGASAKAGLNKSIKAARAFRRVVAVPAAYTSQTCSGCGNIVKKTLDERRHRCLECGLELDRDINAAINIKRLWGNTATLAR

SEQ ID NO: 4758 - protein, 410 aa, Symploca sp.
VYTNTVTLNKQGGDKQVKIAYQYRIKPTKQQREIIDNTLNMLRCQYNYELAQRFEWYEQNRCSIDRCPLVCHFPELKEKPTRFSQQASLKQLKVDRPWYKNIHSQVLQEVPKRVEIAFTKWLAGDSKGKKSGRPRFKGVRQYKTFTYPQFKQHHFVGNKITLSKIGKVKVIVHRPIPDGFVIKTVSVTKKANGYYVTLSLDNQIVPTTKPDFNPDNIVGIDVGLIDFYVDSDNNRIAAPKHLRKAERKLKSAQRKVSRKKKGSERRKKAIKKLGIQHKKVADTRKDFHFKTVKKLLDKYDVVVVEKLNIKGLAKTRLAKSVNDAGWGQFISILTNKAENAGLKVVAVNPNGTSQECYSCGHKVKKPLSQRMHNCPVCNTNLCRDLNAAINIKNRGAHGLKAQHMSSKTSP

SEQ ID NO: 4759 - protein, 377 aa, Virgibacillus sp.
MLVHKAYSFRIYPTKKQTELINKTIGCSRFVFNHFLAIWNHTYNETGKGLSYNTCSAQLPQLKQELTWLKEVDSIALQSSLQNLADAFLRFFKKQNKAPRFKSKKNHVQSYKTKQTNGNIAIIENKIKLPKLGLVRFAKSREVRGRIIHATIRRNPTGKYFVSILAETEISELPKTHAAIGIDLGITDFAIFSDGQKVDNNKFTTKMEKKLKREQRKLARRALNAKKNGIPLFEAKNYQKQKRKVARLYEKVMNQRNDFLNKLTTEIIKNHDIICIEDLNVKGMLRNHKLAKAISDVSWSSFVTKLQYKADWYGKTIVRVSRWFPSSQICSGCGHQDGKKSLKSRSWSCSVCFTPHDRDINASKNILAEGLRIQALA

SEQ ID NO: 4760 - protein, 396 aa, unknown
  TnpB Polypeptide
VSNASVKQVKTYRYRLFPTRAQETALNATLDTLRLVYNSLLNERKFLHETTGKGVSQYTQEKHFAPWRKDFPELADVHSHLLQNVALRVNLAFTAFFRRVREGDKKIERTPGFPRFKGVGQYDSLGFKEWGNGISFKGGSLYVSKIGHIKDKFHRPTEGTPKTATIRRQNGKWFVCIACEVQSEALPPSSESVGIDVGLKTFAALSNGEFIANPRFFRRDETALAKAGRKQARTKKRSRERRKANKVLARIHERVRNRRTDFCHQNARRLVNRFGVIAVERLNVKGMVKRNPKNHCLAKSISDAAWSQFRECLTSKAESASREVYAVDPAFTSQDCHQCGHRARKKLSERWHLCPMCGASLDRDTNAAINVLNRSLENRIGATMRGRYTDREAAAL

SEQ ID NO: 4761 - protein, 414 aa, Microcystis sp.
MKETEQYQALPAKVSQQVLRGLDRNWQSFFAASSEFKSHPDKFLGKPKIPGYKEPKKGRNLLVYTIQAISKVGLRQGLVKLSGTSIALPTRVAERIAEVRIVPKCDCYVIEVIYEKTEQFLALNEKIAAIDLGIDNLMAVTSNQPDFIPLLINGRPLKSLNQFYNQRRAKLQSLLKGNRQSSQRICRLTRCRNQKVDDYLHQASRYLVNLLVDQEITTLVIGKNDGWKQEVNLGKVNNQKFVTIPHARLIEMISYKCQLEGIYVILQEESYTSVANFLNDDPLPVYGQITEKPVFSGKRIKRGLYRTDKGILVLWDREVRSSPKENQSLEVKVKGISEMEFSLSIFDYTFTNYDETGYLPATVPQFRRSLKSETSYLTMKITALDQKQPLTERLGVMDQGSCLVKIKDRDELKN

SEQ ID NO: 4762 - protein, 601 aa, unknown
  TnpB Polypeptide
MNSNTTANAKNKAFTLSISREKLDNLNLDISLASSDLQLVKKIKVTDVNDAFCCLLLSNTAKKLYNSALYLFKEQYRKNQTTLTYQTLDKLIKNENLYPDYARIYQDLPAKVSQQILKMFSQNIKSFFGLKQSAKLTDEQKKKVNLPRYYTKNGLVVVTYTNQALSKKAFNKEGVIHLSGTNLTIKRSLFPDITNFNQINQIRIVPTIKNDKDKRLSDLLEEYYPSKGVAGEFLPSEAEAEAEAEAANFEQIQDDTGKGEGEAKIKRKTSASATLFTIEIVYTVPTSEKRNSNKSLELFYRTSRIYKINPRSNKIATIEKEELVEARYNCEFLQSVAGIDQNLDHLAVGVIAAGETAAFNCDIKYLKSVNQYWNKQRAKLQAEISKQKQLLQELKEDEKLDFYKNVLTEYSFSKIIEGEEIRLKKLKNKLKCITTKRNYKINNYTHQLSRKLINHLSELGVKNIIYGKNVNFKKEINLGRVTNQNFVNIPFNQIIERLRYKALLSGINFMTVEESYTSKTSFLDREHLHSYKLDKPKKGYNFLGERIARSLFQTKKGYVIHADINASFNIIRKVSGDSIYNFVEMTAIKGSSPKRWKINLQ

SEQ ID NO: 4763 - protein, 376 aa, unknown
  TnpB Polypeptide
MKQTLMVKLNPSKEQHDDLLNTLHRFNEACNFIAEEAFIKKSANKMTLQKIVYRPVRDKYGLSAQMAIRAIAKVCEAFKRDKTIKPEFRPDGAMVYDQRILSFRKLEAVSMLTLKGRQIIPVRIGEYQKARLDRLRGQADLILRDGIFYLAVIVEVPEPTKYDPVGALGVDLGIVNLAVDSDGEVHTGKQVDAVRGKNAELRSSLQMKGTRSAKRHLKRLSGKESRFKRNVNHCISKRLVAKAKDTSRAIALEDLKGIRTRGKLFRRSQRSRQSSWAFGQMRAFIEYKSALAGVPVVFVDPRGTSHTCPKCGFNDKVNRPSRENFLCGRCGFAGLSDHVSAMVIAERASVNTPIVARDFCANHVPPQLQASQFIGR

SEQ ID NO: 4764 - protein, 584 aa, unknown
  TnpB Polypeptide
VKVTVNADKRYYLDEKNIVHPDAVITTMEIFNAAKIGLYDAFYDKKYKAAGPLTEISYASWLKETFHVNAYYAAPIVRYANAALSSQTELHQMYIRNGFEDIKTRKGKITATEEDLAKKKAVKNSIREYILSGKWIKPYPKCRLKVCGKKICLPGAKEIPFTEYERKVEQDIRSLKNRLSMLRFGLQRAEAKQQARIDHPPKKIVFGTKDYYRQKDEAGERISLWKEEFFFRRHRSMSLTGRSDAKGGNFLVRMEGSDLVVTCLDGTKTRFCDFQLTRYAEEWKENLVADRSDRKPLCYNFVLHKDEHGRKYLILSVTMELDDPYVNHSFSDGCVSMDINYDIIAVSDISKKGDRIGGAVFPFDIRGRSSGQVSEIIGRTMAKVGKFCADRKKPLVMEDIDLILKRNGLRYGPAKRNRHVSLFAYAKITACIHNQGYKQKFAVIEINPAYTSQIGKFLYMKKLGISIHEAASYAIGLKGMEMLDKLLPDKRMYALLSEPARSRYEEKKDTTSVMGLWRMIYRAFQGVNTHMFYRNIPYEVLKEKKRPTFICHYKGKGQHSLPERNETASGTQPEKRCFPAGFLL

SEQ ID NO: 4765 - protein, 485 aa, unknown
  TnpB Polypeptide
MLRRAVAVELETTRELNKFLYSVESVYLNIVHEVAMYAVVNNVTSATQLQRLLYRKYRLEYQDLNSQLVIQAIRQAAQIAKSFVERKKRGLVSKPYPEVKAVSIRFTEFTWNYEQFVRSIAPVRLSLSLPGGRREVWLRPHRRFWLYWWRVLTGEAELASTLVAKRRLNRWYAVFVFEIKPREEEPKSIIAFDINENTVAVSRIDIETTVNEVTNWNKQYLTPQLYTIRTDFGRLARRYERVRNAIIERLKPGFALPNGKYMNITNTREFRKYVKHLREGVRKVGRVRQVASELTRTPAIIITEELGDNPQESMIEDVGKDELRHRIKQTPFKAVERAVEDKALERGSKLVRVSSYRNSRVCPIHFVRLERTDDWHTLKCPLGHLVHRDYASVLNMAWKLTPEAWTKAFWWNMKREMNWREHEGKSNPIIPHPIMQYLHTTLKEFKAGEQSPAVLARGSPMNHHRIQNEGGGEGTSPPFRVGRGQ

SEQ ID NO: 4766 - protein, 372 aa, unknown
  TnpB Polypeptide
MANKAYKFRIYPDDVQKVLFARTFGCVRMVYNHWLARKIRQYEEDKTAVTYTVCAKEMAEMKKTEAYAFLREVDSVALQQSLRHLDTAFQNFFKQPKTGFPKFKSKKQNKKSYSTICINGNIAILNGYLKLPKAGQVRLKQHRAVPKEYKLKSVTVSQTPGGKYYASILFEYENQVQEKEMQSFLGLDFSMHELYRDSNGNEPAYPKYYRNVEEKLVREQRRLSKMQKGSNNRSKQRIKVAKLHEKVSSQRKDFLHKLSRQLANAYDCVCIESLDMKAMSQMLNFGKSVSDNGWGMFTGFLKYKLEEQGKKLIKVDKFFASSQICSVCGYKNTKTKDLALRDWDCPKCGAHHDRDMNAAINIRNEGIRLVIA

SEQ ID NO: 4767 - protein, 277 aa, unknown
  TnpB Polypeptide
MLLSHRTSVNIRPEYSNIIGHMCYAASKLWNVCNYERRRYKELGLEKYPDWYYQKKAHKGDLWYRQLPSQTAQETCKQLDKAWKSFYALKKTGGIKVPNPPRFKQDNIPITYMQMGIRHEKGSGQLRLSLSKDLKSYMEGTYGIHEKFLYLENKIFRNMDHIKQLRIYPPENGKCDLIVIYEIEEPEQLSQNGHYLSVDLGLHNLMTCYDSGNGRTFILGRKYLSLERYFHKEIARVQSVWYAQQSERGIKYPKSSKHIQRLYRKCLNRITKHLNLK

SEQ ID NO: 4768 - protein, 534 aa, unknown
  TnpB Polypeptide
MSKLAYKIAFPDNLIETYEFLQSEFNRVLSDDLLRELILELDTNSQRGNYWRALRSRIGDTTQDEWKRLNKIANPAWYFRAFAEHIRQLHKAQEEQRALYDAIQLFRNELTDEFYDYCISRKIPFGKTKISNVSRCKVRPTLPYSATFVLDFAFIDIQASQMVDNIFSYRIMVNGRPQWFELPIIIHQSSKYNPGARISKPKFSKDTYGNYYGVIAYDYEEPELQGENIAAIDLGKVNLYTFAFVKPNGEYSECYTHSGYLERLKTKIDILYKERESLIKKNERVDNLYISAKYIPQTTIDKWIRRDERIGELTQKISRVKSAISYEMASEISELCIKFECPTLFMEDLSWLESLGGKWNHSDQQSVISEQCELRGLKVYKVDARNTSKEHPVTGELGRIIGRNVEWSTGEVLDRDYTSTLNQVQRRGERRISKTTRKLEYKEGVNIPKLRDKHEPTPRQTKRKSSNRKLALQRLDAMRNKKLSRTAQIVVVLPRTSDIHGDIATWSCVEKSLLAGVNTSLKRRDVHKLERLRI

SEQ ID NO: 4769 - protein, 508 aa, unknown
  TnpB Polypeptide
MRASTPSFVVSVKVHLHEQMKNHLEKSFNIANSAYNEALGLGLRRLKVMRANSRYQELLEARQSLAESTQRLKKPKGLAWQLKLYDKALSNLRLDYGLSEFSLSKYLTNRRNEPGSPYKHLSASELQVIAKDVCKTLEKVIFYKVKPHKVRFRSKYDLNASFRNKVNNMGTRIVPSEKNGVAYTLFLHKKSTFVEISTKAFSEYQQKSLMRAEKIKYVQIVRKTIRGKRMYYLQIICQGSPLAKTAKGKNKVGIDPGVSTVAYASSDEVELVDLVPKNVTSCEKLIKSLDRRIERSRRVNNPDSYHPNGKVKRGVRFKRPTNRAKRLILRRQKAYRSLTEERRKLQGELVNKIVSQASIIRIEDLNARGLQKRSRDIRINPKTNRPYSKKRFGKAILKAAPSYFREALKTKAHTLGIEFEIINPQKVKPSQYNHLTGSFEKKTLSTRIFDLSSEWTGVQRDLYSAFLIGHIENGQYDQTISKEFPNFYQKMKEFLAKQKPSRLDWYLK

SEQ ID NO: 4770 - protein, 355 aa, Hydrocoleum sp.
MQSIKTKLKVNNKQKTILAKHAGVARHAYNWGLATCITEYESSKKRLSAITLHKRLVAEVKSENPWYYEVSKCAPQQALRDLERAFKNFLTIRGHGFPNFKKKGKKDSFYLEGSIKILKGNYIQLPRIGIVKTYEILPSVPIKNVAISKRAGNWYISFKYDDRPNHTTKERDIIGVDVGINTLATCSDGTKFANVKAYKQAQKRLTRYQRRVNKKEPGSKNRAKAVKKLASSHKKVADIRADALHKLTTWLAKNHSTIVIEDLNVSGMLKNHKLASAIADCGFYEFKRQLTYKCEWYGSELIIADRFYPSSQLCSQCGHQQKMPLHKRTYECSNCGFEADRDFNAAVNLENYVHQ

SEQ ID NO: 4771 - protein, 397 aa, Natrarchaeobius sp.
MGELTKTLELKLVDPTVHKRQKLRETRDAYQQALQEAFTAGCDTQSAANDVVVKYDLSGYAKNALKKYVPQLHNSYDADELHDDHPVRFTNEGLQLDHQPQNALEWYVKIPHHEDYNLWIPVRANPQQREWLEALYADDAEMGESRLFERNGTWYLHVTATRDVEVQSETSADERTAIGVDIGEASLVTVCYRDENGSPVRPELWADDGKAVRRLRKTYFTAKRRLQKRGSERIAESYGDALWDQIDNVFHRVTREVIEYAESVENPVLVLEDLTYIRENMDYGEYMNRRLHGWGFAKLHAQIRYKAAERGIPVETVNPRNTSKACHACSEHGSRPRQATFRCSNDDCWLGEYQADVNGTINIADRYCSGESHHRSDREEDPRRRLVTMTRLRMGPV

SEQ ID NO: 4772 - protein, 865 aa, unknown
  TnpB Polypeptide
MEDKKKEIKKCSIDPEMYSPKIGQKLDSKYCVPLVLKPLDSTESRDTKDVVNTLFISPDNRVITRQFALIPQDIDKNNSYKKLDQYFKQLVIFQNHLLRKMYDSYKNGDVKLNVFANPSTPSMITNVFNPLHLGEARKKFPITINLEKLFFKERIARCAALSPFHAFRNWLVRNNNLARIANELCSRFSVPNNEFNGELLIDFLGDGTLPYGYLKDVLSEKTISDDIFGKKETDLSNPFVSNMVKQLRNLLFSHFRGSIDDVLSIKLLEIKKGLASPDANSYLSDFSDFCLSTFYRTVDKKRVLIPLRDLTRYFLDNYFTTLKKIDTKRKKRSILKSKSNSEISSLKLKEFLKNNKKERDVIYDNSKTTILKSLNLFNVKKILILSFNSILKRIEDNTKEGISLSKLVLSPTFRRFRFSEPSFENFSIYLGNKLLNKVFSHFRELFISPELFSVVNEGLLNLSKWFGANDAKEIKLPVIRSSALNIVDANVITAKSNNYNENVKTFNQLIRERKFQISFVPSEFLEFVFGNNANKTKPDGLSQIFKKYAEKNGTSQIVEINLPTVTYRNHKLILHLSFEVRKKALLSGVIKEKRVLGLDLGLIDFGVVSIYDKTTLLPTEIARYFIGQTQLFDMKFVDGKFVRQNRFENPKNSQCNKCISNKIECKMCKSNVKRRLINIHSTIQKVQSKRNARANELKAKGITDYCSDAEYNRLENTLSLLWERVRHINLEIVRVLQHDVIEIAKYHKVSEVHVEDLRFSAHSKRSDIGRFISFWQVHWLFSAIQDAIELQAYLNNIGFKKVRAEYTSQKCSTCNNGKLGERDGKIFRCKEMHYVKNYRTKKFESKSIQLDADLNASRNIALAEA

SEQ ID NO: 4773 - protein, 383 aa, unknown
  TnpB Polypeptide
MQLSETVKLYPDRFQKELIESAMQEYVACVNRLVSDAVNGISIAKLSSAGVDAPLPSALKNQCIRDAKSIVKKHYKACHSAVMKNRRLAKNGKPLRVTAPALPVVKKPCCYINNQNFRIAGDNIEFPVLINGKSKRISVKAKITEHQKELFATKVLGTMRVVKKNRKLVAQVVYDTEEASTPEEGNILGIDLGIKCPAVGFCSDGSVKFYGNGRRNKYMRRHYDYLRRKTQKAKKLSAVIRLRDKEQRVMKDLDHKLSRQIVNEAASHKVSVIKLERLDNIRSAARKSRKNNHSLHTWSFYRLSQFIEYKAKLAGIAVEYVNPAYTSQKCPVCGNVQHADDRDYICPCGYHTHRDLLGAINICNSTEYAGNRHTAQGAICPAL

SEQ ID NO: 4774 - protein, 404 aa, unknown
  TnpB Polypeptide
MKLTFKYPVYPTKTQARTLFDYFDHLCELQNSARNNRKYAYEEEGRFVSQGEQEKLLTAAREKYDDFRAVPQDFQVSVLKRVDKAFDAFRRRCKEGAEKKGYPRYKTRVRSLTWCLRKHKVKDKATGGFKRVRQNPIIETDFRHNRLKVPKLGEVKIRMHRPFVGDPKEVTLVKKASGWYAHITCELPDTSKVEPTDAVGVDVGTVHYLTTSEGEKEDNPRWYRQAEGLLHKHNQTMARRKKGSQRWQKAVHAIALHHERTANKRKDFIGKLVFKLFHHQKNNVLVTEDLGISNMVKKTHLSKSISDASWGKFFEWAGNIAERDGFHFHSVNPKDTSQTCSACGKKSTKKLSLAIRTFECQFCGTVLDRDHNAALNILFRAACAHRGERWVTNLCEARNLSVDR

SEQ ID NO: 4775 - protein, 369 aa, unknown
  TnpB Polypeptide
MKTYKYKFGDQSNTIRLGNLLDDMWQVHAYFHKWQDERYRSGLPYANYPAMSAHATDLKRTTHRHWKALPSQAIQEELKRIDAAYVRFFKKLGGKPKIKKRHKFKSFTLKQAGWVLEDNRITLNFRKWDKGKWRHDKVAYTFHKHREFEGNIRRITIKRDACGDYWLCILTDFVESKLLSATGKSVGADFGLKDAYLTLSTGEKKQHPQPLKQSLNKLRSLNKSLSRKVRGSNGWWRCVRHLARLYRKISNQRKDFHWQLASDLCKSFDTIAIETLNLAGMKRLWGRKVSDLGFYQFVEILKYKCQKHGRTLLQVGQWTATTKPCSHCGFHNENLSLNDRQWTCPECGSDHDRDINAAINILRAGIAVT

SEQ ID NO: 4776 - protein, 422 aa, unknown
  TnpB Polypeptide
MSEEKNRKIREHGKATRERHSHMDCRVFSVKVQENKLSCAKEEKLNRCFLEAKWLRNAVVAANSLSLEDTLHVQVKVKDTFEVREIKNLSSQMKQSVVDSVKTDVSNLSKAKKAGLKVGRLQYKHECNEINLKQFGKTYKIKSHNKISVQNIGVLVVNGLEQINLDEVEFANAKLIKKPSGFYIHLTVYTKKQPQPTTEKEVIGLDMGIKDQLTFSNGVKVNFYLEESEQLKGLARKLNRQVKGSNQYKQTLNRIKRIFEHMDNKKNDVVNKLNHVLKQNYIICFQDELLNSWKRKKSKQKFSFGKQVQHGILGRVKDKLKKNSSNVMLDSSVPTTQTCPECGCLTKHSLDKRKYHCSYCGFENPDRDIHSAKNMILLSGYGTYRSLNTDTVSTEKMVGFLNNLSHLGVVVSSTNSMEANCL

SEQ ID NO: 4777 - protein, 356 aa, unknown
  TnpB Polypeptide
MAREVREPEITHVTITGRILPLDNDSYMELILLAYRFRKALIRAIKMYAKGLDRNTIVKEITKELNLGYADTIYKLAKLIAEGAKHNGSNPLRVRIGKLFIVSRGFSSNKGNRNIRLLSTNELQVNIPWKGLLRFKVAFGERYISLVSELVKKALSRKLSYTAKIVFRNGMVYLHVSVPIKLYLKHFSKGRAKGSLVAGFDLNSDRINMVIVDKLGIIRDVKTEWFPEVTSHGFPRNKAHTLRLQSLAKLLNYAYHHGVGVVLFEDLDRIKKRRYTRSRTANRKITRFPKRKLLEHSIVTALKNGFKVYLVNPAYTSKLGEKLGTELGLDKHIASAYVLVLKYLGVSEIPLSISSS

SEQ ID NO: 4778 - protein, 383 aa, unknown
  TnpB Polypeptide
LRTVKTVQQRYRSNEDFLGLLEQFRCMLNDCLRIGLAENATSLKFLSLKAYRQLSGYDVMSYYKLCAISRAVGILRNYRKAKRRGHHVAEPYARRPQLVTCYGFKIIDGKLQVPFKPRRPISIPLNKHTLDVLSKPNQTIRSITLTTSMMGIAYSKETTSTEPVGLVGIDNNLDNVTLVDSKGNVERYSLQKAMWIKSKYREIKSHFTRNDVRIRRRISRKYGEKQRDRISHLHHDVSKHIVEDAKAKRFGIVMEKLTGLRRLYRKGNGQGRFYRDRLNSWSFRELQRQIEYKAHWEGVPVLYVPARNTSRKCSICGLSMKPEENRTLKCPTHGIVDRDVNAARNILTRGLRFRPVALPVEAMVTASMPHGMGIRRVDGSEIS

SEQ ID NO: 4779 - protein, 232 aa, unknown
  TnpB Polypeptide
MNCAIKIRIYPDKEQRIQIEKTIGCSRFIYNQMLADKISYYQKEKKMLRNTPAGYKKEYPWLKEVDSLALANAQLHLESAFRKFFREPSCGFPRYKSRKHSGISYTTNAVNGNILLQDTHLKLPKMSAVKIKLHRQIPSDWKLKSVTISRESSEKYYASLLFCCESQTVEKDGQRDFSGSILPCRECVYFLQEKKPGTLCFTEKQRKNLQGNRESFPTVKKEAGTIRNRRKR

SEQ ID NO: 4780 - protein, 366 aa, unknown
  TnpB Polypeptide
LELRTQKIELNPNNKQSTRMSQHAGYARVAFNFALSSFKAGLDKDEWRDYREIKREFNAVKREKFSWCSELSQNASKNAIHNLGDAVTRWKKGQNRFPVYKNRSGKCSYQADNGEGTVDVHKKRINLPKIGWIRMREELQWTGEITKVVVSKHNGKWYASITVRRLDSNNYKHQPLLFDDSKQPIGIDVGINTLATCSNGDTYDNPRPLKRYERKLARANRRLSRRQKGSQNWYKAKAMLSAVHARIGNIREDSHHQATLRIVRKASAIGIETLKVTNMLKNRKLAKALSDSALGGFLVKLKYKAERRGIPITEAPQFFASSKTCSNCGHKKADLVLSERTYHCRECGFECDRDLNAAINLCPTEP

SEQ ID NO: 4781 - protein, 362 aa, unknown
  TnpB Polypeptide
MNKAIKYRLYPTKEQTTKFIQTFGCCRKIWNLMLSDKIDYYKVNKKSLQTTPAQYKKDYPYLKEVDSLALANVQIHLQIAYANFFRDKRIGFPKYKSAKTNKKTYTTNNQNGTIALLDNAIKLPKIGKVKTVIHKKPNSDWKLKSTTISQDSDGKFYASVLFTYEENIQKISQINDAIGLDYKSDGLYADSNGQVCGSPKYYRKSQKKLVKLQRQLSRKQKGSNNRNKARLKVARLQKHTSNQRLDFLHKKSTEIANQYDVVYVETLDMKSMSNKRFGNGKATLDNGYSLFLNLLEYKLNDRGKYFIKVDKWYPSSQICCKCGTKHKLLLSDRVYKCECGNVIDRDYNAAINILNEGLKQIA

SEQ ID NO: 4782 - protein, 239 aa, Streptomyces sp.
VKLVRQVKLMPEADEAAALRFTLRTVNEAACWVSGVAFEHGVPREYELRKHTYAELKMRGLGAQAAQHVIKKTRDAYTTLKANIRAGNLGRPGSRRRIKAESKPVTFRPEVAQPYDDRCLSWQYDQQTVSIWTTAGRLKNVRFACSPDALRMLREHRKGESDLVERDGVFYLVAVCDIPEPDVYEPDGYVGVDLGVVNIATTTGYRAAGRGLNRTGTGPGSSNSAARSRPRAPSPRSVS

SEQ ID NO: 4783 - protein, 434 aa, unknown
  TnpB Polypeptide
MEGVIRTAKVKLDVPSERCDDLHQTKNQFLHCANITSEWAWKHPNDYCVTSKQKAENALYDQLRNETELTANLVQKGIRRAIEATKSGVARLKKQERTSQPHFDAWSVVYDKRSATFHRDHVSLSTVNGRVECDYVIPDDPEETPIGEYLLNEDYEFRMSTLQYDRSTESFYLHAKMRRTERDEKEQSTTTFDDAKHRTVLGVDLNVDGSLAVTSTGVFIGNADEMNHRRREFEKTRGSMHQTGTRSAHLSIQSMNDREHRWMQDELHRASNRILEEAHEHDCTHIAFENLTDIRKRMAGAKRFHAWAFRRLYQYVEYKAEMIGIEVEQVSPAYTSQRCSSCGFTHETNRQSKHQFVCQKCEYELNADYNASKNIGHKLLKRLRSGQKSSSGGAPCQCALKSGTLNLNGDFYASVESTAEGESTDKPTTSVVGN

SEQ ID NO: 4784 - protein, 491 aa, unknown
  TnpB Polypeptide
VRKKHGPLRADTLRPAMNAAKERFVLDFVNDYRVVAVQIGRAQWRLFFETGSTNKQASAKHLNDICGAAPVQMASYQVQEQIDGWVSNRANEFVDCVKDSKLPDAIRKQLYTINRRQMWFSRDAIANVEPQARALARSIMRHVMSKHRRPDLRGISPRLDMRVATIEKPLTADYADLWAMLRLPNRGTVAIPLLGNPRFDQRGGELCPVVQLCTDEASRISIRLVQDMAKPFAALRAAYEPKVDSLGIDFGLATLIATSEGTMFGVGLIADLKRIDKQIVGIARHRARSGGKARDSLRYRKLVARVRGMLKTRINAALNRIVQIHAPGELMVERLDFRIPGLSRRMNRLVTNCGRAVFRAKLADLQDKFGITATEVPAPYTSQECSLCHYVDARNRTSQSKFACRWCGSVKHADGNASRVIAQRRSLGLDSKWLGKAAILGVLVKLHTERFPRSLGTAADPRLDNPYFAKWVRDCRAEARMLQTQGIVRCA

SEQ ID NO: 4785 - protein, 387 aa, Campylobacterales sp.
MQSETLEELTHLSKNLYNYANYQIRQYFFNRREILNEFDLTLKLARENQVDYRAMPTAQSAQQTIKLLFKNWKSFFKSIKGYKLNPKKYLGRPKLPKYLKKDGHNILIFTNQNCKVKNGYICFPKKSKIEPLKTKITSKIKQVRIVPQATCFVVEVIYEKDIQKVDLVDNTYLSIDLGLNNLVTTFNNIGENPFIINGKIIKSINQYYNKKKSKLMSYIGDRGVSNRINRLSHKRECKINDYLHKSSREIVNYCIKHKISTIIIGDNKNWKQNINIGKRNNQSFVSVPFSKLIQMISYKAEEIGIRVKTTEESYTSKIDHLANEDMKKQEIYLGQRKKRGLFISSMNKFLNADVNGAIGIMRKVVPKVVLGTLGDRGTVFVPYKTII

SEQ ID NO: 4786 - protein, 424 aa, Streptomyces sp.
MAQQVKRAFKYRFYPTDEQARELLRTFGCVRLVYNRALEERTRAWHDEQRHISCAQSSAALTQWKKTEELSYLAEVSCVPLQQALRHLHSAFGNFFAKRAKYPRHKSRKKSRASAEYTRSAFTWHEGKLTLAKTAQPLDIRWSRPLPERTEPSTVTVSRDAAGRWFVSLLCEDTIEPALATPATIGLDAGIISLVTLSTGEKVTNPRYERRDRVRLVRAQRELSRKKKGSANRAKARRKVARVHARIADRRRAFLHKLSTRLVRENQTVVIEDLTVRNLLKNGRLARAISDAAWTDLRMMLEYKCAWYGRELVVVDRWFPSSKLCGTCNTVREKLPLHVREWTCDCGTVHDRDLSAARNILAAGLAASACGDGVRPQRESSRTGQSSMKQEPQRATAGISRLQVGEEVKRWPSRSRCAVVVRGG

SEQ ID NO: 4787 - protein, 216 aa, unknown
  TnpB Polypeptide
LITSEGSVGIDVGLTSYATLSSGEKIKNPRPIQHGFKRLRCLHQRLSKKKKGSKNREKARYRLARYYEHVANQRIDFLQKLSTRIIRENQAIIVESLNVRGMMGNRKLARQISDAAWSKFLRMLKDKAEICGVTLIEIGRFESTSRLCSACGFKNTALQIADRAWVCPECRTHHDRDINAAQNIKMIGLRSIMTPGEPREGPVELSALAEALKQET

SEQ ID NO: 4788 - protein, 416 aa, unknown
  TnpB Polypeptide
MLRTNTLELKPTKQQRNILNKMLVRSSAIWNLGNYKRRQAFFDKDKKNASYFMQCKELKNFDLYKSLGSAYSQQILKKLDKSWKSFWKSLKSENVKHKISIPNYFKNYKTKQTIPKLLICRNDCYRIDRDYVYVSCSKNLKKEYGNKGLMKIRYKGRRKWIGEQKAMEIKYIPYIKKFYTYQTEEIDSTPLDFKEENICSIDLGIKRYITTYIKNSKDISLIYESEHIFEDYLTLSKKLAYYQARTKQENNKYTTHRIRRLYLKRRRKLHNYLNNIVAHLFRKLKQYHVSEVVIGEFKGIRDSQIPKYYKNKKKINEMIQNFWSFDLFKRKLQNKCEEFGIELVLIDEAYTSSTCPIYNERVSPNNRTFKCPQCRYKQDRDVVGSINILKKYIHDHQINGIRVENYPLVSTIFIES

SEQ ID NO: 4789 - protein, 503 aa, Sutterella sp.
MNQTATASYCITFEVKVNPSDLPEIDRRMECARQIYNTCLGQCQKRWRQIRSIPEWRAALKELQVLNRKTELFPDEKSRQKALRQQLKAIEQTKGFSEYALHAYALTINRHFGSPLGSNELQKSATFAWRTFERYRFGNAKKVRFKRRGDPITIENKSNRFGLRLKDGKVLWGSKYTRTLEFPLIVRRKDTYAQQTFLDKTKFIRFFERMIRGERRFFIQAVKEGTPPPKKRQYGEGKPAVGIDLSPSTLVAYSPETAVIEELVPDCEDIEAALRRINRAIDRSYRATNSEAYNENGTFKKGCRLVPSKRCQKLQAKRKELFRKQAAVRKQSHEKVANELIAQSTDIKVEDTAVTSWTARAKETTVNRKNGKIHSKKRFGKTVARRAPAMLLSIIDRKLKYRGYALKRVISRQVKASQYDHSTGQYRKKRLCDRWCVIDGHRIQRDLYSAFLISHVTGKNLDTIDRKACCDNWVNFLKLQDEVLKTCDISLLCRADEVHSLAE

SEQ ID NO: 4790 - protein, 397 aa, Moraxella sp.
MTIIRGHIIRLDPTNKQVTHFSKACGVARLAYNWALAEWKRQYKQDKQYRDECLKNGIKIDKSKLNSPSQGKLRKQLNAIKRTQFPFMLEVTKCSPQLAIMQLGDAFKRFFKGESKYPQFRKKGDDDRFSLSNDQFKLKTINNKPYIQIPNLGLVRMRENLRFDGKILSAKVFTKGGSWFVSIAVELDSNTQAKQLKTNQTLKTGNAVGIDLGIANLATLSTGEKIQAPKPLKNKLKKLQRLSKQLSRKQKGSNNREKAKTKLSRLHYKISCIRKDFTHKLTTQLVKSYDVICIENLNVKGMVKNRQLSRAISDLGFYEFKRQLIYKANQWCKTIKELDRFYPSSKACSNCGFIMAKENLTLAVRHWICPSCHANHDRDINASINILNQADKVLTLS

SEQ ID NO: 4791 - protein, 370 aa, Methanothrix sp.
MKTAYKFRMYPNKQQEAMLDLTLETCRHLYNTALADRKNCYELEGISRSYEDQAAILTLEKKEGRWQVFSQVSQDVLKRVDKAFKAFFRRVKAGEKPGYPRFKGKGWYKSFTYPQKGFNLEGSKLTLSKIGSIRIFKHREVDGKIKTCTIKKDLLGHWFAVLVVEIDDISLVEPKTAIGVDVGLKSLVALSTGDTIQYPRYYVQTQQKLEVAQRNLSRKKKGSANRRKAKAKVAKISNDIQNHRDEFLHQVSKKLVDSADLIVFENLNIYGMLKNHHLAKHIQDHAWGKLIQFTQSKAAKAGKIVELVDARYTSQKCSQCGIIVPKTLAERVHLCPNCGLDRDRDINASLNILTLGLRGRAYRDTAIAGQ

SEQ ID NO: 4792 - protein, 410 aa, Desertifilum sp.
MIVYEFKLKGKDSQYRAIDEAIRTSQFIQNKCLRYWMDNKDSKVDKYALNKYCAVLAAEFPFADELNSMARQSAAERSWSAIARFYDNCKKKVKGKKGFPQFKKTCRSVEYKTSGWKLSETRKAITFSDKKGIGTLKLKGTYDLNYYNIEQIKRVRLLRRADGYYAQFSIDVNIRVERQPTHQVVGLDLGLNYFIADSKGNVEPSPKFYRKSEKQLNRANRKKSKKFSRERKKAKQRQSNNYHKARNRYARKHLRVSRQRKEYCKRLAYSVIQSHDLVAYEDLNVKGMVKNRCLAKSISDAGWATFRRWLEYFGHKYGKVTVAVPPHNTSQNCSNCGQKVKKSLSTRTHVCNHCGFVEDRDINASINILKLGLSTAGHAGTYATGDLPSWAIGVNLSSNGESVNVESPRL

SEQ ID NO: 4793 - protein, 300 aa, Methanocella sp.
MLLTLKAKLQPTEEQGRSLLKTMERFNAACNSISKVAFSSKTYNKFKLQRLLYYDIRREYGLSAQLAIRAISKVVESYKVERAVLHEFDEHGAIVYDQRILSFIGLDKASLNTVDGRIIIPMLVGSYAKLDERRIKGQADLIYVKGEFYLCIVVDVPEESPLTPEGFLGVDLGIVNIASTSDGIKYTGESCDKTRTRYSRLKAGLQSCGTKDAKKRLKIVSGREHRFKTNITHNISKAIVQTAKDTKRAIVLEDLTYIRSRTTVRHWAARTICEMGVRPVKEFHRVQGKNSRGTRRTRRR

SEQ ID NO: 4794 - protein, 245 aa, Okeania sp.
MVEKAYRFRFYPTPKQENLLRRTLGCVRLVYNRALAVRTQAWHEQKQRVSYKQTSAMLTHWKKQEDLDFLTEVSSVPLQQGLRHLQTAFTNFFSGRTKYPNFKKKRNGGSAEFTKSAFKWKDGQVYLAKCSEPLAIRWSRQLPENSVPTTITVKLDPSGRWSVSLRVNDTRDFRLKPINKQIGIDLGITSLVTTSDGETFANPKNLNKLHKKLRLAQKSLSRKTKGSNNYQKARLKLARIHTKIK

SEQ ID NO: 4795 - protein, 254 aa, Lactobacillus sp.
LIEPKGFKQYLDGTWKLGLAKVLKVGQKWYLHISATKTFSDYQKGQSQHVVGIDRGLHFLTTSYDEKGQTAFYSGKKVMQIRRKYKRLRAQLQSKGTKSAKRKLKKIGQRENRWMTDVNHQLSKTLVDKYGSNTLFVLEDLTGVRFATEQHDKDYRYEDVSWAFYQLEQFLTYKAHLNHSEVVKVAANYTSQRCPKCGRINKANRDHHKHLYTCDKCGYSTNDDRIGAINIQLLGTRYISGNDQPRFVKTTDSE

SEQ ID NO: 4796 - protein, 442 aa, unknown
  TnpB Polypeptide
MRTVSSYGVEIRKQNIPARQTMEIYRQAVGYLTEIYAQVWEELRKIPETKKRFNTAEHMVHMTKKNTARFDFDLRFPKMPSYLRRSAIQHALGSVSSYETRLGQWKETGVLSGRPKLTCRNHAMPVFYRDVMYREGAEGKDEAYLKLYDGHDWKWFRVYLKRTDMEYLPRNWKGKKTSAPALEKRHRRYFLRFSCTEEVTLTKTPVKEQIICSVDLGINTDAVCTIMRADGTVLGRRFIDHPSEKDRMYRTLGRIRRFQREHGSAQTQGRWAYTKRLNTELGKKIAGAIVRYAEENHADVIVFEYLEMQGKISGKKKQKLHLWRKRDIQKCCEHQAHRKGMRVSRICAWNTSRLAYDGSGAVTRDWENHSLCTFQTGKRYNCDLSASYNIGARYFIRELLKPLPATERSLLEAKVPPVKRRTSCVYADLRKLHSEMERLKAA

SEQ ID NO: 4797 - protein, 392 aa, unknown
  TnpB Polypeptide
MIKSIKVRLHPNNKQLTKLFQYSDCARFAYNWAINREQENHNHGNKFLSDNDLRKEFTQLKKREDYRWLKRVSNDVTKQAIKDACNTYKRFFKGQSKYPKFKSKKRFKPSFYQDTSKIKFTDTHVKIEGFSMSKRRNKQQLNWIKLCEKGRIPTNCKYTNPRFTYDGLHWYMSVSIEMDDITTITTRDGVGIDLGIKDLAICSDGNKYPNINKTKKVKKIEKRKRRLQRSISRKYNINKRGESYKKTSNIIKREKELLRVIKRLTNIRQNHLHQITSEIIKRKPSFICIEDLNVSGMMKNKHLSKAIQQQGFYEFRRQIQYKSEWNNIPVIIADRFFPSSKLCSCCGAIKKDLKLSDRIYQCDCGNIIDRDYQASLNLKQYGENVLKQKSVK

SEQ ID NO: 4798 - protein, 357 aa, unknown
  TnpB Polypeptide
MIQTYKVKHNRDFERELGLARKVAEYSIINKNEYSLIDRYISSKDVKHIGLKSMIANQILRKYSRNKKLRRIFSVKLIVPNQGIKVKDNKIYIPCLKLWLEIWFDRNFEKINQIEIGKEFAYISVSYKETKLYEPISYFGVDRNTTGHVLVASNPTTGKVLKMGKECNHIHNKYKEIRRQLQKKGKLRLLKKIKHRESNIIKNINHQISRKLVNVCKEAKAGIVLENLKDIRRTAKIRKKQRYSHNSWSFYQLENMIEYKAKKLGIPIFYIEPQYTSQRCSRCGHIENANRQEKMFHCKKCGTVENADVNAGFNIALCKQLGISQFNTDRDALKGSTDTPKEASSPETEITLEPRTL

SEQ ID NO: 4799 - protein, 391 aa, unknown
  TnpB Polypeptide
MGQALTVICKLLLTPEQVATFDATCQAFGDACNYANRTVKWNLTGKATIQRQVYYELRERFDLTANLAVRACARVSQARKTAKASGQVVGDFQPTSIDYDSKTFSFRESDWIVSLSTVNGRTRLPAQVGDYQRDRLAGKKPTAAQLCKHRDGNYYAHIQIELDVPEPNDPQKTIGVDLGRRDIAVTSEGKKWNGQSIQAKRDRFARVRASIQRKASQGTRSTRRRARELLKRLSGKERRYQQWLNHNISTEIVRSAKQERASIAIEDLTGIRERTNQAPHSKTERRRSNHWAFHQLRLFLAYKAALSGVKLVAVRPQYTSQTCHHCLHVHPEGGKSYRSGKSFKCGHCGWRGDADLNGALTISLLGAAVNRPRGPGVCCNLRAAESRLSIV

SEQ ID NO: 4800 - protein, 408 aa, Deinococcus sp.
MIRNKAFVVRLYPNAAQTELINRTLGSARFVYNHFLARRIAAYKESGKGLTYGQTSSELTLLKQAEETSWLSEVDKFALQNSLKNLETAYKNFFRTVKQSGKKVGFPRFRKKRTGESYRTQFTNNNIQIGEGRLKLPKLGWVKTKGQQDIQGKILNVTVRRIHEGHYEASVLCEVEIPYLPAAPKFAAGVDVGIKDFAIVTDGVRFKHEQNPKYYRSTLKRLRKAQQTLSRRKKGSARYGKAKTKLARIHKRIVNKRQDFLHKLTTSLVREYEIIGTEHLKPDNMRKNRRLALSISDAGWGEFIRQLEYKAAWYGRLVSKVSPYFPSSQLCHDCGFKNPEVKNLAVRTWTCPNCGETHDRDENAALNIRREALVAAGISDTLNAHGGYVRPASAGNGLRSENHATLVV

SEQ ID NO: 4801 - protein, 392 aa, unknown
  TnpB Polypeptide
MKVKHTYRFYPSEPQKRVLAKTFGCVRVAYNSALKFRSDSFKAGKTVNYNASSSALTAQKKTPQYRYLSEVSSIPLQQSLRHLQTAYSNFFAKRAAYPKFKRREGKQSAEYTLSGFKYDPANRNLVIARLGRLDVHWSREFKSIPTTVTVIRRENGCYFVTLALDETIKPVKKTGREVGIDLGVNRLATLSTGERIANPKFLAKNLVRLKRYQRVLSRRKKGSGRQRRQKLKVARCHAHIANSRKDHLDKVTTDLVRRFDVIAIEDLNVRGMVANHCLARAISDVGMRMFRTMLAYKTVWYGKELRVADRFFPSSKRCHKCGWISESMPLSVREWTCCKCGVRHDRDLNASHNILAVGQTVTGQGGKVRRTRTSVRERISRRAVNQPALECV

SEQ ID NO: 4802 - protein, 410 aa, Streptomyces sp.
LNGIVSGGRYVEGVSRYRLQPTPAQEAMLLEHCAHARFVWNLAVEQHSLWRPGRKAAPGYVQQCRQLTEARAAFDWLATGSQTVQQQALRDFARAMTNYFSGTHRRPTWRKAGRHEGFRIVAHRADRMRRLSRKVGEVMVPKVGWVRFRWSRAAAEGAKSYRVTRDRAGRWHIAFAVIPDPIQAPGSGATVGVDRGVTISAALSTGKLLQVPGLGHGVQRKLVRLQRRLARAKRGSKRRRETKVAIARLKAREADRRKDWVEKTSTELARRFDVIGVENLNVRGMTASAKGTVDMPGRGVRQKAGLNRGILANGWSALVTRLEHKAPGRVIKINPVFTSQRCSACGVVDRRARESQAVFRCRSCGYTGNADVNAARNIENAAGHAVSAREGPRDTGSEHREPQHERLLST

SEQ ID NO: 4803 - protein, 602 aa, Sphingomonadales sp.
MIMDNAPAQVITVAAKYGAFRPINWAEDCEDELMKINRLWNRLVEIGRGADAARVVVECQDPEVYRLRTAAQEAAEAARNAARAVKAARAAARANTITPELVTDLAEARAAEKAAWEAYAPAVKVARKTFAAELRAVEVERQELVKAARNKSGLYWANYNAVIARYDAARDRAIKSGAEVHFRRHDGSGQFYVQIQGGMTQDQMCGTAPGGRGVATLRPVPSEPRQRYLSLWMRSIEEEGKRPRARWLTIPVRWHRDLPEGAVIMGIAATREIVADGTDTWSVSFSLRLPAPTLARGYRTLAVHTGWCAEPDGDYRVATIYDGVAVVPVTIRGLEQRHGSPADTILNRIARAVDAQSDADTDADEIWRQIRDMRLQDAPENIAAQMDLIRRTPMRVTDQLIGLADLWRQHLHYRPDIAEMLADWVPDAKRHRASAGRTLTRIALHRREIFRRQVAEWLNQYDRVIIDSVPIATLTTRDQLSDTAIDVIGRRQHAICAPGELRAWLSQRAKVVGRRVAVVPVATKITTTCWQCGTDVLFDVRRGRCKNGHTHDRDDNAVRNLYAEGLEIFAAQAVAESGAASVSGGRWGRAKAAKAAAAAGGR

SEQ ID NO: 4804 - protein, 390 aa, Planktothrix sp.
MEKAFSYRFYPSPEQESLLRRTLGCVRLVYNKALHERTQGWYERQEKIGYNQTSSMLTKWKKQEDLDFLNEVSCVPIQQGLRHLQSAFANFFAGRAKYPNFKKKRNGGSAEFTKSAFKFKDGKIYLAKSVEPLDIRWSRQIPKGCEPSSVTVKMHPSGRWHISIRFDDPTIKPLPVNDNAIGIDLGITSLIATSNGEKVSNPKQFKKHYKRLKRAQKNLSRKQKGSKNREKARIKVAKVHLKIADSRKDFLHKLTTNLVRENQTIAVESLAVKNMIKNHKLALAISDSGWSELIRQLDYKCLWYGRNLVKIDQWFPSSKRCGNCGHTMDKLPLNIREWKCPKCEVVHDRDLNASKNILAAGLAVSVCGATVRPEQSQSVKAGAMKQKPKS

SEQ ID NO: 4805 - protein, 415 aa, Oscillatoriales sp.
MDSENINLKSQKIRIYPEPKLHQIWKKWLAATKYCFNQSIAYLRKHGKIPKYELRKLILNNAPDWVKECPYNPKGAAVLDAHEAFVRSLKTGTKQSVAGRFRSWKAPKRSIKFQPENYCLGTWYPEQVKGLLFKASEPLPSTEVELQSKQKDNSFKTRTRKGSWNFSTQLIYDKKRWFAVFPVEFEKQESTQQTMVALDPGVRSFLTGFDGEKFIEIGKKDITKIYRLCRFADKLISRKSQLTGRKNKYQRQRVQAKIESLLIRVRHLIDECHKKVAKWLTTEYRLIFLPTFETSQMVAKNGNKKRKINSKTVRQMLRWSHFRFKQTLKFQAFKRGCTVLDVTEEYTSKTCTKCGHVHGLLGGSKKFKCPKCGHSLDRDWNGALGIFLKALRDIAGLDAQVFSTLCQEMSDIVRA

SEQ ID NO: 4806 - protein, 501 aa, unknown
  TnpB Polypeptide
MSDSYILELKLNTKKQSDCNYLDNYFHEAWCYSNTLTRIVRKKLNLLKRDPVYISLIKEYRTASGNAKKRVGKELHAVIESYGLTKYALQKILLDKRKRCRYLHSDVAQKLSDAVYRGVEECLYANGRDIHFNKYADFKSFENKKNTTGIIYDNGKVYINCTPKKPKGGIILDVILPKNKESAHYIYETTCLCDRTKYCRIVRKQFPGGWKYYVQLIQEGTAPCKYAVGTGRVGIDIGTSSIATASDIACHLDTIGDNVTSTEKEIKRLNRKLDRSRRKSNPKNYNADGTVKKGRETWTYSENYKRTKRKSASLQRKRAASLKQAQESYANSLLSEGNEFYIEKMNFKALQKRKKKKGNAKDTKTNGREKFKKRFGKSIGLRAPAQLVAILKRKAEASGCTFVKVNTQTFKASQYNHVTDTFIKKKLSRRHNTINGIWVQRDIYSAFLLKNSEPDYKHTDRSLCIQNYDNFKILHDECIENIKATYKQQNRTIPRSFGIAA

SEQ ID NO: 4807 - protein, 420 aa, unknown
  TnpB Polypeptide
MYLTVKQQLKHLSKEEYLSLRELSHTAKNLYNQAVYNIRQYYFQEKKYLSYQNNYAVLKTSENYKLLNSNMAQQILKEVDGSFKSFFNLLKKKNKGMYNAKVKLPNYLPKNSFTTLVIGFVRLNEDTLVIPYSNSFKKNHKKISIKIPPILLDKNIKEIRIIPKFNARFFEVQYTYEVQEEQRNLDKTHALAIDFGINNLATCVTSKGKSFIIKSFIIDGKKLKSINQWFNKENARLQSIKDKQKYGKKPTLRQKYLYSSRNNKVNDYMSKTARKIINYCLENNIGTLVCGYNETFQRNSNIGKANNQTFVNIPFGKLREKLEYLCKLYNLRFVEQEESYTSKSSFFDMDILQKFEVDKPQPYSFLGKRIKRGLYQTSKGYILNADVNGALNILRKSNVVDLEVLYSRGVVDTPARIRIA

SEQ ID NO: 4808 - protein, 377 aa, unknown
  TnpB Polypeptide
MTLAKKVRIYPTKEQEQKLWQSVGTARFIYNYTIAKQEENYRNGGKFISDGAIRKELTQLKKYELNWLNEVSNNVTKQAVKDACNAYERFFKSLAKKPKFKSRKKSKPSFYNDPIKLKVKEKKVLIEKVGWIKTNEQIPRDVKYSNPRITYDNKYWYLSVGVEVNKSQEELTDISLGIDLGLKDLAICSDGKVFKNINKTKKVKNLEKRLKQKQRQISRKYEMNKLKKEGGGRCQFIKTKNIEKLENTTKLIHRKLANIKNNYLHQVTTSIVKAKPYRVVIEDLNVIGMMKNKHLSDSVRKQCFNKFRQYLTYKSEINGIELVVADRFYPSSKTCSQCGFIKRDLKLKDRIYRCPHCGAVIDRDYNASLNLSMYKLA

SEQ ID NO: 4809 - protein, 352 aa, unknown
  TnpB Polypeptide
LNDKINIAAHIWNYCIAAHKTYYRLYEKTLSLYDLQKHITKLKKKSKYSYWKQLDAQAIQDIVERVDRSYKAFFNHVKKNNSGKKSPPKFKKIYKYSSFTLKQCGYSFHNDNTIIIMGRNYKYFNNQEIQGKIKTVTVKRDKLGDFYIFVVVEQEMQEINSRTGNAVGIDFGMKHFLNLDNYSVIDSPEYFKQNLEKLRKAHRKVSRCQKGSNNRKRAIKELDRIYRKISNSRKDWFYKLTNSLTKEYSIICIEDLNLEGMKKLWGRKISDLSYAEFIQILEWEALKSGSKVVKIDRFAPSSKACHCCGFINDDLTLNDRSWVCPSCGEYLDRDVNAAINIRNLGLAKLSQV

SEQ ID NO: 4810 - protein, 487 aa, unknown
  TnpB Polypeptide
LDKYNLELSHNKNLLINNRIDKDIEEINKEISRLEKSIKSYNKLIANYHEIQQFKSNKPLVYSRLIQLIIDKKLRLISKVKLAFYQTGTHARHLNNAQLSIVKDLSNKDYQYFIKVRKLDKLIGREPKLNNKTKNQYQQLLDKYNEDNFIYLPLIFNQSRLKSIGKTIDNVLIKDNPQILIKSEQLRLGSKNNPNKSRKIHIIFNYEQQNNLANTIEYSIKNKVNINPTELNTLGCDLNLKHNLIADSKGHTYSEILNNKNKFINNLNEIVELFSIKTEERTVKQKYRYEKLLRSNESLLKTYLSGLIKDWKNSNILHLVFEDLNILNDKSYYEHKGIKIKYSRLSRLLRLGQIKHWVASMAEKQGIFTHFINPAYTSQECSVCHYISTNNRTKQEEFICKNPACKHKENADTNAARVIKSRLLNKTLRNKLGKDNVYQCSRNKSINYKLVKNIVEDEYKIGVVTELLPNLHSRLKSKEEASSFRAR

SEQ ID NO: 4811 - protein, 654 aa, unknown
  TnpB Polypeptide
MKKLKKSIVKIKNINLFKPDVNSSRVTIDSRVCNVDKFNEFFALIDNTKNYKNIISQYCYDNLLSLVSDYKPFLNHYKSLDNYQLNSWERQTIFQEIAGHYSETATRYLDKAKFIVIKPKSNINNIALFIHNQSNLTIDNNVYALEFNIEDNLIQLTTYLDKYNLKLSHHKNLLENLVQSKKDNSTEDINKEISKLERLIKSYNKLIANYHEIKQFKINKPVIYNRLIQLIIDKKLRFISKVKLAVYQTGTHARHLDNAQLSIVKDLSNKDYQYFIKVRKLSTLSSREPKPTEKNKNQYQQLLDKYNEDNFIYLPLIFNQARLKSIGKTIDNVLIKDNPQILIKSEQLILGSKNNPNKSRKIHIIFNYEQQNNLAKVIENNLINKTNIIPTELNTLGCDLNLKHNLIADSNGHTYSDILNSNNKNRFINNLNEIVELFSIKTEERTVKQKYRYEKLLRSNESLLKTYLSGLIKDWKNSNILHLVFEDLNILNDKSYYEHKGIKIKYSRLSRLLRLGQIKHWVASMAEKQGIFTHFINPAYTSQECSVCHYISTTNRTKQEEFICRNPACANHKVKINADSNAAKVIKSRLLNKNLRNKLGKDNVYQCSRTKTINYKLVKNIVDDEYKIGVVTELLPNLHSRLKSKEEAPSFRAV

SEQ ID NO: 4812 - protein, 397 aa, Sulfobacillus sp.
  misc_feature (55)..(61): Xaa can be any naturally occurring amino acid
MWPIGRTLCRLRYILPSKGGQWWLSFAAEDLTVTIPGKEGDAATERIAEDLRHLXXXXXXXIPYVAHRPHAVPASIYLAIEGGQWWLSFVAEDLTVTIPGKDGDAATERIAEDLRHLSADQLAERTLGGDRGIAKPLMTSDGHVFDLLPVQQTRIQKARRQHRRWQRRAARRKKGSQNQKKAYRKVAHYPQYEKNVRHEYAHQTSHALVVHAAYDLYVFENLPIQQMTKRPKAKKDAQGHFLPNGRAAKAGLNRAILASAWGQVVMFTRYKARRRGKLVITVPPQHSSQECAECTFTAPDNRPSQAAFVCQRCGHRDNADHNAARVIKKRGIQKLLSGEPLTTSRKTTRIFRTLGPERSEVTPGETHIRRAPSKTDMHRSQNQELRGVIRETPTSTR

SEQ ID NO: 4813 - protein, 331 aa, unknown
  TnpB Polypeptide
VTEGYALYRDTKQYVIDGWENDYFGMSVTTSEIDNDLYSAIQNQAIRESKSDYKKDGIVEYHASQPFALNNQNWEVDETDNGNVVIGFPCISDWWYTPIKVYDEVREPIQKFIDGKADKSRLQVYRRDDEWYCTFNVEHEEDAGSETEVGVDIGYNYLLAVRVPSEDESMLVSGKEAEYVRQKYRSLRDSLQQAGALRARNRVGNKEKRRTKEINHKLSRQLVDFASEFENAVIRMEDLEGIREGSGWNDVHSWHFHQLQEFITYKAEKEGIDVEKVDPHNTSQTCPECGECEDTVRDGDHFVCHECRYERHADLNAAENIARREGEACSA

SEQ ID NO: 4814 - protein, 427 aa, Roseicella sp.
MAKCRATPIRPRQGRLLLFQLAQKACQLLKRKAHVYRLCPTAEQARTLTQWIGCTRLAYNLALEQRKTFFRPGRSFNIASQSRDITALRADFDWIRSAPAQPLHQAIRDLDRAYQNWWSGRAKAPTPRKRGVHDSMRFTDSETLSFCRLSRHVGKVKIPKLGWVRLRWDKRIPGTVKNITISHKAGQWFVSAQYEYEAHEPANSNLPSVGIDRGVALFAALSDGRVIEAANPGRKAQKALARAQRRLSRKKKGSKNRAKQRLRVAKIHARIARCRKDFLHKLSHDIASNYGLVALEKLEVRNMTRSAKGTKTKPGKRVRQKAGMNRSILDQGWGMFGDMLAYKLADRGGTLVKVPAHHTSQTCSACGAVDVASRVSQSKFCCTSCGHEANADINAAINILRRADSPLLPVEAVGCHADEAGTIQRAA

SEQ ID NO: 4815 - protein, 434 aa, unknown
  TnpB Polypeptide
MSSYDAVKVRLDPTPKQERLMVSHAGAARFAYNAGLAHVKEALENGEPANWSHYGLLRWWNANKDELAVNRDTGVVWWDRNSKEAYSMALHGLARGFSNWSKSRKGQRKGKRVGFPRFKSKNTTMRFAYSTNFTAPTASDPYGLKLPRIGRVHCMENVYKRVNGARLIRITVSRRAGNWYASLTVERESAATATPKGGAVGVDLGVKNLATLSDGTVVPNPRALDSRLKALRKAQKTLSLKAVGSVRREKAKGRVARLHARVADVRADAMNKATTMIANTYSAVRIEDLNVAGMVKNHSLARSVSDASLGEFRRQLEYKAARTGAVLRVVDRWYRSSKTCSGCGGVKAKLSLSERTYRCDSCGLTMDRDLNAAINILVAGSAPETLNAHGGAVRRGSPSGHVALVPAKCEPSGGESRVRLGVGLGNEAMQPKLN

SEQ ID NO: 4816 - protein, 429 aa, Selenomonas sp.
MRMLVKTSRKVMLLPNKKQETRLFEFAGAARFAYNWALDKEMQAFEQKKGFISAYDLRKEFTQVRHAKDTNWLEGISNNVTKQAIKDCADAYQRFFKLQKETGIKYTKKRLAHLARIGKKPTVYDRYGHPKFRSRKNGCFRFYQDVAKIRFSGTHVKLEALTDSRRKNRQSMNWVHLAERDRIPQDAKYMNPRVSYDGEHWWISVTIEQEISEPTGVYGEGLGIDLGIKNLAVCSDGLAYKNINKTAKIRRIKKEKRRLQRRISRAYGMANPMKEKGVRYKKTCNLIRAEKRLLRLNHRLMNLRQNYTHQITSEIIGRKPSLICLEDLNVQGMMKNKHLAEKVQEENFYEFRRQVEYKAARAGIPVVIADRFYPSSKTCSHCGHVKKDLKLKDRTYICPVCGNQIDRDLQAAINLRAYGENDIEQKFAG

SEQ ID NO: 4817 - protein, 222 aa, unknown
  TnpB Polypeptide
MITVSVTAKFHNPSLSRRKEWQQGTRLYRDSKQFCIDGWENVDFGKSVTTASTDNALYSAIQNQAIREAKSNHNKDGEVCYRESQPFAVNNQNWEIDTTENGTVVVGFPCVSQWWYTPIEVYDDIADPVDRLVEGDAKKTRLQVYRRGDDWYCSFNIEYDTDTSGETPIGVDIGERHILAVTAYDTGESMLVSGGEAKYVRRKYHSLRDSLSEAGCASRTQP

SEQ ID NO: 4818 - protein, 590 aa, unknown
  TnpB Polypeptide
MIKHKFRDKKFDDFKNKIPDNTDKFWCPQDIKFSKIQSNSCFDFQHFIDQNSAFNELETDASVPKFKDKLIRTISVLAHPNEWQRLVLNRWFDAYIIMFNETIKFIKSKFNSRDLSTVKHMKIKVAKLFRDMKDNDKCVKTMMTDIEKIRKNLVKLRTKRKLEKNDKKKDNTKNKAKSKIKTKIKTKISTESKIKELENQLKVSKIELVELNKSLHMKTMNHNKAKNISNRFENNIQKFLDYKFLRTKKLKEIRDRIQKNSQIKHEKRKMEIHAHTLDTAIKNACSTYKSCVTNFLDGNIKRFRVKYWKLNRKNKLIELEKSTIAQYNDIPKNKKKSSTEDSTKPRYTIAPKILGMMKYSRDGKEYELRLGTIFVRYDSDSGKYKIDVPDEIKQKELNQNNRTVSLDPGIRTFMTGMSNNEVMKFGTNIFDKVKSYIKRINNAKQTIQDNNRIRGIETKYNSKIKRLVDDMHWKIANNLTSKYKTVLIGDMSSKQICRSNNKILDGLTKQAVMQMNYYIFRKRLEYKCAVNKVEYKEIDEKYTSKMCSKCGWCNEKLGGSKTFTCQVCKLHIDRDVNACRNILIKGLKIK

SEQ ID NO: 4819 - protein, 354 aa, Nostocaceae sp.
VKTTYQYKFYPDTNQKLELNEWLRICRYWYNRQLGDRFDWWEMNRTSVNACPLVTSIAPVREKPNYYSQKQQLPIIKKDLVLVFHSGELLDLTRVDSTVLQDVSKRVDKAFERFIVGDSNGSKSGKPRFKSESNFKTMTFATASDSWIKLTRDNWLYLRLPKLGVVKVRMHRPIPDGFVIKQVSVTKKADGWFIQIILEDVNVPTQSQVENVPTWDNSTGLDAVLHEDVYLATSEGEKLPSLKPLRHNQCKLDRISTKRNKRKRGSKARRKLAKRESKQHQKIARSRKDFQYKTAYQLVRTGKKVFFHEDLNLKGLTKRNKIQQDSDGTYLPNGQGAKSGLNKSWSDAAERKFL

SEQ ID NO: 4820 - protein, 424 aa, unknown
  TnpB Polypeptide
MKRTNTFEAAPQTESDRELLLRFLDASAACWNEVNYERRQRFFDGEDVWVVDGVYDDYVGVLGGATAQSMIKRNESAWQSFFALLDQPSEDPSPPGYWGNEEDGRTLQTYVRNDAYDIHWGERSRLDIRVGQDLKEEFGMGYYERLRLEVRGKPHWEGKPGRLAIEYDDIEDAFRVYQPVSVPTKSGPELDGGEIAALDLGVNTLVACTTTTGRRYLYDGRGLFERFSETTEEIARLKSKLADDQGSSRRIRRLYRTRSQRRDHGVDACIRDLVERLADHGTQTVVVGDLAGKFPATGSARANKMVHNFWNYSYFTDQLQNVCEEHGIAVESCSEAGTSQRCPACGSTEATCRHRSTLTCQCGFDGHADLAASRNLLTRWRDNRTIVRPMARPVRFQWDSHEWRSVTDASQNPTNCAQTRKMPL

SEQ ID NO: 4821 - protein, 382 aa, Nocardia sp.
VQLRYNFRLYPTPGQQVALAQAFGCARVVFNDGLRLRQHAREAGLPHIKDSALQKMVITEAKRNPDRAWLAEVSSVVLIQALGDLHNAYRNFFASFTGKRKGPKVSAPRFRSRKDNRRSIRLTRNGFGLRPNGRLYVANVGELKVTWSRALPSVPSSVAVTRDAAGRYFASFVVQTEDEPLVQVDSEVGIDLGLTTFAVLSNGKQIESPRFLRRVERKLRRAQQALSRKQKGSANRTKARVTVARVHARVSDTRRDWAHKHSTAIIRENQAVFVEDLCVKGLARTRLAKSVHDAGWGMFTCMLQEKAVRYGRTFHKVDRFFPSSQLCSACGRIDGPKPLHICEWSCPCGATHDRDVNAAQNILAAGRAESSNACGGTVIPSA

SEQ ID NO: 4822 - protein, 501 aa, Bacillus sp.
VNKTYRSYKIQIQPKHELFDYCDSLCFKAKNLYNITNYYIRQVYTALKKETKNENQLQVLTDIKDHLPQMNQIRLKSFEIAKSKTKKVDNNGLVLEPELKLFEMPHPENAFLPYNFVEALFKVMKQPDYLSMPSQSNQQTIKRVYNDWKSYFEASKKYKTKPTCFSGKPKIPKYKPKNGRTTVYLTNQITKIKNGTVLSLPKTPLTIKLGKIAHIDGKLQQVRIVPSYGRYVIEVVFKSEQEKEIKRSEKQLNEWLFKPKRVMGIDLGVDNLATIIDNTGLKPLLIKGKWLKSINQYYNKLRAKYMSILRNGKGPKEGSFNTTRLISLDRKRNNRVMDFLHKASAKVVEIAKERTIDTIIIGKNEGWKIDVDMQKTSKQTFIQIPYATFIGMIRYKAERDGIQVIIREESYTSKSSFLNHDPIPTFGEENQTNFSGYRSSRAFYKIKGSKILIHADVNGAFNIVRKHIKDVFEGLERKQFLQSPKKIIIMKIRKAKLKASA

SEQ ID NO: 4823 - protein, 178 aa, unknown
  TnpB Polypeptide
MPRLWARAKGISDAIAVKTAAYIVDMAVRYSVDTVVFEHLDTSGKKKGSKKQRLHHWRAQYVQSMVEDKVHRLGMRVARVCAWGTSRLAFDGSGRILRGKESKKTAGNYSLCEFQTGKVYHCDLNASYNIGARYFIREILKSVPVTVQQDIGAKVPRCLKRSTCTLSDLISLAAVLAA

SEQ ID NO: 4824 - protein, 400 aa, Cyanobacteria sp.
MRHVAKVRIYPDSYQQTSLAKAFGCVRWLWKNSLAENNRVYKETGFGLSRTALNARLPSLKKEYPWLAETYSQLDQACMLNLSRALINFFEGRARFPRFQSKHGKQSLQYPQNVKLGVHSLYFPKIGWVSARIHRTFEGKLKTVTVSQTKRGHYYASLLFDDGRPEPQASTQGKAVGVDLGVKEFAITSDGSKFPNPKHLPKHESNLKRKQKNLSRKKKGSNRRQKARQKLARAHEKVSNARQDFHHQLSRKLVNENQVIIAESLNIKGMLGNHKLAKSIVDCGWGTFLNFVSYKAKEDGKTFLEIDRFFPSSKTCNHCLNLVDSLPLDVRNWSCRSCQAQHDRDINAAIKIRDEGLRVLASGTEATASGGNIRPTRGRKSSVLANAVETGSPRIKFIGT

SEQ ID NO: 4825 - protein, 374 aa, Sutterellaceae sp.
  misc_feature (244)..(244): Xaa can be any naturally occurring amino acid
LRWKAKTWTLEVLDLVIKAEAPDAWQKEALLSATDPSGFKRVKYCRLVRRMIRGRMRYFVQLIVEGVPPVKHVYAPKDLKVAVDPGPRTMTFYSPEWQQKILVSVGTVSQEKEIARLLRAMDRSRRDTNWECYNADGTVKVAGKKIVWKESKTYKATKAKLADLYRRQAQTRRCLHGEVINQVFGWAGTVIVEKNSYKAFQRAGYGKSLGKSGIAGLITRMTSKAESAGCCVVKVSPRKTAPEXKPRAFKHGLFRDTFVRLISITRYVLFIFAGRDSMARSMVTESYNFINFHLRTPLSTPYFPRLSRLCTHPLGNFFPTNAGSFGLLPDFDNRTQLREHSLPPLSQTAQMPSGIRPYNAGLPTGNRFPIPLFV

SEQ ID NO: 4826 - protein, 412 aa, unknown
  TnpB Polypeptide
MRYRYRIQPTRGEQRMLARVFGCCRVVFNDALRVRGEAYRAGVKLSDSEVQRRVITYAKTTAERGWLGEVPSVALVQSVNDSRRAWRNFFDSHTGKRRGRRLGRPRMKSKKDHRQSFRLTRNGFSVRPNGHLFVAKVGEVRVRWSRPLPSEPSSVTIIREPDGHYYASFVVDVTPAPLPMVDREAGMDVGIARLATIASTDGARTDIANPRHLGRKLRKLRRLEREKSRRQKGSANRDKTRHKVAIAHNEVARARRDYHHKQALALVRDNQVIHVEDLNIVGMVANRRLARAISDTGWGQFVRIIAEKADRYGRTVGVVSRRLASSKTCSGCGHRLDQLSLQIREWTCPACRTIHDRDYNAAKNILAAGRAERRNASHNSGRDCASGSGGAHVRPQPIAAVDDEIGSNPTAA

SEQ ID NO: 4827 - protein, 417 aa, unknown
  TnpB Polypeptide
VKVIKYTYKFRLKPTNDQKILLNKHFGSVRWTYNYFLNQRKEEYLNNKKSITYNKQSEYLTQLKKNEETEWLKEINSQTLQYSLKCLDTAYSGFFAGRSKLPKFKSRKNRNSFTVPQFVSVNKNKLFIPKFREMGIEIIMNRKIKGTIKHCSISKTSTGKYFVSILTEQEHQPTTKSNQSAGIDLGIKDFLVLSNGTKIKNHRFLKHYERTLALNQKHLSKKTKGSNRYEKQRLKVAKIHEKITNSRMDLIHKTTNNLIRNFDVIYLEDLNIKGMSKRCKSKQDKNGKYLPNNQSAKSGLNKSILDVSWGKFIEVLEYKASWNDKQVIHINRFFPSSKACSKCGCINNNLALKDRTWICPKCGSVHDRDVNAAINILNEGYRKNISDGTSDYERGAKIRPISVGTSNETFKEKELVS

SEQ ID NO: 4828 - protein, 389 aa, Escherichia sp.
MLRATKVRIYPTPEQAEFINAQFGAVRFAYNKALHIKKHSYQRHRVNLNPRKDLKPLLAVAKKSRRYGWLKEYDFIALQQAVINLDVAFSNFFNPKLKAGKPTFKSKHGRQSSYHCVGIKVLDGAIKIPKILPIEARLHREITGMLKSITLSRSATGKYYASLLCDDGMEAPAKPALISNVTGLDMGLAHFVIKSDGNKIASPRHLINASRNLRRKQNALSRKKKGNANRRKARIQLAAVHERVASARADFQHKLSRAIVDENQAVIVETLKTANMMKNHHLARAIGDAGWSGFITKLEYKATEKGVHLVKLDQWFASSKTCHCCGHKMSEMPLHKRIWQCPECGVEHDRDINAALNIKRKGILELQAAGLVVSAHGGQHKSVTQTVAA

SEQ ID NO: 4829 - protein, 381 aa, unknown
  TnpB Polypeptide
MLRAIKVRLYPNKEQEQELNKVLGAYRFVYNHMFAKRMTAYETDKTNLSVNDLSKWFYGTLRKDEQYPWLKEQNTQVMAQAIRQMDDAYQRFFKQHNGFPKFKSKKDKQSALFPRNAISTRNTFETKHITLIKTLKNIRFRCSDLYHRRLQKHKDSIRSATLSKTKSGNFFLSILVDIPEAECIRFGKTNNQGGIDLGVKDFVITSDGVVFENKHFFKKEEKKIARLQKQLSRKKKGSNNRNKQRIRLAKSYERLTSKKENYIHSVVNEILKSYDVVFMEDLNVQGMMKNHHIAKAIQEVGFARFKSILQTKASQNGKEVYLIDRFYPSSKTCSCCGYKKSGLKLSDRFWTCPECGEHHDRDINASLNILLEGQRMLREAQ

SEQ ID NO: 4830 - protein, 402 aa, unknown
  TnpB Polypeptide
MRKIHRTYKFRLYPTKVQTELLAKHFGCTRFVYNYFLNQRQEQYKLTGKSDNLYDDCKSLTELKEQKDTAWLKEVSAQSLQFALRCLDTAYTNFFKKRAKYPKFKSRKAKNSFTAPQYSSIEGDKLFIIKFKEGIKCRVHREIKGKIGKVTITKTPSGKYFASVCMEEEYTTPIGKSGKPIGVDLGLKDLLVTSEGEPFKNKNYTKKYERKLATAQRHLSRKKKGSRGFESQRLKVARIYEKISNRRADYLHKCAVELVRRYDIICIEDLNVQGMVRNHRLAKNVADASWGTFLNMLTYKAEWNDKKVVKIDRFYPSSQTCSVCGYVNKGTKDLSVREWECPACHAHHDRDVNAAINILRVGLNQYTSAGTADYTGGEGVRAVLSESHSSAKPEARKQSACG

SEQ ID NO: 4831 - protein, 424 aa, unknown
  TnpB Polypeptide
VKLSFKYTITKIGNKNLDIIKDLQWHVKKVCNMLLYDIREGKEKIDVNKNLNIISSKIYKDYRKNNWHSNYLHSHMLQEAIIGVIGSYKSYISLCNIYKKNKNSLRGQPRFPRFKKENIVQEIIFTKYAIRIEENKIKLSLSKRMQEKYEVKSLNFLIPRKLRKLVDFSRVKMIKIKQEVKNIEINVIYEREEKKAIEGNTNIMSIDLGLNNIVGCTNKDNSNSILISGKEAKSKNKYINEKIRKLQQIEMKMRKTSKKYKNTKQIKKLYEYRKNYMNTYMHKVSKIVIEYAKVNKCGVIVIGDLKDIKQGMNYNKNFVQIPLYKLVQKIEYKAKLEGIKVEKISEKYTSGVSALDREDIIKENYNKRRRISRGIFVTNRGIKINADIDGSLNILRKYIKKSSPNQEIAMDNGREQRPLKKRVA

SEQ ID NO: 4832 - protein, 405 aa, unknown
  TnpB Polypeptide
MNLNEKEIIYQTDERFDLIKELCHLSKNLYNASLYDVRQHYFKTKSYRTWQSQRPIFTRTHNSDYYALQSHLAGEVLKQVGSQFIGFFNTKSNKKKRIPKYKDKNGYNVVTFPKITISKKIEFNENKQLYTYTLCKQSYNIKIQSTKPNVKMVKFVYDSSTNLIRCFKIYEVEEPKLKKDNSRYFSIDPGLNNIVSIYNNIGIRPLLYNGRPIKSINQYYNKTGAKLRSELPTNVRTSKRLKQLSFKRNNKIDYEMHKISNHIINEAVRNNISKIFIGKNIGWKNELNIGKRNNQNFVFVPHVKLFNQLLYKGLLNGIEVIFTEESYTSKASFFDRDELSVYGNSDSHKFSGKRIKRGLYKDSEGNVWNADLNGAANIMRKCSDKAYKSIRKTKELMKRPILVTL

SEQ ID NO: 4833 - protein, 211 aa, unknown
  TnpB Polypeptide
VPTIFRRGRKRRPPFIPAFRFLLASKEEIDMRHKRAYRYRCYPSQEQQRILARTFGCVRFVFNWALHLRTDAYRERGEHIFYRDTSAAMTQLRKHPETAWLGDVAYIPLQQALRHLDKAFRNFFEGRANYPTFKKKRGRQSAEYTTSAFTWDGERLTLARMLEPLPIRWSRPCPRAPGLPPSPSPEMPLGAISPPSWWKRTSSRCPLPRRR

SEQ ID NO: 4834 - protein, 489 aa, unknown
  TnpB Polypeptide
LPRSGPPGNPGALRGGSQRPGTRLRRKSASSRSSRQPRSSSRPGPSPTRTRSTASTCGGLSPWGPCSSSSHNHLSEEGTIVLFLTCPNYMIKVDIMSFRAFKFYLHPTAAQVVNLDRIRFTCCELYNAALQEKRDAFKRQRLNLGCAFQQAELTDVKEVRPDVGAVHSQVLQNVLKRLHRAFDAFFRRVKAGQKAGYPRFRSSRRYDSFTFPQVSRKTTLQAGGVTIENGRLKVHGIPGAIKVKWHRPLEGIPKTATFKREGDRWYVIFSCEGVLPEVLPLTGRECGIDLGLTTFAMLDDGTAIENPRCLRKDEGKIVRAQRLVSKRKRGSRRRNKARTLLAGHHHHVANARRDHAHKTARMLVNEFERIAVENLNVEKLSRGMLSKSVHDAGWGTFIAILTSKAANAGRELIVVDPAGTSQECSGCGTVVRKELSERVHRCDVCGLVCDRDVNAARNIRSRAFAGPDGAFGEDRPQGHPMTREAVCFS

SEQ ID NO: 4835 - protein, 378 aa, Rubrobacter sp.
LTVLVKLLPSESQYEALEATLRRVNAGCDYASEVAWETRTFGKYKLQQATYYNLKDRFGLTAQVVIRLLAKVADAYKLDKRTQRTFRPLGAIAYDNRILRWYAAEVSIWTVEGRERIPYVCDERTRALLEHRRGESDLVYRGSKWYLLATVAVEEPPPGTPEDWLGVDLGIANLATDSDGEIHTSERVEKSRKRYERIRAKLQKAGTKSAKRHLKRLSGRERRFKKDTNHVLSKRIVSKAKESDRGIGLEDLQGIRERCGKRLRRSQRGRHSKWAFGELRGFLEYKARLAGVSLACVDPAYTSQACNECGHCERANRRSQSKFVCKGCGHVAHADINASKNIARRASVMVPIAAENGNATHALPASPAASPRALAVGS

SEQ ID NO: 4836 - protein, 449 aa, unknown
  TnpB Polypeptide
LFRICSAKNFGYSNCKISQRDQRKCFIKGISGTETFSLERTSLEWLLLLRNHRLYFRRECPQIYRKAKKLSVMNKAIKYRLYPTTEQTVLFIRTFGCCRKVYNLMLEDKIKSYESKKTFGKQTPAMYKDDYPFLREVDSLALANVQLNLQKAISSCFDKSRKKKNSFPRFKSAKHSRKSYKTNNQNGTVAITEKGVKLPKAGVVKAKIHRLPENDWQLKSATVSQESDGKFYVSILFEYKKSIIPAPKTNNAVGLDYASDGLYVDDKGNIGTNHKYYRESHKKLARQQRKLSRMVGSKKGETKSHRYLKQLAKVNRIHRHIANQRLDNLHKLSTEIANQYDIVCVEDLNMKALSNRYFGNGKATLDNGYGLFLKLLEYKLVERGKYLVKVDRFFPSSQICHCCGERHPEMKDLRIRTIKCDCGLRMDRDQNAAINIRHEGLQILNEEVV

SEQ ID NO: 4837 - protein, 369 aa, unknown
  TnpB Polypeptide
LIFTYKFKLYPTPVQSKKMEETTETCRRLYNNLLASRKETGAGFFVQRRQLAQARKNDKFLRIVQSHVLEDVVARLDKAYGKFYAGICRYPRFRRKGAYRSFTFDYTGFSIYRGFVRLSMVGDVRFRLHRAIVGRVKRATVIKDVDQWFVAFDVEAAKLAETVGPGKIGVDLGLTNIVALSDGTIIENPRWLCKSASLIRSLQRQLSRKKKGSHNRDKARTRLAKAWRTISRRREDYAHKLSYRLAKENNLIVFENLRIRNVVRNHDLAQAIMDVCWGKLRRLTASKAERRGGRVVLVSPNNTSQKCSGCGKVVRKDLSVRVHECPNCGLVIDRDVDAARNILEAGLEQARVKAGPLLVQRRRISKFGR

SEQ ID NO: 4838 - protein, 477 aa, Lachnospiraceae sp.
MFAIIIVSETAYSKALYDRQERFIQMAYAVRKTYISKARHPEMYGYLDSYSRKSKLLQNAALFRLRNWFTAHGKQSLTVNELSVVGEIDAAVSAGMGRPKAVLSYFALDRVMRVNHNPDFFAGLPMQSAQECLKQKCREFRSWLNALKEYKADPSKLPGRPKMPGYIKSDTAIVRFTNQDCVLYGDTMKFPHTKETISFGRLPEGCILKEVQSVPCHGQYLLIAVLETPDTDAVSDMPYKAAIDFGVDNFASIAPDTDIPCLICKGGAMKAENQWFNKRMAELKAVLMKGHDPWAYHPASTKQMEALSLKREQFFHDYFHKLSKYIVRWCLENRIGTLVYGHTKLWKQKTSIGKQNTQNFVQLPFMAFVSMLRYQCGREGIRLLEQEESYTSKASAVDGDLIPVYGQEHEKPYHFSGTRVKHGLYRTGDGRTVNADLNGAANILRKAFPDAYECTDVYAILRNIQTIRFGTLYKVSG

SEQ ID NO: 4839 - protein, 562 aa, Firmicutes sp.
MPRKPEKGRFSFTVCGEFFPEIYPASRSSKWSRGEEDPLETEMRLFCACMRWAFNRLLEGVSRDEIKTHGQELFGLNSRYADDARVKAQALLESQKELLELEIEETEEKLDRARKKLGVTMKKLTEAEKEGAAPDVVEKLRVALVGRNNRVAALGKKLAELEAHQENGTIPKVVFGGRRLWEKVCKGRATREEWRAARKNRLYSRGDETKGGNPNIKVSYREGEFRLTVTISHLSEKVGQDALGRPKMSRAPRVDGRLRLPEKHRDMVRIWLAAKLPYTVELVRTLEGRYLVHLTFELGGLRKSDFVKGCLALDTNPDGVALCNVNASGQPEPWPESFSVPYPSNLGKYEGEFQVITYPNGFLYIRVPDLACASGFRRDYLIGVLAKVVVDIAFFLGKPIALEDLDFGKDRLDTDRKFNRMASNFPFAKMVVAVCRKAAKEGVPFKPVPPRHTSTIGYWKYANRYAVPVHCAAALVVGRRAMGFKERVTKELKQAVALIKQNLTRKVNPDTPGEGEGMTRAVRACLRRPDRKLPLHNGLASWQQEAFYSVWHDLKFLALSLR

SEQ ID NO: 4840 - protein, 347 aa, Desulfohalotomaculum sp.
MKLTVKFKILPTKEQEQYLKETLNEYISTVNNIVQSMINNRHIKLTSKDIKANLPSAVKNQAIQDAKSVYRKYKKTNNLPILKKPVCIWNNQNYKINDCLSFPVLIDGKSQRIKVKMLLSDYQKQQLNNKLGSLRISKKSGKWIAQIAVEVIEKQNNNENIMGIDLGLKVPAVAVTSNGKTKFFGNGRQNKYIRRKYKTLRQKLGKAKKLKKIKQIADKEQRWMKDQDHKISRQIVNFAIENNVSNIRLENLTNIRNTARTSRKNEKNLHTWSFYRLAKFIEYKANLEGIKVEYVNPEYTSQKCPYCGELNKARDRKYVCKICEFSTHRDRLGAMNIMKAPVVDGVA

SEQ ID NO: 4841 - protein, 373 aa, Sporosarcina sp.
MILAKKIRLRPTREQEEQLWKSVGTARWAYNWALNRQRENFKQGNKFIPNTILRKELTELKQTEAFNWLYEVSNNVTKQAIKDACNAYQRFLKGKAKFPKFKSRKKSKPSFYNDTGKLKVKKNLVLIEKVGWIKTSEQIPIGVSYTNPRISFDNKYWYISVGIEQEFEQPELTDEIIGIDLGIKELAVCSNGQVFKNINKTEEIRKTGKRLRRLQQSVSRKYEMNREGDRFVKTSNIIKLEKQIQHLHRRLSNIRNNHIHQATNAIVKTKPSDVVMEDLNVSGMMKNRHLSKAIGNQKFHEFIRQMEYKCEKYGIEFTKAYRFYPSSKKCSSCGTIKKDLKLSDRVFSCECGLKLDRDRNASLNLASYEGLTV

SEQ ID NO: 4842 - protein, 394 aa, unknown
  TnpB Polypeptide
MFKAYKYRLYPTNSQKELIAKHIGSSRFVYNLALETKNAAYLGSNHNFSQFDLIKQLPELKKECEWLKEVNSQSLQQSIQNMDTAFKGFFKGGGFPKFKSKHKGTQAFPVPQNVILDTEKSELVIPKFKKKGIKIVIHREIKGEIKSATISKTPTGKYFASLLVETQTEAPVKAEIKENTTVGIDLGIKDFAITSNGEVFNNPKHLREAQSKLKYTQRKYSKNKGKKTKEKLALLHEKVANKRKDFLHKTSNRIIRENQTIALETLAVKNMVKNHCLAQAISDASWSTFVSMLEYKAEWHGKSILRIGRFAPSSKTCSDCGRINKELTLKDREWTCEGCGVAHGRDLNAAINIKSFALKKQFCQGLTVKNQDELPTLVGVMTPEAHPIGYAVGG

SEQ ID NO: 4843 - protein, 237 aa, Escherichia sp.
  misc_feature (235)..(235): Xaa can be any naturally occurring amino acid
VKRLQAFKFQLRPGGQQECEMRRFAGACRFVFNRALARQNENHEAGNKYIPYGKMASWLVEWKNATETQWLKDSPSQPLQQSLKDLERAYKNFFRKRAAFPRFKKRGQNDAFRYPQGVKLDQENSRIFLPKLGWMRYRNSRQVTGVVKNVTVSQSCGKWYISIQTESEVSTPVHPSASMIGLDAGVAKLATLSDGTVFGPVNSFQKNQKTLARLQRQLSRKVKFSNNWQKQKRKXPA

SEQ ID NO: 4844 - protein, 415 aa, Euryarchaeota sp.
VQAHRALVFHVAWQEPQLAWLLAEFRLIVNESIRAALKEEIRSRVRLARAAYADLSARHFIHKKYISSAFEVALSILKAHRRRLRKRKKSSVPYMRRLMLRADNQSYWLDRDEGRIRIPIRGTEGVQLQLPLSNWHRSILSDPSWELGSLTVVPGSIIVVVRQEAPLPYEPRSAIALDTNEDSLDGVIAGRDSPALLTIPLDGVRNVQATHFRRRRKLAQRKARDRRVARRLLRREGRRERNRVRQRLHNVSKSLIEFAQADHSAIVLEDLTLHGAGGRSRKMNRRLSSWPRGLIHHLIEYKAALAGVPVIKVNPAWTSKTCPVCGARRRDRVGKDFVCLMCDWEMDRQINAGMNILKTALASNEALARAVRFQPGALRDDVVSPLYDLLRGGGGAREEPSGVESQAEAVTSPGL

SEQ ID NO: 4845 - protein, 436 aa, unknown
  TnpB Polypeptide
MYYAYKYRLEPSDDQREELDRHRDICRQLYNHTLYRLNEYRENHGELPSMTTLRSELPDLKTWWDDLNDVYSKVLQTVVERLFNNLSGLSALKENGYEVGQLKWKPPREFRSFTYNQSGFKLDKKGGQTVLSLSKLADIPIRLHREIPDNVALKQVTLKKEPTGEWFATFGVEVDRKPPQKPDQPKNVVGIDVGILKYAHDTDGHAVESVDLSDERDRLEREQRTLSRKEHGSNNYEKQRRRVAECHADLKNKRRDFLHKLSNYYAREYDLVAVEDLNVKGMMESPRNSPNTASAAWRTFLSLLEYKCKREGTHFVAVDPAGTTKECAACGVSTDKPLWVREHSCPACGFEADRDANAAWNILSRGIKQLGVGYSEATSSESEDSDGLRKSLGDFRTPVETATAVDSTHRESVSASRVIEAGSPTLKERTASAVSE

SEQ ID NO: 4846 - protein, 412 aa, unknown
  TnpB Polypeptide
MKSTAKTVHKAYKFRLYPTNEQKIVLHKHFGHCRFVYNHFLAERIAFYEANKDTPKGEKKGLTYNDNAASLTKLKKQKETLWLSEINSQSLQTSLRNLDKAYKRFFKEKKGFPRFKSKKNRQSFTVPQRFAFFSETKPTKTLFGTKEVASKHSWLKIPNMPKSAPLIKTKEHRKLPKGARILFVTISKTPTGKYFASLTCELTIQPKAQPIAPKGKIKAVGIDLGIKDLAILSDGRKAENPKYLKKALKKLKYQQRQLSKKKKGGANRERARQKLAKAHEKVTSKRKNLLHNLSSQLIEEQTVICLESLQVKNMVKNHKLAQAITDASWGEFTRQLHYKADWHRRVVVPIDKWFPSSKTCSSCGHVLDELPLKIRKWKCPKCASVHDRDQNAALNILREGLRVANIPEKQVV

SEQ ID NO: 4847 - protein, 405 aa, unknown
  TnpB Polypeptide
VNRKVYKSVFVSFSMLTQKNFRYRIYPSKKQIVKLNKTISDCCFIYNKLLENKVNAYKNDKTNLSQFDLNKLTKDFDVLVHSQVKQNISKRINDAFQHFFRRVKEKKGKVGFPRFKTFNRYKSITFPQSGFKFISNKKIFVSKIGNMPIILHRVPKGKLKTFTIKRTTLGWFAIFSCADVPIENIEIKDNHIGIDVGIESFAVLSDGTKIENPKFLRKSEKKLAKFQRRLSRKKKGSANRRKARFKVAKLHQRIFNQRQDFLHKTSFKIIKEFKIISVEKLQIKNMIKNHYLAKSIADASWGCFIQMLSYKVERTNGQLVKVNPKNTSKTCSHCGNIQDMPLANREFKCLKCGFVCHRDLNASLNIDRAGQVLISSSEDNACGLDVRPSSLKAIEVEAGTICKSE

SEQ ID NO: 4848 - protein, 404 aa, Microcoleus sp.
MIIYEFRVKAKDTQYRAIDEAIRTSQFIQNKCLRYWMDNEKVGKYDLNKYCAVLAAEFPFADALNSMARQAAAERAWAAIARFYDNCKKKVLGNKGYPKFKRHTRSVEYKTSGWKLSANRKAITFSDKKGIGTLKLKGTYDLNYYDIKQIKRVRLVRRADGYYAQFAIDVKVRIETEPTGQAIGLDLGLKFFIADNKGNTESCPQFYRKAQKQLNRANRKKSKKFIHSAKPQSKNYYKARSRYARKHLRVSRQRKEYCKRVAYSVIQSNDLVAYEDLNVQGLVKNRHLAKSISDAGWSTFRQWLEYFGFKYGKLTIAVPPHNTSQNCSDCGKKVKKSLSTRTHICPHCEFIEDRDTNAAINILKLALCTVGHTGTYAWGDLPSWAVGAILLSNGESVNQESPHF

SEQ ID NO: 4849 - protein, 368 aa, unknown
  TnpB Polypeptide
MIQRAHTIKLKPNRTQEVLLSKTAGTARFAYNWGLAKWNELYEKGEKCSAYSLISMWKQKRPEWALEVGSACLQRPFMHLEGAFKAFFRGVRKHPTFHRKGRNDSFYVPVGQFRLFHNKISIPKVGRVRMTECLRYEDAKLLSAAVRRKADGWYVSICVEIEEERRTESESFVGVDVGCKHLAVASDGTICDTPGKLKDLERQLRRRQRLLARKAKGSKNRQKARLRVSRTFQRIQNIKQDTVHKFTSHIAKNHGTVCLETLDVKSMHTGENKYVRKGVHNSCMSEILRQLKYKCNNFIEVDKYFPSSKTCSNCHSLKADLDLSDRTYTCQSCGLQIDRDLNAALNLRQEGFRIYTLGHRGSACREVQ

SEQ ID NO: 4850 - protein, 361 aa, unknown
  TnpB Polypeptide
MRIAYKYRLYPNREQRKLIDFTLERCHLLYNRLLAERIHAYRNEGKSISYYDQANTLNDRKVAIPGLKLVYSQVLQDVARRLEKSFLAFYSRVKQGEKPGFPRFKSSSQYDSFTYPQKGYKLEHKKLELSKIGKVKIKLHRMLQGKIKTCTILRKNRKYYVSFSCEVERETLPVSEKSVGIDLGLKTTIVTSDGEFFSTSRHSHKAQAQICKLQRAVSRKERGSNRRKKAVLLLAKKYEHIANQRKEQAHQISRQLVERYGLIAFEDLRIVKMIQNPNFAQKIADAGWGQLVAFTKYKAESAGRVFIQVDPYHTSQKCSSCGKIVKKDLNVRVHNCPHCGYVGDRDENAAINILKLALEVS

SEQ ID NO: 4851 - protein, 251 aa, unknown
  TnpB Polypeptide
METLSNVTVRSVTVTTRNLAITYSKWVHETKPSGLVALDSNLDNLTTVDSKGDIAQFDLSGITRIRQTYREVRSHMGRNDVRIKGRILSKYGQREQERVSNILHRTSKRIVKEAKRKNFGIVLEDLTSVRRNYRKGNGQSRTLRGRLNSWSLRELQRRIEYKARWEGIEVIYVNPAGTSTTCSKCGHKMKPEENRRLRCDACGLNVDRDINAARNILSRGMRFVPDAPAFEAMVAVPTPRTWESAESMQVK

SEQ ID NO: 4852 - protein, 211 aa, Tepidimonas sp.
MKKFDELLARVQKIHARIGNVRRDYLHKATTTISQNHAMVCIEDLQVRNMSRSAAGTTENPGKNVRAKSGLNKSILDQGWFEFRRQLDYKLAWAGGHLIVVPPQNTSRTCPACGHVSADNRRCQARFLCVECGFEENADLVGAINILSRGMQLLRDEGQDTPHACGGMEALASVSPDGLWIEPHRRSEAGTHRSDSFRLDAGVSAVGIPRL

SEQ ID NO: 4853 - protein, 548 aa, Aureimonas sp.
MAEMGILWAAAQHFLYSQFLSGCEWAGDIAIKHYADYGLSAKQWEHCWRDLMGRVASQRECDKLNTENLQKRVTSKRKAILASEKRLVKADKFMLAQEELQAKTDLAIAAGKKPPKKQFDSVMYERSARIFANTPFYLHKHKRKLDALVFVLEASRLPRTLCFGGRKLLNEQHHLEENGHKDHAEWKEKWIDARNGQFFIEGDAAYASGNQFVRLTQGEDGTFNVEIRLPERLQHLAETHGKSGGTIQHAIHFQGLKFEHGADEIRRALHWKLPISWRLMRDGDSWRIFAMITREYAEQEKFGGYRYSSGAVGVDVNVGHVSVTHVDRHGNPVETWNIPLNCYGKTQAQREDAVRKAAFAVVMIAVRLDLPIVSELLDFKDKKAQLRDSHGPRYARVLSSFAYSAFDAALSSACVRHSIHLRRVNPAYTSVIGDISYARRYGYSVHAAAGCVIARRAMRFSERLPSQVRLYRPRHADQVTLDHHEWNGPTPRKGSTQVGHVWSAWRIVARKRRAVLAGPSGPLPKGVRPFDSTLGSPTPSAKARRGGG

SEQ ID NO: 4854 - protein, 424 aa, unknown
  TnpB Polypeptide
MEVPRTESIWLGPDKGLGYLCHLSKNLFNEANYIVRQEKFATGRWVRYYELWTALKNSPNYMGLPAQTAQQTLWTVDACWYAYYMAMKDYMVNPEKYLAIPRFPKYKKKDGEFILVFSNQQVRLKNGMFKLPKAIGLEVRTRLPNGTKITGARIIPRGIGYMLEITYDKEVKEKRVQEKESPIEGEIENDPKEQAKPCRALGIDPGLNNLLATVNNIGVPPIVFKGGPVKSMNQFYNKRRAALQSQYARQGIETGPKMQKLSLKRNRKINCFFHLVSYLVILYCKMWDIDTIVLGRNKLWKQEIDLGKTTNQNFMNIPFYKLYQMIKYKAEEAGIRVIEIDEAYTSMCSFLDWESIEKHEVYMGKRIKRGLFKSAKGKLINADLNGAYNHMRNAIPESMEKLKEMVMADGIEAVGIHPVRAVLY

SEQ ID NO: 4855 - protein, 388 aa, Acidilobales sp.
VAAGDEGFLTLSIGVRVSPEPVVIELLHRYKNALNYAIKKIIDNNLKTLKQAHDFLYRDLVERFNLPSRIAVDCYRDALTNVKSWRNNPKKGKRPVVKKLSMLLHPELSYRIKDGYIEIIGGIRLRIIGWDRRYDEYKNREARLVYKRDMMILWISKKIPKPKKYTPIDVIGVDVNEQKIVYGDEIINIEKDTAIDRAYRYIRLAEDLQRRYSSSKYLAWRRRRGILRRIRSYHEKARNILNDWTRKISLEIVRLAKELRYAISREDLTNLIRSLRDLPKDHRRKLIIMGYSRIERWIDWQAEKHGVPYVKVDPNGTSSECPICDYKGLEEIGYRRLRCPRCGFEADRDVIGKLNVRKRGLRKLGIYPRGGSLATPTAPQMTDVAPNR

SEQ ID NO: 4856 - protein, 372 aa, unknown
  TnpB Polypeptide
MANKAYKFRIYPDDVQKVLFARTFGCVRMVYNHWLARKIRQYEEDKTAVTYTVCAKEMAEMKKTEAYAFLREVDSVALQQSLRHLDTAFQNFFKQPKTGFPKFKSKKQNKKSYSTICINGNIAILNGYLKLPKAGQVRLKQHRAVPKEYKLKSVTVSQTPGGKYYASILFEYENQVQEKELQKFLGLDFSMHELYRDSNGKEPAYPRYYRNAEKKLAREQRKLSKMQKGSNNRNKQRLKVAKLHEKVSNQRKDFLHKQSRQIANAYDCICIEDLDMKAMSRSLKFGKSVSDNGWGMFTTFLRYKLEEQGKKLVKVDRFFASSQTCSVCGYKNAKTKNLALREWDCPQCKTHHDRDVNAAVNIRNEGMRLVNA

SEQ ID NO: 4857 - protein, 446 aa, unknown
  TnpB Polypeptide
MLIQRKFKLEREEKQAFFPKAPNLTSQIEKNARDHAIQITSSWAKSIYILRIKSVISKLKKSGEITDEMARKLYSIGKHSIDRPKGIITGSDINVYLTLLDNHGGRVPAIRDTLPMRLSEMTSTLEDPTETTTASFWLRCSTLVSRKSVWLPLSGNPYVSKADEVSKGILARKKNGRWRFEVVEKKEWVVPSPEDLPKDAPRIGIDVGFNVIAAASNGDLYGVEFKPAFNRLYQKVQRVRANRQKQGFKENSPRLDRLESRLSGMTRTIVGNTANRLVRQHPDTVFVLEDMNLSGCSGQKRFAYRALARSLACKVPVTVTNPAYTSQECPSCGYVGKYNRKGIEFVCRCCGRQAHADWVGSFNTLRRSEDKGIGLEDSPKAVKRTLTMRFLARRRAGTSGSGSSEVGVNELLLCSRGLTTRASPLGGTGGGSNLISTRFPENGIKG

SEQ ID NO: 4858 - protein, 367 aa, Drancourtella sp.
MLKAYKYRIYPNKVQEEVLEKTFGCCRFVYNQTLAYRKEKYEKDKKSMSRTDCNNYCNRQLKEEYEWLKEVDKFALTNAIYHMDSAYRKFFKEHAGYPRFKSKHNSRKSYTTNYTNGNISVDFDARKIKLPKLKQVRAELHRKFTGQIKSATVSQVPSGKYYVSVLVETYHEPFPETEGKIGLDLGIKDICVTSDGRKYRNPKILSKMERKLVKLQRQLKHKEKESSNYYKAKRQIALCYEKIVNARKDYLHKLSHEIISENQVIVSENLQIKNMVKNHHLAKFISDVSWYELTRQLTYKAEWNARKYVKIDTFYASSQLCSACGYRNTGTKNLSVRKWICPKCRAEHDRDINAAKNILAEGLRKIA

SEQ ID NO: 4859 - protein, 459 aa, Actinoplanes sp.
VKTIQAYRYALDLTPGQERDVYAHAGAARVAHNWALARVKAVMDQRTAERSYGIADDQLTASMSWTLPALRKAWNAVKADVAPWWGEVSKEAFSTGLDALARGLKNWADSRTGKRAGRPVGFPRFKSRRRTTPSVRFTTGAIRIEPDRMHIVLPRLGRLKLHESARKLARRVEADTARIMSATVRRGGGRWHVAFTVEVERAECVPARPASVVGVDVGIKHLAVLSTGEVVDNPRHLVAAQARLRSLGRALARKTGPDRRAGRRPSKRWDRAAARLGRAHTRVANLRRDGLHKLTTRLAGTHATVVVEDLNVIGMLANRRLARHIADAGFAELRRQLAYKAGWNGGRLLMADRWYPSSKTCSGCGAVKTKLALHEREYTCDACGLVIDRDRNASLNLAALAAEYDTAGSGPVAARGADQKTRARGQVAVKREPGTTTVGQTGTVPPQGRTTDHALTRAH

SEQ ID NO: 4860 - protein, 550 aa, Oscillatoriales sp.
MYSTQKNQLRDLSKAEFLALRELCRPSKNLYNVGLYTVRQYFFEERKHFYESVYHLCKDNENYQLLNTDIAQQTLKVVDRTFQSFYGLIGAIKSGVYQQKVRLPHYLPKDGYFLLIIPRIKVKNGKFKVPMSHAFKKQFGALVLDFPERLNPETIKEVRIHPKYDARFFEIEYISQSESEPVETVENSALAIDLGLDNLATCVDTNGASFIVDGRRLKSINQWFNKENARLQSIKDRQKIVGSTSGMPQRLTERQARLYINRNNQVRDYLNKAARWIVNHCISNKIACLIVGFDPGIKQEINMGSRNNQNFVQIPFHAPSNKLKSLCERYGLIYKEQEESYTSKSSYLDGDDLPVYNADKPVAYQFSGKRIKRGLYRSKEGHLINADAQGAANIGRKSKQNGFTGLSRGCESPAVANQALLGFISQESPCVRARECQSPFKIENHQSKMTAVPLPRPSPQPADRPTGRNWWRACTDTSTTFKICWARWDLPSAVLTISTNFWSWCLWWQLALPTPTGELWCSSNLTVKFGSSSCTVRKDGSAKICEKRWK

SEQ ID NO: 4861 - protein, 128 aa, unknown
  TnpB Polypeptide
MLLLLHQLSTMLTQEYGAIFVGNVSSSQLVKTKMAKSTLDAGWSSLKTMLEYKSRQAGVIFEEVNEAYSTQICSSCGEISDNSPKGRADLNKRSWKCHCGSVHDRDINGALNILAFGHERLAVGIPVL

SEQ ID NO: 4862 - protein, 372 aa, unknown
  TnpB Polypeptide
LCPKRWQKKLFARNFGCSRWTYNHFLEEKIRVFKETKQHLNYSKCCGMLTQLKKQEDTAWLAEADSTALQQSLRNLEDAFDNFSKRRKQGVGFPSFKKKKSRKTYRTTNAKIVDDSHVWIPKVGLVKARITRPVEGRVVSATIKQVPSGKYFIVFTCTDIPEPPKVKAGKAIGIDLGITTLVTTSDGEKIDGVADTRKLDKKLAREQRKLSRKKKGSNNRKKQKNKVARVYEKIANKRKDHLHKVTAKIISENQVICAETLDVSGMLKNHYIAKKLANQSFATILGFLEYKAKLKGKTFVQVARDFASSKTCHACGAREEKMPASKRKWKCKTCGARHDRDINAAKNILAEGVRILNGTEGHSGTTAITVAV

SEQ ID NO: 4863 - protein, 386 aa, unknown
  TnpB Polypeptide
MLCYRVRLYPSETQAKDMSATLGVCRTFYNGLLDERKVGYENGHAVTKTEQLRRVKELKAAWPEAAGVHSHVLQVVAADLDKAFQNFFRRVKSGETPGYPRYKGQDQFDSFGLKELGNGFKIDGRRLKISGIGRITVRWHRAIVGTIKTVRITRRAGKWYACFATEVETEVLPQKVLPQTGEAVGLDVGISHLLATSDGEFVENPRWYRAGQKDLRCVQRSVARKKKGGKNRRKTVLQLQRHHERVKNRRQDFLNKVAHRLISRYDVIALEDLRIKNMVRNHHLSKSILDAGWNYLTQKLKGKAESAGRLVEFVPAAYTSKTCSQCGTIFENLTLSDRWVECACGLSLDRDHNAAVNILCRSRLGQSRWASTQGTGLSVAQEAVGL

SEQ ID NO: 4864 - protein, 223 aa, Prochloron sp.
MVQRAYRYRFYPDAEQEQLLRRTMGCVRLVYNKALAARTEGWYERKERIGYKETSSMLTGWKKQEDLAFLREISCVPLQQSLRHLQTAFANFWAKRARYPRFKKKRNGGSAEFTRSAFKWKDRQLKLAKTNNPLNIVWSREIPPGCEPSMVTVRLEPSNRWDAKGGCFAIVSILVDDPTVKPLPNSPKQVGLDMGLTTLMTISDGEPTPIPSWEGRRGVGLTL

SEQ ID NO: 4865 - protein, 501 aa, Rhodovibrio sp.
MTRTFCTVIRDTDDEAVLGPWARHMASLRHWAFKQQYVRGRPVKDVKRDGIARFGVSARQFNGIRFDLDQAVNSWRGQIDHRVKDLADQLKHAGKAVTRLERKLQDERRKTDPSRRKIRNVQFGLHQKKRRQATLQARLDAARAEARRSVPKICFGGRGKLRRGEIGEWRERRTRMITLVGSKDEAAGNQTVETLTVRLPDALGGGFKTLHGVQFRYGQAEMRAALDLGAGITWRFYRRDDGAWQANATIEEPAPAVTATTRAGTIGLDLNVEHVAVMVVDRYGNAVERWSEPFPTAGTDTNEAAAMIGDAVKRIVDAAWARGMAVACENLDFQQKKAGLHNVSKHHARRLSGFEYTQFHARLAARWGRCGVELHAVNPAYSSLIGEKKYARGLNLTRHHAAALVLARRAMGYGERLVCMRRDALVSAAQHEARHVWPRWRGARPRRSRETHRPTATSAPGRTRTGAARRSRACAVASPPAVSTRSDRTSAGAAVPPANPV

SEQ ID NO: 4866 - protein, 162 aa, unknown
  TnpB Polypeptide
MHHLSRKIRRRGIIEELNVKGLQKRSRDIRINPKTNRPFSKKRFGKAIFRAAPSAFRTALKTRASQLDVDFEVISPKNVKPSQYNHITQTFEKKSLSTRVYDLSNEYKNVQRDLYSAFLIGHIENDRYQQKQLERDFPDFYDLMKTFLHQPIKTKRLAWYLN

SEQ ID NO: 4867 - protein, 411 aa, unknown
  TnpB Polypeptide
MHKAYKFRIKPTKSQEVLLNKTFGCVRFVWNKHVAAFNSYGVEGPIQQVTSKRLKDTDSFSFLNEVSAAALQQKERDFEEFKKQFFNKSRKKKVGRVKFKKRCQNESYRLPNQKFSLNQTSSRIRLEKIGHVKIIIDRKIPDNVDYRSITISKTRTNEYYVSILVDEQIDVKPSTGRSIGIDLGFIDLLTCSTGFVIENPRWFRESQAKLARKQKHLSRKQRGSKRYERQRLKVAKQHQKMSRQRNWYLHQISSYLVNNFDTIVMEDLNIDGMKKILGKSASDAGLATLVNQIAYKSNWYGRTFHKIDRFYPSSKTCSCCGDKNSFGLDVREWKCSTCNTVHDRDLNASINILKKGLQDLYDYTSAELIEVVVGNSNEYERGEDVRLKEDATMHPLVATSMKRLTDFYEFV

SEQ ID NO: 4868 - protein, 452 aa, Halobacteriales sp.
VKRTNTFTVRPLSNDGERVLRDLLDASAALWNEVNFQRLMRYNDEDGFEGDVWDADTGALEGKYKAVLGASTAQQVIGRNSEAWRGFFRLKDLYHDESNTSVTEHPEPPEFRGNNDDGRVLKGVVRKDAYTVEWGDRSRLEIVVGETLRDRHNSPNSRLRLEIVGDPNWPDYEDQSRLELWYDETDSTFRASQPVTVSDDARDTPLADETAALDIGANNLVACTTTTGEQYLYEGRELFQRFRETTGEIARLQSKLEDGRYSSERIRRLYRKRTRRRDHAQEALCRDLLDRLHTEGVDTVYIGGLTDILDTHWSVETNAKTHNFWSFKQFTERLACTAEEYGIAVEVQSEAWTSQECPQCGGTDRTTRHQDTLTCPCGFEGHADVTASETFLKRHTNKEVRPMARPVRFQWDDHDWSESPRSPTRESPNEQRIDPSTVHRDGNIASRDSQAV

SEQ ID NO: 4869 - protein, 462 aa, unknown
  TnpB Polypeptide
MKRTYTTETRLSKGSEITKYLDMYVAVYNKLYREMWHDMTSPSFKELYSKESEYVTYMCGKHQLLKRTVNSIRNDINGTMRAFKELQKENKRSLKQKVSKQQTKVNKLIEEVKALKKKAGKNKATEKELEKLRQKKSSLYYQRNRLNKMKQRLVKIEANIDNDRYNIGFGSKKMFRKQFRLKENGYKTHEKWLNDYRKARDKNIYYLGTYSEKAGNQLCQLAYNEETGLFDISLRVEDKLLKLPYKQVKASGISIKYMGDEIASILKEKSRPLSYRFARRGNAWYMQVMFSIEKCSTDTRSKDGVIGIDYNEGFLAITETDGCGNLVGRDRYDLYFHGTGNKAKSEMSQVAARIAKEAHAKGKDIVIEDLDFTRTKAKMIPARSKAGKKYNRQCHLFDYKRYKEFMQGACFKRDVGIHLVDPRNTSVIGKGKYAKQKKLTVHEAASYVIARRGQGFTDKVPA

SEQ ID NO: 4870 - protein, 408 aa, Chloroflexi sp.
LYYTILMNELLTRTICIKLDVAGHEAALAETQRRFNEAASWIATVCWDEHITNSNTAHHRVYGQTRSRFGLGAQLSVCARAKAMEAIKAVRRQDAERLTRWRKGNARRQRKGKKPVPPPEPSACPQFGSRSSIRYDARTYRLLPLDRVSLNTIGGRITARLLPGPRQHAVLADPDWTVGGAELVWRAGTCYLHVTQSKEAPDVTPAVDAIGVDLGICNVATDSMGEQFTGAEVRDKRARFVARRAALQQVGTQSAKRRLKQMSGRERRYMKDVNHCISKTLVRKAVASRKALALEDLTGIREDGITVGREQRYERHAWAFFQLRTYLTYKAAWAGVQVRLVDPAYTSQTCSRCGHCERANRQSQSSFRCQRCGFSAHADSNSATNIALAARQAANGSSGTSLATSPQL

SEQ ID NO: 4871 - protein, 421 aa, unknown
  TnpB Polypeptide
MKEGEFMHKCCKIRIYPNQTQIGIIQRNLNGCRFVYNLYLEYNHRIYDTEGLFLSGYDFSKILTQLKKNDENYSWLKEISSKAMKDAIMTAEKAYKRFFAKIGGYPKFRSKKRNPIHSFFFVKDNIKFYCNRKDKKNKIQLPILGEVRITEKDYLPDKSLVTSGRVIYVNNKYYVVFIYSIEPEIYVPHSPGIGLDLGIKSYATCYREDGKCWSYQSYLKYKRYIELEEKITDIQRIISKKSEFNYGRLLNEYFDNHHNEPNETQKNIMKGESYNTSKIRKLRKKLSILYEKRVNYAKDHILKMIHGLIQTCPEYIAIENLEISNMLENDSNHKLHDLVAKSKWYFFQERLLSKARESSVEIRYPKKKYFASSKLCSNCGHKLKSLSLANRTYHCPECGLEIDRDLNAAINLCFMKKYKIA

SEQ ID NO: 4872 - protein, 474 aa, unknown
  TnpB Polypeptide
MGQATRTTKLLLDLSARRQGGANTEKRAALDATAEVLTAARAFYIDFFLAHADKLSERVTYYSEAHLEMRERLISAHELLTWAEACTVATTAHPHPWTGWNFTERFAGMPFAYRRSVIKDAIGKVRSYLSNRAHWEKSGKKRGKPGLPGATDHPTLYQRCIALELEALDVKEAFVRIAVYTGQVWTWMQYPVNSSRYTMQRLGEADWRRQSPTLVLRAHTAELHIPQVKKIVASKVMERKHDPDLVTVAIDLNVKNLAVITARAHGTIIETVFVTDHGLDAHRYRHLKRIARKQWQSGRPVAGEHSNQQLWRHIDRLNEDAAHKVARRIAAVCARYPGCVLLFERLRKIKPGPGSKSRRMNRKRANQLRGKINQHSRDKAYVEGVVTVEVNPHGTSQYCSRCGAKGERFSYRGGKRVVEKWGKLFVCPVCHYEANADFNASANVHHSFYREWHWQPRTVKAHQAPSPSAVAGGT

SEQ ID NO: 4873 - protein, 414 aa, Marinobacter sp.
MIIRQGFKFRLDTSDAQSARLRVLCGHARFVWNQALAKCNEAADVEGEYVPRYETMAKWVTAWKREPETEWLKEAYTDNLQQKLKDLDAAWQRFFKQVSGAQRPRFKKKGKSWDSVRFVNFNKYCRIENRRVKLPAGLGWVRFRKSREIVGTIKNCTVGFEGGHWFVSFQTEREVSEPVHSSTSMIGVDMGVARFLTLSDGTFIEPVSAFKTNQDKLARAQRALARKEKFSANWHKQKAKINRLHTRIANIRRDYLQKASDRLSKNHAMIVIEDLQVSNLSRSARGDVLNPGVNVKAKSGLNRSILDQGWYEFWRQLEYKQGFRGGKVLAVPAHHTSQTCPACQHISSANRTSQARFQCVQCGFKEHADLVGAINIKARGHRVLACGVAGLPASMKQEPVRNREGVAPGAANAA

SEQ ID NO: 4874 - protein, 635 aa, unknown
  TnpB Polypeptide
MDDDEFDNPNFTVVKSTLNRFCKNDFIKSSLQDYLFQTNLLLNETYLFVNLHINHILENNLTSNYKTLNETFFNNIFMGLKKNVKNESKRFKEMELTDTYHLYKQSLPTDFQHADTKQKSTLLQELSLQLCTITENHLKLNFYKRFSKYLQLQHPDTDWKTIYKIVNLILLSKKKFDESTDTEIKQHPQVIHYRTIFLNKTLDELLKYDVWIILKQLREILIFNEALLMNEQETGLEYKLRTRNARLFSMLPIKQLSNLSYMILTRQPLYYLLSKSLGDEFTTIINNNGKPISNVNYFTETTYKQVCNELFNIKYFETQLKEFHYFMTDGKTVSIVLKKRSFQSTKRRTKTEIEKDKKELPTKKEKKMVIKKQVKTKTELDIKNVELIGIDPGLRMVFVGCRTTIDPTTNKNHITKLSSKQYYNDIKSTRMSMKLKKLIERNNLSNLFSSTTPTRRTSKIDQLCLCIKTITEKLHKLIRTLMESKVREWKFDKYRFQQKKIVEICKMLSGKVRPEEERNVIVGWGNWSNPNNSIIKGHKRGPVKRIVKELRKWCRVETIDEFNTSKKCSKCLSDTEKMKYPEMRTVNDVLRCKNEKCRTYFDRDINGARNMLKKLKIKLGLEEEVEELNKKIVEV

SEQ ID NO: 4875 - protein, 412 aa, Microcoleus sp.
VEKAFRYRFYPTPEQETLLRKTVGCVRLVYNKALAFRTEAFYDQNTRVGYNETSAKLTGWKQLKELQFLNEVSSVPLQQALRHLQTAFANFFEKRASYPNFKKKLRGGSATFTKSAFKFKGGQVFIAKCTEFLDIRWSRQLPKNADPSSITIKLAPSGKWFVSLLCDVKIIPNPKTDKQVGVDLGISALAITSNGDKFNNPKSLKKAQKKLRRLNKALARKHQGSNNRYKARLKVAACHEKVANIRQDNQHKITSQLVRENQVIAIESLNVKGMLKNHKLAQAISDAGWGEIERQLKYKTDWYGRDLAQIDRWFPSSKRCSNCGHIVPKMPLKIREWDCPECGAHHDRDENAGKNLLAVGLTVLACGATVRPKSVKGGGGCLEAGSNSSDAVKTRKQRKRSGESPTSFTCCP

SEQ ID NO: 4876 - protein, 367 aa, unknown
  TnpB Polypeptide
LNIAYRFRIYPTEEQKILLGKTFGCCRFLYNQMLNDKIREYEKTKKMLNNTPAMYKKEYPFLKEVDSLALANVQLHLEKAYKNFFRDSKIGFPRFKSKHHSKNSYTTNVVNGNILVESKRIRLPKLKWIAMKKHREPAEGLRLKSVTVSMEPSGKYFASLLYEGYSCENQAAEPDYSTAKILGIDYAMQGMAVFSEKVETEEAGFFRKNEKRLAREQRKLSRCVRGSHNYELQKKKVIRCHEKIRNQRRDHLHKLSRKIADGYDAVAVEDIDMKAMGQCLHFGKSVQDNGYGMFREMLDYKLVWKRKKMVKVNRFFPSSKKCCKCGRVKKELKLSERVYHCVCGNKMDRDRNAAINIREEARRMLTA

SEQ ID NO: 4877 - protein, 395 aa, unknown
  TnpB Polypeptide
MDIQRTITILIQPDKDLQATLEAFRAVQHELSEPCFNQGKPLNALALQRAVYHQVKGTLSAQMTISAIRTVAGAYQSAKSNKKPATRPFLFKKARALFLIGRRGRDADFRKDGTLSIWTIAGRKHLSYSVPEDFKPILDKAKELDSLNVILRDGKLIGRLTVTLDVPEPQGIHPVGIDLNETNALVAVDPDGRELFISGKAIKVKNRRTAKTRARLQSKHATRKAQHKDTRSVRRVLKRLGRKQRNRTRTFAQQTAKQLVQWAPPDAVLVFEDLHMPQPQKGKLRGRALRRRMSLWQHGLIRECVTSKAEEYGLKVAKVDPRYTSKNCSRCGLRGVRRRHSFKCSHCGYSDHADLNAAKNIRNRFTLFRECGLSSISPEAQTVSVVGKPLSSDKG

SEQ ID NO: 4878 - protein, 257 aa, Actinoplanes sp.
LSVKSMQAYRFAFDLTAAQERAMLAHAGADRTAHNWALARVKAVLDQRAAKRSDGLAEDVANPRRLDAAQVRLRSLGRALSRKAGPDRRARKDPSKRWLRAKARLGRTHARVANLRRDGLHKLTTRLARRHATVVVEDLNVAGMLRHVADAGLRRQLVCKTSRNGGRLVVADRWHPSSSGVERIDTCASSGLVLDRDLNAARNLAALVAAEVSTAGSGPVAGRGAIRKTRPGGREAEKRLPGTPHAGKTGTVGRTAA

SEQ ID NO: 4879 - protein, 424 aa, unknown
  TnpB Polypeptide
MEYSPKFRLFPSTAQRESLDWTRDIVRQLYNHALHEFNKIPEDEGTLRQRVWQVRDTLPQLKKQWTDLTKVYSTVLQKAVERIRTNINNLGKLKAKGYKVGSLNWKKPREYRSFTYRQSGFELDKKSGPRDRAILRLKKVRGETLEIPIRFHRDLPEHDTIKEVTVKKEPTGVWYASFCISTEMPEKPHVDDIDAEDTVGLDLGVLKFIHDSNGLPVDRLDLSDERERLEREQRSLSRKQYESSNWEKQRHRVAKVHVRMSNKKRDYKHKLAHFYATVYDAVFVEGLNVKAMLEGDGNSRNKHEVGWRDFLNILKHHCDKHGTHYVEVDPRGTSKECASCGCESEKPLWVREHSCPSCGFELDRDWNAALNVKSRGLSKLGVVHSENTPVETALPADTRSVSAKRVVETGSSVLKERTALAVSE

SEQ ID NO: 4880 - protein, 329 aa, unknown
  TnpB Polypeptide
LGDQHATLACHEVAGAIKSCIERRKNGKKSSQPQFTTRSMTFDRHTLTVFPDQEKVTLTTLGDHSRVHADLCLPEDEDRYQREYLDSDEWEYTESTLHYRNGNWYIHLGYQTPKEDDAPGSPTENGTVLGVDLGVNQIAVTSTAHFFNAGELNHYRREFEKTRGSPQQTGTQSAHRTIESLSSREEGYVKHVLHTVANGIVEEALEHDCDGIVFEELDGIREELPDAAWHSEWAFRKLKDFVEYKAEFELFVDTTSPRNTSKRCNGCGFTHDENRHAGQFECRSCGKSNHADYNAAKNVAELYLRRGHQPSGRRSVSQYALKSGARTPS

SEQ ID NO: 4881 - protein, 682 aa, unknown
  TnpB Polypeptide
MPPTSDGESVRTVGCALAKLVPNPVHLQKIRDAVATTHKATILASELLNLHIRRVLDSDATADLSCCFSANWVLHAYNEVTSTTRSGGKFDAALRATREESMPPFFPPPRGATQQCLLYDARNLVTVAATNVWMHFSKRVLSHVRTKFALDEEVYKALSKDQRRHRKLELMQMANDLCRSPGANHQSPVARHAWVAAERARLGIDTAVGDWKGKPLLYHLKAKPHRFLNCMRMMSAEKEAVGGKAFGLYPIRRTNVPRHVRFDQKALRDVLGLGSSDHIKQKAKERRKRKREDGTHETQADDDLNLPPLQPNGVGYESGDGAQSAAGPSSVPPPKLTKARRTKAEMADEQTALFAGIVDLRAAGVQRRQRFDFAFTTDGVCARVQMRTREAGSSSALTAMPQRGVWAIDQLKHAARLDQMHVVGVDPGKRELVNCVDMDNAKDCSPVRYTLKQRQRDLRSRQYADAAQRGKPQEVKDAEGGLTGFNSRTANLADFRAYCAKRHETLDECLAFYADIGHRRRRWKTVIKMQKSEERLYKDLEKLKTDSRPLVLAYGSWGMVAGRPGMACNKGNAPCIGVGLMRKLARRFVVSPTPEAYTSKTCCRCLGECGPWVEVEEKMGKKIRGLRRCTQRDCMIPLNRDKNGAANIGTNFTRLMADQPPIRSMTDEDLAFHRASLCLECD

SEQ ID NO: 4882 - protein, 256 aa, Methanoculleus sp.
MYPSQEQVASLMQHIHACRFVYNKAIQKLARCHEKVSNQRNDFLHKLSNRVVGENQAIAVESLNVSGMQKNHCLAQSISDVSWSAFFTMLEYKCQMHGKTLSKIGRFDPSSKICSTCGYLNRDLARKDREWICPDCGTHHDRDINAAINIKKFALQDQNLVGVSGAKRAEGPVDSLPMGRGMITGKPRPQARGSSRFRMWQPHSLIVLCADCANRHPIYRSSGIAHQLTDVFQYLAKLIEIVFWKPTHRFPVLGCC

SEQ ID NO: 4883 - protein, 415 aa, unknown
  TnpB Polypeptide
MLRAYKYRIYPTDEQRVLFAKTFGCCRFVYNWALNLKIEAYKERKETLGNVYLTNLMKSELKAEHEWLSDVNSQSLQSALRNLDSAYTNFFRNTKAVGFPRFKSRKDRQSFLCPQHCRVDFSKGTITVPKAKDIPAVLHRKFRGNVKTVTVSMTPSGKYFASVLVDTGLQEMPVEEVKRDTALGIDLGIKSLAVCSDGRTFGNPKNLQGSLDRLALLQKRLSRKQKGSANRNKARIRVARLQERISNQRKDNLHKITHALTHDNQVRAICMEGLNVKGMQRNHHLAQAVGDASFGLFLTMLEYKCRWYGVNLIKIDCFAPSSKTCGKCGYVYKGLKLSERSWTCPECGTRHNRDFNAACNIKEFGLKALSTERGEVKLVDCPLVDDRPRVLKSNGRKKQEKRGGIGISEAAKSLA

SEQ ID NO: 4884 - protein, 687 aa, unknown
  TnpB Polypeptide
MNDPPYKTSEQLYTMVKAPLAKVLKNYEVLQPIIEKNVIELTELPTLGNQLVFSYLLYQRKNNKPFPKLDKKFILDVLKTICKKETQRGSNKKKVDNKDLKNDLMNFYQKEFSKQILIQDEKGNKKPYQPNITNRTHIVEQIAKEMMTCIKTNLTTHFYEYLCKYINAIFKKPKTVEIKKIKDKKERKELYKVLNEDIRNLKFDIANAKISKSKEEYHQWIKTNLPLLVPVKGFTKDKNVAYDIKVKGRTELYYEYAFYINLQLELLGEKPYAVIPQRNSCIPKHIVLNTVACADLFGGLKEIFNVFNKSELVLHSKKHQKHIWSRILKTEMKSIFNHKKHIFYNQISTDGFSVSILFIDRKFKNKKFGEIIKEIDTSDEEDNYIPAESLTKEQCDELLNGNYKFISNDPGWNRPCSMIDENGKYYSYSAGRRRFETYTKRSAEILYQEKKKDGIFEIETSFSKIATSRTMNYEKYMNFIKEKFIMNNKLKPFYHNILWRKLQFRRYVRTKQADIKMLNEIENCYLTKEEKESGKKLVIMAGDYGRSSQMKGCIPTKCPKGIKRLLASRFLVHNVNEDYSSQLYHKTHSQLENVVVKNKHNKKKHLHQVLTLNLSDENKSLIKNDKLTKCKIFVNRDKNACKNILHIALYFLRNQKRPERFCRKVKEEKTKKSVKKTKKPSVIKSSV

SEQ ID NO: 4885 - protein, 361 aa, unknown
  TnpB Polypeptide
MKLTIRLQVLPDANQKAILLETMGRFNEAAGFAARAGFEAGIFSQPSVHKLAYREIRDRFGLSAQMAVRAIGKAVECFKRDKTRCPAFKPHGAVTYDERILGFKGLDRVSLWTMTGRMVLPLAYGEYQGERFDRIKGQCDLVHRGGKFYLYATVDLPEGSPVEVKDFLGVDLGLANIATDSDGDAYSGKPVEDVRRRHNLQRKRLQRNGTKGARKKLGRVSGKEARFRKHENHCISKAIVAKAKDTGRGIAVEDLGGIRDRLPVWAKDARNRLSGWSFAQLVDFLSYKARLAGVPLVKVDPRNTSRTCARCGYCSRDNRKSQAKFLCVSCGHAANADGNAAENISALAKSKLAIGLVDLTV

SEQ ID NO: 4886 - protein, 429 aa, unknown
  TnpB Polypeptide
MQTRQAQIPYRDGLASVRQVRYKLYPTPAQLEVLERWNGLHCDLYNACLQQRRDAYKKGKSVGYYDQQNELPALKAAIPEYRSLGSHALQETVRRVDRAFQAFFRRVKRGEKPGYPRYKSRKSFVGFCYPDKAGWKFERGPNGKHGVLHLSNLGPIKARGKPRQWGEPLRVTLTRTSHGWYATVALRCQPARKTGNIAVGIDLGVEAVATLSDATRVENPRFLKQASNKLRGLQRQLARRKRFGSNWKRTKHKIARLHLKVANQRNDFQHKLTSLWVSRYGLIAIEELRVKNMTVGGGSRKAGLNRAILDVGMWGILQKLAYKAEEAGTRLVEVPTSRVKPSQTCPICLRQEKKPLAQRVHRCPCGCEMHRDQAAALVMLRWAIHPWVHSRQAVLQGIYPWEPGGGEGPKSGSVEPRNPDHAGIAVGRG

SEQ ID NO: 4887 - protein, 374 aa, unknown
  TnpB Polypeptide
MIISIKVRLEPNNKQNSKMFQSAGTARWSYNWALSKQQENYNQGNKFLRDGVLRKELTQLKKTDKFSWLKHYSNNITKQAIKDCCNAYKNFFKGLAEPPKFKSRKKSKPSFYQDTAKIKFTSTHVRLEKIGWIRLSERNRIPIDTKYMNPRISFNGVHWFISVSVEIENIKPKLTSESIGIDLGIKDLAICSNGMTFKNINKTSKVKKLEKKMRRLQRRVSKKYQLNKKGGSYVKTRNIIKLEKRIRKVYKNLDNIRTNYIHQITAKIVKAKPSKVVMEDLNVSGMMKNRHLSKAIAQQKFYEFITIMKYKCERIGSKFIQADRFYPSSKTCSECGAIKKDLKLSDRTYICPECGCVIDRDYNASINLSRYKLA

SEQ ID NO: 4888 - protein, 344 aa, Methanosarcinales sp.
MIKTYTIKLYPNKNKAKKLNSLVSFWRDHVDHKIKIFWEFDEVKGSYPPKEHSTGGRLIRDASVKAWQIVKGAKATKQEDKPAFDGFEIDLNQFSAYIIEDFETTEFDTWFNIISLEKHKRLKISGKKTPVFNAALETGMLKKSFKLIRKNGDYYMECFVEFPEVESGNTNVIGVDVGINHAAVTSDGVFYGSDVRDLQKRTKHRAYKGLSAVKQRLNAIAKEIVDDHPKQDFAVEQLLFKGKDGRTKAFRRKHNRWAYNHLSKQLEQIGIVKGFDVIRVNPKYTSQTCPVCGFISRGNRNYESFKCLEGGFTGHADHVGAINISGRVPKDNPYLKPTERNDLL

SEQ ID NO: 4889 - protein, 441 aa, Thermus sp.
VVFGGRGLFEQLKRKHFSGKDRERLKREWKEKRQGHLYTQGDKAKGGNPHFKLQIEGSALWLLVHLGEEKRFARALVRTSHPQLKALLERIHTGLPYNTELTLREGKVYAHLSWPEALPPPLHTRANGVLGIDVNSEPYHLALTVVSPDGNLVRHLTLSLEEVDHAPNKGAKELFLWKVAHQVVALAEEHGVGLATERLKYLRKSKRGDGSGRNFRKKQHRFAYRSLLEKIHSLAQRRGVEVLEVNPQDTSTIGMLKYAPQLSLSKDVAAAFVIGRRALGLEERLPKGYEALLQDESFLAHAEGFYQDRLQELEKLKRAEGNPYLRRRLSREMGKAKAALSLLSSLPGPRRGQKASFQGSPRSRKGSTDGRSAFGTHPWRVLKVGLVLPLLGREVPRDLSPLKPILHGSWERWASPERAALQAGRDPHPGGGSACRDVRFG

SEQ ID NO: 4890 - protein, 374 aa, Erwinia sp.
MKVLKAYKYRLYPTSLQEEFIKKTFSCVRLVHNLLLQERIQLYKYLKENPNANVKLPTPAQYKEDYPCLKEVDSLALANAQVYLDRAFKKFRSEKGVGFPKLKQKKDAVTSYTTNNQNGTIKLIDGKYLKVPKLKSLIKMKMHRPIRGKIKSATISLAPSQKYFVSILCEEEVPEVQKTHSAIGITLGTCEFAVLSNGRRIDNDKYTKEFERRITREESKLARRKEIAKAKGLDLAQQKNYQKQKVKVAKMREKLMNQRIDFLNKITTEIIRNYDLICIEDINQKEVSRNNKLHRGVSDVSWALFVSKLEYKAAWYNKRLVKVSACGKCSEHSENITQSRIFTKDINERQGASDPETAASIQILVHGLQNIVTD

SEQ ID NO: 4891 - protein, 210 aa, Planktothricoides sp.
MLVFEFKCLGKPEQYAAIDEAIRTSQFIRNKCLRYWMDNKSVNGYDLNKYTARLAKEFPFANQLNSTARQASAVGEPCAKRIRCWSGIAKLFDNCKKKIPGKKGFPKFKKNQRSVEYKKSGWALSEDRKKITFTDKNKIGTLKLIGTRDLHFYQLEQIQKIRLVKRADGFYCQFCISSDLAKEEVKPTGKCIGIDVELNHFYTDSNRHLQ

SEQ ID NO: 4892 - protein, 169 aa, unknown
  TnpB Polypeptide
MEYPKTSKHLQRLYRKKNNCIKDYIHKMTRYITNYCVKNDIHTVVIGDIKGIRKEKNLGRKNNQKIHSLPYARIYMQLEYKFKMKGIRLIRQEESYSSQCPPQSEEVSCIYAEKRNRKKRGIYIVDTVIYNADAVGAYNILRKYHAVSGKEIDMPVTGLSSTKIIKVAV

SEQ ID NO: 4893 - protein, 276 aa, unknown
  TnpB Polypeptide
MLLTHETTIVLNKNDANIVGHMCYAAYKLWNVCNYERNNYKNLGLEKYPDWYYQKSKHKDDLWFKSLPSQTAQEICKLLDKSWKSFYQLKESGGIENPGTPRYKKDKMPITYMQNGIQHEKGSFNVRLSLPKKLKEYMAHTYDIRAAYLYLKNPVFSNMDIIKQIKIYPPANDGTSRILVIYEVEDILPEEDNGHYLSVDLGLHNLMTCYDNAGKRSLLGENIFHFLIFITRKSRESSRNGTGSRLHGEWSIRKHLSICRGSIERKITVSKIIFIR

SEQ ID NO: 4894 - protein, 458 aa, unknown
  TnpB Polypeptide
MQQIITAKLKLTTTPAQFAHLRQTQLAYRDALNAVSVYAFEHGKAASADRLQKGMYAELRMRYTLPAQMACNVPRQVGATYKGLWTKLKQNSEHHRSKRTKKWFKGLDQAPKYVSPTLTYNYGRDYSFKTEQRVSILTLQGRVIVGYQGYAQHLALIQKGATIGAAKLWYDRPHKQFYLLVALEVEVAEPTPEVQQHIVGVDVGQRYLAVTATLSEKSHFFSGKAVRAKADHYARTRKRLQRKGTRSATRRFITLSGRERRFKLNTNHVVAKTIVHAHPNTLIGLEELTGIRERTKRPKRRREGKQVLPLTPKQRRANRHASKWAFAELHTFIAYKAALSGSSFVVKVDADYTSKACPLCGYIDKCNRPGNGLTFVCQNNECGYQVRTRHAYTLHSDLIGARNIAMRTRLIRQDWVRTGHLSVVPDVSDKEAKAARLKRYAELRWSPDASPLLEQWGN

SEQ ID NO: 4895 - protein, 415 aa, Streptacidiphilus sp.
LSTLQGVGRVIRAYKFLMRPTVGQTQALAEMLRDHCSLYNGALQERRDAYQHASKTSVKYGMQSAQLKEIRAFDPERQGRWSFSSQQATLRRLDKAFAAFFRRVKSGETPGYPRFRGVNWFDTVDFPKDGDGCRWDSTPHDPVTRVRFQGIGHVKVNRHRAVVGKVKTVSVKREGRKWFVVLTAEQSRPEPLPATRAVVGIDMGIANFLADSGGEFVPNPRHARKAAAKLQAAQRALARFPRVHRDKRTGNHQRAVQRVADLHRKVRRQRLDHAHKTALTLVREHDFIAHEDLKIRNMVKAPAPKPDPDPDQPGTFPRNGAAAKAGLNKSINDAGWGVFLTILRAKAESAGREVIAVDPRNTSRRCPACGHTAKENRPTQERFHCRSCGHTAHADTVGATNVLRAGLVRRDARKG

SEQ ID NO: 4896 - protein, 218 aa, Streptacidiphilus sp.
VFYLIAVCDVPETPLNEDPAGFVGVDLGIANIATASTGYRAAGRGLNRHRKRQRDLRKTLQAKGTKSAKRLLKKRSRKEQRHAANTNHVISKTIVTTAERTGSGIALEDLTGIRNRVRHRKDQRTKLHSWSFHQLASFVEYKAKRAGVPLVYVDPAYTSQQCSQCHHIERGNRVDQATFACRACGVIMHADDNASHNIARKGATVWTAGRESRVPEPA

SEQ ID NO: 4897 - protein, 404 aa, Streptacidiphilus sp.
MIRAYKFLIRPTVGQQQALSEMLRDHCSLYNAALQERRDAYRHPSKTTVRYGQQSAQLKDIRAFDPERQGRWSFSSQQATLRRLDKAFAAFFRRIKNGDKPGYPRFRGVKWFDTVEFPKDGDGVRWDATPHDPQTRVRFQGVGHVKVNQHRPVAGKVKTVSVKREGKRWYVILTAEQEQPEPLPATGSVIGIDLGIANFLADSNGEFVPNPRHGRTAAAKLESAQQALSRFPRVRRDKRTGNHQRAVEKVAKLHGKVRRQRLDHAHKTTLTLVREHDFIAHEDLEIRNMSRSVAPKPDPETPGVFLPNGAAAKTGLNRSIMDAGWGVFLTILTSKAESAGRVVVAVDPRNTSRTCPSCGHTAKENRPTQETFHCVSCGHRAHADTVGAINVLRAGLARREAQPA

SEQ ID NO: 4898 - protein, 409 aa, Streptacidiphilus sp.
VSAATNHVKRAFKFRFYPTDAQAAELSRTFGCVRKVYNLALAARTEAWTLRQERVNYNATSAMLTAWKKTEELAYLCEVSSVPLQQTLRHLQGAFGNFWAKRAKCPTFKSRKKSRKSAEYTTSGFRYRDGRLTLAKMAEPLAIVWSRPLPEGARPSTVTVSQDSAGRWFVSMLCDDRPTMPAPVNDAVGVDAGLTALVTLSTGEKITNPKHERKDRERLAKAQRNLARKAKGDGANRAKARLKIGKVHARIADRRRDFLHKLTTRLVRENQVVVIEDLTVRNMLQNRRLSRAIADASWTELRSMLEYKADRYGREVITVDRWFPSSKLCSACGTLRGKMPLNVREWTCDCGTAHDRDVNAARNILAAGLAVAACGDGVRPQRSTPGGQSSVKQEVVPAPRTRGVSQPRG

SEQ ID NO: 4899 - protein, 378 aa, Bifidobacterium sp.
MRVENSEWYAGLKRKKINGGRIPGFKSRKRDPQYFVCWRNQTKTGNAVYHQVSRKRGVVVITGTVKKEFRKPGETGCRWRLSIHVRVSQPVRDYTSVAVNWTERTLAFTNEPSPIRRNATGRQTGIDRGCVHTLALSNGTMLDMPQPSERERRAYLRLQRKLARQDMTNSRRGGKTAKFQSKRRKLTLKRMGSIRRRINNRKDDWVAKTTTRLVEDYDLIALEALDTRQMTRKPKPKQDPDHKGRYLRNGSAAKAGLNRSILGNRWTDIQNKLEYKTRLAGTRLILVNPAYTSQTCNRCGHVAKENRESQAVFQCVNCGFKANADINAAKNILDRAIHTTGMDDAEGVEGHASRETCVSREGSVETPTPATHVGRLSE

SEQ ID NO: 4900 - protein, 480 aa, Gracilibacillus sp.
MYRTQQIRIKKGHRLYTYCDQLTFLAKNLYNATNFHIRQIFTAFGEGKNLQPLQQEVFDLIDQHLPQMNAIKRKTVEKKRQKELKKPVEQRKEIQDAVLFEFPCAQQKWPSYAFLDSLFKVSENEDYLALPGQVNQQVMRLVYQNWKAYFASLKDYQVHPHQYIGRPKIPKYAPKNGRIACIFSNQVCKVKDDKYLRFPQTKERLNIGKLGLKGPLQQVRIIPSYGEYTVELVIKKEEEKDKEFVELEEQHIMGIDLGIHGLATIVDNTGSSPVIIKGQTVKSINQYYNKQRAHYYRVLRHGQGPKEGSFQSKRLQRLDQKRFFKIKDAFHKASFQIVQLALARKVSTIVIGVNKGWKQKVSLRKQDKQHFQTLPHTMLIRMIEYKAEAYGIQVHRQEESYTSKASLVDMDELPTYEKGVPAKVRFCGRRVKRGLYRTKENTCIHADVNAAGNIIRKVVPNAFAEGIEGVVSRPLMLSIG

SEQ ID NO: 4901 - protein, 371 aa, unknown
  TnpB Polypeptide
MAPTAVHTEALSETVEKYASACDAILAVAVREKTSNKVKLQHLVYHEVRKRFGLSANLAVRAIARVAWAIKAAKRKGKAVKKFRPTSIDYDERIFAYRENEETVSLTTTRGRIHVPLALGQYQRDALRGKRPTAAKVVRRNREWYVHIVIEDDPGQRSHPICAIGVDRGVYNLAVTSEGTFHSGRKALHVREKFASRRARLQSRGTKSAKRALKRLSGRERRFMRNENHRISKAIIEEALGKNAAIKLEDLMGIRDRLKRFSPAWNRKVNAWAFRELEAMIRYKAERAGVEVVSVPAKDSSRECSKCGAIDKNSRSGAHFKCAVCGYRSAADLNAARTISGRQVSCPERAVVNRPMVASVHSCTSATSPGL

SEQ ID NO: 4902 - protein, 394 aa, unknown
  TnpB Polypeptide
MKKLLKSYKTEINPTPEQKQIINRTIGVCRYVYNFYLAHNKEIYKTEKRFVSGIDFSKWINNEFIPNNPEFHWIKEVSSKSVKQSIMNAEKAFKNFFKGKSRFPKFKKKAKSDVKMYFVKTDAKTIIQCKRHRIKIPTLGWVRLKEKGYIPTNSNTHIIKSGTVSSKAGRYFVSVLVEQKETVKSDLNDFGMGVDLGIKDFAICSSGKIYKNINKSSQIRKLEKKLKREQRSLSRKYESYKKLNKNLKGEATRQNIQKQKLKVQKLHQRLDNIRTDYINKVISELVKTKPMWISIEDLNVSGMMKNRHLSKAIAQQKFFEFRTKLLAKCSVYGIELRIVDRFYPSSKTCHNCGSVKSDLKLSDRTYHCCECGYTEDRDYNASLNLRDCQTYKIA

SEQ ID NO: 4903 - protein, 445 aa, Methanolobus sp.
MQLTLPVKIQPTPEQEPVMWDLSEKCRLVYNFGLSERKDAYKNKIKISYRKQQDDLPNLKQRFPEYNWVYSKVLQGALKCLDNDYKSFFNLRKNKDIRARTPKFKGKQYFTTMIFNQSGFEISDSDDNVIISKSMDTCIHTPGAVYSDQDKIYINFSHKHPSRIPLKFELPVDVFSNQILKDATGIKQVNLYQKDNKDFYISITYEVPIVRYNHVGSYLAIDIGVGKQAMVDSDGKFTELVNRRPDKYWEPKIQSIQSKRDHCRKHSRKWTRLNANLVRMKRKSSNQLKDNQHKITRHIVENNDVNDIIMGKLDIKQMASKKPRSSRKERSQNRGTHNSGHMGRFAQFLTYKAERLGKRVTRIDESYTSKDCCVCKSRQDIGLDVRTYICPICGNILDRDYNSSVNILLRYYEHNALWTSYQHLVGKLRQTGLWIGIIPKGMILK

SEQ ID NO: 4904 - protein, 387 aa, Methanolobus sp.
MILTKTVILKIENPDNNLVETMQRYSEGMNHASSVVFHYGKTIGSYKLQQIVYGYLRETIGLKSQMSCNIPRQVAGCYKTLKEQIKEGKVNWKEITFSPYSMTLSYKRDFSISQDSVAITTINNGRKSYKIQNYDNAQQYFDGTWKFTASKVLRHKDGNHYFHLSIEKDVPEKELEETSNYMGVDLGMNYLAVASTTEKKCNFFAGGHIKDIRNQYKSMRTRLQSKGTLSAKRMIKHLSDKEKRLMRDVNHVVSKQIIKFAIENNVSIIGLEDLKGIRENRVRKTRRNNRYHHSSWAYRQLQDFIEYKAIEAGIKIQFVDPAHTSQECNQCNHVAKNNRNRLNFACKKCGYENNADLNAAMNIEKRTRDIGYTSLSQGCLSATQTNA

SEQ ID NO: 4905 - protein, 337 aa, unknown
  TnpB Polypeptide
LRDLDRAFSNFFRRCALRAKGKLKGKVGFPRFKSRRRGLGSFRLTGSIQAEERRVKLPRLGWIRLKEEGYLPPESDSIHILHATVSERAGRWFVSLQVEEERGEPVPASGTPAGIDLGVKTLAICSNNAYSHDHHENPRALYRAARKLRGLQKKLARQQKGSNRREVTRKRIARAHMRVSCIRSDAIHKATSSIVAKAKPPELRPCVIGVEDLNVSGMMKNHCLARAVADASMREFRRQITYKCAWYGIELVVVPRFEATSKPCSRCGWLKEDLTLSDRTFRCEACGHVADRDDNAADNILALAVSSTERINGRGGDVRPLDSERRTPEKRHLKLVG

SEQ ID NO: 4906 - protein, 316 aa, unknown
  TnpB Polypeptide
VEVTTGVPEYDVLAVWLRTQNTSGRRATLWLSKIGDIPIRYHREIPDEADIKEVTVKKESTGDWFVSFGLETDEADLPEKPRLIRSMRATASALTSASRTTFTLQRRQDRGLDRPRRRVRPPPPRATEVVAEGEGVEQLREATPRSGDGQAAHPSKGAGLPAQNHDVARPRVRCCVRRGLGREGDVGAVTERARNKQDAAWRQFITLLEYKADLYGCHVVQVEAPGTTKECAKCNVETAKPIWIREHSCPSCGLECDRDANAAMNVLKRGFSELGLGWPKDTPVETALPTDTHSVSAKRVIETGSPTLNEAAPAAE

SEQ ID NO: 4907 - protein, 400 aa, unknown
  TnpB Polypeptide
MPAGGEGELTVTVRMRVSPEPEQEEAVLDLMKRHRDALNYSIRTLIASRALSLTKAHRLLYKDLKERYGLPSRVAQDCYREAIAIARSWLKNPKRGSMPTVKGLSVWLTHELGYRVKGGYVELAGGYRLRVIGWDRRYDDFPSREARLVFRDGEFTLYVFKRVPRPAKYVPKGMLAVDINERQIVVGNSRVEQRIETPVERALRYRRLAERLQVKYSSSRYRAWLRRSGVRRRIRHFRRKAKNIIEDWARKTSHMIISLAKQSQLAVAREDLTGLIESLRRLPKDHRTALIALGYRRLGFWIDWQAEKNGVPLFVVDPADTSSTCPRCGAGLVEVGYRRLRCPNCGLEGDRDTIAILNIEGRALSQMGGALTSPTAPQMTDVSPNRWGEPVNRPKGTLAL

SEQ ID NO: 4908 - protein, 763 aa, unknown
  TnpB Polypeptide
LAQLPGDRTLDLAGGDRGQLAGQPVQLGRGGQARADGVVAPHGQVPGEQLGRPCRGWGQRGGPVVAAGQARRVGQPVQPGADLQGVAAGGQQRRRQLQVAAQGRLVGADPLHLLDQQQPAGGELGRPGGQGGRRVGQVAEQEAAGQQAGGWARERDHGHVVDGELGPGWGVGGGQGHERGRLVEAQDTARAQDRDEQPGAVPGPAAEVDGELRRAGEAGAGVGQERSAGRLEHLGEQAEATRGGRGVAEGVAAHGVHVAWPGRSLEHGVRTGSSASPARGNLSLIVASSMYVSLVMRHTTFRFALDPTPAQVGMLARHAGASRFAYNQCLRLITDALEKRISDPTIALPWSGFDLINTFNAWKRSEAAGRSFVVASDGIITKQVTGLVWRHETSAQVFEEAAVDLGRALAAYEQGRVANIKGRRVGFPRRKRKGRCRESFRLRNKAGSSGAWSIRVGEGHPRSVTLPRIGTIRVHDDTRRLRRLLRPVSQHDPGTGKFVVAPRARILFATCRRHGARWYISLNIQAPDFHPQRHHPSRPADDHGGFVGVDRGLSAFAVTATATRTEVGRFAAPKPLQRSMLRLRTRSRAASHTQPRSSNHAKAVRRLSREHARIANMRHSFLQEISSQLVKTHDRLCLEDLAVANLLGNRQLARAISDAAWTELARQLGYKAVWYGAELVVCDRWFPSTRTCSQCGRVAPSMKLGERVFWCHGCGLVADRDCNAAANLAAWAEAANMAAAQAPDRRAGGRMTNASGGEGAGHR

SEQ ID NO: 4909 - protein, 373 aa, unknown
  TnpB Polypeptide
MLIAYKYRLYPNKGQQEYFAKCFGCVRFIYNRMLSDKIDYYKETKQKLNNTPAQYKKEFEWLKEVDSLALANAQMNLQTAYNNFFKRPEVGFPKFKSKKNHNYSYTTNNNPRNDGGKGSIQISDRYIKLPKIGLVRVKKHRDFDGLIKSVTVSQNHSGKYYISVLVNQEDKEKLPISNNEIGIDLGIKEFCITSDGEMIKNPTYLRQSEKKIKKLQKDFSRCEKGSKNREKCRIKVAKQHEKIVNQRKDFLHKLSTRIIRENQTIVLEDLRVKNMMSNHKLAKSIADVSWSEFVRQLEYKAKWYGREVIKIDTWYPSSQICSNCGHKDGKKALSIREWTCPVCGTHHERDINAAINILNEGLRMKTAGTVGIA

SEQ ID NO: 4910 - protein, 367 aa, unknown
  TnpB Polypeptide
MQIVSSYGVEIKKKNIPLRSTLDIFRKAVSYLIPVYAETWEELSEIRNPQKRFNEAEHLVHETKKNHARFPFDRHFPKMPSYLRRAAIQHALGAVSSYQTRLSLWEKGELRGKPKLVCENHAMPVFYRDVMYKEAEPGEDVAHLKLFDGREWKWFQVKLLHTDMEYLRKKWSGKKASAPTLERKHHKYFLRFSYTEEVSLSKTDVKEQVICSVDLGINTDAVCSIMRADGTILGRKFINFSSDKDHLYHVLGRIRRFQREHSSRQVQSRWDYAKRLNMELSRKIAAEITKYAVEYQARRYALEGILGTVQLFLQSEKHLENLKDDVCSPAGPAMIGVKTLEDRGFRSSVINAVVDAYKRFDEIGKLK

SEQ ID NO: 4911 - protein, 395 aa, unknown
  TnpB Polypeptide
MKRNYAVLLRIYPNQEQQLGINKTIGCCRFLYNHMLAERKQVFEEHKENKEEIYGWKYKTEKQYKQEYDFLKEADSVALQQSRRHLENSYNNFFKSLSGRRKGGLVGFPKFKKKKNGGSYISMNNGVIEIKDTKHIKLPKLGIVKCGINPKFFDNKDKICSVSISCSCSGKYYCSVLFEKEVKEVKKIELSEKSKVIGLDMSLTNFFVDNEGNSPAYIKIYKKHEKRLKRLQHLESRKKKNSRKRKKLRKSINFINEKISNKRKDFSHKLSTELVKNNDVIVVESLNLKAISQGLKLGKSVMDLGYSQFINQLKYKCDWYGKHFIEADKWFASSKICHKCGYKYKDLSLSERKWVCPKCGTTIERDENAAINLKNLGVAHIHKCLQSQNSSSAMK

SEQ ID NO: 4912 - protein, 510 aa, unknown
  TnpB Polypeptide
MSIPLIYQDEVAETIIVKRTQRIHIPYDESISYFCHISKNLWNQIHHIVYGYYKKYGKVPSYEEADKILNDKNYLGYKKDGKYFDEYDNYHKLGATAQQILRVYFKAWTSYLKGISDYSKNGDNKDYTGKPREPGYKKKDGEFILIFTNKQIKFKESKDGSVYMTFPKKIDYKPSRLKDLKILLGNVNSDLDNYLINRIMNGKFDIVRIVPKGTGYWIEIVYDQEIIKNAGEIYVNKGLKLSLDENKIMSIDLGVENLAAITDNIGNRPIIIKTEKLKADNQWYNKRKAELSKIYDRQILGCYLKRTKKGNIRYLVNKTGRKMDILTENRNNIVMDGLHKVSRYLINHALDIKSKTIAFVRNPGWKQKVKMGKRNNQNFVQIPHKKLIDMTRYKAEEYGIDVIDDTEEYTSKCSFPDSEDICFHIEYKGKRIHRGMFEASKGFKINADIDGSYNFLRKIADKVLKNKTKFDYVYPKFDIYDIIEGVAAHGLVPKRLSISGLITKSYQDLS

SEQ ID NO: 4913 - protein, 408 aa, unknown
  TnpB Polypeptide
MSSQIITYSYSLPHDDRFFELSKEAGEAYSISLIEFWKTYKETGKWMSKYELQAHMNGKIERKRLHSDSFIGAMQQVHANLASWKEAKKVCPDTKPPYKSKFLQPIRFKKSQIRFEDGFLKLSFGKDINGKNDYFLFRLNKELSIPSYCIISYDRAKGWKLNTVIEKEIEVISLDLNKTLSIDLGVKRVATLFDGEQVLTISGKKLKGLVHYQNKVRAKLQSDLSKKQKDSNKARKLKSAWRKRNSRLQAIKQDILHKTSRFIVDYAIKNNIGNIVIGDCSEIHDKTNLGKVNNQQVQQNPEQRIKSYVKEKFECISGQVNIVSEAYTSQTCPCCEHKYKPKNREYICSECGFIYDRDGVGAINIYNENVSFGIKPERIRLLTRPIGLKFKNSNQLLLMGNCEKSLVS

SEQ ID NO: 4914 - protein, 375 aa, unknown
  TnpB Polypeptide
MLIGETEELKKLLEMHKLVFNFASPLNFGEKRNSLMFIHTKVYGNIRKSNPEIPSQVIIKAEQECIASYISAKSNKHKLKKPIEKKNLSMRLDKRLCSKDKKDKHSIRITTPNKRKTFKFVVYPKLQELMDKYQYKDPLIYENNGKIYISFPFENKIETLKPKIALGVDVGIRRSAATSDGRIIIDKKFNGDKRKLRRLKDNLKSKGTKSSRKHLIKLKHKEHNSNKNQTHLIANEILKTNADTIVLENLKSIKVKKNKYQNKRSISQVPLYELRRVVTYKAENQGKTVLLVSPSWTSQTDCLTGKREGERRGCRFYAKSGMIYDADINAAINIAKVSKHPVSQTIRLTYGQATVNSPIVCKSLGKPRVLQAQSL

SEQ ID NO: 4915 - protein, 373 aa, unknown
  TnpB Polypeptide
VKTAYKFRLYPTKQQESQLDLTLETCRHLYNLALVDRKNVYEVEGISRTYEDQAAMLTVERKNGNFNGIYAHCLQDVLRRLDKSYKAFFRRVKAGEEPGYPRFKGKGWYKSFTYPDSETGYKIEGSKLTLSKIGSIRVFKHREVEGKIKTCTIKKDKLGHWYAILVTEIEDVPHVEPKTAIGVDVGLKNQVATSTGETIKYPRYYVRAEALLAVAQRNLSRKKKGSSNHQKAKIVVARLHQKVQNHRDEFLHQVSRKLVDSADLIVFENLNIQGMLKNHHLAKHIQDHAWGKLIQFTRSKAAKAGKVVELVEARYTSQKCSQCGIIVPKTLAERTHLCPNCGLQMDRDINASVNIRTLGLRGRAYRDTAIADR

SEQ ID NO: 4916 - protein, 378 aa, unknown
  TnpB Polypeptide
MSKNLYNYANYILRQEFTSTGRYIPYREMNRNLKTSDDYKSCMSQPANCTLRLLDKNWKSFFIAIKDWKAHKDKYLGMPKLPKYLKKDGRFIWMIPNNSCYFEDDEIKFRVRKLQNYRWKSNAKGRLIQVRFVPKGSCYVMEVVTEIELPDRELKPVKNIASIDLGVNNFATITNNIGKQPIIINGRGVKSINQFYNKQRAKLQSDLMLRNGKHWSRELDSITLKRNNRVKNFLHNASRFVANYCIENEIDTLVCGLNKCWKQECKMSKTTKQNFIEIPYDTFIAQLTYKCQEVGIRFLTTDESYTSGTSFLDGEVPCKENYNKKRRIKRGLFQSSDYLINSDVNGSLQIMRKVFPDAISYGIEGGLTPVIINVTKVA

SEQ ID NO: 4917 - protein, 398 aa, unknown
  TnpB Polypeptide
MNPKKTIGSDYYFGSSNDIAGLGREIRNNDPFISHYLKTGICNAVSMKFAASWKVLRSQKTKNNAPAKMGFPRFPNTIPSHVEATEFVVNKEDHKESIAKFQGQKFKVWLPNKEFDRKQKSVLDNPLHGFSLVRRRIRGHYSWYASIIVEGKPNFELIPIKEGVAGIDVGTRHIAISDSSGHDEINLFDNLISKKIKELERAKRIIGRARDRSLRQANPKAYDEKGCYIVGVKLVKTNNFWRLNRKQKEKERQLCQMRKHYQGKITSDILRRGNSIIKMEDVSTKSWQEEHGKAVGNFAPGRFMLELERKAKNLNVGIEWINTYKTKLSQTCVCGNHIGKAPLSVRIRTCEKCGRVFDRDIMSSFLIRFVIKTVDKNKKETYHLDIERALAEFQANPF

SEQ ID NO: 4918 - protein, 546 aa, Streptomyces sp.
VGGLREVAASFVVPGPAGVAVRARLRLSDADVAVLCEVGVFLGGLATGDLAVRSRQRLEHDGGSWAVRKRELTGASSARWAGSITKATYDQWALARRGQARELVWLRGQIASVEARLARPLGAKADRKAGLARGYGSRAEWHAKSRRLHLLRDRLARVEADWAAGRVHVVRDGKQLARLRHHLDEAGLDAVAWRQRWEAARLFLAADGESGKRFGNETIRVTGTGQVSIRLPAALTHLANAPHGRYQLDAIAEFRHRGEEWADRITANRAVAYRIHPDPVRGRWYVTASWQRTPIPVLPLETALSRGVVAVDMNDDHLAAWHLDVHGNPVGEPRRFFYGLSGNAAHRDAQIRHALTRLLHHTRRCGAGAIAIEDLDFSDGTSREKHGRNKRFRRLISRFPTAKLKARLVSMAAEQDIALVAVDPAYTSRWGAQHWQQPLTTETRRTTRHDAAAVAIGRRALGHPIRRRTAPPRTRQSDGRGPRTAQAGPGTRRREGPRPRIPGPRTRSAGAGRGAKAGDQHARHRSGHAAEHGSWHQAKAPLPLSP

SEQ ID NO: 4919 - protein, 516 aa, Bacillus sp.
MYKRLSNTLKIRKSVTKREVKPMARKSTPSYIIEFPLNIPDWQKHRLEKRFKIARAVYNSCLGEALKRHKRVKADKEYRGLLKESKTNDRDKRLSDIRLAYSFSEYGLHDFVKAVQHKFKENIGSFEAQKLATRAFKAVEKLHFGKARKVHFKKLDDTISVENKSNKTGLRYAEGNILWGNKPTKKRPNPKNWVCMPISPKANDEYAHLGLMDKTKYVRILKREVRGKVRYFVQLIQEGYPPTKRNRKSANDETKRVGIDIGSSTIAVCSETSVELRELAPECNVDHSKVRRIQRAMDRSKRTTNNDNFKKDGTIKKGRLQWNYSNQYKKLRTIRKELYRKIAVQRKISHEKLANDILALGSDVRVETMRFQSLQKRTKKTTHNKKNGKINLKKRFGKSIANHAPAMLLTIIDRKLGYQGRSIKKIDTYATKASQFKHITGEYTKKQLSGRWNDFGTFRIQRDLYSAFLIGNTTETLNSVDVDLCSAGWNNFVKLHNHEIERLKQSPSKTLRWFVA

SEQ ID NO: 4920 - protein, 747 aa, unknown
  TnpB Polypeptide
LHEHVTRSIDVAQRKTQALDTRATGTPTKSFSGDTLAPRPLSFRPRGQVGVWHVSARRFKRLVPSISVVVATSCGRCMGVCVREESVLKSVCRGMAPDPGPRAYTVSCSLAKAVVDPAHLASILDAVARVHTCTYHATDLLNLYVRDRLEHHGGTGLDGIFTQNWLLGAYNAVSVAKGRGAKVDAGVQAVFDAHMRGTFAPPMRAGLTQALTYECINLAAVGSTNVWKHFQKRVLAYTRTAFALDEEQYAALSKDACRARKLALLQAANDVCRPPDEPKRSPDAYHAWVDATRAALGIDAAVGDWKGKPLLWHLKAKPHRFLKATHAMSLAQHAAGRKAFALFPLRRAHVPRHVRFDKKVLDSLLGLGEEYAVGKAKKAAGPDLNAPAGRAPKRKRDDPSLLQEKAIVFDRVLDLKRAGVHRRRHFAFAFTTDGVSLHLNMEQPPIAAAPPPPPPRLPRRGVHSIDALKAAARAADDLHVIGIDPGKRELVVCVDADNPKKAPVVRYTLAQRCHDLRTRQYADEAKRGKPAAVTDAEEELSAFHSKAPSLDEYARFSAKRRALLREREEIVDFYADLAFRERRRKTKIKAQQSEARLVARLRGMHAADDPRQLVLAYGAWGLVAGRPNMPGNKGHPPAIGVGLMKRLARDFVVALTPEHYTSKTCVKCSGPCGAHPTLKTKTNKEIRGLRVCQHEGCGLLQNRDRMGATNIGFQFARLVRGQPPLRPMSNEELEFHRLQMCAECDGD

SEQ ID NO: 4921 - protein, 368 aa, unknown
  TnpB Polypeptide
MKSQKIIKCKITYLTNIKAQQLETEHHNLQNLLQLEREGLDFLPIYQNIPLHSANKQQALRFYKRISTDKIYAISIRNDIIKVELKPNNKISKYWCKIPVKQRYGGIWVAIKPHKKDIDFSQYKLGESKLFKKKNEWWIYITIIREVQIKDSYSNILGIDLGSKVIATVCGSFYNQRPTFYGREVRGIRRHYQYIRTELGKKKLLKKIKQLSDKEHRIVNDLLHKISKQIVEKAEQTDSYIVLGDLKGIRNSTKNKGRNFRRIVSNMPYLKLTQFIEYKAKEKGIKIIRISEKGTSKICSKCGYEDKGNRKSQGLFKCKQCGFELNADANGARNILKFSDGYTLPERAMSELALNSNQLEKPTCFSGG

SEQ ID NO: 4922 - protein, 369 aa, unknown
  TnpB Polypeptide
LALGGQRHLVRGNRSGADRAEEGPGPGVPERGVVRAPAAGAAPPAQSVFRVLRRACPVSQVQVPPLPPVRPLHPLGVPHERRRSVAGQDGRPAAVRVVLARHGRGGTRPHDGDCLQGAGWPLVCDVHDRRRLPRTAAADRACRRRRPGREGLRRDQRRAADAESRHLERKARNLARYQRRLARCQDGSANRAKAKAKVARAHRKVRNARGDYLHRASARLVRENDVIVIEDLAVKNIVRNRRLARAISDCGWGEFRRQLEYKCQRRGRELVVINRWYPSSKICSACRHLLAELPLSLRHWTCPGCGTRHDRDINAAKNILAAGLAVARDCPGDACRADVRHSGTSRVQSAVKQEPRPARAGIPALSGRE

SEQ ID NO: 4923 - protein, 428 aa, unknown
  TnpB Polypeptide
MPVQLHGLRFRLSPNGEQTKRLSRWAGCCRWVFNAALALRESLYQTTGKAPNYAALCKQLTAWKQETPWLREPPAMVLQQAIKDLDDGYKRFFSGQNRRPGFRARHRWQSSFRIPQHGGLLRVEPLSRSVGRLNLPKLGWIRFRWSRPVVGDIRSVTLSQDRCGDWWVAILVKTVGADVAEPASMDAEHVRGLDLGVAQSVTLDSGPSIQLPTPTKGDLKHAAKLARRVSRKQKGSKNRAKAQNKLNRTRRRWRRQLRDAQHKLSTTLIRENQAIIVEDLDVQQMTRRATGKRVRQKSGLTRSILSQNWGSFRAMLEWKARAAGVIVERVNPAYTSQRCSSCGLVDADSRRSQAVFQCTACGHKENADTNAAKNIRAAGLSSVKARGVLIRPERSNLPRQGTTKRVLIGGLLTCLSDTDVAGPGIPAF

SEQ ID NO: 4924 - protein, 370 aa, Erysipelotrichaceae sp.
MNRAIKYRIYPTEEQKVLFAKTFGCCRKIWNLMLADREAAYKQHKAVIKPTPAMYKDAYPYLREVDSLALANVQLNLQAAYRRFFTVKGAGRPVFKSRKKTQRSYTTNNQNGTVSLDIENGTIRLPKAGHVKAVLHRLPKEHWKLKSATISQERDGTYYCSVLFEYEQDVVPVEHPEQNAIGLDYKSDGKFADSDGNVCGSPKFFRKSQERLAKAQRKLRHKDKQSNNYRKAVLRIAKVHRKAANQRKDFLHKKSLEIANQRDLVCVESLNMRSLSNKGFHNGKATMDNGYGMFVDMLEYKLADRGKVLVRIDKWYPSSQLCSCCGTVHPEIKDLKIRKWTCPDCGAEHDRDHNAAINIRNEGIRQYLVG

SEQ ID NO: 4925 - protein, 232 aa, Streptomyces sp.
VILACDEVPAEPLPATGSIVGIDMGVRQFFTTSDGEHVAHPRFFQVMAGELAEAQRHLATFPKRTRRRTKKHRAAARKVATIHAKIRRQRLDHHHKRANELIRDHDVIAHKKLNTAGMTKSPEAKADPETPGGFLPNGAAAKAGLNRSILDAGWGLFFGILAQKAESAARRVIPVDARNTSRTCPTCGHVAKENRLTQTKFECTACGFTANADHVGAMNILSRAGLALCHVA

SEQ ID NO: 4926 - protein, 402 aa, Escherichia sp.
VKRLQAFKFQLRPGGQQECEMRRFAGACRFVFNRALALQNENHEAGNKYIPYGKMASWLVEWKNATETQWLKDSPSQPLQQSLKDLERAYKNFFRKRAAFPRFKKRGQNDAFRYPQGVKLDQENSRIFLPKLGWMRYRNSRQVTGVVKNVTVSQSCGKWYISIQTESEVSTPDHPSASMVGLDAGVAKLATLSDGTVFEPVNSFQKNQKTLARLQRQLSRKVKFSNNWQKQKRKIQRLHSCIANIRRDYLHKVTTTVSKNHAMIVIEDLKVSNMSKSAAGTVSQPGRNVRAKSGLNRSILDQGWYEMRRQLEYKQLWGGGQVLAVPPAYTSQRCACCGHTAKENRLSQSKFRCQACGYTANADVNGARNILAAGHAVLACGEMVQSGRSLKQEPTEMIQVTA

SEQ ID NO: 4927 - protein, 353 aa, Aphanizomenon sp.
VYTVACPRLAQRAEGWEGGFQSLSPLRGEVWRGVCLYIKKFFKHPLREFIQSSTKDVIVLSLVAILYAIIKTGRKETKNMKTSYQYRLKPTKEQAEKIDKILDMLRCQYNYQLAQRFHWYEANRSPVDRCSIFVCHLPELKDKPNRFSQQASLTQLKEDRPWYKNIHSQVLQEVPKKVELAFDRWLKGDSNGKKSGRPRFKGVGQYKTFAFPQFKQHHFANNKITLSKIGDVKVIVHHQIPDGFEIKTVSVTKKADGYYVTLSLDDKTVPTIKPDFNANNIIGIDVGLIDFIVTSDDERIAAPKFLRKAERKLKSAQRRVSRRNKNSNGRKKAIKKTGDSTQKSIRYPQRFSL

SEQ ID NO: 4928 - protein, 312 aa, unknown
  TnpB Polypeptide
MKQGVKDADTAFIKYFQGLSGKPKLKSKHKSKISFYVNYESIVRKQGGFQGEKLVFVKTCSPLPKLPKGKKYSNPRISYDGKYWYISVGYEVAERNEELTDESLGIDLGIKDLAICSNGKKYKNINKIKEVKRLEKKLCREQRKLSRKITANIKAYKVVGKKRYPIWIRPLKECKNIQKQNQVIRLLNKRLTDIRNNYLHQTTAEIVKTKPSRIVMENLNVRGMMKNKHLAKSIAQQKFFEFKRQIKYKSKLIGIPVIEVDKFYPSSKMCSCCGNVKKELKLSDRIYKCSICGLVIDRDYNASINLANYKLV

SEQ ID NO: 4929 - protein, 382 aa, unknown
  TnpB Polypeptide
MELRMYQYRLYPSQKQEKRLFNTFNICKNIYNELLELSISVYKENNITLGRYDFNKLLTGLYPEVFSQVKQDVSNRVYKAFQNFFRRVKDPSCKKNGFPRFKSSVNSITYPQSGHHGGFKFSSDKRLYASKIGNIPIVLHRIPKGKVKTLTIKRNRVGQWFAIFACEVDIKPVKNTSKKEIGIDVGIESFATTSDGVFVANPRYLVKAEKRLKLLSRRLSRKKKGSKNRRKARHLLAKQHLKVSNQRLDFLHKLSHELTKDNKTIAVENLNIKGMLHNHHLAKHISDASWNAFVNMLEYKAVTSGSTLIKVNPRNTSKTCSNCGAIADMPLKQRGYRCVVCGFVCHRDLNASINILKIGQDLPESNACGHDVRPSSFEGCRG

SEQ ID NO: 4930 - protein, 240 aa, Blautia sp.
  misc_feature (151)..(151): Xaa can be any naturally occurring amino acid
MVKAIKVMLIPNNVQKTKLFQYAGASRFAYNWALAREIENYEKGGKFISDAELRKEFTKLRRSDEYAWLLSISNNVTKQAIKDACTAYKNFFKGLQKFPRFKSKKRSMPKFYQDNVKIRFSNTHVKFEGFSSSRKANKQKMNWVRLAEHGXVVVLYKDRLLRFGFELIEYIASLYNCEIEIIDNTEKSEQQELVEDLVQIITVFSCKLQGKRANKAKKLIRELIQEEADGKSHKSNVDTK

SEQ ID NO: 4931 - protein, 443 aa, Blautia sp.
  misc_feature (299)..(317): Xaa can be any naturally occurring amino acid
MVKAIKVMLIPNNVQKTKLFQYAGASRFAYNWALAREIENYEKGGKFISDAELRKEFTKLRHSDEYAWLLNISNNVTKQAIKDACTAYKNFFRGLQKFPRFKSKKRSMPKFYQDNVKIRFSNTHVKFEGFSSSRKANKQKMNWVRLAEHGRIPTDAKYMNPRISFDGLNWWISVCVEFPDCREILNDDGVGIDLGIKDLAICSDGTKYKNINKSQKVKKLEKQKRRLQRSISRSYEKNKKGESYCKTNNVIKKEKLLLKRDHRLTNIRKNYLNQTISEIINRKPRFICIEDLNVSGMMXXXXXXXXXXXXXXXXXXXHRLTNIRKNYLNQTISEIINRKPRFICIEDLNVSGMMKNRHLSKAVQEQGFFGFRKQLEYKCSDKGIQLIVADRFYPSSKLCSCCGNIKKDLKLSDRVYRCECGNMIDRDFQASINLKTYGEQFAS

SEQ ID NO: 4932 - protein, 440 aa, unknown
  TnpB Polypeptide
MLEVHRTHQAKILNHSQVEEPLDRHGWSASKLWNVANFHSREVWEDTGEIPDHGDLKDELKTHSKYKGLHSQSSQRVLEELAEAFNSWYEKRKVDSRANPPGYRKKNYYDSDGRRVHEEHPRSTVTWKQNGIKHDATNNRIRLSKGANHKEHPKAWEYILVEYETRPGVIVENLQQVRAVYDKAKGRWELHLVCKDETETPTAPGEETAGIDLGICNFAAVAYSTEEADLYPGNRLKQDGYYFPKEIAKCDDSGGQEATRLHAKWAERRTHFFHSLAKHIVQRCIENGVGSINIGKLAGVREDDNSESKNWGNHGNLDLHGWAFDRFSNILEYKAKVEGIEVVEVSERNTSKTCCVCGREDESQRVERGLYVCEEHDDAFNADVNGAENIRLDINNTSNSESAPDLGGDRSTGWLAQPGVYLHDLSRGFQPRVEVVDCKP

SEQ ID NO: 4933 - protein, 324 aa, unknown
  TnpB Polypeptide
MNAGKVLTNNCPEWAEDVPYQVKKLAVSEFHTALITNKKLVVKKKRTSFEMKFKSRRAPTQCFDVVASAISTKGIYPTKLGKPHYTEDFPEGEVRDSKFILENGRYYLCLVYKTTITRVENQARRVVALDPGVRTFMTGFAEGEAFKIGEQAFARIARLCYYLDRLMSKMSKVTAAKRYRMRKAANRIRWKLNDLTDELHWKTIRFLIDNYDLILSPSFETSQMSSRLKRRLSKKSVRNMLSLKHFQFKMRLKNKCQTEGVAFMEVCEAYTSKTASWTGEIKHNLGSAKTIISNGLTLDRDINGARGIFLRALVDTPSLKYQCA

SEQ ID NO: 4934 - protein, 392 aa, unknown
  TnpB Polypeptide
MRQAFVYRLYPSRTQERTMEAILTTTRIFYNSLLAERKQAWEERKERVTKVQQLRRVKERKATNPYAASVHSHILQIVADDLDKAFLAFFRRVRTGEKPGYPRFRGANRWTSFGLKELGNGFKIDGRRLKVSGVGRIPVRWHRPIEGDIKTVRISKKAGTWYDAFSCVAPDKDPLPATNRSIGIDVGLTHLLTASDGETVENPRWYRAEQATLRVVQRRIARRKKGGNNRKKAVAQVQRQYERITNRRKDYLNKLVADLVGSHDLIAIEDLRITHMARNRHLATSIIDAGWGYLADHLARKAACAGRWALTWRGCPRAWPKKPCRCNGCGVSHGPFSVGINGAPAAARGECPSARCCAWPRWAVSSGRTSVCMRTHSDIRQVRKASSARCAR

SEQ ID NO: 4935 - protein, 391 aa, unknown
  TnpB Polypeptide
MAAMPETPIPNVIRTLRFKLRREGVAWLEAAAVEVNQVWNWANEVSYKAARPYSGPSRWLSGFDLDKLSTGATKCFEHVGADTIQKVDAEFARRRRQFRKAKLRWRVSRGSRRSLGWVPFKAASIRRNGRALRFCGKTLRVFEADRFLGIDRWRDGCFCQDAVGDWWLCLPAPVVIEDIPAAEVDVGIDLGLHATATTSDGAVLDAGRAYRDLEQKIATAQRRGHKRHAKRLHRKASRRRAFALHRFSRKMANTYQMIVVGDVSSPKLARTRMAMAILDSGWGLLRMQLQYKGESAGRCVRIVSERNTSRTCSACGALSGPAGVNGLRVRLWVCGECGCAHDRDVNAAKNILAAGRCSPSVCGNESSPRHAPPSRTPRPRKARKARDGAAA

SEQ ID NO: 4936 - protein, 412 aa, unknown
  TnpB Polypeptide
MDRVVRLRVKADYNTYSALKEVEEEYKAILENAVNYGFESGAKSFIRVKAGIYGAEREKHKDLPSHYIYTACEDASERLKSFQKLRRMGRNYTDKPEIRRITVHLDDHLWRFSLSWVEISTKRGRVRLSPMFPKIFWRHYNDGWRMASEARFGLLKGNVVELYIIFKRDEPKPYEPEGLIPVDLNEDSVSVLIGNTPVLLETNTKRITLGYEYRREGIMRGKSTRDRDVRRKLRRLREGNKKLDVRRKLAKLIVKEALETGSAVVLENLPKRAPEHMVRNIRDPQLRLRIYRAAFASMKRTIIEKAGEYGVPVILVNPAFTSSKCPIHGAMINYRPDGGNAPRVGRCPVGGELWHRDVVSLYNLRKRAGGGSLVPLGSTGTHDPPIIGLGRWLRSKSLRSIVNEYKMSEMRA

SEQ ID NO: 4937 - protein, 338 aa, unknown
  TnpB Polypeptide
VPTLSECCIQANANVAKLEEATDSTFDYWLKVSTLDKGNPLLLPVKLADYHIEALTDPETGKRRKINSSVTLNRREDAWWLTLTYDETVIVQIEPDAPVIGIDVGIANFITTSDGKQYGTFNGKLRERQKRDREKRRRKAKLRKCLEKKGVPKEKLPSTTSRTGQRLIRHIRQEINRAVNQCFEEHEGCQFVYEQLSVSSMRFKARAMNAYMRASNLAHIPDQIAWNATKRGVQATRVKSAYSSQECHVCHYVDRKNRPNQQTFCCRVCGYTAHADMNASQNIASRWGDVELRACQNRQEVKALLLRRHEQWKQHLGLVVVQPAVQLSLWDSHKLQRT

SEQ ID NO: 4938 - protein, 435 aa, Vulcanisaeta sp.
VARTVIVRSTSLPRKVFNVFVELEGMYRNMVEQLTMFAVRNDVKSFTKLKALKYREMRNLYPQLPSHYVYTACQDASTRARSFLKLKKHGLAEKEYPEVRSVSIWLDDHLWKPNGLTYIAVVTHKGWVTIEIEPHKQYWRYINGGWRLASEAKIKLDRRDRRVIIYLTFVKEVEEYKPSGYLPVDVNENNVAVLIDGVAHLFETNTEKLVLGYYYRRKRIQERYDKLYGGVTSRIKRRIMGGRLKERKRKDDVRWKIANIIVRFAHEKRYAIILEKLGKKPASNMIKRIGGDKQLRHRIFQASFRGVQKAIEEKAKEYGVPIIYVDPKNTSRLCPIHSAVIVYSNSSRVGKCSKGGELWHRDAVACWNLLLRARLGDGSNAPSLGGSSVDGSPPVPLGSTATHDPPITLPKGLWARWKSLEVTPPNNHKMPRTTL

SEQ ID NO: 4939 - protein, 404 aa, Micromonospora sp.
MRTAYKCRAYPTPEQAAVLNRTFGRVRVVWNRTLAARTGRWRTTREGTSYAETDRALTGMKKQPETAFLGEVSSVPLQQTLRHQHAAMTAFLAKRARYPRFKCRHGRQSASFTRSAFRLRDGNMYLAKTPGALRFVWSWPGIDPAGLDPTMVTVSRDPDGRWYVALAVDIDVDTSTAPEPTGQVVGVDLGLTDFAVLSTGERIPHPRHMERRERRLKRYQRMVARRQRGSANRAKARRKVARAHSRVRDARRDFLHQTSTALVRRFDAIAVEDLAVANMVRNRSLAKAISRTGWAEFREMLAYKTQRAGRHLAVIDRWYPSSKTCSTCGHVLATLSLGIRHWRCPSCGTRHDRDVNAAQNIAVAAGLVETINACGADVRHEGPPSVRSAVNQETPPARVRISRL

SEQ ID NO: 4940 - protein, 446 aa, Micromonospora sp.
MRTAYRCRAYPTPEQAAVLNRTFGCVRVVWNRTLAARTTRWRTDRMSTSYAETDRALTGMKKQSDLAFLGEVSSVPLQQTLRHQHAAMTAFFAKRARYPRYKSRHGRQSASYTRSAFRLRDGRLSLGKTPGTLAFVWSRPDIDPAELNPTMVTVSRDPDGRWYVTLAVDIDTPALPEPTGQVVGVDLGLTDFAVLSTGERIPHPKHMERRERRLKRYQRMMARRQKGSANRATAKRKVARAHSRVRDARRDFLHQTSTALVRRFDAIAVEDLAVANMVRNRCLAKAISRTGWAEFRHMLTYKTQRAGRHLAVVDRWYPSSKTCSTCGHLLATLSSPSPPGWRRHETPAERTSDAEVLLPCGPRSTRKPHSRGWKSPDFKRGKKPSFRSGPRHTRASFQTAWRVVDRPRSSSCSARSTRSRSGNRASIRTPHCSPSRSPNCPTGTNP

SEQ ID NO: 4941 - protein, 401 aa, unknown
  TnpB Polypeptide
MTKEINRVRTLRFRLHPTVRQTKALGAQLNYQRELYNAALEERIGDWRWEKRSVCYFDQCKTLTSLYEVRPEVVSSGIVLCRGTLKRLDRAYAAFFRRVKSGENPGFPRFKSASHFDSLEWDDNSGWKIKYEAGRLYLLGIGDVKANYHRQLIGVPKAITVKREGSKWWLSVRCIDVPAMPLASTGREVGIDLGITNIVATSDGRQIPGENFGSKSRSKLAVAQQKLATMQQGSARRRRQVEVVAQLHRKIANQRNNAAHELSRELVNSYDLIVLEDLVVTNMVRAPKAKPDPEQPGAYLPNGSAAKAGLNRFIHDAAWGNLASLLLYKAESAGRVLVTINPRYTSQKCAECGHVEAANRVTQAEFRCCSCGHVDHADVNAARNILRAGRVRQASACVSRN

SEQ ID NO: 4942 - protein, 506 aa, Scytonema sp.
LTAKTPSFITEIPLRTTSKDMAVLAARLEAGRQLYNAVLSEGLTRLELVRNSELYNQAKLVPKTNKKERDTAFKKAREAYRFSDYDLQYFANAIAIASVWIKSNLDAQTIQKIATRAFKTLERLIYGKANKARFKQKGQFASLEGKTNKQGIRWTGSSVEWLGLKLSGIIDSNDPVLLHGLNSRIKYVRLVRRIINQKTYWYAQLVCEGLAYQKPKNVIGDGIVGIDLGVSTVAIVGDNQTIWQPFAEELTSKQKKIRRLQRKMDRQRRANNPDNFNPNGTVKKGVKRWHTSKRYKKTANKKREIDRKQAGHRKSLHGQLVNQTLALGKTVKTEKVNVKAWQQIYGKSIGFKAPSSFQSELVRKAESAGGTVLKFSTRKTALSQTCLCGNRQKKSLSQRVHNCSECGLRMQRDIFSAYLSRYVDPKTETLSIPSARNGWLGMEQSLLDGWRSGSNQSARTATSSKSPINNGSELMSSNPIAREESEPVRANETCYASWNLMPLGMG

SEQ ID NO: 4943 - protein, 505 aa, Scytonema sp.
MAKSKTPSFVTTIPLLVDSKRESELLARFQASRQLYNACLNEAMTRMELVKKSDVYQAAKKLPIELHKQRSTMFSEARKLYRYSDYDLQAYATLVSNKSKWIAEKLDSNTQQTIATRAFRASEKILFGLAKKVRFKTSNRFRSVEGKSNKQGLRWKDGQLVWGKLKLNPMIDESNPVIHHGLNSPVKYVRLLWKEINGKCRWFVQLINEGVPYQKPQNYVSEGIVGLDLNISNIAFVGDNHAGLLPFADKVPNFQKEITRLQRKMQRSQRANNSDNYEPDFLAKKGRKTVVKKGKFKKGSRKWNKSKTYKKTAQKKRELEKRKNAYTKSQNCKIVNEILRHGNIIKAEKVSVKGWQKRYGKAISAKSPGFVQSELKRKAENAGGQFITFSTQKTALSQTHLDGSRIKKSLSQRVHRDVTGIVMHRDIFSAFLSRYINEDDTLSLQDAQCEYPRLEQTLWLAWQQYQTNCEQVGESESRLTHSSLEQFNHEGKSVNQIAIRREKLA

SEQ ID NO: 4944 - protein, 399 aa, Streptomyces sp.
VATVHVKRAFKYRFYPTDAQAAELYRTFGCVRKVYNLALAARTEAWTRRERLNYNATSAMLTAWKKTEELAYLNEVSSVPLQQALRHLQTAFANFFGRQAKYPRYKSRKRSRKSAEYTTSAFRFRDGGLTLAKMAQPLDIVWSRPLPEGASPSTVTVSQDAAGRWFVSLLCEDPTVQPLPATDAAIGVDMGLDHLLTLSTGEKVANPRHERRDRARLARAQRQLARKAEGDGANRAKARRKVAKVYARIADRRRDHLHKLTTRLVRENQTIVIEDLAVRNMVKNGSLARAISDAAWSEFRNMLEYKARWYGREVIAVDRFFPSSKLCSACGRLRDRLPLNVRTWTCGGCGTTHDRDVNAANNTLAVGLTASVCGAGVRPQRSTPVGQLATKQKSPRRDP

SEQ ID NO: 4945 - protein, 551 aa, unknown
  TnpB Polypeptide
MKKTYFSNRIYKKDNFDISQVCLISNALIKFNQAKHKAYKLFLTEKNYKVKYDSSIHLQIKELFGFNDYWANSVVKEAKAQISSQKELQKMYTAGVENQIKTKKKRVKELNSKIKHLEELLALIIKGKFKTWRGSNITKRKSGIISVDFRKKSLVFFNVYDFEHQYLLPEIKKSKNRVKLIEFSLTRLEGKLARLQDNFLKGCVFGTKDLFKKQFTLEEYQEDHEAWLEEWVKARYSSLRISGRMDAKHGNFVFKYDVRTNILTFDLPDETTVNIPAIFRYGQEEIDTAFIFQNERRKPIAWTIEDHGDYYIFKITVDLPNNPYVNYYKGSGVIGVDMNFDHAALAEINHCGNLIDWSNIDYDIEKKTSGQINKILEQSAIDVVNIAKIKKKPIVIEDLDTTDSKFKLQYGSKKRNRKISLFAYRILTNAIYARANKEGVYVFKIKPAFTSIIGKLKYMAQKGISIHTAAAYTIARRGMRYKEKVPPVLSVFLPEKIRRRHHWAHWNYLQRQVKNIKIHYLYQLGKKIKSSESVNSLKVVLENSKVLLHVG

SEQ ID NO: 4946 - protein, 512 aa, unknown
  TnpB Polypeptide
MSSVTRTYSLRPFACFDKKTSAGIDLHNILEEVRADAELCAAEALKHITHKNLEQVSEYDGLKPAEAGRQIGIKLPPGKSVTGRSRFEKMVQEYAVTMLRAWHERTTSRNNKDDKYVSAGYQRTNNSNKPAFLKPHLALSATDKNYHTVKLNNLIVELDMVVNKRWVTFKFKAPKRFLEPGSKIIAPTISIDERDRVMFNWYIDVPVERTPFSDKYVVGVDVGITNHTTAIVRNIKTGKVVEASFMNRHIRSLENKIHRAKTQIAALHRKGRANEVEPHREALSNRRKELSILIGQEVADLSWRYDNALVAIEDLSHITNTMKYGRWVRGLIIKRITDMVESNGGRVMKVNPAYTSQLCHKCNTKLDVSVYHTPTCHVCQVGWDRDENAAANIAARLKDKHKKACTTRKKHSSKTRWRNSKDTTRPLKHPLKKTVPTPKAPQNQPKTNHTTHHKHVVIKHREGGVFPILCAAGWSLRDRNVRVPAVAHVSGSDKKPHDYPNNKHRFGVLCLS

SEQ ID NO: 4947 - protein, 428 aa, Streptosporangium sp.
VGDVDPAPQLVAEFSNTHTFRHSTYGTIGTMQLRYQYRLHPDAAQHEALARAFGCARTVFNDGLRARQDAREAGLPYIVDGELSKRVITEAKKTPERAWLGEVSAVVLQQALADLNTAYRNFFASVAGKRKGPKAAPPRFRSRKDNRQAIRFTKNARFAIMPGGKLRLPKIGDVEVRWSRALPAEPSSVTVVKDAAGRYFASFVVEVAEQSLPPADAEVGIDLGLAHFAVTSEGWKIDSPRFLRRAEKKLKKLQRALSRKEKGSNNRAKARRKVARQHAKVTDTRHEFHHQLSTQIIRDNQAVHVEDLAVVGLARTKLAKSVHDAGWSQFIAMLEYKAKLYGRTFHRIDRWFPSSKLCSECGALQESMPLNVRSWICACGAAHDRDVNAAINILAAGRADRRNACGGPVRPPLAVAQPSEAGSHRGAA

SEQ ID NO: 4948 - protein, 310 aa, Streptosporangium sp.
VRLRYRYRLYPTPAQREALAKAFGCARVVFNDGLRARQVAREAGLPYVSDGELSKRVITAAKKTPQRSWLGEVSAVVLQQASADLNAAYRAFFAPVTGKRKGPKVAAPRFRSKKDNRQAIRFTRNARFAVTVGGRLSLPKIGDVDVRWSRDLPSEPSSVTVIQDAAGRYFAHKLSASIIRDNQAVHVENLSVRGLARTKLARSVHDAGWSQFVGMLEYKAKRYGRTLVKIDRWFPSSKRCSACGAVAETMPLSVRSWICACGVAHDRDVNAAINILVAGRADRRNACGDPVRPPIVVAQVDEAGSRRGAA

SEQ ID NO: 4949 - protein, 399 aa, Streptosporangium sp.
VSRYRLQPTPAQEAALAGHCRHARYVWNLAVEQHSFWWLGRGGAPGFAAQCRRLTEARAVYPWLAEGSIVVQQQALKDFAQARANFFGGTHKRPTWRKRDRNEGFRIVAVKAEDVRRLSRHVGEVRVPKVGWVRFRWSRPVPAGVKSYRITRDAAGRRHVAFAAIPRPIPAPGNGEVVGVDRGVVVSAALSTGELLTVAPLRQTEQKRLVRLERRLARAKPGSARRAKAKAALARLKARRKDRRKDWVEKTSTDLARRFDVIAVEDLKIAAMTRSARGTAEKPGRGVRQKAGLNRGILANGWGLLVTRLEDKAPGRVIRVDPAFTGRRCSACGFVDRRARESQARFRCRSCAHAGHAGHADVNAARNIAHAAGHAVAAREGPRVTGPVHREPQPALLIA

SEQ ID NO: 4950 - protein, 368 aa, Streptosporangium sp.
MAQMVKRAYKYRFHPTPGQAAELARTFGCVRYVYNKALDHRTRAYRQEGRKVSYAETSARLTEWKRSEGLEFLSEVSSVPLQQALRHLQAGFANFFARRARYPTFRSRKKARASAEYTRSAFRRRDGALTPAKMDAPLDIVWSRPLPDGVEPSTVTVSRDAAGRWFVSLLVEEKITPLAPVEASVGVDAGITALAVLSTGEKIVNPRHERADRRRLAKAQRALARTAKGSANRAKARRKVARVHARISDRRTDFLHKLTTRLVRENQTVVIEDLTVRTLVKNHSLARAISDASWRRMRTMLEYKTAWYGRELVVVDRFFPSSRLCSVCGIVQSTMPLSVRTWECACGATHDRDVNAAANILAAGPAER

SEQ ID NO: 4951 - protein, 501 aa, Arthrobacter sp.
MSRVTRKFKVSVVPNQAKIDQLKGMAVAVQSLRSDVWSILRQRDMAAVSMYDFRTVMTERGLTPGHYGLQQRIWRQNVETAFREVRLWQEAAKQQYGLKRKIFRRAAGNKAEERRLFTVLKVGDWLSDPWLHKHTRKAFRAKPKPSRQKLRLSFDSASYNTKRDSEGRLWLSLMGAANRQRIKLCFGRVPEKLTPCGEIQVFFHAENDIQIHTGFDEFHACAGDAIPEPGRKVSTHTRRAERESLSAKAPAAPVDRATTNKPYRILGIDAGRTEAFIDSHGTVYGHGLGQLCEEHDAKTKGKRASRSKLREQAKALRKQAEVARRAGNPEKARRLTRKADNIYAHNLSTGRQTAARSRHRARVRDLIFRAVHEIAAVTNCIAAEKFSQNFSYDRSRKQNRLNSGWMRSIVAEALDAAARRRGSSVIHVNPAYTSQQVRRCGHLGKRTNGSVYCTEGSCPEFRVKYHDDMDAAGSIEDRAADPHITLSMTPKQVREVILSRY

SEQ ID NO: 4952 - protein, 154 aa, Bacillus sp.
IRRNPSGTYFVFILAETKVQPVEKTGSSVGVHVGLKDFAILSDETTYTNPKSFRTLEEKLAKAQRILSRRTKGSSNWNKQRVKVAKIHEHITNTRTDYLHKLSTEIIKNHDVISMEDLQISYMFKNRKLAKAISEVSWSQFRNMLEYKAKWYRK

SEQ ID NO: 4953 - protein, 409 aa, Proteobacteria sp.
MHAAHRIEIDPNNKQKTYFRKAAGTARFSYNWALCEWKKDYESGLKPTDGKLRKKLNAIKKSDFPWMSDVTKNAPQEAIRDLGQAFKNFFQGQTAYPKPRKKGIDDKFSMTNDQFKIAGKKLWVPHLGWVKLKESFRFKGHALSATVSIQADRWYVSINIKADQVWDKKSKDWVAFPILRHTSASTGVDLGITTFATLASGKEYFGPKPHKALMSRIKRQSQSLSRTKKGSKNRFKAKIKLSKIHRRVGNIRSDSLHKTTSEIVKNHSIIGIEDLNVAGMLKNHKLARSISDMGFAEARRQITYKMKWQGESPVVAGPWYPSSKLCSSCGFRMKKLPLYIRTWTCPGCGVIHKRDVNAAINLEKLAVSSTVTACGASSVGGTFRAKRFKRSTSHGSMKQESNSESLRMI

SEQ ID NO: 4954 - protein, 395 aa, unknown
  TnpB Polypeptide
VKLAHKYKAHPTTEQKEELQRQFKTHATIFNNALEKLETEWIPKYQMYNQLPTWKQENPNLKTVHSKAAQETVGRIYRAISGLSKQKQNGRNVGRLRYKNSLNSIEYNQSGFKVNDDNVYLSKIGDIPITKHRPVEGDVKGVTIKQSQTGEWSISVIVDVETTEEIPIEDIKEDNVVGIDVNVSNLFADTEGNKLESLYAFLKPELERVRKEHRNLSRKEYESNNYYKQKKKLARAYTNLVNKRDDVLHKLSKWYVEKYDLIALEDIDSKELSEQSNGLGKYIRSQAWSRFAEFVNYKASQAGVHVFQVDPAYTSQDCSNPSCNNRQKKSLSEREHSCEECGLSIDRDVNAAWNVLFKSFEKVGQGLAEYTPVETGTSCDAVSLSSVVEAGSLDA

SEQ ID NO: 4955 - protein, 327 aa, unknown
  TnpB Polypeptide
VELSLLSLEVAGRPRWTGKQGRLEIVYDRDTETFTAHRNVGDEDNPPRRRDPPQPSLATTDSGGEVVAAVDIGANNLAAVTTSHGDHRLYHGRPAFRTFHKHTERIAKLQSILGDDEWSSKQIRSVYHTRGEQRNHAMDALIRDLGEWLAEKGVTELIVGALSDVRKKHWSATVNEKTDLFWAHGRFRDRLSDVLEFEYDITVAEKSEVGTSSECPACESEDVHRSGDLLQCHACGREGHSDIAGSANFLRKHAAESIEIETSGSMARPVATGENTKVDGRQISVPCLEWDDHAWTVKHDGPSTKEAPANQSTSSDTGNVAPGVSDD

SEQ ID NO: 4956 - protein, 368 aa, Okeania sp.
MYKSIRTKLKLNNKQKTLLAQHAGYTRWCYNWGLSLWNAAYKNGYKPNVRIIREVFTNHTKPLYPWMKNLSSRVYQYAFPTECCANINLGEAFKRFFQGLGKYPRFKRKGRSDSFTIDNCGKPIELNGWSHKLPFIGIVKTYEPIEATTKKITISRQAGDWYLSCSYEFNFHTTSQKIDVVGVDLGVKTLATLSDGKVFESVRAYQKFEAKLSRLQYLNRHKEVGSANWKKAQQKIARSHRKVANIRQDALHKLTTYLAKNHGSVVIEDLNVRGMLANHRLAKSIADQGFYEFRRQLGYKCEWYGSELVVVDRFFPSSKTCSNCGHVQDMPLHLRTYDCPDCGLSIDRDLNASINLRNAVGSTVNACA

SEQ ID NO: 4957 - protein, 326 aa, unknown
  TnpB Polypeptide
MGSAKTLLNELPDWAKEVPYQIKKMAVSDAYKARGNGISKFKKTGQPFRLKFRSLKNPQQSCYIPKSAVLDKGLYPTLSGKIDYAESLPEEVLDSRLLLDNGRWFIVVPTKSMTYKAENQGRVIALDPGVRTFMTGYSPVEVVKFGDGDFTQIAKLCRFLDDLKSRMVKVTSRKRHKMRKAARRLQWRIKDLVTEMHWKVGTYLVQNYDVILLPTFETSQMVTRTKRKLRSKTVRAMLTFSHFQFKLRLKHLANKFGKEVIDVNEAYTSKTASWTGEIKQNLGGAKTITSGEVTLDRDINGARGILLRALVDKPSLAYQCAVVSVS

SEQ ID NO: 4958 - protein, 400 aa, unknown
  TnpB Polypeptide
VVEGTAAVRRAFKFRAYPTRPQEHRAARLLADHCDLYNAALEERREAWRMRRVAVSYGMQSAQLREIRRADPQGQGRHSFTAQQQTLRRLNTVFAAFYARAKKGKAGYPRFKPCSRFSQAGFVAGNGAKWTPADVGGWARAAFQAVGSVKVRQHRPVPQTVKFLQLKREYRRWYVIVITDTEPAPLPAGGRAVGVDVGVARFLTTSDGQIVANPRFLAASAEVIADLQRRKERARRGSGNRKRLRRQLAREWRKVRNRRRDFHHKTARALMDTCDVIALEQLHTASVTRRPAPRPDPANPGAFLPNMATAKAGLNKAILDAGWAQFANILTGKAEEAGRRVVFVNPASTSTRCHHCRRQCTRPQQDTVICPTHGTIDADLNGARNIATRAGLGSGQAPAA

SEQ ID NO: 4959 - protein, 404 aa, unknown
  TnpB Polypeptide
MLVKGVAFSLASELPFEAKSLLEDFRLAVNNAVRAGLQARVTSRNALCRIAYKDFREQHPRMYAQHLVSAFEVAGGVLKNHRARIRKCVASRVPYVKRLMMKAENQAFKLDRKTGIIDLPIRAGCHVELRLVVSQYHRKYLDDMSLSLGSLTVLPDRVIVAFRKDAPKPFVPESALSLDTNERSLDGVFIGGDVAMAVKAEFPDIATIQQRHHDRRKRLQKKKAHDRRTSRNLCRNEGTREHHRIDYRLHQVANSVLKFAEERKSAIVLEDLKGFKSRRSKELNRRLSMWPRRRLHQIIEYKAQWRGIPVVKVDPRYSSRTCPICRRIKYSRMGAEFKCECGWCLDRHINASINLLQTAISKGMAGGLWFNPGAFQHDVMMILYEPAMAARSEPNGTSGIVGVS

SEQ ID NO: 4960 - protein, 383 aa, Brevibacillus sp.
MLKAFKTEIKPTYEQKRKINRTFGVCRYLYNLFIVTNMRRHEKGISFQNANEFDKWVNNDYSLDHPWIKDVSSKARKKAIVNAETAFKRFFKGESGFPRFKKKRDQNTGFYAPKNNTGDWTVERHRIKIPTLGWVRIKEFGYIPLDARVTGGSVTQKADRYYVSVTIEQEEIEPEIPTSTGIGIDLGLKEFAVVSSGKTFFNINKTAAIKRIEKKLKRQQRSLSRKYESKKKGGESSTGTYRNIAKNVLRVQKLQVRLARIRSAYRAYVVRELAKTKPAFITIEKLNVKGMMKNRHLSKAIANQGFYDFKMKLLNVCKKIGAELREVDHFYPSSKLCSCCGYKKERLRLSERIYVCESCGESIDRDLNAAINLKRASDYVVLK

SEQ ID NO: 4961 - protein, 130 aa, unknown
  TnpB Polypeptide
LTGIRERVNQQPRSKAERRRANSWAFYQLRQFLEYKTLRAGVALILVPPAYTSQTCHKCLHIHPDPTQSYRSGKQFKCGHCGWEGDADLNGANVIALLGAAVNQPRGSWLACQLQGYRKPALYCEAVRVG

SEQ ID NO: 4962 - protein, 337 aa, Streptomyces sp.
VPPADSTATSGYAASPACSPARATRRVSPCAWSARRWRRRARTPSSWATRGTERAPGRTRALPDYAAAVVTGRPAARQAWKPPIRSVARRSPSRWSDSAARLEAYPSLQTTTTRRPWWAASGRRWLPRGSSRHSGSLRSTTSAPGHLHKLTTRLVRENQTVVIEDLNVRNMVRNRSLARAISDAAWSDFRGMLEYKAQWYGREVIAVDRFFPSSKLCSNCGTLQGRMPLHVRTWTCDCGAVHDRDVNAAKNLLAAGLAVSACGAGVRPQRSTPGGQSAMKQEAQRATAGIPRLQDSVGESANRPPGLVVVGMIVLFVGTRGGAGCRWSRGTTVGCRS

SEQ ID NO: 4963 - protein, 536 aa, unknown
  TnpB Polypeptide
MVDEEYKKLLKQFHKLSDRHILIVETDMSSCDVQKVVALSDKIRKAGNELVGLMRKHYDQLMRTKRYRKLLKLYGTTEDKKKCKDFAVQLNEMQKQYNVTWNFCRTSMIPVGKKYGIDAVFALTKAEDIWQSMEKCLYDNGKILHFSKYGELPCMRAKQINRGIPISVKDNKLQFKLGKTFFGIQVNDKFQTDEVNAVLSYLAEPRIIDGKAIQTFVEGAYFIDTYRPCYATLVPKLIRGRYRVYLHLTMEGKAKPKYDRFGNLRHKYGNGIVGADIETQTVAYTSDTEIGLKNLSERGNSIQKSERLEKLYYRAMDRSRRATNPQNYDKDGTIKKGRKSWDYSNHYKKLKTKHSERCRINAINRQLAINEDANHLRSLGDIFITEPKNAGKLMKRAKETTRNNKGKFNKKKRFGKSIKNRCPSGFQTTIEKKFKVSGGTYLEVPNHYRASQYDHTAGDYIKKKLSDRMYHLMDGTFVQRDWYSSFLLYCYDDKTKNINTSKCITKFEECYNKEKALIKWIKANKIKVLNSGIKIA

SEQ ID NO: 4964 - protein, 378 aa, Filamentous sp.
MLVLEFKAYAKPDQFQAVDEAIKICQFIRNKSIRLWMDGEAKSWFDLSKYCAIWAYEFDFANKLGAMARQASAERAWASISRFYENVKKGIKGKRVGFPTFQKNCRSVEYKTNSWKLAEDRKSIVFTDKCGIGRLKLKGTRDLNFYQPDQIKRVRLVKRADGYYVQFCISVDRLETAPSTGKTIGLDVGLKEFYTDSNGEIAPNPRFLRRGEVRLKRAQRLVSRKAKGGSNRRKARVILGKRHLKISRQRKDHAIKLARCVITSNDVVVYEDLRVSNLVKNHCLAKSISDASWYQFRVFLEYFGKVFGRITIAVNPAYTSQECSNCGEVVKKSLSTRTHICQCGCEMDRDHNAAINILNRGIGTTGHVGTSVLDTVNA

SEQ ID NO: 4965 - protein, 420 aa, unknown
  TnpB Polypeptide
VPNLEKNAKIREKRKQTLLRRKSQEAKTFELKLDKSKISKTKLAVLNRLFLEAKWFTNYIIANGILNFKPHMDYKVKTVHVKVGDTFQEREIQVLSSQMKQALIKRLQDNVIALSKLKEKSVKVGKIKFVKAVHSIPLMQYGVTYWVKKDNKMVHIQGIGNFKVSGLDQIPENAELSSANFVERNGDYYLYVTCFLPKEDKLKKEKAIGIDLGVKNQITFSNGVKIQYLVPMSKRLRRLYHFFSQAKPGSRNKEKLLLKIKREFEKQNNKKRDIINKVVHFVTTNYSHVVLQDDNILSWQKLFGEKIYETSIGGIRNALKRKASTPVEVGRFVKTTGVCPVCRTYVKLNMHQRELTCPSCNSTFDRDVASAIVILKEGLSLWNVGETPGDENASAMLEYFASIPHVSVSMNREALSVRAW

SEQ ID NO: 4966 - protein, 450 aa, unknown
  TnpB Polypeptide
VTLLAYRFALDPTPAQERALRSHAGAARVAFNWGLARVKAIMNQRAAEATYGITGDDLTPSISWSLYSLRKDWNAAKDTVAPWWAQCSKEAFNTGLDQLARALKNWAGSRTGQRKGKPAGFPRFKSRRKAWPSIRFTTGAFRCEARHAVLPRIGRVKLHENGARLADLVAAEAARVLGVSVRFERGRWFAAFTAEQDMSRPSPADPGAVVGIDLGIKTLAVLSTGEEIPNPRHLGRSLRKVRRLSRTMSRRRGPDRRTRQQPSNRWRRASSALGKAQGRVADQRRDALHKATTDLTGRFGTLVVEDLHVRGMLANRRLARHVADASFAEFRRQSEYKAAWRGGRVIVADRWYASSKTCSGCGAVKAKLALSERTYVCTMCGAVADRDLNAARNLAEYGQREVAGSGPETVNGRGADHKTGPARQVAMKRQPGTAQAGQAGTVPPQGRTAA

SEQ ID NO: 4967 - protein, 460 aa, Actinomadura sp.
MSRMTAFRFTLDPTPAQEALLRTAGGAARLTYNTLLALVKERLDARHAAPESVEVAVPWSSFDLINAANQWKRAALAQQIDPATGQPWHRAIPALVFEEAAVDLARALAAFTASRTGRRPGPRMRFPRFKNKRATSYNFRLRNQKESIVLGTPQHPRTLRLPRLGVLAVREDTRKVRRMLRSVDGQEARARICSVTVRQHRGRWIVVVTVRAADLHPAARHFGTASSPAVTVPTAPALAGELPPASEQTAVWAGVDVGLIDLMVVADQHGDEQTRVPAPKYHRRRLEGLRRRARALSRAQPGSRNHRKARARVARYQACTAAMREHHLHQVSNRLVKSHARLVIEDLNVKGMLANHHLAASVADASFGTLGRMLAYKADWHGTRLVVADRWFPSSKTCSGCGTRKPKLTLSERTFVCSACGLELDRDVNAAANLARYGRDLERLGRDPSPDPGPASSRPG

SEQ ID NO: 4968 - protein, 409 aa, unknown
  TnpB Polypeptide
MILAERHVVKVGTVEFKEYDAICFLSKNMYNSALYALRKHFFETKTLKHKFQLSKEFQEQNQPDYRAMFVRSAQQIIGIAHQSMKSFFALIKAKKSGSYDKPVKLPKYLPKNGRQVVIYDNKAFYEKDFKEGYIRVAQTQSRIPTKIKNIKSIQQIRLVPKGNHVVLEVLYKVTDTPLKEDNRRYAAIDLGVNNLATVVSNADSPKIINGRPLKSINQYYNKQKAKLQAKMDKEYGTSKRKQTRREQSLTFKRNNKVNDYLHKTSRKIVNYLVSNNINTLFIGKNKEWKQNINIGKRNNQNFVNIPFYKLIQMLLYKCALEGITVKEIEESYTSKCSFLDDEEISKHERYKGKRIKRGLFKTAGGNIINADVNGGLNILRKAVGKFDYDPIEVCSTPVVWTVGFQSLTA

SEQ ID NO: 4969 - protein, 727 aa, unknown
  TnpB Polypeptide
MSQATITRSFSLISRAPDKVEARESINLRMQAFRSLENTYLDVLFDALRDSTLELMDFAGESKAHVKEHVYNKLELNLISSSYQPKIKIKERMKRSAIQYPYFAVRSWLIQTHYLSLIIRELITLLSDSLTHAVRFLQGDPLSKPVMGRLSRALRADCFGNTNFLSHAYISNLIGQVRNLFISNSHLGSLLSDQISLTEINSTQVQEFLEKCLKSFSRKKKGKTQVIPISELKSYFFKLYVARVKKQSTWNAKHVMKIKDMDAFKQSRNNFFEFLIDSLHDVLGKVPGSFTHDLAQKMFNEILEDSGNSAPEHLIKGIFKPFTRAARVDIIPTRNGFIQYFGQVLKNQLILNVKELFITGDFITEMNNELDFLKESLHNLVNRPKIRNLALPINQAEGIYEADFSRLTIKLSFRSKEFIEYRVKDEKGRINELMERGATTRLPVLTIKGRKFLLHLPFELPSNDLSKHSSPETQTSRVVIGVDLGVKHLAVLSVMDLTDPHHPVEIARYFIGMRTLFDKKFNSVSGRFESKERFNHSHSKKKSCIKRKLRNMRHEARNIQRKVHEYENHFSERNTNSPARQYKHYRLTKTVSGAWNRVKHLNEEIIHQLQHLILQIALYHNASLLKFENLKWSRHSKKKYVGSYLAFWQTHWFFSQVQESVKLQASLHGITFQLVNAAYTSQTCWECGKRGRREGRNFTCMNHALHASKKPIFIHSDLNAARVIALA

SEQ ID NO: 4970 - protein, 303 aa, unknown
  TnpB Polypeptide
VDKFALTNAIYHLEDGYNRFFKHLSKFPKFKSKHKAKKSYTTNFTNGNIEIAENFIKLPKLGTVKAVIHRKPEAGWKIKSATVTQNRDGSYQVSVLFAFEKIIPNAAATEATTVGLDYKSDGLYVSSNGETCGMPHYFRHSAGKLAKAQRKLKHKTVGSNNYKKQQKKVAKIYRHVANQRKDFLQKKSTEIANQYAFVCVENLNMRAMANKGFGNGKTTLDNGYGMFLSMLDYKLRDRGGQLVKVDRFFPSSQLCNCCGYKNPLVKDLSVRHWDCPNCGTTNIDRDINAARNIKKEGLRLLTA

SEQ ID NO: 4971 - protein, 444 aa, unknown
  TnpB Polypeptide
VNILKYTTETRLYIKNNKDIVDYFDEVINQYSYIFRKVYYIIRNNPKTKISSLNTELQNEYSISRRTAASVIKTVQGIINSIKELKKMEIKQKQYKIEKISKKLEKLIPVLMDLKLKAEKNNIKDLIKYRNFKIKVAFMKIKKDKLINKINSLNYQIETNKFKITFGTKKLFRKNLEEFLNKRDNQMVFIGGKDETACNQTFQLKYISKINQFIIKMRKDFKYKNEKGEERYAYGKCFFNNHKKILKEILKSKSSPLTYRIIKRNNKYYLQCIFEINNKNTILTRKNYGVIGVDFNKGFVTVSQTNKYGHLVKTDKMTYRFGSGNKTENDILLIINKLTELAIYTGKDIVVEDLNFSKKKSKTMKENSEKGKKYNKMLHSLAYRMFLNRIEQICNRKNVGLIKVNPAWTSWIARNKFCDKMKLNIHTGASFVIARRGMNIKDIV

SEQ ID NO: 4972 - protein, 441 aa, unknown
  TnpB Polypeptide
LKIKRTGKFRIRKSHPDYEMIRDHTIEAKEIYNYANYIIRQIYFRNSKNHKYSLEFIYEYPELEEDFENYLKESEQFTTTFYRIICSFSRIKGHSLNSKMVQNVVDTLKRDWKSYWKLLKLKISGKYDKPVNIPRYKKKYSTVEYNSQVLSRTKFKNGYVGTVKMKEGFKIPKFYMEYSCKSARVLWKSNEMYMEIIYEKEVPETKSNKKVASIDLGGKILMAVVYNFNRRGICISANILRSLNHYYNKVIGAMTSILPKGIRISKAIQNLWRKRDEQIRNLLGYYANRLIEELASLNVSKLIIGKNKEQKNGIDLHSKIENRNFCMIPFNKLIEILRYKCEENGIECTEQEESYTSKASFLNNDFIPIYGAEDKEYEFSGWRNGRIYKIKKKNQRIHADLNGAFNIMRKAGHELAEDIPSLKKSWIFPIGKYKVKNLNYI

SEQ ID NO: 4973 - protein, 445 aa, unknown
  TnpB Polypeptide
LKSFKTFSTVLEEDNAKEIIEYFEETAENYGFLKRCALHILRNNPEISRNELNKFLQERFLVTRRTADSAIYEVEKMINSVLALIPLNIEKLETRIDGKIKLIEKKKKEMAKIHASRKTNTKRLGKLKFHIYNIHNSINRIKQKIENLERQLNEKKPNICMGTKKFARNDMKAFKQHRDSQINYIGRACEKQGNVNFQMQYVKKGNFFAMKVRRDFGKWKEDRSPERFAYGKCHFKYGGRQLRDAMKNNASAVTVSILRRDDRYYLFVTVAISYESSAIVTRKEHGVIGIDFNKGFINICETDEKGNIVNIEKIKYPFGKAGITNTGLADVINKVSNKAVETGKSIVAEDLSFEKKKRKAKKAVTPTEKERMRMLHSLPYSRYAQILENITFNRRIELIKVNPAYTSRTAEQKFCNRMKLNIHNGAAYAIARKGMGIKDSLKKTG

SEQ ID NO: 4974 - protein, 382 aa, unknown
  TnpB Polypeptide
MKKIKRAYKFRIYPDSEQASFFIKSFGCVRKVYNLMLDDRKKAYEEYKTTGIKTKYPTPAKYKKEYTYLKEVDSLALANAQLNLEKAFKNFLKNKDFGFPKYKCKSNPVQSYTTNNQNTIYVKNGYIKLPKLKSLIKIKLHREIKGLIKSVTISKNSLNHYFVSILCKEEIEELPKTNKNIGIDLGIKEFATMSDCTKVPNLKFTKEYEKRLKREQRKLSRRGRLAKSNDRKLSESKNYQKQKKKVAKIYNKIRNKRKDFINKISTEIINSHDIICIEDLNIKGMLKNHKLARSISDVSWSKFERQLEYKANWYGRIIVKVPKFYPSSKTCSNCGNVKKELLLSERTYRCECCGLEIDRDYNASINILRKGLKILKEQGKLG

SEQ ID NO: 4975 - protein, 418 aa, Nocardiopsis sp.
MRTAYKCRAYPDPEQAAQLGRTFGCVRLVWNKTLADRHTAYHQRGEKTSYKATDAALTQWKRGADLAFLSEVSSVPLQQTLRHQHTAFANFFAKRTRYPRFKSRDSKQSAHYTRSAFRIRDGQLTLAKQTAPLRLAWSFDDVDLSTLNPTTVIVSREADGRWYATFAVDIDDPAPPPEAACEVGVDLGVKDFAVLSTGEKIANPRHLERKARNLKRYQRRMARKQRGSTNRRKAKRKVAAAHRKVRHARADFLHKTTTRLVREHDLIAIEDLNVRGMTSSARGTVQVPGRRVRQKAGLNRAVLDAGLGEFRRQLEYKAARAGRTLVVVDRWFPSSKTCSACGYLLDRLSLGTRVWTCPSCRTRHDRDLNAAKNTLAAGRVAAREAVSGDAWGAGVRRQGSSLPRSATKQETGPARVGP

SEQ ID NO: 4976 - protein, 439 aa, unknown
  TnpB Polypeptide
MSQYPYHFGFKTRIYPNHQQKQIIALNSQASLKMYNLLLDIDAEVYQLNQHVIESKTMQIRQKQPHTTSIINHDPNSHYVKQTRCALTNFKPYLDRLAYLKPLHNNPSKIAKMHTFFSHPNYDAYVGAYAKKALMQAWHNHYHGFQRRPKHHEASDDKYGQRYQTYINPKTTHFVLDENHIRLPKMGRIKCDKIRDLLLHKNDWASGTICVQKDATNHYYIAVQLGSETPFVKTIDNHNRCLGIDLNLDNFATDSNGNVIENPHYFVKQEQRLSRLNQLLSHKRKLATIYNRDLTHNKDYQQLRQKRARLSRKIYNQREVFLQKLTTHIIKNHDIIVAEDLQSHHMLKNHHLAKAISDVGWRKFLTMMTYKANLYNKTFITVNPKYTTQTCSSCGYLLKKDQRLTLADRQWDCPNCHVHHIRDVNAAKNILQKGLDTLS

SEQ ID NO: 4977 - protein, 283 aa, Methylacidiphilum sp.
MYQNFEKKGRQYIPLMILEGGKRIVIPLSANSKIQGMICLVLKEKKATIPYAALLKVPKRLYGEAVGINARLSEFFTDDHGKKYGRGFGELLANLSKFHKEKGKKRQNLQVIDKNPGKAAKARRIRKHNLEKKKRLPRLCKAWVEIERRIHTSLQQLFKLRIPSVIASESLVFRLNVPSKDLSRRIIQLRSYVLPERIELLAPVGGSRREKVYPACSSELCPRCGYVHSKNRSGDKFMCRHRGDASYAESVGAYHQKKDWRSRDFFVEAAEPAACDAFGEVCP

SEQ ID NO: 4978 - protein, 241 aa, Escherichia sp.
  misc_feature (241)..(241): Xaa can be any naturally occurring amino acid
VKRLQAFKFQLRPGGQQEREMRRFAGACRFVFNRALARQNENHEAGNKYIPYGKMASWLVEWKNATETQWLKDSPSQPLQQSLKDLERAYKNFFQKRAAFPRFKKRGQNDAFRYPQGVKLDQENSRIFLPKLGWMRYRNSRQVTSVVKNVTVSQSCGKWYISIQTENEVSTPVHPSASMVGLDAGVAKLATLSDGTVFEPVNSFQKNQKKLARLQRQLSRKVKFSNNWQKQKRKIQRLHSX

SEQ ID NO: 4979 - protein, 301 aa, Escherichia sp.
  misc_feature (241)..(292): Xaa can be any naturally occurring amino acid
VKRLQAFKFQLRPGGQQEREMRRFAGACRFVFNRALARQNENHEAGNKYIPYGKMASWLVEWKNATETQWLKDSPSQPLQQSLKDLERAYKNFFQKRAAFPRFKKRGQNDAFRYPQGVKLDQENSRIFLPKLGWMRYRNSRQVTSVVKNVTVSQSCGKWYISIQTENEVSTPVHPSASMVGLDAGVAKLATLSDGTVFEPVNSFQKNQKKLARLQRQLSRKVKFSNNWQKQKRKIQRLHSXXXXXXXXXXXXXXXXXXXXXXXXXXXXXXXXXXXXXXXXXXXXXXXXXXXXGAMSGQNQV

SEQ ID NO: 4980 - protein, 478 aa, Caldanaerobacter sp.
MIVIQAKLIFLNQKDKQTVLDLMRRWSSCMRYAYKRLLEGHDRKTLKRDLQEPFELNSRYVDDAIMKAGSVLESSKELGNNPKKVIFGGRDLFKKLQNRHINGKEYQKLKTKWQEKRKGNLYSRGDKSKKGNLNTRIKVKENGTFLRINVGERKYVYAKIEAGWKKNKNREELLQKIAESNIPYSVELKLKNGNIYAYFAIEEEYPKIKITTDKGVIGIDVNAYPDNISWAEVDEKGNLISYGNIPMPELSSGSKDKREYFRWQYAHEIVKIAKEKRKAIVIEELDIKEKGKRGDFSGRKSRRIRHSFSYKSLLSKIKTLAKREGIEVIEVDPSYTSIIGMLKYSPQYMITKDISAAYVIARRGLGKEEKIPNNYINFLNTLTVEELEELKKHVKNTVKNKYLKKRHLKEINRAIKFLQSLESESGKVLRPLYGTSFSANDFWQVLKVAVVTPLSPEKVKRDFSTLKELLIQGKWRDP

SEQ ID NO: 4981 - protein, 482 aa, Nocardia sp.
MRAYRLATTANESKLEAVAALLPWWQRGLVHVQLIQVRALQSGETRLGWLGGAEAKALPGYLSARQWKSVVNQANAALISWQEAAKTGIREMIRELDIDEVVRTDLFRINAHKSWWTTTTTLIHHRIPTERVQVGAEALPIARELVHRWLRRHPFPNLSRVRSMAMDGPIAEVSKSTTPLADYWVRISTLRKGQPVYIPLHRNDYFDAAPGEVRNFCQVQVTDTGQVRFLLIKKSKPAPARTDGGELGVDWGLAAMFATSDGRVLGRKLFAWLKARDDEVVTLSKALQANGIRPKNSVRYRRLQSRIRGYVRNEVGRILNRLAAENLKLLAVERLQLTGGGLSRRMNRLVSRAGRAAVSAKLASLTKTHGIAVVEVNPAYTSQVCTGCDYVDRRNRITRSRYSCRFCGKRLHADISGARAILRRSQEPSRGGLALGKQTILARLDRKFHTRWGMDPTVLRERRIRGHSTAVPDLVGAQPPNG

SEQ ID NO: 4982 - protein, 184 aa, Microcoleus sp.
LKRLQKRISRKKKGSSNRRKAINKLGRKHLKVSRQRKDFAIKTALCVVKSSDFVAYEDLQVRNMVKNHKLAKSISDAAWSQFAQWLEYFGKVYDRTVIAVAPVYTSQDCSSCGNTVLKTLSTRTHICGCGTTLDRDHNAGRNILAKGLKQAGITLNTAGHAEINAWGQTDLYSFVAASTSKSTD

SEQ ID NO: 4983 - protein, 355 aa, Okeania sp.
MQSIKTKLKVNNKQKTLLAKHAGVARHAYNWGLATCITEYQSTKKPLSAITLHKRLVREVKSQNPWYYEVSKCAPQQALRDLERAFKKFLTIPKCGFPKFKKKGKKDSLYLEGSLKIIQGNYIKLPRIGIVKTYEILPNCRVKNVRISKRAGNWYISFKYDHQPNPNPKQGDIIGVDVGINALATCSDGRKFSNVKAYKQAKKRLTRYQRRVSKKKIGSKNRAKAVKRLAEAHKKVADIRADALHKRTTWLAKNHSTIVIEDLNVSGMLKNHKLASAIADCGFYEFRRQLTYKCEWYGSELVIADRFYPSSQICSECGEKQKMPLSARTYECSHCGLTADRDLNAAVNLENYVNK

SEQ ID NO: 4984 - protein, 414 aa, unknown
  TnpB Polypeptide
MELRKVTYRMYPGTRQTEKLEELLGLHQRVYNTALEERIRVYGETSKTLGFAAQCKELTSWRKQCEALAAVNAQSLQVTLKRLDLAYAAFFRRVKAGETAGFPRFKPIQRFAGWGYKTHGDGFRLQAGDKMRHGHVRLSGVGMVRVRGQARTPGAVKTAEVQHKGGRWYLSVTVECNPQRASGTLAMGLDWGLESFATVCSSDEKTHSVANPRFLDKPQRQILKVLQQAVSRKKDKRTNNRRKAVALLSAESRRIANRRKDFLHKTSAGLVNQYGLIATEQLSVKNMTASGGAHKRGLNRSILDTAPSTFLNLLKTKAEEAGSLWVEVPTRQVKPSQTCHRCGSQCKKLLSERRHQCDCGASCSRDENAARVMLHWALYGNATGQELSEVGNGSRLAAQNHEIPHIAALVAWVG

SEQ ID NO: 4985 - protein, 232 aa, Paenibacillus sp.
VDSLALANAQLNLQKAYSHFFRDKSVGFPKFKRKKDNHRSYTTNNQKGTVYIENGYIKLPKLKTLVRIKQHRPFFGLIKSVTIAKTPTNKYFVSILAEENEQLFSKLDSKVGIDVGLKDFAVLSNGTKYENPKWLRKSEKRLAFLQRSLSCKKKGSKNRDKARLQVARLHEKITNQRNDFLHKISHEITIENQVIVIEDLKVKTMQKNRKLSKAIGEVSWFKFREYLEYKAV

SEQ ID NO: 4986 - protein, 446 aa, Halorubrum sp.
VKRSNQFDVRPRSVKEREVFVRWLDASASLWNETNYARRQSFLSNTNDSVWEVDTGTLESKYKGVLSSSVAQQIIRKNSEAWRSFFSLNEKYHAGKLDEKPSPPGYWGNEEDGRVLRTYVRNDQYTLEIGERSRLEVPIGSELKDELGLNHNQRLRLEFTGDPKWSGEQGRLEIVYDETADSFRAFQPITVDGSRLDSPLASHEAALDVGANNLVACTTTTGHQYLYSGRDEFERFHETTEEIAYYQSRLENQRESSSRIERLYRKRTNRRNHVQDALARDLVERLYESGVSTLYVGDISGVLSTHWSARVNEKTHNFWAYRRFIDRVECVCEEYGISVEEESEAWTSQTCPKCGEREETIRHQDTVTCPCGFEGHADLTASESFLRQQNNEVGPMARPVYLKWNNHNWREDHNPPSAVETTANEAYTHQSTTSGGNIALGQAQND

SEQ ID NO: 4987 - protein, 278 aa, Lyngbya sp.
VPRNNSFYLEFVYGQPKVKQAEQSGHILGIDPGLNNWLTCVSTTGKSFIIDGKKVKSQNQWYNKQVAKLKTGREQGYWDENLAAITEKRNRQMRDNVNKAARFIINWCLKNRVSTIVFGWNQRNKDSINIGKKNNQSFVQVPTAKLKSRISQLCEQHGIDFVETEESYTSKASFLDSDILPAFGEKPVGEATPKELGWKSSGKRIKRGLFKDYQGQLINADCNGSANIIRKAKVPTQLLAKVVRGVLSLPHRYNLDSLSRLYRKQHCEEDFNLCNNSA

SEQ ID NO: 4988 - protein, 380 aa, unknown
  TnpB Polypeptide
MLARTFGCCRYVYNWALNLKSTTYRETGKSPGFAALCAMVPVLKTQPETAWLSEVSSVPLQQCLHHLDRAFVNFFEGRAKYPAFKKKHGSQSATYTAAAFTWKDGQLTLAKTDAPLDVRWSRPLPAGATPSTVTISRDRAGRYFVSILVEEEITPLPVLPQRIGIDLGLTSMVITSQGEKVDNPKYFARDAKKLARAQKRHAKKQKGSRNREKARRKVAKIHARIRDRRRDYQHKLSTRLIRENQVICVESLAVKHMMQHPTLAKAIADVGWGEFLRQLEYKAEWYGRTLVKIDRWYPSSKTCSVCGHVLESLDLDAREWTCPQCGTYHDRDLNAANSVLAEGLHVYAAGLAVSACGGDVRPNLDGIREGSLQGSRNPHS

SEQ ID NO: 4989 - protein, 208 aa, Moorea sp.
SSISRFFENCKKKVPGKKGFPRFQKHCRSVEYKQSGWKLSPDKKSITFSDKKEIGKLKLKGTWDLWRFDKKQIKRVRIVKRADGYYVQFCVSVDIKEELEPSRTTIGLDVGLKYFYTDSDGNTEPNPRFYRKGENRLKFYQRRVSRKKKGSSNRKKAVNRLGRQHLKISRQREEHAKRLARCVIRSNDLVAYVRAACRKARFKSQKFG

SEQ ID NO: 4990 - protein, 383 aa, Saccharopolyspora sp.
VGDAVNDVIAARRDAYEAGEKFPSAAELSKRLITDAKRTSARSWLGDVSSVVLQQALRDADQAYSNFFDSISGKRKGRKSGAPRFKGRRDRRQSIRFTANAKFSITRGGKLRLQKIGSVPIKLSRLLPSTPSSVTVIKDASGRYFASFVVDVEPEPIAVEAPEIGVDLGLEHFAVLSDGTKIDAPRILRRAEEKLKRAQRNLTRKKKGSANREKARTKLARAHARVADARRDFHHQLSTHLIRENQAIAVEDLSVSGLARTRLAKSVLDAGWSSFTAMLEYKATLYGRKFIRIGRFEPTSQACSNCESKDGPKPLRVRIWQCKACGVWLDRDINAAVNVAAAAGLAVTACGAQVRPPVRVAKRVEAGTHRGDLARRSPCIQTR

SEQ ID NO: 4991 - protein, 361 aa, Acidihalobacter sp.
MNAQSEQVTLKRLDRAFRHFFRRVKNGEMPGFPRFKSLHRYSGWGYKTHGDGWKLHPGESGKHGRLYLQGVGLVPVSGKARTQGECKTCEILHKAGKWYASVTLEVEAIPRERGVETCAFDWGLETFLTVATHQQGIETVPNPRHLRRQLTELKRLGQDVSRKIRMAQTISGRKKHFPVSRHLRKAIQHLARLHAKIARSRKDFLHQTSAWLVNRFGAIATEALDVKNMVHHGGARKRGLNREIHAAAPGAFLKLTRTKAEEAGSWYEEAPTRTLKPTQRCHACWRLPDEKKTLSDRWHQCPHCGAACSRDENAARVLLRWLKMRLAGESGSGREPSEAWSGIRPSETMAPALKRETHAIP

SEQ ID NO: 4992 - protein, 431 aa, Acidihalobacter sp.
MPNRKVTYRLYPNTEQEARLQDMLGLHQRLYNTALEERIRVYKETGKGLSFADQCKALTQWRKNSAGLRSMNAQSEQVTLKRLDRAFRHFFRRVKNGEMPGFPRFKSLHRYSGWGYKTHGDGWKLHPGESGKHGRLYLQGVGLVPVRGKARTQGECKTCEILHKAGKWYASVTLEVEAIPRERGVETCAFDWGLETFLTVATHQQGIETVPNPRHLRRQLTELKRLGQDVSRKIRMAQKISGRKKHFPVSRHLRKAIQHLARLHAKIARSRKDFLHQTRAWLVNRFGAIATEALDVKNMVHHGGARKRGLNREIHAAAPGAFLKLTRTKAEEAGSWYEEAPTRTLKPTQRCHACWRLPDEKKTLSDRWHQCPHCGAACSRDENAARVLLRWLKMRLAGESGSGREPSEAWSGIRPSETMAPALKRETHAIP

SEQ ID NO: 4993 - protein, 949 aa, Pseudomonas sp.
MANRAYKYRFYPTSEQAQLLAQTFGCTRFVYNYVLRWRTDAFFQRQEKVGYLEANAALTRLKRSGEFPWLNEVSCVPLQQCLRHQQSAFKNFFSGRTKYPAYKSKKHRQSAEFTRSAFSYRDGKLYLAKSRTPLDIRWSRPLPSEPSTVTVSRDSAGRYYVSCLCEFEFEALPVTPKMIGIDLGLKDLFVTSDGERIGNPRHTAKYAARLAKAQRRLSKKKLGSKNRSKARLKVARIHAKISDCRMDRLHKLSRRLINENQVVCVESLAVKNMIRNPRLSKSIADVGWGEFARQLEYKGEWALPRGHSQYRIARDLTGWVDQHMGWVDRSRYLNEDGTRMTDDQLRDFLTHAGTTLATGGVNKIEPGRVGGSGMRANRGSESRQIHYRDADAYMAAQEAYGDKNIMDLMFGHIDQISRDIALVETLGPNPNHAFKYFSESAFQHEAVSSPRDISRRLNKQRKRLDYLYTEVAGTREPPVSARIANWFDTYRGINVASRLGSAVITGLSDQGPIALTAKMNGMPVMRVFSNEAKMLNPLNDQHRRTASRAGLGIAQLMGSMARWGADGLGHDAEVAGRASGYSQTAATTLLRASGMNAIDAANRRAFGATMMDAVGYLTRNHESMSSLEAGDRARLRNMGVTDTDFSVWRLAETEDWRGIGDTILTAGSIYRITDEALSDISARTRTSPQRLRDQAATKLLGSVLDETNMAIPAPGARERAFMHGRNARGTWGGELARSFWQFKSYSVSMVMKHWKRAFAQQTGWGKAGYMAAIFASTTVLGAISLQFNEIASGRDPKNMLDADDTTGVPGLRFALAAMLKGGALSIYGDFLFSDTTRYGTSPLAAIGGPVAGDIEALFKIRGTAQDLKGDQLGGNLVKFAKSHIPGANLWYTKAATDHMIFHQLQEYFSPGYLRRMEQRARKEFGQSYWWEPGDYTPRRAPALESAFGP

SEQ ID NO: 4994 - protein, 272 aa, Mycobacterium sp.
MARLKVPEGWCVQAFRFTLNPTQTQAASLARHFGARRKAFNWTVTALKADIKAWRADGTESAKPSLRVLRKRWNTVKDQVCVNAQTGQVWWPECSKEAYADGIAGAVDAYWNWQSCRAGKRAGKTVGVPRFKKKGRDADRVCFTTGAMRVEPDRRHLTLPVIGTIRTYENTRRVERLIAKGRARVLAITVRRNGTRLDASVRVLVQRPQQRRVALPDSRVGVDVGVRRLATVADAEGTVLEQVPNPRPLDAALRGLRRVSRARSRCTNEPPR

SEQ ID NO: 4995 - protein, 330 aa, Scytonema sp.
LSPKNQLSVTSYQLSVSPHTTNTRLVPQINKNRAGRKLGDNATTGLQIKLPKVGAVPINLHRPIPDGFVVKQVRVISKASGWYAQLVLQSDVSVPDVMPNGNSIGIDVGLEKFLAVSNGQLVERPRFFNSLQSELRWLQRKLKNKTKGSANYRKAQHKIRRLHERIYDTRKQFHLNTAHVLCDGVGMVFAEDLNLKMTSRGMLAKHCLDAAWGSFLEILSWVCWKRGVYFAQVNPNGTSQTCPQCGTHTGKKKLSERVHVCHECGYTTDRDVAAAMVVEQRGLAAAGLAVKLPAEVSLFGDASLGTTNVRAACPKGLAGKPNRKIGKPTP

SEQ ID NO: 4996 - protein, 430 aa, unknown
  TnpB Polypeptide
MAWDVTRTVRVRLDVPDSRKSDLHATNNLFQYCANRTAEWAWRYPHDNCVTSKSEAENALYDQLRDETDNLHSNLVQKAIKRATKDIDNCVDRLADGENTSRPHYDTFSIAYDKRAATFYRNKVSLATVDGRVVCEYDLPENPEGTPHGAYLLNDDYEFSTSTVHYDSETDEFYLHAAMRRTVVTDSPEKAEDAKVLGVDCNVNDHIAVTSTGRFVGNADYLNHERREFEKRRGDLQQTGTRSAHLTFQQICDRFGQWSEDYLHRCSKALVVEAERHECTHIAFEDLEQIRERISDGKKFQQWAFRALQEQTEYKAELAGIVVEKVEPSYTSQQCSRCGCTLDENRDGQQFACLNCGYTSNADYNAAKNVARKLSLKLHRGQKSPDGGAFCQYALKSGMMIVNATEVASDQYWSAERESTDKPTALAVGS

SEQ ID NO: 4997 - protein, 453 aa, unknown
  TnpB Polypeptide
MITIKLPYKTTDENKAKILEIQKEQNRLFGKAYQFQKTNPTQKEMTCYLNQQNSTLDSWFIQSAFYEGKAWLKADLETYEDKLSDWEDRKRIATSVKTTKKAAIKNKKLKQKPSLFRVFGGNKLRKDYNLGKISKDQYQKDKLAPISVVGESSKNGNRKFCLQIEKSMVIFKPLCGLKIELFLPNLRNNYQNSLVELQTLAETKQIPYSVKLDSENIYISYEKPILQNKFFQINTLALDLNPNYIGLSVQNPSQEVIFTKLFDISRLTDTNKQNYELSIIAKYITNVAKHYNCKNLAVEDLSIKSRDHEKGKNYNKNVNNKWNRNLLLQYLQKRCRLVGIKFLEVAAYYSSIIGNMLHRGFADPVASSLEIGRRATHGATKQKDENFYPDVSIGNKFCHLLADKTEIFSNWKEISSFFKKKPELRYRVPLPSRECFQAFIDKKSLVFTCDGVV

SEQ ID NO: 4998 - protein, 451 aa, Okeania sp.
MKKFNIQSAYADSIATEARTCLNQLKTAKKNLISKLELQIQAKTTATKKLIIKLEKTLFLATKKGFPHIQARNKFHNQLLGLKSKIQKIASLKRKLKKLKNTERLHICFGSSKLFNAQHNLSENGYKTLDEWSDYWRKKRSGRLFCVGKSQPGGGTMMKVFPLQEDGLYQLQVQLPRPLQDKYGQKIQLEFSVSNRNGRLISTDLDYAINNLKPITISIFRREHKQDNWYIHLSTYVAEIPVFHTRKNCCLGIDFNADSISVTYVKWDGNIEYLEEIAYKWKNQTTGQRQTSMRNIVCQVVFLAEFFECAIAIESLDFTKKKSIARSEEGKVYNEMLVLLSTGMFREAILSRSRRFGVELIKVNPAFTSVIGMINYMGKYGLNSGTAAALVIGRRALKLSEKIPQCLLRLEDVNKHDWSHWRRVASFIKLHRILWTQLFQWRKTLEGIRSP

SEQ ID NO: 4999 - protein, 375 aa, Actinokineospora sp.
LIGMSRFRLQPTLAREQLLLEHCGHARFVWNLAVEQHAHWQLGRKAAPGFTEHCRQVTQARAANPWLAAGSVMVQQQALKDFGHAMSNFVRRTHRRPTWRRRGQSEGFRIVSVKPGDVRRVSRKVGELRVPKIGWVRLRWSPAVAEGVKSYRVTRDRAGRWQVAFAAVPEPISGPGTGATVGVDRGVVVSAALSTGELLSVPAPRDSEKVRLRKSQRKLARAQRGSSRRGEVKIAIAKLKARETDRRKGWIGKTGTRLARAFDMIAVEDPKISNMTRSAKGTVNAPGQRVRQKAGLNRGMLANGWGLLVTRLEQKAAGRVIKVDPRFTGQRCSACGVVDREARESQAAFRCRSCGFARNADVNAALNIRCAAGHA

SEQ ID NO: 5000 - protein, 451 aa, Moraxella sp.
MSKSDKQVKQPKVPKIKYFLAKRPKSDFVGPMQELVGPTKPRIKKEYQIERHIIKHTHPKFSVLDEVTFLSKNLYNATLYAVRQQFFADGSFLEYAKVNKQFTHDRQADYIALPAKVAKHTQQLVDQAYRSFFGLLKTKQQHPKINAKLPKYLDKTKGRQVVHYEKGALSFKKPGFIKLSGLNFYIKTKLIKKQVAFVRLVPKGNHITVEIGYEHEIPKPKDKAGRIAGLDVGLNNLATLTSNVATPMIVNGRPLKSINQFYNKHKAVEDSKLDTGQKTSKARKQQLGLVRKNKIADYLHKSSRHVVNYLVANNIDTLVIGKNIGWKQDINIGKRNNQNFVAIPFTNFIKQVMYKAHNVGVEVIYQEESYTSKCSFFDNEAIQKHDNYAGCRVHRGLFKTASGKKVNADVNGSLNIIKKHLITQEAWNDQLRLDLVEASSTPNIPKFTPDC

SEQ ID NO: 5001 - protein, 294 aa, Acinetobacter sp.
MKTLKLRIKDKHCKMLDQLASEVNFVWNYVNDLSFKRLKRTGQFFSAYDIAQYTKGTSKECNLHSQTIQAVTEELVTRRKQFKKAKLKWRVSNKKSARRSLGWIPFKKVAVKYADGYVQYGKHQFKLWDSYGLSKYNVKTGSFVEDSRGRWYVCLVVDSHKQEKPTTTKAIGIDLGLKDIATCSDGTVISNPKFYRKYEQKLGIAQRAKNKKRVRALHAKIANCRKDHLHKASTMLVKNNVYIIVGNLSAKKLVKTKMAKPVLDTGFSALKTMLKYKCENAGVLFEEVNEAYTT

SEQ ID NO: 5002 - protein, 470 aa, unknown
  TnpB Polypeptide
VETGDEQGFYTRGVVFTLDPTPAQERLLSSYAGSARVAYNWAIRRASSNLAQRRAQREAGLPEEDLTPAISWSAYSLAKAWNEAKGEVAPWWCEVSMHAFRSGTAAAAAALANFSASKKGERMGRLVGFPRPKTRRRSTPSVSFVEINHQLSWLAPDRHGVRLMLPQSSPNPDVRRRCSQLEWIHTTESTRRLYRLVESGRATIQKVTISRRGGRWQVAFSVRHLVRPPVPPRRQSAAGRVVGIDAGLVHLATLSTPVPGLSDEDGHVANPAVLAAHLRRLKKLDRAVSRAEVGSKNRRRLLQRRARLHGQIAKTRAFELHRASNALVRRFGTIAIEDLNVAGMGARKGRLGRSVADAALGELRRQLTYKCADRGATLIAIDRFYPSSKTCSSCGSVKAKLDRATRVFDCQGCGLVMDRDVNAARNIDREATRLLARAQMPVAGLRPETQNAGPRPRKTRRAHARTAAAV

SEQ ID NO: 5003 - protein, 431 aa, unknown
  TnpB Polypeptide
  misc_feature (154)..(154): Xaa can be any naturally occurring amino acid
  misc_feature (162)..(162): Xaa can be any naturally occurring amino acid
  misc_feature (170)..(170): Xaa can be any naturally occurring amino acid
VSEVVRTVIVRSAPLPRRVFRVFAELEGMYRNMVEQLTTHAVRNSVTSFTKLKALKYRDLRTLYPHLPSHYAYTACQDASTRIKSFLRLKKKGLTNREYPDVRRVSIWLDDHLWKPGGLTSVEVATHAGWVRVELELHKQYWRYVNGGWRVASXAKVKLDRXSRRLVIYXTFKKSVEAYEPRGFVAVDVNENHVAVLVGDSVYIFETGFRDVILGYYYRRKRVQEKYDKVYGVSCRVKRRALRKLRERKVKNDLRWKLANIIVRIAKESWYAVVLEKLGKNPAKEMINHVRDDQLRHRIYQASFRGVQRAIEEKAREHGVPVVYVNPRNTSKLCPVHSAPIVYDNSSRIGRCSIGGELWHRDVAACLNLLLKAHLGDGSPAPSLGGVPVDGRIIPLASTATHEPTTLPRGLWARWKPLDATNKHKLMRMNI

SEQ ID NO: 5004 - protein, 385 aa, Bacillus sp.
MKRAYLIEIKPTIEQITKINQTIGVCRYVYNLYISKNKEMYVSEGKFLSGYDFSKWLNNVYTKECNQWIKEVSSKAVKQAIMNGDKAFKGFFKGLSGFPRYKKKKNQDVKCYFPKNNKTDWTIERHRVKIPTIGWMRLKEYGYIPKNGIVKSGTVSQRAGRYFVSVLCEIEEVRVKPTLNKIGLGIDLGVKDFAIRSDGKTHKNINKTVKVKKIEKRLKREQRSLARKYENIKKRGKKPVTNKTSNIDKNILRVQKLHSRLANIRLAYVQSVVNAVVKTKPQCITIEDLNIKGMMKNKHLSKAVTEQCFYTFQTWLLTKCEEYGIELRQVDTFYPSSKLCSCCGQKKTDLKLSDRVYTCECGNVMDRDLNASINLLQAKEYTILT

SEQ ID NO: 5005 - protein, 384 aa, unknown
  TnpB Polypeptide
VQRNLSTTVRVKLHSLTNRKANLLAREYEAFQTEVHGGDTNLYSATKQQASKVHRQKDPNPDTEQPVVLRNDVFDVAHDEDTVLSSWWVKVPVYDPDRGQGNSIWCTAHVPHKDEQLVRKGDIRDSELVRRDDDWYVHLVVRQSVTVADEHDDVLAIDMGARGSPPARFSPTAKTTFYGEKVRRIREHYKQLRKSIGKAKPRQGQQVVERIGDAEARKVDDHLHKIARQIVEDAEERNAVIVVGDFGGIRKDNDKGRYVNDKTHKMPFARLLNYIEYKAHDAGIDVQLVEEYDTSKTCNRCACEGVRAMQGQFECPECGLDDNADKNGALNIGKRALGKFSKPLSEAGAVLAQPEAQVIVHRDDEPVNLSVSVGSTPSGGTPRL

SEQ ID NO: 5006 - protein, 359 aa, Hydrogenophaga sp.
VDTVKTLKLRIKDKHASVLRAMARDVNMVWNYCNETSARSVREKGKFLSGFDLQKLTDGFSKCDGVKVGSATTQQVCEEYATRRRQFKRARLNWRVSNPKSSKYSLGWIPFKSRAVRYKGGQIHFAGEKLGLWDSYGLARYELRAGSFAEDSRGRWYLNVQIKVAELVGPRLPVTSSVGIDLGLKTCATASDGRKIEGRFYRALETRLGIAQRARKKRRVKSIHSKIANQRKDMLHKFSTQIVANNAAIFVGDVSSAKLVKTKMAKSTLDAGWSMLKTMLEYKSREAGIVFVEVPEAYTTQTCSCCGARPHSSPKGRAGLGIREWTCDACGAVHDRDVNAARNILALGHERLAGGIPVL

SEQ ID NO: 5007 - protein, 394 aa, Mycobacterium sp.
VSRYRLLPTAEQAAALAEHCRHARYVWNLAVEQQQHWQPGRRAPGYNEQCAQLTAARAEYSWLAAGSQTVQQQALRDFAQAIRAFFAGTHRRPTWRKAGVHEGFRQVGLKSHHVERLNRRFGRVWVPKVGWVRFRLSRPIPAGTKSYRVTCDRAGRWHIAFAHIPDPIAGPGEGSVVGVDRGVAVSAALSTGEMLHAPGLSRGEANRLTVLQQRLGRAKPGSNRRARTKRAIAKLKARETDRRKDWVEKATTDIARRFDTIRIEALDVRAMTRSARGTVEDPGVGVAQKRGLNRAISRSCWGLLAARLQHKASGRVEQVPAAYTSQRCSACGHIASGNRKSQAVFECETCNSGPCNADVNAARNIAAGRAVTARGDLGASRSANREPQLCSPAA

SEQ ID NO: 5008 - protein, 297 aa, Hapalosiphon sp.
MWEQNHGFPRFKKPGRMRSFSFPQLGQNPLSKGHIKLPVIGAVKVRQSRDIPDGGVIKQARVVRKVSGWYVTLTLTWDVNPPQPMPHGEAVGIDVGLTSFVATSNGLVVKRPRFFRISERKLKLLQQRVNRKRIGSNNWHKAQKKVASLHEYVANCRKDWHRKLSHQICDDAGMVFVEDLNLVGLSRGMLGKHCLDAGFGQFFNILEQTCFKRGVYFQKVDARRTSQICPSCGIETGKKQLSERTHKCSNCGYTTDRDVAAAQVVAVRGLAAVGHTVKMLGEGKFIGIPVKQESPHL

SEQ ID NO: 5009 - protein, 288 aa, unknown
  TnpB Polypeptide
MNTYKAYKFRIYPNKEQKIMIDKTFGCTRFVFNKFLSERKEKYEKSKIKLSTYEQIKELPDLKKENKWLKEVDSCALQKSIFNLDDAFKNFFRGNGYPRFKAKGEHESYTTNNNLNEYKNVKYESIRIDFKNKVITLPRLKKVKFRGYRSNKVIIGKIKSATISKDASKYFVSILVEVPFTKPIINPTSIVGLDLGIKDFIVTSYGEKLKNEVKVNEKRLKGLQKGLARCKPGSKNRYKIKLKIQRLYLKIRNARKHMIYKLTNKILKACLKLTCPILPCKNCNTYCG

SEQ ID NO: 5010 - protein, 362 aa, Prochloron sp.
LKKDWNKWLAACRYCFNQAIAYQKENGSIGKRKLRDIVMQSELPAWVKETPCHIRQNAIFDAHQAYSKSKNCKFRSCKAPRQTIKFNNSNYTKGKWYSRLTKGKDFESSEPIPPSSAYASQIIKTKCGDWFAVFLEEVKPNINNVDGIIAIDPGVRTFLTGFDGRAFVEIGSGDIGKITRLCQHLDLLMSKIGKSKSKRQRQKMRKAAARSRRRIRNLIDECHRQAASWLTKNHSYILLPTFETSQMTKKKKRKIRSKTARQMLTWSHYRFKQVLKNRAELSGCQVIDVTEEFTSKTCTKCGHIHTKLGGSKVFKCPECGHEINRDFNGALGILRSALRDTSVTFSSDAIVVKSDFVSLCTA

SEQ ID NO: 5011 - protein, 346 aa, Cupriavidus sp.
MAQRAGDTVAQGLSRSSAACAQGLERAYKNFFAKRAAFPRFKKKGQRDSFRYPDPKQIKLDQANSRIFLPKLGWLHYRNSRNVQGEVRNATVSMSAGKWFVSIQTQREVEQPVPQGTSAVGIDVGVTRFATLSDGSYLAPLNSFKRHEARLGRAQRTMSRKQKFSSNWKKAKARVQRILARIGNARRDYLHKATTTISQNHAMVCIEDLQVRSMSRSAAGSAEKPGKNIRAKSGLNKAILDQGWFEFRRQLEYKLVWNGGWLVAVPPENTSRTCPACGCVSADNRLTQARFACIECGFEENADVVGAINVLARGHRVAALWRAGAVRPLCETGTHRSGCAAHRVAP

SEQ ID NO: 5012 - protein, 306 aa, unknown
  TnpB Polypeptide
MKRSNTFAVRPLTDDDEQVLRDLLDASAALWNEINYQRLMRYNDEDGFEGDVWDADTGALEGKYKGVLGASTAQQVIRKNSEAWRAFFESKKAYHDESNTSATEHPEPPGFRGNEDDGRQLKTVIRNTSYTVEWGERSRLEILVGCELKDRYDHTGRLRLEIAGTPTWLDYDKQGRLDLWYDETDSTFRASQPVTVSDDARDTPLADEKAALDIGVNNLVACTTTTGEQYLYEGRELFQRLRETTREIARLQSKLEDGRYSSERIRRLYRKRTRRRDHAQEALCRDLLDRLYAEGYGISVEVRSEA

SEQ ID NO: 5013 - protein, 398 aa, Microbispora sp.
VQLRYNFRLYPTPRQRQALARAFGCARMVFNDALRIRQEARENGLPYVSDGDLSKRVITEAKKTPERAWLGEVSAVVLQQALADLNTAYRNFFDSINGKRKGPKIAPPRFRSRKDNRQAIRFTKNARFSITTGGKLRLPKIGDVPVRWSRPLPADPSSVTVVKDAAGRYFASFVVEVAQQPLSQVAPEAGIDLGLSAFAVLSNGRKIDSPRFLRRAEKKLKRLQRALSRTAKGSNNRAKARLAVARQHAKVADARREFHHQESTKLIRENQAIYVEDLAVAGLARTRLAKSVHDAGWSAFAGMLEYKARLYGRVFHRIDRWFPSSKLCSQCGTLAESMPLNVREWTCPCGAVHDRDVNAAKNILAAGRAERLNACGAQVRPGPGLAQREEAGSLRGAA

SEQ ID NO: 5014 - protein, 391 aa, Alteromonas sp.
MLRATRVRIYPTLEQAEFLNAQFGAVRFAYNKALHIKKHFYSRYGQTLSPKKDLKPLLSVGKRSRRYNWLKQFDSIALQQSVINLHTAFDNFFNPKLKARYPKFKSKHGKQSSYHCVGVKVFDEAIKLPKLNQPISAKIHREINGTVKSITVTLTRTGKYYASILVDDGLEVPKPANTIDKITGVDLGLSAFVVEASGRKTVNPRFIKRAERNLKRKQRQLSRKQKGSANRNKARLLVAKCHEKTANARADFQHKLSHTLVDENQAVIVETLKSANMMKNSKLAKHIADASWYSFVTKLEYKAKQQGKHLIKIDQWFASSKTCHCCGHKMDDMSLSVRKWDCPSCDTQDIDRDVNAALNIRDKGILELKAAGLVVTAYGGLCKTCHEQAAA

SEQ ID NO: 5015 - protein, 348 aa, Alteromonas sp.
MAIKTLQVRVKDKHIPYLCSQAIKVNYVWNYINQLSSRVIKEKRVFLSDYDIQRFTNGSSKLIGLHSQTIQEISKEYVTRRDQYKKHRLAWRKSRGAKRSLGWIPLKSGSASYRNGQIYFNRNYFKVWDSFGLSKYTFKSACFSEDSRGRWYFNVCVEFPPNQSEGKSIVGIDLGLKDVATDSNGVKIRGKDYQYLEHKLAVAQRARKSKLIKNIHSKIKNRRKDRLHKYSRNLVNKNSAIFIGNVSSSKFTKTRMAKSVFDAGWGLLRTMLEYKCAHAGIVYSTINEAYTTQSCSICGSNKNGPRGLAGLGIREWTCECGITHDRDINAAMNILALGHQRLAGGVPR

SEQ ID NO: 5016 - protein, 365 aa, Alteromonas sp.
MRLKTLKVRVKDKHKKELNRQARSVNYVWNYINEISSRAIKERHIYMSAYDIHPYTKGSAKELGLHSQSVQCIASEYVTRRKQFKKVSLRWRKSMGASKALGWIPVNSRAAKFKNGCIFFNGKYFGIWDSFGMSKFSFRAGSFNEDARGRWYFNVVVEVDNHLSKGDQIIGVDLGCKVAATASNGDMMDKQEYRSLQDDLRKAQRAGNKKRLRNIHAKIANRRKDNIHKFTRRLVDSSRAIFVGNINSKQMLKTHLAKSVSDAAWGKIKSTLEYKCAYAGVVFDVIDEAFSTQTCSNCGEIPDNSPKGRTGLGMRQWKCASCDSQNDRDINAALNIAAAGHRRLAEGILSLKRGIDVNAPFLRIQ

SEQ ID NO: 5017 - protein, 480 aa, Blautia sp.
MYNAGVRHCIKQLNELKEDIWYKYCLGQFFACKDEKESKRWSKEIFICAAAYQLTEYDLHAYFGRGKISGYEGGIGINIVQKTATALYSAAKKAIFGKMIHFRKFEETFSFEDKKATSGIIYKDKADTVTVCGTTFKLKPIRKSDIWLQEAMRYKVKYCRVIREPFGIHYRFFLQLVMEGVPPQKHAIGAGTMAIDPGVSTMTSYNGGRLSFKELALDVNKYQEKVIKEQNRLSRLTRINNPECYDDKGVHIKGMRVQYSKSMKRAKMRLRTAYRKQRVYVEQSNNNLANEWLEASGSVVKIETMNYKGLQKKSSKTERQDEGFAVTDKTGRRRSIRKFKRRKRFGGSILKHAPSGFLSTIKRKVIATCGIVIDVSASKLKASQYNHASDTYEKVSLSDREKIIDGHMVQRDCYSSFVIFYATDDNEPDRKGCLNGFEKFLICQDKLIEEMAHDNFSNPNFGTKLINIKKQQLRKEPAAA

SEQ ID NO: 5018 - protein, 694 aa, unknown
  TnpB Polypeptide
MIGKYYSGPSTKYLVESFVLSSEDRVVLRKGKERKPDPSFKGNSTQFSQLSSAVRGTGKKVKDIDLRTLTFYFDNYIRAVNIVLSRIYRNSKRVEQLGKTLAKYRGKSYILLSKEKDLCYQHNEDIKKLVFGRLHRNVLEQAGRMLLADWTRRQLVISALKVLNDSPEELVTILRRRRIPSFLIRKVRDSCESTKNNGSGYHYAMGVLRQLRLAIDKYILGFTKNTIGWRARQRKKVASLLKDGSPDCQSVINIVESQVKSWVQNGYPFTVPQLRRYSLDFSASTENSTGQGYWFTPDEERENEILLYLKLPPGFNGTHHKDSPYKSKTLTFRFLDWLPRAASQDRRKAEKAEREGNIHRVEQLRFRAAKFEDMHHQLMNTIKLQHTAHRLSRMKQIKHNDLDEIIRLQQKVSRLKGYRRCSPPQLLLRGHKIILRIPFLSPNGPVSSQIFGERKYTTKAGADRGLRAPVALTVERECSFEDFLITVGPLAEKRDRIRKHAYTLTSELARMKNNWESKRSGQSYPAHIMKRDRHVEALWRKVRRLDREIVRQVASQTVWFCEEHRVKRLFFEDLRSFQGHAGSKHVSYNLTSNLWGKIINTVRYMRESLGHSKYSVWTVNPRYTSQTCHQCGEKGVRVRDESSIIESKGGEYFYCSECKEHFHADINAARNIIHVQDSSDVPGGTKVCPVYNER

SEQ ID NO: 5019 - protein, 382 aa, unknown
  TnpB Polypeptide
MVRTHKIQLKVNNKQSTLLSKTCGCNRFAYNWMLNKSNELYKRGEKYNKFQLKREFNQFKKTLPFIKEVNAHAVVNDAIDRLSNSFGRFFKKFSKFPKFHSKKKNHGSFSLTGSEIKYDSENQKVYLCKLGWLKLTEKVRFTYSKIYKITVTRHADKWFVSFCLEVEDNRKCENQAFSVGIDLGVKNNITCSDGFVIENPRILNHYSRRLRKLNRQLSRRVRGGKNWWKSVYALRKLYYKISNVRKDLIHKFTTKITRKYGIVCLEDLNVKGMVKNHKLAKHILDVSFGEIERQIKYKALEVRHVDRFYPSSKTCSSCGFVKQDLKLSDRKFICPSCGLNMDRDLNASINIRDNAVSSTVNACAVDLGSKTSSRQELNIKSV

SEQ ID NO: 5020 - protein, 385 aa, unknown
  TnpB Polypeptide
MKKKRKRKQKRACRTYKYQIREHPKNVRLGNMLDDLGDVHNHFLALEKRYYRIYGKYAGRYRLQPHLTKLLERTHKHWAWIPRDTLDAVIIRIHITYDRFFDGLGGLPKFKRKDRYRSAKFQSAYQLEEGRVRISFKAWDESLHSLKFNKRWFSFHHHREWNGNVRYIQILRDSVGTYWLYIITDASSTEPYLATGESVGIDFGLETYLTLNTGEKIEHPQPLKQSLTELRKLNKSLSRKVKGSHNWWRAVGEPARLYRKIANQRKDWHYKRATDLCRRFDTLVVETLNLEGMKRLWGRKVSDLAFGQFVEILKFKCFKHKRAFLQIGQWTPTTKPCSECGHHNENLSLSDRQWTCPACGSHHDRDVNAAMNILRAALGPSVEQM

SEQ ID NO: 5021 - protein, 378 aa, Lactobacillus sp.
MTLKGIKLRIYPNREQQLKIKLNFGYNRFVWNQMLNMMIERYRNNPEAPFLNAFALNNLLPALKTEYHWLKEAESTSLQATNHDLVEAYRKFFREHRGFPKFKSRKFPKQSYTSRSGIRLMDTNHIKLPKLGIVRFKSGQKLTGKIKNVTIRLSLTGKFYAILLVDTDVLELVKTGNSVGIDMGVADLMITSDGMKYPTIRFDKILAKKKHYWEKCLARRRLQAKKEIAWDHHNKVLNPRELSDFKNYLKAKHMVAKYNEKIANQWNNYLHNLSKQLVEQYDLIKIEDLKTKNLLHNHKLARAIANQSWRKLRSQLEYKCAWYGKQLVTVNPRKTSQICSNCGFDDSKHTLDVREWTCPKCGTNHDRDINAAKNILSA

SEQ ID NO: 5022 - protein, 509 aa, Aphanizomenon sp.
VQIRWRFKLQPSIGQQALMSEWLVTLRKHRNYCLAERQRGFETNNQKSDESVIYQYGAFSDLDTRIEYGSYCPLTCPVVKHGVMSSGLTKNSKKHGLTWGSATDIQGKRTTELRSESEWYSRINSDVLQGNLAKLDIAYNGFFQHKRGFPAFRKAANFKTFQFKPGQVKLTVNRESNQPRCYSHAYFPGLGTMRYFDSRTIPIDADIRTVTVIKEADGWYMSVLLELPESLPEVTEIETVKSAVGIDVGINKLISLSDGSFIENPQFATNKKVRRQLRIRQRRVNRKIKGSNNRKKAGKIVAKLHKKIADKRNDHQWKAANKVVNTAEAIVQEDLNVKAMKSRCQPKKQQGRFMANGQAAKRGLNRSISDASWGELFSKIAWLALKSGKPVLSVNSKFTSQECSACHHISKANRDGEKFICENCGHIDHADTQASRTILRRANLKFVSNRRKKPTHQSLVPTPGLGESNALLCNDAARNGKRHQAGNRTSKVIPEKRILFEQLCLQLFD

SEQ ID NO: 5023 - protein, 439 aa, unknown
  TnpB Polypeptide
MKIKGRIVQLELNNKQTTLAFKHIGTARHAYNWGVSVCKDLSEKREKLPSKFDLQNKLVAEVKSENPWYYEVSKCAPQKAIFEVKEAWTNFFRDLKNCTIEKQKNNYIAKQKRKNQVINYDKLNDIGKPKFKKKGINDSFYLEGTNHSPIKISKNKIKLPHFGWVKMSESFDEDFTVKNVTISRTANDWFISWKTEFDDDALKIEGIENMPEVGVDIGIKTLATLSDGTTFVNVKAFKKYKGKLKKAQRKQSKRYNPKSKEQSKNYKKASKKVAKIHQKIANVRKDATHKLTTHLAKNHSTVKIEDLNVSGMLKNKRLSSAISDGGFYEFRRQLEYKCAWYGSNLLVIDRFFASSKTCSCCGKVKKDLKLSERIFNCDGCGLSIDRDLNAAINILNFTVSYTGSACGELCKPTKNRGNSLKQEANSDQRRNVEERISFV

SEQ ID NO: 5024 - protein, 294 aa, Lactobacillus sp.
FKSKKNTNQSYTSKFVNNNIRIVDERHIKLPKLGLVYFKAGRILNGKIRAVTVRVNSRKQYQASILVESENQTFKKTKKSVGIDLGLKSLAITSDGQKEDILKVDDRLNKQLRIWERKKSRRYENAKKAMAFDEHDKVLFPRTDLKQFPRYQQAVRTVAKLKKHIAERRRDNLHKLTTRLVKDYDTIVVENLSVKNMMKNHHLSASIANASWGTLISQLKYKCAWYGKRLIIIDPKNTSRICHECKQKNHEFDSLSQSEWLAAREWDCPNCHAHLDRDVNAAKNILAKGLETLS

SEQ ID NO: 5025 - protein, 322 aa, Oscillatoriales sp.
LAKTWFQWISAARWCFNQALAILKAEKIGKYDLRKKVMSCAPAWVGKTPYNPRQLAVFQAVEAHQAAKKTGGHAKFRSVRDPVKSIRFQKDNWKQGTFYPTQTKGLSFISREPIVETMEHEPTLVLDRGRWFICYAVDAPKPRPIESQLAIALDPGVRTFLTGFDGQEIWEIGKSDMGRIYRLAYHLDRLMSRIGLAKGHQFKRLRYRLRKAAQKIRIKIRNLVDEVHKKAANYISTKYKVVFLPKFEVKNMVKRGKRRLATKTARAMVTYAHYRFKTLLKHQAAKYGCVVVDVTEEYKAQNLFKMWSYSHQARRQQTICLP

SEQ ID NO: 5026 - protein, 212 aa, Bacillus sp.
VSLLVETEVQELPKTNSYIGIDVGLKDFAILSDGTTYKNPKFFRLLEEKLAKAQRVLSRRTKGSTRWNKQRVKVARLHEYMANARKDYLDKISTEIIKNHDVIGIEDLQVSNMLKNRKLAKAISEVSWSQFRTMLEYKAKWYGKQVIVISKTFASSQLCSCCGYQNKDVKNLNLRKWDCPSCRTHHDRDINASINLKNEAIRLLTARTAGLA

SEQ ID NO: 5027 - protein, 392 aa, Mycobacterium sp.
VRRAYKFRMRPTARQHVRLAACLDAHRELYNAALQERRDAWVQGRTRIAYEDQAAQLTEIRVVRSDIAVWSYSSQQATLRRLNKTFELFFHRLKAAGKAGYPRFKGPGRFDSVEWPKDGDGARWHADKKRVYLRGIGQVKVTAHREVLGRVKTIQIRRQGRRWMLVLSCDDVPRNPLPPTGRQVGVDLGIANFAITSDGSHVSNPRWARSAAHKLTEAQRRFTRAMRGSNNRARKGEIVAARQRKIANARRDYHHKTALQIVRCYDLIALEHLAIANMICRAKPVHGSEPQRPFLPNGGAAKTGLNRSIVDAGWGQFITILRAKAEDAGRICIVVNPRNTSICCEACGHTAKENRATQAVFICRACGHTTQADEQAARNILRAGLALHATIA

SEQ ID NO: 5028 - protein, 290 aa, Ruminococcus sp.
MIYNYYLDKRIKLYEEEKITFGYTKCANDLTILKKEKDFLKEVDSISLQQALRHLDTAFQNFFKNQKTRFPNFKSKKNNHNSYTTVCVNHNIKLENGMIALPKIGKVKVKQHRDIPDHYILKSVTVSQTPSGKYYASILFEYEEEITEKEPESFLGLDFSMKELYVDSNGHEPAYPRYYRRAEKKLKREQRKLSKMVKGSKNREKQRIKVAKMHEKLANQRKDFLHKQSRKIANSYDCVCIENLNMQAMAQSLNFGKSVSDNGWGMFTAFLKYKLEELGKRLPESVKFKL

SEQ ID NO: 5029 - protein, 462 aa, Caldilineaceae sp.
MARGTAPKVTRILYSRDLNRAKYDRLHGITALCARVRGDAWQRCSGISAARQSAYEIRNAWMAADYDWHGLPAVLGRATLLDALGDIKASREAAKASVRKAIWNHTRGCPAERKRLYSLLKRDRWDEDAYLHRHMRRKWKGGTSRCSNQIVLEPNAYETQVWHGRTWLYVKGVARGERIAVPLGGTRVPTGNLRLILRDGQVEVHHAVDEHAVCSTRPCGEGEIGVDKGYTEAYTDSDGKRHGEGLGDLLAAESDHVKVKGGRRNKLRAVEKKHREAGRTRKADNIRRNNLGNCKWDNRKKLHNAQVRELLCKAAHGIVDRAAVIACEDLTAPMQSAKVRHKGTRRRLAAWTKGLMADTLTSISRRRGSASVLVNPAYTSQIDSRTGLLQGKRRGDRFHGWDGVVLDADTNAARNILQRMYDDEIDLYMPYRKVRSLLLDRIGTPEGTAPPGLEPVGRRTLA

SEQ ID NO: 5030 - protein, 393 aa, unknown
  TnpB Polypeptide
MIRAYQFRIYPKKKQEVILNRTLTTCRHLYNNALAERKRQAVLNRLKKQFDVFPWGKPEWIYYEDQANDLSGSKTDFQKEVHSQVLQNILKRVEKSMDNYFAGSGYPRFKGRNRYNSFTYPQSGFKLKDGKLTLSKIGTFKVIQHRKIEGKIKTCTIKRDIDQWYVSFSCEISNPVPVKIKTKTGIDVGLIDLITLSNGEQVKPPKFLRESEDKLIHEQKRLSRKKLRSKNRKKQIIVVAKAHRTIRNQRKDFAHKLSRNLVDTYDSIKFEDLQIKNMVQNHCVAKSISDAGWYQLMQFTKYKAEYAGKFVEFVNPAGTSQTCICGFSVPKDLSVRTHICPSCGLVMGRDQVSAILIENRPSISTVGTTGINARQGLLNRDQCSGKPPLLVGW

SEQ ID NO: 5031 - protein, 377 aa, Prevotellaceae sp.
MKLALQIKLLPTDEQAVMLKKTFSVFNEACNTISHIAWERHVFKQFNLHKEIYYPIKETYHLSSQLVVRAISKVADAYKLDKKKQRHFREFGAITYDSRVLSYNIDKSVCSISLIGGREKIAFTCYRPQLMQYAKGEADLVLIKEKFYLYQTIDIPDEEEEAAEDFLGVDMGITDIVSLSDGTNVSSKEAKDIRNRYNKVRASVQSKGTRNCHKLLKRLKGRERRFVTIVNHRISKQIVAKAKKEHKGIAIEDLKNIRWGMNSKKRNKTFRRRSNSWNFYQLRSFLEYKCKMNGVKITAIPPAYTSQTCHECGHIGIRHGKHFRCAHCGNVADADVNAALNIATWGYVNAHERWELLSCPIHDDFSTSKARKSLVCG

SEQ ID NO: 5032 - protein, 423 aa, Dictyobacter sp.
MNPTPEQVAYLKRACGTRRFIYNWGREQWEKQYQAYTLEQKTVPEGQRVLPLPNALALKKQFHAIRAEAYPWTYEVTKCVVEGAFDDLGKAYSNFFAGRAAYPRYKQKGKSHESFYLSNDKFTLGSHWIAIPGLGRFILDQRKQEKERGKLRRKLGTVNLAEKLRFVETGKVTPPTKKRNKRKQVLCESVKILGATVSCEAGHWYLSIQMEIKKPLPPTPVPVVGVDVGLKQAAVVSDGRVLENQKPLARHLNKLGKLQRHLSRKQKTKDPHTGKTTFSENDQKQRVKVARKHQQIANIRRDVQHKFTTELARTCGTIGVEDLNILGMMANRKLSRAVADAAMGQLLQLLKTKVAASGGNFFIASRWFPSTKRCSKCGQIKKRMPLKHRTYQCLACGLVIDRDLNASLNLAQFAHDMLRRLSA

SEQ ID NO: 5033 - protein, 381 aa, unknown
  TnpB Polypeptide
MSVLSYKFRLYPTQAQVAGMEAMLGAFCDLYNAALQQRIEAYRRRRKTLRYTDQAGELKAVRAADERLAGYSFSAQQQVLRRLDKAFQAFFRRLKAKGKAGFPRFQAKARFDSAEFRVGDGLTLRKSGRLGLTGLFGEIKVKWHRPLPPGAKLGAAVLSRSAGHWYVCFQVTVPDVAVAERDGAAVGIDVGLTSLVATSDGEVVPTPPWTKRAAKKQRRLQRALSRCKRGSQRRRKAKQRLARHSARTANQRRDVLHKLSRSLVDRYAVIALEDLSVEPLARSMLAKSVHNAAWGHLRSFLEYKAASAGTRVEAVDPRGTSQTCPQCGAVIAKTLDIRVHRCLCGCVMDRDVASATVILQRASHATGPGHGLRTPSQRGAA

SEQ ID NO: 5034 - protein, 784 aa, Catenibacterium sp.
  misc_feature (552)..(641): Xaa can be any naturally occurring amino acid
VKPDHIHVFVDVPQTAVSCDVVETFKDISAIELFKAFPQLIQFYAGCGILWSRGYFVSTVIKIILRSRKMITDKEHKRHLKQFHKLSDRHILAVETDMPYSDVLKVVALSDKIRKAGNELVGLMRKNYNQLMRTKRYRKLLFLYGNSKDKDKRKTYAEQLNEMQKAYNITWEYCRTSMIPIGKKYGVDAVFALTKAEDIWRGIEKCLYGNGNAVHFSRYGELPCIRAKQINRGIPISVTDNKLHFKLGKTVFGIQINDRFQQDEVDAVLSYLSESEILDDRAVNTLIKDGCCIDTYRPCYATLVPRMIRGKYRVCLHLTIEGKAKPKYDKHGSLRHKYGKGMIGADIGTQTVAYTSDTEVGLKNLSERGNSIQTSERKERLLHRAMDRSRRATNPQNYNDDGTVKKGRKTWIYSNHYKKLKEKYSELCRINAINRQLAINEDANHLRSLGDVFITEPKNAGKLMRRAKETTVNSKGKFNRKKRFGRSIKNRCPSGFQAAVEQKFKVSGGIYIEVSNDYRASQYDHTIDDYIKKKLSDRMYKLQDGTEVQRDXXXXXXXXXXXXXXXXXXXXXXXXXXXXXXXXXXXXXXXXXXXXXXXXXXXXXXXXXXXXXXXXXXXXXXXXXXXXXXXXXXXXXXXXXXGNESSDSNRFTLVTPKSENDVRLQATLGNQNPTGLPMGVVSSILLMIKKCLFLMLLLNQDAETTGISIMVQDRSYYVLQEEGIIRNGENLLRNSMWVIQFILRQKSNIGMVQHQKAILYILQKVYQMKMLQTSGLKQWMKKNI

SEQ ID NO: 5035 - protein, 242 aa, Catenibacterium sp.
GQTAFKRFFDHKSAFPKFKKKGRSDVKMYFVRNNPKDCLCERHRIKIPSLGWLRIKEKGYIPTTKDGYVIKSGHVSIKADRYYVSVLIEIKNKRIVSNSSEGIGIDLGLKDFVIVSDGKTYKNINKSAKLKKLEKKVIREQRSLSRKYENLKKGESTQKRNIQKQRLKIQKLHHKIDHIRTDYINKIIAEIVKTKPSYITIEGLNVSGMMKNRHLSKAVILQKFYEFKTKLEAKCKENGIEL

SEQ ID NO: 5036 - protein, 388 aa, Lentzea sp.
MAYRCRAYPTPEQTAVLNRTFGCVRLVWNKSLSERNHRYRAEGVRTSYRQTDAALTGWKRTEELAFLSEVSCVPLQQTLRHQHTAFGNFFAGRARFPRFKSRTGRQSAHYTRSAFRMREGVLMLAKTSTPLRFVWSFGEVDLAALDPTMVVVSREPDDRWYVAFAVDTAEPAPAEPAGHAIGVDLGLKDLVVTSDGERIANPRHLVRKARNLARYQRRMARCERGSGNRGKARAKVARAHRKVRTARQDFLHRTTTALVRSADVIVIEDLSVKNMVRNRHLARAISDAGWGELRRQLEYKCDRAGRTLVVIDRWFPSSKTCSVCGHVLAELALSARHWTCPGCRTRHDRDLNAAKNILAAGRAVTRGDSGDACGADVRRQGSSFRDRQ

SEQ ID NO: 5037 - protein, 455 aa, Methylococcus sp.
MSTCNKAFKVRAYPTQEQRRMFARTEGACRYVYNRALIEMGESYQQKKDGLVEKTKTTIDVSRDVTQWKKQEETAWLAEVPSSPLGQTLRALDDAFKRFFKGQTKYPKKHRRQMACSIRSQLDPRQKTAAEAWANQKIVFPGFGILKTSQPKRLRVAQPKMLTLSLDACGRYFIAFQVEQEIEQLPANGQTVGVDLGVKTLAVYSTGEQVKAHEAAKKLKRKLKHAQRSLSRKVGSKKGEAKSNRYKKQQRRVARIHCRIADARKDTQHKLTDDLTKRFGVVCLEDLNVKGMTKSAKGTAEAPGKKVAQKAGLNRGIANAGFSEVRRQIEYKALWRGGAALFADRFAPTSRSCSCCGAYQTEFSLKIREWTCSDCGAVHDRDVNAAINIVTFAMGGTPEARAGNVRSKARGEANNPGPDEAIQPTRWGLDEPRTESRLLNGQEVMPSKSRRRAAA

SEQ ID NO: 5038 - protein, 388 aa, unknown
  TnpB Polypeptide
LLKSYKTEIDPTQEQIQTINRTIGTCRFVYNFYLAHNKETYEKEKKFVSGMDFSKWINNEFIPNNKNYKWIKEVSSKSVKQSIMNAEKAFKRFFKHQSGFPGFKKKGKSDVKMYFVKTDSKVIIPCERHRIKIPTLGWVRIKEKGYIPTNSETHTIKSGCVSCRAGRYYVSVLVEEIQKDQPILNDFGIGIDLGIKEFAITSNGIIKKNINKTATVRKLEKQLKREQRCLSRKYDDYKKRKKKGEATRQNIQRQQLKVQKLHQQIENNRTDYVNKCVNEIVKTKPSYITIEDLNVSGMMKNRHLSKAVASQKFYEFRTKLETKCKENGIELRVADRWYPSSKLCHECGCIKKDLKLSDREYICDCGYHTDRDYNAALNLRDAKTYKIA

SEQ ID NO: 5039 - protein, 459 aa, Mycobacterium sp.
MARFEVPEGWCVQAFRFTLDPTEDQARALARHFGARRKAYNWAVATLKADIEAWRVTGIGTVKPSLRVLRKRWNTVKDEVCVNAETGAVWWPECSKEAYADGIGGAVDAYWNWQNSRSGKREGKTMGFPRFKKKGRDQDRVTFTTGAMRVEPDRRHLTLPVVGTVRTHENTRRIERLIATGRARVLAISVRRNGTRLDASVRVLVQRPQQPNVAQPGSRVGVDVGVRRLATVANEAGAVLEEVPNPRPLDAALKELRYASRARSRCTKGSRRYRERTTEISRLHRRVNDVRTHHLHVLTTRLAQTHGHIVVEGLDAAGMLRQKGLPGARARRRGLSDSALGTPRRHLSYKTGWYGSALVVADRWFPSSKTCHACRHVQDIGWDEKWQCDGCSITHQRDDNAAINLARYEEPPSVVGPVGAAVKRGADRKTRPCPAGGCEARKGGSRMAAEQPRDGVQVA

SEQ ID NO: 5040 - protein, 418 aa, Halonotius sp.
VAEDYIRRTAITRLEVSDEQQNLLEETISEWKRGCQIATDMAWGNCNAKSDVQPLAYDNVREHTDLGSQHAILATHQASQAITGCIERRFKGKKVSKPTFTAPTVKYDTRTMTLFDDDTVSLSTTESRVRCPLALPHADNGYQHQYLDSDKWSITESTLTVRDGDYFLHIGFRRAKDDTERDTAEDGTVLGVDLGIENLAVTSTARFCSGRDLTHNLREFEKVRAGLQQTGTRSAHRTLEQSSGRELRYIRDVLHQASNAIVDEALRYECDVIAFEDLTDIRDRTGASWGHKWAFRTLYEQVEYKAEAEGISVKQVGSAYTSTRCAECGFTADENRTTRNNFRCVKCESEANADYNAAKNIGLRYVRRGQQSSRRTGNSQLALKSGTVTLSGGFTAHPDRFEAEFTDKPRYQTSQTSG

SEQ ID NO: 5041 - protein, 418 aa, Halonotius sp.
MLDTTRTYVAKITNYQQVRDDLDACGFSVAKLWNVGRYYIQKQWDETGEIPEEDELKSELKEHERYNDLHSHSSQRVLEELAEAFTGWYNSDDGNNPPGYRKRGDDHPRSTITWKKKGIRHDAKHGQIRLSKGFNLKDSRSDFILVEYETRPDLTVENIQQVRAVWNGDRWEIHIVCNEQIPIEDAPGDNIAGIDLGISNYLAIDYENGGSELYPGNTLKEDKHYFSQDEYQTEGSNGPSDRALNARRKLSRRKDHFLHTLSKHIVERCVAAGVGEIAVGNLSDIREDDSGEARNWGQAGNKKLHGWEFAQFTDLLEYKAEEYGILVTRTDEENTSKTCSCCGQIRDSNRVERGLYVCDSCETTMNADVNGAVNIRRKITQSPPTRDMSNGCLAQPGVYLFDRESGSFNTREQGVCKP

SEQ ID NO: 5042 - protein, 410 aa, Halonotius sp.
MEINRTAVVKLSVPDDRRGDLKQTMDTFRDAAQRFVNRGWEGNDDGYVITSRSRVQSLVYDDIRDDTGLHSDLCVGAANHASAALRGAVEQIKDGENDDPVSKPVFTSNTTVYNTNAISYFNGYCTLAAYGSGRVKAECVYPDDSIQADYMESDEWEKQGAKLRYDTQTDIYYLHVSVVKEREEVSSEAGGQTVLGVDRNVDGYLAVTSSGAFIGNADLFNHKRGEYERRRGNLQQQGTRSAHLTIQSIGDRFANWSEDYLHQVSKRVVSEAVANDCDTIVLEDLEQIRDRISNASKFQQWAFRELGRQITYKGKAEGITVEVVNPAYTSQQCSHSECGFTHKQNRDGDVFKCQKCSKELHSDYNAARNIAMKYLQDRRKSDLGGATNHLALKSGTLNGSGDLTPTASRG

SEQ ID NO: 5043 - protein, 382 aa, unknown
  TnpB Polypeptide
VRQVRDQLTSLKDWWDELNDVYSTVAQAAVMRIEDSIKALSQLKQNGYNVGSLNWKAPKSFRSFTYIQSGFEFDSKNGQPVLSLSKLADIPLIKHRAIPDAETVKEITIKKESTGEWFASFTVGDKETPEKPTDPDRCVGIDVGILKYAHDTDGTAVESLDLSDERERLERAQHDLSQKERGSANWERQRQVVAERHADLKRKRRDFLHKLSNYYATEYDLVAVEGLDAKELVELPGNSRNRAGAAWGTFLRMLEYKCEREGTHFAEVDPRNTTKACASCGVKTDKPLWVREHSCPSCGFEADRDANAAWNILSRGLKNIGVVHSESTPVETALPTDTVVSAKRVIETGSPITRSQRLRVSSQNSESSDDTLKERTASAVSE

SEQ ID NO: 5044 - protein, 363 aa, unknown
  TnpB Polypeptide
VVVNYKLSGYAKNALSKYVPQLTTTYNAGELHDAHPVRFTNEGLRLDHKPENAIEWYVKIPHHEDYHLWMPAQPNPEQRDWLEALNAGDATMGESRLFRRDGTWYLHVTATRDAEGGSEVSDEERTPIGVDIGEASLVTVCHRDDHGCPTAPELWADEGKTVRRLRKTYFTATRRLQTRGSERIAESFGDDLWNQIDDVFHRVTREVVDYAESVKNPVLVLEDLTYIRESMDYGEYMNRRLHGWGFAKLHAQIRYKAVEKGIPVKTVNPRNTSKECHACGEVGYRPQQATFKCTNDACWMGEYQADVNGAVNIADRYLSGRVVSENTRTTMTRLRMGAFDRPTRQPSRCYQARDAWNVCVLKP

SEQ ID NO: 5045 - protein, 409 aa, Moorea sp.
MRLAYQYRLRPTREQKVVIDNWLSMLCAQYNYLLADRFNWYEANRCPINACPLVCHLPKLRVNPDYYSQKKRLPGLKKTHPWYKQVHSQVLQDVVKRVKLAFDRFIKGDSNGRRSGRPRFKKPHRYRTFTYPQVKEGCLDGDLINLPKIGRVKVVLHRPIPSGFKIKTASITKKCDGYYLVLSLEDKTVPEVKPDINPDSIIGIDVGLKDFLTTSEGEAIEIPQYYRKAQKRLKVVQKRVSRRKKGGSNRLKAIKQLGKQHKKVADKRKDFHFKTANYLLSNYDVVAHEKLNVKGMAKSRLAKSVLDAGWSSFLTILTNKAVRVAWPTALNAGLLAVPVSAQNTSQNCSNCGKKVPKKLHVRWHDCPHCGCSLDRDSAKPTLREHNAAINIKNRAEGQSVLKAQRLRAQ

SEQ ID NO: 5046 - protein, 450 aa, unknown
  TnpB Polypeptide
MNDVFTVTTELKLNKEYNQLVGKYISDYIELFNKIQRLTFHRIKNYYIKNGKITQKDRNIINKQLQEEFGLTSRAIDAILSNMLGRYNSIKELKEFERKSLERKISTLDKELTKLKDERTLQRINLKNDYQNFNFIKYKNLKIKIYWKQNRLNTKKQKLKNLENEIKSGKYKVCFGTKALLQKDYSKFVKKRDSEIYYLGRAGDATCNNNFQVEYSSKINQFYFRIRKEIDLDNDKFVYGQFYFNNKIYTNLLKNLLRTKESALTYRIKIKDDKVLLQIIYNFAHNKDLCVTRNSYGVIGLDFNKGFVSVSETDKYGNLINTFNIDYQYGKGNQTTNDFQYIATGLKDYCLNTGKDLVIEKLNFTKKKDNLISKRGKKYNEMLSSLAYSKFDLIITSKCAKNRIFLHKVNPAWTSWIAKQKYCPKMKLNIHSGASYVIARRGMLLKDKIK

SEQ ID NO: 5047 - protein, 471 aa, unknown
  TnpB Polypeptide
MKRTVKIKANCSNNEDEILLIGTIQRNIKNYVWSRYNGIGSLLKQDSWTIRDELIQKDLLSKKITKTLSRVAVEQSASTIKSNWTTTKKKVKKAIAQNENLTEDDKRYLYLCLKHTPTLYNILNYKKVDYATDYLKDLKIDVHRLNNLLRRYIRRYKTKSHTNKANVILTSNLYKFNSNNNSFMFSGKAKHSRIEIALIGKIPKLKGTLELVKSQKSNQYYLHVPLDRIITKKRMTDESEILGLDVGITDLITLSNGSIYGANSSELFYTLSDNLVNKNRSRLFSYKRKLEQRILIEQDQSKKSILEQKLKNLEDNNLGSKKRISKISKYKSRIASHINCELNKMVKEEDIEEIVREDLNWSSKKKNVSRKQQNRFSTWAKGILLERLSVKLAEKGIKETVVNPAYTSQVCCKCNHLGSRNGKVFKCSNCNLSIDADFNASINIKKRKFISEINIDTPYKEVKKYYENIPV

SEQ ID NO: 5048 - protein, 418 aa, unknown
  TnpB Polypeptide
MRRKKKETENPIPTITRAHKIRIYPNKHNQEVFQKYYDYQRSIWNRAIDERNAQYKIYKEMKATGLYSQKELNKNYFPNTSNLRKMEKFDWENNFHCRVREVQFDNLCQAWDNYFNPNMPNHKRPKYKKKKDIENHKKLALRNVRTKGKWLLLPNSRYSKPEYRFTKIKMEESLRFNGKITGDSSVSVENNKWYVTITVEMPLEEKQSTFKQSTGIDVNVGSIDYLKKEGVNKEYGKFYLLPNSLLRQYDKIKYYSRVISKKRNKNPYYIHSKSYHETITKLNNAYTKAYNIQEANLNNIVKYFFDNYNRIVIEDLDVNSMKMNKRLCKSLHRNAFGRFKQKMINKAEEYNVEFILADRFFPSTQTCSECGNVKTGDEKLFLWGDKYGNDHNTYVCYNCGTIQDRTENAILNLNHYGK

SEQ ID NO: 5049 - protein, 432 aa, unknown
  TnpB Polypeptide
MVVLAHKIRIYPTDEDIINFKKYIGYKRYLYNKAIVVQKELYLKYKEEKAKCKDFDSLDDEEKKIFYSKYYPHMSLVRNHMVRTKEKWEYNYASKMVAAAADDVTRAVRNALNPKMPNHKMPKFKKKKNQKMSFSFEGIKINDKNELIIPKPSKSKLSGVMPENPIKFSKIKLGEKLRFQGKLTGATISCNRNGKWFVGLTVKLDEEGERKHRLKFDRDRTNKPECGIDANIRGFHYNELDSSYADWKTTSEELMKQYGLIKYYSRVLSKKRLGNKNWKQSKTYAKMRTKLSNSYARAYNLQEENLNKFIQYLNNNYSSVTIEDLDVNSMKMNKHMCKSLHRAMFGRFKQKIETKFNQINIEFIKADRFYPSTQRCSNCGMIKTGEDKLGLSGDKHGNKHNEYKCFYCNSELDRDDNAVENLIQYKKYYAKL

SEQ ID NO: 5050 - protein, 429 aa, unknown
  TnpB Polypeptide
MKYKAIKTKLYLSKNDQTFIRWLLHTSKNLYNEALYNVRQHFFKTGTYLTYEDNYMLLSRESEHYKILNSAQGQGIIRKVDEAMKAFFGSIKSKKSGKVKLPRYLEKDGFYSIIDRMVYKPNKEYYILPRGNFIKRISKFYQQASEQLKKESIYELNEMTSLGLRIETPKCIQQKQIKEITIKSKYDGKYMEVIYVYQREAELENNNTLTETMSIDFGYNNLAYCAVTNNNHLHIDGLKLKSMNQRYHKRISLLASVRPNQLILTKRMISLIEKRNNQMIYGINKAAKLIIEHAINNDVGTIIIGYNEGFKDITISKKVNQWFKAIPIARLRDRIVYLAKEVGIESKVINEAYTSIASYVDNDDLEATKEKTSFSGNRIQRGLYKTKHGILINADLNAALNILRKGKPDALRIGSNGWNTPKRTYLFSS

SEQ ID NO: 5051 - protein, 637 aa, unknown
  TnpB Polypeptide
MLGSFLTNEHPFGYRPGDDQAGPAAGRADPRLHPRDHRRAGLPAERPRDRRGRRPRLHLRRPPPPHQAREGRAAPEGGDPLARAHSPRQPRRQGRERADRRRDRGRPADRGLRGPHRDDGPPGRARAQARHVRSPRARQVDDRRPHRQRRLRRDPAAGHRARRRDRRRDPRRQHRDPEALLQRARSRPAAARQQRDGADLRPGREDPRQGHRRHSSIVLGRYPAAFEERMLTYRSYRTELDPTAAQRILFAKHCGAARFAYNWGLARRNAEYLQNGRVLTSVDLHRELNRLKRSELPWMYEVSKCAPHEALRDLDNAFRQFLRGRRVGKRIGFPRFKTKHSTARTFRLNGVIRVGEAWIQLPRLGRLRLKERSYLPGDSTHVLSATVSGLAGRWYVALRILEERPDVLSVGGQVGIDLGLVNLVTTSEGVAYPNPRPRKCRERKVRRLSRQLARRKSGSRNRAKTRLRLARLHVRIANTRNDYLHKVTTELAKTKSVVVIEDLSVRALQRSHRLGGSLADAALGDFKTKLRYKAEWYGTKLVIAGRFFPSSQQCSACGYLHRALALADRMFRCPACEAELDRDLNAARNLLSVAASAAETLNACGAGSADRDSSVQLPVMKQEPEVAPEPGKVIGVS

SEQ ID NO: 5052 - protein, 529 aa, unknown
  TnpB Polypeptide
MDAHFTTWFSGYSETTSNVGQAPKRKEWRDVAKATKTIQHTLSYQASHAAWFAETHAFYNRVVAFYFDVIHAHEGLIDLSNKEALTALEKLTHATLDNPEPVFPLSEIADSIPAMFRRAAINAALGSARSFFAHLKKWKAKKAKAEAKGKKFADRPPVAPRSWNTCVSFYSGMYKDRTESRIMLKVWTGACWAWVKARTLGREAQDGFELGSPSLIRKGTTWWLHTPVEKTFTGPSKIATQITKTATAICAVDLNIGNNLAVCTLQTVEGTLLATRFIKGGNRIDGFRKRQLGRIARNRSRTGIIAEGEQDNKVRWKRIRHADEAIAHRISCRIVQFATAHGASVLVFEHLANLKPEKGKYSKRGNMKRAYWMKGRIFSYAKYKAWNEGIITSRVNPRNTSRECARCHAPIIRYAKANARAEGYTVGTPLMVCPGCGKRDNADRNASLVIGQRLITRYQEKPHTLSLEKEDRKLSGPSLSQDAKSEQKPSCSLTQRHEERCGHGTARREAATMDTASLSIATQLRLFNE

SEQ ID NO: 5053 - protein, 560 aa, unknown
  TnpB Polypeptide
MKQIITAKLKLQPTSEQHDALHEVQLAHRDALNYVSHYAFDHGKLSNAEQLQRGTYNDIRLQYKLPSQLACNVSRQVGSMYKSLWTKLRKNIEHRKAKITKKRFKGLDKPPKYVSTTLTYNYKHDYSFKTAHQVSIQTLQGRIVIPYQGYKPHITLLKRQAIIGAAKLWYDRPHKQYYLLVSLELSLADPTPKTYQNVVGVDVGMRYLATTSDQSQFFSGKKVWAKADHYARVRKRLQRKGTRSATRRMIALSGRERRFKLNTNHVIAKTIVKAHPHTLIGIEDLLDIREGMKRPMRRRKGTQVLPLTSRQRQANHHMSKWAFAELHSLLVYKAALSGSSLVVKVDADYTSKACPLCGYIDKRNRPGNGLLFVCQNNTCSYKVRTDRPYTLHADLIGARNIAMRTLCIWQDWIQTGHLSVVPDRADKEAKAARLQRYAELRWSPALSSSSAKNLSHRRHVRLSKEDRNISFQDESGQTAPLVMPYMLTHTGPMKQRLKVREIAEQQGWTQARLQRAADVNSRTMSGIWHDQYRKVTYEVLTKIARTLNVEITELVEEETD

SEQ ID NO: 5054 - protein, 433 aa, Euryarchaeota sp.
MNKTAKSWRPQAGNRTFRAYKVELDPGKGQVSDFMRYADVARWTWNYAVARHKEICQWNRLPTVHMKYPNGQALHKEIVRLKHTTHPWLASVSKCVPQEALRDFDQAIRRMLDSRFGHPKFKSKKWAKRSFTLTYIDPNHPQIHVEERRIKLPTLGWIRLKEHGYIPTAGARTMNATVSETAGRWFVSVQVADRVRPRPLPRDPEIFGVDVGVMRGNLLVVSNAEGDKVRVFTSPRALRTNERRLKRLQRSVSRKQKGSSNRGRAVRRLERLHFRIANVRKDALHKATTQLAKNKSIFVVENLAVRAMMGNHRLAKSLADASISEAVRQLRYKGTWYGSGVIEANRSYPSSQLCSGCGKKHPQMRALDLRVLRCQCGLVLGRDLNAARNLARWPTVSRTLETPVRAERLQAVESPLVIGDEAGKNLPTRGRLL

SEQ ID NO: 5055 - protein, 650 aa, unknown
  TnpB Polypeptide
MSKELNERYILNPDTNRYVLKSGTTGKHILGINKKIKIPKKIVPHLPKPIIPKNCILILDRLGCWQIFHLSYFISSIHRIKNELLIIQSDKESVIHRIHTTILIGTLILIKKNKPIIIEYTSVHWRNLVDNLASLDVATQSIKWYPMIVRILTGTGKESKPYWYQSYTDLSQKLWLPTLVESEDVYLECESLYENTNSWFTIKKTEPIIKDSSILTSIECQSMILDSVDIKKESTCSIQRTRKVRIYPNKSIIKQFKTWIAGTICIYNKIVYFQEHCSKEDKNMSEDKLKRKFVYESIVTRKDVSELNKDRKGSYKLKGIILDKQSNPDIIEWTKKLPKVVREGAAEDYCIGRNAAFTNVNLGNIARFKMKYRNYKNDPAFHISNRVQSISNGKYIKLFPRILKKVNITNPHILVNKGDRSFVEQYIGKKPKQQCKIKYEYGHWYLVIPYMSDVQPISIERGACAIDPGVRTPLTLYDAERFISFHYKKEIYTKLIKKLHILQSLRDKKYITSHSYKKARFRIRRRWTNLVNDMHYKCASYLVSKYSVIGIPSFETSKMVTGSLYKKTKLELLDWCHFKFKTRLLSKARQLSYVLHPDESYTTQSCTNCGTLNYVGGAKIYDCKKCHHKIGRDEGSSRSIYMCMILGRLV

SEQ ID NO: 5056 - protein, 374 aa, unknown
  TnpB Polypeptide
MLVRSVPIKIEINELIVDTFDLYKQGLQYCIENGRNLGIKNNVKLHPFVYSSLRQIGLPSQLAVSCIKMACGILKSKGRAPIVNNISIRYNSPRSFSFKDNVLSISTINGRVKIPFNIPEYALKYFKDWSIVESLLTQKKDKSYFTFTFSQENPIASNQHAEVLGVDLGVNKLAVTSQNNFYGKNIKQLRIKHDKKISQIQSKCTKSARRKLKKISGKWRRFIRLNNHEISKKIIDGLKSGDVVVLEDLSNIRRTAKYNKWVHKWAFFELQSFIEYKAIAKGIRVVRVNPAYTSKTCNRCNSLNTRRHSGFFECLDCGFHCDCDLQASRNIAQRYMRNMCRASITTPHISTDERENSLSSRAIECEVRDKYPSL

SEQ ID NO: 5057 - protein, 359 aa, unknown
  TnpB Polypeptide
MKHTMLLKLGPTEDQHRALLETMHAFNAACNYVAAIACAEKTANKFALQKLVYGELRTTYKLAAQLAIRAISKVSEAYKRDKSIQPTFKPEGAIIYDERVMSFKGLLSVSLLTLQGRVLVPFLVGGYQAARLDAIKGQADLIYRKGIFYLAVTLEVPTPAPDKVTDTLGVDLGIVNLATDSTGETFSGEHVEANRKRHHALRQRLQKRGTRNAKRHLKKLSGKEARFRKNTNHVISKCIVAKARVNQQAIAIEELRHIRTRTEARLRHSQRARHSSWAFGQLRQFLSYKAALAGVPLHLVDPRNTSRMCSVCGHCAKENRKSQAAFCCVQCGHSDNADRNAAVNISRASVMEPIAVGRA

SEQ ID NO: 5058 - protein, 532 aa, unknown
  TnpB Polypeptide
MGKATTTIRQTLHQKPEHGAWFAANQTLFNQVAAFYFSVIQAHEQVVALSNQEALTALEQLTHTTKKNPNPVMPLSNVAEDLPAMFRRAAIRAALGSARSFFSHLQAWRARKEKMLAKGKPFTEHPPVPPRSWNKSATIYAGQWKERTGKSIMLKVWTGSCWSWVKCRITGRELPDGADLGSPQLVRHGKDWWLHTPLEKKFASPAKVEEQITTNAQTKMCAVDLNMGEQIAVCTIQTAEGSTIATRFIGGGRAVSGFRKKQLGRIARHRSKTGLLAVGEQDNVGLWRKIRNRDEDFAHQISHRIVQFAREQGASLLVFEHLDHLKPEKGRYSHRGNVKRVFWMKGRIFRYSKYKAWNQAGIITCRINPKNTSRECARCGAQVIRYAQGQPEEGYQMGAPLVLCPQCKMRGHADRNASLKIRQRLLARYQRAPEPKEQPEEKPHAPQFLPSMPPDAQRRTPFVGGMSQELAERSAKAEGVISSQAACGKESPSMTPTGHGTGNGHGTAQKGKRRRMGTPSLSIPPILRHPME

SEQ ID NO: 5059 - protein, 432 aa, unknown
  TnpB Polypeptide
MKTAHKIRMNPTPEQVEYLKRACGTRRFIYNWGREQWEKQYQAYKLEQETVPEEQRMLKPPNALALKAQFHSIREKAYPWTYDVTKCVVEGAFSDLGQAYANFFAGRANYPNYKKKGKSHESFYLSNDKFTLGSHWIAIPGLGRFILDSRKQKKDRGKLRRKLGTVNLAEKLRFVEEGKATHPTKKRNRCKQVLCESVKILGTTVSCEAGHWYVSIQVEIKRPLPKRAEPVVGVDVGLKTAAVVSDGRRLENQKPLALHLKKLGKLQRKLSKKQKTKDPETKRTIFSKNYQKQRLKVARKHQQVANIRRDIQHKFTTELARTCGVIGIEDLNILGMMANRNLARAVADAAMGQLLQFLKTKVASVGGDLFIASRWFPSTKRCSCCGHIKKRMPLKHRTYRCLVCGLVMERDLNAALNLLWFANEQLRQLHAV

SEQ ID NO: 5060 - protein, 418 aa, unknown
  TnpB Polypeptide
MQLVEQTIINEHDPRYAAIDAAAFAAKNLYNLALYEWRQAFIHQNIYLSYAEVYHRVKDSDAYQALPRKVSNDILRQLDKIWRSFRNGLEEWYEHPEKFTGRPRVPKYKHKTKGRFMLIYDEQAISKRALKRGMLAPSGLGIEVPTRQKTVKHARIVPRMGFYVVEVVYEQAVKPVEVNPTYYMGIDIGMNVLAALTSNKPKFQSVIINGRPLKSINQYYNKRHAQLQKKLGGPGITKRMQRLINKRNRRIDHYMHTASRYIIDLLVKEGIGTLVIGKNDLWKQEANMGKRNNQNFVQIPHARFVSMLTYKAELVGITVKVTEESYTSKASFLDLDPLPVHKNGGDATHTFSGRRVKRGLYRASNGRDIHADCNGSANIIRKVAPDAFGAKGVEDFAVHPVRITLRNKQKVARRVALP

SEQ ID NO: 5061 - protein, 435 aa, Microbispora sp.
MSAMNQHGTVWIMQLRYTFRIEPGPGQRIALGRAFGCARVVYNDALRAREDARRDGLPFPKTGDLSKLLITEAKHRPERAWLSEVSAVVLQQTLRDLDTAYRNFFDGLKGKRPRMGAPRFKSKRDNRQAVRFTANARWSITPGGKLRLPKIGEVKVRWSRELPSTPSTVTVVKDAGGRYFASFVVETDGSEVLPGTTPEVGIDLGLTHFAVLSDGRKISAPRFFRRAEKKLRKAQQNLARKTKGSSNRKKAVVKVARAHARVTDARKDFHHKLSTTLIRENQAVHVEDLCVKGLARTRLAKSVHDAGWSAFVGMLEYKAARYGRTLTRVDRFFPSSQICSACGFKDGPKPLAVRDWTCQGCGTVHDRDVNAARNIKTEGSKVAAGQAETVNARGAQVRPVSVPAPRATRTPVRKKQEPTRSCRPTGWVQAGIPSL

SEQ ID NO: 5062 - protein, 293 aa, unknown
  TnpB Polypeptide
MQLEGVDISTGVKELRKLVNNWWYAISAWDYANMLREGCEINKGNPRHIHVKSKFLISYAKSNEQGNRNIKVDDKIVRIRDPFSRKWLEFRHDFGGRFIKAEKYTAKVVFRNGRIYLHLSIPFELVQYGVTCGKLIASFDLNSDRINMIIVDREEKIRDVKVKHFPEVTSHGFPRNKAKDIRLKALAELLDYAYYHDVGVVLFEDLERIKRRKGRTTKTKSKKANRKISKFAKRELLHYGVTMALKRGFKVYLVNPANTSNIAKQICKKLGLDVHCTSAYVLAQKFVNSHELF

SEQ ID NO: 5063 - protein, 358 aa, unknown
  TnpB Polypeptide
MKTLKFRLKDKHAKLLIQLAREVNLVWNYVNDLCFKHLQRTGQFFSAFDVQKYTAGASKVGLNLHSQTIQAISEELVTRRKQFKKAKLKWRVSNPNSSKRSLGWIPFKAPAIKYQHGQVRYLGQWFSFWDSYGLDQYKDMVRTGCFVEDSRGRWYVCLVVDVPKDESKKAASTSAIGIDLGLKDFATLSNGQKIEAQRIYRKFEPKLATAQRAHKKQRVKAIHAKIKNTRCDFHHKLSTALVKDHAAIFVGNVNAKGLAQTKLAKSVLDAGWTAFRTMLKYKCQQAGVWFEEVNEAYTTQTCSCCGSRQDSPKGRAGLGIREWTCVQCGTLHDRDVNAAKNILALGHERLAGGIPSPK

SEQ ID NO: 5064 - protein, 421 aa, unknown
  TnpB Polypeptide
MSNRVVTRTLKASITNHSQVRDDLDSHGFAASKLWNVGRWTISRVWDAIGHIPDADELCSYLKHHDRYADLHSQSSQRVLQELGEAFVSWYEQDDPNANPPGYRKDGDDHPRSTVTWKNQGFKLDTQYNRVRLSKGTNMKASRYAADYILCEYRLQTDDDQTLAAVESVQTVRAVWTGEQWELHFVCKMRVETPDTPGENTAGVDLGICNTAAVSVGNETLLYPGNALKEDAHYFRQEEYDTEGENGPSHHAEWARQKKSRRRTHFLHTLSNDIVEQCGSRGVGTIAIGHPKQIRDDEDWGHHGNKRLHDWAFETLLSHIEYKAQERGIDVERVDEARLKTSKTCCECGTEADTHRVERGLYVCDECGLVANSDLNAAENMRKTVTPNPETDRSNGCLAQPSVRLFDKSTGRVCPQEHVVS

SEQ ID NO: 5065 - protein, 397 aa, unknown
  TnpB Polypeptide
MMEVIKAVEFKHCADVVELINDFKQMVNFCIDKAIELRITSYAKLRKAIYNEWKEKWYPKYHTHYCHSACRVATSILKNFRKRKRKGLTRKDKPEVKKDFIKLEEMLFKFEEDRIKIITAPRKFISINLVVSDYQRKFIEEWKNERLKVGEVIVKKDSIIIPFKKVINPKNFRNIMTIDVNEKNITYSIFDKDGNIVKTIRLDVYMLKRIHENFSKKREKIQKKLANKPMKLKTLMKKYSGREKRKVEDYLHKISKFLVSEALKHNAKIVMEDLTNIRNAVNKKSKNLRRRLNRWNFSKLQFFIEYKAKWGSLDVEYVNPSRTSKLCPICGCKLDPNGQRLLKCNNCNLVFDRDVVATFNLFKKSQNVGSFRSPRTLPDEVWLIKPDGTGEPLREIT

SEQ ID NO: 5066 - protein, 486 aa, unknown
  TnpB Polypeptide
MTTLTYCKALPTPIDELNALGKTQLEMFLVAYTSIFRNAVCETVNFMLSGVDFNKSNWNTHLQTTYGISKRHANGVISAAKGAIDAAKECRILHIKTLEGQAKSCSVWLKKAENKLKKARKFYRVKNWINSKKGCAFPLSCSLKYRQSNWQNLRFQIHNKKRKLHRYQQKIAALKLATLRGAVPHNQAFVVGSKDESFGNQICQWDGNNLRFRVPACLESKFGKYAESKIGDFPRNINRLTATGAKTWHFYYKSGKWCAAVSFTPSEVERVSRSVDYGCIGIDLNPGSIGWAYIDSEGNLKAHGQIPLQTGLSNGQQQAQIVKACLELSALATKFQCPVVCEELDFSTKKEQLRERGKKYARMLSGWAYCQFFKLLNSILSNRGIELIAVNPAYSSIIGLVKYVKMYGLASDESAGLVIARRGMRLSEKIPGSLTALVEVNSKSHVWSLWNQLNKKIKCSGMVTNRHCYYAISNWDFLANLDIEEA

SEQ ID NO: 5067 - protein, 500 aa, unknown
  TnpB Polypeptide
MERVRRAVAVEIENPQPELYALEEPYRKIVEEVAAYVAERGTLEKEKYNELYHRFRKQYPLPAQLIQQAINQGVEIGKSFLALKKDGRVHKPRPEVRRVSIRFAKNSWSYRKTAASAAPVKIAVSLPGGRREVWIKPHRRFWLYWWRVLRKEAELASTLILKRRRNKWYAVFVFDVKPREEPPAEVVAFNVNENLVAVARVSLLSTVDAVALWNGQYVDPAVYSIRTDFGRLAKRYEAVRNAKLEELKRKYPFAGRDEEERRQNVADTREFRKFVRRLRERRRKEGRVRQVAREATKSHAVIITEELGKNPQEEMIGIEKKVEKRELRHRVKQTPFRKILRAVEDKARETGSVVFYVSSFRNSKVCPIHFALLKNGGGWHALHCPHGHPVDRDATAVLNMLWKTTPTGWVKGIWWDVKKVRKRLKKERGLVPKEAVRRRNPLVTWPVVHAVWVSLGSLKASPQWPAVLARAAPMTPAQGADEDGARAPPHGALALGEEVR

SEQ ID NO: 5068 - protein, 509 aa, unknown
  TnpB Polypeptide
MPSKTVISRTYPRIPYAAFDKNSKPLDLNEVLNGIRKDAELVAHYALQEMTEQNLALSTYFDRLKPSGAGYMMGLKLPTEVKKQFKSGASRLERMFREQVVTNLRSWATRVEVLTQTYTKYVSAGWKSTASDSKPSSMQPRLALSATDLGYHKNFSVTPERISLDMVAQGQWVTLQFPTPPQLLEKGCESGVPDIWIDKNNRVVFGFHGKTDPGRPNFSERYVIGVDVGVKNPAAYVVWDTEKKEIVEQSLLGQRARSLNNKVKRGAKQVAALRRKGRDEEAVSHREHLSNRRKELSIIIAQELADVSWHYDNAIVSFEDLSNIKNTMAYGRWFRGEVFRRTRDMVEADGGRVMKVNAAYTSKRCHVCQSDLDMSRYSQPICTTCGITHHRDLNAASNIAQRANVKKACETRRKHATKTKRVRRSKCHVKPLKHPGTKNKPTPKAPQNRPKTHTATPIKQREVSKGMCPADSRVSAVDHDMWFQTTSGTTNPKENQPSTSMVDWVYPKE

SEQ ID NO: 5069 - protein, 375 aa, unknown
  TnpB Polypeptide
VNDVANKAYKFRIYPNDEQKVLFAKTFGCVRLVYNHWLDRKIKQYKEDKTTVTYNACAKEMAELKKTEEYAFLKEVDSVSLQQSLRHLDTAFQNFFKQPKVGFPKFKSKKLNKNSYSTVCINDNIAISDGYLKLPKAGQVRLKQHRSIPSFYSLKSVTISQTPSGKYYASVLFEYENQVQETEPHNFLGLDFSMHELYKDSNGDEPAYPRYYRQAEKKLKREQRKLSLMQKGSKNRDKQRIKVAKLHEKVANQRKDFLHKQSRQITNAYDCVCIEDLDMKAMSQALNFGKFVSDNGWGMFVSFLKYKLEEQGKKLVKVDKFFASSQTCSCCGYVNKETKNLAVRAWDCPQCTTHHDRDINAAINIRNEGMRIVFA

SEQ ID NO: 5070 - protein, 425 aa, unknown
  TnpB Polypeptide
MQLVEKYVIDRNDPRYGAIDEAAFKSKNLYNAALYEIRQSYIFTGTYLNYNEIDRRMQSHEAYQALPAKVSQQVLMQLHHDWDAFFKARVAYKEDPSKFTGHPKLPGYKHKTEGRNLLVYTIQALSRGKKGLKRGIIKPSQLAIAVKTKQKDINQVRIVPRKGFYVVEAVYEQEAKQAPVNPAYYAGVDIGMNNLVALTSNKPGFRPVLVNGRPVKSINQFYNKRRAELQSQLRRKGTTKRMERMTNKRNRRIDHYMHTTSKRIIDLLVEEGIQTLVIGKNNGWKQGSQMSKKTNQNFVNIPHARFISMLTYKAELVGITVRITEESYTSKASLLDLDPLPAWKPDEKTKYIFSGKRIKRGLYRASDGRLINADTNGAGNTIRKVAPDAFSEARAVEDGKGVLASLVVHPVRLVIAPSRTQKGKS

SEQ ID NO: 5071 - protein, 410 aa, Sulfolobus sp.
VLKEIEEFQRLIVNEMIDVILSEGLPTTRKKLHERFYSYYKEKYPFLPSRVVEGSYIIAGRIVKSFRERKKKGLTRKDKPEYKRVLITIPNMVNWRFNRVSVSVLTHKGWVEIPLKLTKQFTRYVYEGWRVSQELKLRLVGRKVLVWLTFEKEVEAETREGNYISIDVNENNVTVAVFEGFKLKELRRYETGLGRIVVNYSIRREEITKGHWTKDELIKKKLGKLRERERKIDVLRKSVKRIVDLARDLKAKVIVGKFSSKAKEKMESDKNDKLRHRIHQWSVVKFVEMLKSQPIVVEEVSESYTSSINPFNGEKLRKDKQVVEKVIKVFNPYLMTGSAHEGRGVKVLKVSARYLESGKVLLERDSIAPLNIMKKLDGRVVAFPSTSPNDLRVTVYDPLRGGARGGIRSN

SEQ ID NO: 5072 - protein, 441 aa, Lentzea sp.
MSVFIKAYRFALDPTPTQEAALRSHCGGQRYAFNWGLAQVKVNLDQRAAEKSYGIPDVQVTPAVSWSAYSLRKAWNQAKHEVAPWWSENSKEAYASGLANLATALTNWQSSRTNSRRGPKARFPKFKGKRARSSCRFTTGAFGLTDDRRHVRLPRIGEVRAHESTRKLVRHLQRGTARIRSATVSHQSGRWFCAFSVEITRIDQVSRFPDRVVGVDLGVKSLAVLSTGQVVPNPRHFDVARRDLRRLQRQAARRIGPDKRTGQAPSNRWRRTQARIARLHGRVSNARRDGLHKLTTDLVRRFGVIVLENLNVSGMLRNRRLASHISGVGMSELRRQTTYKTAWNGVQLVVANRWYPSSKTCSDCGAVKAKLPLRVRVYNCDECGFVLDRDLNAARNLASLVGEDIGGTSAASCAGTKTSPLETHVRPTSCGQRVTPREDPR

SEQ ID NO: 5073 - protein, 369 aa, unknown
  TnpB Polypeptide
MRTYCFKLYSSKKNRNLHKQINAAGLIYNHCIALHKRYYRLYHKSLNVYVLQKHLTKLKKLPRFSCLKEIGSQAVQDITQRIDRAYKLFFRNLKRKVRTAPPSFKKVRKYKSYTLKQAGWKLLEGNAVQIGTQKYRYFKSRAIEGTVKTVTIKRDALGDIYLYFVCETTENAVLARTGKSVGYDFGLKRFLTASDGNDRKAPLFFKANAAAIRKAGKALSQKQNGSNHRKMARLVLARLHKKTANQRKDFHFKLANAICGEYALVCIEDLNLKGMQKRWGRKISDYGFAAFVEILKHQASKTGTTIQTINRYYASSQICHICGSRNPETKDLRVREWICPHCGSVHDRDRNAAKNILKVGTSTFFGEAS

SEQ ID NO: 5074 - protein, 195 aa, unknown
  TnpB Polypeptide
VDYEDAKILGIDYAMRGMAVFSENIKKEDAGYFRKSEERLAREQRKLSHCEKGSRNYFRQKKRVALCHEKIRNQRRDFLHKLSRRIADEYDVVAVEDIDMKAMSQCMHFGKSVMDNGYGMFRELLEYKLKWEGKKIVRVDRFFSSSKKCCKCGRVKKELKLSDRVYICACGNQMDRDLNAAINIREEARRMLLAG

SEQ ID NO: 5075 - protein, 413 aa, Moorea sp.
MLTMNYTFRIYPDSNQQAMMLEWLETCRRLYNRCLRDLKDWINSRKCSTDRCSLEKEDIMSANIPFPSYLEQKRQLTQWKKENDYLKSVHSQVSQDVVKRLHNTWEAFKNRGYGFPRFKKYGQYRSFLFPQFKDNPITGYQIKLPKIGSVLINQHRPIPDEFKVKQVRVLSRCRGAKWYVVVTIKSDVSVPNPLPYGRGIGIDIGLENYLTTSDNFTVEPARFFRDLQSRLKVLQRKASRKKNRSKNWGKSQIEVAKLHHKIANSRKNFQFQTAHLLCDQADMLFAEDIDFRVSAKGFLGKSMLDGAFGQFRDILSWVCWKRGKYFAKVDHKFSSQICPKCQTHTGKKPLSQRVHECPECGYQTTRDHASAQVILQRGLAVLPVDDREGKLSGNCVLSGVSYLDKCRSRNAQL

SEQ ID NO: 5076 - protein, 363 aa, unknown
  TnpB Polypeptide
MAHKSHKIALRVTPKQDTWFRSQCGYARFACNHALGHFKTGLDSGVFHSGIDLNNHFNQAKKEYEWTKAQDQRAAFYAIRNLAEGINRWTDKISRFPKFKKRGGKLSYTTDEQSVRVEGKRIRLPKIGWVRMFQELRFEGKIIKVTISKTAYRWFVSITVDTGTPNAPRDTRGLPVIGIDVGINSLATLDNGKHYENPRPLKRYERKLAREQRKLSRKVFLSNNWHKQKDKVAKLHYKIACIRSDAHHQATTEIVNMASAIGIETLKVTHLLKNRKLAKALSDSALGGFLEKLKSKAAVLGIPIIEAPQFFASSKTCSSCGYVKDELSLSERVFHCEFCYTSIDRDQNAAINLKNLAVGYTES

SEQ ID NO: 5077 - protein, 396 aa, Methanomassiliicoccus sp.
VIRTLKLKLILTEEQKGSLLRTMELYTEAFDHAARWGFEHHRCGKLELQYAIYYEMRQAVPGLGAGLIQSAKDAACEALKRCKMRMAPRRKPHSAVRFPWKEAKVYFDSAKVSIYSVDGRIHAPVVLYDYLKKFKGWRCKLSTLIWNKKSRQFYLSVAVENKIPIEPVKGKTLGIDRGLNRVAVCSNNMFFDSSRINATRGKYAKNRQELQAKGTRSAIRLLRKQSGRERRFVTCENHRISKIIANTEFAVFALEDLAEINKCRWLDRRTNGKLRSWAYHQLERFLRYKAEELGKAVVLVDSTCTSQWCSRRGWIDKKSRKGSEFHCVKCGFHLDADLNASRIIARLGMSEASRLPIYQPYAAGDEVDVSGVRSKSLSPAASSRSTWAIDTPSLVP

SEQ ID NO: 5078 - protein, 396 aa, unknown
  TnpB Polypeptide
MIVVEFKLAGAANQYTALDEAIRTTQFIRNKCVRKWIDERGVKPYDLNKYCAILAKEFDFAGKLNSQARQAAAERAGAAILRFYKNCRKKTPGTKGYPRFQKDCRSVEYKQTGWKLDESRTRLTLTDGFKAGTFKLRGTRDLLGYALDQIKRVRIVRKADGYYGQFGLDADRRVLVEASGKAVGIDLGLTHFYTDSEGATVENPRHLRRSEKALTRLQRRVSRKVKGSRNRAKARGRLGRKHLTVSRQRKDFAVKAARALVMSNDVIAYEDLTVRHMVTNRRLAKSISDVGWRTFVTWLGYLAHVYGKVTIAVPPRYTSQDCSGCGERVKKTLSERTHVCPRCKTILDRDHNAARNILALGLRQLEETTAGHAESNAWGQSALSLSDASPVDTAAG

SEQ ID NO: 5079 - protein, 542 aa, Streptomyces sp.
MGGLRELAAPFVVPGPSGLAVRDRLKHLTAEDEKVLRLVGDHLGTLASRDLKARCAAGLDHDTDQWAERKHILTGESSSRWAGSITKATHDQWALARRGQLAHIQGLEAGVRTIAHRLSLPMGERGGKKVPGGYRTRQEWFAKTRRLHVLADRLEAVRADREAGVVHVLRGGKQLLNARHHLDAARLTEEQWRTRWQAGRRFLAADGESGKRFGNETIRVTPDGEVSLRLPAPLAYLANAPQGRYVLAARVVFAHRGEQWRDRVTANRAVAYRIHEDVLRGRWYLTASWTIPPVKAVPLAAARTGGLVGVDTNADHLAAWHLDAHGNPVGEPLRFGYDLSGTAAHRDAQVRHALIRLLHWAKRHSLAIAIEDLDFSAEKTREKHGRRKKFRRLISGMPVSRLRARLVSMAAELGITIVAVDPAYTSKWGAQHWHKPLTTKNRTTTRHDAAAVAIGRRALGHPIRRRTAPPPHDRSDCVGHRTVQARPGTPGREGSRPRIPGPRTRSVRAGRGANAGDQDTQHRSGRPAEHEFWHQDSLPLSL

SEQ ID NO: 5080 - protein, 407 aa, Streptomyces sp.
MQLRYGFRLYPDTGQQTALAKAFGCARVVFNDAVRAREEARKAEQPFPTAGQLSRELITEAKRTVERSWLGEVSAVVLQQSLRDAEKAYRNFFASLKGTRKGPKVGAPRFKSRKDTRQSIRFTANARWNITDSGRLNLPKIGAVKVKWSRSLPATPTSVTVIKDAAGRYFASFVIDTDPAVDATWMPLTDRTIGIDLGLTHFAVLSDGTKIDSPRFLRRAEKKLKKGQKELSRKQKGSKNRAKARLKVTRAHAKVADARREFHHQLSTKLISENQGIAVEDLSVVGLARTRLAKSVHDAGWSSFISMLEYKAERYGRTLVKIGRFTPTSQTCSTCGVKDGPKPLNVREWTCTACGTVHDRDTNAAINVKTAAGLAVSACGAPVRPGAIPAQREETGSHGFPTEPRAA

SEQ ID NO: 5081 - protein, 542 aa, Streptomyces sp.
VGGLRELAAPFVVPGPSGVSVRDRLKHLTAEDDEVLRLVGDHLGTLASRDLKVRCAAGLERDTERWAERKRALTEESSSRWAGSITKATHDQWALARRGQLAHIQSLEAGVCTITHRLSLPIGGKGSKKTPGGYRTRQEWFAKTRRLHVLADRLEATRADREAGVVHVVRGGKRLLNTRHHLDAAQLTEEQWRTRWEAGRRFLQADGESGKRFGNETIRVTPDGEVSLRLPAPLAYLANAPHGRYVLATRVAFAHQGEQWRDRVTANRAVAYRIHEDVLRGRWYLTASWTIPPVKTVPLEAARTNGLIGVDTNADHLAAWRLDSHGNPVGEPLRFGYDLSGTAQHRDAQVRHALIRLLHWAKRHGLAIAVEDLDFQAEKTREKHGRRTRFRNLISGMPVSRLRARLVSMAAELGITIVAVDPAYTSRWGAQHWQRPLTTTTRKTTRHDAAAVAIGRRALGHPIRRRTAPPPAHRSDEQGHRTVQARPGTPGREGSRPRIPGPRTRSVRARRGANAGNQDAQHRSGRPAEHESWQQDSLPLSP

SEQ ID NO: 5082 - protein, 398 aa, Streptomyces sp.
VTPAQESRLDQQAHAARALWNLLHELFTVSGARRPPLAYLDGEIRWARANVDWLAVLPAQAAQAVLKAYHRAWVNCWEGRAEAPVYKSRSCVVPAVDIPQGRDLRVTRVHRRWGMVNIPKLGRLRFRWTKDLPGVTKSSPSGRITGARLIKDALGWHIVFRTETMQQASMPRDWGRSHVGIDRGITVPLALSDGSAYGHGPWLTDAEDDRMLRAQRQAAHRKQYGGPQGRASKRLRGAYDQIKNLRARAKRRVLDWQHKATTAIAEEYALVSVEQLSIVNMVKSAKGTVELPGVKVAQKAGLNRGIAGEAWGRTVELLAYKLDDRGGVLIRVPAPGTSLRCSECGVVTPGSRESQARFVCRSPECGWSGNADFNASRNIDQAGLVLASVAGRAVVRQT

SEQ ID NO: 5083 - protein, 472 aa, Streptomyces sp.
MALRRLGWTAGPAAGVMVNDRIVRMAQEQAGRALRSACWRAGLTSAVLETWPCDPGKRTPKEWDQVREAAPGGRYLPSGVIHSRTRQIAAFAAKNGRLPAAVFELEAPPRAARMLLLSACDGQQATIERGEDNPQRALLRVQLPTRPDPRSYRDWTWVACPITLPPTVPAGAALHLPTLRPAGGKVRADLAYTHAVPKAGRTGHTVALGVDWGLNTLLGAGAARLHDDGHITTLGHGAQFRAAGVLARQHRLRRLSEHLHAKADHIERLIAGDPRHELSGKHEVLRDEIRFVSDRGSHLNDALAWAAARWTVDQAIAAHATVIYLEDLRSMEAGGMGRTHNTRLSQTVRGHIADRIRHLAAEAGIAVVTVPPRNTSRHCPQCLTPLRHRKAPDRPTVAGWKWAICPDRAGCGWQGDRDRGAWLGVPPLGEHRRTRPDASGQDHHRPGHWADGDPHGGGHTRNRSGHHRDQPG

SEQ ID NO: 5084 - protein, 478 aa, Mycolicibacter sp.
MIRVMTRHTTFKLCLDPTVEQHDVLARHAGAARFAFNQCLRIVKTALTDRKANPDIEVPWTEFDLINTFNAWKKTEDAGRVFTVDTAGDTEVSVTGLAWRTEVCQQVFEEAAVDLGKGLKAWSDSRSGKHRGRRVGFPRFKKKATSVTSFRLRNKHSKGRRAAIRVGDGNRPRSVTMPGIGQIAVHDDTRRLRRMLSRDRATILFATVTEHAGRWWVALTVQAADLHPARHHQPRDAADSTGWVGVDRGLAAFIVAATTDGVEVSRITDAPKALATGMPHQRRLAKSLSRKKKGSHNRRHAAVRLGRHHHRVVNRRKHFLHQVSNQLVKTHDRLVIEDLHTAGMLSNHRLARAISDAGWAQLARQLHYKQAWRGGQIAVADRWYPSSRVCSACGSRRTDLSLAERTFTCPNGHRLDRDLNAAINLAHWGQYHYRTPDPQAGGRATNARRQDGSDQHPACAGETSLDDAGTDVQTAPAA

SEQ ID NO: 5085 - protein, 427 aa, unknown
  TnpB Polypeptide
MQYNYKYRLKPSEDISETLLHHVDTCRQLYNHVLYLLNEADDIPARYEVQGRLPDLKTWWDDLGDVHSKVLQMVVKRVYDNLSTLKAQKKSGRAVGMLKWKSPREYRSLTYNQSGFELKNTSGQPVLWLSKIGEIPIYLHREIHENATIKQVTVKQEPTGEWYATFGIDVDEATTEKPENPVNVVGIDVGVLKYAHDTDGYAIGSPDFSEERNRLESAQRDLSRKEHGSVNWEKQRKTFAQRHADLKRKRRDFLHKLSNYYAIEYDLVAVEDLDAKGLVELPGNSRNRAGAAWGTFLRMLEYKCEREETYFVAVDPKDTTKECASCGVKTDKPLWVREHSCPACGFEADRDANAAWNILSRGLEEVGVGYSESTSSESPCDSDVRTRALLSSTPVETALPVDTNSVSAKCVMEAGSPILKREPSGER

SEQ ID NO: 5086 - protein, 405 aa, unknown
  TnpB Polypeptide
MLVRSLVFRLKDPLPNDAKFLMEDFRLAVNSAIRLGTHSNVTSRFALTKLAYKDFRKEHQGMYAKHLVSTFEVAASILKNHRRRLRKGLRTQIPFVRRLFLKAENQAYKLDRENGIIDLPIRAGLHIQLGLIVSDFHRKYLDDESLSLGSITLLPDRVIVTIRKHAPMPYAPASVLSLDTNERSLDGVLAKEDRIEAVVRAEFPEVSVIQSVHHDRRKRLQKKKSHDRRTAKRLCAREGMREHHRIDYRMHEVANAVLSFAEEHRSMIVLEDLTGIKPRRGKKFNQRISIWPRRKLHQIIEYKAAWQGIPVIKVDPRYSSKKCPVCGKIQDSRKGTEFICGCGWRMNRHINASINLLQTAASEKAAGGLWFSPGAFQHDVVMVLCGPGRAVRPEPNGTSGIRAVA

SEQ ID NO: 5087 - protein, 402 aa, Xylella sp.
MERLQAFKFQLKPNGQQERDMRRFAGACRFVFNRALALQNENHEAGHKHVPYTKMTSWLIGWKYDADTQWLKEAPSQPLQQSLKDLECAYKNFFQKRSAFPRFKKRGQKDTFRYPQGVKLDQENNRISLPKLGWIRYRKSRNVLGTVKNVTVSQSRGKWYVSIQTSHEVPEPIHPSSSMVGMDAGVAQLATLSDGTIYLPVNSFKSSQKKLARLQRQSSRKVKFSHNWQKQRRKIQQLHSRIANIRKDYLHKVTTAISKNHAMIVIEDLKVSRMSRSARGTVSQPGRNVLAKSGMNRSILDQGWHEMRRQLEYKQHWRGGHVITIRPAYTSQRCACCGHTVKENRRSQSEFECLGCGYTAHADMNAAHNILAAGHAVLACGGRVQSGRPSKQEPTEAAPAPA

SEQ ID NO: 5088 - protein, 380 aa, unknown
  TnpB Polypeptide
MIKSYKVRLEPTKEQSEMMFKTAGCARFVYNWCLAFQKERREQGEKFVSAMGMSKHLTALKKQDEYSWLKEVDSIALVGAYTDACTAFKNFFRGCKKGQKIGYPKFKSKKYSTPSFMPNYQAIRFNENQVKLPKIGIVKLSRKNYIPLVNKYFNPRVTFNGLHWYISVGIEEGEFTNTELQGTIGIDLGVKDTAILSTGKKYKNINKTARVKRIEKRLKKLQRQVSRKYETNRQGKIYNKTNNIEKLEIKINKLHKHLANIRNNYNHNITSEIVNMNPERIVIEDLNIKGMMKNKHLSKAIGKQGLYEITRQLEYKCKFKGIELIKADRWYPSSKTCSHCGYIKKDLKLSDRTYICPNCGLVIDRDLNASINLANYKTEE

SEQ ID NO: 5089 - protein, 299 aa, unknown
  TnpB Polypeptide
LDEACRLYNGALQERRDAWKQARHSVTYCEQANQLKAIRADGNLVLANFSACQDVLRRVDKTFKAFFGRVKAGRKAGFPRFRSRRRYDSLTFPSYGDGCRLHKDGHLYLQGVGNLKVKLHRPVEGRIKTVSVKRESGRWYALFSCEVEAAPLPASDEAVGIDLGLTRFTSLSDGTEIANPRHARKAQRRLRVAQRRVARRKKGANGRRNAVRLLQRAHDHIQNQRADFHHKTARILVDRYGLIAVEDLNVSGLAGSMLARSIHDAGWTAFLAKLDYKAEGAGRRVIRVNPAGTTQRSTL

SEQ ID NO: 5090 - protein, 466 aa, Mycobacterium sp.
MLAGRRFRVEFSDEQAEFAEQIGAACRAVWNAGLEQRREYRRRGAWMNYRPQAHELVEAKTEQPWLKVVPGHCLQQTLMDLDRACREHGTFRVHWRSGRRWAPSFRFPEGNKMELQKLNRRHARVKLPKLGWVKFRASRSLEGEAIRSATLSREGKHWFVSFLVEDGMSTREEHGAPGTAVGVDRGVVVAVATSDGELIDQTFVTDGEHRRAVALQRRLSRAAKDSANRAKTRSKLATLRARERHRRQDFCVQTAARLAHTNAVVVVEDLKTRNMTRRAKPVEDPDNPGQYLPNGAAGKSGLNKAILGKGWHRFEQSLTSVARYSGTQVIKVPAAFTSLRCSTCGHVDPKNRESQAVFRCTNCPHGPVHADVNAAKNILAAGLAVTACRATTTPPGAVVTSTQEPAGNREELLLQPTQQVGIPRLSAVGRTSMVRQFPVGRTALDDQSASCTETSCPASNDGVRSM

SEQ ID NO: 5091 - protein, 504 aa, Oxalobacteraceae sp.
MEPANAIDVGVQLTIKATRAQKEAFSRHAGARRFAYNWCVANNRDLLAKRKQGHNVHIPVTPFDNIHAFNQWKKSHHAGIDKDGKIGLPWRREVHQQVFEEGAKDFSRGLKEALTNWLDRRAKRTRRKVGFPEFHGRATSKPTFRFRNTDHKRFSIVGDAISVPKMGPLRVREPLRRLKRLLRPEVDGSCGRITFATIHEQDGYWRLSLNVRVAKYRVAPAPIEGPSSVGRYDFIGCDLGIKTLVTAANETGGRVGFFGHAEEMGTKNLAIAALQRRLAIKREASKSRARAAGETHRTQGCSEKRLRRRLARRFARQRHVRNNRLHEISRALVSQATGIGVEDLHIRGMLKNHCLARAISSQGWNEFVRQLTYKAARADIPLVTVDRFFPSSKHCSLCFELKASVPLETRIYRCENCGLVCDRDVNAAINIARQARAQWNAAPEVRGQEQTPEPRRLETTFKVSRGRLPANSKEAGRSRDGTARRGRKASAEARKGGVDFVNAP

SEQ ID NO: 5092 - protein, 256 aa, Thermosporothrix sp.
MTFPLSQIKRVRLLRRADGYYCQFAVAATRRVEHQPSGKQVGIDLGLRAFFTDSEGNTVAPPQYLRKAERRLKRLHRRLSKTQKRSRNRRKARQALSKASLKVQRQREDFARKQANALVSSHDVIAYEALQIRHLVKNRHLAKSISDAAWGRFLWWVRYDGTLHRVPVIGVEPAFTTQNCSRCGQRVKKSLSVRTHLCPGCGLLLDRDHNAALNILHKALQGTVGQTGTDEGVSSNASGQPAATRRRTAAPRKQAG

SEQ ID NO: 5093 - protein, 173 aa, Desulfosporosinus sp.
MAQIAVEATQQLNIADKVMGVDLGLKVPAVTTTESGKTKFFGNGRQNKFIKRKYRSVRRKLGKLKKLKAIRKRHDKEQRWMNDTDHKVSRQIVNFAKENNVGVIRLEKLSGIRQTARTSRKNEKNLHTRSFYRLASFIEYKAFLEGIRVEYVKFVLAQKGLTKISQFDHSIQR

SEQ ID NO: 5094 - protein, 392 aa, unknown
  TnpB Polypeptide
MKQAYRYRLYPNKTQQVLLRQTFGCCRFVYNATLGAKIKAYEADKTSLSEFECINLMTGLKSEYAWLYDVPAVCLVQSVRDMYSAYRMFFKTKQGYPKFKSKHRSKLSCRFPVPDCSVNQDLRRIKLPKIGLVRYKQDRRFKGQLRNVTVSCDDCGRYWVSCLVETGVADPKPEPIMSHSKCVGLDLGLKDFIVTSDGRKIPNPRFADVIDRRISRLQKIESRRQRGSKRRAYIRLKINKLYARKRDLINNFIHHTVNDILGENQAVFIEDLNVKGMVGNHSLAKSIQNICWSEFVRVLDYKARWLGKTVFKIDRFFPSSKTCGCCGYKNDGLTLSNRSWTCPVCGAAHDRDLNAANNILREGLARILPSVGRFDGRGDGGYEVVEAPICAV

SEQ ID NO: 5095 - protein, 391 aa, Methanoculleus sp.
MLRGYRYRLYPTKDQMILIAKHLGCCRYVYNWALNLKNQIYHNEGISLSGYALMNQLPMLKEELPWLKEVNAQSLQQSMHHLSRAFTNFFEGRAEEPTFKKKHDPEQSFMVPQSYTVDFKQGTVKLPKIGAIKTVFHRTFVGTMKSATVIRRSTGRYFISIVVEDGRKSPKPADPIPDQTIGIDMGLSHYAVLSTGDAVANPKYLRNAQTRLAVLQRRLDRKKKGSRNRNKARFKVARCHQKIADQRRDFQHQLSSRLVRENQALAVESLNVNGMVKNPSLARAIGDAGWGMFLSMLAYKCQEAGKTLLKIGVFEPSSKTCSVCGYRKVDLTLKDRAWTCPDCGTCHDRDLNAAINIRNFALAGVERAEEPVDSLPLGRGMKQEAPCVRLG

SEQ ID NO: 5096 - protein, 361 aa, unknown
  TnpB Polypeptide
MWLKMKRAYRFRLYPKAKQAEILEQTLTLCRKLYNAGLEHRITAYRNGQSTTYLQQQNELPAIKKEFPEYASVHSQVIQETLRRLDRAYKAFFRRVKEKRKGKNVKAGFPRFKSENRYDSITYLQSGFRLLPNGHLLLSKVGEVRMFMHRQPKGKVKTLNVKRDRCGDWYAVLTGEKPPVRHRRAPTVGVDLGLRSLVALSNGEALPAPKFLRHSEKRLKRLQRWTSRKVKNSGKRGKAVLRLAKGHRHVERQRTDFLHNLSHDLARCDVVFEKLNVAGMLKNHRLAKSIADASWGRLVGMTVYKAEEAGGRVVLVDPKFTSQECSVCHTRVKIVLANRIFKCPQCGLIICRDVNAARIVL

SEQ ID NO: 5097 - protein, 405 aa, Burkholderia sp.
MQRLQAYKFELRPNGEQQYDMRRFAGACRFVYNKALAMQKQNYEAGGKFIGYVAMAKWLTGWRNGSETPWLKDAPVHPLQHSLKNLEQAYRNFFAKRAAFPKLAKRGQRDSFRYPDSKQFKLDQANGRIFLPKLGWMRLRLSRPVQGVLRNATVSLSGGKWFVSIQTEREVEPPVPQATSAIGIDMGITRFATFSDGTHLAALNSFKKHEARLRRDQRAMSRKTKFSRNWRKAKARVQRIHSRIGNARRDYLHKATTTISKNHAMVCIEDLQVRNMSKSAAGNVEQPGKQVRVKSRLNKAILDQGWFEFRRQLEYKLAWNGGWLIAVPPQNTSRTCPACACVSAENRLTQAKFACIECSFEENADVVGAINVLARGHRVAACGEPVQSSRSVKQELAEATAQITA

SEQ ID NO: 5098 - protein, 379 aa, unknown
  TnpB Polypeptide
MANKAIKYRVYPTTEQSIMFAKTFGCCRKVYNLMLSDKIEGYKLTGKFPNVTPAKYKKDYPYLKEVDSLALANKQMDLQAAFRNTFSKSRKKNNGFPKFKSAKHSRKAYTTNNQKGTVAIIENKYIKIPKIGRVKAIIHRIPDNNWTIKSVTISQESDGKYYISALFEFDNIFNPYIADKTNAVGLDYASDGLYVDNNGNVGTNHKYYRESHKKLAKAQHRLSRMRGSKKYEIKSNNYTKQLRKVNKIHRHIANQRLDNLHKISTEIANQYDVVCVECLNMRSMANHGFGNGKATLDNGYGMFLSMLGYKLSDRNKYLVKVDKWFPSSQICHCCGTLHPDMKNLSIRKMICDCGLTMNRDWNSAINILNEGLRLLSEAA

SEQ ID NO: 5099 - protein, 256 aa, Mycobacterium sp.
  misc_feature (235)..(235): Xaa can be any naturally occurring amino acid
VLAICVRRNGTRLDASVRVLVQRPQHPRVALSGSRVGVDVGVRRLATVATADGVVIERVENPRPLEVALRDLRRLCRARSRCTKGSRQYRERTTELSRLHRRVNDVRTHHLHVLTTRLAKTHGWIVVEGLDAAGMVRQKGLPGARARRRGLSDAALGTPRRQLFYKTGWYGSQLVVADRWFPSSKTCHACGHVQDIGWAEHWQCDACSVSHQRDDNAAINLARWEEPSTAVGPVXEARKGTSQPAGEQPREGVRVA

SEQ ID NO: 5100 - protein, 178 aa, unknown
  TnpB Polypeptide
VCIFHRGKSRVSYVLQESREKLVREQRKLSHCEKGSRNYQKQKKRVALCHEKIKNQRKDFQHKLSRGLAERYDAVCVEDLNLKGMSGGLHLGKGVQDNGYGQFLSMLGYKLEERGKNLIKVDRYFASSKICSVCGHKKKELALSDREYVCECGNRMDRDVNAAVNIREEGKRLYKECA

SEQ ID NO: 5101 - protein, 385 aa, unknown
  TnpB Polypeptide
MANRTYKYRIYPSRAQVTILERTLDICCELYNAALQERRDAWRIAHKSIGYKDQQNQLPEIKPIRPELGMVHSQVLQDVLKRLDKAFDAFFRRVAENKKLPEEKRQPIGYPRFRSRSRYDSFTYSQSGFALESGKLRLSKIGKVKIKLHRPIEGRVKILTVTRSSTGKWFACFAVEREPEPLPVITEATGIDMGLKAFAVLSNGEAIANPKFFRVEEKRLAKAQKKLSAATKGSPERRKRRRIAAHVHERIANKRRDFAHQESRKLANRFAFIVFEHLNIDGMLKNHHLAKSIADAAWGQLVQLTTYKAECAGRLVVQVNPYNTSQMCSGCGEIVKKDLSVRLHACSGCGLTLDRDHNAAINILALGLQSIGQSTIEAAHFKSAE

SEQ ID NO: 5102 - protein, 399 aa, Clostridium sp.
MEINPTDKQKSKIHQTIGVSRFIYNFYIAHNKEIYEREGKFVSGMDFSKWLNNEYIPNNQDKKWIKEVSSKATKQAIMNGDKAFKDFFKGTKGFPKFKKRKNQDVKAYFPKNNKTDWTIERHRVKIPTLGWVRLKEFGYIPVNSIVKSGTVSQKADRYYISILVEERDIKISNSNIGIKISNSNTGMKISNTNNEGLGIDLGIKDFAICSNGNKFKNINKTSTVKKIEKKLKREQRKLSRKYESLKIRNKNIEEGRATRQNIQKQVVKVQKLHQRLANIRTDYINKTVFSIVKQKPSYITIEDLAVSNLMKNKHLSKVIASQKFFEFKTKLMSKCKQNDVELRIVDRFYPSSKTCSQCGKVKKDLKLSDRIYRCDCGLIIDRDLNASINLKNAKKYKIA

SEQ ID NO: 5103 - protein, 389 aa, Photorhabdus sp.
MLRATKVRVYPTQEQAEYLNAQFGAVRFAYNKALSIKRHAYPRHGVNLNPRKDLKPLLAVAKKSRRYGWLKEYDSIALQQAVINLDVAFSNFFNPKLKARYPSFKHKHGRQSSYHCVGIKVLDGAIKIPKISPIEARLHREISGSVKSITLSRSVTGKYYASILCDEQIEAPAKPTLIANVTGLDMGLTHFAIKSDGNKIANPRHLSNASHNLRRKQKALSRKKKGSANRCKARIQLAAVHERVANARADFQHKLSRAIVDENQAVIVETLKAANMMKNHRLARSIGDAGWAGFITKLEYKAAETGVHLVKLDQWFASSKTCHCCGHKMPEMPLHKRLWQCPACHTEHDRDLNAALNIKQQGIFELQAAGLVVSAHGGLRKSVAQTAAA

SEQ ID NO: 5104 - protein, 290 aa, unknown
  TnpB Polypeptide
MDGGAQEHHLRPDQRHAHPMEQTAEYSYMNEVSCVPLQQALRHLQTAFSNFFKQTGDYPRFKAKSHGGSAEYTRSAFKWDAERNELTLAKMRGPLPIRWSRTLPRKTEPSTVTVSLDAAGRWHVSILVEENIKRLPKKNNAIGIDLGVDSYAVTSDGETIANPRHYRKLAQRLEREQQELSRKTKGSNNHRKAALKVARTYARITDMRRDFLHKLSTRIIRENQTVVLEDLNVKNMAKRCAPKPDPDNPNHWLPNGQSAKNGLNRSIMDAGWSEFRRMLEYKAECTGESS

SEQ ID NO: 5105 - protein, 324 aa, Escherichia sp.
LQQSLKDLERAYKNFFQNRAAFPRFKKRGQNDAFRYPQGVKLDQENSRIFLPKLGWMRYRNSRQVTGIVKNVTVSQSCGKWYISIQTEREVSTPVHPSASMVGLDAGVAKLATLSDGTVFEPVNSFQKNQKKLARLQRQLSRKVKFSNNWQKQKRKIQRLHSRIANIRRDYLHKVTTTVSKNHAMIVIEDLKVKYMSKSAAGTISHPGRNVRAKSGLNRSILDQGWYEMRRQLEYKQLWRGGQVLAVPPAYTSQRCACCGHTAKENRLSQSKFRCQVCGYTANADVNGARNILAAGHAVLACGGMVQSGRPLKQEPTEMIQATA

SEQ ID NO: 5106 - protein, 367 aa, Methylobacter sp.
MDNSKASILRTLSVRVRDKHSAILSRMAFEANQVWNAANKETATWCYIPVPEVGYIRNPIGAFELQKQLKGIREEQGFIIHSTTVQEVIAVHAKSRKQFRKDKLRWRVSGGVRRSLGWVPFKSGAVSWKNGQAYFAGYYFKVWDSYGLSGYRFRSGSFSEDARGRWYLNIIVELLEQTGVGSGQVGIDLGLKDTATCSNGEKLQRGGFYRDSEQKLAKAQRARQKKRVKNIHAKIKNRRKDALHKFSTRLVKDNALIVVGNVSSSGLAKTKMAKSVLDAGWAILKTQLDYKSKGMRVVFMVVDEKYTTQTCSCCGSISDSSPKGRAGLRIREWTCARCGTLHDRDINAARNILAAGHGRLAGGIPGR

SEQ ID NO: 5107 - protein, 405 aa, Methylobacter sp.
MKENETITQRQGYKFRLEPKPKHLDHLSQSLGANRFVWNKLLSMNLYRLRNELPILWYPEMAWWITFWKQSEDYAFLRDAPSQSLQQTAKALDRAFLDAFDKKQPNKRLPTKKKLGKNEAGIRYPQGCTLDENNRVIKLPKLGCVKYRFSRKIEGAIKNVTISRKGGEYSVSIQTERELKRPVHPATGDIGLDMGVKRLFTLSSGDHAEPFNFEQLTKKLAQAQRMLSRRVKFSANWHKQKKRINSLNARISNARNDYLHKVSTRISQNHAMIYVEDLKVANMTRSAKGTQDNPGSRVKQKSGLNRAILNQGWGIFINQLTYKQKWRGGDVIAVPPHHTSQTCPCCQHVSKDNRQTQAEFLCVECGYENHADVVGALNILQRGRQILAGTQPQGMRGSPAKCPVR

SEQ ID NO: 5108 - protein, 332 aa, unknown
  TnpB Polypeptide
MARSVNFVWNYLNELSWRAIRERGVFLSAFDLHPYTKGAGKELGLHSQTLQCIAAEYVTRRKQFKKSRLRWRKSGGARRSLGWIPLNTGAASWKHGQVFHNGHHFKVWDSYGLGDFRFRSASFSEDARGRWYFNIVVDVGTQLGTGQGVIGVDLGLKDVATCSDGRKLENGRFYRDLEAKLAVAQRAGNKERARAIHAKIANRRKDALHKFSRQLVNQHAEIYVGDVSSQKLTQTRMAKSVLDAGWGQLKAMLAYKCAHAGIVFKVVDERYTTQTCSCCGAKPDSRPRGIAGLGIREWTCSECGVTHDRDINAARNILAAGRGRPVVGIPVL

SEQ ID NO: 5109 - protein, 443 aa, Moorea sp.
MILTYCYKIKPSPEQITTMEKWLELLRRHWNYALGQRLDWLNRTRCSIDRCSLISEPIGEIPETVNYYTQQTALKETKRLFPEYKKIYAETQQVNLQRLNKAWDRWRKPDEAGKRGGRPRFKKAGELRSFVFPRINSLKAGAHLVGGILKLSRIGSMPVVMHRPLPVGFTLKQCTIVKKADGWYCCISIKDDAVPELLPIDSVKSAVGIDVGLEKFLTTSDGEAIPIPQFYRRAQDKLAQAQRVMSRRVKGSNNWKKAKHKVALMHLHLTRCRKEFHYQVAHWLCSKYDLISHEKLNIKGLARTKLAKSIHDAAWGAFLEILQAVAVKRGLLAQEVNPRGTSIECFNCGSRVEKSLSDSAKPTLRERIHCCSSCNVKIDRDWNSGINILNRGLLAVGLPLNGCGKSIQDIVRASGGRRPRYANGSAEEQQVSFVNLRSPHHNL

SEQ ID NO: 5110 - protein, 408 aa, Synechococcales sp.
MLTRRVTFRLYPSKTQTAWLFGWRKLHQLLYNSAVADCKDSYQRLGQSVDYFGQQNALPAFKQVWPEYNVLGSHALQATLKRVDFAFQRFFKGLGKYPRFKSIRHFSGWTYPDRAGWKAHTVGDNGTLELSKLESIKMRGKARQWGTPTTCTILYRHKCWYASITINCELVRETGDGAVGVDLGCLSAVATSEGQLIENPRYLGKTLAKVKQVSRDKRRKRAPSFKKRIKASSQWRKAQKRVSKLTRKISSQRQDWAHKVAAQIVSCNSLVATEKLNLRNMTRKARGQGKRQKAGLNRSILDVGMGYLRSCLEYKLTEANGVFIEVPTQQVKPSQTCPQCGRQEKKTLEQRVHSCPCGCIENRDVAAAQVMLNWALGMSVFKRGETSSISCGSMRQLGSKKRQKLAPL

SEQ ID NO: 5111 - protein, 395 aa, Escherichia sp.
MLILKAYKYRLEPTDVQAQRLRQMCGCARFVWNYGLAETQRILDTGQKLPTYAELCKMLTAMKGMPETAFLSEGYTDNLQQKLKDLHGAWKRCFDKRLAAEKPVFKRKSKGNDSIRFVNFDKYCQLDRKRVKLPSGLGWVKFRQSRAVIGKIKNATVSQHAGSWYISFQVEIEVAQPVHPSTSAIGLDAGISKLATLSDGTIFEPVNSFKKNQVKLARLQRQLSRMVKFSANWKKQKAKISSLHSHIANIRRDYLHKVTTTVSKKHAMIVIEDLKVSNMSKSAAGTVDEPGRNVAAKSGLNRAILDQGWYEMRRQLEYKQLWHGGEVLVVTPAYTSQKCACCSYTAKENRQSQAVFVCVACGYEANADINGARNILAAGHAVLSGMYPGRARKAA

SEQ ID NO: 5112 - protein, 392 aa, unknown
  TnpB Polypeptide
VKRAYKLRAYPTRPQEGRAVRLLADHCDLYNAALQERRDAWRMGKVSVSYGDQSAQLKEIRAADPDGQGRHSFTAQQQTLRRLNVTFAVYFRRIRDARGKAQRVGYPRFKPYQRFDQVLFVAGDGARWEPADGGRWAYATFQAVGRVKVHRHRPVVGRVKTLQLKREGRRWYVIVVSQTETVPLASTGRSVGVDMGVARFLTTSDGEVVANPRLLDAAQQRIVDLQRRKQRARPGSGNRRRLRSALAREWRRLGNQRRDFHHKTARKLVDNCDTIAPEDLRVAAMTVSASGTVEHPGRNVAAKAGLNRSILDAGWTQFTSIVAAKAESAGRRVVLVPPGRTSSDCHTCGARCLRPRQELVVCPVHGELDADLNGARNIAARAGLGSGQASAA

SEQ ID NO: 5113 - protein, 408 aa, Gammaproteobacteria sp.
MKKTLRYNYRLIPTPEQEAKLVAFGATARGIWNLLLSENMRRYKYDKTFLFYKDMASLLKEIKRFEEFGWIKAFDSAAAQQVARDLETALKNAFSKGRLQRFPKHKISYKKKKLHNDSFRAVNNSNCIRTESGTISIPKVGKVPIILHRELTSKIKTVTIQYRHGKWECSITQEVECKTAKQVLKAITGFDINSKQTVVGSNGFVADNPKFLKQSKEKLNQLQRQLARRKKGSNRWHKTKQRINKLHGKISRQRLDFAHKVSRQIINETDIACFEDLNVKAMQRFNGSMIADNVMGLITQLSKYKAELEGKLYHEIGRFEKSTGICSECGQHHALTLNDRNFTCTACGSHQNRDISSAKSIARTGELDLTAAGIVARVMPKSQQKSAIKMKVFELSKFADGTEKKEAP

SEQ ID NO: 5114 - protein, 415 aa, Achromobacter sp.
MQRLQAFKYELRPDGQQERQMVRFAGSCRFVFNKALALQKANHEAGGKFISYVSMAKELTAWRNGSETPWLKDAPVHPLQHALKDLERAYQNFFAKRAGFPRFSKKGQRDSFRYPDAKQIKLDQANSRIFLPKLGWLRYRNSRDVLGTVRNATVTRSGDKWFVSIQTEREVEQPMPSAGGAVGIDLGIVRFATMSDGSYLAPLSSFNKHEIRLRRYQRAMSRKAKFSSNWKKAKAKVQRLHTRIGHCRRDYLHKATTTISQNHAMVCIEDLQVRNMSKSAAGSAAKPGKCVRAKSALNKAILDQWWFEFRRQLEYKLAWTGGWLIAVPPHNTSRTCPTCGHIHADNRKTQAIFTCVQCGYEGNADVVGAMNILARGHRVAACGEDVSHAKPARDKRAASAKQEPTEVTHSSLLPL

SEQ ID NO: 5115 - protein, 411 aa, Achromobacter sp.
MQATVIRHQGFKFELLPSKAQARMLREFAGACRYVYNRALSLNQERHRAGEGKLSYVEAAKLLTGWRADADTPWLGEAPAQVLQQSLRDLESAYTNFFAKRAGAPRFKKKGQHDHFRVPQKFKLEEGNARVRLPKVGWIRYRKSRQVLGQVKHVSVSSRAGRWFVSFLTARNVPKPLPTATTAIGIDVGVARFATLSVGTVYPTLSSFAAHHGQLRKAQRAMDRKVKFSRNWKKAKARVSKIHARIANCRRDFLHKTSTAISNNHAMVFVEDLNVGGMSASAAGTVDAPGRNVRQKAGLNRVIQDQSWYTFRRFLEYKLDWNGGMLMAVPPRNTSRTCLRCAHVAAESRRSQAVFQCVQCGFEENADLVGAVNVLRAGEARLARQASDAVRSPAAGTHRSATDGGKAVHAP

SEQ ID NO: 5116 - protein, 435 aa, Richelia sp.
VGDERTKPTACFLDLCYHSPGACDKNIVLKAVKVRIDPTIEQQSHLAQAFGCVRWVWNQSLAAMSQTYKETGKGVSALTMKKQIPVWKTEYEWLKECYSQCLQSSVLNLSGAFINFFDGRAAYPTFKKRQGRQSMQYPQNVKILSHSEIKFPGNLGVVKAKIHRDCVGTLRTVTVSKMPDGRYYASLLMDDGMENPVINEDGKAIGIDLGLLDFAVTSDGSKYQNPRHLKKHERNLKRKQRKLSRKKDPTTNRRRKAKLAVAKVHAKIARVREDFRHKLSRKIVNENQVIVVENLAVKNLVKNHNLAKSFSDAGWGMFCTMLKYKAEAEGKVYLEVGRFFPSSHLCSNTLLSLPKMDLSVREFECPHCGNRHDRDINAAINIKNEGLRILALGTSVTALGGNVRPKRYGQKSTVVEAVALELGSPLHTGTTVEGG

SEQ ID NO: 5117 - protein, 399 aa, unknown
  TnpB Polypeptide
MIRISKHNISPIANTDKKHSLEMLFKDYRACLEGYVSLILKGALPLKKNLSSKGLPIINIAHSRYRQLIYKNAAEIVRSQIKSADKRRFKAYKKAYAYFKKNRPNHPFAKKKYKELNLKPIKESKYFSNPEIKNVTINLDYRFFNIRQGNHFDSFIKITLPYFKPGLKRAETINIPLKHHRHSLKFKNGGFSLKNVLQLKQTNGNIMAGLVWEKQTGPKTEGKAIGLDMGYKKLLATSEGEYIGTEMEQVYEKIYRKQPNSKAYKRALRERDILINYYCNQLILDNVKTAYVEKLKNVKKGNSYRKSFKEKLKRWSYRKTKAKLGLMCEERGIMLEEVPPAYTSQKCSNCGSIHKESRKGEQYLCIECGYEIDADYNAAINILNRGAYSPPAHPKEHFS

SEQ ID NO: 5118 - protein, 365 aa, unknown
  TnpB Polypeptide
MYSSSKNKKLFRLINIAGLAYNHFIALQKRYWKIYHKFIEKYSMCKHLTKIKKYKKFSYLNELNAQALQEIINRIDLGYKRWWRDIKAGIKSSPPKFKKVSKYSSFTLSQSGWKIDEENGVIWIQKKKYKYYNSRKINGKIKTVTVKRDNLNNLWLYFVVKQDSFVSRKTFNRKITGFDYGFKDKMLISFDKTEDICAPSFFRKNKALFKEAAKKLDSKPFQSNNKEKAKIRLAKLHKKVLNQRKDYHWKLSHYLCSIYSLICLESLNQKFIFKKNGKKATDYGFATFVTKLIHVAIQNETKVSFVDRFFPSSQLCSNCGYKNEKVKKLSVRRWTCPSCGVEHDRDRNAALNICSEGFKKYIEKR

SEQ ID NO: 5119 - protein, 489 aa, Escherichia sp.
  misc_feature (64)..(64): Xaa can be any naturally occurring amino acid
  misc_feature (74)..(74): Xaa can be any naturally occurring amino acid
  misc_feature (118)..(118): Xaa can be any naturally occurring amino acid
  misc_feature (151)..(151): Xaa can be any naturally occurring amino acid
  misc_feature (170)..(170): Xaa can be any naturally occurring amino acid
  misc_feature (173)..(173): Xaa can be any naturally occurring amino acid
VKRLQAFKFQLRPGGQQECEMRRFAGACRFVFNRALARQNENHEAGNKYIPYGKMASWLVEWKXATETQWLKDXPSQPLQQSLKDLERAYKNFFRKRAAFPRFKKRGQNDAFRYPQGXKLDQENSRIFLPKLGWMRYRNSRQVTGVVKNVXVSQSCGKWYISIQTESEVXTPXHPSASMVGLDAGVAKLATLSDGTVFEPVNSFQKNQKTLARLQRQLSRKVKFSNNWQKQKRKIQRLHSCIANIRRDYLHKVTTTVSKNHAMIVIEDLKVSNMSKSAAGTVSQPGRNVRAKSGLNRSILDQGWYEMRRQLEYKQLWRGGQVLAVPPAYTSQRCACCGHTSYSESKNHAMIVIEDLKVSNMSKSAAGTVSQPGRNVRAKSGLNRSILDQGWYEMRRQLEYKQLWRGGQVLAVPPAYTSQRCACCGHTAKENRLSQSKFRCQVCGYTANADVNGARNILAAGHAVLACGEMVQSGRPLKQEPTEMIQATA

SEQ ID NO: 5120 - protein, 338 aa, unknown
  TnpB Polypeptide
MYLVEQHIISVNDKRYKDLDRICFLSKNLYNAALYTIKQEFLSTGKWIRAGELNKKMVAENNIDYRAMSGSSSQQVLMALDKNLKSYFSAIKSWKRDNKKFTGCPRFPRYKHKTKGRNVFSYSYAQFKHKGNFIFFPKKEGLLPLKTNCKEGSVKQVRFVPKSDCYVIEVVYESSVKEQFPDNNRIMSIDLGVNNLASIVTNTNSKPVLIDGWKQEINLGKRNNQNFVSIPFDMFISMLRYKSERQGLRFVEVNESHTSKCSSFDLESVEHHDTYVGKRIKRGLSRTKDGILLNADINGSYNIMRKVKGDAVMPPYTGFGYNPVKKFINKYVPGQTGT

SEQ ID NO: 5121 - protein, 127 aa, unknown
  TnpB Polypeptide
MKQSNIIDKIMGCTRFVYNYFLNLKIEYYEINKTTFTYNMCSKELTALKKINPWLKEADSVSLQQSIRDLDNAYQKFFKEKTNFPKFKSKKRPKQSYRTNANKNRSILIKDNTIRLPKLGWIRFCKS

SEQ ID NO: 5122 - protein, 217 aa, Klebsiella sp.
MKRLQAFKFQLRPNGQQERDMRRFAGACRFVFNRALALQNENHEAGNKYIPYTKMTSWLIEWKSIPDTQWLKDAPSQPLQQSLKDLERGYKNFFQKRAAFPRFKKRGQNDAFRYPQGVKLDQTSNRISLPKLGWIRYRNSREVIGEVKNVTVSQSCGNGTLASRRNTKWLTPFIRQRQWSVWTPESRNLPRFLMAPYTSQSTASKQASVSWLCFNGS

SEQ ID NO: 5123 - protein, 229 aa, unknown
  TnpB Polypeptide
VHIDLEPSKEFYKLLARGFKPTSHAKIKLGRKNRRVAFHLSLEKEVEIYKPEDIVKSVDVNENPVATIYEAFAVILEADLAKATLGYSYRKESIQRRNGSDSRETRKAMKKLKERKKKRDYRWKAANMIVRQAMKTRGIIVIERISGEDIRVMISRYRNRQLRHMIYQSALKGELNAIIDKAREYGVPVLTVDPRNTSKICPIHKAVIKYGEDRIGICSKGGEKWHRER

SEQ ID NO: 5124 - protein, 294 aa, unknown
  TnpB Polypeptide
MSGKSFSVWLNNEYLPTHLEYSWIKEVSSKATKHAVECGCTAFTRFFKHQSGFPKFKKKDISDVKMYFVKNNPKDCYCERHRINIPTLGWVRLKEKGYLPTTKDGWRIRSGAVSKKAGRYYVSVLVDVPDLQVKSKEDQTEGIGIDLGLKEFAILSNGKIYKNINKTGRIKKLEKQLRRAQRCLSRKYENLKKMRKGEPTQRANIQKQKLKVQKLHQRINQIRTDYINQTIATIVKTKPSYIMIEDLNVKGMMKNRHLSKAVASQKFYEFREKLMMKCHMEGIELRIVSRWYPS

SEQ ID NO: 5125 - protein, 433 aa, Thermococcus sp.
MKRSITVKLQPSKEQEKALFELAQATAIIWNKLNYQRLKQFKEFGKIDFNGTEKEAYQAFKNWIGGSTIQQLARKNAESWRSFFSLNKKKKSGDLPEWFKPKPPGFVREKNGKKLFIIPLRNDQYRVEGSVLELRRLGKFGKLRIQFKGRIHLKGKQGRLEITYDPIKRKWYAHISITVKEKLYGQEWLKIPREPLGNLSTGIDLGVNNLMAVYVENGKSFLVNGRPLKSIDFYFKKVIADYQSKLNKSGAKKSSKLSRIHQKAKLQAKHYINTAVRQTLEKLYQLGVSRIVVGYPKGIARNSEKGRRQNYLLSHVWRFNYVIKRLKEVAEEYGITVIVVNEAFTSQLCPLCGQRHSNGRIFRGLFKCRREGVVMNADLVGAFNILKKVVEKITPSLPALAGRGNWPKARPEGLKTHFGLGFNETPQTSPPLD

SEQ ID NO: 5126 - protein, 396 aa, unknown
  TnpB Polypeptide
MSYQTTKLLLTGNITDQTRDVLVFLCHEANRLWNTAVYQVRQAHFSTCGIREFFDQNDLLRRQFKDKKVKISYSGLCQEFKENPHYQWLGGQQGQQVLKSVVEAFKSYNQLLEMWFNGEIDHKPKLPSYRTKGGLCEFSFPAQSLRLNLENGRWVLPMSRLIKDYWVEEEFSIPSVNYICEENIAEIRILPQHGKLWAELVYQVKEKVAVGLDYSQALGVDPGINNLLTCVSTFGKSFIIDGHKIKGSNAKYNKKVAKYKQGKADFYWDEYLNQLTHKRSCFLRDAINKTSRFIINYCLKYGIGNIVFGWGQGVKTNCNLGSKNNQNFVQIPMARLKNRIKELAESVGIKFTETEESYTSRSSFLDGDELPVFGGEKPASWKPSPKKSKKRIISDS

SEQ ID NO: 5127 - protein, 396 aa, Microcoleus sp.
MAELTLTLKLPFHRLNACKASEFERLSAVNTQVANDLLAVDRKERKKLTSAAFRHIEIGSMWMNQTIRNCNAKTKVKHFKRMWLEVNNQGYEVLKSGDWFTVSFSLYRGRKRRIPLEIHAASHTEVLNKVIDGSAKLGSLKLWKSKKGIWYALISVSMDVPDACEVKGWIGVDRGQNNIAVAALPQSFGRFWNGRKVKALRRRFQKLRKSLQEAKKLQKVKQLESRERRIMTQINHEISKQLVQFAKDHSMGLRFEDLSGCRQTMKQRKKTKSDAAENRDAWAYYQLEIFTRYKAICASVPIESVPAPYTSKSDHRNGVIGKRVKHQFKGFDGYRCHADWNASQNIGQWLGFACPLELQKAVSAMDMVALADGVDDSPLTGDASNSVACCPELDNR

SEQ ID NO: 5128 - protein, 372 aa, Blastochloris sp.
MKLIAQLKLLPTPEHAGALKRTLEVTNAACNYISDVAWQTRTFGKFALQKLCYQDVRDIFGLSAQVVIRALAKVGDAYKLDKQAKRAFRPLASIAYDDRILSWNLHEPSVSIWTLAGRLSIPFVAGERQMQLLRTRMGETDLVNHRGNWYLLATCEVPEPDPQDVDDVLGIDLGVTNIATDSDGTIYSGSTVTSVRYRHRRLRNKLQKKGTLSAKRRLRKLAGQEARFAKDVNHTISKRIVREAQRTKRGIGLENLKHIRTRVRARKSQRTVLHSWSFFQLQACIAYKAALVGVPVALVDPRNTSRTCPKCGHIDKANRPNQAVFRCVSCGCAGHADTIAAGNIRVLGRAAVIQPHVSEAEGSVAPETSRRL

SEQ ID NO: 5129 - protein, 164 aa, unknown
  TnpB Polypeptide
MKNDRDKYLNSRARFQRNGSKSAKQALRKASGREKRHVRQINNEVSSIVVAEAIARGKRVIVLEDLTHIRSRIRAGIKVRSRLHRWPFRELQQMIVDKAVRNGIEVIFVDPHYTSQICSHCGAIGSRQKHRFVCKNCGNRAHSDINASQNLQGLGYQLITQGLV

SEQ ID NO: 5130 - protein, 285 aa, Moorella sp.
  misc_feature (159)..(161): Xaa can be any naturally occurring amino acid
MTIHRLFWFKYGIWIDEATMKEFLKGRFSVHSQDVQAIIETYYECWERTKKLHEEGYTDWRYPWRLKRFFTSTWKVTGITVEDGSLRLSNGWKKPPLKIKLPARLKGLEIKQVQLVWHRNGYWLHIAVVKPALEKVQGDAVAAVDPGEVHALTLTDGRXXXVREQDCGRHHNQRMSQWTFGRLRDLLEYKLKRHGITLEKIEERGTSGTCPTCSKYTKQTGRIYRCGDRDCGFGGVHRDVIGATGILDLVVNGRFTPGRKLPETVFYARPAVLTPMPCHKKKKAA

SEQ ID NO: 5131 - protein, 569 aa, Moorella sp.
MKKRRKNKKRTIEPGDDLKYTVCGEWFPEVYPAFRSKKWSRGDEDPLDTEMRLFCACERWAFNRLMEGRSREELKQEGQRVFGLNSRYCDDAILKARAVIETQKELLALEIEETETKLSRAKKKLRWAEKDLDKAIKVNDPAKIEKAKRAFHGRKARVQKLAAKLAELQKHEANGTIPKVVFGGRSLWRQVCRGKAGREEWRHTRQNRLYARGDETKGGNPNMKVAYQEGRFTLAVTISHLSEQKGTDSKGRPIMTRAPRVTGKLWLPEKHRLNVWELLLKGAPYTVELFKGRDGRYRVHIAFTIKVPELVTDPDLGYLGLDTNPDGVALVNVNYFGQPEPWPERFAVPYPKGLHKFAGEFQTIVHPNGFLHIKMPELAYSRSFRRTYLIGVLAQVVVNIAKVLGKSIAIEDLGFGKDRLDTNKKFNRMAANFPYRKITEAVVRKACKEGVGVKPVRPAHTSTIGYWKYMERYGVTIHHAAALAIARRAIGFKERITKELKQKIQAVIESLNQKENSLPGEGKGMTRKVKQQIMRLDEKVPVHNGLDRYKQESFYSVWHDLKQLALSSR

SEQ ID NO: 5132 - protein, 292 aa, Richelia sp.
VLAQHFGCSRWWWNYGLNQCIETYKATGKGLSQSGLNSLLPKLKKEKDTEWLGDCYSQVLQSVSLNLSRAYQNFFEGRAKYPRFKSKHHRQSIQYPQKVKQIEDALKFPGKLGTVKAKIHRPLDGAIKTVTVSKCPSGKYYASVLMEYEGDYPASNGAGKVIGIDLGIKDFAITYDGEKTSKYPNPKHLSKYERKLAVKQRIAARKHKGSNRRRKANKIVARVYERVSNVRQDYLHKLSRKIVDNNHVVVVENLNVKGMVRNHKLASSISDTGWGIFVNFLNYKLERSGGNW

SEQ ID NO: 5133 - protein, 455 aa, Filamentous sp.
MQVLEFKVKGKPSQYQAIDEAIRTAQFIRNKCLRYWMDNEGVNKYDLNKHCRVLAQEFPFANKLNSQARQSSAERAWSAIARFFDNCKKAIPGKKRRDPLRVRQFLQVGEPAQRTALTAPPKASRPRAADRRKGMLDKTGAPCSSARQGYPRFKKNCRSVEYKTSGWKLHDPKHISFTDKNHIGRLKLVGTWDLAFYPIESIKRVRLIRRADGYYCQFCLNVEVKVDAQPTGKAIGLDVGLKEFYTDSSGTTEPNPRFYRQNEKRLRFHQRRASRKKKGSSNRKKAINRLGRVHLKISRQRVEHAKRVARSVIQSNDVVAYEDLRIKNLVKNHCLAKSINDAGWYQFRKWLEYFGRKFGRVTVAVNPAYTTQQCSHCGTIVKKSLSTRTHVCRCGCVLDRDWNAAINILKSALSTVGHTGTWVTDPNASGDLTATEVGAILSQQVDSMNEESPHL

SEQ ID NO: 5134 - protein, 444 aa, unknown
  TnpB Polypeptide
MQKRKYTIITQIHEKNNLELLEYLDYSRHIYSKAVRETFQVIKNSEEFNKSRFNTYLQNKFDITKRTANSIISDAQGKFNSLKERKIYEKSQIETKIKYLEMVVIPKLEQKRNHNSEMLRLGFSVSLESQRNLRRKVVAKKLKLNKLKQMLVSLNYQIESSKYKFCFGTKELLLRSYNEFAEHRDSQMSFVGSKTEAACNSQFQLKYNARNNQFDLQLRKDFGGFKDAKGLERYVFGKVYFRHHKNKIVQILKDKNSPLSFKIIKNGSRYYLYCTFEVQVDEDDLLTRSTQGTIGLDFNKGFITLSETNKHGHLVQTLFLPYRFQSGNRTKTDLQQVISKVVDLATSKGKDLCIEGLNFSSTKSKTEANQGKKYNSMLHSLAYSQFVGLVDSIAYRNKVFVKKVNPAWTSWIAKEKYCPQMKLNVHVGASFVISRRGQGYKDTL

SEQ ID NO: 5135 - protein, 372 aa, unknown
  TnpB Polypeptide
VAHKAYKFRIYPNDTQEILFARTFGCVRMVYNHWLNQKIKQYKENKTNLTYTVCAKEMAVMKKTKEYAFLREVDSISLQQSLRHLDTAFQNFFKQPKKGFPKFKSKKHNTKSYSTICINNNITLSNRYLKLPKIGQVKLKLHKPVPKEYKLKSVTISQTPSGKYYASILFEYENQVQQKEMQLFLGLDFSMHELYCDSNGNKPAYPRYYMMTEKKLAQEQRRLSKMQKDSNNRNKQRIKVARLHEKISNQRKDFLHKQSRQISNAYDCVCIEDLNMKAMSQSLNFGKSISDNGWGMFTTFLKYKLEEQGKKLIKVDKFFASSQICSVCGYKNTKTKDLALRDWDCPKCGAHHDRDMNAAINIRNEGIRLVIA

SEQ ID NO: 5136 - protein, 386 aa, unknown
  TnpB Polypeptide
MLKGVKLRLYPNKHQQTQLWQMFGNDRRLWNLMLDMAKKRYQNNPSSQFVGEYDMNYLLKPLKQEHPYLRASDATSLQVVNHNLAQAFKMLFKHHGGYPHFKSRHAAKQSYTGKQVGCCKVFAKRRMKLPKLGGIRSSKTTQAVNGKIKRYTVSYDSTGHYYLSLIVETTAPKALPKTGKAVGIDVEIADLAISSDGVKYGTFNAKWLEKQVTKWQSKYSKRKHQATVAVCQWNHKHKLTKMSVDDYQNWQRARRQKAHYQAKIANKRVDYLHKLTTALVKKYDVIAIEDLKVKNLQKNHHLAKSIANASWYLFRTMLEYKCNWYGKRLVAVNPKYTSQICSMCGYPSGKKPLEIREWTCPQCGTHHDRDINAAVNILNRGLKAIG

SEQ ID NO: 5137 - protein, 498 aa, unknown
  TnpB Polypeptide
VPGVVPFSSLDEPVGRYPTVFTTPGTPSSPKSRNKNKRKRNENVRTVRLRLLPSDAQDRKLRRLGDATARLWNELNYARLVQYRETGKIDFEGTEREFYYKYNDVLGVNAGVVVQLNNQAWNSFFELNRMYKQGELPKFMGKPSPPGFWKDKVLGKRELIILVRNDRYYIEPINGGEGYIVLKDWGLRIRYAGRIKWSGKQGTLIIKLEGNRWFAYVPIEVGAKPAKSNPRGYVRGIHEKIQIENPRGNNKAFIDIGLNNLFAVVFNHSDTAILIKGSTIKAEYYWWKREIGTYQAIRDWLRNHGFESWKKYHAFYLHAVYKQHERLRHYYRTAIRFLAKTLWQMGIDEVFIGYPYLVSQNDGNEFNTNVWWFNKITRWLGEVLEEYGIRLHVVNEYGTSKQCSICNAEHENGRVKRGLYVCETTGIKINADINAARNIARRVGYEVPIPRRILSYIVTTNGVKPLTPKEGVTIETPRVKPRPSKAGRGSIVQKTPTE

SEQ ID NO: 5138 - protein, 317 aa, Planktothrix sp.
MIVLEYKVKGKPNQYQAIDQVIRTTQFVRNKAIRYWMDNSRELKIDKFALNKYSTTLRKEFSFVNDLNSMAVQSAAERGWAAISRFYDNCQKKISGKKGYPKFQKVGIESFYTDSNGYQEPNPKFLRKMETSIKKSQRQIYKKVKGSSGRRKARKVYAKKHLKVSRQRNEHAKRIARNVCTSNDVVAYVGVACAKRIDLSVRNLVKNHCLAKSISDASWYLFRQWIEYFAAKFDKLAIPVPPHYTSQKCSNCGGIVKKSLSTRTHICNCGCELHRDTNAAINILNSAKNREGHSQINATGVGVSTLLGATLVEQILT

SEQ ID NO: 5139 - protein, 416 aa, unknown
  TnpB Polypeptide
MYLAIKQQAKHLSKEDYLSLKELCHAAKNLTNEAIYNVRQYYFTEGEFLKYEKNYTLLKNSPNYKTLNSNMAQQILKEVDGSFKAFFGLLKLAKQGKYAFKDCKLPHYLPKDGYTTLVIGFVRLKGNKLIIPFSNSFKKTHRPIEITIPPILLNKKVKEIRIIPTAKARFFEIQYTYEAEYIQRNLNKNNALALDLGINNLVTAVSSNGKSFIIDGRRLKSINQWFNKENARLQSIKDKQHFGKKTTNRQKAITRDRNNKVNDYMNKTARTVINYCINNNIGTLIVGYNETFQRNSHIGKPNNQNFVNIPYGRLRNKLEYLCELNDIVFIKQEESYTSKASFWDNDNIPVYNADNPKEYQFNGKRIYRGLYKTAKGKVFNADVNGALNIMRKSSVVDMNILYGRGDVDTPVRIRIA

SEQ ID NO: 5140 - protein, 407 aa, unknown
  TnpB Polypeptide
MILNLQVKLYPTKQMRTYLDSQCDYRRYCWNKALSVWNDLYDERVIALPNELKRKIRDSLTDKTIQFTEEETSQRERFPSPTERVVRDELVANKNDWEYENSSRVLQLAVKDLTNTWNQFFKKSQENSGKPKFKSRKDTKQGFKTDRACIKCGRLFLDKPRAYTGQWESIRFTGYNITEGPVKLCAITRVKNQYLATLTVEVEITPLKSTGKVTAVDANVDHFDYTDGVYTLRPKELNRLYGKVRHYNRVLSRKRKECGIHSKSYQKTRTKLQMTYSRIQHIQNDLLHKFTTRLYQDYDVVVIEDLLVKKMQMSKKAKGLHRSLFGRFRQFMEYKAEKFEKRLVIADKYYPSTQRCSSCGYIKTGDEKITLSGNEKHGTKHHEYYCYECGYKADRDENAVLNLLALI

SEQ ID NO: 5141 - protein, 440 aa, unknown
  TnpB Polypeptide
MQKRKFTVVTQLHEKNNYDIIEYIESSRSEYAKAMRETFYTIKHSDLNKSQYNTHLQNKYNILKRTASSIISDAQGRYNALKELKKYERKQLGIKISHLETEVIPKLVELRDYNSVKLELGKRVSLIKQRNLRRKIIAKKSKLNRMKQKLSNLTYQLESGRLKLCFGTKKLLQQDYEHFIAQRDSQMTFIGAREETTCNTMLQLEYNRKDNQFGVKLRKDFGGYKSARGKYVYGKVYFNRHKKHLISILRSKSSPLSYKIIKRNGRYYLYCTYEIHVDDFVTRSYNGTIGLDFNKGFVTLAETNKYGHLVKTQVLPYRFKSGDKTKTDLQGVANIIVKLALQTGKDVSIEDLDFKTKKSKTETKQNKKYNEMIHSLAYRQFGDIVESVTYKNKVNLIKVNPAWTSWLAKEKYCGAMKLNVHVGASYVIARQGQGYKDTFK

SEQ ID NO: 5142 - protein, 508 aa, unknown
  TnpB Polypeptide
MRASTPSFVVSVKVHLPEQIENHLEKSFNITNSAYNEVLGLSLRRLKAMRANPRYQELLEARQSLVESAQRLKKSKGLAWQLKLYDKALSDLRLGYGLSEFSLSKHLTNRRNEPNSPYKHLSASELQVVAKDVYQTLEKVIFYKVKPDRVKFRSKFNLNASFRNKINNMGTRIVPSEKTGVAYTLFIHKASTFVDISTKTFNEYQQMSLLRAEKIKYVQIVRKTIRGKRMYYLQIACEGYPLAKTTKGEHTVGIDPGVSTVAYASSDEVALVDLVPENVTTREKLIKSLDRRIERSRRVNNPGCYNPNGTVKRGVRFKRPTNKAKRLIRRRQKAYRSLTEERRKLQGELINRIVSQASTIRMEDLNVKGFQKRSKDIRINPKTNRPYSKKRFGKAILKAAPSYFREALKTRANTLGITFEIINPQKVKPSQYNHLTESFEKKTLSTRIFDLSDEWTGVQRDLYSAFLIGHIENGQYDQNISKEFPNFYKKMKEFLAKQKPSRLDWYLK

SEQ ID NO: 5143 - protein, 407 aa, unknown
  TnpB Polypeptide
MLLSLQVRLYPTKQMKSYLDSQCDYRRYCWNKALSVWNDLYDQRVIALPRELKLKIKDNLTDKTIRFTEEELNLRKRFPSPTERIVRDELVANKSDWEYEKSSRVLQLAVKDLSIAWNQFFKKSQENSDKPKFKSRREPKQGFKTDTARIKYGRLLLDKPRAYTGQWESIRFKGYNIPEGPIKLCAITRVKNQYIATLTVEVKTISLKSTGNVTAVDANVDHFDYTDGTYTLKPKELNRLYGKVKHYQRLLSRKRKECGIHSKSYQKTRTKLQMTYSKIKHIQNDLLHKFTTKLYRNYDIIVIEDLSVKKMQMSKKAKGLHRSLFGRFRLFMEYKALKFEKRLVIADKYYPSTQRCSCCGYVKTGEDKITLTGNLKHGTKHHEYHCYECGYKADRDENAVLNLLVLI

SEQ ID NO: 5144 - protein, 380 aa, unknown
  TnpB Polypeptide
MLKSFKYRLYPTGKQAKALSSQLDGHRFLYNSALAQRKEAYEVAGKGITFSEQSAGLLPKLKKENEALAPCNYSSLQQTLRRLDKAFKAFFRRVKAGEKPGYPRFKPSDRFNTVAYAILGDGCQIKDGRLYLQNVGHVKVKWHRPVAGKVKTLSVTRRNNRWYVNFAVECEVVSLPKTGKEVGIDMGLVSFATLTDGTQIEAPKFFRKSEQLLKKAQQRLARRKKGSMRRTEARRLVAKVHEKIANQRLDFCHKVSHSLVKSYDGFAVENLNIKGMVKNRHLSKSISDASWGMFLSILKSKAESAGRWYREVAPHGTSQRCSSCGEVVKKSLAVRVHDCPYCGLSLDRDLNAALNILQLARTGPSALAAISAVPPRSCLL

SEQ ID NO: 5145 - protein, 172 aa, unknown
  TnpB Polypeptide
MSRKRKGSRNREKARLRAARLHTRVADARRDFHHQLSTNVIREHQTVCVETLNVAGLGRSRFAKSIHDAGWGQFTAMLEYKAKLYGRTLVRVDRMFPSSQLCSACGHRDGPKPLKVRTWTCPDCGTVHDRDLNAAKNILAAGLAVTACGPGVRPSASQAVGDEAGTTLAGAA

SEQ ID NO: 5146 - protein, 491 aa, Microcoleus sp.
MPSLTYVKGLPTPESELNALGFSQMEMFLTAFAPIFRLAAIETVNQLLTCTDFKKSKWNTHLQTTYSLNKRHANGVIAYSRGKVDGAALHRSLHIKTLTGKAKSIEIWLGKAEKKLKAASKFYAKKNWPGSQTCCNFPVSCSLKYRETNWQSLRCQIHHKKRKLFLVQNKLATLKILPIKVFVPHDQVFLVGSKDETLGNGIAQWNGSTLKIRTPACLEGSFGKNVSAEIGNFDRNINRLPTCGAKTWHLFKKEGKWKVAVSFTPIPVKSQSFDQVYGCIGIDMNPGSIGWAYIDTDGNLKAKGQIPLQVGLPNGVQQAQIVDACLQLATLALLYQCPIVCEELDFSDKKQRLGEASRKYARMLSCWAYNEFYKQLNSILANRGIELITVNPAFTSIIGLFKYLKMYGPACDEAAALVIARRGMRLGEKLPDSITAYVEVNSDKHVWSQWAQLNNKTKQSGKITRRHDYYTVSNWSFLVNPKEVCGEAFAH

SEQ ID NO: 5147 - protein, 419 aa, Microcoleus sp.
MLTMNYRYRIYPSITQEQSLKEWMDVCRVAYNYGLREIKDWCNSRKCMVDRCSISHEYIMAADSPFPSEVNQLNALPSAKKVFPRLGEVPSQVLQQAIKQMHRAWDGFQKVGHGFPRFKKFGQFKSLLFPQFKQNPVQGVHIALPKLGLIPIKLHRPIPGGFVVKQVRIINKANIWYANVNIQCDVSVPNPMPHGHPIGVDVGISKFLATSDGVIVKSPKFLRVMQSKLKLLQRRLDRKKKRSKNYEKQRIKVARIHHTIDNTRKDFHFKQAHALCDAGDMVFMEDLDYRILAKGMLGKQMLDAGFGQFRAITKYLCWKRGKFFGEVNARGTSQECPECGATVKKDLSVRVHHCQECGFIADRDVASGQVIRNRGIESISTAGHVGIQNAYADGLPGTEISQSRSKSKTRKGTTRKSLK

SEQ ID NO: 5148 - protein, 300 aa, unknown
  TnpB Polypeptide
VIQHRQHRVYRFRLEPTTDQEAAFQRYAGARRWTWNWALYQKRAHYAATGTGLSEKELSARLTALKKEPDTAWLREIDSQLVQQALADLKTAFEAFFAQRARYPRFKSKKRDTARFRIPQRVTLADGSLTVPKIGRVKVRQSRAVDGTTKSATFKRDACGHWFVSLVAETEMAAVALPLPSEERTVGVDMGLKDAIVTSDGERVAAPRFYRAAQRKLRRAQRSMSRKVTGSNNRAKARATVARVHQKIVHGHVESPTDGQLMVPIRGEPADGSPSPAHAKAVPRQGELVLQGAGTGPSAL

SEQ ID NO: 5149 - protein, 379 aa, Cyanobacteria sp.
MIVYEFKVKGKSVQYQAIDEAIQTAQFVRNKCLRYWMDNKGISRSELYRYNTQLRAEFPFVEALNSHACQAAVERCWSAIARFFDNCKQPIGGKNGYPKFKKHSRSVEYKTSGWKLSQDRKRITFTDGKQIGKLKLIGSRDLNFYQSDQIKRVRLVTRADGYYCQFCIQVDVSVSSTPTQKAVGIDLGLLYFIAYSNGESEPAPGFYRKAEKQLNRANRKQSKKYRKGAKPQSRNYHKARVRYARKHLRVSRQREEYCKRLAYSVIQSNDLVAYEDLNVKGLVRNRHLAKSISDAGWSTFRRWLEYFGQKYGKATVAVPPHYTSQNCSNCGKVVKKALSVRTHVCPHCAYVVDSDTNAAINILQRGLTTVGHTGSYTLG

SEQ ID NO: 5150 - protein, 458 aa, unknown
  TnpB Polypeptide
MTYTVTRIAPEALNTVEDLQKARELALRLGALRKDLWNRFGGIQAWGEKPNEVLKLFKIDNPPSKYLLDYKSWDKTVQQVIDDILMTHAAVRENVIRKIYSRYGKDERKELCKQLNSKAYLAHPVLHRWVRKAMGRGHTKVDTHIVLCHKNGAIINRKGRVTEVVFNGLPIDGKNNRYEKITLRFKTGKVSVAGYATLILHDDGVWRMHYPLKQEKTVNDSELKVGVDKGFTEALYGSDGVIYGAGIGKLITAQSDKLKKKMQARNKLHALYKQTGNENIRKNNLGRIKMDKQTAKVQAQLKSVIRCDVKAIFSKFGTVVCEDLSGRFGGKSKGKNANRKLSAWCKGEIHQALTEIADRTGASLKVVNPAYTSQVDHLTGTLLGERKGDRFIRYTGDVIQADYNAAMNILERDNDKEITRFTPYQTVKKILLKRTACFVEKQSLGVECHPKQTDILYA

SEQ ID NO: 5151 - protein, 421 aa, Clostridium sp.
MKMMKGIKVMLLPNNKQKTKLFQCANTARFAYNWALDMQMNNFKDGGKFISDSNLRKEFTKLKQQPDYNWLYNVSNNVTKQAIKDCCDAYSDFFAAQKRTGIKYTNETLVKLARKNKKPTLYNMNGHPKFKSKKYSIPTFYQDTDKIKFTGTHVKMEGFSESKKRNKQKLNWIRLAEKDRIPTDGKYINPRISYDGINWWISVGIEVKDSTTLPSDEGIGIDLGIKDLAICSDIKDPYKNINKTSKVKKSKKKQRRLQRKISRKYLKNKKGDSYCKTSNIIKSEKELLKINHRLADIRHNYIHQTTTEIIERKPSFICMEDLNVKGMMKNKHLSKAIQEQCLNEFQRQIEYKSSWNNIKFIEADRYFPSSKLCSVCGCINKNLKLSDRVYICPECGNVIDRDYQAALNLKAYGENVIQLAS

SEQ ID NO: 5152 - protein, 410 aa, Micromonospora sp.
VKVTRIAYSVRLNPGKYAALAEQARRLGRVRSEVWQRYGSVAGVGSGLTDRRVRDRWLADGTHVHFAVLANAWKETVRDAMADIAANLAAAKVAVRRAINRRTNDPAERKRMFTALKADDWASDPFLARQMRKHWKRGFNRTHDQIVVRADKYHTAVDGRGRLWLAIPGLEPRKLIRIPLSTTVAPTGTLRLILRGGRVEVHHRSIANTAALRGDHAKAHRVKANNLGIVKRERQAARHRARVRTEIFTAVHEVVDKAATVIAEDLTKRFTGRKQLPKNINRRLAAWTKGVTAEALKNVSERRGSALVHVNAAYTSQACHRCGRFGRRGGDRFHCTSCGVVWQADVNAAINILQRAGDPDIALHTPHHKVKQILQDRTDRHRTRLPVQDSSPATTGRRANYPNRSTVSDK

SEQ ID NO: 5153 - protein, 406 aa, unknown
  TnpB Polypeptide
VKLRVKVNHETYSALREVEEEYRKVLEDAINYGLSNKTTSFTRIKAGIYRNKRERHKDLPSHYIYTTCEDASERLDSFEKVKKKGRAYTNKPSVRKITVHLDDHLWKFSLDTISISTKKGRVFISPIFPKIFWEYYNKGWRIASEARFRLTKGNVVEFFIVFKKDEPKPYEPKGFIPVDLNENSVSVLVYGKPILLETNIKKITLGYEYKRKSITTGRSTKDREVKRKLRNLRERDKKANIRRKLAKLIIKEAFESKSAIVLEDLPKRTPEHMVKDMKDSQLRLRIYRSAFSSMKNIIIEKAKEFGVSVVLVNPSYTSSTCPVHGTKIVYQPDGGDAPRVGVCERGKEKWHRDVVALYNLRKRAGDVTPVPLGSKESHDPPTTSGWLRAKSLHLIMIEDKMIEMKV

SEQ ID NO: 5154 - protein, 132 aa, Clostridioides sp.
  misc_feature (2)..(2): Xaa can be any naturally occurring amino acid
LXHIANQRKDFLQKLSTKLIKENDIICIEDLQVKNMIKNHKLSRSISDVSWSEFIRQLEYKANWHGRQIVKVGKFFASSQICNKCGYKNEEVKNLNIREWICPSCNETHDRDINASINILKEGLRLITIQNK

SEQ ID NO: 5155 - protein, 242 aa, unknown
  TnpB Polypeptide
LQILDHNRDNPEDKIKFPTAIDLHKWLVALVKPECPWYYEVSFCAPQYALRQLASTWKRAFKKTSKPPRFKKKGRGDSFTLDGSIELDHFKIRVPVIGWLRTYERLPVCSQPKSVTISRTADRTPAAGASHWSLSFKLEYEPVNRPKPHPVVGVDLGIKALAVLSTGIVVEGAKSYRKIELKLSRLQWLNRHKQIGMAAPRCASRPETPTHVVRGSDTTGWVLLDAFVSRDNRRSLKNFRDC

SEQ ID NO: 5156 - protein, 507 aa, Cyanobacteria sp.
MAKITSPSFITTIPLIVTSLAESELLSRFQAGRQLYNALLNEAMVRVKLVQKSSHYQLAKTLPKGKARTEAFSKARKEYRYSEYEIQAYATVTANASLWIAQKVDSNTQQKLATRGFQSSEKVIFGRAKKVRFKVPSRFRSMEGKTNKQGIRWTKEQLVWGKLRLNGLIDKDNPVMSHGLNSEVKYVRILWKEINGKRRWYAQLINKGDPYQKAANFVSPGVVGLDLNISNVAYVADNNAGLLPFAQKVPTFEREICSLQRSMQRSQRQSNPDRYDPDFLGKKGRKTLSKKGKPKKGRLPWHKSKRYVALAAKKRELERRKSEYCKSQNRRLVNDILKMGNQIKTEKVSVKGWQKNWGKAIGTKSPGFFQAELKRKAEKAGGSFYQFSTSKTALSQTHLTGERIKKSLSERVHYDRSGVVMHRDLMSAFLSRHVYDDELSLQDAQLEYPGMETTLLRAWQQYQQSANRVSASESRCSHSPVELIRSNLENSSQIASEGTSDKLDINF

SEQ ID NO: 5157 - protein, 407 aa, Blautia sp.
MEKTSCYSITVKKFNVFCRHTDWLRQTQELYNEILSFYYELYLDTFIDSTPGAMEALRTLEKMTITGRDKQPVPNPLPWTKVPLYFRRAAINAAIAAARSYRTREAQNRRTQQFTESVTFYKGMYRDFNNKEITLKIWNGTAWKWTRIRLYGNSIPETGVMMSPSLVLKRNQTELHIPWKTPVEDGRTAKERMNAKEKICAVVFCNQDACTVCCILDSEGNSEGTRFIRGGAEYSHRCKTVEAKLKKSQESGGAGDNPHANARYWEKLRNLNDFYSHSISRQVIEYCKNNNAKIIALPEFDRDYSKIIMTKAGNHSPIHLSTAIREKIKYKAWQEGIVVVELQQHEISSVCSICGEKIKNKENEFFCPNGHRGNRYLNTARNLGKKCLKGFEQNKEKTASKTPGSCV

SEQ ID NO: 5158 - protein, 410 aa, Bacteroidetes sp.
MLKALKIRLYPNKHQENYMLSLLGSYRFVYNQCLNLKKTKYVEEGKNIGLKELGNFFHQQLTKNPEYIWLKEHNTKVLKQSVINLLDSYKRFFVNGTGFPKFKSKHDNQHSCRFPFEAISKKNDYSTYKLTLTTDLKNIKFACSEKYVNYLVKHKENIKSATLTKTKSGKYFLSILVDGDIDKVLYTPKNDIIGIDLGINTFIVDSKGNEYENIKIKRNNENKLAKLNRELSRKQKGSKNKNKSRIKLAKFHEKLNNKKQEYLHYITNKLLNENQVIVVEDLNVKGMMQNHKLARSLQELSLYRFKEMLTYKAEWFGRHIVEIDRFYPSSKKCSCCGNKKEDLTLEDREYSCNSCGLVIDRDMNAAINIEKEGGRILNNKIPIRCGELTLMDRSHVTLDEIGNKNLGKFV

SEQ ID NO: 5159 - protein, 355 aa, unknown
  TnpB Polypeptide
MLLKLLPTKEQHQALLDTMHAFNEAANYVAQVAFAEKTANKFALQKLVYGELRTTYKLAAQLAIRAISKASEAYKRDKSIQPAFKPAGALVYDERVMSFKGLLTVSLLTISGRVLVPFQVGDYQKARLDAIKGQADLIYRNGTFYLAVTLDVPEPEPGESQGTLGVDLGIVNLATDSQGEAFSGELVERNRKRHHALRQRLQKRGTKSAKRRLKKLSGKEARFKRNTNHVIAKRIVAKAKATGQGIAIEELRHIRKRTDSTVRRSQRSRHSSWAFGQLRQFLSYKAALAGVPLHTVDPRNTSRTCPAYGHCAKENRKSQASFCCVACGLAMNADIVGAINISRAPVNVPIAAGRA

SEQ ID NO: 5160 - protein, 402 aa, unknown
  TnpB Polypeptide
MRKIHRTYKFRLYPTKAQTELLAKHFGCARFVYNYFLNQRQEQYRLTGKSDNYYEQKRTLTKLKKQEETAWLKEVNAQSLQFALKCLDVSYTNFFKKRSKFPNFKSKRSKNSFTAPQRATLSDNRLFIPKFREGIKCRVHREVKGKIGKVTITKTPSGKYFASVLTEEEYITPLGKTNKSVGLDLGLKDFLATSEGERFTNNHYTKKYERKLATAQRHLSRKVKGSRGYENQRLKVARLHEKISNSRADYLHKCSISLVKRYDRICIEDLNVKGLMKNRNLAKYIADASWGKFISMLTYKAEWNDKKVVKIDRYFPSSQTCSVCGSVNKDVKDLSIREWECPSCHSHHDRDVNAAINILRVGLKKYTSAGTADYTGGEEVRAVLSESHSSVKPEAHKQSACG

SEQ ID NO: 5161 - protein, 514 aa, unknown
  TnpB Polypeptide
MQTKESSSKSGCQRNENVSLKTTRSLNQERRVYCPPLSSDTAECQGEHSSVKKKSSKTLVHVSATNSQFYDDICKTISSHLLSSTEIGSAVSDLSCLNSSSRGAEVKSWFSTSQKTVNSVNSLRICSQYFKPPHEEGTDLSFSQIKTRRIRIYPTKEQRTLLRRWFGVQRLVYNQAIQHYNDKEFDVRNWMKLYPIVFSELDMDYVKEVPCLIKVIAVKDAYTSWRTNCKKTKESGKPFSLKFKSRKDKVQSCGIPKTAVSAIGIYHTISGRMKFSETDWFAKSEISDSRLICDHGRWFVSIPKKITTQQTFETQGGAVAVDPGIRNFGTYFSTDGRFGWVGQRAFERILKLNLRIDKIKSIIATTEDKLFKFRLKRVLDRLYHKIRDLVDELHWKFMNFLTKEFSVVIFPPFNVSEMSKVSNRKIRKVVVRSMMSLRFHEFKERLKNKCKERHVLFIEQNEAWTSKTNSFNGEVMTNLGGREFFNYQGLKINRDINGSRNILLRAMRDSSANG

SEQ ID NO: 5162 - protein, 380 aa, unknown
  TnpB Polypeptide
MLRAVKVRLYPNKVQEQELNKVLGCYRFVYNQMLAKRKTAYETDKTHLSENEISKFFYGTLRKDEQYAWLREQNTQVMGQAIKQMDVAYKMFFKKCSRFPKFKSKKDKQSALFPRIAISKRNTFETKHITLITSLQNLKFRCSDLYHRRLQKYKDNIRRATLSKTKSGNFFLSILVDIPESECIRFGKTNKQVGIDLGVKDFVITSDGVVFENKHFFKREEKKIARLQRQLSRKVKGSNNRNKQRIRLAKAFERLTNKKENYIHYVVNEILKSYDVVFMEDLNVQGMLRNHSLAKAIQEVGFSRFRLVLQTKASQNGKKVCLIDRFYPSSKTCSCCGYKKHDLKLSDRFWTCPECGEHHDRDINAARNILLEGQRKLQAG

SEQ ID NO: 5163 - protein, 395 aa, unknown
  TnpB Polypeptide
MFVLTHKVRLKVRSKRQCDALQNALTVTRTLYNAALEERSGAWTKAKSSISKYDQMKSITALAGDPSLGGLPVNLLRWPLVKLDLAFKGFFDRVKKGETPGYPRFRSKDRFDAFGYTDRQCWKVDPDRGYVHLSRIGSYRLQMHRPIIGEIRSLQIEREGSRWFALIGVKTPVSLAHANDDAVGIDLGIRHHLTLSSGETVENLRHADRHTKAVKRAQRKLARARRGSRSRTKRKADVAALKRHETNARRTRLHQISANLTRRFSTLVVEKLIVQNMTRSAAGTVDAPGVNVAAKRRLNRSIQDASWGILVNMLTYKAERAGGTVIKVDPRNTSQMCSGCGSIVPKSLSQLRHVCACGVDLDRDHNAALNVLHRGVVTPGDAKPAIAPVRLRKVA

SEQ ID NO: 5164 - protein, 114 aa, Clostridioides sp.
  misc_feature (112)..(114): Xaa can be any naturally occurring amino acid
VEKAYKFRMYPNKKQQELINKTFGCCRFVYNKYLAKRIDVYKNDKETFTYKQCSSDLTNLKKELKWLKEPDKFSLQNALKDLDNAYKKFFKEKAGFPKFKSKKINRFSYKTXXX

SEQ ID NO: 5165 - protein, 463 aa, unknown
  TnpB Polypeptide
MYEAPGQRGVIAMGERNYHGPPTPVNPRYSRRAETLSAIHQHEIYRAETPSAAGGSRGECHRPLLGSGIVQVRYRYRIYPAPGQQRALVRAFGCARVVYNDSLRLRDACHEAGEKMSDAEVQRRVITLAKLTPERAWLAEVASVALVQACQDARRAYRNWFDSLSGHRKGKVGHPTFRRKHNRQSIRLTRNGFALHGQRLYVAKVGDMKVKWSRDLPSVPSSVTVTREPDGRYYASFVVERQATPLSACGREIGIDLGLASLVVTSDGDVIPNPRFLRNKERRLARAQRAMFRKRKGSANRAKARHRVAGMHRKVREARLDHAHKTALRLVRDNQAVYAEDLCVSGLARTRLARSVADAGWSQLLRLIEEKAARYGRMSIRIGRFEPTSQVCSACGVNDGPKPLHVRTWACAACGTVHDRDVNAARNILAAGRADKSNACGGQVRPAPVLAPADEAGTLRGAA

SEQ ID NO: 5166 - protein, 406 aa, unknown
  TnpB Polypeptide
MAYLNNIISMTLKAYQYRIYPNKEQLSLIWKHMNHNRGLYNKLLALSCRYYKFFGKSPSKRKLQDHIVKLKKRSKYAWLKEVNSQSLLVTLENLDNAYRNFFSGRAKFPRFKSKRSNWHSYANPQHTEVCFDGSKIKLPKIGWVNAKLHRAFTGKIKTSTVKITPSGKIMVSILIEDGQERPVATTINAQEAIGIDLGLKDFLITSDGHTFENKRHLKHKLQALNKQQRILSRKKKGSISSKKQRLKIAKLHESVANARKDNHHKISRTLVSENQTTLFVEDLAVKNMVKNRKLARHIADAGWSQFLNFLAYKQADQGKNLISINRFMPSSKTCLKCDEKNESLTLADRVFVCPSCSHVEDRDIHAAKNIKRFGLAQELGSGSESSHAVKSSPRSKLDLTSDLAKG

SEQ ID NO: 5167 - protein, 272 aa, Cyanobacteria sp.
MSITRRVTFRLYPSKTQAQKLSYWRRMHKDLYNAALYHRKTEYQKFGNRVDYIQQQNCLPAFKKEWPEYVELGSHALQATIKRVDFAYTRFFKGLGKYPRFKSIRHYSGWTYPCISGWKIETEGKNGYLTLSNLGRIQMRGKARTWGKPTTCTIVFRNGYWYASITVQCQPQRETGTGSVGIDLGCKEAITLSTGEKIAKPDFLEAGQNKVKNASKRLRRKRSSNRNKRVKASRRWKKERLKVSKLQRKVTRQREDWLHKTTSNIVSGNSLI

SEQ ID NO: 5168 - protein, 481 aa, Cyanobacteria sp.
  misc_feature (277)..(326): Xaa can be any naturally occurring amino acid
MLLAMSITRRVTFRLYPSKTQAQKLSYWRRMHKDLYNAALYHRKTEYQKFGNRVDYIQQQNCLPAFKKEWPEYVELGSHALQATIKRVDFAYTRFFKGLGKYPRFKSIRHYSGWTYPCISGWKIETEGKNGYLTLSNLGRIQMRGKARTWGKPTTCTIVFRNGYWYASITVQCQPQRETGTGSVGIDLGCKEAITLSTGEKIAKPDFLEAGQNKVKNASKRLRRKRSSNRNKRVKASRRWKKERLKVSKLQRKVTRQREDWLHKTTSNIVSGNSLIXXXXXXXXXXXXXXXXXXXXXXXXXXXXXXXXXXXXXXXXXXXXXXXXXXSGNSLIAGEQLNVKGMTASAKKGKRKKQKAGLNRSILEVGFGIIGDLLTYKAAEAGGFYLESPTRELKPTQRCAQCWELTPKTLKDRTHFCSNPLCGHIEDRDVNAAQVNVIWARGQELASLDGESLSSTSCSKHEATGDEEASETSSMRLAWAR

SEQ ID NO: 5169 - protein, 381 aa, unknown
  TnpB Polypeptide
MKAYKLRIYPNKDQKEKLEFVLEMCRQTYNLLLHELNEQIVIDKSQIQGIIPDMKICNPNLKQIYSKTLQYECYRLFSNLSALRVLKQNKKKGGRLRFKGKGWFKTINYNQSGFKLDKENKRLNLSKIGNIKIKLHREVEGNIKQITIKKSIDKWFATIITDKIIRKKCGDKVIGIDLGINNYLVDSDNNKIENPQILNKYLNELKIKQRKLSKKKKGSNNRKKARKQIAKLYSKIENIRKDFLHKLSTKLVKECKTIVIEDLNIKQMSQQNYFNARNMLDCSWGKFIQFLTYKAESAGCKVIKINPKNTTKMCSHCGNLQNMPLYKRTYKCKNCGLIIDRDYNSAKNILKLGQELSYVENNSPVHIEQELSMKQEAITSK

SEQ ID NO: 5170 - protein, 575 aa, Scytonema sp.
VAELIKTEQTKTYTDQIDFWHWGELFAISNLIDSARHHCLEMILAEKSQLDCNKELQRLFNINKRYSNSIYTEVQGIVTNANKNRANHIKILEGQIKSIKSDIKKRSKQIKDFAKQEHMLISKSRSAKKGFKTSKTKIKKACSIYAKQRQTTQLQDAKFGLHQKKRRLYVLQSQLVHLKSTSPKYTLPDIDSFVLVGSKDESRGNQLAQFDYLEETDSFVLSIRTPYALEERLGGDYIRIDGLNFKHGKHDLVESISERCYKVKTKDGTEKWAIGCSAVTIRFYWKDNCWYVAASTDINLPEITSEYLSGYVGVDLNADSIGWAVCDVQGNLLEYGDYKLDLHSKTSNQREAILRDAATFIALKALEYNFPVASEKLDFSEKKKQLKEKGKKYARMLSSFAYSQWNEALDAACSKSGIYHKKVNPAFSSTIGMLKFMSQYGMNSASSAAFTIARRGRRFSERLPKLHHLLHSKSAYPIGKHVWSQWSKIAKSVKGTQRHQYFNARPYRTRVVTSNCHPTYSVGGDGLLLNPVQLELFEIGEIPMGKDAVTVAVSGSRKTRRCRQTSFIQISLDLN

SEQ ID NO: 5171 - protein, 402 aa, unknown
  TnpB Polypeptide
MKHETIKAYKLRLYPSKDQAKMLAKTFGCVRFVWNQRVAGFLSWTPENGPTKESSIKDMKQEYDWLSEVPYNALEQKLQDWLQTKGQFFNKKRKKKLGKPSFKKKGNHESFRLSTNGFKVKPDGIYASKIGKLKLKGHDLNSLPLDTCKSITISKNPAGQYFVSILVREEVELKERTGEAIGIDMGLNDLFILSNGVSISNPRWFRKSQAKLAKAQKHLSRKKKGSNRYNKQRIKVAKIHQKTSNQRMWFLHNVSKLVVDSYDEIIVEDLAVSNMAKNSKLAKSIMDASWTSFRTMLEYKSNWYGRTFHKIDRFYPSSQICSCCGHKDGKKELSIREWECSNCGTYHDRDLNAATNIARKGLNDLYDIASEECSDYIRGDFIRPIDSLSVQLAESMKRIDLY

SEQ ID NO: 5172 - protein, 404 aa, unknown
  TnpB Polypeptide
MRLRYSYRLDPSPTSRRALARLYGCARVVFNDGLRVREDAHKAGEPYVSDAELSRRLTLAKRTPERAWLGEAPAAVLQQSLADLHRAYRNHFADLRRVKEARARGAKAKLRVRKPRFKSRTHRQAVRFTRNSRFRILPDSRLLLPKVGEVPVRWSRPLPAEPSSVTVILDTAGRYHASFVVEVCEAPLPATEAAVGVDLGLTAFAALSTGEKVDNPRWLRAREKALRRSQRNMSRKREGSANREKARRKVARLHVRVADARRDFHHQFSTRLVREHGTVCVETLNVAGLGRSKLAKSIRDAGWGQFTRMLEYKAGLYGRTLVKVDRAFPSSQLCSGCGRRDGPKPLKVRAWTCPACGATHDRDTNAARNVLAEGLSVAACGGRVRPGASPAAAGEAGTTLAGAA

SEQ ID NO: 5173 - protein, 371 aa, Nostocaceae sp.
MRISFKTELKLNNYQRTQLAKHAGVARHAWNWGLDFCKKILNHNRENPLDRLKFPSAIDLHKILVKWVKSENPWYYEVSKTSPQYALKYLSSAFSDFFRKKTVNGRVVGFPKFKKKGINDSFTLEGIIKIEHRAIQLPKLGKLRTYERLPQGLIPKTAIVSRSANRWFMSFSYDIEPTPTNKVLTAVGVDLGIKTLATLSTGETFPNPQPYRFSQTRLARLQSSASRKVSGSKNRHKANMKVAKLHATSANIRKDTLNKLTTHLAKNHSQIVIEDLNVSGMMANHCLAKSIADLGMYEFRRQLTYKAELYGAEIITVNRFFPSSKTCSSCGHIQEMPLNERVFDCQKCEAHIERDLDAALNLRNQAAPILA

SEQ ID NO: 5174 - protein, 207 aa, unknown
  TnpB Polypeptide
MLKAYKYRIYPTSEQRLYLAKTFGCTRFVYNQMLADRIKSYEENKDLDIKAIKYPTPAQYKKEYEWLKEVDSLALANAQMNLDKAYKNFFRDKSVGFPKFKSKKTNRFSYRTNFTNGNIEYCGKYIKLPKLGMVKIRDKQVLKGRILNATISKEPSGKYYVSLCCTDVEIKKLENANSNIGLDLGIKEFCITSNGQTIENPKYLKKS

SEQ ID NO: 5175 - protein, 379 aa, unknown
  TnpB Polypeptide
MLRAIKVRLYPNKAQEQTLQKVLGSYRFVYNHMLARKQDAYKSDKTNLGLAQLSKCFHHELLKDEQYDWLKEQNTKVMNQAIRQMLTAYDKFFKEHKGFPKFKSKKDKQTALFTKTAISKKNTFETKHITLVKSLKNIKFRCSDLYFKRLQRYKDNIRSATLSKTKSGNFFLSILMDIPQNEFVNFNKTSRDVGIDLGVKDFVISSDGDVFENKRFLKADERKLKKLQRQLSKKKVGSNNHNKQRIKIARAFEHITNKKENYIHYVVNELLMNYDTIYMESLNVSGMVKNQHLAKAIQEVGFFRFKEILNSKAIANDKKVVLIDKFYPSSKTCSNCGYKNKDLKLSDRHWQCPECGEQHDRDFNAAKNILREGQRISVA

SEQ ID NO: 5176 - protein, 402 aa, Escherichia sp.
VKRLQAFKFQLRPGDQQECEMRRFAGACRFVFNRALALQNENHEAGNKYIPYGKMASWLVEWKNATETQWLKDSPSQPLQQSLKDLERAYKNFFRKRAAFPRFKKRGQNDAFRYPQGVKLDQENSRIFLPKLGWMRYRNSRQVTGVVKNVTVSQSCGKWYISIQTESEVSTPVHPSASMVGLDAGVAKLATLSDGTVFEPVNSFQKNQKTLARLQRQLSRKVKFSNNWQKQKRKIQRLHSCIANIRRDYLHKVTTAVSKNHAMIVIEDLKVSNMSKSAAGTVSQPGRNVRAKSGLNRSILDQGWYEMRRQLEYKQLWRGGQVLAVPPAYTSQRCACCGHTAKENRLSQSQFRCQVCGYTANADVNGARNILAAGHAVLACGEMVQSGRSLKQEPTEMIQATA

SEQ ID NO: 5177 - protein, 235 aa, Haloquadratum sp.
LKRRVTIEITKRCQEHGKQSIHRKLGDNEERFTEWVLHRLSRAVVEFADQFSNPVIVFEDMSGIREEMQYGSYMNRQLYKLPFDKFETFVSYKATWREIPTDTVAAYYNSQTCSCYGERGYRQGRRCRCPNEECDVVQDHADRNASVNIVWREKATLDGNESNSRTYKTHPQVRLVRLSGCRVGARRVSRPPSSRSLAEQGVRAHRTAEEITKPSGHRARGCLQTLISYFRSKYS

SEQ ID NO: 5178 - protein, 290 aa, Haloquadratum sp.
MATVIRTLQATLVPPTSHKQASLQHSVETYRHALQEAFQADCDTKTAVNEVVTPYDLSSYAKDALKNYVPDLVDEADELDESHPVRYTGRGLTLDHDPDRQNSFCWRVPKAQSAEGSPFLIPLRISPAQRSLWDGTLNGEIEPNQFQLQRDGETWSLHVGVDIDVPDSTYDSDSDGITTVGFDIGEAHLLAGCACTDGSPTDPLLITGGHARQLRKGKEMFTTLSRLQERDVAQWRIDERFNHYQNALTDIVEKASRQAVDYAQQFDKPVVVLEQLHSIRENLDYGKWMN

SEQ ID NO: 5179 - protein, 430 aa, Haloquadratum sp.
MAWEVTRTVHVRLDVPDDRKSDLHATNDRFQYCANRTADWAWRYPEEDCVTSKSEAENAIYDDLREETDRLHANLVQKAIKRATNDIDSCVDRLADDEDTSKPEYDTFSIVYDKRAATYHRDKVSLATVNGRVECEYDLPADPEGTPHGEYLLNDNYEFSTSTVHYDSDADEFYLHAAMEREIDASSPEKAEDSRVLGVDCNVDDHIAVTSTGKFIGNADHLNHQRREFEKRRASLQQTGTRSAHLTYQRIGDRFGHWSRDYLHQCSKQIVKEGVRHGCTHIAFEDLTQIRGRISDGKKFQQWAFRELQEQVAYKAEEHGIVVETVEPSYTSQQCSKCGCTLKQNREGQRFACLDCSYSVNADYNAAKNVARKLALKLQRGQKSPAGGAFCQYALESGIMTVNTTDVASDTPVSAERESTDKPTASAMGS

SEQ ID NO: 5180 - protein, 285 aa, Haloquadratum sp.
MVMNHTEGYRLFPENDAIQFRISAAPRSHVKGELRGSPDQFNRLRTALNNAEWHVGTAEVVHKHDEWRLHVTVTKEDCDVASPDDADTVVGVDVNEDCVALAAMDRNGEVKDSIVVSYPSIKERRHEFFTKRKRMQTAGQTGLESVVQTAERDYVHDCLHKVSRQVVDWMSQFTTPELQDHAPDTVVAEVSTPSGVTTTDGGELDKTDDRTRPNRSACRRGRTARRFRTHRHRWVRLRHGRPHRERGRGAGRRCTVWGSSLGDEWCRRRVDVHADKDYRQLRRSG

SEQ ID NO: 5181 - protein, 213 aa, Haloquadratum sp.
VSNIAAVAFPDEYVLYPGNTIKQDNHYFQHREYNTEGENGPSQQAQRLRRKRRRRETHFYHTLTKTIIGECVDRSVGTLVVGWPEDVRSNDLGKTANKWLHTWAYDRLYQYLNYKGEEHGIEVLKENEWNTSQTCCCCECGDTADSNRVDRGLYVCDSCGLVANADCNGAENIRHKITPNPAVDRSPGCLAQPSVSLFAKSPGERVPQEQGVP

SEQ ID NO: 5182 - protein, 395 aa, Haloquadratum sp.
MAKQVVKRTITGYIQNHSQVQDELDSLGFAASKLWNVARWTSGRVWNETGHIPEDSELKSYLKSHERYDDLHSQSSQRVLKELSSVQQLVRETPKWGHESESTSIPYRKHDDEHPRSTLTFKGAGFKFDTNNGRVRLSKGENLKEYWTDFALCDIQTRSDVDLSAIESVQQNRFVLSGTSNEIKMSGNSTSSAILKLLCQRNTEKTLGIDLGICHFAALAFEDKESELYPLNCLKRDNYYFSKHIARCDDSTSQETVRLNVKKSNRRTHYFHTLSKHIIQQCVNENVGAIAIGDLSGIREDEDGETKNWGWGKHGNGNGNGNGNLDLHLHSWAFDRFTDMVEYKAEEAGIDVMLNACLKRIRQSRVPRVDVRVIQTELSVDCTCVTSVIWLRMLT

SEQ ID NO: 5183 - protein, 404 aa, Haloquadratum sp.
VDYRRTAVIKLDIPDGADAFLRETVEQFKHCANTASEWCWHGDDGFHVTSKAKAETALYDQLKTETDLTANLVQKGIRRAVEAVKSGVERIKRGEDTSKPHFSADSVVYDKRSATFHRDHVSLSTVDGRIECEYILPDNSETPPTKYVADEDFEFRMGHLQYRDGEWYLHASMQKETAEKTPESTTEHRTVLGVDLGVNNLAVTSTGTFWPADEFNHWRREYEKRRGDLQACGSRHAHENIESVGRKETGRFEIQLHTVANELITEAIENDCSHIVFEDLTHIRTEIPEASWQHIWAFRRLYEYVEYKATEHGVEGVQVDPRNTSNRCSTCGFTHDDNRHQESFACQQCGYENHADYNAAKNVGLQYLRRRQSAGDGGAPVDVRLNRGTLNVSGEYNPPATTQA

SEQ ID NO: 5184 - protein, 438 aa, Haloquadratum sp.
MSIVVRRTNTFAVRPLSTEDEQLLRELLDASASLWNELNYERRQNFFDGDSVWDTADYRKQYVGVLGSATAQQVIRKNSEAWRSFFAAREDGEDAAPPGYWGNEEAGRELRTYIRNDSYTLETGERSRLEIPVGQDLKDEYGLGYYDRLWLEVCGAPKWDGEQGRLELYFDEIDDMFRAIQPVTVPDSRQDSPLASEEAALDVGANNLVACTTTTGQQYLYEGRDLFARFRETTEEIARLQSKLREGRNSSQRIRSLYRKRTRRRDHAQDALVRDLIERLYAEGVDTVYVGNLTDVLSEHWSAEVNEKTHQFWAYRSFTDRLATTAEEYGITVRVRSEAYTTAECPVCGEREKTERTGDVFRCSCGYEGHADLGASRTFLERQAGINLDVGSMARPVRLKWDDHIWSELSRSPERASPNEERTNRSTRKGKLASVGTA

SEQ ID NO: 5185 - protein, 280 aa, Haloquadratum sp.
VSFKQADFSHDAQFTYVRLSKGRNLKEHRSDFILCEYQTRPDVDLTEWDIQQVRAVYKRDEWRLQFVCRTTSDPEPPGDDVGGVDLGICNFAAVSFGSESVLYPGGALKENEYYFIKKKANCDDSLSREATRLDRKRTGRRTHLLHALSKAIMKECVERSVGDLGGIREDDETGESRNWGDHDHRNLDLHGWAWAFDRFRTPLDYKAEAEGIDVELVSERDTSKSCSACGHTDDTQRVERGLYVCEECDTVANADVNGAENIRQKVLPSLATDGGERDNG

SEQ ID NO: 5186 - protein, 233 aa, Haloquadratum sp.
VPVKNSEWRAIDDRLHKISRQVVEDAKERNFLIVIGNLEGIQNQEMGTEMNRRLHSMPHYTLTRYITYKARFAGIGVKIVDEYNTSQTCWRCGEKENTERVGQDRHLCDECGLDDNADKNGATNIGKKGLAKDIQSPLSSLGGVYEPSLELGDDDETAAQVRVRLRDDSETKPHPILDERVHRTSEVGWGSSLRTLYFSITKYPICQGSVLYFHYEDTRALFDVGFFATDMRE

SEQ ID NO: 5187 - protein, 356 aa, Haloquadratum sp.
  misc_feature (292)..(298): Xaa can be any naturally occurring amino acid
MLEVHRTHRAKICNHPQVAESLDRHGWSASKLWNVANYHSREVWEGTGEIPDHEKLKDELKTHPTYNGLHSQSSQRVLEELAESFNSWYSSDDDRDNPPGYRKENHYDDEGRRVHEEHPRSTVTWKQNGIKHDTKNNCVRLSQGANHKEQEHPKAREYILVEYETRPGVTVENLQQVRAVHDQQTERWELHLVCKNEIETPNAPGDEAAGIDLGINNFAAVAYSTEDADLYPGNRLKQDGYYFPKEIATCDNSSGDRATRLHHKWSERRTHFFHSLAKHIVGRCVEKGVGRXXXXXXXVLLGNGIGIIFQIKTCVIIFDERLYLAFSEFLLNIASEYCSLTLYIYIVIDDRLDIIQ

SEQ ID NO: 5188 - protein, 417 aa, Haloquadratum sp.
LIRATWRPKRLHGRCRRRLPPTSHKETSLQHTLNTYRHALQDAFQVECDTKTAVNDVVTPYDYDLSSYAKDALKNYVPKLVDEADELDDAHPVRYTERGLTLNHDHDSAREHSFCWRVPKAQSADGSPFWIPLRINPAQQSLWKGLLDGEIEPNQFQLQRDGETWSLHVGVDIDVSEPAYESDDEDATAVGFDIGEAHLSAGCACTNGSPTDPLLITGGRARQLRKEMFTTLTRLQERDAAQWRIDERFDHCQNALTDIVEKASWQAIDYAQQFAKPVIVLEQLDSIREGLDYGKWMNRRLHNWAFRRLQDAIDRKAIEAGIPIEYVHPHHTSQTCHACNHIGYRDSDEFRCTNDACWVTEYHADINAAVNVANRLDPWGESLPVKAAGDDMTCHGMGALVTVPRLQPSRANQSNSK

SEQ ID NO: 5189 - protein, 394 aa, unknown
  TnpB Polypeptide
MNQELKKFILESKLIYNQSLYFLRQAYFGCKKNSIKIVTPSYIDLYKLVKSTESFSTSCLDYVVKQGVIKQAYTSWKSFIRATIEFNKAPNKFLSRPKLPNYLKKDNNLITIDSTRLRTTGCKINEIRLPNSAFKFVLPRYITRSKIKCLRILKNYQKLKIEIIYEKEQNLKNYNNSHTIGIDIGLNNLAAITSNELNFSMLINGRPLKSINQFYNKMLGDLKSKGATKKIDKLSHKRKMKVDNYLHWASRQVISICLANGVSKIVIGKNDSWKQGINLGKRTNQNFVMIPFAKFIQMIQYKAGEVGIDVKLTEESYTSKIDHLAHEGLHKQEHYLGKRTKRGLFKSSTGRVLNADINGAIGILRKVNEITDVHLMNLRNRGDAVSPKLLNKAA

SEQ ID NO: 5190 - protein, 405 aa, Actinomadura sp.
MCPTPAQEVGLLWHCGHARFVWNLAVEQNSWWTPRRGPAPSFAAQCRQLTEARAECEWLRAGSQTVQQQALKDFAQAMANFFAHTHQRPTWRKAGVHEGFRIVGKRGLHWDVRRLSRRIGEVRVPKVGWVRFRWSRPVPDGVKSFRVKRDRAGRWHVAFAAIPGPVPAPGNGNAVGVDRGVTVSAALSTGELLHAPALTDREAERLRRLQRKLARAKRGSGRRARLKAAIARIKAREADRRRDWVEKTTTRLAAGFDVIAVEDLNVAAMTRSARGTIDAPGTGVRAKAGLNRAILANGWGVLVQRLQHKAPGRVIKINPRYTSQTCHACGHRAPENRESQAVFRCVACGHRANSDVNAARNIKDTAIRDTAIKDTAVGRTVAARGALQPPGGATNREPQPDLLPV

SEQ ID NO: 5191 - protein, 720 aa, Halobacteriales sp.
VKKAASIPLSRANSSIPPRQSSPPSKRQTYSPAGVTSRWCMSLSLAGGHHKGTGSPAVVSGRESTLAGRGRPREIPLPPPAYLHRRESSAVQGVNESLCDPFAHQKSKTSGDVDETPRVSFASRRNFVPADSSEIKDFRDTRTRSVPGTDVNRVDSVAQPPEPATRIFHCNPFVGQPTLTTYGRPGRHPHPRRHRLQPAAGVKRPRSSRVRRPQKLKISDGLHESEALVNASKLWTIARWTAERIWSETGHVPSHAELSAYLKFHERYADLNAQSSQRVLQELAEAFKSWYGRRQNGNSESDPASIPQAGRPAPSLDGHVQRGRIQARPRQWPYPAVEGSQPQGRVERLHPLRVRRRPRREDRERSAGPGGVRARRVAASHRLSSRNRPDPRGDAVAGIDLGISNLAAVSFGDEGVLYPGGASKEDEYWFHKKRAECDDASPAEAERLDRNRADRRTHSLHALSKDIVERCVEHGVGTIVVGDLSGIPDGENWGDSGNLGHGWAFDRFTQMLEYKAEERGIDVERANERGTSKTCSACGTEDGDQRVERGLYVCESCDTVTNADINGAENVRQSLAPDRGDRDNGWTARPAVRLFDKSTGRVTGREQVVDCKPYYPDYGREIPASSATSDCPRDVVPRCSRRGGCHRQARSAGASDTSIASQAPSSVMSAITYSCPEPASSTEATTSPFSRVMVDAPMPTSSTYRYISPSEPAGGFSPDR

SEQ ID NO: 5192 - protein, 169 aa, Cyanobacteria sp.
LKRLSGRERRYQTWLNHNISKLIVLSALQNNAIIAIEDLTGIRERTNELPRNKTERRRSNSWAFFQLRLFLSYKSVKYGVEVVAISPAYTSQTCAACLHIHPVKGKSYRSGKSLKCGHCGNHCDADENGSKMISIVGAAFVNPLGGSVLSCNLADHIRATESPQLLAVG

SEQ ID NO: 5193 - protein, 334 aa, unknown
  TnpB Polypeptide
VLAIRKNAYEQEGKSVSYYETKKLLPQWKEDKPELKGVHSQVLQEVVKRVDLAYQAFFRRVKNGEDPGYPRFKGYGRYDSFTYTQSGFSLKPGKLWLSKIGDIKIKLHRAIEGEIQRLNIRRMPTGKWFASFVVKVEPDEPLPNTGLSIGVGVGLKSFVTLSNGEHVDNPRFFLHEEKDLAKAQRKLSRAEKGTAERAKALKMVHRVHERITNKRDDFVQKLSLKLVESYDLIAFEDLNIKGMVKNHCLAKHIADVAWNKLITTTSYKAEWAGKRVELVNPSNTSQTCSDCGQVVQKDLSERVHRCPFCGLTIDRDHNAALNILRLGLQSVAKA

SEQ ID NO: 5194 - protein, 396 aa, unknown
  TnpB Polypeptide
MLLCRKIKIEVNDQGAEALEFMQNKGRGLCNWWVMRLRNGERWNLERAKKSLRESKQYDPELRYVYGKLLAEMYFRLDKAMQAFFQRLAEGEKKPGFPRVKPRHQFFTLCYPAMYLEVQGKTITLPTGGGGNWGPKRYPNIVAYLTEDPPAHFHEVAVSRDARGNYYCSFVYDDTEQGKADQESKPGKSRKRRKHYPIREDGIVAFDLGIKTLATGYTDQGRFYHIRSKRDKCKKKSRRYIHLSKVYKRVAEKKRRKQQDCLHKASHLIAHRLAERAVVIGDLSQRQMVIKKQEQETRQERNKRRIRNRLVYNDWGLYGFVQMLAYKCLRFGKALYIISERDTTKMCHKCKHKQDMPLWKRTYRCEHENCGLVMDRDENSAVNLYQRFVAGLPPHR

SEQ ID NO: 5195 - protein, 309 aa, Halorubrum sp.
VKRTNTFAVRPLSEDGERLLRDLLDASATLWNEVTYQRLMRYNDEDGFQGGVWDADTGHLEGKYKGVLGASTAQQVIRKNSEAWRAFFRLKEQYLDASNTSVTEHPEPPGFRANEDDGRQIKTVIRNTSYTVEWGDRSRLEILVGSELKHRYDHTGRLRLEIAGEPNWPDYEKQGRLDLWYDETDNTFRASQPVTVSDEARATPLADETAALDIGANNLVACTTTTGEQYLYEGRDLFARFRETTQEIARLQAKLEAGRHSSERIRRLYRKRTQRRDHAQEALCRDVIERLYTDGVDTVYVGDLTGVLA

SEQ ID NO: 5196 - protein, 299 aa, Brasilonema sp.
MIVYEAKLEGTDDQYRKLDEALRTGLFVRNACLRYWMDGHAKTRNDLSAYCKVLSDNPDFPWVRKLNSMARQAMSERTWAAISRFFDNCKAKKPGKKGYPRFKRFQTNVSVEYKTTGWKVSEDRRFITFTDGFEAGQFKLWGTRDLHFYQISQIKRVRVVRRADGYYAQFCIDHDRREKREPTFKTVGVDVGLNHFYTDSEGLTVANPRHLRKSEKSLKRLQRRLSKTQKGSKNRARFRNKLARKHLKVSRQRKDFAVKTARCVVMSNDLVAYVSEAARQRGLEGAEYGEEQTSRQIHL

SEQ ID NO: 5197 - protein, 506 aa, unknown
  TnpB Polypeptide
LDLRRTPGDARSCARAGIHQARGFARVHRQPAQRLQFSDAACGVPAPEVPAADLVVSFVLHRHCRVGVASRCRRLHRDPVGTSLAEGLGVRRAYQFRMYPTAKQQVLLAAMMRDHADLYNAALQERRDGWNARKARHITDPKDRYGRVGAYDQITQLPAIRKADPDQARWSATSQQQTLRRLNTSFDAFFRRVKAGQSPGYPRFKKWTRFHTVTFVDGDGARFNSVPTNRPDKARVYLQGIGHVRVHAHRPIQGRIKTIEITRTGDPRARTRWQATISCDDVPVTPLPATGNVAGIDLATGDNGLAWTSDADRIANPRPLHAAAAKIADLQRRRERTTRGSRAHHRLSAQLAKTHRKAANIRRDHHHKTALDLVRRYDVIAHEALAVKNMTKAPKPKPDPHNQGAYLPNGKATKAGLNRSILDTGWTQFLAILHAKAESAGRTVTAINPTFTSQTCPECWHTDPASRTGRRFTCTGCGHTDHADINAARVICAVGTGLVPARHHPA

SEQ ID NO: 5198 - protein, 506 aa, unknown; identical to SEQ ID NO: 5197
  TnpB Polypeptide

SEQ ID NO: 5199 - protein, 452 aa, unknown
  TnpB Polypeptide
MTINVKKAIKLIIADKNGLSNLRKQTHPLMIQINERISSLIRDNILININGSFNDVYIHREALPDGEKLTTSNFMKEFMSDIFSPYEKSKVTTQLRMFTAGQLRKYKGYKKRNKGKLPNFIAVRSDNLVMGDGFFEFYKNKINGKLKVKNLDGTKSIVRYRKSSKCKGIQNNALKYIEHVNVEKKFGGTIVFGKEGKPDRIVASVDVPVEFDYYPKGFIGLDFNKSNENWIYFSEDVFGQEKISKKSYPVISALEKHIESLNKIVKVHKKISEREVRSKQRTPVRLEIQKLHEKHMNLIETSRFPGKERGIIDSILDYAVSKSYGLAIDTVAMGEELGTFGQDKLKQLFVDKCIERKVPYILAPSYYTSRRCIHCGWLDLSKANSSRDKKTNTFTCEHCNKAENADRTGAKNHVVYAKYLADIDFWTFDKSKQWAKIKESENIFHSSQINGR

SEQ ID NO: 5200 - protein, 407 aa, Microcystis sp.
MITLTYQFKLKLTRQQIEKVEHTLEICRRVYNLALSERKHWLNSRKSPANACSIISEYIIPVDAPYPNYIHQAKSLTAAKQSNEDLRSVNAQVLQQTLKTLDKAFSDMKAKGNGFPRFKKTMRSFVFPQLLNNCLAEGKVKLPQLGWVKIRQSREYPTGFEAKQARIVKKARGYYLMLYFQSSEQCPEPIVGKTSLGIDAGIESFVATSQGELIKAPRLLLKAQSKLKLLQRRLKHKVKGSKSWLKLQNKIARLHESVANTRRDWHFKLAHYLGDLAENIFVEDINFVSWSRGIVRQRSLESGIGQFINEILPYVAWKRHKLYLKVDKNGTSQECPSCHQATGKKKLSERSHNCQFCGHRENRDTASAKVIEYRGKIAVGQPVIQNACEDVLTGIKQRTLFDLVKCL

SEQ ID NO: 5201 - protein, 266 aa, unknown
  TnpB Polypeptide
MCSFPKLGRLRFSGSPKDVERVLAHTSQTRISSVKISRDAVGEYWASFSLASEFPFYDELPGTGAMEGIDLNLLHLVDDSDGGHVENPRFYRQAEERLVKEQRKLSRMREHAKKDNRKLSHSKNYQEQRKKVAYVHRRVSRQRMDHLHRISKREVENQDFLAAEDLRVRNLKRNHSLAKSISDAGWRTLLSMLAYKADLYGKTFVLVQPRNTSQTCSSCGYVLRGDERLSLSDREWVCPSCGARHDRDHNAAKNILARGLKQAGYA

SEQ ID NO: 5202 - protein, 395 aa, Klebsiella sp.
MYRATKVRIYPTQEQTELLDKQFGAVRFAYNKALHIRSHWYKKHGVSLNNAKHIQPLLPIAKKSRRYSWIKEADSNALQVSLHNLDRAFQNFFEKRAKYPKFKRKHGPQSSYHCSSLKITADTIKIPKISPIRANIHREIVGKVKSITISRAPTGKYYASILSDDGQEAPAKPNFITKLTGYDIGLKDYLIRDDGKKISNPRHLVNAYRRLRRDSKALSRKLKGSANRRKARIRLAAQYERVANARTDFQHKLSRAIVDENQAVIVETLKVANMMKNHHLARSIGDAGWAGFITKLEYKAAEKGVHLVKLEQWFASSKTCHCCGHKMAEMPLKIRKWQCPVCLTHHDRDINAAMNIRQKGITELMAAGHVVKAHGGLRKSVLTTVAACEVGNQAL

SEQ ID NO: 5203 - protein, 373 aa, unknown
  TnpB Polypeptide
MKLTLQIKLLPDDTQSKSLIETIKECNKVCNIISDIAWQNKTFNQFKLHNLVYHSIKKSSKLSAQALVRCISKVADSYKLDKKKKRIFNPLGAITYDARILSYNIEKRIVSIWSIDGRLKIPFICHNPKYLPYIKGEADLVYKKDKFYLFQTVEVSEEDVKDVEEFIGVDFGITDIATLSDGTKFSSEQLNKIRDKYFKVRRSVQRKGTKGSRKLLKRLKGREQRFATITNHTISKRIVEKAKAEGKGIAIEDLTHIRERTTVRKAQRRKHHSWAFRQLRFFLEYKARLAGIPLVVVDPNYTSQICSVCKTIGNRNGKHFSCPSCGNIIDADVNAAKNIAQLGALCGKQPRKDVNMLNFVSHIPPKADCFSCQ

SEQ ID NO: 5204 - protein, 374 aa, Silvanigrella sp.
MRESRAYQAARRLPKNAKERTAAFKNVRENLPSMSTLSMLRHATIKHGWIGEHIGINVAQKVATRAFKAVEKVAFSLAKRVRFKRYGGLNSIEGKNNATGLIWKGTFLKVGKLELPALIDSSDPVVTHGLSCRVKYCRLVQRNISGTRRFYAQLCCEDKTLSAQDRHLLRSIKPPGERRKPLISEGGPVGIDIGPSTIAIVGEKDAVLLRFCDEIEPKREEIGKLQKQLDRQLDRQRRANNPQNFEENGTIKKGCKTWSRSERQKETQKSLAEMQRRTAAHRKNLHGSLLNSLPLHENFFLEKLSYRSFQRNFGRSVGMRAPGMFVEELKRKAINAGGSVSEFPTVTTKLSQTCQCGTVQKKSLSERWQLWLWR

SEQ ID NO: 5205 - protein, 270 aa, Escherichia sp.
  misc_feature (43)..(43): Xaa can be any naturally occurring amino acid
  misc_feature (250)..(250): Xaa can be any naturally occurring amino acid
VKRLQAFKFQLRPGGQQEREMRRFAGACRFVFNRALALQNENXLERAYKNFFRKRAAFPRFKKRGQNDAFRYPQGVKLDQENSRIFLPKLGWMRYLNSRQVTGVVKNVTVSQSCGKWYISIQTESEVSTPVHPSASMVGLDAGVAKLATLSDGTVFEPVNSFQKNQKKLARLQRQLSRKVKFSNNWQKQKRKIQRLHSCTANIRRDYLHKVTTTVSKNHAMIVIEDLKVSNMSKSAAGTVSQPGRNVRAXQISAGTTFTKSQRPSAKTTQ

SEQ ID NO: 5206 - protein, 471 aa, Fusobacterium sp.
  misc_feature (232)..(468): Xaa can be any naturally occurring amino acid
MKIIKKAYKFRIYPTLEQIIFFSKNFGCVRKVYNLMLDDRKKDYEEYKSTGIKTKYPTPAKYKEEYPYLKEVDSLALANAQLNLEKAFKNFLKNKDFGFPKYKCKSNPVQSYTTNNQNTIYINDSYIKLPKLKSLVKIKLHREIKGIIKSVTISKNSLDHYFVSILCEEEIEELPKTNKNIGIDLGIKEFATMSDCIKVENLKLSKEYEKKLKREQRKLSRRCKIAKDSAKXXXXXXXXXXXXXXXXXXXXXXXXXXXXXXXXXXXXXXXXXXXXXXXXXXXXXXXXXXXXXXXXXXXXXXXXXXXXXXXXXXXXXXXXXXXXXXXXXXXXXXXXXXXXXXXXXXXXXXXXXXXXXXXXXXXXXXXXXXXXXXXXXXXXXXXXXXXXXXXXXXXXXXXXXXXXXXXXXXXXXXXXXXXXXXXXXXXXXXXXXXXXXXXXXXXXXXXXXXXXXXXXXXXXXXXXXXXXXTNL

SEQ ID NO: 5207 - protein, 516 aa, unknown
  TnpB Polypeptide
MSEHTSTYQARIAATEDVESVLDAYAVHYGHVERCLYADMRKSGKKAVALKNDYLVRFKITARQFNAIARNLAGKIDSVKELLPLRIQETELAIARAKKVLGRLKNKNKIHQKKRRLANLESRLAAVISQKESENPRICFGSRDLFRKQFNLEENGYSFHKDWLADWQAKRSSQFYVLGSKDETAGCQGCVATENPDGTFNLRLRLPGFLVEEEKYVHLRDIRFSYGGEVIRQALRCGQAISYRFIRDDKGWRVMVSTDFPKIKTISFRQAGAIGVDINEDCLAVSEIDRYGNLAGTCVISLVTYGKSTNQAKAIIGDVVKEIVAQAIEARKPIVIEKLDFKKKRAELEAEHPGQARMLSSLLYNKIIQQIHSAAYRAGIEVIEVNPAFTSTIGAVNYAKSCGISIHQGAAIAIARRGTGFRERPIKAVEATIPTAKGDHVTFPLPARNRGKHVWSFWSDVRKIQKAVLAAHLRPPKGEPGKRNPSQGKVPRFTVRPRDANHRQHCSVGVMDDIPW

SEQ ID NO: 5208 - protein, 380 aa, unknown
  TnpB Polypeptide
MIALKYRLFPSKAQEKALNETLAVCRLVYNSLLHERTALHEKSKYEPGLKSPTYYTQAPAITRWKKDYAELKTVHSQVLQNVAVRVDLAFQAFFQRIKAGETPGHPRLKGKGQYDSITYPQSGFKIGASSVWLSLFGSPVQIKAKLHRGILGKVKTCTVRRYGSNSKSSKWFVCFSVEQEEDFLPPCAEAIGLDAGLNSFLALSDGEFVDNPRFFRRDEKALAKAGRKQAKTKKHSHERRKANKVLSRIHERIRNRRHDFVHQTARRLVNRFGVIAVEKLNVKNMLGNHYLAKSISDASWSMFRTVLTHKAESAGRVIVAVNPAYTSQDCSACGYRPDGLEGRTKKKLSDRWHFCPNCSASLDRDINAAINILNLARGQK

SEQ ID NO: 5209 - protein, 402 aa, Escherichia sp.
VKRLQAFKFQLRPGGQQEREMRRFAGACRFVFNRALALQNENHEAGNKYIPYGKMASWLVEWKNATETQWLKDAPSQPLQQSLKDLERAYKNFFQKRAAFPRFKKRGQNDAFRYPQGVKLDQENSRIFLPKLVWMRYRNSRQVTGVVKNVTVSQSCGKWYISIQTENEVSTPVHPSALMVGLDAGVAKLATLSDGTVFGPVNSFQKNQKTLARLQRQLSRKVKFSNNWQKQKRKIQRLHSCIAHIRRDYLHKVTTTVSKNHAMIVIEDLKVSNMSKSAAGTVSQPGRNVRAKSGLNRSILDQGWYEMRRQLEYKQLWRGGQVLAVPPAYTSQRCACCGHTAKENRLSQSKFRCQACGYTANADVNGARNILAAGHAVLACGEMVQSGRPLKQEPTEMIQATA

SEQ ID NO: 5210 - protein, 381 aa, unknown
  TnpB Polypeptide
VNLGAVNKQYAAIENNPFADGEIVLRLVIQGAWYRLIFDFDNERFAEGKVTLPVIKVQDGEPVFIFTVVTDNPVVQFSGDWVIGVDVGINNYATVIVRDVKTGRIVYETTLPQRVHSLWNSVRASQRQVSYLKKKSDRLLLYRQERMAALDEAQLHREAASRKKRELAILAAQEIADLSHLWDNAVVAVEDLGWISNTMQNGRWNRGALVQWLTHYVSQNGGWVVTVSPANTSQQCRVCGAKVSHPTHKDSVCPEHGVMDRDVNAAANIAARAASRVAKARVTRAKNRKLRPQAPLRTPVARNSLKYPGRDRTKNKPTPRRKNHRLVSREVILPVCPARAQAHSLSAMVLADGGTHGAAGTSEAALKQGNVTYKCRLYSLI

SEQ ID NO: 5211 - protein, 411 aa, unknown
  TnpB Polypeptide
MKRTSVVRLIVDKSSEEKLKLLCNLSSKLWNEVNYARRRMLFEKKGVDIKATYKEFYEKYKVLIGSATTQQILNKNDEAWKSFFKMLKLKKEDKLPPFITKINPPRYKKKDNKRSLWSVLRKDQYKIGDNKIILKGLGVIGRIELRYKGLVHLKGEQGRLEIHYDPDRKRWYAHISFEVSEKAARRVWTSVPKKPRGDLVAGIDVGTNNLIAVYVENGLTQLVNGRPLKAISHYWRMRIAEYQSMLNKYGLKTSRWLRTMYSKWRSVGVSIIKVGYPKNIAQENGDFNNVHVWTYGYLLRRIYEVAEEHGITAVYVSEAYTSSGCPIHGERCGSRVKRGLFKCTRLNKVFNADLVGAYNILITPSPERDRGNGPKTRPGIESSRRGDVVPNLPALAATSPFRRRGGQMRQV

SEQ ID NO: 5212 - protein, 391 aa, Fibrisoma sp.
MMYKRYRYRIYPTKVQAQTLNRHFGAVRYIYNWGLATKKRAWEESKERVSYNDLQRQLPILKKELTWLSDPYSQSLQISLQNLENAYAGFFAGNGYPAFKTKFSKQSLAYCPPPSRSYINFDSSLIQVPKVGPVKCVISQRFEGKLKTVTISRTPTGKYFASCLVEEDINPAAKTEPIESGAVGVDLGIKYFATLSTGETIANPRHLSKSLKALRRASRQHSKKKKGGKNREKSRKKLARIHERVTNQRTDFLHKVTTRLVRENQTVCIEDLNVAGMGKNHKLARHIKDAGFGTFRRMLEYKAGWYGVNVLVIDRFAPSSKQCSCGHKNDALTLKDRVWTCVSCGTTHDRDQLAAKNIVRFAFHPEIVVKTLVGRGAPELTPVETLALAGR

SEQ ID NO: 5213 - protein, 371 aa, unknown
  TnpB Polypeptide
MKSITITAKVKLYPTSEQMMILNKTLSVIRDVLNFVSAFVFGREGIRYLELDHALYYPVRQQFGLRSQMTQSVFKTVLAKYKSMKSNGHPFSKVSFRNFEYDLVWNRDYSISGQSVSLNTLSGRLHIPFELKGMEHWFSAGGRFGTAKLIRKNRKYYLHIPVTLEAENRNISNHIVGIDLGINHLAVSFDDEGNTRFFSGRAVKEKRAKALALRKRLQACGTKSAKRKLKKLREKETRYVTAVNHAVTKALISQYGAGTLFIIEDLTGIRTVTEHVRLKSRYVIVSWAFCQFREMLEYKAALSQSEVLVTDPKYTSQSCPVCGNTTKANRNRRKHEFCCTVCGYRSNDDRTGAINIYRKGCNTLFAEACQA

SEQ ID NO: 5214 - protein, 135 aa, Metallosphaera sp.
LARGLVEELHKLGVSTLYLGYPYNISQDKGNKYAVNVWSYRKLIDAIELKAQEYGMKVYEVVEYNTSRLCAYHNVEVRRKPRGVITCPLNHKLHSDLNALNILKKATGNIINAVKKPLSFIVDHNRIAPVKGSNP

SEQ ID NO: 5215 - protein, 407 aa, Oscillatoriales sp.
MKARQRHRIYPNMPQRRMLAQTFGCVRVVFNDALRLRQEEYRTNGTTISSSELQKQLITQAKHTSERWWLAEVTSIALQQSIQDACLAFKNFFQSRKGQRKGKKVGFPRFKRKSNAQAFRLTRGGFKIRDNGKLYLAKIGDVKVRWSCELPSEPSSVTVIQDAAGRYFVSFVCEVEPIQQPTPNDDVGIDLGITTFATLSTGEKIANPRILQKQLKKLRRQQQSLSRKVKGSKRYQVARRKVARLHARIKDTRTDFLHKLSTRLVRENQALVLEDLNVSGMLKNRRLARAISDVGWRQFRTLLESKSIRYDRALQVINRWEPTSQRCSCCGQIGGKKPLDVRTWTCLHCGAEHDRDINAALNIKNVAAGHAETTLNARGGLQKTGKPAAADEARTRLEVEQLSLFAC

SEQ ID NO: 5216 - protein, 500 aa, Crocosphaera sp.
VAIFEINHYNNKKTNKLDSIKNLTKMILAYKYKLRASPSQKMIMTNWLFMLRSHYNFCLRDRIEAYEQVKSPQLGNYSILKTKASCCPLTCSISPQSQLGEPFKKTGKKRNAYEMQSSELPILKKARPWYKGIYSSVLQQNLRRLNDAFTNFFEGRGYPKFKTRQNFKSFSYASNQVKLESNKIYLPSIGWMRFFKSRNISDGFALKTVTVRQKSDGWYVSIRIENKDIPQSKPKDLEQVKTVIAADLGVKKLLALSNGELIENPQFEKRLSKRKTIRQRRASRKKRGSSNQKKAYAKLARLDQKIVNQREDNQWKIAHRLARLADAIILEDLKIQNMIKKCRAKQDENGKFLKNGQSAKRALNRLIRDCSWGNLTEKIESVAAKFGLIFLKVSPKFTSQKCSHCGHIEKKNRNKERFLCLYCGFFSDSDTNASICIGIKGIETLGINLSKLLMVNQEVTPKPASTGSSNREKSVSLETEPGNPQQLSLFEWVNGEAIPC

SEQ ID NO: 5217 - protein, 478 aa, Virgibacillus sp.
MAGYKTMQIWVKKGHRMYGYFEEMCQNAKNMHHTTNFYIRQVYTALTQEKALQPLQKEVLDNIRIHLPEINANQLAAYRKKVVKEEAIPSDKRKEVTCFLFEEPTKEKPYINYNVIDALFKSMSQNDYRSLPVQSSQWVMKVVFQNWKSFYASLREYRNTPSKFKARPKIPGYSRSKEKEVTFSNQDCVIRDHKFLKFPKTKERLNIGKLGWIEGKLKQVRVIPKYGQYVVGIIFAVPPAQESRESKNRYLSIDLGIDNLATIVTNTGERPVLVKGKTIKSINQRFNQLKSHYTGILRQGKNTSQGSFTSKRLEKINNKRFNQLKDLFHKASYQIEKLALENDIDTFIIGHNKGWKDHSNMGKRNNQTFITIPHRLLVQMITYKVERHGIKVIMTEESYTSQASFLDYDDIPVYGEEMNNSFSGKRVKRGLYRSKNGTHMNADVNGAANIMKKVFRDAFKEPFACTETLLYPISVTLK

SEQ ID NO: 5218 - protein, 387 aa, unknown
  TnpB Polypeptide
MVKAIKVMLIPNNVQKTKLFQYAGASRFAYNWALAREIENYEKGGKFLSDAELRKEFTKLRHSDEYAWLLNISNNVTKQAIKDACTAYKNFFRGLQKFPRFKSKKRSMPKFYQDNVKIRFSNTHVKFEGFSSSRKANKQKMNWVRLAEHGRIPTNAKYMNPRISFDGLNWWISVCVEFPDCRETLNDDGVGIDLGIKDLAVCSDGTKYKNINKSQKVKKSEKQKRRLQRSISRSYEKNKKGESYCKTNNVIKKEKLLLKRNHRLTNIRKNHLNQTISEIINRKPRFICIEDLNVSGMMKNRHLSKAVQEQGFFWFRKQLEYRCSDKGIQLIVADRFYPSSKLCSCCGNIKKDLKLSDRVYRCECGNMIDRDFQASINLKTYGEKFAS

SEQ ID NO: 5219 - protein, 377 aa, Paraburkholderia sp.
MNVKRAYRFRFYPTPEQEVILARTFGCARFAYNYMLRQRTDAWFERQERMGYHETSAALTELKKTEQHAWLNEVSSVPVQQALRHLQTAFANFFAKRAKHPTFRRKDGTQSAEYTTSAFRWDGSQLRLAKMDAPLAIRWSRTIPKGAKVTTITVSKDVAGRYHVSMLCDDVVTPRPNATGKIGIDLGLTHFAILSTGEKIAASNALRKNEAKLAKLQRRLAKKQKGSANRRKAKLKVARMHARIVDSRRDFLHKLSTRLINENQVIAVESLSVRNMKRNRCVAKSISDASWSAFVTQLEYKAQWYGRSLIGIDRWYPSSRRCSDCGHTVASMPLSVRTWTCPECQAIHDRDINAARNILAAGLAVSAHGEAVSPLSL

SEQ ID NO: 5220 - protein, 443 aa, Escherichia sp.
MVKNLTSVSGDKDQVNMHQENTMLPRRISVSLFIDQSIIWPVKRLQAFNFQLRPGGQQEREMRRFAGACRFVFNRALALQNENHEAGNKYIPYGKMASWLVEWKNATETQWLKDSPSQPLQQSLKGLERAYKNFFQKRAAFPRFKKRGQNDAFRYPQGVKLDQENSRIFLPKLGWMRYRNSRQVTGVVKNVTVSQSCGKWYISIQTESEVSTPVHPSASMIGLDAGVAKLATLSDGTVFEPVNSFQKNQKTLARLQRQLSRKVKFSNNWQKQKRKIQRLHSCIANIRRDYLHKVTTTVSKNHAMIVIEDLKVSNMSKSAAGTVSLPGRNVRAKSGLNRSILDQGWYEIRRQLAYKQLWRGGQVLAVPPAYTSQRCVCCGHTAKENRLSQSKFRCQVCGYTANADVNGARNILAAGHAVLACGEMVQSGRSLKQEPTEMIQATA

SEQ ID NO: 5221 - protein, 404 aa, Vibrio sp.
MKKAIRKVTYKLKPSVSQEESLMNLFVHHHQLYNWALRDRIETYRNSDYGLSFSEQCKINTLWRNNRKAHGIFNANAQSEQVTLKRVALAFDGFFRRLKKGDKKAGFPRFKPFQRFKGWGYKAHGDGWKLHLKEKKHGAVYLADVGIVKIRGKARNSGGKPKTAEIIHKNGEWFISVSMEYDSIERQCGTKAIGLDWGVSHYFSTIDQDGNFEQVENPRYLRNSKELLAALQRDLALAKKGTRVHRKLKHRIAKLHQKIARQRLDFTHKETAKLVGVAALIATEKLTVKNMTRSAKGTAEKHGKNVKQKAGLNREILNTAPAMTLNLLSYKAAEAGSEYVEVPTKQVKPSQTCPDCGAKKKKTLAERWHSCKCGCEKPRDVASAQVNLNWALGIQAGNQPKKAA

SEQ ID NO: 5222 - protein, 417 aa, Vibrio sp.
VKIEKTYKFKLEPTSEQAEKLAQMAGCGRVVFNDSLEYVLNIIKKSVTITDKKVLYKHLNDLAFKDRKLLKKSFPNSAFLNKQLTSWKKLNHRLWLDNAFTDCLQQRQRDFVKALDEWSKGKRGFPVFRARKIAHHSTMRFPAPKKQISIQNKHIKLPNGLGLVRYRNSQPVIGELRNATVSLNAVGEWYISIMCLVEIELPTHVQGEMTGIDMGIAKNMTLSTDFCGNEGVFEGIHSFRAYQDKIAIEQRKLSRKVLGSENWKKQKLKVSKLHQRIANIRKDYQHKATSEISKNHAMVICEALKVANMSKSAKGDSENHGKNVAAKSGLNKSILDQGWHELRRQLEYKMRWKGGIYREVNPRNTSRECASCGHTEKENRKTQAEFICQSCGHSDNADKNAAKVILNRYLRELEQAA

SEQ ID NO: 5223 - protein, 444 aa, unknown
  TnpB Polypeptide
MERIIVEQLRDRLYYATDTIVTYIDSRVLICNSNEFPQSQEDKAEFITTSKYYILESGDLCPCNDLYYKEDIRLFSRISFERKEEIRKFTFECVYYGLMDELEAVVAYLKDPGFHDAYAIDRMQHGEIVSTYRPCYASIVCKTIRGKLRVYLHLTVEGFPFPKRTKDGVIKHPCGDGIVGCDIGTQTIAYTSDHVVGLENLAERGNSIRCVERQQRLVQRAMDRSRRAMNPDNYNADGTIRKGKKAWTKSKRYQKLQLRYRELCRVSAENRKLAIHEQVHKMRSLGDVFVTEVKNAKKLQKRANPEDPMDKNGKPKRKKRFGRSIKNRCPGYFQAKVQQLFESTSGTYIEVPPDYRASQYDHTADDYIKKKLSQRMYNLKDGTKVQRDWYSSFLLYCIDLITKTIDRQKCLAIFEIQLNKEHELIEEIIRLKKRIMNSGIRVAA

SEQ ID NO: 5224 - protein, 506 aa, unknown
  TnpB Polypeptide
MEKRFRAMTHIHNVCVKHGNKLLSRLEHDKAYQDAMEKRLETSKKLDGLQQKVPSNRKEERELEKQVTALEKGIKSINQALNAIRADMGLSKSGFESWLKKCGSRFSHLVSSQQVQAEAGRVWAGVEKVLFGNGTKLHYKKEYELSTITGKSNANGAKFHPETMTVEWTGLTLSCRLPNCISEQHYIAEALKGTIAYCTISRKMFHSGWRYYALVCVRSDAPVNGRMSGKGPMGIDPGTSTMAAVSDEAVFLEELAPRVPEYNRQIRDLQYRMDVSKRMTNPGKYHEDGTIDQKNHDRWIFSKGYKRMRQKLRAIYRKKAAYIKQDHEERANRFLANADTIYVEHMDYRALQKRARNTSRKEDASPVKQKDGTVRLIRKFKKKKQFGRSLNNRAPASFITILKRKAELLGVAVLEIQTRTYKASQYNHVTGECVKTLLSERKKKIDGHTVQRDLYSAFLIQNPSDDLAIPNQQACKERFQNFLQLQERLIQTMKSTGQSMPQCFGF

SEQ ID NO: 5225 - protein, 389 aa, unknown
  TnpB Polypeptide
MMKNYKGIKIEIKPTDEQIEKINKTIGTGRFLYNFYIAYNKEIYEKEKRFVTGFEFSKYINNVFLKENPDKSWIKDVSSKSNKQAIMNSEKAFKRFFNKISSFPKFKKKSHNNQKCYFFKNNKTDFEFYRHKIKIPALKFVRVKEYGYVPKNANIKSGTITKIADRYFLSLIIEVDDIVKTENTNTKGLGVDLGVKDTAICSDGKVFRNINKTKKIKKLKKKLKREQRKMSRSVEYSKSKKIKLKKCKNFNKKKLKVQRIFYRLNCIRDDYNNKIVDEITRAKLKYITIEDLKVSNMIKNKHLSKAIQEQNFYSIRTKLINKCKERNIELRLVDIFYPSSKTCSCCGIVKKDLKLNDRIYKCCNCGLEIDRDYNASINLEKAKIYKVIA

SEQ ID NO: 5226 - protein, 436 aa, unknown
  TnpB Polypeptide
MKEFRTLKYNLKINNRETKAFLKFLCHVSKNIYNNALYELRKQYFETGNICKYFDLNKLMVSKPDSKIMNMAMTYCINRDAHVAMSNFVYHKYKTIDMPKYKEKHGYYNLYIEESDTLRDCRVGNQIKFPLSRLILSKQIKSKTYEDEEVNQFIQSSNKMEYFYIKVPKCIENEEIRQLQIIPRFDCRYFEVSITYAVDKTETKDVKKSGTLAIDLGIDNLATCVNSNNNESFIIDGRLLKSKNQWINKQLAYYKSKVLRGTMTNNIASLYMRYNWMMSDYVYKSARKIIDYAVKNNVKNVVIGWNQGFKQKGFSNSTNEENARKNQNFLQIPLAKLKDRIKSLCEENSINYIEVDESYTSLCSFYDGEDIGKHDEYLGKRVERGLFKTHYGKLVNADVNGALNILKKSKTESDSTINRLMNSGLTVPYRIKVLYS

SEQ ID NO: 5227 - protein, 357 aa, Microcystis sp.
MKSDQNINVERSRDVEYKLTGYKLSDDRRKIKFTDGFKAGEFDLWCSQKTLVYYSEQQIKRVRVVRRADGYYCQFLIDVERQEYHEPTGQITGIDLGLKEFYTDAQGNTVENPRYLRKSEKRLQKAQRRLSKQFRKGKKQSNNYHKQRIKVARLHLKVSRQRKDKAIKDALALVQSNDLVVYEALKVRNLVKNRKLAKSISDASWYQFTEWLNYFAKIYRIVCVAVPPHFTTQDCSVCGTRVQKTLSTRTHQCPNCKTVLDRDHNAAINILKKGLQYLGNHLKASTSLGIDTERSRSVNGTVGQTETDPNPPDVGGARGGGESGLWILNGDIENLSCLIEQGISDSDRSRIPRHSVA

SEQ ID NO: 5228 - protein, 387 aa, Clostridioides sp.
MIKTHRVKLNLTRTQFELVREKQMESANCWNYIVNLSKEYYFEHKQWIKKNDIQKLIKGKYNLHSQTIQAISDKFDANRKTISELRKKGNTKAKYPYKTKKFYIIPFKASAINRNAKGNLKLSMSKGRYLELDFNVENIKTAEIVWRNGYYLYYTFDNELNGVVAKGTNTVGVDLGEIHSIASVTNKGVGLILSNREGRSIKQFRNKMYAYISKRLSKCKKGSRQSKKLWRLKNKIRSKTDNQLMNLYHQTTRKFIDFCVEQKVCEIVLGDIKGVEKDTKKKKRLNRVNRQKISQMEYGRIKDYIKYKAKEQGIEVKLVKENYTSQTCPKCSKKHKPTGRTYSCTCGYETHRDIVGAWNILNKKHKYGLVDFRINHKQPINLKVSTV

SEQ ID NO: 5229 - protein, 364 aa, unknown
  TnpB Polypeptide
MKTLKLRVKDKHATQLNELGWAVNFVWNYVNDLSFKHLQRTGKFFSAYDISAYVKGSGELLNLHSQTLQAITETHAKSRKQFKKAKLNWRTNNPKSKRKSLGWIPFKKTAIKYLGVKKAGKKALKSTIQLSLAKGKKLTIDVWDSYNLALYTINTCELVQDSRGHWYACVVVAEHPKTACGANQVGIDLGCKDAATASNGEVLTTKLTHKYAPKLGIAQRAKNKKRVKAIHAKIKNTRADLIHKFTTKLVKDNNAIIVGKLQSKSFTSSKLAKSVYDAGWFEIKRQLTYKCENAGCHYAEVNESYTTQTCSCCGSRQNSPKGRTDLGIREWICECGVTHDRDINAAKNILALGLERLAVGITVL

SEQ ID NO: 5230 - protein, 603 aa, Rhodococcus sp.
MIGLGSTAPRQFAFTTRAHAAVDDATGEPIGLDDVDTRVGWLLDLIAAAGGELVSRLWQPVTFEVLAAGRDGAGRRLPAQGHVAAARLGWNPHYPTGVYVPSRVTRVVTAQVMTSLRTLAYRDTAITALSERFDPATGRIAPPTCAADWVPAGFARGLQRQLVAHSRRTDTDAVPAGRVRITDIQGPPRTSAMARLSAADRQLAQITAAGRELVLTVKLPTCPAPAGRAQWRRVRLTAAIPGHLQGRAVTDWHLPTLVLDRKGLLWRCAAAELVPVGDLGSATVAVGVDWSPSTLGAAATAASGPDGLSSDYRGVTYDDRGLGTKLARLQAEGQMLHRKAARLTRLAATAPPEVRAQLEAKIAVLNEHRTAVGVKRGKINRELGFHFARQVTDYAEAAGATVIAVEDLTTLETRGHGRVNNNRAAQSARRKATAALAHTAAGVGIAVVSVPARGSSAQCPGCDEPLARPGGYHTAWCSGCRVGGNRDHVAGVNLAKRALLGKRKVTRRRGQLPAIRVAEHAPVRRSRDKNGPTPSRPRHRRVRRSLPTVTPRLGVTPNRHVPAPRASVWDTVKHEPPQGDAGSRGTRTSPTPATPVADSMRST

SEQ ID NO: 5231 - protein, 221 aa, Rhodococcus sp.
LLWRCAATELIPAADLMAGTVAVGVDWSPSTLGAAAITGDGPDGLSSDYLGWTYDDRGLGITLARLQAEGQMLHRKAARLTRLAATAPPEVRSQLEAKIAVLNEHREAVGAKRRRINRELAFHFGRQVTAYATATGAQVIAVEDLSTLEARGHGRVSNNQAAQSARRQAAAALAHTAAGVGITVVSVPARGSSALCPGWRRTTLPCRRLPHRVGPGLRGRR

SEQ ID NO: 5232 - protein, 611 aa, Rhodococcus sp.
VVKLVPTADQFAALESTLVLCNEVANEVAGVAQSRGLRSRRALQVALYPTVKTRGLSAQPALHVLRKVADAYATRQANLTNGNYGRPGSPRYTAVAGTAVAFRPYAAQPFDDRCLSWQMDVSTVSIWTTAGRMRGVRFVCAPWQRTLLAARKGETDLVYRDGHFYLYATVDEPSPEPAPPPDTAAGWLGVDLGIVNLAVTTDDDPATLDVRWSAGAVTARRTKNAAMRASVQRVGTKSAKRKLKARRRKEQRFATDINHQLSKIIVASAQRTGRGIAVEDLSGIRDRVRLARQQRTQLHSWAYAQLRAQITYKAERSGVPVAVVDPRNTSRTCSQCGYCDKANRVSQATFRCRHCQWTGHADHNAARNIAALGHRTYRAAQSTAPIAATPPAASENVSTNPALQGRVVDLHHFRDRRHHRHGVVRTPGGAARAEAALGGAASVHPGHGHVRGRADAHPRRPHHRQRLRVGDVEDRVHPGASAIGRAQRNPARSADSGDRTRSHGGGRGSRGGLGRRRGRIGVGESSCRGGDAEGARLRGAHPRDVDRRRCPRRRSRTGAGVVGRSRTRVGAGGRKPPPRGRGRPRPRVGGDGRPARYRRGLARRIAPRLRR

SEQ ID NO: 5233 - protein, 431 aa, Lactobacillus sp.
VKAMRQQSQQKENEVKFGINSVRVYPTDEQKVYFINLFGANRWFWNQIKDMTDKRYKNNPQLSFPSVSSLKRLLPRLKQEQEWLKEIDSTSLQATAEYYCNAQEAFFKQKPKGRKPPKFKSRHYYMQSATIKNVHYRYKLKKDNTLHEGDQIHVVDPHTLQVGKKLSLHTSSLKCLKGCTIKRMMIKYRQDLDRFYLSFTVVKQKKDLPKYAEKIKKTGKAVGIDVGLGKEWLVTSDKHRWSVPDTFALERQKNKVQSHFDRNRSAIEKRVARFNHEHKETKIEKYDFQNWQKLRKTKSKYQLKIANKRYDYLQKVTTWLVKHYDVIAIEDLKTKNLMRNHKLAHNIANAGWRMFRQMLEYKCEWYGKKLIVVAPQYTSRICCECGKKNPAFNHIKTRDWLAVRQWECPFCHAQHDRDVNASRNILKRALA

SEQ ID NO: 5234 - protein, 430 aa, unknown
  TnpB Polypeptide
MKLTKTLKFKVGGLTDHEKYVLNQTRRQFRKSVNFYLYQIQKKSSTTRNDYKEEYQKARDIFQLNSALIQQSEAFAINQYKSFKNNENNHHFPHFRSFVDVRYDNRTVTFKEENEETSEIKVSLATTQSRVEGTLQGGEYCFEEFQAGEFCDARLRRKDGEWYLKVHVQWEPEIQDAEKSKHYIGVDLGVNNLATIAVQNREGEVVETKFFDGSYVSEKKRRFNAKRREYMRKGLWSKLRKTKGKEKRFIKDVNHKISKYIKDLCEKYESSTVVMENLDGIRENMDFGSKQTRRLHSWSFVQLQEFIIYKAREAGSSYRRVPPYNTSQVCGSCFGEVFRSSRNYSIGACETCKQEVLNVDLNAAVNIVQRLWYYITRDCHEDTVSETELREFSSEGSGIESHQGSVDGKVDTAAIDAKHQLVSSLSLSLP

SEQ ID NO: 5235 - protein, 125 aa, Okeania sp.
MVKKRCDPATTPVARERAPRDHKLARAISDANWGEVVRQLEYKAEWYGRELIKIDRYFPSSKRCSICGHVVEKLPLNIRQWDCPECGSHHDRDINAAINILRMGTRVGERRKRSDPATTPVAREC

SEQ ID NO: 5236 - protein, 267 aa, Okeania sp.
MVEKAYKFRFYPTPEQESLLRRTLGCVRLVYNKALAARTQAWYERQERVGYKQTSAMLTNWKKQEDLDFLTEVSSVTLQQGLRHLQAAFPAECCANTNFFGGRAKYPNFKKKRNGGSAEFTKSAFKWKDGQVYLAKCAQPLPIRWSRQLPQNCVPSTITVKLDPSGRWSISLRVNDTRDLRLNPTNKQVGIDLGITNLLTTSDGEKIANPKKLNKLHKKLRLAQKSLSRKTKGSNNYQKARLKVARIHAKIKDSTEDYTHKRAHSTN

SEQ ID NO: 5237 - protein, 411 aa, unknown
  TnpB Polypeptide
MKYSHRYPAYPTQEVAAELEYHIDIHRQAYNYTLYEYENVDADDIGSAYKHHYRLPGWKHEFPVFSTVNSKALQRTVTRFYDNLSNLKDQKNNGNTVGKLNWKSPREFQSMTYSQSGFELKNTSGRHATLCLSKIGDFKIRYHRDIPDTADIKEVTIKKETTGEWFVSFGLETDEADLPEKSDVDSLDVSNSVGVDLGIHNYIHTSDGKTVEWLNLEDEYERLRREQRKLSRKEKGSNNYENQRRNVATVKRHIKRTVLDYQHKLTTWLVREYDAVFVEDLDVKEMLEQSHNARNKQDAAWRQFITLLEYKADLYGCHVVQVEPRGTTKDCASCGVETAKPIWVREHSCPSCGFECDRDANAAMNVLQRGFSELGLGWPESTPVETALPTDTAGFQRVSAKRVIETGSLGA

SEQ ID NO: 5238 - protein, 258 aa, Lactobacillus sp.
VDNSHLKLPKIGFVRFKSGKKVTGKIKNVTIRLSSTGKYYAIVLVDADIKELPKANNSVGLDIGVADLMITSDGVKHPTIRFDQILAKKKHYWEKRLARRRLQAQKEIAWDKHNKALVPRELSDFKNYQKARLMVAKYSEKIANQRNNYLHLLTKQLVKQYDVIKIEDLKTKNLMKNHQLARAIANQSWRELRSQLQYKCDWYGKQLVIVNPRKTSQICSSCGYDDGKHTLEIRQWTCPNCGINHDRDINAAKNILNA

SEQ ID NO: 5239 - protein, 342 aa, Thiomonas sp.
MQRRKVTFKLYPNAAQSARLEAWTRLHCELYNAALEERIDAWRKAKKSISYYEQQNALPAIKADRPEFVELGSHALQQTLRRLDLAFAAFFRRVKAGQTPGFPRFKSAKRFSGFAYPDPAGWKLMGHGGRGATLRIGSGQGAMSLRARGQHRFGSESKPNDLTLTRRNGQWFVSVTLRVPEEGCARQRTGDARRGVDFGVTDWATFDDGQIIANPRWLREELPKLADLQRQRARKRKGSVRHKRLGANIARLHDRIANMRRDFLHQETSRMVQQCAVLATEELAPKNMSRSARGTEQEPGRLYNTQDTPGTGVAARPKPLPRQRSKSKSATRETHAITAQAV

SEQ ID NO: 5240 - protein, 413 aa, unknown
  TnpB Polypeptide
MLNLTYAYRIYPDAKQEATMLDWLEQSRRVYNYALRERKDWMNSRKCQVNACSIRSEYIITGDTPYPNYYAQKRNLTQARKRFPELDAVHSQVLQEVLLRLDKAFRSMQKLGFGFPRFKKYGQYRSLLFPQVSANPITGWQIKLPKIGGVRINLHRPIPDRFVVKQVRVVRKASGWYALLVLESDVSIPDAMPVGNAIGIDLGLEKFLAVSTGKLVARPKFFVELQSKLKWLQRQLKDKVKGSNNYRKAQRQIAKLHEHIHNTRKEFHFLTAHQLCDGVGMIFAEDLNFIALGRGMLAKHCLDAGWGGFLEILNWVCKKRGVYFAGVNPNGTSQTCPNCGVHTGKKELDVRVHHCESCGYITDRDVASAMVVEQRGLTAVGQIVVLPVEESRLGTPVKQENLGSDQGMPTLSA

SEQ ID NO: 5241 - protein, 373 aa, unknown
  TnpB Polypeptide
MHNATFQYRLYPTPAQATVMQYALDECRWLYNRLLEERKLAWEQTETSVGLYDQINRIGALKAERPALADVHSQVLQNVAVRIDLAFKAFFRRVKANDKPGFPRFRGYGRYDSFCYPSSGHKIDGQHVVLSKIGRVKAVIHRPREGKVKTCCVRRTATGKWYVSFACEMEDAPLAATENAVGIDVGLATFATFSDGSEVANPRFFRRDEKALAKAQRRLAQEPKTPKGQPLTPARRKRRKVVARVHERIANRRKDFAHQQSRRVVNQHDTIAVEGLSINRLVHNHCLAKSIADAAWSLFTSCLSYKAVSAGRRYIEVNPAYTSQTCSRCGHRQKMPLADRVYHCPCCHLDLSRDHNAAINIVTLGLQCLGANP

SEQ ID NO: 5242 - protein, 422 aa, unknown
  TnpB Polypeptide
MSKTFKYRLLPSAAQERVLRMTLEECRWLYNQLLEQRKAAYEERGEMPTLYEQQATFGALKEERVSLGDVHSQVLQNVAMRLDLAFKAFFRRVKASETPGYPRFRGYNRYDSFCYPQSGFRVNDKRVYLSKIGHVKAVLHRPLDGTVKTCCVQRTRTGKWFVAFSCEVEDAPLPATASAVGIDVGLTTFATMSDGREVATPRFFRRDEHDLARAQCRFSEHPTPEKGHPSTRERRRRAKIVARIHERIANRRRNFAHQESRKVVNTYDTIAVEDLSINRMAHNHCLAKSIHDAAWAMFTAMVAYKAACAGRHFIAVNPAYTSQTCSGCGHRQKMPLSERTYQCPCCHLSIGRDVNAAKNILAVGLHSIGEGPSKPTALAMGAVTSTASMTGPVRASGGQPGRARRRARDVAAGPVCDGIMGL

SEQ ID NO: 5243 - protein, 404 aa, unknown
  TnpB Polypeptide
LTEQVKTYLGLSSIDDSLIDGQPFLTTCYRINKDKCWYQKPTLAWAYDTDGNLTVPTKENKATVELEVPEAIMKFMRRLVKQARKASSLPDLSKVRTFKLDEKVATLEVTKNAHHVDFWLKLSTLDKGKPIYIPLKNNPYYMKLLKTGERVPFVQVSLKDGKLTVSPILAHEKAPLRTDGSELGLDFGMVTMFTTSTGERHGITTFNKLKIWDEILLKRTKELQAQGKAFKSDPTYNTLQSKIRSFIKNEIGRILNKLANKGYAVFMVEKLDFRGGGLSRRMNRLLSRAYRKVIKDKLTRLEETCGITTVEVNAAYTSQECSKCGFISKGNRKSQSAFHCACCGHKVNADVNAARNIVKRRSFDVELRTYAREQNVRITRCLILERLLHKHKRLCSNNLASCHL

SEQ ID NO: 5244 - protein, 400 aa, unknown
  TnpB Polypeptide
VVTTLNRIESFYIKPDPDLSHWCHLAKNLYNEANYIVRQELFHNGVWLRYYDVWLALKETSDNYDELPTGTAQQILRLIDSAWKSFFASIKEWKKHPEKFLGRPKLPKYKPKDGEFVLPFTNQQVRHKDGLIKLPRKFDVEVKTRLNEGTNIRGARIVPQGVGYRLEVIYDKEVPEPPLESTRIAGLDLGVNNLVTIGTNIGIEPIVVNGGVVKSWNQFYNKKRAQLRSVLDRQGGKSSRRLNRLYLKRKRKMQDYFHKTSRRIIDWCVQHNIDTIVIGHNDGWKQNVRLGRRNNQNFVGIPFGMLISQLEYKAEDVGIRIVLQNEAHTSKCSFLDNEPVCHQKQYAGQRVKRGLFRASDGRLINADLQAAYNIVKKAFPNAFTDGIEGIGVCPRRLSVA

SEQ ID NO: 5245 - protein, 211 aa, Ruminococcus sp.
  misc_feature (206)..(209): Xaa can be any naturally occurring amino acid
MVKAIKVMLIPNNVQKTKMFQYAGASRFAYNWALAREKESYEKGGRFISDSELRKEFTKLRHFDEYAWLLNISNNVTKQAIKDACTAYKNFFKGLQKFPRFKSRKRSMPKFYQDNVKIQFSNTHVKLEGFSSSRKANKQKKNWVRLAEHGRIPTDVKYMNPRISFDGLNWWISVCVEFPDCRETLNDDGVGIDLGIKDLAVCSDAXXXXIQ

SEQ ID NO: 5246 - protein, 395 aa, unknown
  TnpB Polypeptide
MLYNISKIVYNYFLYHIFVSKDNDMLKAYKYRLNPTSEQISLIEKTFGSTRFIYNWALQTKIEAYQDDKKSLTYHDLCKKLTDLKKQEEYTWLNEVSNECLQQSIRNLDQAFTRFFREKKGFPKFKSKRGSRKSFKNILNIHIDFDNNRIKLPKLGWVRFYSNQVFKGKIGTVTVSKSPTNKYYISILVDNGLKLPGKSPINPDTTVGIDVGIKTFATLSNGSVFENPKYLERSSARLRCLQRRLTRKQKGSRRREKARLAVAKAYEHISNQRHNFLHHVVNNILGENQTVVIEDLNVEGMMKNHKLANSIASCSWSEFFRILSYKSDWKGVNLIRIGRFEPSSKMCECGYVHRDLKLSDRIWTCPSCGAVNDRDLIAARNIKKFGLEKQNLLTQ

SEQ ID NO: 5247 - protein, 476 aa, unknown
  TnpB Polypeptide
MKAILINETEEHKEIIDNIMLIFCTAIRYAFKRLLEGKKISDLEKCVSSKYNLNIRQAKDAVENARQIIKSQKELVKLNYDNYLSKVKAVEKILNDKDKKISASKRKALLSKLDKRQRKLNYYKNFIDTNTIPPVIFGTKKMFLKRCKGLISNEEWKDCRSNRYYSRGDKTKKGNPNLRVVIINNMSYLEISTLEKTSTNRAIKIRIPIYLPQKLSKKTGQINGINYRQLFLNHLQTGEAYQIELIKKDRKYYAHITFEVPKTETTYTGHEGIIGIDTNPDGFALTYIDNKGNYKWHKYLKQHELIYARSNRRTNLCGELVKQVISMAKCENCGIAIEDLKFKDDKDVHRKFSRTKHQFIYSKLLTMLESACNREGIEIVKVKPQFTSKIGLYKYCHQYGMPVHNGAAMVIGRRSYGFKEKIPKILKDKLIDNKDKFDKKNEWERWSIINRIIKGKVGENPDLWLKERKQILGLIS

SEQ ID NO: 5248 - protein, 405 aa, unknown
  TnpB Polypeptide
VSQPLSKFEFVSRCRTFRYLLQPTSHQQAALKHLLGVQCELYNAALEERRGAWRWEQRALTYFDQSRELTELRAVRPEVLAYGVTVCRGTLKRLDRAFCAFYRRCRLGQRPGYPRFKSQRRFDSVQWEDTKGWRLQTEQRRLYLQGIGHVKVRPHRAIRGTPKAITVRREGRRWWVSVRCVDVPATPLSATGRAVGIDLGIRFEVATSDGQLIEAGRPLRRSAERLAVAQRELSTKHRGSGHRAKAAARVGAIHRKVANQRKDFAHQLSRSLVNLYDLIVHEDLAITNMVRIPKPRKDQDTGTFLANGARAKGGLNRSIHDAGWGQLLAFVAYKAEDAGRELITVDPRYTSQRCSSCGHVEAANRCSQAEFRCCSCGYQAQADVNAAENILRAGRARRELASVKA

SEQ ID NO: 5249 - protein, 405 aa, unknown; identical to SEQ ID NO: 5248
  TnpB Polypeptide

SEQ ID NO: 5250 - protein, 562 aa, Clostridiales sp.
MGLKTISFKLHKPGKRKSEIIDTAMRNYTQAYMFMLEKAYCRRAELISLFGDTHGKFSATAASNWARESVAKELDQFDAEPFKDSLLLDFGMTISSWLRLREIQPDSPFPEEKQGFGTSVIRPLYFCRYDTVRSYSLLHDNEKDRYYVQLFLMNRKLAGYFAKTAAKGEAVATGEAVATGEAVATGKNAESVGYASSGLAFKALSADRKLVYIHREKRMLRPCAKNPAYILIPLSFGKWQEEWLKKSLAEPEIIRTARLLKKNGEYFMSISFKTDTAREIKPARYLGISRGWGSEVCYSVIEGRNERTENSAGAVKKEGMLLASGIVKSGDEPENARISINRLHVLANKIVDIASEYKCQVIALNLVGRDDGLGWNEPDGTRLKPLVSHGNYNRLIGLLDYKLPEKGLPQPVRVSPSGIFHTCVSCGLNSNQNRLTKDIFICTECGASMGITGIGSINTARRLIKYSDSRIRIEVVCAGDSKTYRNKLIGLDFTISEDEACQMERLRTEIIRLYEEAFSQNATTAGSPALNKRRSILGKLALQAGESGTSDIKAFTDRLDFV

SEQ ID NO: 5251 - protein, 358 aa, Lentzea sp.
VRTAYRCRAYPTPEQAEVLNRTFGCVRLVWNKTLSERNHRYRIAGARTSYRKTDAALTEWKRSEELAFLSEVSCVPLQQTLRHQHAAFQNFLSGRSHYRRFKSRTGRQSAHYTRSAFRMRNGTVTLAKTDAPLRFTWSFGDIAAATLDPTMVIVSREPDGRWYVTFAVDVDTPAPVAPARHAVGVDLGLTDFLVTSDEVRVANPRHLTRKARNLARYQRRLARCRPGSNNRRKAKVKVAGAHRKARNARQDFLHRTSATLVRAADVIVIDRWYPSSKTCSTCGHLLAELQLSTRHWTCPGCRTRHDRDLNAAKNILAAGRAVARGDSGDACGADVRRQGPSLPQSAVKQEIRAARSSA

SEQ ID NO: 5252 - protein, 459 aa, Pseudoalteromonas sp.
MLTGIKLRANPTSYQKLVLSQWMGCARSIWNAKVDEEKYYRTFARKYYPTGTYAPIDQKTSQFKSKELTPWLSRCPSQIIRNSAVNWYQTYQKFMKGVCGRPKRKPKTDRGSIYLTREVFSFERCEDGNLRLFIGTKTNNIGYLSFKAHGKFESPNSLYVRKERGQYYVSFCYEDGNSEEELPSNAEHLEFLQGSTKKYLEEHTIGVDRGVAIPVHAGSITFDFCENQKSNMTKADRYIKRLQRKLSRQKKGSSRRNKTKHRIATHHAKKANIRNDFAHKTSRSLIESKAKVIVFEALRTSSMTRKPKAKQDEQGRYVSNKAKQKAGLNKSILNVGWHIIEIYTKYKAYQAGKAVFKIPAPHTSQECAKCDHTHPDNRKSQELFVCGNCGNTDNADNNASKVIKKRAINLILDTGTVLSGDGVLITQADSGRGGNRKTSRVKSSTSGVQRSVKKERLVA

SEQ ID NO: 5253 - protein, 467 aa, unknown
  TnpB Polypeptide
VKVTRIAYSKNLNAGKFAQLAEQARRLGRVRSLVWQRYGSMAGAGKSSRQIRDQWMSDGTAGTFGVLANPWKETVRDAAEDIRACREAAKVKVRRAVCRHTTDPAERERLYGLLFANRWSEDGYLSRQMRKHWRRGHNHTANQIVVRADNYQTFTRAASGNVWLAIPGLERRSRVCIPLNTTVTPAGTLRLILRDGRVEVHYQVDAVTLKSAQRSCGDETVGIDRGYREVCTDSIGRRYGTSLGSLLAVESDRLKIKNARRAKLRSVVGKAGKAEDLAKAQRIARCNLGQAKYRRQKARAGRLIRTETYVAINTLVDHAKVIVAEDLTQPIAGKPRGKNWNRRLSAWTKGVTAQALRNVSDRRGSAVVVVNAAYTSQTDSRNGTFGRRCGRKFYCSDGVVLDADHNAAANVLQRMSDPDITLRTPHTEVRRIIAARTRSHRLRLPSQDSSPPRAGGERNVQGCSSHE

SEQ ID NO: 5254 - protein, 390 aa, unknown
  TnpB Polypeptide
MNRQRSYKYRLYPTDEQKLQLARQFGCCRFVYNWALRQRTDAFFKRGERLSYEGTAHQLTDLKKQEAYAWLNNVASVPLQQSLRHLDKGFKHFFEGRTAYPTFKKKSHQQSATYVGTALTLKGTLLTPAKMSTPLDIHWSRSLPEECTPSSITITKDEANRYFVSILVEEDIKPLPIRNKQIGLDLGLTSMVITSDGHSYGNPRFFARDEKKLAQAQRKHAKKKKGSKNRDKARLKVARLHKKIADRRRDYQHKLSTQIIRENQVVCVESLQVKNMVKNHTLAKAIHDVGWSEFVRQLDYKAEWYGRTLVKIDKWYPSSKRCNDCGHILDSLTLDVRSWTCPECKVHHDRDINAAKNILAAGLAVSACGEMVRPGRAKAHPGTSRRSKKA

SEQ ID NO: 5255 - protein, 304 aa, unknown
  TnpB Polypeptide
MGRWTLKRIEDAFTEFFRRVKRDQKAGFPPYRSRYRWRSFGLLEASGLRIKGHYLLLRGITRALRMNLHRPLPLDATLKGATFTRRGRHWFVSLQIESQTIIAATAPAGRAIGLDVGVEHLASWSDGTIDGHVVNARPRSRRERDLRLAQRALARCRRGSRRRAKVRERLARVQASVARQRDTHLHQQAERLARSHRLIVIEKLSIRNMTRSAAGTVDAPGTNVAAKAGLNRSILDASMGRFLQYLRYKAARAGGTVLEVRAAGTSQQCSACGTKVPKTLSIRDHRCGCGLEIQRDVNAARRRT

SEQ ID NO: 5256 - protein, 404 aa, unknown
  TnpB Polypeptide
VSEDPRLEWLLAEFRLLVNESIRIALRDDIRSRARLTRVAYIDLSARHTVYKQYIPSAFEVALAVLKVHRRRVRKGKKTSIPFIRRLLLKAENQSYRLDRETGRLRIPIRGTEGLQLHLPLSEWHRSILGDPSWSLRSLTVVPGKIIVVLRKEAPKPYEPRAAIALDTNEGSLDGVHVSGDSAGLLRVAFDGVRRVQETHFRRRRRLARKKSQDRRVQRVLLNREGRRERNRVRQRLHRVPKSLVWAATARGAAIVLEDLTLHAAGGRSNRMNRRLSSWPRGEVHRQIEYKAALEGVPVIKVNPAWTSKTCPVCGARRRDRVGRDFVCLMCDWEMDRQINAGMNILKTALTSNEALARAVRFQPGALRHDVVSPLYDLLREGRGAREEPSGVESQVGVIPSPDL

SEQ ID NO: 5257 - protein, 358 aa, unknown
  TnpB Polypeptide
MTKTFSFRIKDSTSAKHLRAMARAVNYVWNYCNEIQKKAAHDNRRWVNWVMLNNLTSGCSKELRLHSQTIQAIGERFHASLKEAKFPTGKKKRFLRFRGRRSQGWIPFKASGIKLRDDVVVYQGRTFRFWKSRDIPSTIKCGNFSCDARGRWYVNLVCKYEETIVSKEDTVGIDLGLKSVATLSNGKKYDAQKFFRKYERKLVHHQRCNNGRQVRTIHAKIANSRKDFNHKVSHELTRDFNKIFVGDVGCLSLLKTKLAKSVSDASWGQLRTFIEYKAIARGGTYYVVDENNTTRTCSACGCLSGPSGLAGLRVREWQCKECGTVHDRDTNSAINIEQRGLLTLCSPLRTLSAKEEIL

SEQ ID NO: 5258 - protein, 404 aa, Kitasatospora sp.
MIRAYKFLMRPTVGQAQALGEMLRDHCSLYNGALQERRDAYRHMSRTSVKYGMQSAQLKDIRAFDPDRQGRWSFSSQQATLRRLDKAFTAFFRRVKSGDTPGYPRFRGVNWFDTVDFPKDGDGCRWDSTPHDPVTRVRFQGVGHVRLNRHRPVVGRVKTVSVKREGRKWFVVLTAEQEQSERLPATGSVVGIDLGIATFLADSGGGFVPNPRHGRAAAAKLEAAQQALSRFPRVRRDKRTGNHQRAVEKVAKLHGKVRRQRLDHAHKTALGLVREYDFIAHEDLKIRNMSRSVAPRPDPETPGVFLPNGAAAKAGLNRSIMDAGWGVFLTILTSKAESAGREVIAVDPRNTSRTCPECGHVAKENRPTQEKFHCGSCGHTAHADTVGALNVLRAGLVRREAHPA

SEQ ID NO: 5259 - protein, 460 aa, unknown
  TnpB Polypeptide
MGTFEVPKGWTVQGFRFTLDPTEEQTRSLAKHFGARRKAYNWTVATLKTDIDAWQALGVKTAKPSLRALRKRWNAVKDEVCVNPETGAVWWPECSKEAYADGIAGAVGGFWSWQQSRSGTRAGKAVGFPRFKRKGRDADRVCFTTGAMRVEPDRRHLTLPVIGTVRTHENTRRIERLIRAKRARVLAISVRRNGTRFDASVRVLLQRPQQPNVASPDSRVGVDVGVRRLATVASNDGRVIERVPNPRPLDGALRELRHLSRARSRCTNGSRRYRERSKQISRLHRRVSDIRTHRLNVLTTRLAKTHGRIVVEGLNAAGMLRQKGLPGARARRRGLSDAALGTLRRHLSYKTDWYGSELVVADRWFPSSKTCHECGHVQDIGWDEQWTCDGCGTGTHQRDDNAAINLARYEETLSVVGTVGAAVKRGADCKTRSSRAGGREARKGRSPKAAEQPRDGVQVV

SEQ ID NO: 5260 - protein, 647 aa, unknown
  TnpB Polypeptide
LHNNINIQDEVKQPKRVKRPPEQLRVVKTNLAKIIRDVNNLQIIYRAVEDLHKIAIHTLNFLKLFLLHHLHANQDQPPPVVTSALLQNIAKVIYEDNADKAQAQHAAAATHTLKAQLLAFHTTHYKPTMQPEVLNLQHLWSTLIYMCNGMKATFETNISEHYKDYLVCFLMVLYRQDHPRASKRAIKTQARSAAHLIMSMKFHKIGDMDSAHEHLRKLYPKREIAKQSLYYDLACDDGRVQDYLPCMFYMMQFVEAAGARMYNLFPLRSNIIPKHITVDSDFLRRLFDTKELGTKASLMKVGEHGFRLWAAFFKTELPCFCPLKTKDGQRNRATAWEFHHMIQTDGVSCSIVHRMKAERVTRDKPKLYKTPYVERMADRERFHSLRVVGIDPGKSDLLYCAMPMPQKKAKTMRYTQSQRKAEGKWKKFERKRTRLKNTIIEGKTVADWELELSVLNRKTVDFNRFKHYLVEKNRLNQRLLTFYADFIFRKMGWWSKINIQRSESQLINRFKETFGAPHETLVAFGDWSEKDHMRNHEPTKGKGFRKLFAKAGYDVVLVDEYKTSASCYNCHGENAKFKEVANPRPRRPNQEHYRATILCHGLLRCNACKTLWNRDRCGALNIELIAWNAVQGLDRPLYLSRHTPLGG

SEQ ID NO: 5261 - protein, 383 aa, Okeania sp.
VITLNYQYKLRPNKQQEAKIELMLDVCKNVYNYALRERKDWLNSRKSPTNTCSIISEYIIPADAPYPNYCYQSKKLTIAKKTNPRLKSVNAQVLQQTLKALDRAFSEMKSLGKGFPRFKKKLRSFVFPAMLKNCLGDNRIKLPQLGWIKIRQSRRYPEGMAAKQAMVVKKASGYYLMVNFQSLESVPNNPVGKTSLGIDAGIESFVATSTGKLIKSPKFLLGQLRKLKLLQRRLKHKNKGSNNWLKIQNRIAILHEKIANTRRNWHFKLAHQLCNLADNIFVEDINFISWSKGIVRKQSLDSGIGQFINEILPYICWKRGKYYAKVDKNYTSQECPSCGHTQKKKLSERKHNCSACGYQINRDIAAAKVIKNRGLKSVGHTVE

SEQ ID NO: 5262 - protein, 371 aa, unknown
  TnpB Polypeptide
MIKTFKFKLFHAKRNKKLHQQINACGRAYNHCIALHKRHWKLYRKSLNIYALQKHLTKLKKIPRFAYLKEMGSEALQNITERIDRGYKLFWNNLKRKRKTAPPGFRKIRKYNSYTLKKAGWKLDEEHGAVYITKQKYRYAKSRCIEGKVKTLTVKRDTIGDIYIYFVCELPDIKVEVRTGKSVGFDFGFKGKMLVAENSEDDISAPSFFHKNKNTIASANRKLSSKRMRSNNRRKARQKLVRLYRKTVNQCNAYHWQLAKELCTKYAVICFEDLNMKWMQIGHGKKVMDYGFANFLNILEYVAAQFGTQIIRVDKFYPSSQLCNNCGFQNKEIKDMRIREWDCPVCSKHHDRDRNAAKNIHEEGLRILAES

SEQ ID NO: 5263 - protein, 270 aa, Bacillus sp.
  misc_feature (3)..(36): Xaa can be any naturally occurring amino acid
  misc_feature (233)..(266): Xaa can be any naturally occurring amino acid
LIXXXXXXXXXXXXXXXXXXXXXXXXXXXXXXXXXXKKQNSAPRFKSKKNNVQSYTTKQTNENIAVVGNKIKLPKLGLVRFAKSREVEGRIVNATVRRNPSGRYFVSLLVETEVQELPKTHSYIGIDVGLKDFAILSDGTHYKNPKFFRSLEDKLAKAQRVLSRRMKGSSRWNKQRVKVARIHEYISNARKDYLDKITEIIKNHDVIGIEDLQVSNMLKNHKLAKAISEVSWXXXXXXXXXXXXXXXXXXXXXXXXXXXXXXXXXXLVLY

SEQ ID NO: 5264 - protein, 411 aa, Planktothrix sp.
MLIREAKLINGTKEQYLAIDEAIRTAQFIRNKCVRYWMDNQGVGKANLYALCKDLAKEFPFAKKLNSAARQASAERAWASISSFYSCCRKKKKKKAYPQFKKHCRSVEYKVSGWKLSDDCMNIAFTDGFDVGTLSIYCNKETREDLFRLKINRVRVVKRADGYYAQFCFDIDRKEKVEYTGNVVGLDLGLNYFFKDQNDNVVVYPHYLSKSERKLKKAQRRLSKKFVKGAKPQSKNYHKARKRLGKIHLKIQRQRKDWAIKQARCVVHSNDVIVYEALKVWSMVKHHYLAKSISDPSWYQFTQWLNYYGKIWDKTVVAIAPNYTFQYCFSCGHRGKKSLSSRTHSCPNCGIEICRHREAAINILQKGMGILGMEWQHSTFGQKGSAEQSGKHGEKTVSTIDGQPEIANGLL

SEQ ID NO: 5265 - protein, 511 aa, Rhodococcus sp.
VSGTSPSTYPRPGCRHRCDLGHCEARGTCRTVPVTSNVYSMRGWWVSTVLQAYRFALDPTCAQETALRSHCGGQRFAFNWGLARVRANLDQREAERSYGVTGEQLTPSMSWSAYSLRKDWNQVKGEAAPWWGENSKEAYSSGLANLATALANLATALANWSSSRSGKRKGPRVRFPRCKGKRAGLSCRFTTGAFGLVDTDRRHVKLPRIGIVRTHESTRKLARRVAAGTARIRSATVSFGSGRWFVSFSVEVERCGLAPTLPESVVGVDLGVKSLAVLSTGEVVRNPKHLEHALKELRRLGRQAARRQGPDRGTGRQPSKRWRQTHARIARLHSYVANARRDGLHKLSTRLVRSHTVVVVEDLNVAGMVHNRRLARHIAGVGMGEFRRQVEYKAGWSGQRVHVADRWYPSSKTCSGCGVVKAKLRLSERIFVCESCGMSIDRDLNAARNLAALVEASSPSCGATENEPAGNPCQSRTVRATGTATGRPAPTGAGQRRHREGSTQYTFLHVS

SEQ ID NO: 5266 - protein, 566 aa, Mycobacterium sp.
MADQKLREWRGVKLVAGPAGVAITCRMRTSAEDEYVLDRVAAQLGRLRRADLAATSRRDLVDSRLGAEQRRQVRRDQLNARKKVLTAQSSARWATAIIAGNDDQYCLAREAQYRHVVGLRAAIAAIEKRLAAPTIDALTGAEPKARRKAKGPKGYATQHERFTKQQRLQALRGQLAQAEEDRRNQRVRVTEGGKRLVRTRRHLDKAGLTVAEWTRKWAAARWRITANGSPDEPFGNLTITVTPTGEVSVRLPKPLEHLANEPRGRYVLSAPAVLPHRGHEWAQRISNGNSVSYTITRKAGRGGRYLTASWAIPTLPYWVGRYDTAAGEDVYATGPVAAVDLNDGHLAVRRLDAHGNPTGRAERIDIDLTGSAARRDAQVRHAITQLIRYTQRFGITAIAVEDLDFADARATGRETMGRGTRGKRFRRTVSAIPTAVFRNRLTAMAHHAQIAVFAVNPAYTSKWGAQHWQHPYHNVTRHQAAATVIGRRAQGLSARRRKGVTPARPEDRAVRATDQTAPNSPTASTGRRHETGKRATTCRQPTSPRTRQPGRATVTPALANNGQLRM

SEQ ID NO: 5267 - protein, 364 aa, Clostridium sp.
MIKAYKYRIYPNVEQKIYIAKACGCSRFVYNQMLANRIEVYEANKDILTSKEMSKLYLTPAKFKTEFEFLKEVDSLACANAQLNLDIAYKNFFRDKSIGFPKFKKKTNRISYKTNNQKGTINIENGYIKLPKLKSMIKIKQHRLFKGEIKSTTVSKNPMGQYFVSILVDAENFQLPKVDKKVGVDVGLKEFAICSDGYRVANPKHLRKSEKRLSKLQKDLSRKVKGSNNRNKARLKVARLHQKIVDQRKDFLHKLTIKIIRENQSIAIEDLRIGNMLKNNKLARAISEASWYEFRVMLEYKAEWYGRAIVVAPSNYASSQLCSCCGYKNKDVKNLGLRNWTCESCKSEHDRDINASKNLEKLIV

SEQ ID NO: 5268 - protein, 264 aa, unknown
  TnpB Polypeptide
MYRTNMYEQTGTYQAQIKVHIRNTWDWITVNLRKSDIDYINRHCSTRKQCAPTLQKRGKEWFLDFPFEEKAKLCDTDVDKQTILAVDLGINTAATISVMRSDGTILGRHFCHLNKEIDHLIHSINRIKKAQQHHNCKTPRLWSRTKGINHDISVKTAQFITDIAVLYNVDIIVFEYLDRNGKLRGSKKQKLHMWRSQEVQAIVTNKVHRLGMRIRRICAWVQASLLMTIVAWFYEVKTQILQLIASVNLLTVKYTTAIYLHPII

SEQ ID NO: 5269 - protein, 602 aa, Rhodococcus sp.
MAGTDPTERRQFAFTTRPHMAVDDTTGDPIGLDDLDSRVRWLLDLITGAETELLTRLWQPATFDTLAAGREGDGRALPKHGHVAAARLGWTPTYPDDVCVPSRVSRVVTAQATATLRTLTYPDTAIASLSARFDPATGHIAPPTGGEVYVPSGFARGVRRQLVARTRRGDEATSDAPTSDVAQPERLRITDIQTPPKVTAMARLAVADKQLAELTVTDRTMELTVKLPTAASPTRRAHWQRVRLTAVLPPHLHGRPITGWHLPTLTLDGRGLLLRCAATEAVPAPDLPAATVAVGVDWSPATLGAAAITTDTGDGLISDLRGYTYDDRGLGIKLARLQTEGQFLHRKAARLRQLAENAPPQVRSELEAKIAVLDENRAAVGAKRGKINRELAFHFARQVADYAVAADATMIAVEDLATLEPRGRGRVNNNRAAQSARHKAADALAHTAARVGVVVVTVPAKGSSAWCPGCNEELARPKGYHDAWCGSCRLGGNRDYMAGVNLAKRGLLGRGKAVRTRGGGVKVRTTEHAPVRKCRDKTGPTPGRPRHRRVRHSVPASTPAEGVNTLKSRPAPEASVWDTVEPAASEDVSGSREERESGPPGT

SEQ ID NO: 5270 - protein, 407 aa, Streptomyces sp.
VGWVIRAYKFLMRPTAGQAIALGEMLRDHCSLYNGALQERRDAYRHVSKTSVKYGMQSAQLKEIRVFDPERQGRWSFSSQQATLRRLDKAFQAFFRRIKAGDTPGYPRFRGVNWFDTVDFPRDGDGCRWDSTPHDPVTRVRFQGVGHVRVNQHRAVVGKVKTVSVKREGRKWFVVLTAEQERSEPLPATGSAVGIDLGIASFLTTSSGEHIANPRYARKAAKRLEAAQQALSRFPRCKAKDRTRNHQRAVEKVAALHGKVRRQRLDHAHKTALDLVREHDFIAHEDLKIRNMSKAPAPKPDPDQPGGFLPNGASSKAGLNRSIADAGWGVFLAILNAKAESAGREVMAVDPRDTSRRCPECGHTAKKNRPTQEKFHCQACGHNAHADTVGALNVLRAGLVRRDANQS

SEQ ID NO: 5271 - protein, 412 aa, Streptomyces sp.
VVGVQLRYSFRLYPSAGQRSALAKAFGCARVVFNDALRVRESARVAGLPFVTSGELSKHLTALKKTPERAWLAEVSSVVLQQSLRDLDAAYRNFFDSLKGKRPRMGAPRFKSRKDNRHTIRFTANAGWRITGGGKLRLPKIGDVRVKWSRCLPSVPSTVSVVKDAAGRYFASFVVETSTDETLPEVTPVVGIDLGLTHFAVLSDGAKIDSPRFLRRAEKKLKKAQRDLSRKEKGSKNRNKARVRVARAHARVADARREFHHQLSTKIIRENQAVAVEDLAVRGLARTRMAKSVHDAGWSAFLAMLEYKAARHGRTFLRIGRFEPTSQVCSQCGVKDGPKPLHVRVWACGACGAVLDRDINAAVNVAKAAGLAVSACGARVRPGLVPAQREETGTHPKPQPETTGRQAGISAL

SEQ ID NO: 5272 - protein, 407 aa, Nostoc sp.
MIVYEAKAEATKEQLLKINEVLRTALFVRNSCLRYWLDGHAKTGFDLNKYTKVLSDNPDFPWVSKLNSTARQSSAERVWSAISRFFDNCKKKIPGKKGFPKFRRFQTRLSVEYKQSGWSLSECRQFITFTDKFGVGTMKLMGTRDLNFYQISQIKRVRIVRRVDGLYIQFCIDHDRKEQLQSTGKSLGIDLGLTHFLTDSDGNKVDNPRYLRKSEKALKKAQRRLSSCAKGSKNRAKARNRLGRKHLKVVRQRKDWAAKLAQCVVKSADIVAYEDLKVRNMVKNRHLAKSISDASWSIFTNWLGYFGKVYGRFVVAVPPHNTTINCSNCGHPVHKTLSTRTHVCPACSYTDCRDVNASKNILDRGLELIKNTVGQTEISYASGESDPCSRKVTSKNKSSHRKRKNQQ

SEQ ID NO: 5273 - protein, 392 aa, Nostoc sp.
MVERMLTLTYEYKLKPTKQQIEDIENILIVCRKVWNYALRERKDWVNSRKCKINSCSLEYEYIIKADESFPTYHVQAKRLTEAKKTNPELKSVNAQVLQQVLRTLDRAWDDMKSRNFGFPRFKKHFRMKSFVFPQLKGEIIKANLVKLPQLGWVKFHQSRPIPDGFAVKQARVVRRASGYFVMLSLQIDVDIHEISFHGHPIGVDIGLESFLATSEGTLIARPKFFKSLQRKLELLQRRLRNKKLGSNNRKKLNIKIARLHQKISDTRKDFHFKTAHKICNQGDSIFVEDIDFRTWAKGMLGKHTLDAGFGQFFTILSYMSWKRGKFFGKVNKDGTSQTCPNCDAHTGKKALDIRIHSCPECGYTTNRDVAASQVIRNRGINEALRSWGFPK

SEQ ID NO: 5274 - protein, 393 aa, Romboutsia sp.
MKKLKRAYKIEINPTQEQKHKIHQTIGVSRFIYNFYIARNKDVYEREGKFVSGMDFSKWLNNEYIPNNQDMKWIKEVSSKATKQAIMNGDKAFKEFFNGKRGFPKFKKKKNKDVKAYFPKNNKTDWTLERHRVKIPTFGWIRLKEFGYIPTNSTVKSGTVSQKSNRYYVSILVEENDIEIPKPANEGIGIDLGIKDFAICSDGNKFKNINKTSIVKKVEKKLKREQRKLSRKYESLKVRNKNIKEGVATRQNIQKQIVKVQKLHQRLTDIRTDYINKTVSSIIEQKPSYVTIEDLAISNMMKNKHLSKAIASQKFFEFRTKLTSKCKQNNIELRIVDRFYPSSKTCSNCKEVKKDLKLKDRIYKCPNEKCNLVIDRDLNASYNLKNAKKYKIA

SEQ ID NO: 5275 - protein, 405 aa, unknown
  TnpB Polypeptide
MSRKTMTTQKTYNFCFYDQRFFELSKEAGEVYSRSLEEFWKIYDETGVWLSKFDLQKHMRNKLERKLLHSDSFLGAMQQVHANLASWKQAKKVVPDACPPRKPKFLQAILFKKSQIKYKNGFLRLTLGTEKEFLYLKWDINIPLPIYGSVTYSKTRGWKINLCLETEVEQKNLSENKYLSIDLGVKRVATIFDGENTITLSGKKFMGLMHYRNKLNGKTQSRLSHKKKGSNNYKKIQRAKRKTTDRLLNIQKEMLHKYSSFIVNYAIRNDIGNIIIGDNSSTHDSPNMRGKTNQKISQNPEQKLKNYIKYKFESISGRVDIVPEPYTSRKCPHCKNIKKSSPKGRTYKCKKCGFIFDRDGVGAINIYNENVSFGQIISPGRIRSLTEPIGMKFHNEIYFKSYVAA

SEQ ID NO: 5276 - protein, 383 aa, unknown
  TnpB Polypeptide
MHLVERHIIKNNKELDELCFNSKNLYNKALYLVRQHYFKTEGYLNFFEVYRLMADSKDVDYYSLPCKVSVQTLKLLDRNFKSFFALIKKKRGGNHDKSIRLPRYLDKQGRYITIFPKDAVSKVYLRKGIIKLSKLSIEIPTKVTESNLVEVRVLPRNNHHVVEVVYKVDGVESKSDNGRYASIDLGLNNLATVSSNVVKPFIINGRPLKSINQYYNKEKARLQAHLKGNQRTSKRINSITNKRNNKVRDYLHKSSRRIVNFLVSNNISTLIIGYNEEWKQNINLGRTNNQSFTNIPFLTFINQLEYKCKLEGINVILTEESYTSKCSFLDGETIEKHESYLGKRIKRGLFRSAKGKLINADLKCFTKYSKESSWRISVSNRGM

SEQ ID NO: 5277 - protein, 450 aa, unknown
  TnpB Polypeptide
MQIIEKDYKPFWDDSCEVISSHLLSHTQIDSAGLESTPHSNSKMVENSWFLTERKFHQNENSQKTYLQSYTNSLIDCTDLGDTQIKSRKIRIYPTQQQKLLFKQWFGVARKFYNETLTIYKNGSEKTWDKVYQDIAEQNKEHDYIKSVPYQIKKISVKDYREALSINKIKAKRSGKPFDMKFKSKKNPKQSCYIPKTAISSSGIYYTIAGKLKIKERAWFENEDINDCRLVLEFGKWFIVIPKEIKITPIENQEGVVAIDPGVRTFATYFSTEGYFGKLGKGAFDRILKLNLKIDKLMSKLSKETDKHKKSNLKRSIFNIRFKIRNLTDELHWKTIKFFTSRFKVIIFPSFNVSEMVKKSKRKLPKKVVRSMNCFRFFEFKERLKLKCKENGITFVESSEAFTSKTNSFTGELMENLGSKEKFMFNNISIDRDINGARNILIRAMRDASA

SEQ ID NO: 5278 - protein, 392 aa, unknown
  TnpB Polypeptide
MYLVERHIIKNNKELDEVCFKSKNLYNKSLYLVRQHYFNTKGYLNYYDVNRLMIDSKDEDYYALPTRVANRTLMLLDKNFKSFFALLKKKQGGDYSKHIRIPKYLDKDGKYIAVFHKSAVSKVYLRKGIIKLSSLSIEIPTKVTESNLVEVRVLPRNNHHVIEAVYKVDEAQPKSDNGRYASIDLGLNNLATVSSNVVKPFIINGRPLKSINQYWNKEKARLQAHLKGNQRTSKRINSITNKRNNKVRDYLHKSSRRIVNFLVSNNISTLIIGYNEEWKQNINLGRTNNQSFTNIPFLTFINQLEYKCKLEGINVILTEESYTSKCSFLDGETIEKHDNYLGKRIKRGLFKSAKGKLINADLNASLNILRKVVGEFEYPIEVCSTPLRVTLK

SEQ ID NO: 5279 - protein, 417 aa, unknown
  TnpB Polypeptide
VRAYKFRAYCSKTTAGVLEAQLRAACRLYNTLLHDEKEEYEKNKHTMNRNELRQLALDLRKRNTEFQSLHSQVAQQVADRFYQARQRFFEGLANKPRVKKPHRFLSLVYPQSGWRLSNIRVVGQGENKKKKARLYLSKIGFFTIVMHREFPLNRVSQVCVKLYPSGKIFVVFLVDEPVGEGPRESTGEAGRAVSVDVGIVRLVTLSDGRFLENPRPLERSLDRIRALQRSLSRKRKLSKNWFKARRRLAKKYEYVGDFRRDLFFKLGSLLAAEYDLLVLEDLNVEGLIRRGETGKRRLRLHDCAFSELRRALEWEFEKRGKAVLGVPSYDSSRECFLCGRINQGLTLEDRIFHCPHCGFTLDRDLNACLVLLKRAGWVPPVVPVELRPIPPLPSLGLAGRGRQGGAMMREAPPFKAG

SEQ ID NO: 5280 - protein, 217 aa, unknown
  TnpB Polypeptide
VGENQAHLDEAVCAVDPGVRCFATIYDPHRCSVVNWGDGDVKRIYSLAVQVDKLQSLWSASGVKHRRRYRLKAKAALFRSRIRSVVDETHKKLCTYLCSNYSLVLMPEFTTSEMVLRKHRKIGSHTARSMCTWAHYRFRQRLLHKVREYPSCMVVLCNEEYTSMTCGACGILHHGLGGSKQFRCPSCRCTLDRDANGARNILLRYLSLCEAGISHSA

SEQ ID NO: 5281 - protein, 512 aa, Sulfurihydrogenibium sp.
MITLHCKLTFENDKDRQTLEDLMRKFSSCYRYAFNRLLEGHTRKDLKKHLQKLFNLNSRYCDDAIFKAQSLINLCKETGQNPQKVIFGGKRLFQLLKNKHLNGKDREKIKQKWQERRKACLHSRGDKTKKGNLNTRIEFEKDSLILRINVGEKNWIKAKIKRTVNRPSDKWTNFIADLLQAEKTKEYFPYSVEIRKINDNFYAFISYEEELQKEPIITKENGVIGIDVNASPFHIAIATVKTDGNLQAVERISLHKLINKTKNQREYLSWQIAHQIVELAIIQDKAIAIERLKEIKKGNKGDGNKKLRKRLQQWIYKGILEKIKALAKRKQIEVIEVNPAYTSVIGSLKYAPQYNLDKDTAGSFVIGRKALGYKESLPKNYEKLITDKEYLNFAIERLQEEKQKTQERLKEEKNQYKKKPLKSKIDELNKQLKIIQSLYSEPQTQEFVNLRKEQMRGLYWASYKLWQVVKVALAIPILGKSLNRDLSPLKPILVNGEWDRVASKSCFKTNLA

SEQ ID NO: 5282 - protein, 257 aa, Lactobacillus sp.
  misc_feature (204)..(237): Xaa can be any naturally occurring amino acid
LPKLGVVYFRSGRLPQGKIKNVTVRLTVANQYYITVLTECENQTLAKTGKRVGGDLGLKSLLNLSDGYKEPIHHFEDKYRKKLHHWEKLRSRRYLLAKQAIAWDYHNKVLAPRQLDDFKNYQKARVMVAKYRQKIANQRLDQLQKFTTKLVKQYGIIVLEKLKIKGMLKNHKLARAITNASWSKLVSILQYKCDWYGKKLIQVXXXXXXXXXXXXXXXXXXXXXXXXXXXXXXXXXXRSEYVVRSLAPQSVHFEGTD

SEQ ID NO: 5283 - protein, 211 aa, Lactobacillus sp.
VIDNHHIKLPKLGVVYFRSGRLPQGKIKNVTVRLTVANQYYITVLTECENQTLAKTGKRVGGDLGLKSLLNLSDGYKEPIHHFEDKYRKKLHHWEKLRSRRYLLAKQAIAWDYHNKVLAPRQLDDFKNYQKARVMVAKYRQKIANQRLDQLQKFTTKLVKQYGIIVLEKLKIKGMLKNHKLARAITNASWSKLVSILQYKCDWYGKKLIQV

SEQ ID NO: 5284 - protein, 279 aa, Streptomyces sp.
VAVNRAIAYRIHHDVQRGRWYVTASWQQPVSQPVPLAAVLVGGVIGVDMNADHLAAWRLDVHGNPTGNPRRFCYDLSGTTQHRDAQLRHALTRLLNWARACNVRAIAVEDLDFTTEKTREKHGGRRRFRRLVSGLPTGRLRARLVSMADATGLTIVAVDPAYTSKWGAQHWQKPLTSKNRKTTRHDAASIAIGRRAQGHPLRRRTTPPRAHRSDVHGPRTVQAGGDAPGREGPRRRVPGPRTRSVPPDAERTRATRTPTTVRGVRSDREGVPDPLPLTD

SEQ ID NO: 5285 - protein, 370 aa, Deinococcus sp.
MTHTAPQSRRNEPDHYDVPAHHGSYPTFALLIEQGVVVPLPRPEDERADPLKGVRSAQTYRLAPGVLPVVTGDRHLTLAGQSIQADLYRLPAHAYAALVEASPDHRAPLCLDVAFTLAREPDVNVCDVRLVLEQSAAHAPRHLDAPHLVPSTLPLKSSWLPEDTLLHMTPGGHWFVTLTFRTTWLTRPLPTERGRVALDLGLFPLTTAVHEDGRVQVFHSTPLTLPDRAGLSRAAQLLHDQIVYANGRQDAEQVTGYLFMHASTVIAEQLRIPNMDRGYVHRSRDHALLDHHHAALPQALNAARIPLYRLPAGYTSTECPHDTCRHVSPANRHGSRFICVRCGFTTDAHVVAGMNLLRRHERTARRHVRR

SEQ ID NO: 5286 - protein, 430 aa, unknown
  TnpB Polypeptide
MADKTPEEVNGLAYRGVEFALSPNATQRNLLESNAGAARFAYNWALDEIKGEYALWENDKSRKMGCTHYELRKRFNHVKDDIAPWWHDVSKEAFSYGCACAAAAWKNFMDSKRGRRHGRRVGFPRYKSRRQEHNHRYAITTGIDHCVADAHHIKIPRIGRVRVMENIYKRITSQAIHRMNIRLKGGRWYVVLLIEVPENATPSQSRKHVGIDLGVKNLATFSDGTVVRGLKPYRNAMRKLARAQRSLSRKTRGSKRYERQKRRVNRIYARVRGLRRNQLDQLTTNISERYSLVAIEDLNVSGMARNHRLARAISDEGFGVFRHMLEYKCRDRGVALVVADRWFPSSKTCSACGCVNAGLALSDRTYVCPECGLTIDRDLNAAMNLDRYGMSKVDSRAEDTLNARGGNVSRSCDSSCADPNETCTNESVGA

SEQ ID NO: 5287 - protein, 414 aa, unknown
  TnpB Polypeptide
MMRTVQFACTLPKSDADALNAESGRIYTDMLVRHYRLARKQGVWLTPKAGERLEDALGGPTSLHAHSRDAAQQGFYKACKTARACRQQGLDVKYPHWHKRFRTTIWKKTGISRSGERLWLARARGVAPVSVLLPPHLIPLPATAFLEARLVWDRAAQHYSWHVVVEDGVPPLPAPGTTTAAVDLGEIHPAALTDGRETVIITCRVLRANAQYTVKRLSAIRAKQDRKAKGSCSWKRLQRRKSRFLAQQKRRARDLEHKISRAVVTWARERQIGTLVIGDVRDVADGKRMHTKSQQKIGLWSHGRQRHDITYKAEAAGIAVTLVEEAYTSQTCPGTLPDGTGCLHCYKPKGRVYRCPACGFTAHRDGLGAANLLSQHFTGEPGHVLPPCEKYRYPFVGKRSRLDTAELARIPTVG

SEQ ID NO: 5288 - protein, 378 aa, unknown
  TnpB Polypeptide
MEATKTVVCKLDCTKEEFEKLMNTVIAFRDACNYINKIAYDNKCFNPVALHHMTYQDVRVKFGLPANLAIRARDRVAKSYKKDKKKLHKFTALSMDLDKRLYTLRRNDWTVSISTVDKRVKPKLDIGEYQKNLLQNPTKDAKLVYRRDTKEFYIHITVEIKCPKPQGGNPVGVDVGMKNLLVASNGFKVKGGEIKQRRQHFRSLRRSLQKKGTSSTKRKLKQLSGRERRWINTVLHQVSRAFVNSLKEGDYVIMEKLNGIRQRCKHRKKQRADFHSWAFHKLQFMIAYKCLDKGIPVVYVEPKYTSQRCPRCGTIDKRNRRSQALFKCVSCGYQHNADYVASVNLRELAQGGWVVVNQPNVEVVLHGNHLQAPSVREG

SEQ ID NO: 5289 - protein, 404 aa, unknown
  TnpB Polypeptide
MIIYEFKVKGGDAQYRAIDEAIRTSQFIQNKCLRYWMDNEKVGRYDLNKYCAVLAAEFPFADELNSMARQAAAERAWSAIARFYDNCKKKVQGNKGYPKFKKNCRSVEYKTSGWKLSQNRKAISFNDKKSIGTLKLKGTYDLNYYDIKQIKRVRLVHRADGYYAQFAVDVKVRIETEPTKKVVGLDLGLKYFLADSDGNTVETPQFYKKAERQLNRANRKKSKKFKKSAKPQSKNYHKARTRYARKHLRVSRQRKEYCKRVAYSVIQSNDLVAYEDLNVQGLVKNRRLAKSISDAGWSTFRQWLEYFGFKYGKQTIAVPPHNTSQNCSKCGQKVKKSLSTRTHICPYCGFIEDRDVNAAINILKLALSTVGHTGTYAWGDLPSWAVGAILSSNGESVNQESNVL

SEQ ID NO: 5290 - protein, 185 aa, Kyrpidia sp.
VDGRALNHRRHRLLAAIYRKREQSGRLQPGVQDNANLWNKIRNLDENAAKQTAVAIVRFAREHGAKVIVFEHLRRYRPPKEKMSRSGRKNHKRAYWLRGQIMKWVRDLAFREGILTVERNPAYTSQVCPHCKVLGERKGSRFTCKNPNHRYSADADFVGMMNLYRKWTKTFVYPRRGDDPKPGVA

SEQ ID NO: 5291 - protein, 389 aa, unknown
  TnpB Polypeptide
MVNKGIKLKLYPTKVQEAYFKQEVGNQRFLWNKFLYNNIKYHNRTGEFKFYYDMSNKLPNFKEKYEFLKLSNSQALQQTLKDLEQTMKNCFNSGFGFPNFKKYNNRDSFRVPQQFKTKGSKLWLPKVGWIRFRCSKSKRKGKIKNVTVSRDTDNWYASVCVEFKPKLLKKTNKKVGIDVGSVRTLTKSDGHYLKAFRNLDRVKLVLHKIKVVQRQMSWKQECWKQRTNRVRLEKNEVISNSWLKLKFTLQKLYEKLRNLRRDFLHKASYKLVKEYDVIAIEDLRLKNLTKNNKGTIKKPGKNVKQKSGLNRNLLSNSLGTLVSLLEYKCKWYGKESVKVNPKFTSQICSSCGFKSKTNRKSQSEFECNSCGFKLNADHNAALNILALAS

SEQ ID NO: 5292 - protein, 405 aa, unknown
  TnpB Polypeptide
MLVRSLVFRLKDPLPNDAKFLMEDFRLAVNSAIRLGIHSNVTSKFALSKLAYSDFRKEYPNMYSQHLVSAFEVAGSILKNHRRRLRKRLPVQAPFVRRLFMKAENQAYRLDRKNWIIDLPVRAGLHIQLGLIVSDFHRKYLDDESLSLGSVTLLPDRVVVTIRKHAPKPYAPASVLSLDTNERSLDGVLAKDDRIAAVVRAEFPEVSVIQNMHYERRKRLQKKKAHDRRTAKRLCAREGMREHHRIDHRMHEVANAVLSFAEERRSMIVLEDLTEIWPQKGKELNRRISMWPRRKLHKIIEYKAAWRGIPVVKVDPRYSSRKCPVCGRIQDSRKGAEFVCGCGWHINRHINASINLLQTAVSKKTAGGLRFDPDAFQHDVVMVLCGPGRTVRPEPNGTSGMRAMA

SEQ ID NO: 5293 - protein, 332 aa, Methanobrevibacter sp.
VHQEYPFLEKAESSSRQQSQRNLINAFKRYDDSSLKSNYPVIKTKKNKKDTFRIMRNNNNLRIQKDKYGHDKILLPKLGLVKFKTSKKYKELLRKGSDPDNPTAEIKHVTIKKENDKYYAVFNITELYVPWEIIGPRQQLGIDIGCSKLAALSNGQEIPNLDLTLEVDKIIQYQQKMSHTQPGSIRHNEAQRLYNLWTKKLINKRNDYYDKVTSYIVKNSSFVAVQNENIISWKHNKYLSRKLQLNAPRIFMDKLEYKCIWNDVEFIKVPKYFPSTQICSECGKRNHNMSGLRNLGIREWDCPHCHAHHGRDINATKNILNKGLEIVGTTVQ

SEQ ID NO: 5294 - protein, 389 aa, unknown
  TnpB Polypeptide
MGKGQLKDEKILKICKKIRFYPHNEFKYHQMLILYRRAYNLAVEKYINNEYKDKNGLWKDLRKEIRFQCEEEQKNKDSVYNSNIVNEAVLSAKKSFKAVIRNNKNDNNRGKLNFKSRKKLIQSFVIDRMPKGLNPAVKTLGKIDLTENIPSEAIGKSCIITYNKGRWFIQVQKQIQVKSDIQGRVECIAIDPGVRTFATCYSQKEVIIAGDNFSKNKLLPLVKKVDKLLSEKKKLEKKKQEDKQWYKDRERYLEKRINKLKCKKDDLIADLHNRLAYELVSKYDVIFLPSFETQKMSKKNKRSIRKVTVRQMLDLNHYKFKEKIRWYAKKYGKHLVDCNESYTSKTYSWNGFIDDKVGGKKIISDGNVIVDRDINGARGILLKQLTKAT

SEQ ID NO: 5295 - protein, 397 aa, unknown
  TnpB Polypeptide
MNMKLTRTIKLKLNISPAEIKPTLEAYTTAFNYVCQMGWREGDFNGVSLHHKTYQATRSYLPSQLAISARMKATEALKSARDRLKKQENVSCPQSKLCAVRYDARSYNVWFERNEVSLLTVDGRKKFPIIVPAYFKQYLDWRRTTTDLFLRKNGVFLHIVFEQEISDVPLTGEVVGTDRGINNIAVTSNNQFFGGGHIKHVSRRYEKLRTKLQSCGSKSAKRHLRKLSKKENRFRADVNHVVSKHIIQSMQPGNVIVLEDLKSIRQTSRLRKKQRKQLHKWNFFQLQQFLTYKAEAKGIRIDYVDSRYTSQKCSVCGYTSRSNRTSQAIFKCKHCGFSLNADLNASRNIRQNYLDATGYPGRVVVNQPIVVSNEAKGSLRATAVEFNYKPPSLDGGS

SEQ ID NO: 5296 - protein, 278 aa, Okeania sp.
MRKLPSEPSSVTVIKDSANRYFLSFVVEIQPETLPKTDNSVGIDLGIKTFATLSNGQKIDAPKPLKKRIKKYRKLSKSLSKKTKGSKIYEKARLRVAKFSYGMLRKHAKLKDTRTDFLHKLSTKIISENQTIVLEYLFAKHSEGNVSGMVKNRKLSRAISDLGWRTFRTFLEGKAEKYGRNFRVISRWEPTSQICSCCGFKGGKLDLQVREWECLNCGTRHDRDENAAINILVAGGQSETLNGRGGKRNPPPSPPGRGARGVGAAACETLTRRRAAAR

SEQ ID NO: 5297 - protein, 414 aa, Chloroflexi sp.
MRVKQAFRFEIDPNRGQRVALAKHVGAARFAYNWGLQRCLAALTQGQPLPTAVQLHRERNRWKRENAPWWVEVSKCAPQEALRDLERAFHKWRAGRAGKPRFKRKKCLDDNKARLTGSIRVFPRHVQLPRLGRIRTKEPTEKLLELLGEKKARILSATISREADRWFVSLTCAVERPDPPLRQPDEAGVSGIDLGLDCFVVLSDGTRIEAPKPLKKALTLYRRRSRQLSRKRKRSNNYRKAAVKLARLHRRIRNIRRDFLHRLTTWLAKTKPVLVVEDLNVRGLGRGRLSRSVADAGWGTFRRMLEYKASWYGARLIVAPRSFPSTRMCSACGWVGPRLPLSCRVFRCAACGLELDRDLNSARNLEHYGLATLNGPTGSSPGSDACGDRLCGGPGRSRTVLVYEHPVGEAGSRT

SEQ ID NO: 5298 - protein, 387 aa, Shigella sp.
  misc_feature (291)..(339): Xaa can be any naturally occurring amino acid
VKRLQAFKFQLRPGGQQEREMRRFAGACRFVFNRALALQNENHEAGNKYIPYGKMASWLVEWKNATETQWLKDSPSQPLQQSLKGLERAYKNFFQKRAAFPRFKKRGQNDAFRYPQGVKLDQENSRIFLPKLGWMRYRNSRQVTGVVKNVTVSQSCGKWHISIQTESEVSTPVHPSASMVGLDAGVAKLATLSDGTVFEPVNSFQKNQKTLARLQRQLSRKVKFSNNWQKQKRKIQRLHSCIANIRRDYLHKVTTTVSKNHAMIVIEDLKVSNMSKSAAGTVSQPGRNVRXXXXXXXXXXXXXXXXXXXXXXXXXXXXXXXXXXXXXXXXXXXXXXXXXTAKKNRLSQSKFRCQVCGYTANADVNGARNILAAGHAVLACGGCQQTG

SEQ ID NO: 5299 - protein, 441 aa, unknown
  TnpB Polypeptide
MAQKYAVSRDNPEDVFAFFYKNFGCSRKVYNLCVDSLYRQLEAAGYQCGDDIPDPVFPKVSALKKEYHYLKEVDSQGLANSVMDFLAAWKRFRKQPSHKAYTKRALRRDGSGTEPLSFRGLKGIPKFHAKAMGYCSYRTACQYPSGKNSLKRPTVRLTGDTLYIPKLKSGVKLVLHHSLPEDAHIENVTLSMEMDGSVHASICYSYTLLMDMGLQEAAMDGTLPEGTTFLGLDYSQQDFYVDNEGRKANCPKYYRKSEERLALLQRRLSHKEKDSRNYRKLLKQIRKLHTKIKNQRKDFLQKESTRLVKAYDVIVVEDLDLRGMGGALSLGKNLHDNGFGMFRNMLAYKLRRKGSCLVKVDRWFPSSKTCSCCGYVLDALELSDRTYVCPACGNTMDRDENAAVNICEEGKRIFTDYLKKILQEEQEAADKAKRKGRQKAA

SEQ ID NO: 5300 - protein, 403 aa, unknown
  TnpB Polypeptide
VNLVEQHIIKKKHRLYDELDSLSFLSKNLYNAANYIIRQGFINNKQYLNYTKVFHLIKKTVDYKQLPAKVSNQTLRSLDGNWVSFFRAIKDWGKHPEKYNSKPGLPKYKKKSSGRNIIIYEKQAVGKRHLLKYNEIKLSKSNISIRTKISYTELRQVRVIPRYDHYIVEVVHVKKEVDNDLNENNFLGVDMGMNNLCAASTLDGDFFLINGRPLKAINHYYNKKLSRLKSELEKSNSKRKSLRTRKLTNKRNRKIKHYLHKVSKFIINFCLTNNIGKIIVGKNDNWKSEISLGKKTNQNFVQIPHSLLVNQIKYKAKLQGVSVILQEESYTSKCSFIDNEQVGRHERYAGKRIKRGLFKSKEGILINSDINGSLNIIKKVVSNFTIRENEIKGFAVSPRLVAL

SEQ ID NO: 5301 - protein, 404 aa, unknown
  TnpB Polypeptide
MLIREVVFRLEGELPREAKFLFEDFRLAVNSAIRVGLQARVTSRNELNRLAYKDFRAEHPRMYAQHLVSAFEVAGSVLKNHRRRIRKGKGNHVPYVRRLFMKAENQAYKLDRNSGIIDLPIRAGCHVELRLIVSQYHRKYLDDISLSLGSLTVLPDRVAVAFRKDAPKPFVPESALSLDTNERSLDGVLVTDDAGVAVKAEFPDVALIQQRHHDRRRMLQKKKAHDRRTSRELCRREGTREHHRIDYRLHQVANSVLKFAEERKSAIVLEDLKGFKSKRSKELNRRLSMWPRRKLHRIIEYKAQWKGIPVVKVDPRNSSRTCPICRRIQYSRMGPEFRCECGWRLDRHINASINLLQTAISKGMAGGLRFDPGAFQHDVMMTLYAPSRGARSEPNGTSGIVGVT

SEQ ID NO: 5302 - protein, 406 aa, unknown
  TnpB Polypeptide
VKRIERIRLYPTASQEQRLRFMLDVTRELYNALLQERRDAYRDRGLTVSTKQQYAELTALRNEDARVAAAYRECEDAVLHRLHLAMHAFFRRMNRGETAGYPRFKGYARWNQLEFPHGDRALRFDRLQGRVTVPGVGRIKLRKGRIVPAFGRAWIVAKNGRWYACFECEREATPLSPTGILIGIDRGVHVLAATSEGELIDNRAFGERNRGRIAHHQRQLESLTVRDATGRVCNRQDPQRKAAVLRLARAKEQEANRRRDYLHKMARKIVRSADVIGVEALNLRTMTRSARGTPEQPGRNVAAKAGLNRVMLDASFGQFARLIGEKAEEAARTIVRVDPRFSSQECSRCGHVAARSRRRRRFCCVGCGYTNHADVNAALVIRGRAQLALSRLPDAGAEPVMQHDAA

SEQ ID NO: 5303 - protein, 308 aa, unknown
  TnpB Polypeptide
MRYRKSRPLAFKCADGSMKSGTVRQIHIRKDCGHWFVVFTTEFDIEMPDPKELDVGIDLGVVHAVATSDGQFFDLNTDKIKELEKEIARYQRKLALNRSSRQKLAKEGRAEAFDKTKPSRKRRRLLEKLQKLHRRVRNIRRDFQMKTAHTLAQEYGCVYVEDLKTRNMTKSAKGTIDNPGKNVKQKSGLNRAILRTGFFGMRQAIEWQQYKAGGYVVAVPAAYTSCECPSCTCTDKRNRPRQAQFRCIGCGYENNADIVGAINVRRKGRTGPSAHDQKRIAREVSAGAVVPFARNSGANSENQPLGVA

SEQ ID NO: 5304 - protein, 411 aa, unknown
  TnpB Polypeptide
MIQLYYKRNNKLREFLMLRGIKIALELTDEQEQQMWKSVGVARWSYNYAITRSKEHYLKSLEDENLPKTLSEGAIRKELTVLKRTTHPWLKEVGSNVIKQAVKDWDESRKRFFKGLGKAPKYKSKATSKPSFYVNYETLRKVNGGFKGEKLGFVKTSQPLPKIPKGSYYKNPRISFDGKYWYLSFSYEVPTISVELTDLVIGVDLGLKTLATLSTGEFVENINKSHRVKQLEKQLRREQRHLARQLQANTKGYLTTANGGRKPIYKRSLDLCSNIQTTKRKIRLLYRKLASIRLNHIHQTTSYLVKQFPKGIVIEDLNVQGLMKNRHLAKHIQNALFYEFRKQLEYKCLQYGIELVIAERFYPSSKMCSYCGCIKSDLKLKDRVYKCEFCGLEKDRDLNAAENLAYYFHRG

SEQ ID NO: 5305 - protein, 229 aa, unknown
  TnpB Polypeptide
LIKSATISKTATGKYFISILCEEEIIPLPKTNSNIGIDLGLENFAIFSSGEKVENLRFLTSLSKKLAREQKILSRRALLAKKKGRKLSDCRNYQKQKLKVAQIHERISNQRRDFLNKLSMELIKNHDVICLEDLASKNLMKNHHLAKAIGDVSWYEFVRQLTYKANWYGKKIVTISRWFPSSQLCSTCGFSSGKKPLSIREWTCENCGTHHDRDINASLNILKEGLRLA

SEQ ID NO: 5306 - protein, 463 aa, unknown
  TnpB Polypeptide
VTGSLRPVAAPFVAAAPGGARVRARLRLPPQDEAVLRAVGAHLGSLAGRGLAARCAEGRLDARSRARSRAARKRALTAGSSSRWAGAITRTNEDQVRLAGQNLRADRTSLQARIRRIEARLAIQAGGKAGRTRGYATAAERHGKTIRLRSLQARLARVERQLAAGTVSVVRGGKALLRTRNTLAAAGLTEEQWRQEWESARLFLTADGEAAKAWGNETIRWHPGEGWLEIKLPAPLAGLANRPHGRYRLSCLVTFCYRGDEVAAQAMSGAVRYDISHDPARGRWYIDASWTAAPAPAASLDELRQHPVVAVDVNHGHLAAAVIAPDGNVLGTPATIPLDLAGLPSATRDGHLRAAISALITTAKARGARAIVIEDLDFAEARAEGRERAGCRPSRGRRGRDFRRAVCGIPTARLRDRLVQMACNAGLAVIVVDPAYTCGEPGTGCGPCGSTTHRRPATTRQRW

SEQ ID NO: 5307 - protein, 395 aa, Pontibacter sp.
LLQQTCPAPGKAPKAAVNQIKTYRFRLKPTRAQAQVFTQWLGSCRYVYNLCLAYKKHLWTNYQISVSKNQMQQELAAIAKEVGWIGCVHSQTLQEVTDRLFRSYDGFFKQGNGFPRFAKRSLYRSFTFKQGVKLHQNTSTVQLPRIGKVKYRKSQDVQGVIKTASVVREAGGWHVTLCCEVEIAPLPQTDSVVGLDVGIKSFVVTSDGVAVDNPKHLYRYQHQLRRAQRAVSRKKKGGSNRRKAVGKLSRIHLKVRNTRKDFHHKLTTQLIRESQAIVVEQLQIQHMVQNHMLAKSISDAGWHGFVQMLGYKSKWYGRELVKVAPNHTSQDCWVCGWRNTELKLSDRYWTCSNGHALHRDVNAASNIRNKAVGQTVSAWEIYKDNGSVAQESYCL

SEQ ID NO: 5308 - protein, 221 aa, Pontibacter sp.
VKLHQNTSTVQLPRIGKVKYRKSQDVQGVIRTASVVKEADGWYVTLCCEVDIERLPQISNVVGLDVGIKSFVVTSDGVVVDNPKHLYRYQHQLRRAQRAVSRKKKGGSNRRKAAGKLARLHQKVSNTRKDFHHKLSTQLIRESQAIVVEQLQIQHMVQNHKLAKSISDAGWYQFVQKLAYKSKWYGRELVKVAPNHTSQDCWVCGWRNTDLKLSDRYWTQS

SEQ ID NO: 5309 - protein, 243 aa, Pontibacter sp.
MQQELSAIARDVEWIGCVHSQTLQEVTDRLFRSYDGFFKQGKGFPRFARRGQYRSFTYKQGVKLHENTCTVQLPKIGKVKYRKSQDVQGVIRTGSVVKEADGWYVTLCCEVDIERLPQISKVVGLDVGIRSFVVTSDGVVVDNPKHLYRYQHQLRRAQRAVSRKKKGGSNRRKAAAKLARLHQKVRNTRKDFHHKLSTQLTRESQAIVVENLQVQHMLKNRKLAKSINDAGWYQFVQMLEYKS

SEQ ID NO: 5310 - protein, 440 aa, Pontibacter sp.
MKNLLCQNLGVDVGKDALDVVRHSFTFAGFDLTLCSTACTCRLLPLLQQTCPAPGKAPKAAVNQIKTYRFKLKPTRAQAQAFAQWLGSCRYVYNLCLDYKKHLWTNYQISVSKNQMQKELSAIARDVEWIGCVHSQTLQEVTDRLFKSYDGFFKQGKGFPRFAKRSLYRSFTFKQGVKLHQNTCKIQLPKIGKVNYRRSQDVQGGIKTASVVKEADGWYVTLCCQVDIERLPQISNVVGLDVGIKSFVVTSDGVVVDNPKHLYRYQHQLRRAQRAVSRKKKGGSNRRKAAGKLARLHQKVSNTRKDFHHKLTTQLIRENQAIVVENLQVQHMLKNRKLAKSISDAGWYQFVQMLAYKSKWYGRELIKVAPHHTSQDCWVCGWRNTDLQLADRYWTCSNGHVLDRDVNAAINIRNKAVGQTVSAWEIYGRSSEVAQESNLL

SEQ ID NO: 5311 - protein, 296 aa, Pontibacter sp.
LFKSYDGFFKQGKGFPRFAKRSLYRSFTFKQGVKLHQNTSTVQLPKIGKVKYRKSQDVQGGIKTASVVKEADGWYVTLCCQVDIERLPQISNVVGLDVGIRSFVVTSDGQVVDNPKHLYRYQHQLRRAQRAVSRKKKGSSNRRKAAGKLARLHQKVSNTRKDFHHKLSTQLIRESQAIVVENLQVQHMVKNRKLAKSISDAGWYQFVQMLAYKSKWYGRELVKVAPNHTSQDCWVCGWRNTDLQLADRYWTCSNGHVLDRDVNAAINIRNKAVGQTVSAWEIYGRSSEVAQESNLL

SEQ ID NO: 5312 - protein, 420 aa, Pontibacter sp.
VRHSFTFVGFDLTLCSTACTCRLLPLLQQTCFAPGKAPKEPVNQIKTYRFRLKPTRAQAQVFAQWLGSCRYVYNLCLDYKRQLYSNHQLSIGKNQMQQELSAIARDVEWIGCVHSQTLQEVTDRLFRSYDGFFKQGKGFPRFARRGQYRSFTYKQGVKLHENTCTVQLPKIGKVKYHKSQNVQGVIKTASVIREADGWYVTLCCEVEIAPLPPVTNVLGLDMGIKSFVVTSDGQVVDNPRHLYKYQYQLRKAQRSVSRKKKGGSNRRKAVAKLARIHLKVRNTRKDFHHQLTTQLIRESQAIVVENLQVQHMLKNHKLAKSISDAGWHGFVQMLEYKSKWYGRELVKVAPNHTSQDCWVCGWRNTDLKLSDRYWTCSNGHVLDRDVNAARNIRNKAVGQTVSAWEIYGRSSEVAQESYCL

SEQ ID NO: 5313 - protein, 282 aa, Pontibacter sp.
MQKELSAIARDVEWIGCVHSQTLQEVTDRLFKSYDGFFKQGKGFPRFAKRGQYRSFTFKQGVKLHENTCTVQLPKIGKVKYRKTQPVLGTIKTASIVKEADGWYVTLCCQVDITPLPPTDSVVGLDVGVKSFVVTSDGQVVDNPKHLFRYQYQLRKAQRSVSRKKKGSSNRRKAVAKLARLHLKVRNTRKDFLHKLTTQLIRESQAIVVENLQVQHMLKNHKLAKSISDAGWYQFVQMLAYKSKWYGRELVKVAPNHTSQDCSVCGWRNTDLKLSDRYWTQS

SEQ ID NO: 5314 - protein, 143 aa, Pontibacter sp.
VVDNPKHLFRYQYQLRKAQRSVSRKKKDGSNRRKAIQKLARLHLKVRNTRKDFHHKLTTQLIRESQAIVVENLQVQHMLKNHKLAKSISDAGWYQFVQMLAYKSKWYGREFHRVAPNHTSQDCWVCGWRNTDLQLSDRYWTQS

SEQ ID NO: 5315 - protein, 339 aa, Pontibacter sp.
VVQHPFTFAGFDFTLCSTACTCRLLPLLQQTCPAPGKAPKAAVNQIKTYRFRLKPTRAQAQVFTQWLGSCRYVYNLCLAYKKHLWTNYQISVSKNQMQQELAAIAKEVGWIGCVHSQTLQEVTDRLFRSYDGFFKQGNGFPRFAKRSLYRSFTFKQGVKLHQNTCKIQLPKIGKVKYRKSQDVQGVIRTASVVKEADGWYVTLCCQVDIERLPQISNVVGLDVGIKSFVVTSDGVVVDNPKHLYRYQYQLRRAQRAVSRKKKGGSNRRKAAAKLARLHLKVRNTRKDFHHQLTTQLIRESQAIVVENLQVQHMVKNHKLAKSISDAGWYQFVQMLEYKS

SEQ ID NO: 5316 - protein, 282 aa, Pontibacter sp.
MQQELSAIARDVEWIGCVHSQILQEVTDRLFRSYEGFFKQGKGFPRFARRGQYRSFTYKQGVKLHENTCTVQLPKIGKVKYRKSQDVQGVIRTASVVREADGWHVALCCEVEIAPLPPVTNVLGLDMGIKSFVVTSDGQVVDNPRHLFRYQYQLRKAQRSVSRKKKGGSNRRKAVAKLARLHLKVRNTRKDFHHKLTTQLIRENQAIVVENLQVQHMLKNHKLAKSISDAGWYQFVQMLAYKSKWYGREFHRVAPNHTSQDCWVCGWRNTDLQLSDRYWTQS

SEQ ID NO: 5317 - protein, 229 aa, Pontibacter sp.
VKLHQNTCKIQLPKIGKVKYRKSQDVQGVIKTASVVKEADGWYVTLCCEVDIERLPQISKVVGLDVGIRSFVVTSDGVVVDNPKHLYRYQHQLRRAQRAVSRKKKGGSNRRKAAAKLARLHLKVSNTRKDFHHKLSTQLIRESQAIVVEQLQIQHMVQNHKLAKSISDAGWYQFVQMLEYKSKWYGRELVKVAPTILLRTAGYVVGETPSYSYRTGIGLVLTDMSWTGM

SEQ ID NO: 5318 - protein, 495 aa, Symploca sp.
MPKRRNSIQTEKLSTQIVPIIGMAKSVETEIVSTMQRLGIVRSETYNKLGSLRHWGLDWKKAYSLVRAKRTPESLGLPSKLMEWTVSDVAKAISAQQAACIEALGTALHHRYPGKENQKHRKQCYKQLSDTSFLDHPFLHRIVRKQFQRGHSWVKNQIVYQQGGYSCKRISRHTYELELAGLRRGQRNRILVRSNRKITGQISVIHNLEFERFEIHFLVNHGTITAPGQRREIGIDKGYTEAFYDSNGRAYGKGLGSVATAKSDRITAKNRNRGKLWALHRKLEKIDPAKSARILENNLSRKTENRRYRQDTAAIAQVIGAASKSLLNGVCAACPEGVPLKVFAEDLTQPMKGKPQSKAMSRKLNSWMKGYMRDSLQKWANWTGSLVQEIQPSYTSQVDSVTGTLLGRRDRDSFIRFTGVVLQADHNAALNILARGTDKEISRFMKKEEVQAVLLRRTARFLKGMGLTLLQAVELGWLDPKHSKSKAFEELLIGM

SEQ ID NO: 5319 - protein, 354 aa, Escherichia sp.
  misc_feature (159)..(159): Xaa can be any naturally occurring amino acid
  misc_feature (331)..(331): Xaa can be any naturally occurring amino acid
VKRLQAFKFQLRPGDQQECEMRRFAGACRFVFNRALALQNENHEAGNKYIPYGKMASWLVEWKNATETQWLKDSPSQPLQQSLKDLERAYKNFFQNRAAFPRFKKRGQNDAFRYPQGVKLDQENSRIFLPKLGWMRYRNSRQVTGVVKNVTVSQSCGKXFKKRGQNDAFRYPQGVKLDQENSRIFLPKLGWMRYRNSRQVTGVVKNVTVSQSCGKWYISIQTESEVSTPVHPSASMVGLDAGVAKLATLSDGTVFEPVNSFQKNQKKLARLQRQLSRKVKFSNNWQKQKRKIQRLHSCTANIRRDYLHKVTTTVSKNHAMIVIEDLKVSNXATCQSQQRVRSASRGAMSGQNQV

SEQ ID NO: 5320 - protein, 305 aa, Streptomyces sp.
MHQCYADDRLGQHVGKGRKLKRQRGHKARLYLTPSQLTAAEDQGHAARAMWNCLHSWWTMLPKDKRTLGAADEAIRQGRKDLDFLGALPARAAQQVLKTYFRAWVNCWEGRAQAPTFKARFRSRMAIDIPQGRGLQIVRLNRRWGRMWAPTIGHVLFRWTKDLPAGKRADKLNKVTGARLVREADGWHVVFRVQTEVPDPSPHSGPTVGIGRGIAKPLALSDGTFREHSDWLTPGETKRLRRREKEPEWKTWPSPPWSSPPRGPWKPPAGTSARRPDSTAPSPGKRGAVRSPCLSTRWPTEAASW

SEQ ID NO: 5321 - protein, 442 aa, unknown
  TnpB Polypeptide
MKIISSYGVELRKQNIPIRQTLEIYRSAVSYLIGIYVQVWEELAEIPDAKRRFNAAEHLVHTTKKNHACFDFDIRFPKMPSYLRRSAIRHALGTVSSYKTRLDLWEKTDRKSGKPKLVYENHAMPVFYRDVMYREGAEGKDEAYLKLYDGHDWKWFCVRLDHTDMEYLRKYWSGKKASAPTLEKRHRKYFLRFSYTEEVTLTKTPVKEQIICSVDLGINTDAVCTIMRADGTVLGRKFIDHPSEKDRMYRTLGRIRRFQREHGSAQTQGRWAYTKRLNTELGKKIAGAIVRYAEENHADVIVFEYLEMQGKISGKKKQKLHLWRKRDIQKCCEHQAHRKGMRVSRICAWNTSRLAYDGSGAVTRDWENHSLCTFQTGKRYNCDLSASYNIGARYFIRELLKPLPATERSLLEAKVPPVKRRTSCVYADLRKLHSEMELLKAA

SEQ ID NO: 5322 - protein, 365 aa, unknown
  TnpB Polypeptide
MVKGVKFRAYPTKEQQNLINRTLGCSRLIYNKGLAMRDAAYKAGEKIGYNQTSAMLTGLKKQDDYAFLKEVDSIALQQSLRDLDRGFKNFFAKRAAHPQFKSKHDHHQTYRTINQGNSIRISGRYIKLPKLGYVKIRQSMEIGHINHATVERTASGKYFVVLNVDFEPEPRPNAGGQVGLDVGIKAFYSDSNGNTLSNPKYLEKAARKLVREQRKLSRKQKGSGNRNKQRIKVALVHEKIINQRNDFLQNQPTMLVRDNQTICIEDLHVKGMIRNHKLAKSIASVSWAKFFKMLEYKASWYGNEIQRVPTMYPSSQTCSSCGYRNPRIKNLSIRIWECPKCHAVHDRDTNAGINILKKALQMQSA

SEQ ID NO: 5323 - protein, 422 aa, unknown
  TnpB Polypeptide
MLVTKAYRYELDPNNRQRTHLHQHAGVARFAYNWGLEQRIRLFKDNQGTDRFTDAMKQHRLLNSLKESQFPWMYQCSKCAPQEALRDLHTAFQNFYRGLKTGRKVGIPRFKRKGVRDSFRLTGNIRFRKRAIQLPRLGVIRIKERRRSYYKGRILSVTVRRRADRWFVSVTVEEEIPDPETPAGGAVGVDLGVKTLATLSNGTTFTNPRALGRRLRKLKCLSKSLSRKRLGSKNREKAKIRLAKMHLRIFNIRQDTLHKVTARLAKNHSKIVIEDLNVSGMLRNRRLARVIADVGFYEFRRQVEYKCKWYGSELVVVPRTFPSSKLCSRCAHKKKELSLSEREYHCKACGLRIGRDLNAALNLVAVSLPETENACGEDVRLLASPSGVAMKQASAKQEPNISPRLNVKDCLGFGKRHVPLRL

SEQ ID NO: 5324 - protein, 366 aa, Chloroflexi sp.
MKLIAQVKLLPDDRQADALRRTMEQANAASQFVSDRAWETRTFRQYDLHHLCYQAIRSQFGLSAQVAVRVIGKVADAYKLDRQTKRTFRPTGSIAYDDRILSWQLAKSTVSIWTVEGRLHIPFVCGDRQRALLESRQGETDLGVFRDMFFLSATCEVQEPEPIDVQGVLGVDLGVTNIAVDSDGEVHSSSQVNNVRHRHRRLRAKLQRKGTKSARRRLRRLSGKEARFAKWVNHNVSKRIVAKAEGTKRAIALEELTGIRQRVTARRSQRATLHSWSFFQLRQFVTYKAQRVGIPVVFVDPRNTSRTCPACGHIDKRNRPDQSTFSCVVCGFSGLADHIAAGNIARRAAVNPPNVSTTQRVSESTV

SEQ ID NO: 5325 - protein, 299 aa, Paenibacillus sp.
MRTKYPYKKKKHFNTKWVDQAFKIEGNTIHLSLGIQNGKRQQPIKITVPRMPVADIKEIELVYDRKLMISMSYDDGQAAAENHGSQTAGIDLGEIHSITATTTENKSIIITGRKVRSIHRLRNKKLAEIQKLMSKCQKGSRQWKKYNRAKKYILSKSERQLNDAIHKTTRQFVAWCRENEVKEAVVGQVDGVQRNTKKKKRKIINQKLSNWSFGKIQKQLEYKLESQGSTIKIIDESYTSQQCPCCGRRKKTSTRNYNCSCGYTEHRDIHGSKGILSKYLHGDIRYLGETREIKYLRIA

SEQ ID NO: 5326 - protein, 346 aa, Escherichia sp.
VKRLQAFKFQLRPGGQQECEMRRFAGACRFVFNRALARQNENHEAGNKYIPYGKMASWLVEWKNATETQWLKDAPSQPLQQSLKDLERAYKNFFQNRAAFPRFKKRGQNDVFRYPQGVKLDQENSRIFLPKLGWMRYRNSRQVTGVVKNVTVSQSCGKWYISIQTESEVSTPVHPSASMVGLDAGVAKLATLSDGTVFEPVNSFQKNQKKLARLQRQLSRKVKFSNNWQKQKRKIQRLHSCIANIRRDYLHKVTTTVSKNHAMIVIEDLKVSNMSKSAAGTVSQPGRNVRAKSGLNRSILDQGWYEMRRQLEYKQLWRGGQVLAVPPAYTSQRCACCGHTAKENRL

SEQ ID NO: 5327 - protein, 516 aa, Moorea sp.
MPRKVGATKKISTQVVPVVGMTKSVELELLQVMKKLGIVRSESYNKLGSISHWGIDWKKAYPEVRSFRTPESLGLPSKLMEWTVSDTAKAITASQAACTEAVIKKVYKRFPGKDKQKIRKELCKQLKTLAFLDSPLLHRLVRKEFQRGHSWVKNQIVYQQGGYKCKRLSRNTYQLELAGLRRGKRNRIVVRSNRKISGQIRLIHNQLLQRFEIHFLVDYGTAGIPADRRSRSVAFGLSRAKGDRRSIGVDKGYTEAFYDSDGQAHGKDLGKVATKKSDRICAKNRNRGKLWALHRKLEKMSPCKSARILENNLTRKTENRRYRKNQSELTAIIGAASKSLFKGESLKVFAEDLTQPIRNKRQSKAVSRKLNSWMKGQMRDSLQKWADWTGSVVTEVQPSYTSQIDSVTGTLLGKRSGDSFTRFNGVVLQADHNAAKNILDRGIDKEITRYMNKTEVQAVLLRRTARFLEGMGLSLADAVELGWLDFKHSKTRAFKELLVGMPGTSRQMSGKLDSNC

SEQ ID NO: 5328 - protein, 360 aa, Helicobacter sp.
MLIAYKQKLYSTSRNKHISKLLRLYGICYNHCIALHKRYFRLFKKHLKLYTLQKHITKLKRTARFAFLKTLGSQTLQELVERIDKVYKRFFKKQGRPPRFKKVANYQSFTFSQCGYKIQDNIISFNGYRFKFVKTYDLAGKPKTLTIKRDNLGDYFLCLVCETEDNLKPAGDKSVGLDFGLKTFLTCSNGTQIPSPLFFSKFLPLIRACSRSLSKKKRGSHRRLKARLRLARLHRKIKNLRTDFFYKLANSLSKQYTTIFIEDLNLKGMVKLWGRKINDLAFGEFVAILERKTQVVKIDRFYPSSKTCSSCGEVKEDLSLKDRIFNCHSCGLSFDRDLNASINIHRVGASTLGVEAVRPA

SEQ ID NO: 5329 - protein, 407 aa, Helicobacter sp.
MTLTERHIIKPKHPCFASIKNFCHLSKNLYNYANFILREHYLAGFKLPTPYDLINRFVKENQRDYRAMPAQSAQQVIMLLSKNWKSYLKAIKAYKAKPSKFFSKPKIPKFKPKKGVSIGVFINQQISLTKGNLTKIKFPARANLKRLITKVKETSRLKQVRVIPKTTCFIVEVVYEQPTNKPQVQGDGIMGIDLGVNNFVTAIDNQASPFIIKGGGVKSINQWFNKLKAYYAAKAKLSNNSYWTKRLGALTLWQDCKLNDFMHKASAYVVGHCLKNSISTIVIGENEGWKQKLGLSKRNNQNFTYIPYQSFLDKLRYKCELAGIKLLITEESWTSKCDHLANETMQHHEQYLGKRVKRGLFKSSTGKFLNADINGAIGILRKVFPDAVQTLRDSGVVFTPVKISLAF

SEQ ID NO: 5330 - protein, 485 aa, unknown
  TnpB Polypeptide
MSQKVRIDGVKHTGASVFLGVDHCGNPCWTRNPERVMEWLCDGWRTRFNQRREQRPHNMPVKDEAGGIVDWVKEPLGGPDVAELLPDKEARLQCPWMAGIPAPILSSTDKIENTEWSAGLKRKKTVGGRIPGFKSRHRGLNFVCWRNASKTGNAIFHKTGRKSGVVAITGMNPSRWRKPGEKLYWRVIIHVRVSQPIRPYTSVHVDWTYRSLVFVNMPLPLPRTGDGVIGIDRGCVHALALSDGIFMDMPKPSKAELKRLKYLQRRMARQDRVNEARGGRAAKLASKRRWKTLSEFNALQGYIVRRRNDWIERTTTRLARENSLVAMEDLGVQAMTKRPKPRPDPDKPGQYLHNGAKAKAGLNRSILSNNWSRLMKRLKDKMDANGGRLVVVPAAYTSQTCHECGHVAKENRDSQAAFKCVECGYMANADVNAAMNILSRALDKTGGGTALDVEDPRWRSREASTPSTQAGSSFGVRAVKGIPRL

SEQ ID NO: 5331 - protein, 521 aa, unknown
  TnpB Polypeptide
VPRPSGRGWSRSGPSGRIELIMETVRRYNYRMYPTRGQRMALSRLFGACRYAWNWYVRQRLTDWNFNRSRPSYAELSAKFNRTKTEPGLEWLTGVSAVPLAQSLRQCEKAYSAFFRYVEKHGCHVDHKGRPLGYPRFKSRHCGEQSAVFTTSARFHVRHDHNARWMFLRLPKIDGEIRLRWSRDLPSRPSSVTLMLHADGTYEASFVVKTEPKAPPKPRHNACGIDMGLESLASIVYSDGTREKVAPLRALRRAERKLRRLDKELSRRQRGSNNYSKTRQAKARLYARIGAQRRDLAYKLASRVAGENQAVAMETLCVKGLMRTWMGKSVADAAWSTFTDRVDELCAQWDRKVVHIDRWCPSSQVCSQCGRRDGPKPLDVREWECPRCGAFLDRDYNAARRGTRGVVKRPWRRCETEAGFGRPRRDRPRSGNPPNRDAPLGWQGRDPPPSGGGGSQDWELADFEACELSDPHMPDPYECVVNDLRLLAEDMDKEPRHMGGLVRYDTAYALAGFEYLTFRKD

SEQ ID NO: 5332 - protein, 373 aa, unknown
  TnpB Polypeptide
MNTYVRAHTIRLNPNPEQEQYFHKAAGIKRFVYNWGLARWKDMKSRGVAAYGVMAAKKDFNAIKRTAYPWVMDVAKDVAEGAFADLGAALKNYFDWKNGHRTGRKVGFPTFKAKKNTRQSFRLNNDKFRVNGHTIVIPKLGPVNMAEPLRFMGKIMGAVVSKAADWWFVSITVQIERPTPRRFPKQSTGVDVGIKALATLSDGRAFENQKPLRRQIQKLRRLNRTLSRRKQGSHRWWRAKRKLARFHDRIDNQRADAHHKASHAIASTYAIIGVENLHVTGMVKNRRLSFALADVGLGEFLRQISYKSDAFGGTVVTVGRFYASSKTCHACGHINQQLILADRTWICGHCGTTHQRDWNAAQNIEREALRLIA

SEQ ID NO: 5333 - protein, 436 aa, unknown
  TnpB Polypeptide
MITGRKYRVKALGKESREMFFTWSAAQMLIYNALVQERMYFLGFFRKFGGKLPPIDQKYSHLINREDGAYAWMHTVPSQNWAVLHKKAWSNDFAGITRQPIPKRVKGADRSLWLTQELFSIKQVSKNWYELSVGTKTISGGRFLFKAHRPFTEPVSVHLKSSGTEIFISFSCEEEFQQYPETKAEKIARLSQYGKDELLNISVGIDRGVVTPFQLSDGRRFDYSQTQKDRLKASERRKKHYQRMMARRIKGSSNWKKAKEKARRCSRYAAYVRRDFAHKTSHAIVGNESVEIIGIEDLKIKSMIARPEPKKFEDEEFLPNGANAKAGLNKAILEKAWGLTERFIEYKAQRAGKLIIKVPAPYTSQTCSRCGCQAKTNRKSQALFRCTHCGFTQNADRNAAEVIKAKAVELFHSEGIKPKEVRRTMRLRHKPACASA

SEQ ID NO: 5334 - protein, 332 aa, unknown
  TnpB Polypeptide
MAPYSRICGSVYNFAVRKIELNAQDKIYFSKQEFRNLLANHGERLGIPSHALQGVLCTVHDAWNRCFKKIGGKPRLKGMRNKLTSIPFPDPIKAPKGNRIHVPALGPVKYHKMELPEGRNKCGRMVKRASGWYLCLFIDAEPKAIERVAYGRIGIDPGFSNLLTTSDGDPIEHPRELEASAERLAQAQRGHNKQLAARIQERVANRKRYRNHKLSRRLVSENILIAFSKDNIKGMAKRFGKSASSSAHYQLRQMPSYKMPKSGGTYVEPESTFSTKTCNECGSQSGPTGLTGLSVRQWSCSECGFVHDRDVNAARNALSAAAGCAVEGYVYA

SEQ ID NO: 5335 - protein, 332 aa, unknown; identical to SEQ ID NO: 5334
  TnpB Polypeptide

SEQ ID NO: 5336 - protein, 323 aa, Bacillus sp.
LKKELVWLKEVDSIALLQSSLKNLADSYARFFKKQNKAPRFKSKKNKVQSYTTKHVNGNIAIVDNKIKLPKLGFVRFAKSREVEGRILHATMRRNPSGKYFVSILAETNVQGLPKTGSSVGVDVGLKDFAILSTGEVFSNPKWFRKLEEKLAKAQRVLSRRQELALKRKCKLDEAKNYQKQKRKVACIHENIMNARTDYLQKISTYIVKNHDIIGMEDLQVSNMLKNHKLAKAISEVSWSQFRTMLAYKARWYGKQVVTVSKTFASSQLCSVCGYQNKDVKNLKLREWTCPKCNSHHDRDINAGQNLKNEAIRLLTVGTTGIS

SEQ ID NO: 5337 - protein, 354 aa, unknown
  TnpB Polypeptide
LKQGKVSYPQFKKKRDNEGSFYIQADKIRLSETNKNSKKFAKLAHNEHGKRQYICMPNLRGGWVKMAEHIRFNYVKINNVCISQSGGKFYASFSLEITEAEYRRTHRHVETVDANRKVGIDMGIKSALILSDGIAIENPKPLKKSQRKIKRLSRQLSKRFHPKTKEERLQGVRKSNNYMKMSVRLAHAHGRVANIRRDFLHKVTSILTTHYGEIAIEDLNVKGMIKNHRLAQAVNDVSFGELRRQIEYKAKTNGVKVVKADRFFASSKTCSVCGEKKEVLSLSDRIYRCEHCGAVIDRDWNASLNLLGLLVNHKIGTDYPESTPADLTALLSRFSLSGIATSKVETGKQHKSYV

SEQ ID NO: 5338 - protein, 264 aa, unknown
  TnpB Polypeptide
VPLKAASLKRKGKSVRFCGKTLRVFEPERLEGVKWKQGHFAQDAVGDWWLSLPIEVPVDESVAPLEKVGIDLGLKEIAVTSDDARCEKSRFYRGIEQKIAQAQRRGHRRKAKFLHRRAANRRKDALHKFSRQLVDQYQKIVVGDVSSTQLVKTRMAKSVLDAGWGMLRGFLQYKSQQAGRTFQIVNERYTSCTCSNCDSITGPRGVNGLHVRRWTCAACGVSHDRGLTPGSWTPTRGVRCERIRYIRIRSDWQRPGSTCAANWD

SEQ ID NO: 5339 - protein, 221 aa, Caldivirga sp.
VFFLLLLLCRVVAVELEVARGLNRLLYSVEAMYLSIVREVVAYAVEHNITSATQLQRLFYRKYRWEYQGLHAHLVIQAIRQAAEIAKSFIEKRRRGLVGKSYPEVKAVSIRFTEMAWGYGKFIGSTAPIRVELSLPGGRTEVWLRPHKRFWLFWWRVLSGEAELASTLIVKRRLNRWYAVFIFDIKPKKELPQSVVAFDINENTVAVGKIDIKTTVSKVVD

SEQ ID NO: 5340 - protein, 376 aa, unknown
  TnpB Polypeptide
VIKAIKIRLKPTNEQEVLMFKSIGCARFAYNWGLSKWEEIYKQGGKPSKAKIRAEFNNTIKNDSNYVWLKEVSAQVTQHAFEDLDNAYNNFFKGLSKYPKFKTKKRSKQCFYVRYDAIKFKDGKVNLEKIGKVKYKTNYHIPNLPKYINPRCYFDGKYWYLSLSFEHNENQVELDKDLSVGIDLGVANLAIVNYLDKPIKNINKSVKIRKLKKKLKRLQRGLSRKYEANKKGKEFVKTKNIIKLEKQIKLIHRKLNNIRLNHIHQATNMIAKLHPYRVIMENLNISGMMKNKYLSESIQEQKFYEFIRQMKYKCEFNGIEFVTADKFYPSSKTCSCCGNIKKDLRLKDRVYVCDKCGLKIDRDKNASINLGNYKIA

SEQ ID NO: 5341 - protein, 416 aa, unknown
  TnpB Polypeptide
MEAQKTIKFKIGELNNRKRELIDLALINSLNALYDFMELSLKNKTTSNLKLHHLGYFDIVKKYNLPACIVHQSRNKASEILRSWKKNKRRLHKNIPKPEPKALRIRYDNVVFDVMKTENKDFQFWASILVSKRKRIYIPLIVNSDWQKSYLEDLINKKYKKGSADLVKKGEEYFIHIVLKKEIKFERKENYNPIGIDIGINNLAVINLNGKLKFFNGKRAIATKKHFNQVKAIYQNRNNIKMLNAIKGKEQRYFNHINNEISSWIVKNALEQENPIIVMEDLTHILEITRVRKKQRYVHQTWAFRKLQNMIQYKAVWNHIPVVYIQPQFTSKVCPKCLSTNKRVKHSYKCKYCGSEYNSDLVGAINITKKFFEGISFKDTAPINSAVGFSFCEPKAMIESEAKKSIKIGGCFSSQP

SEQ ID NO: 5342 - protein, 406 aa, Azotobacter sp.
MLRLQAFKFELMPTGEQQRQMRRFAGSCRFVFNKALAWQKERYEQGESRLGYAGLCKRLTEWRHDPETAWLANAPVHPLQQALKDLERAYANFFAQRADFPRFKKKGQRDSLRYPDPKQIKLDRANSRIFLPKLGWLRYRNSREALGMVKNVTVSQSCGKWYVSIQTAREVEQPLPDGAAVGIDMGITRFATLSDGTFYAPLNSFKRHEKRLRKAQRAMSRKTRFSNNWKKAKARVQRIHSRIGHARRDYLHKISTTISQNHAMVCIEDLPVRNLSRSAAGTTEVPGRNVRAKSGLNKSILDQGWFEFRRQLDYKLAWNGGWLVAVPPRNTSRTCPCCGHVSADNRQSQARFECVECGFEENADVVGAINVSRAGHARFACEVSGVVRPPAAGTHRSDSGMARCRA

SEQ ID NO: 5343 - protein, 384 aa, unknown
  TnpB Polypeptide
MPKQILKAYKIRLYPNDEQKTFFAKSFGCTRFIWNKMLADKIEHYQANKTELKNTPAQYKKQFEWLKEVDSLALANVQQNLRAAYGKFFKQGLGFPKFKKKGQRDSYTTNNQKGTVAITNNTVKLPKIGHIRATFPDRINGLIKSATVSRTPSGKYFASILVETVIDELPKTQSNIGIDLGLTNVIVLSDGTKVANPKFLSKLQDKLAKEQKILAKRRAVAKAANRKLSDSRNYQKQKLKVAKVYEQITNCRHDFLHKLSINIIKNHDVMVIEDLNVKGMIKNRKLAKAISDSSWSAFTTMLAYKADWYGKQLVKVDRWYPSSKTCSGCAHVLTKSELPLSVRSWQCPSCLQHNDRDINASINILNEGLRLAEQSKTVGATGLA

SEQ ID NO: 5344 - protein, 414 aa, unknown
  TnpB Polypeptide
MIQAWDHPPVRTGKRLRTYKYLLRPTQEQEQKLDFLLDQARRVYNAALEQRITAYQETGKGIRYPAQWTTFRDLRRAEVDTLGQLNASALQQTLRRLDKAFAAFFRRVRAGEQPGFPRFKGRERFHSLEFTYGDGCRLLADGQGRRSFPFQNVGELRVCYHRPLPEGAALKHVVLKRVNQRWYTCLMLEHPNTAPVPAVHPVRGVGLDNGLQALVALSSGERIGNPRWLRSNLAELRLLQRHLSRQVQGSHRRRATLRQIARSHEHIANQRRDLQHQLSRRLVRDYDLIALEGMPLAFMNRNKHLSLASHDAGWGGLKHCLEYKAEEAGIPLIAVDPSFTSQRCSGCGRLVEKTLAVRVHRCPSCALVLDRDVNAARNILQLALDSLVTSPARTGQAERNVTQRGVRALRSCLL

SEQ ID NO: 5345 - protein, 535 aa, unknown
  TnpB Polypeptide
MPKSYTLSFVCELPLVLSSADERVMAVRFDVARQAYNACLSEALRRVDLMRESKEYQATRKLPKGEKGSPAAQARTAAFRAVNRRFNFSGKYALDAWATEHISHTWLGEHLDANSVQKLAERACDAARQYVFGKRGRPRFKGRNQLDSVEGKSNGAGIRWRGDHVEWSGLNLPASIDPKDEVIAHGLKSRVKYVRLVRRKLNGTPRYYAQLACEGLPYQKEKNTLGQGIVGLDLGPSTLAVVAPEAKVAFLEMFCGELRSSQKAIRRLQRQIDRQRRAANPNNYNPNGTAKKGAKVWRKSARQRKTGAKLAEQHRKQAAHRKALHGQMVNRTLRLGNVIKLEKVSYRSFQRNFGKSVNFRAPGTFVRELKRKAESAGAQVDEFPTRPTRLSQMCHGCGSIDRKPLAQRWHICECGVSAQRDLYSAFLASCVEGERLDAGRAKLAWPGVDPLLQAALSRIEQPASGGRLPASFGLRAGRSQSRSPVIAGANAVEAQVVVPFVSLCDGTGELEKDSGTSRTPRLARVPRFARAGRLA

SEQ ID NO: 5346 - protein, 371 aa, Bacillus sp.
MTKQNKAFKFRLLPNKNQEVLLAKTFGCVRFIYNKMLEERKETYEKFKDNKEILIKQKFPTPAKYKEEFSFLKEVDSLALANAQINLQNAYKNFFEGRAEFPKFKSRKAKQSYTTNMVNGNIELKDGHIKLPKLKFVKIKQHREIPAVYKIKSCTISKTKSGKYYISILTEYEKEIPLSTIQHVVGLDFAMDGLYVESEQGEKANYPYFYRQSLDKLAKEQRILSRRKKGSIRWEKQRLKVAKLQEKTANQRKNFLHHKSKELAINYDAVIIEDLDMKGMSQALHFGKSVHDNGWNIFTTFLKYKLEEQGKRLIKIDKWFPSTKRCSCFGAEKEMPLSERVYQCSCGFVLDRDHNSAINIKNEGLRLLALA

SEQ ID NO: 5347 - protein, 362 aa, unknown
  TnpB Polypeptide
MLKTYKFRIYPNEEQRIYLAKTFGCTRFIYNKMLSDRIKSFEENKDLDIKNIKYPTPAQYKKEFEWLKEVDSLALANAQLNLDKAYKKFFRDKSIGFPKFKSKKTNYHSYTTNNQKGTVFIESGYVKIPKLKSMIKMKQHREFTGLIKSCTVSQVPSGKYYISILVDTENFALPKIDKKIGVDVGLKEFAICSDGYREPNPKHLRKSEKRLAKLQKDLSRKQKGSNNRKKARLKVAKLHEKIANQRADFLNKLSIKLIRENQSIVIEDLKVKNMQKNHKLAKAISEASWSEFRRMLEYKGDWYGREIIIAPSNYASSQLCSECGYKNEEVKNLALREWICPNCGAHHDRDINASKNLLKLAI

SEQ ID NO: 5348 - protein, 380 aa, unknown
  TnpB Polypeptide
MKSVATIKLKIPKNNLLLQTMKQYSKAIQYIADEGFKANTYNRYKLHHLCYYDARERFNLPSQFVINANRVASQTLKSVKANKGSKPTFKECMPLAFDKRTFTFSFDKVRLTTINGRIDVPIEVPEYYWKYLDWSYQTALLTIDKHNRMFLHITFSRDISIPTNSDGFLGVDVGINHIAVTSNRQFFSGSKVKSYRLKFKRLRARLQSKGTRSSQKLLKKISGRERRFKAYWNHVISKQIVSNCNAGTIVLEDLKGIRKQKKGKWFNFWLSGWSFYQLHSFIRYKALQRGIKVVKRNPYLTSQRHYLCGQIGSRSKGFFVCSHCNSSLNADLNASFNLAKRHSMTDGVSASVTAPNIQGDEHKGSSSAIACELMDKSSRL

SEQ ID NO: 5349 - protein, 370 aa, unknown
  TnpB Polypeptide
  misc_feature (80)..(80): Xaa can be any naturally occurring amino acid
MAMVMKLTMFLKPHPTEQQKEVLLRTMEQFNAACNYVSEVAFKEQTASQVKLHRLAYYAVREKFGLSAQMAVRVIGKVAXAYKADRKHHHTFKPHGAIVYDQRILTFKFPDRVSILSIEGRQEIPFVFKNYRQLDIRRVRGQADLVYRNGDFYLAVCVDVPESLTDEPTEWLGVDLGIVTIATNSDGESYSGAQVSGLRKRYTKLGSKLQKKATEKRKSGKRPKSVLRLLRKRSKKEHRFVANVNHVIAKELVAKAKGTGRGIALENLTGIRDRITVSKAQRCSQHSWAFRQLRTFIEYKVKLAGVPVVLVDPHNTSRTCPVCGCVDKRNSPNQAHFRCTSCGFAGPADVIAARNIASRATVNWSYVATA

SEQ ID NO: 5350 - protein, 180 aa, Burkholderia sp.
MILVYRYRVKSLNGLLNKQSRAVNYVWNFCNDTQKHALKWNKKWPTGFDLNVLTTGSSKALGIHSGTINATCEQYAKSRSRNRRPYLRYRGMKSLGWVPLKGRDLKREGEAFRFAGNTFRVFNSRPLPEGKIKDGTNFAQDARGNWFLNIVIEMPDVQVRPVRSGVGIDLGLKDFATLST

SEQ ID NO: 5351 - protein, 426 aa, unknown
  TnpB Polypeptide
VWNAEYSDLYDEYAPILGKANCQQVARKNAEAWRSFFTLLEKYKKDDPSVSEKPSPPDYWGNKDDGYEVHDLVRNDLYTFDWDEDKSVVEFGVGVALEEKYDFEYQEQLTLEARGNPQWTGDDSRLELIYDEVADTLRVNHPVQIQSDRLQEQRENAFTHTFDTGNTMNSAATDVGVNNTLAIVTSEGETAVYHARLEFERFQFYSQLIAILQSKLPEDEYSNERIRRSYSERSEKRDHSRDAAVKHATDWLFEKNVETVYVGDLSDVLESHWSSTVNEKTHSFWRHGQLIDRIKLTMDDVGIDVEEVSEQDSSSKCPECGFENVHRSGDEFGCQDCSLEAHSDVAGAWNMLQDKEVGSMARPVVLRAGRRRNASQTANLTEGVYWEWDEHDWRLGSFEERSSSTFVIKNNDNQTSISEHASSQLG

SEQ ID NO: 5352 - protein, 402 aa, unknown
  TnpB Polypeptide
MAYKFKLKLNDKQKAAIANYGGSTRFLWNKALSINLERLKNKQHILYYQELDFFSKLWKKSEEYGFLKECPSQTIQQKLRDLEKAFKDCFDKKQPLKRLPRFKKKGCGDSFRYPQGFKVSGNQVFLPKLGWIRFRKSRDILGVIKNITIGGNGNNWYVSIQVEQEVTKPTHPSKSIVGIDVGIARFATLSTGEHIEPINSYKILMEKLKKSQRALSRKKKSSNNRKKAKIELQRVHSKIANVRRDFLQKSSTAISKNHAMIVMEDLKVTNMSKSAKGSIDEPGKSVRAKSGLNRAILDQSWSEFKRQLIYKQEWLGGDVLVVPPHNTSITCPSCNHKSKENRVTQSNFKCKSCDYRNNADVVGAINILRLGHSRLACGEKLLNVVDIGDISSQAQESPMVAA

SEQ ID NO: 5353 - protein, 390 aa, Crocosphaera sp.
MLRAIKIRLYPNTEQKQSLEQSFGNCRWLWNYCLNLMNQTYIETGKGLSGYEVKKLIPQLKKQYEWLSLAYSACLQQVCLNLGVAFNNFFERRAKYPRFKSKHGRQSIQYPQNVKVFDNYLKIPKIGDVKAVIHRPIEGKIKTVTISKNCCGQYFASILFDDGKEKPEASTEGKAVGIDVGLTHFAITSDASKFDNPRFLTKYEKNLKLKQQQLSRKQKGSNNRNNARKKVAKVHRKITNCREDFLHKLSRRIVDDNQVIVTENLNVKGMMKNHCLAKAIGQVGWGMFMTMLKYKAEQDGKTYLEVDRFFPSSKTCHVCLNQVGSLPLDVRKWTCNNCHTTHDRDVNAAINLREEGLRILTCGTRDKAYRQTVSRSNRGRKKSTTVLVSG

SEQ ID NO: 5354 - protein, 387 aa, Thaumarchaeota sp.
MAQSRIMSQTIETCRRLYNDLLEERLKENTNYFAQTKAVTAVRREDKFLGAVNAQVLQDVALRLDMACSRFFKGLSRRPRFKRAGRYKSFTYPQLGGFRVLGGEIRLSKIGLIKIRPARLIAGTPKTCTIIMDVDVWFACVTVETENSQGIGQMPCGPAVGVDLGINRLVTLSDGKKFENPRVFVRARGRITILQRQLSRRKVGSKNRQKSRIALAKAWRRVRNQRSDLAHKISAFLSKEYSTIVFEDLNISNMVRNHRLASAIMDASWGNLRRLAAYKAERRGGRVILVNPKGTSQKCSRCGEMVAKELSERIHDCRGCGLVVDRDVNAARNILRVGLEQARVEEQPLLFNRRRISKFVPLKQEARGTRPTGSTAGSSIHHQFLLF

SEQ ID NO: 5355 - protein, 523 aa, unknown
  TnpB Polypeptide
LQPVRAKRRSRQHRPKPRCKKSSDAPTSPTRSDATLSPIPSSRPRSRPKAPPPASTPRSRQALRNSWAARAQRERVSVVLEAVKVALDPSPVQERLLLSHAGAARFAFNAGLAHVKEALDASEKPEWSFYSLVRWWNSSKDALAVDADGVPWWRENSKEAANTGLRSLAAALSNWSKSRRGARKGRRVGFPKFKAKDQAVPRFAYTTGSFGLIEGDPKALRLPRVGRVHCMEDVTERVGDARVLRMTVSRHAGRWYASLTVEREDKPVTRAPKGGAVGIDLGVKTLATLSDGTVIENPRPLRKAERRLKRAQKALSRKTMGSNRRAKARAKVARLHARVANQRLDAMHKLTTWLASTFSHISVEDLNAAGMVKNHHLAKAVSDAAFGEFRRQLEYKTAKTDAKLHVIDRWYPSSKTCSRCGRVKAKLSLAERVYRCDGCGLVMDRDLNAAVNILVAGSAPETQNAHGGTVSRGGQPGRATRVPVKCEPSVGGNVVSDLERVPARTPCKLQQSSLQRAKKGEAK

SEQ ID NO: 5356 - protein, 494 aa, unknown
  TnpB Polypeptide
VPYEAFSKNGEPLDLDEVLDGIRSDAELVARYALREMTEQNLALVTYFERFKPAEAGRRMGLFLPDEVKKQFRSGASRLERMFQEQVVSNLCSWAARSGVVSGGYTGYVSAGWKRTVNASRPNSMQPRLSLSAADKQYRKMSVTDERIELKMVVQGQWVTLHFPVPSRFLEAGCEPGVPDIWIDKSNRVMFGFHGKTNPGRPKFSSRYVIGVDVGVTNPAAYVVWDTEKKEVVERSLLGQRARSLSNKIKRTQTQVSSLQRKNRSEEAVSHRTHLSNRRKELSILVAQEIADAAWRHGNALVTFEDLSHIKNTMRFGRWFRGEVYRRTRDMVEADGGRVLRVNAAYTSRKCHVCQSDLDMSDYSSPVCDTCGITHHRDVNAAANIAQRANVKKACQTRNKHATKTKRIRRSKCRIKPLKHPGTKNRPTPKAPQNQRRNHTTTTPARAVSVRMCPAESRVSAVDHTEWFQTTSGTTIPEEDLSTGNAVDVVYTKE

SEQ ID NO: 5357 - protein, 509 aa, unknown
  TnpB Polypeptide
VKYYDTVTRHRFTTEDRVDVEQVERYLAQMVAWMAKAEQEVLASQEFHDLAVKVLRGGRPTGSLNSWGRKRLSRYDFEFQKHNMNEMLITNIVGALESYAVSVGLFQVMSTHPKETKPEKILSCYKVAYPDAPQPTGGMIRAHLRRYHVKGERKASLPGVNAKLNLAVCDTYFAPKTFRDEKDPLNVVVQVKTPSYGLTRLYFRLPDNESRFGDGKVCRPTIRLNDKGQVVFDIAIERKVHQRDTNKIVGVDLGKVEPFVTTVIDPEAKYRSAPYHVNYKRRLGSLVKAEKKRRDLSAHLYERADLCERYNRAQRAQILRTEAKRVGAKATRIKHEISQCIASQVVEIANKSDAHLSLENLSWLDALGGRWPHAEIQHRIEKTAKRYGIKVTKVSAKNTSKTCSRCGGKVSNNSKSRVCTCTTCGFSLNRDVSASREIALRAVSNVRNRDRMRSLLRQRREKRSSAVTRQSKPVTALGGNQGNTGTSERKSEATLMMVRENLDSRGSPT

SEQ ID NO: 5358 - protein, 289 aa, Halomonas sp.
MPRRMGARGACAAIWHHGRLDHRRVKLPAGLGWVRFRQSRPVVGKITNCTVGLDGGRWHVSFQVEIELAESPRHPATSAVGLDMGVAHFAVDSNGTAHTGRNSFRQLEQRIATAQRRLEHKVRFSQNWKKQKARIARLHQKAANTRRDTLHKLSTAISQNHAMVAVEDLRVRNMSASAKGTLAAPSKRVKQKAGLNKAILDQGWFEFRRQLTYKQDWRGGLLIAVPARHTSQTCPGCGHIEAANRPTRALFRCQACGHTAHADVVGARNVLARAHESLSGQDLPVAPVK

SEQ ID NO: 5359 - protein, 423 aa, unknown
  TnpB Polypeptide
MSIKAFKYRIYANKSTTEKLQWILDRCRELYNAGLQERRDAYELGVRRHPGYYDEETRKHLTREHAVGYYEQKRELVEIKEERPEYQEIASHVLQDVIMRLKRAYDDFFRRVQNGEQPGYPRFQGKNRYDSFCYPDGAGWKLEAKERPANKKGIVRVNLKLTKIGTVKLHLHRNIEGAIKPLTIKREGEHWYAIFTCEIGQTEPLPVSYEDVGIDLGVTHFAALSNGEFIDHPRYLRKAEKKLAKAQQAISRKKRGSHRRKKAVQQVANCHRKIANQRKDFQHKAARNLVNQYQVIVLEDLKTANLTKRPRPKQDENGQYVPNGAAAKAGINKSILDAGWSTFTAMVSVKAAWAGRTVIFVDPSKTSQICPKCGAVRKKTLEERWHSCPCGCELDRDTASAKVILDLGRKALSVGTRPTRETA

SEQ ID NO: 5360 - protein, 409 aa, unknown
  TnpB Polypeptide
MQLVEQHCISKNDPRYSVIDEAAFKSKNLYNAALYEMRQAFLHEGISLSYEAMDTRMQRHEAYKALPAKVSQQVLRQLADAWKAFREAKAAYEEDPSKFLGRPKLPKYKHKVEGRNILIYTIQAISRGKKGLKRGIIKPSMLPVVVKTQQKDVDQVRIVPRKGFYVVEVVYGKEVKQAEVNPAFYAGVDIGMNNLVALTSNKPAFKAVIVNGRPVKSVNQFYNKRKAELQKKLGKTGTTKRMERMTNKRNRRIDHYLHTASKRIIDVLVEEGIGVLCIGKNDGWKQEANMGKWNNQQFVQIPHARFISMLTYKAELVGITVKITEESYTSKASLLDLDPLPVRKPGDETKHTFSGKRVKRGLYRASNGRYINADINGAGNIIRKVAPDAFGSEGVEDLVVHPVRITLTK

SEQ ID NO: 5361 - protein, 434 aa, unknown
  TnpB Polypeptide
MTQTQALTKTLVFPLDVQSDNESLLHDARIECRRVFNEVLRLNYEGWDWTEIEDIVEQNADLVQNTAQRIINKGFSALENYYDNDDWGRPWYKHEAFPLRMNYGEGYNLFLEDETVRFRISAKPYNHVKGELRGTQDQFGLLRQAIEDDDWHVGTAEALCRNGREELHVTVTNETAEVDAKTAAETVIGVDINEDCVALAALTEHGIEDSVVIDYPEIKEERHRYFTMRKRMQEAGQTVFNDLFRNKEQRFVHDQLHTVSRRVVAWIQRFDNPVIVFEDLGDMRDNIEYGTRMNRRLHSLPFAKLRDFITYKAAWNGILSDDVDPEYTSQQCPICGHTERANRSGKRFKCCECEHQDHADRSAGISVAQKWLRTQDDRNVPALNTLLQVQKWEMRRQASGSVDGPTVTHHTAGGHQTEGVSGVSDQSTGRSSGA

SEQ ID NO: 5362 - protein, 378 aa, unknown
  TnpB Polypeptide
MFKAFKFRLYPNKEQKILINKHFGSNRFIYNYFLAKRIEIYKLNQETLTYYQCSANLPQLKKEFEWLNEIDSVSLQQTLKNLDSAYQNFFREIKKGNKNQGFPKFKSKKDNRKSYRTQLNKTTAGGNIRIKDNKVKLPKLGFIKFAKSREVTGIIKNATISQTPSGKYFISILCEVPEPMKLPKSELNIGIDLGIKEFAITSEAEIIDNPKYYRKYEDKLVKLQRKLSKKQKGSKNRNKIRIKVARLHEKITNTRTDFLQKLSTRLINENQIICLESLDIEGMMKNHKLAKSISDASWSSFTTMLNYKANWYGREIVVIDRYFASSQLCNVCGYKNVEVKDQSIREWECPECGTNHHRDVNAAINIRNEGLRLLGLSA

SEQ ID NO: 5363 - protein, 283 aa, unknown
  TnpB Polypeptide
MRFFKKQSGFPKFKSKKHETPSFYNDNIKLKVKKNSVLLEKVGWVKIKEKIPMDCKYTRPTVSFDGKYWYLSVGIEQQTKNNELTKEVVGIDVGIKDLAVCSNGMVFKNINKTKTVKKTEKKLRMLQRKVSNKYEKNKKGVCYHKTSNIVKLEKQIRLVHRKLNGVRKNYLHQATNQIVKTKPSKVVMETLNIQGMMKNKHLSKAIQKQNLCEFKRQMKYKCEFNGIEFIEADKWYPSSKTCSECGCIKGKLLLSERTYVCEECGCIIDRDLNAAINLSRYSA

SEQ ID NO: 5364 - protein, 319 aa, Chlamydiales sp.
LLGSQAIQDISDRIERGFQLFFRFLKSGRKVSPPSFRKRVKYKSFTLKQAGYKLLEGNQILIGKKLFKYHKSREIEGKIKTLTVKRDALGDIYLYFSCEVSDEPINRVLSGKSVGFDFGLKSFLTLSDKDKIESPEFFKRSLKDLKNLSKAVSRKKKGSNNRRKARLELARMHKRVFNRRKDYQFKLAKDLAERYDCLFFEDLDMNEMKKKWGRKVSDLAFSSFLIILEYYCSKTGSKFHKIDRFYPSSKVCHCCDYKLDKLSLQTREWICPNCKFHHDRDVNAAKNIYRVGASTLGEGEVRLAREQAFTVEPRIPIHS

SEQ ID NO: 5365 - protein, 478 aa, Glycomyces sp.
VQVTRIAFSVDLNPGKYDMLVEQARRLGRVRALAWRQYGSIAGVGVRDRAIRDQWMESGDAQRFGVLANAWKETVRDAVADIAASRESAKVRVRRAIWARTRDESERKRLYTALRFDHWTSDRWLSRQMRKHWRRGRSRTSNQIVVRSDQFRTFALSEGGNVWLAVPGLERRKLVKIPLNTTVAPTGTLRLILRDGLVEVHYQIDAADMKSSQRPCGNDPIGVDKGYTEVLTDSDGVRHGTDLGDLLTVRSDQLRSTNARRAKLFSIAERAEARGDRVKAARIRTNNLGTVKRRRQGDRWQAQVRTVTFEAVHRVVDKAAMVVAEDLTKTFTSRKRLGQNTNRRLAGWTKGLTAEALNAVSGRRGSAVRLVNAAYTSQVIPGTDALGIRKGDRLHCTECGAVWKADHAGAVNVLRRLGDADIALWTPHWRVKQILQERTDRRRSRLPDQDSSIEPLCQCGERNIQKLRNERTNGSRQE

SEQ ID NO: 5366 - protein, 438 aa, unknown
  TnpB Polypeptide
MPALAFSGRVYRKFARKPPRFSGWMNGGLMQKDLVSYKKHDIIVSMEVMRTYKFRIYPNAVQREWFARQFGACRFVYNHFLRARIDYYAAHKDDPNKKGLTYHDTALMLTQLKKQEEYEWLREANAQSLQHSLRDLDTAYNNFFNRRAKFPRFKSKRGPQAFHVPQHFRIEENRLILPKIGAIKIVVHRPIEGEMRNITIRKTPAGRYYAMIVCRVDFPEPEPKQGEIGIDVGLKSFLVTSKGEVVEHPKHLLRAEKRLKRLQRSLSRRKKGSNNREKARLLVARQHEKVANARQDFLHKLSRRLVDENQVIYAEDLNVKGMLANHRLAKRIADSGWGELFRQLAYKSEWYGTTFHQIHRFYPSSKRCHGCGYIKQDLRLSDRTWVCPECGVRHDRDLNAAINIANFGRVERTVGTTETHTPMESDNSRSLKSEATPL

SEQ ID NO: 5367 - protein, 390 aa, unknown
  TnpB Polypeptide
MLKACKIRLYPNKEQKQIIASQIGGSRYIFNRMLALKIYTYKKFGKNISKYDLIKRATKLRKRDKTSWLKDIDSQVLQQSISNMDSAYKNFFRRVKQGGAVGFPKFKSKHHSRQSFQYPQRVKLNENKNKIYLPKVGWVKCKGFRKDFIGKIKTVTISLEAYQYHASLLIDDGIENKSINHNNQIVGLDVGVKLVVADSNGNKIEALKLERELTKLRKRAKQLSRKKKGSNNRFKAKQKLAKINLKIANKRKDFLHKLSTKYSENQAIVVEDLKIKNMSKSAKGTTETPGKNVKAKSGLNRVITQQSWGMFFEMLEYKLKRNGGELIKVNPKFTSQTCPKCGYISKENRLSQSKFVCQKCNYSNNADIVGALNILDRGIHGNNACDKIAS

SEQ ID NO: 5368 - protein, 507 aa, unknown
  TnpB Polypeptide
MTEQYRTYQCRVDETPSEDALMSDYAELYGKTERKLFARLYSGDKDTNSLKREFIKRFRITARQFNSVSAGLKGKISSIKELRVNLIREAEQRIAKAKEVLKRISDPAKKHQKKRRLAILQARLKNLKSDRASGKVRLCFGSKKLFRSQFYLKENGYASHSEWLKDWQSARSNQFFVIGSKDETTGCQNCVATVSGDGSITLRLRLPNAMSKKYLTLSGLHFEYGHKSIVAAIGRNLSDNKNDWQAINYRFLRDDKGWRVFVSIALLEFKPTSLKNIGVVGIDINADHIAVSETDCYGNPVEYFSVPCNTYGKTANQRKAIIGGAVKQVIAFAINKRKPVVLEKLNFQKKKSALEKQSRKFARMLSSLAYTQIQTNVRARAFDAGIDVYEVNPAYTSVIGQYKFKDRYGMSTHNAAALVIGRRSLGFGETLPNQLYVTLPLSVRNRGGHVWSKWADVSRKAQAALAAHRQSRKGSSLSPVLDKAQFVINPPVTGAIPVCESSLVPFE

SEQ ID NO: 5369 - protein, 205 aa, unknown
  TnpB Polypeptide
LQHSQTAAFSITLGRLSALWIGLECFRELSQEKKFLSKNWLKAKRKLAKEHEHVKDFRRDLFFKLGALLAQEYDVLVLEDLNVQDLIQKGENKKRRLRLYDSSFSELRAVLEWQFVKRGKLVLPVPSYNTSRECFLCGEINKGLTLKDRVFHCPRCGFALDRDLNACLVLLRRAEWVPPGVPAKLRPLPPLPSLGLVRRGRQGWL

SEQ ID NO: 5370 - protein, 372 aa, unknown
  TnpB Polypeptide
LERSYKFRLYPNREQEILIQKTFGCVRFVYNHFLDERIQQYSQAGKAPTRFQQDKSLTTLKKELEWLREPDKCALQEALKNLDAAYQNFFRRVKRGEKPGFPRFKCKRDHRKSYKTNSTIKVLDGAVQLPKLGKVKCAISKKVEGRILSATVSQNPSGKYFVSLCCTDVDIAPLPKTGAVVGVDVGLKSFAVTSEGVEYSNPKYLRKSEAKLAKLQRRLSRKTKGSRRCDKARLAVARMHEHIANQRLDMQHKLSTALVRENDVICIEDLAPSNMVKNHTLAKSVSDAAWGEFRRQLQYKADWYGKTVSVVDRFFPSSQLCSSCGEQWAGTKDLSVREWVCPKCSAHHDRDVNAAKNILNEGLRLLAEQPAA

SEQ ID NO: 5371 - protein, 439 aa, unknown
  TnpB Polypeptide
MQLVEQYVIDRDDPRYDAIDAAAFKSKNLYNAALYEIRQSYIFTGTYLNYNEMDRRMQSHEAYKALPAKVSQQVLMQLHHDWDAFFKAHAAYKEDPSKFTGRPKLPKYKDKTKGRNLLVYTIQALSRGKKGLKRGIIKPSQLAIAVRTKQKKINQVRIVPRKGFYMVEAVYEQEEQQAQINPTWYAGIDIGMNNLVALTSNKPGFRPVLVNGRPLKSINQFYNKRWAELQSQLRRKGTTGRMECLTNTRSRRIDHYLHTASKRIIDLLVKEEIGTLVIGKNDGWKQEANMGKRTNQNFVQIPHARFIAMLTYKAALVGITVKVTEESYTSQASLLDLDPLPVRNPKSNGDEKYAFSGKRIMRGLYRAKDGRTINADINGSGNIIRKVAPGAFSEVEGVEDGKAVLASLVAHPGRIVVPRRTQKGKSLARAKMLENARDR

SEQ ID NO: 5372 - protein, 273 aa, unknown
  TnpB Polypeptide
VLEVISQPGLEVRSFTLTQNRLIFCIARDAPLLECNSTVGVDRNLRNLTVGNDDQTRHYDLSKCVRIANTTVRVVASFTRDDDRIKTRIASKYGRRRTSRSGHLLHNATKTIVAVAVQRRTAIVLENIENIRSLYRKGNGQARKYRGRMNGWSFYEAQRQLEYKARWIGLPVIRLSRRETRGSSLTCPRCGERLQSDKRLKRKLWCGKCRVVMDRDQVAAVNLARRGRVRFARSRPPIVREAQGRAVEAMKGNPTPTVIPGVDAPKLTQPTKS

SEQ ID NO: 5373 - protein, 352 aa, Mycobacterium sp.
  misc_feature (5)..(5): Xaa can be any naturally occurring amino acid
VDELXVPGHCLQQTLMDLDKACRAHGTFRVRWRSGRRWPPSFRFPEGNKMVVEKLNRRHSRIKLPKLGWVKFRASRSLEGDIIRSVTVTRAGRHWFISVLVDDGRQVPETHQGSVTAVGVDRGVAVAVATSTGALFGRAFTTVGERRRVVALQRTLSRTAGRSANRDKARAALAAVRARERWRRMDFCAQTAHQLAAANAMVVIEDLKTKQMTKSAKGTLDQPGRSVAAKSGLNRAILAKGWHRFALALASAARYTGTTVVKVPAAYTSQRCSACGHVDPKSRESQAVFRCTHCAHTEHADVNAAKNVLAAGLAVTACEDDRRPAGRAGSPKQEPAGNRKELLLQPAAVPAA

SEQ ID NO: 5374 - protein, 433 aa, Halovivax sp.
MYYSYKYRLKPSNAHREELDRHRDICRQLYNHTRYRLNEYQDEHGELPSMTTLRSELPDLKKWWNDLSDVYSKVLQTVVERLFDNLKGLSKLKENGYGVGQLKWKPPREFRSFTYSQSGFKLDKKGGQTVLSLSKLADIPIQLHREIPDDAAFKQVTLKKEPTGEWFATFGVQMDRESPEPPENPEKCVGIDVGILTYAHDTDGTAVGSLDLSDERERLEREQRKLSRKEHGSNNYEKQRRRIAECHADLRRKRRDFLHKLSKYYAREYDLVAVEDLNVKGMMESPSNSRNTASAAWRTFLSLLEYKCEREGTHFVAVNPRGTTKECASCGVETKKPLWVREHSCPACGFEADRDANAAWNILSRGLEDVGVGYSESTPVETALPVDTPVSAKRVVEAGSPIWSRARSARSHGQRDRRSRATLKERTASAVSE

SEQ ID NO: 5375 - protein, 446 aa, Halovivax sp.
MKRANQFNVRPRFTEEREVFKRWLDASASLWNETNYARRQAFLSGSNESVWDAETGALGGKYKAALSSSVAQQIIRKNSESWRSFLSLNEKYHAGKLDEKPSPPGYWGNEDDGRVLRTYVRNDQYTIELGERSRLEVPIGSELKDELGLNRNQRLRVEVSGDPKWSGEQGRLELVYDELADTFRAFQPVTVDDSQLDSPLASHEAALDVGANNLVACTVSTGSQYLYKGRGQFERFRETTHRIAELQSRLEGQRKTSKRIDCLYRKRTSRRNHAQDSLVRDLVERLYDEGVSTLYVGDIKGVLSTHWSARVNEKTHNFWAYRRFINRLECVCEEYGITVEEESEVWTSQECPECGERDDTVRHEDTLTCPCGFEGHADLVASKSFLRRQTTAVGSMARPVYLKWNNHDWREHHSPPSLVETTANEAYTNQSTTVHGGNIALGDSDD

SEQ ID NO: 5376 - protein, 460 aa, Halovivax sp.
MNPTTSDKNNMKYPVWMFHDSPLDIFKYAARHRLRMAKKVVTRTYKASICNHSQVKDDLDALGHAASKLWNVGRWTVSRVWDEIGYIPEAEELTSYLKTHERYDDLHSQSSQRVLQELAEAFHSWYGKRKNGDDRANPPGYRKHGDDHPRSSVTFKAAGFKHDAKNNRIRLSKGDNTKDYWTDFALCEYQTRPDVDLSAVESIQQVRAVWTGDEWELHFVCKQAITVADSPGDKTVGIDLGICTFAALAFEDETCELYPLGCLKEDGYYFGKRIARCNDSSSAQVERLHQKWSNRRTHYFHTLAKHIAERCVEKNVGLIAIGDLNGIRGDEDGEVKDWGPHGNLDLHGWAFDRFTNILTYKAEMQGIDVEPVNERGTSKTCSCCGQEKESNRVERGLYVCDGCELVANADVNGAENIRQVPLSPSDDTSADRSNGWLAQPSTHLFDKSTGGFHPQEQVVS

SEQ ID NO: 5377 - protein, 205 aa, Microchaete sp.
MSKASSLTETRDKYSRVRASLQQKASTRTRSSRRRCRQVLARLSGRERRFQSWVNHNISKTIIQQAKSEQALVAIEDLTGIRERTNLHPRNKTERRRSNSWAFYQLRMFLEYKGFRDGVEVVAVPPAYTSQTCNRCLHIGLRSVKKFKCGNCGLSSDADLNGAKMIELLGLFVSQPGGSNRLCCSLSTDSSGLLKAHTVPQGQCG

SEQ ID NO: 5378 - protein, 426 aa, Microchaete sp.
MLDVLKVRIYPNKEQEISLAKSFGCSRFVWNLYLNKTNTQYEETGSGMTYSQMAKDLTQLKKLADYEWLQEPTAAVLQQSLKNLETAFKNFFAKRTRFPKFKSKHSKQSIRFPESCSIKGGNLKLPKLGLIKASLSKSINGKIKSVTVSKTSTDKYFAAILFETNELFTTKQGKISGIDLGLNSLVTVFDGETCYKVDPIKPTRKYAKRLRIRQKALSRKIKGSNNRRKAVKLVAKVHEKISNTRQDFLHKLSRKLVDDNQVIVAENLCIKGLVRTKLAKSIHDAGFGMLLNFISYKLEREKGKFVQVDRFFPSTKLCSCCGYKNDSLNLSIREWICPGCQTTHDRDENASRNLRAEGIRILSTNTVGHTEIQACGEAVRLVGTCAKKRVSEKQESPANRFAVSGGVSISFICLSANTGNVSKDVM

SEQ ID NO: 5379 - protein, 289 aa, unknown
  TnpB Polypeptide
MECVRRAVAVEVESPPPELYAVEEPYRRIVEEVAVYVAERGRLEKEKYNELYRRFRKQYHLPAQLIQQAINQGVETGRSFLQRKRDSRVHKPRPEVRRVSIRFAKDSWSYKKAVGSAAPVKLALSLPGGRREVWIKPHKRFWLYLWKVLRKEAELASTLMLKRRRNKWYAVFVFDVKPREEPPAEAVAFDVNENSVAVARLSLLSTADAVAWWNRQYVDPAVYSIKTDFGRLAKRYEAVRNAKLEELKRKYPYAGGDDEERVQNVTDTREFRKFVRRLRERRRKEGRIK

SEQ ID NO: 5380 - protein, 363 aa, Proteobacteria sp.
MKLTLQLKLVPTAEQHTALLETMHAFNAAASYAAQVGFEAHVFSQQAIHVRCYQALRERCGLSSQMAVRAIGKVVETFRRDKKTCPVFRSDGAMTYDERLLGWKGPAHVSLLTLQGRQVVAMLYGEYHAGFLPRLKGQVDLVLRDGVFYLYATIDVPEDTPIEPTHFLGVDLGIVEIATDSDGHSYTGAEIEAVRHRAATARQTYQATGTKSAKRRLKKMAGRQSGFQRLANHTISKRLVAYATDTKAALVLEELTHIRRRMTVRKGQRSKQHNWSFRQLRSFISYKAQRAGIPLVCVDPRNTSRTCAQCGHVDKRNRRTQAVFSCLRCGHTANADHNAARNLATRGEVGRPNLVALVKTGWP

SEQ ID NO: 5381 - protein, 363 aa, Paenibacillus sp.
MHRAYKFRLYPNKEQAALINKTIGCSRFVFNHFLAKRKEAYEQEKKTLNYHECSAMLTQLKKEIEWLKEVDSTALQSAVKDLDSSYKKFFKEKKGYPKFKSKKNPKQSYTCKMNIKVEGNCIKLPKLGWVAFAKSREVEGRILSATIRRNPSGKYVVSVLCETEIPPHPQIEQTVGVDLGIKDFAILSTGEKVANPKYYRKYEKQLAKWQRIHSRRQKGGKNRYKARIQVARLHEKIANTRNDFLHKLSTKLINENQVICLEDLQVKNMVRNHKLAKSIADASWSMFRTMLEYKAEWYGRTISIVGKQFPSSQLCSTPNCGYRNKDVKNLNLREWNCPKCGAKHDRDENAAINIEQEGLRLLA

SEQ ID NO: 5382 - protein, 436 aa, unknown
  TnpB Polypeptide
VELRVTAAQRRRLLGLLRAGGDVWAALIEVNQARFRHHAKPIFGYQAWCHEIAGVAVSELSADAMRSVVRRYSSACFEVAKRKRAGERARYPRRKRALVPLRWSTGTFSVEGQRVRVSMADGAPPCWLRLCRPVPYPRTSVRSVTLLVDAGRLVLDVTAGLDVEDHRLDPTRVAGVDLGIIHPIAARSAEQALLVSGRALRAEDRLHLADTKARQRKMDPKKPRPGQRGSRRWRQLRARQRRAEAANQRRVRQAHHEAARTLVDWAIAQRVGTLVVGDPHGITDKDYGAVHNRRLRTWRRTHLVGTIADKAERAGIAVERVDERGTSSTCPRCRHRVPKPSGRNFSCPHCGHAGHRDLVAAHNIAAKRGGTITTSPLAVEHRRVGNPTQRRDRRRHHMDQRRSCPAPGRPAKPDGESLADPCEDQPTVRQNSANVC

SEQ ID NO: 5383 - protein, 231 aa, unknown
  TnpB Polypeptide
VILYSKKVTGKGDRYYVSVLVEIPDVKIANNSNGGIGIDLGLKDLAIVSNGKTYKNINKSTRIKKLEKKLRREQRCLSRKYENLKKGESTQKNIQKQKLKVQRLHHKIDNIRTDYINKSIAEIVKTKPSYITIENLNVSGMMKNSHLSKAVASQKFYEFRTKLKAKCDENGIELRVVDRWYPSSKICHCCGAIKKDLKLSDRIYRCDCGYVEDRDFNAALNLRDALTYEVA

SEQ ID NO: 5384 - protein, 366 aa, Campylobacter sp.
MLLTYKYKLYKTKKTKHIDELINIACSVYNHCIALHKRYYKLYHKSLNKARLQKHLTKLKKLDKYKHWNKLGSQAIQQITERIDNAYKKFFKRLGGLPSFKKRIKYKSFTLKGSVGYKLKDNVISFNGYSFKFSKNQTINADDKIKTITIKRDNLGSFYICVSLKTKDKENITTGKSVGIDFGLKTFLTLSDNMTIKSPLIYLKSLKELKAKQRKLSSKKIGSNNRKKAKLELAKFHIKLANQRKDYFFKLANILAKKYDNVFIEDLNLKAMAKIWGRKINDLAYSEFINILATKTNVVKIDKFYPSSKTCSCCGYVKKDLSLKDRVFDCPKCNTKIDRDYNASLNIFRVGASTLSGEFVRPTKVG

SEQ ID NO: 5385 - protein, 343 aa, unknown
  TnpB Polypeptide
LKLQRTVHAKLVLDRKNKHEAIEREYQAWQRELKNGDEQLYSATKQQAERFKQRVRKQSHHDLKAREYPMILRRDCIKLQQQKESVFHWWIRIPAYPKSVWVPIQLPYEQEPLLKHELRESKLIRDGEKWFVNITVQKEARLRRRYATVLPVDMGVRKLATTIEGGKPRFYGKDVRRTRGNYFRLRRSAGKARIIKRWRHNERETVKHQVHAVTRHIVEQAKRDNALIVIGDLEGIRGQDRGRSFNRRLSSQPFYLFKQLLTYKANWEGIRVLTVPEAYTSQMCHRCGVRGQRVAGRFSCPTCGLVCDADVNGAWNIAKRARGMLHETGAVLTPPRTLAECEP

SEQ ID NO: 5386 - protein, 380 aa, unknown
  TnpB Polypeptide
MEICRLSKRLYNYSLYCWRQSYFGYIQPFSEYELTGLFAEFKHFDYCNLPAQTSQQIIKLMFKNVKSFFELKAEYKKNPDKFTGEPKPPTFKKETFITIFTNQQIRLMDGYILFPKSTGLEPIKTKVDNVCQVFIVPKSNHCVIDIIYDFEEPKQKEYDGKWMGADFGLNNVAACSTQEGSFLMNGKPLKSMNHYFNKRIQYLQSLLKPKQYSSKRIRAITEKRNRKVDDFLHKVSRIIVNKAIKEGVTKIILGNNKNWKHEINLGKKTNRQFVSIPHSDLIQKITYKAQMEGIEVIVTQEAYTSKCSALDLEEICKHETYLGKRKKRGLFVTSEGKLLNADVNGSINIARLGLSASGNSITKEELVLSAALAPKKINIL

SEQ ID NO: 5387 - protein, 217 aa, Moorea sp.
MVILASTPTLCSHLDQIKSKHDKVKGRKFKRLRYKLRKAMERQRTRIKNLRSEIHKQVASYLARNYDIIVLPTFETSQMVAKKRRKLRSKTARAMMSWAFYQFSQTLGHLCNRYGSKLVRITEEYTSKTCTKCGHIHRKLGGSKNFKCPKCGYEIHRDFNGAVGIFLKAMWDTTFTDHVGDVVLDVLNVEDVAVKSIRYDSEQKQVIHQALSEILDE

SEQ ID NO: 5388 - protein, 393 aa, Planktothrix sp.
MLVLEYKVKGKPDQYKAINEAIRTTQFVRNKAIRYWMDALRESKIDKFALNRYSTVLRNQFPFVANLNSTAVQSAAERGWSAISRFYDNCQKKISGKKGYPQFQKDCRSVEYKQSGWKLHPTKRQITFTDKNGIGNLKLLGKWDIQTYDIKDIKRVRLIRRADGYYAQFCLNITVTDVQPKTGKEIGLDVGIESFYTDSNGYQEPNPKFLRKAEKSIKQSQKQIYKKVKGSSGRRKAIKVYAKKHLKVTRQRNEHAKSRARNVCTSNDVVVYEDLSVRNLVKNHCLAKSISDASWYLFRKWIEYFAAKFDKLAIPVAPHYTSHKCSNCGAIVKKSLSTRTHICNCGCELHRDTNAAINILNLGKQARRGHLQSNANGLETSTLLDESLDAARI

SEQ ID NO: 5389 - protein, 395 aa, Methanofollis sp.
MIVSYKYRAYPDATTEIRLNAALDTCRWLYNKLLEECNTAWDGGISPTMRGTQARIVTLKDENPFLKSVYSKVLQMVNYTLWSNIAALSQTKKRGRKIGKLRFKSAFRYRTINYNQSGFKIDREHSTITFSKIGALSFNMHRPYTGKVKGVLITHSSDRWYVIIQAEQEASESKREGRSVGIDVGLNSFTVDSDGAAVENPRFYEHSQGKIKKIQQSIARKKRFSQNWKKAKSRLEKVYDHVTNQKKDFLHKLSRQYVDTYATICVEDLNIKGLKEKGNSTGLHTSIHDASWGRFYSYLAYKAESAGTKLVKVDPRNTSQICSNCGSIVKKSISERVHECPYCGFVADRDYNAAVNIHRVGMEQPFEPVEMIPLHHIAVMQVLSMKQEATPNRAW

SEQ ID NO: 5390 - protein, 436 aa, unknown
  TnpB Polypeptide
MLFTQKIQLNLTKEQEKLLDSQSKICNWLYNKFLEKEITAYEMKGKYLGYFNHNHQFSAFKNEHPFLKVVHSQVLKETLRRLHKAYQKFFDDNKQGRKTGIPKFRSWKRKWMSLVYPEGAGIKLSRESGRIQITFGKDAQGKQLRIIVKLNEPLKRTATKGHNSFGQVVITKDPNGNYYACFTLEKQDPEEHKSTEKVIAIDPNHKNSFVGFDGEKAIELASCYVQKNLDVTIDYIKSRRDKCNKKSKAVFNPDGSLKYWKPSRRWKQFNRVLNKLYAKRREQMKLFAYTVAHWLERHYDKVLYGDYTPWASGLKNTHRSMLSQGYVGYLRSIVKWVFEKGGKVAEEVTERKSTKTCHCCGNEISMPPEKRFFVCSNLVCNASLPRDVNSAINLYNWHHFSSKKRPRKVIKKPNAEINLHLKWIPFFGLEEIYSVS

SEQ ID NO: 5391 - protein, 396 aa, unknown
  TnpB Polypeptide
VERSVVKVVSLWYNVIEEVRKMITSLKVRLEPNNEQLSLLVKSSGTARWIYNWTLDRQEKNYANGGSFLSDNDLRKEITQLKKLEEFSWLGSMSNNIPKQAVKDACEAYKKFFKKLSKKPKFKSRKKSRPSFYQDTAKIKFTDTHVRLEKIGWVRLSEQGRIPTDTKYTNPRVTYDGVRWYISVGIEIAVKSVKLTGVSVGIDLGIKNLAICSNRTEPYANINKTKEIKRLEKKLRRLQRIVSNKYEMNKKGVRYVKTCNIIKLEKLIRILYRKLDNIRTDYKQKITTEIVRTKPSRIVMESLNVRGMMKNKHLSKAIAQQGWGELKSMIQYKCDRDGIEFVEADKWYPSSKTCSACGYIKPKLSLSERTFVCESCGSILDRDQNASINLSRYQAS

SEQ ID NO: 5392 - protein, 420 aa, unknown
  TnpB Polypeptide
MILAHVIALDATAAQEQHFRKACGVARLAYNWALAEWKRKYEAGERPSAYKLKIKWNEIRRSQFPFTLEVTKCAGSQAILNLGVAFGNFFRDLKKPKGVRKVRYPCVKKKGVHDSFSLWNDQFAIDGTRIRIPNLGWVRLTEPLRIAGKIMGAVVKRECDRWFVSVQVEVPDPELPHTAPGSVVGIDLGISTHLSLSQPLPDGRTKIENPQPRRAYARRQRKLQRRISRQELVRRRANAKRSKRQARRQAQLRQLHYRIGCIRKDAIHKATTVVASAFETIVIEDLNVSGMSKNHALAGSVLDAAFGEIGRQLAYKTKIAGGRVVIADRFFPSSKTCSDCGHVVDALPLHVREWMCPVCGRVHDRDTNAAINLELVGRATPEPAQMPTCGDMEALAVEQSATKLPWMNRKLDRRTHVRTN

SEQ ID NO: 5393 - protein, 558 aa, Caldilineaceae sp.
MPTRTAAPKSKATEVRSERYRIRFDRRAQAALCAQIAGACRLVWNLLLADCERRYRLHKEYGKGTALEGAVPVDKSVSFFTLGKRFTDLRSRPDAAWVRAFLGSPWGRRYRAMELSWLGDLPYAPLRYTAKYLADAYTRFFEAWAAAKFQGQSLGVRKSDGKPKGFPKYKAKFDRDDGFTIPDGVRMDGDRLHIPKVGWVRLEGSGLYRGCKAKQVRIRKEGTEEHPKWYAYVFHEVPADRLKQPAWTGAVGVDRNVGQATDSEGEVYEVPDDPKLDANIKRKQRSAAKARARSKANGQPMSNRGRRICGQLKKRQRKKKRRRENANHQASRKLADTAHTVVLEDLNTKAMTRSAKGTVEEPGKNVKPKAGLNRGILNTGWGQLERNLDYKAGRIVNVDAAYTSQTCSSCGHVSKENRKTQAHFRCTACGHTANADCNAALNILARGLALCPTARGNGASARREAAHIAGPGRAGQLRSRHPRRSALECRSRNGSPGTTDDATAHGRSNGDRHRSPGNGSPTGGQGGISGARGLGGSGPPQRTAARCSRLRRTLGPRM

SEQ ID NO: 5394 - protein, 378 aa, Anaerolineae sp.
MKDSTVVLRTYKYRLYPSKSQETNLFRVLHACHGLYNMALAERKYAWQLERVHVPTKKLNDLGKHYRKTFPYAQQMHSQTTQSVIEQVDEAYEGFFRRVKNGEKPGYPRFKPRQQFHSFEFKQYGSGCKIDGRRLKIYGVGRVRVRWHREVLGKIKLVRIKHQAGEWYACFVCEVPRKHTVTSDWEIGIDVGISALLTTSEGEKVENPNYYRNGQAKLRRLSRKLARAKRGSKNRQKALQAVQSQHQHIANQRHDFIHKLTHTITDIYGWVAIEDLAIRNMVRNHHLSKSILDSGWGLFKEQLQYKAAEAGLQLKLVNPRKTTLKCSNCPREFTNLTLKDRWVECPCGLSLDRDHNAAINILKQAGWATSVVANVECG

SEQ ID NO: 5395 - protein, 398 aa, Actinocrispum sp.
MIIVKQVVKVRLLPTAEQASALHATLRTCNEAASWLSARMHSGQVWRKHDAQKHWYGELRDRFGLSAQPAIRVIGKVADAYTTLRANLRAGNYGQPGSVRRRTVEDTPIRFRPDAAQPFDLRCLSWQLPELGRDGTVSIWTVAGRMRNLRLVGNPAHLTLLRHAGVVGESDLVHRGGQWLLHAVVDTPEAALRNDPDGFLGVDLGIVNIATTSDGDRMSGAHLNRYRKRQHRIRRRLQAKKTSSARRLLRKRRRAEARFAADMNHRISKNIVAEAERTGRGIAVEDLTGIRARVRLRKPQRATLHSWSFAQLGQFLRYKARRVGVAFVQVDPAYTSQTCHLCGHVDKKNRRSQASFVCGRCGFVGHADYNAALNIAQRGVVCWGEVMRPDAAPTLAAS

SEQ ID NO: 5396 - protein, 192 aa, unknown
  TnpB Polypeptide
  misc_feature (32)..(32): Xaa can be any naturally occurring amino acid
MIRAHKIRLYPNNAQKTYFAKACGIARFAYNXALAEWQRLYELGEITNEGLLRKKLNAIKREQFPWMMEITKCAPQLAIKNDLNNAFRDFFAKRSGFPRFHKKGVRDSFEISNDQFTMKDAFVQIPKLGPVRLAEALRFEGKIISATVSRTADHWYISIHIETADPAPLHNEISENQAIGVDVGVKTTGRFI

SEQ ID NO: 5397 - protein, 194 aa, unknown
  TnpB Polypeptide
LTSALKPLAVLSSGEVIEGNKPSKKYAKKLRRAQQSLARKKGARKGEEKSANYRKQQRKVSRIHEKIANSRNDGLHKLTTKLTRNFSLIGIEDLNVKGMVKNHNLAKAIHDQSWSEMGRQLTYKAATSGSYVHYADRYFPSSQLCSNCGYQNPETKNLSVREWVCSVCGATHERDRNAAENLKKDAIRAVLGVK

SEQ ID NO: 5398 - protein, 401 aa, Nostoc sp.
MRLAYQYRLRPTSQQIASFQKWLELCRCQYNYRIAERFNWWENNRCDVDRCSIISCGIAPLKDKPNYYSQKRDLTNTKALLSQYKDIPSHTLQDVIARVEKTFDRWLKGDSNGKRSGRPRFKGKGRYHSLAFPDPIKPEHLTGKFIQLPKIGKLKMILHRPIPDGFKIKTATITHKADSWYISLSLEDVTVPILKTDAIPTLDNTVGIDMGLKSFLVTSDNQEVEIPQHYRKAEKRLKRLQRQLSRKKKGSKRRAKAIKRVAKTHLKVANQRKDFHYKAALWLINQSQVIAHENLNIKGLAKSMLAKSITDAGWGQFLQILNTKAASAGCLVVAVNPNGTSQECSDCGATVSKTLADRWHGCQCGASYDRDHNAARNIKHRAAGHPVLQSSVNVRRVAGSH

SEQ ID NO: 5399 - protein, 419 aa, Streptomyces sp.
MQLRYSFRVYPTPGQRAALARAFGCARAVYNDALCVREDARRAGLPFVTSRELSKRLTAAKKTPERAWLAGVSSVVLQQSLRDLDTAYRNFFDGLKGKRPRVGAPRFKSRKDNRQAIRFTANANWRITPGGKLRLPKIGDVMVKWSRRLPSAPSTVTVIKDAAGRYFASFVVEADESPLPETGSQVGIDLGLSHFAILSDGTKIDSPRFLRRAEKKLKKAQRDLSRKQKCSSNRDKARLKVARAHAKAADARREFHHQLSTKLIRENQAVAVEDLAVNGLARTRLAKSVHDAGWSQFVAMLEYKAARYGRTLHRIGRFEPTSQVCSVCGVKDGPKPLHVRSWACGACGAVLDRDINAAVNVAKAAGLAVSACGAQVRPGPVPAQREEAGTRPELPAPAPHPVWEQRGIPVLQGREEVKA

SEQ ID NO: 5400 - protein, 555 aa, unknown
  TnpB Polypeptide
MIINPTKNKKDAAFCQYFKTNTADSKCMYNTANFYIRNTMTGLKKSPEESTHLETEVLHYVFTGIQKANEVIGQKNMKKKFAELNLSKVGGMNSAVIAFSIVSQEPFQYPTEEKWFLSYGTLDAIFKFTDNPVYRRMNSQVNQNAIRKAVAAWQGYFESLKAYKKNPAGFTGKPKIPGYKQDEEYIAWFSKQVAKLKEEDGRCYIQFVNNPDRFEIGKASLYSDLKYVKTEVKAMYGKYYILITFDDKIAEVEAPENPKRILGLDPGVNNFLGVANNFGGVPFVMNGRAVKSANQRFNKKRAKLISSVTKGSDSKSSVKYSKHLNILSQKRESFLRDYFYKCAWYICRYAKAAGVDPATGAQLYWVYDTDDEGNMINERVSSDYEKAAKSKYYLGSRIPDLYGSIGTDLSWKGVDLSILTTYSIGGKVYDGLYSASMNNMYYNNAWNEHALRRWQKPGDITDVPRIEIAGKSTTNDRFLVDASYFAIKNITLGYTLPKAWMQKVKLSSVRVFGSVDNLALFTHLQGMNPQYNFSGETSYSYSPNKTWSLGVEINF

SEQ ID NO: 5401 - protein, 540 aa, unknown
  TnpB Polypeptide
MLCCVYGRCVQTQTARGLCAQLPLCVDTTTTTTRACGRGGDAVGCPHQRKSRGVGDGRGGVGDPARSPTSVRVGVARLGAQSDRPSAQGLHGPHASAGVPRTREDAEHVDRCVFRIDSRARVCRDHPAVHRRTKHEGLAMSVRRVYRFRLEPNPAQEEGFRRYAGARRFVWTWSLRQKQEHYQATGKGLPDKELSARLTALKGEPATAWLKEVDSQLVQQALADLKRAFSTFFERRARYPRVKSRTRNVARFRIPQRVTLTEGYLTVPKIGRVKVRQSRAVEGATKSATFKRDACGHWFVSLVVECEMPVVALPAPAPAPAPERTVGVDLGLKDAVVTSDGARVAAPRFYRAAQRTLRRAQRAFSRTQKGSANKQKARVRVARVHQTIANKRNDFCHKLTTTLIATHDAVCIEDLNVKGLAKTKRGLSKSVLAASIGTIRRQLAYKGVWYRRHVVVVGRFYPSSQIHNACGWRNRALTLSDRVWVCQSCGEVVDRDLNAAMNIKDEGLSILTLAAGHAETENACGQGVRPPMGAALAIPA

SEQ ID NO: 5402 - protein, 388 aa, Virgibacillus sp.
MLLNYKYEIYPSESQKETLEYWLAICRQQYNSALLDKLNYYRKYKKGLSHMLLQKQLTQDKKKLTFLKTLPSQPLQEVFFRLEKAYNKFFKGDANYPKLKKHKDYTSITFTQFGTGTRKVKNKKTGMTKIQPVRYAASFDSDGNLFISKLGSIKIILHRKPEGNIKQAIIKRKGNRWFAIFSVERPANPPEILADLIKTTGIDVGIKKFAVLSDGTEIDNPTYLRIKEKSLKRQQKKLSRMKRSSNNWKKQVEKVQKIHAKVANQRRDFQHKQSYWISNKYSVVIVEDLTIRNMVKNRHLAKSIHDAGWGSFKHMLMYKCERNGGFFVKVKPHYTSQNCSACGRTVKKSLSIRTHLCKHCGTILDRDHNAAMNIEKAGLQQIKWKPIA

SEQ ID NO: 5403 - protein, 392 aa, unknown
  TnpB Polypeptide
MSNLTKTIKLRIHVTPEQETLFRQMTEQYRQACNFVSQYIFDHRFNMTYQSLNRELYSDLRSQFGLKSQLAQSSIKTTIARYKTVKQQLFQNPYRYKDENGNWQRIAKTWEWLWKPVFFSRPQADLVRNRDYSFVDSGQVLSINTLGKRTKCTFEGKHFAEYLDGSYDLGTAKLVELKGLWYLHIPVTKIVEDFQKETVRHVVGIDRGLRFLTVSYDEQGKTEFVSGRKVATQRHKFQEVRKQLQSKGTKSAKRKLKAISGRENRWMSDVNHQISKTLIEKYGKDTLFVLEDLTSVSFEESNLSRTAKQNNDLRSWAFYQLEQFLTYKAHENRSEVLKVSARHTSHLDAFPAIFSGFQWLNQKVESHDVCSSLPSPYAVLSCQSLYTPIAES

SEQ ID NO: 5404 - protein, 425 aa, unknown
  TnpB Polypeptide
VDKNASLVAKRDKIKQSLKATKAKRKLQSCFVRELKINTSHLSKENYNNLNLLFIEAKWLRNAMLSSNNIAKFNLSKSLIEVSGFDKHRNPEMKPIRMLSSQMKQAIQTQLKNDIKSLSTKKKKGFNVGALRYVSEVNSIDLKQYNRTWSFKDDFKKISIQGIKTSLKVHGIKQFKFNELNYDFANAKLIKKATGFYLKITYYLYKNELSAHNQELKSNVGLDFGIKNNITTSDGESFNILIKESESLKKAQRAFSKTQKGSNNRYKIRLHMKKLHEKITNQRTDKANKIVSYLQRNYNTIFLQDENIAGWHKGAYGTTIQHSALGTIKSKLMNLEQSMIINRAAKSTKQCFCGNEINLGLNERTFHCPFCGYKEDRDIKAAKLILLWGETKQNIINKKAISFFNLNYEKSLLRIAETIKTELNQ

SEQ ID NO: 5405 - protein, 264 aa, unknown
  TnpB Polypeptide
LIRKFKEICIIPKANARFFEIQYIYEAECIQRNLNINNALAIDLGINNLVTAVSSNGKTFIIDGKRLKSINQWYNKQNARLQSVKDKQNIGKRPTNKQKANTRSRNNKINDYMNKTARAIIDYCINNDIGTLVVGYNETFQKNSSIGKANNQTFVNIPYGQLRFKVEYLCEINGIVFVKQEESYTSKASFWDKDDIPIYNNDNPQSYTFSGKRIHRGMYQCLNGKCLNADVNGALNILRKSNVVSLVGLYSRGEVDTPVRIRIA

SEQ ID NO: 5406 - protein, 385 aa, unknown
  TnpB Polypeptide
MKQQRAYQYRCYPTPSQRQMLAQTFGCVRFVYNWGLRLRTDAYRERGEHVFYRDTSAALTTLKQQPELAWLNEVSSVPPQQALRHLEKAFRNFFAGRTAYPKFKKKRDRQSAEYTTSAFKWDGSSLLLAKMTEPLPIRWSRPFPKDARPTTITVSRDAAGRYSVSFLVTEDIRPLPVSSKTVGIDLGLQDVVTLSTGEKTGTEHFFTKEEKRLATLQRRHAKKQKHSKNREKARLKAAKLHARIADRRRDFLHKLTTRLIRENQVICVESLQVKNMLQNHALAKAIADVGWGELIRQLEYKATWYGRTLVAIDRFFPSSKRCHGCGYLLDNLDLDVRQWACPNCDLVHDRDINAALNVKAAGLAVLACGGAVRPNLNGTREGTLR

SEQ ID NO: 5407 - protein, 226 aa, unknown
  TnpB Polypeptide
LNNLFAVVFNHTDVAILIKGSTIKSEYYYWKREVKTYQSVRDWLKNHGFESWHKYYTYYLHAVYKKRERLRHYYRTAIRFIAKTLHGMGVDEVFIGYPYLVSQDNSNEYNTNVWWYAKVINWLGEVLQEYGIKLNVVNEYGTSKQCSICNMEHENGRVKRGLYVCELTGIKINADINAARNIAKRVGYNTPIPRKILSYIITTNGVKPLTPIEGVTVETPKVKPRP

SEQ ID NO: 5408 - protein, 301 aa, Lyngbya sp.
AFTNMWERNAGFPRFKKKGRMRSFVFPQMKGKRLEHGLVKLPVIGWVKFRQSREIPNDAQIKQARIVKRVSGWYVMLTIQWNVDLPQPIPHGEAVGIDVGLTSFIATSSGLLIKRPRFLGDAERKLKLLQKRVSRKPIGSKNWRRAQKKVAKLHEYVANCRKDWHRKLCHHLCDHAGMIFVEDLNLVGLSRGILGKHCLDAGFGQFFKILAQTCFKRGVYFQKVDARKTSQICPNCLTETGKKELSQRTHICSACGYTTNRDIAAAQVVAIRGLTAVGHTVKMLAEGKFVGIPLKQESSRL

SEQ ID NO: 5409 - protein, 630 aa, unknown
  TnpB Polypeptide
VAYGVAAVLRRALSLKYFDQYPEVKGLLGLSVGAVKAFIILVTLAIAFSILKLGPATLYMQEIANYLPSLASAIILLTLGVALINMLVDYIQRQVGGASNPFLASVFNILKFGLYAVIITIAVQLSIFYWIHFINPYLFYDIIIASVIKQTANPAPGRGGTKIKKLSLLFSFKMSPSGQLLGHEEREPTSPAIPEEGIYEVNYTNRRTNVVRLLPNGFQERKLRKLADTSAKLFNEANYERRQQFFHGGKVDFKSTWGKYCDKYKGVLGVNAQAVLQKNNEAWSSFFSLLRLKKQGKLPPRVSHVSPPRYWKDRETKGRKLILVIRQDRYEVDEQSRRLTLKDFGLEVEFAGRLRWHGRQGRLEIYYDDAESAWYASIPVEVGVEETKTGKKSKYIIRGERRSIQIASPKGNKVASVDLGINVLASVVVDDGTWLLYKGVRAKEDYFYLQRRIAEAQSLADKARNIGEDEAQEELNREKRRLFKKLTRRLLHLYRNLASNLLKRLHDQGVSTIYLGYPLNIAQEKGNKFTANLWSYRKLINAIELKAQEYGMKVYEVVEYNTSRYCAYHDVEVKRYPRGVVSCPKGHKLHSDLNGALNILKRATGTVVSTVRKLLSFLVLHNGVAPVKGV

SEQ ID NO: 5410 - protein, 449 aa, unknown
  TnpB Polypeptide
MPRRRSPQSPRVVHRTARAGLRVTPAQRRRLLGLLVSAGDVWACVLELNAWRRARQDRPLASYQELCRALAAAGPGTFGELDTEGARSVLRRYSDAWFATAQRRKGGDHRARFPRRRRALVPIRWYHGTFALERRRLRLPAARGRPPLWVRLDRDLPYPPAQVRSVTLIYDAGRLWVDVTAEVPVACYPAGQEPDPARVAGVDLGIIHPYAVAGPDGQGLLVSGRAIRAEHRMHLADGKARRRAVAHRAPKPGQKGSRRWRHHRRRQRLAEDRHRRRVRQAQHEAAKTVITWAVARRVGTLAVGDPRGVLKLDAGRKHNQRTRDWRIGHLIAALKDKAEAAGISLTLVDERGTSSTCPACRSRIPKPAGRVLSCPSCLFTGHRDLAAAANIAARNGGGTTSASLVADVTHRRAGAHLPGVSPSRRDPRRRAHHRGARGSPGRHRPAPPT

SEQ ID NO: 5411 - protein, 277 aa, Crocosphaera sp.
MEITEKKVKQEAIPYNCVSQTFTISREAGKWYVSFAVSASYIPEMKHSHQKVGIDLGIKTFATLSDGNTIEAPSSIKRAKTKLGKIQWRNRNKVLGNRRAGISASKNAVKYYQKLRKKHKRITNIREDFLQKTTTLLAKTYQHILVEDLNIKGMMANHKLSDALSNLGLYRFRELLSYKQECFGFLLSIVDRWFPSSKTCSVSGNIQDMPLCERVYHCQNCGQVMDRDLNASINLENWTKNADGLWVNPLAQSKGERLWTRRSRLPWLKQELNIKPV

SEQ ID NO: 5412 - protein, 376 aa, unknown
  TnpB Polypeptide
MRKSFKYRIYPTKSQRSRMERTLDLCRWVYNQTLAYWKDAWEIEGRSTSKYETHNFLPGWKVEKPELIEVHSQVLQNVQERAELAFKAFFRRVRSGEKPGYPRFKGKGWYDSFTFPQSGFKLVSGKLRLSKIGDVMIKLHRPIEGKIKRLTIRRTSTGKWFACFSVEIDDPPKPPWKDGSMVGIDVGLESFATLSNGEKIDNPRFFRSEEKALAKAHRRLSKCEKGTPERRKTLKVIQRIHERIANRRYYFAHQISNQLVSKYGLIAFEDLSIKNMLKNHNLAKSISDAAWRMLVTTTSYKAESAGSIVVLVDPRNTSQLCSRCGLKVPKSLSDRVHECPQCGLVMDRDENAAINILRLGLQSLPKARSPALQGEE

SEQ ID NO: 5413 - protein, 382 aa, unknown
  TnpB Polypeptide
MKKRKQKRTRRVYKYQLREHPKNKRLGNMLDDLGDVHNHFLRLEKRYYRIYGKYAGRFRLQPHLTKLLQRTKQHWTWIPRDTLDEVIVRIHITYDRFFDGLGGLPKFKRKDRYRSAKFQSAYLLEEGRVRLSFKAWNDASQSFKFHKRWFSFHQHREWKGTVRYIQILRDAVGTFWLYVVTDDASTEPYSATGESVGIDFGMETYLTLSNGEKIQHPQPLKQSLAELRKLNKSLSRKVKGSHNWWRAVRELARLYRKIANQRKDWHYKRATDLCKRFDTIVTETLNLDGMKRLWGRKVSDLAFYQFVEILKFKCFKHKRAFLQIGRWTPTTKPCSECGHPNENLTLKDRQWTCPACGSHHDRDINAAINILRAALGPSVEQM

SEQ ID NO: 5414 - protein, 330 aa, unknown
  TnpB Polypeptide
MLLSKKTSIKVSREYANLIGHMCYAASKLWNVCNYERQHYKETGMAQYPDWYYQKKAHKEDLWYKQLPSQTAQEVCRLLDKAWKSFYALKRSGGIETPRPPRFKQESIPITYMQMGIVHERDTDRVRLSLPKTLKKYMEETYQIHENFLYLENKIFRGMDQIKQLRIYPPEKGSCKIIVVYEVPDQEELPQNGHELSIDLGLHNLMTCYDSENGKTFILGRKYLALERYFHKEIARVQAQWYGQQSGKGVKHPVTSKHIRKLYKRKQDSVFSRNPVPAGERGKQMWFWQPASHWQVLAGRKKGSGNICFGKSSLCVSGTRMRAMRSGFRM

SEQ ID NO: 5415 - protein, 385 aa, unknown
  TnpB Polypeptide
MSKDIKGYVYRIKPTISQIELVNKTFGCVRKMWNTLLFERETIYEMFGKYPELHNAHVYANPKYIKGIYPYMYEVDSQALTTAWLHLKNAYQNFFNQSHDHPLYKSRNNPIQSYTTHIVNDNIRIERSYLKLPKLGLVKIKLHRPLPKDALIKAVTVKKEAGKYYVSLRVTYEHEKKQTEVFQRAIGLDYTLHGLYVDSEGNRANYPNYYKQSLIKLAHEQKILSRRQKKSSNYESQKLKIQKLHQHIKNQRQDFLHKASRYLVNTYDVISIETLDLKEMAKTKHFRKSISDTSYNTFARYLEYKTKGEGKTLVKIDKYYASTKTCSRCGKLHDMPLAQRVYTCACGNQMDRDLNAAINIGVQGLIEHYQKAYGTDAIAWSSSGH

SEQ ID NO: 5416 - protein, 380 aa, unknown
  TnpB Polypeptide
MRKTFKYRLYPTAKQKKSLQLFLDACRWAYNKTLKVRKQAWEERKESISRYDTSNLLTRWKKENPELDNAYSQCLQNVTMRVDLAFRSFFRRVKIGEKPGYPRFKSFDRYDSFTFPQSGFAFVDDRLKLSKIGSVKIVKHRGIEGTIKTLTIRRTADKWYACFSVEYNNNPLPKSDNAIGIDVGLENFATFSNQSKIENPRFFKTGQKALAKAQRKLSKQTKGTPERKKAKKVVARIYERISNKRHNFIHQESRKIINKYGTICIEKLNIKGMMSNQTKFFGNKLNKSIADVAWSQFANVLSQKAEEAARQFVAIDPKGTSQRCSQCGSIVKKELSDRWHDCPICGCHLHRDYNASLNILSLGLQTLGLAPRSSRIYSEE

SEQ ID NO: 5417 - protein, 173 aa, Methanosarcina sp.
VDLALYNGSGIKLENLKGIRKLNSKSNGAGKGKPDQNKDKKLTCSNEYSLNNWSFLQLQQFIEYKARLRGVEVVYIDPYATSKKCSRCGHTGNRQSKRFECPCCGHVDHADVNAAFNIALTPKDTGQFSAERDAGKGRTDTPQKVLARNAFSKRAAREKASPQFAWEVCQFLT

SEQ ID NO: 5418 - protein, 406 aa, unknown
  TnpB Polypeptide
MAHRYRIYPNQDEAESFARHCNDTRFIWNLALEQFNFYDRRVAGRKAPSVGERQRQLADLRKVSWLGEGASAVQQPVLRDFKQACENWWRGTHRRPTWRKAGRSEGFCIRDVTVKVINGKWATVHVPKCGHVRFRLSRRLPEQYGMGRVTCDAAGRWHVAFSAPQPKLLHVTSGRAVGIDLGIASTITTSDAAHYDAPTPEDGEKARLLRLERQFARQTKGSNRRGRTRGQIAKLKVRQADRLKDWREKITTELVVNNDLIVVEDLRVKNMLRSAKGTAEAPGKNVKAKSGLNREIAARGWSVFTLRLEQKAAASGVEFIKVSAKNTSRKCRKCGHTDKDNRKSQAVFRCIKCGHQTNADINAAKNILAAGQAVSGRGGTVRPVAALAAAGKPVETSTTGSVLCAA

SEQ ID NO: 5419 - protein, 352 aa, unknown
  TnpB Polypeptide
VKTLKLRIKDKHAGVLSLMSREVNFVWNYCNETSSKAIRDRRKFLSGFDLQKLTAGYSKCEGVRVGSATVQLVCEEYALRRKQFKKSRLNWRVSNPKSARRSLGWVPFKVGGVKYKAGQVSFLGHRFSLWDSHGLSKFELKAGSFAQDARGRWYLNVCVKVQPQRSEGTEVIGIDLGLKTAAVCSDGTELASGTYRQHEAALAKAQRAHKKNSVRAIHAKIANTRKDAMHKFSTDLVARSGAIFVGNVQASAMVKTKMAKSTLDAGWSMMKTMLEYKSHGAGVVFQEVNEAWTTQTCSSCGIIPASSPKGRAGLRMRRWACCGCGAEHDRDVNAARNIARVGRHALGEGAPA

SEQ ID NO: 5420 - protein, 372 aa, Acidobacteria sp.
VRKTFKYRLFTTRLQSEALDGQLSEACRLYNAALQERREAYRSNKKSLNYYDQANQLKEIRAAGDLALANFSCCQDILRRVDKTYKAFFLRMKRHQKAGFPRFKSRHRFDSVTFPSYGDGVKLTGNILRVQGVGEVEVKLHRPVAGKIKTVTVKRECAKWYACFSVECEAQPLPILNNAIGIDVGLDSFATLSNGETIPNPRWYRKAQAKLRRAQRRVARRKKGSRRRKAITLLQKIHARIFRLRNEYQHRQSFRLVRDFGMIVVEDLNVKGLAAGMLSKSVQDAGWSSFIAKISYKAENAGRQLIAVNPAGTSQTCICGATVRKSLSDREHVCVECGLIAPRDVVSAQVILQRARISPSSDNVAAVSACVA

SEQ ID NO: 5421 - protein, 403 aa, Chromatiaceae sp.
MPTIQRSYKLRIYPTAVQAQRLACDFGCARWVWNTCLAWRSNLYRAEGESVTGVDFSRELTFLKRLPGYEWLADAPATILTQKLRDQDQAFANFFAGRAKFPRLKKKGHAQSIRYQLDQRIVAGLYRPGELLKVPKLGALKVRWSRVPAGIPKLVTISRDAAGRYFAAFMVEEEVQPLPEKPNGVGVDLGVKDLAITSDGARFGNARPLQRLLRRLKHAQRVLSRRRKGSGNWHRQRQRSARLHVRIADLRRELTHQASHAIVTGAGLIAIEDLHVKGMCASAKGTLEQPGRRVRQKAGLNRAILDAALGEVRRQIAYKAEWNGRVLVVVDRWAPSSKTCSHCGHVLGALPLSVRAWSCPNCGTAHDRDVNAARNLLAWATGGGAGTRNDACGAVTIPEALTA

SEQ ID NO: 5422 - protein, 459 aa, Streptomyces sp.
  misc_feature (459)..(459): Xaa can be any naturally occurring amino acid
MAVRDRLKRLTARDEEVLRAVGEYQGGLASRDLKARCRGGHGHCADSWAGRKRELTAVSSSRIAGTITKATHDQWALARRCQAAHLQSLEAGIGTLRRRLSLPLGEKGTKGAAGGYRSRGEWFRKSRRLAVLEARHAGVAEDWRAGRVRVVRGGRRLLNTRHHLEAAQLTEAEWRRRWEAERWFLAADGESGKRFGNETIRLSPDGEVSVKLPAPLAHLANARHGRYILACAVEFRHRAGEWRDRVESNRAVAYRIHLDVARGRWYLTASWQRPVVKTLPLATARAQGMVGVDTNADHFAAYRLDPHGNPIGDPHRFFYDLSGTTGHRDAQIRHALTRLLHWTRRCGVTAIGIEDLDFATEKTREKHGRHKRFRQLISGMPTGKLKARIISMAAELGLAIVAVDPAYTSMWGDEHWRKPLTSTKRQMTRHDAASVAIGRRALGHPIRRRTAPPHDDRSX

SEQ ID NO: 5423 - protein, 579 aa, Streptomyces sp.
MDAGVGCSGGLSVLAGRFLVLAVMMSGGEMQQQQSGKGPLRSVAVPYVALGPSGMAVRDRLKRLTARDEEVLRAVGEYQGGLASRDLKARCRGGHGHCADSWAGRKRELTAVSSSRIAGTITKATHDQWALARRCQAAHLQSLEAGIGTLRRRLSLPLGEKGTKGAAGGYRSRGEWFRKSRRLAVLEARHAGVAEDWRAGRVRVVRGGRRLLNTRHHLEAAQLTEAEWRRRWEAERWFLAADGESGKRFGNETIRLSPDGEVSVKLPAPLAHLANARHGRYILACAVEFRHRAGEWRDRVESNRAVAYRIHLDVARGRWYLTASWQRPVVKTLPLATARAQGMVGVDTNADHFAAYRLDPHGNPIGDPHRFFYDLSGTTGHRDAQIRHALTRLLHWTRRCGVTAIGIEDLDFATEKTREKHGRHKRFRQLISGMPTGKLKARIISMAAELGLAIVAVDPAYTSMWGDEHWRKPLTSTKRQMTRHDAASVAIGRRALGHPIRRRTAPPHDDRSDRRGHRTVQATSDGRGREETRPRIPGPRTRCASPDRGTKAGDQCAQHRSEHTAEQQSWQQDSLPLSL

SEQ ID NO: 5424 - protein, 396 aa, Natronorubrum sp.
VVDDYVRRTAITRLSVTDEQRDLLEETITEWKRGCQLATDIAWGKCNAKSDVQPLAYDTVREQTDLGSQHAILATHQAAQAITGCIERRSNGKAARKPTFTAPTVKYDTRTMTLFEDETVSLATTESRVRCDLVLPDADDGHQRQYLDSDEWSVTESTLTARDGDYVLHIGFRRHKTDTERNTAEDGTVLGVDLGIENLAVTSTARFISGRELTHDLREFEKVRAGLQQTGTRSAHRTLEQSSGRELRYVRDVLHRASNAIVDEALRYDCDVIAFEDLTDIRDRTGASWGHKWAFRLLYEQVEYKAESVGITVKQVGSAYTSKRCAECGFTASENRPTRTDFCCQKCGAKANADYNAAKNIGMRYVRRGQQSSRRTGDSQLALKSGTVTSSGFVET

SEQ ID NO: 5425 - protein, 374 aa, unknown
  TnpB Polypeptide
MILNRAIKMRIYPDDEQRHKIDVTLGHCRYIYNKMLERNTVIYKRRKEHLNYYAMQNLLPEMKKYLPWLKEADSQALKYACRQVNNAFERFFHAQGGYPRFHSKRGKQSYTTTNTKNICIEPHKVKLPCLGWIRTPETRIPDGMICYATVIRESDGRYYVSIAYKKEVPDAVAVVPKSENVLGFDYKSDGLYTDSNGRTENMPHFYRDAQEKRTKLQRQLSKKHGYRKGEPKSRNFMKQLQQVNGQATHIANQRRDYLHKLSTEIANRYDAVCVEDLDMRAQSNKGFGNGKATMDNGYGMFLNMLAYKLAERGKQLIKINRWYPSSQICHCCGHRQPMPLKIRTYQCLECGMVFDRDWNAAINIKTKGIVLLLT

SEQ ID NO: 5426 - protein, 337 aa, unknown
  TnpB Polypeptide
MNVLRAFKTELDLNNAQRTACARHAGAARFAFNWGLARKQQAYLDGQKTPSAIDLHRELNRLKKTELAWMYEVSKCAPQEALRNLDQAFANLFRRVKARRAGQKIKVGFPKFKSKKKGLGSFRLTGAIHVLEKEIQLPRLGRLRLKERGYLPTSGVHILNATVSERAGRWFVSVQVELEIADPKPSGKPMAGVDLGINRMAQVSDGTPFENPRALQQSLTKIKRLHRIVSRRVKGGANRKKAVRQLAKAYARAANIRQNALHQATTWLAKTKSAIMLENLNVSGMMRNHHLAQAIADVGMHEFRRQLAYKGTWYGCQGDDSRPLLPLQQALFTVRQR

SEQ ID NO: 5427 - protein, 337 aa, unknown; identical to SEQ ID NO: 5426
  TnpB Polypeptide

SEQ ID NO: 5428 - protein, 323 aa, unknown
  TnpB Polypeptide
VELHIDTYKLERKHGFLTLTISRESGVYLRFLVMGYEYARRELENAKLGNSKLLVDNSGVFLLLTVCRDVEVVEHRNKLIVDINEDSVDCLLVDYDENKAVLFSIRHDIRKIRTNYRRIRKSIQLKVENPVVRVKLLAKYGSRERKRVEDRLRKIATLLAEIARGHSADLVREDLRDLKLKSKKKSKQLNYRLSTFPYRRFIGYVDHKFYERGLDVVEADAKKTSISCPVCGYSDRRNRAGKETFKCRRCGFTFNAQHVACLNLFSRPNDGVVATRGGALLLVSRKTAQVVAVDVAPDEPLMEMRWLREKPAQVSKVTLVTKR

SEQ ID NO: 5429 - protein, 470 aa, Asanoa sp.
MKVTRIAYSARLNSGKYAALHEQARRLGRVRSEVWQRFGSLHGAGVRDRHVRDRWMADGTAAGFGVTANAWKETLRDAIADIAASRESAKVAVRRAIARRTIDPAERKRLLAALKCERWADEAYLSRQMRKHWKRGKSRTRNQIIVRSDKVRTFSLTDGGNVWLAVAGVEPRQLVRIPLNTTVAPSGTLRLILRGGRVEVHYQIPASEMKSSRHPSGDREVGVDKGYTEVLIDSDGRHHGARLGALLTAESDRIKERNRRRARLRSIANNAAAKGRHAKAARIRANNFGTVKRDRQAAKHHAQVRTEIFTAVHRVVNEAGVVVAEDLTKAITGRRSLGKNLNRRLAAWTKGVTAEALKNVSERRGSALVLVNAAYTSQVCPTCEGLARRNGDRLHCTPCGVVWHADHAAAINVLRRYGDPDITLFTPYKRVKEILQERADRRRIKLPIQDSSPATGAESELSIHALPSEV

SEQ ID NO: 5430 - protein, 415 aa, Moorea sp.
MLNLTYSYRIYPGLDQEAKMLGWLEQCRRVYNYALAERKDWINSRKCLVNACSIRQEYIIPADTPYPDYYKQQKALTKAKELIRQLKAVHSQVLQDALKRLDQSFKFMQHRGFGFPRFKKSGQYRSFVFPQFKSNPVKGFEIKLPKIGTVPINLHRPIPEGFEVKQVRVVFKSSGWYAQLILQADVSVPEPMPDGDPIGIDLGLEKFLAVSTGELVERPRFFVDLQSKLRWLQRKLRNKKKNSANYRKIQAKIRALHEHIHNVRREFHFLTAHKLCDMAGMIFAEDLNLLITSRGMLAKHCLDAAWGSFLEILKWVCWKRGVFFAKVDPNRTSQICPQCGSHTGKKELSERVHHCPECGYITDRDVAAAQVVAQRGLVAVGQTVILPVEDGCHRTPIKQETSRAILGSPRSTRFG

SEQ ID NO: 5431 - protein, 375 aa, Ktedonobacteraceae sp.
MRKTYKYRIYPTKKQARKLNETLDECRWLYNHLLETRKTTYAQHGTSLSLYQQQDTFPLLKEQRPTLKQVYSQVLQNVAVRIDLAFKAFFRRVKAGEKPGYPRFRSTDRYDSFTFPQSGFSITHDHRACLSKIGSLKMVYHRPIKGTLKTCTITRSSTGKWSACFSVEAQPERLAPCAETVGIDVGLKTFATLSTGEEIENPRFFRNEEKALAKVQRKHATLEKGTPQRRTHRKVLARVHERVKFKRETFTHQKSRQIVKRFGVICVEDLQVNHLVHNHCLAKSISDVAWAAFFDQLSCKAEEAGRELIRVNPAYTTQTCSQCKHRQKMPLSERVYHCPCCLLSIDRDLNAAINICALGLQSRVIPEAPDLESGE

SEQ ID NO: 5432 - protein, 442 aa, unknown
  TnpB Polypeptide
MQTVSSYGVEIRKQNIPIRQTLKIYRQAVSYLTEIYEQVWAELKMIPEAKKRFNAAEHLIHTTKKNHAHFDFDIRFPKMPSYLRRAAIQHALGSVSSYESRMEQWEAAGELSGKPNFTCENHAMPVFYRDVMYREGTEGKDEAYLKLYDGHDWRWFRVCLSHTDMEYLRRNWYGKKASAPALEKRHHKYFLRFSYTEEVTLTQTPVKEQIICSVDLGINTDVVCTIMRADGTVLGRKFIDFPSEKDRMYRTLGRIRRFQRKHGSAQAGERWAYTRRLNIELSRKIAGAVAEYAWENHADVIVFEYLEMNGKISGSKRQKLQLWRKRDIQKRCEHQAHRKGMRISRICAWNTSRLAYDGSGMVLRDWRNHSLCAFQTGKRYNCDLSASYNIGARYFIRELLKPLPATERSLLEAKVPAVKRRTSCVYADLRELSSEMGLLMAA

SEQ ID NO: 5433 - protein, 372 aa, Lyngbya sp.
MKLKGTESQYRKLDEAIRTGRFVRNSVIRAWLDGQVKSRNDAYKHCKVLSDNQEFPWVARLNSMARQAHAERAWASIERFYRNCRQKIPGRKGFPKFKKYQVRASVEYKTSGWKLSDDRRYLTFSDKFEAGTFKLWGSRNLHFYQLEQIKRVRVIRRHDGYYVQFLIDHNREEKKELTGKQTGLDVGLNYFYTDCSGNQVDNPRFLRKDERQLKKLQRRLSRTQKGSQNRKKARNRLGRAHLKVSRRRQNRVCKLAQHVIRSNDLVAIENLRIRNMVKNHHLAKSINDAAWYRFREWLEYFGKIYGVPVVAVEPAYTSQNCSNCGEKVVKTLSIRTHKCPHCGYTSDRDKNAAINILKSALKQLANQETDKK

SEQ ID NO: 5434 - protein, 411 aa, Calothrix sp.
MSIYKIEMQTISVKCKLQVPIDLRQEIDLTLLRFADACNQIYKLARRENCWNTTKLHHKVYKPVKESTGLKANHVCQAIRRVIGNAKAVKQVHKFRPTSLNLDIRTFQYIEDLQTVGVTLMCGRKKFKLSIGNYQRALLKGQSPTAAILNKTKRGDYYINMCVDLPTDPTGKTPKVIGVDLGRRDIATTSTGKSWSGGKIQATRDRYSKVRANIQSKRTRSSRRMLRRLSRREQRFQKWLNHPYGFASRFKSRNPPNALAHNISKQLVQDAKSSNAALAFEDLTNIRQSLNQKRRSKTERRRTNNWAFYQLRMFVDYKARIAGIGVVFVPPAYTSATCSRCHHVHPTKGKSYRNGKKYKCGNCGFEHDADINAALNIAALGLSVIQPESLKISCQLEGQLNLFPTSFFELG

SEQ ID NO: 5435 - protein, 403 aa, Cyanobacteria sp.
MEKQVLTIVCKINPTPEQVAKIEATLQAFADACNYINEVVEPKITHNVTIQNQVYGEVRERFGLASNLAIRAINRVSSNRKTAKRMNKPVKKFLPTSADYDARIFSFREKDWSVSLTLIGGRERFLVDVGSYQKGKLSGFSPTSATLVKHQNGTYSVNIQVHIDAPNSQKSQGVIGVDLGRREVAVTSEGESFSGEQITKVRDRYSRVRASIQKKAVARRRAPASLTEGTRSTRRRARRILQRLSGRERRFQSWVNHNVSKHVVGKAKQSGCSIAIEDLTGIRERTNEQPRNKTERRRSNSWAFFQLRTFLDYKALGAGVEVIKVNPAYTSQTCHKCLHIHPAKGKSYRSGKTFNCGHCHWKGYADFNGANVIKLLGACVNSPGGSYLSCELRRKVEYFQPSL

SEQ ID NO: 5436 - protein, 371 aa, Burkholderia sp.
MLAKRAYKFRFYPTPAQEQALAQHFGCVRFVYNYMLARQQQRHQDGQRSSYGDDAAALTLLKRAPGYEWLRDVSIVALQASLQHLDTAYRNFFARRTKFPRFKRKHAAQSYSLMRNGFTLRERQLTLAKMKAPLDVRWSRALPGVPSSVTVSRDPAGRYFVSLLCEEDIAAHRLTDKVVAGDLGLSTFLTFADQRPSIEAPKFLAEMLHRVRRLSQALSRKVKGSKNRDKARGRLARLHARVADARKDFLHKLSTQLIRENQAVFMEDLCIKGLMRTNLARSIGDAAWGELLRQLAYKAKWYGRTYWQANRYFASSRTCHACGFKLRALPLSVREWTCPECGEIHDRDRNAAKNILADGLIATATAGRAVS

SEQ ID NO: 5437 - protein, 210 aa, unknown
  TnpB Polypeptide
VSVLYEQEICVPVFKPNSIIGIDLGIKDIVITSDYEKYNNEKLIQKYEKRIKRKQKELSRKEKGSNNYYKWKQKLARLYSKLKNARKYLTHTITKKLTETNDIIVTETLKIKNMIKNHKLAKAITDVTLGEIIRQLEYKTKWKGKKLYKIDTYYPSSQLCSICGYQNKMTKDLSVRKYTCPRCGSELDRDYNAAENILFEGIKQYMLELI

SEQ ID NO: 5438 - protein, 383 aa, unknown
  TnpB Polypeptide
MKISKAYKYRFFPTDEQKKNLAQTFGCVRLVFNTMLDARTKAWQQEKQHLSYHDTAKMLTELKKQEDRVFLNDVSSVCLQQTLRNLDTAFRNFFAGRAKYPTFKKAKSNQSARYANNAFKFVDGKITLARQTEPLEISWSRPLPDDAKINSITISKDTVDRYFISIHFETAWKPLEDVQTSVGIDVGIKTLAVLSNGEKLENPKFLQSAEKKIKRLQRRLSKKVKGSNNRRKAKLKLAKAHAKVSDKRADYIHQFTTKTIRENQTIIVEGLSVANMLKNHCLAKSIANASWGEMFRQLEYKAEWNGRKYLELDRFFPSSKICSSCSHLLVKLPLSVREWDCPNCSTHHDRDLNAAKNIEIAGQFLLSTESDARKVTPKRYDSR

SEQ ID NO: 5439 - protein, 410 aa, unknown
  TnpB Polypeptide
MKACISLAREMPEGVYRRALKAKAEVIEGNANDFLWDLTIYKYALQRCIDALWELDSIPKKSQVHQLLYPMLRSYGFRAHVARNIYSTALALVKSAKKNNGSKPVVKKMSTRLDYQDARVEIDDGVVRVILRNKWYALKLMHRREYIERFKGLRWKEVHLKYSDGVLYVGIVFEARYKPYTPRSAVALDVNLKQIVSYDGASIRRYKTRFIDALSKKARAEELQKKYPKRWRYNNRILKRIRTLRRRAKNIAIDWHRKFAKEIVLKVKKHNYAIVLEDLKYLCKNMSENKNTIVWKLTMFAYRKLQEAIISKAIEYNVPIVFVNPRGTSSICPRCGAKLVYNHRLAICGKCGLIADRDVVGAMNIWLRFIHAYAGEHGSPQSAPAVKDETRQSGRTRNEGMKKVIKNIQM

SEQ ID NO: 5440 - protein, 542 aa, Nocardiopsis sp.
VGTDQRGLRPIAGPYLVPGPTGVAVRTRLKHLTAQDEKVLRLVGAHLGSLASADLKARCADGLDHDSARWAARKRALTPESSSRWAGSITKATHDQWALARRGQVAHLRSLQAGIATIRHRLSLPVGAKGTKKKPGGYRSRQEWHAKSRRLASLQDRLATVRADFEAGLVRVVRGGKHLARNRHHLDATGVDRSQWRERWETARWFLQADGESGKRFGNETIRITPDGEVSIKLPAPLKEWANAPNGRYVLSGTAAFAHRGQEWAERVAENRAVAYRVHLDAERRRWYLTASWQIAAPPQVPLRAALAPGVIGVDTNADHLAAWRLDTHGNPIGDPRRFDYQLSGSATHRDAQVRHALTRLLRWAQSCGVRAIAVEDLDFTDSKSREKHGRRKRFRQLISGMPTGKLRARLLSMCAETGIGVIAVDPAYTSRWGAQHWHKPLTGRKRRTSRHAAAAVAIGRRALGHAIRRRMAPPPHHRSDGAGHRTIQAESRSPGREEDRPRASGPRTRSDGAGHGRNAVDQNAQDRSGRSAEHAQLMLSL

SEQ ID NO: 5441 - protein, 435 aa, unknown
  TnpB Polypeptide
MKIMTTYKTKIRDSHSALANTVGIYRQAVDFLIGVALEEWNALKEIERSLEKQRAIECVIHHTKSNPCPKYDFDSRFGKFPSYLRRAAITEAVGKVSSYKSNYANWEENPQGKEPGIPVAGYIYPAMYRDNCFVRIGTYTARLKVWIRNTWDWLDVQLRKSDVDYIQRHCATRKECVPTLRRRGKNWYLDFTFEENVKLEDKPIDRQIIIGVDLGINNACTCSAMLSDGTVIGRKILSLPREKDSLGHKLNKIKKAHQHGARKMPRLWAKAKGVNLDIAHKTAQFIADVAMLYSADVIVFEHLDTQGKKRGSKKQKLHHWRAQAVQRIVADKTHRDGVRVRRVCAWNTSKLAFDGSGEVERDEHNYSMCTFKTGKRYHCDLSASYNIGARYFIREILKSLPAKARLGIEAKVPQCTKRTTCTLSTLLSLNAELVA

SEQ ID NO: 5442 - protein, 400 aa, unknown
  TnpB Polypeptide
MQRTNIIQLKPNKIQKKILKELMLLSSCVYNSTNYLIRQQFFNKEKISSFFDLQQQLQTTEDYQLLGRSYALPRIQIYAETNSARFKLIKSKTQKKVGLPKYLKNRKTNTTLPSYLVIDGGQYSVKNKHIMIPLSRQMRKRYKLGRYFKIKYNGILKWKGNQKRGQIKFKDGQFYLHQSIESKDKTKVKSKVKAGLDFGIKKLLTVYINNGNDKIIGNNRFFKQWKYYTNLISQEKSRLDLQNKRTSKNLQKLFRLRSKWQNNLYNNLIAKMFKILNNNNVSQLVVGDISHIRDNNDKGKRLNQMIHNYWSFDLLLKKIENKAEEFGIELLKETEEYTSQTCPICGVAEEKNKQDRIFICDFCGYIDHRDIVGARNILTKSMCGSLQSIHLGETAQLEIT

SEQ ID NO: 5443 - protein, 416 aa, Azotobacter sp.
MLRRQAFKFRIEPTGEQQRKLRQFAGMTRFVFNKALALQQANREAGEKYIGYVSMAKQLTAWRNSDETPWLKEAPVHPLQHALKDLDRAYQNFFAKRADFPRFKKRGQHDSFRYPDPKQIKLDQGNSRIFLPKLGWLRYRHSRPVLGTVKNVTVSLNAGYWYVSIQTEREVAIPLHASPLAVGIDLGVVRFATLWDGHKETVLEPLGSFARHQHRLAKAQRQMARKTKFGCNWLKAKARVQRIHRQIGNARNDYLHKASHAISKSHALACVEDLQVGNMSRSAKGSAEQPGRNVRQKTGLNRSILDQGWSEFRRQLDYKAQWAGGWLVAVPPQYTSQQCPECGHTYADNRQTQSLFLCVACGHSENADRVAAKNIRERGLKTLEGQDHAPIACEVNGAVRPSAAGTRRSDDAAKAA

SEQ ID NO: 5444 - protein, 388 aa, unknown
  TnpB Polypeptide
MKRSLKFSLDLANTDKLKALDKLSQEYRKEVNYFLKRLFKKKELSEEFLKSHNSSLSYRYKQCAKRQAFKLFKSWCRNKKKGDKPKLKNLSLVLDYRFMELQKSKRSDTFDYWVKIATLNRGKPIFLPLKSYDYAKQYFKNWQLLKGGRLLKKQGSWFLELTFQKETPTKKEKGKVIGLDIGIKKLITTSEGKEYGKDIERLMNKIQRKQQKSKAFLRALKERDYYINKIVKTLPRNKLKAIVMENIKNIKRRAEQSEARREMRRSLSDQNIKKERRLSKQFRSKFQRWTYSQLLKRIKLTAEATGVHLQLVNPAHTSQTCSKCGFIHKLNRKNEIFLCRNCGYTLDADYNASKNILLSYLAQQPMVAGSIKATALYLKGLGPAYFFK

SEQ ID NO: 5445 - protein, 283 aa, unknown
  TnpB Polypeptide
MVVNRAYKFRIYPNDEQKILFAKTFGCVRMVYNHWLDRKIRQYGENKTNVTYTICAKEMAAMKKTEEYGFLKEVDSITLQQSLRHLDTAFQNFFKQPKTGFPRFKSKKRNKNSYSTVCINGNITISNGYLKLPKIGQVRLKQHRIIPDEYSLKSVTVSQTSSGKYYASILFEYEYKVQEKELQKFLGLDFSMHELYRDSNGKEPAYPRYYRNAEKKLAREQRKLSKMQKGSNNRNKQRLKVAKLHEKVSNQRKDFLHKQSRQITNAYDCVCIEDLDMKRCRGH

SEQ ID NO: 5446 - protein, 457 aa, unknown
  TnpB Polypeptide
MAYRVTQRIISSDDPLYPYFDDLCRKSKLLYNAALFRVRNIFTGYDKEHRTENEVEVFQEVALLQRSYPNMHVRRVISYTHLEKMMRVTENADFFSGLPRQTAQQMVKQTVTDFKNWLASLREYKKHPEKFLGRPKMPHYKKQDLATVIITNQDAVLYPSETGVSLKLPIIKKRLSFSNISERAFLKEVRIKPYHGRFLFCLTFEEPEPVIETSMPYTCAIDFGTDNFAAIVCDDGTSVIYKGGAVLSDTQWFHKQKAKYVSILTKGYKNQYAASKRSSDLSYRHANFVKDQCHKISRSIIDFCVDHQAGTLIFGVNPLWKQNSRIGKINNQKFVSMPIALLRAMIIYKALNAGIKIIEQEESYTSKADITTKDYIPTYGVDDKDAQFSGLRIKRGLYRCADGTILNADCHAAANIMRKAVPDIWDRTTDLSFLASPKVYGFHELNPKSIPVKGIAA

SEQ ID NO: 5447 - protein, 383 aa, Acidianus sp.
MARREKNPIRATVAMNIGLSDSLLAFVNNYVKALRFSLFWMKENVKNPNEKGALSKVHEGLYEKLRKEYNLPSKVTEDCYRDALAIYKSWYNNPKKGRFPRVYKPTVWLTPKQSYTVDLEKMTVRIASVGELPILGYPRNLKEYANWKMKEARLTIKDGKALLKVTFEKEEEKVKPKDSVAVDINMNDIVVGKDDTHYVRIPTRLHDAHHFKSLAENLQKKYPRRWKQNRRILHRARSFHQKAKLIMEDYARKVGKWVVEIAEGLGANVIKLEDLKNLIKDVNKLPAEFRDKLYLMQYRRIQYWIEWQAKKHGMIVEFVNPSYSSVSCPKCGHKMVEIAYRYFHCPSCGYENDRDVIAIMNLNGRGSLTLSTAPQMRDVAPNR

SEQ ID NO: 5448 - protein, 441 aa, Bifidobacterium sp.
MMGTMGTTMKRYDYRACPTGKQADALARQFGCCRFVYNAFIKERSYRYRHGGVNLTAVQFAKELTELKTTPDRRWLADVSVVPLQQAIRHADAAYRNFFRGCETGRNVGYPRFKSKHGTQSAEYTKSARFKIQHQKGAKWAYLTLPKVGRLKFRWSRDLPSVPKSVTVLKRPNGDYHVSFPVEAPILPAPQPAHEACGIDLGVASLAVVRASDGTGYTVEHPRLMRHAQRKLSRLQRKLSRQKKGSNRYRKTRHAIARTHQHMRDKRLDLLTKTAKQVTDENQAVALETLSVKNMVRRANPKPGPDRPGQWSPNRRKAKAGLNRSILDAGWGTLVRLIEQMGMEKGRDIRKIGRWAATSQTCCVCHTRDGRKPLAVREWDCPTCGAHLDRDANAAVNIMLAAGLAESLNARGGAVNRRLAQANLAGNTPMEAGTHRTVVLH

SEQ ID NO: 5449 - protein, 411 aa, Micromonospora sp.
VQLRYNYRVYPTPGQQGALARAFGCARVVFNDGLRARQRAREAGLPYVSDGDLSKQVITQAKQTPERAWLGEVSAVVLQQALADLNVAYRNFFASLSGKRKGRPVAPPRLRSRKDNRQAIRFTRNARFAVLDNGRLRLPKIGDVSVRWSRTLPAEPSSVTIIKDAGGRYFASFVVQTSDEPLPPAEAEVGIDLGLTHFAVLSNGKKITAPKFLRRAAGKLRRLQRDLSRKQRGSANRAKAVVKVAKAHARVADTRRDWHHKLSTRIIRDNQAVYVEDLCVAGLGRTRLAKSVHDAGWAAFTHMLEYKAARYGRTFGRVDRFFPSTRMCSDCGRINEKLPLNVRSWTCPCGSTHDRDVNAAINILAAGRAERLNACGAQVRPAPVPAPRREAGIHPDATRRPTRSVEGISVL

SEQ ID NO: 5450 - protein, 395 aa, Streptomyces sp.
VELRYTFRLEPGPGARMALAKVFGCARVVWNDALTARKVAHERKLPFPKTGLLSKLLITQAKRTEERAWLADVSVVPLQQVLRDQDTAWTAFFGSLKGTRKGPKMSEPVFKSRKDHRQSVRFTANAKWKITPDGKLSLPKIGTIPVRWSRPLPSVPSSVTVIKDAAGRYFASFVVTTNPIEDLVASPSVEGDQSIDLGLTHFAVLADGSRVASPRFLRRAEKKLKKRQRDLDRKQKGSKNWNKARLKVARAHATVADTRKDFHHQLSTKLVRENQTVTVETLNVRGLARGRLAKAVHDAGWAQFTAMLEYKARRYGRGFTRVAHNFPSSQLCSACGHRDGPKPLKIRIWTCPECGTVQDRDWNAAKNTQNEGRRIRAATQRTAPPTPGPGALTPA

SEQ ID NO: 5451 - protein, 134 aa, unknown
  TnpB Polypeptide
VVEQLNLAGMLQNRRLARSLADAGLAELRRQLAYKTAWYGSRLVVADRFYPSSKTCSACGWVKAKLTLAERTLRCEACGLQVDRDLNAARNLAKLAQHVAQSGWETVNARGADIRPGLAGLTASKREAGAEFLG

SEQ ID NO: 5452 - protein, 301 aa, unknown
  TnpB Polypeptide
LPALRRDWNRAKDQIAPWWAENSKEAYSSGLDGLARALKNWADSKHGRRKGRPMGFPHKKRKGRARDACRFTTGGIKVLDDRKHVRLPKIGVLKTHESTRKLARQLEHGSARILAATITRTADRWYVSFTVEVQRDVSAGNGSTSVIGVDAGIRHLATLSTGANIPNPRALQRSLRKLRRRNRQLHRRMPSSNRRGITRRKLSRVHARTTNLRRDALHKLTTTLATQSSPPPWPPSTAPSWSSSSTWPACCRTGVWPGPWPMPAWPNCAASSPIRRPGTAAGWWSPTGSIRRPRRARPVAG

SEQ ID NO: 5453 - protein, 291 aa, Methanofollis sp.
IKFIFHVGYAIIRYPTKYIYRREKGRLRFHPRPEDRGLPAPPPLPPQVKLDGDRLHLSKIGNVRVVLHRPIEGTIKTCTIRRSSTGKWYVCFSVEYESSPLPQKETAVGVDVGLESFVTLSNGEKIKNPRFFRTDEKALAKAQRKLSKAENGTPERKKARKIVAHIYERIANRRLNFAHQTSRQLVDRFGTIVFEDLNVTKMQKNHRLAKSIADVAWNLFITITKSKAEEAGSKVVLVDPRNTSQQCSRCGMIVAKTLSDRVHSCPHCGLVMDRDQNAAINIMRLGLQSQG

SEQ ID NO: 5454 - protein, 381 aa, Clostridium sp.
MKTVIKGYKYRIYPTKEQEVQLAKTFGSCRFVYNQILAKRIEFYKSENKSMNKTECNNYCNRELKKQYPWLKEVDKFALTNSIYDLDRAYQNFFREVKKGNKNQGFPKFKSKKNHYYSYKTNFTNNNIKVDFENNRVQLPKLKWLKAKLHRHFDGRILFATISKTPSGKYYVSFNVECEHEELLQNNNALGLDLGIKDLLITSDGEVFDNKKLTYKYELKLAKLQRQIAKKKIGSNKWKKQRVKIARIYEKITNIRKDNLNKISHQIVKENQLIFSENLNIKGMVKNHNLAKSIHDCSWYELTRQLAYKSEWNNRIYHKVDRYYPSSQLCNVCGYKNEDTKNLSVRFWTCPQCNTEHDRDKNASINILNQGLKDLGLDKAI

SEQ ID NO: 5455 - protein, 384 aa, unknown
  TnpB Polypeptide
MESFRLICNDAIRIGLSGDASSLKRLSKLTYGELTRYDGVPSYYKLCAISKAAGILGARKKSIRRGFPTKSPYLSRPMLVSCYGFKIQDGSLLVPVGYHSFERIPLSSHTLNVLSEPGVEVRSFTLTGCSLSLCIAKATEEIQVEGMLGIDRNLRNVTVGNGECITYYDVSKAVEIVETTRSIVRSFRRNDVRIRKQLAEKYGRRRQERVKQILNHVSKNIIREAKRSKEAIAFEEIKGIRKLYRAGNGQERNFRGRMNSWPFHELKRQVEYKAAWEGVPVVTLSVKETRGTTMDCPRCGERLQAVVRGDAVHHRQLRCKRCERWEDRDLVAVMNISHRGWVRFAQSRGKGAAGEAMTGNLEGRRQQVILRVDASKLCQAQQTQ

SEQ ID NO: 5456 - protein, 380 aa, unknown
  TnpB Polypeptide
MYKLYHSKKNKHLHRQINVGGAIHNKMIALHKRFYRLYKAYPSRSTMQKHLAKLKRLPKYAWWSQLGSQAIQKIVERIDLAYQRFFQNIKDRRAGLTTRKTGPPTFRKIRKAKSFTLTQAGWKLLGGNRLRIGTVVYKFAQSREIEGHVKTVTIKRDALGELYVYFSCRVDLQPPVRVMTGKSAGFDFGLHTYLTGSDGTEHHAPQPFTQGLRQLAKANSELSHKVKGSRNRSKAHAHLARVHRRVAHVRHAFHWEKARELCQTYDAISLETLNLQGMKALWGRKVSDLGFASFVDILHHVASKLGTVITHIDHWYPSTKICSDCHHVNHHITLRDRVWTCVACGVTHDREVNAAVNIDREGASSRGVHPVRLALASVDG

SEQ ID NO: 5457 - protein, 406 aa, Bacteroides sp.
MPKIRKAYKVRLKANTEIEKKLVRFCGSARFLWNKSLAMNLERLENRQTILWYHELAFWLTLWKRSDEYGFLKECPSQVLQQKLMDLERAFRDSFDRSQPRKRLPVFKRKGRGDGIRFPQGFKMEGRRIFLPKIGWQGFYQSRPIEGTVKNITVSSSGDRWHASIQVEQTIESVPPPGESEIGIDAGIKCFAAFSDGTLVAGANSFRRHEDRLAMQQGKLSRKKKGSQNWREQKRRISRLHHTISNVRSDFLHKLSTATSQNHAKVFVEGLNIRGMSKSAHGTIEEPGRNVRAKSGLNKSILDQGWGEFRRQLAYKLDWKGGQLVEVDYRYTSQRCSCCGYTGKQNKQSQAVFKCAACGHEENADVNAARNILTIGQTGIACQANRSSGRQQEPARNREGVMPVAS

SEQ ID NO: 5458 - protein, 283 aa, Methanosaeta sp.
VGRSLKPFKETISRAEVDMTRSPILRKGSRSILERMYLSKIGDIKIKLHRPIEGKIKRLTVRWAATGKWYACFSVGQEDLPKPPWKDGSLVGVDVGLESFATLSNGEKIANPRFFREEEHELARVQRILSRAPKGTPERKKALEIVERVHERIANKRYEFAHQISNQLVNRYGLIAFEDLNIKGMMQNHNLAKSIGDVAWNMLVTLTSYKAASAGSMVVLVDPRNTSKMCSRCGILVQKDLSERVHNCTQCGLSIDGDWNAAINIHRLGLQSVGIQSVQARPL

SEQ ID NO: 5459 - protein, 390 aa, Methanosaeta sp.
MTEQVLTVQCKLSPTDSQAEEMEDTLKAFADACNWINQNTPAKLRNKVRIQGIVYQDVRAKFGLSANLAIRAINRVASNRKTAMKDHSSVKNFEPTSIDYDTRIFALREKDEEVSVTLLRSRQRIKLVLGDYQRTRLKDSKPTSATLCKKGSEYYISIQVKSEAPEQIHVDTVLGVDLGITDIAVTSEGQKFGGKTIKLIKNHYASMRAVLQQKAVKGTRSSRRRCRELQQRLSGKEARYQRQINHEISKAIVTRAQEIPAKIALEDLTGIREGVNQKAGKNHRRKVSGWALYQLKEFLSYKALAAGVPLVLVDPAYSSQTCHQCGEHGIRNGKSFKCPVCGWSGDADFNGAKNIAFLGRYVDRPGGSEGLPSIKAVLSGLLKAPVFRPE

SEQ ID NO: 5460 - protein, 422 aa, Methanosaeta sp.
MKAESFAMITFTPPSADISIGIHNCIRLMISYKYPIFPNKITQWKLAENLDACRWLYNRLLQNLNEAKEKGIKLKTYDTQNMIPSLKLENPKLNQVYSKVLQMVNYTLWSNIKGLFASKKNGRKIGHIRFKGYGWYDTLNYNQSGFKIDQDHGILHLSKIGDMRIKIYRKIEGCIKAVIVKREGERWFAIVQANQEPQPLPETEEAVGLDVGLTSFVVDSVGNEIENPRCAKQSADKLARLQRRLARAVRGSNNYKSLKGKIAKLHKRINCQRDDFLHKLSRTYVNNFDIICVEDLDIKGLKEKGHNNGMHRSIHDASWSKFVFMLSYKAQSAGRKLIKVDPRNTTQRCSACGSIAEKDLSVRVHECPYCGFSCDRDYNASRNILISGMEQPVAPIEPKPLHHISLMQVLAMKWEAAPFRTR

SEQ ID NO: 5461 - protein, 296 aa, Methanosaeta sp.
LISFSKPSRIFAFREKDEEVSVTLLRSRQRIKLVLGDYQRTRLKDSKPTSATLCKKGSEYYINIQVKSEAPEQIHVDTVLGVDLGITDIAVTSEGQKFGGKTIKLIKNHYASMRAVLQQKAVKGTRSSRRRCRELQQRLSGKEARYQRQINHEISKAIVTRAQEIPAKIALEDLTGIREGVNQKAGKNHRRKVNGWAFYQLKEFLSYKALAAGVPLVLVDPAYTSQTCHQCGEHGIRNGKSFKCPVCGWSGDADFNGAKNIAFLGRYVDRPGGSEGLPSIKAVLSGLLKAPVFRPE

SEQ ID NO: 5462 - protein, 366 aa, Methanosaeta sp.
MAKVFRYRLRPTKAQVTKLNEQLELCRWVYNETLAMRKNAFEQEGRSVSYFESKRMLPIWKESKPELRSVYSQVLQDVVLRVNLAFKAFFRRVQSGEKPGYPRFKGKNRYDSISYPQSGFSIDGDKLWLSKIGDIKFKLHRPIEGFVKRLTIHRSATNKWYVSFLVEESIDHVIEPSDKVVGIDVGITNFAVLSNGEFIENPRFLLADEGMLKKAQSKRDKLPKGSQERNKANKSVNHLYERIANRREDFAQQLSHMLVTSYGIICFEDLNIKNMTQNHNLAKSILDASWNKLVQYTSYKAVEAGRKVVLVNPLNTSQMCSCCGQTVKKDLSVRVHSCPYCGLSMDRDLNAAKNILRLGLQSVAKA

SEQ ID NO: 5463 - protein, 406 aa, Methanosaeta sp.
MNAASTAVKLKNYISYNSLTISMSMLKAYKFRIYPTKSQRTKMERTLDLCRWTYNETLEIRKTAWEDEGKSLSKYETNNLLPEWKENKPELKEVFSQVLQNVHERVDLALKAFFRRVKAGEKPGYPRFKGIGRYDSFTYPQKGFKVDSGKLYLSKIGEIKIKLHRPIEGKIKRLTVRRSATGKWYACFSVDLEDLPKPPWKDGSLVGVDVGLESFATLSNGVKIANPRFFREEEHELARVQRKLSKAPKGTPERKKALKVVERVHERIANKRYEFAHRISNQLVNRYGLIAFEDLNIKGMMHNHNLAKSIGDVAWNMLVTLTSYKAASAGSMVVLVDPRNTSKMCSRCGILVQKDLSERVHNCTQCGLSMDRDWNAAINILRLGLQSVGIQSVQARPLSRAGVVTG

SEQ ID NO: 5464 - protein, 376 aa, Methanosaeta sp.
MLKACKFRLYPTKSQITKMERTPNLCRWTYNQTLAYRKNAWENEGKSVSKYETNALLPGWKEDKPELRDVYAQTLQNVQERVDLAFKAFFRRVKAGEEPGYPRFRGKGWYDSFTYPQPEKGGNLVNGMVRLPKIGDIKIKLHRQIEGKIKRLTVRRTATGKWFACFSVETEDVPLPPWKDGAVVGIDVGLESFATFSNGETIANPRFFREEEHELARAQRKLSKAPKGTPDRKKALKVVERVHERIANKRYEFAHQVSHNLVDRFGLISFEDLNIKGMVHNHCLAKSISDVAWNMLVTLTSYKAASAGSVVVLVDPRNTSKMCSRCGTLIEKSLSDRVHNCTQCGLSMDRDWNAAINILRLGLQSVGTGSRGSPAL

SEQ ID NO: 5465 - protein, 381 aa, Methanosaeta sp.
MLKAYKFRIYPTKSQRTKMEQTLDLCRWTYNQTLAYRKNAWEKEGKSISKYETHNLLPTWKEIKPELSGVFSQTLQNAQERVDLALKAFFRRVKAGENPGYPRFRGRGWYDSFTYPQKGFKLNAGKLYLSKIGNIKIKLHRPIEGKIKRLTVRRAATGKWFACFTVEMEDQPKPPWKDGSLVGVDVGLESFATFSNGEKIANPRFFREEEKELTRVQRKLSKAPKGTLERRSASKVVERVHERIANKRYEFAHQVSRDLVNRFGLIAFEDLSIQNMLKNHCLAKSISDVAWNMLVTLTSYKAASAGSVVILVDPRNTSKMCSRCGILVEKTLSDRVHNCPHCGLSVDRDWNAAINILRLGLQSVGIKTVEACPFKGAGVVT

SEQ ID NO: 5466 - protein, 378 aa, Methanosaeta sp.
MFAQRTLQIVIEPDESLIKTLDSFTQICNSISKTAWNSGKPLKALDLHRRVYDNIKGTVSSQLTCTSIRLTAGAYASAKKNGHDLDHPFNWHRPFALFLVGKRGRDASFMRDGLLSISTIDGRKHIKYTVPYAFREEFCNATEIDSIIVKNLGDKIIGYVAYTIEFPDVEGIHPVGIDLNETNAIVAVDADGNELFISGLDRKIKNKRTSKTIKRLQRKLAQRKAEGKNTRSVVRDLKRLRAKRSRRTKDFCNCASKELIEWAPDNCVLVFEDLNFGQGKHGSKAWDRRFSVWPRGMIFNMTSYKIQGKGIVAKVDPRNTSKNCSRCGLPGTRKRHSFNCPKCGFSIHADLNAAYNIRNRFTSSRASEDQSVSSEASI

SEQ ID NO: 5467 - protein, 263 aa, Methanosaeta sp.
MDDALELCRWTYNEVIAIRMNAYEQESKSLSYYDTKKLLPGWKEEKPELKEVHSQVLQEVVKRVDLAYQAFFRRVKAGENPGYPRFKGYGRYDSFTYTQSGFSLKPGKLWLSKIGDIKIKLHRAVDGEIQRLNIRRMPTGKWFVSFLVEVEPDEPLPKTGLSIGVDVGLKSFITLSNGEQVDNPRFFVHEENALAKAQRKLSNAEKGTPERARALKVVHRVHERITNKRDDFVQKLSISLVKSYDLIAFEDLNIKGMVKKALR

SEQ ID NO: 5468 - protein, 282 aa, Methanosaeta sp.
MERTLDLCRWTYNQTLAYRKNAWENEGKSVSKYETNALLPGWKEDKPELRDVYAQTLQNVQERVDLAFKAFFRRFKAGEEPGYPRFRGKGWYDSFTYPQPEKGGNLVNGMVRLPKIGDIKIKLHRQIEGKIKRLTVRRTATGKWFACFSVETEDVPLPPWKDGAVVGIDVGLESFATFSNGETIANPRFFREEEHELARAQRKLSKAPKGTPDRKKALKVVERVHERIANKRYEFAHQVSHNLVDRFGLIAFEDLNIKGMVHNHCLAKSISDVAWTMLVQPG

SEQ ID NO: 5469 - protein, 270 aa, Methanosaeta sp.
MTEQVLTVRCKLSPTDSRAEEMEDTLKAFADACNWINQNTPAKLRNKVRIQGIVYQDVRAKFGLSANLAIRAINRVASNRKTAMKDHSSVKNFEPTSIDYDTRIFAFREKDEEISVTLLRSRQRIKLVLGDYQRTRLKDSKPTSATLCKKGSEYYINIQVKSEAPEQIHVDTVLGVDLGINDSCDLRRPEVWRKDYQANQESLCVYACCSSTESRERYKEFKAKMPRASATTIRQRSTLPTADQPRNQQSHCDQSPGDSCKNCSGRLNWN

SEQ ID NO: 5470 - protein, 380 aa, Methanosaeta sp.
LLKVLRYRIYPTKSQRTKMDDALELCRWTYNEVIAIRMNAYEQESKSLSYYDTKKLLPGWKEEKPELKQVHSQVLQEVVKRVDLAYQAFFRRVKAGENPGYPRFKGYGRYDSFTYTQSGFSLKPGKLWLSKIGDATIASMAASTKSRHIKIKLHRAVDGEIQRLNIRRMPTGKWFVSFLVEVEPDEPLPKTGLSIGVDVGLKSFITLSNGEQVDNPRFFVHEENALAKAQRKLSNAEKGTPERARALKVVHRVHERITNKRDDFVQKLSISLVKSYDLIAFEDLNIKGMVKNHCLAKHITDAAWNKLITTTSYKAEWAGKRVELVNPNGTSQICSGCGQVVQKDLSERVHRCSFCGLTLDRDHNAAINILRLGLQSVAKA

SEQ ID NO: 5471 - protein, 209 aa, Methanosaeta sp.
MIAVTSEGQKFGGKTIKLIKNHYASMRAVLQQKAVKGTRSSRRRCRELQQRLSGKEARYQRQINHEISKAIVTRAQEIPAKIALEDLTGIREGVNQKAGKNHRRKVSGWAFYQLKEFLSYKALAAGVPLVLVDPAYTSQTCHQCGEHGIRNGKSFKCHVCGWSGDADFNGAKNIAFLGRYVDRPGGSEGLPSIKAVLSGLLKAPVFRPE

SEQ ID NO: 5472 - protein, 288 aa, Proteobacteria sp.
MITAHKIALAPHDTQATSFARACGVARFAYNWALAAWQRQYTAHKADPALPKPSQMALRRQLNSIKRAQFPWMAEVTQNAPHMAIIQLGNAFKNFFAGRARYRRFRKKGVYDRFTLTNDQCDVDASRIRMPHLGWVRMREALRFSGKILSATVSAKAERWFVSLTVDTPDTPQQPAENQGVVGVDVGVSALATLSTGEQVAGAKPHTALLQRLKRLSRAVSRKQQGSANRNKAKATLARLHARIANIRNDTLHKLTTDLTRRFHTIGIKVKPSPVKQETNSRGELCRA

SEQ ID NO: 5473 - protein, 417 aa, Proteobacteria sp.
MNYRTVEIHWLPHTPSEWRTFTTSRKEAARLWSDLVARHHRLRRRRLKWPSKGRWERWARGKYPGLSAQSAQQLLGEFCAAVHSTRQLRKKGHDDARYPWRRPRFHDVVYTNQDARVRDGDLILPHGTSGRLHIPLPRRALPGRLMEARLQMGRLMLVCEVAETPRPQQTVIGVDLGVNTLIAATDGTKALLISGRGAKALVQARNKHLSSLQEAQSHKEQGSRQWQRLQRRKARMLAQSRRRLHDMTHKATRKVVEAFPNATCFVGKPFNDAAQKMGRRQAQQVSSACNAKLIAQLDSKSCGAIQVDEHYTSQTGPVCGERNKGRRIYRCRRCGLTAPRDVIGSRHILCLGQHGRFVPGCRVPNTLHFVHPLKYPGLSPGSTGGHPGNSLGLSQEAPAKLPCSELESVTCITVEVR

SEQ ID NO: 5474 - protein, 409 aa, unknown
  TnpB Polypeptide
MLREWDLFSTCNNGDAAVGVMEPLSHRTKAHPVVRYDFDSLFYKFPSYLRRSAITKAFGLVSSYHSNLDSWLSAAPKKRGRRPSVPKAGYSFPVFYSGNMFLSGENYTARIKVFRNNTWDWMKVRLRKSDVDYVRRRCKDFEAGSPSLVRRGKVWSLDIPYTTYKQLNDIPIRKQRIVAVDLGINNACVCSVMLPDGTVVGRRFLRLPAENDSLGKALGRIRKAQSLNARRCPRLWARADGINKDIASKTAGFIIDTAMMYNADVIVMEALDTGGRKRGSKKQRLHHWKARCVQAMVEGKAHRLGMRISHVCARNTSRLAFDGSGEVKRGRDSEKTGGNHSLCEFQSGKVYHCDLSASYNIGARYYIRELLKSVTERRRLQLEAKVPSVCKRSTCTLSDLISLDAALVA

SEQ ID NO: 5475 - protein, 251 aa, Clostridioides sp.
MYCGQHIKLPKLGMVKIRDKQVHQGRILNATISKEPSGRYYVSLCCTDVDIEAFENTNNQIGLDLGIKEFCISSCGEFIENPKYLKKSLSKLAKLQRELSRKTIGSLNRNKARLKVARLQEHIANQRNDFLQKLSTKLIKENDIICIEDLQVKNMIRNRKLSRLISDVSWSEFIRQLEYKANWHGRQIVKVGKFFASSQICNKCGYKNEEVKDLNIREWICPSCNETHDRDINASINILKEGLRLITIQNK

SEQ ID NO: 5476 - protein, 142 aa, Psychrobacter sp.
LGLKESATTSMGDKLTIKQTQKWAKKLAIAQRANNKKRVKAIHAKIKNTRLDLIHKFTTKLVKDNSLIVVGDVKSRSFTTKKTKLAKSTYDAGWFELKRQLEYKCKHAGCQLEMVNESYTTQTCSCCHKISDSSLRVEQVCE

SEQ ID NO: 5477 - protein, 578 aa, unknown
  TnpB Polypeptide
MAFGNKNSTPSFVLTLPMKVTEQDEIFLSKKFRVGCTVYNQMVTKTTKMWHQLRKTREYKNLVKAIKAAPANSDKRKALLVQRSNLIKQAGFSEGAFHKLVVPYQKAYNVNCDVAQKVASAVWKAWDDFFYGKGKTVHYKKLDDFVTLSGKKNNSGIFFRPANHTVSSMKSAKRKAKNSIEKKYFDAYRNPNTKKDKEVVLPDEVKAQMDKEVADATTKAKPCIGEGNLRIIYEKHEFLVKLRNPDIQTGWYQQEALKCGVKYCRIVRSWVGTKWKYYAQLVLEGYPPIKCDSNGVVKHHVKQGRVGIDIGTQTLAISSNDICDLRVLAPSARAQAKSLVNEITCTMRAMDRSRRAMNPQYFNENGTVKRLKRKNGHKQIRHWNYSKNYYRLLHKLRNLNRKLADVRKMEHYILANELLTYGNEFIVEDMNYKALQKRNKKTKINPKTGRAHSKKRFGKSIGRCAPAMFISILNQKANRYGGSVIKVSTFETKASQFDHTDDSYTKKKLSQRFAKLSDGTVVQRDLYSAFLLLHLRKNLQSYNKKTIKKDFPQFKKLHDETKERLKSSHEWLPTSVGF

SEQ ID NO: 5478 - protein, 294 aa, Shigella sp.
MRPVINTSLTGKWLPGWLSGKNATETQWLKDSPSQPLQQSLKDLERAYKNFFRKRAAFPRFKKRGQNDAFRYPQVKLDQENSRIFLPKLGWMRYRNSRQVTGVVKNVTVSQSCGKWYISIQTESEVSTPAHPSASMVGLDAGVAKLATLSDGTVFEPVNSFQKNQKTLARLQRQLSRKVKFSNNWQKQKRKIQRLHSCIANIRRDYLHKVTTAVSKNHAMIVIEDLKVSNMSKSAAGTVSQPGRNVRAKSGLNRSILDQGWYEMHRQLEYKQLWRGGQVPGMWIYSERRCKWRS

SEQ ID NO: 5479 - protein, 570 aa, unknown
  TnpB Polypeptide
MTTKTILEHKTLVNFTKYPLAHFANGIAKVKLILLGHPENNADIAHNYLQKLQIIHNQLQKLVIVLLLMYKNRKSVIVEFPHPIKKMIYNAKKSISNQDIQITELFKILVLVSIGNGEDLKPFWNSQCKKNSTQLWLPTKTDCVDLHSNSFNGSLNPIMSNSWFSMNQFVPQNKNSLKTFCQSSTFSLADKWEKGDIKKKKIMGTRKIRICPTPEQQIILNKWINTSRYTYNKAIHKIEKEKQKINFYNLRNKLVPKKNIIKSKEWMLDTPKDIRANSIREVVSMYKSAFTNLKNGNISKFNMRYRSRKLLSEVISIPKTAIKISDDKTKFNLFTTYLKTPIKVFKELIPDINHEIKLLHDKKCNNWYICVPIEYNVNSDNQGGIVSIDPGVKTFQTLYDANGSVTQIGSEDMKFILVELYKKIDKYKSLRTTATGRRKKNITSRIFFLNNKYKNLITEIHNKTCVYIYKNYNNVLISNIGNIKSKNRQNNRCLLGWSHGKFIERLTHHMHKNGKKINIVTEEFTSKTCGRCGWLDNNLSNKDIFHCRSCGLHISRDVNGARNILLKHLQ

SEQ ID NO: 5480 - protein, 373 aa, Shimazuella sp.
VELTITAKVKISPNEEQKKLLLETLQAVKVGCNFVSEQVYQSKVLTRAKLINMTYETLRSHYSLRSQMSQSIAIAVIAKYKSAKSNDHNWSLVRFKKPEYDLVFNRDYSIRPNKIFSVNTLEGRVQIPYETKGMEHFFDGTWRFGTAKLVYKKQKYFLHIPMTKEIPDADLKEVKNILGVDVGLNFLAVTFNSQDTTTFFKGRHRKDKRGQYKRVRKSLQQKQTPSARRRLRAIGSRENRWMTDVNHQVSKALVEHAGKNSLIVLEELEGIRSATEKVRKRDRWYTVGWAFYQLRQMIEYKAKRNQSTVIAVDPAYTSQTCPKCGHTEKANRNKKKHIFHCKTCGYISNDDRIGAMNLHRKGMEYLVAVTTSA

SEQ ID NO: 5481 - protein, 375 aa, Shigella sp.
  misc_feature (308)..(308): Xaa can be any naturally occurring amino acid
VKRLQAFKFQLRPGGQQEREMRRFAGACRFVFNRALARQNENHEAGNKYIPYGKMASWLVEWKNATETQWLKDSPSQPLQQSLKDLERAYKNFFRKRAAFPRFKKRGQNDVFRYPQGVKLDQENSRIFLPKLGWMRYRNSRQVTGVVKNVTVSQSCGTWYISIQTESEVSTPVHPSASMVGLDAGVAKLATLSDGTVFEPVNSFQKNQKTLARLQRQLSRKVKFSNNWQKQKRKIQRLHSCIANIRRDYLHKVTTAVSKNHAMIVIEDLKVSNMSKSAAGTVSQPGRNVRAKSGLNRSILDQGWYEMXCCGHTAKENRLSQSKFRCQVCGYTANADVNGARNILAAGHAVLACGEMVQSGRPLKQEPTEMIQATA

SEQ ID NO: 5482 - protein, 404 aa, Streptomyces sp.
VIRAYKFLMRPTMGQAIALGEMLRDHCSLYNGALQERRDAYRHVSKTSVKYGMQSTQLKDIRAFDPERQGRWSFSSQQATLRRLEKAFIAFFRRIKSGETPGYPRFRGVNWFDTVDFPKDGDGCRWNSTPHDPTTRVRFQGVGHVKVNQHRPVVGKVKTVSVKREGQKWFVVLTAEQEQPEPLPATGSVAGIDLGIANFLADSNGEFVPNPCHGRTAAAKLEAAQQALSRFPRRKAKDRTSNQQRAVEKVAQLHGKVRRQRLDHAHKTALTLVRKYDFIAHEDLRIRNMSRSPEPKPDPEQAGVFLPNGAASKAGLNRSIADAGWGVFLTILHAKAESAGREVIAVDPRNTSRQCPECGHTAKENRPTREKFHCQACDHQAHADTVGALNVLRAGLVRREAQPA

SEQ ID NO: 5483 - protein, 266 aa, unknown
  TnpB Polypeptide
MRYRKSRATEGVPKQVTVSLSAGKWYVSIQTEREVPEPVHPLQTAVDIDMGIARFATLSDGSSLRPLHSFRKHEKKLAALQRKAAKRVKFSANWRKLKARIQRLHRKIANVRNDFLHKTTTIISKNHALVVIEDLKVRNMSRSASGTLDHPGKNVRVKAGLNKSILDQGWFEFRRQLAYKLAWLGGTLLLVPPQYTSQTCSHCGCVDKSNRLSQAKFKCTACGFECNADHNAALNILAAGQAVSACGAGRAQAPVLNQEPAYGAAR

SEQ ID NO: 5484 - protein, 351 aa, Microcoleus sp.
VQHQAIKVRIYPTPGQEQLLAQAFGCSRWWWNFALNKSIETYKETGKAIGQVALNALLPKLKKQEETSWLADCYSQVLQATTLNLVTAYKNFFEGRARFPRFKSKKSKQSIQYPQNVKILANNTIKIRGGIGDVRAKIYRPIDGQLKTVTISKTPSGKYFASILVETLVDNPLVSTDGRVIGIDLGIKEFAVTHNGEKVSKYSNPKHLAKHEKNLKRKQQKLARKKEGSNSRLKAQKITANLYERVANARQDFLHKLSRKLVNENQVVVVENRPVKGIEDWTCPHCGTHHDRDGNAAANIRAEGIRMIETEGIAVSAVGGEVRPHSGRKSVLRHSPMSTEAPTVRTSFSGG

SEQ ID NO: 5485 - protein, 445 aa, Brasilonema sp.
VILLPKDYGCQQVLLNRSLLVHPILEYLCNQAHRLTNCGIYYGRQIWFQERRYLKKFDLINELKSSLNYQSLYSQCAQQVLLAVVESFKSFYELDKKSRNGELDQKPRLPSYRKNGLAVVTYPKQALKLVGGEIRIPLGQTVKAWFGIDYFTVPAPSNIDFALIKELRILPRNREFYAEWVYEQQPVRQIKLNERWVLGIDPGVTNWLTCIENSFGGNSFIIDGRHVKSVNKWYNKQIACIKEGKPQGFWSKKLATITEKRNRQMRDAVNKAARIVINYCLKNRIGNIVFGWNKGQRQESSLGRRNNQTFVQIPTCRLKERIECLCKRHGIKFVETEESYTSKASFLNRDPLPTYGEKPDRWKPSGRRTKRGLYRSLWYGTINADCNGAANIIRKVAATSGFDLDGVGMGALTRPTRIKIWVTAKNVKGHGFSLPRSVNLESPRL

SEQ ID NO: 5486 - protein, 396 aa, unknown
  TnpB Polypeptide
MYKAFKYRIYPNKEQEELINKHIGCSRWVYNYGLNKKIESYQQARKGISRFDIQKELPILKKTEGTEWLSEVLAQSLQTSLENLDQAFTKFFKEKKGFPKFKSKHESHQSYSIPQNVRVYFEECKVYIPKLPSLVKCKFSRIFEGTIKTSTISKTPTGKYFISILVDIPQSIPEPLPIDESQAIGIDLGIKTYAVLSNGNSIENPKYLKKSLKRLKKLQRKASKKKKGSNNRKKANKKVALLYERVTNQRKDFLHKVTTQLVRDYDTICLETLKPSNMVKNHKLAQAISDVSWSTFNEYLDYKASWCGKNVLRIGQFEPSSKMCSCGLINKDLKLSDRTWTCSSCKTTHDRDLLAANNIKRFAFVKNKTTDGTSGCQACGDEGLPLSMKQEAYLDR

SEQ ID NO: 5487 - protein, 364 aa, unknown
  TnpB Polypeptide
MLKAYKYRLYPNKTQEELLNKTFGCCRYFWNNCVATFNSYDKELNPKPTFKTVKELREETGWMKEVSHDSVASKENDFKEFKKQFFSKDRKKSINRPNFKKKGEGQSFRLDKKYVQVKDNQTHISKIGWVKFIEHNPLPEGSQIRNATYSKDNLGHYYISILVETEIKQLPKTNKSVGIDVGLKEFATLSDGTVIHNPQYFRENQSKLKKAQQHLSRKKKGSTRYKKQKLKVAKIHKKIQRQRELFLHTTSLNIIKNYDTICIEDLNVSGIVKNRKLSKSISDAGFYTFFSQLKYKAEWYGKEVVQINRWEPTSKKCNNCGYINQDLTLKVRDWTCQKCNTHHDRDLNAAKNIKALGVTSAQRA

SEQ ID NO: 5488 - protein, 411 aa, Nostoc sp.
MLVFEFKTYGKALQFQAIDEAIRTTQFIRNKAIRLWMDGLAKSWIELSRHCALLAKEFLWANKLNSMARQAAAERAWAAISRFYENCKKKISGKKGFPQFQKNCHSVEYKTSGWKLADDRKSITFTDKNGIGKLKLKGTRNLHFYQINQIKRVRLVKRADGVYAQFCVDVERTEDIQPTHRTVGLDVGLESFYTDSFGEKIENPRFYRTGERKMKRSQRLVSRKVKGSSNRRKARNTLGRVHLKISRQRKDHAVKLARCVITSNDVVVYEDLRIKNMVKNHCLAKSINDAGWYQFRAWLEYFGKVFKRITIAVNPSYTSQECSICGVIVKKSLSTRTHVCQCGCKLDRDHNAGINILNLGLGTVGHTGTFAAPLATTGGTPATQWLLDASNALGETASTLSGESLIEQVVS

SEQ ID NO: 5489 - protein, 166 aa, unknown
  TnpB Polypeptide
MFLTRKRNHRTQDYIRKVARYIINYCMEHRIGTIVCGYNGDFKRSMNLGKITNQQFTQIPFGNLRETLKGLCERYGMKYIEQEESYTSTASCLDLDEIPVYKPEQPYTGAFSGKRVHRGLYQFADGRMANADVNGAANILRKSKQNFDYEELCRGLLDSPLRIRIS

SEQ ID NO: 5490 - protein, 405 aa, Aneurinibacillus sp.
MRDESASDEGRRVAFSQVRLFSLQAIRYNERRGGGEKQVKKHKGFKFRIYPTEKQATLINKSIGCVRYVFNHFLAKRKEAYETEQRTLNYKACSTLLTKLKKEVTWLKEPDSTALQNALQDLDAAYQKFFNEKTGYPKFKSRKNRRQSYNTTNNNDAIRIEGTQIRLPKLGLVRFAKSREVEGRILSATVRRNPSGHYFVSVLCEVEMQPLPNVEQQVGVDLGIKQFAILSSGETFENPKYLRKYEGKLAYLQRMMSRRTKGGSNWNKARIKVARLHEKIANCRTDFLQKLSTKLIRENQTICVEDLQVSNMQKNHKLAKSISDASWSEFRRMLEYKVEWYGRTLSFVAKTFPSSQLCSACGYRNRDVKNLNLRTWGCPECHTHHDRDVNAAVNILKEGLRLLEV

SEQ ID NO: 5491 - protein, 269 aa, unknown
  TnpB Polypeptide
VRKINRAVKIRIYPNAEQRVQIEKTIGCSRFIYNCMLADKMEYYKKEKKMLRNTPASYKKEYPWLKEVDSLALANVQMHLESAFHKFFREPSAGFPRFKSKKSSRKSYTTNVVNGNIFLEGKYLKLPKMTAVRMKLHRPISEKWKLKSVTVSREPSGKYFASLLFCCGNQAAKKDRQKNLLGSILRCRECVCFLPLKEPNIRCSTGTQRKSLHGNRESCPDVRKAVRIIRSRRKELHCAMKKSEIREKIFSINSVPVLPRASMQYAWKI

SEQ ID NO: 5492 - protein, 368 aa, Lactobacillus sp.
MKQVLDDLCDYRRYCWNKGLATWNDMYDLHTIERNSPRPGAYSVRNELVADKADWQYGLSARTLQLALADLGKAWQNFFDKSLPDWGKPRFKSKRAPRQGFKTDRAKIINGKLRLDRPRGVKAWYDIRISKQVDLAGILKVVSVYRENGQYWASLPFAVTVAAKPKTGENSAVDINVGHLNYTGGAINTLPNRLKKLYQRIKFYQKRLARKRVVNGKQATKSNNYQAMRAKLQRDYRKVTNIQHDIMQKFTTQLVTDYDKIVIEDLSVKKMQMAHVASKGLQRAMFGYFRQLLSYKCDWYDKVLILADKHYPSTQRCSKCGHIKSGNDKITLQGNATHKTKHHEYVCYNCGVTLERDKNAVVNLLALI

SEQ ID NO: 5493 - protein, 484 aa, unknown
  TnpB Polypeptide
MIEDPATPGRCAVCPGKRPKPSEEIVLRSGVRTPICADCRLPNDVTASIVSREAFRCTLVPTAEQETMLRKHVGLARFVYNWALGRRTAWWDANKALPKAERTSEPTAGPLSKAWTIEHPEWSGELMRNTVTYALDAVDDAFKNFFRRLKLGIKPYGFPRFKKKGDCRDSFTIQDQSFRAEPRAIKLGKMGMIATHEYIVPTPTVRRKIVARQRMISGYAVTEHVSETVGNPGQTRYLTGRVLRIVVSRQNNKWFAAIMVERERLAPPLRPKNVIGVDMGTSRMITTSEGERFPASPELDRLAKRLRKLQRSQERKDPTSKNYAKQAVEIAAMQRKVADRRNHYIHGLANHLVDNYSVVVMENFDVRELAKRSGPTRGKRGAAIARRRIMQSGFGELRRVVAYKARWRGAKLTLVSGRTDQTCAACLVANEAMRERTDSKFSCPSCGHKTTRQDNTAQLLARVGRGEATSFDGQPSRVGTGSPI

SEQ ID NO: 5494 - protein, 593 aa, unknown
  TnpB Polypeptide
VQAHRDPLEAVGLQQRRLLLEEGAVGGHRHAPYPAHPRKHANQGLDLPPHQRLAPAHPDLFNPHRRKDPRHPCNLLEGQQLRVLEPDGLVRHAKVAPEVAPVGDRYPKLAGEAPEGVGEPARRDRAQAFGDLRMKIQPFPPKKGVEALLRVSSRGPLAFRHVAEFIRFRCIRTLRATKSVSQPHSSSELRGLLAECLTVTYNAIHYAEEHGIQNRRGMKGFYQGLKGAELPSCYKVACMTRACAVVKSRRKSEKRGVDAFHRRRLRLMVCVSSGFFITMKGRLFVPLKRDKYFDVQLSQHTVEQLGHKKVRSLAMTADSLSFCYSEDVKPTLVEKVFGVDRNEKNITFGDREIVTRVDMVGVVEIRQTTREVISSFKRNDLRIRRKLARKYWTRANHRVEQILHAATNSIVETASRNQAALAVENLVGIRKLYRKGSGQGVNFRFRLNSWPHWRAKRMIEYKSAWKGVTVIQLTKSETYGSSSTCSSCGEKLRNPAKDDVEHWRMLWCQTCKVWIDRDVNAALILSTRGRSRLDRSLSQPKEMEESRSQQAITSLPSTEEKGLAGEAVTGNGTTTLILRVDASKLIRRREPEN

SEQ ID NO: 5495 - protein, 367 aa, Ruminococcaceae sp.
MLKAYKYRIYPNNEQKVQIAKTFGCCRFVYNQTLAYRKEVYEKDKKSVSKTDCNNYCNRALKKDYEWLKEVDKFALTNAIYNMDSAYQKFFREHAGYPKFKSKHDNHKSYTTNFTNGNIAVDFEKGKVKLPKLKDVKAKLHRGFRGQIKSATVSQVPSGKYYVSILVETEHKELVHTNDSIGIDLGIKDLCITSNGKVYENQKIIRKYEKQLAKLQRQLSHKEKRSKNYDKTKKKIALCHERIRNTRKDYLHKISHEIISENQVIVSENLQIKNMVKNHHLAKDISDVSWYELTRQLEYKAEWNGRKYIKIDTFYASSQICSVCGYQNPDTKDLSVRGWICPECGTKHDRDINAAKNILAEGLRHIA

SEQ ID NO: 5496 - protein, 249 aa, Okeania sp.
YALRYLSLSWKRCFKKVSGQPKFKKKGKDDSFTLDGSITVGFNQIKLPRIGWVKTYEILPDNITPKSVTISRKADRWFISFNSREKETQITEKSVDVVGVDLGIKSLATLSTGEVFEGAKSKRRLEAKLSRLQYLNRHKTKFSNNWKKAQLKIARLHTKVADIRKDTLHKLTTYLAKNHSQIVIEDLNVSGMMANHKLAKAVADMGFYEFRRQLEYKCKLYGSELIIVDRWCPSSKTCSNCGTVKESLL

SEQ ID NO: 5497 - protein, 226 aa, Bacillus sp.
MMNKAYKFRIYPNQAQAILINKTIGCSRFVFNYFLSLWDHAYKETGKGLTYGTCSAKLPAMKKELVWLKEVDSIAIQSSVRNLADAYTRFFKKQNSAPRFKSKKNNLQSYTTKQTNENISIIGNKIKLPKLGLVRFAKSREVEGRIVNATVRRNPSGRYFVSLLVETEIQELPKTHSYIGIDVGLKDFAILSNGTHYKNPKFFQSLEDKLAKAQRVLSRRMKGSSR

SEQ ID NO: 5498 - protein, 401 aa, Synechococcus sp.
MLLRYRYRCEPTPGQRIALAQAFGCARVVWNDALALSREFHRRGERYPGGAALQKLCITQAKRTPERSWLGDVSASMLQQSVRELDKAFRNWWSSLSGKRKGPKVCAPRFKRRSNRQSIRICGKEFRPTEKGVRFSRIGELKLVWSRPLPATPGSVTLTKDCAGRYFASFVVEVERSKPEPNGKAVGVDLGLESLAVTSDGEKIAPPRFLRSALKRLRRLNRDLGRKAKGSQNRQKARLRLARAHARVADKRLDHLHKLSTQLIRENQTVVLEDLNVLGMVRNRKLARAIADAGWRLLRTLLESKAEIYGREVKIISRWEPTSQTCSACGHRDGKKSLSVRAWRCSACGAEHDRDVNAAKNILAARLAERQNACGAESKTDLSASGIEAGTRLDQEACHVS

SEQ ID NO: 5499 - protein, 382 aa, unknown
  TnpB Polypeptide
MTETPKTIRAHRIRLNPTPEQAAYFAKCAGIARFCFNWSLARWKEIKASGQKASFNEIKKEFRAKIDAEFPFVREVASCVIDEAVGDVSASISRYYKTKKTYQEAGNRKALARLKFPGWRKRRDGEGGFAYTNIAFRVDGHNLKLGRVAEPVNMTEPVRFPGKLMSCRITRRAGAWFASITVETEYPKPSEGKGVTAIHFGLRVAATISDGAAITQIKPPRFLMQAEHRLAQLQRGLSSKVKGSANWLKQKRKVGKAYQAVANARAHFQHTLTHGLVHQAETVVFDKWEVQNLIDLPDQMLEKGFYDAGIATIANQLEYKGDLYKTDVIAARLKASKMCSACGAVNEALKISQKNWDCPSCGARHDREINAVTNNRKYVEAV

SEQ ID NO: 5500 - protein, 214 aa, Thermofilum sp.
VEELLENLEVIAVVDVNSSHGFYFLAYDLRSGSFRVHRLKVPKIDWRRIKELQRNATKSRKPGAWATARCALRKAHRRRRAALLSAVAEATKELRGKRAVAFIDVPFDESLRNSGLQRTLRSFAKRLENSLGFHGIPVIERTLPSKRCPLCGGKLEEAERRGETRVMRCTGCGMVFERDSVPALHALKLFLEEAEVEELAENLARHYRLSAQRR

SEQ ID NO: 5501 - protein, 379 aa, unknown
  TnpB Polypeptide
MGMSTRTIVLTLKPTTDERAALERLRERFNAACDYISGVAWDAQEFNKVRLQRLCYGAVRADYGLMAQHTVRAIAVVADSYKADKVRRHTFCLMAAVVLDTPRLYRIAHNRASITTLDGRLKIQLGIGGHQRQMLAEAVKLAEADLMCDEKGRWRLKVCAHFPDVPASTPSDVLGVDLGIVSIASDSDGVQYNGAKVLGLRARYAHMRRKLQKKGTSSARKLRRKRSKREHRFQRDVNHVISKAIVQRAAQSGRAVAIEDLTHLTQRVKGRLKRSQRRTHSSWSYADLRAKIAYKAAMAGILVVAVDPCYTSQTCSRCGHGERANRQSQSSFLCRSCGLSLNADLNAALNISVRGRAVVNRPDIPHPGVLNGAGTSPLL

SEQ ID NO: 5502 - protein, 368 aa, Planomonospora sp.
MAQIVKRAYKYRFHPTPEQANELARTFGCVRLVYNKALEERTRAYTLQGRRVSYVESSARLTEWKRSGDHDFLSEVSSVPLQQALRHLQAAFSNFFAKRAKYPTFKSRKKSRASAEYTRSAFRWRDGRLTLAKMDQPLDIVWSRPLPEGAEPSTVTVSKDAAGRWFVSILVEETIRPLDPVERSVGVDAGITSLLTLSTGEKITNPKHERADRRRLAKAQRNLARTANGSANRAKARVKVARVHARITDRRRDFLHKLTTRLVRENQTVVIEDLTVRNLVKNHSLARAISDASWRELRSMLEYKAAWYGRTVVTVDRWFPSSKLCSACGALREAMPLGVRTWACACGAVHDRDVNAAKNILAAGLAER

SEQ ID NO: 5503 - protein, 396 aa, Planomonospora sp.
VAVRRSYKFLLRPTSKQAAALAACLEDHRQLYNAALEHRRTAYRKAGVTIRYGDQSAELKHIRGDDPDGQGRWSFSSQQATLRRLDKAFRAFFDRVKAGRTPGFPRFKGRGRFDTVEWPKDGDGCRWDSQPQHPTATFVRLQDIGHVRVNQHRPVRGRVKTISVKREGRRWYVVLSCDDVPAEPLPATGAVAGIDLGVVSLVTTSDGTHVANPRHLAATADRLATAQRDLARKKRGSQRRRKAVARVAALHAKVRRQRLDHAHKAALALVRDYDMIVHEDLRIANMTRSASGTIEAPGRNVAAKAGLNRSILDAGWGVFLQVLAYKAESAGRELIAVNPADTSRACARCGHCAKENRVTQAAFVCTACGHAAHADVNAAVNILRAGLALREAAEAA

SEQ ID NO: 5504 - protein, 294 aa, Moorea sp.
MIILEFKAKGKKSQYQAIDEAIRTVRFIRNSCIRLWMDNKGTGKYDLSKYCKILAKQFPFANELNSTARQAAAERAWSSIGRFYDNCKKKVPGKKGFPKFQKRGRSVEYKQSGWKLSPDKKSITFTDKKGIGKLKLKGTWDLWRETAKQIKRVRIVRRADGYYVQFCVSVDIAEELEPTGSAIGLDVGLKDFYTDSVGNAEPNPRFYRTGEKRLKFYQRRVSRKKKGSANRKKAINKLGRTHLKISRQREEHAKRLARCVIRSNDLVAYVRAACRKARFEGQKSGQKPLSCQVN

SEQ ID NO: 5505 - protein, 381 aa, unknown
  TnpB Polypeptide
MVKRRTAVRFRAYPTGEQQQQVIRTIGCARLVYNLMLESRNAYYQSRFGNPDIQLGEPLPTPAMYKKDYPFLCEVDSMALCNAQQNLAKAYRNFFQNPKIGFPKYKSKHSSRKTYTTNCINNNIRFENGGRYLRLPKVGPVRVRQHKRIPDDWRLKSVTVEQAASGRFTVSVLFEYETQAPEPVAPVNFLGLDYSSHGFYASSDGERAEYPRFYRKMEERLALEQRRLSHMAKDSGNYAKQKTKVARVHERIRDMRGDWLHKTANRLAGQYDCVCVEDLDMRAMSRSLNLGKSTMDNGFGTFRTILAYKLESQGKRLVKVGRWYASSQLCSDCGHRFEGVKDLNVREWACPACGVWHDRDVNAAINIRNEGQRLTALQQAA

SEQ ID NO: 5506 - protein, 398 aa, unknown
  TnpB Polypeptide
MLIYEYKVHGNNKQYAAIDEAIRVTQFIRNKCLCLWMDTRGITKNDLQCYCAVLAKEFPFAACLNSQARQAAADRAWFAISRFYHNCQAHKPGKKGYPRFQHDNRSVEYKTTGWKLEPDGKHITFTDGCGIGRVRLIGNTGQRIEEFPTKQIKRVRLIKRADGYYVQFAVDAERRIEHVQIGLHAGIDMGLKEFLTDSDGNTVANPRHLRKAERRLKTLHRRLSRTQKKSANRKKARKALAKAYLKVQRQREDFARKTASTLISSHDLIAYENLKIANLVKNRKLAKSISDASWGRFLSWLTYYGLVHAIPVIAVEPAFTSQDCSACGTRVKKSLSVRTHICSSCGLVLDRDHNAARNILEKAYRTGGQSGTGGQPHNASGQTASTRLSKRMSSKRAG

SEQ ID NO: 5507 - protein, 413 aa, unknown
  TnpB Polypeptide
MFGCQQVLISPDAELKAILEFLCGESNKLHNCGTYLARQLYFKTGKAPSKFDLHRDMSSNIHYQAMHSQVAQQCLTTVAESFKSFFGLLRGIKKGTVTQKPKLPNYRKPGLNLVTYPGQAVKLKENGLRFPLGSKVKAWFGIDCFYLPMPSNLEHKDIREYRILPRNGAFYLELVYKVQSVQAEVDPAKTLMIDHGINNWLTCVSNVGTSFIVDGKHLKSINQGYNKRVAFLMEGKANGFWSKRLAGLTEKRNRVMRDAINKAARKVVNHCIENKIGTVIFGWNVGQKDSANLGSKTNQKFVQIPTARLKDRIAQLCEQYGLGFVETEESYTSKASFVDLDLLPIYGAKPEGWKASGKRIKRGLYQTFQGWTINADCNGAANIGRKVAMMLGLNLSGISRGDLSAPLRIKLWS

SEQ ID NO: 5508 - protein, 400 aa, unknown
  TnpB Polypeptide
VNTARCYKFRLDPTPAQEHAFVVFAGCRRWAWNWALSRKRESYEATGKGIGYNALGYNALAAELVALKKAAPFLKGCHSQVLQQTLMDLDKAFKSFFEKRARFPRLKSRKRTPHAFRIPQNVTVVGGKVSIPKVGLVKARLHRPMVGTVKSATVKQESDEHWYVVFVSHIEVPDSVPACDKNFCRPCGIDVGLESFLTLDNGTKVSPPKFYRRGQRKLRRLQRVLSRCQKASRNRAKAKARVARQHSRTANRRNDFLHKLSHGLVARYDTLGVEDLNLSALVKTKLRGHAKSWSDAAVGSLMRMLEYKSLWNGGQVVKVGRWFPSSRTCHRCQNVQHLELSDRQWACVSCGVVHDRDHNAAINILSETLRILNLPVAAGSADTLRASGGSVRPATAGGPR

SEQ ID NO: 5509 - protein, 340 aa, unknown
  TnpB Polypeptide
MSRYRLLPSPAQEAVLREHCAHARYVWNLAVEQHGHWRPSWRKAGRDEGFRIVGRGRQWDVRRVSRKVGQVWVPKAGWVRFRWSRAVPPGVKSYRVTMDRAGRLHVAFAVIPGPVPAPGNGQVVGIDRGVAVSAALSTGELLHCPGLTARERTRLRRLQRRLARATRGSNRRTRVKHAIARLRARETDRRKDWAEKASTGIARRFDLIRVEDLQIGNMTRSAKGTRENPGRNVGQKAGLNRGILRSGWGLLVRRLQDTACGQVEKVKPALTSQRCSACGQVDRDSRESQAVFRCTACGFAGHADVNAAISIAAGHAVTARGGDGAARPVNREPHLLLPSA

SEQ ID NO: 5510 - protein, 387 aa, Pleurocapsa sp.
MLTRTFEFKLKPTTEQASLFEAWLIACRQVYNYALAERKAWVNSRKCAVNACSLSQEYIIPADTKRPNFASQCRSLTQARKDFPELGNVHVHVLQETLKRLEIAFVAMWDRGHGFPRFKSTKRMRSFNFKQMGVNPLQEGKVKLPKIGWVKMRQSRPIPEGFELKQVRIVRRVSGWYAMLVLKLEVDVPNPMPHGEPLGIDLGLEKFLATSTGKLIARPKFFVSLQSKLKSLQKKMSRKKKGSSNWKKAGFKVAKLHEHISNTRKDFHYKTAGLIASEAGMVFAEDLNLKAMSRGMLRKHTLDAGFGQFLNILEFVCWKQGVYFNRVDPNLSSQTCPKCQTLTGKKELSERVHSCPTCGYTTDRDVAAAQVIEQRGVVAVGRTVQVC

SEQ ID NO: 5511 - protein, 397 aa, Pleurocapsa sp.
MTERAYKYRFFPTAEQENLLRRTMGCVRLVYNKALATRTIAWYERQERIQYKETSSLLTGWKKIENLDFLNEVSCVPLQQCLRHLQKAFANFWGKRAKYPRFKAKRNGGTAEFTKSAFNYRNGSLWLAKCKEPLNIVWSRLLPEGCEPSTVTVKLDPSGRWFVSMLVDDYTIETLPPTKKKVGIDVGVSSLLSTSDGEKIANPKHFNRLYQKLSVAQKELSRKTKGSNNRHKARLKVAKIHAKIKDARTDFLHKLTSRLVQENNVIAIEDLAIRNMVKNHKLSRSISDAAWGEMFRQLEYKCDWYGRKLVKIDRFFPSSKRCNHCGFVVDKMPLDVRTWDCPNCGTKGIDRDINAGKNILAAGLAVIVCGADIRPDNHNVKGQLRKTRKGRKQKPKS

SEQ ID NO: 5512 - protein, 296 aa, unknown
  TnpB Polypeptide
MTVVAAHFDPHGGIAYDQRIMSFKAMDRVSILTLTGRILVPFVGGAYHRARLEGVRGQADLVLRKGKWYLYVTVEVPDGAPVDPEGWLGVDLGIRNLATDSDGECHSGSGVETVRQRMLRLRGALQAVGTKSAKRHLKRLSGHEARFRSDVNHTISKRIVQKAKDTARGVALEDLKGIRERTTVQHGQRAMHGGWAFFQLRAFLEYKGRLVGVPVVAVDPRNTSRECPECHLVDKRNRRTQAEFCCVACGFVAHADWVGARNIAARAAVMRPIVAGIGRETHSCESSLSLAASPSL

SEQ ID NO: 5513 - protein, 418 aa, Mycolicibacterium sp.
VVTGRRFRVEFTDAQAVFAEQIGAVCRAVWNTGLEQRGEYRRRGAWMNYGPQAKELAEAKTEHSWLRDVPGHCLQQTLMDLDKACREHGTFRVHWRSGRRWAPSFRFPEGNKMVVEKLSCKHARVKLPKLGWVKFRASRSLQGETVCSATLSRGGAHWFVSLLVDDGIAAPAEHAAPGTAVGVDRGVVVATSDGELADREFVTTGERRRLVALQRRLSRAAKGSANRTKTRRALAKLRATERHRRQDFCVQTAHRLAQSNAVVVLEDLKTRNMTRRAARVEDPGNAGAFLPNGASSKSGLNRAVLGKGWYRFEQALMSVSRYTGTQVIKVPAAFTSQRCPVCGHVDPKSRESQAVFRCTNCPHGPVHADVNAAKNVKNVLAAGLAVTACRETTAPAGVAVTSTQEPAGNREELLLQPV

SEQ ID NO: 5514 - protein, 338 aa, Mycolicibacterium sp.
MDLDKACREQGTFRVHWRSGRRWAPSFRFPEGNKMVVEKLSCKHARVKLPKLGWVKFRASRSLQGETVRSATLSRDGAHWFVSLLVDDGIAAPAEHAAPGTAVGVDRGVVAVATSDGELADREFVTTGERRRLVALQRRLSRAAKGSANRTKTRRALAKLRATERHRRQDFCVQTAHRLAQSNAVVVLEDLKTRNMTRRAARVEDPGNAGAFLPNGASSKSGLNRAVLGKGWYRFEQALRSVSRYAGTQVIKVPAAFTSQRCPVCGHVDPESRESQAVFRCTNCPHGPVHADVNAAKNVLAAGLAVTACRETTAPAGVAVTSTQEPAGNREELLLQPV

SEQ ID NO: 5515 - protein, 540 aa, Actinomadura sp.
MRPIAEPFVAAGSSGVAARARLKGLTARDENALREVGAHLGSLAGRDLKARCEAGLAHDADGWAARKRELTGESSARWAGAITKATHDQWALARRCQLAHLSGLEAGIATIERRLSVPVGAKDTRRAAGGYRSRREWFAKSRRLHVLKDRLAAAQADWDAGRVRVVRGGRRLLNNRHNLEAGLSEEQWRARWEAGRRFCQADGESGKRYGNETIRVTPDGQVSIRLPAPLAHLANAPHSRYVLTARVAFAHRGAEWADRICVDRAVAYRIHHDPDRGRWYLTASWQRPAIPTMPLEAARARGMIGVDTNADHLAAYRLDAHGNPVGDPRRFGYDLSGTAAHRDAQVRHALTALLHWARRCGVAAIAIEDLDFAREKTREKHGRRKRFRQLISGFPTGKLKARLVSMATEAGLAIVAVDPAYTSKWGDQHWRKPLSSNKRPMTRHDAASVAIGRRALGHPIRRRTTPPCAHRSDEHRHRTVQAGPSAQGREGTRPPVTERAHDARPRTGTPQRTRATSASNTVRDTRSTGTWVQNSLLDTV

SEQ ID NO: 5516 - protein, 328 aa, Streptomyces sp.
VVAVVLRRLDNAFAAFFRRVKSDETPGYPRFRGVNWFDTVEFPKDGDGCRWESTSHDPVSRVRLQSVGHVRVHRHRAVKGRVKTVSVKREGRRWYVILACDDAPAEPLPATGAACGIDMGIAHFLTTSGGEHQPNPRHGKRNADALAEAQRALMAFPRRKRENRTARHRRAVEKVASLHRRVRRQRTGHAHKAVLAMVRDYDVMAHERLSVANMVRTPKPKLDPGMPGGFLPNGAAAEAGVNKSIHDAGWGVFLGILTHKAESADRVLIPVDPRNASRTCPACGHVSGENRTTQEKFECTRCGHTANGDHIGALNVAIRAGLVLPDVA

SEQ ID NO: 5517 - protein, 416 aa, Streptomyces sp.
MQLRYAFRLDPEPGQRVALARAFGCARVVYNDAVAARERARREGAAFPSAGALSKTLITEAKQSPERRWLSEVSAVILQQALRDAERACINFFSCLKGSRQGARVGAPRFRSKRDARQAIRFTANARWKVTGVGRLLLPKIGEVKVRWSRSLPSVPSSVTVIRDAAGRFFASFVVETDPDADLARMPDADGLPAVGIDLGLTHFAVLSDGTKIDSPRFLRRAEKKLKKVQRELSRKQKRSKNREKARLKVARAHAQVADARREFHHQLSTQLIRESQAVAVEDLAVKALARTRLGKSVHDAGWAQFLAMLEYKAQRYARVFVKAGRFEPTSQVCSACGVKDGPKPLHVRTWTCTHCGTVHDRDHNAAKNVKQTAGLAVTACRAQVRPEPKVPAQREEAGSHGIHTGTRAAQRHSTR

SEQ ID NO: 5518 - protein, 384 aa, unknown
  TnpB Polypeptide
MPRHSQPHSPAVVHRTARAGLRLTRGQRRRLLGLLLSAGDMWACVLELNAWRRARQDAPLVSYQGLCRELAVAGPGCFGELDSAGARSVLRRYSDAWFAAAARRKNGDTSARFPRRRRKMMPVRWYHGTFVLEGRRLRIPVARGCPPLQVRLDRDPPYPPGQVRSVTLLYDAGRLWADVTAEVPAAIYPPGAEPDPGRVAGVDLGIIHPYAAAGPGGQALLVSGRAVRAEHHLHLKDTKARQRAVARRAPKPGQRGSRHWRHYRRRQRIVEARHARRVRQAQHEAARTVIGWAVARRIGTLVVGDPRGVLDLAAGRRHDRRTRDWRVGHLISVLRDKAQQAGIALTLVDERGTSSTCPACRARSPGRAAGCSAARAAGFRATAT

SEQ ID NO: 5519 - protein, 639 aa, Herminiimonas sp.
MRPTDCPYDVLTLMLARPKGALEQVCLVLCHQAKNLFNTANFLIRQVTSAYQYDAQAKVNRLRPELQANQAAVIAHINAQIVSINAARKARHPEKVAKATSLNKEAPDLKLIPTLDAVMPKLAGTLLDATLLDNAARNWQSHDGDAVYKRLPAVMSQQVIGRLRDAYSSFFEALKVYAVAPATLTGRPRMPGYLPKHERFVIELPIAAISVKRGMEADGDKPATPDRGYLPSLKGKTIPVDYAETSVLDDETMAAFSAFDLVGAVNTACHKRGWKDGCTPQHVRIVPRRTGVKMEAVVRVPNAYPANSFLARLVQDHGPALAELTKEKERDKWIVNYLKDLPAKVLPRFAAIDLGTNNIATVAYSTGHQAAVHTGGHFDAVMATMNEVIDRFVSENTPLRARELQGKKNALRKEKHTLTKAEHRELGALLKPIYEEPRYQDLTARREVWKEQYLHRLSRGIVRHCADRGIEVIVIGKNARWKDEVDMGRQQNRRFCQIAHARLIEFIRYKAQLLGMAVVTVEESYTSRTSFVANETLACYGEKTPMAVPADSLTSLSSASPDVAPVTLATSCGKRSSNRHWFVHSQPRECLQRVHSDVNGAMNIGRKLFAQFAWHARLSLKFVLWRLSERCGVVPVQLQ

SEQ ID NO: 5520 - protein, 391 aa, unknown
  TnpB Polypeptide
  misc_feature (293)..(296): Xaa can be any naturally occurring amino acid
  misc_feature (347)..(350): Xaa can be any naturally occurring amino acid
VAQKKTDIVNLAKAKKKGIKVGALKFKSGVNCLPIITGFTQILDGCRITIPGFRKLRVHGLNQLHQFEKFELADAKLIHKASSYYVKISVMLPKEKRIPTNRNVGLDFGIKDSITTSYGDKYKCNVRETDRLKFLSRKLNRRGKKKHEKGSKLYYRCLRQLKREYEHIANVRKDMANKIYHGLVTDYDVIYFQDEQIKNWHKGLFGKQVQSSCLGALKQRLVALEASGRSFKISKWEPTTKMCPVCGCINHPTLADRIYKCGCGYTMDRDIHSARVILMIGSSQRAECLEQAXXXXLKYLSRKLNKRGKKRNEKGSKLYYRCLRQLKREYEHIANVRKDMANKIYHXXXXRCRRLYLRLCRNRRSHRSRSRSPCRSPCTPWSLPGNPGNPA

SEQ ID NO: 5521 - protein, 497 aa, unknown
  TnpB Polypeptide
  misc_feature (489)..(492): Xaa can be any naturally occurring amino acid
MLSDTKRTEIIHRAEEIRAVRNEISEVFFSNMLGFQDMTKFEAFNFFNPTFTDRMSSHYLKKAIEDVWKAYQLRYDAIRKKIEFELVGKLIPSFYKINAKGHKKGDLKSIERHAKKTELTKVLTWLARYGNDNSVYWLESKIPTVDESKQKFYRTILRCISKFGFDRLMRLALSRRETVFGEYSSRGKITFESLAFSGRSRIKRPIVDARRNETGKFDYYIEISWDWFDDGYRGDSKNTMCIPFKYNRAYHRALQRYCNGTDTSYTIVIRGNDIHFVLARDGYRYKHDEEITEENTVGIDVNSKHNMFALSTGEFIPHDEALIADLEDALVKVDAKQKAYNARFKKDEVHDAFKISKKDKNRIEAITTKLNESNKRTIANLCKQLAELGIRHIAMENLDGFRGRKLHSEDSKGFNLGRLHLRIGLSSLKDEFIHIAPMYGLLVSLVQAEYTSKMCGECGCIDDRNRQTQEEFCCVECGHSENADIHSAXXXXTEYPR

SEQ ID NO: 5522 - protein, 404 aa, unknown
  TnpB Polypeptide
MLSYNVKLNFPGKETEQAMQDCLKTEADCYSYVSALLETTGFREHPISRYDVHYKFYYAIRKQYPTLSSQMVCKVIQEVVASWKTCLQTKENFNTPKKKNLSMTLDKRLYSKLTDHSVNITVPGFKKVQCTFDTYPLIQYMFDNYKAKNCNIFYRDGQFWLIVQFETPELDLVNEDVLGIDRGIKRLITCSDGTAISDKEFNRRRRQIRYLKRCLTSKGTKNAKRHLKKLRRKEARMSKDYTYQVANYILSKPEGIIVLEDLTKIKKTTSRKKITTESGEKKEIKRKRHNNRFGQVALRQLQTVLEYKAPLVGKRVATVEPAYTSQLDCRGLPNGKRLGTRYYAADGLVFDADWNASINIANRYRPDTFSLPICGKLNLLGRPSSTGQSRELLGNRGSLKPTVL

SEQ ID NO: 5523 - protein, 382 aa, unknown
  TnpB Polypeptide
MEIRYTTIKARLYPNEVQAELFEKTFGCCRYIWNQMLADQQRFYTETDLFFIPTPAKYKKEAPFLTEVDNQALIQEHNKLSQAFRMFFKNPEHFGYPKFKRKKDDRDSFTACNHEFTSGPTIYTTKDGIRMTKAGIVKAKFPRRPQAWWKLKRITVDKTRTDKYYCYILYEHTEKEPVLVTPTEETTVGLKYSMQHFYVDSEGIKADPTNWRRQAQDKLTKIQRSLNRMQPGSKNYREAVQKFYRIHEHIANQRRDYIHKESRRIANAWDAVCVRGDEMAELNRITNQGNVFDSGYGMFRECLRYKLARQGKQLLVVDRYFPSTRTCAVCGCVTPEEISTKRRTWTCPHCGTVLNREANAAKNIKAEGLAQYFHMQERRESA

SEQ ID NO: 5524 - protein, 252 aa, unknown
  TnpB Polypeptide
MDFDTRSATFYRNKVSLATVEGRVEPSFEARQTVRRPTSGTYSLRTTSSARVRFGTTRATDEFHLNISMRRTDGDDEVSEDTGHPDQTVLGIDLGVNSLAVSSTGTFWQGDDYDHWCREFEKRRGEMQHCGTQAAHKALLRLGKREEAWRKQYIHTIANELVSEAIEHDCDVIAFEDLNDIREGLPQAKWHHVWAFRRLFEYVSYKAPEQGVSVEQVEPNHTSQRCSRTDCGFTHPNNRQENTLSARSAGTK

SEQ ID NO: 5525 - protein, 523 aa, unknown
  TnpB Polypeptide
MKKSKTPTFLLELPLQVNQQQAKRLRAHFEAARCLYNALPGQAMKRLQRMREDPRWQQVRRIPGTQKQERSALFSQLREEYSFSEYALHAFATRARTAWIANHIDSNTAQKLATRAYQAANRVCLGQARKVRFKSRGRGLDSMEGKTNQQGLRFILQVPEEGSAGYLVFQQDRLPALIDWNDPVVKHGLDQRIKYVRLLRRRASSPQAQGADGEGYRYYAQLVLEGIPYQKPKHHVGTATIGLDFGPSTIAIVPQTGRARLLSFCSELQTQKHKKRRLQRKLDRQRRVNNPENYDAKGCVKKGTLSWKDSRGYTVTRRRLASQERKLAAHRKSLHGRLVHEIVRTGNTIITEKVSYKAWQKQYGKSVGAHAPGMFRGLLKRTVERTGGILHEVPTGSTRLSQYCHGCGSYARKKLSERWHQCSCGIGPVQRDLYSAFLACHLDVKILRPSIARQDWESAETRLRAAMEDVMQRANAGEALPQSMGMSRVRARLPRSRTSSPQELCCPQGSREGGARWLEPPAF

SEQ ID NO: 5526 - protein, 479 aa, unknown
  TnpB Polypeptide
LSIPANTTWCGVPSIAALSWSMALMFVLKRLFRASVLNRTSSYSNWKSCQSMSISWWKLILNTGFIALYARSKAVLHGSCVRDTPGCVPDCLPSGPTRTLSPPLVGLPWKWSSSTSKTRNGSSMMQRQLKLRLNTGQEAQLDTWLFQLTGVWNWAIRKIDQDAKDGIYYTPKDFHNLLADHGKKLGIPSHTLQGMLDAAYTAWQRCYKKLAKKPRLKGQRNKLTSLPFPDPFTTPNDTRIHVPGIGYVRFHTQDIPAGRLKSGRIVKRASGWYLCLFIDAHPQPIAHCGDGAIGIDPGFHSLLTFSTGEKIAHPHERRQTEQRLGQAQRGGRKRLAARRQERLANQRKDRNHKLSRRLVADHHKIVWSKDNDKALARSFGKSVASAAHAQLRGMLAYKCTASGRQFLEVPSRFSTKTCSACGSLSGPTGYAGLSVRQWTCADCGSAHDRDVNAAMNTLHAGVGMTHESHRKVASGIPRI

SEQ ID NO: 5527 - protein, 405 aa, unknown
  TnpB Polypeptide
MRLGVRMQRTNVIQLMPNKKQERILRECMLLSSCVYNSANYIVRQQFFNKESVSNFRDLQVKLQKSDDYRLLGRSYALPRLQIYGETNSARFKLIKANVQDKVGLPKYLKNRKTNTTIPSYLVIDGCQYSLSKTKATIPLSRAMRKKYDIKYFKIAYNGILKHKGKQQRGQIHYKNKKFYLYQSVEVTTPIMKSGNIAGLDLGIKNLLTVTTNTNQEKIIGSKRFFKQWQHYTDLIAQEQEKLSKINRKASNNLSRLYYKRSVYQDNLFNNVVAKMFRFLKRNNISTLVIGDIKGIREHNDKGKKLNTMMHNYWSFDKLLHKIENNAEASGIEIVMTTEEYTSRTCPICYDNSKENVKDRIFQCTFCGYIDHRDIIGARNIMIKGMHDQSNQSVHRQEILPLEVL

SEQ ID NO: 5528 - protein, 601 aa, Rhodococcus sp.
VSGPGSTAPRQFAFTTRAHVAVDDATGAPIGLDDVDTRVGWLLDLITAAGTELTARLWQPVTFDVLAAGVDRQDRRMLAQGHVAAARLGWNPHYPDGVYVPSRVSRVVTAQVMASLRILAYRDTAITALSERFDPATGRITPPTAAADMVPLGFARGVRRQLVARARRTEDAQSARLRITDVQGPPQTSAMARLSAADRQLAQITVIGRELVLTVKLPTSPAPTGRGQWRRVRLTATIPGHLHGRAITDWHLPTLVLDHRGLLWRCAATEFVPGGDLGSATVAVGVDWSPSTLGAAAITTENSDGLSSDFRGWTYDDRGLGTKLARLQTEGQLLHRKAARLEKLAVAAEPEVRARLETKIAVLNGHRTAVGVKRGKINRELGFHFARQTADYAEAAGATVIAVEDLTTLETRGHGRVNNNRAAQSARRKAVTALAHTAAGAGVTVVSVPARGSSAQCPGCDEPLSRPGGYHDAWCSRCLVGGNRDHIAGVNLAKRALLGKTKVTRRRGQLPAVRVAEHAPVRKSRDKTSPTPSRPRHRRVRRSRPTVTPRAGVIPKQHVPAPRASVWDTVKLAPPHGDAGSRDTRPSPTHATPAADSMRST

SEQ ID NO: 5529 - protein, 480 aa, Clostridium sp.
MPQMSFDNLFRKGGRHMKIITSYNIPILQQARVTEDNPCVYGKVDDRLMAVCSACCLDALKYCVDVFLTEWDYLAAFPTTAKPGKPHRKRIADTLIHSTKDNQAKYPEFDRRFLNMPAGVRRALIADALGVVSSYRSNHDNWEKTPADERGEEPSIGYPTRYELTFYKSERGIDELPDGAIRLKLYNGTSWEWYRFRMKPSDARYIHALSQTRSMMSPVVIKKNGKFFLRFSFEEKQELVDDSNPLNYLVMAVDLGINAAASWCVMDKVGTVFGKGVIHLPNEEGRLNHAINRKRQYQQAGKKSHCVYRWVDQANERLSIETTRKLMEVAALYNVDCIVFEHLDTSGRKKGGRYRERIHLWRAKDVQKRVELQAHRNSMRISRVCAWGTSRYAYDGSGVTDRKSVYRWVHGEKKYNYSICTFQNGKIYNCDLSAAQNIGARFFLREYAKCEDCPKIPKTPQRTMKTLWDLVRVYKGCQAA

SEQ ID NO: 5530 - protein, 348 aa, unknown
  TnpB Polypeptide
MKQVIVIKLEPSQEQQKALLATVEAFNRGCQYAADVAYEKRLANKIALQPFVYGTLRSEFGLSSQMAIRAIAKAVEAYKRDRRIHVKFDPHGAMVYDPRIMSFKGLTQVSLMCLDGRELVPMRYGAYQAARIDRAKGQADLILRDGTFYLYLTVEMPTPPPIDPVDVLGVDLGIAVLAMDSDGEAHTGEGIKQCRRKFSRLRVGLQKAGTKSAKKHLRRNHRRESRYQRDVNHVISKHLVQKALVGQKALAIEDLTHINRQTTVRKTHRYARLSWAFHQLRQFLTYKCEAAGVPLYVIDPRNTSRTCLACGHCAKENRRSQSEFLCIECGFQADADWVGSVNIRKRGL

SEQ ID NO: 5531 - protein, 255 aa, Caldalkalibacillus sp.
VVNGNIKLADGYIKLPKLKWVKLKQHRQIPVHHIIKACTITKTKTGKYFISILTEYEHQPVPKEIENVVGLDFSMNTLYVDSEGERANYPRFYRQALEKLARAQRVLSRRRKGSNRWHKQRRKVAQLHEKIANQRQDFLHQAARQLANRYDAVVIEDLNMKGMAQALHFGQSVHDNGWGLFTTFLQYKLEEQGKKLIKIDKWFPSSKTCSCCGRVKVSLSLSERLFCCECGFVADRDTNAAINIKKEGLKQLGTA

SEQ ID NO: 5532 - protein, 222 aa, unknown
  TnpB Polypeptide
VDKVIEQIEYRRANFDCKLCKYNDDEKTICSEDCSDALIDGLIEIVKSQCVYRWIRNANRALSIETARKLIEVAVLYSVDCIVFEYLDSQGKIRGKKFRERIHLWRKNDVQKRVELQAHRLGMRLSRVCAWGTSKYAFDGSGMVDRHSIYHFEHGKKVYNYSLCTFQNGKIYNCDLSAAQNIGARFFLREYQKKGVTGFPSTPLRTLSTLREFVNNGLPVAA

SEQ ID NO: 5533 - protein, 423 aa, unknown
  TnpB Polypeptide
MAQVLTISCKLKVSVSQAAKLDATLDAFAKALNCVNENTPEKIVNAVKLQSLCYREIRTRFGLSSNLAQQVCRRLAGARKVAQQKNRPVKAFKSGFVTYDARIFSFREKDWTVSLTTVEGRERFELDIGHYQRGLLAGSNPKAATLVKRQGGSYSIQIGVESEVPEPEHAVKAIGVDLGRRDIAHTSEGDNWNGQQLNQVRDHYSRLRGVLQRKASKGTRSTRRRCQQLLQRLSGRERRFQTWVNHCISKSIVARALATHRFIALEDLTGIRERVNRQPRSKTERRRANSWAFYQLRQFVHYKAMRAGVKVVVVSPAYSSQTCHQCLWIGQREGKHFRCVNPACGWEGDADLNGANVIALLGVAVNQPPYIPPHAGGQEGGSWLACQLQGYQKPAPYPPQSPRPPAPRIRGVGGLEGGAVGAG

SEQ ID NO: 5534 - protein, 419 aa, unknown
  TnpB Polypeptide
MILTYCYRIKPSPEQETVMLHILELLRRHWNYALGQRLDWLRSTRCSIDRCSIVSEPIGEVPEKVNYYTQQAALKETKELFPEYKNIYAESQQVNLQRLNKAWERWLFPDKSGKRGGRPKFKKQGELRSFVYPRMNCAKAGAFLNNGVLKLSKIGQMPVIVHRPIPDGFTLKTCTIVYKADGWYCCVQIEDSSVPELLPLDNVKSVVGVDVGLKEFLTTSDGQTVPVQKPYRNAQKHLSRQQRFLARKQKGSVDYKKQQNKIARIHQRVGRIRENFHYNTAHKLVKQYELIAVEALNIRGLARTRLGKSILDVAWGSFIDKLVAVAVKRGIHVVKVNPYGTSVECSNCGAKVPKTLSIRTHECHKCGAVLDRDENAARNILQRALNAVGLIVSAGGGLGDAQPLKPEAWGYFGEQLSLF

SEQ ID NO: 5535 - protein, 612 aa, unknown
  TnpB Polypeptide
MDDDEDNFTVVKSTLNRFCNNDFIKSHLQDYCFQTNLLLNESYLFVNLHVNRILENNFQSEYKTLNQTFFNHVFSGLKTNVKLDSKRFKTHELNLTYELYKESLPTNFQHADIKMKTSMLNECAQQLRINTENHLKLNFFKRFSKYIKLRYLMDSEWKTVYDITIHILMHSKQFKKSTNNEIKTHPLVVQFRERFLHKTIDELFKKDVWIVLKLLREILIFNEEHLQHEQETNLNYKLRTRNSRLFSILPTKQLSNLSYMVFTRVPLYYLLKTSLTDDFITIQNEHDVEITNHTHFTETTYKRVCNELFNIRYFETQKKEFCHFKTDGKTVSIVLKPREEKQTKKNNDKTTKPVDKKDLELIGIDPGLRMVFVGCRNTIDPSTNKNLIMKLSSKQYYNDIKSTRMSMKLKKLVERNDLSNLFSSTAPSRRTSNIDQLCLCIRTITEKLHKLIRILMESKVREWKFDKYRFQQKKIVEICKMLSGKRRPDEERNVIVGWGNWSNPNNSIIRGHKRCPVKRIVKELRRWCRVETIDEFNTSKKCSKCYSDTEKMKYLQAEKMLTVNDVLRCKNEICRTYFDRDINGARNMLKKLKIKLGLEIEVEELSRKTVEV

SEQ ID NO: 5536 - protein, 328 aa, Tolypothrix sp.
MWGKHLSCVKLQSHIAKLRKRNLFWQSVGSQAVQDICQRIEKAYQLFFKHNKKGVRPPGFKKVRKYKSFTLKQAGYKFLDGNRVKIANRVYQYWNSRKIEGTVKTLTIKRTPLGELFMVIVVESVIEPEMKFETSKIAGFDFGLKVFLTVSDGSKIESPQFFKQSLNAIKKANRQHSKKMKGSANRERARLNLVRKHESIANRRSDWFWKLAHDLTNRFDVLCFETLNLKGMQRLWGRKISDLAFGEFLQILEWVAKKKDKKVVFIDRWYPSSKTCNNCGHILKDLDLSIREWHCPSCQSVNGRDENAAKNIQAVGASTVGVGNVRQS

SEQ ID NO: 5537 - protein, 364 aa, Psychrobacter sp.
MKTLKLRIKDKHANQLNKLAGAVNFVWNYVNDLSFKYLQRTGKFFSAYDIATYVKGSGEFLNLHSQTLQAITETHAKSRKQFKKAKLNWRTNHPKAKRKSLGWIPFKNTAIKYLGVKKAGKKSLKSTIQFSLAKGKKLTIDVWDSYNLALYTINTCELVQDSRGLWYACVTVKEYPKTACGDSQVGIDLGCKDSATTSDSVKLQTKLTHKYAPKLGIAQRANNKKRARAIHAKIKNTRQDLIHKFTSKLVKDNNAIIVGKLHSKSFTSSKLAKSVYDAGWFEVKRQLTYKCENAGCHYDEVNESYTTQTCSCCGSRQNSPKGRAGLGIREWLCECGVTHQRDINAAKNILALGLERLAVGIPSL

SEQ ID NO: 5538 - protein, 566 aa, unknown
  TnpB Polypeptide
  misc_feature (488)..(560): Xaa can be any naturally occurring amino acid
VEPEEGRRAGADGGHGPQRGGPPAPLPPPRRQGGASRLMPRPRAKTAHPPVHRTDLLPSNLTTSKEMKVLALLAAYRRGAVLLGREQWRLLHETGRFNKNHDTDKVTFAAVIGAANRVQMCRYQVVGQLQGWISNRANEFRDVVQGGTLDPDTKHMLHVINRLGSWFVRRDVVMRDTGEIVPDHIRRLARSIMRHVMSRHRRPDLSRISMRLDQRAALLAPPIKATQRGRVDWWVRFDTRERGRKMNVPLLGYERHRARKGTVANGVLVTEDRETRRLLFGVVTDEGAACADARAAYRPERDVLALDFGLSTLFATDEGQLLGQGWLPRLRAYDARIAAIARHVQRSGGKPRDSRRYRDAVTALRGFIRTEVGRVLNRLVATGRPASLALERLDFRNPALSRRLNRIVQNCGRSVIEAKLRDMENRFGIASEEVNPAYTSQTCSVCGYVDKRNRRSQSAFGCLWCGHQMHADLNAARNIGRRRASPIXXXXXXXXXXXXXXXXXXXXXXXXXXXXXXXXXXXXXXXXXXXXXXXXXXXXXXXXXXXXXXXXXXXXXXXXXPLGLVA

SEQ ID NO: 5539 - protein, 380 aa, Trichococcus sp.
MKLKGIKIKLKPSINQKDQIDINLNLRRFVKNQMLAMQQARYGNGGKYLGKFAMIYCLKGLKLEFPFLKLAESTCLEYAIADLDQAYQRFFTGQNNRPNFESRKRPHNSYKSKGINNNIQVVDNHWIKLPKLGLVKAYGLERIQGKIKSAVIRKEPTGVYSATIQVEYEPNAWAKTGKQVGLDLGLTDLVSQSDGYKLKNKQFERAMAKKRRIWERKLARRRLQAKTKMEEARKAGVELELSDFKNVQKAKQQVARINKKIANQRENYLQQYTTKLVKGFDTIVMEDLKTKNLLQNHHLSRSIADSAWAKIKSMLTYKCDWYGKELILVTPQYTSQICSACGENTGKKPLHIRAFVCPYCGTHHDRDINASINILNKAFA

SEQ ID NO: 5540 - protein, 400 aa, unknown
  TnpB Polypeptide
MLLAHQIRLTPTNKQRTFFAQCVGASQFAYNWALDEWQRQYVAGEKPHEVPLRQLLNGIKATEFPWMLDVPKTVPQQAIKNLGTAFQRFFTKLGSYPKRKKKFRHDSARLDNGPPKKGSDAVQVKGKKVRIPRLGWVRMTEPGRFAGQIKSCTLSRTAEDWFVSLMIDTAPPVPTKKAPGSVVGVDLGVKTMATLSTGETIVGPKAHTAKLARLKRLDRVMARRKKGSANRQKAAAHRAKCHQQVANIRADFLHKLTTDLSRRFETLVIEDLHVSCMVKNHHLARAISDMGFSKFRQQLTYKVEREGGQLLVAPRFYPSSKRCSRCGHVLAALPLSVREWPCPSCGIIHERDQNAALNLQSLAGSSPASACGVASAGRRPVVMVKLAPVKQEANAFALQG

SEQ ID NO: 5541 - protein, 380 aa, Lechevalieria sp.
VKVVVQVRLLPSAVQAAALLETLHACNAAADKVSKMAFERGVHSRNDLQKLVYADVRGFGLGAQAAVRTIKKVVDACASLQASIRTGNLAGPRRRKAEGKAIRFRKGAAQPFDDRMLSWRYDARTVSIWTTSGRLKGVRIVGHPAQLDSLRSHRRGETDLVRRDGKWLLIATCEVPEPEPVVPSDWIGVDRGIVNLATTSDGTNFQGLRLRRYRRWQERKRAELRVKRTKSATRRLRRRARREHRHVTNVNHVIAKKLVAVAQRTGRGIALEDLRGIRNRVQLRRDQRAIRSSWPFHQLGAFIAYKARRAGVVVITVDARFTSQMCPGCGHTARDNRRDRDRFCCRRCGFAGPADHVAGINVRNRARSAWVLVNVPEPAA

SEQ ID NO: 5542 - protein, 524 aa, Nitriliruptoraceae sp.
MSSDTGHVEAAECGHVTRAFEVVLDPSPSQQRWLRSYVGSMRAAYNWALAEVRDNLEVRRAERDRGVPEDELTPALSWSAFSIAKRWRAVRDEVHPWHRDVSIHAFETGLNNAALALKNFSESRSGKHRGPKVAFPKFKNRHSRQAITFVELADGVDHRHWINPDSNEHVRLMLPRRAAEGSWERRHTRPKAQQEAGRDRRSEIAWLHSHQSEAVREVWQLCDTGRAKVQALTIKFEGGRWKAVFRLRLLDGSTRLRNPGEPVKHHGGAIGVDLGLKHLVTLDRPVPGLTDEHGHVPNPLVLERHLTRLRRLDRAIARCVKGSKNRAKLLRRRAKLHGKITSTRKLFLHELSRRLAGGFDVICVEDLNVAGMARRKGLRNGRSVAEASMGELVRQLDYKTNDRSASMVRVGRFYPSTQTCSQCGARAKLALWQRVYHCEGCGITLDRDVNAARNIAAEGQRLMREQQQQHVASIRGETRNGEPRPGETEPTHHHREGGHRSSEAATVPASPPRAGSRDLPVPVA

SEQ ID NO: 5543 - protein, 221 aa, Moorea sp.
LRDLKKAFSRWRDPKLCSGIPQFKKKRHQCSFTVDDGHGKRLVKAGKFITIPTLGTFRIKEAIPFNCGSQTFTISREAGKWFVSFKIEACPLPSMKHTHKKVGVDLGVKCFATLSDHTKIETPSSIKKAKIKLSKLQGRNRKKVLGNGQTKQKPSKNAHKYYQKLRQQHQHIANSREDFLQKETTRLAQTYQEIKIEDLNVSGMLANHKLAEAISLLGFYR

SEQ ID NO: 5544 - protein, 257 aa, Nostoc sp.
LEQIKRVRLVRRADGYYVQFLISADNKVETQPTGKTIGLDVGLKEFYTDSNGHTEPNPKFYRTGEKRLKFRQRRVSRHQKGSTNRKKALNKLGRVHLKISRQREEHAKRVARCVIQSHDLVAYEDLRVKNLVKNHCLAKSINDAGWYQFRKWLEYFGVKFGRITVAVNPAYTTSQCSNCGAVVKKSLSTRTHVCECGFVMDRDWNAAINILKLALGTTGHVGTWIYDPNASGDSSSTHAGEILCEQVGSMNEESPHL

SEQ ID NO: 5545 - protein, 242 aa, Nostoc sp.
VIKDCANRYFLSFVVEVEPNTTIANNQSIGIDLGLKTFAVMSNGEKALSPDYSKHDRKIRKLQKKLARQQKDSKRRNNTRVKIAKLHNQIADTRKDFLHKLSTKIINDNQVIVLEDLNVSGMVKNSRLSRVISLQGWREFRNLCEAKSEKFSRDFRVIDRWQPTSQICSCCGFRWGKIDLSVRSILCLSCGTEQERDENASRNIEMVGMGHRHDLKRAGSDCQTTSVASYCELSRITEVESR

SEQ ID NO: 5546 - protein, 410 aa, Streptomyces sp.
MKTNQDAVRRNVHRAYKFLLRPTARQAAALGDMLRDHCSLYNGALQERRDAYRHTSKTTVQYGQQSAQLKEIRAFDLDRQGRWSFSSQQATLRRLDRAFAAFFRRIKAGGKPGYPRFRGGGRFDTVDFPKDGDGCRWDSTPHDPVTRVRFQGVGHVRVHQYRPVVGKVKTVSVKREGQRWYVVLTAERASSEPLPATGRVVGIDMGIASFLTTSDGEHVVNPRHGRKAATQLVAAQQAMSRCERGSKRRRKAVAKVATLHRKVRRQRLDHAHKTALDLVREHDFIAHEDLKIRNMRAAPAPKPNADRPDTFLPNGAAAKAGLNQSIADAGWGVFLAILNAKAESAGRELMAVDPRNTSRRCLECGHIAKENRPTQEKFHCVECGHQAYADVVGARNVLRAGLVRRDAKRA

SEQ ID NO: 5547 - protein, 389 aa, Streptomyces sp.
VKLVVRVKLLPTPEEAAALEATLRACNEAASCVSVRAFESGRTSRAALQALAYAELKARGLSAQPALHVLRKVADAYTALRASLKAGSLGRRVSKRYRGVAGKPVVFRPDAAQPFDDRCLSWQLDKRTVSIWTTSGRMKGLAFTGQAEQLAMLTAYRKGETDLLCQGGAWYLVATCEVPEAAPNTAPAGFVGVDLGIVNIATTSAGTRHSGRRLNRRREADRRLRAKLQKKGTKSAMRRAKRHAGKEARRARDINHKISKCIVAEAERTGRGIALEDLGGIRERVRLRKPQRVTLHSWSFRQLGTFIAYKAQRAGVPVVYIDPAYTSQECSRCHHVDRRNRPSQAVFACQACGFVEHADLNSSHNIAARGWWTWVRGAESQAPALTLTV

SEQ ID NO: 5548 - protein, 319 aa, Streptomyces sp.
LHRLDKAFAAFFRRVKAGDKPGYPRFRSGTRFDTVDFPKDGDGCRWDSTAHDPVTRVRLQSAGHVKVHRHRPVVGKVKTISVKREGRRWYVILTAEQAQSEPLPQTGSVIGIDMGIANFLADSNGEFVPNPRHGAKAAAKLEAAQQALARCKRGSKRRRNAVERVATLHRKVRGQRLDHAHKTALRLVREHDFIAHEDLEIRNMNKTPAPKPDPETPGNFLSNGAAAKAGLNRSIADAGWGVFLAILAAKAEGAGRQVMAVDPCSTSRRCPECGHTAKENRPTREKFHCQACDHNAHAHTLGALNVLRAGLVRREAAPA

SEQ ID NO: 5549 - protein, 426 aa, Streptomyces sp.
VSQNSLVKRQFGHRARLALLPAEALKADAQAHAARTMWNLLHAWWQTMPKGKRTLANADAAIRQARKDIDFLGVLPAQAAQAVLKTYLQAWKNCWDGRADAPNFKGRFRTVTSVDIPQGRDLNITRVHRRWGMVNIPKVGRVRFRWTKNLPVGKHAGAENRITGARLIKDALGWHIAFRVQALEAKPAPHQGPEVGIDVGVSVPLALSDGETYEHGEWLTSEEKARLLHWEQRAARRKQHRRPGERTSRRLRRTHDRIAGLRAKAKRRALDWQHKTTTHIARTYGTLVVEALTITNMVKSAKGTVEEPGKNVAQKSGLNRSIHAEAWGRTVTMLTYKTAQHGGTLHKAPAPGTSQRCSACGSTTPGNRESQAVFVCKNPDCGWSGNADHNAARNVLYLYRMGLALIPAAGRAVVRRARRVKPATAR

SEQ ID NO: 5550 - protein, 280 aa, Streptomyces sp.
VSRKSGRWFVSFLVDDQVATPKRHAMPATAVGIDRGVRFAARHQRRRFPRSRVHPARRGRAVSTPATEALTHSQRERQPGQTRGRMNKITGRVTDRHRDFCAQTADRLVRKYALVVLEDLRIKNMSASASGSLAEPGRQVRQKAGLNRAILDKGWHRLELALTSAARYTGTSVVKVNPAYTSQRCSACGFVTEGNRESQAVFVCKAPDCGHREHADVNAGKNIKAAGLAVSACGDLGAGRSVKQEPVGRVTGRTPHQGIPALQGGEDVKGTVIPWPPPRP

SEQ ID NO: 5551 - protein, 443 aa, Rhodobacteraceae sp.
LALEKLKTYKYRLYPTEEQKEILEREWFAPIRFLYNLALEHRSQLRSQDYDFHSRQLSNEQLREFSNYSQAGAIRSVLKELKGDPDYEWLRKFPSQCIDSLLNDLNEAFKKFFKKQGGRPTRRTFLKNNSAKLKTIGKKKPDGSNYINVLYRKDTVRIPKLGLVKYKKHKKFYGKPTVSTIMREGNEYYICVTTRQTFKAVEHCGTAIGVDLGLAFPSATSDGEILPKNTMLDTIDSRYRKLQKKFSRQENKQSIRRKRTKAQLADLKRKQTRCRKAYIHKATTELTKRYSYIAIEDLKVQNMTKSAKGDAEEHGKNVKAKSGLNRVVLNVAPYEMRSQLVYKAGWYGSHIEDVHTCPECGAIDKKNRKSQSVFECVECGHTNNADINAARNILIKSGMSETALGLRKTPSKNHQVLATSESIVSCFQPLSDCNSNALSSGYG

SEQ ID NO: 5552 - protein, 269 aa, unknown
  TnpB Polypeptide
LGERRIWVAIKPHYPTEPDMEICESKLFKRNEGFYLHVVVRKEIEPKTGCNDVLAIDLGIHNIAVTANSKTKEVHFYGKRLRAVRGHYFHLRRKLPNRRAVKKVGKHEKRIINHELHKISKTIVLEANRTNSVTVMGKLKSMRKNGNGKGRRFNRKLNSFSYAKLSSYIRYKAEWLGIPVLTISEANTSKKCSLCGREGLRHNGLFKYSCGAKLSVDYNGAKNIMKRALGKLHAEPLSSVGAEVNQPRTTPTDSLSPMMRMEAPCESLG

SEQ ID NO: 5553 - protein, 460 aa, unknown
  TnpB Polypeptide
LKRHGRAQHFCQDAALGLARFNQPPVFGATGCVGDRFEPATSHGASSPSGQGRLLAWLEPNRMAVGASEQLCYYWLRMFKSFKYRLFPSRAQERLLSQTLETCRRWYNTCLEERKTAWEERRESVGKYAQLRKVKYLKATSPYAAPVHSHILQVVAQDLDKAFQAFFRRVQAGETPGYPRFKSRDRFHSFGLKEYGNGFKLDGRRLKVSGIGRIAVRWHRPLESEVSTVRLVRKAGKWYACFGCEVEARLLPSTGQEVGIDVGLHHLAALSNGETIENPRWYRAEQARLRVLQRRVSRRKLAGSNRRKAVASLQRQHERIANRRQDYLNQLAHDLIVRYDRIALENLQIKNMVRNRHLAKSILDAGWSYLKQHLTHKAEGAGRVVYLVNPAHTSDTCSQSGTVFENLTLADRWVSCVCGLSLDRDVNAALNIVHRAGQAHWGQTWPVPATASVPQEAAPL

SEQ ID NO: 5554 - protein, 406 aa, Microcoleus sp.
MQVFSLTYEYKLKPTSAQVARFEDWLEQCRRVYNYALAERKDWFKSRSCQINACSLQSEYIIPVETKRPTYASQCKTLTAYRKTSGNLQRVQSQVLQQTLRRLEQAFVSMWEQGHGFPRFKKSGTMRSFVFPQVGIDAVRDGAIKLPVIGWIKFHQSRSIPDGAKLKQVRIVRRASGWFAMLTLQWDVSVPDVMPHGEALGVDVGISHFAAVSNGKLFPNPRPFKKLERKLRLLQQRVSRKVKGSNNRKKAQVKVSKLHERIANTRKNYYWLVAHNLCDWAGMIFVEDLKLKGLVRGFLGKHCLDAGWGQFFQVLEQCCRKRGVFFLKVDSKKTSQICPNCLVETGKKQLWERIHSCQHCGYRTDRDVAAAQVVLIRGLAAVGHTVKMLSEGKAIALPAMKESPSL

SEQ ID NO: 5555 - protein, 520 aa, unknown
  TnpB Polypeptide
MRPSYILDLNGELFDSVPVMSQLAAEIRGISAYATFAVRNDTKLAADLAQVTVSQPAVAGRRAGVTIPAELVVKGELRRNKAGKLVEEKVFGKSRKEWLFRHRVVTEHRSWQERINAANGESGKYVSQGWKRTVDASAPSYGEDTINLGAVDKQYAVIENNPVVDGEIVLRMVVKGRWYRLIFPFDNARFREGKVTLPLVKVENNHPVFIFSVVTDNPVVQFSGDYTIGVDVGINDYATVVVRNSSTERVVHETTLSQRVHSLWNSVRASEKQVKQLNKKADKLLYDRQAHMSAIDEAQLHREAASRKKRELAIVAAQEIAYLSHAYGNAVVAVEDLGWVANTMQNGRWNRGALVQWLTHYVAQNGGWVVAVNSANTSQVCHLCNEQVTHPTHQLSVCRKHGEMDRDVNAAANIAARAVSKVEKARKTRAKNRKLQRRTVLKTPITRASLKYPGRDRTKHAPTPKRKNRISKGVNLPLSPARVVMTTVLADWDASGILETDMAAINLGNVTCECRLCSLN

SEQ ID NO: 5556 - protein, 475 aa, unknown
  TnpB Polypeptide
MSTFTLSLKLNTSASDEAVLMERFYQGFLMYNRLVSHARKRLRGLRQDKRYRAAMDTYRKGERKKELSTELSALRVEYGLSEYQFHSWISIQQKKRKRYMDSLTAQKIASTVWKSVEDVLFRKGKTIHFKKLMGFTSMEGKNNAAGLRFRDKKLHWLGLCIQVRLHKKDWYVQEALQHKVKYCRIVRKPVGIRWHFYLQVVLDGIPPQKHRFLENGDVGIDPGVSTEAAVSGNGCILTELAPERPGTRKEIRRLQRRMDRSLRAANPENYHEDGTPKKHKKWKKTRHYKQDQMRLKTLRRRNADAVKQSEEALADRILCAHGTDIHTEKMDYRALAARAKEDQVTKEGKHRSKKRFGSSIAGHAPARFLCILNRKLSYIGKELHLVDTRKYRASQFDHVTGGYTKVSLSTRWKEVGGHPVQRDLYSAFLLMNAAGDEHPDTARCNDTFETFLKFHDICIRELKGTGISRPATFGL

SEQ ID NO: 5557 - protein, 369 aa, unknown
  TnpB Polypeptide
VENYKKDKISLTKTDLRRIALKKRRSSEELKQVHSQVVQNVADRVSVAFKNFFEKRSRFPKNKHYRNYRSFIYPQSGFDIQSTPEGGHKIYLSGIGKVRIFVHRPMSGKVNRLCVKYEAGEWYGIFLIEQAVTHQQRERDIDSIPDERIRGADLGLERFITLDNSISKEYPRFLRQSEEKIKGIQLHLSRKKKGSRRRRLLALKLAQLHFHVKRQREDYQNKLVSTLLKKHTDILVLEKLSAENMLQNHRLAKSIADASFGRFAMKCIFKAEMLSKQVLFVDPWGTSQFCHGCLQWVPKGLGEREHNCPKCGVKLSRDLNSAKLIRRLGIQKRSPPSDGGLSPAELLPLPSLRRMASIGEEAGSLRIHS

SEQ ID NO: 5558 - protein, 351 aa, Candidate divison MSBL1 archaeon
MKVRKTVQGGVVNLTKVKRDVLAEEYENLQKYLHENKDVELYSANKQQAKRYYDKIRDGKEYPISIRKDLIDVQECKSDVCDYFVKVPVAGRYGVVKIPVNTHVEIREDWEVCESKLFRKDGSFYINITVEIEVEEVERYEGVLGIDLGLRNPVVSVALPSHRSEIRGQKIKQVQSRYFYLRRQTETGKGWHRREHNKVRDQLHKITTELAEFVEENRLIVAVGDLSGIQKQDRGKTMNRKLHRFPHYSFRQMLEYKCKERGIKYIDVDEAYTSQRCSRCGELGDRNGGEYKCEKCGFEIDSDVNGARNIAGRALGKSEIRPLVNAGAPVAVPGTLSVDATSGAPMGAASC

SEQ ID NO: 5559 - protein, 546 aa, unknown
  TnpB Polypeptide
MLIQSKYTKIFHSKDLTRQKYDELYDFAVLIRNHKNTVSQYVNDNLLHFLEYNKFQFLKEMRERFKNVIPSSFDAQLYTQVFTCYQNKFDGIQRKLIFEVKTFKGFEFYKRDTKKNKKGDLKKVIAEKKQTPLSNCLTYLARYGNENTIDYISSNIDVCDEKKREFYNNILRCCNKFGFERLYRLALNKRQRVVKHYSEYPIEFKSLTFNGRCRKKRIIDYNRKFDSVINSFISLSGIGRKSFDIPITFNKGWHGNMKDYRKKNPDYEYTITFNEKEHQVNIHLCKDGERYIPQANGNTIGIDVNCKHNLFSLSNEATYDYDRKLVNDFCKLSLEIDKLKENDKEYKVGKRKQQKLDTLKSKMIKSEQQLIADMCKTLQSQGVGHIVMEDLDNGFGKCYVKDKDNEDINYNRKVKFLGLSSLKQEVEHIARKYDIAVSTVQASYTSKMCPMCGCIEDENRPNQETFECIKCGHKDNADFNAAKNIRNRVLVTVLQDLLLKQKDNGAFEPKKLKREKVKEVLLSFRRSLQNVGSECTESSVTTFDYV

SEQ ID NO: 5560 - protein, 375 aa, unknown
  TnpB Polypeptide
MLKAYKYKIKPNQQQEELLSKFFGCVRYIYNWGLNAKTSAYKENGKAINYLQLAKELTSLKQQQDHEWLNECTTEALQQSLRSLDNAFTAFFRKKAKYPRFKSKKRTKNSVKFIKSVHFDFENWKVKLPKLGWIKLCKNKTFNQSICKQGTCTVSRDHCGTYWCVITVDDLQPKPTKAKLVKDNAIGIDLGIKDYAILSDGTKFANPKHLEQAQRNLAHLQRVFARKGKDSKNHESMRVKVAKCYRSITNRRNDFLHKLSTYLVRNYDVICLEDLNVKGMEQNHHLARAIQDAAWGEFVRQLEYKSEWYGKNILFIGRFEPSSKLCHKCGYINQELKLSDREWICPQCGEHLDRDVNAAMNIKEIAFDKQNLVGV

SEQ ID NO: 5561 - protein, 436 aa, unknown
  TnpB Polypeptide
MLRAVKIRLYPNKEQATMINKLLGCCRVVYNQCLNRKIESYKNEGKTENLTTLGHFFHNELTKDPCFIWLREQNTKVLKQAIIDMLTAYKNFFERRSGFPKFKSKHDNKQSCRFELHAISKRNDYTTYHLSLANIRNVKFRCNEKCAQYLQKHHDNIRQATLTKVPCGEYYLSILVDGDLTHKVKETDAAVGIDLGIKDFVTTSDGEVFNNLHFKKTETKKINRLQRQLSKKEKGSNNRNKARIKLAKLYKKINDRKQYYLHAISNSLIDENQVICMEDLNVKGMVKNHNLAESICEMNFGEFRKMLEYKAQWYNRKIVFVDRFYPSSKTCHNCGYINKSLTLNDRQWACPQCGEVIERDYNAALNILDEGLKILETTINVGCCEPELTLVDYPTTERWQHRNVLTVDDRLSNEVLKSSGRLKQEVNNEQTSLFKF

SEQ ID NO: 5562 - protein, 388 aa, unknown
  TnpB Polypeptide
MVIKTYNIRINGEQGFTAFWLTLLRETRDAYNLCSDTIITEKVKIGLTAIHNACYDKLRSSFPSLPSQAIIRVQKEVLQAFKSKKTNKHKGSAPHKTSLSLTLDKRLYSNFTAEGISLTSGKSNCRERFTFKPYQKIAEMFATSVAKDPTIFYKDESLWLSIPFEVQGIMVQNDRSIGVDLGMKRFFVTSEGKYFQDKEYLMQRRKLRYLKRCLQSKNTKGAKSHLSRISRKEHNISKNECYKAVNALLQSTDCGYIVMEDLSKIKVKTSKSKDGFKRKRHNNALSQVPFYTFKYILTYKATLAGKQVVSVSPVNTSQNDCRSGSKNGTRKGCRYYTNDGFVFDADWNASVNIALRAEHPTSTPLPIDGRLVALVGRAPSTAQTLKTR

SEQ ID NO: 5563 - protein, 402 aa, Streptomyces sp.
VIRAYKFLLRPTTRQAAALGEMLRDHCSLYNGALQERRDAYRHASKATVRYGDQSAQLKGIRAFDPERQGRWSFSSQQATLRRLDKAFGAFFRRVKAGQTPGYPRFKGVGHFDTVTFPKDGDGCRWDSTPRDRQTRVRLQGIGHVRVHQHRPVQGRVRTISVKREGNRWYIVLTCDNVPAEELPPTGAIVGVDMGVAHFLTTSDGEYIANPRFLQAMAEQLAEAQRHLATFPKRTRQRTKAHRAAARKVAKLYGKIRRQRADFHHKTAHALVTDHDVIAHERLNTAGMTKSPAPKPDPDNDGAFLPNGAAAKAGLNRSIFDAGWAQFLGILANKAESAGRLVVPVDARNTSRTCTECGHAAKENRATQAKFQCTACGFAANADHVGALNVLNRAGLVLCAAA

SEQ ID NO: 5564 - protein, 410 aa, Ardenticatenales sp.
LAKEQADAFNLASGRVYTGVLISHWRVVRKKRIWLSEKAGTRWSDHRTTASLHAHSIDAAQQGFYKACRTTRALRKAGYPEAKYPHWPKKFRTTIWKNTAIKHEGQALLLSNGRGNEPITLLLPNHLGDVLRVLEVRLVYDKRARRYTWHLVVENGKQSKAALGSNVVSVDLGEVHPAVVGDEHESVMVTCRERRHEQQGHAKRLATLSRALSRKKKGSRRYKKLVRAKSRMKAKHKRVMRDMEHKVSRAIVEVAVERAANTLVIGDVRDIADEVALGKRTNQKISGWNHGKIRAYTTYKAEAEGIVVVLQEEHYTSQTCPTPSCRQRHKPRGRTYRCPSCGFQSHRDVVGQVNILSSFKYGAPGHIPTPPIIKHRMPHNLRLMRRRRDTGQALAPVARRSSGPREAAGL

SEQ ID NO: 5565 - protein, 436 aa, Thermococcus sp.
MKRTVTIKLQPSKEQEKILFELAHASAVIWNKLNYQRLKQFKEFGRIDFNGTEKEVYHEFKNWIGSSTVQQLARKNAESWRSFFQLNKKKNGELPEWFRPKPPGFVREENGKKIFIIPIRNDQYRITGNVIELRRLGKFGRLRIQFRGRIYLKGKQGRLEITYDEVKRKWYAHVSFTVGEKLINGEWVRVPRQPLGDLSAGIDLGVNNLMAVYVENGESFLVNGRPLKSIAFYWQERISDYQSKLNKSGAKTSRKLKRMHEKAKLQAKHYINTAVRQTVERLYHLGVSRIVVGYPKGIARNSEKGRKQNFLLSHVWRFNYVIKRLKEVSEEYGILVVVVDEAFTSQLCPLCGQRHSNARFVRGLFKCRGKGVVMNADLVGAFNILKKVVEKITPSLPGLTAGRGNWGKTLPEGFSEPPSKGVVRITPQTSPPLARG

SEQ ID NO: 5566 - protein, 249 aa, Thermococcus sp.
LPEWFKPKPPGFVREENGKKVFIILIRNDQYRIDGNVVELRRLGKFGRLRIQFKGKIYLRGKQGRLEITYDEVKRKWYAHTNITVEEKLINDEWVRVPKQPLGDLSAGIDLGVNNLMAVYVENGESFLVNGRPLKSIAFYWQERISEYQSKLNKSGAKTSRNLKRMHEKAKLQAKHYINTAVRQTVERLYQLGVNRIVVGYPKGIARNSDNGKKQNFLLSHVWRFNTVIKRLKEVSEECCYERRPCWSV

SEQ ID NO: 5567 - protein, 407 aa, Anabaena sp.
MKTSYQYKIKPTKQQAEKIDNTLEMLRHQYNYLLAQRFDWYEFNRCPIDICPLICHLPELRKQPNYYNQKASLVQLKVDRPWYKEIHSQVLQEVPKRVELAFDRWLKGNINGKKSGRPRFKGKGQYKTFTYTQFKQHHFVNNKITLSKIGDVKVIVHRPIPDGFKIKTVSITKKSDGYYVTLSLEDQTVPAIKPDFNPDSITGIDVGLKEFLTTADGETVSVPQHYRKAQKRLRVIQKRVSRRKKGSKRRQKTVKQLGKQHKKVADKRKDFHFKTANNLLKKYDVIAVEDLNVKGLARTRLAKSVLDAGWSSFLLILTNKAVNAGLLVIPVKASGTSQDCSSCGVKVPKKLHIRWHNCPNCGCSLDRDHNAAINIKNRAQGHRVLKAQLMSAREPGVAEKPTLTRSR

SEQ ID NO: 5568 - protein, 419 aa, Anabaena sp.
MLLTYQYKLNPTAQQVVTMETWGELLRRHYNYALGQRLDWLNRTRSLLDRCSLVCEPIGEIPHKVDYYTQASDLKQTKELFPKYKSIYADCQQQNLMRLDKAWKRWLVPDKNGKRGGRPRFKKRGDICSFTFPRVNCAKAGAHLTGNILKLSKIGEIEVILHRPILDGFELKQVTILKKADGWYASFSLEDKSIPKVLPLDDIKTATGIDVGLEKFLTTADGQSIEVPQYYRKAQATLARQQRQLARKTKGSKNYQKQANIVALIHLHVARQRKEFHYQVAHWLVNSYDLIIFENLNIKGLARTRLAKSILDVAWGAFLQIMQAVAVRRGKHTRGVDPRGTSINCSDCGVRVEKTLAVRVHSCSCGLVIDRDWNSALNLLKLGSVGLPIPGCGGLDVGQPLKQQVSYVNLRCSRYIACN

SEQ ID NO: 5569 - protein, 394 aa, unknown
  TnpB Polypeptide
MLRAVKIRFYPNKSQKHLLFQHFGAVRFIYNYMLDEKLRDYNLGLQTSIYDLKKLLPQMKKNEKFSWLKDIDSQALGESVLDIDRAFKNFFRELKKGNKKGFPKFHSKHNSRQSFQYPQRVKINEDKNKIYLPKIGWVKAKIHRDITIIKTVTVSVEANYFHASVLTEFQDIAESDNNETIGIDMGVTRFATLSNDSYIKPINFTKDLKRLKLLQKQLSDKQHSRFKGDKTPQSNNYKKLKLKVQKKHLKISNKRKDFLHKESQKMSKYKTVIVEALKIKNMSKSSKGDRETPGKNVKQKSGLNRSILQQSWGKFFEMLNYKLNQNGNQLIKVDPKYTSQKCPECGTIDSKNRESQSVFICKSCNHSGNADYIASINIKARGIHDLSMPIIKSA

SEQ ID NO: 5570 - protein, 265 aa, Oscillatoriales sp.
RSPTIIADGWYVALTLEDKRVPVTVAEIQPTDENTLGIDLGITNYVYLSNSERVENPRFLRKSAEKLARLQGKLASRIKGSKPWKIIKDKISRFHQFVARARLDFQFKMAQDLLSKCDVLVVEDLSVKNLTRRAKPKTDVENGSLVYLPNGQAAKSGLNKSMLDAAHGQFANILKYVAWKLGKNVLFVEPKGTSEHCWNCLNKVPKELSERWHYCRCGESLDRDENSAKPIKKIGLLHQSGGGTPSLKKALVQREIEACSLAVLR

SEQ ID NO: 5571 - protein, 367 aa, unknown
  TnpB Polypeptide
LYNHLLEKRKTAYEQEGKSLTCYEQINTFPILKAERPSLKSVHSQVLQNVAVRIDLAFKAFFRRCKAGEKPGYPRFKGYGRYDSFCYPQSGFSLTHDERVTLSKIGSVKMVYHRPIRGKVKTCTIHKSSTGKWYVTFSVECEPERLEPLDTQVGIDVGLNSFASLSTGEEIANPRFFRKEEKALAQVQRKHSKLAKGTPERRKHRKVVARVHERIKFRRENFTHQESRQIVDRFGVICVEDLTVNRMVHNHCLAKSIVDASWSAFFAQLFAKAEEAGRTAIKVNPAYTSQTCSVCGHRQKMPLSERIFKCPCCHAQLARDLNAAYNIRALGLQSLGLSVEAPAFQAWGVVTSVKGFSNSECVLSGHH

SEQ ID NO: 5572 - protein, 433 aa, unknown
  TnpB Polypeptide
MLIRQGFQYALRLKAKREAVLRRWVGCRRFVFNEALAHQRAEVAAGRQRPGYAALCARLPALKAQHPWLAEPPAQALQQALKDLCRAWDSKFTSRFGAPRFKMKGGGDTLRLPQDCKYNAAAGALRLPKLGVVRLRHSRVAEGELKNVTLRQERGRWIASLQTEREVDVAVPAATAAVGLDFGAATTIMPSAGAPIELPRRIGRYERRMKRLQQAVSRKKKGSANRGKAVARLNACHGRIAAMRRDFLHQRTTELVRGHALIAIEDLTVKSMTASATGTVDAPGKNVKAKAGLNRTILRNGWAMARSMLGYKAEWHGVMLVAVPPAFTSQQCSACGHTAAANRKTQAEFACVACGQCDNADRNAAKNILRRGQEILSGGRPASTAGYAGTHACKGAGCKLPHRRPRSAAQGGLAEPPLAGTVPGLSLPGNLNP

SEQ ID NO: 5573 - protein, 401 aa, unknown
  TnpB Polypeptide
MLVYRYRIYPTKEQLCTLTNQMMLAKAIYNILLGETKQHYNATRKSFTRNMMNMRLTELKKEHQEFNSLHSQVLQNISDRVWKAYRNFFHRVKEKQKGKRIKVGFPRVKKFVVSLTYPQSGFKLNGKYLSISKVGRLPIVLHRPIGGKVKTLTIKCTKSMEWYATFTAENEGRAFMPNEKPAVGIDLGLSNYATLSDGSVIQNMRFSKQNIARARRLQRQISRKVKGSRNRRKAVLRFARFSNHIAQQRWNFLHKLSHRLVNSYGLIAYENINIRNMIKNHRLAGAIQDAGWGGFISMLCYKAARAGSRVIEVDSKDTTKTCSNCGAMKPMSLSMRTYECENCGLTMDRDLNAAKVILARGLNTAGRAGIYACGEATSTFERSRASNFFEAGTTCERNVHA

SEQ ID NO: 5574 - protein, 242 aa, unknown
  TnpB Polypeptide
LIIHRNLPENAHICNVTLSLDTDGHFYASITFSYVMQMEMDLRNLAITGGTLPKNLTFLGLDYSQNDFYVDSDGKKANYPHYYRKSEEKLGKLQTRLAKKQKGSSNYKKLQAKIQKLHAKIKNQRNDFLQQESTKLVRKYDVIVVEDIDLRAIGGALKLGKICMIMVSECSELCLHINSSKKAHALLKLTDGLLLLKHAAIADMFRKSILMNVHMFAKNADLLLTETGMLQSTSEKKENVSS

SEQ ID NO: 5575 - protein, 421 aa, unknown
  TnpB Polypeptide
MEKSLTKTLVFQLQSNNERLLSEAYHEARWVFNQTIQLAEDGMDWDDISPRLEDEADLVKNTTQRIVAKALDSLQQSYDHDDYNTPSHEKTGNYPLRMNFTEGYNLTLEDNEVHYRISAKPYNPVKGTLRGSPDNLELLEQALNSDDWRVGTAEAMKHNGNHELHVNVTHLEATVQDKQDTQTVVGVDINEDCVALAALHEEDIVDSVVIDYPEIKKERHRYFTMRKRMQNAGQTAFDRVFEDKEERYVHDQLHRVSRRIVEWVQQFESPLVVFEDLKHMRDSIEYGTRMNRRLHSLPFNKLRSFVAYKAAFEGIPSDDIDPAYTSQTCSCSGCEHTARSNRRRKRFKCNACGRQDHADRNAAVNIAKKGLKSLNRNVPALKTLPTIRKLRRQASGAVNAPAVTHAPVRGNQADGRVGVSD

SEQ ID NO: 5576 - protein, 583 aa, Rhodococcus sp.
MISSIRFRCRSPNTWRRYFVTKTKCTCMRNVQCLPVRMSSSSPINQYGTVVCVQLRYAYRLDPPPAQRRVLARVFGCARVVFNDAIAARRAAHEAGAPFPTDAALSKALTAAKRTPERAWLAEVSAVVLQQALADACADYRNFFASLDGTRKGRKLGAPRFRSRTDRAQSIRFTKAARFPGAPERAAAAAGGRGRPGALVARPALGAVERDGDDGRGRAVPRLVRRRRPRPAVASRAARGGDRPGADTLRGTVGRHEGRRPPPRPQGAGQAADRAEGTRPAAEGLGPPGACAPKGGALPRPGREHPPGLAPQALLHDRPREPSGVRGGPRRVRAGPDEARPLGARCRVVDVHGDARVQGTAARAHLRPGRPVVPLHAGVLGVRGHRGGQAPARPVVDLPVWRGPRPRCERREEHPGRGTRGQPNARGAGVSRDPGPAPGREARTRREHRMSGADRNPRCSRRGGRQMVAGRTTNTAEARVPFSWSSAAARPDGSIAAYTPGIPTGSSHRPFASSAASAAVTSRHGNAVRIAASMSRLTVGSSSSWASVRACSSPNGPTRVRRSAVRCAPTPSADPRSRASARM

SEQ ID NO: 5577 - protein, 169 aa, Geobacillus sp.
VQSYTTKYTNGNIAINGNQIKLPKLGWVRFAKSREVEGRILNVTIRRNPSGKYFVSILVETEVRELPKTNSAVGIDVGLKDFAILSDGTTYANPKFFRKLEEKLAKAQRILSRRTKGGSNWNKQRIKVARLHEKITNARNDYLHKITTEIVKNHDIIGKEQRSKKRKWC

SEQ ID NO: 5578 - protein, 566 aa, Carboxydocella sp.
MPEKHEKNKFSITVCGEFFPEIYPTHRSSKWSRGEEDQLTTEMRLFCACMRWAFNRLLEGASRHEIKKSGQELFGLNSRFVDDSRLKAQALLDSQTELLKLENEEENEETEEKLGRARKKLSLAMRKLAKAEEKGAASEVIEKLRLAVKGRNKRVVSLAKRLAELKDYQEKGTIPEVVFGGRRLWEKVCQGRAAREKWRHARRNRLYSRGDESKGGNPNIKIFYDGQDFRLAVSLSHLSEQTGIDKLGRPRMSQAPRVEGKLWLPEKHRELVQIWLAMKLPYAVELIRTLEGRYLVHLTFELVRVQEPDFAKGCLAIDTNPDGVALCNVSASGQPEPWPEGFSVPYPGNLGKYEGEFQVIPYPNGFLYIRIPDLTHASSFRRSYLIGVLARVMVDIAFFSGKPIVLENLNFSKDRLDTNKKFNRMASNFPFAKMVGAMYRRAVKEGVPFKLVSPRHTSTIGYWKYMKRYAVPVHCAAALVIGRRAMGFRERVTEELRQLISQIKQNLTRKVNPDRPGEGKEMTRGVRACLRRLEEKLSVHNGLAQSEQEAYNSVWPDLKLLALSVR

SEQ ID NO: 5579 - protein, 410 aa, Carboxydocella sp.
MPLITLKAQVHADSQTEAVLKDAMFCATKVYNGLLWHLREEYKENGKVNISRKNLNRILKELPRVKGYYSMSVQLTRDEVREAYRSFFALKKKGLTQHKAPGFRHKNYLSPLKYVQSGFRVDKNRVTLSLGTSREDGVKQVSFRISHRPGIEYDRVRELSITYDKISGQIEARLVVEVKARENSGTERVAVDLGETVLMACAFGDGTVTLYSGRLVKAIRRYWQKVRASLQRNSRRWGQVAHREKKQVEQLLHVATSHFIAECVRRGVKEIAIGDINGIRESTDYGDQLNQRLHAWPYRKLINMLKYKGALAGIVVRDDVNERGTSVTCHVCGRVLSSNRKSRGLYECSCGWRAQADVNGALNIFEKKYKVSPIKGSSGRVARLVVLSFRLGWHGVHEPKRGDKNLRASA

SEQ ID NO: 5580 - protein, 426 aa, Carboxydocella sp.
VIELARKKKFSNGMPTQTLTARAKVINLSDRDALLLGLLGFFATKLWNVANHHRRTVWNETGRIPGFVEQCRELKINRWYRLLPSQSAQEVLGEQDDSYRSWFSHRKNGDVLAKPPGFRKKDTLSTVTFKQNAFETLPDNRVRLKLPKTYGRRVIVLEYQLPSHVTLSKVQQVKLVYEPGTGDWYLHITHRVPVTYKETGNVMALDLGIVNIAAGVISDGFSFLVPGGELLALDRYFQKEKAKCTKSTSRRCIELNVKWGRQRNHYLHVLTRWLVDLAVAHNVFTIVVGELKGIRADREWGDAGNQKLHAWPFSKIISLLTYKAALAGIRVVKVSEKNTSTTCPACGERGKKARVHRGLFVHCGVVLNADLVGAYNILQRYLRESGLALPDRSGVVGALARPAVNLFVWRKTTPSGREQGTFGQAA

SEQ ID NO: 5581 - protein, 562 aa, Carboxydocella sp.
MPKKQKKDKFSMTICGEFFPEVYPAFRSGKFSRGEEDPLKTEMRLFCACQRWAFNRLQEGASRDKTKKLGQELFGLNSRYADDARLKAQAVLDSQKKLLELEIEETKNKLHRARKKLGTVMKKLAKAEGKGDATEIVGKLRLVVKGRNNRVASLEKKLAELDAHRQNGTIPKVVFGGRKLWERICKGRAKREEWRNARRNRLYSRGDETKGGNPNIKVTYREGEFYLAVTISHLSEKVGEDALGRPKMSRAPRVEGNLWLPEKHRDLVRIWLAMKLPYTVELIRTSEGRYIVHLTFELGGGQKPSFTKGCLALDTNPDGVALCNVGHSGQPEPWPENFTIPHPGNLGKYKGEFQVITHPNGFLHIRIPDLAYASGFRRDYLIGVLAKVVVDIAFFLGKPIVLENLDFGKDRLDTSKKFNRMAANFPFAKMVEAVCRRAVKERIPFELVPARHTSTIGYWKYMERYAVPVHCAAALVIGRRAMGFRERVTKELQQLVTQIKQDLTCKVNPNIPREGKGMTRRVRACLRWLDGKLLLHNGFARQQQEAYYSVWHDLKKLALSLR

SEQ ID NO: 5582 - protein, 513 aa, Carboxydocella sp.
MRWAFNRLLEGASRHEIKKSGQELFGLNSRFVDDSRLKAQALLDSQTELLKLKNEETEKKLGRARKKLSLAMRKLAKAEKKGAAPEDIEKLRLAVKGRNKRVVSLAKRLAELKDYREKGTIPKVVFGGRRLWEKVCQGRAAREEWRHARRNRLYSRGDESKGGNPNIKIFYDGQDFRLAVSLSHLSEQTGIDKLGRPRMSQAPRVEGKLWLPEKHRELVQIWLAMKLPYAVELIRTLEGRYLVHLTFEVVRVMEPDFAKGCLAIDTNPDGVALCNVSASGQPEPWPEGFNIPYPGNLGKYEGEFQVIPYPNGFLYIRIPDLAHASSFRRSYLIGVLAKVVVDIAFFSGKPIVLENLNFGKDRLDTNKKFNRMASNFPFAKMVGAMYRRATKEGVPFKLVSPRHTSTIGYWKYMKRYAVPVHCAAALVTGRRAMGFRERVTEELRQLVSQIKQNLTRKDNPDRPGEGKGMTRGVRACLRRLEERLPVHNGLAQSEQEAYNSVWSDLKLLALSVR

SEQ ID NO: 5583 - protein, 396 aa, Carboxydocella sp.
VQVTRVVVVEINLAKQQEIICQHLTYSASKLWNVANYEVAKNNLKPNKLKSNLKNNFWYKNLHSQSAQAVLEKLQIAWENCYKKHTKRPRFQPKDGHFPVRWKKQGIQVQDGKIRLSLSKQTKEYLKTAHSIESDYLWISLPKNLSLNNVQEVEIKPHTIYGHTTYVMHVVYRKTLQDKTTQGNGVMAVDLGVGNLATVVTTNNTATIYDGKSLVSRLRLFSKKKAKLQSAIDKNKHTTSKKMHYLIIKERNYLKDYTHKVSTFIVRQAIQEEVKTIAIGKLSYGITNMDIGRRNNEKLHKIPFGKLCNMIEYKAKEVSIDVVLINESYTSQTCSTCGRIDKSNRKFRGLYVCDCGNVLNADINGAANILKRVVPSLKAGRDRGFLNNPVRVAINH

SEQ ID NO: 5584 - protein, 415 aa, unknown
  TnpB Polypeptide
VSELIRTVVVPSVELTEKKFEVFRDLEELYRQALIELVDYGFRNSVDSFTRLKRDKYRELRRRYPHLPSHYIHTACQDASTRIKSFNKLRKKGLAKSEKPEVNRVSIWLDDHLWRRVGYTTILIYTHRGWIPVELVPHKLYWRYINSGWALKTQPKIRLDYKRRRLLVYFVFVKAVDVDESGVKRVISVDVNEDNVAVKVLGKVYILETGIRRITIGYARYREVMQSVKGSGHVGRAIRGGERKRKKDIRLKIANIVSNTAKKLNAVVVLEKLSKQCPRNMIKGVKDPALRHRIYQAGFRGMVKAIEEKCLERGVPVVKVDPRNTSSKCPFCESKLMRGDAPRQLKCPRCRFKAGRDVIAVLNLEKKYLTLKGCVPFTPMPSDPTPEVAVLPMKEWVRRKSLDATNKHELMRMSI

SEQ ID NO: 5585 - protein, 290 aa, Streptomyces sp.
MQSPKQTSSTSVVVLPLHEWNFPRILLMQLRYNYRVYPDASQRRAPARAFGCARVVWNDCLRDRKEAHAAGLPYVKSAELSRLRITQAKRTEERAWLADVSAVVLQQSLRDLDTAHKNFFDSVKGKRRGRKVGPPQYKSKKDTRQSIRLNTNAFSLTSDGTVYVAKVGDLKTKWSRRLPAPPTSLTVAKDSSACPPSPSCPTAGRSTAPASCAGPRRNSSAFSGSCPASRRVRRTGPRPASRSHASTRVWPTGAGTGTTRHPHRSSATTKRYSWKTSRCPASHAPGSPSP

SEQ ID NO: 5586 - protein, 413 aa, unknown
  TnpB Polypeptide
MVNFIHKTYILPIPDKYQIFAKKLAMESGRIYPKAVSFLNRMYSNNARVSPKTLYTYMSLWTHEREFTLYSQSVQASYQQAWQAWQASWKKLKKAKAEQKSTSKIKLPHKAKKYNKVCYKEAAIHIEDGAIVLSNKRNAEKIVVLFQGLSAPPKYAELIFHADRGKYYLHVTFEIENAQPTQHNGVLSVDLGVVHPMVCFDNQNVLLYNGGVLNCKLRYRNKKLAEFQQKLSRCKKSSNQYRRLQRAKRRILHKLKNQVRDVLQKYTSHLVEYCLKSKINVVVLGNVKGIRNKAMYNKVANQKIHQWLFRKLASILANKCAFAGIRVEYISESYTSQTCPVYGTKNKPSNRNYRCSGCGFEYHREGVGVVNIWQKYTGVSLVVGHLTCPTGVRYQPHLRCPDRWNVHPVGKAA

SEQ ID NO: 5587 - protein, 229 aa, Streptomyces sp.
KQLRRASRTVSRRRGPDRRTGGQPSKRWEKANAQRNKVHHRVANLRADALHKITTAVTGEYGTVVVEDLNVAGILKNRHLARRIADAGFGEIRRQLTYKTRRNGCRVIAADRWYPSSKTCSGCGAVKAKLPLHVRTYECDACGLVLDRDTNAARNLAALAAAACTTGTGVAGDQDTAPAVSKPRGADQKTRTTTHGRKATGGRAGGATLPHQRQTETGDRTQTEPLTLW

SEQ ID NO: 5588 - protein, 372 aa, Sulfobacillus sp.
MLKEVITMALSSSSGPRWKAWQQHHPWGFAVGIGILAYFLAERVPPNDKFQIAGRRVKLPKIGWVRLRESLRFPGKILGARVVREADQWFFAVHVSVPDSIYYRTRTGHGIEGVDVGVKTFATLSTGEKMTGPQAHRRALRRLKIRQRRLTRKIQAAKVSMGFAPQDPLPKGIRLPRSRNWDQAKLSVARTHLRITHIRQDFLHKTSTQLCRENQAIGIETLSVQGMLANHRLARAVADQGFGRFFSLLKYKARRYGTCLVEADRWFPSSKLCSTPRCGYLKTDLTLKDRTWTCPSCGLTHDRDVNAATNLKGLATRTALPVATRPVMAATMPETADIGGKVTPVRHEAIPESLLSASGQEEAGDHNRAPTL

SEQ ID NO: 5589 - protein, 361 aa, Sulfobacillus sp.
VLRFRLKPTKEQEQKLFYTFYLCRKLYNQALEERITYYREKGISIRYTDQQNQLPTWKQEHPEYKEVHSQVLQNVLQRLDQAFVNFFEKRARFPKFKNKFMFRSITYPQARARYFHENQVYLPKIGWVRMMAHQPFDAASVKIINVKFHDGRWDVNLTYGTEAVVSRTEIQNAVGIDLGVLSLIATSEGEFFENPQWLQKSEGRLKRKQRQLSRKKKGSKNREKAKQKLQCLHDHVANQRKDHLHKISRSLVDRYDLICMEDLPVTGMMKNDRLAKSIANASWGKLATYLEYKAKNAGKHLITVPPHYTSQRCSGGCGTIVKKNLSVRLHQCPTCGLEIDRDVNAAINILHRGLEIRHQAS

SEQ ID NO: 5590 - protein, 403 aa, Lactobacillus sp.
MLKGVKLRLYPKPDQVIQLWQLFGNDRFVWNQLLAMMNQRYENNPELKRLNRYQLDYLLPALKIEYPFLKLSDSSSLQVVTRNLNQAWVNFFQDKSHQVGKPRFHSRHYPRQSYTGKSTVQVIAKRYLKIPKLGYVKTSKTGCLKDGQIKQYTLSHDATGRYYLAIQLECPEPQPLPKTHRVVGLDLGLAHLVTTSDGQQFPTLKADWLTRQATLWQRKYQRRKNQATKWARQWNHDQRHFTDRDVFDYQNWQRAQQIKARYQGRVAQQRLNYLHQLSTELVKKYDVIVIEDLKVKNLQKNHRLARSIANAGWYQFRQMLTYKCDWYGKQLIVVNPRYTSQQCSNCGFQSGQKPLAIREWTCSQCQTHHDRDINAAVNIRQAGLKLNATGSGRTLVTKSGSVS

SEQ ID NO: 5591 - protein, 373 aa, unknown
  TnpB Polypeptide
MQVKMCRAVKYRMYPSETQAQLIDRTIGCARFIYNQMLETRIATYKATGETCNPTPAQYKDRFPFLREVDSLALCGAQMHLSTAYRNFFRTPGRVGFPKFKTKHRSRQTYTTYRVGNNIVLSEGGKRLRLPKVGSVRVRQHKHIPSDWKLKSVTVEHCRSGEYTATILFEYETQAPEPVTPVLFVGLDYASHGLYVSSAGEHANYPRFYRQMEPRLAREQRKLSRMTRGSCNWVKQKRRVAKLSAKVRNQRADFLHKAANQLASQYDCVGVEDLDMQALSQSLRLGKSTLDNGYGLFRVLLAYKLEQQGKRLIVVDKWFPSSQLCSDCGHQASATKDLSVRDWVCPNCGVWHDRDLNAAVNIMREAQRLSREQ

SEQ ID NO: 5592 - protein, 390 aa, unknown
  TnpB Polypeptide
MTSRKVSQRIPFTPSKTQAELLEQCFGARRFAYNQQVEAFNAYDKDTNPRPSYPNVTDMKNENEWLRDSPVPSNALSNAIQDFRKSQAAYFRKAEYGKNRPRFASKGDNVQSFRNRSPIRRMEGNRYPLSRKLGSVRIRRRDRIRYPLESLSSWTVKRENGVYYLVLSFDVDIQPKPTVIGKVGIDVGVKDFLTLSTGEKINYPGRLRQLEEKVRWEQRKLSRRVKGSSNYRKQRAIVAKAYAKVRHFRENFQHQLSHRLIEDNQFIGMETLAVQNMTRKAKKKLDDNGKPTRNGQSAKRAMNRSILRNGWSGFVEKLAYKAQWYGRTLIQIDRFYPSSRLCNNCGHKYDGLLLSEREWVCENCGVLHDRDVNAALNILGEALRLSQTAG

SEQ ID NO: 5593 - protein, 461 aa, Bacillus sp.
MNSLRKVVKTMARKKAVKVLRKQKKRETMKRFTQKQNVGRACLTAKEFRLLQRMSHSSKALRNVGLYTMKQSYLTHNKIATVKEIDTAMQVDMNYWGIQSNSVQAIRRALYAEVKSFFKALEQWKKNPEKFTGRPKFPNYSRSTDKRIIEIYQVPKVDNNGYWMIPMNVAFRKKFGSIKIRMPKNLRHKKISYIEIVPKQKGRFFEVHYTYEMHVSQMKKPSTTTSNALSGDLGVDRLVSCVTNTGDAFLIDGKKLKSINQYFNKMICNLQQKNIENGISKRVVTNQMAALWHKRERQINGYISQTVGLLFKKVNACNIDTVVVGYNTGWKQKSNMGKKNNQKFVQIPFYKLIAAIENKCIKEGIRFFKQEESYTSKASFLDKDPVPVWTKDDKTYYHFSGKRMTRGLYQSKAGRCIHADINGALNTLKKSKVIELEENLKVKTPILLEVQKSKAVASRIA

SEQ ID NO: 5594 - protein, 338 aa, Marinobacter sp.
MSKEKSTHIRTQQIVIRKPHEAFRGAGVCTQIVRRIKNATSYLMQHHPEGKDQTLSHRDADKWLKKNNRELYAKLPPVKTQFRFSQNWNALVGDTVALEVRIVPKGNCFIIELIYDESKIVEAGRFCRLLDKSRKAGIDLGINNLIALATDQPGVRAVTNKRHRRMKDLLHRASSKVASYCLENNIGTLVIGYNVNWKQEINIGKVNNQKFVDIPHSILIAQIQYKCQNLGIATVIQEESYTSKASALDNDVLPVYGEKPKNVVPLFSGKRIRRGLYQSKHGIINADINGALNILRKATGDAFGLACKGCVFNPIMMELMPYKSVVIRRENATQPMAA

SEQ ID NO: 5595 - protein, 387 aa, Marinobacter sp.
MNNEKSTHIRTQKILIRKQHEAFRGASVCTQIVGQEWTSYFAALRAYKKMPSSFKAKPKKPGYAHKSATVHIGRNGFKFVDGTLYFANGVLPPIKTQFRFSQKWNASVGDTVALEVRIVPRGNCFIIEIIYNESKIVEAGNFCRLLDQSRKAGIDLGINNLIALATDQPGVRPVLINGKALKSINAWYNKRVAKLRSQGKYAHIRAVTNKRNRRIKDLLHRASSKVIACCLENNIGTLVIGYNKHWKQEVNIGRVNNQKFVGIPHAILISQIQYKCQALGITTVIQEESYTSKASALDNDFMPVYGNNPENVVPLFSGKRIRRGLYQSKHGIINADINGALNILRKATGEALGLACKGFVSNPIMMDLMPHKSIVIRRENTAHQIAA

SEQ ID NO: 5596 - protein, 413 aa, unknown
  TnpB Polypeptide
MLLSFKTQLLPNNKQVTAFKKACGTARHAYNWANAIIQKCLEEEQKIPSAIDLHKRLVAEVKPGLPWYYETNKNVPQKALADARQAWDRCFKKLSGQPRFKKKGQRDSFYLEQGSKAAPKIQNDGKRIRLPTIGWVRLSEALPIAAVHNCVISRQADRWFIAVKYEVEKPTVFSDRPTIGVDIGIKELAVCSDGKVFSNPKAYRRMSKRLKCAQRRVSKRVKGSKNRTKAIRKLAKVHAKISNIRKDAIHKLTHHLAKNHSEVRIEDLHVKAFLKNHKLAGAIADCGMHEFKRQLEYKTEKFSSKLIFVDRFFPSSQICSNCGNHRHKMPLKNRVYVCSDCGYQANRDLNAARNIDRWFEDIFVPERSETVSFTEIACGVDKPLKSHLETTMKQEVNTKTINVQLSLDLGSFG

SEQ ID NO: 5597 - protein, 416 aa, unknown
  TnpB Polypeptide
MSGRKGKGLYTATALIVVVGTVKQAILLQTFATNSKNHHLKDFINKAVCEYNRLLFERKNRETFMQFHHKTLKDCKARAGFNIQVACSLIRDAWRKNAGRVDGLTVKFNVPRNCKTFNTKTNFFVEFGLYPRNRIAVPIIRNRNYQRFQRLIQNGWTCKTYGLTQDLHVVAYLSNTKEIPRRRNVLGVDINAKHLTVTVITPEGKILYQTYFGKQMWVTRKKIMARRSLLQSLNAKKLKQLGECEKNYVKTNLGHIVREIVGLALRYDADVAIEKLERFSPKGRRFNKTVMRIPFYQFRRILEQRCFDRNVYLDIVDSWHTSKWCSHCGAVGKGHSANYSLFKCKCGLIVNSDRKASLAVAVKSLLERKDGSNQTFQFSSRRVPVSGLVRPSEADKPGSVNPTRSADGKPTSLSCG

SEQ ID NO: 5598 - protein, 418 aa, Deinococcus sp.
VTPTESSTPPIRNKAFVVRLYPNTTQTELINRTLGCARFVYNHFLARRIETYRQDGKSITYAATDKELTLLKRAEGTLWLAAVDKFALQQSLRDLEKAYQNFFRTVKTTGRKVGFPKFRKKRTGEAYRTQFTNDNIEIGDHCLKLPKLGWIKTRGQPDIHGKILNVTVRRVVEGHYEATVLCQVEIPYLPAAAKFAAGVDVGIKAFAIVTGGNGEFDHHANPKFYRSALRKFRKAQKTLSKRKRGSVRYRKAKTKLARIHRSTANRRQDFIHKLTISLVREYEVICTEHLKPVNMVKNRQLALSISDTGWGEFIRQLEYKSLWYGRLVSKISPYFPSSQLCHDCGFKNPEVKNLAVRMWRCPNCRETHDRDENAALNIRREGLVAAGMADTLNAHGDGRRPTSVGSGLRSENHATSVV

SEQ ID NO: 5599 - protein, 413 aa, unknown
  TnpB Polypeptide
MRGLTTLKIWVVPRGEYMLTLKARGVLVDGSLNELREELCLTRKAIQYIVDALWELDKLPTLNQLHQMFYKMLRNQGFRAHQCKQIYKYARALVKSTRENNGKKPVLRKLSTRLDRYDVRVDLENRIVVVKLRDKVFRIKLLHNKDYIRKFLRRKWYEVIVSIDKQGRIWICIPFRWEYNPYKSKRLFSIDINLKKVVIYNGRRVRRIDTRFTEALYLKHLAEDVQKRHSYAWRRNKKWLEIIRALHRKSRNIVVDWSRKFAKYIVLKAKSTRSAIVLEDLDKLWFDASRKSSSLADKLSRFAYRKLQQAILTKVIEYNVPVIFIDPRNTSSTCPRCGYKLSYNHRLAICPRCKFIADRDEVGAINIYLKAFKLLAPCLGSWGTHSMTDETRPKSGCKIDEPMTIHIKTYTSI

SEQ ID NO: 5600 - protein, 369 aa, unknown
  TnpB Polypeptide
MTTKFDTKNDVHTQVINTVTCTVKVKIPDAFSHKLKQLYTPALKCARRMLQRRNENSTKHYKEIPSVIAKSLIAKYQRNAKCRNIKSLVLPICGDKGKQIKLVEGGVRIPVLFKKDVLPVTWPRKVVGYVRSVEFYHREGQWYGTFCYNTTAELPVLARDVVGLDRNSAGNIAVLADPCTGKVIKLGLSPAPTKQAMRGRRKNLQHAGKFRLLSKLRRKQRRRMAHENHRVAKTVVDYAARHCRAVAIEKLANVRSAKSKIRRYSESNQWAFAQLETFIRHKAALRGVAIIEVEPAYTSQTCSRCGSIHKPQGKRFVCKSCGHNDHRDANAAFNIALRGRGRIGESSSGLSVPELGLIGDPQAGKAVAA

SEQ ID NO: 5601 - protein, 432 aa, Haloferacaceae sp.
MYYAYKYRLKPSDAHREELDRHRDICRQLYNHALYRFNQIPEDAGTLNQRVRSIRDELPGLKGWWDGLSDVYSTVLQTTVMRIEQNITSLGKLKQNGYGVGQLKWKPPREFRSFTYSQSGFKLDKKGGQTVLCLSKLADIPIRLHRAIPDDATLKQVTLKKEPTGEWFATFGVEMDREPPEPPENPERCAGIDVGILTYAHDTDGMAVGSLDLSNERERLEREQRKLSRKQHGSNNYEKQRRRVAECHADLRRKRRDFLHKLSNYYAREYDLVAVEDLNVKGMVESPSNSRNTASAAWRTFLSLLEYKCEREGTHSVAVNPRGTTKECASCGVSTEKPLWVREHSCPACGFEADRDANAAWNILSRGLEDIGVGYSESTSSETLRGSDGLRKSLRDFRTPVETALPVDTPVSAKRVVEAGSPPLKREPSGER

SEQ ID NO: 5602 - protein, 341 aa, unknown
  TnpB Polypeptide
MKFGIKIGKFALINHIKKLKSREQTSWLKEIDSQAIQQSIANMDKAYQHFFKGGGYPKFKSRHHSRQSFQYPKRVKIESNKIYLPKIGWVKMKGFRKEFAGKIKTVTVSHKAYQYHASILVDAEDKGISINHNSKSVGLDVGVSLMVADSNGNQVKPLDLTRELSKLRTRAQQLSRKKKGSNNRGKAKAKIAKQNLRIANMRKDFLHKLSLQYSENQTVVVEDLKIKNMTKATKGTVEIPAKNASAKRGLNRSITQQSWGMFFALLEYKLQERGGQLIKVDPKHTSQICNVCGHVSKENRKSQSKFVCTACGHSANADTNAAKNILARGIHGNNASLKIAV

SEQ ID NO: 5603 - protein, 425 aa, unknown
  TnpB Polypeptide
MDYTLKYRLFPDSRQREQLDWVRDTLRQLYTHALHRFNRLPESAGTVKQRLTQVRDEIPDLKDWWTDLTNVYSTVLQQAVEQIATNIENLGKLKEKGYNVGSLNWKAPDEYRSFTYRQRGFELDDNSGPSGRGMLTLKKVNGENIDVPIRLHRAIPDDTDVKHVTVKKDRTGALYACLNIKQDVPEKPEPSERDTEDTVGLDLGIMSFIHDSDGREIDRLDLSSDRERLEREQRTLSRKEHRSNSWEKQRCRVAEVHKRMRQKKLDFKHKLAVFYTREYDAVFVEDLNVKSLLEANRNGRHTAEVGWREFITILKHHGQKRGCHVVEVDPADTTKECNQCGVKTEKPLWVRDHSCPSCGFTTNRDYNAALNVWERGLDKLGVVHSEETPAETGTAVETGESASVSASAVVEPGSPCLKEPAIAGE

SEQ ID NO: 5604 - protein, 333 aa, Natrialba sp.
  misc_feature (10)..(10): Xaa can be any naturally occurring amino acid
VFNSTTSHRXHHDDYHLWIPAHANPDQRDWLEAVYAGDVEMGESRLLERDGTWYLHITATRDVEEQSATSANERTPPDSSGEPCLAGLDRTPIGVDIGEASLVTVCHRDESGSPVRPKLWANDGKTVRRLRKTYFTAKRRLQRRGSERTTESYGESLWNRIDHVVHRVTREVVEYAESVENPVLVLEDLTYIRENMDYGAYMNRRLHGWGFAKLHAQIRYKAAEKGIPVETVNPRNTSKECHACGKVGSRPRQATFRCSNDDCWVTEYQADVNGAMNIADRYRSGESHRQSDRTSRQKAGDDDSATDGASLTGPQDSHADAEPQQVTHGTNAS

SEQ ID NO: 5605 - protein, 174 aa, unknown
  TnpB Polypeptide
LRTYKSLAEYLQIKYPKRWNRNKYIKRRITAFHLKAKNIAEDFARKIGKKVVEEAIKMNANVIILENLKNLIKNVKNLHKEFRDKLYFMQYRKIQYWIDWQAKKHGLLVKYVSAFYTSIKCPKCKNKMKEIYHRWLKCKCGYENDRDIIAIINLNGRGSLSLSTAPQMTDVAPN

SEQ ID NO: 5606 - protein, 402 aa, Okeania sp.
LITLTYQYKLKPNKRQETEINQILDVCRTVYNYALRERKDWLSSRKIEINSCSIITEYIIPADAAYPNYNYQAKNLTIAKKTNPRLKSVSAKSRHENAQVLQQTLKTLDRAFSEMKSLGKGFPRFKKKLRSFVFPAMLKNCLGNSRFKLPQLGWIKIKQSRQYPEGFQAKQARIVRKATGYYLMIIFSSSESVPENPVGKRSLGIDAGIESFVATSTGKLIKSPKFLLLSTAVGANGHSPLQLLQRRLKKKKKESSNWLKLQNKIARLHEKIADARRDWHFKLAHQLCDLTDNIFVEDINFKSWSRGIVRKQSLDSGIGQFINEILPYICWERGKYYAKVDKNYTSQECPKCGQIEKKKLSVCVAFRRNRKHNCSHCNYQENRDVAAASTPIPSREGSKRGG

SEQ ID NO: 5607 - protein, 243 aa, Okeania sp.
LLQSGYIFASIKNLILSPGIAKIKSDFHGEIQLRDNPDYYSQKKDLVNTKDKFREYKLIHSQVLQDCIKRVKLAFDRWFKANKNGQRLGKPRFKKKSRYRSFTYPQIKQECIVNQRINLPKIGNVKLIQHRPLPEGFQIKTVIISRKADGYYVTLSLEDKSVPSLNSEVKPTSENTLGIDMGLKEFLTTSSGELVPIPQYYRKYQQRLKTLQKRLSKKKKGSKRWLKAIKAVAKQHKKGSRQA

SEQ ID NO: 5608 - protein, 144 aa, Kurthia sp.
MNYQKQRRKVARLREKVAFQREDFLHKLTTAFIRQYDVICVEDLNTKGMLKNHQLAKSISDVSWSSFVQKLTYKAKWYGRELVKINRFFPSSQLCHVCGHCDGKKPLEIREWVCPSCHTTLDRDINASRNILVEGLRLFETTQP

SEQ ID NO: 5609 - protein, 456 aa, unknown
  TnpB Polypeptide
MMPTVSYGLRISRENHIFDQTIEVYRAAVNYLMDIASLHYDMLAAAEPTVSATVQQVRQGIVEHLVHSTRENTAVYPAFDKRFYKFPSYLRRDAITTAIGKIFAYRAWVSNWEADDRKGKRPFLNRNQDVMPCFYRKNTFLQDGNHVSLKLYNGSDWVWHEVRIRPSDFRYVLEQMTDWKESAPVLAKRNRRYELRFAYTAAKSRFPKFQKDKDVDTVLGVDLGINTDAVCSVVHADGTVTGQKFLNCPVEKDRMYTLLNAVRKAQQHGSRKNHRLWRFINNYNETISIRTAAGIVNFANEHHVQVIVMEYLHMSGKKRGSKKQRLTMWRKRDIQHRVEAMASRYGIRVSYVCAVNTSRLAYDGSGKVSRGEDGGFSTYELCRFQNGKVYNCDLSASKNIGARYFIRVLLKSTPARELLSVQTKVPELGKRTSCVLATLINFHAMRSTFKAGKPAA

SEQ ID NO: 5610 - protein, 376 aa, unknown
  TnpB Polypeptide
MANKAIKYRVYPTTEQKIMFAKTFGCCRKVYNLMLSDKIAYYKATGKSIQTTPAQYKDEYPYLREVDSLALANVQLNLQAASHNAFSKSRKKNNGFPKFKSTKHSRRSYTTNYKKGAVVILDKRYIKLPKVGKVKAVIHRIPNDNWVIKSATVSQSSDRKFYVSVLFEYESDINYQADLNNAIGLDYASNGLFVDSNGKKGTNHKFYREAQKKLTKEQRKLSRMKGSKKGEPKSNNYIKQLHKVNKIHRHIANQRNDNLHKISTEIANQYDVVCVESLNMRSIANRGFGNGKATYDNGYGMFLNMLEYKLSDRGKYLVKIDKFYPSSQLCSCCGNKKKLTLADRIYKCDCGLTLDRDQNAAINILNEGLRLLNEVA

SEQ ID NO: 5611 - protein, 240 aa, unknown
  TnpB Polypeptide
VTKTRSCKWYACLTCELVKMNPPKINFTKVIGIDVGIKSFAYDSDEHNTPNPLNLKKMLKPLVRAQRKVSRRKKGSNNRLKAIQHLQRIHERIVNRRKDFQHKLSSTYANHYDVIFVEDLQLTNMVKNHKLARSIMDSSWGAFLQKLEYKCKLLIKVPARNTTINCSRCGSKVPKSLAVRIHRCDKCNLIIDRDYNASINILQKGLKIFSQDKLPQELREVTPVEISRSVKQEAQFFRYV

SEQ ID NO: 5612 - protein, 170 aa, unknown
  TnpB Polypeptide
MGGKNREKARKRLAKLHRRVARVRADFQHKTSRRLVDENQALIFETLRIKNMMKNHHLAGAIADVGWGEFMRQCEYKAKQKGKVFVKIGTFFASSKTCSACGHRLQTLSLATRDWTCPHCGAHHDQCSFFHFNQPFFFSRWNLFFLDLKAFPAADAYAICNCVYPHSHSY

SEQ ID NO: 5613 - protein, 486 aa, Deltaproteobacteria sp.
MGSSRTIRSACAGSSRIEGVVSPIPTDSADATLVKGVPRCGVDRGIRPGGSWGSSADRRMAWQTAPVTHPPEKPIPQPFGPIRRTPETPMPWVSPFCRAGCLMYLDSEIMPWYPAPMLREYRFRLYPTPAQRRAMDRCLEACRWVYNEVLEVRKRAWEARGESLSRFDTIKMLPGWKREKPSLNDAYSQVLQEVCTRVDLAFQAFLRRVKAGEKPDYPRFKGRGGYPSFIYPQSGFKLSEEGRRLYLSKIGHVKIRLHRPIEGRVKRLHVRRDLLGKWYACFVCDVEPRRLPSTIGIVGIVAGASHFAVLSNGEFIDIPPSFRRDAKDLAKAERRLSRLAKGTREYRRQERVLAHIRRRMANREGDFVHKLSRDLVDSFQIIAFGKLAGKPMQGGKRRGLPEDVPDSVWSRLVRLTKYKAERAGRCVVVADPLDTTEACSRCHAILPHDMSRRVQACPACGLEIDREVNAAINILARGLARIGSKP

SEQ ID NO: 5614 - protein, 224 aa, Okeania sp.
VGTSLIIDGKHLKSMNRWYNKQVSIIKENKPTGFWSNKLAAITEKRNRQIRDGINKAARIVINHCLKNSIGTIVFGWNKGQKNEIELGHKKNSEFVPIPTARLKERIAQLCDEYGIIFIETEESYTSIASFLDGDDLPIYGEKPDDWKPSGKRIKRGLYRTGSNWCVNADCNGAANIITKVSRKLSLDLSRLCRGTLTCPQRVYLWSAKKKRSNMDLSCCVVST

SEQ ID NO: 5615 - protein, 367 aa, unknown
  TnpB Polypeptide
VQQTRTIRCKLFVDPTEVPALDDLFNRYAKAVSRISQWGRDHHESNAVRLHHALYKMVRTESGLPANLVVTALRRASGMLKTARMRGKFEVRPTFVALDERTFTLKGETVSWSMPGRARMKAKLDIGDYQRKALAGQKPTSATLVKARNGYFVNIVVESEVPDAAGGGVLGVDLGIRNIAVTSTGRKFDGKAIREFREKRWRIRASIQSKGTRGAKRLLRKLSGYERRRMTLRNHEIAKAIVSEAVKNGCSLIRMENLKGIRDRLKVPNRHLNRMMSLWAFAQLQAFVQYKAAGKGIAFELVHPAYTSQTCSSCGKRGLRNRETFCCTTCGWTTDADVNAAKVTAAGGASVNTPESNGQASAQVKAS

SEQ ID NO: 5616 - protein, 350 aa, Halovenus sp.
MVEVSVETTFRNPSHTRQKEWQRATHILRECKQWLVDGWNDGSLSSSITTGDIENPLYSALQNQAIRAAKSDYDDEPVEYTGEQPIEVNNQNWEIHTTENGSIVIGFPCISDWWYTPIHVYDDIEDPIEALLDGDAEKTKLSVWREGDDWKVSFTVSYSDDTSGEETPIGVDVGHNYILAATPDDASAESFLVSGKEYKFVRRYYRSLRESLQQAGALRARNHVGNKEYRRIQDANHTLSKRLVEYASQFENPVIKLEDLEGIRDGSEWHGVHSWPFYELQQFIIYKAEKAGIRVEKIDPQNTSQECSQCGEYAGRDRSRFECPSCGYVRHADLNAAENISQREGEPCTA

SEQ ID NO: 5617 - protein, 424 aa, Halovenus sp.
MDDDAPRRTVPIKLDVPEQRRGDLHQTKAQFLHCANRTSEWAWRYDDYCITSKSKAEDTLYDDLREETDLTANLVQKGIRRAIQAVTGGVEKLKKGEKTSQPHFDSWSVVYDKRSATFNADHATLSTPNGRVTAEYVLPPVDEREDTPFGQYYESDDWDASSATLQYDEQEGTFFLHVTLKNPDYEVDGTERQEAELPDDHEKNGTVLGVDLNVTGALAVTSTGAFIGSADYLNHKRDQYEQRRGKLQQTGTRSAHLTIKSIGSAFSEWSLDWLHNRVNDLIAEAHNADVDGIIFENLDYIRENIANGSKFQQWAYTKFVELIQYKVESTALFVDFVNPAYTSQRCSHCGFTHEDNRDDKQFACQDCGYEANADYNAAKNIANRYCGYIHRGQKSRGGWATSQLALKSGTLNVNGDYTPTELLG

SEQ ID NO: 5618 - protein, 468 aa, Halovenus sp.
MKRTNTFAVRPLTGDDEQILRDLLDACAALWNEINYHRLMRYNDEDGFKGDVWDADTGALEGKYKAVLGASTAQTVRRANSEAWRGFFENKKAYHDESNTSVTEHPEPPGFRGNEDDGRVLKGVVRKDAYTVEWGDRSRLEMVVGKELRDRHNSPKSRLRLEIVGDPNWPNYEDQSRLELWYDETDSTFRASQPVTVSDDEQATPLADETAALDIGANNLVACTTTTGEQYLYEGRELFQRFRETTREIARLQSKLEEGRYSSKRIRRLYQKRTRRRDHAQDALCRDLLDRLYAGGVDTVYIGGLTDVLETHWSVETNAKTHNFWAFKKFTERLATTAEEYGISVEVRSEAWTSQECPQCGSTDRTTRHQDTLTCPCGFEGHADLTASETFLRRHQKSQISDWRTRREASRQRQTEQAVRPMARPVRFEWDDHNWSESPRSHRPKEQRTDPSTVHKDGNVASEESQTG

SEQ ID NO: 5619 - protein, 446 aa, Halobacteriaceae sp.
MKRTNTFTVRPLSDDGEQLLRDLLDASAALWNEVNYQRLMRYNDEDEDVWDADTGQLEGRYKGALGASTAQQVIWTNTEAWRGFFQNKQKYHDESNTSVTDHPEPPGFRGNEDKGRQLKTVIRNTSYTVEWGERSRLEILVGSELKDRYNHTGRLRLEIAGDPNWPDYEKQGRLDLWYDETDSTFRASQPVTVSDDAQATPLADETAALDIGANNLVACTTTTDEQYLYEGRELFQRFRDKTREIARLQSKLEEGCYSSKRIRRLYRKRTRRRDHAQEALCRDLLERLYTEGVDTVYIGGLTDVLDTHWSIEANAKTHNFWAFKQFTERLACTAEEYGISVEVRSEAWTSQECPQCGSTDRTTRQQDTLTCPCGFEGHADLTASETFLRRHTEKAVRPMARPVRFEWDDHDWSGISHPHERPKEQRTDLSTVHRDGNVASGESSTG

SEQ ID NO: 5620 - protein, 206 aa, Borreliella sp.
LDVKNNDKTKDNKKEVVGIDMSMRHFLVSSEGEKINHPKYLLKNESKLKRYQKKLSKKQKGSRNRAKSRLRVAKLHRKISNQRKDFLHKLSYYFAANYKNIVIENLSIKGMQKGMFGKSVNDLGWYEFVRQLSYKSEWYGFYLHQADRYFPSSKLCNNCSIKNTTLKLSDTRWTCSGCNTLHDRDINAALNLKNYYKEIKTKAGTA

SEQ ID NO: 5621 - protein, 405 aa, unknown
  TnpB Polypeptide
MPVKAVVFRLGSKLPPEARFLLEDFRLAVNNAIRQGLQSRVTSRNALNRLAYKDFRQEHPNMYAKHLVSAFEVAGSILKNNRRRVQKGYAGHVPYVRRLFMKAENQAFKLDREAGVIDLPTRAGCHVTLKLVLSDYHRRYLGDRFYSLGSLTVFQDRVIIAFRKGATNPYVPESALSLDTNECSLDGVLANGNNVTVVRAEFPDVAIIQQRHHDRRKRLQKKKAHDRRTLRRLCRREGQREHHRIEYRLHQVANAVLSFAESRRSAVVLEDLKGIRPKWSKELNRRLSLWPRRKLHQIIEYKAQWRGIPVVKVDPRYSSRTCPICGRIQDSRMGAEFVCRCGWHLDRHINASLNLLQTAILKGMAGGLRFNPSAFQYDVMMILYDPERGARSEPNGTSCVGAVTP

SEQ ID NO: 5622 - protein, 475 aa, Moorea sp.
MKLYKTIPVRAEFTDEEEAFWVFQCQRANSLINCAIYYIKQKHYDWLKEQLEAYSTYWRGDELRLGWKTYKCITKYPELDKVLKMNPHYKAMAAQSAQQTLKSVGESISSYNQLVGSYYKGEVDRPRLPRYRKKGGLAGVTFPRQSLTYKEGIFYPSISKESKPELICKITLTPPDFIDPDWVKEVTIRPNLGQLWIDWVIDDGKQAVEHNPDLDYSQAWSFDHGGDNWLTGISTKGKSLIIDGRKLKSMNQGYSRLVAKYKSGKSESYWDANLDRVQRKRNNQMRDAKNKAARFIINRCLNDKIGNLIIGWNERQKNASNMGKRGNQNFVLIPTKRLIERLKQLCYEYGIKLTITEESYTSKASFLDEDPLPRHGENEREWKPSGKRVRRGLYKTSSGCLVNADCNGAGNIARKVATQLGLDLTKVSRGSLTVPHRYDVFSSLKKSYRKRSVGVRVASAKADRGSVSTSLLTTF

SEQ ID NO: 5623 - protein, 412 aa, unknown
  TnpB Polypeptide
MTTIQQVEKHVIKKSHPYYNMFCEFTHLSKNLYNHANYLVRKEFVETRKWLRYQDLDRLLKADLEFPDYRNMPTAQSAQQVLRLLETNWKSFFNSIKDWSKNKDKYSGKPKLPKYKPRDGKMVLSLTNQQVKVKGDLLHFPKSFCGFTVKPRCVTLDNFEKINQIRLVPTNQTFCLEVVYSISVESDLLSDNGRYMSIDLGLDNLATVVTNIGLNPIIVNGKGLKSENQYYNKKKAHYQSVAKQMNNQYYTNRLYRLTQKRNLKVEDYLHKVSRYIVDFALEHKINTIVIGNNKKWKQSSSLGKVTNQAFVSIPHKKLIDKICYKAELCGIQVILTEESYTSGTSFLDDELPQKEFYNKKRRVRRGLFVSNKGFKINADVNAAFQIMKKVFPNVFTDGIEGVVLHPVRVGIV

SEQ ID NO: 5624 - protein, 310 aa, Enterobacter sp.
VIKKQVFKFLLEPNKGQLSDFLAFAGSCRFVYNKGLALLNENYRSGKKFIGYNQLASELVEWKNEESLSWLKEAPSQCLQQSLRDLDKAFRNFFTGKSQYPKFKKKGRHDSFRTPSQRVRVDQEKKLVSLPKVGWVKYRKSREIIAELKNVTISMKQGKWYISFNTEHTVPDPIHPSDIKTKIVLNNVNSVHLSSGIGGDNTSQAEEKKKLIRLNKRLARRKKHSKNWLKTKGKIDRVKSKAARLRLDNIHKATTAICKSHAVIEVVNLMGSVSDKNDNTLSMRYEFVRQLIYKQEWLGGEVIRRESKPL

SEQ ID NO: 5625 - protein, 215 aa, unknown
  TnpB Polypeptide
VSVLVEIPNVKIANNSNGGIGIDLGLKDLAIVSNGKTYKNINKSTRIKKLEKKLRREQRCLSRKYENLKKGESTQKNIQKQKLKVQRLHHKIDNIRTDYINKSIAEIVKTKPSYITIENLNVSGMMKNRHLSKAVASQKFYEFRTKLKAKCDENGIELRVVDRWYPSSKICHCCGAIKKDLKLSDRIYRCDCGYVEDRDFNAALNLRDALTYEVA

SEQ ID NO: 5626 - protein, 524 aa, unknown
  TnpB Polypeptide
MSKKNKSELKKVVRHYSFVYTKSKERKLNAVAKKYRAFRNELYKKYGGVECLPYLGNHRFTLSKQWAEDDSCDKHGLQGRQWKSALDEAFSKLLGKMEAAKTQVRSDMGRNKKFSNEEKHYVNYLLCFNNLLYKICKGFCVGTEKKFDIPEKRKEYLQRYLHGRLRKRAGGKPRSKSLSFTIDQEMYNTKKNERGDNWIAITSLKPYKQIKIKLTDNKPIKGTLRVKILRDRIEIIETQDVPCKNKTENTSESVIAIDKGLKNLVNSSSENKFGRNFGESLTKFSDRRSEKNKSRNKLRALYKKLLDKKMFKKAHRLLLHNLGTEKYDRIKEVERKELERQIGQALNEFFRVDNPHTLVTEDLSFQSWSKSLSRNQKRHFAEWLKGYLKKRLEFKCQQNGVLLAEVNAAYTSQTCPFCGYVHSDNRKGDKLHCLNCGKEGDADYFASLNILSRLDDPDINRYTPYREVKKILMERFEARRRNGGGTVETVQPRLQTQKWEGTKNKKSTRRPRCHSESELLSICG

SEQ ID NO: 5627 - protein, 405 aa, unknown
  TnpB Polypeptide
VQKVINGTIHEGDFNTLKQIMRDWSSCVRYAYQRVHKDGLTYGNDVVKACKPLYMPKLNQRYIQDAVLKAKAIDQKHALFGGRRLWKKLLTGLITKQQWHEIRDNELYSRGDLTKQGNPNIRIIKTPEGYKLRVGLSGSRQFLHFKLYIPLKFQEMLDLYSDCYDVRIKNKDGKFHVYIGINTPEVPLAYKCSSGTIGVDTNPDGLAVVETDREGNMLEHQYFQNDRIQFAQHHKRKHDIEDLAIKVVNYAVSKNKGIVLEDLKFNDRKKGFRKFNRMRHNFIYSQLLQAIERRAMKYGVEVLKVNPAFTSIAGRLKYQEQYSLNRHTTAAFIIGRLGLGIKEKIRVRLEPAEKDKLNLAGRGVSIALTKKAYSYFRHLYRVVEVKMPGLTAPYLTPALGNYGTG

SEQ ID NO: 5628 - protein, 404 aa, Escherichia sp.
MKRLQAFKFQLRPGGQQERQMRLFAGACRFVFNRALALQNENYEAGNKYIPYTKMASWLVEWKKDTETEWLKDSPSQPLQQSLKDLERAYKNFFQKRAAFPRFKKRGQNDAFRYPQGVKLDQENSRIFLPKLGWVRYRNSRQVTGIVKNVTVSQSCGKWYISIQTESEVSTPVHPSASMVGLDAGVARLATLSDGTVFEPVNSFQKNQKKLARLQRQLSRKVRFSNNWQKQKRKIQQLHSRIANIRRDYLHKVTTIISKNHAMIVIEDLKVKHMSKSAAGTISQPGRNVRAKSGLNRSILDQGWYEMRRQLEYKQLWSGGQVLAVPPAYTSQRCACCGHTAKENRLSQSKFRCQVCGYTANADVNGARNILAAGHAVLACGGMVQSGRPLKQEPTEMIQATALT

SEQ ID NO: 5629 - protein, 442 aa, unknown
  TnpB Polypeptide
MRTVSSYGVEIRKQNIPARQTMEIYRQAVGYLTEIYAQVWEELRKIPETKKRFNTAEHMVHMTKKNTARFDFDLRFPKMPSYLRRSAIQHALGSVSSYETRLGQWKETGVLSGRPKLTCRNHAMPVFYRDVMYREGAEGKDEAYLKLYDGHDWKWFRVYLKRTDMEYLPRNWKGKKTSAPALEKRHRRYFLRFSCTEEVTLTKTPVKEQIICSVDLGINTDAVCTIMRADGTVLGRKFIDFPSEKDRLSHVLGRIRRFQKEHGSKQIGSRWAYAKRLNTELARKTARSITEYAHENHADVIVFEYLEMKGKISGKKRQKLHLWKKREIQTMCEHKAHRYGIRVSRVCAWNTSRLAYDGSGPVSRDPKNHSLCVFQSGKQYNCDLSASYNIGARYWIREIIKTLPETERSSLEAKVPAVKRRTSCVYADLLIIQNEYGCSKAA

SEQ ID NO: 5630 - protein, 478 aa, unknown
  TnpB Polypeptide
MATVSYGLKITNAYHVFDATLRIYRDAVRYFMEIASLHYEELILLTGYTTNRGKRVTAQQHRQQYMEHLTHSTKDRDADYKKFDKDFYKFPSYLRRDAINTAVGNIFAYHSQLKNWEKNGRQGRRPFLKKKPAAMPCFYRGNTFLQDGTSVSLKLFDGHDWIWKTVHVRNTDWQYVTRQMAEWAAAPPVLAKRGHRYELRVAYTLANKKLPRYKKDKDVSTVLGVDLGINTDAVCSVVGKDGTVTGQKFINSPVEKDRMYGLLNTVKKAQQQGNHKNPRLWRFINHYNAAIVVKTAQAIIAYAQEVSAEVIVFEHLQMHGKKRGSKKQRLSLWRKRDIQHRVKEMAARKGIRISYICAVNTSRLAYDGSGKILRGREAGFSTNELCRFTNGKVYNCDLSASKNIAARYFIRVLLKSVSAKRMLQVQAKVPELCRRTSCVLATLIHFSAVLGTLKNSVSCRVTKRLRKSGICSRAAHTT

SEQ ID NO: 5631 - protein, 314 aa, Marinobacter sp.
MSFDKALDVMTENDVRQYAASLSDTELEGQVDGYDLGVKRQLTDSAGEVYHLPDDTVAALSRLEKRRIRYQRRYSRMARANDRKAGTIKRPRTGGEKKMQRKIAHYSKKRAHIQSNNSHHISKRIADKTRLIAAFEDIKINNMVRRPKAKICPNTGRWLVNGASAKRGLNKAIHSVNLGQIRQFTAYKLIDRGKLMVRVKPHYSSQECSQCGHTEKGNRPSQATFKCLGCGFAANADDNAACVIKQRGITHVRSEAFLQGKTPRTTKVRRKKAPELASSGSGDLVSPGCQATIGDALHSRRTIDHYCLSEARRL

SEQ ID NO: 5632 - protein, 297 aa, unknown
  TnpB Polypeptide
VNSDSVKKVHKAYVLRLYPTRAQETALSATLDTLRLVYNSLLNERKFLYETTGKGISQYAQEKHFAGWRKEFPELADVHSHLLQNVALRVNLAFTAFFRRVKSGDTPGFPRLKGAGQYDSLGFKEFGNGVSFKHGNLYVSKIGEIKGKFHRKIEGTPKTVTVRRQSGKWFACIACEVSPEPLPPCGDSVGLDAGLNSFMALSNGEFVDNPRFFRKDEKALAKAGRKQAKTKKGSKPRRKANKVLSRIHERIRNCRHNFVHQNARKIVNRFGVIAVEKLNVKGMVQNHCLAKSISDAS

SEQ ID NO: 5633 - protein, 392 aa, unknown
  TnpB Polypeptide
MSRYRLTPTEPQAAVLRQHCAHARYVWNLAVEQQSWWRPGRGQAPGYCAQASQLTAARAEHRWLAEGSQMVQQQALRDFAQAMVYYFTGTHRKPTWRKEGRDEGFRIVALKAAHVRRVSRNVGQVWIPKAGWIRFRWSKTVPSASSYRVTWDRAGRWHIAFAAAPAPIQGPGTGEVVGVDRGVAVSAALSTGELLRSPGLRPTEKARLRRLQRKLSRARRGSARRDRVKAAIAGLKARESDRRRDWVEKTSTSLARRFDLIRIEDLRIGSMTGSAGGTHERPGRKVRQKTGLNRGILASGWGMLARRLDDKAPGRVEKIHPAYTSQQCSACGFVAAESRKSQAVFHCTACGYTGNADVNAARNIAAGHAVTARGGSQLEPMNREPQPLPLSA

SEQ ID NO: 5634 - protein, 412 aa, Chlorobiaceae sp.
MMKLLQAFKFELMPNGEQKRDMRRFAGARRFVYNRALDIQKTNYTAGGKLIGYVDMANRIPEWKKEFPWLKESPSQALHQSLKDAERAFKNFFEKPVSFPRFKKRGVGDSFRFPQGFEIDKANHHIKFPKSGQMRYRNSMVILDTAKNITVSQSGGKLFASIQTEREIEQPIQSATNAIGIDIGIVRFATLSDGSFIAPLGSFKKHEQRLARYQRRMSHKVKFSKNWLKAKRRVQKIHTRISNARKDFLHNATTEISKNHAMVAIEDLQVSNMSKSSAGTTETAGKNVAAKSGLNKSILDQGWFEFRRQLEYKLNWNGGILVPVPAHYTSQICPACGHVAKENRKTQAKFVCMDCGHEENADVVGAKNVLARWHRVLACGEDGSGSGRKTKVKPALMKQEPTESTIREATHA

SEQ ID NO: 5635 - protein, 354 aa, unknown
  TnpB Polypeptide
MKTTYIKTLKVRVKDKHAKELNRQAQNVNFVWNYINELSNKAIKDRRLFLSHFDICKYTQGANKELGLHSQTLGQISKEYVTRRRQFKKAILKWRKSFGTSKSLGWIPLTGQSISWKNGQLYHFGKYYNVFDSYGLSQYKFRQGCFVEDARGRWYFCVAVEVKPEKSKGKDSVGIDLGCKTTATTSKGEMLEGRNYRKLEQKLGIAQRAKKKNRVRAIHAKIKNRRQDGLHKFSTKLVQENGAIFVGDVSSTKLIKTKMAKSVLDAGWSSLKTMLEYKCQLAGVVFEEVNESYSTQTCSSCGTLPDSRPKGIAGLGIREWTCSECGDIHDRDVNAAKNILAVGHYRLAGGIPHL

SEQ ID NO: 5636 - protein, 408 aa, unknown
  TnpB Polypeptide
LVGLRYKLALTAAQEQSCVRWEGICRAVWNTGLDQYRHAWRSNKVRPRDAQVWPGFAVQCAELAAAKKQPGLDWLTDAPTHVLQQTLRDLDQAVRRHSPWRTHFRSQRRSAPSLRFPAGKAIVVEQLSGRWGRVKLPKLGVVKFRMSRPVAGEIRSATISRDQLGWHISILVDDGQAVAEPGSHHGPAVGIDRGVVHALALSDGTFLDPRTPFTSAREGKFEKGLRRRLARQQRGSARAAVTKARIAKVKAKQARRRKDYAAKAAYKLTSRYGLVVLEKLPTAQMTRSARGTVEVPGKNVKAKSGLNRSILDQGWHAIALAIESAARRSGTRVAYVPAAYTSQMCSECGHTARMNREKQAEFCCRGCGFEDNADTNAAINVLAAGLAASGRGGLPLGRPQKRQTLDAA

SEQ ID NO: 5637 - protein, 457 aa, unknown
  TnpB Polypeptide
MFTVRQKLLMFLLGTSDCYLFHNCRQNDLTVLSLKQHRLTAKPMRVSYQYRLKPNREQIAKIEQWLEMLRCQYNYLLGQRFDWWETHRSAVNACPLICHLPEPSDRPSYYSQKQQLTQLKKDRPWYSQIQSQVLQDCVKRVDLAFQRWLKGDQNGKRSGKPRFKGKGRYRTILFPQVKADCVQDNHISLPKFGTVRFVKHRPLPDGFKIKTAQITRKADGYYLTLSLENTSVPKSTIDTIPTTENTVGIDMGLKDFLATSEGEKIEIPQYYRKGQDRLKKLQQKVSRRQKGSNRRQKAVKQLAKHHQKVARQRKDFHYNTIKLILSKGNVIAHEKLNIQGLAKTKLAKSIYDAGWGTFLSRLAVKAENAGQLTIEVNPKNTSQTCSGCGKKVPKNLSDRIHNCPHCKLSMDRDQNAAINIKNLAVGMNVRSKAQSRTKPKGGAAEKPQLHHEVISCG

SEQ ID NO: 5638 - protein, 282 aa, Oscillatoria sp.
MVSLTMLKGREKFNLHIGNYQKQLLKGQTPKSATLVKRNDGSFYLNIQLESEPPAIPDTDDVLGIDVGRTDIACTSKGEKFSGQQITQTRDRYSRVRASLQKKASKGTRSTRRRCRQVLQRLSGRERRFQTWLNHTISYRLTRTAKASNQAIALEDLTGIRERTNELPRSKTERRRSNSWAFYQLRQFLTYKGVKFGVDVRIVDPRYTSKTCHCCKVIGNRQGKKFECLNLKCGWVGDADENGANNIATLGVIVNNPRGSEVMSCSLQDVVLRATKSPLRTA

SEQ ID NO: 5639 - protein, 188 aa, unknown
  TnpB Polypeptide
MSLPKLYVDSNGKSPDFLKPYRKMEAKIAQEQRKLSRKKPGSKRYEKQCVKVAKLHAKAKHQRRDILHKISCALTDEYGLIAIVDLDMAAMKQSLKFGKSVSDNGWGMFTDMLEYKAERKGKTVVKIDKWFPSSKTCIACGHIHKELQLSDRTYICPKCGHMMERDVQAAQNILDEALRMLNADATAD

SEQ ID NO: 5640 - protein, 468 aa, Streptomyces sp.
MGESAEKAKPKAVKGEEAERIKREALGIGNRRKHHTRKATPLKGHVKEPDTLHRLYRFRFYPTEEQAEQLGRTFGACRWVYNEGLTLRSKAWEQHHVKVGFAETCRSLTGWKRAEETAWLGEVSSTVLQQSLRHLDQAYGRFFKGEARYPKRKKKGRSRDTATYVRTGFKWVEDLERPGTGLITLAKQARPLDVRWSRALPAGTVPVRLSVTRDRAGRYFVSTLVEERIALLPAAFEPDSRAPKAVGLDLGLASLVTLDDGTKLDHPRLLKRYAEKLARLQRELHKKVRGSKNRQKVRQKIARLYALISDVRRDMLDQFTTRLVRENQVLVVEDLSIVTLLRAARGKGRRRKAKLNEAIFDAAWGELLRQLRYKCDWYGRTLVIVDRFFPSTRRCSACHAKGPKMDVSVREWTCAECGVVHDRDVNAAVNLRDEGMRLYWLVAAGLPPEKKAPTVIKASELEECLLAA

SEQ ID NO: 5641 - protein, 406 aa, unknown
  TnpB Polypeptide
MEQTLTFNLAHTIRLYPNKAQETFFRKACGCARVAYNYGLSEYQRIRKEGHKPNILEIKKKFNSEKKVLFPWMSETNKDANQQPFTNLQSAFSRFFKRQNKYPVFKKKGRKDSFYISNDKFGVENKKFWVPKLGWVKGAETLRFKGKIASATIKRKADYWFVVISVETENTHAACENQAVVGVDLGIKTLATLSDGKVVEAVKPLRARLARLKLLQRWASRKVKGSFNRHKANRKVAKIHYEIACLRKDVLGKLTTYLCENYQTIVIEDLNVSGMLKNHCLALSISDCGFGEFRRQLEYKSVLHGNTFIVTDRFFPSSKTCSGCGAVKEALLLSEREFICENCGMVIDRDLNAAINLRNYGLKQLRAVSPEVTPVDKRALVYSSSIGINETVLGEAGISACTEMYM

SEQ ID NO: 5642 - protein, 405 aa, unknown
  TnpB Polypeptide
MLIKKAFKYRLRTTPEIEEQLRRMAGCRRFVWNDGLSAIKTALDSEERRPGYKQLCDALLLTKRTHPFLAEDAPSQALQQTLKDLDRAVKDAFDKKQPLKEFPTFKKKGKCTESFRIPQGFQIDQGSSRIKLPKLGWLRYRNSREMTGIPKNVTVSLHAGHWYASVQTEQEIPDPAQGPSKHIGGDRGINSFLAMSDGTLIQPLNAFKEASRKLGRLQRQLSRKVKFSENWKKCKAKITKLHSRIAAMRKDFLHKLSTTIAKNHGLVVLEDLKIKNMSASAAGTIEAPGKKVKQKSGMNRSILDQGWAEFARQLEYKLRWRGGMFLKIPPQYTSQRCSCCGHIHPSNRKRQAFLCLSCGFEDHADINAAKNILAAGLAVIACGEHPDVTGSVKQEPTGGDYALAA

SEQ ID NO: 5643 - protein, 422 aa, unknown
  TnpB Polypeptide
MRPRKGRCRIEVTKANIAYKFELMPTREQKRIFAQAAGWRRFVWNKAVELQKRCLEQEVPFLKYTELAGRLVLWKKEDDMLWLLEAPSQALQQCLMDASAAIQAFKAKKKGFPKFQARGDGDSFRIPQVRPTDWDEANGRVRIPKAGFVRFRKSRPIQGKIKQMTVSVECGHWFVSVVTEMDFANAGPHRPGEVGIDLGIAQTVTLSDRTVFQLDVESIKKHEKQIAVLQRQLCRNKEARQKLAKLGKANPFDKREPSRKRRRLKAKIQNHHRCIRNIRRDFMLKTAHTIAQNYGWVAMEDLKLKNMTKSAKGTVEVPGKTVSQKTGLNRSLARVAPYAMRGGMRHFSPFQSIWLSPMKGVCLSPPCAKVLHEHEILHHQSTDHHRRSRPSSATQEFQLRLQPSEHRHGRWMGSCSAAACHP

SEQ ID NO: 5644 - protein, 190 aa, unknown
  TnpB Polypeptide
VIHRNSEPERKLKSASISQERDGTYYCSVLYEYDRNIKPAVLDKDNAVGLDYKSDGSYVDSNGNRSVSHKYYRESQKKLARLQRRLSRKIGSKKGEEKSSNYVKQLMKVNKLHTHISNQRKDFLHKKSTEIANQYDIVYVENLNMRSMSNRGFGNGKATMDNGYGTFLKMLEYKLENRGKFFVKVVKFYP

SEQ ID NO: 5645 - protein, 235 aa, unknown
  TnpB Polypeptide
MIKSGSVSCKAGRYYISVLVEEKEQEKPQLNDFGLGIDLGVKEFAVISNGNVKKNINKTERIKKLEKKLKREQRCLSRKYEDYKKRSKKKGEATRQNIQKQVLKVQKLHQRMDNMRTDYINQCVNEIVKIKPSYITIEDLNIEGMMKNRHLSKAVASQKFYEFRTKLKNKCEENSIELRIVDRFYPSSKRCHGCGRIKKDLKLSDRIYQCECGYEAGRDYNASLNLRDAKTYKTA

SEQ ID NO: 5646 - protein, 383 aa, Clostridium sp.
MKRAINIRLFPSKEQEILMWKHIGSMRYAFNWGLDKQIKHYEATKKKLSVAELGVDLTKLKNQEGFEWLYYVSHATLKEALRDLDKSYKNFFNGSGFPKFKSKKKSKDKFYSRYDKIYFKENIVNLEKIGKVQCRHNYDIDLSKVNKFSNPRVSFNGRVWVLSVAIEIKVEDKKEQLNDYSIGVDLGIKMLAITNIDSLDTKNINKTQKVKRLTKKLKKLQRQCSRKYEKNKKGVCYQKTENIAKLEKKIKRLHSKLTHIRENHIHQATSKIVKAKPFRVVMEGLKVSNMMKNKHLSKAIAEQGFSMFITQMKNKCAKYGIEFIQVPIFYPSSKTCSSCGRIKKDLKLSDRIYKCECGFVADRDKNASFNLAKYGLEISLSPD

SEQ ID NO: 5647 - protein, 414 aa, Streptomyces sp.
MQLRYNYRAYPDTAQRGALARAFGCARVVWNDCLRDRKEAHAAGLPYVTSAELSRLRITQAKRTTERAWLADVSAVVLQQSLRDLDTAYKNFFDSIKGRRQGRKAGPPRYKSKKDTRQSIRLTTNAFSLQENGTVYVAKVGNLKVKWSRRLPAAPTSLTVTQDSAGRYFLSFVVDTEPDLLPEAGTDTGIDLGLSAFAVLSDGHKINSPRFLRRAEKKLKRLQRELSRKAKGSKNRAKARSKVARRHAKVADRRRDFHHKASTQIIRDNQAVYVEDLAVSGLGRTRLAKSVHDAGWSVFVGMLQYKAARHGRTFARVGRAFPSSQLCSACGFRDGPKPLHVREWTCGACGTVHDRDHNAARNVLVEGRRIVAAGRAETQNACGAPVRRAHMPAQRGEAGSPRKGRTAQAGIPGL

SEQ ID NO: 5648 - protein, 262 aa, Escherichia sp.
VKRLQAFKFQLRPGGQQECEMRRFAGACRFVFNRALARQNENHEAGNKYIPYGKMASWLVEWKNATETQWLKDSPSQPLQQSLKDLERAYKNFFRKRAAFPRFKKRGQNDAFRYPQGVKLDQENSRIFLPKLGWMRYRNSRQVTGVVKNVTVSQSCGKWYISIQTESEVSTPVHPSASMVGLDAGVAKLATLSDGTVFEPVNSFQKNKKKLARLQRQLSRKVKFSNNWQKQKRKIQRLLSVSQISAGTTFTKSQRPSAKTTQ

SEQ ID NO: 5649 - protein, 283 aa, Lactobacillus sp.
MNKVIKGIKLRLYPNQSQREQLWQMFGNDRFVWNQMLGMAKERYQNNPNSLFVNEYGMNYLLKQLKCEYAFLRESDSTSFLVVNHNLAQAFKMLFRHRGGYPHFKNRHSLRQSYTGRSTCKVLARRRMQLPKLGGIRTSRTGLVGDAKIKRYTVSYEPTGRYYLSLQVETEVNQLPEMHQSVGLDMGLADLVISSDGVKYGTFNAEWLEKQAVRWQRKYARRRYLAQCEVWKWNHNRFDHLEELDGYSNWQRARVNKARCQKRIANKRRDYLHKLTTDLDQEL

SEQ ID NO: 5650 - protein, 312 aa, Lactobacillus sp.
LNYLRPNQSKNCVSLPSSGQAKIISAHFIKIQDYGTIQVVENIKNMKNTKIVTTKIKRKANGQFELQIVFKTINERKGIVNMIGADWNMKNNKIWHTSDNDELYLSKNVSDKADKLEAEINKLKSQRDLITWLSQKSQRITKLNEDIRYLSSKRSHIPTAEYKRMAKELFAENDLIAIENLNAKKMRKRNQINVKQNKAKNRKLAKIKPYEMGRLLIQMANRLGKTVILVDSYKTSQAEYGTKYQEKHDVNDGKWVSKHTEAIIERDLNASRNILAWALNPKEHIKYKESLKLYKEGKIKTAIKPLNLITVN

SEQ ID NO: 5651 - protein, 645 aa, Halanaerobiales sp.
MVDSKITIKKTLVIKNAMTDYNHKIFNHMTKVSKNVYNCVIYCFSIFLKYKDAIYRRLNALIVQFRNRKKLSGEIIDKWFYDIFESYYNNYSEICTIKKHNNEIIYKYIIDKIENDNIYIDNDNLDDFRKTVYNDLSNLEDLKHEHTDETIIEVVDNILKSIYIKNWYDVQHKLKNNIPINGVSEQFIEDVKNKKFLFKSKVKIDYKKKINKIISKEIDCKLKSNQNYVTRIAYKHLHDNSEMLPSDIIVNIMNKAFENIKAYYQLKANGIKCNLPKYLQKDSKFNLYFTYRSFKENNKDVRLTIGKYVSENYIDITGNNSVVCVNPTANTVYKKYAPKTACIDTNCKRFPKTTNFIIGTKYISKKHNKIFDAYYMNIPKPPNPPKINGQNMKLQLIEVKPIYEGHKYDIHYKYSIETNEPIRENEQGSVEDFISIDLGIGNLMTIYNPTGEQQIVSGKYLVWLNKKYNHLIDEAKQKAQRINGSYTTKKIRNMLINRENKINDHFNRIVKWLENNYKEKKIIIGYNLNWKSKVNMGRKTNRRFYEIPYSKLLKKIKDKFRSNLILNEESYTSKCDGLALADIKKKDNYLGKRIRRGLYQSSVGKLINADLNGAINIMRKCLKKKEINMDRIFGNSIFNPKKAKI

SEQ ID NO: 5652 - protein, 350 aa, unknown
  TnpB Polypeptide
MLLSKKTSIKVSREYANLIGHMCYAASKLWNVCNYERQHYKETGMEQYPDWYYQKKAHKEDLWYKQLPSQTAQEVCRLLDKAWKSFYVLKRSGGIETPRPPRFKQESIPITYMQMGIVHERDTDRVRLSLPKTLKKYMEETYQIHENFLYLENKIFRGMDQIKQLRIYPPEKGSCKIIVVYEVPDQEELPQNGHELSIDLGLHNLMTCYDSGNGKTFILGRKYLALERYFHKEIARVQAQWYGQQSGKGVKHPVTSKHIRKLYKRKQDSVTDYLHKITRYLAEYCREQEITCVVTGDIRNIRREKDLGHRTNQKLHSLPYNRIYIMLEYKLKRYGIRFIKQPANKKSRLN

SEQ ID NO: 5653 - protein, 273 aa, Halorubrum sp.
MYYAYKYRLKPSDTHCEELDRHRDICRQLYNHTLHRLNEYQDEHGELLSMTTLRSELPDLKKWWDDLSDVYSKVLQTVVERLFDNLKGLSALKENGYGVGQLKWKPPREFRSFTYSQSGFKLEKKGGQTVLSLSKLADIPIRLHRNIPDDAKLKQVTVKKEPTGEWFATFGVEMDREPPEPPENPKKCVGIDVGLAYSSTPTTPTARLSGRLTSQTNATAWSASNGSSRANNTSRTTTRHNGVESRSVRLISEGSGVTSCTNSRTTTLGSTIS

SEQ ID NO: 5654 - protein, 388 aa, Lachnospiraceae sp.
MTKIKKGFVIRLYPNAEQMRQIRRTAGCTRWLYNEIVATNQKRRDVDPSASLLCGRNLNYILPRLKEEHPWLKDVDSTSLTGVVDNIANAYTRWFSGLGRKPKFKKRSTYADSFISKCVNGNIAVIDRHHIRIPKLGVLYYKSGKMPHGRICSVTVRLLPSGKVNASVLCEYDEVELPKTGKTIGIDLGLKDLAILSDGTKYELPRWDKESAEQLHYWQRTASRRLLRAKEAMKKDSTLTLEDFRNYQNARQMVAKIHAHIANRRKDYLDKLTTMLVRDFDVIVIENLKPSKIVHNHNLASAIHNAGWGMFAEMLAYKCAFYGKRLIKVDPSYTSQTCSDCGTVNGRLGYNAYGWLKVREWTCPACGAHHDRDINAAINIRNIGISAA

SEQ ID NO: 5655 - protein, 456 aa, unknown
  TnpB Polypeptide
MMTIKLKIQNTIDITEYQRQFSCLVRYAYNRILDGKTAADIRKLCKTLNNVGLMDGSWAEFAYYRADRNIEVQKALHPDNNVVFGGKKNFSDYSNGKITEEEYRNNRLSNLLSIGKKHDPRGNRKFQLDLANNKVIFKPSRDTHIDVILPRLSKNQKKLLEQVEMLGKNHEMPITYELSSDHICIKFDEAYCSTPYHNFKKDRVLAIDTNPNFLGITICDYNLDGEQKVLHKEIISNAEINALFTTEGIGLPSTHPFKKYITQKRIHEGHEVAKYISVLARSWNCEYVALEKLNIKQRDIGKGKTYNRKCNNMWNRLRMFDGIKKWCSLKNIKVHDVPPQHSSFIGCINYTTDYDMIAASLEISRRANAFISNYRTKTKDHTNHIVYPAIEKKKILNEWKDEGLTAKDFSNWVDLYGWFKQNPELNYRVLLDVGKTTEKSFRLFSQKSKLKIFRIL

SEQ ID NO: 5656 - protein, 396 aa, unknown
  TnpB Polypeptide
MSRYRMCPSPAQEAVLRDHCGHARYVWNLAVEQHSHWHPGRKRAPGYVEQCQQLTRARAEHPWLATGSQMVQQQALRDFAQAMAAFFDPQNPAGRPSWRKAGRDEGFRVVAVKPGQVRRLSRKAGEVWVPKAGWVRFRWDPDLPAGVKSYRVTMDRAGRWHISFAVIPELIPAPGNGQVVGVDRGVAVAAALSTGELLCVPGLTAREHKRLRCLKRKLARAKQGSNRRERGRLAVARLNARETDRRKDWAEKVSTYLACQFDVIRVEDLDVKAMTRSARGTAAAPGRHIRQKAGLNREILRSGWGLLVRRLEDKAPGRVEKISPAFTSQRCSACGHVDAKSRESQARFVCTACDFADNADVNAAQNIAAGHAVTARGGDGVTRPVNREPQLLLQSA

SEQ ID NO: 5657 - protein, 278 aa, unknown
  TnpB Polypeptide
  misc_feature (242)..(273): Xaa can be any naturally occurring amino acid
MIRGHIIELKPNNVQANHLARACGVARKAYNWALHEWQRQYALDKAYRDACLAAGVEVDTKNLNKPSQAKLRRELNAIKRELFPYMLEVTKCAPQAAIMQLGDAYNNFFKGLAKYPTARKKGRDDRFSLSNDQFAIKGKSIRIPNLGWVRLKEALRFDGKIMSATISKRGGKWFVSVAVEIQKAVIPTKKTGKSVGVDLGITDLLVLSDGTKIKAPKPLQANLKKLRTLNKALSRTKKGSKXXXXXXXXXXXXXXXXXXXXXXXXXXXXXXXXLSFAL

SEQ ID NO: 5658 - protein, 252 aa, Thermosporothrix sp.
LLVSLEIETPDPATRTGIAGVDVGIRYLAVTSSTRGKQSFHSGKQVVARANHYARRRKRLQQKGTRSAKRRLLAISGRERRLKQDANHVVSKRIVTQYPHHLIGLEHLRDIRDRTRRKKASKKQRKANAIFSKWSFAELQHMIAYKAQLSGSLVITVDANNTSKACPMCGHTCDANRPNKGLLFVCQKCHYTLHADLVGARNLAMRTVLIRQDWMSTGTLSECPDVSDKEAKAERLRRYSEVRWSLDTSPRS

SEQ ID NO: 5659 - protein, 185 aa, Thermosporothrix sp.
MIVVEYKQTGWKLDPDGVHIRFTDGCGIGRLRLIGSRDIMAFPLSQIKRVRRLRRADRYSCQFAVSATRRVEHQPTGKQVGIDLELSAFFTDSEGHTVAPPQDLRKAERRLKRLHRRLSKTQKRSRNRRKARQALSKASLKVQRQREDVARKQANALVSSHDPLCLRSLADPSSRQEPPSGQEHR

SEQ ID NO: 5660 - protein, 403 aa, Thermosporothrix sp.
MKVTRGYKTELDLNNKQRTACLKHAGCARFAYNWGLACSQEAYRATGKRPTAIDLHKELNALKKTDYPWMYEVSKCAMQEALRDLEKAYKNFFRRVELKKQGKWKGKLGFPTFKKKSKGIGSFRLTGSIKVLRDAVQLPRLGRMRLHEHDFIPTTARILSATVSEEAGRWFVSIQVEEEQEQLTPPATTAIGVDLGIKTLATLSDGVTFENPRALKHAQKRLRHLERQKSRRKLGSKNRKKTCRKLAKQHARIARIRKDAAHKLTTSLCKNHALVAIEDLHVAGMLNNHKLAQAVSDSNFGEIRRQLEYKAVWHGVHLVKIDRFYPSSKRCSACGWQDDEQTLADRLFTCHECGLVLDRDLNAAINILQEALRTTGSSSGSHAYGVGSSGLLECQQAKLPTLK

SEQ ID NO: 5661 - protein, 207 aa, Bacillus sp.
MAKQNKAFKFRLLPNKEQSALLAKTFGCVRFVYNKMLAECKEMYEKFKDDKESLKKQKFPTPAKYKSEFPFLKEVDSLALANAQMNLQTAYKNFFEGNADFPKFKNRKAKQSYTTNLVNGNIELKDGHIKLPKLKLVRIKQHREIPADYKLKSCTISRTKSGKYYVSVLTEYEKDIQPKTIENVIGLDFAMSLCQNKNIPLSEYLEN

SEQ ID NO: 5662 - protein, 200 aa, Clostridioides sp.
  misc_feature (165)..(200): Xaa can be any naturally occurring amino acid
MYPNKKQQELINKTFGCCRFVYNKYLAKRIEAYKNNKETFTYKQCSSDLTNLKKELKWLKEPDKFSLQNALKDLDNAYKKFFKEKAGFPKFKSKKINRFSYKTNFTNGNIMYCGQHIKLPKLGMVKVRDKQVPKGRILNATISKEPSGRYYVSLCCTDVDIEAFXXXXXXXXXXXXXXXXXXXXXXXXXXXXXXXXXXXX

SEQ ID NO: 5663 - protein, 448 aa, Halorubrum sp.
MIDTGRIPRPTVVGDEADNSQYKPLNQHITNHKTAMEYSHRYHAYPTQEVAEGLEHHLNVHRQLYNHVRWDYTNSPEDDKPSEYDQNNKLPEWKRTWPVFAETHSKAAQATVARFHHNLTVLSELKEKGYNVGRLKRQAPTDYRSVTYNQSGFDLDEKRGHDKDAYVWFSKIGWMKIRYSRPIPDHASIKEATFKKETTGEWFITFSLETEDEHVPEKPAVESLTASNSVGIDLGILNYVHTSDGKTVDWIDLDDEYDRLRHEQRKLSRKEHGSNNYEKQRQEVAKARRHIRRKVLDYQHKITTWLVKTYDAVFVEDLNVKEMLEQSHNARNKQDAAWRQFITLLEYKAALYGTHVVQVEARGTTKECASCGVETAKPIWVREHSCPSCGFETDRDANAAMNVLQRGFAERGLGWPESTPVETVAATDTDRFESVSASHVIETGSLPS

SEQ ID NO: 5664 - protein, 281 aa, Halorubrum sp.
MEYSHRYHREIPDEAAIKEVTIKKETTGEWFVSFGLETDEADLPKKPDVETLDTSNSVGIDLGILNYIHTSDGKTVDWLDLEDEYDRLRREQRKLSQKEHGSNNYESQRETVAKVNRHIRQKVLDYQHKLTTWLVTEYDAVFVEDLNVAEMLQADENARNKQDAAWRQFITLLEYKGELYGTHVVQVEARGTTKECAKCGVETAKPIWVREHSCPSCGFECGRDANAAMNVLQRGFSELGLGWPKSTPVETALPTDTISVSAKRVIETGSPTLNEATPVAE

SEQ ID NO: 5665 - protein, 249 aa, Rhizobiales sp.
LRDHISAEDDIEVLETVRFDGGDFLERVKKHASKVDTLRSEIDRLYNRLDRIRVEINFVAEVEQGALVPEIAALPNHPRYMAMHARFFRLLKAIDRLKEARRGLYRTVAGLKKSWFGHVAQRKADLAEKHGAVVVTEDLNVVAIRTDDPAYKGRTFNKMINNGSKGQYIRRSKNTLTWRGIASIKIPSFYTSSTDWRTGTVDKKQRRGTIFRAASDGRVWDADLHAAEMIGRYLFLKPKSKAIVAALAA

SEQ ID NO: 5666 - protein, 387 aa, Neisseriaceae sp.
MYERIISQMLITKGYKTELKPNGKQRTCLSQHAGAARFAYNWALDRIQKGISKPNGIQLHKEWNVWKKENIIWWKEVSKCSPQEALRNLDTAFNNFFRKCKQKVKGKKGFPKFKSKKNGLGSFKLTGTIKVSNTHIQLPRLGKIKLKEFGYLPVNAKILSANVSERAGKWFVSIQVEEEINKIQKPEAIVGVDLGIKTLAVCSDGTTFDNPNALKSNLDRLKRRSKQLSKKQKGSKNRKKAAKKLAKLHYRIANIRKDSLHKITSYLTKTKSKVAIEDLNVSGMLKNRKLSRSIQDIGLFEFRRQLEYKGKWYGCEIIIADRFFPSSKSCSNCGWIKRDLNLKDRVFECDSCGLEIDRDLNASYNLESYTVSSTGINAYGEVSSGLK

SEQ ID NO: 5667 - protein, 381 aa, unknown
  TnpB Polypeptide
MIEFVYNLSMDITLQIQLFPDTDQSNGLRGTVERFNEACNWIAGELFDRKLSNRIEAQRLLYHQIRERFALTAQTAILAIRRVCEAYKRDKAIQVKFRVHAAITYDPRVLRFIGLDKVNLWTIAGRLTVPIIMGKYQAERFTTAKGQCDLVLRKDGKWFLLATVKVPDGTPIPTTDFLGVDLGLAEIATDSDGNSHSGKDVEAVRRKHNLQRKRLQKRGTKGAKKKLKRVSGKEARFRKHQNHVISKTIVELAKGTGRGIAVEDLTGIRGRLPAWSKDVRNRLGGWGFAQLRLFIEYKAQLSGLFVVAVDPRYTSQACSACGHCSRDNRKSQARFSCVSCGISMNADKNAARNIRVRALGTRKMPIGLAGDSILQPESPRL

SEQ ID NO: 5668 - protein, 360 aa, Pleurocapsa sp.
MWRQWLAACRYCFNQAMAWLKDNRKLIAKRKLRNIIMQSDLPDWVKQSPCHIRQNAVFDAHQAYKASKKAKFRSCRERNQTIKFNNCNFSNGRWYPTKTKKLDFKASEAIPDECEAATGLTWNKGRWFATFPAPVESVDNKSDGIIALDPGVRCFQTGFDGHRFIELGKGDISRITRLCQHLDNLMSRISQAGGSKRSAMRKAANRMRNRIRNLIDEAHRQIAHYLTNNYKVIFLPTFETNQMVAKSSRKIRSKTARQMLGWAHYRFSQVLANQAELTQTRLIEGSEAYTSKTCTKCGHIHTTLGGSKVFKCPSCGHKLPRDWNGALGYMLRALRDTSFTINNNGVAIAALSGNYLYCVA

SEQ ID NO: 5669 - protein, 128 aa, Salmonella sp.
TRAIVDENQAVIVETLKAANMMKNHHLARVIGDAGWSGFIAKLEYKAAEKGVHLVKLDQWFASSKTCHCCGYKMPEMSLHKRIWQCPECGVEHDRDINAALNIRQKGIQELKGAATLLKVMERSCFTG

SEQ ID NO: 5670 - protein, 301 aa, Deinococcus sp.
YAKHLEYIAQGAEIGAGKLWYDKRKKQYFLLVPLSIELPDPDPMTHKQVVGVDVGMRYFAVASSTSNQAFFKSGKATLRKAERYAKARKSLQQKGTRSAVRRLVALSGRERRFIADTNSSLASEILKTYPHAFIGVEELTGVHERTERRSRPNSSEKQRKANRRRARWSYAELLGFLAYKAPLHGSFVVKVDAHYTSQTCTRCGHCSKGNRPNSGLMFVCESCGYHLHSDLMGARNVGLRALLVRQDWASTGCLSCTPGRPQSADPQAGSAGRDVSDAEAKAARLSRYAELRWSPDTSLAL

SEQ ID NO: 5671 - protein, 401 aa, Desulfomicrobium sp.
MKKSKAYLFTLKTDLNLERQMSRYAGSCRFVWNRALALEKGRLDAGEKILRYNDMAAQLVAWKREPETAWLCESPSHTLQQTLRNLDRAFMDAFDKNNPKRFPKFKKKGVHDSFRFPDPKQFCLDQANGRIKLPKLGWVRYRKSRDVQGDVKQVTVSRCGKRWRMSILSEQTVPEPRHASTSKVGIDLGIRAFAALSDGAIVEPLNSFRSMEKKLARAQRSLARKVKFSANWRKQKARIAALHERIANARGDFLHKLSTDVCKNHALIAIEDLRVSNMSRSAKGTIEAPGRNVRAKAGLNKSILDQGWGEFRRQLEYKALWAGGVLVAVPPQYTSQSCPECGRVDAGNRHKTKFRCLGCGHTADADVNAAINILAAGHAVMACGAVKAQATAAKQEPLHAA

SEQ ID NO: 5672 - protein, 272 aa, unknown
  TnpB Polypeptide
MYFVKNNPKDCRCERHRINIPSLGWVRIKEKGYIPATKDGYVIKSGSVSMKADRFYVSVLIEIPDNKTTDIYSEGIGIDLGLKDFAILSNGKKYKNINKSARLKKLEKQLIREQRCLSRKYENLKKGESSQKANIQKQRLKVQKLHHRIDNIRTDHINKTIAEIVKTKPSYITIEDLNVSGMMKNRHLSKAVASQKFYEFRTKLKMKCDDNGIELRIADRFYPSSKICHCCGSAKKDLKLSDRIYKCSCGYVEDRDLNASLNLKDAVTYKIA

SEQ ID NO: 5673 - protein, 461 aa, unknown
  TnpB Polypeptide
LYQSYAGAETRSCALSGLSGLHGGRCAPRVQRELGEVAFLLVGSAHRCYTSAMLRRQGYKFRIEPTEGQRVILERTAGAIRFIWNSALALQKHRLSKHSKTLNYAELCRELTVARNDPELSFLSEVHSRPQQQVLKDLGKAFSDFFLKRKGFPRFKKKGRSFDSFRFSQANDSIGVNGRRIKLPALGWVRFRKSREIEGTIKNVTVKRRGAHWFISVQTEREVADSIHPSSSEVGIDMGVAKFAALSTGELVQPIDSFRRLEKQMGTAQRALSRKKRFSSNWKKQKAVVSRLHIRIADARNDFLHKTSTAISKSHAVVYVEDLKVKNMSASARGTTEEPGKNVRSKAGLNKAILDQGWFEFRRQLTYKGQWRGGKVVAVPPKYTSQTCARCAHVSSESRRTQARFVCVACGHEDDADINAAKNILRVGQTLSVCGEGSLGPSAKQKPRAARKRRSRAAKAA

SEQ ID NO: 5674 - protein, 371 aa, Bacillales sp.
MTKQNKAFKFRLLPNKEQELLLAKTFGSVRFVYNKMLAERKETYEKFKDDQEKVKEKKFPTPAKYKDEFPFLKEVDSLALANAQINLQKAYKNFFEGRAEFPTFKSRKHKQSFTTNRVNGNIELQDGHIKLPKLKLVKIIQHREVPADYQLKSCTISKTKSGKYYLSILTEYEKEIEPVSIKNVVGLDFAMDGLYVESEQGKKANYPRFYRQSLNKLEKEQRILSRRTRGSARWEKQRLKVAVLQEKTANQRKNFLHHKSKELATNYDAVVIEDLDMKGMSQALKFGKSVHDNGWGMFTSFLQYKLKEQGKQLVKIDKWFPSTKTCSKCGSVKEIKLSERTYQCTCGLNLDRDYNSALNIKKEGIRLLANA

SEQ ID NO: 5675 - protein, 405 aa, Burkholderia sp.
MQRLQAFKFELMPTGEQARKMRQFGGLCRRVYNDALAAQQKNHEAGGKFVNYVGMAKWLTVWRNDPSKPWMRDAPVHTQQMTLKDLERAFVNFFEKRADFPQFKRKSKAADSFTYPDRKQITVDGGNGRVKVPKLGWLRYRNSRSILGNVRSATVSQRAGKWYVSILTAREVEQPVPNGPAVGIDVGVARFATLSDGTYIAPLASFKKHEQRLAKYHRRMARKVKGSANWKKAKARIQRVHAHIANARADFLHKASNTISKNHAMIAVEDLQVRNMSKSAKGTADAPGRNVRAKSGLNKSILDQGWGEFRRQLEYKTAWRGGYFVAVPPRNTSRTCPCCGHISGENRKTQALFACIKCGHTANADHIGAINVLAAGHAVLACGEKAQSGRSKKQESTEATQAIEA

SEQ ID NO: 5676 - protein, 381 aa, unknown
  TnpB Polypeptide
METIVVSHKIRLVPNQMQEEYFRKACGTARFTYNWGLAEWKRQYENGQKPSAYSLKMLFNRIKKEQFPWVAEVTKCAPEQAFADLQRAFVNFFRKNARYPNFKKKGRSKDSFYLSNDKFEINGKKVRIPKLGWVRMRETLRFSGKILSARVSRDADQWYIAIQVEIARPTPPTKNHGTVGMDVGLNCFAALSTGEKVLAPKPLRNHLKRLKKLQRRHARKQRGSQNRKKHITKLARLHLRIRNIRSDFLHKLSHRMTTSCKQIAIEDLNIKGMVKNHRLALSISDAGWGEFRRQLSYKTDWYGSSLYVVDRWFPSSKTCSQCGSIKDTLSLSERLYVCVCGNKMDRDVNAAVNLKLAATGGYPESNACGHSDRCAAAGLAV

SEQ ID NO: 5677 - protein, 520 aa, unknown
  TnpB Polypeptide
MIETKDQAQKVVREPSKKKAKKENIFTERIQIRSNTKLNQLCQASARLFNAANNIVHQGFKMFVLCKGYGVQKAGGWVRYYDVCDELQGTSVYRALPAQTAQQVIRQVDTAWESFFEAIKAWKEDPDKFCARPLPPGWKAEDEVNLLTFSNQQCKMKFNPQSEKAYIHFPKAVCIAPVQVNPYRIGTLQQVRVLPRGHYAIVEIVYKRDIVQKPKAQSVPQDRIAALDLGVRNLVCLVTNCGVRPVVVQGGAVKSMNQYYNKRRAEYQKKYSAQGIQGEPLQLERLTRKRNNKIEDLFHKLSSTLIIYCTSQRIGTLVIGYNEQWKQKTHLGRRNNQNFVNIPFYRLVEKLKYKANLAGIKVVLIQESHTSKCSFMDNEPIEHHETYMGQRGVYRSAAEGGANKVAYGLFKTAGGKVINADVNGAYNILRKAFPEALVADGIEGLGLVPIAVRFSKLTQDFTELKQLAANLDSSTDALLKANSADGSKAPGQRQGGYSDPAKNLGKFHTEPALLNLVTKL

SEQ ID NO: 5678 - protein, 412 aa, unknown
  TnpB Polypeptide
MILKDQMLFKAVSFHLDSDPPADARFLLEGFRLAVNNAIRAGLQARVTSRNALSKLAYKDFREEHPEMYSQHLVSALGVAAGILRNHRRLVRRGAARNTPYIRRLMMKAENQAYKLDRESGVIDLPIRAGCHVKLGLVVSQYHRKYLDDNNLTLGSLTLLPDRVIIAFRKEAPKAYTPESALSLDTNERSLDGVFVNGDDGVVVKADYRDVAVIQQRHHDRRRRLQKKKSHDRRMARLLCRGEGVREHHRVDYRMHQVANAVLSFAEMQSSAVVLEDLKGFRTKRGKDLNRRLSIWPRRKLHQIIEYKAAWKGIPIIKVDPRYSSRKCSMCGRISDSRMGTEFVCECGWHLDRHINASINLLQTAVSKGLEVAGGLRFDPGAFQHDVMMILYEPAMAARSEPNGTSQADAMS

SEQ ID NO: 5679 - protein, 382 aa, Escherichia sp.
MRRFAGACRFVFNRALARQNENHEAGNKYIPYGKMASWLVEWKNATETQWLKDSPSQPLQQSLKDLERAYKNFFRKRAAFPRFKKRGQNDAFRYPQGVKLDQENSRIFLPKLGWMRYRNSRQVTGVVKNVTVSQSCGKWYISIQTESEVSTPVHPSASMVGLDAGVAKLATLSDGTVFEPVNSFQKNQKTLARLQRQLSRKVKFSNNWQKQKRKIQRLHSRIANIRRDYLHKVTTAVSKNHAMIVIEDLKVSNMSKSAAGTVSQPGRNVRAKSGLNRSILDQGWYEMHRQLEYKQLWRGGQVLAVPPAYTSQRCAYCGHTAKENRLSQSKFRCQVCGYTANADVNGARNILAAGHAVLACGEMVQSGRPLKQEPTEMIQATA

SEQ ID NO: 5680 - protein, 395 aa, unknown
  TnpB Polypeptide
MVFLGEYHRLLQEIANDAWSNGIPGYDFDISENQLCAPSYLPSDYLKTFDSWFTARMKQCVGKQACAMLKTSVKKRSKQLWMLKKLQREGKDARRLQSKIDRQALVRPSATFAKAELDPRFIDFQTDSAEFDMFVRIKTIGDGLVLRLPVRETKPSKKWKRKGARKNSIRLSEDTLWFIYEVPDIHKHSGKTVGCDQGYKTVATLSDGQFTGPCPHGHTLETIQSKLSRCKKGSKGFERAQEHRENYIHWSLNQLDWSDIGEVRFEKVRRLRYGHRTSRQMSHWAYSIIREKVESLSETEGFVFKEVENAFRSQRCQCGRVRKANRKGKTFKCDRCGFAADADMNAASNLALDLYEIPYWVRQSKINRQGFYWQEDGLFDDDHEPIVREANKAAA

SEQ ID NO: 5681 - protein, 425 aa, unknown
  TnpB Polypeptide
MDIQRTVTIKLPNDADLRATLAAFRDVQNAVSTDAFNEGQPLAAVPLQRLVYNRVKGTLNSQMTITALRLVVGAYASAVKGRNRRLKAEARRKKRCEAKGWRFTERAIKPLGVCRFEHLAAMFLIGVRGRDADFRDDGTLAIWTVGGRKRLSYEVVRSHRALFEAATEINSVTVIERDGHLYGRVALTLEIPEPVGVTPVGVDLNETNALVAVDADGNELFISGLATKVKNKRTMQTTARVQRKLAAKKAEGQDTHSVRRALKRLGGRRKRRTRDFARVAAKTLVQWAPSDAVLVFEDLSRIPRAEKRLTRGVALRRRLSVWQHGAIREAVTSKAEMRGLAIVYINPAYTSQNCARCGLRGERHRHTFTCPSCGHEAHADVNAAINIRSRFVQSRLDGPPSVGPEALSLSSEGDEGKPTAVALGH

SEQ ID NO: 5682 - protein, 444 aa, unknown
  TnpB Polypeptide
MERNIGRELFLGKPAKNRKIKETIRRTMIRRKNQACRTYELKIDQSHLDAEVRGHLTRLFLEAKWFYNSLIAQGKANRDGLWNADYKAQKVMVKRKSVFEEHELRCLSSQMKQEIIGRAKDNIVGLSKLKKKGRRVGGLKFTGRVHSIPLNQYGVTYWINSNRIHLQKLKRPLRVRGLRQIPKDAEYANATLIQRNGDYYVHVTTFQPKPQIQFKQKSIGVDGGIRKQLVLSNGVEIEESVPLTKKIRRLHREFSRKKKGKNRAKAQEKLNLAYDELTRQRRDIRNKVGGKLTRTFEVVCVQDDNVSGWQRLWGRRILATGIGGLMSALNKAHTPAPVDRFYPSTKTCSRCGHMQNVDLDEKTFRCEACGLVIDRNLNAAINNEQEGLKNIGVPVVRREFTPVDTKTSAELVGYFNSIPRVRASLVEEAGSRASARKPTTSVVW

SEQ ID NO: 5683 - protein, 373 aa, unknown
  TnpB Polypeptide
MIITLKAKLKKPNKRKEILLENYCREFTECCNFYLKEIQRLRTTSRKRLHSELYQKAKKKFPEIATQNLQTALDKSIETARAFYRKKGKKTFPRFTNIFGAFRQDSVRIDKLNLGLNLIKGKRIWLPFEIRNEYKPLLEKSGRVEIKKVRKKWFAFITVQLNPEKKKAKKVLGLDLGIAKIATLSDSQGRINKFWRGEWIRWKHQYFEKIRAELQKNRKSLKKISGKERRWMRDINHKISREIVNIAIKEKANIAVENLIGIRSRLKLTKRTRKMIAHWSFRELLNFIEYKLRLAGLEMFSVNPRGTSITCPKCGFRHRRNRRSQSIFKCSRCGYELNADLVAARNIATLGERYILSPECGYASAVSGINPTS

SEQ ID NO: 5684 - protein, 509 aa, Bacillus sp.
LKNDLIVLKNTSTLPVYEYFHQIAKYFGMLERKLFVDLYVRKKPSGDVKKFYCATYNITARQYNSIKKQLDGRISSKLELSKLYMKEWNEKIKSTTKRIKSKEEQKAKLQSTLLKMKGNEANFLKKVKRYRNIKRFIHQKKRKLYSMNLKLKKVESDFHHGIVRICFGSKELFQKQFHLEENGLTFQQWKKEWGEKRAAQFTFIGSKDETFGNQSCTYDLENHLRIRVFSKDEEVFGNYVTLKNVQFGYGQENIDKAKISSLGYTKGKRNPVKYYRALTWKFVRKSGHWYACVSVDVDVPPIITLKNNGVLSIDFNYGFLAVSDVDGFGNLVYSFQVPYQSTHCTSEQTKQSLSVALKAVVQYAVKKAKPIGFENLDFKRKKQNLKQMSSKQAKMLSGFAYSTYQSLLQSKCEAAGIESIAVNPAYTSQIGQHKFMKKYGISSHESAALVIGRRGLHFKRIEKIPPHHILNQKKKDSILQMDRRSQWKEIGQQWKNYSFNNKLYVLYRI

SEQ ID NO: 5685 - protein, 199 aa, unknown
  TnpB Polypeptide
MQDSSKDKAPRFKSKNNKVQSYTTKHTNGNIAIIDNKLKLPKLGLVKFVKSREIEGRILSATVRRNPSGKYFVSILAEAEVQELPKTDSTVGIDVGVKNFAILSTGEVFGNPKWSRVLEKKLAHAQRILSRRTKGGANWNKQRMKVARIHERIKNARTDYLQKLSTRIIKNHDVLGIEDLQVSNMLQNHKLAKAIQEVS

SEQ ID NO: 5686 - protein, 393 aa, unknown
  TnpB Polypeptide
VKAIRIVKLKISGSTKAAGLLAAWLKSANWLSGLVFKTAELNSNRLAKAHYANLREMGLPSQLACSLCKTVCATYKTAKSNNRWRLAKFTRAMLPVVWKRDFNRTKKGVSLWGELLVIEDSRPLPEGGWKDSKLKRVGKQWYLILAHEVEIPEPKTEGCIVGVDMGVKRMLVATNSANAKPFFFHGGELNHRRSCIRRTRAAVQSVGSKSSRRLLRRMSGNEAAVTAHLTHVGSKALVSYAVEVGARKIVVEDLSNIRDGSLSKGKDLRSKIHRWPYADMRFKIEYKAAAVGIEVEAVSPRNTSRGCSACGHVSASNRKGLHFCCQKCGHKDDSDLQASKNIRARSVSIARNATGTGSLKAPESIGSVDIDSKLCVPHGGLVLVKDSAKIRAL

SEQ ID NO: 5687 - protein, 399 aa, unknown
  TnpB Polypeptide
MTKSKNCDSYICYCCFAISVSFDRIETKEVSVTEKAYKYRIYPNKKQQDLIKKTFDCTRFVYNHYLAKKIELYEENKTSLTYNQCCADLTNLKKELKWLKEVDNRALQNSLRDLDRAYQNFFKKYAKFPKFKSKKTHRFSYRTSFTNNNIEYCGKHIKLPKLGKVKIRDKQVPQGRILNATISQEPSGKYYVSLCCTDVENPQYEKTGSVVGLDLGIKEFCITSDGEFVENPKYLKRSLNKLAKLQRELSRKTKGSSNWENARIKVARQHEKIVNQRKDFLQKLSTGIVKENDIICIEDLQVANMIKNRKLARAIGDVSWYEFTRQLTYKSNWYGKQVVKVDKFYASSQLCNACGYKNDEIKNLSIREWKCPQCGAYHDRDKNAAKNILNEGLRILQVA

SEQ ID NO: 5688 - protein, 351 aa, Campylobacter sp.
MFFLKYPLQNLNLAFQKFFRDLKQGKVSYPKFKKKKDNFGSYYIGGDQAIIKDEKYLKVPNLGLVKMKEKLRFNGKINSFTISQSADKFFVSFSMQISKDEYLKTHNKAKNNNLALSIDVGLKSFLSLSNGLEIKAPKPLAKFNRLMIKRARQLSKKQHAKTKQEALQGIKKSSNYLKASIKLNKLHRKIANIRSDFLHKLTSSLVANAKYFCLEDLNVKGMMSNHRLAKSISDVSFYEFKRQLEYKSSYNDKEIYQVDRFYPSSKLCSNCGTIKENLALKDRVYICDECGISIDRDYNASLNLLSQLKQKIGKVLAEFTPADLTALLNDLAINQIATSKVETGIQQKSYL

SEQ ID NO: 5689 - protein, 465 aa, unknown
  TnpB Polypeptide
MLLGIRLKANPTSRQKLILSQWMGCARAIWNAKCDEERYYATFARKYYPIGTYAPIDQKTSQFKNKELTPWLYECPSQIIRNAAVNWYQTFQKFMQVQCGKPKRKPKTDKGSLHLTRELFKFEKGEDGVTRLFVGTKTNNIGYLSFKSHRSFEIPNSIYIKKERGQYSVSFCYDDGKDNRSMTMDEHLQYLKSATKEYLNDNVIGIDRGVAIPAQAGNKSYDFTKGQKKNKTKAEQYIKRLQRKLAKQKQKTSQRRSKTKCRIANHHAKCGNIRKDFCHQTSRSLVNHQAKIFIFEDLKTSKMTMKPKAKQDENGKFVSNKAKQKAGLNRSILDKGWHKLETFTKYKAYKAGKVVFKVPAPHTSQECANCSHIHPDNRKSQALFQCGYCGHIDNADRNASLVIKKRAINLILDTGTVLSDRGVLTSADTGRGAKGKSGKSTLLSASGNEPSKKKRTTTTTIKVAA

SEQ ID NO: 5690 - protein, 485 aa, Hydrogenibacillus sp.
MVTIPGRIYPNETAKAELISFMSRYQTARRTAYQALRRGKKTGEIVKDLYQKFFPNARWCQWAVEDAKATLESQKDQVDMHVSDLEAKIEKAAEKLERTKDKLRRRGIQMRLDRLRARLASWKAFQDRGEVPPAVFGGKKNLLKLQRGKLSREKWRELRSNAFYSVGQANQKGLEGQHGNANTEIVHDPLTDSFRLNVYLPPLPGRNPGRRRDEADWVTVPLEVPARYRSLLQKHLDAGEAYTVRVVRKDDRFDCFISFPLKSDPLPVPDRSQALAGIDLNPDVVAVTVALPNGNFKVSRCFWSPDLVHASHEKREWIAGNLAGEVAEWLASLGVRQVALEELSFAQDHDTNKVFNRITHNFAKKLLFTRLIVALRKRGIAVFTVPAAYTSLIGFFKYAETYGLNAHQAAALVIARRALGFKEKVPKGLLQKLLGRSPGEGWTHGKLWGKLYGMFKATRKKIARSFNIKGFTPSVWVETIFVESG

SEQ ID NO: 5691 - protein, 392 aa, unknown
  TnpB Polypeptide
MLSKKIKLNLNYNKQLILETLSNEHRLLYNFLLERVKDNLDFKQINENYKIFRSTNNLTINSKSAQNTSINLVNNIKSYLSLKKKDKTARFPNKFKSHKFFNSFMLDYNGGCGGFKINNNKLELNLNSVKNKLVLDLPEYSNDVNNENVKTITFKKEDNDYYLIFVYQEKSKLRILNKNNYLSLDLGYSRLLTGTTKDENIVLDNLKQKKLNNYISELQSKRDSYKKGSRKWSKTNLSLKKKKRKLKNKVNDFIHKSSKKVVDYCISKDIGKLIVGNIEVKKVIKKENKKINGLSKSTGNLGRFKTFLEYKSKNVGIEFVLVNEAWTSKTNCMTGMVEFNSDLKNRYFEYGYLLIDRDINSSINILKRSGECLTQDSIKSLLLNKMSELKVY

SEQ ID NO: 5692 - protein, 450 aa, Frankia sp.
VKALQAYRFALDPNQVQLAGLRRHAGAARFAYNWGLARVKAALSQRTAEQSYGLTGDLLTPVPWTLPALRLAWNAAKNDVAPWWGECSKEAFSAGLDQLARGLKNVTDSRKGKRKGRQVGFPRFKKRGKGRDSFRYTTGAYGPASETSVKLPRIGRVNVYEPMAALASRLADGRARLLGATVSRTAARWFVSFTVEVEREIPARPSWRQRTGGPVGVDLGVKTLAVLSTGQSVANPKHYQRAERKLRRASRAYARSKPSSAGRRQRAAALAHVQNRIADQRRDGLHKLTTRLARSHDVIVIEDLHVAGMVRNRRLAKAVATAGFAEIRRQLAYKTGWYGSTLVVADRWYPSSKTCSGCGWRNPSLTLSDRMFHCQSCRLVLDRDTNAAINLKHLVAASAVETKNARGADRKTAFARQVAVKREPGTAAAGQTGSATTSTVAARRRLTHAS

SEQ ID NO: 5693 - protein, 352 aa, Streptomyces sp.
VARWGVRRGAATGPPGPRRRVSELLRRIEGQTPAHGAPRFKSRKDNWQSVRFTANARWKITTGGDLSLPKVGNVRVKWSRNLPSEPSTVTVIKDAAGRYFASFVVETEPEHLPETDSVVGIDLGLGHFAVLSNGTKVDAPRFLRRAEKKLKRAQQSLSRKVKGSKNRTKARVKVARAHGAVADARREFHHQLSTRLIRDNQAVAVEDLAIKGLARTRLAKSVHDAGWSAFIAMLEYKSARHGRTFYRIGRFEPTSQVCSVCGVKDGPKPLHIREWKCGACGAALDRDINAAVNVAKAAGLAVSACRAQVRRAPVPAQRDEAGTHRDGQLTVAGIPVLRAGSGSQSAVSCRRA

SEQ ID NO: 5694 - protein, 421 aa, unknown
  TnpB Polypeptide
MFIYEYKVAGTPKQYAAIDEALRVTQFIRNKCLRLWMDDSSHLGQKEERSSSSSEMDKGQKRGVSKNDLQVYCAVLAKGYSFASLLNSQARQGAADRAWSAIERFYGNCTNHKPGKKGYPRFQHDNRSVEYKVTGWKLDPDGKHITFTDGCGIGRLRLVGTKKQDIAAFPVKQIKRVRILKRADGYYVQFVVKAERKVEHVTTGAQVGIDMGLKEFYTDSNGNMVANPRFLRKAERKLKRLHRRLSKTQKQSKNRQQARQKLAKAYLKVNRQREDFARKTANALTTSHDLVAYEDLKIANLVKNHHLAKSISDAAWGRFLDWVNYYGLVQNVPIVAVAPHFTSQQCSGCGKIVKKSLSERTHRCIHCGLVMDRDENAARNILALALQWLKEQGCTEGHSETGLPARRRNASGQKTTTTAQH

SEQ ID NO: 5695 - protein, 247 aa, Bacillus sp.
MKLPKLGLVRFAKSREVKGRILNATVRRNPSGRYFVSLLVETEVQELPKTHSYIEMDVGLKDFAILSDGTTYKNPKFFRSLEEKLAKAQRVLSRRMKGSSRWNKQRVRVARIHEYIANARKDYLDKISTEIIKNHDVIGIEDLQVSNMLKNHKLAKAISEVSWSQFRTLLEYKAKWYGKQVILVSKTFASSQLCSCCGYQNKDVKNLNLREWDCPECNSHHDRDINASINLKNEALRLLTVGTTGIA

SEQ ID NO: 5696 - protein, 427 aa, Escherichia sp.
MHQENTMLPRRISVSLFIDQSIIWPVKRLQAFKFQLRPGGQQEREMRRFAGACRFVFNRALALQNENHEAGNKYIPYGKMASWLVEWKNATETQWLKDSPSQPLQQSLKGLERAYKNFFQKRAAFPRFKKRGQNDAFRYPQGVKLDQENSRIFLPKLGWMRYRNSRQVTGVVKNVTVSQSCGKWYISIQTESEVSTPVHPSASMIGLDAGVAKLAMLSDGTVFEPVNSFQKNQKTLARLQRQLSRKVKFSNNWQKQKRKIQRLHSCIANIRRDYLHKVTTTVSKNHAMIVIEDLKVSNMSKSAAGTVSLPGRNVRAKSGLNRSILDQGWYEIRRQLAYKQLWRGGQVLAVPPAYTSQRCVCCGHTAKENRLSQSKFRCQVCGYTANADVNGARNILAAGHAVLACGEMVQSGRSLKQEPTEMIQATA

SEQ ID NO: 5697 - protein, 424 aa, unknown
  TnpB Polypeptide
MRYAYQRLLEGEKRKDLKKYLSKLFSINTRYSDDVIFLAQSTISSCKERGQNPKKVIFGSRKLFEQLKKNHLTGKRRKQLKIKWKESRQGNLYSRGDKSKQGNLNLRFEWINDKLYLRINTGNKQYIYAKVIRSVERKNDKWIEFMFMLENAYKYGAWFPYSVRLKVKNGNVYAFISIEEKLPPITIKKDNGIIGIDVNAYPFHLALAFTSKDGNLEKYQSISLNELLEVNSEKRQYLEWQIAHKIIKIAKEESKAIAIENLKKLPKGKRGDGFPKLRGRLQKWSYKRLLNKIEILAKRNGIEIIKVNPAYTSLIGKLKYSPQYNIDKDIAGAYVIARRGLGFKEKLTKNYKELLNDTDFLSYTIAKIEDNIKKLKQKLKEEKNEYKKNKIKTKLNKTKKKPKNITKTRITSHISRLTFRKWKE

SEQ ID NO: 5698 - protein, 332 aa, unknown
  TnpB Polypeptide
MMPIIERKYKLYLNKFQSLILNQMFINSEKLYKIFLEKGVINNSEKLLSQYTIKSLYNNACISKKNAKNNKFKIHTISISIKDIEIRKNKIYLKNVGYIKVKPEIRKEKMLLCKIMKSKTNKFYMLFSVKIDNIYINKTNKAIGIDLGLMDFCVFSNGAKIKNPKYYFKVENKIKKLQNIRSKKKYMSKEYCKISKSINKIYEKISNKENDFLHKLSKNIIFNYDIICLESLDIKGLMTSSKYKKSINYVCWFKFIKMLKYKSNIYNKKLVFIDKYYKSTQICSNCGNLNNIHSLNIREYQCIHCEKKLDRDVNAAKNILREGLKRINIKIK

SEQ ID NO: 5699 - protein, 579 aa, unknown
  TnpB Polypeptide
MSKKKNNIQKHNKTKSKKNTVQKKKMDKSVFLYGKPNVWKREILKQDQTNYTNGMNDYMQFLYDTENYDVETFMFILTNTPQSPSLRSLEKKLRDNTNLKTALSQSAFDEAVNKVSNQFLNIKNQMYGMLENDFTSSKVLYAMALYHCTQNEMRDKIECLIKYTKEKLTESIEYYENLFQNLNSLSINEFNESMMEFHIWYEFISSSFKCPFCKKAYVKLTARSSNFTKNIVLTSEQSSKNEIVLEKSKGIKSPYTIAITNSVSNKRIEVPLNTSTRSIYRLEHYKSSSCVSYTIRDDGSIKVVVPIKKDIESSKEITSYNGVDTGMSDAFHTSDDVVFGSFIENIDFYKKKVEPALAEINKLKKKKAFLKKQLRLRKNELTETQIKQYRDKIDHIEKNIRQNKVSKKYLNKYHNETEKIINQVCNEYIASLNQDKSIMTVLEKLDIKEFDKSKHDNSMYSIWVRGQLQKRVMEKLNWNGYQFMEVEPAFTSQTCPKCGYLDKENRNGKEFKCLCCGYEDDSDHVGALNIKSRATDEELFNICEKYEYDKKGRHKEIIILQRKRHKKYVEEHPEEFKNK

SEQ ID NO: 5700 - protein, 391 aa, Streptomyces sp.
  misc_feature (273)..(290): Xaa can be any naturally occurring amino acid
VTRQVKRAYRYRFYPTDEQAAELSRTFGCVRLVYNKALEERTRAWYGEQRRISYAQSSALLTEWKRTEEPAFLTEVSSVPLQQALRHLQTAFANFFAKRAKYPRYKSRKKSRASAEYTRSAFTWRDGKLTLAKMAGPLDIRWSRPLPEGAEPSTVTVSRDAAGRWFVSLLCEDRIAPAPVTTAAVGIDAGIASLVTLSTGEKITNPRHERRDRTRLAKAQRELSRKAKGSANRAKARRKVAKVHARIADRRRDFLHKLSTRLVRENQTVVIEXXXXXXXXXXXXXXXXXXYKCAWYGRDLVVIDRFFPSSKLCGTCGTVREKLPPHVRVWTCDHCGATHDRDVNAARNIPAAGSAASACGDGVRPQRESSRTGQSSLKQEPQRATAGTPRP

SEQ ID NO: 5701 - protein, 438 aa, Halorubrum sp.
MSVVVRRTNTFAVRPLSTEDEQLLRELLDASASLWNELNYERRQHFFDGESVWNTADYRKQYVGVLGSATAQQVIRKNSEAWRSFFAAREDGEATAPPGYWGNEDDGRELRTYIRNDQYTLETGERSRLEVPVGQDLKDEYGLGYHDRLRLEVTGNPKWDGGQGRLELYYDEVDDTFRAIQPVTVSDSRRDSPLADESAALDVGANNLVACTTTTGQQYLYEGRDLFARFRETTEEIARLQSKLREGRYSSQRIRRLYRTRTRRRDHAQDALVRDLVERLHEGGVATVYVGDLTDVLSAHWSAAVNEKTHQFWAYRSFIDRLATTAEEYGITVKIESEAYTTAECPACGERKNTERNGDVFRCSCGYEGHADLDASRVFLERQAGRNLEVGSMARPVRLTWDDHTWSESPRSPERASPNEERTDRSTDDGKLASVGTA

SEQ ID NO: 5702 - protein, 336 aa, unknown
  TnpB Polypeptide
LPVLLLLAEGCHRGRVQQRYHLRLVQGRQPRRADPQDQRAYHPAGKSSHAVRRDHDRYALGPLLSHHKRRLPTTGGCRPKKTINKGLNTIPIFRCGFKRPAVNKIKVPGLGMVRYHKQDLPEGKIKCGRIVKRTSGWYLCLFIDGEPASIVRTGEGIIGIDPGYHHLITTSSGEKVDHPKELQTSIKRIGQTQRGGNKHLASRLNERIANQRKDRNHKLSRHLVAENRVIAFSKDNIKGLSRAGFGKSVTAAAHGQLRSMLSYKSRIGGSQYIEVPSKGSTRICSCCGANTGPQGLAELSVRHWVCSACGAPHDRDVNAAINTLNAAVGISVEKAV

SEQ ID NO: 5703 - protein, 405 aa, unknown
  TnpB Polypeptide
MLIQKAFKYRLRTTPEIEVKLRRMAGCRRFVWNNGLSIIKAALDLGENWPSYAQLSAGLVPLKAEHPFLSEDAVAQALQQTLKDLDRAVKDAFDKKQPLKEFPTFKKKGKSVESFRIPQGFQVDQGNNRIKLPKLGWLRYRNSRKITGTPKNITVSLHAGHWYASIQTEQEVLDPIHGSTEQVGVDRGINSFLALSDGTLIQPLNALKTALRRLARMQRQLSRKVKFYENWKKCKARITKFHSGIAAMRKDYLHKVSTIIAKNHGLVVLEDLKIKSMSASSGGSIETPGKKVKQKSGLNRAILDQGWSEFARQLEYKMKWRGGRFIKIPAHYTSQRCCCCGHIDSSNRQNQKFHCLICGFEDHADINAAKNILAAGLAVIACGEHLDVTGSVKQEPTGGDYAFAA

SEQ ID NO: 5704 - protein, 371 aa, Microcoleus sp.
MLRYSQVLQATTLNLTTAYKNFFAGRARFPRYKSKQGKQSIQYPQNVKVFEGLVQFPGKVGKIKAKLHRNIEGIIKTVTVSLEPSGKYFASILTEAEGENPTFSTEGKVIGIDLGLTHFAIASDGTKVSKYSNPKHLAKHEKNLKRKQQKLAKKQKGSKSRNKAKKTVAKVYARIAKSRQDFLHKLSRKLVNENQVVVVENLNVKGMVRNHNLAKAISDAGWGTFTNFLAYKLDKKGGKLIEIDRWFPSSKLCSSCYYQIDKLPLDVREWTCPNCGTRHDRDGNAATNIRAEGIRMLQTDGTAVSEEWRGSKTNVHDVSQFARHCPAMLEACTIIASISVRVVHPRFQLRRKVRYRSPKLKASQFACVPWQ

SEQ ID NO: 5705 - protein, 457 aa, Microcoleus sp.
MLDRLNWKNQPISRKTEVTKTKKIMGVQQVLLSPNKDVKALLEYLCQQSGKLYNSGVYLARQTFFKTGKLLTGKFDLSVESSVSRSMVAKSLPSTPMQQTLMSVAEAFKSFKELRDLYIKGQLHFKPKPPGYLKGSKLFKVAYPNSGGLRPKLVGNQLRFSLGLTVRRWFGVSEFFLPMPSNLDFFKVKEFTILPKNGVFYLEMSYEVEKQQHNLDINQALSIDLGTADNLAACVDTLGNSFLIDSRAMKAMNQLWNKKVATRKEGKPEGYWDNWLDRVTRKRNHQMRDGINKAAKLITNHCLKSGIGTLIVGWNEGFKSNSNLGKVNNQKFVQMPLGKLKNRLKELCDLHGIRFVETEEAYTSKASFLDGDSLPKYGEKPSGWKASGKRIKRGLYQSANASMVNADLNGAANILRKVASKLSVNLDQLGRRVLTTVARVRLWVLPKPILSAESQCL

SEQ ID NO: 5706 - protein, 402 aa, unknown
  TnpB Polypeptide
MDRTMVVQLKPAPEQVIALQQTMQEHTACFNAVARLGFASKCSNGVELHKQTYYELRATYPDLPAQLICAARVKATETVKSALTWQKKHEQHYQKRVAQAQKEGKPVPGFKPVKCPQLKLCPIRYDARSYWVKWETLTTSLATVKGRVELPFTVPGHATRYVGSKVCSADLCYRKGRYFLHIVVSVPEPAVAHSDSAIGVDLGLNRPAVTSTHQFLGERRWKEQERRIFRLRRKLQAKGTRSAKCHLKKLSGKLFRQRKDHDHVLSKRIVQNAPPGSILVIENLTYIRDRATMKKHTENQRRLHSWSFAQFHGFLSYKAQERGLTVVKIDPRHTSQTCSHCGYQARNNRRSQSLFLCRKCGYSLNADLNAAVNIQQKYLASLGTSSASGLVSSSLSSQPLVG

SEQ ID NO: 5707 - protein, 351 aa, Moorea sp.
  misc_feature (201)..(201): Xaa can be any naturally occurring amino acid
LICCDTNTTIYWLTDLTGPYEQNRCSINSCPLICHLPELRNNPDYFSQKRTLPQLKKDRHWYKTIHANVLQDCVKRVDLAFKRYLKGDCNGKKSGRPRFKGKNRYKSLTFSAFSKNPIQGNKLNLPKFGWVKMVYHRPIPDGFKIKTATVTRKADGYYVTLSLQDDTVPSVIPIEQVSNPIGIDMGLKSFLIKSDGTEVPXTGGQTRAFIHIQDTVRCIELAIANPPASGDRVKILNQMTETHRVRDLAQIVSDITGAEIAYLENPRNESAENELAVENKCFLEMGLKPTTLVKGLMQEVIEIAAKYVDRCDRSKIICTSLWRQKGNGVSMADETSAQTTSDKTAVGVGAS

SEQ ID NO: 5708 - protein, 265 aa, unknown
  TnpB Polypeptide
MRYNQRVITVNLIRGIATVASTKGRIKTTFKIPDCYQDYLTWKIKSSTISYDKRSKTFYLHVSLEHPDPELTQDIKVLGIDRGIVNIAVCSDNTFYNSKKVKNTRAKHAHLRKELQSKGTRSAKRTLKKFSGRERRFVTDVNHCISKQIANSEHTVFALEDLSKIRVQKRRGKQFCRKLNSWSFYQLEQFIRYKAETLGKHVLLVDARYTSQKCSECGHIYKRNRERYLFRCRKCGFELHADLNASRNIAQAGISCLGRLPLSTS

SEQ ID NO: 5709 - protein, 416 aa, unknown
  TnpB Polypeptide
LVNFEFSNINAKEGISIDRVERHIINRNHKMWNICDEYCFKSKNLYNYANYELRQVFIYTKKVEKYSELTRRLKTTEVFKEIGSNSGQHTLKMLDKAWKSFLISIKDYYKTPSKYLGKPKLPGYKEKNGRYMCILTNMQSQIKEGYLYFAFKPFKPYNYLIRTKIKGKHMQTRIIPKGGCYILEIVYQTKDVKEREFNNRIMGIDLGINNFVTMTNNIGYKPIVINGKGLKSINQYYNKQLSKYRGLAKTNNNLDWTKRLDRINMKRYNKLEYFMHCASRIVIDYCIRMNINTIVIGINKEWKQECRIGSNTQNFIQIPYDNFIKKLEYKCKENGIKLITTEESYTSGTSFIDNELPIKENYNKSRRKYRGLFISNKGISINADANGSYQIIKKVFPNAFANGIKGVDLHPIVINY

SEQ ID NO: 5710 - protein, 397 aa, unknown
  TnpB Polypeptide
MAEKKDCYAIVTKRFQLRTAHVCWLKETQRIYNEILHFYYMLFLEKTELHGLGNQKLMRELECLSIVGRDKKPVEYPLPWKGVPLYFRRAAINTALAAGKSYLSREGQEQPTAAFSAGVTLYKGTYRELTSHSIEIKVYDGERWRWIRCRLSGNTIPEGARCLSPRLVFGERQVELHVPVQKNVPDGRTLKERMGNGMKICSVQFTNRDAIAVCCVVDGPGCLRAVRFLKGGKNYAHRCRKVLEKINISKKAVGEKRGKNDNKRYWRKLKQISNDEAHQISRQIIDFCVETGAGVILLPKYSKEFTKYVMAAVGNWSPLHLNYQIRSQLKYKAWQAGILILESEVHDIDRYCALCGGIVRKQGELFVCENGHRGNRRVNAAWNLGKRTTQSLSKHML

SEQ ID NO: 5711 - protein, 421 aa, unknown
  TnpB Polypeptide
MITLTYEYKLAPTSEQIQTFDQWLEICRSVWNFALRERKDWANSRKCDINSCSIVSEYIIPPEVKRPTYASQCKALTAAKKEYPHLKIVHSQVLQQVLKQLETAFVSMWERGFGFPRFKKKMRSFVFPQMKAEDVVGDIVKLPSIGMVKMHLSRPIPEGFSLKQARIVKRASGYYVMLSLQCDVNVPDVPPHGEPLGIDVGLLSFVATSEGELIARPRFFVDTQSKLKLLQRRLKRKKKGSKNWRKLNQKIALLHEHISNSRKDWHFKLSHHLCNQAGMIFAEDLNLKAMSRGMLCKHTLDAGFGQFLNILSWVCWKRDVYFAKVDCNSTSQTCPMCDIYTPKDLGVRVHDCVCGYKTDRDVAAAQVVKKRGLLNLSADGQAVFQNVCGDGLTGIEISSQVSLKQKAQTAKFGIPRLTAKR

SEQ ID NO: 5712 - protein, 473 aa, Ruminococcaceae sp.
MQITASYKVEILQLHTPLKKTLKIYREAVDWLLPVIDSEWDRISAQNGLKRQFNYAEHLIHKTKDNEPDHPFDEVFPKMPSYFRRSVLQKVLGTVRSYHTNLDKWKEGGEQGNKPKLRSTGHAMPAFYKDQMYKEKDGKTCLKLYSGTDWVWYPIRLRKTDVNYLRKYWTGVKASAPTLMKKHKKYYLVFTFQKEVQLPEKEAGKRVICGVDLGINTDAVCSIMQGDGTVVSRKFINFPTEKDRLLRVCNRTRKKQRQYGPKAVTGLWNYAKRINDDLAIKVSREIVRFAKDHQADVIVFEYLETKGKTRGRNAQKLHMWKKKDIQNITERLAHRNGIRISRVCARNTSALAFDGSGPVRRDKNNHSLCTFRNGKKYNCDLSASYNIGARYFIREFLKPFSARERSELEANVLWVPRRSSCVYADLLDLLWRMEIFGMRAGSLTAVYDYCGDAGQWRVELKRSRIRRRPGLAA

SEQ ID NO: 5713 - protein, 492 aa, Pseudomonas sp.
MDSVDGEAVLKRCSLLLDVSANNIYGGPTAATGEVGRGPQSCAPQFLLNALTPLAVFCYKDQVSMYQKNSMFSKSDIIVITHRPNYSRVMKRLQAFKYELMPDGNQERQMRRFAGSCRFVFNKALALQKSNHEAENKFIGYVEMAARLPIWKREAGFEWLKDSPSQALQHALKDLERAYSNFFAKRADFPRFKRKGKSESFRYPDSKQFKIDEANNRIFLPKLGWMRYRNSRDILGKAKNITISLSCGKWYVSIQTEREVEQPSPQGNAVGIDLGIARFATLSDGTFYKPLNSFRRHEKRLSTAQRVMSHKVKFSNNWKKAKARVQRIHAHIGNARRDYLHKTTTTLSKNHAMVCVEDLQVRNMSKSSAGDSEQPGKNVRAKSGLNKSILDQGWFEFRRQLDYKLAWNGGYLVAVPPHYTSQTCPCCAHVCKDNRQTQAQFRCVECGFEENADVVGAINVLRVGHARFACEVNGAVRPSAAGTRRGESALAG

SEQ ID NO: 5714 - protein, 552 aa, Streptomyces sp.
VQCVVQGGGRVGVLREVAASFVVPGPAGVAIRDRLKGLTVGDEEVLRLVGGHLSSLASRDLKARCAAGLDHDTERWAQRKQALTGQASSRWAGSVTKATHDQWALARRGQAAHLHRLQAGIDMVRRRLSLPVGARGSKRSPGGYRSEREWHAKSRRLRVLQDRLERVRADHQAGRVRVVRGGRRMLTTRHHLPQAQLTEAEWRRRWEASRRFLQADGESGKRYGNETIRVGPGGQVSIRLPAPLAHLANAAHGRYVLAARVAFAHRGEAWRDRVQANRAVAYRIHEDTDRDRWYLTASWTLPPVKTVPLATARASGLIGVDTNADHLAAWRLDEHGNPVGAPRRFDYDLSGSADRRDAQVRHALIRLLHWAKRHGLGIAVEDLDFTAQTTRERHGRRKRFRQLISGMPTGRLRARLVSMAAELGLPVIAVDPAYTSQWGAQHWQKPLTSTTRETTRHDAAAVAIARRALGHPIRRRTTPPPHDQSDRAGHRTVQAAPGIPGREGPRPRIPGPRTRSVRAGRGANAGNQNTQNRLGCSAEQETWQQDSLPLSP

SEQ ID NO: 5715 - protein, 391 aa, unknown
  TnpB Polypeptide
VSKTKRAYKFRFYPTDEQRIILAQTFGCCRFVYNWGLHARSVAYREHKQRLSYNDLAAMLPDLKQEYPWLGEVSSVPIQQSLRHLERAFKNFFEGRAQYPTFKKKQNAQSATYAATALKWDGAALTLAKMNASLDIHWHRDLPKNAKPSSVTITKDGANRYFISILVEDDIKPLPVVNKMVGIDLGLKSMVILSTGEAVGNPRYFAKDEKKLAKAQRRHAKKKKGSKNRNKARLKVAKIHARINDCRRDYQHKLSTRIVHENQVMCVESLAVKNMVKNHKLAKAISDVGWGEFIRQLDYKSTWYGRTLVKIDRWYPSSKTCHTYKHVLDSLLLDIREWVCPQCGTAHDRDTNAAMNILAEGLSASACGGSVRPVRAKARRATPSEAGTSHS

SEQ ID NO: 5716 - protein, 437 aa, Halorientalis sp.
MGEVTKTLELKLVDPTLHKRRKLRETRDAYQNALQAAFAAGCDTQSAANDVVVEYDLSGYAKNALKQYVPQLHNSYDADELHDDHPVRFTNEGLQLDHQPQNAIEWYVKVPHHEDYHLWIPVRANPDQREWLEAVYADDAEMGESQLFKRDGTWYLHITATRDVAEQSAASADEQTPIGVDIGEASLVTVCHRDDSGSPVRPELWADDGKAVRRLRKTYFTATRRLQQRGSERIADSFGDALWDQIDDIFHRVTREVVAYAESVENPVLVLEDLTDIRENMDYGAYMNRRLHGWGFAKLHAQIRYKAAETGIPIETVNPRNTSKACHACGEHGSRPRQATFRCLSDDCWVGEYQADVNGAINIADRYRSGESHRRSDRSSRQKAGDDDSATDGASLTGPQDSHAVNESRSDSFAHQKSPISGDNAETQQVTRGTNAS

SEQ ID NO: 5717 - protein, 371 aa, Nonomuraea sp.
MQGVTQIVKRAYKYRFYPTPEQAGELARTFGCVRLVYNKALEERTRAYKLEGERVSYAESSAMLTEWKRSTEFGFLREVSSVPLQQALRHLQAGFANFFAKRAKYPVFKSRKKSRASAEYTRSAFRWRDGELALAKMDAPLAIVWSRPLPEGAEPSTVTVSRDAAGRWFVSLLVEETIAPLAPAEQAVGVDAGITVLATLSTGEKIVNPRHERRDRRKLAKAQRALARKEKGSNNRAKARLKVARVYARIADRRTDHLHKVTTRLVRENQAIAVEDLTVRNLVKNHRLARAISDAAWRQMRSMLEYKARWYGRTLVAVDRWFPSSRLCSACGALQEKMPLNIREWQCACGAVHDRDVNAARNVLAAGPAES

SEQ ID NO: 5718 - protein, 309 aa, Bacterium sp.
MERKAYQFQIAPTKGHVRLWQQTLDLCRWVYNETLAYRKRAWEERQKHVGVYETHALLPIWNAQRPELKQVYSQVLQDVQNRVHRAFDACFRRVKRGEKAGDPRFKGRGWYDSFTFKQAGFGFKLDGPWLDLSKIGRIRLIAHRPIEGTIKTLTIRRTRTGKWFACFSVETKPAPLPETQRAVGVDVGLTHFATLSTGEQLANPRFFRRDEQALAKAQRRLSKAEKGTPERVKRRKVVVHIHERIANRRKDFAHNLSRRLVNEFGTIVFEDLSIARMLKHHALAKSIADAAWSQFATYTRSKAASAGRT

SEQ ID NO: 5719 - protein, 383 aa, unknown
  TnpB Polypeptide
MNTNIVIKGYKYRIYPIKEQEVQISKTFGCCRFVYNQLLAKEIELYKTGQNYLSKIDCNNYCNQVLKKQEKYNWLKEVDKFALTNSIYNLDKAYRNYFRELKKGNNEQGFPKFKSKKDNNKSYTTNFTSNNIKVDFKNSKIQLPKLKWIKCKIHRKFNGKILFATISKTPSGKYFVSFNVEVEHIVLSNNNCKIGIDLGIKDLLKTSNGGVINNEKITYKYENKLAKLQRKLAKKQKGSKNRDKQRIKVARLHEKITNVRKNNLHYISKQITNENKVIICEDLNVKGMVKNHNLSKSIHDCGWGELTRQLQYKSEWNNKLYYEVNRYFPSSQLCNKCGYRNNDTKNLGVRFWTCPQCGEYHDRDENAAINILNEGLKDLRLVI

SEQ ID NO: 5720 - protein, 393 aa, unknown
  TnpB Polypeptide
MIHGFKYRFYPTEDQELLLRKTVGCCRYVHNRALELKSKAWTDSKKSMSFSEVSGLLTQWKKDPETEWLGEVSSVALQQSLRNLDVAYSNFFKKRSKYPRFKSKKSGGSVRFVSTGFRIKDGNVWIAKTADPLNVVWSRPLPEGVSPTSCTVSLTPDNRWFISFVCEDPSIRHLPKVDSEVGLDMGLTSLVTLSTGEKITNHRHARTDHVRLKKAQQRLAKKQKGSANRRKARIKVARIYARIADRRRDQLHKLTTRLVHENQVIAVEDLNVRGMQQNRKLARSISDASWTMMKQFLEYKCDWYGRELVVNDRWYPSTKTCFDCGHVVEKLPLEIREWVCPVCKVKHDRDVNAARNILAVGHTVLACGETVRPKRGKALRLDSMKQESVVETP

SEQ ID NO: 5721 - protein, 443 aa, Butyrivibrio sp.
MKITTTYKVKIKHYNHIFKATIRIYRKAVDFLIEVCLANWNEIIEIPFATARQSYVEKLIHRTKGNPSPVYDFDKNFYKMPTYLRRAAISDAIGKVSSYKSNLAGWEAEVPSERGSAPAYPRAGFSFPTLYKNDMYKLPGKYKAKIKVYTRNTWDFITVDLRKSDIDYIENHCSNRKKLSPTLRKRGKEWFLDFPFEENVKLDKKDILSQRIVAVDLGVNSAATVSVMQADGTVLGRHFFKLPKEYDSLKHSVGRIKKAQQHGSHKTPILWAKAKGINNDIAVKTATFIMDIAAAYKVTSIVFEHLDIGGKKRGSKKQKLQLWKARYVQSMIADKAHRLGLHVSTINAWNTSRLAFDGSGRVLRGREDDLGSYSVCRFANGKVYNCDLSASYNIGARYFIREILKSLPVKERLALEAKVPQTARRSTCTLSTLINLYGELYSM

SEQ ID NO: 5722 - protein, 492 aa, Mycobacterium sp.
VKRFEVPEGWVVQAYRFALDPSAAEVRVLESHCGAARFAFNHMLAHVKAVLEQRAAEKSYGIGGDELTGSQGWSMPALRKTWNTRKDVAAPWWSSNSKEAYNTGLDGLARALENWAVSKSGDRRGEKMSFPRFRARHRTVKAVRFTTGVIRVEADRHSITLPRLGRIHTLESTRKLARRLEAGTARILSATVTFASGRWWCAFHTIVENKTRPAHAARRSQYPVVGVDLGVKDLLVIATPDGAEVDRIPAPKSLSHARSGLAVLQRRAARQLGPYDPVAQVRREPSNRWRRTQTRISGAHARVANIRGDAIHKATTMLALQHDKIVIEDLAVKNMTRRSRGVGKRGLNRAIADAALGRIGTQLKYKTMWYGSELVVAPRFYPSTQQCSRCGSKTKIRLAERIYHCQNGCPPIDRDTNAAVNLACLSDTTDRSDGMRTGTGSGPAANHRAGKGRRANHKTIPDTTVTGMAGGDETSTPQPHQTGTATRQRGAA

SEQ ID NO: 5723 - protein, 333 aa, Thermotoga sp.
ISFSEKCPLQDKAVCSVATLLQSERTERAEAERQESRKTQVQKVWSNEDICLQPERIQTSRRKTPSEQDRRYSNQVAQKDKRKHKQVCIKREQSGRWFAIFSVEQKPEKLSTTGRAVGIDLNTQNYLTDSEGGRVEHPHELLKLEERVKIQQRKLSRKKKGSKNWIKQASRLARVHERISDRRRDFLHKLSRYYIENYDLIAVEDLAVKEMIESSYNAKNKADSAWSTFIQMLSYKAEGAGRTLVKVDPKNTSQICSRCGAYVYKPVWIREHRCPTCGLVMDRDHNAAKNILNKALQEVGSGRPELTPVEMRPLLHSMGGASLVEEAGSPHHL

SEQ ID NO: 5724 - protein, 330 aa, unknown
  TnpB Polypeptide
VSAVPLQQSLADLNAAYRNFFESRSGARKGPKIGRPRPKSRKDRRQSARFTTNAQFAVLPSGKLRLPKVGDVEVRWSRSLPSAPSSVAIIKDAAGRYFASFVVQADPAADAERFPAAGSEVGIDRGLTAFAVLSDGAVVRSPKFLRRAERKLKRAQRSHSRKQSGSKNKEESRVRLARMHARVASKRADFQHKVSTWIIRENQAVYVEDLCVTALARTRLAKSIHDAGWSGFTRMLEYKAHRYGRAFVKVGRFEPTSQVCSACGVKDGRKPLGVRQWTCPACGTVHDRDLNAARNILALGRRERLNACGGGVRRELPAVAAETGTLPGAA

SEQ ID NO: 5725 - protein, 327 aa, Streptomyces sp.
SQQATLRRLDKAFQAFFRRVKAGEKPGYPRFRGVNWFDTVDFPKDGDGCRWDSTPHDPVTRVRLQGVGHVRVHQHRPVKGHVKTVSIKREGRQWYVVLACDNVPAEPLPATGAVTGIDVGVTHFLTTSEGAHVENPRHGKRNAEALADAQRALKAFPRRKRADRSAKHRRAVEKVGNLHRKVRRQRTDHAHKAALALVRDYDQIAHERLNIANMVRTPKPKPDPETPGSFLPNGAASKAGLNRSILDAGWGVFLGILAQKAESAARVLIPVDPRNTSRTCPKCQHVDSENRDGEKFQCTSCQHINHADRVGAWNVALRAGLVLPDVA

SEQ ID NO: 5726 - protein, 421 aa, unknown
  TnpB Polypeptide
MRIAYQYKLRPTKQQTIEIDRWLAMLCSQYNYLLADRFNWYEQNRCPINACPLICHLRELRDNPDYYSQKKTLPQLKNTHPWYGEIYSQVLQDVVKRVKVTFDRFLKGDSNGKRSGKPRFKPRNRYRTFTYPQMKDGCLDGNRINLPMLGKIKVVLHRPAPDSFKVKTASITKKADGYYLTLSLEDKTVPEIKPDFNPDKITGIDVGLKEFLTTSEGETVEEPHYYRWSQKRLRVLQKRVSRRKKGSNSRLKAIKQLGKQHKKVADKRKDFHFKTVNWLLSKYDVIAYEDLNVKGLARTRLAKSVLDAGWSNFLLILTNKAENAGLLAVPVSAHNTSQDCSKCGEKVPKKLHIRWHDCPHCGCSLDRDHNAAINIKNRAEGHPVLKAQRLLSDSRIGCEAYTIPVLTVGVGDVTLMSENLP

SEQ ID NO: 5727 - protein, 417 aa, unknown
  TnpB Polypeptide
MRGGVVRSLAFPVESLPPPLCGLLGEFRLLVNRSIRIALRKDMRSRSRLAKAAYHTLSTEHDIYKQYIPSAFEVALAVLKAHRRRLRRGRRTSVPFVKRPLLKAENQSYRFDRGTGRLRIPIRGTEGVQLILPLSDWHRRFLADPSWGLGSLTVTTDRIIVVVRKIAPEPYEPTAAIALDTNEASVDGVAVGDGEAGLVSLPFPEVRVVQATHFRRRRRLARKKAHDRRVMRCLLAREGRRERNRIRQRLHRVSKPLVAAAEERRAAIVLEDLTLHGAGGRSRRMNRRLSSWPRGELHRQIEYKAALAGVPVIKVNPAWTSKTCPACGARRRDRVGKDFVCLVCDWEMDRQHNAALNILKTALASNEALARAVRFQPGALRHDVVSPLYDLPAREGAREEPSGVESQQTGTISSPHV

SEQ ID NO: 5728 - protein, 385 aa, Streptomyces sp.
VKIVTQVKLMPDAVQAPAIAATLHTVNDLANWVSDVAFTCGVPREYELRKHTYARLRAEGLGAQAAQHVIKKVRDAYTTLHANLRAGNLGKPGSKRRRKAESKPVTFRPQAAQPYDDRCLSWQYDAQTVSIWTTAGRIKGVRFTCSARALKVLQQYRKGASDLIERDGVFYLIATCEVPEAEQYEPDGWIGVDLGIVNIATTSTGYQAAGRQINRYRKRQLALRAKLQKKRTKSAKRRLKERSRREQRHVKNTNHIIAKTIVTEAERTSAGISLEELKGIRQRVRLRKPQRVALHSWAFAQLGDFIVYKARRAGVPVVFVDPAYTSQQCSECGHIDKKNRTSQALFTCRNCGVVAHADRNASRVLARRGQNAWTAGRESRVPATP

SEQ ID NO: 5729 - protein, 405 aa, unknown
  TnpB Polypeptide
MHTTVYKLFRAPRNRNLKRKTWIAHTIWNYFLGWQRTRYALGLPYMSFKEMSREFTMLKNSHPEMFAHWRELNTWSAREILKRLNEGYVRFFKGLAKRPPKFRSWRKPYSFTMCRSGFKFADPKEGDLGFGVYNDKVRIMKRHYRFHLSRPILGNIKTVTVKADALGDFYMSVVTDHIATEVAPKTGEAAGYDFGIKTMFTCSDGTQRGSPAFYSTAQLKLKSAQQRQSSKVKGSNNRERERKKVARVHRKIRRQRENHHWKLAKQLVHQHDILCLETLTFEGMKRLWGRKVSDIAPYAFHLKLRHQAKKHGKQLCYIDRFEPSSKTCGFHCGQMDMFISLDVREWKCSGCERKHHRDVNAAINILKVGASTFGLGDVRLAIASGPCRLRPKSIPHDPHRKARIH

SEQ ID NO: 5730 - protein, 393 aa, unknown
  TnpB Polypeptide
VLRGFKYRFYPTPEQELLLRRTIGCARLVYNKALAERSAAWTQAKKSVGYAQQDRSLTGWKKTAELTFLNDVSSVPLQQALRHLQTAYTNFFQKRASYPSFKRKSAGGSAVFTRSAFAFRDGQLKLAKMSAPLDIRWSRRLPEGAQPTTVTASLDAAGRWHVSLLCEDSTVKKLPKLKTAVGIDLGITALATLSTGEKIQNPRHDESEIARKRQLSRSLSKKKKGSHNRYKAQQKLARLHARIADRRKDSLHKLSTRLVRENQVIAVEDLNIAGMVRNRSLARVISDAGWRQLLTMLAYKCEWYGRDFVKIDRYFPSSKTCHSCGVVVERLPLSIREWKCEACGMPHDRDVNAAKNVLAAGHAVAIACGPGVRHRILRNQVQLGLKQETPGVS

SEQ ID NO: 5731 - protein, 551 aa, Streptomyces sp.
LIWVGVGVVRVLAESFVVAGPSGVSVRTRLKHLTPGDEAVLRQVGAHLGSLASADLKQRCADGTGYSAESWAVRKRVLTPLSSSRWAGSITKASHDQWGLARRGQHAHIQSLRAGVAMIEQRLSLPVGAKGSKRTPGGYGSQREWFAKSRRLRVLQDRFDAQRADHEAGRVRVVRGGKKRARTRHHLHEAGLTEEQWRQGWEAARWFLSADGESGKRFGNETIRVTPGGGVSIKLPAPLAHLANSPHGRYTLTGTVAFAHRGDEWADRVTADRAVAYRITFDPSRGRWYLTAAWTLPPVQAVPLAAAVAGGVVGVDTNADHLAAWRLDPHGNPVGEPRRFTYDLTGPATHRDAQVRHALTRLLHWAARHGLAIAVEDLDFTAETTREKHGRRKRFRHLIAGMPVARLRARLVSMAAELGIPIVAVDPAYTSRWGARHWQKPLTTSTRTPTRHDAAAVAIGRRALGHRIRRRTAPPPHDRSDRAGHRTAQAGHGTRRREETRPRTPGPRTRSAGPDPGRKRATRTPNTVRDVRSDQEWIQHPLLLTEQERLR

SEQ ID NO: 5732 - protein, 442 aa, unknown
  TnpB Polypeptide
MGKSRTSSYIVEYSLAFNDENPMSVLQKLDRIATAIYNDVLNEGLKRMHRLDRDRTYQETLARYKRLLAKEKRDRKLSKADTAIKAQFSDYLRDARKAYGFTEYSLHAYVAKPKHYFHDVLGINECQKLATRAYNALWKLHTGEAEKVHFKRKYELISIENKRNNYGIRFDRKKMAVIYRNYEFPAIVKKNDEYAQLALLDRVKYVKLKPRMLRGRLRWFVQLVFEGVPPQKNRRCGDSTAQGIDIGVSTIAISNKNKVIMKELAPECQVDAGKLRIIERKMDRSKRSINPQNYNKNGTVRKGHLKWKFSKSYRKLKAKRADIYRRMATKRKSSHEQLANEIIASGTDIRVEKMQFSGLQCRAKKTAKNRNGRYNSKKRFGKTIGERAPAMLLSIIDRKLKYYGLELKKVDTARVRASQYNPLDESFHRKNLKDSNPETLGT

SEQ ID NO: 5733 - protein, 463 aa, unknown
  TnpB Polypeptide
LDLTTKEALTALETLTHATEKNPSPILPLTQIAEGIPAMFRRAAINAALGSARSFSSSLKKWRTRKEQVQTKQGRKGAKKKAFRERPPVPPRRWNKSVPLYAGMWKERTGSSILLKVWTGTCWSWVKVRTLSRALPAGFEVGSPSLVRKGRQWWLHTPIEKTFPSPPKIAEQLTTAETRICAVDLNLDEHLAVCTVQTVEGTILATRFIGRGREIAGFRKQQLGRIAQNRSQTGIIAENEQDNADLWRKIRTVDSQVAHLVSARIVQFAAEQGAAILVFEHLGNLKPEKGTYSRRGNTKRAFWMKGRIFTYAKYKAWNQGIITSRINPRNTSRECHHCHAQVIRYHAGQAVEGYTPGAPLVLCQVCQMRGHADRNASLVIGRRLMERYTAPFKEKPHTAVRRAGRVEQSTGVVLSQEAQSKGRPSSDHARHGESNGHGTAQRSRRRMGTAPPSIPSQLRLFNE

SEQ ID NO: 5734 - protein, 315 aa, Burkholderia sp.
MAGMILVYRYRVKSLNGLLNKQSRAVNYVWNFCNDTQKHALKWNKKWPTGFDLNVLTTGSSKALGIHSGTINATCEQYAKSRSQHRRPYLRYRGRKSLGWVPLKGRDLKREGDAFRFAGNTFRVFNSRLLPEGKIKDGTSFAQDARGNWFLNIVIEMPDVHARPIRSGVGIDLGLKDFATLSTARSCRTTGSAGKRPRSWQRLSKRESTSDILRSCTPRSRMLEPISSTSSHSIWCGGSITSRSATCRPRSSPEPGWRRASTTRPGRPSETSSATKRSRTEPRSRKSTKAVRPSPVRRVGRKTARRGRKVSRGCE

SEQ ID NO: 5735 - protein, 472 aa, unknown
  TnpB Polypeptide
MKYKEISNVKFRYKNSDEMKKFEEQIMSLARQTAKLIGKKVREGIIPEKVHLIDLEGDKVLNFKGKPTAKLSLEKGSAYIHVEDYTDIDDYKDKRLKPASLRDDPEWFGEIFKDVKNKSMGLSITEGVINRYASYQKRNKKLPPYVELKKQAFNIRKNTFSLDLNKMQIIFNGLDGNKIYLDIDVEKSVLFKLEDFKKKLESKKEKPKKSKSREEIIKSATFGANVNFEQNLIIATTECEKTLAYEPEGFFGPDINKENQYWLTYPVNLPCAENPNGSFYLSKPEEIQEIENELGKVNDLINQTFKPKGEERSVTFIEFKGKKRKCNSQTRRTLRRYWQELHKKQMKLIRKISQIEKVFKFCETNKLGYAHDNITTGQKNGSFSQDKIKRLVEERQRRTGIPVVYTRPAFTSQTCPKCNKKSEKNRIGDKFKCVDCGYENVSHVVGAENICRFAEKQFIENANNEKGVRVPH

SEQ ID NO: 5736 - protein, 367 aa, unknown
  TnpB Polypeptide
VLKAYKYRIYPNSEQRIQIAKTFGCCRFVYNQTLAYRKEIYEKEKKSVSKTDCNNYCNRELKKDYEWLKEVDKFALTNAIYNMDTAYQKFFKEHAGFPKFKSKHDNHKSYTTNYTNGNITVNHEKGKIKLPKLKEVKARLHRNYSGQIKSATVSQMPSGKYYVSILVETEHKELVHTTGSIGIDLGIKDLCITSDGKIYENQKIIRKYEKQLVKLQRQLSHKEKRSKNYYKTKKKIALCHEKIRNTRKDYLHKVSHEMISENQVIVSENLQIKNMVKNHCLAKAISDVSWYELTRQLEYKAKWNGRKYIKIDTFYASSQICSACGYQNSDTKDLSVRTWICPKCGAEHDRDINAAKNILAEGLRQIA

SEQ ID NO: 5737 - protein, 386 aa, unknown
  TnpB Polypeptide
VEFAYKYRLYPNREQENLIARTFGCCRFVFNHYLALRKETYEQTGETLNYYACAKDMTTLKQQEETLWLKEVDATALQSSLRDLDDAYQHFFRRVKQGKKPGYPHFKSRHQHKQSYKSKCVGTNIKVLDGAVQLPKLGKVKCRISRAVQGRILSATVSRSASGKYYVSLCCRLEENIPKLPSTGAAIGIDLGIKSYAVTSDAVEYQNPKYLKQSEKKLKRLQRQLSRKTKGGANWEKARIQMARLHEHIANQRRDMQHKLSTEIVRQNDIICIEDLAPKNMVRNHKLAKSISDASWGEFRRQLTYKAEWYGKQLVTVDRFYPSSQTCSECGAQWPGTKDLKVRHWVCPECGASLDRDTNAAVNILHEGMRLLAGHNHFGRVGHTRT

SEQ ID NO: 5738 - protein, 372 aa, unknown
  TnpB Polypeptide
MEYSYKFRLYPTKAQEQQMQRTFGCCRYVYNHYLAQRIDAYKQDGQTLNYYDCCKDLTQLKHTLEWLREVDSTALQSSLRDLDIAYQNFFRRVKKGGEKPGFPKFKSRKSGKKSYKSRCTGTSIRVLDKAVQLPKLGAVKCRISKKVQGRILSATVSQNPSGKYFVSLCCTDVEMEQLPSTGAVVGVDLGLRYLAYTSDNRKYENPKPLDKSLRKLARMQRALSRKTIGSANYNRAKHRVARLHEHIANQRRDAQHKLTTALVREYDLICAESLNIRKMLQQSPYLARQIGDAGWGEILRQLSYKCAWQHKPFVQIDALFPSTQVCNVCGYRNKALSKRFREQWECPCCGAIHDVDLNAAKNILNEGLRLLS

SEQ ID NO: 5739 - protein, 491 aa, unknown
  TnpB Polypeptide
VFRSSTSSIGRPSLSKGSNQATGERGSSSYIRPSGKAPVMHAGDEPPFLVRGEGWGCISTSGAEGKNTGRGNENGKGRTRAMLIYEYKVDGTPQQYDAIEEAIRVVQFIRNKALRLWMDTRGTSKNDLQCLCASLAREFPFARKLNSQARQAAASRAWFAIERFYEACLNHKQGSKGYPRFQHDNRSVEYKQTGWKLEPDGKHITFTDGCFIGTLRLVGNKQQQIEAFPTKQIKRVRIVRRADGYYCQFAVEATRKVEHVPSDAAIGIDLGLLSYYTDSDGNTLANPRYYRKGEKKLRRLHRRLSRKKKGGQNRKKARRVLAKQYLKVQRQREDFARKQANALVSSHDVIAFEDLKIRNMVRNRHLAKSIQDAGWGTFLRWVKYYGLLQDIPVLAVEPAFTSQECCGCHRIVKKSLSVRTHICPGCGLVLDRDHNAALNILIKALALYLGAQGNSLLLFGGGNAWGDVAATTALERARQQAISRNQEPPAF

SEQ ID NO: 5740 - protein, 294 aa, unknown
  TnpB Polypeptide
VQEAVLREHCAHARFVWNLAVEQQSWYGTAGRKTAPGWVAQARQLTEARAEHEWLAAGSQMVQQQALRDFGQAMANFFAGTHRKPGWRKAGRDEGFRIVAMKPGHVRRLNRHTAQVWVPKAGWVRFRWSRPVPEGVKSYRVNRDPAGRWHVAFAAVPEPVPGPGTGEVVGVDRGVAATLALSDGRMYQAPAVRPVARLQRRLCRARRGGNRRKRVRAQLARVQARNADSREDWAEKASTQIGQADFLCTACGYVCNADVNAAGNIAAGHAVTARGGLALAGPVNREPQRALLAS

SEQ ID NO: 5741 - protein, 357 aa, unknown
  TnpB Polypeptide
MEVLKAYKYDLRPNKVQKVLLNKHFGSVRWVYNHFLDDRKKQYLETKKSDSYNSQAKKLTVIKNKEETIWLKEINSQTLQASLKNIEVAYLNFFHGNAKFPRFKSKYKKNSFNVPQHVKLENKKIFFPKFKQGIRVNQYREFNGEIRNCTVSKAKSGKYYVSVLVKTNHIPYKKTGKITGIDLGIKVFAITSDDKKFKNHKWTKKYEKSLRRAQQHLSRKIKGSQQYKNQRLKVAKIYEKISNCRKDNLHKVSTDLIKSYDLICLESLSVKSMIKNRTLAKHIQDVSWSNFVRILEYKAEWNKKTIIKIDRFFPSSKLCSNCGWIKQDLTLKDRKWTCEICNCVHDRDVNASKNILS

SEQ ID NO: 5742 - protein, 402 aa, Escherichia sp.
VKRLQAFKFQLRPGGQQECEMRRFAGACRFVFNRALARQNENHEAGNKYIPYGKMASWLVEWKNATETQWLKDSPSQPLQQSLKDLERAYKNFFRKRAAFPRFKKRGQNDAFRYPQGVKLDQENSRIFLPKLGWMRYRNSRQVTGVVKNVTVSQSCGKWYISIQTESEVSTPVHPSASMVGLDAGVAKLATLSDGTVFEPVNSFQKNQKTLARLQRQLSRKVKFSNNWQKQKRKIQRLHSRIANIRRDYLQKVTTTVSKNHAMIVIEDLKVSNMSKSAAGTVSQPGRNVRAKSGLNRSILDQGWYEMRRQLEYKQLWSGGQVLAVPPAYTSQRCACCGHTAKENRLSQSQFRCQVCGYTANADVNGARNILAAGHAVLACGEMVQSGRSLKQEPTEMIQATA

SEQ ID NO: 5743 - protein, 367 aa, unknown
  TnpB Polypeptide
MTAIKTLRLKVKAESYAWLNAAAVEVNQVWNWSNETSLKAATRTDIKRKWLSGFDLCTLSAGATEYFEHIGADTIQSICTHYAQKRVAAKRLKLRWRVSKGARRSLGWVPFKAASLKRKGNALRFAGKTFRVFEAHRLDGVKWKAGSFAQDAVGDWWLCLPIEFQATDEPAPREAVGVDLGLKTIATTSDGDVLEAGRWTQGHAEKLAMAQRRGHKRQAKRIHRKAARCRADALHKFSRKLVDDYQKIVVGDVRSQKLAKTRMAKSVLDSGWGMLKTQLQYKGQWAGRSVEVVNEAFTTRACSQCGSLSGPQGLRQLVVREWTCTACETVHDRDKNAARNILRSRHRPPSAGTRQDVSACLEHALTA

SEQ ID NO: 5744 - protein, 413 aa, unknown
  TnpB Polypeptide
MTLTARGYKTELRPTKAQGELFAKACGIARFAYNWGLERNNNVYLWNQLPHPPLKYESPVDQHRILNTKKAKDYPWMYEVSKCAPQEALRDLGSAFHNFLMRRDRFRWPSYKNRHGAKQSFTLTGAVHVKDRAIRLPTFGWVKLKERGYLPRSRVLYATVSKRAGRWFVSVGVRREKVRVPENDDGPVAGVDWGIIHPATVSDGTTLERPRLERLKWQERHAQKALARKAKGSKNRLKSLLRHQKIWYRITNIRLDRLHKFTTMLARTKSVVVVEDLAASKLARNHSLAGAIYGGAPYEMRRQLEYKTKWYGSRLVVAPRNYPSTKMCSGCGGVKEEMQLDERVFRCEVCGLTINRDLNAAINLANYYYGTASSAGRACLMREVTVPLGRCPQVKQEERSGLDDHKLGTAESL

SEQ ID NO: 5745 - protein, 337 aa, Salmonella sp.
LPFLQGIVPGGAGGPLLSHANYVIVHQNASGKPRPSGRGGKEAVFRLTVFCIIPFSSLICEAMKRAYKYRFYPTNEQAELLAQTFGCVRFVHNSILRWRTDAYYERKEKIGYLQANARLTALKKEPEFAWLNDVSCVPLQQSLRHQQTAFANFFAGRAAYPAFKSKRHKQAAEFTASAFKYRDGRLYMAKNKIPLDVRWSRQLPSVPSTVTISKDAAGRYFVSCLCEFEPASLPITSSIVGIDAGLKDLSTGSGALHFTRFRIYRLSVGSHCQPGSVDISGSINVPFMGFSTLRTSPVTNIRRHFLHGEAATTTASGRREKLVDCDHAAPGPFAFVL

SEQ ID NO: 5746 - protein, 426 aa, unknown
  TnpB Polypeptide
MKLVEKHIISKNHKSYKEIDHLAFLSKNLYNKGNYIIRQEFIRTSKEVEQGKRENAKWIRYNELQKQLQTSNDPDYIALPRKVSQQVLRQLDNNWKSFFKATKEWKKTPDKFKKRPSLPKYKHKTKGRNILIYTIQAISKVELKNNIVKLSNTNIQIKTKQKNIQQARIVPLPYKTYKIEIIYEKEIEQRNTDKNRIASIDIGLDNLATVTSNVKEFRPLIINGRPLKAINQYFNKRKAELLSKLMKQYKDRWTSNRIDKLTLKRNNKIEDYMHKASRMLVDKLVEFNIGTLVIGKNDGWKTGVNIGDKNNQNFALIPHAKFINMLEYKCQLKNISVILQNESHTSKCSLIDNEDICHHETYVGKRISRSLFRSANGVIINADVNGSGNIMRKAIPNCFTTNGIEGFVVSPVRITPKGYYPHKQVS

SEQ ID NO: 5747 - protein, 538 aa, Streptomyces sp.
MGGVREMAAPFVALGPSGVAVRDRLRRLTAGDEEVLRLVGDHLGALASRDLRVRCADGLDHDGGRWAERKRTLTVESSSRWAGSVTKASHDQWALARRGQLAHLQSLEAGVRTIAHRLSLPVGEKGGKRAAGGYRSKREWHAKARRLHVLAGRLEAARADWQAGRVRVVRGGKRLLNTRHHLDAAQLTEEQWRRRWQAERRFLQADGESGKRFGNETIRVSPDGEVSLKLPAALAHLANAPHGRYLLAARVRFPHRGGQWRDRVAANRAVAYRIHEDPARGRWYVTIPPARTVPLATARANGMVGVDTNADHLAAWRLDAHGNPVGPPLRFGYDLTGTADHRDAQIRHALIRLLHFARRHGLAVAVENLDFSADKTREKHGRRKRFRNLISGMPVARLRARLVSMAAELGIPVIAVDPAYTSKWGAQHWQKPLTTKARKTTRHDAAAVAIGRRALGHSIRRRTAPPPAHRSDEQGHRTVQARPDTLEREGNRPRIPGPRTRSVRAGRGANAGDQDAQHRSGHPAEHEPWQQDSLPLSL

SEQ ID NO: 5748 - protein, 288 aa, unknown
  TnpB Polypeptide
MVPRRSASYGYGVPAQALVRKKSSAPVLEKRHQKYFLRFSYTEEVTLSKTPVKDQLICSVDLGINTDAVCSIMRSDGTVLDRKFINFPSEKDRLSHVLGRIRRFQKEHGSKQIGSRWAYAKRLNTELARKTARSITEYAHENHADVIVFEYLEMKGKISGKKRQKLHLWKKREIQTMCEHKAHRYGIRVSRVCAWNTSRLAYDGSGPVSRDPKNHSLCVFQSGKQYNCDLSASYNIGARYWIREIIKTLPETERSSLEAKVPAVKRRTSCVYADLLILQNEYGCSKAA

SEQ ID NO: 5749 - protein, 402 aa, Nostoc sp.
MQKAFKVTLIPNHNQEVLINKSIGCARFVYNHFLALNQELYQTEQKTLNYNACSQRLTLLKKEVEWLQEVDKFALQNSLRNLETAYKNFFADLKKIKGRKNVGFPKFKKKHGGKQSYKTNITNGNIQVIENRLKLPKLGWVKFHKSQEITGKLVNVTITRTSRGKYIASILCETEVEKYPQVTQNIGLDLGIKSYLVTSVGEVVNNPKYYRTQTRKLRSCHKKLSRSIKGSNNRVKAKIKLARTYERITNLRDDFLHKLSTWLIKENSVICIEDLRVANMVKNHKLALSISDASWSKFVTMLEYKALWHDRIVQKVATLYPSSQTCNCCGFVNPLVKDLKLREWFCPQCSIYNLRDNNAALNILSEGLRLIAAVGIPEALNACEELVSPELLQAESVEAGIA

SEQ ID NO: 5750 - protein, 402 aa, unknown
  TnpB Polypeptide
MQVRYRYRLYPSPGQQQALARAFGCARVVFNDGLRIRQEAHAARLPYITDAALSARLTAVKATPKRAWLGEVSSVVLQQALADLNIAYRNFFASLTGKRKGPRVAPPRFRSRKDRWQAIRFTANARFKVLPNGRLRLPKVGDVPVRWSRNLPSEPSSVTVIADAAGRYFASFVVETDPAADAGRFPPAGAETGIDLGLTAFAVLSGGTMIKAPKFLRRAERKLRRLQHAMDRKDKGSANRDKARARLARAHARVADSRRDFHHKLSTKIVRDNQAVYVEDLCVAGLGRTRLAKSVHDAGWSAFTGMLEYKTKRYGRYLGKIGRFIPSTAPCSACGTNDGNKPLHIRTWTCGTCGTTHDRDVNAARNILALGRRERLNACRGTGSPGLALAGPSETGTHRGAA

SEQ ID NO: 5751 - protein, 364 aa, Lachnospiraceae sp.
MNRALKFRIEPSKAQKEFFEKTFGCCRFLYNQMLSDRKEAAQRGEKLRPRPAMYKGEFPWLKETDSLALCNVQLDLETAFRNYYERPDMGYPKLKSKHHSRRSYTTNAVNGNIRIEGKKIRLPKAGAVRIRIHRKIPEDWKLKSVTVIKDAVGKYYAALLFDLPECENQTSGRTEKKRYLGMDYVMDGLAVLSDGTRADYPKYYRKAQEKLAREQRRLSQCEKGSRNYEKQKCKVAKVHEKVRNQRRDFLHKFSRNLADAYDVIGVEDINMKAMSQSQHFGKSVMDNGYGMLRHVLAYKLEEHGGKLIKVDRWFPSSKRCSCCGKVLEELALSERTYVCSCGNVMGRDVNAAVNIKQEAMRMVS

SEQ ID NO: 5752 - protein, 491 aa, Nostoc sp.
MPTLTYVKGLPTPREELNSLGLTEFEMFLAAYSSVFHKAACETANRLLAVNSFHDSSWNTHLQKTYGISRRHASGVISFAQGAVNASKEHRKLHIKTLEGKLKSLNSWVIKSEKKLSNSASFYAKKNWHNSKTGCRFPLSCSLKFRNTNWNKLRFQIHNKKRWAYKLSQQIEHLKTAPIQTVIPRNQIFIVGSKDEKFGNQVCQWDGDIIKFRVPACLESKFGKQVITSLGNFDRNISRLPKDGAKTWHFFRKHNKWDAAVKFTPVPVNRVSRHSAYGCIGIDMNPGSIGWAYIDKDGNLKSHGQIPLQMGLPSGKQDAQIVHACLQLARLAHTFCCPIVCEKLDFSTKKEQLGERGRKYARMLSSWAYSRFYKLLDSILSNRGIYLMKVNPAYTSLIGLVKYARQYGLASDEAAALAIARRGMRLTENIPGSITAYLSVKDGKHVWSLWNQLNKLIKKSSIERHNFYAISNWESLVKQLSEESDKSKLRR

SEQ ID NO: 5753 - protein, 410 aa, unknown
  TnpB Polypeptide
LVEKLNSNDNKIYRSVKIRLLPTKEQEVLFWKSVGVARWSYNYFLSESYRVYQEWLADNSKPKHVFEQEVRKYINNHLKKTTHTWLKEVGSNVMKQGVKDANIALQNFFKHSKGYPKFKSRKKSKPSFYVNYESLKRTSNGFQGEKIGIVKTRESLPKIGKNQKYRSTRISFDGRFWYLSISFEVNKLDVGLSDTKLGVDLGIKELAVVSNQDGNGVKKYHNINKTCEVKRLERKLKREQRKFSRKILMNTSHYFDNDRPVYIKDLESCKNIQKQRHIIQRLYRRLLNIRTNYLHQTTTEIVKTKPSRIVLEDLNVSGMMKNRHLSRSIMIQKLYEFRRQIEYKAELYGIEVAIADRFYPSSKTCHVCGNVKKDLKLSDRVYRCDCCGNVIDRDINASINLANYNIDDIK

SEQ ID NO: 5754 - protein, 410 aa, Deinococcus sp.
MHRAETVILKIAAPTTRKRDWLTSTAQAFRDGVGMVLRVAESEKTSSRARLHNACYAAIREKAGLPSDYARMVVNAGVALARSYWGLRKGKRKAGFPKVGKSQGIGLGVNAYAVLKRGERFFLRASTGKRGESMWLPLAVPVHLASKLQFVHGDAKLFQRGQDWFVMLPLRLPHTPAVRDGEPTVLGVDLGIVRLATVVTPDGCKIWNGLPVRHRREHFASLRRRYQRHRRTDRIKAQGGKERRWMHDLNHKLSRELVDLARFYPNAVIALEQLDGIRDRVRGSKRFNRMMSSWTFRDLVDKVRYKAEAAGVGVVFVDPRQTSQTCHRCGHATRSNRTSQAEFRCVSCGFRGNADINAATNIAAAGLRAVQQGPLDTARPAEGQELPQSEALDGVKECGLLHSDPNLASP

SEQ ID NO: 5755 - protein, 382 aa, Deinococcus sp.
MRAFRYRLYPTKTQEAALLDTLRLTRELYNAALQERRDAYRKAGKSVSVFEQMRSLPEVKAVRPEFKKVHAHVLQGVVTQLDRAFQGFFRRVKQGVPAGYPRFKGVARWDSFSFKQVWDNSRNTWFGPGKVLDSGRIYLPNIGNVRMKMHRPMEGKPKTLTIKKEGNEWYAVYVCDSPTRPLPETGSVVGLDLGTTHFLITSDGEFVDNPRFLQLSLKKLRVAQRSLSRKKRGSNRRRKAKQHVARLHRKVARQRLDFHHKTARKLVQEHDLIAHEQLNVSGMGRGRLARSIHDVGWGQFLNLLSLKAADAGRRVIGVDPRFTSQACNRCGHTERANRRSQSVFVCVSCGHETNADHNAAKNVLGRAVPSGLNGRGQPHAVA

SEQ ID NO: 5756 - protein, 368 aa, unknown
  TnpB Polypeptide
MKLTVQLKLLPSPSQSAALRTTLETANTAANRISQLAWDNKEFRQFPLHRLCYRTIRDEFPLSSQIVVRLLAKVSDAYKLDRDKQRVFRKLGSISYDARILDFQLASSTVSIWSVAGRLKALPFVCGEQQRKLLEFPRGEADLILRDGNWYLNVSIEVPEETEYAATEFLGVDFGIAEIAADSDGNRYSGSKLNKVRHRNKALRRKLQRKGTKSAKRLLKKRARKESLFARDVNHTISKRIVSLAKRTDRGIAIEELTGIRSRIRARRAQRYTLHSWAFAQLGQFLSYKAQRAGVPVIRVDPAYSSQQCSSCGHIDKANRKSRAEFVCQSCGHTQHADENGAVNLRLRGLAGAGAFNHPNAETSVSVG

SEQ ID NO: 5757 - protein, 583 aa, unknown
  TnpB Polypeptide
MQLTEQFHIPDEHHEACDRLTTLVQKHTRRLLDTEYWTGNHLDAISEHTGQSYTYVRDDDHDAFEDVEEYVYSRFKRCVYHRVTHVLDAHTDEFQAFQFVTERKIRRSGWQRLRERVFDDDSPYIEWCVLESVVEQLNTYYDTHGHFPETYTELVETPEPNGTLSYAPDKGDYHIHELEIEDGEVRFVLNAPDSLSPDSYHDWTKHELRFPIHSRFHQMLDTGAVKAPTLHASEHGYTLDVPVSVPDQETETVVDRVLAVDLGVKKQATAVVLDNGDQTHEQVAPPQFLDHAAKDKLFRVKADAEGINDRLAELRRQGKAQTERFDHLLCEYRQTRRKERRLREQIQHDVANQLVWLAVENGCETIVFESLGQLDAGDTSGAVAWSISSWARGELLDYVEYKAGLLGIDVTTVNPWGTSRYCPRCSERGHTVNAPNDHMECRHGGHFHCPTCGYECDRDVVGAVNVGRKHLDRCKMESANPAEYISAGNHASFPSHSAECARSEASPASPTGEVSGVQSATESQDQASGRQTRLSQHRPRSLTGKPGGRDLGGLHRNQGSNTGQRWPRRSVTQAVLASTTDCG

SEQ ID NO: 5758 - protein, 391 aa, unknown
  TnpB Polypeptide
MQPKDLTHSHVHSVTRTLRLKVKTESYAWLNTAACEVNQVWNWSAEVSEKAARPCTGERKWLTGFDLNNLSAGASEHFDKVGADTIQRVNGEYAEKRRIAKRYRLKWRTSRGPRRSLGWVPFKAANLKRKGRAVRFCGKTLRVFEPERLEGVQWKQGHFAQDAVGDWWLSLPIAVQVDDSVAPLEKVGIDLGLKEIAVTSDDARCEKGRFYRDIERKIAQAQRRGHRRQAKYLHRRAANRRKDALHKFSRQIVDQYQKIVVGDVSSTKLVKTRMAKSVLDAGWGMLRRYLQYKSQQAGRTFQIVNERNSSRTCSNCDALTGPQGVNGLRVRRWRCAACGASHDREVNAARNHLRRAELPESVRERASVFAGPPSRASRSRKAGLEPVRTVA

SEQ ID NO: 5759 - protein, 441 aa, unknown
  TnpB Polypeptide
LKYTTETRLYTKNNKDIVEYFDEIKGQYNCILRKVYYIIRNNPKIKENFLNTELQSKYNISKRTANSIIKTVQGRINSIRELKKTEVKQKQYKLERISKKLEKLIPVLLDLKLKARENDIKDLTKYRNLKTKVAFLKIRKDKLVNQIKSLNHQLETNKFKITFGTKKLLKQSLEEFLKQRDNQIIFLGSKEETSCNQTFQLKYVPKINQFVMKVRKDFKYKDAKGEERYIYGKCFFNNHKKLLKEILRFQSSPLTYRIIQRNNKYYLQCTFEINNCNLSLTDNTQGTIGVDFNKGFVAISQTNKYGHLVSIDKMTYRFGSGNKTKNDLLLIINKLMELAINTGKDIVVEDLNFLKTKSKSIKGESKEGRKYNKMIHSLAYKMFLDRAEQICNRENVGLIKVNPAWTSWIAKNKFCDKMKLNVHTGAAFVIARRGMNIKDVV

SEQ ID NO: 5760 - protein, 398 aa, unknown
  TnpB Polypeptide
MIKRSYKYRIYPSKEQSEILEKTFGCVRFYWNKALELKLKVFEENKGKSKEERKPIPRILPSELKNDYPFLKEVDSLALANAQLNLEKAFDRFFKGKAKRPKFKRKKSRQSYTTNNVNNSIRVDFRKGTVRIPKVGEIKAKLHRQFSGKIKSATIEKTTTGKYYISILVEEEINKIPQTDKITAIDLGLKDFAIMVDNQGNIEKIGNPKYLNKALKRLVKEQRKLSRKKKGSKNYEKQRLKVARIHEKVRNQREDFLHKLSKRIVSENQAIILEDLNIKGLLSNGNLSRHIADTSWNRFIQYLLYKAQWYGRDVIFVDRFYPSSKLCSVCGYKKDDLTLSDRYWKCPVCSTEHDRDINAAKNLLIYGLTCLKGGRVGTTRTYACGGADSSDEAGSSML

SEQ ID NO: 5761 - protein, 342 aa, unknown
  TnpB Polypeptide
MILEKTVTAKLFGLTRVKESKIRLEYANFQRALKGEDVPLYSATKQQAKRKKAWKGDCEYPLVLRRDCFGVKDLGLKFSRWWAKIPVFGGSIYCPVQLPYMQESLLKEDIRETRLVRRRKGWFLHITVQQNIELNIPNASVIGVDFGERHIATSVEWQGRFQNPIFYGTEVRGIRRHYAWLRKRLGNVKALKTIRKVGRAENRKVNAVLHNISRTIVNRAKELNAVILLGAPNGASMRRKALRKGKRFTRIVYSMPYYRLRMLIEYKALQEGLTVVNANEEWTSKTCSFCGEISDRPRQDLIVCPHGHRLNADINACRNLIERFLDHWLRDGAILASPKLPL

SEQ ID NO: 5762 - protein, 429 aa, unknown
  TnpB Polypeptide
MRVAKTVVLKSEKLPKKVFKIFVELEGMYREMLLQTVLFAVRNEITSFVKLKAEKYRFLRELYSQLPSHYAYTVCQDSALRVKSFLKRKKKGFAKKEYPEVRNVSMWLDDHLWRAGLSFIKIATHKGWVEVLLETHKHYWKTVNSGWKLASQARIKLDKKERRLIVFLTFFKDVEQYEVKSWISVDVNEDNVTALIDFAPIIFETNQKKTTLGYYYRRKRVQEKWDKKLGSRNGKKKGILRKLREKNKKRDIRNKLAKIIVEEARKRNAGIVLEKLPKNVPRKMLEGINDKQLRHRIYQSAFLGVQRAIEGKAREYGVPVIKVNPKNTSRICPIHNAPVKYESDRFGVCSVGGEVWHRDVLAVWNLYLRALQSDGGDALSSGDVFVDGSPVPLGSTATSEAIWIEKSRWLRWNSLPLIHSDTYPYKTKR

SEQ ID NO: 5763 - protein, 483 aa, Bacillus sp.
MFNPLIYLQNNRKMVYFGIEQTFVKRGWLVMIMAKTLRHKITNHSRIFDPTLNIYNEALAFIINVIDNEFDDLSDISTKSIVSAVEKLIHTTKSNPLPKYKEFNQRFYKFPSYFRRSAIATAFGKVKSYRSNYKNWLKEKEITLSEGKRFNKRPPRLQLEHKEFPVFYKTNMFQRTSDTTARIKVFHHNDWVWVDIEFRKQDLYKRDVWSWKEHNPKLVKVGKKYFLNISYSNRVALSKTEINSQKVCAVDLGITNSAVCSIVDAKGTVLARKFINQAKEKDRLYRMTNKLRKVQRESGWAAAPNYWRQIHGLQKHIINHTCHEIVKFAKENKCEVIVFEYLNKMRVPKGFWGAKKLRFKLRYWRKTAIQNKVKEMANYVGIRISRVNPRNTSALAFDGSGKVERNDKKDLAVFTTGKVYHADLSASYNIAARYFIRAYQKSLPEKVWLSLQAKVPVLANRTNQTLSSFISLTKAMEAPAVTY

SEQ ID NO: 5764 - protein, 382 aa, Nocardia sp.
VQLRYNFRLYPTVGQQRELAKAFGCARVVFNDGLRLRQRAREAGLPYIKDSALQTLVITEPKRTPKRAWLAEVSSVVLVQALGDLHTAYRNFFQSATGKRRGPKVAPPRFRSRKDNRQSIRLTRNGFRLRPNGKLYVAKVGELKVRWSRELPSDSSSVTIVKDATGRYFASFVVETTGEMLPPVESEVGIDLGLSTFAVLSDGKRIESPRFLRQAERRLRKAQQSLSRKEKGSKNRAKARVEVAKTHAKVSDRRRDWAHKNSTRIIRDNQAVFVEHLCVKGLARTRLAKSVHDASWSIFTRMLEEKAGRYGRVFGKIDRFFPSSQLCSECGRVDGPKPLHIREWTCPCGAVHDRDLNAAKNILAAGHADKSNACGGTVSPST

SEQ ID NO: 5765 - protein, 173 aa, Okeania sp.
LSASFRPTGFWSNRLAAITEKRNRQIHDGINKAARIVINHCLKNSIRLKERIALLCEEYGIIFIETEESYTSIASFLDGDNLPNYGEKPNDWKPSPKRIKRGLYRSSNNWLINADCNGAANIIAKVSRKLRLNLSRLCRGTLTCPQRVYLWSALEKTKQHGFILLRSINLESP

SEQ ID NO: 5766 - protein, 396 aa, Okeania sp.
LITLTYQYKLKPTQHQEAEINQILDVCKSVYNYALRERKDWLSSRKSPINSCSILTEYIIHADAAYPNYNYQAKNLTIAKKTNPKLKSVSAKSRHENAQVLQQTLKTLDRAFSEMKSLGKGFPRFKKKMRSFVFPAMLKNCLGNNRMKLPQLGWIKIRQSRPYPDFFQAKQARIVRKATGYYLMITFFSSESVPENLIGERSLGIDTGIESFVATSTGKLIKSPKFLLSSLRELKAKLLRRIELLQRRLKKKTRGSNNWLKLQNKIARLHEKIANTRRDWHFKLAHQFCDFTDNIFVEYLNFKSWSRGIFRKQSLDSGVGQFINEILPYVCWKRGKYYAKVDKNYTSQECPLCGHIQKKKLSDRKHNCSNCNYQIDRDVAAAPTPIPSREGSKRGG

SEQ ID NO: 5767 - protein, 402 aa, Thiomonas sp.
MLIAHKIALDPNNAQTTYLLRAAGTARFAYNWALAEWKRQYEAWKTDNTLQKPSETALRRQLNAIKRDKFPWMLRVTKNAPQMAIIQLGQAFQNFFAGRARYPQFRKKGAHDRFTLTNDQFSLDGCRIRIPNLGWVRMRESLRFSGKIVAATVSRVADQWFVSIAVDTSKDLHLPQAENQGAVGVDLGVLALATLSTGETIPGPKPHKALLGRLRRLSRGLSRKQKGSENRQKAKARLAKLHARIANIRKDALHKLSSDLTRRFHTIVIENLNVRGMMANRCLARSIADMSIFEFRRQLEYKTAMRGGAVKVADRFYASSKICSGCGNKLDALPLSARQWTCPVCGTHHDRDVNAAINLKNLTVSSTAAACGEDGSDRYRKTKVKPAPMKQEVSLVLHVQKC

SEQ ID NO: 5768 - protein, 314 aa, Okeania sp.
MYSCQQVLVGKNPELIAILTFLCEQSHKLTNMGIYYGRQLFFKSHKTLGKYDLEKVYKKNNHYKILYSQAAQQILRTVAESFRSYYGLIIAYREGKISDRPKIPNYRKKGGMATVSYPKQALKLKDNQIRIPLGNTCKRWFGVDSFLIPMPSNLEFSSLKELRILPRNRCFYWEFVYEKEVIVKPLLNQENVLGIDHGVNNWLTCVSNVNTSLIVDGKQIKSMNRWYNKQVSTIKENQPQGFWSNKLAAITEIRNRQMRDGINKAARIVINHCLENSIGTIVFGWNKGQKNQIELGKKVIQNLYQFLQLDSKKE

SEQ ID NO: 5769 - protein, 326 aa, unknown
  TnpB Polypeptide
  misc_feature (321)..(326): Xaa can be any naturally occurring amino acid
MPSSGQLLKHEERGPISPAIPEEGIYEVNYTNKRTNVVRLLPNGFQERKLRRLSNISSKLFNELNYERRQQFFHEKKVNFNKTWDKYYEKYKEELKVNAQAIMQKNNEAWSSFFSLIKKKGKLQNHMKHIKPPGYWIDKDTKKRKLLLVIRQDRYVINEQNHKLVLKDFNLEIDFAGRLRWYGKQGRLEIYYDETRNAWYASIPVEVGVEKTKTGKESKYIVRGERKKIQIESPKGNKLSSIDLGINNLASIVLNDGTWFLYKGVRTKEDYFYLEKKISQVQSLADKTKNIGEYEAYDELLKEKKRLFKKLMRRLLHLYRXXXXXX

SEQ ID NO: 5770 - protein, 415 aa, unknown
  TnpB Polypeptide
VNPVSPTFLTAIKSVAFQYETEERVTRLLTTFRMMVNHAIWAGMQGGFRSRFSLIKAVYKDFKKYGLHSHYTLNACEVAAAILKNHRRNHRAPVAKKLFLKLDKQTYLLQKETLRIPIKPREFLVLKLRLGDYQSRFLDDPSLTLGSITLTEDKVTVTFKKEEANGLEYRAVTAYDTNELSLDGAFSDGSTVQAIHINLKKIARVRAFHFRRRRNLQARFAHCHRKLRTKMAECEKKEQRRVNAVLHIVTKRLITLAKQSEAEVVLEDLSGIRRTINKRKLNYSGRVRTSLPRSRHLKRRLNTWSFGRLHTFIQYKAAWEGVPLAFVPARYSSRTCPKCGCLLSGEQDPSKRRIFVCPDCGWTCNRHLNAAFNLLKTQDEGRWFSPDRLLNEVMTSEPTRRKLSHNGLAEPTLTS

SEQ ID NO: 5771 - protein, 243 aa, unknown
  TnpB Polypeptide
MPYTCAIDFGTDNFAAIVCDDGSSVIYKGGAVLSDTQWFHKQKAKYVSILTKGYKNQYAASKRSSDLSYHHANFVKDQCHKISRSIIDFCVDHQAGTLIFGVNPLWKQNSRIGKINNQKFVSMPIAFLRAMITYKALNAGIKIIEQEESYTSKADIATKDYIPTYGVDDKDAQFSGLRIKRGLYRCADGTILNADCHAAANIMRKAVPDIWDRTTDFSFLASPRVYGFHELNPKGIPVKGIAA

SEQ ID NO: 5772 - protein, 548 aa, Streptomyces sp.
MAEAKKKQLRQIEEPFVALGPSGVAIRDRLKHLTAEDERVLRLVGEHVGHLASLDLKARCADGLDHNSDAWAARKQSLTAESSSRWAGAVTKATHDQWALSRRCQLAHIQSLEAGVKTVAHRLSQPIGDKGTKRAPGGYRSKHEWFQKTRRLAILEHRLDVARAEREAGVVHVVRGGRRLLNTRHHLEAAQLTETEWRERWEAERWFLAADGESGKRFGNETIRVTPEGEVSIKLPAPLAHLANAKHGRYVLASKVAFAHRGAQWRDRIEANRAVAYRIHHDVQRGRWYLTAAWSIPPVKTVPLETARAEGMVGVDTNADHFAAYQLDPHGNPVGDPRRFFYDLTGSAEHRDAQIRHAISQLLHWANRCGVKTIGIENLDFTAEKTREKHGRKKRFRQLISGIPTGKLKARLVSMAAEHGLSIVAVDPAYTSMWGDQHWRKPLTSSKRKMSRHDAAGIAIGRRALGHPIRRRTAPPHDDQSDRRGHRTVQAEPSARRREGTRPPVTERAHDARRRIGEQRMREPSASNTVRDARSSGNWQQMPLLDTA

SEQ ID NO: 5773 - protein, 251 aa, unknown
  TnpB Polypeptide
VVLNDRMLRLSKVGDVKVVRHRPIRGDIKTATIQRSVGKWYVCFSCEVEPEPLPVSSAMVGVDLGLKTFAVLSNGEPIKRQRWMKQDAKNVARLQRKKEKLPKDSPERRKAVKALLHAYQRSNNRRNNFAHQESRKLVNRFGLMVFEKLDIQDMQSNGNKVVNRGIADVAWGRFVQYTLYKAENAGRACVLVNPRGTTQECSDCGQVVLKDLRVRVHDCPHCGLRIDRDLNAALNILARGMASIGAARRDP

SEQ ID NO: 5774 - protein, 251 aa, Clostridioides sp.
MYCGQHIKLPKLDMVKIRDKQVPKGRILNATISKEPSGRYYVSLCCTDVDIEVFENTNNQIGLDLGIKEFCISSCGEFIENPKYLKKSLNKLAKLQRELSRKTIGSLNRNKARLKVARLQEHIANQRKDFLQKLSTKLIKENDIICIEDLQVKNMIRNSKLSRLISDVSWSEFIRQLKYKANWHGRQIVKVGKFFASSQICNKCGYKNEEVKNLNIREWICPSCNETHDRDINASINILKEGLRLITIQNK

SEQ ID NO: 5775 - protein, 431 aa, Desulfurococcus sp.
MKRTVTIRLIPNRDAEAKLKALCSLGSKLWNEVNYARRRMFFEAKRVDLKSTYKEFYEKYKTLLGSATTQQVLNKNDEAWKSFFSLLKTRKEGKLPLFIARVNPPGYRKRGGKRVLWAVLRNDQYRFEGDHVVLKGLGAVGSIRIRYLGRIHIMGEQGRAEIRYDPDERKWYMHVSFEVREKIIRDKMIRVPTGSLGNKVAGIDIGVNNLLAIYVEDGSALLVSGRPLKSISFYWRKKIADYQSTLNRYGLKTSKRLRRLFKKWRRQTRSYINWAVRNAVEWLYARGVSEVVVGYPKYITQAPGKNPKTNFEVVHVWSYGYLLRRLAEVAEEYGISVEFVSEEYTSTTCPLCKTHIAHRRIARGLLKCYKHSKAFNADLVGAFNILSKKKPITPSPTLSGVGVTRLRPGAGLNPAKPGNVAPNLPARTLTL

SEQ ID NO: 5776 - protein, 370 aa, unknown
  TnpB Polypeptide
MKRTISIKLLPAEEQGQALFGLQQAFAHACNAIVPFAVEHRCWNQVALHHLTYYPIREQSQLGSQMVCNSIKAVCNAYRALKPQKGKEVSVISFKPNGSIHFDKRTYSIKDKVVSLYTLAGRAKIKMQPGAFQKAYLEQGTPKEAELVFRGGKWFFNLVLELPDRPPTRGDLTLGVDLGENNMATTSSGKILEGGQLRHNRDRYLALRRRLQSNGSQSAKQLLRKISGKEQRHMKQVNHEVSKAIVSEALRYGASTIVMEDLTNIRRRIRAGKRMRSRLHRWAWAQLQGFVQYKAEAAGLRVAYVNPAYSSQTCSVCGCLGRRVKHRFFCSHCGSQQHSDLNASQNLCRLAMSADVATGAVNRPDVAGYA

SEQ ID NO: 5777 - protein, 357 aa, Sphaerospermopsis sp.
LSPAQKRKVKYWFGVSRFVYNETIRYLQTPETKANWKGIKTGIIQGLPEWCKDAPYQIKSIAIKDACQAVKNAKKKYINGGGISRCRFRTKKDPVQSCYIPKSAVKDAGIYHTVLGELKYKDPLPDGFGDCRLVSFYGDYYICLPIESLRHKTENQGRVVALDPGIRNFLTFFADNCFGWLGENANLRTQKLCFKLDKLISKISKAKSKQKKRLKNAATRLRGKIKYLVDELHKKTARFLVDNFDVILLPTFETSMMSRKVKRRIKSKSVRQMLTLSHYKFKQFIKHKAHEFNKIVVDVNEAYTSKTVSWTGEIINNLGGSKTIKSRIDGKTMNRDLNGARGIYVSACARHKSSCIG

SEQ ID NO: 5778 - protein, 287 aa, Cyanothece sp.
MLTKRGSSKSLRWQHSRYSALGRQWEVSLFTFQFLLFLLWDKLLKNNSIKQRQKRARWLVRNLLQLGPTFIKIGQSLSTRADLIPLEYIQELSQLQDNVPPFSTEEAVIMIEKELGQPVYDLFDSFETERGQNQIAVASLPNRFGKFWNGRQIKHLRRHYQKLRKQLQKANKRKVVKRLESKERRIITYINHCISKQLVQFAKDYGMGLRFEDLSNIRQTSKQSKKVRSDAGNSRHTWSYFQLETLTRYKAIKNGVPFELIPAPYTSKSDHRNGVIGKKKWALVQRS

SEQ ID NO: 5779 - protein, 317 aa, Nostoc sp.
VLHKVVQVRLYPSLEQQTQLAQTFGCARWWWNYALNKSIETYKETGKGLGRAALNAFLPALKKAEETVWLADCYSQVLQATTLNLTTAYKNFFEKRAGFPKFKSKHGKQSIQYPQNVKIVDGNVKLPGNIGIVKAKIHRTIEGKIKTVTVSKTPSGKYLASILTELDDENPVISEGKIYGIDLGLKHFAVVTDGEKVSKYDNPKHLAKHEKNLKRKQKKLARKQKGSNSRNRYRKVVAKVYERVSNSRLDFLHKLSALLLLRKNKIFVGWVERSETQQNQRLLVLGFVPQPNLRLNSSKSLKIRVDDFYPTRVIKER

SEQ ID NO: 5780 - protein, 268 aa, Nostoc sp.
VLHKVVQVRLYPSLEQQTQLAQTFGCARWWWNYALNKSIETYKETGKGLGRAALNAFLPALKKAEETVWLADCYSQVLQATTLNLTTAYKNFFEKRAGFPKFKSKHGKQSIQYPQNVKIVDGNVKLPGNIGIVKAKIHRTIEGKIKTVTVSKTPSGKYLASILTELDDENPVISEGKIYGIDLGLKHFAVVTDGEKVSKYDNPKHLAKHEKNLKRKQKKLARKQKGSNSRNRYRKVVAKVYERVSNSRLDFLHKLSALLLLRKNKIFV

SEQ ID NO: 5781 - protein, 130 aa, unknown
  TnpB Polypeptide
VHEKIANQRNDFLQKQSTMLVRENQTICIEDLNVKGMIRNHKLAKSIASVSWAKFFKMLEYKASWYGNEIQRVPTMYPSSQTCSSCGYRNPRIKNLSIRIWECPKCHAVHDRDTNAGINILKKALQMQSA

SEQ ID NO: 5782 - protein, 194 aa, unknown
  TnpB Polypeptide
MNPRISFDGLNWWISVCVEFPDCIEKLNDDGIGIDLGIKDLAICSDGAKYKNINKSQKVKKLEKQKRRLQRSISRSYEKNKKGESYCKTNNVIKKEKLLLKRNHRLTNIRKNYLNQTTSEIVSRKPRFICIEDLNVSGMMKNRHLSKAVQNQGFLSLESSLNTSAGIKGSSLLWLIGFIHHQSFAAVVETSKKI

SEQ ID NO: 5783 - protein, 387 aa, unknown
  TnpB Polypeptide
MDQQSVRKTFKYKLQPTAEQEGTLGFILRRCRELYNAGLEERREAWRMSRVNITMAGQSAQLPDIKPERPEYQDLHSQVLQDVLARLDRAFQAFFRRVKHGETPGYPRFKSSNRYASFTYKQFGNGATLDNGFLVLSKIGRIAVRWSRPLEGAPKTVTIRREADGWYVTFSCADVPIKPLPLTGQETGIDLGLESFATLAEGSQIANPRLFRVAEMNLKRAQRRMSRRVKGSKRRRKAVTLLAKAHARVRRARADFHHKTALALVRQYDTIYHEDLQPANMVKNHQLAKSISDAGWSGFLTILSFKAVEAGKTVVAVPAAFTSQACSGCGVLVHKGLSVRWHACPECGTSLHRDHNAALNILARGKEPSGAGQAPQALTQPVGAYVA

SEQ ID NO: 5784 - protein, 526 aa, Rhodococcus sp.
LSGLQPDRVRGERGRGGRLGALVRGGIRERGRADSAEHAGQLLDGGQVRGVRCREGGDEIAGRSPRRPDRAAAVPRRRPRDPRPASPRTWSRLWPRTRQYSRYPPSSRSSSSPQSDLIRESFGANPVLQVRDSRSGLSDCVASVWVMAGRVVKRAFKFRFYPTAVQAEQLARTFGCTRYVYNRALAERSRAWSQEQRRVTYSDTSKMLTGWKRDAETEWLAEPSKGPLQESLRQLQGAFERFWRTQAGYPQFKRKGQSKDSATYFSNCFSYRGGQLRLAKQSEPLEIRWSRPLPEGVTPSQVTVSRNARGQYHISILVEDTISELEPTDRVVGLDAGITSLYTLSTGEKITNPRHERRDRERLAKAQRVLAKKEKGSRNRVKARLKVAKIHGRIADRRRDYLHKLSTRLVRENQVIAIEDLSVRNMVKNRSLSRAISDAGWSEFRSMLEYKAAWYGRRVVAIDRFCPSSKTCSVCGEIASTMPLDVREWTCRCGAVHDRDVNAAKNILAVGLTVAACGDGVRPPRT

SEQ ID NO: 5785 - protein, 158 aa, Rhodococcus sp.
VLARKEKGSRNRAKARLKVVKIHGRIADRRRDYLHTLSTRLVRENQVVAIEDLSVRNMVKNRSLSRVISDAGWSEFRSMLEYKADWYGRRVVVIDRFCPSSKTCSVCGVIAGAMPLNVREWACRCGVVHDRDVNAARNILAVGLAVAACGDGVRPPRT

SEQ ID NO: 5786 - protein, 625 aa, Rhodococcus sp.
MNDVTAVPASLSGPFSGRCGRHSINDGVCTMPRQFAFTTRAHVAVDDATGEPIGLDDVDTRVGWLLDLITTAGGQLASRLWQPATFDVLAAGRDHQDRRLPAQGHVAAARLGWNPHYPDGIYVPSRVTRVVAAQVMATLRTLAYRDTAITALSEGFDPATGRIAPTTAAADCVPMGFARGVRRQLVAHAGHTDDGAPADRLRITDVQGPPQTSAMARLSAADRQLAQITAAGRELVLTVKLPTCPAPAGRAQWRRVRLTAAIPGHLHGRAITDWHLPTLVLDRKGLLWRCAATELVPDCDLGSATVAVGVDWSPSTLGAAAITTENSDGLSSDYRGFAYDDRGLGTKLARLQTEGQMLHRKAARLEKLAATAPPEVRTRLEAKIAVLDAHREAVGVKRGKINRELAFHFGRQVTEYAEAAGAEMIAVEDLTTLETRGHGRVNNNRAAQSARRKAVAALAHTAAGVGVAVVSVPARGSSALCPGCDAPLVRPGGYHTAWCPRCRVGGNRDHVAGVNLAKRALLGRNKVARRRGQLPTIRVAEHAPVRKSRDKTSPTPSRPRHRRVRHSLPTTPQQVGVTPKHHVPAPQASVWDTVKPAPPHGDAGSRDTRTSPTPATPVAESMRST

SEQ ID NO: 5787 - protein, 342 aa, Rhodococcus sp.
MLARSFGCARVVFNDCLRIRQDAYAAGVSLSDTAVQKQVVTAAKKTPERAWLGEVASVVLVQACQDARRAYRNWFDSLSGKRKGRMVGAPRLRSRRDNRQTIRLTRNGFSIRPNGKLYVAKVGEVEVAWSRDLPSEPSSVTIIKDAAGRYFASFVVETTDEPLPPVDAEVGIDLGLATFAVLSNGETISSPKFLRRAERKLGAATTGSRHVFASRRPTPECPTPAGTGRTSIPRRSSARTKRCSSRICACGGWRGHGWRNRYTTPGGGCSPACWRRKPPATGAPSSRWTGSIRRRRSAPDVGSGAARNRSRSGSGHARRATRFTTATSTPRRTSTPQDVRSG

SEQ ID NO: 5788 - protein, 383 aa, Rhodococcus sp.
MRGRTWLRSSRTPPLIGARSRCKSGSMPSSRRAGCRRNRRSGSSRKSADAYATRTANLRNGNYGTPGSTRYAKVAGKAIVFRQDAGQPFDDRCLSWQIDRSTVSIWTSAGRMRNVGFVCAPWQRTMLADRTGESDLIFRDGCFYLHATVDTDAPQQLVPADDPTGWLGVDLGIVNLAVTTADDPAELDVRWSGGAVTARRKKNGTIRSALQKVGTRSAKRTLKKRRRKETRYATDINHQLSKTIVAQAQRTGQGIAVEDLSGIRDRVRLARRQRQQLHSWAYAQLRDQITYKAHAAGVPVQVINPRNTRKTCHHCDTANRHSQALFRCRGCGWTGHADHNAAANIAALGHTNYRAAQSTVPKAATPLTASENVSSKPASFRTG

SEQ ID NO: 5789 - protein, 374 aa, unknown
  TnpB Polypeptide
MNFKKSFKYLLKPKKVENTLFNQFSGAKRWIFNWGLDQRKQMWEKEKKRISLFDQNNELVHLKKGEDLAWLKEIHSQVLQQSLNDLDRAFVNFFNGLKKNIQIGYPKFKCKGMKDSFRYPQGVKVEEDKVWLPKIGWIKFKKTREIEGVIKQTTIIRERDNWYVVFSCEIEKDLPKVNIDPKKTVGIDLGLKYFANLAIGKDNHFVTIENPKYLRKALKKLQFLSKELSKKSKGGKNRYKARKKLSNLHCHLKNLRLDFFHKLALMIVKSHDIIGVEKMNIKAMMQGLKTLSRAISDAAWGMFLNCLKNKALEYGKNLYEVSSFLASTRKCSKCGEKNNIKLGQSRYFCECGQNIDRDLNAAINIKNLAVGASV

SEQ ID NO: 5790 - protein, 379 aa, unknown
  TnpB Polypeptide
LNIAYRFRIYPTEEQKILLGKTFGCCRFVYNQTLAYRKDIYEKEKKSVSKTDCNNYCNRELKKDYEWLKEIDKFALTNAIYNMDAAYQKFFKEHAGYPKFKSKHDNHKSYTTNFTNGNIAVDFETGKIKLPKLKAVKARLHREYSGQIKSATISQVSSGKYYVSILVETEHKELAHTNHNIGIDLGIKDLCITSDGKVYENLKIIKKYEKQLVKLQRQLSHKGKRSKNYYKNIKKLNELYIKLSNNRRYYNHKITKEITENYDIISTESLTISKMIMDKEHHLSKAISDATFNEILEQLEYKAKERGKYFYKISPYYPSSQICSVCNNIDKKYKNLDERMYECNRCYSKLDRDFNASVNIMFEGLKLHIMAPMKNLSTR

SEQ ID NO: 5791 - protein, 407 aa, unknown
  TnpB Polypeptide
VDACKQYASDFLKEFLANGYEDFAVGFSSEMKLPKMIKYSYFNDKIKSELSGRTKNQIVKQIQPLIVNWIKEWNYWFKRSLKDPSIDTEKWKKFPEIKNFELTTMFCDIQINENKAFLELKALGKFGIKHGTSSVLRIPFKIDKRTINERLNRGWRLSSAVTVTKSYVILNWEKESQIPNHDKKQFHKGQVGCDQGINSVITLAYKDENDVIHSFQSPFKDRQGWSLSKIIKRMKRCKKGSKQYARYQKLRANFIRWSINQAKSFIRENNIKVIALEDIRFLGKGRNAGGFLSKFEHSLIKSKLMMMSEENGVFVALSSNSYRSQRCSKCGFVHKLNRKKGTKQFVCVNCGNAIDADLNAALNHSVNLEPKKFGQINNERGEFWKELGSQLGVNSVPNDPEPIVSAS

SEQ ID NO: 5792 - protein, 389 aa, Chloroflexi sp.
MCYNVTMRLTYKYRLFPTGAQRATLEQTLDLCRWVYNQTLAMRKEAWEQEQRNVSYYDTKRMLPIWKAEKPELQMVHSQVLQNVTERVDLTFKAFFRRVKAGEEPGYPRFRGRGRYDSFTYTQSGFALLDNGRLRMSKIGDVKIELHRPISGTIKTLTVRRDSVGNWYACFSCEVEARPLPPTDKVVGVDLGLSTFAAFSNGEKIERQRWMKRDQRDIARLQRKKERFAKGTPERRNAVRALQHAYRRATNRRTNFAHQESRKLVNEYQFIAFEDLDIQDMQVNGNKAINRGIADVAWGQFMRFTTYKAASAGRGVALVDPKNTTQMCSGCGEIVPKDLTVRVHECPHCGLKMCRDVNAALNILARGLASISTGCPQGAAVVAVEAQQL

SEQ ID NO: 5793 - protein, 440 aa, Halobacteriales sp.
LVVVEETFKYAATPDDDATATAAWNDIQTCREVYNHALTQEYRPRSAGDKPSYTELQNKLTGESGWKERWPEWQTVYSKCLQMAVRRIKQSESVLESLQDRGYKVGQLKWKKPDEFRSICYNQSGFDVDSNTGRTDHACVNFSKIGDFHINYHRPLPANADITQIILKKEKTGSWSVCIVVDYDPGYPEKPPVEDIEVEDTVGIDLGITKFIHDSNNHSFESLDEQRDRERIDRRHRDLSRKEYGSNNWENARQALARAYERLDNRREDYREKLAHEYTTRYDAVFLEDLDVKSMTEGNGNSRNVAAMSWRQTIQAFNRHGKKNKCHVIEVPPEGTTKRCSQCGCSTQKPLWVREHSCPACGFEGDRDYNAALEIKRLGLEKLGVETNTKAVGQGMAKSTPAETALPGETEATADDVSPKRVVETGSPCLTERTASAVSE

SEQ ID NO: 5794 - protein, 397 aa, unknown
  TnpB Polypeptide
MLTSWYQLGIMFIESEVKLMKKSLKIRLLPTKEQEVLMFKSIGCSRFVYNWALSKCNELYKQGIKYSMSDIRKQFTQLKKEEDFKWLNEVSNTTMVESMRNLDKAFKSFFKKQTKYPKFKSKKKSKQSFYVRYDNLYFLDGICNIEKIGKVKFKTNYDIPKGRNICRFSNPHCSFDGKYWYLSFGIEVDENQVDLNKDLSVGIDLGIKDLAVVNVIEKPIKNINKTKKVRKLKKKLKRLQRQVSRKYKANKQGSNFIKTNNIIKLENKVKLLHRKLSNIRNNHIHQTTSEIIKMNPYRVVMEDLNISGMMKNRHLSKAIAEQCFYEFIRQMKYKCKFNGIEFIQADRFYPSSKTCSCCGNIKKDLKLKDRIYKCDKCGLVIDRDKNASINLGNYELA

SEQ ID NO: 5795 - protein, 395 aa, unknown
  TnpB Polypeptide
MTQKAFKYRFYPTTEQEDLLRRTMGCTRLVYNRALATRTEAWYSEKKRVGYSDTSAMLTDWKKQDGLDFLNEVSCVPLQQGLRHLQKAFSNFFEGRAKYPTFKKKRNGGSAEFTKSAFKWRDGKVYLAKCSEPLPIRWSRELPDGASPTTITVKLSPAGRWTVSMLVETQIESLRKSLNLVGVDLGLTSLIALSTGEKIANPKSFKAKRRKLKKVQKVLSRKQKGSSNRDKARLKVAKVHQQISDARNDFLHKLTTQLVRENQTIAVEDLAVKNMVKNRKLALSISDASWGKLVSLLEYKCDWYGRTLVKIDRWLPSSKRCGNCGHIVEKLPLNIREWSCPKCGTVHDRDVNAAKNILAAGLAVNVCGANVRPDNQSVEGQLRNPRKGKKQKPKL

SEQ ID NO: 5796 - protein, 299 aa, Enterococcus sp.
LKNISDAFSRFFKKQNKRPQFKNKKHPVQSYTTKNVNNSIEIRNNFVKLPKLGLVKFAKNREPKGRILNATIRKSSSGKFFVFILCEEEIAELLKTNSAIGIDLGITDFAIISDGQKIDNNRFTSKMEKKLKREQRKLSKRALLAKKKGINLFEAKNYQKQKRKVARLHEKVMNQRNDFLNKLSTEMIKNHDMICMEDLNTKGLWRNHKLAKSISDVSWSSFVTKLQYKADWYGRKIIKVDKWFPSSQICSECGYKDGKKPLKIRAWTCSICYTHHDRDINTSINILTEGLRLYSMRLA

SEQ ID NO: 5797 - protein, 474 aa, Rhodococcus sp.
VSLSAQTRSFRSGIADLVLSDCVASVWVMAGRVVKRAFKYRFYPTAVQAEQLAQTFGCTRYVYNRALAERTRAWSQEQRRVTYADTSKMLTGWKRDPETAWLAEPSKGPLQESLRQLQGAFEKFWRKQTRYPQFKRKGQSKDSATYYSNCFTYRGGQIRLAKQSEPLDIRWSRPLPEGAVPSQVTVSRNARGQYHISILVEDTISELEPTDRVVGLDAGITSLYTLSTGEKITNPRHERTDRERLAKACAGQEAEGVPEPGQGPTEGREDSWPDRRSAPRLSAHTLHSTGARKSSDRHRRSECAEHGEESVVVSGDLGCGVVRVPVDARVQGRLVRAPGGGDRPVLSVVEDLLGVRGNRRGDAAERAGVDVPLRRRPRPRCERCEEHFGRRTDGGSLRRRCETAPHITCGAATVGETGTSRRESRGESRSFTAERTSNRSPYWTRGDTDPVPPPDSPRIALLRNLDARPLILRA

SEQ ID NO: 5798 - protein, 380 aa, Rhodococcus sp.
  misc_feature (380)..(380): Xaa can be any naturally occurring amino acid
MAGRVVKRAFKYRFYPTAVQAEQLAQTFGCTRYVYNRALAERTRAWSQEQRRVTYADTSKMLTGWKRDPETAWLAEPSKGPLQESLRQLQGAFEKFWRKQTRYPQFKRKGQSKDSATYYSNCFTYRGGQIRLAKQSEPLDIRWSRPLPEGAVPSQVTVSRNARGQYHISILVEDTISELEPTDRVVGLDAGITSLYTLSTGEKITNPRHERTDRERLAKACAGQEAEGVPEPGQGPTEGREDSWPDRRSAPRLSAHTLHSTGARKSSDRHRRSECAEHGEESVVVSGDLGCGVVRVPVDARVQGRLVRAPGGGDRPVLSVVEDLLGVRGNRRGDAAERAGVDVPLRRRPRPRCERCEEHFGRRTDGGSLRRRCETAPHIX

SEQ ID NO: 5799 - protein, 117 aa, unknown
  TnpB Polypeptide
MPDEIKRVRVVRRADGYFAQFCINGSRTEGSIPTGKAIGIDVGLNHFYTDSDGSTVPNPRHLRKSEKALKRLQKRVSRKKKGSSNRKKAINKLGRKHLRVSRQPIRLRERGNSKTSP

SEQ ID NO: 5800 - protein, 417 aa, unknown
  TnpB Polypeptide
MGYRSADTNCIVRLLPLRNLNRQQEALCESLRREAGRCWSDMLQAHIESRGGKWLSSVELGKRFKRQYALHSQTIQALAQKLEANVNAARKLCQGNSDIRYPYRLKRYQTIVWKRSAIHRTEAGRLSLSNGKHVPALALSISDEYLGADICKVELTWRVDHYEVCLTIDTGLENPPMKENGQMAGADLGEVNISAIATEAGDSLVVSGRALRSVKRLRNKRHAELSSLIARCKPGSKRHRKLIKSKARASTKLHRQQRDILHKASRQAVEFCQTNDVRKIAIGDVRDIQDGIALGRMANQKISQWPHGQFVQYLIYKARQYGMEVEQIPEDFSTRTCSCCGEIMKYAPRGRIYTCPGCGAVIHRDVNGASNICSRARYGSYGKVQAQTIMYLRPLRRSRAFDTGQRCLESSPGTPAL

SEQ ID NO: 5801 - protein, 384 aa, Cyanobacteria sp.
MIIRRSYYFQLKANASQRTQLSRFAGCCRLVWNKGLELQKKRLDQQKRPLTYAEECAELIGWKKEIPFLQEIHSQPLQQTLKNLDRAMKDGLSNDRGFPKFKKKGQKDSFRYPQGTKLDDDKIYLPKIGWVKFRKSREIEGTVKNVTVSKNAGKWYISIQVEMEVPEPIHPATSAVGIDLGVTKFATLSDGTVLESINSGKKLKKKLARQQRTLSRRTKFSANWKEQKAKIQKTHSKIANVRNDYLHKASSEMSKNHALIILEDLKVRSMTKSAKGTEDAPSKNVAAKSGLNRSILDQGWYEFKRQLKYKQEWAGGMMILVNPKHTSQTCSMCSHTAAENRQSQSQFQCVNCGYLDNADLNAAKNILAAGRAALACGDIGRNAA

SEQ ID NO: 5802 - protein, 388 aa, unknown
  TnpB Polypeptide
MKKRKKNRRAYKEKIRNHPQNMRLGNMFDDLEDVHNHFLAVEKRYYRIYGKYAGRYRLQPHLTKLLGRTKQHWAWIPRDTLDAVIIRIHIEYERFFDWIKKGKRGRRIGPPKFKRRGKLRSAKFQTGYKLTEGVVRLSFKEWDASKEKFAFVRRNILYHHHRDWEGNVCYIQIGRDAAGEYWLYVVTDSVSKEVLSATGESVGIDFGMETYLTLNTGEKIYHPQPLKHSLNQLRKLNKAISRKVRGSGNWWRAVRELAQLHVKIANQRRDWHYKRATDLCRRFDTIVTETLNLDGMKRLWGRKVSDLAFYQFVEILKFKCLKHNREFLQVGQWTPTTKPCSDCGHRNENLSLSDRQWTCLECGSHHDRDINAAINILRAALGPSVEQM

SEQ ID NO: 5803 - protein, 374 aa, unknown
  TnpB Polypeptide
MNKAIKYRLYPTTEQEMMFAKTFGCCRKVYNLMLADKISCYQETKSFGKQTPAMYKTEYPFLKEVDSLALANVQLHLQSAMKSCFDKSRKRQNGFPKFKSAKHSRKSYTTNNQKGTVAILADKYIRLPKIGLVKAVIHRKPDDDWNLKSATITQDSDGKFYASILFEYDKAITSVVISNNIIGLDHKSDALYMDSNGYSPSGHKYYRRNQERMAHAQRKLKHKTVGSNNYRKQQRRIAKIQKHTSNQRLDFLHKESTKIANLYDLVCVESLDMKAMANKGFGNGKATLDNGYGMFLNMLEYKLADRGKYFIKIDKWYPSSQICSYCGRQKKLSLADRMYKCDCGLSINRDQNAAINIGRLGTSQTKRLWTLCKT

SEQ ID NO: 5804 - protein, 556 aa, unknown
  TnpB Polypeptide
MIIDPTKNKKDAAFCQYFKTNTADSKCMYNTANFYIRNTMTGLKKSPEERTHLETEVLHYVFTGIQKANEVIGQKNMKKKFAELKLAEVGGMNSAVIAFSIVSQEPFQYPTEKKWFLSYGTLDAIFKFTDNPVYRRMSSQVNQNAIRKAVAAWQGYFESLKAYRKNPAGFTGKPKIPGYKQDEEYTAWFSKQVAKLKEENDRCYIQFVNNPDRFEIGKASLYSDLKYVKTEVKAMYGKYYILITFDDKIAEAEAPENPKRILGLDPGVNNFLGVANNFGGVPFVMNGRAVKSANQRFNKKRANLISSVTKGGDSKSSVKYSKQLNILSQRRESFLRDYFYKCAWYICRYAKAADIDVIVMGHNDGQKQEIDLKDNVNQNFVSIPYTKFITILKTVASKCGIAVVIREESYTSQASLLDMDDIPTYKKGKNKKYAFSGKRIHRGLYRSKNGTLLNADINGAANILRKEYPNAFDGIKDFTYLCITTISISYKDLYKNAKACAGRPKQYKYHKSGRYTVVRHMERSHKKCEYRKLWGKGKFGWRPDKNKQDTQQEKAA

SEQ ID NO: 5805 - protein, 560 aa, unknown
  TnpB Polypeptide
MRTWKMIINPKKNKQDAAFCQYFKTNTADFKCMYNVANFYIRNTMTGLKKSPEERTHLETEVLHYVFTGIQKANEVIGQKRMKKKFEDLKLAQVGGMNCAVIAYSLAIQEPFQYPTAKKWFLSYNTLDAIFKFTGHPVYKRMNSQVNQNAIRKVIAAWEGYFESLKQYKTNTAGCTGKPKMPGYKNTEEFTAWFSKQAAKLKEENEKFYLQFVNQKEWFCIGKASLYKGMQYVKTEIKPVYGRYYLLVTFDDKVKATEPPVSPERILGLDPGVDNFLGVANNFGAVPFVIKGGAIKSVNQRFNKRRSVLMSALTKGSDSQHSVKYSEQLNTLSKKRDSFMRDYFYKCAWYICRYAQSAGVEVIVIGHNEGQKQEITLGDKNNQHFVTIPYLKFIKILKAVAAKCSIAVVVREESYTSRASLLDMDDIPTYKQGDDANYQFSGKRIHRGLYRSGNGIVMNADINGASNILRKEYPHAFDNVKDFTYLYETTLAIEYKDLYNNAKTISKRPDGYHYHKAGFGSKVCHKYRKQSRMEYRKLFGKSKFVWRAGKNDKTQVEPAA

SEQ ID NO: 5806 - protein, 375 aa, unknown
  TnpB Polypeptide
MIKSVKIRLLPTKEQEELMFKTIGCSRFAYNWALNKANEMYKNGDKYSMANIRKEFTQLKKQEEFKWLNEVSNTSMVESMRNLDTAFKRFFKKNGGYPKFKSKRRSRLSFYVRYDALRFNGEMCNIEKVGKVKYKTNYNIPTDCKYTNPYCSFDGKYWYLTFGYEHDENQVVLNKDLSVGIDLGVKDLAITNVHDKPFKNINKTRKVKQLKKRLKRLQRQVSRKYEANKQGNKFVKTNNIIKLEHEIKLIHRKLTNIRQNHTHQTTSSIIKMKPYRVVMEDLNVSGMMKNKHLAKAIQEQTFYEFIRQVKYKCEFNGIEFIQVDRFYPSSKTCSCCGSIKHDLKLSDRVFVCNECGFEIDRDKNASINLANYKLI

SEQ ID NO: 5807 - protein, 420 aa, Microcoleus sp.
MLLTQTNRLHLSVEETQTLRTLCRLSKNLYNVGLYTVRQYFFTERKHLRYESTYHHCKTNENYKLLATDIGQQTLKVVDRAFQSFFGLLEARRTGTFTSFVSIPRYLDKEGYLALIIPIRARQVFKEWKFPIPLSRDFKRQIGGSVTLEIPERLREKRIKEIRIYPKYNACLFDVTYIYESDDTPAQVNPEHMMGIDLGMDNLAACITTKQTSFVIDGKRLKSVNQWFNKRKSQLQSEKDKQGIKGLTEQQFRITDRRNRRVRDYLNKAARHIINHCIDQGIGKVVVGYNPGMKQDSNMGTRNNQNFVQVPIFTLRLKLRSLCERYGITFVEQEESYTSKSSFVDGDPIPVYNADNPVEFKGSGKRINRGLYRTKKGWLINADINGAANILKKHLESSQDKPRFGLGRGCLAQPLRVKIS

SEQ ID NO: 5808 - protein, 341 aa, unknown
  TnpB Polypeptide
MKRLCAMQEALRDLEKAYKNFFRRGDLAKAGKWKGKLGFPKPKKKSKAIGSFRLTGSIKVFSNVVKLPRLGRLRIHEHDFIPTDAKVLSATVSEQAGRWFVSIQVEEEQEKPVPTATTAIGVDLGIKMLATCSDGMIFANPRALKHAQKRLRRLERQKSRRKKGGKNRKKTCGTLAKQHARVANIRKDAAHKLTSYLCKTHALVGIEDLHVAGMLKNHCLAQALSDSNFGEIRRQLQYKSTWHGVHLVVIDRFCPSSKNCSACGWIDEDQDLGDRTFICQECGLMLDRDLNAAINILHEALRTTGSFSGSDAYGQDSSGLVSISGETALEEVGTNLHIGMS

SEQ ID NO: 5809 - protein, 406 aa, unknown
  TnpB Polypeptide
MRISRAHRFELKPNNVQRTHFAKCAGVARFAWNWALDERQRLYRERQGNERFTNAIEQHRRLNVLKKTDFPWMYEVSKCIPQEALRNLDNAYGLCRMAKKAGRKARLPKFKKKGRARDAFAFTTGAIRAEGTHVVLPRMGRVRIKEPAVLDGRILRATVTRDADRWFVSFTVEQEVPDPQPPAGSAVGVDLGVSRLAALSDGCVFENPKPLQSRLRKLRGLAKELHRRNKGSNNRKKSADRLAKAYWRIGNIRRDALHKATTHLAKNHGEIIIEGLNVQGMAGSRYLARAISDVGFGEFRRQLEYKCRWYGSRLTVAPRFYPSTKRCSLCGHIKKEMPLSERTYKCESCGLVLDRDLNAALNLVAVSSTETLNACGDLASTVPARVLRAGPLKQEVNAAILHGIGG

SEQ ID NO: 5810 - protein, 322 aa, Moorea sp.
MQLGYVYKLRPNHQQQATMNRWLDMLLAQYNYLLRDRNESYDQVRSPRLGNYCDFKSKGEACPLTCSVNKSHSIGYPWKKSQKNPRRNAYEAQSSSLPTLKKERPWYKTINSTVLQQTLRQLDVAFSKFFKGETEHPKPKRRSRFRSFKYAPGQVKLDGNQIYLPGIGWMRFHKSRPIPDGFTVKSVTVRRKARGWFVSLQIEDKSVPDPSVKTKGEIDASRVKGCDLGIKKLVSISNGEIISNPANDKKSKRQARRLRLRQRSASRKKKGSKNRKKSFSRVASLHDRITDKRRAYHWETAKTLTNEADALIFEDLNMCGSF

SEQ ID NO: 5811 - protein, 393 aa, unknown
  TnpB Polypeptide
VRTKKLKLDYAKQLDAINAATASVWGECLELKQMWDYAHGYRTGAKLDMPCELWMDKHLSKSQHLHSQSIQEVRSRYFKNRKGYRELRKNGHIKAKPPHKDKKYQTTTWKKSAIHFKNGLLILSNGKSGAPLKVRLPENFDIKYAMTHIAIVELVYDNGQYFLHFVYNVGKPVKSKAKGIAGVDIGEIHPIVCYDGTYTTIFNGRYIRSLYRLRNKVIASFGTKIDRCKRGSKRHKALIRRKWKRIRQIDNQITDGLHKHTTDFVKMCQERNIGTIVIGDLSGIRNRIDYGKRVNQKLHQWAFGKVTELITYKAKALGIKVEVINEAYTSQTCPKCGNRKKSDNREFKCKCGFTYHRDGVGAINIRQKYIGRLGLPIRKAILPPTGVRLEVRK

SEQ ID NO: 5812 - protein, 361 aa, Enterococcus sp.
  misc_feature (152)..(201): Xaa can be any naturally occurring amino acid
MEQLKAYKFRIYPTEEQEIFFAKSFGCVRKVYNLMLDDRKKAYEEVKNDSSKKMTFPTPAKYKKEFPFLKEIDSLALANAQLNLDKAYKNFFRDKSVGFPRFKSKKNPVQSYTTNNQNGTVALIDSKFIKVPKLKSLVRIKLHRQPKGIIKXXXXXXXXXXXXXXXXXXXXXXXXXXXXXXXXXXXXXXXXXXXXXXXXXXRRALLAKNKGTNLFEAKNYQKQKRKVARLHEKVMNQRTDFLNKLSTEMIKNHDIICIEDLNTKGMLRNHKLAKSISDVSWSKFVTKLQYKADWYGRKIIKVDKWFPSSQICSECGHKDGKKSLEIREWTCPVCHTHHDRDINASINILTEGLRLHSMGLA

SEQ ID NO: 5813 - protein, 420 aa, Haloarcula sp.
VSNQVVTRTLKASLINHSQVSDDLDSHGFAASKLWNIGRWTISRVWDAIGHIPGADELCSYLKNHEHYADLHSQSSQRVFQELGEAFVSWYKQDDPDANPPGYRKHGDEHPRSTVTWKNQGFKIDTNYNRVRLSKGTNMKESRYAADYILCEYTIQTDEQTLEDVESVQTVRSVWTGEQWELHFVCEIQIDHPESPGEKTAGIDLGICNTAALSVGDETLLYPGNALKEDAHYFRQKEYDTEGENGPSDHAKWARQKKSRRQAHFLHALSRDIVEQCAERDVGRIAVGHPKNIRDDSDWGRHGNKRLHDWAFETLLSHIEYKAEELGISVERVDEAALKTSQTCCECGKEADSNRVERGLYICEGCDLVANSDLNAAENMRATVTPSPSQDRSNGCLAQPSVRLFDKSTGRVRPQEQVVS

SEQ ID NO: 5814 - protein, 467 aa, Clostridia sp.
MEENGRSLALGYLTLQLKIHRPSAVKRRVMEQAIERYAQALNDLTARRWEALSACIAAGDASRLGGLADAQAMGALNRLGVQPFKDSIKAEFTAFARACMARGKPLGEFRPLKKRSVYFGRKSDSRDYCLLTDGQGRFYVKMTLLNAGEALTGYPAGQRKELRCILPGLPPCGGLARSKRRFVICPLSFGRGTHELLKELIDDPGRLGTARLTERGGEFYLYVSVVAPAAKATAETGRFLGVARGEQGVGWSLWSRSNDSVPAFADGEFAWEGRYLTAKCILGLAEEHGARIVYEAKGCRDDGASALFGEQALPWRDYARLCETLTYKAEWRGLAPPVGVSANGIHFCCPACGSRTKHSLQREEVFLCIHCGTATEVRCAASRSLARRLDYYGGKKLVFSARKLPGGIAVRQELLGFSCTAVDEAGFLLELEGFLREGKKAGRKAASAAAKLRAAPSLKDAVLLEFE

SEQ ID NO: 5815 - protein, 356 aa, unknown
  TnpB Polypeptide
MICTLKIKLVPDEKQFNSLLATMKRFNQACNHISKVAFNLGTFSKFKLQKACYYDVREQFGLSAQMVVRAIGKVSESYKADKKTLHTFKDTGAMVYDERILSFNGMEYASLLTLDGRIKVPIVLGKYHHGLLYGNRVRGQADLILQDGVFYLMLAVEVPEAPPVDSNDFLGIDVGIANLATDSTGENFSGSAVNAVRNRNAKLRAKLQSKGTKSAKRLLKKRSKKEQRFVRNTNHVISKQIVKKAKALGVGIALEDLSGIRLRTEKTVRKSQRSRQSSWAFYQLRQFISYKAKIAGVPIALIDPRNTSRTCVVCGHVEKNNRKTRDNFCCLSCGYAAPADNVAAVNISRKAMCQLA

SEQ ID NO: 5816 - protein, 370 aa, Chloroflexi sp.
MKLTAQLKLLPTPEQADALRRTLEAANAACDTISASAWATTTFRQFALHTLVYHDIREAFGLAAQLTVRCIAKVADAYKLDKDRQRTFAPLGSVAYDDRILAVYPASSTISIWTLDGRQVIPCVCGNRQRALLASQKGESDLAYRDGNWYLFATCDAAEAPQQPATEALGVDLGVTNIAVDSDGETHSGKAIKNVRYRHRRLRTKLQRKGTLGSRRRLRKLAGQERRFATWVNHNLSKKIVTKAERTKRAIALEDLTHIRTRIRARRSQRVTLHSWAFFQLRAFVVYKAALVGVAIHLVDSRNTSRTCPKCGCIAKANRKTQASFVCTRCGFAGHADVIAAGNISGRAPVNVPYCSEAGSPVAPEQSPRL

SEQ ID NO: 5817 - protein, 356 aa, unknown
  TnpB Polypeptide
MKEQILSYEITLPQRIYPYLDGFFSVFKSQVNFYIPKLWNEKDFKLLSQKGSAVRILKKEFSIPEGLPSRVFRNVLELTGQIIRSQIERREVFEKLLRGVERVLALDLSPSEKRLSAMVLVEGEKVSKPLFFKTQMLRKIERLHFEVSALERKIDNIHSSIEKTVYKQEKERLWERLRHLFAEQKRKQRKIKQIRKQILETFTNFVVAHAKVYDCQAIVIEDLSFKEVPDWKDKRALRRFSQWFYSRFASKLEEKAKLYSLKVIKVNPAYTSRVCHRCGKEGKVEGLVFKCFCGAYDRDYNGSVNIAFRLTKPKAQRVEGIPGSIPSRLVQVEWKALLSFISFSKLLKWVYSDKYD

SEQ ID NO: 5818 - protein, 373 aa, Thioalkalivibrio sp.
MVKRAYKYRFYPTPEQEVLLARTFGCVRLVYNTVLRYRTDAFFERQEKIAYTEASAYLTAMKKAEETAFLNEVSSVPLQQCLRHQQTAFKNFFAGRARYPNFKKKRARQSAEFTRSAFQYREGQLFLAKCREPLNIRWSRTLPSEPTSINISMDSAGRYFVSCLCEFNPEKRPVTPKMVGIDLGLKDMFVTSDGHRTGNPRHTAKYAARLALAQRRLSRKKLGSKNRAKARQKVARLHAKIADCRMDRLHKQSRQIVNENQVICVESLKVKNMLRNPHLAKAISDAGWGEFVRQLAYKAEWAGRQLVAIDPWYPSSKRCSHCGHVVDALPLSVRTWTCPECCTEHDRDVNAAVNIKAAGLAVRALGENVSPAP

SEQ ID NO: 5819 - protein, 293 aa, unknown
  TnpB Polypeptide
VFSYDPVLQKLKYRSLNDWAHTIVFPGVRFPYGQDKISVFLAERRGAVAWEICDMGNAWQVTCIIEDTPEHIKNDHFGTGCVAFDMNYDNIAMAELDASGNLLHHKILRFDLENKTSGQVEQLLSRALEDVFRYAANKRKPVVMENIRFLQRKKFYDWNTKRTRRISMFACNQMALLAASKSNKYCIEVVQVNPAYTSKTGLLKYKKRYGLSTHEAAAFVIGRRGMGFTDKVPDSWKRHLKPEHRTKPRYEQWKTLYAVLTKMNYRDLNQLLYPGLQPALNFMQPINYSHSDY

SEQ ID NO: 5820 - protein, 649 aa, unknown
  TnpB Polypeptide
MKPREKIKEQIEENDEQDPKFVWYTDDLKQYNQFINYPSQNDVRCNLEYEFNHHDNFFTHKHFNFPEANPNDLNETLNYNAITSIDHLKVEQQLIKKYNKSVLKLNNNTKITDTQKQIRLKTLLTRHNKAVNNIGKELRSRTCSIQFDTKQSNIILQWIEECLKVYNECIKLFYENRKNNLKMNMKMNMKMKYLKKTIFNRLYKINKSYFNSSIKIDSKYISKNNTHLIAFGKAYKSIKNLSHEIDANIKYSFIIINNANYRQNISLLENCLGINHFLCKLDENDFEKIDICIQLYETHKFMTSETIVNLEKKKNCPYDTLSDELRSFCSNLKSCFTNFKNNGIPFTMKEKKMKKSYSLMIPIISITKKGIFPTYLGETNLNIDVKDVKGDSRLIYDKRENKFSLSYPIYVDVKPKEDKQKTCALDPGESIFQTYYSLDGYGTIGENVRKNILEYEYKIRKLQRIISQGINEFGEKLKNKKSLMKKIRKLYTKIKNLVKELHNQAAIYLCKNFDTILIPEFATQKMLCDKKEIKKKYKETIQDYLERKDKEGLKKYNRQTRLNSRVKFCLNMLSHYRFRQHLICKANEYGCRVLVVTEEYTSQLCTKCGMLSKKYKEREKICTHCGDKIHRDYNGSRNILLKNILEIYS

SEQ ID NO: 5821 - protein, 286 aa, unknown
  TnpB Polypeptide
MIKSFKYRLNPTKSQIVQMEKTFGCCRYIYNWALDLKIKAYQESKKSLSAVDLCKELTLLKQKEDHLWLKEVSNESLQQSIRCLDSAFTKFFREHAGFPKFKSKHRDKSTFKNINSVKIDFENNKIKIPILGWVKFYKNRSFEGKIGTITVSKSSTGKYYVSVLVEDGNSLPEKNPIVPSTSVGIDVGLKDFAVLSNGQVFQNPKYLEKFSKRLACLQRRLSRKKKGSNRYKKAKLTVAICHERIKNRRQDFLHKVSKRIISENQTVIIEDLNVEGYLYGNVGLYF

SEQ ID NO: 5822 - protein, 182 aa, unknown
  TnpB Polypeptide
LKKFLVSSDGLDIEAPMFFKQNAECIKSANRKLSRKKIGSNNRKRAKLELARLHKKVANQRKDYHFKLSRSICEQYAVICIEDLNIKAMQRIWGRKISDLGHSQFVNILKYQASKLGTSVVEIPRFYPSSKRCSCCGYVLDELQLSVRTWVCPACGIKHDRDRNAANNILKVGTSTLLGEVV

SEQ ID NO: 5823 - protein, 159 aa, Okeania sp.
ISLTIEYKTVPVEVAEIQPTKENSKGIDLGLWHYAVTSDGEFVEVPKFLRFSEHRLSKLQVRLAKKQKRSKPWQIFKGKIAKLHQLIARQRLDWQFKLAYYLFSDCQVIFVEDLKIASLVRRCKAKLGDNGQFLPNGQSAKSGLNKSLQDATTINFLIF

SEQ ID NO: 5824 - protein, 435 aa, unknown
  TnpB Polypeptide
MIQLCRLAYKYKLRPTGKQERVMVRFGGCGRFLWNALLAEQNEEYREYMEEIESRLTWGEAKTADEAAELTVKPTLAKFTFTNRLKSLKAGHPFLNECHSQVLQQKSLDLYQAFRNSFERLKKHEAPGFPVFKRKGRSSDSFRYPQGFKLDERNSRVFLPKIGWVRYRNSRHLPENSRPKNLTVSHSADGWYMSVQFEFANTPKVTAPDLHAASGIDMGVVWFLTLSDGTHQESLTRFLAPAEHKITLLQKKISRAQKGSHNRERLIRKLSLLHKHKADLRHDILHKLSSKLVKNHDLICCEDLQIKNMTRSAKGTALNPGRSVKAKSGLNRAISNEAWGEFLRELEYKLTLKGGLLIRVSPKNTSRKCPVCGHVSKDNRQTQDTFCCVKCGYTENADVNAARNILRAGLARLASQVNHIGGQQEEPAEDLPRDR

SEQ ID NO: 5825 - protein, 455 aa, unknown
  TnpB Polypeptide
MKVTRTLYTDTPTELAGVCKTMGFVRADIWRRFGALGNVGMSAADMRLAVTSGNYYAGLFVDGTIRAETTKDVINDLLAYKAAALVKVRRAVAAHTNDVVERKRLYTLLRKDEWLQDSFLHRQVRKHFRHGVSHTANQFVVRSDKHTSEVVNGKLVITIRVARKYGQDIRLVTTTSGKNVSLTGSNLRIIVKDGFTEVHYATEKGDGRVCGDQVVGVDKGYTEAFTDSDGQTYGPTFGAVQMQYSDKTAATNQSRNKLHALEKKHRSAGRINKADRIKMCNLGRKKIEARRDKAKKQLRSIAFESAHALVDKAAVVVSEDLTSPIVKKQQWKRVNRRMSSWAKGTLAEALDSVCTQRRSKHVLVNAAYTSQMDSTNGLLQGKRVGDKFYRLNGDVLQADYNAALNVRARLDDSEITRFTPYRVVRQILLSRSPAQLSVKRLELGAQARQPSADKS

SEQ ID NO: 5826 - protein, 452 aa, unknown
  TnpB Polypeptide
MAVSQAYRFALDPSPAQERCLRSHAGAARFAWNWGLARCKERYEAERKWYSSVDLHRLWNAAKKADPGLAWWAENSKCVYQESFRDLERGLKDFVRSRKGERKGKRLGFPRFKKRGRCRDSFRFSTGAIRCAGRTVTLPRLGAIRTYESTRKLARRVENGTARIVSATVSRTAQRWFVSFTVVVDRAIAPRHPWPGSAIGVDLGVRTLVTGVDDRGSVIEICGPKPLSSSLRRLRRASRAHSRTQDGSENRRKSAGRLARIHARVAYVRADALHKATSELSVRYETVVAEDLNVAGMTRSRRLARAVADQGFGQARRMLAYKTEWNGGRLILADRWYPSSKLCSGCGTVKAKLALSERVFTCEACGLRTDRDVNAARNLLDLAASGAESINACGGTIRPGTAGHVPVNQEPGTAHAGQTGTASGQPLAAGRVSAHAHCPATALPRLAGHPLL

SEQ ID NO: 5827 - protein, 409 aa, unknown
  TnpB Polypeptide
MNPCEDDDLVKCFGMVKNKAFCFKLEPNKEQKVLVDKTLGCTRFIYNHFLALKKNTYKETSKNISYGECSKALTALKKEYSWLREPDSIALQQTLRHLDIAFQNFFQNESNGYPAFKSRHKSEASYTTLVVNKNIQIKDNKIRLPKLGWVKMRMHRYVPDTHTVKSVTIRRTATMKYHISILTEYTDINMPTVPFPETTAGLDFAMNGLFVDSNGDSGSYPRYYRESQEKLAKEQRKLSHMVKGSNNYKRQKQKIAKLYEKIRNQRKDYLHKKTFELAEKYTIICIEDLNMKDMSKSLHLGKGVHDNSWGTFTNLLTYKLEDRGKYLIKINKWYPSSKTCSSCGNIKEDLELSDRKYICYSCGHVMDRDENSAINIRKKGIDVFFKTKIPITLVDNRGTHGDSSLKLSS

SEQ ID NO: 5828 - protein, 367 aa, unknown
  TnpB Polypeptide
VLKAYKYRIYPSNEQKIQIAKTFGCCRFVYNQTLSYRKEAYEKEKKTVSKTDCNNFCNRELKKEYEWLKEVDKFALTNAIYNMDAAYQKFFKEHAGYPKFKSKHDNHKSYTTNFTNGNIKADFGHGKIKLPKLKQVKAKLHREFEGQIKSATVSQVPSGKYYVSILVETEHEKLQHTSHNTGLDLGIKDLCITSDGKKYENPKIIRKYEKKLAKLQRKLAHKEKRSQNYYKIRKKIALCHEKITNTRKNYLHKISHKIISENQVIVSENLQIRNMVKNHHLAKSISDVSWYELTRQLEYKAKWNGREYVRIDTFYASSQICSSCGYQNTNTKDLSVREWVCPVCRAKHDRDINAAKNILAEGLRQIA

SEQ ID NO: 5829 - protein, 404 aa, unknown
  TnpB Polypeptide
MLIVERHFNKGTPEMVRLCGLAKDLYNRTNYLMRQSWFSQRDVPGFRQMPSFTTLIDETKDLPCFQGFGNTKIAKQTIRRVLTDWSNFYKALRAFKRDPNKFDRYPRPPHYKDQLAQVIFYNETIKGGQSGRSLERLTATNGCFSIKSDRSYKQVVVTPKHFGFIIEVQYEAQDIPKPKLSRKKVCTIDLGLNNLAAVTLDQQRPILVNGRIVKSINQWYNKRPCKSRAKKRYFRLENYFHHTAKMIVELCVRNGIGTIIIGKNEGWKSGMNMGRKNNQKFQFVPHESLIGKIRYRAEMVGIDLILTEEAYTSKASFYDHDPLPRYGEDHPEFSGVRKHRGLYVSKDGFAVNADINASLNIGRKVIPEFLGIGDRSVAATPVIVNPLKGWSEKDHPVDGPNQEV

SEQ ID NO: 5830 - protein, 419 aa, unknown
  TnpB Polypeptide
MKIIRSSKCSLEFSTASKRQELKRVLSEYGRLCNIFIDLFWDDCPVKAELLAEIVNVPESWLSHRLRKTCAREAIDLIRSSKESIDAKREQLVHSIAVIEGRLEGLTPDTKKKRRLINDLHIKLKKKQMRHDMIQPRKPKHRGRTMSVSSTIADLQSTQDSSFDAWLHLSSIGDGIILDLPVNFHRHFKRLNDAGERLNSYVITPSSVQFAFEIETGLKREVQKIIGVDTGINALASLSTGEQLGTDIKAGIDRVKRCKRGSKGNTRAIRALRQRIDEVAKEVVGRTDLVVVEKLEKMGSCSKLRGRLSRSVRSDIGSWNWRHWLERIKMNCENDRVSFRSVSPFNTSVTCSTCGHVDVTSRNKEVFMCRSCGCTGNADINAAVNIVHRFVRGKYGSPFQHLNLDLHRLTPAGDSSRFK

SEQ ID NO: 5831 - protein, 197 aa, Nostoc sp.
MIENPKFLRVGEKVLKRSQRRVSRKVKGSKNRGKARQILGKRHLKISRQRKDHAVKLARCVVQSNDLIAYEDLRIKNMVKNHCLAKSINDASWYQFRVWVEYFGKVFLRVTVAVNPQYTSLECSSCGGIVKKTLSTRTHVCSCGCVMDRDENAARIILSRGLGTVGHTGTFALDASNAWGDETSTLVGENLQEQVMS

SEQ ID NO: 5832 - protein, 313 aa, unknown
  TnpB Polypeptide
  misc_feature (293)..(296): Xaa can be any naturally occurring amino acid
MPKKSNKEVLFGIQRQQLKHLTASEYRALRELCVLTKNMYNVALYNVRQYYFTEKKFLGYNSNYHLCKDNENYKILNSNSAQQIMKVVDRNFKSFFALIQMAIKGEYHYKDIKLPKYLPKDGFFNLIFGEFNTSNDKFAVPMSPAFKRLYGKVEINIPSNLKGKAIKEIRILPKNNARFFEIQWIYEIQELKENLDKNNTLAIDLGIDNLCTCTANNGKAFIIDGKKLKSINQWANKENARLQSIKDKQGIKGTTKAQRKLWNKRNNRVNDYLSKTVKIIIDYCLNNNIGTIXXXXEKLIWVKLIIKTLLIFQ

SEQ ID NO: 5833 - protein, 355 aa, Microcystis sp.
MASLMKKTEQYQALPAKVSQQVLRGLDKNWQSFFAASSEFKSHPDKFLGKPKIPSYKEPNKGRNLLVYTIQALSKVGLRQGLVKLSGTSIALPTRVAERIAEVRIVPKCDCYVIEVIYEKTEQFLAPNEKIAALDLGIDNLMAVTSNQPDFIPLLINGRPLKSLNQFYNQRRAKLQSLLKGNRQSSQKIHRLTRCRNQKVDDYLHQASRYLVNLLVEQEITTLVIGKNDGSKQEVNLGKVNNQKLVTIPHRRLIEMISYQCQLAGIKVIIQEESYTSVANFLNDDPLPVYGETTEKPVFSGKRIKRGLYRTDRGFLCQSDVIGSYNILRKAFPNAFNRYGIEGCVVHLRRINLSK

SEQ ID NO: 5834 - protein, 401 aa, Oscillochloris sp.
MTRTIQTTYRYRLTPTGAQETVLNQFAGARRWVWNWALDRKIAHYRQTGTTLSYHDLAGDLTHLKQQPETAWLREMDSQSLQQALRDLDSAYQQFFRRITRGEKRKGFPRFKSRKTDTPRFRIPQRVVLHAEAVSVPKIGMIRVVIHRPLEGVTKGATFTREPSGHWFVSIVTEQQVAPRTERPVQTHVGVDVGLKSLAVYSTGETIANPRWYRTQSRKLRRAQQAINRKVQGSHNRGKARVVVARLHQKIKNQRADFLHKLSTDLVRHYDLVSIEDLSVRGLAKTKLALSVLDAGWGMFRSMREYKADRNDSHVVAIGRFFASTKMCGACGGIHDITLAMREWDCLNPACGVHHDRDLNAARNSDHEGMRLFELRVAAGDAETQNACGDSVSPIGTVGTG

SEQ ID NO: 5835 - protein, 426 aa, Acrocarpospora sp.
VRLRYNYRLYPDASQRQALARLFGCVRVVWNDALAMRKAARKAGLPWIGGGDLQKICITAAKRTPEREWLGAVSAVPLQQSLRDLDVAYQNFFDSVSGKRKGRRMGLPVFKSRRDRRQSARFARNAFRLGGDGTLYLAKIGKVEVRWSRELPAAPSSVTVVQDAAGRFFASFVIEVDDAGQVLSEAEAEVGIDLGLTHYAVLSDGTKIANPRWLRRRAKRLARLQRALSRKRKGSKNREKARIAVARQHAKVGDARRDFLHQTSTSIIRENQTVAIEDLAVRGLARGRLAKSVNDASWGAFRTLLGGKAARYGRTLTTVDRWFPSSQLCPCCGWRNGKAPLQMREWDCPSCGEHHERDLAAALNILAEGIRLRAQATEASLAEGRQDKDMVAAGLADTRNDCGGRVRPGEAIPNLAPPATYDARAA

SEQ ID NO: 5836 - protein, 283 aa, Deinococcus sp.
MHLDLPLYRLPSAAVNAVLQESEALIPDVGSLEALLTRPCGWQWWSAVQDIASQPSRAGGVPTGPLQQTAQWQPGETYVTMNRDWITVTLAFDVHTTHMAGTHDTVIGVDVGQTPLAVALGDQFRSVLPGLPPLPAMPLGVPEAAMRLAQVAVYGAARQQWENLFALMLPRASLIAVEQLDFRGLQARFQQQCHDHGINDATLAWLPQLAREAGVQIARVEPAGTSRLCPICVRPGDRQGAILHCATHGALDAHDVAAHWIRRLGELQQLNKWQAKCTARRSR

SEQ ID NO: 5837 - protein, 554 aa, unknown
  TnpB Polypeptide
VRKINRAVKIRIYPNAEQRVQIEKTIGCSRFIYNYMLADKMEHYKKEKKMLRNTPASYKKEYPWLKEVDSLALANVQMHLESAFRKFFREPSVGFPRFKSKKSARKSYTTNVVNGNIFLEGKYLKLPKMAAVRIKLHRPISEKWKLKSVTVRREPSGKYFASLLFYCENQTAEKGPAEKFIGIDFAMQGMCVFSTNERAKYPMFYRHAEKKLAREQRKLSRCQKGSQNYKKQKKRVALCHEKIRNQRKDFQHKLSTSLAESYDAVCVEDLNLKGMAGGFHFGKGVHDNGYGLFLSMLEYKLEERGKYLIKVDRYFASSKICSVCGKKKEELSLSDRIYCCECGNRMDRDVNAAVNIMNEGKRIFAYEYTGYWKDVGTLKSYWEANMELIDIVPEFNLYEEFWKIYTKNDALPPQYLSDSAEVEKSIVGEGCDIYGGVYNSVISADVVIEEGAEVHDSIIMHGTRIRKGTKVYNAIIAENVEVGQDCEIGIGEYADSLLSQKIYNCELAVIGEGSSIPDGVKIGKNVAISGKTEITDYPDGKLPSGGYIIKAGEI

SEQ ID NO: 5838 - protein, 248 aa, Bacillus sp.
MKVEGNQLFIPKLGWVRFAKSREIEGRILSATIRRNPSGKYFISVLADVDVQPLPKVNKAVGVDLGLKDFAICSDGVVFENPKYLRKYEKQLIRWQRMLSKRAKGGSNWNKARIRVAQIHEKIANCRNDYLHKISTKLICENQTICLEDLQVSNMLKNQKLAKAISEVSWSMFRTMLEYKGQWYGRIVSVVGKTFASSQLCSVCGYQNKEVKNLNLRQWECPSCGTHHDRDINASKNILQEGLKLLNT

SEQ ID NO: 5839 - protein, 232 aa, unknown
  TnpB Polypeptide
MPGSGTPYSYARARTDQRSRSRRYRRTEKGGDLGLQQFLTLSEGSLPNYPRFLRREEEKIKRLQKVLSRAEKGSNNFRRLSFRIARLHLRVRRQRNDYQNKLIAELYKDNDVLVLEKLNVKGMIRNHSLAKSISDASFGRFVRKATFKADMLGKWFVPVDPWGTTQFCYNCLEWVPKDLVERQHICPNCGVDLPRDENSALLIRRLGLTWLGYAPGRGVKKKRPWSPGLYHP

SEQ ID NO: 5840 - protein, 559 aa, unknown
  TnpB Polypeptide
MLRTYKLKHSINQEKQKKILAILKEYRNTSVEISNRQWIHFYKNGKFNRDLKIDTIKSKLSKRYKQTAQYQVVSGLESYLGNRQNEFKDYLKNSNFDSDTKTKLYYINRYKKWFHSSIKMQGEEIDQDIIRLSRRIIKNIFKKNKKPNFKFCNMALDAKVMEITPNGIKKVHKSKKVKDENGEFVLNKSGNPKLKTYIEEREIKKSSFDYWIKLSSLEKGKKIYLPLTTNSYFEGINGEINSFIQINFQQDIDKINGNKSLSSLNRLDYSNYKIDVCLIKDIKKEKYEPKIEKIGLDLGLNNLFATNLGELYGRNFSKLLKEYDDIISLLAKNRQKQKIRTLSKKYKKLINKIKAYLKNEINRVINAIIRNNKPKEIIIESLNFTSPKLSKKLNRLISNFGKKIIEEKFKSIEEKYGITVTKVNPAYTSQTCSRCGYVDKKNRKGQETFICGFCAKEQNADINASKNILARSSGELKDIFTKKAFILDKTVKNFIERHLVVLLYIFKTKDLGKSSDYTLSKIKYNNNLCYNSLANTLTSNPYLTNYLNGNFLETLEVSR

SEQ ID NO: 5841 - protein, 389 aa, unknown
  TnpB Polypeptide
MVKKAYKYRLYPNKAQATLLDKHCGCVRLIYNHGLAEKIRHYEQTGESLSRYKIQSQLPVMKREDRPWLAEVNAQSLQASLINLDRAFMNFFRKKTKFPRFKKKTDKQSFQVPQRGKIDFENRKLIIPKFQEGIRCKMSRRFEGETKTFTVSKTTTGKYFVSVLVETPEEIPDKQPITEASTIGIDVGIKTFATLSTGEEIENPRLLKEELARLKVLKRRASKKKKGSINRRKAFKKVALHHERIAGRRNDFLHKLTHRLISENQAVAIEDLNIAGMMKNHCLAQAIADVSWSEFFRQLEYKAEWKGKNVLKVGRFEPSSKMCSCGVINTKLTLKDRTWTCTACGITHARDVLAAQNIKRFALLNDNLKNSGQGLTGELSEVRCCNDDR

SEQ ID NO: 5842 - protein, 304 aa, unknown
  TnpB Polypeptide
VRIHRGYRYELDPNNRQRTLLSKHAGCARFAYNWGLEQQIKLFYRKRSRFTNAIQQYRELIQLKRTQFIWLYEVSKCAPQEALRDLDKAFTNFWRGRKKGFKVGFPKFKKKGRHDSFRLYGTIRLFEKAVQLPRLGRLRLKEKPKLQGRIISATVSRKADRWFVSVCVERKIPAPSHVTGPRIGVDLGIKSLAFFSDGTKIENPQALVKKLQKLKRLSQQVSRKKKGSHNRRKVIIRLARLYWRISNIRMDVIHKLTTYLAKNHSQIVIENLCVKGLMKNKRLSRAIADVGFNEFRRQLEYKTK

SEQ ID NO: 5843 - protein, 353 aa, unknown
  TnpB Polypeptide
VATPSGFHCGSTQSNAILGPTCLTVSLSGGEFRLQQNRTNWVLHVTVEYEIEATEMPEDPTPVGFDIGESKLLMGCALTEQGTPKEPFLFDGSRARQLRKEMHTTLKRLQERDCAEWRRDERFDYYQNALADIVEKASRQAVEYARQFDSPVIVLEDLSYIREQLDSGTYMNLRLHGWAFARLTDRIEDKAADAGIPVRFVNPAYTSQTCHICGHIGRRGSQAEFRCTNGGCWVTEYQADINAAANIAGRLDPWGELALKPAGDDSPQDGLVVTLPQDTTRRVRNPDRRRLWRFSPETSSTRGFPCRKPRRRRAKPGCLRDVVSPVHGGRGCHSVASSSTACSSHSSISSVPK

SEQ ID NO: 5844 - protein, 333 aa, unknown
  TnpB Polypeptide
LKEHLFKNFGFSAKYLWIETGYKELEKLKPLNVQIVPYKSYGHISYKLVVVYEKEISEVTLQKDKVLAIDYGISNFATCVIERNPISYIIDGRGLKTLLRKKLKKIAKLQSKLDNLKNKGLQAVQVERKLHKLWKRVKNLIRDFAHKVSSLIKKLAVLNGVKTVVIGKVQESKNKKNNLPDFVNQPFKLLPHGKVTKYLTYKLKEVGVEVKLIDESYTSVADSCDRKAGVTKESKGNGRRIKRGLFLSPIKGLINADVNGARNILRKFKKKWFDLVTRLKRVVKVRIYKLSEGISESLLYAGIGVEGGVNPPRGIRIRITCQTPSEAPSLRAE

SEQ ID NO: 5845 - protein, 335 aa, Moorea sp.
VAIGQGRAKYPRFKSYHHRQSIQYPQKVKQVGDYLKFPGKLGVVKAVIHRPLDGTIKTVTVSKDPSGKYYASVLMEYESDDPKPSTDGKVIGIDLGIKDFAITYDGEKTSKFGNPKHLAKYEKKLAKKQRITVRKKKGSSGSRKARKIVAKVYERIGNVRQDYLHKLSSKIVDQNQVVVVENLNVKGMLCATRTLRERNHKLAKAISDLSWGTFVNFLSYKCEKEGKVLVEIDRWFPSSKTCSNCHYRIKELPLDVRTWTCPSCGTHHDRDGNAAKNMFSRRYQNAILLWNGGGQRQWRRSKTKTWTPVQVEAFFRETGSPGLNEVGRGSSLIFV

SEQ ID NO: 5846 - protein, 548 aa, Streptomyces sp.
MKGSSAVAGVDEMRAFRAPFVVPAPRDTSVRTRLRVSERDAAVLSEVGALLGSLASRDLAVRSRQGAAPGTGTWADRKRALTVASSARWAGSITKATHDQWALARRGQAAEMAWLRAEIARIAARLARPLGAKSEKRAALPRGYADRTEWHAKSRRLQALRIRLSTVTDDWRSGRVRVVRGGGRLARLRHRLDEANMTREEQGRRWRAARMFLAADGESGKRYGNETIRVTEAGRVSIRLPAALAHLANAPHGRYLLATTVTFDHRAEEWCDRITADRAVAYRIHHDVIRGRWYLTAAWQRAVVPTPSLRAALTRGVVAVDMNEDHLAAWYVDVHGNPVGEPRRFPYELSGRASHRDAQIRHALTRLIHYARRCGAASIAVEDLDFADAGTREKHGRAKRFRRLVSRFPTARLRKRLVAMAAEQNIAVVAVDPAYTSQWGAQHWQKPLTTRTRPTTRHDAAALAIGRRALGHAIRRRKAPPGIHRSDGYRHRTFQADAETERREGPGPRHPGPQTRSVTPGGGAKAGNQRAQHHSGHAAGHGVLPLGP

SEQ ID NO: 5847 - protein, 298 aa, Lentibacillus sp.
MSVHKAYNFRIHPTKKQTELINKTFGCSRFVFNRFLAEWNDTYQETGKGLTYHACSSGLPFLKNEYEWLKEVDSIALQSSLKNLADAFSRFFKKQTKAPRFKSKKNNVQSYKTKYTNGNIAVVGNKIKLPKLGLVRFAKSRDVRGRIINVTIRRNASGKYFVSILAETEVSERPKTHTSIGIDLGIEAFAILSDGQKIDNNKFTAKMEKKLKREQKKLARRALNAKKNGINLFEAKNYQKQKRKVARLHEKVMNQREDFLNKLSTITRRQAKNATSCGNACMTNILLAPTTISSVSKT

SEQ ID NO: 5848 - protein, 358 aa, Lentibacillus sp.
MAQTITVKIKLLPSKEQAAILQSMSQTYIRTINTLVSEMVAEKKSTKKSSKDVHVSLPSAVKNQAINDAKSVFKKAKKNKYKNVPELKKPVCIWNNQNYSFNHTHISMPIVVNGKVSKTPIRALLVDKDNRTLELLTHKLGALRITKKANKWIAQISITIPTVQETETKVMGVDLGLKVPAVAVTEDEKVCFFGNGRKNRYKRRKFQSKRRELGKRKKLIAIRNLKDKEQRWMQDQDHKVSRSIVNFAKKNKVSVIRIEQLANIRQTTRTSRKNEKNLHTWSFYRLSQFIEYKANLEGIKVEYVNPAYTSQRCPKCFEKNKTQDRKYKCKCGFKRHRDLIGAMNIRYAPVIDGKSQSA

SEQ ID NO: 5849 - protein, 542 aa, Streptomyces sp.
MGGLRTLAAPFVAPGPSAVAVRTRLKQLTPADEEVLRQVGAHLGSLASRDLKARCRDALDHDGQAWAVRKRELTPVSSSRWAGAITKASHDQWALARRGQLAHIQNLEAGISTIRHRLSLPLGDKGSKRAPGGYRSRREWHAKTRRLHVLQDRLEQARADHKLGIVHVVRGGKRLARTRHHLCAAQLTEADWRRQWQAARWFVQADGESGKRFGNETLRVSPDGEISIKLPAPLKELTNAPQGRYVLAGRVSFAHRGPEWADRAEANRAIAYRIHYDVQRGRWYLTASWQIPVSPTIPMAAALAHGVIGVDMNADHLAAWRLDMHGNPIGAPRRFFYDLSGSAGHRDAQVRHALSRLLHWAKSCGVKAVAVEDLDFAAEKTREKHGRKRRFRQLISGMPTGRLRARLASMADQTGISVIAVDPAYTSKWGAQHWQKPLTGKNRKTTRHDAASIAIGRRAQGHPIRRRTTPPPAHQSDVQGHRTVQAGPEAFGREETRPRIPGPRTRCVSPDAARTRATRTPKTVRDARSDLVWVQDSLLLTD

SEQ ID NO: 5850 - protein, 418 aa, Planktothrix sp.
VPHKAVQVRLYPTALQEALLAQTFGCSRWWWNYALNKSIQVYQDTGKGLGQVALNALLPKLKKAEDTIWLADCYSQVLQATTLNLTTAYKNFFDKRAGFPKFKSKHGKQSIQYPQNVKIVDGNVKLPGNIGIVKAKIHRPIAGKIKTVTVSKTPSGKYLASILTEIEGENPTISEGKIYGIDLGIKHFAVVTDGENVSKYDNPKHLAKHEKNLKRKQKKLARKEKGSKSRNKYRQVIASLYERVSNSRQDFLHKLSHKLVSDSQAVIVENLHVKGMVRNHNLAKAISDCGWGTFTNFLAYKLERKGGKLVEIDRWFPSSKLCSNCFYQVSQMPLDVREWTCPNCGTDHDRDGNAAINIRAEGIRMLALSAVEMLKTDGAAVSAVGGEVRPKGGCKSVLRHSPVSTEADTVLGTPSQCG

SEQ ID NO: 5851 - protein, 504 aa, Planktothrix sp.
VIKLILSYKYKLRHNNQQSQKLSGWLDLLRATYNWCLRDRIDGWHQQFICGDYCDLKTQIEITPLTCSLVKGTQLANPWKDGGGKAKKEGEKDKSPKRTAVLMQDANLQELKDARPWYKEIDIGVLQLIPARVNESFNKFFKGAGFPRFKRRHDFKSFSYKPGRIKIKGNKIYLPKIGWMRFYNSRPIANGFEIKTVTVRQKADSWYVSVRIENQTVPDFPVIPDSEIKTIIGGDMGLGKLVYLSDGSAIENPRFATNKKTKRLMKIRQRRVSRKQKGSKNRSKAQLRVSKLHNRIQQRRESYQWDVANRIVRKADAVAVEDLQVKNMMKRCKPVKSESGRFLSNGQSAKRGLNRSIADAGWYNLTQKLEYLAVKSGKKLYKVNPKYTSQTCSKCKHVDKNSRHGEKFICTNCGHIDDANLQAARNVKTQAIETYGLNIVKMIKSKKVRRDSSKPVQTTPFYVGMYERSSDNTLPQKACTEPGRGGKRRVGENPEYKQLSLWDI

SEQ ID NO: 5852 - protein, 402 aa, Planktothrix sp.
MFQAYKYRIYPNIEQETALAKSFGCCRWYWNYALNLCQETYKTTGKGLSRKAIQGLLPELKKEYPWLTDAYSQSLQVVALNLSVSYKNFFEKRTRLPRFKSKHGKQSISYPQNVKFEGDYLKLPGKVGLVYCLRHREFQGVIKTVTISKNPDGNYYASVLVDDGKEMPNLSTNGKAIGIDLGLTHFAITSDGDKYSNPKHFAKHQRNLKRKQQKLSHKQKGSNSRQKAKLKVAKVHAKIARCREDFLHKLSRKIVNENQVIAVEDLAVKNMVKNHKLAKSISDCGWGMFGTMLKYKAEKEGKTYIEIDRFFPSSKTCNVCLNKVGSLPLDIRSWTCEHYQTTHDRDINAAVNIKNEALRILSLGTSDTASLRGCQSPEQTSVSFDAPPVDARSTHLLVEKCG

SEQ ID NO: 5853 - protein, 492 aa, unknown
  TnpB Polypeptide
VGVYGDGFLCGCFFLFLLLRRAVAVELEVSKDVSKLLYSVETAYLNIVREVTEYAVANNVTSATQLQRLFYHKYRREYQDLNSQLIIQAVRQAAQIAKSFVKRRKKGLASKPYPEVRRVSIRFTEKAWNYEQFIHSIAPVRLELSLPNGRTEVWLRPHKRFWLFWWRVLTGEAGLASTLIVKRKANKWYAVFVFEIKPREEKPKSIIVFDINENTVAISRIDIETTVGKVADWNRQHVTPELYMIRTDFGRLARRYERVRNAIIERLKPEFALPNGNYTNITNTREFRKRVKHLRESGRKVGRVRHVANELTKTPAIIITEELGDNPQESMIEAVGRGELRHRIKQTPFKALERGSRIFHVSSYRNSRVCPIHFTRLEKTNDWHVLYCPKKHYVDRDYASVVNIMWKTTPEAWVKGVWWDLRKKIDWGEHEGKSNTTIPYSIVQYLHAMLKTFTASEESPAVLARGKPMNPARGANEGWARNLPKKGRRPGG

SEQ ID NO: 5854 - protein, 419 aa, unknown
  TnpB Polypeptide
MFEMERADAFKAFGDPALWRLADNCARLWNEVNFERRQAYIRYRKFSWYPKDLYRKYAPSVGSATAQQITNKNNEAWRSFFKLKGLEAEGRLPEHITRVSMPRYWKRNGRRELRVVIRNDCYRIDKEHLYLPKGLKLRYKGDLEWRGKQGRLEIVYDDVDDVWRGFMSVEVKEPPKKGGSRSLYIDLGVINLTTVWFEGLRQPIAFSGRTVLADWWYWTRKIAKEQGRLAEVNEVKTSKRMKGLFRIRQRRFRHAVNAMVKTIVECAYELGISKIVLGRLKGIRENGNHSRNVNAMINNFWSFEYIIRRLKEKAEGYGIKVEEVSEYKTSSRCPKCHSENITTNGRLFKCLNCGLEAHRDAVGVLNIGYLQGEGSVNGVVAHPLLLRWDGMRWDGMRWEPRRAMNTRPMKTLEAGISRL

SEQ ID NO: 5855 - protein, 422 aa, unknown
  TnpB Polypeptide
MGSKNILNVLRASTVLLKPTDTQPLSEYAEQSAILWNIANYERRKAFFEHMKMPSYANQCRELKHTEPFKKLGTCKAQALLSKLNEAWQSFYALLRLKEKGKLPPHIRKLSPPRYWKRDGRLEAKAFYVRSDGWKIDEEGISLPRGLKIPYQCGELWVGKQGRLEVFRDELNKRWYAHIPVEVDWQPPSRSQTDAEKEKKASLDLGICNLAALYIEGERPIIYSGRGVLSDWVYRTKKIAERQSLLPRRRHVSCWIRTAFRRRERRLKHAINTMLRDIFSLLEGKRIGELYIGDLNGIREGANHGRKGDQKLHNFWAYNLIEKRIFELGEEYGITVKKVSERDTSRTCCLCGKQHNGRVERGLMVCRERHKSINADVNGAVNILNVAVNRFPSVLSTDKGETSGSRLLAEPLLLRWNYHEWS

SEQ ID NO: 5856 - protein, 384 aa, Lachnospira sp.
LLKSFKTEINPTEEQKTKIYKTIGTCRFIYNFYLAHNKRLHNNGEKFMSSNKFRVWLNNEYLPTHPEYSWIKEVYSKAVTQSVNNGYIAFTKFFNHKSAFPKFKKKSRNNVKMYFVKNNPKDCRCERHRINIPSLGWVRIKEKGYIPTTKDGYVIKSGTISINAGRFYVSVLVDIPNNKITNNSSEGIGIDLGLKDFAIISNGKAYKNINKSTDIKKLEKKLRREQKCLSRKYENFKKGESAQKSNIQKQKLKVQKLYLRINNIRTDYINKTIAEIVKTKPSYITIEDLNVSGMMKNKHLSKAVASQKFYEFRTKLKTKCDDNGIELRVVDRFYPSSKLCHRCGSIKKDLKLSDRIYRCDCGYVEDRDFNASLNLRDAVTYKIA

SEQ ID NO: 5857 - protein, 375 aa, Lachnospira sp.
MEKAYKYRIYPNKKQIELIHKTFGCVRYVYNYYLAKRQEVYEKESRTMGYNECSKDLTTLKKELEWLKEPDKCALQNSLKDLNAAYGNFFRDKSVGHPKFKSKKTHKFSYRTNNAFGSTQSKPSIEFVNNRIKLPKLGWLKTRDKQIPQGKILNATISQEPNGKYYVSICCTDVEIKPLPKTNRQIGIDLGIKEFCITSEGDKFYNPKYLAKSQKKLVKLQRELSRKTRGGRNWQKARIKVARQYEKISNQRRDYLQKLSTKLIRKNDVICTEDLNVSSMIENAKGANKEKANLRKQISDVSWYEFARELKYKAEWYGREIKQVDQYYASSQICHICGYKNTITKDLSVREWTCPVCGTKHDRDINAAINILQNA

SEQ ID NO: 5858 - protein, 457 aa, Saccharomonospora sp.
VRCGAVIVTEVIQAYRFALEPDSQQEDQLRSHCGAQRFAYNWGLARVKAVMDQRKAEASYDIPAEELTPSISWSAYSLRKDWNEAKGRVAPWWGDNSKEAYASGLANLATALKNWSGSTKGKRKGPKVEFPRFKGKRHTWSCRFTTGSFGLAETDRRHVKLPRIGTVRTHESTRTLARHVERGTATIRSATVSFRSGRWFVSFSVKIQRNDPPPADPDSAVGVDLGIKSLAVLSTGEVVPNPRHLEVAQHELRRLQRQASRRVGPDKRTKQKPSNRWRKTQARINRLHAFIANARRDGLHKLSSRLVREHGSIVLEDLNVEGMMSNRRLARHVAGVGMGEFRRQIEYKAAWSGVHTHVASRWYPSSKTCSDCGAVKAKLRLSERVYQCEHCGTVLDRDLNAARNLAALVERDTSSASCVVRLNEPAGNPRKPTRGGNGYRHGKAHAGQRQRGNALVR

SEQ ID NO: 5859 - protein, 506 aa, unknown
  TnpB Polypeptide
MKRTVIRYSDKVNPGKWQQPCSIARLFRDEKNVHLRYFNQNINYSDAIQKDHTRRDELVAEKYQPETELQARQWKTALKTAYETVDKHWCALSVALKPMIAQHKEVWSDAENHYAYWLTYSSKRLVELGERNAPLPENFKVSYKDQVRVRNYLRRVIRRKKKELPVAKMSRSFELDANMYSLVESGKDSKKQYIKIMGLTPGKRIVIPLTGHTYFSGTVKIILDHNNQRIEVHTTSEIKPVEIKSNEVIGLDAGVSEVFTDDFGTHYAPTFGKTIATVSKRLNKTGKQRNKAHALRKSSSKDKAKRIRKFNLGRKKLNERKRKAQIRIRQQISHAIHQAVDTRHPGVIVTERLDIRGKAKSKEMSRQVSYWMRESLKERMDFLALVEVFHHKQVNPAYTSQMCPTCLFVHEDNRRGDIFKCLYCGHSDHTDRVAAINLKARNYDAEITIYTPKYVVKSILLARFEKNKNAPLEMKPASLQVSVGGLTVSGMTAAQSSRCGRAKRPA

SEQ ID NO: 5860 - protein, 506 aa, unknown; identical to SEQ ID NO: 5859
  TnpB Polypeptide

SEQ ID NO: 5861 - protein, 384 aa, unknown
  TnpB Polypeptide
MRHVTRYRIYPSPDVETRLFTAFERCTFVRNWCLENNMFRDSCLPPLKKAFPELNAVHSKVLQNVVQQIAHNLYALKQLKAKGRKVGKLRKKWLHSMIYEQSGFKLTGNRLWLSKIGEMPVELSQPVVGIIKQIVIKHTMTHHWFITVISETPEVPEPTTGESWVGIDLNLENFSTDTDGVVFPHPHNVRKSAKRLRRAQKKLSRKEQGSRNRWKQRVRVARIYEQVENRRNDFLHKWSRYYVDRYDHIALEHLNIRPMIESFDAKLKRRSKLILDAAWYKAREFIRYKAANAGTYVHLIDPAYTTQDCFRCGYREKKDLSQRTHDCPVCRYTVSRDLNAAQNILKKAMVGWGTPESTLAEIGTATPPILVVQVSVDEPRISRL

SEQ ID NO: 5862 - protein, 362 aa, unknown
  TnpB Polypeptide
VISSKGFPTGGYQALSAVLTQVKHDPDYAFLNEVSCVPLQQEVRRVEAAYKRFFGGEGGKPKYHGRHGSQSVEYTRSAFRNVEQAVNARWGFVTLAKLGRTRFRSSRTLPSDPSSLTVIRDPDGTWHVSFVVKEKIEPLSANNRIAAVDVGCRRLASMVTSDGSRLLFDNPKAYATRERRLARLQAKQARMMKGSDKWVRCQHRISSLHARIRHTRMDAIAKTASLIARENQTVIVETLDVKSMLANGPARKPVADAAMSMLLRLIGEQCDKHGRTLVKTSADYPSTRRCSNCGRLADIPLNITVWQCAECGVILDRDFNACVNLFDAAGLAESLNAQDASPARWEPTEHSGKTGCVGIPVL

SEQ ID NO: 5863 - protein, 390 aa, unknown
  TnpB Polypeptide
MTNCKVAQRIPFTPSKTQAALLEQCFGARRFAYNQQVEAFSSYDSETNPHPAYPSIADMKRANEWLRGSPIPSHALSNAIMDFRKARSAYFRKAEYGKNRPRFASKNDSVQSFRNGQPMRHMDGNRYPLSRKLGSVRIRRRDRIRYPLETLSSWTVKRENGVYYLVLLFDVDVQPKPQVDGRVGIDVGVKAFLALSTGEKINYPDRLRQLEEKVRWEQRKLSRRVKGSSNYRKQRAILTKAYAKVRHYREDFQHQVSHRLIEDNQFIGMETLTVQNMTRRAKKRVDANGKYACNGRSSKRVMNRGILRNGWSGFVEKLAYKAQWYGRTFVQVDRFYPSSRLCHNCGHKYDELRLSEREWVCESCGASHDRDVNAAMNILDEALRINQARE

SEQ ID NO: 5864 - protein, 381 aa, unknown
  TnpB Polypeptide
VNLGAVNKQYAAIENDPFAEGEIVLKMVIQGTWYRLIFDFDNKRFTEGKVALPVIKVEDGQPVFIFTVVTDNPVVQFSGDYVIGVDVGINNYATVVVREVETGRIVYETTLSQRVHSLWNSVRASERQVRFLKKKSDGLLSRRQARMSALDEARFHREAASRKKRKLAILAAQEIAYLSHAWGNAVVAVEDLGWIRNTMQHGRWNRGALVQWLAHYVTQNGGWVVAVNPANTSQLCHKCGARVSHPTHEVSVCAEHGVMDRDVNAAANIAARAVPKVEKARKTRAKNRKLQPQRTLKTPVARNSLRYPGRDRTKSKPTPKRKNHRLVSREVILPSCPARAQAQRLEARVLADQGARGALGTNMAALKQGNAAYKCRLCSLI

SEQ ID NO: 5865 - protein, 435 aa, unknown
  TnpB Polypeptide
MGSYEAVKVRLDPTPRQECLMVSHAGAARFAYNAGLAHVKEALENGEPADWSHYGLLRWWNANKDELAVNRDTGVVWWNQNSKEAYSMGLRSLAQGLSNWSKSRKGKRKGKRVGFPRFKSKSTVMRFAYSTHFTTPTAGDPYGLKLPRIGRVHCMENVYERVNGAHLVRVSVSRRAGRWYASLTVERESTAPESAPKLGAVGVDLGVKHLATLSDGTVIPNPRALNVGLRALRKAQKALSRKVKGSVRREKAKGRVARLHARIADVRADALNKATTMIAQNYTAVCIEDLNVAGMVKNHHLARSLSDAALGEFRRQLEYKTARSGAVLRVVDRWYPSSKTCSNCGVVKAKLSLSERAFHCNACGLSIDRDLNAAINIQVAGSAPETLNVRGEDVRRNQHTVGNADLGEARTKWAHQSAVRLGAGLGNEAMRPSVN

SEQ ID NO: 5866 - protein, 321 aa, Lactobacillus sp.
LVKADWQYDLSARCLQLAIKDLANAWKNFLDKAQPDWGKPRFKSKKAPRQGFKTDRAEIVNGKLRLDKPWSIAKDNWFDLASYEALKMRKVKIASIFKEKGLYYAALTYEENIPAKAKTHKKTAIDVNVGHFNYTDGLINVLPVRLQKLYKRIKHYQRMLARKREINGKLATKTNNYLAVRAKLQRDYRKVVNIQNDLLQKFTTRLVNDYDQIVIEDLAVKEMMMTHVASKGMQRSLFGKFRQILTYKCDWYNKELILASKMYPSTQRCAKCGYVKKGDEKITLQGNQKHGTKHNEYICYRCGYTNDRDENAVLNLLALAK

SEQ ID NO: 5867 - protein, 255 aa, unknown
  TnpB Polypeptide
VKFRKSCIIGGEIRNVTVSRSGGHWTVAIQTEKEVPDPTHPSATAVGGDLGVANLLTLSDGTIFPPVTAYRDLQKKLAREQRKLARQVKFSANWKKQKAVITKLHQRIAAIRKSVLHQVSTAISKNHAVVVLEDLKVRNMTGTARGTVEQHGRHVRQKAGLNKSILDQGWGLFKQMLGYKLQWAGGMLLLVDPAYTSQTCSVCGFVDAENRKTQAAFCCRHCGHETHADVNAARNILARGLQSTAGHAEVACFTA

SEQ ID NO: 5868 - protein, 404 aa, Methanocella sp.
MLVRKTVRIPVHYKTTKSKLDKLDKLTARLTYCISLINSLVTVETRLDRPTLRKLVKDNRIAEKCKLSAGYIDQCIDKVLWTWRSYEDKHDEWQYRYDRAVEDHANAGDEEREKLKKKVKRLQENEPSTPRFDHKVSCRLDHRTGRIEKGENSFQLWMHISTLVKGATMDIPLNPSYWHLKQLEGVEIDDFEIIGKNGKYYAHISTTRLVNTRITSSYGGIDQGLNLMAIVLLDAVPREELLYDEKRSLLDKYDEIIASLQQAGKTRKLKQLRNKRSNVSVYHDWCLANKVAEYTDGYIIAIGNTGFRQAQYRGNGMSRLRKRIGKWSYGRQRMFIAIKRAERGLPTKLLDERNTSNTCHICGSRLVARKYHDGSSWLQCHSCGSKLDADLNAAYNIEAGEMTG

SEQ ID NO: 5869 - protein, 224 aa, unknown
  TnpB Polypeptide
VATRTADKAGFVPRLVNGRPLKSIHQFSNKRRAELQRLLGLGGTSKRLERITTKRTRRSDHERHTASRRIIDLLVTEGIGTLGMGMGLGMGMGMGMGKHPNWKQEVRMGKRTNQTFVAVPHARFIALLTYKAELVGIPVLVTEESDTSKASFLDADPLPVFGTAAAETTVFSGKRVQRGLSRAANGRHITADVNGAYTIMRTVAPDAFAHGSSGCVVHPLRLAA

SEQ ID NO: 5870 - protein, 331 aa, unknown
  TnpB Polypeptide
MKLVRLAYDFRRAVLYATRMIGKDMKTNDILKELRNMLNKAYGDSAYKVAKAIVEGCRFNGGEPRHIKIKRLFIVSEGEASRFGNRNVRLETTDIVKVRYPYDKSWIILRTCFGRKYLSLVREVSELAKQRRISYGARIVFKDGRIYLHLSIPINLYLKYFSKGKAHGELVVGFDINSDRMNMVIIDRYGKIRDIKTKWFSEVTSHGYPKSKAKARRLEALAKLLKYTYHHNVGIVVFENLFTIKKREYSRNPTANRKITRFAKKELLRYGILMAMKYGFKVLLVNPRGTTRSKEHDEVMKKLGLDRHVASAYLIALRGIRRYTMIQKAMI

SEQ ID NO: 5871 - protein, 288 aa, Hassallia sp.
MYQNPVTTLHIKLPKIGVIPINLHRPIPTGFVVKQVRILRKADRWYASISLQCDVSVPDPIPHGHPIGVDIGLEKFLATSDGVLVKPPKFFKQLQSELKLLQRRLSRKQRRSRNYEKQRLKVARLHHQIDNTRKDFHYKQAHALCDAGDMVFMEDLNYRTSAKGMFGKHMLDAGFGQFRTIVKYVCWKRGKFFSEVDARGTSQECPECGGEVKKDLSVRVHSCPHCGYKTDRDVAAGQNIRNRGIALISTAGLAGMETACPDDLPGIEVTQSRQVSKPRNRATRKSSK

SEQ ID NO: 5872 - protein, 540 aa, Hassallia sp.
MKERSAAGKLKEKSKLLEHPLGKEGITSIDLLLELVEPITESSSFTLESVAALNNPILIDKSPTLANSTRKQKFVAKSEGGLTSSAKSFFPYWNESLKEMSEWLSLPTKIDWQDSDLTCSNGSVSKTGANSWYSTKQTLVQSKKWLKTSLQFSTVLVADSTDSENTNLKSKKIRIYPTQELNKIWRKWLAACRYCFNQGIALQRKKRLSKLELRNEVMRSELPDWVKETPCHIRQNAIFDAHRAFKASKDAKFRSIRDYSQAIKFNDGNFRKGTWYPSLTKGLTFKASEVIPDCEYGTQLLYYKGRWFAVFPIPATLEPAETTGIIALDPGVRTFMTGFDSNKFVEFGSGDMGRIARLCQHLDDLMSRASKASKQQKRRIRQAAHRMRIKIRNLVDECQKQTACYLTSNYRIIYLPTFESSQMVAKARRKIRSKTARAMLTWAHYRFKQTLKHQASIRNCQVVDVTEEYTSKTCTKCGHVHKKLGGSKLFKCPDCGYEIPRDFNGAFGILLKALRDTASISYEGDSAIVTLSGNDRINVA

SEQ ID NO: 5873 - protein, 422 aa, Hassallia sp.
MQLVEQRVIKKSHPAWVGIDAMSFASKNLWNAANYCIRQSFIYGHGVPDYNSMDKLMQPSQEYKALPAKVSQQILKLLDKSWKGYFRAIGQYKLDSTNFTGKPKIPGYKPKDGRCVLIFTEQSTSKKVFKNSGQIKLSSIDYNFDTQIKQPQYCQSRIVPKLDHYVLEIVYEVSDHELSQSTERIAAIDLGINNLMAVTSNVPGFKPVLVNGRPLKSMNQFFNKKRATLQRRSQLRTSRRIKHLTTKRNFKVRNYLHSSSNYVIELLVELGVTKLVIGQNRDWKRGVNIGKRNNQAFVSIPHGQLIDMLTYKGNLCGIDIIVREESYTSQASFIDGDFIPDYGTKSFGWKPSGKRICRGLYRAKSGRLCNADINASYNILIKEFPNAFETGDREVLVDPIRVNLAGFKATHLDPILDAFKVL

SEQ ID NO: 5874 - protein, 273 aa, Hassallia sp.
VLKALKVRLYPTTEQEIALAKSFGCARWYWNYALNACIQHYQETGKSLKLSVYKAYLPQLKLEHPWLKEDCYSAVLQCVAINLNKAYTNFFEGRAKFPRFKAKHHKQSIQYPQNVKVVDDCLEIPKIGIVKAVFHRPLRVRQSPTEGNPPNAYGNATRTGLDSPIEGKLKTVTISKTPTDKYFASILLEVEDDASQSIGDKILGIDLGLKDFAIVHDGNEVSKHSNPKHLERHEKNLARKQKKFARKVKGSNSRNKYRKLVAKVHERVSNSRY

SEQ ID NO: 5875 - protein, 397 aa, Hassallia sp.
MRTSYQYKLRPNKQQIIQLEQWLSMLRSQYNYLLSDRFNWYEFNRCSVNACPLVCHIPILRDNPNYHTQQNALPQLKKDRPWYAAIHSQVLQNVVKRVELTFERFLKGDSNGKRSGRPRFKSSSQYSTFTYSQMKPDCISNNTIALPKFGKVKIILHRQIPDGFKIKTCSLTRKADGYYATFSLEDKTVPTIKPNFNADKIVGIDLGLKEFFTDSNGLAVPIPQHYRNAQKRLKVVQKNVSRAKKGSNRRNKAVKKLGKQHKKVTDKRRDFHFKTANTLLKNFDVVVHEDLNVKSLSRTRLAKSVHDAGWSSFISILSNKAENAGLLVIGVNPYSTSQDCSKCGEKVSKKLHERWHDCKNCGCSLDRDHNAAINILNRAEGHPVLKAQRFLSNSRIS

SEQ ID NO: 5876 - protein, 441 aa, Hassallia sp.
MQLVEQRIIKKSNPAWKQIDAMSFAAKNLWNVANYCIRQSFIYGHGVPSYNSMDKLMQSSQEYKTLPAKVAQQVLMLLDKSWKGYFAAIAEYKKEAYLFTGKPKIPGYKPKDGRGVLIFTEQSTSKKIFKQSGQIKLSAIDYTFDTRIKQSEYCQSRIVPKIDHYVLEIVYEVSDHELSQQVPVLARAKDGKLALPLGQSTERIAAIDLGINNLMAVTSNVPGFKPVLVNGRPLKSMNQFFNKKRATLQRRSQLRTSRRIKHLTTKRNLKVRNYLHSSSNYVIKLLVELGVTKLVIGQNRDWKRGVNIGKRNNQAFVSIPHGQLIDMLTYKGNLCGIDIIVREESYTSQASFIDGDFIPDYGTKPFGWKPSGKRICRGLYRAKSGRLCNADINGSYNIMKKEFPNAFKTGDSEVLVDPIRVNLAGFKVTHLDPILDAFKVL

SEQ ID NO: 5877 - protein, 256 aa, unknown
  TnpB Polypeptide
LYQKSQLAAALRIGECDLLYRADKDRWNLAVTIDLPDVPLSPAVDAIGVDQGIVNVAVTSDGEMYGGATVLGVRRRYFHLRQKLQKKGAKSAHRLLKRRGKKERRFQANTSHTITKQIANHTRATGRGVACEDLKGIRSRTGHVRRAQRRTHHSWAFGQFTAYLAYKCQERGVPFVLVDPRYTSQTCSRCGHCAKANRQTQSSFLCQSCGFAAHADWNGAENIRAQALGVLGAGTRSDARTLGVARGVACEQAHGL

SEQ ID NO: 5878 - protein, 474 aa, Escherichia sp.
  misc_feature (262)..(333): Xaa can be any naturally occurring amino acid
VKRLQAFKFQLRPGGQQEREMRRFAGACRFVFNRALARQNENHEVGNKYIPYGKMASWLVEWKNATETQWLKDAQSQPLQQSLKDLERAYKNFFRKRAAFPRFKKRGQNDVFRYPQGVKLDQENSRIFLPKLGWMRYRNSRQVTGVVKNVTVSQSCGKWYISIQTESEVSTPVHPSASMVGLDAGVAKLATLSDGTVFEPVNSFQKNQKKLARLQRQLSRKVKFSNNWQKQKRKIQRLHSCIANIRRDYLHKVTTTVSKNHXXXXXXXXXXXXXXXXXXXXXXXXXXXXXXXXXXXXXXXXXXXXXXXXXXXXXXXXXXXXXXXXXXXXXXXXAMIVIEDLKVSNMSKSAAGTVSQPGRNVRAKSGLNRSILDQGWYEMRRQLEYKQLWRGGQVLAVPPAYTSQRCACCGHTAKENRLSQSKFRCQVCGYTANADVNGARNILAAGHAVLACGEMVQSGRPLKQEPTEMIQATA

SEQ ID NO: 5879 - protein, 363 aa, Klebsiella sp.
MNTQTKTLSVRIKDKHAAVLRQMAFEVNQVFNLANEITSAAYSNAGVFGAQVPKWLTAFDVQKMTTGIQRERGYSIGSATVQEVIAHHGKARKQFRRSRLRWRVSSGARRSLGWVPFKSRAAQWQNGCVKFAGHYFKVWDSYGLAGYKFRAGSFSEDSRGRWYFNICVEVETVPTAGTTAVGVDLGLKDYATPSEGEKLEAGRFYRDLESALGKAQRAGKKARIRAIHAKIKNRRKDTLHKFSTALVNSHAAIFVGDVSSSKLAKTRMAKSVLDAGWAMLKTQLEYKAIARSVVFEVVNERYSTQACSCCGAISANSPKGRADLRIREWTCCECGTAHDRDVNAAKNILAAGHCRLAAGIPVL

SEQ ID NO: 5880 - protein, 179 aa, Hapalosiphonaceae sp.
VPKAVAKIQSKVARQRQDWQHKVSTQIVSCNSLVATENLNLKGMTRKSKGKNKRQKSGLNRSLLDVGIGNLKDLIQYKVTEAGGFYIEVPTQKVKPSQTCPNCGHQNKKTLAQRIHHCQKCGYQCDRDVAAAMVMLNYARGMERTSTDSDESTSTWCGSFKQVAQVKSQKHTSQRSGCV

SEQ ID NO: 5881 - protein, 365 aa, unknown
  TnpB Polypeptide
MKKTFQYRAKINRETEKNAINWLNLCCILYNIALEIRISAYKNFKKSISLHNQVIQLPDLKKAYPEFKTVGSQVLQDVLERLDRAYKAFFDRCKNGKAGFPRFKSKHRYDSFTLKQAGWKLDGKYLNIKNIGIFKLYLSRAIEGDIKTVTVRRTSTGKWFVCFSCDNVPERKYLETKKEIGIDVGINSFLVDSEGNNVENPKYYRKAQKVLRRKQRVLARKKKGSNRRRKARILVAKAHEKVANQRKDFLNKTANLYIAMYAIISIEALKINNMIKNKHLSKSIADSAWGMFFELLTYKAVEAGRKIIKVAPHGTSQNCSKCGEKVPKSLAVRVHKCPYCGIVLDRDFNSALNIKTAGQAVQALI

SEQ ID NO: 5882 - protein, 399 aa, Gloeocapsa sp.
MSLKSFKTTLILNNKQATLASKHAGVARHAYNWGLATCFETIDNNQLLPSSIDLHKKLVAEVKSVYEWYYEVSKCAPQQALRNLHQAFMNWWKHQHCQKPKFKKKGIRDSFYLEGAIKISGNKIKLPIFGWITADEILPSVIPKNVTISKRASKWFISFKYELENKPTPKTSPIIGVDVGINSLATCSDGTVFANPKAYRKAKKRLARLQRALSRKQKGSNNRKRALGRLQKAHYRVANIRKDTLHKITTHLAKNHSEVVIEDLNVSGMLKNHRLASAIADCGFYEFVRQLEYKCEWYGSTLTRVDRFFPSSQLCSNCGHKQKMPLSQRVYQCGNCGTTLDRDLNASINIRNAFKNTPSSGEINACEEVKQLGSTAAKTSMKHEVNIKPKQLSLFDLLE

SEQ ID NO: 5883 - protein, 232 aa, Mycobacterium sp.
  misc_feature (105)..(105): Xaa can be any naturally occurring amino acid
LSKAWTRQRCCGKKGCRVPALVGADCRMRPWALRVGTCPTRQSGTGRRWWSPTAGSRRRKPATPAGMCKTSAGTNNGNATDAQWSISVMTALPSTSHATRKHPAXRGLSDAALGTPRRHLSYKTVWYGSALVVADRWFPSSKTCHACRHVQDIGWDEQWQCDRCSVVHQRDDCAAINLARYEETSSIVGPVGAAVKRGADRKTGPRPAGGCEARKGSSPKAAEQPRDGVQVA

SEQ ID NO: 5884 - protein, 409 aa, unknown
  TnpB Polypeptide
MERIKTYNFRLYPTKKQEELLNHHLWLSKELWNFLLQKEKDHYNETSKFIEKTELQKLTKKSGLFSQTAQAVCHRLYNAIMKMVRERKQGKNTGFPRFKNFFRMKSLYYPQAGFKLEEKLEVSPFGEIKIKKHREINGTIKTLTLKRTPSGKWFAMFVVYVQKKIPQQNNGPKTGLDFGLMNFATLSNGFTIPNPKPLIKHEQKLIFFQRRFSKKNKKSRNRNKAKIKLANVHEKIKNMRLDFLHKTSNALISNYSFIAIEKLATREMIIKGHGKGINDAGWSMFAFILCSKAEEAGCKVELVNSMNTTKECSRCKTIVPKSLYIRTHNCPKCGLIMDRDQNAALVILKRQPLPKGSGATCKASGSLGANAGPGGSNALEDGRTKIPSLNKEPGNHRDFADAKCGTFSR

SEQ ID NO: 5885 - protein, 374 aa, unknown
  TnpB Polypeptide
MPKIYRGYEFALYPGTEQKVFFAKSFGCVRFIWNKMLAAKINYYKENKTNLKITPAAFKKEFSFLKEVDSLALANTQLNLEASYKKFFKEGSGFPKFKSKKIGKNSYTTNNQGGTIAVIKTEKGDFIKLPKVGLVKIKLHRELPTDSVIKSATIKQSKSGKYFCSILFEKEIATTMGVSISPDKVLGLDYSSGHFYIASDGNIADYPKYYRQKEKQLRRAQQKLSRCKNGSKNKEKARTKVARIHEKIANQRKDFLHQLSRKITNSYDVVVVENINLRGLAGSLKLGKSTNDNGFGTFRTFLKYKLEDQGKQLIVIDKFYPSSKICSECGYINKELTLKDRTWTCPSCGIIHNRDFNAAVNIKKEGLRILNSAT

SEQ ID NO: 5886 - protein, 203 aa, Haloterrigena sp.
VATARRRRRRWRPSSICIRTIRRRSPISRTARTATRPARIRNQRRTSKRSDRLYRKRTRQWNHAQDALVRNLVEQFVEEGIGTVYVGEFADVLSTHWSCRVNEKTHNFWAYRRFSNRLKSVCEEYGSDVTETSEAWTSQECPECGSRDKTVRHDTLTCPCGFEGHADLTASRTFLERQVSREVRSMARLVRLKWTKLRLAGTP

SEQ ID NO: 5887 - protein, 375 aa, unknown
  TnpB Polypeptide
MQSKLLAQMFGNQRWVYNYFLAEQKRRLDAKEKLLSRFDMQKLLPQLIQQNDWLLASKVDSLRFSIQALDNAFRRFFAKSARFPRFKSRSNELMVATDQPGKNLRFSKALGKIRAVAHRPITNGKIKRFTIKKTPSGKYFQSVLVETPESVPVVKQPNGFIGIDEGLTTFITLSTGRKIQHGKHYRANQARLKREQRRLARRKKGSNRRERQRIRVAKIHEKIQNSRSYEVHLITTNLVRKAVAESQGIAFQKTNIKNQMQNSKLALSITDASWGELRRQLSYKCERAGVALVEVDQWAPTSYPCFDCGAVPDTKGLAVRSWRCACGRKIDRDVNAARNISRLAERVWRREAPLLDEEAGAVRLADESSSGRKAA

SEQ ID NO: 5888 - protein, 214 aa, unknown
  TnpB Polypeptide
VPSGKYFVSILADVENKQLEKANKRISFDLGIKEFLIDSNLNHIDNPKTLYKYEKKLAKLQRQIAHKEKGSQNFIKQRIKIARLHEKITNIRKDFLNKLSCQITNEYDVIVSEDLNIKNMVKNRNLAKSINDVSWGEFTRQLQYKSEWKGRVYHKVSPWFSSSQLCSDCGYKNKEVKKISIREWACGNCGTVHQRDENAAINILNQGLLELGFN

SEQ ID NO: 5889 - protein, 332 aa, unknown
  TnpB Polypeptide
MILTFKIKHSRDFSNELAKARQLAQFAVETRARSSADVKQFGLRSVISNQIIRKYARNKNCRRARRINLIVPNQGIKLQDRKAYISSLKLELDLSHLPAFQKINQIELNKDFAFVSVTVQEQAQKEPQRWIGIDRNTTGHCAVIADPSTGKVLKLGKEAHHTHQKYKNLRTDLQKKGKFRLLKKTKNKESRIIRDLNHRISREVVNYAVANNAGIVLENLKNVRKAKSSKSFRSSLHSWSYAQLENFIGYKAKLLGIPVVKIDPAYTSQQCSRCGLLGHRNGKHFECSCGHSDHADANAAFVIAERHMGMVRSPIDRDVGEGSTDTPIEATA

SEQ ID NO: 5890 - protein, 417 aa, Prochlorothrix sp.
MITLTYEYKLKPTKQQVEQIDHDLEVCRRVWNYALKERKDWIASRKCPVNACSLRSEYIIPADEPYPSFSVQCQRLTEAKRLNTDLASVNAQVLQQILRRLDQAFDRRKKLGFGFPRFKKPGQMRSFSFPQLGKMPLKNGSVQLPGLGWMAIRQSRHYPEGFAVKQARVVKRASGYYVMLTFQADIVIPDPPLVGHVVGVDVGLEYFLSTSDRLQLERPKFFVDLQRKLKSLQRRLKRKQIGSANWKKAQLKVSRLYEHIANARKDFHFKVAHQLCDVADVIVVEALNLIGLSRGMLGKHMLDAGHGQFLNSVLPWVGFKRGKAVVKEKAAGTSQECPACGEAVRKTLSTRWHECPCGCSMPRDIASSLVLRNRFQQRCGMSSVKNAPGEVLVGSVLHSSQDSVNGESPAIREALAG

SEQ ID NO: 5891 - protein, 582 aa, Euryarchaeota sp.
MTKRKKNVSSKQSDASGGSGQTATYRVHYKIPDEVSDRKEFRTRLANKIRDLKELSLAMANHPRVLEGMEKYVLQSPRFSLNKFRKTFLNPYKNEFAQVKVKLSTGKEMPLYVGSNLHESTFAYVHGAFKAREVLKRLFLKVVKDCEIMFSLFGRDPFMGLKLRKMKYTKAFAYNFVVGLGRKLDQPIPQFRVEPKVIRQWYDDLFEPKTDNQKKFHERAQVMVDNPGKVIAVLTDFFKDCGLPSDNWELLKSTLSHRFPKVYASPFRHLICYIAVKHGFQPQFDLDKLFPRPEFNDLPIQLVMSKKYVIKRPGNSSEMTELVCKGKSIDLIFPNKGKPLEVTIKFPKAVVRRICAGAVLSSFRVDLDRDGQPRIDVILRKVPSPWSTKLWKMELEKTRVVALDINRLGEHMLSFNQPTDNSVFKELNRKYQAVSDQIKQYKSSDHWQLGQLHRRRSNLLKTAHSLVPRFIASVIVNSGAEVLVTEFLTVTTRKTKGSLAKAITTMPQKEELIAKALAICRKLGHAVEHRIVNPRHVNFKVHFGCGGRLDRGPGQWDYAPCKRCGEKVNTHQNAAELLAARS

SEQ ID NO: 5892 - protein, 396 aa, unknown
  TnpB Polypeptide
MGKYRALVLKYNLLRLPPEVAEKIPALLRVQEEFRKWAAEWAKSGGSLPPPERPLKYFAEEFLHAAKAFDWLREIKKNGMEVRGTKPPLIFDAQLRLGGERDVSRGVLIDLPRREVRIRKWGGGTITLPLTDKAVEWTLARTREGGKLVLATVWVGRSRRSHAVKLYVALIFRREVAPIQPKRLLVIDVNALHNGLAWAVVEGERIVEKGILRPNISKILRLQKVAARLESICAKEDRACEEAMATQSRIWRLLRSWEDEAVKKIVRLALQYKAAIVIDVPDDNSVKELKEGNYKAEKKVFLNFGRIRRRLRGLAEWYVPLREERLYSTVCPICGAKMEELPNRRVKCQCSFEAHRDEVPFRWAQKRFLELTIPSFSSSSAVLRVTTPAAAWWVSG

SEQ ID NO: 5893 - protein, 380 aa, unknown
  TnpB Polypeptide
MPKLTKTVRCKLDPGAKERQAMLETIRQFSAACNYISQIAHEHRGMSNKVALHHLTYYGVRAKFGLPAQLACTARDKVAEAYKKGSRRTPRHFGPNTSVRLDARTFSIAKAGQASISTVKGRIKVPMILGDFQRSLLDAWEINGAAELVYDKRAKTFYLHIVVKRETDPPTKSGRTVGIDIGMVNLAVTSNGLRFSGKKAMHLRRHYRNLRANLQAKGTSGSHCLMKRLRGKETRIMREVNHIISRRIVNSLQAGDTIRIETLTHIRERAKQRRARRADFHSWPFAQLQFFLEYKALERGIAVEYINPAYTSQTCSRCETRGHRVQHRFSCPSCNSRNAADFNAAYNIAKASLALGDGPQSIGPKATRCSQLQALQLAVG

SEQ ID NO: 5894 - protein, 581 aa, Halonotius sp.
  misc_feature (454)..(460): Xaa can be any naturally occurring amino acid
MAKWPMKRTNTFTIRPLTDDDEQVLRELLDASAALWNEINYQRLMRYNDENGFEGEDVWDVDTGRLEGTYKDVLGASTAQTVRRANSEAWRGFFKNTKQFHDESNTSVTEHPEPPGFRGNKDDGRVLKGVIRKDAYTVEWGDRSRLEFVIGDDLRDKHNSPKTRLRLEIVGEPNWPKHKDQGRLELWYDETGGTFRASQPVTVSDDAQASPLAEESAALDIGANNLVACTTTTGEQYLYEARELFQRFRSTTQEIAQLQSKLSDGQYSSHRIRRLYRKRTRRCDHAQAALCRDLIEQLYDEGVDTVYIGGLTDVLEAHWSVEANAKTHNFWAFKQFTERLATTAEEYGITVEVRSEAWTSQECPQCGSTDRTTRQQDTLSCGCGFEGHADLTASETFLRRQTEQAVRPMARPVRFQWDDHRWSESSCSHRPNEQRTNRSIRFQTGNLATGESAXXXXXXXKASPVSSPKASSPASSSNVSSVVSSPKASSPLSSSNSSNSSPPVSSSKALPASSSKASSPLSSSNPSSKESSGSLSSSPSSSDSDAASSSASSGSSPSAHSASPESYSFFSSLNDLSPDIS

SEQ ID NO: 5895 - protein, 372 aa, Fervidicola sp.
MQTVTLKVKLLSPNKGKLEKMALMLETYRKACSWFLKQAETLKTTSRAKLNRETYHKACELFDLNRGTLQCAMLKALSAYRSYLSRTKNGKKSSLPKFDRIVPVMVRQDCYSIHQLPSGTWVIKFPVSSGRSQIAVPIATSEYHTKRLQDLAGGSCRQGSMEIWLGKDGEWYAAISLIYETHLNEPCGVIGVDFGIVKLAVLSNNIFFDGRHVRWRKERWAARRAALQKAGRLSRVKKEAGRETRWMRYINHCISKRIVEIAKKEGKAIALENLLGIRERTKGSKKFNRMMSGWNFRELASFIEYKAALAGVPVIYVDPKETSKTCPKCGNASRYNRKAQGWFKCIKCGYQSDADRVGAINIAARGLDALGA

SEQ ID NO: 5896 - protein, 429 aa, unknown
  TnpB Polypeptide
MIFSKFKKLSSIQKAFKVTLIPTHNQEVLINKTIGCARYVYNRFLALRQELYATEQKTLNYNACSQQLTLLKKEIEWLKEVDKFALQNSLKNLETAYKNFFADLKKSKNKKDVGFPKFKKKHGCKQSYKTNLTNGNIQLIENRLKLPKLGWVRFHKSHSEAVASHRASDITGKLVNVTISRTTSGKYIASILCETKIEKHPQVTKNIGLDLGIKSYLVTSNGETVDNPKYYRTQTRKLRSCHKKLSRSVKGSSNRVKAKIKLARTYERITNLRDDFLHKLSTRLIKENSIICIEDLRVANMVKNHKLALSISDASWSKFVAMLEYKALWHDRIVQKVGTFYPSSQTCNHCGFINPLLRDLNLREWSCPSCNSYNLRDKNAALNILSEGLRLLTAVGTPEVIKSACGEIVSPEVIQAEFVEAGITRLSVV

SEQ ID NO: 5897 - protein, 415 aa, unknown
  TnpB Polypeptide
VIRTHIVPCKLNRETCDSLNLASGRIYSGIVSRHWRLLRQKDLWLSEKTLTRLSDMRPSVQAMAMHAHSIDAAQQGFFKACKTTRALRKAGFTDANFPWRNKKFRTTVWKNTAIKFKDGIVRLSNGAQRREPSGCRQARIEIALPESLHNVLQVLEVRLVFDKQSRRYSWHIVVENGKQSKVAPGNNVVSVDPGEIHPAVIGDENSATIIVCRERRHEQQGHAKRLAKISKALSRKRKGSRRYKKLIRAKSRMKAKHERVTRDIAHKVSKAIVEEAVARGASTIAYGDIRNIADGIDTGSEHNQRMSQWAHGKVRAYVEYKAQAEGITVVLQSERDTSKTCPSCGNKHKPRGRTYICRRCGFSGHRDVVGQINILSAYKFGQPGKLPVPTEIKHRIPHNLRVMRRRVDTPQALVL

SEQ ID NO: 5898 - protein, 259 aa, Shimazuella sp.
VSFVLLHLRKSIIYIFFLSRVLVYIIFTRKIFDTYSNLRRNTRRFCAWNWYKNGKYYTCFSCQVEPSSQPKTGIQVGIDLGVKHLATTSDEQFLSAPKHLRKSESQIKRLQQSISKKKKGSKRRKKVVEVLARTHEKVANRRKDYAHKLSHLLVQAYDFIAFEDLSIPNMVKNHRLAKSIVDAGWGQLVQYTTYKAESASKRVVLVNPYQTSQRCSCCGKIVKKTLAERMHRCTCGYEQDRDINAAINILHLAQQVAAS

SEQ ID NO: 5899 - protein, 383 aa, Proteobacteria sp.
MKLPLQLKLLPTVEQHAVLRETMRLCNAAATYSAATGYAAGVFGQVSIHHLTYYAIRERFGLSSQLAVRAIAKTVECFRRDKTVCPTFKAEGAICYDQRVLSFHGLHSASLWAIGGRVEVPFACGPYQQARQGRIQGQADLVLRGGVFYLLCTIAMPEETSLAPQDVLGVDLGVINLATSSDGTIHSGAGVEACRARYTARRTRLQRAATVAQMDGKRPKKIRQALQRMARKEAGFRRDVNHCISKTIVASAKGTQRGIALEELTHIRSRSRFRQSQRARMAGWAFAQLRAFVEYKACLAGVPVVLVDAKHTSQGCNRCGHVERSNRQSQARFSCQQCGYTTNADFNAANNIRDRARVKVPLVAVPLRQLRLPLAEPATSPGL

SEQ ID NO: 5900 - protein, 703 aa, unknown
  TnpB Polypeptide
MMFFSKNIFNSTIFFSNVFYKFKFNIFDEFISYLILNKIKFDFSNCPKHEITVKIKGKKVIKMVYDDNVIKQINDLKQKANQFIYDNFQFYIDLYLKILKYSKYNFRPMFHHISGYIDIDKITITSKNVDKIAADFIDDINVHGFGFKFDDNTFHECYVKVVYKVLNNIYRKQQLSKKLPIDDAFTDKINNIILTPVFNIVNNNLDKLLKKRDLKLTDQSIITNIVKHFNSEACGQLPYDMVHELIAKSFISYTSYYEALKVNPFARKPNYLDKENGRYILRLTRKSTNIIKKTYDDDGYLIKTEKYKPNSSNNEDTNVEYLIGVPTGKYVSKHYLSLTGDKKLVKIGENNRYGHVFYAKKKFIKIDKPDKVTKSFINKHYKYKNKYIAKDNSNIINGGMIYFNIAKEIVDKFTYMEISMDDNNNFKLNLSYSVNKINQPKNINKVASADLGGVNLMTVYSSHNESIIIPGGPIKSWNYFCNMKIDKLKSRKATGKKTIDRTIKYTKNGKNYTVKEEIDTKTLIRNLRTGRLNRINDYFNKIAKYMVDIYCKESDIDTFIIGLNEGWKNKINIGKKNNRDFSSIPHSRLIQKIKDKADLAGIKVIVREESYTSKCDALSLESVEKHQEYMGRRTKRGLFKSGTGKLLNADINGAINIMRKELESTNKTLKRMMNNEIKELVQETKKVVKYPRKINVWAELNNQ

SEQ ID NO: 5901 - protein, 321 aa, unknown
  TnpB Polypeptide
VIGLYDQHARLPALKSARPSLETAHSQVLQNVCLRLDLAFKAFFRRVKAGEAPGHPRFKSFGRYDSFTFPQAPSGCQLRGEKLVVSKVGPVKIVLHRPVEGVVKTATIRRTATGKWFAFFSCELEPKPLPTSTERAGIDVGLMTFATLSNGEKIENPRFFRREEKALAQAQRKLSATPKGTPKRVKLRKAVARVHERSTNRRHDFIHQQSRRLVNRFGLIAVEDLNVNRMGRERKFSKSIHDAAWSMFFACLSFKAEEAGRTMVAVNPAYTSQDCSRCGQRQLMPLAERVYRCPSCGLELDRDHNASLNILAVGLHGLGLP

SEQ ID NO: 5902 - protein, 399 aa, unknown
  TnpB Polypeptide
MLQAYKYRMYPNREQSASLMQHIHACRFVYNHSLEQKIQAYEQEGRKLSCFDLNNCLPVLKEEHPWLKEVNSQSLQSANKNLDNAFTRFFREKKGFPRFKSKKNPVQSFQVPQHYHVDFERNRVKLPKLGEIETLFHRMFTGKMKYATVSVTSTGKWFISILVDDGTPEPELAPFSSETTLGIDVGLIDFATLSTGEKVANPRNLRKSLGRLKCLQRRLSRKQKGSKNRKKAVLNVARAHEKVANQRNDFLHKLSNRIVSENQAIAVESLNVAGMQKNHCLALSISDASWSTFFTMLEYRCKKYGKMFLKIGRFEPSSRICSVCGHHTKGLTLSDREWTCPDCDTHHDRDINAAINIKKFALQDQNLVGVTGAERAIEPVDSLPLGRGMKQEAPPFRAG

SEQ ID NO: 5903 - protein, 362 aa, unknown
  TnpB Polypeptide
LNKSFKVRIYPNKEQQILLEKTFGANRFVYNYFLNLKSRLYEFYKINLNYNNSSKAMTELKKQKTWLKEVDSVSLQQTLRDLDSAYQNFFSGKSKYPKFKRKDDKNSYRTSSNIKISNRYITIPKIGMLRFRDKNDFSNILKIYNVTISKTPSGKYYASISAEVDIRHFEKTNQSVGIDLGIKDYLILNIGEKIDNPRILENLEVKYRRLAKAVSRKRLNSNNRNKARIKLARFHEKIANIRKDFLHKLSTSLVKAYDIICIENLNIKGLMKSNLAKSFQDVSISEFIRQLEYKAKWYSKTISKVDMFYPSSQLCSNCGYKNSEVKNLNIREWTCPKCGVHHDRDINSAINILNEGLRLLEV

SEQ ID NO: 5904 - protein, 366 aa, unknown
  TnpB Polypeptide
MNKSFKVRVYPTIEQRVLLEKTFGVNRFVYNYFLNLKSKLYEFYKINLSFGNSSKALTELKKQKTWLREVDSVSLQQTLRDLDSAYQNFFIGKGKYPNFKRKDDKNSYRTNSNIKISNRYITIPKLGMLRFRDKYKLGECNILKIYNVTLSKTSSGKYYASISAEVYISCFEKTNQNVGIDLGLKDFAILSNGEKIHNPRILKHLESKYRRLAKAVSRKVRGSANYQKSKIKLARFHEKVANIRKDFLHKLSTSLVKSCDIICIENLNISGLIKNHKLAKSFQDVSLYEFIRMLEYKAKWYGKITSKVDRFYPSSQLCSKCGYQNKEVKNLNIREWVCTECGTHHDRDINSAINILREGLRLLETI

SEQ ID NO: 5905 - protein, 358 aa, unknown
  TnpB Polypeptide
MNRRTKTLKFRVKDKHIPLLNNMARSVNFVWNFVNELSQRSIKERGKFLSAYDFHPYTKGAGKDMGLHSQTLQCIAGEYVTRRKQFKKVRLNWRKSGGARRSLGWIPVNTAAAQWKNGQVFHNGHYFGVWDSYGLSQYKFRSGSFNEDARGRWYFNVVVDVEVTPSVGQDRIGIDLGLATTATCSDGETLEASRFYRGLESKLAVAQRARNKQRVKTIHAKIANRRKDSLHKFSRKLVNRCGEIYVGNVSSLKLVKTKMAKSVLDAGWGQLKTMLEYKCDHAGIVFKEVNEAYTTQTCSSCGALPESRPRGIAGLGIRGWTCSACGVTHSDRDVNAAKNILAVGHGRLVVGITASLGR

SEQ ID NO: 5906 - protein, 401 aa, unknown
  TnpB Polypeptide
MSFIKRSDKFRIEPTAAQRPGFVQAAGARRWVWNWALERRIRYYATHKTTLSVTALCKELTALKRQPETAWLNDVDSQALQQAIRDLAAAFDQFFARRARFPKFKTRKRDRLRFRIPQRVKVERNRVYVPKIGWVKLRQSRPLQGRLTSATFSRDATGCWDVSFATELEVPDAPLPPVNPARTVGLDDGLQDFVVLSTGQTIPAPRFFRKGEASLRRAHRHLSRCQRGSTRRVKARLRLARLHRKIANRRRDFVHQTTSALVRAHDGVCLQDLSVQGLARTKLAKSVTDAALGELHRQLRYKTAWHHRHHAVVDHWFPSSKRCSVCGALHDGLRLSDRVWTCVCGAVHDRDLNAARNILAEGLRLLTTSPRDTRETENARRGAVSPPTGRQAPMTRESPGR

SEQ ID NO: 5907 - protein, 422 aa, unknown
  TnpB Polypeptide
MHTVCFKLKTTAYERKELARRFFALSHIHNVLVKHVRKLLIRLEHDAEYQEVLKEYRALLKKKTTPKEELVPYKERLNEIRNTYGLTEAGLQSYIKVCGKRYQKMLSSSQVQKEATRVWAGVSKVLFKDGKQVHFKKYRDFDTIGGKSPTNGVIFEKETLSIEWLGLSLNCIIPRQQKTWKYLVEALDAQISYCELERKMFPNGWHYYVKIVLRGDAPKKFIPGDSVMGIDPGTSTISAVSDTDVFLEELAKDAAKYEKKIFPLQQSMDRSKRMMNPQNYHEDGTIKKGKKTWKYSRMYFKKRDLVKTLYRKKSSVIKQSHEILCNKLLQDSRTFLVEDMDFKALQKRAKETKRQEKQSAVRQKDGSVKMVYKYKRKKRFGHSIGSRAPSLFLTILKQKTNIIFLLRRHQMQQVCPVFRHIL

SEQ ID NO: 5908 - protein, 431 aa, unknown
  TnpB Polypeptide
MKILRAYKTELKPNSTQRELLIRSCDAARAVWNWGLALRRVEYEQTGKSSNAIDQHKQLNQLKKTEIFSWLYEVSKCTGQESLRDLDKAFKHFFRRCKQKGAKPGYPKFKSRKNPNQSFRVTGLVYATETHAHIPRIGKIRLKEHGYIPVKGTENVKVNSATVSTRAGRWFVSFQVEEIRPDVVATGVPVGVDLGVKALLTASDGRTYEGARALRKSEKRLNRAQRSVSRKVRGSRNRYKARLKLAKVHYRIACQRKDTIHKAVSAVVARTKPSAERPCEIVLETLNVSGMVKNHCLAKSISDASMSEASRQFEYKAAWGGSTILRADPFYPSSKLCNVCGHKNDGLGLKDRTWTCPACGTRLDRDLNAAKNLRDLSSHAPAKAEGARLGEAIVPSVRREFTPMEMVDSCLGQPEQVAVSEVGNETGHCHK

SEQ ID NO: 5909 - protein, 424 aa, unknown
  TnpB Polypeptide
VHITAKIRIQVIPEQEDVLWHLSEKCRLVYNFALAERNRNYQENKDRPGKQYIGYVQQANALPKLKEKYPEYKWVYSKVLQTTLKSLDDDFRSFFALRQNGDKGANPPGFKGKDHFCTLRYNQSGFKIERDQIWFSHFYNTVPLIFALPAGSQFINVKQVDLFYDDIKSAYYVSIVHEVQPAQEYRDNGLYQAFDLGVTQHVGVNSHGKFIGFSVARPDKYWKTPIAELQARRDHCKKKSRKWQKLNRLKRKCERKQGNQIKDFQHKLSKKIVENTRANTILVGDLSVKQMPRSRQATPGLNRATQNTGHLSRFIRFLTYKATLAGKRVIKIDEQNTTKACCVCGALHDMPLWKRVIECECGNTMDRDRNSAVNIMVRFLSQNALRTGYRQFADNLRQTGLEIPVHSQEAPCVGGGSSRIWVVP

SEQ ID NO: 5910 - protein, 404 aa, Ewingella sp.
MLKAFEYRVFPTEIQREILLQNAGNARFIYNHLLAQIKETGEILSAYSLSKKLPELKSKFEFLKLSESSSLQHVTGHLGIALRRFFDKVSNFPVFKRKGVKDSFTISNINSNCWIWNPDSDNSTGKHQIRLAKLGWFKFSYHREIPKEYLIKRITIKLKSDNNWYISILSDNGLDLPEALNPKSSIGIDLGLKDFLTLSNGDKISSPKHYHLAQRKLKRLQRSFSRKAKGSLASLKQKSKISKLHFKIAAQRKDFLNKLSYSIVSKYDLVTLETLNVIEMSKNKYLAKAIMTSGWSIFKSMIEYKLENQGKWWCYADPFFASSRIHHNSGYKNSQLTLNVREWVCPESGSVVDRDVNAAINLDQLGQHWFLSNNLLNSKEYQEAIRSKTLLSLNLPKPESERAA

SEQ ID NO: 5911 - protein, 398 aa, Ewingella sp.
MNKAYRYRLFPQEDQLEKLAQTAGCCRFVYNEALAYRKEQYDLGTKVSGFDLIKRLPELKLQFPWLKEVPATSLQKAIADLESAYQNFFRRVKQGKTPGFPKFKVKHKSKQAFNLKWDNFSSKRANYFKCIWYNDQSNWIRLAKMGWFRLEMHRDLPENGIIKSATISKDTDGWYVSFLIELPDTASTVSPEDAIKSSVGIDFGLKSFLTLSNGKEIKSPRFYHKAEKKLKRYQRALSRKTKDSQNRLKARQQIANLHLKIRNQRKDYLRKLAYNLSMSYALITIEDLNIQGMVRNHRLAKSVITSGWSMFTKFLDEKCLETGSHLIKANRWFASSRIIYETGEYRPQLQLGCRWLTDYNGTKIHRDINAAKNIDYWGQHLLTTGEELDTKGYLALYS

SEQ ID NO: 5912 - protein, 398 aa, Ewingella sp.
  misc_feature (112)..(112): Xaa can be any naturally occurring amino acid
LNKTYRYKLFPRKDQLEKLSQAAGCCRFVYNEALAYRKEQYDLGTNISGFDLIKRLPQLKVVHPWLSEAPATSLQKSVADLDIAYRHFFRRVKQRQTPGFPKFKSKHDQKQXFNLKWDNISSSSATYFGCIWRNKQSNWIRLAKMGWFRLEMHRDLPENAIIKSATVKRDIDGWYISFLLELPELESQPCFEDAVKNSIGIDFGLKSFLTLSNGDEIKSPRHYHKAEKKLKRYQRSMSRKTKGSKNRLKAKQRVAKLHLKIRNQRKDYLRKLAFNLANSYSLITIEDLTIQNMSKNHCLAKSIMTSGWAMFAEFLAEKCLEADSHLIKADRWFASSKIIFDTGEYLPLLQLKHRWLIDCNGAKIHRDINAARNLNYWGQHLISTGEKLSTQAYLKLYH

SEQ ID NO: 5913 - protein, 336 aa, unknown
  TnpB Polypeptide
LAFKAFFRRVQSGEEPGYPRFKGKNRYDSISYPQNGFSIDGDKLWLSKIGDIKFKLHRPIEGFVKRLTICRSATKKWYASFLVEESIDHVIEPSDRVVGIDVGITNFAVLSNGEFIENPRFLLADEGMLKKAQSKRDKLPKGSQERKKATKSVNHLYERIANRREDFAQQLSHMLVTSYGIICFEDLNIKNMTQNHNLAKSILDASWNKLVQYTSYKAVEAGRKVVLVNPLNTSQMCSCCGQIVKKDLSVRVHSCPYCGLSMDRDLNAAKNILRLGLQSVAKAWMPANSLAGVVTSSVRLSTFSQGSRCLKHLPVLRIPAGKSRISEAHAVFAQHY

SEQ ID NO: 5914 - protein, 144 aa, Oscillatoriales sp.
RLKVARVHQEIADARKDNLHKLTTRLVCENQTIAVEDLAVKNMVKNRKLALAISDASWGELVRQLEYKCDWYGRTLVKIDRWFPSSKRCFECGHIAEKMSLNVREWDCPNCGTHHDRDINAAKNILAAGLAVSVRESDCKTRTE

SEQ ID NO: 5915 - protein, 460 aa, unknown
  TnpB Polypeptide
MRLVYSFRIDQNDKVIYSTLKEMSKISKDLYNQALFEVKKNYEEIGEILSYSQLDKIIKTKKNLEDNINYHLLPAKVAQQTLMLVEQNIQSFFKAKADYKEHPEKYLACPQFPNFLDKNGHFVLVFTNQQAKITEDGKIQLTRDVAIHIPEEEFSKYQQYFLKKEGFRIVPKFNQVRIVPKFNAQFFNIEIIYDKSELSLDLDIERVASLDIGVNNLITLVDNYMDEEDRKPIIINGKPIKSINQFYNKKRAEILSKLSQTNQRSSKELSTLQNPTLFSSVLIKVRFCNVLREITDWRNEKINDYMHKASRFVINHCKAFNIGHIVIGKNDGWKQEINIGSRNNQNFVFIPFNRLIQQIQYKAKLVGIEVTTTEEGYTSKCSALDLETIGKHEDHAYAGKRVKRGLFRTALGILINADVNGALNILRKVIGDIFLKPFIEKVARLIPSRGYLCYPSKVYF

SEQ ID NO: 5916 - protein, 372 aa, Alkaliphilus sp.
MILAKKIRIKPTVEQQQQLWNSVGTARFIYNWTLARQEENYKKGGKFISDNEIRKEITLMKKTEEYKWLYEVSNNVAKQAAKDACNAYKRFFKSESEKPRFKSRRKSKPSFYNDNMKLKVKENKLVNIEKVGWVKTSEQLPINVKYSNPRVSFDGKYWYISVGVEIKNPIVELTEESIGIDVGIKDLAVCSNGMTFNNINKTRLVKKLEKRLRRLQRKVSRKYEENKEGRKFVKTSNIIKLEKQIRLLHRRLSNTKNNHLHQATTKIVKTKPSRVVMETLNIKGMMKNKHLSKAIAQQGLYEFKRQLRYKCEFYGIEFVEADKWYPSSKTCSECGHIKEKLSLSERTYICEDCEAVIDRDYNASINLSRYSA

SEQ ID NO: 5917 - protein, 382 aa, Escherichia sp.
MRRFAGACRFVFNRALALQNENHEAGNKYIPYGKMASWLVEWKNATETQWLKDSPSQPLQQSLKDLERAYKNFFQNRAAFPRFKKRGQNDAFRYPQGVKLDQENSRIFLPKLGWMRYRNSRQVTGVVKNVTVSQSCGKWYISIQTESEVSTPVHPSASMVGLDAGVAKLATLSDGTVFEPVNSFQKNQKKLARLQRQLSRRVKFSNNWQKQKRKIQRLHSRIANIRRDYLHKVTTTVSKNHAMIVIEDLKVSNMSKSAAGTLSQPGRNVRAKSGLNRSILDQGWYEMRRQLEYKQLWSGGQLLAVPPAYTSQRCACCGHTAKENRLSQSQFRCQVCGYTANADVNGARNILAAGHAVLACGEMVQSGRSLKQEPTEMIQATA

SEQ ID NO: 5918 - protein, 510 aa, unknown
  TnpB Polypeptide
MHTLILRLKMNREQTALANRRFYYMWRVHNQTVKHARKLLNSLKHSREYKALSGTYKAAKESGDDELRKTTADRMDAIRDKTGLTKGSLEKYASRMQREQYRKHLSSQQVQKEADRVWEAVEDVLFGDGKEISFKKLADFGTVSSKSMNGCHYCDPLHPSQYKNDRIKYPTGEIVWMGETIKVEIPWHDQYTAFSINHDIKYCDITRKQFNSGWHYYVILTLGGPAPVKHLMGKGTTGIDPGMSTMCAVSDNSISFDELAPRCREYDRKIIRLQEKLERSRRDNNPDNYNKDGTPKKGKHKWTNTKAYKKTQRQLRTQYRRKSDYTGCMHNRLANEYIAESDTFLVEEIDYRALARRSRRPAERQDKATKIKHKDGTVKEVRKFKKKRRFGKSVNDRSPGLFIRTLAGKVLKLGGTFGFVDTKKLKASQYRHDTGTCEKTQLSQRCKMIAGEKVYRDPYSAFIIKHCLPDRASPDRDAMVKDFKNFLEKQSAMVETAKLKYPGRPACFGF

SEQ ID NO: 5919 - protein, 263 aa, unknown
  TnpB Polypeptide
VVEDDGEIEFRIIKQLKKREYIPATDEIAIDLGLRPLFATDKGGLFGRSFFDTLKAFDKKITKRMANLQKRNIKPRSDKKYRKLVDDLREFLKNEINRLINIIIKIYKPKRIVIEKLDFRSPELSKRMNRMIQNFGKRYIKEKLQKLQELYGIEVVEINPAYTSQECSCCGYIDKKNRKDTQEFECKACGNKTNAQINGAKNILKRSSLGNLTKKQVLKILIERYLERLKGCKSAPLDVIKGNPYFKDYLDSILNPRQSLTSS

SEQ ID NO: 5920 - protein, 394 aa, Anoxybacillus sp.
MIKTFKVMLLPNHKQQTRLFECAGVARWAYNFALAQQQENHKQGGKFLNDGELRKRLTRLKQTKEYSWLNNYSNNITKQAIKDACQAYKNFFAGRAKFPKFKTKKRTRPSFYQDTSKIKITDTHVKLEKLTPSKKKNRQKLNWIRLAERGRIPHGKHVTYVNPRIVFDGIHWFLTVGVEEAEVKHETYNEGIGIDLGVKSFATVSNGMMFPNINQTPKVKKLEKSIRRMQRQISRKYEMNKTKTEGGEFRYRKTENIKKLEFLVLKKRRRLKNIQLNHTHHITTTLVKAKPAYVVMEDLNTSGMLKNRKLSKAIQQQTFHAFKRQMTYKCAWHGIELIVVDRFYPSSKKCSRCGHVKDHLSLSERTYRCEVCGLQMDRDLNASINLKQYAESMM

SEQ ID NO: 5921 - protein, 374 aa, Anoxybacillus sp.
LPVHKAYKFRMYPNKKQEVLINKTFGCSRFVFNHFLVRWNDTYKKTGKGLSYQACSSQLTKLKKEYTWLKEVDSIALQTSLKHLSDAFTRFFQKQNDKPRFKSKKNKVQSYTTKYTKGNIAIVGNKIKLPKLGFVRFAKSREVEGRMLSVTIRRNPSGKYFVSILVKTDVQPLPKTHTAVGIDMGLKNFVILSDGTTYANPKFLRKLEKKLVKAQRILSRRKIGSSNWHKQRIKVARIHEKITNSRNDYLHKISTEIVKNHDIIGMEDLSVASMLKNNKLSKAICEASWATFKAMIAYKAKWYGKQLVVVAKNFPSSQLCSHCGYQNKDVKHLTLREWQCPNCHTRHDRDVNASINIKNEAVRLLTAGTAGLAY

SEQ ID NO: 5922 - protein, 443 aa, unknown
  TnpB Polypeptide
MYLTSVTNLKLTQEQFEVIDTMSYRAKALYNSAIYETNKYFEQKEEYIGYQQLDQHLRNLADIEENLSYRALPAQLSQQIIKKFDKNYKSFFSLLKMKQSNEYNKSIDTPKYKGKDDRKELIFAKSKSGQAFIFKDECIFITVTKDLHKGRMKLCKIPEYLKELDFDEEIKYMEIIPKLGSYSLHIVYLKEEKEISPEAKNWFSIDLGLNNLCTVTSNKTNSFIMNGRHIKSINQKYNKRIAKLKSAIKKSQSKSTSKELNRLYSTRGNKLNNEIHKITDFIVQSVIEHKIDFVVIGYNKGWKQNINIGKRNNQNFVQIPFSKILQHLEYKLRLLGIEVILQEESYTSKCSYFDNEEVKKHQTYKGKRINRGLFKTSNGMLINADVNGSLNIFKKCVIKVLKAQEVHDALLEPVDTGLVMNPLKIQIRTSTSLTEISALIQSL

SEQ ID NO: 5923 - protein, 402 aa, Escherichia sp.
VKRLQAFKFQLRPGGQQEREMRRFAGACRFVFNRALARQNENHEAGNKYIPYGKMASWLVEWKNATETQWLKDSPSQPLQQSLKDLERAYKNFFQKRAAFPRFKKRGQNDAFRYPQGVKLDQENSRIFLPKLGWMRYRNSRQVTGVVKNVTVSQSCGKWYISIQTENEVSTPVHPSASMVGLDAGVAKLATLSDGTVFEPVNSFQKNQKKLARLQRQLSRRVKFSNNWQKQKRKIQRLHSRIANIRRDYLHKVTTTVSKNHAMIVIEDLKVSNMSKSAAGTVSQPGRNVRAKSGLNRSILDQGWYEMRRQLEYKQLWSGGQLLAVPPAYTSQRCACCGHTAKENRLSQSQFRCQVCGYTANADVNGARNILAAGHAVLACGEMVQSGRSLKQEPTEMIQATA

SEQ ID NO: 5924 - protein, 350 aa, Hydrogenibacillus sp.
  misc_feature (162)..(162): Xaa can be any naturally occurring amino acid
  misc_feature (336)..(336): Xaa can be any naturally occurring amino acid
VVEEYFEAVSGYRKHRENGHEEMQPPNFKPKKHLRTVTRKKQGFDVRPDGLGLKRSRGKDPVSVPLPAGWNVIVLPDGRSVTGTPVEVKVKAIVRRRKVENLILHVTFDLGVVPVRAQEGPVSAYDYNSALVARATSAGVLDLFVGRELLAQIQYRNKVLAXATSAGVLDLFVGRELLAQIQYRNKVLAEFQAKLSRLREGSRRWRRLQAAKARVLEKLDRRIRPMEHALTKALAELDRKEGIAVSVLGDLTGLRRSAGTGMKGKKASQKIHQMAYDRLGSQQGYKNLRRGIRTIFLPEKYTSSTGYACGRRDPSSRRHRGHWKCRRCGFSLQADXRSGVFPHDPALALG

SEQ ID NO: 5925 - protein, 419 aa, Domibacillus sp.
MSYNLFVSPNMDPLEPSPADLFRSNHKKVVSHLIIHRAYKFRLYPNKEQEILIAKTIGCSRFVFNRFLAQWNDAFKKTGKGLTYGACSSQLPALKQEYEWLKEVDSIAIQSSIKHLADAFSRFFKKQNQAPRFKSKKNRVQSYTTKCTNNNIAVEGNRLKLPKLGLVRFAKSREVEGRILSATVRRHPTGKYFVSIMVETAVQPLPKTGSSVGVDVGLKDFAILSDGTVFKNPTFFRSLEQKLAKEQRILSRRKQGAIQRKQPLFEAKNYQKQKRKVARIHEKIANARADYLHKISTDIVKNHDIIGIEDLQVVNMLKNRNLAKAISEVSWAQFRTMLEYKATWYGKQVVIVSKTFASSQLCSSCGHKHQDVKNLALREWICPQCGIHHDRDLNAGLNLKQEAERLIASSTAGTAGLAY

SEQ ID NO: 5926 - protein, 281 aa, unknown
  TnpB Polypeptide
MFLIGKAKRDASINKDGTVTVWTIGGRKRLKFTVPQQFKSAMAQAESFDALCVAISRGRLHATLSVTLPDPECVGALPVGVNLNDVNAIAAIDMNGRSMCVTGVAHRAMMKSGEKTRRRLEDRLSTRKAEGRETRSVRRLLKRLGRKRYLQTKTFCSTAAKSLVDWVGPRAVIVLEDFRHQSPSRRKLPTVVGPVFYENIRHRIESRAAASGIAVAYVDPLSNLPCSRCGSEGSHRRGQFTCPHCAFQAPVDKNAATNVRNKYTVFKAVGCSQPAPKLDIG

SEQ ID NO: 5927 - protein, 406 aa, Streptomyces sp.
MQLRYSFRLYLNGPQRAALAQAFGCARVVFNDALRARKDAHEQGRPYPKSGGLSKQLITEAKKTPERAWLGEVSSVVLQQSLRDLDTAYKNFFDGIKGKRPRMGAPRFKSKRDTRQSIRFTANARWKITTGGDLSLPKVGDVRVKWSRALPSTPSTVTVVKDSAGRYFASFVVETEPTEVLSEVDAEVGIDLGLGHFAVLSDGTKVDSPRFLRRAEKRLKKAQRELSRKQKGSANRGKARVKVARAHARVADARREFHHQLSTKLIRENQAVAVEDLSVKGLARTRLAKSVHDAGWSAFVSMLEYKAARHGRTFVRIGRFEPTSQVCSVCGVKDGPKPLSVREWTCGECGAVLDRDINAAVNVAKAAGLAVTACGAQVRPVPVPAQRGEAGTHRDGQTTVVGVPHL

SEQ ID NO: 5928 - protein, 356 aa, unknown
  TnpB Polypeptide
VADDYVRRTAITRLSVDDEQRELLEQTIKDWLRGCQIATDMAWGDCHQKSDVQPLAYDTIREQTDLRSQHVILATHQAAEAITGCLERQSKGQPTSKPTFSSPTITYDSRTMTLFDDETVSLSTTESRIRCPLALPDADDGYQRQYLDSDDWQVTESTLTARDGEFFLHLGFRRHKTDTERDTAEDGTVLGVDLGIENLAVTSTARFISGRELTHRLREFEKVRAGLQQTGTRSAHRTLVDASDRELRYIRDVLHCASNEVINEALRYDCDVIAFEELTHIRTRTGASWGHKWAFRTLFDQIEYKAEAAGISVKQVDPTYTSTRCWRPKRGFTAYPDGFEAEFTDKHHHQKSETSG

SEQ ID NO: 5929 - protein, 432 aa, unknown
  TnpB Polypeptide
MSSKNEKKNYLVREEIYVPSEEESLILGLMGYAAYKLWNVANYERRNWKELGLDEYPDWYDQKKRLKTNFFYKNLPSQSAQRTLKKLDESWESYYSLKKSGGVENPHPPRFKRDKMYIVFVQNAIQVLGDGTFRFTIPKQLKTNLREKYNLEVKFLYLKIGRLSGLRGIKEVQVSFREDGKLKLSIVYGIDLPKEKPDNGRYFSIDLGIKNNFTCYDSANVTSFILSGWLAKTHWFDKEITRLQSISAGQQAAHGVQYPKPSKKALKLYERRRDVQKDFLHKSARFLVDYCVENNLHTIILGDWTKIRENLDGTPKDWGRKGNAKLHAFPFKKFREILTYKCALVGIRLVVRSEAYTSQCPPDSLGFSKEFSEKQNRKHRGSFVHDGASLNADSVGAFNILRRFLLNETKELKLPTEDELFALRSPKRKFVA

SEQ ID NO: 5930 - protein, 408 aa, unknown
  TnpB Polypeptide
VILVQRHQIKPSSSMYQELDHLCFLSKNLYNATMFEVRQHYFKTGKFLGYCQVNKRFQETDQPDYRALPAKVSKHTQMLVDRGFKSFFALLKKKQKGEYDQPIQIPRYLPVDGRQVLEYEKGALSFKKEGYIHLSKTEIYIPSTFPKEDVQAVRLVPKNGYIVMEVLYKREAKKTKVNNNRVVGIDIGVNNLAAVVSNVFDAFIINGRPLKSINQFFNKELAAAKSDLKIRHDKKKSKKTNRLWRKRTNKVNDYLQKASTYLVNQFVSNDITTVVIGYNKNWKQDINLGKKNNQNFVQIPFRQFINMVAYKCYLEGITVYEQEESYTSKCSFLDDEPIQKHEKYRGRRVKRGLYKTSTGKLVNADINGACNILKKFLLRKEAWNEEISSNLVEVCSTPSVTKVTVNFS

SEQ ID NO: 5931 - protein, 472 aa, unknown
  TnpB Polypeptide
MISSKTFTIETRLNQRDNAEILEYAKEYNVLYGKMLRFTWHRYNNGGTFNMKKSRFNTILQQTFGVSKRLASSVISEVEGLYKALYQLKRYEYEQLKGRINRKRKKVKKLSEKVYAIQKKAKENGFSKASLPYYRKLKADIFYVHQQINRMEQKRKNLLKEILSKNLHICFGSKRLFYAQFYLKENNFTSHKIWLEHFRRARDNRSLYIGSKDERRCNQILQLTPMIHTGKGNNFAIQLRKNTKAREYVRGVCTFKYMSGFLAKSLIKQDHGISYRMIFRGNKCYLQAMVTMDKDSNKCKTRSSYGTLGLDYNDGFIELAETNETGNLVGLQHFGLKYHGTGKKAENEIREIVSEIVHYAISVGKDVVIEDLDFRKTKSETEAAKSDKGKNYNKMIHAFDYSRYKKSFEDCCFRRDVNLIEVNPAYTSKIAAQKYCKRKKLVIHQGASYVIARRGQGYVDKYIESKKVNKSA

SEQ ID NO: 5932 - protein, 471 aa, unknown
  TnpB Polypeptide
MILSKTFTIETRLNQRDNAEILEYAKEYNVLYGKMLRFTWHRYNNGGTFNMQESKFNTILQRTFDVNRRLASSVISEVEGLYKALYQLKWVEFFQLKAKIAKTHKKYEKLQQKVYVLKEKAKSNSLSAGPLSYYRKLKADLFHAKQKLNRMNRSLKNRLAVLNSRKLEICFGSKKLFLAQYHLAENHMTSHKIWYETFCKRRDNRALYIGSKDEQRGNQLVQLVPMVNIGKGNSYAIQIRKNTKKREYVRGSCNFKHMGGQLAKLIVDKAHGITYRIKFRGKKCYLQATVTIDRDSKDCQTRSTFGTIGLDYNDGFIEMAETNETGNLIKLKHIDLEYHGTGNKAENEIRKVVSDIVNYAVSVGKDIVIEDLDFKKTKAETEVAKSDKGKDYNKMIHLFDYSRCKSTFEGCCYLRNVNLIKVNPAYTSKIAGQKYCNQRKLVIHQGASFVIARKGQGFVDKYIKPKKKEAA

SEQ ID NO: 5933 - protein, 520 aa, unknown
  TnpB Polypeptide
MAKKGKYRTFLISMPQELIPIYDFVQKKLNQFLSNPVFRPKLLTLDFSQHRGNVWRDIRDIVRKEELTSWKEEIPNPVWYFYMLCDNLLRIVKSKDDAIACFNALKDNGNKIDQELFELLNDQGIYPTVGFLRNLKRSDEPPTIAKKATFVMDYSISAEQNCQRIADNIFGFNYESGKYLTYEVVIPLSVRKNLTGRIAKPRFIKRKSDGRYIGHCSYQVGIPTVKGQNILGVDLGKKKLFSSVVLYSDGNYSDEIINSRLSHRIDEKLKRKLKDLEHLLAKNKTFEDLINGDINLFNFHLEEIRQDRVNQIMELRGNISHTKRYLTKLLASEVVSIAKENDCKEIHLENLSWLESQGGRWNHSEIQDFVTEFAELKGIKVIKVCAKHTSSAHPITGELGRKSGRNVRFSSGDVIDRDLLASINIAKRNKRNQKENKITKLRKNHTSTPKKVKKPSNRKVSLAIKNKLLEKNQRGTKIVVFYPRQTCKGTWEVLDISSKPHMLSLFMCHLRHPMSICYMT

SEQ ID NO: 5934 - protein, 394 aa, unknown
  TnpB Polypeptide
LVRQTAQRRHESEPARLPETRRRPSAFHGHVQSRWLQTRHPVQSRPTLERLQSESVLLHTLCKSQMRPDVDLSSVENVRQVRAVWTGEEGVALRGPVCKVKIDVSESPGEQTVGVDLGITNFAALAYEDGHSEAVPAQLPETRRLLLQQADRSRCDDSNSEQATRLNHKKSERRTHYFHALNHIVERCVEDGIGTIVIGDLSDIREDEESDESRNWGKHGNLDLHSWAFDRFTKLLNYKAEMEGISVEKVSERDTSKSCSCCGRTRDANRVERGLYVCDECETVANADVNGAENIRQKVSPSSPNLSVNRSNGWLAQPSTFLFNTETGAFAPSRTGHVVNHNIPTQRCGAVGILALQRGRMSMTRLSTKTAISRDMWIVNGIDDMMANNLRSPS

SEQ ID NO: 5935 - protein, 306 aa, unknown
  TnpB Polypeptide
LEGPKVSVFSPTYSLASSSIVRTANPYCRCRNLRIFPSSNTAQFLTPRLSKKSRLRRSQPVNGSLSFTVGDKETPEKPTDPDRCVGIDVGILKYAHDTDGTAVESLDLSDERERLERAQHDLSQKERGSANWERQRQVVAERHADLKRKRRDFLHKLSNYYATEYDLVAVEGLDAKELVELPETHGIGRERRGERSFEMLEYKCEREGTHFAEVDQRNTTKACASCGVKTDKPLWVREHSCPSCGFGGGQGTRTQRGTFFLAVLKYRSGSLRINACGDCAPYGHRCVCKARHRNRKPHHQKSKTSG

SEQ ID NO: 5936 - protein, 375 aa, unknown
  TnpB Polypeptide
MQQTITAKLQILFNSSDKQILCDTMKAYSDACNYVSDYIYKTHNLSRYSVQEDTYYQIRESFGLRSQMAVSCVRTVIAKYKTILENQNEWIKPIFRLPQLELVWNRDYSLNAKNDTFSVNTLNGRIKVKFYKNGFDKYFTNDCKFGTAKLVFRHSRFFLHIPVTYEINELAMSDVSNIVGVDRGIRFIATTYDSKCKTTFYDGNAIKQKRGRYKTLRKELQQVHTPSSRRRIKAIGQRENRWMQDINHCISRALVESNPDGTLFVIEDLKGIRSATEKVLVKDRYVSVSWSYYDLEQKLTYKALRNHQLVEKVNPAYTSQTCPKCGHTEKANRDKRRHLFCCKNCGYKSNDDRIGAMNLYRMGINLLVPDTAATE

SEQ ID NO: 5937 - protein, 372 aa, unknown
  TnpB Polypeptide
MKTYKFKLYQNKRNRYLKRTINAAASIWNHCIALHKRYHSIFGKHLNKFQLMKHIAKLRNKKSYWKLVDAQAVQDISDRIDKSYKLFFKHHKTGVRPPSFCKSKKYKSFTLKQTGYKLFGSKVRIGKRIYGYHKSREIKGKIKTVTVKRVPTGDMYIFIVTDAQSESIGVVTGKVAGFDFGLKTFLTNSNGNNIQSPLFLLKARKQLRKLSQQLSSKKLGSNNWNKARIRLVRLHSCIANKRRNWFWELSHKLCDTYDVMCFETLNLRGMQRLWGRKISDLAFGNFLEILQTVAAMKGKSVVFVGKWFASSKLCSECGYKHRKLQLRDRVWDCSSCNTRHNRDKNASINIQREGASSLNLDTVRQPLVASVV

SEQ ID NO: 5938 - protein, 196 aa, Caldicellulosiruptor sp.
MEQDILCWFSRNCFSKCRKGSKRYRKLLKAKKRMLRQIRHQIKDILHKITSNFLKICLQKEIGTIIIGDVTNIRERVEGNDNFNQKIHQWCFRKMVEMITYKAQLLGIEVELVPKEYTSQVCPVCGSKNHPAGRNYECKSCGFRYHRDGVGAINIWRRYLGKKSQVVAGLAPVRGVVSKPHLCGHGVKNAPWKAAR

SEQ ID NO: 5939 - protein, 164 aa, unknown
  TnpB Polypeptide
MGRCPKDTILVVRGNVRASLSKHPRRQRKHFLHVASTRLVKTHSYIAVGDVNAAQLAKTSMAKSVLDASWTSFRHMLRYKAIAHGAVVEIVSERNTTRTCSCCGVIPDSSPKGMGALGMRHWTCSGCGASHDRDVNAAMNILRVGAERRPLVEEITSLQAVGRR

SEQ ID NO: 5940 - protein, 389 aa, Escherichia sp.
VKRLQAFKFQLRPGGQQEREMRRFAGACRFVFNRALALQNENHEAGNKYIPYGKMASWLVEWKNATETQWLKDAPSQPLQQSLKELERAYKNFFRKRAAFPRFKKRGQNDAFRYPQGVKLDQENSRIFLPKLGWMRYLNSRQVTGVVKNVTVSQSCGKWYISIQTESEVSTPVHPSASMVGLDAGVAKLATLSDGTVFEPVNSFQKNQKKLARLQRQLSRKVKFSNNWQKQKRKIQRLHSCTANIRRDYLHKVTTTVSKNHAMIVIEDLKVSNMSKSAAGTVSQPGRNVRAKSGLNRSILDQGWYEMRRQLEYKQLWRGGQVLAVPPAYTSQRCACCGHTAKENRLSQSKFRCQVCGYTANADVNGARNILAAGTPFLPVERWCSQAAR

SEQ ID NO: 5941 - protein, 391 aa, Sporolactobacillus sp.
MPLKGLKVRIYPSQTQKLKIKLSFGSTRFVWNQMLNMMIERYKNNPKAKFLSTYDLNYLLPALKREYPWLKDAESTSLQATNHDLIEAYKKFFKEHKGFPRFKSRKFPKQSYQCKCVNQNMKPIASHYIKLPKLGLVKFKTGQQIPDKIKSATVRRSPTGKYYAELLVECENQVFKKTNQQIGIDLGISDLMVCSNEKKIPTIRFDKILASKKRYWEKRLARRRLQAKTQMAWDHHNKVLSPRCLDNFKNYQKAKLMVAKLNEKIANQRKNYLHKLTTRLVKENDVIVIEDLKTKNLLHNHSLARAMANQSWREIRRMLEYKCEWYGKKLIVVSPYKTSQICSHCGYDDGKHTLDIREWTCPKCHVHHDRDINAAKNILNVGLGRASVKES

SEQ ID NO: 5942 - protein, 261 aa, Anaerolineae sp.
LDDNKARLTGSIRVTPRHVKLPRIGKVRTKERTDKLLELIQAGKARILSATISREADRWFLSLTCEVERPDPEPREVRSPEDIVGVDLGLESFITLSDGTKVEAPKPLKKALRLLERRSRQLSRKQKHSSLRLARLHRRVRNIRWDFLHKVTTWLAKTKPVIVVQGMSRNGNLSQAIYDASWGMFRRMLEYKCQWYGAVLIVAPRDFPSTKVCSNCGEISPPLLLSQRVFRCDACGLEIDRDWNAALNLWQYGPYREFPGK

SEQ ID NO: 5943 - protein, 419 aa, Pseudothermotoga sp.
MKKAERIKNTLQETKERRKTQRPVVFQLKLQNLSKQRIEKLKRAFLEAKWFYNWLVSDLDRLNRPANKVGMVEVKVGDVFEERELIILGSQIKQEIADRLKDNLRALSKLKQNGHKVGQLKPKKFVNSIALKQYGVSYKLDFVRNRVRIQKLGSFRVLGLHQIPDNAEIANAVLVSKPSGYYLHVTCYLPKDSLQKEPIGEAIGIDFGVGYKLTLSNGIKIDYEIHETQKLKRLQKRLARAKKGSNNRSKIRHLLRREYEKITNRRRDAQNKILAFLRLYDKVVFQDDNVKNWSKLFGGEVHSSGIGGLKARLRNSLATPIPVGRFEPTTQECFICGKKHRLSLSDRVIQCECGWRQDRDLNAALVILKKGLGLSPNQAVGLDRPELTPLERKASARILGSNPYIRVSFLIEGGSPLLQ

SEQ ID NO: 5944 - protein, 352 aa, unknown
  TnpB Polypeptide
VLKVWTGSCWSWLKIRTLGRDLPGGFQMGSPQLVRKGDRWWLHTPIEKTFEAPAKVIEQLTAADTRICAVDLNLDHHLAVCSVQTVDGTILATSFIGNGTAVSGCRKQLLGRIARNRSQTGIIAENEQDNADLWAKIRHVDEQIAHLVSSRIVQFATKHEASILVFEHLGNLRPEQGKYSRRGNTKRAYWMKGRIFRYAKYKAWNVGGIITARVNPRNTSRECHRCHGLVVRYNQGQPQEGYTAGAALCFCPQCQMRDHADRNASLRVGQRLIERTQAPLKEKPHALVRRAKREPKGSGVGISQDAKRQRRPSTDAARRGDHANGHGTAQRGRRRMGAPLSDIASTLRIHFE

SEQ ID NO: 5945 - protein, 269 aa, unknown
  TnpB Polypeptide
MVLLSLFFGLLKKKNKGMYNAKVKLPNYLPKNSFSTLIIGFVRLNEDTFVIPYSNSFKKISIKIPPILLDKKIKEIRIIPKFNARFFEVQYTYEVEEEQRNLDKNHALAIDFGINNLATCVTSKCKSFIIDGKKLKSINQWFNKENARLQSIKDKQKYGKKPTLRQKYLYSSRNNKVNDYMSKTARKIINYCLENNIGTLICGYNKTFQRNSNIGKANNQTFVNIPFGKLREKLEYLCKLYSLRFVEQEESYTSKSSFFDMDILPKFKI

SEQ ID NO: 5946 - protein, 407 aa, unknown
  TnpB Polypeptide
MLISKKIRLEVSEQDAATLEFMQGKCRGLYNWWVMRLRNGEKWPGWEEAKKTLQASKEYDPELCFVYGKLLHEVYFRLHKAMDAFFERVKQGQKPGFPRVRPRHCFFTLIYPATYLKVEGKSIRLPTGGGGRHGPKRYPDITATLTEAAPNGYKEVAISRDGQGHYYASFVHEVKEETHEQQGIVALDLGIKTLAVGVNEQGHFYHIGGFTGHQWYNKQLDKLRSKRAHCKKGSRRYKHLSRVYKRVSQKKRNKQHDCLHKASHLIAHTLVESTVVIGDLSQRQMVTKEHATRNKHRNRAVYNDWGLYTFVQMLAYKCLLYGKELMVLDERDTSKMCSRCGNKQPMPLWKRTYRCRECGLIMDRDENSAVNILMRFLARLGPHTERISVRCADVFTAIDDMFTYEHI

SEQ ID NO: 5947 - protein, 331 aa, Tetragenococcus sp.
MKKEDLVKVLKGYKFRIYPDEKQIQYFIQTFGCVRFTYNQLLLARQKALQEGEYKTDVSPAKLKLDYPFLKKTDSLALANAQRNLDRAFKNYFSKRAGYPKLKTKKNSWQTYTTNNQKHTIYFVGNQLKLPKLKTLINVNLHREVLGEIKSATISAKDNQLFFVSILCLEEVTPLPKTGKSIAISYCPKHLVQIPATNYLPAFRQEKLQWQLDKAMKRLKVRAKAAKNRKVLLEKAKNYQKQKVKVQKLYMAKNEQKKNYMNQVSYRLVRDYDYIYLEKTPTFMENMNFSETDWHHFLRKLQYKVQWYGKKIIFVDAVENVRTKENSPLNV

SEQ ID NO: 5948 - protein, 311 aa, Halophilic sp.
MTYDKRAATYHRYKASFAVVNGDPVECQYELPVDLAGTPYERYVLDARWSFSTSKLVYDGERFWLHAVMKRRYADDSVYPLTTKGSDAQEDFTRVLGVDLNVDGYSAVTSAGGFHGNADYLNHRRAEYEALRGELQQTGTRSAHLRLQSRQGVEWKWFDQYAHDVANSIVADAVRVQATHVVFEKLTRIRKRISIAPKFQQWLFRRVQKYVEYKLEEFGISSERVGAYCTSQTCSRMDCDCVDEDNRDNKHFECVECGYVLNADLNAAKNIGLKFLDDLPTSHTCSTGKATSQLALVSGTLTSSGKFTRME

SEQ ID NO: 5949 - protein, 273 aa, Halophilic sp.
MEVRRTVRVKLDVADSDADFLHETISEFLWAANYVVDHAWQGEYKTTSKAELQRATYGDVRAETRLQANLVQNARNKAADAVQSAVARWKQGDVAGKPHFTAPTLVYDKRCATFNDDHATLSTVEGRITAEYVLPDEGRETPHSEYLFNDDYEVTGGELHYRDGEFYLHVRTKADVESEIADDGNAGHSTVLGVDLGIENVAVTSTGTFWNGSELNHWHREFEKRRGSLQQRGTRAAHETIQSVGRTETGRYDPSYTPSRKNSWWKLLRTTVT

SEQ ID NO: 5950 - protein, 404 aa, Halophilic sp.
MRYNYKYRLDPPEALTETLLYHVDTCRQLYKLNETDEIPARYKVQGTLPDLKSWWDDLNDVHSKVLQMVVKRVYDNLSTLKAQKENGRAVGMLKWKPLREYRSLTYNQSGFKLKNTSGRPVLWLSKIGEIPIHLHRDILEDATIKQVTVKREPTGEWFSTFGINVDEATPDKPENPERVVGVDVGILKYAHDTDGTAIESPDFSDERERLERAQRDLSRKEHGSTNWEKQRKTVAQRHADLKRKRRDFLHKLSAYYAREYDLVAVEDLDAKGLVELPGNSRNRAGASWGTFLRMLEYKCKREGTHFVAVDPKDTTKECASCGVKTDKPLWVREHSCPACGFEADRDANAAWNILHRGLEEVGVGHSESPPVETALPVDTPVSAKRVVETGSPTLTERTASAVSE

SEQ ID NO: 5951 - protein, 333 aa, Halophilic sp.
VTYGERSRLEIPVGFDLKEKYDLGYHERLRLEASGDPRWAGEQGRLELVYDRDAEAFRARQPVSEATPRRDESLATTSGDEDVVAALDIGANNLVAVTTTAGHQRLYHARPGCHRFRHTTKQIAALQERLAYGEWSSERIRKLYRRRTERVYHLQDALVRNLAEWLADLGVGAVVAGDLSDVLQKHWSARVNEKTHQFWSHGRFRRRLREVLEGEYGISVGEVSEAGSSSTCPECGSGNVHREEDLLTCYDCGFEGHSDVAASENLLIEHAEDGSMARPVVSRENTTESGHREVPRLEWDDHRWRRRDRSIKEEPANRSTRKGKLASGVSGTA

SEQ ID NO: 5952 - protein, 412 aa, Halophilic sp.
MYYAYKYRLKPSDAHREELDRCRDICRQVYNHALYRFNQIPEDAGTLNQRVRSIRDELPSLKDWWDGLTDVYSTVLQTAVMRIEDNIKSLGELKKNGYGVGQLKWKPPREFRSFTYSQSGFKLDKKGGQTVLSLSKLADIPIRLHRDIPDDAKLKQVTLKKEPTGEWFATFGVEVDRKTSEKPDILTDVVGIDVGILKYAHDTDGTAVESLDLSDERERLEREQRKLSRKQHGSNNYEKQRRRVAGCHADLRRKRRDFLHKLSNYYAKEYDFVAVEDLNVAGMMQFDSNSRNRASAAWRTFLRMLEYKCEHEGTHYIPVNPRGTSKECAACGVSSDKPLWVREHSCPSCGFTADRDWNAAYNILVRGLKKADIGAGCSESTPVETALPTGTAVVPAKRVVETGSPVLNARSA

SEQ ID NO: 5953 - protein, 260 aa, Halophilic sp.
VVYDKRSATFHRDHVSLSTVDGCIECDYILPDGSETPPTKYVSDEDFGFRMAYLQYHDGDWYLHASMRNVEADEQTSDSESKYRTVLGVDLGVNTLAVASTGRFWSADEFNHWRREYEKRRGALQQCGSRHAHENIESVGQKEYGRFKIHLHTVANELIEEALEHNCSHIVFEDLTHIRENIPEATWQHVWGFRRLYEDVEYKAKEHGVEAMQVDPRNTSKRCSTCGFTHDDNRSGASFECQQYGYENHADYNASKNIGL

SEQ ID NO: 5954 - protein, 428 aa, Natrinema sp.
MTAETTVTKTLEATTVPPTAHKQRRLEDTVGAYRDALEAAFESGADTQSAVNDIVTGYDLTSYAKDALKQYVPQLRRTYDADELADDHPVRFTNRGFRIDYSSDREYGFCWRVPQAGRGNAFWIPLRINPSQEDLWFDLLEGEASVGEFRLFQNRRTWTLHVTIEYTIKEPDASDDPTYVGFDIGESALITGCALKRDTPTTPLLIDGGRARHLRKEMHTTLKRLQERDAAEWRLDERFGHYQNALTDIVEKASREAVEYARQFDDPVIVLEDLSYIRERLDYGAYMNRRLHAWAFARLQGRIEDKALEAGIPVEYVQPAYTSQTCHACGHIGRRDEQAEFRCTNDECHISTFQADINAAANIARRVDPWGESVPWKPERDDTPRNGSPSDRATERREASRQPRQTTLSEYGSETSDDEASLVGSPVL

SEQ ID NO: 5955 - protein, 319 aa, Virgibacillus sp.
MILSGRKDAANGNFVFNYDIENKQIHFKTPSGVFINMEQVHFPYGQEKVASAIQTQQNCKNKKKYGKPIAWSLEDNGDYYIVKCMIDVETNSQTNYSKFDGVIGVDCNVDHFAIANINAKGQLLSSCTLPFKLEGKTSGQITKIIEAEAIGVVAIALKANKPIALERINTTTSNVSNPYGNKKANRKMAMFAYKKMIAAIKSRAEKIGVTVYEINPAYTSQIGKMKYMKRFGISIHQAAIYVIARRAMGFREKLPPVLRALLPEKMIGAHHWAQWRYVSNHLKKVHTHAFYLAELFDVDRFHKTGEFFVSGALGPLDVG

SEQ ID NO: 5956 - protein, 305 aa, Escherichia sp.
QNENHEAGNKYIPYGKMASWLVEWKNATETQWLKDSPSQPLQQSLKDLERAYKNFFQKRAAFPRFKKRGQNDAFRYPQGVKLDQENSRIFLPKLGWMRYRNSRQVTGVVKNVTVSQSCGKWYISIQTENEVSTPVHPSASMVGLDAGVAKLATLSDGTVFEPVNSFQKNQKKLARLQRQLSRRVKFSNNWQKQKRKIQRLHSRIANIRRDYLHKVTTTVSKNHAMIVIEDLKVSNMSKSAAGTLSQPGRNVRAKSGLNRSILDQGWYEMRRQLEYKQLWSGGQLLAVPPAYTSQRCACCGHTAKE

SEQ ID NO: 5957 - protein, 293 aa, Escherichia sp.
  misc_feature (290)..(290): Xaa can be any naturally occurring amino acid
MASWLVEWKNATETQWLKDSPSQPLQQSLKDLERAYKNFFQKRAAFPRFKKRGQNDAFRYPQGVKLDQENSRIFLPKLGWMRYRNSRQVTGVVKNVTVSQSCGKWYISIQTENEVSTPVHPSASMVGLDAGVAKLATLSDGTVFEPVNSFQKNQKKLARLQRQLSRRVKFSNNWQKQKRKIQRLHSRIANIRRDYLHKVTTTVSKNHAMIVIEDLKVSNMSKSAAGTLSQPGRNVRAKSGLNRSILDQGWYEMRRQLEYKQLWSGGQLLAVPPAYTSQRCACCGHTAKEXTGI

SEQ ID NO: 5958 - protein, 410 aa, unknown
  TnpB Polypeptide
LVEKLNSNDNKIYRSVKIRLLPTKEQEILFWKSVGVARWSYNYFLSESYRVYQEWLEDNSKPKYISEKDVRKYINNHLKKTTHTWLKEVGSNVMKQGVKDANIALQNFFKYDKGYPKFKSKKRSKPSFYVNYESLKRTPNGFHGERIGVVKTRESLPKIGKGQKYCSSRISFDGKFWYLSVSFEVERVDTKLSDNRLGIDLGIKELAIVSNQGGTMVKKYHNINKTYEVKRLEIKLKREQRKFSRKILINTSHYSDNGRPIYSKDLELCKNIQKQKGIIQRLYRRLLNIRTNYLHQTTTEIVKTKPFQIVLEDLNVSGMLKNRHLSKSVSDSKLYEFRRQIEYKAELYGIEVVIADRFYPSSKICHVCGHVKKDLKLSDRLYRCDCCGNVIDRDVNASINLANYNIESIK

SEQ ID NO: 5959 - protein, 340 aa, unknown
  TnpB Polypeptide
MSIVQRAYKVELDLNNEQTTACKKHAGAARWAYNWGLRRKEVEYRTTGKSPNAIDLHRELNALKQTAVPWMYAVSKCAPQEALRNLDRAFDGFFRRANLKKVGQYRGKLGYPRPKSKKHGPGDFRLTGSIAAFPDAIQLPRLGRLRLKERGYIPTRGVKMLSATVSEQAGHWYVSVLVEQEHVVPENTGPVVGVDLGLKRLATMSDGGTAENPRHLKTRLRKIKRLHRAVTRKVKGSQNRKRAARRLGTEYRTVANQRANTLHQFTSRLAKTKSVVVIEDLNVAGMLKNHSLALAISDVGWGAFRRQLTYKAAWYGCRVIVADRWLASSRTCSCCGWMSS

SEQ ID NO: 5960 - protein, 425 aa, unknown
  TnpB Polypeptide
VKLTYKFRHPKSAQLDLLCTISKKLYNQANWYIRQDFFHLENWLNYQDLNFILQHSYNYKLLKAQTSQQILKIIDKNWKSFFNAIKEWKKSREKFNGRPRPPKYKQDGYNLLIFTNQNSKVKNNKIILTMSKLFKKAFSEFEHPIEITIPHYRNKNFERYQQIRILPRKEFYVVEVVYKRKVEKAELNDDSYLSIDFGLNNLITTVENRNVKPIIVSGRVLKSINRQWNKRKARLNSIKDKQNLKRTNRLDSININRNSVITDYLHKTAQLLVGYCLKNQIGHICLGKLENIKQNIRMGKRNNQNFVDIPIQKLKQMIAYKAQLVGIQIHEIDESYTSKCSSLDLEPIQKRKNYVGKRTKRGLFRGSNYLLNADVNGALNILRKVVGDGFIQNLSDRGCWFQPVRIRDIFQTSHEQFLLKCYTIT

SEQ ID NO: 5961 - protein, 396 aa, unknown
  TnpB Polypeptide
LDKTFGSCRFIYNKMLEERKKVYQELKDDKEAFYDHKYKTERQYKQDHSFLKEVDSKALQSEWRHLKSAYDNFFRNIKKGIKKGFPKFKSKKNRQSYTTYNVNNNCKIDFENKKLKLPKIKTWVKYRDDRIFSEYIKHITVSKTKTRKYFASVLIEIESNVIPKQVVKEDKIIGFDMSASKFLIAKELKLSSPRFYRKEEPKLIRLHREASRKEKGSSNRNRARINLARLYEKIENRKRDWIHKITHLLSNHFDCVILEDLNVKGMQRFNSGLSKSVSLDFSWNQFVTIMKYKMEQKGKHLILVDRYFPSSKLCSECGYKKEDLELSDREWVCPKSQITHDRDVNASVNLRNEGIRNLKENNITIINNNETTVGTTVDAFGENVRLLDQRFKSNSR

SEQ ID NO: 5962 - protein, 592 aa, unknown
  TnpB Polypeptide
MLLSELCSAGKNLVKSNASVQMETTDDICFQVSQKLKTFQVPDEKFVIVESRPHHKSLTSKDRLNSSKVNIQIMKLSETLDQVSTLKEKDCKQFWTPQKKEMSKKLWLPTKIDCVDSVLNLSKESSKSTMGKSWFSIKKKRPQNKNSSMTSFQLSQYSLPVCTDFARTHLKTKLKNKLDSKSVVHLKTMKFRLFPTEEQKTEIHRMLDQFRYYYNAVLTIFEHKNSKTEILSKKKHSEYDMRDLLNRYTYSKTKKDGFTFHNCDENEEKSSIFIPDWWKPKGLLHSRVPRGAVCKFTSSLNSAISNFKAGNIRKFEMNFRTKKNPTDYLFFEDKSYPKIINKIKSHFWYRTKDRKRKVFSFDQIKNKKSLEIIYEKETDRYFLHTPVEHDFFPTDDLRNDNQVTLNQREERIISLDPGVRKFLVGYDPKGSSIFFGDGASKKLTKLLIEIDKRIENGLDTRKQQRYVKNLISDLHWKICSFLVKNYDNILLPDFRVQQMVRGRKLSKMTKRLMMMFSFHTFKEKLKFKCNLYNKTLIIVDESFTSCTCGRCGYINNVKGNEQFECSECKLKLDRDVSGSRNILLKNLSLRLG

SEQ ID NO: 5963 - protein, 390 aa, Streptomyces sp.
VKLVIRVKLLPTPQQASALQATLHACNEAANHASRCAFTTGIKRNRELRTQIYAQLKDRWGLGAQAAQHVIKKTCDAYAALAGGLKAGTFGRPGSKRRAKATGKPITFRPDAAQPYDDRMLSWQTEQRTISIWTVQGRMKRIPYTGQEDQLVLLARRRQGESDLIQQNGHWYLLATIDLPEPPENPAPQGFIGVDLGIENIATTSTGKRHSGRQTNRTRENDRRLRRDLAKKNTRSAKRRAKRNAGKQARRTRDINHKISKHIVAEAQRTGRGIALEDLSGIRERARLKKPQRVTLNSWAFGQLGSFIAYKARKAGVPVVYVNPAYTSQECSQCHHIDKRNRPRQAVFTCRSCGFVEHADLNASHTIAQRGWWMWVRGAESQVPVLRLVA

SEQ ID NO: 5964 - protein, 431 aa, unknown
  TnpB Polypeptide
MTLLDSCIMPDLTAIKVRLYPDKEQREQLDRAFGCCRFLWNQMLAEHKQSYEQYKIDGIKLKYRTEKEYKILFPFLKEIDAKALQNVNWKLQDTYTHFFQNIKDRKAGMTKRHVGYPRFKHKHGKQSFTTNNINDNVKIDFVARKLKLPKIDWISYRDDRVFEEKIRSITVSKTKSGRYFASILIACEDQVIPLSKIHEEKVVAFDMSMKGFLVSEECKLGNPRFFRQSINKIRKLHRKVSRTKKGSSNRDKACQKLAAAYEHYVNQKKDWEHKLTRKLADEHDAVIVEDLNIEGMKQFNTGYAKSITKDISWSKFIAMLGYKLARLGRHLVKVNRFFPSSQLCSSCGYQYHELALDQREWTCPACGSIHDRDVNAAKNIKREGMGILRERNITVILDNATVGTTGSNAFGDLVRPLALVARIDEEGIHGH

SEQ ID NO: 5965 - protein, 274 aa, unknown
  TnpB Polypeptide
LENDTLSLSKIGDLHIPWYRRVKGEPSSVVLSRTPSGRYYVSLQVEQQPLRVVGGAQNQVLSVDINTKAFHFFNGRTWSQVELPRPLLAAVSRLGTAQKHLSRGEKGSKNRGKARIKVAQIHQRVFDIRTDFLQKWSTQLVHENQVILVETLRTKNMLKNGRLARAISDAGFGGFLRMLEYKCKWYGRTLVKVVLHFDEKNAELKLRDRWRCPHCKTEHQRDENAIVNIFVEGLRILAEGRSVAACGGKVRPKREPRRAPVKQETSLETSSNAA

SEQ ID NO: 5966 - protein, 473 aa, unknown
  TnpB Polypeptide
MAAATEEERTRTNTFHLAPKAEWRKVCLIELLDSAAALVNIVTYHRRQACFDQDTTRTDVWNAVTKTEMRNRFQSVLGRAITDKMLDKCDEQWRSFFEQLDNYYDGERDEKPGVPGYWKDDGKRVLKACIRNDAYTVEWGEHSWIELALGSELKEKYGIPLNQRIRVPIKGDAQYEGHGGRLELVYDRSTESFTATQPVTFLNDTTRATDASDEGCVAAVDVGANNFVAVTTTTGHQRVFHARPLFERFHQYTARISELQSQLPTNVDSSRLIESLYDKRIRHRNHAQDALVRHLARLFDEWDVNTVFVGELDDVRETHWSATVNEKTDLFWAHGRFRDRMHTVLAGECGISVTEQSEAGTSSECPRCDEDTSVSRHGDVFRCGSCGFEGHSDVVGSENFLQETVAGDVDFNEERPMARPADSGQNGPERGHQSVPRLEWDDHRWRQRGHATNEEPANRSTQAGNLASESGPA

SEQ ID NO: 5967 - protein, 300 aa, unknown
  TnpB Polypeptide
MELWKLVLTRWDWITIKLRKSDVNYINKHCLEKKHCVPILRKRGKEWFLDFSFEENVKLNDIDAKNQTIIAVDLGINTSATISAMRSDGTILGKHFCKHSKEIDSLTHCLNRVKKAQQHGNRKTPKLWSKVKGINHDIAVKTASYIMDIAIFYNADVIVFEHLDTKGKKNGSKKQKLHMWRKTEVQSIVTNKAHRLGMRVSHICAWGTSKFAYDGSGVVSRGKNGGFTTYELCKFKNGKIYNCDLSASYNIGARYFIREILKPLPETERSSLEAKVPAVKRRTSCVYADLRKLYAELKAA

SEQ ID NO: 5968 - protein, 496 aa, unknown
  TnpB Polypeptide
MRAQTFSYVVSVKLKLSKSIENRLEKSFHIATSAYNEALSFGLRRFEALKQNATYRALLKQRRLDNKRKECDQVLLELQKSYNLTEFGLSNHLGQRRKKSDSPYKQLNSGELQVIAGQAYKVLEKVLFYQIKPSRLQFRSKYDLNVSYRNRVNTTGTRLVPSDRKGVAYRLYLHKMSTFIDIPGKAFNNYQQMSLLRSEKIKYVQIIRKTIRGKKVYSLQIVCQGSPLSKVTRGEGVLGIDPGISTVAYASNREVALVDLVPKDINRKERLMRYLDRKIECGRRVNNPNCYNNDGTIKKGVRFKQPSNRQMRLGVRRLKAYRSLSEERKKLQGQLVNHLISQASVIKMEDLNVKGLQKRSRDIRINPKTNRPFSKTRFGKSIFRAAPSAFRKALQTKAHQLGINFEIVSPRETKPSQYNHLTQNFEKKTLSTRIFNLSEDITGVQRDLYSSFLIGHIENGIYQQEQLNQDFPEFYQLMKNFLHEPKISSRLDWYLQ

SEQ ID NO: 5969 - protein, 406 aa, unknown
  TnpB Polypeptide
MFILEFKTVGKTTQYSAIDEAIKTVKFIRNKSLRFWMDNKGVGQKGLYNYSTLLRKEFPFVTDLNSSACQASIEPTWSAISRFYDNCKKPSVKKKGYPKFKKNQRSVEYKTSGWKLSEDRKSITFTDKKGIGTLKLKGSRDLNYFQIDQIKRVRIVKRADGYSVQFNIKEDVRAIKPREYEPTKHCVGLDVGLKYFYADSDGNTVEIPQHYRKAEKQLNKLNRRKSKKFRKGKPVSRNYLKAKNRYARKHLKVSRQREEFAKEKALRLIQSSDLIAYEDLAVKNMVRNRHLAKSINDVAWSTFRRWLEYFGYKYGKITVAVPPYNTSQDCSNCGQKVQKSLSVRTHVCPHCGFICDRDINAAINILKKALSTVGHTGTFVFKAINAWGEDASILIGSNTCQGKQPR

SEQ ID NO: 5970 - protein, 390 aa, unknown
  TnpB Polypeptide
MQSIRVVELNTLPLTKSKERLLDGLRSKYLFCANETLSVLKQNYPLTQKELHNLTYNRLRNETKLFSQLVQTCRREVWSRRKKIKNGFVRISPKFENRGFKVFFTNRGTFCIRFSIFENRKVVIPIKKDGVYQRFDNFLKDGWDFKTIIIIENQVKVVLKKDFPESVNKNTIVSVDIGSVNLAAITVYDSAKKKVLRQLYFGRDVAVRQRKYVIRRAKLQSANNRKYLRRLKSKQSNFVKTRSEQVAWDIVRITKQFNAMISIENIRNLRSHNKGRKFNGLVCRIPYAKFFSALNNICIRESIKIIKVSPRHTSQECPVCHMIDKKNRKNSIFRCINCGRTLNSDRNASLNIALRAVKIAFQPNLSDQISESGVTVNSLGCPNEVLVGCL

SEQ ID NO: 5971 - protein, 451 aa, unknown
  TnpB Polypeptide
MQQIVTAKLKLITTPEQCAALRETQLAYRDALNAVSRYAFSQGKTSRVTRLHKGMYAELRTHPGLPSQLACSVERQVAATYKGLWTKLKKHAEHRRAKLTKKRFKGLDQPPHYSSPTVQYTYERDYTFQCDCRVSVGTLNGRISITYQGYEKHIALIRQGGTIGDAKLWYDRSKKRFYLLVSLSIDLPDPTPAQLTDVVGVDVGIRYLAVTSTATGKATFHPGSQVRHRANHYARLRKRLQKKGTRGAKRRVRCIEQRERRLKAQANHTLAKHIVEHHPHALIGLELLTDIRERTKRRKRRRKKNGKGSEPVSPKARKANRVYAQWSFAQLHDLISYKAALSGGLAIKVDADYTSKQCPLCSHTADENRPRKGLLFVCQNPRCGYTLHADLIGARNITMRTLLVRHDWIRTGHLSIAPDTSDKEAKAVRLSRYTGLRWSPDASLRLEAGGH

SEQ ID NO: 5972 - protein, 399 aa, Streptomyces sp.
VEAVQVRRAFKYRFYPTDAQAAELSRTFGCVRKVYNLALEARTQAWTLRQERVNYNATSAMLTAWKKTEELAYLNEVSSVPLQQALRHLQTAFTHFFARRAGYPRFKSRKKSRKSAEYTTSAFRFRAGELTLAKMTEPLEIVWSRPLPKGASPSTVTVSQDSAGRWHVSLLCEDPTVGPLAPTDAAVGVDAGLDHLLTLSTGEKISNPRHERRDRTRLARAQRHLARKAPGEGANRAKARRKVARIHARVADRRRDTLHKITTRLVRENQTIVIEDLTVRNLLKNGKLARAISDAAWSEFRSLLEYKAQWYGREVIAVDRWFPSSKLCSVCGTLRDKLPLHVRTWTCDCGTTHDRDVNAARNILAAGLAVSACGAGVRPQRSTPGGQSATKQEPPRREP

SEQ ID NO: 5973 - protein, 457 aa, unknown
  TnpB Polypeptide
MRSYEVAHSANPGKEAALVALLPWWQRGLVHVQMIQVRQMKAGHRIGFLDTKDLPPYLAQRQWKSVVNQVNAGLRSWQERAVVKMRPIIAALDVDDERRKHLFTLSKSGRWWEDDDLTSLISALARTSHPFPNFSRCRTMLMDGPIAQIEESKSPRFSRWVRFTMQTGSKPVRIPLTSNPYMDAQPGDVRRFTQVIVREDETIRVRLVKSSVLAPERTEGRILGLDWGLANLLTTSDGRRYGQALYAWLRARDGEITDLAASLQRQGIRLRDSRRYRRLNARVRAYVKNEVGRILNRIGDESVRGLVVESLDFRGGGLSPRLRRIVSRAGRAILRQRLEALTEDQGIAVTRVHAPYSSQECSGCGFASRSNRISQSGFRCQFCGKTLHADVNAGRVIEGRRSSLQASRPMSKPQVLAHLDQQFSIRWGVPADRVRERHSRPLSRAPIGLYADGQLVE

SEQ ID NO: 5974 - protein, 449 aa, unknown
  TnpB Polypeptide
MKKRMKRTNTFTVRPLTGTGEQLLRDLLDASAALWNEVNYQRLMRYNDEAGFEGDVWTADTGQLEGRYKGVLGASTAQQVIRKNSEAWRGFFRLKDQYHDESNTSVTDHPEPPGFRGNEDDGRQLKTVIRNTSYTVEWGERSRLEVLIGSKLKDRYDHTGRLRLEITGDPNWPDYEKQGRLDLWYDETDSIFRASQPVTVSDDTRDTPLAEETAALDIGANNLVACTTTTGEQYLYEGRELFQRFRDTTREIARLQSKLREGRFSSERIRRLYRKRTRRRDHAQEALCRDLLERLYTGGVDTVYIGCLTDVLETHGSVETNAKTHNFWAFKKFTKRFACTAEEYGISVEVRSEAWTSQQCPHCGSTDRTTRHQDTLTCPCGFEGHADLTASETFLKRHTQKAVRPMARPVRFEWDDHTWSESPHSHRPKEQRADPSTVLQNGNVASGDS

SEQ ID NO: 5975 - protein, 437 aa, unknown
  TnpB Polypeptide
MSVVVRRTNTFAVRPLSAQDKQLLRELLDASASLWNELTYERRQQFFEGESVWDTADYRKQYVGVLGSATAQQLIRKNSEAWRSFFAAREDGEDTAPPGYWGNEDEGRELRTYIRNDQYTLETGERSRVEIPVGQDLKDEYGLGYHDRLRLEVAGDPKWEGEQGRLELSYDEVDDTFRAFQPVTVPDSRRDSPVAEESAALDVGANNLVACTTTTGQQYCYEGRDLFARFRETTEEIARLQSKLGDGRYSSHRIRRLYRTRTRRRDHAQEALVRDLMGRLYDEGVATVYVGDLTDVLSTHWSAEVNEKTHQFWAYRSFIDRLAMTAEEYGITVEVRSEAYTTAECPACGERDDTERAGDVFRCPCGYEGHADLDASRTFLEGQVGKPEVGSMARPVRLTWDDHTWSEIPHSPVRASPNEERTNRSTDDGKLTSVGTA

SEQ ID NO: 5976 - protein, 381 aa, unknown
  TnpB Polypeptide
MLTQMNFKYRIYPSKTQIIRLNKTISDCCFIYNKLLEAKVNAYKTDKTSLSKFDLDKFTKDFDFHVHSQVKQNISKRINDAFNHFFRRVKEKKGKVGFPRFKNINRYKSITFPQSGFKFVSDKRLFVSKIGNIPIILDRVPKGKLKTFTIKKTALGWFAIFSCSDVPIKKIDVPDNSVGIDVGIESFAVLSNGEVIENPKFLVNSEKKLAKFQRRLSRKKKGSANRIKAKFKVARLHQRIFNQRNDFLHKTSFNLIKQFKIISVEKLTIKNMIKNHLLAKSINDASWGCFVQMLSYKVERTSGQLIKVNPKNTSRTCSKCGNIQDMPLANREFYCLKCGFVCHRDLNASININTAGLAEINACEHYVRPLETKAVWMKQEL

SEQ ID NO: 5977 - protein, 395 aa, unknown
  TnpB Polypeptide
MRLKAYKYRLYPTRQQEQLLAKTFGCVRFVYNKALDIKTSLYQKEKKSISIYDLIKQISQWKKSEEWLKEVNSQSLQSGLQHLDIAFTKFFKEKKGFPKFKKKSNRQSFSNPQNTIVDFKNKKVSIPKFKSGIRTIFHRTFKGKIKTSTVSRTPTGKYFISILVEEKINNPKKKKLKENKTLGIDLGIKSFLTDSNGNKIDNPRFLNNCLLKLKKGQRQLSRKMKGSNNRNKQKIRVAKIHEKISNCRKDFLHKITTGIVKNQDYTSIAIEDLSTSDMIRDRRLSRCISDVGWGTFKDFLSYKCDWYGKNLLVIGRFDPSSRLCPCGHHNKNLRLSDRNWKCPLCNETHDRDILAAKNIKRFAFCKQDTYPSERGEFTPAESCVSDSLKQEASQL

SEQ ID NO: 5978 - protein, 438 aa, Streptomyces sp.
VKGVGWLIRAYKFLLRPTAGQAIALGEMLRDHCSLYNGALQERRDAYRHPSKTSIKYGMQSGQLKDIRAFDPERQGRWSFSSQQATLRRLDKAFTAFFRRVEAGGKPGYPRFRGVNWFDTVDFPRDGDGCRWNSTPRDQVTRVRLQGVGHVRVNQHRPVLGTVKTVSVKREGRKWFVVLTAERPLPEPLPATGSDIGIDLGIASFLTDSNGVHIPNPRHARKAARRLEAAQRALSRFPRCKAKDRTRNHQRAVEKVAALHGKVRRRRLDHAHKTALTLVREHDFIAHEDLKIRNMSKAPAPKPSPGTAGVFLPNGAAAKAGLNYSIADAGWGVFLTILNAKAESAGREVMAVDPRNTSRTCPECGHAARENRPAQEKFHCVTCGHQAHADEVGALNVLRAGLVRRHASTAWREAPPTRAGRSHPDDLPDDVMWRCAHR

SEQ ID NO: 5979 - protein, 420 aa, unknown
  TnpB Polypeptide
MESSRRVYGKALREAFYAVRRGGINKSKYNTYLQHKYGIVSRTANSIISDAQGRFNALKELKEYERKQLERKIKLLESIVIPKLVDKRKQNSTKLQDGVFVSLVQQRNLRLRVVAKKAKLNRLKQKLDALKYQLETGRLKLCFGTKRLLKQNYKKFIEQRDSQMTFVGAREETACNQVLQLTYNRRSNQFLIRLRKDFGGYKSAKGDDRYAYGKVYFNHHKGQLVSILRHKGSPLSYRIVKRKDRYYLHCVFEFQVGDSDIVTRSNYGTIGIDFNKGFVTLSETNQYGHLVKTAFMSYRFKSGGKTKTDLQGVATSVVKLALQTGKDICIENLDFRRTKAKTETKVGKKYNEMIHSLAYREFSEAIESIAYRNRVGLNKVNPAWTSWLAERIYRKPMKLNIHTGASYVIARHGQGYKDAV

SEQ ID NO: 5980 - protein, 519 aa, unknown
  TnpB Polypeptide
MSRERTDADEFSIAMFGAIVVAVVLIFVIAGLVTHWEKSEASANLKGDPSRVSAVIESARVSYWSKDRLEGLKVQFDGEVYTPKITPVARNYSVVHRGHGNAGVGDYGKALRETFYAIKRGGFNKSRYKTYLQNKYKIVSRTANSIIYDAQGRFNALKELKEYERKQLERKIKHLEDTVIPKLVEKRNQNSTKLREGVAVSLTQQRNLRLRVVAKRSRLNRLKQKLKALEYQLKSGRLKLCFGTKRLLQRDRKKFVAQRDSQMSFVGARAEIACNQNLQLTYNRRSNQFLVRLRKDFGGYKSAKGDNRYAYGKVYFNYHKGQIVSILRNKVSPLSYKVVKRSGRYYLHCTFEFQVGNSDIVTRSNYGTIGLDFNKGFVTLSETNQYGHLVKTEFMSYRFKSGNKTKSDLQEVANHVAKLALRTGKDVCIENLDFRTTKSKTEAKIGKKYNEMLHSLAYREFSDAMESVAYRKRVELHKVNPAWTSWLAERIYCKPMKLNIHTGASYVVARRGQGYEDAV

SEQ ID NO: 5981 - protein, 536 aa, unknown
  TnpB Polypeptide
MNIEGGENVSTTILKRVSTYQIKNSHELFEYCDNESFKAKNLRNLANYHIRQCFILSSKEELNKEQVLYLKDINNAIDEFNDKKKALFYEKKTEKIEKAKLELDDFIKSKFNSKNYKDELERKKESLKKLIKSEYKPHKYINLENALISYDFLDFYFSNYLKSEDNPYKMLAIQTSQQILRNLFKDWKSFFVSIKDYNKNKSKYKGRPKLPKYKDKNGRVKLSMTNQSCKIKNGKLTLPKTKLTLKVGIDVSNSKLKEVRIIPMGSVYKIELVLDKEFKNNVKLNEKAFIGIDLGLSNLATITNNIGLKPIIINGKPLKSINQYYNKKKSLMQENMPLYTFVRYDKKNNIYINERRQCSYSKKMDSLTRKRNAKIDDYMHKASAFIVNYCIENLIGNIVIGKNENWKNEISIGAKNNQNFVSIPFNKIINMITYKAESFNINVNIIEESYTSKSSFLDLDDIPTFKEGEKYKFSGKRISRGLYKTKNIIINADVNGSYNILRKFDNTLFKKEDIKSLLTIPKIINLSGYINKKKLA

SEQ ID NO: 5982 - protein, 522 aa, unknown
  TnpB Polypeptide
MDIIFKENLQAVKQLKQSDKLIQCRGSTIISASKESMKRREKNPIVIAGSQVENKKVTISDNTQCDNNSKTSEMYLTSNEKYYKPFWDDSCELISSNLLSHIQIDSAYLETGLSKQENKSWFSKENKFHQIKDSQKNFLQSYKTSFVECKSLEDTQIKSRKIRIYPTQHQKILFKRWFGVSRKFYNETLVIYKNGSQKTWDKVYQEIAEKNKDYDYIKSVPYQIKKVAVKDYNNALSINKRKAKILGKPFEMKFRSKKTPKQSCFIPKTAISSSGIYHRIAGKLKMKEREWFENENICDCRLTLEFGKWFIVIPKEVKTTPIENQEGIVAIDPGIRTFVTYFSTEGYFGKLGKGAFERILRLNMKIDKLISKMSKETNKHKKSNLKRSIFKIRFKIRNLIDELHWKTIKFLTSRFKVIIFPPFNVSKMIKKSKRKLSKKVVRSMSCFRFFEFKERLKLKCKENGVTFIESSEAFTSRTNSFTGELIKNLGSKEKFEFDNILVDRDINGARNILIRAMRDASA

SEQ ID NO: 5983 - protein, 377 aa, Acetomicrobium sp.
MKTYRFKLYRSKKNKKLHRLIDVAGRIYNHLIALHKRYYRLYGKHLNVNKLMQHMTKLKKRRMFVFWNQLGSQAIQDIAQRIERNYKLFFKNQKRGIKTAPPSFKKIKKYKSFTLKQTGYKLLEGNKIIIIGHVYKYSKSRNIEGKIKTLTVKRDFLGDIYIHLTCETEETAVEPRSGKSVGLDFGLKQFLTTSDGKIIESPLFFKQSIKEIRKLHRILSRKKKGSNNRKRALIILAKAYKKIANRRMDYHFKLAKELAEEYAIICIEDLNIKAMQKIWGRKISDLGHGQFVNILKHQCTKVGTMAIEIPRFYPSSKTCSKCGYVLEELPLDVRSWACPICGAVHDRDVNAAINILRVGASTLGGEGVKPASAGILR

SEQ ID NO: 5984 - protein, 322 aa, Microcystis sp.
MRCSQYKLTGYKLSDERRKIKFTDGFKAGEFDLWCSQKTLVYYSEQQIKRVRVVRRADGYYCQFLIDVERQEYHKPTGQITGIDLGLKEFYTDAQGNTVENPRYLRKSEKRLKKAQRRLSKRFRQGKKQSKNYHKQRIKVARLHLKVSRQRKDKAIKDALALVQSNDLVVYEALKVRNLVKNRKLSKSISDASWYQFTEWLNYFAKIYRIVCVAVPPHFTTQDCSVCGTRVQKTLSTRTHQCPNCKTILDRDHNAAINILKKGLKYLGNHLNGTVGQTETDPNALGESGLWIFSGDIENLSCLVEQGISDSDRSRIPRQATL

SEQ ID NO: 5985 - protein, 365 aa, unknown
  TnpB Polypeptide
MYPNKEQEELIQKTFGCCRFVYNHFLAKRIELYKQDKSNLTFYGCCLDLTKLKNELPWLKEPDKFALQNALRNLDDAYLNFFKGLKQNKKIGFPKFKSKKHDRNSYRTSQNNGGKAIQLLDGFIKLPKLGCVKIRNNLTPQGRIINATISQNPSGKYFVSIYCTDVKITQLNKTGALVGIDLGIKEFVITSDGEHIENPKYLKKSEKKLIKLHKKLSRKSIGSNNRNKARIKVARQYEKITNQRKDFLHKLSTRLIRDYDVICIENLKVKDMLKNHSLAKSISDVSWYEFTRQLQYKANWYGKTIQKINTYYASSQMCSVCGYQNKEIKNLSIREWECPECHTNHDRDENASKNILNEGLRLLLS

SEQ ID NO: 5986 - protein, 470 aa, Nitrospiraceae sp.
MNEGKKFRVYPTKEQIKTLSQWIGHQRFIYNSKVGEDRYFRKFKNKSLSLIGEDVPCDQKYSQFISADTDFLKDVPSQILRNGVYGWRSAYQLFFKKLSGRPTIKKKHGRQSVMITKELLTFYSVDPKTAMINLGTKKHPIASIRVNVHLDYEVPATIYISVHGGKWYVSFSNENEIDVATEAELLADLQHLTEEQLMDVASGFDRNVIAPVASSNGSTFDYSAGQKKSLQKALMGKVKCQKLLSKKQKGSSNRRKFVKKVGCYDRKICDIFNDFAHKTSKSIVDASESLLVFEDLGIKNMTASAKGTVEEPGKNVRQKAGLNRSILNEVWGRIKTYTRYKGLRKNKFTIEAPAHHSSQECSRYSYTHKDNRPSQAEFICQDCGFACNADLNASLVIKKRGVRAVLNNEGHIKIPNKVAFSKKSACRAGTVRSDASASKPAERVSAISAQKPVCSSYVKQETHTTTAATV

SEQ ID NO: 5987 - protein, 424 aa, Halorhabdus sp.
MANKVATRTFRARILNHSQVRDDLDSLGFAASKLWNVGRWTAQRVWDACGQIPGANALTAYLKKHERYADLHSQSSQRVLQELGEAFTSWVGKRENGDTKANPPGYRKRNGDHPRSTVTFKQAGFKHDAANNRLRLSKGKNLKDGWSDFVLCEYEVIGPPETAIENVQQVRAVYEHGEWRLHVVCQVEIDSPDAPGDDVAGIDLGICNVAAVSFGDESLLYPGGALKENEYYFAKKKAKCDDSSSREATRLDRKRTGRRTHFLHTLSKAIVEECIERGVEMIVVGDLASIREDDENGEPRNWGDHGNLDLHGWAFDRFTSMLTYKAEERGIEVELVSERDTSKSCSACGRSADSQRVERGLYVCEECGLVANADSNGAENIRQKVLPNPQQDRDNGWLAQPAVRLFDRSEGRFAPREQVMNREP

SEQ ID NO: 5988 - protein, 421 aa, unknown
  TnpB Polypeptide
MYEEKNRKIKENGKATRERRSKMDCRVFSVKVQENRLSKAKLEKLKRCFLEGKWLHNAVLTSEAITLEDTKTVQIKVKDTFETREIKNLSAQMKQSIVESVKTNVINLSKAKKKGIKVGRLKFKKECNEIDLKQFGHTYAIKGKNKIRVEKIGVLIVNGLEQINLDEVEFANAKLIQKPSGFYIHLTVYTKKQPQSNTEKEVLGLDMGIKDQLTFSNGVKVNFYLEESEQLKGLARKLSRQVKGSNQYKQTLARIKRIYEHLNNKKNNVVNKLNSVLKQNYIICFQDELLCQWKQKKPKRRFSFGRKVQHGILGRVKDKLKKNSSNVMLESSVPTTQTCPECGCLTKHSLDKRKYHCSHCGFESPDRDIHSANMMVLLSGYGTYRSLNTDAVSTDRMVSLLDNLSEPGVVVTTNSMEARSL

SEQ ID NO: 5989 - protein, 376 aa, Chloroflexi sp.
MTFKYRLKPSKSQQRQLERALELCRWVYNETLATRKHAYEQSCSLAHRDVQNMLPGWKAEKPELKGVHSLVLQNAQIRVDLAFQAFFRRVKAGEKPGYPRFKGYGRYHSLTYPQYGNGVTLKEHLLTLSKIGVVRVIMHRPFACTIKTVTIQRDGVGNWYACFSCDVDPQPLPSSPDVVGVDVGLKTFATLSTGETIQRQRWMKRDAKDIARLQRKKERYPKGSPERRKVIHALNHAYQRASNRRDNFAHQESRRLVERFGLIVFEALDIQDMQSHGNRVINRNIVDVAWAKFVQYSTYKAESAGRAVVRVNPRGTTQLCSGCGEIVPKDLSIRVHKCPYCGLRIDRDLNAALNILARGLASIGAGAARDPSKLMP

SEQ ID NO: 5990 - protein, 362 aa, Deltaproteobacteria sp.
VILEVTKMLVRELKLKPTKRQEATLNEWLWCLTGVYNWASRKIELDAQDKIYHRKLAFQNSLSGVSKKLDIPSHTIQATILQAYNAWERCFKKVSKQPKLKSVRNKLRSICFPDPLNGKRISENRISLPGLKSVRFYKQDLPEGSIKQARIVKRALGWYCQICIDTVHIFPVENTDEAVGIDTGFKDLAILSTGKKFSNGREFVKGQKRLAQAQRGGRKKLAARLYERISSRRKDYNHKVSRQIVQNFKEIYITNDNLRGQAKIFGKSVSDAGISQLRQFLIYKGAQHSRKVVLVDSKYTTMTCSICGSLTGPTGLSGLVVRTWKCGACGAQHDRDVNAAKVILKSGLGCSLGVLESSGGAR

SEQ ID NO: 5991 - protein, 379 aa, unknown
  TnpB Polypeptide
VILGKKVRLYPTKEHEQKLWQSVGTARFIYNWTLARQEENYTLKGTRKNGGKFISDNDLRKELTILKKTELNWLNEVSNNVAKQAVKDGCEAYKKFFKGLADKPRFKSRRKSKPSFYNDTSKLKVKESSVLIEKVGWVTIKKNSIPINCKYTNPRISFDGKYWFIAVGIEKENPIVALTTESIGIDLGIKDLAICSNGMTFKNINKTRVVKQLEKRLRRLQRRVSRKYLKNKEGSRFVKTSNIIKIEKQIRLLHRKLANIRSNYNHQATNKIVKTKPSRVVMETLNIKGMMKNKHLSKAISKQCLYEFKKQMQYKCEFNGIEFIEADKWYPSSKTCSKCGHVKPKLSLSERTYICEECGLVIDRDYNASINLSRYELVG

SEQ ID NO: 5992 - protein, 373 aa, unknown
  TnpB Polypeptide
MRKTFKYRVKPNQEILKKAERWLCLCRKLYNDCLEQRIIAYKTTKNTISCYNQIKQLPQLKKMRPEFKSVNSQTLQDVVERLDKAYQGFFRRVKNKFSKSSRIWNNKEKAGFPRFKGQRRYDSFTLKQSGWKLQGNQLTIQKIGTFNIVLHRAIEGDIKTITIHKDLTNKWFVSFSCDNVPQKLLKKTGKEIGIDMGCESFLTDSNGDKVDNPRFFKNSQDILKMRQQRLSQKKRVSNCRRKARVLIAKIHQKIFNQRKDFHLKIVNKLIKENDKIYIEELKSWKTFKGLNRSMRDVAWFQFFNRLCFKAEEAGREVVKVPAKRTSQLCSECGQIVEKDLSVRIHKCSCGLKIDRDWNAALNILRVGATLQVS

SEQ ID NO: 5993 - protein, 431 aa, unknown
  TnpB Polypeptide
VSKGLRLKSFQPGEEYVYLTYSMKNDEREESRVLLESYRVLLQKALDYLWERAKVERKEVKKGRKVFTKVKITLPKRKEVYKELRDGLEKVNLLASHYVDKAINNAYSILRSWKRRAEKGQASLRKPRLRKVYVRVKSTLRKVEGESVRITVRPYEYITFTWSHTWFSRRVKGLELGEPIIKEDKVYLPFRYRLPWFTPLDFLAIDSNLYTLDAYDGEKFITFSLKELYSLKYGMELKRGRIQRFASKHGRKGKVLMEKYSHRERNRVLDYVHKFVNKLLEMYPLTMFAVEKLNKQEMFEDADDKLSKKISRTVWRTIHRVLKYKAPLYGSFVKEVNPHLTSKSCPRCGWVSRKVGGTFRCERCGFTLDRQLNASLNIYLKMCGFPHIREIPRMWVGVIPLKGRRGMKGAIPRDSGEAQGLRIGYKFMKIQ

SEQ ID NO: 5994 - protein, 298 aa, Bacillus sp.
MILAKKVRLIPTPEQEKVLRNHAGAARFAYNYCKRMSDRYYKLFGKSVSQLALQKRFTKIKKRKRYEWLNDINAQVPKQASKDFDKARKNSFKKYKNGFHTSYKSKKDLTQGFYANYERLIIGKKVVHIQSIGEVKTSQQLPRNKKTSNPRVTFDGRHWWICVGFEESFEFQELTHESISVDVGLKELFVASNGMKERNINKDAKVKKLLKRKKSAQRDMSRRFKNGVKIQSAGYEKAKAEHLRLSRKITNIRNNHIHQATATLVKTKPMRIVVEDLSISNLLKNKKLSKALSFQKLN

SEQ ID NO: 5995 - protein, 409 aa, Bacillus sp.
  misc_feature (299)..(332): Xaa can be any naturally occurring amino acid
MILAKKVRLIPTPEQEKVLRNHAGAARFAYNYCKRMSDRYYKLFGKSVSQLALQKRFTKIKKRKRYEWLNDINAQVPKQASKDFDKARKNSFKKYKNGFHTSYKSKKDLTQGFYANYERLIIGKKVVHIQSIGEVKTSQQLPRNKKTSNPRVTFDGRHWWICVGFEESFEFQELTHESISVDVGLKELFVASNGMKERNINKDAKVKKLLKRKKSAQRDMSRRFKNGVKIQSAGYEKAKAEHLRLSRKITNIRNNHIHQATATLVKTKPMRIVVEDLSISNLLKNKKLSKALSFQKLNXXXXXXXXXXXXXXXXXXXXXXXXXXXXXXXXXXFFQCLSYKCEKYGIEYVKADKWVASSKICSCCGVKYDHSVQSEGQWSLKIREWRCVRCNSHHDRDVNAAINLSRWVK

SEQ ID NO: 5996 - protein, 433 aa, Chloracidobacterium sp.
LLFNIQSQGLNETESKVHSDEAKKSLIFHYEPGIIKTMKAYKYKLKPSAKIEAIFTSWLATLCELYNAALQERRDAYRISGISINYKAQSKQLPEIKEERVDLKRIHSQVIQETLKRVEKAFDNFFRRVKEKKDKAGFPRFRSSPRYDSFTFPQSGFRVDQKRKKLHLSKIGSVKVHLSRPIEGKIKTCTIKREADGWYVLFAVEEKEKKSVVVAADEPVGIDVGIKTFATLSNGEQIENPRFFRQGEGELKKAQRRVSGRRKGSHRRKKAVRLLAKKHQRVARQRCDFHFKEAKKLTQRFRVIKFEDLNIKGMVKNHHLAKSISDAGWRQFISITAHKAEEAGGRVEEVNGSGTSTKCSRCGHRHRMPLSIRVYRCSNCGLVLCRDQNAAINIKERKGRAVLASRRKVTSVEEARTYQRTQLESPPITGFTV

SEQ ID NO: 5997 - protein, 459 aa, Chlamydia sp.
MLTGIKLRANPTSHQKLILSQWMGCARSIWNAKVEEERYYRTYARKYCTIGTYAPIDQTTSQFKSKELSPWLSECPSQILRNSAVNWYQTYQKFMSGKCGRPKRKPKTDKGSIYLTREVFRFDHCDDGNVRLFIGTKTNNIGYLSFKAHGKFEIPNSLYVRKERGHYYVSFCYEQGQPDRKLSTNEEHLAFLQGATREYLEEHTMGVDRGVAIPVCAGEQTYDFTHSQKKNMSKADRYIKRLQRKLARQQKGSNRRAKTKHRIAVHHAKKANIRNDFAHKTSRLLVDSSAKIIVFEALRTARMTRRPKAKQDEQGRFISNKAKQKAGLNKSILNVGWHVIETYTYYKAYSSSKAVFKIPAPTTSQECAKCGHTHPDNRKTQALFVCGNCGNTDNADHNASLVIKKRAINLILDTGTVLSGDGVLRTQSDSGRGGNRKTGRAKSSTSSAQRSVKKEKLAA

SEQ ID NO: 5998 - protein, 245 aa, Mycobacteriaceae sp.
VTEIRSVRSDQAVWSFSSQQATLRRLNEAFTGFFRRVKIGQKAGYPRFRGAARFDSVEWPKDGDGARWQPDQNRVYLQGIGTVKVSVHRKVEGRVKSIQIKRQGRRWMLVLAAARLAAAQQRLARAKRGSNNRRHKRETVGGRHRKISNQRKDFHHKQASELAARYDLIVVEDLKIANMLRRPKPKRDPDNPGKFLPNGARAKAGLNRSISDAGWGQFVSILRAKAEDAGRVWIEVDPRHTSDRC

SEQ ID NO: 5999 - protein, 404 aa, unknown
  TnpB Polypeptide
MYLVEKHIIGKKHKYYKECDKLSFLSKNLYNASLYSIRQHFFDTEKYLDYVKNYHTVKSSVDYKALPAKVSNQVIKLVDQNFKSFFTLLKKKNAGQFDKLVKIPKYLDKINGRSLVRYETQALGRKKFKDGKILLSKTNIEITTKQKNWSDIKEVRIVPRKDYYVIELVYFKAEKELREDKGKYCGIDIGLNNLFCVGFNAPDIEPFIINGRPLKSINQFYNKELGRLKSELAKKNNKKTSNGIRKLTLKRNNKINDYLHRSTRLLVNQIVSTQVSQVVIGLNKDWKQDINIGKRNNQNFVGIPHSRAIDILQYKLKLEGINLIIREESYTSKCSFLDGEYPKKREIYVGKRIKRGLFRSGGGIIINADLNGAYNILQKEIPNAYVDGIEGLAVNPKLLVVKSH

SEQ ID NO: 6000 - protein, 471 aa, unknown
  TnpB Polypeptide
MLRRAEMAEKQYVWHLGFKTKLNPTPEQAHYFACACGVARFSYNWGLDQWKKQYQAHKTNPEKEPLPNECALRRQLNKIKRKEFPWMLEVTKCAPQFGIKQLGMAFANFFRNPKHFGYPKYKRKFRDDSFTISNDQFKLEDSRIHIPKLGWVRMCEPLRFENAKVLSAVISRQADSWYVSLTCELTDLSHLIPAKNQGRIGIDLGINKLATLSNGLEFEAPQPLKRLLGKLRKKQKKCSRAVPGSKNKCKLAKEVARLHQRIANIRKDALHKLTTFIAANYSEVVIEDLNVKGMMANHCLARAIADVGFYEFRRQLEYKMALRGGVLIVADRFFPSSKLCRFCKKKNDGLKLSDREWICPHCGKKIESRDMNAAINLCHYPETKNWWSESTADYALYIHFRGPPAVAHHEKSEPDVSLCPSKEGGGGQCHSQTCGRQERHTVMVAALARDKSIANCDQKIGEEKVGSACSD

SEQ ID NO: 6001 - protein, 350 aa, unknown
  TnpB Polypeptide
VFGELHSKAAQATVARFHRNLSNLRKKKEKGHKVGRLKRQAPSDYRSVTYNQSGFDLDEKRGHDKYAYVRFSKIEWVKIRYSRPIPDHATIKEATFKKETTGEWFVSFGLETDDADLPEKPTVDSLNTSNSVGIDLGIRNYIHTSDGKTVDWLDLENDYELLRREQRKLSRKEHGSNNWEKQRREVAKVRRRIQRKVLDYQHKLTTWLVCEYDAVFVEDLDIAGMLQGDGNARNKQDAAWRQLITLLEYKADLYGTHVIQVEAEGTTKECASCGVETAKPIWVREHSCPSCGFETDRDANAAMNVLQRGFSELGLGWPEDTPVETVTATDTTQFESVSASHVVETGSLPS

SEQ ID NO: 6002 - protein, 485 aa, unknown
  TnpB Polypeptide
MSQKVRIIKVRHAGASVYLGDDSCRNHCWTRNPERIMDWLCDGWRSRFNQHREHRTIRRYMEDMESHERMWVDVPLGGATVGEPFKDSEARIRCSWLACIPSAILASPMRVENSEWYAALKRKKINGGRVPGFKSRKRSPQYFVCWRNQNKTGNAIYHQVSRKRGVVVITGTVKKEFRKPDETGCRWTLSIHVRVSQPIRDYTSVAVNWTERTLAFTNEPSPIRRNTTGKQTGIDRGCVHTLALSNGTMLDMPQPSERERKEYLRLQRKLSRQDRTNEKRGGKTAKFQSKRRMLTLKRMNSLRRRINNRKDDWVAKTTTQLVEDYDLIALEALKTRQMTRRPKPKQDPNHQGCYLHNSATSKAGLNRSILNNRWTDIQNKLEYKTRLAGTQLILVDPAYTSQTCNRCGHVALENRESQAVFQCVNCGNKDNADVNAAKNILNRAIHTTGMDDAEGVEEHASYGTHVPQESSGETPTPATRMGRLL

SEQ ID NO: 6003 - protein, 402 aa, unknown
  TnpB Polypeptide
MGKIHRTYKFRLYPTKAQTELLAKHFGCARFVYNYFLNQRIEQYRLTGKSDGFYEQSKTLTELKKQEDTAWLKGVNAQSLQFALRCLETAYTNFFKKRSKFPNFKSKRSKNSFTIPQCASIAGDRLFIRKFNEGIKCRVHREIKGKIGKVTISKTPSGKYFASVHTEEEYATPFEKTNKSVGVDLGLKDLLVTSEGERFNNNRYTKKYERKLASAQRHLSRKVKGSRGFEKQRLKVARLHEKISNCRMDYLHKCSISLVRRYDTICIEDLNVKGMVKNHHLAKSISDASWGAFVSMLTYKAEWNDKKVVKIDRYFPSSQTCSVCGHINKETKNLSVREWECPSCHSRHDRDVNAAINILRVGLKQYTSAGYADYTGGEDVRVNLLKDQSSMKPEAYESLTLV

SEQ ID NO: 6004 - protein, 472 aa, unknown
  TnpB Polypeptide
VKLQVVKTVPIPVHYALTKRKLRILDSLTARLSYGICLWSQLIKRNQLRGTCAERDRSAKEFQEQTELPAAMVQCCYDTAKWAWRSYRQLHREWSLKVAEARRTHDDRWLLKLLKREPQKPFSNGVQHKIPIWFDERIGTLEPSRRMKLVPWVARISTLRKGKKITIPLNPAKYHLGLLQKGQLKSFQLIKRNGRYYVHVKVEFRVPDQPVHAVRGVDLGVKRSMASVMLRPNQPPRSSDFTTIRDGLKQEQLNRLNRRVAELQKARKWAPLKRIRHKRLHVSEYYDRLAAKRVAATSQNCLVAVGYPKGIKHKNYRGNGKPKLRRALARWSYGRAIRYIQEECAEQGIRTEAPDELWSSRTCHRCGSRHTERLTQSLFHCWNCELWYNADYNAAINIGSRFLPTATTRQATDDLAYAWNEQAREIVACEPRSPHPLMGGSKSQSLSSSPMGVGNRACETGFESGQSGGRCV

SEQ ID NO: 6005 - protein, 531 aa, unknown
  TnpB Polypeptide
VPRVVPPKRGFLALDEPVGRYPTVSTTLGTLSSFPPKLKGRGGKSRSEEMRTVRLRLLPSGAQERRLRKLADAAAKLWNGLNYARLIQFRASGKIDFKGTEHELYHKYKSVLGVNAGQVINLNNGAWMSYFKLKEMYEQGKLPRFYGKPSPPDFWRDRLLGRRKLVILVRNDRYYLEQVNGGEGYLVLKDWGLRVKYAGRIKWAGKQGMLTIKFEDDRWFAYVPITVGEKPARSNPKGYVKGIHERIRIENPKGGNKAFIDVGLNNLFVVVFNHTDTAMLIKGSTIKSEYYYWKREIKTYQSIRDWLKNHGFESWKKYHAFYLHAVFKRKERLRHYYRTAIRFLAKEIHKMGVDEVFVGYPYLVSQDDGNEYNTNIWWFNKIVNWLNDVLQEYGIKLNIVNEYGTSKQCSICDMKHENGRVKRGLYVCPVTGIKINADINAARNIAKRVGYETPMPRKILSYMVTTNGVKPLTPMEGVTIETPTVKPSPKKGREGVMLIDTSVLIEVLRGRITNVGDALNNLRNGGCQGFR

SEQ ID NO: 6006 - protein, 385 aa, Meiothermus sp.
MCYNGFVQTLTLRCTLKPTPEQEAALEATVRLFAEGCNHALRVAKEHGEFRRFKLHRLVYNDLRSMGLSANLAVQAIARVGRKKGSRAKFYQPTSCAFDQRTLSLRGESVSLTTTAGRLVIPMKLGNYQRGLLARARGVQGGVLTKGPRGKWYINLMLRLEVPTPPTGGGKVVGLDMGQRYMATLSSGIQVSGGGVKSRRIHLRNKRAEVRSKLDTGRTKGLSALWERLSGRERRFVDHTLHTLAKRVVDSLEPGDTLAIEDLTGLRSRTAKRGREARHLHNLWPYGKLRFLLEYKAALKGVRVVAVDPRHTSQECPRCGHTARENRKSQALFRCTACGFQHNADWVAATNIAQRAGSTGRGRCKPARILRVSSLHRPPSESPRL

SEQ ID NO: 6007 - protein, 445 aa, Bacillaceae sp.
MNEYRRTNTTISLIKYHFVFCPRYRRKIFLRADVEKRFKQLVQEICEELEVVIVALECDKDHTHLLLNALPTLSPASIMAKIKGVKRMSQTITVKVKLLPTKEQTSILTAMGKEYISTINTLVSEMVAEKKSTKKTTKDVRAHLPSAVKNQAIQDAKSVFQKVKKSKYTMIPILKKPVCVWNNQNYSLDSSYIALPLMMDGKAKKVPVRALLVDKHNRTFDLLKHQLGTLRITKKSNKWIAQISVTIPRSEKTGTKTMGVDLGLKVPAVAVTEDEKVRFFGNGRQNKYVRRMFKSKRKKLGKLKKLNAIRNLDDKEQRYMKDQDHKVSRAIINFAKENKVSVIRLEQLANIRQTARTSRKNEKNLHNWSFYRLSQFIEYKANLAGIKVEYVNPAYTSQTCPKCSAKNKAQDRKYTCECGFQKHRDLVGAMNIRYAPVIDGHSQSA

SEQ ID NO: 6008 - protein, 353 aa, unknown
  TnpB Polypeptide
MYRTIKIKLDRSNELVQTARIWNAACQDVIDYGFEVHEFNKTRLNRATYNDVRAKYPTLPSALVQTARDQASDMLKRTKFEIKPYKHELGAVRFDIRTMKVFLESGYCKLTTVFGRLRYNFTLPKCYLKYSSWEIVNAQLKITKHNCFLNVQVGQSNPEIIEGDIRLGVDLGINNIAVCSDNTFYESGKVKAVKGKYQYLRSKLQSIGTRSAKRKLQKLSGRERRFQKDTNHNIANWILSKPFNIIALEDLTGIRNQTKNSKLGKWSFAELRSIIEYKAEAIGKQTIAINPKYTSQTCSKCGFQKKTNRNGRIFKCKSCGFEIDADLNASRNIATFSRSDSSRPSVNRPIVAE

SEQ ID NO: 6009 - protein, 393 aa, Exiguobacterium sp.
MRKRRITILAERGGGMLKGYKYRLYPTEAQADFLVRTIGCARFIYNKLLEDHITIHKEAEAGNEPRRKPPTPASYKPLFPFLCEADSLALANAKLHLDAAFAKFFAGTAGFPVFKSKRRSRASYTTNNQQGTIRIEGGRIRLPKVGFIRFKQHRDFDGDIRSATVSMTKTGKFFVSLLVEQADEPWVPAAHRIGIDLGLVHFASTTNDALFTEKIPNPRNLRKAEAQLKRAQRALARKKPGSKNREKARILLAKRHEQVNNRRHDFLHKLSRRIVDENQVVVVETLRTREMMQNRRLARSIGDAGWGEFVRQLAYKWRTHGRTLIKADPWFASTQICSRCGENSGKKGLDIREWTCVACGAHHDRDVNASLNLLRLAEEIMSSGQGLPDELGP

SEQ ID NO: 6010 - protein, 593 aa, unknown
  TnpB Polypeptide
MVLPSQLFGSGQKMEEFLSEEMKTAIIGTVSTLHQVSPLTIIQTLTSSTPESPLKNNNLILNDSAASSNSNIPTTESLQILDQELILTDQVLKPFWKVSSKNASDMLWLRTKTDSPDLALISSHGFSNNLERNLQVWQMKTVPKIKTRLKNLLKTSWRSLQSFPPATMVEENILCTRKVRFYPNCAQKQLFDKCFTAHRLCYNNAIQEINKRYTDRKAEFAEAKTCIFKNCSCSKFEKGYFCEAHKNKQIAWNLNIVRGSIRNASMKTNEDLNINEMWLKDVPFDTRGHGVQDAVSAYKTCVANLKNGHINHFELRYINCHKSSKIFWVNKKAVSPGFKIFTQRLKHQSALRFKASDKQWLSTTFSEGRFNNDFKIQRECGKYYLLINFEKEIVTRQKSCMVAALDPGIRTFQTMYSESGLIGKFGESTTHQIDALYQKIDRLRSVQSKVIGKKCHNIRKRVLGLQKKIRDIVTNLHNQTSSYLSKNYEKILLPEFGTSKLVQNSPLAKCVKRKMMTYRFYDFKQKLNHQCNTYNTKLIIVKEDFTTMTCTRCGVLNKTIKGSKVFNCSACDLTIERDIGGSRNVLIKTITEC

SEQ ID NO: 6011 - protein, 439 aa, Actinoplanes sp.
VKAVQAYRFALDLTPGQERDVLAHAGAARVAHNWALARAKAVMDQRTAESSYGVPGELLTPPLSWSLAGLRKAWNQAKPQVAPWWPEVSKEAFNTGLDALARGLKNWAGSRTGTRAGRPVGFPRFKSRRRTTPSVRFTTGSIRVEPDRMHVVLPRLGRLKLHESARKLARRLDLGTARIMSATVRRDRGRWHVSFTVEVERAEHIPARPASVVGVDVGIKTLAVLSTGELIDNPRHLVAAQQRMRSLARALSRKTGPDRRTGRRPSKRWEQAAARLGGAHTRVSNLRRDGLHKLTTRLTREHHTIVVEDLNVTGMLRNRRLARHIADAGFAEIRRQLAYKTGWNGGRLLIADRWYASSKTCSACGTVKAKLALSEREYHCQACGLIIDRDRNAALNLAALAAQFDTAGSGPVAGRGADQKPRTRGQVATKRQPGTTPVG

SEQ ID NO: 6012 - protein, 457 aa, Actinoplanes sp.
VVVLRVMQAYRFALDLTSSQQRQVLAHAGAARVAHNWALARVKAVMDQRAAERSYGIADEVLTPALGWSLPALRRAWNAEKAVVAPWWGQVSKEAFNTGLDALARGLRNWAGSRRGERAGRKVGFPRFKSRRRSTPSVRFTTGAIRVEPDRMHVALPRLGRLKLHESARKLARRLEAGTARILSATLRRESGRWHVAFTVEVDRTERAPVWPDLVVGVDVGITHLAVLSTGEMIDNPRHLETAQVRLRALGRAMSRKQGPDRRTRAQPSKRWARAAARLGRAHARVANLRRDGLHQLTTGLATRYGIVVVEDLNVSGMLANRRLARRIADAGFAEIRRQLAYKTVWNGGRLLVADRWYPSSKTCSACGAVKTKLTLAERTYYCTTCGLVLNRDFNAARNLAALAAEFDPAGSGPVAGRGAIRKTRLGGQEAAKRQPGTTVNTVDKTGTVAAQGATAA

SEQ ID NO: 6013 - protein, 802 aa, Actinoplanes sp.
VPVHLRYRFRIYPDAAQRLALARAFGCARVVFNDGLRMRRQAWEQGLPFVTNSELSKQVITVAKKTPERAWLSEVSTAVLQQALGDLNEAYRNFFGSVSGKHKGQKMAPPRFRSRKDSRQAIRFTKNTRFKILDNGRLRLLKVGDVAVRWSRSLPSEPTSVTIIRDAAGRYFASFVVQTAGNDILPPLATEVGIDLGLTHFAVLSDGTKITAPKFLRRAARKLRRLQQSLARKQPGSANRKKAVVKVARAHARVADSRRDWQHKLSTTIIRDNQAVYVEDLCVAGIGRTRLAKSVHDAGWANFTTMLEYKAARHGRTFAKIDRFFPSTRQCSACGLVGEKIPLSTRTWNCVCGTSHDRDINAALNILAAGRADRLNGRGASVSPVSVPAARGEAEIRSGAVQIVRRAGNPRPSGGENVKPSITTFEQHGDTSQLESHPVRKAGDDAHAGQQAVGNRSGQADDRWMDATPLPLSLLDLAPIAPGHDVRESFQASVELARAAERSGYRRVWFAEHHNMASIASSATSVLIGYIAAHTDTIRLGAGGIMLPNHSPLVIAEQFGTLATLFPGRIDLGLGRAPGSDQNTMLALRRNPMSADTFPQDVQELLGYLSGKTLVPGVQAVPRAPEIVPLYILGSSLFGAQLAAQLGLPYAFASHFAPTHLHQAVEVYRETFQPSAQLEHPYVIAGANVFAADDHDVAEQQMKVAYRARTRAMISRGSVGQNFTDAEIDAFLASPNGRQLAAMTKYTATGTPGEVRAYLEDFAASCGADELIVAHYANDVADRVRSVELTGQAMIKAGTPAS

SEQ ID NO: 6014 - protein, 413 aa, Actinoplanes sp.
VVLVQLRYNFRLYPDTAQREALARSFGCARVVFNDGLRLRQQAREAGEEYVSDGELSRRLITEAKSTPERVWLGEVSSAMLQQALADLNAAYRNFFASISGKRKGRKLALPRFRSRKDNRQAIRFTKNSRFKVLDNGRLRLPKIGDLAVRWSRALPSDPSSVAVIKDAAGRYFASFVVQAAEEEVLPPVGSEVGIDLGLTHFAVLSDGTKVTAPKFLRRAARKLKRLQQDLSRKINGSNRRKKAVVQVARAHARVADTRRDWQHKLSTTLIRENQAVYVEDLCVVGLGRTRLAKSVHDAGWAGFTGMLEYKAARYGRTFGRVDRFFPSTRMCSDCGRINDKMALNVRAWDCPCGSDHDRDVNAARNIKAAGQADFNDRGAQVRPGLVPAPRGEAVTHPDAACSTRSVEGISVH

SEQ ID NO: 6015 - protein, 418 aa, Actinoplanes sp.
MNQPGTVLLVQLRYNFRLYPDTAQRKALARSFGCARVVFNDGLRLRQTARENGGKYVSDGELSRRLITEAKATPERAWLGEVSSVVLQQALADLNVAYRNFFASITGKRKGRKVAPPRYRSRKENRQAIRFTRNSRFKVLDNGRLRLPKIGDLAVRWSRTLPSDPSSVAVIKDAAGRYFASFVVKSTDEALPPVESEVGIDLGLTHFAVLSGGTKVAAPKFLRRAARKLKRLQQALSRKQRGSQNRRKAVVKVARAHARVADTRRDWQHQLSTTLIRENQAVYVEDLCVVGLGRTRLAKSVHDAGWAGFTAMLEYKAARYGRTFGRVDRFFPSTRKCSDCGRINDKMALDVRAWDCPCGSHHDRDVNAARNIKAAGQADFNDRGAQVRPAAMLAPRGEAVTHPDAAYSTRSVEGISVL

SEQ ID NO: 6016 - protein, 276 aa, Metallosphaera sp.
MKEHLVEAKIIDYGKLKTIHSDIVYYVSYYKTLEKSGVKTKPSPPPSLKDMNVIYTKPRIGPLKLIGEGPVYKLDKVGAIVSVDFPGTPLYAIVDFEDSIRVYLAYPVEDPIVGIDLGIRHLFTVVAVTKNGKIYKSKYIGNGSIMETFTKYMSETQGLSYVREIREKVRISLRELMDFLVELSPKIVALEDLRLYDAKIGRGLKLIEDELERELLEKGIRFRRLDPRNTSKVCSQCGYKKGEVMGSLFVCPACGYKVDRDFNAAYNLALKCYYTC

SEQ ID NO: 6017 - protein, 392 aa, unknown
  TnpB Polypeptide
MNKAYKFRLYPNKKQVELLSKCFGCNRFTYNYFLEMKINAYKNEGVNLSYTKMANILALMKREEEHAFLKEVDSVSLQQSLRHLDTAFTNFYKHKEFGFPRYKNKKSHHYSYSSICINNNIKILENRIQLPKIGEVKMVKHRHIPSNYVLKSITVSKDPDDKYFVSILFEYENQIPKKIPTSFIGLDYSINHLFVDSDYCIPYFPRLLMNSQTKLKREQRRLSHMKVGSNNYHKQRIKIARIHSHIANQRKDYLHNESRNIVRVYDCVVIEDLSMKDIVNKNENQHLHFGKQVMDNSWSLFVNMLDYKLKEQGKTLIKIDKYFPSSQKCSCCGNINKVLKDFSIRKWTCPSCGQIHNRDINAAINIREEGKRLFFDRYNRGTHGVSSPMLGS

SEQ ID NO: 6018 - protein, 497 aa, Ruminococcaceae sp.
MREVVGSSPILTTIDQRNCPLVFFFFYGFRVTITIDCRTNVLYNISGYFAKEELMVITLSYPVRITNAYRVLLPTLNLYRACVKSLIGVVLENYSDLEYLSPQKSQRHVELLVHSTKNHSAIYPFFDREYYKFPSYLRRSAISESIRIVSSHMSAMKKWCESKPSDRGRRPKLNRNQHSMPALYKGNCFQWLDNNHCRLKIFHQNDWVWYTFSLSKSDIDYIKKLDLAESSPTLEKRGHRFFLRFAFVKKNTMSNSINRICSVDLGINTNAVCSIIDSNGTVTARKFIDYPVEKDRMNTILGQIRKAQKKGASQTPKLWRFAKYYNREISIKTSHEIVQFAIDHCASHIVFEYLNIRGKVSGSNKQRLALWRKQDIQKRTALMAHKAGIHISHVCAKNTSFLAFDGSGDVTRSHSNRQLCAFQSGKQYNCDLSASYNIGARFFIREIIKSLSATEELTVSAKVPELVKRTGGLTTIHSTLSTLINLNAALFPCEQAG

SEQ ID NO: 6019 - protein, 439 aa, unknown
  TnpB Polypeptide
MKSTTLIRTATHSTKFSNTGKLEVLRTFLSEYQLAVQHYVDYFWTTKVEWFASDKSTKCLDVINNQFDLPNFISTVGNEPKNTPSLSAKMFKSAAGQALGIVGSVIAKRNKIAFKLNIAIVKGDINRVAKLQEQLEKFNLTKPDAKITTANLDSNTLEFIEINKRTDERFKEFDGFLKITSMSKTLGFIEIPVKFHRQVKNLQNRGYKQKTTWFVSIDKVCSTWEKPRSAKKQSGRKVGADQGIKTCLTLSDGQATSKCNHGHSLESIMQKLSRCKKGSNGFKRAQEHRKNYINWSIKQLNLDDINEIGYENVKNIRFGKNQSNFMKSWTFTTIRTAVERRCEEEGVLLTQQSSIYRSQRCSSCGFVHKKSRNKKQFTCTQCGHCLDADLNGALNHEVDLLDIPYALLSRKLNIVGFYWLEYGLYSIDGEEITVPQQEK

SEQ ID NO: 6020 - protein, 248 aa, unknown
  TnpB Polypeptide
VKLKEFGYIPTNAKAINGNVSMKAGKYYVSVLCDVIDRNDYSNYTNEGIGIDLGVKDLAIVSNIDKPYKNINKSKIIRQLKKKLKRIQRQVSRKYEMNKDGKKFIKTKNIIKLESKIRHIYQQLTNIRLNYIHNITNNLVKNKPEYIVIEDLNVKGMMKNKHLAKAVQEQCFYEFRKQLTYKCLWNNIELRIVDRFYPSSKLCSECGRIKKDLKLSDRIYVCNECGIEIDRDKNASINLKNAKEYKIA

SEQ ID NO: 6021 - protein, 418 aa, unknown
  TnpB Polypeptide
MLLSHKTSVKICPEYSNIIGHMCYAASKLWNVCNYERRHYKELGMEKYPDWYDQKKAHKGDLWYRQLPAQTAQETCKQLDKAWKSFYVLKKTGGIKEPNPPRFKQENIPVTYMQMGIRHEKGSDQLRLSLPKELKSYMEETYGIHEKFLYLENKIFRDMDHIKQLRISPPKNGKCDMIVIYEIEEPEQLSQNGHYLSIDLGLHNLMTCYDSGNGRTFILGRKYLSLERYFHKEIARVQAQWYGQQSVKEIKHPVTSKHIRRLYQKKQNSVTDYLHKITRYFAKYCREQGITCVVAGDIRNIRKGKDLGHRTNQKFHNLPYNRLYSMMEYKLKMYGIRFVRQEESYTSQCSPLSPEVEKRYAQPCNRKQRGLYRDRNRKYNADAVGAYNILRKYLSVSGEKKELSVTGLKNPEIIKVAV

SEQ ID NO: 6022 - protein, 601 aa, Methylobacterium sp.
MAYGKGSRGKDDKRMVALGAMPVDADWLGLRREWIHASNAIASAVRPTLLDEMPTGKEVDRLMLAAQAELKGRINSVWAEKARISAKTAVIERHRRGQANLFGRLRHVGTVGDVPCGDGTRRLVNLPEEWSRRLSDADVGALKALADSLDFAGAMSLLRKVRDGRSNLPPLHAEALMAMVAVVEERFRHPEWGRDAEAVVQLHLDYRCLPKGESGSNKEAWTALQDRMTNAVRSVARGGEPVAIPLLVAAPVARGPCKLVRAVVRQAPLKHLLRNEDVDAFAMGSLCLEIGPCSVTVKGVLSHRPKVRPLEAATHLLGRDYGYRNTAAFAVVRKDGPVDPGLLAASAEWGKEEAKAYLETHAHDGEPVETALMDGGDFLKAVAGHALRVDALRSEIDRAYPRIHALKANVNARLGAEPDSLVDLGMVTEDRHLAGWTRRLARLLAYVGRLKLERRGVYRTVEGLKRSWFGHVSGIEMRLALKWDAAVVREDLTVVAEEKGSPGYKGRTFSRMMNDGAKGQYIRRASNKLRWNGVREVVVPSYWTSCTDVRNGVVDRAQRRGSVFEAKADGRRGDSDLHAALTLALWPILRPLAAPRVALAA

SEQ ID NO: 6023 - protein, 471 aa, unknown
  TnpB Polypeptide
LRDHARPRPPVRQDRPAGLAVVCREPVQGHVQPGTAAGVPAPAQAPADVVVPVIFRRVSGRGQRGHGAAVHRYAVRAALAQGACAVRRAYKFRIYPTTGQTARAAACLRDHQRLYNAALEERREAWKRRKVSIRYGQQSAQLKDIRGFDPEQRRWSFSSQQATLRRLDKAMAAFYRRCKTGQAPGYPRFKALDRWDSVEWPSDGDGCRWKPDTNRVYLQGVGHVKVHAHRAVEGRVKTIRLKREGRRWYVVLSCDTVPVKPLPMTGRKIGVDVGIARFATTSDGEIIANPRFTRTSEVELTAAQQALARKKRGSANRRRAKAKVAEVHRRIRDRRGDFHHKTARTLIRTCDVIALEDLRIKNMTQSASGTLAQPGSNVAAKSGLNRSILDAGWGQFAGILAAKAEEAGRRIVLVDPRNTSIICHQCGARCLRPWRALVICPVHGGMDADVNGARNVYIRAGLGPDRDAPAA

SEQ ID NO: 6024 - protein, 444 aa, Thermotogaceae sp.
MKQVLMLKFKFDATKEQKRQLFETAEAYTEAVNFVLSKNLSDKTTNVKKLHHAYYVTIRERFGLPAQLAVNVNRDAAAIYKTLWAQFKELKRRKPDSKATKKFWDKPPKRKSLIAKYTYNRTVSFKFANWNEIYVSISTLQGRLKWIRIYGWNKHYEYLRQGKIGDPILSYDRSSKTFFLLVPVTLEIQERRPKEIVGVDVGERHIMAVASTTGKKYLVNLPEEVKRRKQRYHNLRSELMSKGTRSAKRKLQKLSRREKRFTENVLHIVSKTLVESHPQARFVLEDLTQIRSNRVTYRGKDKEARRQAEQWPFASLQKKIEYKAALYYGVQAVYVDPSYTSQTCPVCGYVSKNNRPNHGERFVCQNCGYKEHADIVGAINIALRELSKTQEENLKGLLVSQPNAPGQTGRASSPSLGGRVADLLRRIEKYLDNSQEIWYKKFGR

SEQ ID NO: 6025 - protein, 396 aa, Escherichia sp.
  misc_feature (17)..(63): Xaa can be any naturally occurring amino acid
VKRLQAFKFQLRPGGQXXXXXXXXXXXXXXXXXXXXXXXXXXXXXXXXXXXXXXXXXXXXXXXWLKDSPSQPLQQSLKDLERAYKNFFRKRAAFPRFKKRGQNDAFRYPQGVKLDQENSRIFLPKLGWMRYRNSRQVTGVVKNVTVSQSCGKWYISIQTESEVSTPVHPSASMIGLDAGVAKLATLSDGTVFGPVNSFQKNQKTLARLQRQLSRKVKFSNNWQKQKRKIQRLHSRIANIRRDYLHKVTTTVSKNHAMIVIEDLKVSNMSKSAAGTVSQPGRNVRAKSGLNRSILDQGWYEMRRQLEYKQLWSGGQVLAVPPAYTSQRCACCGHTAKENRLSQSQFRCQVCGYTANADVNGARNILAAGHAVLACGEMVQSGRPLKQEPTEMIQATA

SEQ ID NO: 6026 - protein, 147 aa, unknown
  TnpB Polypeptide
MQKGSNNRSRQRIKVAKLHEKVSNQRKDFLHKQSRQITNAYDCICIEDLDMKAMSRSLNFGKSVSDNGWGMFTTFLKYKLEEQGKKLVKVDKFFASSQICSACGYKNTKTKNLALRKWDCPQCGIHHDRDVNAAINIRNEGMRLVIA

SEQ ID NO: 6027 - protein, 383 aa, unknown
  TnpB Polypeptide
MQVVKTVKIPVHYATTKRKLDILSRLTARLTYVHLWSQIIEANGTRTRMGLRKRELEREVRRQTGLSAGFVQCCADAALWMWRSYWKLHREWGSRVRQVQRKGDERWLRKLLKREPQPPFSNGLKHKIPIWFDYRIGNLEHSEAVQISPYIIRISTLKRGERLTILLNPAKYHLDLLECGEIKSFQLVKREGKFYAHVKIEHEVQDQPVRAVRGVDLGIRRDAATVLLRPSKPLRRGNFSVIRDGEKTHRLNELNRRLARLQQLKKWNALKRMRNKRRHVAEYYDRLIAKRIAEISSGCVVAIGYPKGIKYENYQGNGKRRLRRLMTRWAYSRIIRYTIEECAERGIEAVVPDERWTSIICHRCGSRNTERLTQSVVHVTSAG

SEQ ID NO: 6028 - protein, 529 aa, unknown
  TnpB Polypeptide
MRYTYQRLLEGEKRKDLKKQLLKLFNINTRYSDDAIFLAQSTISSCKERGQNPKKVIFGSRKLFEQLKKNHLTGKRRKQLKIKWKESRQGNLYSRGDKSKQGNLNLRFEWINDKLYLRINTGNKQYIYAKVIRSVERKNDKWIEFMFMLENAYKYGAWFPYSVRLKVKNGNVYAFISIEEKLPPITIKKDNGIIGIDVNAYPFHLALAFASKDGNLERYQSISLNELLEVNSEKRQCLEWQVAHEIIKIAKEENKAIAIENLKKLPKGKRGDGSPKLRGRLQKWSYKRLLNKIEILAKRNGIEIIKVNPAYTSVIGKLKYSPQYNIDKDIAGAYVIARRGLGFKEKLTKNYKELLNDTDFLSYTIAKIEDNIKKLKQKLKEEKNEYKKNKLKSTLTKLRKNLKTLQKHVSLLTSHVSRLENGKSKPASQQPVNQRKEQVRGLSTSRHKSWQVLSIALAFCCLEKSYRDFSPLKRVIISKDWIAVANRLVPVLGIGAMTLPKYRLLGSEVSEMAEYKYPNPSCANFVQFG

SEQ ID NO: 6029 - protein, 450 aa, unknown
  TnpB Polypeptide
VEQTFKYRVYPTEDVASEARRHINICREVYNHALGLYDSAPAGDKPTYTKLQNKLPAWKRTWNSWKTVNSKCLQMAVRRIFSSLNVLKSLKSKGYNVGKLKWKSPREYRSIVFNQSGFDVDSNTGRTEHATLKLSKIGTMDVEYHRPLPEDGIIKEVRLKEEKTGKWYASVVVDHDPEHPEKPAVEDIQFEDTVGIDLGILKFAHDSDGTAVTPLDESEDRERIEKRHRSLSRKQHGSANWEKARVKLAEAYERLSNKRKDFIEKLARSYTTQYDAVFLEKLNVRGMLEQDSNGRNIASMSWSDAIKTFERHGDKNGCHVVTVPPEGTTKRCARCDVESDKALWVRKHSCPACGFEADRDENASYNVLKLGLDELGVEYNLDEVVGLGEAESTSSESQSDSDVRTRVALSSTPVETALHTGASENDNSSFRVVPAKRVVETGSHGPPRPW

SEQ ID NO: 6030 - protein, 571 aa, unknown
  TnpB Polypeptide
LLVTKSDRISILPITNKNKLISLSKYFDKILFTKNQISKQLNKDKAFQNLLFSNKKEDSKLLLAYCNKLNYPILSAWELQKFVNADFIDKEKNRIEQFFVQYKASLFKYETDLKRNIRFSTNLGKLVALMVKNFFYDGYFNDKINEIIESNNFFINHRDRIFKLVNHITYRYKYHRKPIEYKTSSMIKCDQRILGYSTPRMIKNDANKLYKHWLCFDYIDDNCEKQKINLPLAYNDFYHKDFSQYNKALGENKFKRTNLNRKSFLTSKACSLYVVKLEKSKHKSIQSNQDKINILFEKEFQISFSKRTNRLTITLPKKVEHNLVTSKITTQSEQTKFVRKDNSIGIDLGGSIKNTLVDSSGRVIAFNHLEKLIKKFNIVDKLPSKTREEKLVKGELWSRLSRINEYYINNIITTYLNDCKNKGIEHLVFEKLESWNVKWRNNKELDERCNRVFRLIRQQGIVELFKKQARNNGIVIHNIPSFYTSQRCSCCFKVDKNNLKSDRIYLCQCGNNIDRDINAAKNIKDILERFSSKLCKQNAYNEYESIKYISKEFTKRVLLGEKVEKFSSKSC

SEQ ID NO: 6031 - protein, 421 aa, unknown
  TnpB Polypeptide
MKGGYYMYLTQKCQLRNLSKNEYSALRSLCILSKNLYNSTLYAVRQYYFAEKKYMRYENAYHVCKENENYKLLGTDLAQQTMKVVDRNFKSFFALISKAKSGSYKFSMIHIPHYLPKDGIFSLIVPRIRIKDGYFALPMSPAFKREHGEIKIRFPTNLNADTIKEARIHPKFGGRYFEIEYVYEAESNNVNLNPDKFLSIDLGLDNLATCVTNTGASFIVDGKKLKSINQWWNKENARLQSIKDLQHIKGTTHKQFLLERKRNNRMNYHMCKTTRIIFNYCIEHDIGNIVIGYNPDWKRNIDIGRQNNQNFVNIPHGNLRQKLNSLCERYGINYVEQEESYTSKSDFFANDDLPTWNADNPKNYSFSGKRISRGQYKSSNGKIINADCNGALNIMRKSKLIGLLTLQNSGCLDQPKRIRII

SEQ ID NO: 6032 - protein, 371 aa, Microbispora sp.
VGRDGESGRAADGAGPRWRCRGSHHWTGCRVTGQCSGLQAGGEGPRGRAAKARACPDGQCSSCACSAVSAIGTGTTAAIVRPRLVMYVIRPRTAASLSTSANRRRASATLISPEPIHVMKRGHTFMHVDADVPVRWSRDLPAEPTSVTVVKDAAGRYFASFVVGTSNQPLPESAAEVGIDLGLTHYAVLSDGRKIDNPRFLRRAERRLKKTQRALSRKAKGSANRKKAVARVARAHARVADARRDRAHKLSTALIRENQAVYVENLAVSGLGRTRLAKSVHDAGWSQFVSMLEYKAPRYGRHFAKIDRWFPSSKMCSACGAIQPSMPLAVRSWTCPCGAVHDRDVNAAINILAAGRADRLNACGGTVRPAA

SEQ ID NO: 6033 - protein, 279 aa, unknown
  TnpB Polypeptide
LSKYPKFKSKKKSKPSFYNDTFQIKFTPTHVQLEKIGKIRLSEKERIPQGKYMNPRITYDGLKWYLSIAVEIENNIKPILTNESIGIDVGVKDLAILSNGMTYKNINKSKKVKKLEKKLKRLQRKTSRKYEKNKQGNKFIKTKNINKLEVKTRKIHKRLTNICTDYIQKTTTEIVKIKPSQIVMEILDIKGMMKNKHLAKYIQQQKLYEFKTLIKYKSNKYGINFIEVDKWFPSSKTCSECGYIKSKLSLKEREFICEDCGIIIDRDINAAINLSRYVV

SEQ ID NO: 6034 - protein, 486 aa, Brevibacillus sp.
MHDKGSYQTYQIWIQPGHRLFPYFQQLCQQAKSLYNTTNFFIRQVYTALTQGKELQPLQQEVMDLIHQHLDAMNENQFLAFQKKVAKEGMKPEEQRKDVKANLFPLPIKEDPMLSYHFLDALFKAMGQENYRALPTQSSQNIMKVAFQNWKSFFALIKKYKSNPTSLSGKPRIPKYCRTPQKEFIFTNQDCEIKNHRFLKLPFTKQRLNIGKVGFTNGRLMQVRVIPSYGRYVVELIFTCDEQPQQHPLDRVMAIDLGIDNLATIVTNTGRTPTLVKGKVVKSINQYYNKQKAYYVGILRQGKKSHEGQKTSKRLECLHRKRFLKIKDIFHKASHAIVEIALQEQIGTIVIGHNTQWKSESNMGKRNNQSFCHIPHNLLIQMIRYKAKRSGMTTIVREESYTSKASFLDNDDIPTYGESDTIATFSGKRIHRGMYRCANGTLINADVNGAYNILRKEVPKVFANGIEGLDGLSAVAVSTPLVLSVR

SEQ ID NO: 6035 - protein, 307 aa, unknown
  TnpB Polypeptide
MPDAYRIERVRLFPTTAQRRQLDSYAGAHRWTWNWALAAREAHFAAHQTSLSYYEQGRALTVLQQQPDNVWLIGIPRRVKVGALRDLDKAYRAAFRRVQRGERPGFPRFKARKRGDASFEIPAETRFDRHRVKVPGIGWIRARGGREIATDTTTARYFRDGAGDWWAALRYTVALTPADVADISSVGMHLKPGHALTLSTGEIVNESRYVSRSDRNLRRLKRAVRRTQPGSGNRQRARRRFARATRHVANQRRDWQHTVSRRLVDAHPRLVMQERGTAAHTTGPENQRAVWGDRARRARVSDAIWAA

SEQ ID NO: 6036 - protein, 427 aa, unknown
  TnpB Polypeptide
MSHPWRSRGEKRTIATEYQPSESILACLTDMRDALRMALVYAYVMAREDNSRLPGPIALRRGFREWFYSRYSYARHHINPVCRNGVALLRSYKRRHKRLEIPEVKRLAVRIDAELFKIEQEQGNEGTVSARITLQPFRYGYITFTPRHKRWEEYSKGRASELLITDRRLFITFVTSGGKKPLGSRFVASDINFSTIDSTTAIKEGETVKLRQVKTEPIGRIARIQNDFSRRRRRIQLHVKNPQKRDKKLKETRGRQRDRIRDALQKLSTEQVRKNHDTSFIFERLTGIRENGNAKSRRLRTYLNRRPYRMYQSMVEYKPPFRTVYVSPGGTSSRCPVCGGKVKHPAWAMSRCNTCGADYGRNRLASLAILCRGMRLCGQPFAVSADASWRLMRDEYLYAPIQPENGRAGWTEVVSAPNGSVYENIHS

SEQ ID NO: 6037 - protein, 470 aa, unknown
  TnpB Polypeptide
MSHPWGSRGEKRTIAVEYQPSESILACLTDMRDALRMALVYAYVMAREDDSRLPGPIALRRGFREWFYPRYGYARHHINPVCRNGVALFRSYKKRHKRLEIPEVKRLAVRIDAELFKIEQGNEGTVSARITLQPFRYGYITFTPRHKRWEEYSKGRASELLITDRRLFITFVTSGGKKPLGSRFVASDINFSTIDSTTAIKKEDDGGDDGGTIKLDSVETESIERIARIQNDFSRRRRRIQLHIKNPQKRDKKLKETRGRQRDRIKDALQKLSTEQVRENPGASFVFERLTGIRENDNAKKSKRLRTYLNRRPYRMYQSMVEYKSPNRTIYVSPGGTSSRCPVCGGKIRHPAWAMSRCNTCGADYGRNRLSSLAILLRGMRLCGQPFAVSADASWRLMRDEYLYAPAAPDGRGAGWTEEAANAPNGNVVYKSTRLRKRLFNMSFDIMKGLISQLKAVASSGQDSTDLVRH

SEQ ID NO: 6038 - protein, 378 aa, unknown
  TnpB Polypeptide
MTSVSIGTDKDQMIKAHKKFKIKHMRRTSRIFLNNLNPSKAKITLDFLCKSRNGIQYFVDVFWQRGDFSSTLADKKTIHQGIGRMEIPSSRLAQCYAKQAKEIVRGSVLLKGSKPQVRKHTLTLDNRFIQIEPFKGHFDYAIKLGGAGVPKILLPVHSTYHLNEKLEGGWKIGKSIRIGQINQQIFVDFLLEKPLPPICKTGKVIGLDSNYKNGLVLSDGQQVGQNLYSKIATFDKRQKHTYQEAKSITFRAIKQIDLTKVKMLVVEDLRYIRNGTRGKFPRSLNRRLSHWLFNSITNRLNQRCEKEGIQLIRKSPWKTSQRCSICGNWDKRNRRSDRFICIYCGNSDHADFNAAKNLEFLGLAGIHSFRLLEKLKTK

SEQ ID NO: 6039 - protein, 418 aa, Eubacterium sp.
MLLSHKTKVSLNNGYSNIIGHMCYAAYKLWNVGNYERMNYKELGLSEYPDWYYQKKCHKDDLWYKQLPSQTAQEVLKILDKSWKSFYVLQKTHGIENPKPPRFKQAPIVITYMQNAIVHEKDSDTIRLSLPKQLKLFMSETYGISDNYIYLKNMIFKNTDAIKQIKIYPPEGNKCDIIIIYEVEDVMPLSDNGRYLSIDLGLHNLMTCYDSTSGDTFIVGRKYLSICNYFNKEIARVQSQWSSLQNGKGVKFPKSSKHIQRIHKKKNNTINDYLHKVTRYIVSYCVKNQINTVVIGDITNIRKDNDLGNVTNQKLHSLPYAKIYIMLKYKLEMNGITLIKQNEAYTSQTSPLCESVTKESAKKNNRIKRGLYKDGDKVWNADCVGAYNILRVYLSNNSKNINLNPNEINNPYVVKVAV

SEQ ID NO: 6040 - protein, 411 aa, Clostridium sp.
LGKRLTVKQKNELLEAEDKQILNYGIRIHIMPNGEQATQIHKTFGCSRFVYNKYLADRQEYYKVNKKTLYVNDYKKNVLNPLKKTEKFSFLKEVDKFSLESAVENVEIAYKRFFNKQSKYPKLKTKKDTKKTYSTYFTNDNIKINLDSQTIQLPKLGEVNFSIPKGKNKGKFNNLGSHSVKITKATIGQVGSNYFVSLCIEETISKIKQINTKDIDLTKVCGVDLGLKHLAIVSNGIITIKYENHKYLTKSEKRLKNLQRRLSKMIKGSKNYEKMKLKINELYSYTANCRKDYAHKLSRKIVNENQVVVLEDLNIKGMIKNRKLAKAIADTGWYQLITFIKYKAEWEGKKFIQVDKFFASSKLCNVCGDKKIMLTLNERKWVCSSCHTVHDRDENASLNLRAEGIRLLEVA

SEQ ID NO: 6041 - protein, 437 aa, unknown
  TnpB Polypeptide
MITIAHRIQLMPNNKQRTYFRKAMGCCRFAYNWGLAEWQRRYKEGERGLTGRKLRNKFNAIRGGEFPWTYEVTKYATAHAFDDLQSAFYNFFAHRAKYPAMHKKRDGIGSFYIGAGQEIKLSDTHKGLKHLKNTAHNIHGKHQYINVPNLGYVKMAERLRFVGKILGVKILQDGDKFFVSIQVQITEEEYHRTHALASEKSKYRAVGIDFGLDEAMTLSDGIAIHNPRIIRKHQRKITRLSRQLSKRHHAKTKQERLQGVKRSSNYRKLSRSLGREHRHIAAIRRDFMQKLTTILVKHYRAICIEDLNVKGMQRGKLAKSVSDMAFGELRRQIEYKAAMTGCIVTIADRFYPSSKTCSNCGEKKDDLTLRDRVFVCPKCGHVINRDLNAALNLLSLIPNVGTDDPKLTPADLTALQSRFFTNGIATSKVETGRQHKL

SEQ ID NO: 6042 - protein, 160 aa, unknown
  TnpB Polypeptide
MQKLVREQRRLSRKQKDSHNRNKQRIRVARVHEKVTDQRNDFLQKQSTMLVRENQTICIEDLHVKGMIRNHKLAKSIASVSWAKFFEMLEYKAAWYGNEIRRVPTMYPSSQTCSACGYQNPLVKNLHIRIWECPICHAVHDRDTNAGINILKKGLQVQSA

SEQ ID NO: 6043 - protein, 397 aa, unknown
  TnpB Polypeptide
MQLVEQHVIRKGDARYEAIDQAAFASKNLYNAANYEIRQAFIFQGVYLNYHEMHRRMKSHEAYKVLPAKVAQQVLRILDKNWRSFFKAIAEFREHPEKFLGRPCLPKYKDKQKGRNLLVYTIQALSKPALKQGYIVPSQLAIRIETQHQHVDQLRIVPRHGFYVVEVVYEQEAVQADVDPSLYAGIDIGINNLATLTSNKKGFIPRIVNGRPLKSVNQFYNKRKAELQSKPGHEGTTNRMERLTNKRTRRINHYLHTASRRIINLLVQESIGTLVIGKNPEWKQEVNMGKRNNQQFVCIPHARFIDMLTYKAELVGIQVIITEESYTSKCSFLDNEPMKKQETYAGKRVKRGLFRASDGRLLNADVNGSANIIRKVAPNAFADGVEAVVVRPVRFCA

SEQ ID NO: 6044 - protein, 412 aa, Rivicola sp.
MQRLQAFKYELMPNGEQQRQMRRFAGLCRVVFNEALNLQKTRYEQGEKKLGYAGLCKELTAWRNGAPLPSGRTAPWLSEGPAHTQQQTLKDLERAYSNFFAKRADFPRFKKKNQSDSFRYPDPKQVKLDQSNCRIFLPKLGWLRYRNSREVLGAVRNITVSQSCGKWFVSIQTEREVEQPIPNGGAVGIDMGIARFATLSDGVFYAPLNSFKRHETALRKAQQTMSRKVKFSSNWKKAKARVQRIHARIGNARRDYLHKTSTTISQNHAMVCIEDLQVRNMSKSAAGTTESPGRKVRAKSGLNKAILDQGWAEFRRQLDYKLAWNGGHLIAVPPQNTSRTCPSCGHVSKDNRQTQAKFECVECGFEENADVVGAINVLRAGHARLACEVSGAVMPPAAGTHRSDSGVAQCRA

SEQ ID NO: 6045 - protein, 400 aa, unknown
  TnpB Polypeptide
VLAVKSVWQYYVPAADVLRLLDLFRRMVNDSLRIGLLNNASSLRRLSLLSYNQLARYHSPSYYKLCAISRAAGILAARNKSARRGYPTRTPYAVKPQLVSCYGFKITNDGLEIPVSRGKRFSIPLTTHTLQVISQSGVKVRSFTLTQNKLCLCIARDVPMIECVSTVGVDRNLRNLTVGNDDQTRHYDLSKSVRIAGTTRIVASFRRNDDRIRTRIASKYGERRTSRTSNLLHNATKTIVAVAVQRRTAIVLENIGGIRSLYRKGNGQGRRYRGRVNGWSYYEAQRQIEYKARWAGLPVIRLSRSETRGSSVTCPRCGERLQSDKRLERKLWCGRCRIVMDRDRVAAINLARRGRVRFARSQPLVRIEAQGGAVEAVKGNPTPTVIPGVDAPKLTHQTKS

SEQ ID NO: 6046 - protein, 417 aa, unknown
  TnpB Polypeptide
MEVRRTVPVVLDVDSDDTVLLEDTVDTFLWCAQYVTDHAFQGEYVTTSKTTLDGETYDDVREATDDFNGGLVQAARNKAAEACKSVVARWKQGKKASKPRFTSPHVVYDHRTATFHDDYVSLATTNGRIEADYILPDEDSETPHSEYFFSEEYEITGAELHYRDGEWMLHIHRKTDIEPDTSDTTTTGNGTVLGVDLGVNQLAVTSTGTFWTGDEFDHWRREYEKHRGDLQQHGTRWAHENIQSVGRKEDGRFKMMLHRLSNELVAEARENGCSVIAFEDLTDIRERTGASWGHKWAFDRLYEYVEYKAAEYGIDVEQVDPENTSRRCSHCGFTHPDNRDGEVFECLKCGYENHADYNAAKNIGLRFLRRNQTGSDGGAPLGVRLNSGTLNVNGGYSPASSEARTGVHAESHPFTGG

SEQ ID NO: 6047 - protein, 419 aa, Moorea sp.
MLTLNYRYRIYPDATQEQRLIESMEICRSAYNYALREIKDWCDSRKCLIDRCSLEKEYIISSEAKFPNEINQLNNLPNAKKEFPRLKEVPSQVLQQAIKQLHKGWEYFQSRGFGFPRFKKHGQFKSLLFPQFKDNPVTDLHIKLPKIGLIPINLHRPIPNGFVVKQVRIIRKADRWYASINIQCDVSVPDPMPHGHPIGVDVGLEKFLATSDGALVKPPKFFKTLQSRLKVLQRRLSRKQKRSKNYEKQRMQIARLHHKIDNTRKDFHFKQAHALCDAGDMIFMEDLDYQTSAKGMLGKYMLDAGFGQFRTIVKYVCWKRGKFFGEVDARRTSQQCPECGGQVKKDLSVRVHNCPDCGYKTDRDVASGQVIKNRGIQLISTDGQSGIEIACAVGLPGVGATQSRSEAKPHKGATRKSLK

SEQ ID NO: 6048 - protein, 276 aa, Microcystis sp.
MFVLEYKLRGKPSQYQAIDEAIRTVQFVRNKCLRYWEDNKGVGQKDVYKYVTQLRSEYPFVQDLNSTACQQACERTWTAILRFYNNCKNQIAGKKGYPKYSKRTHSVEFKKSGWKLNRNSKRITFTDGKNIGELKLIGSRDLFYFQEWQIQRIRIVKRADGYYCQLMLKLDARDITPQLESTGHCLGLDMGLKYLYADSNGNTVEPPKYYRKAEKRLNKLNRRKSKKFKRGQKQSNNYKKASQKYAKGHLKVSRQREEFAKKWLVAIKKMDRVFWY

SEQ ID NO: 6049 - protein, 415 aa, unknown
  TnpB Polypeptide
MQRLQAFKFELMPDGAQQRDMRRFSGACRFVYNKALALQKTNYEAGGKFIGYVALAKSLTDWRKGPDTPWLKQAPCHPLQHALKDLERAYKNFFAKRADFPRFKRKGSGESFRYPDAKQFEIDQANSRIKLPKLGWIRYRNSRDVVGQAKNITISQTNGKWYASIQTEREVPQSTPAATTAIGIDVGIARFATFSDGSFIAPLNSFKKHQQRLARYQRRMSRKVKFSNNWKKEKAKVQKIHSRIANARKDFLHKTTTAISQNHALVCVEDLQVRNMSKSSKGNSEKHGKRVKQKAGLNRAILDQGWGEFRRQLEYKMAWAGGLFIAVPAHHTSQTCPCCGHVAKENRQTQAKFLCVDCGHAENADVVGAINVLERGQRLLACGEDGSGRGRKTRAKPASVKQEPTEATMHEVSHA

SEQ ID NO: 6050 - protein, 155 aa, Anoxybacillus sp.
LQKKQTPSARRRLKKIGQRENRWMQDVNHCISKALVERYGKNTLFVLEDLTGVRQATEKVSVNHRYEMVSWAFYDLRQKIEYKARKHQAKVIAVDPTYTSQTCPKCGHTEKANRNKKTHTFCCKTCQYTTNDDRVGAMNLQQKGIEYIVEVTTNA

SEQ ID NO: 6051 - protein, 414 aa, unknown
  TnpB Polypeptide
MLAILKDEMLVRGVVFRLASDLPSEARFLIEDFRLAVNNAIRAGLQARVTSRNALVRIAYRDFHQEHPKMYAQHLVSAFEVAGGALKNHRRRTRKGIACKIPYVKRLMMKAENQAYKLDRESGTVDLPIRAGCHVKMKLVVSRYHRRYLNDPDLSLGSLTLLHDRVIVAFRKAAPAPYTPESIVSLDTNERSLDGVFVGRRPGAAVPVKARFPDVAIIQQRHHDRRRRLQKKKAHDRRTSRNLCRSEGKRERNRIEYRLHKVADAVVSFADGHRSAVVLEDLTGLRFKRGKDMNRRLSMWPRRKLHRIIEYKARWKGVPIIKVDPRYSSRTCPACGRIQDSRMGTEFVCECGWHLDRHINASLNLLQTAISNGMAGGLRFDPGAFQHDVMMILYEPSMAARSEPNGTSCIGEVT

SEQ ID NO: 6052 - protein, 365 aa, unknown
  TnpB Polypeptide
MKKGVKFRIYPNREQKNLINQTLGCCRLIYNKGLAMREDEYKSGNKIGYLETAAMLTDLKKSDDFAFLKAVDSIALQQSLRDLDRGYVNFFQKRASHPTFKSKHNNHQSYRTINQGDNIRIAGKYIKLPKLGFVKVRQSMKVGKINNVTVEHTPTGKYFVVLNVEFTPQPMSNMGGTVGIDVGIKEFYSDSNGKVVSNPKYLEKSMKKLRREQRRLSRKEKGSNNRNKQRVKVALVHEKITNQRKDFLQKQSTILIRENQTICIEDLKVKNMVRNHRLAQHINSVSWSKFFDMLTYKAIWYGNEIMKVPTMYPSSQTCSCCGYKNPLVKDLAVRKWECPECHATHDRDTNASVNILNKGLQMQSA

SEQ ID NO: 6053 - protein, 377 aa, unknown
  TnpB Polypeptide
MKFTLQIKLLPTNEQAIKLKNTFSVFNEACDAISQIAWERHVFKQFSLHKEVYYNIKETYHLSSQLVVRAISKVADAYKLDKKKQRRFKEFGAVTYDSRVLSYNTDNSVCSISLIGSREKIAYTCYRSQLMQYVKGETDLILIRGKFYLYQTIEIPTEKEEVAEDFIGVDMGLTDIVSLSDGTNISSKELKEIRNKYNKVRASIQSKGTRNCHKLLKRLKGRERRFATITNHRISKQLVAKAKKEHKGIAIEDLKNIRFGMNSKKRNKTFRRRSNSWNFSQLRSFLEYKSKVNGVQIVTIPPAYTSQTCHNCSHIGIRRGKYFHCTHCGNVADADVNAALNIATWGYVNTHERWELLSCCLHDGFSTSKAHKSLACG

SEQ ID NO: 6054 - protein, 543 aa, unknown
  TnpB Polypeptide
MIIQSKYTKIFHSNDITRQKYDELYDFAVLIRNHKNILSQYVNENLLHYLDCTKFQFSNEIRTKFKGYVPSSFYEQIYTQVFTCYENKFKNIQHRLVFKVSTVKGFELYKRGTRKYKKGDLKRVIVEKKQTKLSSCLTYLARYGNENTIAYIKSNIDKCDANKSDFYNNILRCCEKFGFERLYKLALLKRKRIINKYANKPIEFSSLTFNGRCRKKRIIDYNHRFGSVINSFISLSGFSRKSFDIPVTFNKGWHGNMKDYRKSNPDYEYTLTFNEKVHQVNVNICKDGERYISEPNGNTIGIDVNCKHNLLCLSNETTYDYDRKLVNDFCKLSLEIDRLKGKNNEYKVGKRKQRKLNKLKEKIIKSEQQLIANMCKTLQSQGVGHIVMENLNNGFGKCYVKDGDNENINYNRKVRFLGLSSLKQEVEHIARKYDIAVSTVQASYTSKMCPICGCIEDGNRPNQETFECVECGHKDNADFNAAKNIRNRVLVTVLRDKLLKQLDNGAFEPRPLSREKVKEVLLSFRRSLPKVGRECIESSNTTF

SEQ ID NO: 6055 - protein, 552 aa, Cupriavidus sp.
LQLTIQTRPPIASQAIPVLDRLCAHYGLHKRKLYARVAKDGGKAKDYKTEFCQQYGLTARYFNGLFNDLQGSIDSVRELLTEGIKDKRGDVQKLKERLKGYDKKLAEIASKKVLVTTKVFKRWTKQKRKIELKIERLDKQIQEFRVRLAANVPGICFGSRKLFHKQFNLSENGYANHKAWKKDWDAARNHECFFLGSGDEKGGNQSCTLFVGEDGLLALRIRLPDAVAAACGPADGGPRPEKLTSKDKYLVLPGLTFPYDEADLRRALRDGKALSWLIHKDHKGYRLMVSFDRPETKVSTLSRKFGAIGIDFNADRLAVAETDPGGNVIKAWRIDLTFEGKSSGQRDAILSDALEEVVEYALKVRKPIAGEDLNFADKKKDMTAMTPAQARALSGLAYAKYQQLLASKCHRRGVELIKVDPAYTSVAGLVKYAKPRGLSVHKAAAGVIARRSQGCKENIPREVSTPVSIMGVTAVFRLPARNRSEAGGTSWGEIHVALGKFRREMIAAQRKSVARKVGASRGVKSRGPSGGTVNPAGIKSNSSPRSGEQICS

SEQ ID NO: 6056 - protein, 414 aa, Cupriavidus sp.
MQRLQAFKYELMPTGVQQRNMRRFAGSCRFVFNKALALQKQRYEQGEKKLGYVGLCKELTAWRNSTETAWLAEAPVHPLQQALKDLERAYTSFFAKRAEFPRFKKKGQADSFRYPDPKQIKLDQGNSRLFLPKLGWLRYRNSRDVLGAVKNITVSQSGGKWYVSIQTEREVAQPVPQGGAVGIDMGVARFATLSDGTFYAPLNSFKRQETALRKAQQAMSRKVKFSNNWKKEKARVQRIHSRIGDARRDYLHKTSTAISQKHAMVCIEDLQVRNMSKSAKGSAEQPGKQVRAKSGLNKSILDQGWFEFRRQLDYKLAWNGGWLVAVPPQNTSRTCPCCGHVSASNRQAQARFKCMECGFEENADVVGAINVLRAGHARLACEVSGAGMPPAAGTHRSDSFRLDAGMSAVGISGL

SEQ ID NO: 6057 - protein, 423 aa, unknown
  TnpB Polypeptide
MRVTSSYAVEIKKQRMFDDTIKLYREAVSFLIDCFNKEWLTIQSVDKAKAKFNFAEKLVHTTKYNTAKYDFDAKFYKFPSYLRRAAIQAAFGAVSSYRSNYKNWEANGKVGNEPKLQCDRFCFPTFYKTIMFSESNEPNQCYLKLYSKNDWVWVPIAMRATDVKYITKYWSHCQKSAPTLEKKYGKYFLRFAFEEEVKLSDTEIQDRRICAIDLGLNTDAVCSIMTADGTVIARKFINFASEKDHLYHVLNRIKRKQREHGPKSATAMWRYAKALNDDIAKKVAAAITEFAVLYSADVIVFEHLSFTGKKHGGNKAQKLSMWKRNSIQDYVEHKAHRCGIRISHICAWGTSKLAFDGSGALKRDEANHALATFASGKQYNCDLSASYNIGARYFVRELLKPLPVMVRSQLSAKGENHGSSIFM

SEQ ID NO: 6058 - protein, 380 aa, unknown
  TnpB Polypeptide
MIKSYKVRLEPTKEQIEMLFKTAGCSRFVYNWCLAFQKERYEQGEKFVSAMGMSKYLTALKKQDDYSWLKEVDSIALVGAYTDACTSFKNFFQGLKKGQKVGYPKFKSKKHSKPAFMPNYQNIKFNENQVKLPKVGIVKLSRKNYIPIVKKYSNPRVTFDGLNWYISVGVEEAENISLELNGTIGVDLGLKDTAILSTGKKYKNINKTAHVKRIEKRLKKLQRQVSRKYEQNKQGKQYIKTNNIIKLEKNINKLHKRLANIRNNYNNNITTDIVNMNPQRIVIEDLNIKGMMKNKHLSNAIGKQGLYEITRQLEYKCKFKGIELVKADRFFPSSKTCSNCGHIKKDLKLSDRIYICPECGTVIDRDLNASINLANYKTEQ

SEQ ID NO: 6059 - protein, 382 aa, unknown
  TnpB Polypeptide
MNTVRIYSLTHLSSTQYQRLREAQMEAAQVWNECMHMHRDARLQHEAWPGRNELQKATKGRFALHSQSVQMVVHAFLANVETTQQLRLTHPQMRMRYPYKDKRFYPVMWPAQAVSRERGRVVLPMGRGRQSLVLPLALPENSGSCTLVWNNGFELHVCVEVPQADNAPGDKHATVDLGEIHLAAATTNTGKAMIVTGRGIRSLKRQRTMQLRSITKKQSKCKKYSRRWKKLQRAKNKQCRRAERRIRNQRHQATRKVINFCIERKVGTLFIGNPHGVRNQNKGRHHNQRMALWEYGRDIDYLTHKSKQAHMVCFTGSERGTSSQCPTCGHKHKPRNRQWTCKQCEFKGHRDLVGSINMHKLAFSEQVTFPRSFTYLRPSVLG

SEQ ID NO: 6060 - protein, 372 aa, Selenomonas sp.
MVKTFKFKLFHAKRNKKLHRQINAAGLAYNHCIALHKRYWKFYHKSLNVYALQKHLTKIKRISRFSYLREIGSQTLQDVTQRIDKGYRLFWKNLELKCKTAPPGFKKVRKYKSYTLKQAGWRLDEEHGAVYIAKQKYRYAMSRPIDGKVKTLTVKRDKLGDIYIYFVCELPDHEVEARTGQSVGFDFGFKGKMLVAENPDEDVKAPLFFRKARNAIARANRQLSSKQMRSNHRRKAQKHLARLHRRIANRRNACHWQLAKDLCQKYSIICLEDLNMKFMQSGHGKKTMDYGFAEFENILEYVGKQVGTKIVKVDRFYPSSQLCYNCGWKNKKVKDLRIREWTCPACGEHHNRDRNAAKNIHREGLRILNKAS

SEQ ID NO: 6061 - protein, 370 aa, unknown
  TnpB Polypeptide
MKRSISIKLCTTEEQTAALALVQKEFNRACNLIVPLAVKNRCWNHPDLHRIAYSTIRASTSLGSQMVCNSIKAVCNSLKVLKIKASQEVPLITFKPYSSVPFDKRTYSIKDIVLSLYTISGRITVPMIRAPFNDQYLHKGIPKEATLVYKNKSWFFNLVLDLPTPPVPKTSGKVMGIDAGENVLAAMSSGKLFDGKLLRHKCDCALALRSRLQSNGSKSAKQRLKKISGKEARHIKHVNHTISKALIQEALDAGCDTIALEDLKNIRKQIKAGKRMRLRLHRWPWAQLQAFIVYKAQAAGLKVVFVNPAYTSKLCATCGNRGIRNKHRFECKACGILRHSDLNASLNIRRIAASADTATGTVNYPHMGVA

SEQ ID NO: 6062 - protein, 175 aa, unknown
  TnpB Polypeptide
MQDNGHYLSIDLGLHNLMTCYDSAGTSFILGRKYLEISRKYDKEIARLGHQWNSCQSAGGIKYPKPSKHMLKVYKKKRNCIHDYLHKVTRAVVDYCKANDIHTVIIGDITNIRRNKNLGKVTNQKLHALPYAKIYGMLEYKLAMHGITLVKQTEEYSSQCSPTCTTGNKRICKEM

SEQ ID NO: 6063 - protein, 370 aa, unknown
  TnpB Polypeptide
MWNLCVEQESQWRPGRGRMPGFADRCRQLSEARAENPWLADGSAIVQQQAIRDHAQAMAGFFAGTHRRPSWRKAGRDEGFRITQVRPGDVRRLNRSTAEVRIPKVGWVRFRWSRQVPQGVKSYRVNLDRAGRWHVAFAAIPSPVPAPGHGGVVGLDRGVAVSAALSTGELLCCPVLTARQRQRKRRLERKLARARRGSARRKQIKRAMARLRACETDRRKDWCEKTSTDLARRFDVIRVEDLKIRNMTCSARGSAEEPGRNVRQKAGLNRGILASGWGQLVRRIEDKAPGRVEKVRPAYTSQRCSACGQIAAGSRESQALFRCATCGYADNADVNATRNIAAGHAVTARGGDGVTRPVNREPQPCTPPAA

SEQ ID NO: 6064 - protein, 418 aa, unknown
  TnpB Polypeptide
MKSNTEPAVVQMMSVRSVVFYLDGHLAPEARFMMEDFRLATNGAIRAGLQARVTARNALCKLAYKDSRKEYPGLYSQHHASAIEVAAGILKNHRRRSRAGRAVRQPYVKRLMMKAENQAYKLDRKEGVVDLPIRAGLHVKFKLVVSLYHRHYLDDEAYSLGSLTLLPDRVIVAFRRIPPKPYAPKSVLSLDTNERSLDGVFLRKGSSVAVRAQFPDVAIFQLRHHDRRRRLQKKKAHDRKTARALCKREGQREHHRVEYTLHQVANTILSFAKSKESAIVLEDLRGIRHKKSKDLNRRLSMWPRRELHRIIEYKAEEKGIPIIKVDPSYSSRRCPICGRTQHSRMGTEFKCECGWHLDRHINASINLLQTASSKGLAGGLRFDPGAFRHDAMMILYEPAMAARSEPNGMSKEWEAVVP

SEQ ID NO: 6065 - protein, 422 aa, unknown
  TnpB Polypeptide
MALVSQLPENKRNKCSDPPVSSGIIIGGGENQMQVKKAYRFRIYPNSKQAELINKTIGCARFVYNYFVGKQKEKDAYWCIVQEMVQNGQLPQNNWKGELFNKNKSIKAVRELKKNHPFLKEVDSIALQKSVEIVNDAYSRYYKKQNREPRFKSKKNPVQSYTTKSVNGNIQIHPKHIKLPKLGLVRFAKSREVDGRIINATIRRSPSGKYYISILAETEVEHLEKTGTSIGIDVGLKDFAILSDGTIYKNPNFLRTLEEKLAKAQRILSRRYMGSSNWHKQKRKVARIHEKIANARKDMLDKISTEIVKNHDIIGMEDLSVKNMLKNHKLAKSISEVAWSQFHRMLEYKAGWYGKQVVTAAKNFASSQLCSNCGHKHKGVKNLAMREWDCPVCNTHHQRDINASINLRKEALRLTAGTAGIA

SEQ ID NO: 6066 - protein, 366 aa, unknown
  TnpB Polypeptide
MLKTYKYKLYKTKKTKHIDNLIDLACSIYNHCIALHKRYYRLYGKSLNKFALQKHLTKLKRLDRYKQYSKLGAQAIQQITERIDEAYKKFFKKQCGIPSFKKRIKYKSFTLKGSIGYRLKDNVISLNGYNYKFSKNQKILDDDKIKTVTFKRDNLGSFYICISLETKDKIRIATGRSVGMDFGLKTFLTLSDNTAINSPLFYLKSLKDLKSKQRNLSSKKKGSNNRRKAKIELAKLHTRLSNRRRDYFFKLANDLAEKYDNVFIENLNLKDMAKLWGRKINDLAFNEFIGILSTKTNVVKIDKFYPSSKTCSCCGYIKQDLSLKDRLFECPNCEAKLDRDYNASVNIYRVGASTLRGEPVRPTIVG

SEQ ID NO: 6067 - protein, 394 aa, unknown
  TnpB Polypeptide
MKTGYSIRTWRMRLVCPEPIWLDRTEEYFQNVVEFYYHLLRQHEELWNSSLFDIQRSLELLTLAGRDGRQPTNPLPMGKVPVYLRRAAINKASATVKSTQELQSGFPEKLEAKVTFFKGMYSDLTDRSICLKLWNGEKWIWTDCNLKGRPFPQDGQLMSPTLVKEGRRYLLNIPVKQENSDARTAKERMAEGTNLCSVRFTNTDTFAVCCILDEQGKQLAVHTCRGGDAYRHRCKLLETRIQKSRPNTVGDNSPQPNRKYYMHLKNLSEHYAHQVSREILNFCKENQAGIIVLPDYDQNFTRMAMVKSGNFSPLHLSSKIRTNLQYKAWAEGILVLETRTDGLKDKCAICGGRVRRKGNEFLCENGHQGNRFLNDARNLGRKCQDSFFRVSRTK

SEQ ID NO: 6068 - protein, 366 aa, unknown
  TnpB Polypeptide
MKLTLQLKLVPTPDQHTALLDTMHAFNTAASYAAAVGFRDRVFSQESIHKRCYRELRDRFGLSAQMAVRAIGKAVETFKRDKRVCPVFRPDGAMTYDERLLGWKGPAHVSLLTLQGRQVVAMVYGEYQEGFLKRLKGQVDLVLRDGTFYLYATIDVPEETPIQPTRFLGIDLGIANIAVDSDGNSYMGDPIEVVRQRSATHRQTYQSTHTRSAKRRLKTLAGKQARFQRDVNHTIAKKLVTYAKDTKAALVLEELTGIRDRTTVRKRQRSKHHNWSFRQLADFIVYKAQRAGVPGCFVDPRNTSRTCSRCGFVSKKNRPSQEKFSCIRCGYTTPADQNAARNLATRGTVNCPDLVVPPGGQLAFAW

SEQ ID NO: 6069 - protein, 406 aa, Saccharopolyspora sp.
LQLRYRYRLYPAPGQMQALAQSFGCARVVYNDAVAARRAAWLAGEEYPTSGALQKRLITEAKRTPERAWLANVQHSMLQQAVRDCDMAYKNFFDSLAGRRVGRRMGVPRFKSRRDKRQTIRFQANGFRILDNGRLRLGKIGDIKVAWSRNLPSVPKTVTVIKTADDRYFASFVVEVGDETADPVLDECGNEIEAGLDLGLSVFAVDDQGRRIENPRFLRQAERKLKRAQRQMSRKQKGSNNRAKARQRLARQHAKVADARSDWLHQETTRLVRENQAIYLEDLAVSGLARTRLAGSVHDASWGSFRKLLEEKCARAGRALVVVDRWFPSTKTCSACGHAKGAMPLDERVFRCEKCPLVLDRDVNAACNILAAGRAERLNACGPDVRPPTGAVGVEAGTQRSAAKAQ

SEQ ID NO: 6070 - protein, 350 aa, unknown
  TnpB Polypeptide
MKAKKVIKCKIIALTDRKRRLLEAEYNGLQVYLQTGKDSGLCKTNMRQAKRFYKKILVTHEYPLTIRKDLIRFQTNDCKLSKFWFSIPVGGRTRLWLPVQPHASIPEGATLCESKVTRGRDGVFWAHLVVEKEIPCHTDFTNILAVDLGERLPATTVLYANGAFKEPRFYGREVRGIRRHYAWLRKRLGEKKALNTIRKIGQTEHRKVNDACHKISHTIVEQASRERAVIVMGDLKGIRDGTKRRGRRMNRIISNMPYYKLTQQIMYKAAWLGVPVHQIPERNTSKTCHRCGSTDTTRLKQPIFECKDCGLIYNADLNAAKNIAERFLDQAVKERGILAVPVTPHERSVP

SEQ ID NO: 6071 - protein, 149 aa, Bacillus sp.
MNREGIRFVKTSNIIKLEKKIQLLHRHLTNVRDNHIHQVTTAIMKTKPCRIVVKMLNIKEMMENKHLSKAIAQQKLYDFKIKIQYKCEKYGIEYMEVDKWFPSSKMCSSCGEIKKTLRLSKRIYTCDCGHETDRDLNASINLSRYQLAK

SEQ ID NO: 6072 - protein, 398 aa, unknown
  TnpB Polypeptide
VSSRCRAFRFQLCPTNKQTYTLERLLAGQRELYNAAMEERRGAWRWNRRSVTKFEQYRTLSGLREVRPDTLAFGVTVCRGTLNRLDLAFRAFFRRVKAGQTPGFPRFQARHRFDSVSWPDRSGWKLDEVQHRIYLQGVGQVKYRKNLPLRGSPKTMTLRREGRRWFVIVFCGDVPAQPRPETGREIGIDLGVTALVATSEGDTFDNPRWFRHGADRLAVAQRALATKQKNSARRRRAVEGVARAHRKIRHQRRNHAHLLSRRLVDANDVIVHEDLRVTSLTRRPRPRPLEDGTHEPNGASAKAGLNREILSAGWGQLLRFISYKAEEAGRTVIAVDPRHTSLTCHACGFVDAGNRTGTAFRCKRCGHTDHADINAAKNILRAGLARREHSRVANRVVA

SEQ ID NO: 6073 - protein, 385 aa, Sporolactobacillus sp.
MVTKGLKLRIYPNKQQRQQLAQNFGCARFVWNQMLAMLEERHENNPKASFLTAYALNNLLPLLKKEHPFLKEAESTSLQVTNQHLIDAFHAFFKKEKGHPKFKAKHAFKQSYTSKFVKGNIQPVGHHGIRLPKLGILRFKAGQRLSETIRQVTLSRTPTGKYFAVLTVEGENQAFPKTGQTIGCDLGVKDLLIGSVEDLRSPTTHFDQGLARKLRLWQRKLARRQQLAKKAIAWDHHQKVPVPRILADFKNVTKARLQVALIHEKIANQRMDKLHKLTTELVKTYDRIALENLRTKNLLRNHALARAIVNQAWGELRRLLIYKCAWYGKELKLVNPYKTSQICSTCGHDDGKKPLNVREWTCPQCGTHHDRDVNAAKNIERLAFG

SEQ ID NO: 6074 - protein, 332 aa, Sporolactobacillus sp.
MVMRGIKLRIYPNQQQRQQLAQNFGCTRFVWNQMLAMLNERHENNPKASFLTAYALNNLLPLLKKEHPFLKEAESTSLQVTNQHLIEAFHAFFRKEKGHPKFKTKHAFKQSYTSKCVNGNIQPVGDHGIRLPKLGILRFKAGQRLPETIKQVTLNRTPTGKYFAVLTVEGENQAFPKTGKTVGYDLGVKDLLVGSVEGLRHPTTRFDQSLARKLRLWQQTLARRQRLAKKAIAWDHHQKLPVPRTLADFKNVAKARLQVALIHEKIANQRADKLHKLTTQLVKTYDRIALENLKAQNLLRNQKNRPLWPIIGASFRLALLKLVCCFSLQSMG

SEQ ID NO: 6075 - protein, 302 aa, unknown
  TnpB Polypeptide
MYSYKYKLKPTPDQEALFAKHFGCVRYIYNYFLEQRIQSYQTNKTGSTYVNDANQLPTLKDQFEWLEKVGSQCLQYAVKCLQNGYDNFFRKCKQKVKGKKGFPCFKKRHAKQSFRIPQGVKLVENRLIIPKFPEGILLIMHRKLQGEIKFATISKNKARQYFVSITVERDMQALPKVVKAIGIDLNVKDIVDNDGNKEPNPRPGQQYQDRTKLLAQRVSRKKLNSKNREKAKLKLNKKKQHIHNVRENFLHEVSKCIINENQVICIESLSVEEMVKKVSTEEMPRWKQKKLHRDILDCGFFC

SEQ ID NO: 6076 - protein, 390 aa, unknown
  TnpB Polypeptide
MLIQKAYKTEIDPNNKQRTLLMKHAGCARKAWNWALARVKDKSSKPNAMQLHREINVEKQGEFAYMYEVSKCAMQESLRDLQTAFKNFFDKRAGFPKFKTRNKGIGSFRLTGSIKVENNKIKLPRLGWLKLKECGYIPKDQHILSVTVSEKAGRWYVSVLVREEVELQENHEEVLGIDLGIKALATCSDGSQYDNPKALAKLENKIKYCQRRLAKKKDKKSNRRKKLRTKIAKLWRRVTNIRKDATHKASSEIVKTKQPQIIVMEDLNVSGMTKNHKLAKAICDANMREFRRQVEYKAAWAGVDVRYVDRFFPSSKMCSSCGNVKKDLKLSDRTYRCDCGLELDRDLNASYNLRNTVSSTGINAHGDDKVHAKKLAGGRLGSENQTSISA

SEQ ID NO: 6077 - protein, 435 aa, unknown
  TnpB Polypeptide
MFEAVKVRLDPTPRQLRLMASHAGAARFAYNAGLAHVKEALDNDESPELSHYSLLRWWNANKDVLAVNQTTGVVWWSQNSKEAYNMALHGLARGFSNWSKSRKGQRKGKRVGFPKFKSKNNVARFAYSTGFTAPKAGDPYGLKLPRIGRVHCMENVYRRVDGARLIRITVSRRAGHWYASLTVEREPAAPASVSAPKGGVVGVDLGVKNLATLSDGTVIPNPRALGARLKALRKAQQALSRKVKGSVRREKARERVARLHARVADVRADAINKATTMIASNYSVVCIEDLNVAGMVKNHCLARSLSDAALGEFRRQIEYKTARSGAVLRVVDRWFPSSKTCSNCGVVKDKLSLSERVFHCDACGLSLDRDLNAAVNIQVAGSAPETLNARGGDVRRLSPLLGDADPGEARTKQSPTGGVRLGADLGNEAMQPSVS

SEQ ID NO: 6078 - protein, 528 aa, Thermus sp.
VIGEAASQGRSRKRKKEKAFAGVHALLVFPSGEDRKATLDLMRRFSAAVHYAYNRLLQGWSREALKRENGPLCTFFRLNTRYADDAILKAQALLDSARERGEDPRKVVFGGRKLFETLKRGHLSGKPLKELKREWKEKRQGLLYSRGDKSKGGNLNLRLEAEDGALWLRVNLGNGSYAWALVKTSHPNLSALVERVHASLPYNVELSLKDGKVYATFTWEEEPTPLVATKENGVLGIDVNADPYHLALAVVGPNGNLRRHLTLSLEEVDRAPNRGAKELLLWKIAHQVVSLALEHGVAVATERLKHLPKGRRGDGSGRAFRRKQHRFAYASLLRKVHSLARKRGVQVVEVNPQDTSTIGMLKYAPQLSLSKDVAAAYVIGRRALGFKEKLPKGYGKLLRDERFRDHVQGFYASRVRELQAKKAQEQNPYLRRRLSREIGKAKRHLSLLSSLQGSPGSQREVTDGRNSPGANPWRVLRVGTFLPLLGREVPRDLSPLKPILFGGSWEGWRESRGPHPGGGPECTNVRST

SEQ ID NO: 6079 - protein, 396 aa, Peptococcaceae sp.
MKTIHKAFSFRLYPTQDQEKLFASHFGQARFVYNYFLRQRIDYYAFNKGQEKQSLNYHDTARMLTELKKQSDTVWLQEANSQSLQQSLRHLDNAYNHFFNHGFKFPNFKKKSGKQSFIIPQHFKIDIQTNRLHVPKITPIKIVLHRQMEGVAKSVTISRKSSGKYFASILCETQKDIHPRDTGGEIGIDLGLKSFFVTSAGESVQPPKFLRTSEDKLKLLQRRLSRKVKGSNRRNKVRIKVARMYEKVTNQRNDFLHKLSHRLVSENQAIFAEDLNVKGIMANHHLAKSVADAGWSEFIRQIKYKSEWNGVHFGQIDRFFPSSKRCHACGWINQSLTLKDREWTCQGCGRVVDRDFNAAQNILQFGQVGRDAAEPSKRPGRGGAVMPLAELGSPGL

SEQ ID NO: 6080 - protein, 287 aa, Planktothrix sp.
MIVLEYKVKGKLEQFKAIDQAIRTTQFIRNKAIRYWMDNSRELKIDKFALNKYSTTLRKEFSFVNDLNSMAVQSAAERGWTAISRFYDNCKKKISGKKGYPKFQKDCRSVEYKTTGWKLHPTKRQVTFTDKNGIGNLKLLGKWDLHTYNLKDIKRVRLIRRADGYYCQFCLGITVTDVQPRTGNEIGLDVGIESFYTDSNGHQEPNPQFLRKAETSIKKSQRQIYKKVKGSSGRRRARKVYSKKHLKVSRQRNEHAKRLASNVCTSNDVVAYEDLSVRNLVKNHCAR

SEQ ID NO: 6081 - protein, 423 aa, unknown
  TnpB Polypeptide
MLLCTKIKLEVSEQDAATLEFMQSKCRGLYNWWVMRLKNGEKWPGWKVAKATLQASKQHDPELEFVYGKVLHEVYFRLDAAMSAFFRRVQHGETPGFPRLRPRHCFFTLCYPASYLKIKGDKLLLPTGAGGKHGPKKYPNVEARLTETPPEYFKEVAISRDARGNYYASFPASRQPEECHNADTVAFDLGMKTLATGTNEQGRIYTIGGFKGSRWYNRQLDKIRSKRDKCKKKSRRYIHLSQVYKRVSQKKQNKQQDSLHKASHLIAHTLVERTVVVGDLSQRQMVMKEHKDRNKHLNRSVFNEWGLYTFVQMLTYKCSLYGKELVLENERDTSKMCSSCGNLQKMPLWKRTYCCVKCGLVMDRDENSAINILMRFLARRGPYTPSGCDVLQAHQNSVEVTVASCQMQVQQLNMFENGPAEYV

SEQ ID NO: 6082 - protein, 403 aa, unknown
  TnpB Polypeptide
METKIKRKGFQFRFSPNGEQQRQFARIAGACRFVYNKALAERIRVYKEEEKSTSFFTTSYWLTEWKKEISWLVGYPRPVIAESLRDLDKAYKNFFKLKRGFPKFKKKSNTFQIRFPLSCHFKIEQGNKRIKLPLWSGLRCASKNKQSGWMRYRKSQEIIGKAKNITVIKKSKHWYISVQTEIEYTPPESLPSQVGIDRGISRFATLSNGEFYKPLNSFRVKQKEMAKLQRAMSRKKKFSSNWKKAKAKITSLHESIANHRKDFNHKISTDITTKYGLVAMEDLKVVNMSASAKGTVEKPGRNVKAKSGLNKAILDQGWGEFKRQLEYKTEWNGGIFMTVPPQYTSQTCPSCNHVSKDNRKTQSNFTCVECDYKENADVVGAINILRLAVSGEKSPDKGLGKPG

SEQ ID NO: 6083 - protein, 496 aa, unknown
  TnpB Polypeptide
MRAQTASFVVQTKLKLPTSVENYLEKSFRVAASAYNEALSFGLRRFKALKQNSLYQELLEKRRDAEAQKECDKALFELRKSYGLTEYGLSTHLSKQRRIPNSSYRHLSAGEIQVVAFHAYKALEKVIFYKIKAHSLKFRSKYDSNVSYRNRVNTEATRLVESDRQGIAYRLYLHKMSTFVDIPVKAFNRYQQESLLRSEKIKYVQIIRKTIRGKRVYILQIVCQGFPPAKVTPGSKIIGIDPGISTVAYASNSEVALVDLVPTNINQKEKLMKLLDRKIERSRRVNNPDCYHEDGTIKKGARFKHPSNRQLHLQVRRLKAYRSLSEERQKLQGQLVNRIISQARLIKIEGLSVKGLQRRSREIRINPKTNRPFSKKRFGKSIFRAAPSTFRNALQTRAHQLGIDFEVISPKDVKPSQYNHITQTFEKKSLSTRIYDLSEDVTGVQRDLYSAFLIGHIEDGRYQQEKLTQDFPVFYKLMKEFLHQPPKTSRLVWYLH

SEQ ID NO: 6084 - protein, 394 aa, Mycobacterium sp.
VSRYRLLPTVEQAAMLVEHCRHARYVWNLAVEQQQYWQRGRRAPRYNEQCAQLTVARAEYEWLAAGSQTVQQQALRDFAQAMRNFFNGTHRRPTWRKAGVHEGFRQVGLKAHHVERLNGRFARVWVPKVGWIRLRLSRPVPAGVKSYRVTCDRAGRWHIAFAHVPEPIPGPADGSVVGIDRGVTVAAALSTGELLHAPGLSHGEAKRLRVLQKRLARAKRGSHRRARTKRAIAKLKARDTDRRKDWVEKATTDVARRFETIRIEALDVRAMTRSARGTVEQPGMGIGAKRALNWGILRSGWGLLAARLQAKAVGRVEQVPAAYTSQRCSACGYVARGNRKSQAVFECEACTAGPCNADINAARNIAAGRAVTARGDLGISRSTNREPQLCSPAA

SEQ ID NO: 6085 - protein, 429 aa, Acidimicrobiaceae sp.
  misc_feature (50)..(52): Xaa can be any naturally occurring amino acid
MFAIHTSSIASPRVTASPNTENSDSRTDDSDRLAHRTSALARRHVPVRPXXXSFINEFNAWKNGQSDDALVNDDGTRGLAWRHELPGDVFECASVDAARALENFSTSRRGERSGSPVGFPRFQAKGKVTPSFRLRNRATSGMPPSSHPIRFNDPSHLRLPKFGPVKLFGSTRKVRRMIDVGRFHVYSATFTQLAGGWTVSLTGVAAEFHQAERSRTNRHAIPVGVDRGIISLCVAADANGIPFNSFEGVKTLKQAHASLKAANQALARTTPGSKGHQRARARLATRHRKVANIRRHLVHQASRALVDRCQVLVIEDLNVAGMMRNRRLAKSISDAAMGELSRQLRYKARWHGVEVRVADRFFPSSKTCSGCGEVKTNLDLLTRTYSCEVCGLVIDRDLNAAINLARWQPKETSEVSLLDPTPALLPSTA

SEQ ID NO: 6086 - protein, 219 aa, unknown
  TnpB Polypeptide
VKPENPWYFETSKCAPQYALRDLLLAWDRFFKKVSGVPKFKKKGRSDSFELDGTIKIRSTRRIQVPKLGILHTYENLPQVPVKNVTISRTADRWFISFRIEIEPSTTSKSVDVVGVDLGVKSLATLSTGERFEGAKSYRFLEAKLSRLQWLNRHKQIGSVNWKKAQIKIARLHRRIANIRKDTLHQLTTYLAKNHSTVVPYGFECVGNDGKSQTGCIGF

SEQ ID NO: 6087 - protein, 351 aa, unknown
  TnpB Polypeptide
MKINKAFKFRIYPNDQQKQFLAQSFGCARFVYNRFLRQRIDYYAENGKGLIYLDDASALTQLKKLPEFEWLNDINSQSLQAALRNLDTAYNNFFNKRAEFPKFKKKSNKQSFNVPQHFSIHDNKLDIPKCRGIKIKLHRVIEGSIKSITISKTPSGQYFASILCELDIPEPVFTGNEIGIDYGIKAFISTSEGEIIESPKFLRKSEKRLKKLGKALSKKQPSAKNRYKAQKQLARQHEKVSNQRQDFLHKTSKQLVSDNQAIYIESLAIRNMIQNHCLAKSISDSGWNTFVNMLKYKGQWYGCRIIEIDRWFPSSKRCHVCGYINDNLTLKDRSWLCPECNSDHDRDITPR

SEQ ID NO: 6088 - protein, 374 aa, Anabaena sp.
MKTLKFKLYEHKRNRHLKRMINTAGVIYNHCIALHKRYYRMWGKHLSCAKLQSHIAKLRKRNRLWQSLGSQAVQDICQRIEKAYQLFFKHNKKGVRPPGFKKVRKYKSFTLKQAGYKFLGGNRVKLGNRVYQFWKSREIEGKIKTLTIKRTALGELFMVVVVDNELKPEIKSTTGKVAGFDFGLKTFLTCSDGSTIDSPEFLKQSLNAIKKASRSHSKKLKRSNNRERARKNLVRKHEDVCNRRSDWLWKLAHELTDKFDILCFETLNLKGMQRLWGRKISDLAFGEFLQILEWVAKKNNKQVIFVDKWYPSSKTCSHCGHILEKLDLSVRQWRCPSCNSVNGRDENAARNIQMVGALTIGLGDVRLATPAIAV

SEQ ID NO: 6089 - protein, 547 aa, unknown
  TnpB Polypeptide
MKEKIETKKRLIQFDLLRILAIFFMMLLHIAGSNWDWTAVDSFEWNTFNVYDSIARCCVPIFVMISGMFFLNDDRIEPIGYIYKKRILRLVTAYLFWSTLYSLYVNLILQNDSGVEIKKQNIPIRHTLHIYRQAVRYLIHVYEECWEELFQIANLQKRFNAAEHLVHSTKKNRARYDFDQRFPKMPSYLRRSAIQHALGSVSSYETRLELWKQKKLDGKPKLVYENHAMPVFYRDVMYKEAEDQADIAFLKLYDGRDWKWFPVNLLHTDMEYLRKNWAGVKSSAPTLEKRHHRYFLRFSYTEEVPLSKKEINEQIICSVDLGINTDAVCTIMRADGTVLGRKFINFPSEKDQMYRVLGRISRFQREHGSGQVQSRWNYAKRLNMELSRKVASAITTYAQNSHADVIVFEYLEMKWKVTGKKRQKLHLWRKRDIQKLCEHQAHRIGVRVSRVCAWNTSRLAYDGTGEVVRDSENHSLCTFTTGKRYHCDLSAAYNIGSRYFIRELLKPLSATVRSSLEAKVPSVKRRTSCVYADLRKLYVEVNNLKAA

SEQ ID NO: 6090 - protein, 364 aa, unknown
  TnpB Polypeptide
MSMKVFEYRLRPNRNQEDAFMKVLIGTRLMYNAALAEWKQHLDETGKYLGMYEQDKRYNKQSYPELPAVVVDQAMKRLHRGLTRFFTFRREGKVCGFPRFKGANQWNSIEFRDSGNALKDRYFHAGKLCGGNIRTIVHRPLEGEFRFARIIKRPSGWYLQCICLVEKNLLPHTGNAVGIDVGVKSITADSNGYIVPNPQHLKAEMKNLAHSQRLLSRKVKGSERRKKQIRIVARRHERIANRRKDFLHKLANHYIQNNDVIVIEDLNIAGMIQNHHLARSISDASWNQFRNLLTSKAENAGRQLIVVNPRFTSQKCSKCGEYVEKSLSIRTHVCPYCGYIDDRDVNAAKNILAIGLDEAIAECS

SEQ ID NO: 6091 - protein, 364 aa, unknown; identical to SEQ ID NO: 6090
  TnpB Polypeptide

SEQ ID NO: 6092 - protein, 437 aa, Salipiger sp.
MGTMARRRVTYKVYPNKQQEELLENTRRMHCDLYNAALEERITAYRRRGISVKKADQEKSLTQIRQQDPLGYGAINAQALQGTLKRLDEAFQHFFRRVKEGREAPGFPRFKAGRRFKGWTYKAHGDGWRVFPGADWKHGRLRLSGIGTMQIRGKARTQGAPKTCTITKKIDGWYASVVIECQPRRDHDQDAHDAMTMDWGQETYATLVWGIEDDEYEELANERFWQSEKDKIIEKNRELSQAILDEYNALPKEEKKQWKKPSKRHRRKRRELARAHRRLSNRRKDRSHKTSAYIAKRCKRFGTEKLTVQNMTRSAKGSVENPGKNVRQKAGNNREALDTAPADLLKMIRYKVEETGADYIEIPTRQVKPSQRCPVAWTCEKKGLGDRKHRLPDGRVIGRDHASGATQLRWMLAKSGQSIPWVGCRPLDSPGNSHPEP

SEQ ID NO: 6093 - protein, 503 aa, Salipiger sp.
MSLDDVQADVPTEADVLASFPALPDVMDPPDLVQQASVFRIYPDDTQIAAFRQWIGAARWLWNRYVEINQHLYDYEGRFAFQQELSSLLPQMKKAQGLEWLAEPPASHIVDVSCRFDQSLRKFLDDKQAVRAGRMSKNAAAGFPRFKSKRDREGSVYVSGQNVRLIRREANPHAARGWVELPAMDQTEVWERTVKGGKRKGQVDELPKPLRKAIRIRGGRWPEGHVQSVTIREDAPGVWIMSVQYLGPPPKRKRRGEDIDVPDPEVAARGYDLGCSSAAVGSDGSRLEPDRPLRKRVKRLRRAQRRSARRRQARLDQAQEKKKDIPRSRRERRAYAEEARIHHQVRNARYNFTHQFTHRATAKAVVTCAEDLNVSGMIRNPKLALSVSDAGMGEILRQLEYKSEWRGRHFVKIDRWAPSSKTCSGCDHKLDELSLSTRRWVCPACGADHDRDENAALNILRWGLKEALRRGTPKVTPGESRALVGGKSRKGKRTRRNSARKAQ

SEQ ID NO: 6094 - protein, 334 aa, Tolypothrix sp.
MWDKHLSCAKLQSHIAKLRKRNPFWQSLGSQAVQDICQRIEKAYQLFFKHNKKGVRPPGFKKVKKYKSFTLKQAGYKFLGGNRVKIGHRVYQFWKSRDIEGTVKTLTIKRTPLGELFMVVVVDEGSRPEVEVKTGKIAGFDFGLCTFLTCSDGTKIESPQFFKQSLNAIKKASSHHSKKLKGSSNRERARRNLVRKHEDISNRRRDWFWKLAHELTDKFDVLCFETLSLKGMQRLWGRKISDLAFGEFLQILKWIAKKKNKLVVFIDQWYPSTKTCSGCGHVLEELDLSIREWRCPSCQSVNGRDENASRNICAVGASTVGLGDIRLAMPAIAV

SEQ ID NO: 6095 - protein, 179 aa, unknown
  TnpB Polypeptide
MHELYRDSNGKEPAYPGYYRNAEKKLAREQRKLSRMQKGSNNRNKQRLKVAKLHEKVSNQRKDFLHKQSRQIANAYDCICIEDLDMKAMSRSLKFGKSVSDNGWGMFTTFLRYKLEEQGKKLVKVDRFFASSQTCSVCGYKNAKTKNLALREWDCPQCGTHRKLNLPRWGRMSQLRQEK

SEQ ID NO: 6096 - protein, 384 aa, unknown
  TnpB Polypeptide
VAQRIPFTPSKTQAALLEQCFGARRFAYNQQVEAFNSYDKDTNPRPAYPNVTDMKNENEWLRDSPIPSNALSNAIMDFRKAQSAYFRQAQYEKNRPRFASKNDNIQSFRNGKPMRHMEGNRYPLSRKLGLVRIRRRDRIRYPLESLSSWTVKRENGVYYLVLLFDVDVQPKPPVDGQVGIDVGVKDFLTLSTGEKINYPDRLRQLEERVRCEQRKLSRRAKGSSNYRKQKAVVAKAYAKVRHFRENFQHQLSHKLIEDNQFIGVETLAVQNMTRKAKRKLDANGRYTRNGQSAKRAMNRSILRNGWSSFAEKLAYKAQWYGRTFVQVDMFYPSSRLCHDCGHKYDELRLSEREWVCESCGASHDRDVNAALNILCEALRLSPKG

SEQ ID NO: 6097 - protein, 352 aa, unknown
  TnpB Polypeptide
LENHQQTETPRPNVLRCSRRITAPGQPRASRTQPSRRSRQRLCRTLEERQESLETTLHVTVRQLRRKNRHGQRRPRHARHHRRASHRRFHPPDERRDTPHSAYLFNDDYDVNGATLHYDEVEDCFYLHVRTKPAVENDEAEQGDAKHVSVLGVDLGITNIATTSTGRFWSGGELNHWHREYEKRRGDLQQTGTRWAHENVQRVGRKQTGRFEQFLHTISNELVKEALENDCTHIVFEQLKGVRERLPHAKAVHKWAFHRLYEYVTYKAESKGVEVKQINPEYTSQRCSKCGFTHEDNRPHNNRQDEFECLKCGYEVHADYNAAKNIGLKYLRDQQKSGRGGAPVGVRLNSGR

SEQ ID NO: 6098 - protein, 118 aa, unknown
  TnpB Polypeptide
MLHKLSTDLVRQYDVICIEDLAPKNMVKNHRVAKSISDASWGEFRRQLEYKAKWYGKVVATVGRFFPSSQLCSICGAQWPGTKDLSVREWVCPECGEHHDRDVNAARDILNEGLRLLA

SEQ ID NO: 6099 - protein, 408 aa, unknown
  TnpB Polypeptide
MQRLQAYKFELRPNGEQARQMARFAGARRFVYNKALALQKDTYAQGGAYVGYVAMAKHLTAWRNGTETPWLKEAPVHPLQQALKDLERAYQNFFDQRADFPRFKKKGVCDRFRYPDKKQIKLDQANNRIFLPKLGWLRYRNSRTVPGEVKNVTVSQRAGKWFVSIQSEWDAENPVHPSGSVVGIDMGVVRFATFSDGEKIDPLNSFHKHQRALTKAQQSLSRKVKRSRNWIKQKRKIARLHARIADVRNDFLHRNSTTISKNHAVVVLEDLAVKNMSASAKGTTEQPGRNVRQKSGLNRSILDQGWGEFRRQLEYKQTWRGGRVIAVPPQNTSRTCPMCGHVSAANRKTQAAFCCVACGFSGHADWVAATNIKRAGLARIACEVSGAERPPAAGTHRTDGTGKPDATE

SEQ ID NO: 6100 - protein, 201 aa, Bacillus sp.
VKCYFPKNNKTDWTVERHRVKVPTIGWVRLKEYGYIPKNANVKSGTVYQRAGRYYVSILCEVKEVKPNSILNAVGIGIDLGIKDFAVRSDGKTHKNINKTVQVKKIEKRLKREQRSLSRKFENIRKRGEQPVTNKRANINKNILRVQKLHARLANIRLAYVKSIVNDVVKTKPMFITVEDLNVKGMMKNKHLSKAVAQQCF

SEQ ID NO: 6101 - protein, 359 aa, unknown
  TnpB Polypeptide
MELRNKMIVRELKLKLNIKQEQQLNDWLWYLTGVYNWAIRKIELNAKDKIYFSKFDMQNCIANHSKKMSMPSHTIQGIIIQAYMTWQRCFKKKGGKPKLKLIGNKLMSIPFPDMVPLSRVDKQTIRMPGLGQLRYFKQELPKGKIKNGRIIKRASGWYLQLTIDAIHKFKVKNTNEKVGIDTGFKHLAVFSNGVKYNNPRYYIKLQKRLAQAQRGRDKKLVARLHEKIKNQRKDNNHKIAREIVENYNEIYITNDNLRNQAKKLGKSVNDAGISQLRNFILYKGNNHNREVKLVDSKYTTMTCSTCGSLTGPKGWNELAVRYWECSACGAVHDRDINSAKVVLNTGAGIALKEVSNVFN

SEQ ID NO: 6102 - protein, 228 aa, Paenibacillus sp.
MRFANSRACEGRIISATMRRHASGKYFVSILCEVEQEPLPAAHKHIGIDLGLKAFAVCSDGLRVESPKAFCRYEKKLAFWQRRMSRRTKGGSNWHKAKVNVARIYEKIANIRQNFLQQLTTKLIRENQTISIEGLDVVNMLKNTKLAKSIADASWGEFERQLTYKAKWYGRTLKFAEPFAPTSQTCHVCGFVNPKVKHLSIREWNCPSCKTSHDRDNNAAQNIKRVAI

SEQ ID NO: 6103 - protein, 401 aa, Micromonospora sp.
MSRAVKRAFKYRFYPTDSQAAELARTFGCVRKVYNLALVARTEAWTLRQERINYHTTLALLTAWKKTDELAFLNEVSSVPLQQALRHLQVAFTNFFARRARYPSFKSRKKSRRSAEYTTSAFRWRGGRLTLAKMTEPLDIVWSRPLPEGASPSTVTVSQDPAGRWFVSLLCDDVIEQVPASGMVGVDAGIDSLLTLSTGEKIVNPKYERRDRARLARAQRAVAKKEKGSANRAKARHTVARVYARITDRRRDHLHKLTTRLVRENQAIVIEDLAVRNMVKNHRLARAVSDAAWRQFRTLLEYKADWYGRDLVVVDRWFPSSKLCSACGALAQRMPLNVRSWTCRCGQTHDRDVNAARNILAEGLSVIACGGGVRPQRESSRTGRSSAKQENPRATKGILAL

SEQ ID NO: 6104 - protein, 553 aa, unknown
  TnpB Polypeptide
MKKQSKSKNTIFRMYKTKGPDLLIPLYNILQGELNRILSTPTYVDALSKIDFKYRDENGKEQTKLNGMLWKEIHEIIGDSLKDKVPDAWYIRILYHNIISLLKSRKEQIKIYEILKSNQYKINNTLRDKLAQEKLYPTKAYLETLTNAKDIPVLPKRKTFILDFSVSDKQMFRVGKNTNAYEIKIYNKQEVKDKNLDTRWISFEMYLPTYIRESFTGETAKPQFYWDRNRDEFVCAIPCKIKKIPNKYENIIGVDLGKVKVYSATVVRNDGSISDEYIPTLELQNLVDKLNRINQHINSVYEKKQRSYQYGIITERQNRRELDYKKSKNKRTKLQFAIARLIAVEIVNIAIKEQCKEIHLENLSWVKSSGGKWNFAQVQACIEEVAELFSIQVLKVNANNSSKTNSVTLEVGTVSNRDVTFKTGEKVDRDQLASLNIALREPKKTKQRKIKNLNNRDSVVIQRQSRRFQNYLMKQSVMEMKSKRKIHKECLRAMQDHRSSNPNLIRKENKKIVMFSHDKAKSDFAIVSVYYTNQVQLQLKQSYYFSDNLKFRL

SEQ ID NO: 6105 - protein, 449 aa, unknown
  TnpB Polypeptide
MYHHQFITSIINTASTVRLAHKIELIPTTSQVEYFTKACGVSRFAYNWALANWNSQYQEWKEAEEESKKNGTINTLSKPKEYELRKQFNAIKSEQYPFVKEITKCAVQQSIKDLGVAFVRFFKKTSNYPQFHKKGRHDSFYMDNISFKVVGKRIHIPKLGWVKMRENLRFYGKIMSATVSRIADRWFVSVQVDVPFNSLKVAREPYHQDNSYCENQAVLSDSMIEDVDLKVVGIDLGIKTMATLSYTDKIEKIDAPKPLKQLLSKLKRLQRKLSRQGQKYTLEDYVDANGETRKIRKYSNNYMKTKVKLARLHAKISNIRHDFLHKLTTRLVKEFDVICIEDLNVKGMMANRKLARAIMDLGFYEFKRQLLYKAQMWGRMVIIADRWYPSSKTCSHCGEKLKSLELSDRDWKCPHCHTVHDRDANAAMNLRKLYFTNIDEVAAPDTQLM

SEQ ID NO: 6106 - protein, 452 aa, unknown
  TnpB Polypeptide
MKLTLKIEIRKRSVVNKLEKTCKLLQSFKNIVYICARKYFDKTGEIHPFLNKSWLDRFIKKKVSLNVIDEELYELQDKLYNMWKNEIGSDTTKSLVNVLVREFKSIVGKWKAGKKSKLPVPRKISTLYSFTIETNPNMIVDKRFSKRGKSNHVVIRLCKKYGAIRFKIPATLPDKIHYKVIWFKDDVVNILATYEVDCNCSLNLDPSNYISIDIGIRNFISAISNTNIKSFIVNGNPLKSFNQWVNKLSAKLSSCNEKGLLQKLWRYRNKRVLHFVHNVANMLVMICLENRIGTIIVPESLLDEYQKESKMSRKFNQEFRQIPFGKFIKILEYKCKLYNIRLLKVNESYTSKLSSITDRIENKEASKKINGVRIKRGLFKDLKLNKVFNADLNGALNIAIKALGKFARQSLMKNYKWITKLCNPVKINLFKTYSPSQVLNLIGDSSSYPCRG

SEQ ID NO: 6107 - protein, 513 aa, unknown
  TnpB Polypeptide
VKRAYRVAQHGNTDKIAAVAQVLAPYQATMRSAQRSQWRAWCQNGQQFWNRRDPALISSTLSERYKRSAQNQVVAGLDSWLELTKDSVARTVTRSSLDAETRADLHWLNRSSMHHRTDGTAMVPVWAYDDGGVRTPSKARRPAPPETLFLLRRITKHVRRHRVSVPTLWRTRTMTLDGTVAQLESSTPKPLPQPSPRRRSPGSTFGHWLRISTVTPGKTVQIPLHSNHFLDAAAGGLSNFAQVTVARDDTVKITLVKCSDPAPERTGGIDLGLDWGLHSMFASSLGDQLGTALYPWLARLDTQLTTLAADLQRQGIKLARNTRYRNFQRRIREYVRNEVGRVVNRLLETYDIRSVTVEDLDFRDGGMSRRMNRILARAGRAAVKEKLAAITETHGVTVHAVNPAHTSRECSGCHYVDPRNRQGQHFRCRFCHKRLNADTNGSRVLLHRRSVREADTHLGRKTVLRKADARFEAHWGLRPGRAEKLRSRPTERPAPPRPETDGLVQRTTFALTK

SEQ ID NO: 6108 - protein, 415 aa, Chloroflexi sp.
VAGNMNDTVLMRYKYQIVNHRRNRKLHQFIDIGGIAWNHTVALQRRHYRLTGKRIGKYDMGAHLLKVRRQNPKRDYWKLLNSQAYKEIADRHDKALTRFLTGLAKGRPKFRKVKKFRSIVLPMGNGCKLLESDNPRIGRMQFAYGWRGAEKMNLRYHIGDRPLEGKVKSVTIKRTGDGKFWLSFVVERERPRIFYPSTGKTGGFDFGLRIFLTTDEGQAIASPGFLFEELDELKRRSKKLSGRGRKKLGSGSWKREKFAVSRLHIKIVNRRIDFHWKLAHELCQRYDVLCFEDLGLDEMKRQLPHKKARRKHGDLALGEFRRKLEWVAQKTGREIRYINRYKPSSKTCSVCGHEVDEMPVEQRTFECVACGLLIDRDHNAARNIFQWGRGPVLGESGVRLTANAGATALTTEPTA

SEQ ID NO: 6109 - protein, 462 aa, unknown
  TnpB Polypeptide
MFFEMLSSGQLSEREEREPTLTPAMPEEGISEVEFKNRRANVVRLLPHGFRERKLRRLAKASAGLFNEINYERRQQFFHGERVDFKGTWNKYYDKYKGVLGVNAQAVMQKNNEAWNSTFSLLKLKKEGKLPPFMNHVSPPRYWKDRETKKRKLLLVVRQDRYVVDEQNHELVLKDFKVEIDFAGRLKWYGKQGRLEIYYDETRNAWYASFPVEVGVEETKTGKKSKHMMRGERKSIQIESPKGNKVASIDLGINVLASVVIDDGTWLLYKGLRTKEDYFYFEKKIAQVQSLADKMKNIGECEAYAELSREKRRLLKKLTRRLLHLYRNFASHLVKELHEQGASTIYLGYPFNIAQDQGNKFTVNMWSYRKLMDAIELKAQEYGMKAFEVVEYNTSKYCAYHDVKVTRNPRGVITCPKGHRLHSDLNGALNILKKAVNVTLSTVKKPLSFVVDHNLVAPVKGV

SEQ ID NO: 6110 - protein, 376 aa, unknown
  TnpB Polypeptide
MANKAIRYRLYPNADQKTMFAKTFGCCRKVYNLMLNDKIESYKETGKFVAVTPAKYKKDYPFLKEVDSLALANVQLNLQAAFRNHFDKLRKKQTGFPKFKSAKRSRKSYTTNNQKGTVAIIGNSIKLPKIGRVKAVIHRQPEADWVIKSVTISQEGDGTYYASVLFEYEKNVVKVRKSDNAIGLDYASNGLYVDDKGNIGDNHNYYRESQKKLAKAQRKLSRMQGAKKGEKKSNNYLKQLRKVNKIHRHIANQRLDNLHKLSTEIANQYDVVCVESLDMKAMSNRGFGIGLATMDNGYGLFINMLAYKLDDRGKYLVNVDKWFPSSQICHCCGKVHREMKDLRIRTMSCDCGLTMNRDQNAAINIKLEGLRILKSV

SEQ ID NO: 6111 - protein, 194 aa, Halorubrum sp.
MEVRRTVPVKLNVVDSDADLLHETISEFLWAADALQSVVARWKQGDYAGKPSFSAPTLVYDKRCATFNDDHATFSTVEGRITAEYILPDGSRETPHSEYLFNDDYEVTGAELHYRDGEFYLHVRTKADVESETADEGDAEHSTVLGVDLGIENVAVTSTATFWNGSELNHWHREFEKRRGSLHQRGTRAAHETI

SEQ ID NO: 6112 - protein, 391 aa, unknown
  TnpB Polypeptide
VKAPKKQLKNTSNHRKKVKRLLTKKAYKVRLYPTQKQKIQFSKTFGCSRWVYNHFLAQRIEAYQTEKHTLNYNQCSTILTKLKEETETKWLAEVDKFALQNGLRDLDAAFVNFFEGRSGFPKFKSKHKSKQSYQTNFTNDNIRLDRNHHLLKLPKIGWVEYGVDGREIPDSIVNVTVSKTSSGKYFASILCEATIEILTPNDKEVGIDLGLKKFAILSNDEVIENPKYYVKAQKKLARLQRAHSKRKKGSKNREKARLKLARQHEKVANQRQDFQHKLSKKLVNENQVISMENLRIKNMVKNHKLAKAISDAGWGDFQRMVEYKSIWYGRAFVKVDSFYPSSKLCNKCSTKNAMLTLSDHEWQCPVCRTIHDRDKNAARNILVEGRRILAS

SEQ ID NO: 6113 - protein, 387 aa, unknown
  TnpB Polypeptide
MRKLLKSFKTEINPTEEQKVKIRKTIGTCRYIYNFYLAHNKELYNKGEKFMSSNQFRVWLNNEYLPKHPECFWIKEAYSKAVTQAVNNGQAAFTRFFKHQNSFPRFKKKNRSDVKMYFVKNNPKDCRCQRHRINIPSLGWVRIKEKGYIPTTKDGYVIKSGHVSIKADRYYVSALVEIPNNKIANNSNEGIGIDLGLKDFAIVSNGKTYKNINKSARLKKLEKQLIREQRCLSRKYENLKKGDATQRANIQKQKLRVQKLHQRINQIRTDYINKTIAAIVKTKPSHITIEDLNVKGMMKNRHLSKAVASEKFYEFREKLMMKCHEEGIELRVVSRWYPSSRKCHSYGCIRKDLKLSDRIYRCSCGYVEDRDRNAALNLKDAETYEIA

SEQ ID NO: 6114 - protein, 403 aa, unknown
  TnpB Polypeptide
MKKKKSTIKSTKTSMKFSNTNKKDAIKNIIFEYKRVMEEFITLMWLIDDLKPLADKELTSQVSTWLSARMVQCASKQASGIVRGTRRKQEKRLFVIGELIKENKLKRARKLQKIYDEVSISKPNLNNVEPELDSRFVKIDLDNSTSFDGWIDLWCIGNKLKLQIPFKKTKHFNKLLALGELKKGIRLSSKNITFMFDIPEVTKKDSGITLGIDIGLKNVISCSNSHISKPNPHGHDLDSICSILARKKGESKGFKRAQAHRTNYINWAINQLNLSGTKQINIEAIKNLRYKNKSSRKLARWTYTDIFGKIESYCEEHGVHVLKVNPTYTSQRCSNCGWTRKSNRKGKLFKCGQCSLELDADLNASINISLKLKPIWNKQRLKQANRVGFYWLVDGQDSIVPVV

SEQ ID NO: 6115 - protein, 402 aa, unknown
  TnpB Polypeptide
MIVHLTPTQEQAALLRETLAQHTACYNAVAHEGFTTQCSNGVELHKRTYYPLRAQFPALPAQLVCAARVRATESVKSALTWAKKKEAAFPIRMEKALKRGKPAPVFKPVRCPRSEVACIRYDARSYWVKWTTNTCSLATVKGRVELPFTVPAHLTPYVGHKVCSADLCERKGHFTLHIVVSLPQPVAAPSEEVIGVDLGLNRPAVTSTRLFLGERRWKEQERRTLRLKRKLQAKGSRSARRHLKKLSGKQFRRRNDHDHVLSKRIVASTSTGATLALENLTNIRETSKMGRGKDNRNVDNKRRLHSWSFAQLYSFVEYKAEACAITVVKVDPRHTSQTCSRCGHQARNNRRSQSLFHCRSCGYQLNADLNASYNIRSKYLASIGTPLAGGPQSIGLSCQSSD

SEQ ID NO: 6116 - protein, 417 aa, Symploca sp.
MLVLEFKVRAKKHQYAAIDEAIRTAQFIQNKCLRFWMDNSQVNKYDLNKYCRVLAHDFDFAKSLNSQARQSSAERAWSAISHFFDNCKRKVTGKKGYPKFKKNCRSVEYKTTGWKLDPNTRKVITFTDKKNIGRLRLVGTYDLNFYPVESIKRVRLIRRADGYYCQFIVSVDVKIASESTNSVIGLDVGLESFYTDQNGNKIENPRFLRKGEQKLKRLQRRLSRKKKGSSNRRKARQRLARSHLKISRQRKEFAKRVAGSVIHSNDVIAYVRAACRRQDLRLKNLVKNHCLAKSINDAAWYQFRLWLEYFGTKYGKITIAVPPQYTSQNCSNCEEKVNKSLSTRTHICACGCQLDRDENAARNILKLGLSTVGHTGTWLLDSLNALGEDVSTFSGEILSKQATSVNKESPVKATIGA

SEQ ID NO: 6117 - protein, 235 aa, unknown
  TnpB Polypeptide
LIDHTREEKKQLTGKQTGLDVGLNHFYTDSEGNKVDNPRFLRKDERQIKKLQKRLSRTKKGSKNRRLARNRLGRAHLKVSRRRNDWVCKEAQRVIQSNDLVAIENLYVRNMVKNHHLAKSINDAAWYLFREWLEYFGSIYGVPVIAVEPKNTSQNCSNCGKKVSKTLSTRTHKCPHCGYEADRDENAAINILIAALKQLSTTLGRRESNASGETDLCLNEETQASKPTRRKRKPK

SEQ ID NO: 6118 - protein, 400 aa, Marinobacter sp.
MIIRQGFKFRLGASDVQSARLRVLCGHARYVWNQALEKCNESADTKGAYVPRYETMAKWVTAWKRAPETEWLKDAYTDNLQQKLKDLDAAWQRYYKKIEGAQRPRFKKKGQSRDSVRFVNFQKYCRIENRRVKLPASLGWIKFRKSREIVGTIKNCTVGFEGGHWFISFQTEREIPEPAHTSTSMIGVDMGVARFLTLSDGTFIEPVGAFKANQLKLARAQRALARKVKFSANWQIQKAKINRLHTRIANIRRDYLHKASDRLSKNHAMIVIEDLKVGNMSRSAKGDQENPGVNVKAKSGLNRSILDQGWYEFRRQLTYKQAFRGGEVLAVPAHHTSQTCPKCQHVSPDNRTSQACFRCVQCSFEQNADVVGAINIKARGHRVLACGESGLPDSVKQEPV

SEQ ID NO: 6119 - protein, 343 aa, Nocardiopsis sp.
VIPAIACLFGLSSSGSDRVVRHHHPRLGAARLSPLFAFGHKVTLRGADFTATLFSSVFEPVHEQGGEEVGRAHRGHRTCPALTAEQTKSSDAQAHAARALWNLLHEWWTMVGENRWVSLTDADAAIRQARKDIDFLAVLPAQAAQAVLRTYFQAWRTCWDGHADEPTFKSRPRPVMSVDVPQGRDLNVPRVHRRWGMANPPQPGRVRFRWTRDLPVGKRANAENRITGARLAKDSLGWHIAFRVQTLETEPETRTGPEVGGDVGATVPLTLSEGNHQNHGRPHRTGDGTADQDKWLTPTEKAKLLRLERRPPSANSTTLPASAHRAGCTAPSPRRRGDGRSRC

SEQ ID NO: 6120 - protein, 329 aa, unknown
  TnpB Polypeptide
MKVNCAYKFELILKPEQRAKCAQFVGNCRYVYNKAVEIQLRQLETKQPFVSYKELASQLVGWKKDDSSLWLSESPAQTLQQTLKDLDRGLMCFKQRKGGMVRYKARGDCDSFRLPQLLDGDFDEANARIRIPKIGFVRYRKSRDIQGKVKNLTISIEAGRWYVSVCTEIENFQPQATRDGEVGIDLGIVRTVQLSDGTVYRLDVNEIKKLEDRIAVYQKQLERNKTSRQKLAKLGKAADFGKKVPSRKRRRLKEKIANLYRRIRNIRKDFMFKTARAIAQKYGWVAIEDLQVRNMTKSARGTIEEPGTNVKAKSGLNRSLQRVAPGAFR

SEQ ID NO: 6121 - protein, 429 aa, Alkaliphilus sp.
  misc_feature (6)..(6): Xaa can be any naturally occurring amino acid
  misc_feature (341)..(341): Xaa can be any naturally occurring amino acid
  misc_feature (348)..(348): Xaa can be any naturally occurring amino acid
  misc_feature (366)..(366): Xaa can be any naturally occurring amino acid
VIYNDXINYTGGEKMKLSFKFKLNVNEQQLEIIEELSFHTTKLYNIVNYDLRENEFKSYVDIEKKFKSNWHCDFLHSHTRQQAFKVLEQNWKSYFASIKDFKVNPNKYNGLPRPPKFKNAEDKKNEIIFTNLAIRFKGSILMLSLSKAIQKVFEVDSLNFEVSNKLQSLINFEKLQQIKIKWDNSIKQWYLIIIYSKDELKGNADNTDVMAIDLGLNNLATLTFKEHEENFLFCGKKLKSVNSHINKKVARLQGIEMKKSGSDKFKNTKEINRLRKYRNDYVNDYLHKVSKNIIDKGVQHEVKKIVIGKLKGIKQNMNYNKTFVQVPIQRLSELIKYKAEXQGIEVKXKEESYTSGCSAFDLEPIXKKSYDKSRRVVRGQFKSSFGLVNSDVNGSLNILRKEEKCIPKLVETMRDKGKCSRPLRIRVAC

SEQ ID NO: 6122 - protein, 491 aa, Aulosira sp.
MPTLTYVKGLPTPAEELNSLGLTKFEMFLTAYSSVFHKAACETANHLLTVNSFHNSSWNTHLQKTYGISRRHATGVIKFTEGAVNSSKESRKLHIKTLEGKLKSLNSWITKSEKKLSDSAKFYAKKNWRNSKTGCRFPLSCSLRFRNTNWNNLRFQIHNKKRRAYKLSQQIEHLITAPIQIVIPRDQVFIVGSKSESFGNSACQWDGNIIKFRVPACLESKFGKQVITKLGNFDRNINRLPKDGAKTWHFYYKHNKWNAAVKFTPVPIERVSRHCAYGCIGIDMNPGSIGWAYIDKDGNLKSHGQIPLQMGLPSGKQDAQIVHACLHLARLATIFACPIVCEELDFSSKKEELRERGRKYARMLSGWAYNRFYQLLDSILSNRGIYLMKVNPAYTSLIGLVKYARQYGLASDEAAALAIARRGMRLTENLPGSITAYLSVKDGKHVWSLWNQLNRLIRKSSIKRHSFYAISNWGSLVKQWSEKSDKSKQRR

SEQ ID NO: 6123 - protein, 310 aa, Mycobacterium sp.
MSRFRLLPTPAQEVVLVEHCRHARFVWNLAVEQQQMWQPGRRAPRYKEQSAQLTEIRAEYEWLAAGSQTVQQQALRDFAQAMQNFFAGDGSVVGIDRGVTVSAALSTGELLHTPSLTPGEQARLRRLQQRLARAQPGSNRRARTKLSIAKLKARETDRRRDWVEKTSTDLARRFDTIRVENLNVRAMTRSARGTPEQPGVCVAQKRGLNCAIHRQGWGWLVARLDYKAAGRLQRVPAAHTSQRCSACGHIAPENRKSQAVFACVACKAGPCNADVNAARNIAAGRAVPAQGDFAVRRSVNCEPQLSSPAA

SEQ ID NO: 6124 - protein, 387 aa, unknown
  TnpB Polypeptide
MRRLLKSFKTEIDPTEEQKIKIHKTIGTCRYIYNFYLFHNKERYDAGERFMSGKSFSVWLNNEYLPGHPEYFWIREVSSKSVKNAIENACTAFSRFFHHQSSFPRYKKKGRSDVKMYFVKNNPKDCLCERHRIKIPTLGWVRLKEKGYIPTSKDGYVIRSGAVSMKAGRYYVSALVDIPAPEADGNLTDGIGIDLGLKDFAVVSNGTVYRNINKTARIRKLEKQLRRAQRKLSRKYENLKKGKSTQRANICKQKLKVQKLHHRIENIRTDHINKVISEIVKTKPSHITIEDLNISGMMKDRHLSKAVASQKFYEFRTKLKTKCAENGIELRVVDRWYPSSRICHCCSCIKKDLKLSDRIYRCTCGYIEDRDLNAALNLRDAETYEVA

SEQ ID NO: 6125 - protein, 265 aa, unknown
  TnpB Polypeptide
LKFKIPKNIIGKEIKQVTVTKFNDGYMINIICKDENVIKLKFGNNVAAIDLGLSNLVACVSNSEMKPFLISGRVINSINHYWNKKVSNLRSKLDTSKDEGEKDAIKKKISKLNRKRNFKINDYLHKLSTKLINHLDSNQIDSLIVGYNQGWKQDINLGKKNNQKFCNLPFYKFLNMLKYKCVNKRITLKTQEESYTSKCSFLDNEEVCKHDSYLGKRVKRGLFKSSKDIEINADINGAYNILVKAIGQFNYNSIQVCGLPSTLKV

SEQ ID NO: 6126 - protein, 383 aa, unknown
  TnpB Polypeptide
VLKSLKVRLYPSQEQEVLMYKTAGCCRLVYNFFLASAKENKDFNYNEYSKHLTNLKKDEKYNFLQEVPSQPLQQSLRHLDVSFKRFFSKQAKFPVFKKKFVNDRFTYPDGVKLNHSFTKVFLPKIGNMKFKTSKKYLKLLKTHKFRSSTVKLEAGKWYISILVEDNTVPQPAVKINKTVGIDLGIKKYLVMSTGQSVSAPNILNKLKEIDRLKSYLSKKMKGSNAAKRLQLKIQRKQKYLNDLKEDFLNKLVDYLIKNHDCVILEDLSIHKMIKKLGERKKSFNRLMTIIPMYEFRQKLQYKAMLAGKHCVAVNPANTSRTCSACGNVDKKSRKSQSDFECTRCGMSANADYNAAINIHNAGVKHLLAAGHAVKSAPHNCVSS

SEQ ID NO: 6127 - protein, 241 aa, Pseudonocardia sp.
MLGITRVAPGDRSLQRRRTGAPPFTRNPQLAFLNEVSAVPLQQGLRHLQAAFASFWAKRAKYPTFKSRKRSRQSAAYTRSAFRYRDGRLTLAKMDQPLDIRWSRPPPEGAQPSTVTVSRDAAGRWFVSLLCETTIAPLSPTDRAVGLDAGLTSLVTLSTGEKVTNPRPERRDRRRLARAQRNLARTQKGSNNRARARMKVARVHAVIVDRRRDHLHKLTTRLVRENPNDRDRGPDRAEHGP

SEQ ID NO: 6128 - protein, 373 aa, Azomonas sp.
MANRAYKYRFYPTPEQAQLLAQTFGCTRFVYNHVLRWRTDAFFQQREKVGYLQANAELTRIKRSGEFPWLNEVSCVPLQQCLRHQQAAFKNFFAGRTKYPVFKSKKHRQSAEFTRSAFSYRDGQLYMAKSKVALNIRWSRPLPCEPSTVTISKDRAGRYFVSCLCAFEPEALPVTPNMIGIDLGLKDLFVTSEGERFGNPHHTAKYASRLAKAQRRLSRKKLGSANRAKARLKVARIHAKISDGRLDRLHKLSRRLINENQVVCVESLAVKNLIRNPKLSKAIADAGWGELVRQIQYKGEWAGRQVVQIDRWYPSSKRCSCCGHTLEHLPLDVRRWDCSECGAEHDRDINAALNIKAAGLAVLALGEHVSGIG

SEQ ID NO: 6129 - protein, 313 aa, unknown
  TnpB Polypeptide
VTQTLINANTAFKRFFKGLSRYPQFKKKNKSDVKMYFVRADANYIIKCERHRIKIPTLGWVKIKEKGYIPVNHNTHIIKSGAVSYKAGRYYVSVLVEEMQPMKEKLNDFGIGIDLGLKEFAVLSNGIIYKNINKNQKVRKLEKKLKREQRRLSRMYESYKKRKTINEDCTKFNYEKQKLKVQKLYQRLNNIRDNYIDQCISEIVKTKPSYITIEDLNVSGMMKNRHLAKAVQQQKFYKFRRRLVAKCKEYGIELRIVDRFYPSSKTCHNCGCIKHDLKLSERVYKCPECGFKIDRDLNAAFNLRDTKIYKVVL

SEQ ID NO: 6130 - protein, 412 aa, unknown
  TnpB Polypeptide
MRSQKIRLKLTKEQETLAWWYSKVSRNFWNLLVDIDRRNNKGEFDEILNKNGNNTYYSKFHNREVYDLNQSDYRNLAKIIVTKNSEEDSESWSWYYQPNQTFIYAFISRELVKIKRQNKGELSFRSMDKIQPNFDVRCDVSSNNKRPSRIYLKDNGKLQIPNIGDVSFGSVRKNFDLSCKKQVAKISFDGKYWYLSYTEDVGTSVTNLPDYTDGIGIDLGIKTLATVSDGTTIPNIKTFRRVRILNKRLKRLQRKVSRKYLINKCNKHNKTKNIIKLERQIKLIHRSLSNIRINHIRKFVSELVKKQPKYIAIEDLNVKGMMKNKYLAKDIANCSFFSIREYLIRKATERRIAVRLVDRLYPSSKTCSNCGSYKKDLKLSQRVFCCNHCQEKIDRDFNASLNIAKTDKYVLA

SEQ ID NO: 6131 - protein, 426 aa, unknown
  TnpB Polypeptide
MSNIITLVTESKLYVKDNLSLYSYFDDYSSLFNFLVRRCVHHLRHKLNGLPESRYRTDLMIQFNLTNRMAKAIIRTAKNQLKLLRESARYQFNNLYKRRKSLYKKIQKYKSMLSMNSTSLKQRKVTKLRLFWTQMKLNKVNQLISNGLKLHLTFGTKHLLKTNKQKFFAKRDNQVVYIGDKSETCGNQQFQVQFDSKYNRFDYKLRLDNQWVSDSEKYIFGSFVLKNKEAKKDILKILSEKKSNPLTYRIIKREGALYLQIMYRRETVDITRNNHGVLGVDFNKGFISVSEIDSVGGLKSLTRYNYLHKGKATKTKTSMLELVSRLVTQAASIGKDIVIEDLVSLDSNKKQEKTTSKEYNRMINSLKFGLFKHCLLSKAAKEGVSVHSVNPYNTSKIARKSYTNRMKLNVHDAASYVIARRFYQYD

SEQ ID NO: 6132 - protein, 721 aa, Blautia sp.
MARPRAKKKKVSSGTHTRSVFLYGSPNAEKRSTLEKLQADYTDAVNFYISLLSDREECLLQLLQNDKKDPLLRKLEKESRIEGLSSAYSQNAFDEAVTKLHNRLDNIRKDVIAATGGSVFAVSILLFHAVLSGQSREEMCGMLARIRDSYKAKEKIQYYDKLHDTVKTMEEKEFLDSVSEVAMFYHIISDEYRIPVVKKAHVLSVTIPDRKRERMQVPVQADRDALRRMEQYGVSGSMRYTITDGGSLKLTCSFEKKTRTPEEHSAVIGVDVGITDAFHTSEGQAIESFQPVIEFYQTEVEPAFGKLSTLRNRKQQLRRFLKKHKGVLPEKVILNLRKRIDHLEKDIRQAHAPYRRKRHYYQLVEYTVRNAVNTYIESLNGDKTVLTAMELLDIKEFNKSRRVNGMLSDFSRGKLAEKLMEELSWHGFPFVQVEPAYTSQICPVCGCLDKASRIIHKVFINGLVKNAIAELTEHTAELRKESGLKELFLCRIKSQNNKIAPYTETHWNDKKLRYFIERHDIRDNKGDLYPLTSHQFRSTFVRELIKRKVPIAMIMKQYSHVSIEMTAHYLTLQEEEVKEIYSDMILSPESKIAGLRAKEIKGKLDDLFHGKTEDEIDDVISGLAKTMSFNPLPTGVCLYDFRRGNCTDGDGCFFYNCPNYITEVQFYPILKDELDLLEKEMVRLKELGQEPAYQVQAVKYKYLKPLVESLEVQLNGKESVG

SEQ ID NO: 6133 - protein, 404 aa, unknown
  TnpB Polypeptide
VWEELAEIPDAKRRFNAAEHLVHTTKKNPARFDFDLRFPKMPSYLRRAAIQHALGSVSSYETRMDLWEKSGEKAGKPRLAYENHAMPVFYRDVMYREEKEGKDEAYLKLYDGHDWKWFCVRLNHTDMEYLRRNWSGKKASAPTLEKRHHKYFLRFSYTEEVTLTKTPVKEQIICSVDLGINTDAVCTIMRADGTVLGRKFINHPSEKDRMYRTLGRIRRFQREHSSAQSRGRWAYTKRLNIELGRKIAGAIVKNAEENHADVIVFEYLEMQGKISGKKKQKLHLWRKRDIQKRCEHQAHRKGMRVSRVCAWNTSSLAYDGSGSVSRDPKNHSLCVFQTGKRYNCDLSASYNIGARYFIRELLKPLPVTERSLLEAKVPSVKRRTSCVYADLRELHLQMEILKAV

SEQ ID NO: 6134 - protein, 521 aa, unknown
  TnpB Polypeptide
MARKRPEHPPVHRTDLLPSNMTVGKQAKVLDLLAHYRAGAVLLGREQWKLFFETGRFNKNHDVDKVTFAAVIGAANRVQMCRYQVVGQLQGWVSNRENEFRDAVNRSSLDGDTKHMLFVINRLGAWFLRGAVVMRKTGEIIPDGIRRLARSIMRHVMGKHRKPDLSCISMRLDHRAACLAAPTKATQNGAVGWWVNLSTMESGKKISVPLLTYDYHAKRTGHVTNGIQVNLNREGVLSFGIVTDIGEACAKSRADYDGVGAIALDFGLSTLFATSEGQLLGQRWLKRLRRYDALISMIAASQQRAGKKPRESKRYRALVDDVRGFLRTEIGRVLNRLVETGRPKELVLERLDFRNPDLSRRLNAILRNCGRSIIQTKLADFEDRLGIKSTEVNPAYSSQTCNACGYVDKRNRRSQSKFSCLWCGHTKHADLNAAPNIGERRALPIGSVFQRKEAVLAELVRQFGERRIRSMRPGRTGSRGAPADPRTTNPYFGGVSEAVVRLSERREATMKSGQPQALVAA

SEQ ID NO: 6135 - protein, 491 aa, unknown
  TnpB Polypeptide
MARYPRSHRSFFSVKKSRFFYLHPEANSGKVASLEALQAEYTAYLAICVSAMLQARRFSLSRGERQAFFPRYSALSSQIVKNVRAHAVAIVSGWAASKYTVKLKSVIRAKFKGGEFDEATRSALCILGKRLIDVPSGKVTQEAINLYWSWLLDEDVVGKSPRISDRVGMRLSEMTSIFGKSENTRLTAWWIGFSHLDAGKSRIQLPLVANPYVKEASDVAKGVLARKTRQGRWRFEVVECKKWEVAKLPESAPRLGVDVGLNVMAATSDGRLLEAGLKPKFNALYDTVRDVRANRQRQGLTDDSPKLNALESRLTGLVKTLAGTCSNKLIVAYPGHVFVVENLDLRGCRGQKRFAYRALHHSLEMKAPCEVVNPAYTSQTCPNCGFVSRKNRSGIKFQCCYCGKISHADVVGGAGLLRRSEDKQIGLDDYPTVVKPILEARHEEWKKFQASLSALGRKKNALEPSSRELTTGVSGFSRDRHSFELESEGVG

SEQ ID NO: 6136 - protein, 284 aa, unknown
  TnpB Polypeptide
LISEVNTVQNVRTVWNGDEWELHFVCKVEIESADPAGDGVAGIDLGIKNIATIAFPDEYVLYPGNSLKQDKHYFTRAEYDTEGENGPSEKSMWARRKLSEREIHFYHTLTDAIITECVERGVGTLAVSWPKDVRESDWGKTGNKKLHSWAFDRLYQYLEYKGEMRGVEVLKENEWNTSKTCSRCGDDTKSNRVERGLYVCSSCELVANADCNGSENMRQKITPSPHGEDRSNGCGTAIDISVRLRERMLCTARAGRVVDQQRSHLRYGKPRRLRRGGCHRVRLQ

SEQ ID NO: 6137 - protein, 272 aa, Okeania sp.
MVKSQIAKCAEPLPIRWSRQIPQNCIPSTITVKLDPSNRWSVSLRVNDPRDLKLNPITKQIGIDLGITSLVTTSDGEKIANPKNLNKLHKKLRLAGKYLSRKTKGSNNYQKARLKVARIHAKIKDSREDYTHKLTTQIIKENQLIVVEDLAVKNMVKNHNPPPSPPGRGARGVGSDANWGELVRQLEYKAEWYGRQLIKIDRYFPSSKRCSNCGHVVEKLPLNIREWDCPECSSHHDRDINASINILAAGLAVSVCGATVRPEGSKSRLCGC

SEQ ID NO: 6138 - protein, 424 aa, unknown
  TnpB Polypeptide
MLRSYKYRIYPNEWQMELINKTLGCCRLVYNMALETKQYAYKSHGIGLSAFDLINQLPDLKEGFPFLKVVNAHSLQSSIRNMEKAYINMYKNGFGYPKFKRKHNRESFQCPDGIRRINFEKSLITLPKIKNIPIVIDRNFNGQIKTVTVCKTPSGKFYVSVLVDTGADLPKKKTISNSIGIDMGITTFATLSDGTEIENLRFYKKQQERLAIAQYKLSLKKKGSNNRGKQRVRVARIHEKIANQRKDYLHKWSDAITKQYDTICVENLNIKGMSSTVKPKQDEDGNYLPNGQSAKSGLNKSILDVGWGMFINMLEYKSSWRGCNFVKVDRFYPSSKTCNNCGNINKDLKLKDRVWICNTCSKEHLRDENASKNINIEGVRLLRQKQNEIENIVQSGRGSSVEPVGIEAGSSDESSDTCLSNTFC

SEQ ID NO: 6139 - protein, 413 aa, unknown
  TnpB Polypeptide
MRGKTTQYVRVVPRGEAMLTLKARGVLIEGSINELREELYLTRRAIQHIVDALWELDKLPSINQVHQMFYKVLREQGFRAHQAKQIYKYALSLVKSAKNNGGSRPVLRKLSARLDRYDANVDIEKQIVIIKLRNKKLNIRLLHYKDYTRKFIRRKWYEVIVSIDKQGRIWINIPFRWEYKPYSPKGILSLDINLRKIVIYDGRGVRRIDTRFIEALSLKIHAERLQKKYPRMWRYNKRILNRIKNLHRRGKNIVIDWCCKFARYIVLKAKKTKSIIVLEDLEKLWFNISRKFSTLANKLSRFAYHKLQRSIITKAVEYNVPILLVNPKDTSTMCPRCEAKLSYTHRLAICHRCGFIADRDKVGAMNIYLRALRGMCPSLGSRANAPTMKDEARQSGRTADESMTLYTHLYTIT

SEQ ID NO: 6140 - protein, 386 aa, Chloroflexi sp.
MRFCKKIRLQVSDQDAATLEMMQGKCRGLYNWWVMKLRAGERWRCWDVKRTLAESRKVDPDLDQVYGKLLAEVYFRLDKAMQAFFTRVQKGETPGFPRVRPRHQFFTLCYPAMYVKVDGNMVLLPTGGGRGKKDKPYPTIVAGLTEIPPTGYHEVAISRDARGHYYASFVYEVPESPQEPGGVLAFDLGIKTLAVGVNEHGRRYRIGGFKGHSWYNKQLDKIRSKRDRCQKKSRRYIHLSQVYQRVSEQKRNKRKDCLHKASHLIAGKLVERTVVIGDLSQRQMVLNEHEDKQRFKHRAVYNDWGLYSFVQMLQYKCLLAGKELIKLDERDTSKTCSGCGHLQPMPLYKRTYRCGTCGLVMDRDENSAINIMRRFLARLGPHAHLV

SEQ ID NO: 6141 - protein, 388 aa, Oscillochloris sp.
MTQTLSTRTVCCKLSLDADAAAALQATAEAFNAAATYCASVAWEERITNKNTLHHIVYVPTRVQYGLGAQLACCARDKAAEAVRAVRAHGSDTCPTFKPDSAIRYDARTYRLMSLDRVSLNTLTGRVMGQLVLGDFQRRYLYDTSWKIGGAELVQRDRQFFLHITQTKANPAPDEPTGFLGVDFGIVNLAADSDGETYSGEDVKRVRERRFRHRQRLQKANTRRARWRLRKNARREARFQRDANHCISKKLVAKAKTERKALALEELSHIRKRTDNGCRRSQRRLRTSWAFRQLRSFVTYKAQQAGVLVIAVDPHNTSRTCAVCGHCEKANRPNQAHFRCLSCGHTAAADTNAAVNIAFRAARQTAYGAAPPLGGGASTSPTASALGI

SEQ ID NO: 6142 - protein, 170 aa, unknown
  TnpB Polypeptide
MPHYYRKSVQKIAKAQRKLKHMIIGSNNYNKQQKRIAKIHRHIANQRKDFLHKESTAITKQYSCVCVENLNMRAMSNKGFGNGKATLDNAYGMFLNMLEYKLKDKGGYLVKVDKFFPSSQICNCCGFKNPLLKDLSIRYWNCPNCGMTNIDRDVNAAQNIKHEGLRLLLA

SEQ ID NO: 6143 - protein, 463 aa, unknown
  TnpB Polypeptide
MEQQCGRKICLKPSKAQVRTMYRMCAVSRRAYNWKLAEQNKAYEEAKANTPEGEKVKCTLGTPRDWHKEWCVYKKLPDNKWMTEVSKFCGQEALIDLGSAWKRFFKGLAKHPRFHLYNQDNSFRCSGGVFIGRDFVQIPTLGRIKLREKDYIKIPKDSEKIPLAMATVSVDAAGKWYVSFAYVADIVPVHESISSFEEQDIVGVDFGVKDLAITSDGIVYANPKAYRHAKARLRRFQRALSRKKKHSKNRERCRKLLARIHRRITNIRVNAAHQFTADITKHTKPKAIVIEDLKPKNMSKNHKLASAILDANFGRMRQFLEYKCAWLGILLFFAPQFYASSRYCSHCGQYYNKDLTLDDREWVCPVCGHHHDRDYNAARNLQFYGLWLLNLVVPTETNAVRYTVSGETPTNACPHGDIQCVTYREGMVYTSPKDMRLQFFETQEQCMAMKQEITNTYLIGKNV

SEQ ID NO: 6144 - protein, 429 aa, unknown
  TnpB Polypeptide
MEAVRSEDTKAKIRASMSATKARRQTQVCRVFELKVSIRHNPKSVFDKMSQCFKEAKWVINDMLSLSKDNPDNSMFDYKYTDHKDVVHYDKDNNPVHSSITLPSVLHRATVAQKRTDIVNLAKAKSHGRKIGALKFKRQVDCIPIITGFTQIIDGCRLTIPGFTKIRVNGLNQLHQFEQFEIADAKLVRKASGYYVKISIMLPKSSRKPTNREVGLDFGIKDSITTSNGDKYNCKVQESERLKYLSRMLNRHKTEKGSKRRWRCKCQLAREHERLANKRKDIANKIYNRLVTDYDVIYFQDEQIKNWQKGLFGKSVQSSCLGSLKQRLVALEASGRSFKISKWEPTTKLCPMCGCINHPTLADRIYKCDCGYTMDRDTHSARVVLVIGSSKRAECVEHASAEVAASMPTSSTGLAQVAPLKRKLEAHAL

SEQ ID NO: 6145 - protein, 203 aa, Bacterium sp.
IASAWSQRPSRKRISVARAASPLRRYLQKLKRLSRSLSRKQRGSRNRSKAKTNLVRLHRRIADIRADALHKLTTHLTRYRIIVIEDLNVAGMLANRRLSRAIADVGFFEFRRQLVYKAGMAGSTIIVADRWFASSKLCSACGEKNENLTLSERFWTCASCGASHDRDLNAACNLARLPESSPGAAHGAEGAGGEDHLAVEPAA

SEQ ID NO: 6146 - protein, 400 aa, Streptosporangium sp.
VRRSYKFLLRPTAKQTAALTACLDDHRTLYNAALEHRRTAYAKAKVSIRYGDQSAELKHIRADDPHGQARWGFSSQQATLRRLDKAFRAFFDRVKAGRTPGFPRFKGRGRFDTVTWPKDGDGCRWDSQPEHPAATFVRLQGVGHVRVHRHRPVRGRVKTISVKREGSRWFVVLSCDDVPASPLPATGAVVGVDMGVASLATTSDGEHLASPRHLAASAGKLADAQRDLARKKRGSARRRKAVARVAALHGKVRRQRVDGAHKAANALARDYDVIVCEDLRIANMTKAPAPKPDPDRPGAFLPNRAAAKAGLNKNILDAGWGVFLTILVHKAESAGRELITVNPANTSRTCARCGHRAAENRVTQAGFRCTACRHEAHADVNAAINILRAGLALRDAAQAA

SEQ ID NO: 6147 - protein, 368 aa, unknown
  TnpB Polypeptide
VQSSTLTQTLSFGLDIHTGSGDDLQTGCLEARRIRNETNRLDRQGWNWDDIKPVVVDNGDHVNNTSQLIVDKALGEIETYHDNKDDDWGRPYPYIDGMYPMVMNHGEGYRLFPEDDGSIRFRITATRGTHVKGELRGSPDHFDRLRTAFTDEEWRVGTAEVVHKHDEWRLHLTVTHETHRVASKHDTDTIVGVDVNEDCIALAAISRNGSLKDSVVFEYPSVKEQRHEFFTKRKRMQKANQTAFETVVQTEERDYVHDCLHKVSRHVVEWVSQFSDPVIVFEDLKDMRDSIDYGTRMNRRLHSLPFAALQNMVSYKAAWEGIPSDEVDPEYTSQRCPRTECQHTERANRQNKRFHSSLDNTLSNTHQP

SEQ ID NO: 6148 - protein, 418 aa, unknown
  TnpB Polypeptide
MRRKKKELENLISTITRTHKIRIYPNKHNQDVFQKYYDYQRSIWNRAIDERTAQYKIYKEMKATGLFTQKELNKNYFPHTNNLRKMKKFDWEDNFYCRVREIQFDNLSQAWDNYFNPNMPNHKKPKYKKKKDVELHKKLALRNVRTKGKWLLLPKSQKSKPEYRFTKIKMAQELRFNGKITSDFSVSVENNKWYVTITVEIPLEEKFSLYKQFTGIDVNVGSIDYLKSEGLSKEYGKFYLLPKSLLRQYDKIKYYSKLIAKKRNKNPYYMYSKSYKEAITKLNNAYTKAYNIQEANLNNIVKYFFTNYNKIVIEDLDVNSMKMNKRLCKSLHRNAFGRFKQKMIHKAEEYNVEFILANRYFPSTQTCSECGHVKIGDEKLFLWGDKYGNDHNTYVCYNCGTIQDRTENAILNLANYGK

SEQ ID NO: 6149 - protein, 392 aa, unknown
  TnpB Polypeptide
MPQRKTFKYKLYTAKRNKKLHHLIEIGGAIYNHLLALHKRYYRLYKLYPSIYQIRAHITKLKRIPKYSWWKLLGSQAIQQIAVRIDNGYQQFFRNLKARKAGKTTRNVDSPTFRKISKAKSFTLAQAGWKLLGDNKLRIGKTIYKFFKSREIEGVIKTVTIKRDALGDLYVYFSCIIESKPINRVMTGKSAGFDFGLVTYLTGSDGTTYQAPQPFKQYQRHIAQANRSLSHKAKGSHNRHKARQHLARTHRRVANIRQAFHWDLAYKLCNRYDAVYLETLNLQAMKVFWGRKVSDLGFGNFVSILHYVASTKGAVVYSIDRWFQSTKICSVCHQVNNHITLRDRVWTCVFCSVTHQRDQNAATNIYQEGTSSYGGDPVRLASASVDRRFQNF

SEQ ID NO: 6150 - protein, 407 aa, unknown
  TnpB Polypeptide
VYTIIVTPTPEKGDNQVRISYQYKIKPTKEQAEKIDKTLEMLRYQYNYLLAQRFDWYEQNRSPINRCSIFVCHLPELKEQPNYYNQKASLTQLKKDRPWYKEIHSQVLQEVAKKVELAFDRWLKGDSNSKKSGRPRFKSTGQYKTFTFPQFKQHHFVNNKITLSKIGDVKVIVHRQVPDGFQIKTVSVTKKADGYYVTLSLDDKTVPTIKPDFNANNIVGIDVGLIDFIVTSDDERIAAPNFLRQAERKLKSAQRRVSRRKRGSNRRKKAIKKLGILHKKVVDTRKDFQFKTANNLLKKYDVVAVEKLNIKGLAKTRLAKSINDAGWGQFITILSNKAENAGLKVIAVNPNGTSQECSNCGHKVKKPLSERTHNCPNCKVSLCRDLNAAINIKARGTHALKAQSMSS

SEQ ID NO: 6151 - protein, 373 aa, Methanosarcina sp.
MPKVNRYRIYPTKSQVTKLNETLELCRWVYNETLALRKNVWETEQKRISYFDSKKMIPIWKKDKTELKTVHSHTLQDVTMRVDLAFQAFFRRVKAGEKPGYPRFKGKGWYNSITYLQSGFSLNGNILTLSKIGDIKIKKHRELEGNIKRLTIRRTSTQKWFVSILTDVDSYQPLEHSDKSIGIDVGILSFAALSDGTFVANPRFYVKEEKNLAKVQRKHSKTEKGTPARKKTLKVLRRVHERIANKREDFAQKLSKTLVNNYGIICFEDLNIKNMVKDPLYAKGIMDAAWNKLVTYTSYKAENAGRKVVLVNPYNTSQLCSKCGNIVEKDTSVRVHNCPYCGLSIDRDYNASINILRLGLQSDRKIGRCPSLQ

SEQ ID NO: 6152 - protein, 372 aa, Actinomadura sp.
MMCDMGQSVKRAYKYRIYPTPEQAAEFARTFGCVRLVYNKALAERSRAYAADGRTITYAQTSAMLTAWKKTPEPAFLSEVSSVPLQQALRHLQAGFANFFAKRAGHPTFKSRKRSRASAEYTRSAFRWRDGTLTLAKMDEPLDIRWSRPLPQGAQPSTVTVSRDTAGRWFVSILVQETISPLPPTLPTVGVDAGITSLVARSTGEKITNPRHERRDRRRLAKAQQALSRKENGSKNRDKARQRVARIHARIADRRRDFLHKLTTRLVRENQTVVIEDLTIRTMLGNRSLARAISDAAWRQMRGMLEYKTGWYGRELVVVDRWFPSSKLCSGCGARQDAMPLGVRSWECSCGAVHDRDVNAARNILAAGLAER

SEQ ID NO: 6153 - protein, 374 aa, unknown
  TnpB Polypeptide
MKTLKFKFYSHKRNRHLKRSINVAGVIYNHCIALHQRYYRMWGKHLNCAKLQAHIAKLRKRNQYWQQVGSQAVQDICQRIEKGYQLFFKYHGKGVKPPGFKKVKKYKSFTLKQAGYKFLGGNRVKIGSRVYQYWNSREIEGTVKTLTIKRTPVGELFMVVVVDDVDESQIKFETGKIAGFNFGLKTFLTCSEWFQVESPLFLKQAINAIKKANKQHSRKVKGSFKREQSRLNLACKHKDVVNQRTDWFWKLAHTLTNKFDVLCFETLNLKGMQRLWGRKVSDLAFGNFLQILEWVARKKGKEVVYIDRWYPSSKTCSSCGHILDELDLSVRRWRCPSCQSENDRDENASTNIKLVGASTRGLGDVRQSQIAIPV

SEQ ID NO: 6154 - protein, 398 aa, unknown
  TnpB Polypeptide
MSRFRLYPTPAQQAALLGQCLHARYVWNLALEQWSMWTRDKGPTPGFPGQCRHLTEARAAFGWLRAGSQTVQQQALRDFDQAVKNFYAGTHQRPTWRKAGRHEGFRIVGGQASRWVKLNRKWAKVNVPKVGWVRFRLSQAVPEAKSYRITCDRAGRWHVAFAVVPPPIPAPGTGEVVGVDRGVTVSAALSTGELLTCPRLSGREQARLKHLQRCLARCRPGSNRRGRVKAAIAKLYARVTDRRKDWGEKTSTDLARRFDLIRVEDLRVKQLARRPKPKADPQRPGAYLPNRRRQKAGLNRGILANGWGLLVARLEHKAAGRVEKVKPAYTSQTCSVCGHCASENRESQAVFRCVACGHHANADVNAAVNIAAGRAVSARRETPVRVSSKREPQLATSA

SEQ ID NO: 6155 - protein, 362 aa, Vulcanisaeta sp.
MRAFRALLIKLPRDRCDVGYIERLMALANLAYRGFEVWEPDIPKTIQHHLYGFRNFKNSLIFGTSPKAWFARTWLPLKTRRVYADGAGEGVSNAPVVLDFVRGIIKIRLVCKPERDFVLELPMPGWVVERVNEGGDVKYAMIGLKDGEPYLALVAERVVKPYKPGDYKLVVDVNSWRYGIAWGLIHDGRIVSFRQERPDLGLLMTLYNEAVQLERKAGKLRRLNLDYTVLRKQAKARRGKIYRITRDKAYFLASKLVRKALRYEALLVIDDMTEESRRELLEEKLPRGVIKLLMANTRKFTKQLTTLAQWYGVPYRFERLPSTVCPMCQHELTQEEGRIMICENCGFKAPRDKIPIHWAMKL

SEQ ID NO: 6156 - protein, 509 aa, Vulcanisaeta sp.
MGMPPQTTTNEARKPLRRSIAVELEVTKELNKLLHSIESMYLSIVRDVAEYAVKHNVTSVAKLYRLFYNKYRQEYPGLHSHLVIQAIKQASEIAKSFIKRRRMGLASKPYPEIKAVSIRFDETAWNYEQLVKSIAPVRIAISPISTGKRGRGSRRFEAWLRLHRRFWLYWWRVLNGEAELASTLVVKRRTNKWYAIFVFKLKPRKEEPKSIVAFDINENTVTVNRIDLPSTVDKVAKWNKQYLTPQLYMIRTDFGRLARRYERVRNAIIERLKPGFASLNGKYVNITNTREYRKRVKHLRERGRKVGRVRHVASEPTKTSALIVTEELGNNPQEEVIDGIGKDELRHRIKQTPFKALEKAVGDKALERGSKLFHVSSYRNSRVCPVHFTRLEKTDDWHTLYCPLGHYVDRDYASILNMLWKTTPESWTKAFWWNMKKNMNWRKHENKSNPLIPHPIVKYIHVTLKEFTASEKSPAVPARGKPMNPARGANEGRARKPPKRRRPVLPLRK

SEQ ID NO: 6157 - protein, 372 aa, unknown
  TnpB Polypeptide
MNRAHKIRIYPTREQETQLYKTAGTSRYVYNWALAEWKSMYDAFDKGLSQEKPSAFKLSAKWTKERPDWSHETYRKAQSRAIMNVGTAFQNLWKGKAAYPKFHKKGRKDSFYVSNDDAHIEGSRISLPRIGKVRLAEPLRYQGKIMSYVVSTYAGQWFVSVQVELASDARPRCEAPNSAVGIDVGLSHTAVASDGTNLDMPKSLKRLDAHLKALQRELSKKAKRSHNRSKALRRKQKVQRRIDNIRKDAVHKFTSTITKNHGIVVTENLNIEGMVEKGSKPLRRSLAHSLMGEVIRQVSYKAQRHIMVDRFFPSSKRCSNCGFVKTNLELSERTYKCEACGLVIDRDYNASLNLMQAGKVIPSVPVESAASC

SEQ ID NO: 6158 - protein, 443 aa, unknown
  TnpB Polypeptide
MKVISSYGIEIKKQHMFDTTIKLYRGAVSFLIDCLSNEWSAIQAIDKAKARFNFAEKLVHTTKSNKAKYDFDAKFYKFPSYLRRAAIQAALGSVSSYHSNHKNWEANGKVGKEPKLQYDRFCFPAFYKTAMYTESSTPNRCWLKLYNQKDWVWVSVKMRPTDVKYITKYWSHCEKSAPTLEKKHKKYFLRFAFEESVQFADVEVQDRRICAVDLGLNTDAVCSIMTADGTVLARKFINFPCEKDHLYHVLNRIKRKQREHGPKGATSMWRYAKALNDDIAKKVAEAITDFAVLYSAHTVVFEHLDFKGKKHGGSKAQKLSMWKHNSIQDYVEHKAHRCGIRISRICAWGTSKLAFDGSGTLKRNENNHALATFVSGKSYNCDLSASYNIGARYFVRELLKPLPVTVRSKLTAKVPGAEFRTQTTLATLKNLYPEYKKLGLRAA

SEQ ID NO: 6159 - protein, 115 aa, unknown
  TnpB Polypeptide
MPMTAVSDRPALSWVFQGRLSTGEAVKSPEYAKIDRKIRRFQRQMARQVKSSNRRARTRLKIAKLKATIKDIRQDFLHKLSTRLVSENQAVCLEDLNVKGMVKNRKLSRAISQQG

SEQ ID NO: 6160 - protein, 376 aa, unknown
  TnpB Polypeptide
MSQKAFKYRFYPTAEQENLLRRTMGSTRLVYNRALAARTEAWYERQERVGYSETSSMLTDWKKDESLSFLNEVSCVPLQQGLRHLQKAFSNFWAGRAKYPNFKKKRNGGSAEFTKSAFKFRDGQVFLAKCAEALPIRWSRLLPDGVEPSTVTVKLSPAGRWTVSLLVDVEIDPLPISPSRVGIDLGVTSLAVLSTGEKVLNPKGFKAKYRKLRKAQKALSRKQKGSRNRDKARLRVARVHAEIADARKDNLHKLTTRLVRENQTIAVEDLAVKNMVKNRKLSQAISDASWGELVRQLEYKCDWYGRTLVKIDRWFPSSKRCHDCGHVVDKLPLNIRDWVCPSCGEHHDRDINAAKNVLAAGLAVVACGANVRPDKH

SEQ ID NO: 6161 - protein, 380 aa, unknown
  TnpB Polypeptide
MANKAIKYRLYPTTEQKTMFAKTFGCCRKVYNLMLNDKIESYKATGSFASVTPAMYKKEYPFLKEADSLALANVQLNLQGAFRSCFDKSRKRQNGFPKFKSAKHSRKSYTTNNQKGTVAIIDNAVKLPKIGKVKAVIHRRPDADWIIKSATVSQDSDGKYYVSVLLEFAGNITPVSISDNAVGPDYASDGLYVDSNDNTGTNHKYYRESHKKPAKEQRRLSRMKGSKKGETKSGNYIKQRHKVNKIHRHISNQRLDNLHKISAEIANQYDVVCVESLDMKAMSNKGFGNGKATMDNGYGLCLKMLEYKLSDRGKHFIKVDRWFPSSQICHSCGALHPEMKDLTNRTMVCDCGLTISRDQNAAINIRREGLRILKSKDSIA

SEQ ID NO: 6162 - protein, 374 aa, unknown
  TnpB Polypeptide
VNKGFKIRIYPSQEQIKLIKKTFGCVRYVYNYILKLKQKAYSIFELKLNYVKISSILTKLKQRKAWLYEVDCVALQQCLRDLDAAYIKFFNGSGYPNFKSKRGKNSYRTNCNLHLDQDGKKIKIPKVGWIKFRDKSKFIGLTKINNITISKSASGKYFASISAEVDIPTFAKTKKNCGIDLGLKDFCILNDGTKFNNPRFLVNSEKRLRVLQKSLSRKAYGSKNYEKARAKLAKFHEYIVNCRKDYLHKISIFLIKNYDIICAETLQIKNMVKNHKLAKAINDVSWYEFCRQLEYKCLWYGKQLVKINTYFASSQICSNCGYKNSGIKDLNIREWTCPECNVHHDRDINAATNILNQGLKLIQFQHIKPRDTRG

SEQ ID NO: 6163 - protein, 665 aa, unknown
  TnpB Polypeptide
MPKRTRGPNKSVPWVRRPEDGLAVLRLPLDTTDPVQRDRIETMFSAAYQIRSAVQRDARDRARAYWAASHERARDATAARERLGLSKTGLEYAAYGHLDAAPHLRRATTKAVAMHLADSVWAATERHLFRDATGKRHGMPRPGSWFDFTRIPGRAKSHTTERKWETFRLHGSLAGHRAAYTTSDGRFRQPDHLRPVTTATRGWWRYTGPLAVVFTGLPIGTLVLPVRLPAAPSNQPILDHYLADATRWHKIDLVRHRDPTAAGGWRYEAHLLVLTPPYESPTTHARRVVAAATTATRRAGIDVNVSNITVASHAGGRDLQITRVVHDQSARQAIATRATRQKRHGRRLDRSRRASNPEHYELSARQQRHNERRAANGLAPAQMIPRGPRKRRGNGAPQSAYRHDALSNAYRRERAAAARDAEAASQARHELARQIAARFVRDHGCSFVVEDCNLTSWSRRWGARMAAFTPGLLVTALEREAVAVARLAAIAGGIDRAATRTTALSQHCLCGQRVPKSLGERTHACGACGLRGNRDAVSATLAACVVFATPGEPASATLDGERARALLDAPHTRSRLLATLPYAFHGRQDVRSESTVPSARDGWSIADMGPTPDLVVVARRIVGTASYPTLDERGGSHRHTTPERVRTRTNLFRTPVTWTELRNSS

SEQ ID NO: 6164 - protein, 384 aa, unknown
  TnpB Polypeptide
MERVRKTYQEKLRPTPTQERQLEAVLWRCRTLYNVALEQGITWWRRGQGVSATRFQQEAELKAIREAYPEDAALHSHVLQDVLARLDKTYQAFFHRVANGEKAGFPRYQGRTRSHSFTSKEYGNGARLDNGYLVLAKIGRIAVRWSRPVVGSIKTVTVSKEADGWYVCCSCADVPIQPLPPTGQETGIDLGLESFATLADGTQVENPRQYRTAEREIKKAQRRVSRRKKGSTRRRKAARLLARKHQHVRRQRRDFHHKQALALVRAYDTIYHEDLQTANMLRNQYLAKSIADAGWSQFLSILAFKAACAGRRVVAVPPAYTSQACSGCGVIVSKGLSVRWHSCPGCGTSLHRDHNAAKNIQWRGQRLRGVPAVAGALNREPGGL

SEQ ID NO: 6165 - protein, 407 aa, Okeania sp.
MQYQAVKVRLYPTTEQQEILLKHFGCARWWWNYALNMCIDTYKATGKSLTRNALNKRLPKLKKDKETEWLSECYSQVLQTTTLNLVTAYKNFFEGRAEYPKFKCKKNRQSIQYPQKVEVVGNCLKFPGAVGLVKAKLHRPIIGTIKTVTISMTPSGRYHASVLSEQEGDKPSPSNEGKVAGIDLGLKDFAIVHDGVKTSKYNNPKHLARHERNLARKQGKLARKQKGSNSRDKARKLVARVHERVSNVRQDYLHKLSRKLVDDNQVIVVESLYIKGMLRNHKLAKVISDVGWGIFVNFVAYKLDKEGKVLVEIDRCFPSSKLCCNCHYQVDEMPLDVREWTCPSCGTRHDRDGNAAINIRAEGIRMLSVSGTGTAADGGEVRPMRGRKSKLRHSPVKSETRAIPVQG

SEQ ID NO: 6166 - protein, 431 aa, Okeania sp.
LKARYKYRIYPNHVQVTKLNQLFGCCRYVWNQSLTYCNKLYALGKKKPGYVDLTKQFITQAKRELLWLKDVASSPLQQSLKDLDQGYKNFFDSCTGKRKGIKVKAPKFKSRKSKQSARFTNNNYKIGQNKIFFTKIGKVKIVWSRSLSSKPTSVTIIKDCAGRYFASFVVEINPEILLKTDNSIGIDLGISTFATLSNGDKFEAPKPLKENLKKLAKFQRKLAQTELGSKRREKRRLKIAKLHAKIKDIRTDFLHKLSTDLVRKYDVIVLEDLNVSGMVKNRKLAKAISDLGWRQFRTLTEAKCEKYGKEFRVINRWEPTSQKCSCCGFKGGKKELNVREWTCLNCGTFHDRDVNAATNILQVVRPKTKVEIVQKTAVDNPIQLSLFDTVAGGQSETLNKTRSPRKSSPKKDANSNESSTLPEFIQLSLFE

SEQ ID NO: 6167 - protein, 438 aa, unknown
  TnpB Polypeptide
MCKNKDVIKHRGFMVDHASMQRPDQQAKECRIPEESMYLTYRFRLYPDQEQKTTLAQKFSMARRAYNTLVAWSRETGTAEKNIEKMNDNTATNPQLPAIGQSYDYLADYFLQQEKSHDLTDRSILVSVLRHFAQNRKMAVQNGRNLHFKSCKQHKQTIRFLVCNQSLAIGHNTIRMTLLGQVKVSITRKPVGRLIYLTICETVAGRYYISLLAKKADSKKSIYKTLQKRKISIVGIDVGITHYLTLSDGSTYQNPEFFSSNLTSIKRCHRQLSRKNEASRNRAKARLRLARKHAQIQNRRNGFLHEVSTEIVKKYDVIAIENLSIHQLMLQNHRARKIADASWHQFMWMLSYKAKKQGKAVIVVPRYLPSSKQCCRCHTINHALTLQDRHWVCSVCQTQHDRDTNAAINIMVAATRILLKEWPLINRASLCPVLSEKR

SEQ ID NO: 6168 - protein, 338 aa, unknown
  TnpB Polypeptide
MDYLAQPEIIDDKAVKILQDEACCISTYRPCYATLVPKFIRGKYRVYLHLVIEGKAKPKYDSSGKPRHKYGKGVVGADIGTQTVAYTSDTETGLKNLSERGNSIQKSERLERLYYRAMDRSRRATNPKNYNADGTIKKGKKKWTYSRHYKKLKAKHAELCRINAINRQLAINEDANHLRSLGDIFVTEPKNAARLMKRAKETTVNNKGRINRKKRFGKSVKNRCPGGFQTAVENKFKTSGGTYIEVPNNYRASQYDHTADDYIKKKLSDRMYKLTDGTLVQRDWYSSFLLYCYNYRTNDIDKKKCAAEFKKCYSMEKEFIEWIKANKIKVLNSGIKTA

SEQ ID NO: 6169 - protein, 392 aa, unknown
  TnpB Polypeptide
MCFHSARLFNYALYLTRKQWEDTRTFLRYEIGYFTYKENYNYKILPSAPAQHTCKLVERSFKSYLGLLKLAKEEGWENPINPPHFIPKKGHFMLIIPRNGFQVKGNELHIGISRELKKETGQKNLVLMFPKNVDKELPIKELRIHPHQKAHYFSLEVVYEVEEQEETKETGVLGIDVGMNNLATCWDSKNSRAFIIGGRRVKSINHYYNQQIAKLQSINDKQGFKHCRTKKMFLITRKRNNRVKDYMHKAARHIVNYALSNGIGEIVIGHNVGWKQDINLGKRINQDFIQIPFGFLMSCLKYKCQEVGLRYKEVVESHTSKCSWLDCEPVKHHDEYVGRRVKRGLFRSGQDIFVNADVNGAANIVRKATGDYSVLSSDQIAGFVANPLRITL

SEQ ID NO: 6170 - protein, 392 aa, unknown; identical to SEQ ID NO: 6169
  TnpB Polypeptide

SEQ ID NO: 6171 - protein, 417 aa, unknown
  TnpB Polypeptide
MLLCKKIKLEVSEQDAAALEFMQGKCRGLYNWLVLRLRDGERWHLAEEKARLVECRAYDPELNDVYGKLLAEVYFRLDKAMKAFFTRVANGETPGFPRVRPRHQFFTLCYPAMYIKIEGTMVLLPTGGGRGKKHKPYPTIRAGLTEEVPAGYREVAISRDARGAYYASFVYRVQEAAQQSGQVVAFDLGIKTLATGVNEQGRFYHLGGFRGYQWYNKQLDKIRSKRDRCQKKSRRSIHLSQVYKRVSEQKRNKQKDCLHKASHLIAGKLVERTVVIGDLSQRQMVTKDHTEHLKALHRSVFNEWGLYGFVQMLTYKCQLAGKALVQINERDTSKTCSGCGHKQDMPLYKRTYRCETCGLVMDRDDNSAVNILQRSLARLGPHASSEARCVAGEPGGVAVTGTAQAAHVQQLTRLNTF

SEQ ID NO: 6172 - protein, 435 aa, unknown
  TnpB Polypeptide
MLKAIKIRIYPDNEQKVYINKLLGSCRFVYNNCLTYKIEKYNENNSTVGFAQLGKYLTNLKNMEKYSWLKDSHSKVLQQTLINLEYAYKSFFKDGTGFPKFKSKHENKQSCRFPIDAIGKIHGNRINIILPLKNIHFKCGINDEKYLNKNQSHIKSATLTKTKSNRYYFSILINRTNIKQFPKTDNIIGIDLGIKDFIVDSNGNKFENLKLIRNNKKRLIKLNRQLSKKQMLGTGEYKLNKYGKEVEINQASNNREKARIKLVKFNEKLNNQKENYLHQITNQLLNENQVIVIENLNVMGMLKNHKLAESLQELSINGFKNMLTYKANWYGREIIEIDRFYPSSKLCNNCGYKNKDLTLKERSWVCPACGTKHDRDYNAAVNIKKEGQRILSIKENKIGLSSPEFTLEDCPPMDDKAAMPLKSYDRSIQEKNVFH

SEQ ID NO: 6173 - protein, 594 aa, unknown
  TnpB Polypeptide
MPDFLVSGKSGRSRKENLLRYNVVTSYRSYMERVQAANGESSKYVSQGWKRTVDASAPSYGEDYVNLGAVDRAYASIENDPFADGEIVLRMVVQGQWYRLIFNFDNRRFTEGRVTLPVIKVEDGYPVFIFTVVTDNPVVQFSGDYTIGVDVGINNYATVVVREVETGRIVYETTLSQRVHSLWNSVRASEQQVRDIKAKAVTLLRDRQARMSALDEAQLHREAASRKKRELAIMAAQEIADLSHTFDNAVVAVEDLGWIANTMQNGRWNRGELVKWLTHYVSQNGGWVVAVNPSNTSQQCYTCGQRVSHPTHKDSVCPEHGVMDRDVNAAANIAARAVPRVVKARVTRAKNRKLQPQAQLRTPPARGSLKYPGRDRTKNAPTQKRENRRRVSREVILPVCPARAQAYRLEATVLADQGACDTLGTVQAALKRGNVAYKCKVMQPYLLPRRESQSKRVSLDLSERAVLEALRGACERLVVGGDSETSRRTLEVRCLLVVANEGDIILLVLDNCHICFLLFLFIFAGCAYALPRFSFCNLTSVAHAINEHNVVGRVCGGYLSCLSAPRSRRVFYWFFQVMPMLSARVRATRSATRP

SEQ ID NO: 6174 - protein, 370 aa, unknown
  TnpB Polypeptide
MMKAFKFRLYPTTTQAVQLNQHIGSCRFVYNWALDQKIKTYEQTGKSISRFDLNKKIPVLKSSNEWLGKVNSQSLQGMTKQVESAFTRFFREKNGFPKFKSKKNPIQSFPIPQHYSVDFENNTVKLPKIGEIKAVLHRKFEGELKTATVSRSCKGNYYISILVEDGKELPAKHSFTESTTIGIDVGIKDFAILSTGEKIANPKYLKNSLKRLKVLQKRVSRKQKGSKNRAKAKKRVAVLHEKISNQRNDFQNKLSFKLISENQAIALETLNVKGMVKNHHLSQAISDSAWSSFVTKLEYKAAWFGKTILIIGQFDPSSKLCNVCGYHNSDLTLKDREWTCPDCKTKHDRDINAAINIKKFALIDQNLIGL

SEQ ID NO: 6175 - protein, 414 aa, Aquaspirillum sp.
MQRLQAFKYELQPTGEQQHNMRRYAGACRFVFNKALALQKDNHEAGNTFIGYVAMARNLTAWRNGTETPWLKDAPVHPLQHALKDLEKAYKNFFAKRTAFPRFKKKGQGDSFRYPDPKQIKLDQANGRIFLPKLGWLRYRNSREALGEVRNATVSQSGGKWFVSIQTQREVEAATPRGGMVGIDMGIARFVTLSDGSFLAPLNSFKRNESALRSAQRAMSRKTRFSHNWKKAKARIQKIHARIGNTRRDYLHKATTTISQNHAIVCIEDLQVRNMSRSAAGTSESPGRNVRAKSGLNKAILDQGWAEFRRQLDYKLAWNGGHLIAVPPQNTSRTCPSCGHVSAENRPTQARFECMECGFEENADLVGAINVLRAGHARLACGELAQSGRSVKQEPAEVSELLASRSRNLLPSRA

SEQ ID NO: 6176 - protein, 364 aa, Aquaspirillum sp.
METVKTLKLRIKDKHAKALLAMARDVNTVWNFCNETQYRSLRRYTNKPQLWLSGFDLQKLTSGFSKCEGVSIGSTTVQVVCEEFATRLRQFKKQRLNWRVSDKKSPKYSLGWIPFKAKALAYKNGQVRFKGISLGLWDSYGLSKFEFRAGSFNEDSRGRWYLNIVIKCQTEDKPVQYGASAIGIDLGLKTMVTDSNGQKFEPKQWYRESEAALGIAQRAHKKKRVKAIHAKIANQRKDAIHKETARLVREHAIIFVGNVNAKALAKTRMAKSVHDAAWTTFRTQLKYKAMRQCVVFEEINEAYSTQTCSCCGIKPASSPKGRAGLGIREWTCSECGAVHDRDTNAAKNILAAGLRRLAEGIPAL

SEQ ID NO: 6177 - protein, 423 aa, Aquaspirillum sp.
MGVDCKNTSMQRLQAYKYELMPTSEQQRDMRRFAGSCRFVFNKALALQKARYERGEKKLGYAGLCKLLTEWRHSAETAWLADAPTHPLQQTLKDLERAYTNFFARRADFPRFKKKGQSDSFRYPDPKQIKLDQANSRIFLPKLGWLRYRNSREVLGAVKNVTVSQSCGKWFVSIQTEREIEQPIPQGGAVGIDMGITRFATLSDGTFHAPLNSFKRHETALRRAQRAMSRKQKFSSNWKKAKARVQRIHSRIGNARRDYLHKCSTTISQNHAMVCIEDLQVRNMSKSAAGSPEKPGKQVRAKSGLNKSILDQGWFEFRRQLDYKLAWNGGHLIAVPAQNTSRTCPCCGHVSADNRQTQAKFECVACGFEENADVVGAINVLRAGHARLACEVSGAVMPPAAGTRRSDSCRLDAGMSAVGIPRL

SEQ ID NO: 6178 - protein, 402 aa, Aquaspirillum sp.
MQRLQAYRFELKLNGEQQRLMRRFAGSCRHVYNKALALQQARHEAGEKKLGYAALCKALTEWKARPETLWLNETPSQALQQALKNLEHAYKNFFEKRANFPRFKKKGQSDSFRYPQGIKLDQGNSRIFLPKLGWLRYRNSRDVLGEVKNATVSQSGGKWFVSIQTEREVDQPLPQGEAVGIDMGIARFATLSDGRHIEPLNSFKKHQQQLARYQRAMSRKVKFSNNWKKAKAQIQRIHTRIANTRKDFLHKASCQISQNHAMIAIEDLQVRNMSKSAKGNSEQHGKRVKQKSGLNRSILDQGWCEFRRQLEYKAAWNGGFVVAVPPQYTSQTCPCCGHVSKDNRQVQTKFACVECAYEENADLVGAINILARGHRVLACGESVQSGRSVKQEPTEATQAIVA

SEQ ID NO: 6179 - protein, 408 aa, Aquaspirillum sp.
MQRLQAFKYELMPNGEQQRNMRRFAGACRFVFNQGLALQKARHDQGEKKLSAFALNNLLPAWKNCPATQWLKDSPSQTLQQSLKDLERAYSNFFAKRAAFPRFKKKGKGDSFRYPQGCKLDQANNRIFLPKLGWLRYRNSREVLGAIKNVTVSLHAQKWFVSIQTEREVAQSVPQGGIVGIDLGITRFATLSDGSFIAPVNSFKQHQVALRKAQQALSRKTQFSNNWKKAKARVQQLHARIGNIRKDFLHQATNAISQNHAIVCLEDLKVRAMSKSAAGDADQPGRNVRAKSGLNQAILDQGWFEFRRQLDYKLAWRGGFLIAVPARNTSRTCPCCDHVSADNRQTQAQFRCVECGFEENADLVGAINVLRRGEALLEQGQDNAQIACEVSGAVIPPAAGTHRGDLAA

SEQ ID NO: 6180 - protein, 433 aa, Aquaspirillum sp.
MGMGCIKTSMQRLQAYKYELMPTGQQQRDMRRFAGSCRFVFNKALALQKARYERAEKKLGYAGLCKLLTEWRNSAETAWLADAPVHPLQQTLKDLERAYANFFARRADFPRFKKKGQSDSFRYPDPKQIKLDQANARIFLPKLGWLRYRNSREVLGAVKNVTVSQSCGKWFVSIQTEREVEQPIPKGGTVGIDMGIARFATLSDGTFHAPLNSFKRHEARLRKAQQAMSRKTKFSSNWKKAKARVQRIHSRIGNARRDYLHKATTTISQNHAMVCIEDLQVRNMSRSAAGTTGQPGKNVRAKSGLNKAILDQGWAEFRRQLDYKLAWNGGHLIAVPPRNTSRTCPACGHVSADNRRTQERFECVECGFKENADLVGAINVLRHGEALLSSEGQDDARIACEVSGAVMPPAAGTRRSDSCRLDAGMSAVGIPRL

SEQ ID NO: 6181 - protein, 401 aa, Aquaspirillum sp.
MERLQAFKFELQPNGEQQRNMRRFAGSCRFVFNKALALQQERREQGEKKLSYAGLCKVLTEWKAQPETIWLKETHSQPLQQKLKDLERAYVNFFEKRADFPRFKKKGMGDSFRFPQGCKLEQTNSRIFLPKLGWLRYRNSRPVLGDVCNVTVSQSGGKWFVSIQTRREVETEQPQGGIVGLDMGIARFTTLSDGSHYDPLNSFKKHQQRLKRYQRRMARKVKFSANWKKAKAKVTQVHIDIGNARKDYLHKASTIISQNHAIVCIEDLQIRNMSKSSKGNVEQHGKKVAQKSGLNRSILDQGWGEFRRQLDYKLAWRGGHLIAVPPHNTSRTCPACGHVSGENRQTQAKFECVECGYENNADYVGAINVLERGQRLLACGELAQSGRSAKQELAEASQAQA

SEQ ID NO: 6182 - protein, 160 aa, Aquaspirillum sp.
NARKDFLHKASCQISQNHAMIAIEDLPVRHMSKSSKGNSEQHGKMVKQKSGLNRSMLDQGWAEFRRQLEYKSAWNGGFVVAVPPQYTSQTCPCCGHVSKDNRQTQAKFECVECGFEENADVVGAINILARGHRVLACGEPVQSGRSMKQEPTEATQALAA

SEQ ID NO: 6183 - protein, 414 aa, Aquaspirillum sp.
MQRLQAYKYELMPTGEQQRDMRRFAGSCRFVFNKALALQKERYEQGKKKLGYAGLCKLLTEWRNGSETPWLADAPVHPLQQTLKDLERAYTNFFAKRADFPRFKNKGQSDSFRYPDPKQIKLDQANSRIFLPKLGWLRYRNSREVLGAVKNVTVSLSAGKCFVSIQTEREVEQPIPNGGSVGIDLGVVRFATLSDGTFYAPLNSFRRHETALRKAQQAMSRKTKFSHNWKKAKTRVQRIHSRIGNARRDFLHKATTTISQNHAMVCIEDLQVRNMSRSAAGTTETPGKNVRAKSGLNKAILDQGWAEFRRQLDYKLAWNGGHLIAVPAQNTSRTCPCCGHVSADNRQTQARFQCVECGFKENADLVGAINVLRAGHARLACEVSGAVMPPAAGTRRSDLCRLDAGMSAVGIPRL

SEQ ID NO: 6184 - protein, 443 aa, Sutterella sp.
MTLKAYRYRLYPNTVEKNKLAQHFGCTRLVFNLYLEENQKTYKETGKGIKPYTFIVSLPKLKKSEEYSFLKDVNSQSLQSSVLNAGKGLDNFFTKGAGFPRFKSKRSGRQSFQCPQNVRVHFDSESLASTKGTIELPKIGRIKAILHRRFVGEVGTVTIVKEPSGKYYASVLVDDGVEPPKTDVISEDRTAGCDAGIKTALVVSYPDGTVKKFDNHHRLTKGLKRLKIEQKILARKKVSFVEQTNSEGKTFQQRLPSKGYSKQRERISKLHEYIRHGRLNDVHQISHTLANDNQVTSYVIEDLNIKGMVKNHKLSRAILDVGIGNLYRCLDYKLKVNGKNLIKADRFYPSSKRCCVCGHRHQGLTLKDREWQCEVCGQEHDRDECAAKNLAKWPFLAEENKSCAGRNGPEWVKSSSQATLFSDSACAKGLNHTDSVRSHKALE

SEQ ID NO: 6185 - protein, 370 aa, unknown
  TnpB Polypeptide
MLKSYKYRIYPSDEQKEQLQCFFGVARLVYNLGLETKSNAYDSKQVNLSNYDLIKQLPELRKEYDFIKDCPSQVLQQSLFNLDKAYKNFFKSKGKFPKYKNKYSKQSIKFNQNYKILFKDNKVKLPKIDTLINVIYDREFKGIPKSVTLSKTTTNKYFISILVDNKVDLPKKKRITKRTSVGIDLGIKDLVITSDNIIYKNKNFFKSQQRRLRIEQRSLSRKQKNSKNRDKQKLKVALLCERIRNQRKYYLHSISTELVRNYNTIIIENLAVSNMVKNRKLSKAISDMGWRELRTMLEYKCNWYGKNLVVIDIFYPSSKLCSNCGTRKDNLKLSDRTYSCDSCKISIDRDLNASLNIKKQGLVTILQSLK

SEQ ID NO: 6186 - protein, 477 aa, unknown
  TnpB Polypeptide
MQIGNRFRCYPTPAQEQTLLQWIGCQRHIYNAKVREDQYFRRFARKSLQHAGQFAPVDQQYSHFKTELTPFLSEVPSVVLRNGSVLWKQSYSRFFSKLGGRPVVHKRHGKQSVWLTSEVFEFISQADAETGKITGHQLHLGTKKFPVGMLEFKAHREFKVPASIHLSVHAGRWHISFNYEDDIPEPSEKETTEYLLQFDEAALLKMTVGLDRGVALLLAGSDGQAFNFSDIQQKRLDKQERHKKRWQRRQARRDQGSAGWLKAKRRVARYVLYGADVRRDVAHKTSHTLSSDSRYKLFVFEALKVKNMTASAKGSIESPGRNVKQKSGLNRSILASTWGQTRTYLQYKARRKGKLVIEVPPQFSSQECAACGHIHQDNRVSQSEFVCLSCGNTDHADHNAAKVIAKRGVQQLLSRKRVQKEKKRCGVTRKKVGREVSEPVAAMQSTSDEIVVSREVGQSIPTLWSLTQETLATAVAA

SEQ ID NO: 6187 - protein, 407 aa, unknown
  TnpB Polypeptide
MPDYCVRRLNLGRTAQLDALAHAAGQVYTRTLVFFWRTVRKKGIWLKPKHLMKLLPADPDHLLHAHSVDAAIQSFFAGLSSWRERRKTDQGAKPPRRRKWYFKVEYKRSAMTLKDGQLRFSNGRGNDPLLLSWPWELPQTVVIRWTGQQYEAIATYQVDGPLRKALPEPDVEQRRAKQVAGIDLGEVHMAVSHDGTHTHILNGRRLRAKRQYQNKLKEHLSKKIDRKKQGSQRRKKLIASKKKQLNTIKNQIKDIEHKQTTALISTLYQEGVQTVVIGNVKDIRQRMDVGSPNNQRLHQWSHGHTRHLLTYKAERLGMEVVLQEESYTSRTCPVCGHRKKSSPKGRNFACSTCRYHGHRDGVGARNIRYKYREEFGVPHVVAAMAPATGIRFRPHARVARSQGRENV

SEQ ID NO: 6188 - protein, 384 aa, unknown
  TnpB Polypeptide
MIKTHKIALDPNRDQLAWFYQQCGYAKFAYNSALSDFKAELASDNFLSMYDLNKRFNKKKKAFDWTQAQDQRAAMYAVHNLGSAIDNWKAKRAKFPRLKRRGCKHSYTTDEQAVRMEGKRIKLPKIGWIKTFEALRFRGKIVSVTISRTAHRWFASVSVEVQPPIRRCPASSEFFDWYASEVEVGTPHEIERSIYPTLGIDVGISTLATLDDGTKYENPKPLKRYERKLAREQRKLSRKVFLSKNWYKQKRKVERLHYRIACIRRDAHHKATTDILIGASRVGIETLQITNLLKNRKLAKALSDAALGGFLEKLKTKVKSLGIPIVQADRFFASSKNCSSCGHKKENLMLSDRQYDCSHCGMSIDRDVNAAINLRNLAAGYAES

SEQ ID NO: 6189 - protein, 384 aa, unknown
  TnpB Polypeptide
MIKTHKIALRPNRDQIAWFYQQCGYAKFAYNSALSDFKTEFASDNFLSMYDLNKRFNDHKKAFDWTKAQDQRAAMYAVHNLGRAIDNWKAKRAKFPKLKKRGCKHSYTTDEQSVRMKGKRIKLPKIGWVKTYEELRFRDKIVSVTISRTAHCWFASISVEVQPPLHRCPASLAYVDWYTSTADVGTSRQIERSIYPTIGIDVGISTLATLDDGRKYENPKALKRNERKLKREQRKLSRKVFLSQNWYQQKRKVERIHYRIACVRRDAHHQATTDILKCASKIGIETLQVTNLLKNRKLAKALSDAALGGFLEKLKTKAASLGIPIVQADRFFASSRNCSACGHKKDDLTLSDREYHCSHCGYRENRDVNAAINLKHVAVGYTET

SEQ ID NO: 6190 - protein, 352 aa, Bacterium sp.
MSLVYPSGAGIKVIENNRIQITFGKNAEWPVEQYRVSSGKQLRIIVGLNEPLKSNSFGQVVITKDPNGNYYACFTLETQDPACDACETPSIEEHESISKVIAIDPNHKNSFVGFDGVNAIELARCYVQKNLDKAIDYIKSRRDKCLRKSKAVFREDGSIKYWKPSRKWKQFNTVLNKLYAKRREQMKLFAYTSAHWLERHYDKVLYGDYTPFAGLKNTHRSMLSQGYVGYLRRIVKWVFEKSGKVAEEVSENRSTKTCHCCGEEMDMPPGKRFFVCGNPPHRVGFNLSGIANEVLSPPGEGECNASLPRDVNSAINLYNWHGGSEKKIPDAKINLHLKWSPFYGLEETCPVN

SEQ ID NO: 6191 - protein, 420 aa, unknown
  TnpB Polypeptide
MKRTSIVELVVDKNVEEKLKLLCSLSSKLWNEVNYTRRRMFFEKKGVDLETTYKEFYEKYKTLIGSATTQQILNKNDEAWRGFFKMLKLKKEGRLPSFINKVNPPGYKKKNNKRTLWSAVRKDQYRVEGDKIVLKGLGVIGSIELRYKGIIHLRGEQGRLEIHYDPDRRKWYAHISFEVLEKAVRGVWANVPRQPKYNLVAGIDIGVNNLMAVYVENGLTRLVNGRPLKAISHYWRMRIAEYQSTLNKYGLKTSRRFRSMYSRWRREVKAYIDSKVRQAIEWLYSVGVSIIKVGYPKDIAQEDGDFNIVHVWTYGYLLRRVYEVAEEYGITVVYVDEMYTSSKCPVHGLGCGERIKRGLFKCTKLNKVFNADLVGAYNILITPSPERDRGNRPKTRPGTKPSKRGDVAPNLPALAGTLAL

SEQ ID NO: 6192 - protein, 435 aa, unknown
  TnpB Polypeptide
MLLQHCAHARYVWNLAWNLHQFGTLETYGKASRRIDRDGRQYIHQKRRPVRSLPSYVEQSRMLTEARAEHEWLAAGSQNVQHQALRDFDQAMRNFYAGTHGRPQRRKRYLNEGFRITDFNFRRHVWRLNRRWGQVWVPKCGWVRFRWTRAVPECKSYRVTRDRAGRWHVAFAVKPESIPAPGTGEAVGVDRGVVITAALSTGEKLHCPGLTAREHARLRKAERRKARAPRASPGQLVERHRIARLRAREADRRKDWCEKTSTDLARRFDVIRFEDLRIRNMTRSAKGTAEAPGVNVRQKAGLNRAILAQGWGLLVRRTEDKAPTRVEKVRAAYTSLRCSVCGWISKDSRDSQAGFCCVSCGFTCNADENAAVNIAAGHAGGTPPSVREPQLLASLTERDVVGIPASARGGCQSTVCRDRSTCICRDSGVGRRAAG

SEQ ID NO: 6193 - protein, 475 aa, Eubacterium sp.
MSAGYAITTYKIQLNYKRLDWFKKTQSLFDAVLAFYYKLLEKQPEVLSLSNQNLLRHLELQTIKQRDGTPPETPLPFEKIPLYFRRAAINAAISMYRSYVGKLKAWQEGQEKEVDSEKLIVDRLGTESQSDSELNQIGKADLHYHYPLSTVNYQLKGRPSKPRRLHMSMLYYKGMYKDFADGSILLKLYTGKAWAWVKHRYTGRPFPENAELMSPTIVIKKKKVMLHIPVKEMVEDSRTAKERVKQNESFVAVALTGSDTLAVCTTIKADGRATAPYFIKGGKALAHRRKQLLGYTKRGNTGNNAPRLMTQPVGNAALSVPQRNRPNAKYYEKITRVTDHYAHEVSRKIVDYAIKQGAKLIVLPELKESFNQAKKPYLGKSPYDFIGRRIARYVQYKAWQKGLVAMTSKPYYASTRCYHCGAPIAKHNTEYQNPSPNFYGGKNFVCKEGHKGSTALNSARNLGKGFYERFYAGVA

SEQ ID NO: 6194 - protein, 439 aa, unknown
  TnpB Polypeptide
MLEVHRTHRAKILNYAQVEEPLDCHGWSASKLWNVANYHSREVWEETGEIPGHGDLKDELKTHNKYNGLHSQSSQRVLEELAEAFNSWYEKRKSDDRANPPGYRKKNYYDSEGRRVHEEHPRSTVTWKQNGIKHDSKNNRVRLSKGANHKEHPKAWEYILVEYETRPGVEVKNLQQVRAVYDQQKERWELHLVCKDEIETSNAPGNETAGVDLGICNFAAVAYSTEDADLYPGNRLKQDGYYFPKEVAKCDDSGDERATRLHHKWSERRTHFFHSLAKHIVERCVEKGVGHINVGKLAGVREDENGESKNWGKHGNLDLHGWAFDRFTSILTYKAKVEGIEVVEVSEHDTSKTCCVCGREDDSQRVERGLYVCEPCDAAFNADVNGAENIRLNLNQSNSESSASVGGDRSTGWLAQPKVYLHDLSRGFQPRAEVVDSKP

SEQ ID NO: 6195 - protein, 432 aa, Xylanimicrobium sp.
LLIEARTHAQAAAIARVSGGVRLTRVTGDGEVKETRQVRVPDFEAVSAQVEAVTLMFRLYDETPDGLVQVGNGWSFRGYKFEVAWPQEAERRDLIRGHFGACRKAYNVALGWVKDDLDARAKDPKHESTPWRMDALRLRWNTQKNQVAPWWAEYSKEAYAAGIADLATALKNWSASKHGTRKGRRVGFPRFKSKRTARKSVRFTTGVMRLGEDRRTIVLPRIGALRSKENTRALQRRLAKGDARILSMTLSEHAGRLFVSVQAAVRATPVVAPAYPDATAGVDVGMRTLATASDSLGHTVEFENPRAYKAALVELRREQRKLARRLPGSRGYERSKAKTARLHERVSNIRRAHHHQVATWLVGTYGHVVIEDLAVSAMMQSLNRRFRRCVADAGMGGLLALIALKADKTGTQVTRADRWFPSSQIHHAAGAS

SEQ ID NO: 6196 - protein, 376 aa, Chloracidobacterium sp.
VKLTAKVKLLPTPEQHKLLLDTLEAANSACNEISQIAFETATFHPVALQKICYSQIREDFHLGAQITIRCISKVADAYKVSPVEQREFKPLGAIAFDLHILRWLPDHQAVSIWTVEGRQFIPFATGEKQLDLLKYQKGQSDLCVINGEFYLLATCEVPTPPTLEPENVLGLDLGIVNLATDSDGHSYSGCEVRSVRCRRRRQRKRLQSKGTKSARRVLKRLKGRERRFATNENHRIAKQIVKTAKDTKRAIALEELKGIRKRTTVRKQQRADLHSWGFGQLIAFIIYKARLAGVKVVEVDPRNTSRRCSECGYTHKNNRKSQERFSCGQCGMRAEADHNAALNIARQGWGQISGPHESGDSLRVSQVQATCSTGGS

SEQ ID NO: 6197 - protein, 414 aa, Halorubrum sp.
MEKRRTVPVKLAVDSDDAALIEDTVDEFLWAANYVTRHAFEGEYVTTSKTTLHDDTYEDVRDETALHSNHVQAARNKAADACKSVVKKWKQGKKASMPHFTSPHVVYDHRTATFHDEYVSLATTDGRIEADYVLPDDEQDTPHAEYLFSDEYETTGAELHYRDSDWMLHIHCKMEVESDTAEQTATENGTVLGVDLGVNSLVVASTGTFWTGDEFDHWRREYEQRRGDLQEHGTRWAHENIQSVGRKEEGRFKITLHRISNELVAEAREYSCSVIAFEDLTDIRERTGASWGHKWAFNRLFEYVEYKAAEYGINVEQIDPKNTSRRCSTCGFTHPDNRNGEEFECLKCGYENHADYNAAKNIGLRYLRRNQTGSGGGAPVGVRLNSGTLNANGEYDPPAEMSARAGVHAESPRL

SEQ ID NO: 6198 - protein, 206 aa, Thioclava sp.
LSATAGLDWGVSTFVTLAHEDGAFEALPNPRHWALEAEDLKAEQRRLSVAARARKISRRALRAHRRALARRHAKIAARRKDFLHKASARIAGRHRLIATEALAVRNMTASARGTAEAPGRNVAQKAGLNGSILDTAPAGFLNMLRYKAEEAGAEFLEPKTRELKPSQRCLDCGAVRKKTLAERHHDCDCGCRLGRDEAAARVLLNW

SEQ ID NO: 6199 - protein, 359 aa, Deinococcus sp.
MARNDPDLHWVQIRHSSYSRLGPLVQAGALQPYLGRLSGFPGAQIWRVDSPLTVQSDHQCSIAGVPLQAALHHQPSHAYCAMVAASPHFTQYAGTGELSRLLRSHDDWDPGGFAHALEATVRQGRVPLPRPALAVPPTTYLTYWLPERSFVSRLSNGHYMLGLSYTVRYVPPPGLARRSAVGLDLGIDPLTVAHTDTGATRYFRPTSLRHVRQLPWLSADAQMLLRDLIYASGRLDAEGIVAWLNFHAHTVYAERINHMGMSTHWIHSGRDRAIHDHHFSALSQYLFASGVDFRRVAPHHTSTLCAPCFEHQGRVVYGLRAGDRFRCPACGADLDAHANAAHNVLLRGQMLPPRGRAAA

SEQ ID NO: 6200 - protein, 455 aa, unknown
  TnpB Polypeptide
MENEDPERRQVMKIMCSYAVEMKHINKLFRDTIRIYNDAVSFCVKAFEDHWEVLKTLDPGNKERFAYADHLIHSTKTNTAVFKEFDQKFHKMPSYLRFSVINTALGHLSSYYSNLSNWENDPSKGKQPSFQFRLNKLPVFYKDNMYIPGENPDTIRLKVFVNHDWNWVTVSLKHTDVVSIRNHRKDGKISAPMLEKKNKKWFLRFAFEGQVKLNDTKLEERRILAVDLGVNTDAVCSVMTKDGTVHARKFINFAGDKDRIYHTLNKIKKVQKNSGSQNTKKLWRYARFHNDELARKVASKIAETAIEYQCDVIVFEHLDIKGKKKGSKKQKLQMWKKNTIQKIVEQKAHKNGIRISHICAWGTSKLAYDGSGYGLRGTEAGTKSYSICRFPNGKTYNCDLSATYNIGARYFIREIQQNQSVKNWSVITAKVPECQKRTQCTYSTLLRINALDRVS

SEQ ID NO: 6201 - protein, 319 aa, unknown
  TnpB Polypeptide
LAASTARKQRATLLGNEAASRTLQAASKETEPPPRSQDARVSNDSPTRLRETEQQKNSIFRWWIRMPLHPESVWIPIQLAYEQEPFLKHELGECKLLRGENDGHWYVNITVQKQARLKRKYATVLPIDMGIRKLATTIEQGKPRFYGKQIRRTRGHYFRLRRSVGKPSIIRKWKHSEQRSVRHEVHTITRRIVEHAKRMNALIVVGDFEGIRRLKRGRSFNRRISSQPFYLFKQMLKYKANWEGIRVLTVPEAYTSQTCHRCGVRGQRVAGRFSCPSCGLVCDADVNGTWNIGKRAHGVLRHDAGDLLAVPRTLAVCEP

SEQ ID NO: 6202 - protein, 408 aa, unknown
  TnpB Polypeptide
VKILKNKLRSTSTRKRRKTNMVVTYKYKIYPNKKQQIQLAKTFGCARFVWNYYLAWREKRYREENLSTTESECRKHMNGVLKEQFPWLREVDKFALENALINLDNAYARFFKRLAKHPKFKRKKSHYFSYTTNFTNNNIQVDFGKLASNTKLNRCWGRIKLPKLGWVKARIHRVFEGKIKTATVKLLPSGHYYVSITVEQEMIVNPRIKQTPSNFAIALDLGVKDFLVDNHGKHIENPKILVKYEKKIKRVQKELSRKKIGSKNFEKTRKKLARLYEKVANIRTDFLHKNSSQIICENQVIICEDLRVKNLVRNHHLAKSILNVSWSKFVEMLEYKSVWYSRVFLKVSSNFPSSQICSSCGYKNGAVKDLKMRTWQCPECGAVHDRDENAARNILKQGLSQLGISVVV

SEQ ID NO: 6203 - protein, 471 aa, unknown
  TnpB Polypeptide
MGQASRTTKLLLNLGNRSQGGANSEKRAALDATAEVLTQARAFYLDFFLAHAQKLSERVTYYSEEYLEMRERLISAHELLTWAEACTVETAAHPHPWTGWNFSQRFPNMPFAYRRSAIKDAIGKARAYLSNYARWEASGKKKGKPGLPAATDHPTLYQECLVLDLKVLATPKAFVRINVYTGESWTWMHYPVSSSRYALQRLQAADWKRQSPTLVLRAHTSELHIPQVKKIAASKVMERKQDPDLVTVAVDLNVKNLAVITVRQHGGIIETVFVRDHGLDAHRYRHLKRIAKKQWQSGRPVKGEQSNQHLWWHIERLNEDAAHKVARQIATVCAKYPGCILLFERLRKIKQGPGSKSRRMNRKRANQLRGKIREHAKDKAYVQQVVTVEVNPHGTSQYCSRCGAKGERFSYQQGQRVFVKWGKLFYCPVCHYEANADFNASANVHHAFYREWHWLPRRVKAPPPSAVEDGT

SEQ ID NO: 6204 - protein, 354 aa, Moorea sp.
MLTINYTYRIYPSQNQEQIMKEWLETCRRVYNYSLRELKDWIASRKCPVDRCSLQSEYIIPADTPFPSYHRQQNNLPLAKKTNPFLAKVHSQVLQTTVRRLHDSWEAMRKRGFGFPRFKKKGQYKSFLFPQFKSNPVGNEHIKLPKIGLVPIRLHRKIPVGFQVKQVRVLAKARQTEWYVVISIAMEVDIPDHPAVGRAIGIDLGLEKFLTTSDGFTVERPKFFKQLQGKLKLLQRRAAKKQKRSNNWEKAQLKVARLHHKIANARKDFHLKTAHLLCDQAETIFAEDLNTIGLNRGMLRKDCIDASFGQFLDLLKWVAWKRGCARRESVKLNQSLKWLSGECILQPAEMRGEE

SEQ ID NO: 6205 - protein, 449 aa, Shigella sp.
  misc_feature (356)..(362): Xaa can be any naturally occurring amino acid
MRRFAGACRFVFNRALARQNENHEAGNKYIPYGKMASWLVEWKNATETQWLKDSPSQPLQQSLKDLERAYKNFFRKRAAFPRFKKRGQNDVFRYPQGVKLDQENSRIFLPKLGWMRYRNSRQVTGVVKNVTVSQSCGTWYISIQTESEVSTPAHPSASMVGLDAGVAKLATLSDGTVFEPVNSFQKNQKKLARLQRQLSRKVKFSNNWQKQKRKIQRLHSCIANIRRDYLHKVTTTVSKNHAMIVIEDLKVSNMSKSAAGTVSQPGRNVRAKSGLNRSILDQGWYEMHRQLEYKQLWRGGQVLAVPPAYTSQRCAYCGHTAKENRLSQSKFRCQVCGYTANADVNGARNILAAGHXXXXXXXLWRGGQVLAVPPAYTSQRCACCGHTAKENRLSQSKFRCQVCGYTVNADVNGARNILAAGHAVLACGEMVQSGRPLKQEPTEMIQATA

SEQ ID NO: 6206 - protein, 372 aa, Actinomadura sp.
MMNYMTQLVKRAYKYRFTPTPGQAEELARTFGCVRLVYNMALQERSRAYAADGRKISYAQTSAMLTAWKRTPELAFLGEVSSVPLQQALRHLQAGFANFFAKRTGYPTFKSRKRSRASAEYTRSAFRWRDGALTLAKMDGPLNVRWSRPLPEGADPSTVTVSRDAAGRWFVSILVEEKIAPLPPAKRTVGVDAGITTLATLSTGEKVVRPRYERRDRRRLAKAQQALSRKVKGSKNRDKARLRVARVHARIADRRRDFLHKLTTRLVRENQTVVIEDLTVRNMLKNRSLARAISDTSWRQMRGMLEYKAEWYGRELVVVDRWFPSSKLCSGCGTRQDAMPLGVRSWQCACGAVHDRDVNAARNILAAGLAER

SEQ ID NO: 6207 - protein, 397 aa, unknown
  TnpB Polypeptide
MIILEFKARTKPSQASAIDEAIRTAQFVRNKALRYWMDNEKVGKYDLNKLCKELAEEFPFAKKLNSMARQASAERAWSSISRFYDNCKKKVKGKKGFPKFKKNARSVEYKTSGWKLLEPKRIKFTDGFEIGELRLIGTYDLALYDESQIKRVRLVKRADGYYVQLCINVENSTTMLEPTHNTVGIDLGIKYFLATSTGEFLESPKFYRKAEKQLNRANRRKSKKFRKGAKPQSKNYHKARKRYSLKHLRVSRQRTEWLKNQALRLCQSNDLIAYEDLNVKGLVKNRKLAKSISDAGWSTFRKWLNYFAGKYGKIAVAVPSHYTSQKCSNCGRIVKKSLSVRTHKCTHCGFESDRDTNAAINILQLGLDTLGHREIYKLGEIEPLAELDQSCLVKSGL

SEQ ID NO: 6208 - protein, 479 aa, unknown
  TnpB Polypeptide
MSATPTTRASATATTVRIFPLRGLTTGQRSLLRAGQWEAGAVYTACMQAHRIARQMRSPWPAYSDLHHLTKGRHPDLCAQSVQATCRAFDGTINSTRANRTAGNTRMRYPWKERRYQPIRWPAQALQRKRNGTRFPLGGRGKERRYVDLPIHLPRHAGACQIIWTHGQYELHVCVAYEVATSSESETSSVAQGRACIDLGEIHQAALVTDTGKGVIVSGRGIRTIKQGRNRAIADLQKKQARCTKYSRQWKKYQRARDRINGKTERRVRDLRHKGTRLIIEAAKKEGVREIYIGNPHGVRRHQTGHHHNQRMSQWEYGSDIRYVTEKGGRAGIAVRTGPERGTSSTCPNPACRHKQKVRGRDWRCRLCGGSWHRDLVGATNMFALASEDAAVVPVPERRNTTYRRPGPVALGPRARIGNARRSSQGRGLRGTPFPAELITSAASHPPGPGSAQAPPGAGPGGQALGLLDGHGSPRAALA

SEQ ID NO: 6209 - protein, 469 aa, unknown
  TnpB Polypeptide
MTDKIVNKGFKIRLYPTDEQKVIIEKTFGCCRFIYNNYLQEKNEFYINHKLELKGKTKEEKAKIYSTFKRTSDKEYGEKYEWMKETSSTARHEMTRHLDSAFKKFFDNVKKKRKVGKKGNKYGFPQFKSKKDTHQSYSDRITQFNWNEKFIVIPKCSKVKFRHKDLPSWWKFMTKMNGTVTISRSSSGNYYASILFTVKNENYKIENRKDSIGLDFDCDDGYIDSDGKSVLKDYGFVKQKQGIYWDSDIKTLKQNKTKKKLKRLQRWEKRKVRTKLEDSPRKVNSKNREKARIKLAKFEEHIANSRRDWIEKETLRLVKTYNKVVVENLNYKAMMGNSKNAKNYEDISWSTFVTRLQQKGETYDCNVIKADRFFASSQICHICGYKNKEVQEKHLEEWNCPNCGTHHQRDVNASINLKNYVPLEQRKLTTVENGYVKNLASVALRVGSFDEAVRCKATNTEASTLKGGV

SEQ ID NO: 6210 - protein, 406 aa, Rhodothermaceae sp.
MSEGKEYRGVEYRLLPGTRARARKLAGIAGACRFVWNYFLAQNKEEYKRAKESDGKKPSISFFSLGKQFTQLRKEIDWLSEYSFIVVRYALKYQADAWQGFFKGVRKHPRFHSKYGKHPSFTIPENIKIRDGRLFIPKVGWMQIRRKGGNPNLDGRPVKATVKKVGRQWRASIIYEIDTQERIENGVAVGIDLNTYNVACTHSTGEQEMLPIPKLTLKEIRIRRYQRKLARQQKGSQRRRVTKRKIARWKRKQKNCRKNVAHHHSRALANRAETLVREDLNIKGMSKSAKGTVDNPGTNVEAKAGLNRVIQNSAWGRFNQYCDYKFRKVIEVDAKYTSQMCNKCGHICKDNRKTQSQFTCMACGHTDHADLNASANILASGIGAAGRGEAFPLGTSMSRQIDLNIA

SEQ ID NO: 6211 - protein, 380 aa, Staphylococcus sp.
MERLKAYKFRLYPTEEQEVFFAKSFGCVRKVYNLMLHDRIKAYQEKTNNPSEKMRFPTPAKYKKAFPFLKEVDSLALANAQLNLDKAYKNFFRDKSVGFPRFKSKKNPVQSYTTNNQNGTVALIDDKFVKVPKLKSLIRIKLHRKPKGVIKSATISRHASGKYYISLLCKEGINELPKSNSAIGIDLGITSFAILSDGQKIDNHKFTAKMEKKLRREQRKLSKRALLAKKRGVNLFEAKNYQKQKRKVARLHEKSMNQHTDFLNKLSTEIIKNHDIICIEDLNTKGMLRNHKLAKSISDVSWSRFVTQLQYKADWYGRKIIKIDKWFPSSQICSKCGHKDGKKSLEIREWTCPICRTHHDRDINASRNILNEGLRIMAFA

SEQ ID NO: 6212 - protein, 376 aa, Sulfolobus sp.
MKSIRRYLWLMHKAVLQKNNEAWSSFFSSLKNKDSLPQFVNHISPPGYWKDKGKRKLILVIRQDRYEVDEERHLLKDWKMEIPFAGRLRWFGTQGRLEIYIDGNKFYAQIPVDVGRVTAKKSKRPIKGSLIIHGERDKIQIALPKGNKVASIDLGINMLTTVTVDDGTVLFYRGSLVKSDYFYFQKKIGELDRLKAEDEKIHETEAREEVLRERERLFKKLYRRLIHYYRTLASHLAKSLWELGVSTVYLGYPYFISQDKGNKFTSNIWSYRKLIEAIVYKLYEYGIKVFLVVEYNTSRLCAFHDVEVSRKSRGVINCPLGHKLHSDVNGALNIMKLGIRKIVNVLKKPLSFLVSSNGVTLVKGSNTLDLGGTLAL

SEQ ID NO: 6213 - protein, 252 aa, Phormidium sp.
KASGYFIMLSLQLDVDLPQPFPHGHPRGLDLGFDKLVATSDGLEVKRPRFLKSLQRKLKLLQRRLKNKQKGSNNRHRLNRKIARVHQRISDARKDWHFKLAHRLCDGAGLLCVEDINVYSWQRGMLSKPAADAGFGQFVNILGWVCWKRNVFLAKVDKDGTSQECSHCGAHTGKKTLDVRVHHCPECGYTGSRDVVSAEVIRNRGISDLGQGLEAKQIACGGDLTGAMPSQEPVRQDSLVARLGISHYSRPA

SEQ ID NO: 6214 - protein, 328 aa, Phormidium sp.
MLVFEAKLEGAKEPSERLDEAIRTARFVRNSCLRYWMDNKGVGRYELSAYCAVLAQEFPWAKKLNSMARQASAERAWSAIARFYENCKKKIPGKKGFPKFKKHKTRDSVEYKTSGWKLSEDRRTITFTDGFQAGSFKMWGTRDLHFYQLKQIKRVRVVHRADGYYVQFCIDQERLEKREPTRTVIGLDVGLNHFYTDSDGQTLRLPRHLRKSEKALKRLQRRLSKTQKGSKNRQKARNRLARKHLKVSRQRKDFAVKTALCVVRSNDLIAYEDLRVQNMVKNHNLAKSISDAAWSTFRQWLEYFGKVFGVATVAVPPHYTSQNCSNCG

SEQ ID NO: 6215 - protein, 374 aa, unknown
  TnpB Polypeptide
MKLKAYKYQLNPQGGQFEMLNKHFGCSRFVYNWGLNRKSEEYAKTKKNISCFDLIKEITLLKKEEEYKWLSEIQSQTLQMSLRCLDNAFTSFFHKKSEYPNFHKKKNRQSFQYPQGVKIKDNMIYLPKIGWIKYFKDKRDLNGIIKTVTVSKTPTNKYYVSVLCQQEGKYPEKKEIKQETAVGIDLGVKDLAITSNGEVFENKKYLGRNLSRLRIEQRKLQRCKKGSNRREKQRMVVARLYEKITNERNDYLHKITTSLVNEYDTIVMEDLNIKGMMQNKHLSRSIGEMGWNIMLNMFKYKCEQYGKNFIQIGMFEPSSKRCHNCGYINKDLKLSDREWICPKCGKKQSRDIGAALNIRDYGLGTQPSDAKVVR

SEQ ID NO: 6216 - protein, 405 aa, unknown
  TnpB Polypeptide
MLISYKYRAYPDATTETRLNGALDTCRWLYNTLLEECNTAREHGFTPTMRESQARIVTLKDENPALKEVYSKVLQMVNYALWSNIAALSQTKKRGRKIGRLRFKSTFRYRTLNYNQSGFKIDREQSTITFSKIGALPFTMHRPYTGKVKSILITHSGDRWYVIVQAEQKVSEPKREGRSVGIDLGLTSFAVDSDGAVIENPRFHEHSLKKIKKLQQSIARKKRFSQNWKKAKSKLERVYDHITNQKRDFLHKLSRQYVDTYATICVEDLNIKYLKEKGKSRGLRRSIHDASWGRFYSYLAYKAESAGTNFIQIDPRDTTQMCSNCGSIVKKSLSERVHECPYCGFVADRDYNAAVNIHRVGMEQPFEPVEIIPLRHIAVTQVLSMKQEAPPERSGVVHVGQCFHD

SEQ ID NO: 6217 - protein, 390 aa, unknown
  TnpB Polypeptide
MARLSKNLYNETQYAIRQHYELNGTFLPYNSYYHILKTSANYDKLPSQVAQRTMKSGEHAWKSFFVLLRMKKKGDFVCQVEKPQFLPKEGYYPCIFPPNQFQVKDGKVRLSLGMWFKKNQHLQHLFFTLPPHIVGKKIKEIRILPRYNARFFDIEYVYETEPIATLFNASKYLSIDLGLNNFATVTTSDRASFILEGKGIKSYNRWWNKQKAKLQSQYDIHGIKFGKKMAILLRNRSNVIRNFTAQSVNRVIKECIDHQIGNIVIGELKGIKQHGHLGKKNNQHFQAIPYGLFKQKLKSKCELYGIAYHEVSEAYTSQTCSHCGRIRKANRKHRGLYACDQCHTKINADVNGSINIGKKVAPNYLEGSSGIVNIPKRITLVIFRKCCSTA

SEQ ID NO: 6218 - protein, 415 aa, unknown
  TnpB Polypeptide
MAKPKEKATEMILVEQVHIKPSNPFFSECDHICFLSKNLYNATLYAVNQYYEETGHHLSYKEVNRRFTYENQPDYRALPAKVSKHTQMLVEQAFSSFFALLKKKKKGEHDGKIHRPHYLKKVKGRQVTHYEKSAISFKEEGFIKLSGTNLRVPTRHTREEIQFARIVPFGTHYVIEIGYKVKLPELSSSQHVLAIDMGVNNLAACTTSEGEKFLISGRPLKSINQYWNKLAAKDRAHLEKNHGRKSSKLMRNRHRKRNARVKDYIHKATRAIVRHAVFAGIGTIVLGYNEGWKQGTHLGRKNNQNFVQIPFGIFRDTLAYKCALAGIRFATINESYTSKNSFVDGERAVKREVYAGRRVKRGLFKTKNGRKVNADINASFNIMRRFMEKNETWNVCLQANLVEACSTPCVHRMSF

SEQ ID NO: 6219 - protein, 405 aa, unknown
  TnpB Polypeptide
MYKTQKNHIRCDKQTYKLLRVLCHLSKNLYNYSLYIVRRHFFENGTRLRYERVYHFTKENENYKLLPSQVAQQTIQAVDEAFKSFLGLLAAKKGGKITKKVSIPRYLPKDGMFLLIFPKDQFKIIGNKVRLSLGRGFYKKYGVRYLYFDLPATVSGKKVKEIRIIPRFKGKWFEIEYVYEEQEQLCKLDRNKYLSIDLGVNNFASIVDTIGTAFLIEGRHIKSVNQWYNKRRAILQSVYGKQGIKGGRKLAQISLRRQHIIDNFLNQAVNYIVKHCLANEIGVIVVGEMKDIKQGVELGKVNNQNFVSIPYEKFKRKLEAKCRCYSIEYVEIDEGYTSQRCSRCGVIRKSNRKHRGLYVCKGCGNVLNADINGALNILRKVAGESAIERIVSSGCVNHPVRIRVA

SEQ ID NO: 6220 - protein, 558 aa, unknown
  TnpB Polypeptide
MKFRDVKECKRIYGLSRMALVNYEKEGAIKPLTEKKSNSNFVTVGCLLAFDKDEDKGRVLTLMRKFSSMVRFAYKRLMEGAERKELKKLLSRKYEINARYSDGAILLAQQALESCVERGQNPKKLVFGSRELFEKLKKKHLKGKSRDELRQKWEERRYGVLYSRGEKSKEGNLNLRLVNLNNQWYLRINLGNGEYVWAKVVRSATRKTDKWISFISDIEHAEKTGEWFPYAVRLKLRNGKIYAQFSKEEKLPEVSITKDNGVMGIDINAYPFHLALVHTAKDGNLEKYERISLDKLLEGSSEKREYLSWQVAHQIVEIAKRERKAIVVENLEKLPKGKRGDGLPKLRQKLQKWIYKALLQKIEIIAKRNGIQVIKVNPTYTSIIGKLKYAPLYNIDKDTAGAYVIARRGLGFKERLPKNYKQLLKDAEFLSYAMAKIEDKIAKLKQEIREEKNEYKRDRLKSILWKTRKELDLLLRYLRESGESASATQQTVNRKMERVRGSTQVEQQSWRVLSVALAFSCLESLRDFSPLKKVILLRDWVGVAKRLVPPYLVRGRLY

SEQ ID NO: 6221 - protein, 247 aa, Hydrococcus sp.
MKRRRFLSNAIAGTASTVSLNACRQETPAVSSSSQSPSVRWRMATSWSTSLDIMFGGAETICQRVSDMTDRIRYARKHLRVSRQRKEYAKRCAYCVIQSNDLVAYEDLNVKGMVRNRKLAKSIADVAWSTFRQWLEYFGYKYGKVTVAVPPHNTSQNCSNCGEKVQKSLSTRTHICPSCLYVEDRDVNAAINILRLGLSTTGHVGSQAWGEETSTSVGENLSEQVSSVNQESHGKGVSSPCGVSTME

SEQ ID NO: 6222 - protein, 455 aa, unknown
  TnpB Polypeptide
MIKTFGFYIFPSLRSEMRALFINSMADNIPFINYQTVIPMMRTYKFRIYPSKSIQRIIEEHLNICRYLYNYLLEQKTKNPKLNKMDTQKLITEHKKKNPELKKVHSKVLQMVNNKLWDNLKALGKLKKKGYKVGKLRFKSSKNRYKTLEYNQSGFKVDYETKRLKLSKIGEIPIKLHQKIKGKIKSVIIKKEPTGKWFAFFQVEEEPKPLPKTNKVVGIDLGIDGYAIDSDGNKFENPKFIDKTLDKIKKVQKNLSRKVKGSNNYKKTKLKLIKVYDKLNNQKNDFLHKLSRYYINNYDKIVVENLNIKSMVENGKCKTLNRHILDGSWKRFINLLLYKAEGAGREVILVNPSYTSKKCSNCGCVVDGLKLSDRVFFCPNCGWKSDRDYNASLNILKSGLGESVVPAEGRSLLRVIPYIMVISGQVSPMSQEALPEGRGLRKPKGFRLTPSVRAE

SEQ ID NO: 6223 - protein, 411 aa, unknown
  TnpB Polypeptide
MVLRDQMLFKGVVFRLDSGLPADARFLLEDFRLAVNRATRAGLQARVTSRNALAKLVYKSLRVEHPKMYAKHLVCAFEVAAGILRNHRRRVNKGNAKSIPYVKRLMMKAENQAYKLDRVAGFVDLPIRAGCHVKLGLVMSQYHRRYLDDNTLTLGSLTLLPDRVIIAFRKEAPRAYTPESALSLDTNERSLDGVFVRGDDGVAVKADYSEVAIIQQRHHDRRRKLQKKKSHDRRMARLLCRGEGVREHHRVDYRMHQVANAVLSFAEGQRSAVLLEDLKGIRQKRGKYLNRRLSMWPRRKLHQIIEYKAAWRGIPVIKVDPRYSSRKCPICGRIQDSRMGTEFKCECGWHLDRHVNASLNLLQTAVSEGLEVAGGLRFDPGAFQHDVMMILYEPAMAARSEPNGMSHAGAM

SEQ ID NO: 6224 - protein, 382 aa, unknown
  TnpB Polypeptide
MRKAFVYRLYTNKAQDKGLIGLLDIARTFYNAALQERRDAWKVGVSINYYDQANQLKVIRQENAWCAELNCSATQDVLRRLDKTFKAFFRRCQSGEKPGYPRFKGRDRFNSVTFPSYGDGIRLTDKLYIQNVGRVRIKLHRPIEGQIKTVSLKQACGKWYAVFSCDAADAPPRKDICNSVGIDVGLTCFAALSHGEPVRAPRYLKAGLSELRRCQRKVSRRKKGGANRRKAVRSLQKAHAHIQHQRADFHHKASRQLAATYGFIAVEDLNIKGMVRNHCVARSISDAGWGYFLDKLAYKVEETGGRLVRVNPHGTSQVCSQCGASPDVSKTLADRVHSCPHCGLVVDRDVNAARNILRLGLSLWDVTWGKTPSVSQEAVCFS

SEQ ID NO: 6225 - protein, 272 aa, unknown
  TnpB Polypeptide
LHHLLGLSQNSKDHQEWILAHQLLNLAIEKGKAVAIENLKKLKKGMRGDGKAKLRKRLHHWNAKKFLQKLKRVARLKGVEIIEVSPAYTSVIGMLKYAPQLSIDKDVAGAYVIGRRALGFKEDMPENYEKLLKDKAYLEFALNRYEEREKELRELIKKESNEYKRNALNSELKVVENAKKLLVNLIQSLQGEPSSCKGANGRNPEQGETKKVSQSAWQVLKVALLFPILGRVLPRDLSPLKPVLVEGVWDRVRRSNGLVPLSAGGTVPIRDF

SEQ ID NO: 6226 - protein, 383 aa, unknown
  TnpB Polypeptide
MATLTKTLKLPFLRLNQTKAELFARLERLNTDVANSILAMPKTERRALTTKAFAHVEIGSAWINQTIRNANARTKVRRFKRLPLETNNQNWSLHRVGDTFSVSFGLLRGIKKRVPLDVHAASHRDWLVALLDGRAKAGSLKLVRSKKGIWYASLSVSMEVPDAKNTGRWIGIDRGQNIPVVAATPDGPIVFWKAARIQHVRRMYAERRRKLQKLGKHRAVRKLESKERRIVTHINHCISKELVAMAKRQDAGLILEDLSGIRQSSRQRKDAKSDAGQNRDYWPFYQLETFIRYKAMEAGVKVEAVRPHYTSKTCHVCGALNERKKHAYVCTRCGHQAHADANAAMNIRDWHGLCCPLELEVPAGGLHEPALNPVRETTAQAAA

SEQ ID NO: 6227 - protein, 423 aa, Thermococcus sp.
MKRTVTLKLQPSKEQAKILHQLADLGAKAWNRVNYLRKWQYFQERIVDFNSTEKTVYEEFKREIGSATVQQICRKNAEAWRSFFSLLRKKRNGELPDWLKPKLPNYLKEDGKRKPLIVLRNDQYRIEGNKLILKGIGEFKRLEIQFKGRIHLKGRQGRLEITYDPVRWKWYAHVNLTVGEKLEGEEWVSIPRQPKGSLLAGIDLGVNNLMAVYVENGESFLVNGRPLKSIDFYWRKRIADYQSKLNKSGVKTSRKLKRMHEKAKLQAKHYINTAVRQTVRKLYELGVSKIVIGYPKGIARNSDRGKKQNFLLSRVWRFNYVIKRLTEVAEEYGVQVELVDEAFTSKTCPVCGRPHEGARFVRGLYLCPATGLVFNADLVGAFNILRKAIKTITPSLPALSGGRGNRGEGPPRGAESPLFSGFE

SEQ ID NO: 6228 - protein, 367 aa, Anaerolineae sp.
LLEVAICASHIEHESLTQSPPLIMFPAIFFLPLRRFVLLIHNSSLSPECAFYFLSTDFVIAVHSHILQVATTDLDKAFQAFFRRAKAGESLGYPRFKGRKRFDSFGLKEYGNGFKIADKCLKLSGVGNLKVRWHREVEGQIKTVRIKRNAGKWFAAFACEVEPKSLPYSGEAIGVDVGLSKLLTLSNGESVGNPRNYKNAQARLRVLQRSVARKKKGGANRRKAVGLLQAHHVHVANQRSDFIKKIIFNLVSRFDVIAIEDLQVSNMAQHPTLAKGILDAGWGYFRSHLSFKAEEAGKTVVAVDPSYTSKTCCRCGQRIENLDLSVRWINCDCGASLDRDHNAAINILRRAGHARLGPTWGIGPVRA

SEQ ID NO: 6229 - protein, 470 aa, unknown
  TnpB Polypeptide
MHRTISLPYVVEDAGFAGVLSELRRRQSRVIRSAYNRLVEGIALKDLYQNLRAHAVGQGLHTWLLLSAMTKAKALYQMRPEGGVVFGGKKGLIDRTRDKMDPAEWKKRRLAPLVIEGHARSYGSQGGNHLATLDMTNTRLVLHAPGRDFILKLKLSCRSREYRRRLECLQARSEALRDVPFSVSVTETTVAIGWKDPGTVSKTGRSDRVLAIDLNPNRIGWAVVEKIGDHRCRSVAWGLFEYPELNRRLGLASDDPKVAAQDNKRQHELSILAKRLVLIARHCQASWIVTEHLSLPFRSKKGKVNRLVNRCWYRTGFVQCLVRRLEEAGLRHGQVDPAYSSMIGNSLWADLLKVPDPACAALEVGRRFLNPLARDAQASVPKPNAVHLWKDGRRVPERRTLGRWSQVWKELNKSAGDTPRRVRRRSRADFPFGPPRRPSIRETRSKVGFLDPRPGTSEPFGTNFSLLLAG

SEQ ID NO: 6230 - protein, 470 aa, unknown; identical to SEQ ID NO: 6229
  TnpB Polypeptide

SEQ ID NO: 6231 - protein, 264 aa, Mycobacterium sp.
MSPEGAGRFSGRGTADDRGRFYAAPDTAALDKQRRFHQRRMAKSKLIAARQGRRFWESRRYQAHKSAATGLAAKQARIRDDFAHQLSTQLVRGHDFIGIEKLPVERMTRRPKPGRDHNNPTRFLPNGAARKRGLNRSMRNAALARLAKHIQYKAELVGVTVVEVPAAYTSQRCHQCGHTARENRESQAVFRCQSHSCGWTGNADTNAAINIREEALTRWVAQQSEQLAGTSGEKPGGEAVSQAGSKNKTDPHTRVRPLGRRHLR

SEQ ID NO: 6232 - protein, 374 aa, unknown
  TnpB Polypeptide
MRQLDETLETCRLVYNSFVHWRTFEYETAKKSVGRYEQEAALTHWKHKVSDGKKEHPELSEVHAHLLQNVAHRVDLAFRAFFRRAKAGETPGYPRLKGKEQYDSFCFKQWENGVQFKNGNLWLSKIGKIKCNVHRPLLGEAKTCCLRRVNGKWFACITCEVEPVLLPVSKERIGIDVGLKTFAALSDGTFIENPRFFRTQEKALAKASRKQAKTKKRSRERRKANKVLARIHERIRNRRHNFAHQTARRLVNQYGMIAVEKLAVKNISKAPAPKPDAENEGQYLPNGASAKAGLNKSILDAAWSQFRSILTNKAESAGREVVAVNPAYTSQKCSGCGYQASKSLKERWHLCPMCGTSLDRDTNAAINILAIAMG

SEQ ID NO: 6233 - protein, 529 aa, Bacterium sp.
MSQSYILSFELTLPQRIYPYLDRLFNVFKWEVRRTVGEIWNEDFFKRFKGRGSASAILKEILKKPPNIPSRVHRNILELSGEIVRSHIERKRIYDYLMEKPCRVLFDEDRIADELNASPLFVLNVQRQVRKILRKEKDKKSYFQVVKPSFNGEVVIFSADDSVENGQFKKLRFSRRYIEFEIKVPDGNSWKWIKVRKLIPDRLKKFLTEAKRTCAPLIKKVYLKSGLSIYRLVIPLEFETRFSEGSLKVFSLDLSPSEKRLGVGVIVSPEGHSRPIFFNAEKMVKKLERILKEISNLEKKIDNIADEIHITGNREHKVRLEKRLKHLFAEQKLKWRKFKELRKQILEVFTKLILEYARAYDYSFIAVERLKFSRLSDWKNRRMRRLFSQWFYARFIERLRQKALRYGLRVLLINPYRTSRVCHKCGGEGKLEKLEFKCQCGTYDRDYNASVNIGKRALEKLVSGAKSEPYRGEDIPARFPFLQGTIHLKGKALLSILPLTLLLSYLRLVETSYLKLSRLSRYLQTDKYG

SEQ ID NO: 6234 - protein, 280 aa, Azotobacter sp.
VAAEYVTRRKQFKKVRLNWRKSGGARRSLGWIPVNTGAASWKHGQVYHNGHSFKVWDRHGLGRYRFRSASFSEDARGRWYFNVAVEVEAELSPGQGAIGIDLGLKDVATCSNGERLENGRFYRDMESRLARAQRSRNKRRVKAIHAKIKNRRKDALHKFSRRLVDRYGEIHVGDVSPTKLVKTRMAKSVLDAGWGQLKTMLAYKCAHAGIVFKVVDERYTTQACSNCGALPDSRPKGIAGLGMRAWTCSECGVTHDRDVNAARNILAVGHGRPGVGIPAL

SEQ ID NO: 6235 - protein, 405 aa, Vulcanisaeta sp.
MPTVGFKFRAYGDVRAVEAQLEAARELYNTLRWADIFFYNVYGVKLSRNDLRELALQLRRQDEDFRRLYSQVAQNIADRFYEAKERFLKGGLSRRYPREKRPGRYYSLTYPQNGWRILSIRPIRSNKKKLMLLRLSGLGVFKVIIHRDFPLEKVARVTIKLYKSGKLYVIFTVEDYEYPKLPRTGRVVGIDVGIEKLITASDGWFIPNPRPLERMLNRIRRLHRALSRKKYGSRNWMKARVRLAKAYERLVNFRRDLYFKLGKYLALNYDVVVMEDIKVSQLIGKSNRELRRRLMDVGFHELRTIIAWQVAKYGKEFRLVDPRDTSRKCSRCGYVNEKLTLRDRVFRCLRCGLVIDRDLNASINILKRGGWEPARPPVEPPHPLPPLGAILQGQGEAMKQEAPPP

SEQ ID NO: 6236 - protein, 437 aa, unknown
  TnpB Polypeptide
MNWNLTFPTNQPIRKTYKQQNNTAIMVSVTFLRNYRYRLYPFRNQQRILQHQLDIGCDMYNSLLDLKQEIWRETKTSLSKQDLNNIITSLKIDNHRWNDIHSQVLQNVSDRITKAYDSFFRRVKEKKAGKKIKAGYPRFKKQVRYKSITFPQYGNGCRLISNKKLFVSGFGEIPIVLSRMPKGKIKTATIKIKTNKWYVIFTCMITQELPQHPHADREVGIDMGLTKFAHLSDDTVIGNERFYKQKEKRLKRLQRQLSRKKKGSHNRQKAMLRLAVEHEKIWNQRNDFQHKASRYIADNYGVIGVEGLNINGMLKNHRLAKHIADAGWGGFLKKTCYKAVSAGGMFIIGDRFAPSTQECSCCHALLKIPLSERAYSCPVCKTKLDRDLNASINRKPSSILSRDGQPRIYAWGDPTSTLQQKDCDASRVDEPKNRQRT

SEQ ID NO: 6237 - protein, 366 aa, Campylobacter sp.
MLLTYKYKLYKTKKTKHIDELINIACSIYNHCIALHKRYYKLYHKSLNKARLQKHLTKLKKLDKYKHWNKLGSQAIQQITERIDNAYKKFFKRLGGLPSFKKRIKYKSFTLKGNVGYKIKDNIISLNGYDYKFSKNQVIKANDKIKTITIKRDNLGSFYICVSLETNAKNRITTGKSVGIDFGLKTFLTLSDNTTINSPLIYLKSLKELKAKQRKLSSKKKGSNNRAKAKLELAKFHIKLANKRKDYFFKIANDLSKKYDNVFIEDLNLKAMAKIWGRKMNDLAFNEFINILATKTNVVKIDKFYPSSKTCSCCGYIKNDLNLKDRIFDCPNCNSKIDRDYNASLNIYRVGASTLSGEFVRPTKVG

SEQ ID NO: 6238 - protein, 389 aa, unknown
  TnpB Polypeptide
MFRTYKYLLRPNTEQVKSLDFLLWQSRLIYNAALEQRITTYKETGKGIGYGAQWAHFRDVRHDSPDTLGKLNASSLQHLLRRLDKAFAAFFRCLKAGKKPGYPRFKGRNRFHSIEYTYGDGCKLRQDEHGRKSFYVQSVGEMRMCYHRATPTDAKIKHVVVKRVGERWYVCLILELPDPIARESHIGQQVGVDVGLKSLAALSTGELIENPRWLRENLAKLRRFSRHASRQVKGSNRQRKTYRQIARLHERVANQRADYLHKVSSRLVAENDLIAIENLSLSFMNRNGHLSLSSHDAGFGLFRQMLEYKAEEAGIQVTAVNPSNTTQACSECGSIVPKGLSVRVHECPDCGLVLDRDVNAARNILTLALQTPLGRSGQAVTCPVGESVA

SEQ ID NO: 6239 - protein, 396 aa, Streptomyces sp.
MSRYRLQPTPNQAQRLAMHCAHARFVWNLAVEQHSWWTPRRGPAPGYVAQARQLTDARAVNAWLAAGSQTVQQQALRDFAQAMTGYFAGTHCRPTWRKAGRHEGFRIVAIKPEDVRRVNRCAGAVKVPKVGWVRFRWTRTVPAAKSYRITMDRAGRWHLAFAAVPDPIPSPGNGETVGVDRGVTVSAALSTGELQSAPAMRRGEARRLVLLQRRLARCKRGSMRRRKVKAAIGRLHAREGDRRKDWVEKTTTELARGFDVIGIEALRIQGMTTSAKGTSDAPERNVRQKAGLNRGIRRSGWGLIATRLEDKAPGRVVQVNSAYTSQRCSACGHVDAESRKSQALFACTACRFSCNADVNAARNIKTAAGRAVAAREGPRVAGPVHREPQHDLLPSA

SEQ ID NO: 6240 - protein, 377 aa, Methanobrevibacter sp.
MKIVNKGIKVRIYPNKKQEELFHKNFGASRFVHNNILERLNKLHAIYPNQYKLNITLINTFLKQLKQENPWLEEIESTSLQQSSRDLYKSYQNFFKNPKTNFPKFHSRKNTRLSFRQTIAKYPIKDKKLILRKYGLIRYRTSKEYYQLLNSNIKINNITITYDNGKYYAILNIEAPIEEWNNTNQSKGYDLNSNRNYFLVSNTGEKYKFDINHENQMIKKLNISLSTKQKGSRAFKNIQKRLQNWYTKRTNKLNDFIQKLSTTLVKENDTIVLEDNWANIKILIGGEQNMVFPLMKFKDMLNYKFNWYKPDCEGLVTVNPKGTSKTCCHCQHVVDELSPSVRQWTCPNCGIVLDRDINASINILNRWNNGDRLSTRC

SEQ ID NO: 6241 - protein, 370 aa, Lachnospiraceae sp.
MKRQRAYRFRLYPNREQETVFHKTFGCCRFIYNQMLADKKEMYEKTGKMERLTPARYKQQFPWLQEVDSLALANVQLHLEAAYRKYFTEEKIAYPKFKSKHRSRKSYTTNVVNGNIRLKKGRIRLPKVGKVKIRCHREIPEGHTLKSVTVCMENSGKYYASLLYEYEASENQAAEKDGDVKEILGIDFAMQGLAVFSDGSKAEYPMYYRKAEKELAKEQRKLSHCEKGSRNYAKQKRRLAKCYEKVRNQRKDYLHKLSRKIADRYDVVAVEDINMKAMSQCLKFGKSVMDDGYGMFRNMLTYKLEESGKELVKVDRFFPSSKMCSRCGTIKKELELNERIYRCECGNSMDRDVNAAVNIREEGRRILMTV

SEQ ID NO: 6242 - protein, 384 aa, unknown
  TnpB Polypeptide
MRNYKFRLYPNLEQEYKLQNNLNVCKWVYNKFVEQAQKSFLSRNDMNYILTELKQSEPWLYNYHSKMLQMISTQLEGAEKSLIEKSKKGHKTGKLRFARYNEFRTFTYNQSGFKLDNNKLFLSKIGNIRIKKHRDTPDDIKQVIVTKTRSGKWYACLTCELVRVNPPKIDFKKTVGIDVGIKSFAYDSDEHNTTNPLNLKKMLKPLVRVQRKVSKCVKNSNNRTKHIKRLQRIHERITNKRNDFQHKLSSIYANHYDVIFVEDLQLTNMVKNHKLAQCIMDSSWNSFLQKLEYKCKLLIKVPARNTTINCSRCGSKVPKNLAVRIHRCNKCNLVMDRDYNASINILQKGLKIFNQNKLPQELRKVTPVEISKSVKQEVQFFRYG

SEQ ID NO: 6243 - protein, 408 aa, Methanohalophilus sp.
MLLTYKIRHKKDFSEEIRKARKIAELCIRDQISSRNASSPVQNENSIPSFPLTSQEPLFFTPIPSLTHPQSFSKTGNKPIMTYDDVKHIGLKSIISNQILKKYSKNKGMKNVKNVKLVIPEQGIKLDKKQKVLWIPSIKFKLEYHFDNSFKRITQIEVDNEFAHIAIVYPEKETEYPDSYIGVDRNTRGHIAVVAHPETGKVWKFGKNRMHTHKKYENMKRQVEKKGKFKKLKALKVREKRKIKDMNHKISHKIVDIAIRNNSGIKLENLSGNKKKPRITKEYSLNSWSFHQLQQFIEYKARLHGVKIAYIDPHSTSKNCSLCGLTGKRHSKNFECPHCGHVDHADVNASFNIALKKNSIGQFTAERDAVKGSTDAPRMALARNLKRTRKANHKTPIQYAWEVCQFLP

SEQ ID NO: 6244 - protein, 276 aa, unknown
  TnpB Polypeptide
MKQRYKYRIYPTSPQVHSLTKLFGCCRVVWNDSLASCNSSEKLPSNGDLQKTFITQAKKSEQREWLAEVSNIPLQQSIADLGVAWKNYFDSLKSKRKGKKVSRPKFKKRNGRQSARFRIGGFSIKHGKVYLARIGRIKVVWSRELPSPPSSVTVIKDAANRYFASFVVEVNPAVLPDNGQSVGIDLGITDFATLSTGEKVKAPKPLKKHLRKLHKAQRKLARKKKGSRRRELARRKVARIHARISDIRNDFLHKLSNRIIRESQTIVLEARLELVV

SEQ ID NO: 6245 - protein, 381 aa, Zobellella sp.
MMKRAYKYRFYPSPEQEQLLARTFGCVRFVYNSVLRHRSEAFQQRKEKINYLAANAFLTRLKKTPEAVFLNEVSSVPLQQCLRHQQTAFKNFFEGRANYPTFKRKRHRQSAEFTRSAFKYQDRQLFLAKCKEPLVVRWSRELPGEPSTVTVSKDSAGRYFVSCLCEFHPETLPITPKMVGIDLGLKDLFVTSDGHRTGNPRHTSKYAARLAKAQRHMSRKKLGSRNRAKARQKVARIHAKIADCRMDGLHKLSRRLINENQVVCVESLKVKNMVRNPTLAKSISDAGWGELVRQLGYKAEWAGRQLVAIAPWYPSSKRCSCCGQVVDSLPLSVRAWTCPECATEHDRDINAAVNIKAAGLAVLALGENVSGMGPVSVSGSR

SEQ ID NO: 6246 - protein, 402 aa, Escherichia sp.
VKRLQAFKFQLRPGGQQEREMRRFAGACRFVFNRALARQNENHEAGNKYIPYGKMASWLVEWKNATETQWLKDSPSQPLQQSLKDLERAYKNFFRKRAAFPRFKKRGQNDAFRYPQGVKLDQENSRIFLPKLGWMRYRNSRQVTGVVKNVTVSQSCGKWYISIQTESEVSTPAHPSASMVGLDAGVAKLATLSDGTVFEPVNSLQKNQKTLARLQRQLSRKVKFSNNWQKQKRKIQRLHSRIANIRRDYLHKVTTTVSKNHAMIVIEDLKVSNMSKSAAGTVSQPGRNVRAKSGLNRSILDQGWYEMRRQLEYKQLWSGGQVLAVPPAYTSQRCACCGHTAKENRLSQSQFRCQVCGYTANADVNGARNILAAGHAVLACGEMVQSGRSLKQEPTEMIQATA

SEQ ID NO: 6247 - protein, 509 aa, Eubacterium sp.
MNSLRRIKELKMKAGYAITTYKIQLNYKHLDWFKKTQSLFDAVLAFYYELLEKQPEALELSNQNLLRHLELQTIKQRNGTPPETPLPFKKIPLYFRRAAINAAISMYRSYISKLRDWETGQEKQMENEELRVENSGPESQSDSESNQIGQADLHHNFPLSTFNLPPESAKKGRPSRPKNLHMSMLYYKGMYKDFADGSVLLKLYTGKTWAWVKHRYTGRPFPENAERMSPTIVIKKKKVMLHIPVKEVVEDSRTAKERVKQNESFVAVALTGSDTLAVCTTIQADGRATAPYFIKGGKALAHRRKQLIGYTKRNTAGNKVPRLITQPVGNDALGVCPRGLSSYGQAEAGIVPQDYQLGRPNAKYYDKITRVTDHYAHEVSRKIVDYAAHQGAKIIVMPAYGNTFAKGTLPYLKTNIMDFIGRRIIRYTSYKAWRAGIVVTFNSVGNAKKECSHCGSVIYKYNTEYQPPSQNFYGGKNFRCKKGHKGSTALNTARNIGKSFYGAFYEKAG

SEQ ID NO: 6248 - protein, 472 aa, Eubacterium sp.
MSTGYAITTYKIQLNYKHLDWFKKTQSLFDAVLAFYYELLERQPEALSLTNQNLLRHLELQTIKQRDGTQPETPLPFERIPLYFRRAGINAAISMYRSYVGKLRAWEEKQMENGKLKMENSGTESQSDSESNQIGQADLHHNLPLSTFNLPPESAKKGRPSRPKNLHMSMLYYKGMYKDFADKSILLKLYTGKAWAWVKHHYTGRPFPENAELMSPTIVIKKKKVMLHIPVKEIVKDSRTAKERVQQNEKFVAVALTGSDSLAVCTTIEADGRATAPYFIKGGKALAHRRKQLLGYTKRGIIGNDMTHTVGNAALSVPQEHRPNKKYYDKITRVTNHYAHEVSRKIVDYALKQGAKLIVLPELKESFNQAKKPYLGKSPYDFIGRRIARYVQYKAWQKGLVAMTSKPYYASTRCYHCDAPIAKHNTEYQNPSPNFYGGKNFVCKEGHKGSTALNSARNLGKGFYERFYAGVA

SEQ ID NO: 6249 - protein, 491 aa, Eubacterium sp.
MSAGYAITTYKIQLNCKHFDWFKKTQSLFDAVLAFYYELLEKQPEALELSNQNLLRHLELQTIKQRDGTPPETPLPFERIPLYFRRAAINAAISMYRSYTSKLRDWEAGQEKEVDSEKLIVDRLGTESQSDSDSNQIGDADLHHNLPLSTFNLPPESAKKGRPSRPKNLHMSMLYYKGMYKDFADGQILLKLYTGKAWSWVKHRYTGRPFPENAERMSPTIVIKKKKVMLHIPVKEVVKDSRTAKERVKQNESFVAVALTGSDSLAVCTTIQADGRATAPYFIKGGKALAHRRKQLIGYTKRSSIGNNMTHTVGNDALGVCPRGLSSYGQAEAGSIPQEHRPNKKYYDKITRLTDHYAHEVSRKIVDYALKQGAKLIVLPELKESFNQAKKPYLGKSPYDFIGRRIARYVQYKAWQKGLVAMTSKPYYASTRCYHCDAPIAKHNTEYQNPSPNFYGGKNFVCKEGHKGSTALNSARNLGKGFYERFYAGAA

SEQ ID NO: 6250 - protein, 400 aa, unknown
  TnpB Polypeptide
MQHAGNARWAYNWGLQQHREAYDQWVSEGKPKKWKDWPNAISLHRVLVRLKKTDPLEGGVPWMYAASKAAPQEALRDLDKAFKNFLSGRSRYPRFKSRSRGIGGFRLTGQIKSDHRKIQLPRIGRVKLQPGEYGYLPWGKHPQVSVTEHAGRWFVSVVGPETPEASPKGPSVGLDLGVAQLATLSDGTVIENPKALSKYQHKVKRLQRELAKKKKGSENRTKARKNLARAHVRVSNTRKDALHKATTHLAKSHGRIVVEDLKVRNMTRSGGSRKKGLNRVVLDAAFGTFLRLLEYKGKRYGCEVMAVAPHYTSQKCSVCGHVAKGNRKSQSEFRCLACGYHVNADLNAAVNILEAASSTDSLNACGDDVRPTPSCVGDAVSVKQESGSSLRRRLDRRPSS

SEQ ID NO: 6251 - protein, 418 aa, Moorea sp.
VRAAYQYRLRPTKSQIAKIEKWLDMLRHQYNYLLADRFNWYEQNCCPVNSCPLVCHLPELRNKPEYFSQKKSLPDLKKDRPWYGEIHSQVLQDCVKRVDLSFKRFIKGDCNGNKSGKPRFKGENRYKSFTFPSLSKEPVSGNILTLPKFGKIKMIYHRPIPEGFKIKTATITKKADGYYVTLSIQDDSVPDIIPIVMVTNPVGIDMGLKSFLIKSDGTDIPIPQYYRKAQKRLKKIQKAVSRSKKGSNNRKKAVTKLGKAHKKVADTRKDFHFKTAKGLLDDHDLVAHEKLNIKGLAKTKMAKSVLDAGWGQFLSILSTKAVRVAWPTALNAGLVTVAVNPRNTSQNCSNCGKKVPKKLKDRIHSCPHCGYVADRDVNAAINVLNLAVGHPVSSKAFRVSEPMGGVGKKPTLNLKRSV

SEQ ID NO: 6252 - protein, 341 aa, Thermoprotei sp.
MYSIPISDSRVRELVSWYLKTLQRAIDVIWENIEWKYVFPRVERRGGKLKVTTSYKVKALELPKSKSFKKQLRDELLKDCPYAKHWVDAVIRTAYSIMESWRKRYLKGRARKVKPKVKKRFTRCKITLMSVDYVKKTIRITIRPGEHLEVSWTGRWFSRRVEGWRVGEVVLKDDRILIPFKSTRVVEVRDVIAWDSNELSLDGFSPQLGFIKVDLRLLQSMKIVYEKKAVAQSENKREVYEKYVKRERDRERDFINKLAEGLVALFPNSVHILEDLEKEDLISKKRAPKSRRKRNARTPWKLIQRKLSEKALVVKVSPKNFSNLPAMRVSREDPSGQGVQV

SEQ ID NO: 6253 - protein, 412 aa, unknown
  TnpB Polypeptide
MLLCKKIKIEVSDQGAEALEFMQAKCRGLCNWWIMKLRNGERWNLERAKKSLRESKQYDPELRYVYGKLLAEVYFRLDKAMQAFFQRLAEGEKKPGFPRVKPRHQFFTLCYPAMYLEVQGKTITLPTGGGHSWGPKRYSNVVAHLTEEPPEHFHEVAVSRDARGNYYCSFVYEDAVQENHDDEHKPGKKRKKRKPYPIREDGIVAFDLGIKTLATGYNDQGGFYHIGGFKGYRWYNKQLDKIRSKRDKCKKKSRRYIHLSKVYKRVAEKKRRKQQDCLHKASHLIAHRLAERAVVIGDLSQRQMVIKKQEHETRQERNKRRIRNRMVYNDWGLYSFVQMLEYKCLRFGKELHIIDERDTTKTCHVCKHKQDMPLWKRTYRCENCGLVMDRDENSAVNIYQRFVAWPGPHTLL

SEQ ID NO: 6254 - protein, 403 aa, unknown
  TnpB Polypeptide
MKTVPVKLKCSEEDKAYFLSILQEKQACFNFLSKELYALNWKNLLSIKLIHDRFYYALKERFPNLLTQILIKVEQEVLSTYKTIKSNRHQIDKAPEQRNLCLQLDKRLYSHFTKTSIALPRNKGEKRKQIEFVLYDRARDFLEHNTPHDPKLYVKGNGLYIAIPFDVACPAPENEDLLGIDLGIKCVASCSDGRVYKCNDFKKEKHRLKYLRRCLQSKGTKSAKRHLKKVGRKIANYSKDYIHKLVNELLKTKSDIIVIEDLKKIKERTKFHKGTKIKRTTHNRVFGDIPIALLASMLAYKASHLGKMVATVDPAYTSQNDCRGLDRGKRQGRRYYGVDGVQLDADINASVNIANRFLWNNKILAEKHPVSYPEMRTYAGRLPINQPIVDGVNNDSSLQASTL

SEQ ID NO: 6255 - protein, 288 aa, Moorea sp.
VKTPTKIIRTDKWQLKPTPDQKLLFGETVKVYRRACQYLVGVIYTHWSDLESLTADQLTPAVEKLMHETAKRPNIKYPQFNKAFYKFPSYYRRAAISFVAGQVSSFVTRYREWQSGIRKRRDSRPPRLNANTGCYPALYKGQCYKLHSFDQVEIKVFNGLDWVWTTVQITGLRQRHQVASNKMMSPSLIFNEKYCHLSVPFNCKPEKRKPEANVTAVDLGINTTATISVVTHSGTVIHREFIHPGRDIDRRDKRLKSVSMRAAKTMGKGGKLHKGFCSLTSAKMPKNQ

SEQ ID NO: 6256 - protein, 403 aa, Moorea sp.
MIILEFKAYGKPHQYSAIDEAIRTVKFIRNSCIRLWMDNKGINKFDLSKYSKVLAHQFPFANELNSTARQAASERAWSSIIRFYDNCNKKVPGKKWFPKFQKHCRSVEYKQSGWKLSPDKKSIAFSDKKGIGKLKLKGTWDLWRFDKKQIKRVRVLKRADGYYVQFCVSVDVNEQLDPVDATVGLDVGLKEFYTDSRGNTEPSPRFYRAGEKRLKFYQRRVSRKKKGSANRLKAINKLGRQHLKISRQRKEHAKRLARCVIRSNDLVAYEDLRIKNLVKNHCLAKSINDAGWYQFRKWLEHFGQKFGRVTVAVNPAYTSQNCSECGEVVKKSLSTRTHICECGCELDRDHNAAINILKRALGTVGHTGTWIHYPNSSGDLASTVLGSGQVQQVGSLSEESPRL

SEQ ID NO: 6257 - protein, 523 aa, unknown
  TnpB Polypeptide
MVVNNWFDKNQSDTISLPSKNNFKSIKNSINFGQKQYNSKFNKSFKFKNPTNVFNFEPVERITETLKLKKLRTQLKNVLDRDPENSTKIKTIKTKIIKEQNSLNKCTISKKITIYPTEKQKKIIHKWFYECIKVYNKCVELYEKDKKYFDLGYMKRKIDIFKILYDGKKPAPYDMLTDEVRIFCSNLKSAETNLSNNHIRKFNLNKKEYKRKNYSIFIPKTTIKNDSIYKSHLGKVEGMKNVKNIKTINDCRLIYIKDKNRYELIITTNTNIKNINNREKVVALDPGEKIFMSYFGEKTFGMIGENMRTKILEQEKEIRRLQRIFNKGQNKKGKKLKNKKKIQKKIRRKYNKINDIVKELHNKTALFLCKNYEKVLIPEFETQKMVKNKIIKKENISREELKEKLKEYTKERRLDGRVKFCLNMLSHYRFRQHLINKSNEYGCKIYIVTEEYTSKTCTKCGHISEIYKNRIKDCEKCKYKINRDINGARNILLKNIKKGGREVAGIDVYHRIVIKKCIEKDNK

SEQ ID NO: 6258 - protein, 185 aa, unknown
  TnpB Polypeptide
MNQSNNIRITGRYIKLPKLGYIKIRQSMEIGHINHVTIERTPTGKYFVILNVDFDPELRPNAGGKIGIDVGIKAFYSDSNGNTVSNPKYLEKSARKLIREQRNDFLQKQSTMLVRENQTICIEDLHIKGMLRNHKLARSISSVSWASFFPCSNIKLPGTGMRSSKCLPCIQAVRHAHVVDIKIHL

SEQ ID NO: 6259 - protein, 280 aa, unknown
  TnpB Polypeptide
MNTEVLRLMRFIENLNTQYFKEINISRSQLYEIKRDPRLLYKSRLETVLKLYNYMHQYEELKHEQVKNVMDDEQFQSALKDEEENIKALNLDHYVGVDLGSKHLIAASNNDLSQTFIAKTQNINRLTNIYNRERKQAQRSEFKTLATTLCNKFTTQVEGEINYQVNQLLKEFDDDAVFVVGDQCFRNGQEVKDQTSSNYIIWSLIIKQFRRKLEDQNRLIIINESGSSIKCPNCHRSKKSNRTIDNRFHCKSCGFKHESDDVVAAVNILNKYLAKNMDKL

SEQ ID NO: 6260 - protein, 364 aa, unknown
  TnpB Polypeptide
LVNEAIRICLAENIRGRLKLRDRIYEELQETYGVVSCFPYSVAEIAWSIVKKHKRWHRKPYVRRLILRMDSRNYSLNYSILSLPFKKGERILIPLQYGEYQRSFLMDKTLKRGCVTVTESSIVIAFSKETSTTEPTRKVGFDLNEKSIVGSDDTVYDLSEVARLHTLYGIRRSKFYEKHPHDTRLKKEFASSRREKERASQELHRISTLNVEKARANNEAIVLERLKGIRYAHKKGNGEETARRRRIALWPFRQLQSYIEYKAGWAGVPVEYVSPSYTSKTCHMCGYINRKLKVTERSWLCPSCGAKLDRDLNAAINIERRGKIRCLGEVHPGARGKDEAVKGNETTTPILRAEVPKSSLVALP

SEQ ID NO: 6261 - protein, 271 aa, Microcoleus sp.
LKLPKIGDVRCKVSRQPEGTLKSVTVSVNPSGEYLAACLYDNGKDLPEKSTEGKAIGIDVGLTHYAVTSDGTKHGNPKYYRKYEKKLAKRQKQLSHKLKGSGNRNKARVKVAKVHAKIVRCREDFLHKLSRKLVGENQVIVVENLAVRNMVKNHKLAKSISDAGWGQFCTMLNYKAQWAGKTYIEVDRFYPSSKTCNNCLNRVDSLSLDIRSWQCPKCGENHDRDINAAKNILYEGLRILTVGHTVTASGGRVRPSKGTAFTRHLPVNEES

SEQ ID NO: 6262 - protein, 418 aa, unknown
  TnpB Polypeptide
MAKQREFMRTYRYRLYPARSQEQNLWRVLDACRGLYNLALAERKYAYQLEGRSVSKAELYTLAKRYRRTFPYASQMFSQTAQSVIEQVDLAFQAFFRRVKAGEKPGYPRFKGCGRYNSFLFKQFGFGTRLDGRRLKLYGIGRVRVRWHRPLEGTVKTVRIQHKAGRWYACFTCEIPEPEPLPETGRGVGLDVGIAALLTTSAGQKVGHPAFYRAGQRRLRVLQRKLARARRGSRNRHKVLRAVQRQQEHVANQRKDFLHKLSTELVRRYDRIALEDLRVTNMVRNRHLSKSILDSGWSTFQQYLTYKAESAGREVAFVAPTYTSRCCSECGAVFQDFDLSTRWVICACGLSLDRDHNAARNILRRAGWDTPVPDNVAPLLAASRGQQGQASVRSPRLLAWGVSQTRDTVLRKDAAVLQ

SEQ ID NO: 6263 - protein, 398 aa, Symploca sp.
VFNLTYEFKLKPTRQQVLLFSEWMEIHRRVYNYALRERKDWYKSRSCQINACSVHSEYIISADTPRPTYASQCKSLTAARKNNSQLKSVNAQSLQQTLRRLEKAFVSMWEHNQGFPRFKKTGKMRSFSFPQLGKSPLGKGQIKLPVIGVVKFRQSRYIPDGGVVKQARIVKRISGWYVMLTINSNVDVPEVKPHGKGRGIDVGLISMVASSDGLLVKRPKFFVDAERKLKLLQQRVSRKRLGSNNWKKAQKKVALLHEYIANCRKDWHRKLSHQLCDGAGMIFVEDLNLTGLSRGMLGKHCLDAGFGQFFKILEQVCLKRGVYFQKVDSRKTSQICPQCQHQTGKKTLAERVHKCAHCGYTTDRDVAAAQVVLIRGLAAVGHTVKMLSEGKFVGIPVN

SEQ ID NO: 6264 - protein, 518 aa, unknown
  TnpB Polypeptide
MKATTPTCILELPLVVGDKEERRLRTTFDFCRQLYNATLGTALGRLQVMRESKEWRAAREMPKGKERTQCFQKIQQQAGLTQYGVEKIALKHKNAGSLKVWIGAHECQMIAKQVWSAVERFMFGKGGRPRYKSKSRGLHSVSGKSAETGLIWVNDDSFMGIRWMKHHFAVKFKNTRYNREMLYVDGDPTKPRRVKYCRVVRRTVKKRVRWFLQIVLEGLPPVRHVYAPLCERVGVDVGPSKAAVVTPHSVALMPIAPNVETLEDVIRRIQRAMDRSRRAMNPGNYNEDGTVKKGALQWVFSKHYKELQVTLQELHRVQAATRWRDHGTFVNRIFEEGGTVCLEKLSYVAFQKMYGRSSQRHAMGEFVSRLKQRAASAARKVVELNTRELRMSQYDHITQTYVKKPLSQRWHRLGETNWIIQRDVYSALLAMCAAENGHDPSSVERRLRAKDALLQSAGLLRQFQPAKDQTWAQALARLTREPIVDFASEPVQTKTTCTLRDSSSIPEGQKPLQAGGKS

SEQ ID NO: 6265 - protein, 367 aa, unknown
  TnpB Polypeptide
LNIAYRFRIYPTEEQKILLGKTFGCCRFLYNQMLDDKIREYEKTKKMLKNTPAMYKREYPFLKEVDSLALANVQLHLEKAYKNFFLDSKIGFPRFKSKHHSRNSYTTNVVNGNILVESKKIRLPKLKWIAMKKHREPVEGLRLKSVTVSMEPSGKYFASLLYEGYSCENQAAEPDYSTAKILGIDYAMQGMAVFSEKIEMEEAGFFRKNEKRLAREQRKLSRCVRGSHNYELQKKKVARCHEKIRNQRRDHLHKLSRKIADSYDAVAVEDIDMKAMGQCLHFGKSVQDNGYGLFREMLDYKLAWQGKKMVKVDRFFPSSKKCCKCGRIKKELRLSERVYHCECGNEMDRDRNAAINIREEARRMLTA

SEQ ID NO: 6266 - protein, 382 aa, Lactobacillus sp.
MSREYQRLANLVSQWVFDHDFPLSSLKINHALYKVLRRESPLNSQMIQSVFRTVVARYKTVLEQMKHHPYRYQDDDKNWVRVTKDLTWLFKPLHFSRPQADLVRQSNYSFVNSLTEISLTTLGKRTKMPFTIKGFKQYFQSGWKMGTAKLVHSRGKWYLHIGITKEVADFDSTVSSRVVGIDRGLRFLATTFDQQGKTRFFDGEKVLLKRHKFQKIRTELQHRGTKSAKKRLKQLQQRENRWMTDINHQLSKTLVTLYGPQTLFVLEDLTDVTFNTDDLPKSVRGSHRSWAFYQLETFLTYKAQAIQSQVLKVNAAFTSQRCPKCGLVEKNNRRHDIHEYHCQQCQYRSNDDRLGAMNIAMLGQEWLDGVKHPKIRKTTATG

SEQ ID NO: 6267 - protein, 371 aa, unknown
  TnpB Polypeptide
MQLSIKIKLVPNQKQRNILLQTIEKYNEACNFVSQIAFENRTASVVKIHHLCYYEIRQKFNLSSQMAVRVVGKVADAYKVDRAKKRNLVKPHNFNKHGAVIYDQRVVSWKGLEKVSILTLQGRQIIPMILGQYQQSKLVYPRRGQIDLLYQNGNFYLIPVVDVPEPPKKISKGVLGIDLGVVNLAVDNTGEIYSGKEVDRKRVKIDKLKSALQSKGTKSAKRHLKKLSGKESRFRKDINHVISKKIVAKAKRHSLAIALEKLTGIRSRTRLRKIQRRQHSSWAFNQLQQFIAYKAKLAGILVEFVDPRNTSRTCPECGFVSRSNRHNQSSFKCLSCNFTELADKVGATNISRLAVVNLQIVAPRGVTNRLL

SEQ ID NO: 6268 - protein, 395 aa, Scytonema sp.
MIKAMYAIKVELKLNNKEQTLLRKHAGFSRFIYNYGLALMQGLERDGIVGGYGKKVKAIRKVLTNYTKKRQEFQWMSKLSSKVYQSSLQALENAYRRWGQGIADRPRFKRRKDGESFTVYDSNGKVLLSPGKQIKIPTLGTFRLKESLPCRYVTQTFTISYRAGKWFVSFAIDAEKIPPTYHPEEKVGIDLGVKCFCTLSDGTTVESPKPMKKAKTKLAKLQWRNRNKQLGDHRLGIKQSNKAKKYFEFLAKQHWRVASQRQDFLHKLTTDISRKYYQIRIEDLNVSGMLANRKLSAAISDLGFYEFRRQLTYKSQVYGTKVELVDRWYPSSKTCCMCGIKHSELKLSDRVYKCISPICVAHTITLDRDLNAALNLLNAPDEYVRLAQPESPVDK

SEQ ID NO: 6269 - protein, 406 aa, Ruminococcus sp.
MISRTEKHIIKSSDNYFSLILSFCRQSKNLYNHANYLIRQEFTKNKKLIKYSDLDKILKADEEYLDYQNMPTAQSAQQILRLLDKNWKAFMVSIKDWSKHKEKYSGRPKLPNYLKKNSNYILILTNQNCQLKNGKIHFPKVFQGFTIKPKFTGKENFVSFQQVRLIPHKNRIVAEVVYNMEILEIKADNQRYIGIDIGVNNLATVCNSICDKAFIINGKPLKSINQYYNKRISHYREITKRMNKADYSKRMDRLTEKRNSKIDDYLHKASRYIINYCLKNDIHTIVIGKNKEWKRNSKLSKRVNQNFVQIPFARLIEMIRYKAEEKGIAVILTEESYTSGTSFIDNEPPTKENYNKARRIHRGLFVSNKGIKINADLNGAYQILRKVVPIKWDGGCVLHPFVVNVA

SEQ ID NO: 6270 - protein, 397 aa, Streptomyces sp.
MATSHVKRAFKYRFYPSDAQAAELSRTFGCVRKVYNMALAARTEAWTRQERVNYNATSAMLTAWKKTEELAFLNEVSSVPLQQSLRHLQTAFTHFFGKRAKYPRFKSRKKSRKSAEYTTSGFRFLDGRLTLAKMKEPLDIRWSRTLPEGASPSTVTVSQDAAGRWFVSLLCDDPSVKPLPATDKAVGIDVGLDHLLTLSSGEKIANPRHERKDRARLALAQRRTAKKAEGSNNRAKARRKAAKIYARISDRRRDHLHQLTTRLVRENQTLVIEDLTVRNMVRNRSLARAISDAAWSEFRSLLEYKAAWYGRDVIAVDRWFPSSRLCSTCGTLQEKMPLHVRTWTCDCGTTHDRDVNAAKNLLAAGRAVEACGAGVRPQRSSPGGQSAMKQEVSRREP

SEQ ID NO: 6271 - protein, 405 aa, unknown
  TnpB Polypeptide
MLVRSLVFRLKDPLPNDAKFLMEDFRLAVNNAIRLGVHSNVTSRFALTKLAYKDFRKEHPGMYAQHLVCAFEVAGSILKNRRRRHRKGITEAVPYVRKLFMKTENQAYKLDKVNGIIDLPIRAGLHIQLGLIVSDYHRRYLDDESLSLGSLTLLPDRVIVTIRKQAPKPYAPASVLSLDTNERSFDGVLAKEDRIEAVVRAEFPEVSVIQSVHHDRRRRLQKKKSHDRRTAKRLCAREGLREHHRIDHRMHEVANAVLSFAEERRSMIVLEDLTGVKPRKDKKLNRRISIWPRRKLHQIIEYKAAWRGIPVAKVDPRYSSRKCPVCGRIQDSRKGAEFVCGCGWRIDRHINASINLLQSAASKKAAGGLRFDPGAFQHDVVMVLCGPNKAVRPEPNGTSGMRAIA

SEQ ID NO: 6272 - protein, 437 aa, Chroococcidiopsis sp.
MLQVITAKLKLEASSEQKELLREVSLAYRDALNYTSQVNFDNGKSSNGTRIQKLVYRDLRAEFNLPSQMACNVPRQIGATYKGLLTKLKQNEEAIRTGKTLDRFKGLDEAPKFVSRTCNLNYLRDFTFKPNQQVSVITLQGRITVNYFGYNKHIQLIKSGCKIGGAKIYYSKSSKTYYLLVSLELELSELEPVNYRRVVGVDVGRRFLAVTTDVQNQTQFFSGSETIHKANQYQRARKTLQRKGTRSATRRLKLVSGRERRFTADVNHKISKRIVTPCTLFGLEDLTHIRDRTKPKKKGKKASTKQRKANRKQAKWSFAELHTFIDYKAVFIRSLAIKVDANYTSIGCPKCGHVSNNNRPNKGLIFRCECCNFELHADLVGARNITLRTLLSRQDWERTGVLSVRPDASNGEASSERLLRYSELRWSSDTSPRYSEA

SEQ ID NO: 6273 - protein, 441 aa, Aeropyrum sp.
MARVTRTAIVRSVKLPRKAFRVFVELEGMYRNMVEQLTMYAVGNSIKSFTRLRALKYREMRKLYPQLPSHYVYTACQDASIRAKSFLRLKKRGLAEKDYPEIRSVSIWLDDHLWKASGLTSIRIATHKGWVELGLEPHKQYWRYINRGWRLASEARVKLDKRNRQLIIYLAFVKEAEEYKPRGYLPVDVNENSLAMLVDGIAYLFETDMKRLVLGYYYSRKRIQEKYDKLYGVKSRIGRRVLRKLKEREKKSDIRRKIANIVVRAAYEKRHAVVLEKLGRRPADSMAERIRDKQLRHRIYQASFRGIQKAIEEKARELGVPVVYVNPKNTSRTCPLHNAKIIYVNGSRVGRCSRGGELWHRDVAACWNLLLRARLGDGSHAPSPGGHLVLDVRAVPLPSNATHEPIGISKSLWARWNSLPQIQNATVLNRMEAVGRNGVKR

SEQ ID NO: 6274 - protein, 229 aa, Glycomyces sp.
MVTVSRDSAGRWFVSIRIEEVIPALPGRSEAIGVDAGLTSLLTFSTGEKISNPRHERTDRQRVKSRQRDLTRKQKGSKNYQKARLKLARAHARIADRRLDAMHKLTTRLVRENQVICVEDLNVRGMLGNRKLARAIADASWATFRRLLEYKCEWYGRELVAVDRFLPSSRTCAACGSTRASMPLGVRVFRCTDKACGNVEDRDVNAAMNILAAGLAVAACGGGVRPKRS

SEQ ID NO: 6275 - protein, 294 aa, Lactobacillus sp.
MLFKHQGGYPRFKSRHAIRQAYTGRSICRLLAKRRVKLPKLGSIRTSKTTRLANGKIKCCTVCREPTGRYYLSLQVEVEAPKHLRKTEKAVGIDVGITDLVISSDGIKYGTFNTKWYEKQAITWQRKYSKRRHQVTIAVRQWNHHHKMVKEELNDYQNWQRARQQKTRYQAKIANQRKDYLHKLTTALVKQYVLIVIEDLKTKNLQKNHCLAKSIANASWYQFRTMLAYKCAWYGKRLVVKPNYTSQICSHCGYHSGSKPLNIREWTCPSCGTHHDRDINAAVNILHQGLNAVG

SEQ ID NO: 6276 - protein, 188 aa, Clostridium sp.
LSSPDLGIKDLCITSDGKVYENLKIIKKYEKQLVKLQRQLSHKGKRSKNYYKTKKKIALCHEKIRNIRKDYLHKVSHEIISENQVIVSENLQIKNMVKNHHLAKAISDVSWYELTRQLEYKAKWNGRKYIKIDTFYASSQLCSVCGYQNPDTKDLSVRTCICPKCGAEHDRNINAEKNILTEGLRQIA

SEQ ID NO: 6277 - protein, 387 aa, Lactobacillus sp.
MEVKFMIKSQKVRLYPNRHMKENLDKLCDYRRFCWNHGLAIWNDMYDLYTIDSTSPRPSAYAVRNELVANKADWQYNLSARTLQLAIADLGKAWKNFLTKAKPDWGKPTFKSKRAPRQGFKTDRAKVVNGKLRLDRPCGAKYWYDIRISKNIDLFGTLRITNIYREDDKYWANFFFDVNLKSKIKTGNNSAVDVNVGHFNYTNGIIRTLPKQLDDLYQQIRFYQKKLAHKRIVNGRKATKSNSYRAMKIKLRNNYHKVAYIQHDLVHKFTTKLVTDYDKIVIEDLSVKDMKMSHVASKGLHRSMFGYFRQLLSYKCRWYGKELILADKYYPSTQRCSKCQHIKTGNDKLTLQGNTNHKTRHNEYVCYNCGLVLDRDKNAVANLLDLI

SEQ ID NO: 6278 - protein, 383 aa, Lactobacillus sp.
MLRVQKVRLYPNETMKQVLDDLCDYRRYCWNQGLALWNDMYDASLVLGDKKLRPSARKVRDELVANKEDWQYQLSARCLQLAISDLGKAWQNFFKKSLPDWGKPKFKSKKTARQGFKTDRAQIVNGKLRLDKPQGIKAWADISFKGADDLKGELKVVSIYRENGKYWASLPFEVKVTKKTKTGQKTAVDVNVGHFDYTEGQVKTLPNNLKALYKRIKHYQRLLARKRVANGKKATQTNNYVKTRAKLQRDYRRVANIQHDIVQKFTTMLVNNYDRIVSEDLAVKQMQMSHVASKGLHRSMFGYFKQVLKYKCEWYGKELILADRYYPSTQRCSQCGHVKTGADKVGLDGNKKHGTKHNEYVCYECGAVMERDKNAVRNLLALL

SEQ ID NO: 6279 - protein, 360 aa, Crenarchaeota sp.
MKLVKSYTAKITGNAEKESKLLFNLSILQQVSEYVFPLGFDYWFDFKTMYHDCRERFPELNSKILQNFLQLYRPIKGKKSPKKVISSIITLDNQNFNMLFDPDTKYTNYWLRFGRRNYPLRGKRILSRIKDVSGVQECRIFSRNNNLYCKLTYVEEIPEITADPAKSVGIDFNTKRLASSNNKIYKMDRWFHRKSEYKKNKGKKNINNYTKNFVHSLANSIIEDLIFTGQEVLVLENLTDLRKSSSKKNGTSKGKAVNYMINNCFPFSMLKQILEYKCLESNILVETVSPAFTSKTCSRCGSQETIRESQPRFKCQDCGFQLDADLNASRNIKSRYTSLNGLQVNPARLCSQRQAAHLNA

SEQ ID NO: 6280 - protein, 373 aa, Serratia sp.
MMKRAYKYRFYPTPEQVELLAQTFGCVRFVYNAVLHWRGEAFRQSLEKIGYSAASAHLTELKKNAEYAWLNDVSCVPLQQALRHQQTAFKNFFAGRASYPAFKSKRHKQAAEFTKSAFKYVDNQLYIAKSKIPLALRWSRLLPSAPSTITITRDAAGRYFVSCLCEFEPESLPVSPKMVGIDVGLNDLFVTDSGFKTGNLRHTAKYAARLALLQRRLSKKRKGSKNRTKARLKVARLHTKIADCRLDNLHKLSRALINENQVVCVESLKVKNMLRNPQLAKHIADASWSEFVRQLRYKGEWACRSVVAIDPYFPSSKRCSCCGFTLKHLPLNVRSWVCPECNISHDRDINAARNIKAAGLAVLAHGEFVKPAA

SEQ ID NO: 6281 - protein, 433 aa, Fervidibacteria sp.
MATKVITMPTVCLKFRFKENSKIKTLMDACASIQQQAVNFAIDNNKTATFTIIKALYPSIKSQFPNLHSQWLQSAVRSGAAVVHSFKNRKRKGKRQGTGGKGQGNTSLEKPKIKRPFVYVSKQILKVDWDGKRLTLTFPVSPYDKEPITLSFRPHHKYCRLLDDWKEGRAKMREPTLTFNSISIPIKFPEFEPYKPKTVIAVDSNELNLTVYVGARDMGQGTFKGCLREIDTSYAARISRDHEKRVRKGVKGKQNPKAKRKVASKHGRIRKEKVKNFWHHIALMLIAWAMANKAAIVLEDLKGMKGRITSKHKSRRMRQRLLNFWSVMTFHKILAQKAWFYGVPLVFVPPENTSRTCPICGRVNERLRGHVFECPCGLKKGRHEVGAINIACRGLEFLGFVMPRQGLVGDPCCLSSDFGLKAQGHDRNTQPTA

SEQ ID NO: 6282 - protein, 419 aa, Clostridiales sp.
MHITLTSKVRILPDEETTDLLISTMHAYTAACNYVSVHVFSTGVTSKQRIHDELYRDIRSRFALRSQMAESVIRTVVAKYKALSSSGESWKIIRFSKPQYDLVWNRDYSLKGDVFSVNTLSGRRRMHFAKPASSLDGKFGTAKLVHKHGKFYLHIPVTHEVPEVSDDRLTDVVGIDRGIRFLAAAYDSSGKTTFFSGAQVKAKRAHYKALRKELQRVGTPSSRRRLKAIGQRENRWMNDVDHCISKALAESYPKGTLFVLEDLTGIRKVTERVKASDRYVSVSWPYYDLEQKLIYKAAMRGQKVINVDPAYTSQTCPKCGRRDKVSRDKRLHLFRCTGCGYTSNDDRIAAMNLYSMGNEYLVQSGKSMSLAGGVRSMTPDVTPADPKLSGPVTNAGGISRPLQGSHKPLLQGVSLSRGI

SEQ ID NO: 6283 - protein, 388 aa, unknown
  TnpB Polypeptide
MLKQRKAYKFRMEPTDLESDELLRMAGTDRFVWNWALDRCLTFYQANKKGISQSQLSNELTELKAKQPWLYDFDSQSLQQVLRKLQQAYKNHFNPRMRAGFPKFKTKKNPRQSFRIPQRVVVREGKVYVPKLGWVRIRQSQPVAGETKSATFKHTATGKWYVTLVSEFEVSECKQPVTRVVGGDLGLETYLTLSDGTEVENPRFLRQYAKKLRRAQRHLSRKVKGSRNRAKARLRVAKVHERVAHLRSDFSHQLSHKLMRYPAVCLEDLSILGLAKTKLAKSMLDAAFSEVIRQWRYKSVWNGTYALQADRFFPSTQICSECGYQNQDLNLSDREWICPGCESKHRRDQNAAHNLEEEGRRQLVAMGLIETQNACRRHIRPTTVGNVG

SEQ ID NO: 6284 - protein, 372 aa, Clostridioides sp.
VIAVEKAYKFRMYPNKKQQELINKTFGCCRFVYNKYLAKRIEVYKNDKETFTYKQCSSDLTNLKKELKWLKEPDKFSLQNALKDLDNAYKKFFKEKAGFPKFKSKKINRFSYKTNFTNGNIMYCGQHIKLPKLGMVKVRDKQVPQGRILNATISKEPSGRYYVSLCCTDVDIEAFENTNNHIGLDLGIKEFCISSCGDFIENPKYLKKSLSKLAKLQRELSRKTIGSLNRNKARLKVAGLQEHIANQRKDFLQKLSTKLIKENDIICIEDLQVKNMIKNHKLSRSISDVSWSEFIRQLEYKANWYGRQIVKVGKFFASSQICNKCGYKNEEVKNLNIREWICPSCNETHDRDINASINILKEGLRLITIQNK

SEQ ID NO: 6285 - protein, 159 aa, Symploca sp.
  misc_feature (120)..(120): Xaa can be any naturally occurring amino acid
VAKVQAKIKDTRTDFLHKLTTKLVQENDLIAIEDLAIRNMVKNHKLARAISYASWGEFNRQLEYKCQWYGKKLIKIDRYFPSSKRCGKCGHIMEKLPLKVREWKCPECGTHHDRDINASXALINGKIPRANNPKVEIPPPVKISRNPKTGLLLIAAAKA

SEQ ID NO: 6286 - protein, 464 aa, unknown
  TnpB Polypeptide
MVKIFVTADGAETDLDLGHYERFIDEELNRDCSITTGKIYSHVIAKERRGDYLGATVQVVPHITNEIKERIYAAAKSSQADIVISEIGGTVGDIESLPFIEAVRQIRLDLGYENTLYIHTTLLPYIGASHEVKTKPTQHSVKELRGYGIQPDIIVCRSEKYIDQELKDKISLFCNVPTKAVISNYDVDVLYELPMLLLNQHMDDLVLEHLRIDAPKADMKAWQELIQRVKGLNKDITIKMVGKYVQLPDAYLSVNEALKHAGYYENSIVNIEWVNAEEITQENVRQMLQGADGILVPGGFGERGIEGMITAIQYARENKADVIVFEYLEMQGKISGKKKQKLHLWRKRDIQKICEHQAHRCGIRISRVSARNTSRFAYDGSGRVIRSAEDHSLCTFTTGKTYNCDLSASYNIGARYFIRELLKPLPETERSSLEAKVPSVKRRTSCVYADLRNLHLEMDILKAA

SEQ ID NO: 6287 - protein, 402 aa, unknown
  TnpB Polypeptide
VLLAHEIRLRPSRTQEEYFRHACGVARFTYNWALEHWKSAYEAGEKPSGSSLKKQFNAIRREKFPWTYEVHRDCTAQSFTQLQKAFTHFFHRMKAGRKPGYPKFKKRGGCKDSFYIANDRFRLDNKRIHLPKIGWVRLREVLRFEGMITSAIVKRVADAWFVVVQVDVGDYRRDRIANSEVGVDLGIRSSATLSTGEHIQGPKALKKNLRKLQRESRWHSRKQKGSANRRKSTMKLARLHRRIGYVRSDYLHKLSTRLCRENQAIGIEDLAVQNMVRNRRLSRHIVDEGWGGFRRQINYKAVIFDDVVVVHDRFYASSKTCFLCCEKRAKLSLSERTFKCACGWEIDRDVNAALNLLPWVTREVTLVEKEALVLALAETKLPLMKQELTPTPLCVGERYQKA

SEQ ID NO: 6288 - protein, 427 aa, unknown
  TnpB Polypeptide
MRKVSHGRAWFPDPEMDRILSLMKVQSSATRAAYQFMRRTGHVANEVKKAIKPNYMADLNQRYLGDACGLAAQKRNTPSVIFGGKKTWRDLQRGKISKEDWVQKRNSLLYSRGDKSHSGNPNIRVVGDKILVNDPSEKGKWIEGRFWMPKKFAFNPDCYDVRLIYRKGQVEVKISSEFPTPRIVTKPVSQGAIGIDCNPDGLAVVETNDQGQLVHHHYENEQRIRFARSKKRTYDIRLLAVQVVLFAFLIKKPLVLEALKFRAGKQKNKKFNRMSHNFLHRQMLDAIRSRATRMGVEVVEVNPAFTSILGKLKYQDMYSLNVHTAAALVIARRGQGFLESQRFTDKLFGLGGSRVKLEARSREHTLRPKAWSWLRDEFLKPKNSRAHSPTSGSCNDAGKGGNLGEIPKDESGSITGRSRHSSECLRR

SEQ ID NO: 6289 - protein, 462 aa, unknown
  TnpB Polypeptide
MKVTRILFSKNLNAGKFTALEEQAHRLGELRSEIWQRFGSVNGVGKSDREIRDEWLQQKKEFDVPANAWKETLRDTVSDIKTSREAAKVKARKAVCRHTTDVAERKCLYTLLKSDNWTTDPYLTRIMRKYWKRGHNHTHNQIIVRTDNYRTFELDGSVWLKIPGLTPRKRISIPLDTNVHPTGTLRLILRGGKVEIHYQIEVKKENRHGDKTLGVDKGYTEVLVDSDGDHHGEGLGKLLSSESGYLKVKYQRRNKLKAIARNKPHKRVDIERNNLGRKKLDRRDRVVKVCVRDKVFKAAHAVVDKAAVVVAEDLTSPIPSKRSYGRNMNRRLSAWTKGVIAESLDSVSQRRGSTLALVNCAYTSQVDSRYGVLRGRRKGDSFYCFDGVVLHSDENAARNVLARHYDFEIGRWTPYRKVRGILLERTKCHRLGLLNLDTSCRPEGLSTVSELPLQGKGQLCHA

SEQ ID NO: 6290 - protein, 459 aa, Mycolicibacterium sp.
MAKLEVPDGWTVQAFRFTLDPTEEQARSLARHFGARRKAYNWTVATLTADIEAWQASGVESEKPSLRVLRKRWNTVKDEVCVNAETGAVWWRECSKEAYADGITGAVDAYWNWQTSRSGKRDGKRMGFPRFKKKGRDQDRVTFTTGAMRVEPDRRHLTLPVIGTVRTHENTRRIERLITKGRARVLAISLRRNGTRLDASVRVLVRRPQQPSVALPGSRVGVDVGVRRLATVADADGVVIEQVPNPRPLDAALKDLRHASRARSRCTKGSRRYRERTTEISRLHRRVNDVRTHHLHVLTTRLAQTHGRIVVEGLDAAGMLRQKGLPGARARRRALSDSALGTPRRHLSYKTRWYGSQLVVASRWFPSSRTCHVCGHVQDIGWDEKWQCDGCSVTHQRDDNAAVNLARYEETSSVVGPVGAAVKRGADRKTGPRPAGGREARKGRSREAAEQPRDGVQVA

SEQ ID NO: 6291 - protein, 462 aa, unknown
  TnpB Polypeptide
MQQIITAKLKLVATPEQFKALRTTQLAYRDALNAVSQYAFAHRKTSSATTLHKGMYRELRSRYHLPSQLACSVERRGAATYKALWTKLKQNSEHRRAKRTKKHLKGLDQAPKYVSPTLSYVYGEDYGFKSGQHVSLQTLEGRIIVSYQGYTQHLALLQKGATFGGAKLWYDKPHKQFYLLVSLKIEVAEPTPEVQQHVIGVDVGQRYLAVTATLSQESQFFSGKAGRAIADHYARLRKRLQRKGTRSATRRFIVVSGRERRFKLNTNHVIAKIIVNTHPNTLIGLEDLTGIRERTKRPKRRRKGKQVLPLTAKQRRANRHASKWAFAELHSLLTYKAALSKSSLVVKVDADYTSKACPMCGYTDKRNRPGNGLVFVCQNRACSYKTQAEHAYTLHSDLVGARNIAMRTRLIRQDWVERGSCQLSLMSRTVKPKQHVCKDTLNCGGVLRQASGLMPEVIDRRE

SEQ ID NO: 6292 - protein, 411 aa, unknown
  TnpB Polypeptide
MQLVEQHIINRNDPRFAVIDAAAFNSKNLYNAALYEIRQSFIHRGMYLDYNETQRHMQSHEAFKALPAKVSQQILRLLHKNWRSFFEALEVYKQDPSKFTGRPKLPKYKHKTEGRNILVYTIQALSKSALRDGLVRPSELPITIKTEHTIVDQVRIVPRNGHYVIEVIYTKEPVQADVDPSFCVGIDLGVTNLAAIASNREGFVPRLGNGRPLKACNQWYNKRMKELKRRLPKEDRARVTKQMEQITNTRNRQIQHYLHTASKRIIDCLVKEGVGTIIIGKNPLWKQEVSMGKRNNQNFVSIPHARFIDMLTYKAALVGIQVEVREESYTSKASFLDLDPIPTYQPNDEQEHLFSGKRIGRRNRLYRSNDGHIICADVNGAYNIVRKRRPDAFSKAKGVAGYVVHPSRLAV

SEQ ID NO: 6293 - protein, 768 aa, unknown
  TnpB Polypeptide
VTDNATTIERAYRVRLRPTPAQARTLQCLLGAKRFVWNWALARKDAAWRMDGLSLNWIDLSRELTVLRQAPDMAWLGALPRIPLEQVLRDFDRAWVNFFDGRAKRPRSKKRGSVATVRFTLNQHQPQVERERYRVHLTGIGKVRFRVTQPLEGRLRSVTVRRNAAGQWFATFTADGVPAPAAAPAALPAIGVDLGLKDAAVLSTGVVIAAPKHLAAQLARLRRYQRRFARQRDAAARRQGLDPAKPLPKGTRLASSARMKRTQAAIGRLHVRVADARRDHQHQLTAHVVRLANVIAIEDLAVKAMARGMGRRAFRRSVGDAGLGEIRRQLTYKANWHGRALVVVDRYYPSSKTCSGCGVIHAGLQLRDRAWTCGACGAAHHRDHNAAVNIEREGLRLLASEPSTPRSGGIDARGESASAAGSTPPTGQAALDEPRTRLSRGKPRTRSVSDSTDSAAGGLRLRRDRFRAHRRSRSQNRERDLLRSLSLIEWPDIDNRGTRMAKPRKTAKATPEPAKTLRMMPLASHQPSGQAARTVTQSNDLIEAAYSLTLNEKRLLLLAAAQLDPNKPPRRNLSIPVTAADFAETFGITSRGHAYEALEDAALRLYDRSIKSIERTSKGTPVEERRWLTGRAVYDNGTVLLEFNEGVLGYMTQLSQHFTSYQLQQVSQLSSFYAIRIYELAAGAAQSGARYMPLETLRSVLDMGEKYPNVKDLRCKVIDPAVEEISATSDLAIEAEPVREGRKVVGFKFTVERQQPPGVPAAAMVAAL

SEQ ID NO: 6294 - protein, 477 aa, unknown
  TnpB Polypeptide
VRPQPATVDSSCEGFTDLVTDSTTTLERAYRVRLRPTPAQARTLQRLLGAKRFVWNWALARKEAAWREEGVRLNGIALSREFTALRQAQDTAWLATLPREPFKQVLRDFDRAWANFFAGRAKRPRRKKRGSVAAVRFTLDQRRPLVDRERGRVQLDGVGKVRFRVTQPLEGRLRSVTVRRNAAGQWHATFTADGVQAPAAAPAALPAIGVDLGLKDTAALSTGTVVAAPKHLAAQLARLRRYQRRFARQRDAAARRQGLDPAKPLPKGTRLASSARMKRTQAAIGRLHVRVADARRDHQHQLTAHVVRLANVIAIEDLAVKAMARGMGRRAFRRSVGDAGLGEIRRQLTYKAKWHGRTLAVVDRYYPSSKTCSGCGAIHAALQLGDRAWTCGACGAAHDRDHNAAINIEREGLRLLANNSSTPRSGGIDARGESASAAGSSPPAGHAALDEPRTELSRGKPRTRQRAGQEQARRREG

SEQ ID NO: 6295 - protein, 369 aa, Halorubrum sp.
VALSSEKQRELAGATADVENRPADESGLGQTDERPLWSTDVPVWDAGVRRHDAQFTRVRLSKGRNLKEHRSDFILCEYQTRSDVDLTEWDIQQVRAIYKRDEWRLQFVCRTVIDPDSPGDEVAGVNLGICNFAAVSFGGESVLYPGGALKEDEYYFTKKKAKCDDSSSREAARLDRTRTGRRTHFLHALSKAIVKECIERGVGTLVVGDLGGIRADDENGEPRNWGDHGNLDLHGWAFDRFTALLDYKAEAEGIDVELVSERATSKSCSACGHTDDNQRVERGLYVCEECDTVANADVNGAVNIRQKVLPSLATDGVDETHRVSSAHQNAKRSGDGDRDNGWLAQPAVHPFDRREGSFAPREQVVNREP

SEQ ID NO: 6296 - protein, 144 aa, Bacillus sp.
VSLLVETEVQELPKTHSYTGIDVGLKDFAILSDGTDYENPKFFRSLEDKLAKSQRVLSRRMKGYSRWNKQRVKVARIHGYISNTRKDYLHKISTEIIKNHDVIGIEDLQVSNMLKNHKLAKAISEVSWSQFRSMLEYKTKWISK

SEQ ID NO: 6297 - protein, 282 aa, unknown
  TnpB Polypeptide
  misc_feature (3)..(35): Xaa can be any naturally occurring amino acid
MDXXXXXXXXXXXXXXXXXXXXXXXXXXXXXXXXXKFKSKHDGHKSYTTNFTNGNITADFDRGKVKLPKLKEVKAKLHRNFSGQIKSATVSQMPSGKYYVSILVETEHVELPHTDQNTGIDLGIKDLCITSKGKKYENPKTIRKYEKKLARLQRQLAHKEKRRQNYNKIKKKIALCHEKITNSRKDYLHKISHEIISENQVIVSENLQIQNMVKDHHLAKAISDVSWYELTRQLEYKAKWNGRKYRYILCQQPTMFGLRIPKYRDKRFINKRMVVSCLWCKT

SEQ ID NO: 6298 - protein, 414 aa, unknown
  TnpB Polypeptide
MRVRAYRFRAYSSNTTARVLKTQLEVACKLYNTLLHAEKEEYERNKHTMNKTELRQLALDLRKQNKEFQVLHSQVAQQVADRFYQARQRFFEGLANKPKKKKPHRYLSLVYPQSGWKLSNWREVGQGKNKKRKARLRLSKIGFFTLVIHREFPESQVSQVCVKLYPSGRIYVIFLVEEAETLGQSSKKPKNAVGVDLGITRLATLSDGRFLDNPKPLERSLERIRVLQRTLSRKRFLSKNWLKTKTKLAKQHEHIKDFRRDLFFKLGALLSQEYDVLVLEDLNVEGLIRNGTKKRRLRLHDSSFSELRAVLEWQFRKRGKLVLPVPSYNTSRECFLCGGINKGLTLQDRVFHCPFCGFTIDRDLNASLVLLKRAGWVPPVVPEELRPIPPLPSLGLKRRQGVAMKQEAPPFKAG

SEQ ID NO: 6299 - protein, 387 aa, Escherichia sp.
VKRLQAFKFQLRPGGQQECEMRRFAGACRFVFNRALARQNENHEVGNKYIPYGKMASWLVEWKNATETQWLKDSPSQPLQQSLKDLERAYKNFFQNRAAFPRFKKRGQNDVFRYPQGVKLDQENSRIFLPKLGWMRYRNSRQVTGVVKNVTVSQSCGKWYISIQTESEVSTPVHPSASMVGLDAGVAKLATLSDGTVFEPVNSFQKNQKTLARLQRQLSRKVKFSNNWQKQKRKIQRLHSCIANIRRDYLHKVTTAVSKNHAMIVIEDLKVSNMSKSAAGTVSQPGRNVRAKSGLNRSILDQGWYEMRRQLEYKQLWRGGQVLAVPPAYTSQRCAYCGHTAKENRLSQSKFRCQVCGYTANADVNGARNILAAGHAVLACGGCQQTG

SEQ ID NO: 6300 - protein, 211 aa, unknown
  TnpB Polypeptide
VFRSLDILLNRVGRNIPRHPNVVRFFPKPATPQILLQERFVRDRLHKVSRHIVEWSQQFEKPCIVFEDLKEMRDSIDYGTRMNRRLHHLPFRALQYYTSYKASFEGIPTGWIDPYKTSQRCPMCGHAERANRNKKRFKCRSCQHQDHSDRGASVNIAVKGIKKLDWNVPALNSLPQVRKVRRQASGAVDATTVTHDAVRGYQTDGIGGVSD

SEQ ID NO: 6301 - protein, 227 aa, unknown
  TnpB Polypeptide
VRIEPDGRYYISICATDVPAPVLEHNEDPIGIDLGIKDLAILSDGTQFDALKPLNASLKRLKFLQRSFDRKSKSSARREKARVKVARMHAKIAAQREDYLHKLTNFVTKKYGIIFLEDLNVGGMMKNHCLARHIADSSWGELRRQLEYKAKWRGRVLLTVDRFYASSQTCGNCGFKNPAVKDLGVREWVCPKCGHHHDRDLNAAQNILCEGLRLLAELDERFCDKSA

SEQ ID NO: 6302 - protein, 432 aa, unknown
  TnpB Polypeptide
MRAQAKNKMYLARQEIVEPTEEQSLIFGLMSYAAYKLWNVANYERHHWKELGLEKYPDWYDQKKRLKTNFFYKNLPSQSAQNVLRKLDESWKSFYALKKSGGVKNPKPPRFKRDKISVTFVQNAIQVLPNGTFRFTIPKQLKQHLREKYGLEVKFLYLKIGRLSGLRGIKEVQVSFRTDGKLKLSVVYEVPRPAEKPDNGRYLAIDLGIKNNFTCYDSANIQSFILSGWLVKKHWFDKEIARLQSIYAAQQAAKGVKYPKPSKKVLHLHERRRLVQRDFLHKSARFLVNYCVTHNLHTIILGDWTKIRENPGGTPKNWGRKKNAKLHAFPFKQFREILAYKCALAGIRLIVRSEAYTSQCPPDSLGISKKFAAKTKREHRGLFVHDGVRYNADSVGAFNILRKFLLDEAKELKLPTKEELFSLRSPERKWVA

SEQ ID NO: 6303 - protein, 396 aa, unknown
  TnpB Polypeptide
MNIVAHRIEMDVNNKQASALRQHCGAARVAFNHALCDFKKGLEEDEWRNDKTLRPRFNKVKHMEYPWLKELSANAAKNAIVHCGEAIDKWRKGKKSKRKVGFPQFRSIKRTGCRYQADNGAGSVKVDGKQVKLPKIGWLKMRETPRFNGLARKAFIKERGGRWFITLTFARPDDPPKRAIGEIIGIDAGLKHLAVLSDGAKHESPKPLKRLLRKLRMLNKKLSRQQKGGNRRKRAVAKLSKLHCRTACIRLDHLHKTTTEITNRVGLKELRMETLSVKGMMQNRRLARAIADAGIHEFQRQIEYKSRWKGVSVSKAERWFPSSKLCHVCGEKNDALKLADRSWKCVCGAELDRDVNAALNLAASSAVCGRGESVRLAIASNSQRSVHQTDYHRFYG

SEQ ID NO: 6304 - protein, 106 aa, Nodularia sp.
MISLYPLGLRLLVVGWVDVILLPTFEISVMSRKAKRRIRSKSVRQMFTLSQYKFKQFIKHKAQEYDKIVVDLNEAYTSKTVSWTGEIINNLGGGINCNLNYTHNHC

SEQ ID NO: 6305 - protein, 298 aa, Planomonospora sp.
MLSRTFGCVRVVWNQTLAWRHRRWHAEREPTNVPQANAFLTQLKRTEQFAWLNEVSSVPLQQVLRTQQRAFVNFFEGRARYPRFKSRTGRQSAEYTRSGFRWRDGRLWLAKTDAPLKLVWSWPDVDPATIDPSTVTVSRDPDGRWYVSLAVDVPDPEQAPATGTAVGMDLGVKDFAVTSDGEKIANPRHLERRARNLARYQRRMARKQRGSANRTKARAKVARAHRKVRDARRDFLHKTSTRLVRDHDVIVIEDLAVENMVRNRSLARAISDCGWGEFRRLLEYKTTRYGRHLIVIDR

SEQ ID NO: 6306 - protein, 373 aa, unknown
  TnpB Polypeptide
MSKANKSNKAIKYRLYPNDEQKVMFAKTFGCCRFVYNQLLALQKQRYKDGESHLSKLKSNEFATRTLKKDYDFLKEIDKFALTNAIYNMDVAYQKFFKEHAGYPKFKSKHDNHKSYTTNFTNGNIAVDFETGKIKLPKLKAVKARLHREYSGQIKSATVSQVSSGKYYVSILVETEHKELAHTNHNIGIDLGIKDLCITSDGKVYGNLKIIKKYEKQLVKLQRQLSHKGKRSKNYYKTKKKIALCHEKIRNIRKDYLHKVSHEIISENQVIVSENLQIKNMVKNHHLAKAISDVSWYELTRQLEYKAKWNGRKYIKIDTFYASSQLCSVCGYQNPDTKDLSVRTWMCPKCGAEHDRDINAAKNILTEGLRQIA

SEQ ID NO: 6307 - protein, 385 aa, Oscillatoriales sp.
MLVFEFKAYGKSDQFSAVDEAIRTAQFVRNSCIRLWMDNQKIGQYDLQKYCAVLAHEFPFASELNSMARQASAERAWSAIYRFYDNCKKKTPGKKGYPQFQKDCRSVEYKTSGWKLAENRKSITFTDKKGIGKVKLKGTRDLHFYQISQIKRVRLVKKATGVYVQFCIDAERKENTEPTGKTVGLDMGLKEYYTDSKGVMVENPKFLRAGEKVLKRCQRRISRKVKGSKNRGKARQILGKRQLKISRQRKDHAVKLARCVVQSNDLIAYEDLRIKNLVKNHCLAKSINDASWYQFRLWLEYFGKVFERVTVAVNPQYTSQECSSCGEIVKKTLSTRTHICKCGCTLDRDFKAARNILSRGLGTVGHTGTFARLCKQRSLENRPLL

SEQ ID NO: 6308 - protein, 552 aa, Streptomyces sp.
MGGLRELAGSFVVPGPAGVAVRDRLRVSAADAAVLAEVGRFLGSLAAGDLAERSRQGLGHDAAGWAVRKRALTGKSSARWAGSITKATHDQWALARRGQAAHRGWLRGQIASIEARLARPLGAKANRREGLVRGYGSRGEWHAKSRRLQTLKNRLVSVEADWAAGRVRVVRGGKRLAHARHHLEAAGLDEAAWRRRWQAARMLLAADGESGKRLGNETIRVTDIGQLSIKLPAPLVHLANAPHGRYLLDATVRFRHRGQEWRDRITANRAVAYRIHHDVLRGRWYVTASWQRAAASVLPLDTALARGVVGVDMNDDHLAAWQLDVHGNPVGEPQRFFYDLTGSTEHRDAQIRHALTRLLHHTRRGGAAAIAIEDLDFAAEKGREKHGRNKRFRRLLSRFPTAKLKARLVSMAAEQDIAVVAVDPACTSKWGAQHWQKPLTTPRRKTSRHDAASIAVGRRALGHPIRRRTTPPPPHQSDGAGHRTVQARPDARRREETRPQPTGPRTRCVSLVVERKRGTPACPTPFGAALLSHSPGNRPHSHSVFRNGRTTS

SEQ ID NO: 6309 - protein, 658 aa, Streptomyces sp.
VGERGPHAGPCTPDAVRDVAGRRGRHRGVREGCGVLPCLFGRPEAGPRPAGRPRGPGSHRTWSAGRGCRHRSRLGTERTPPRTAPSPVRSGRCRDRGRAPRPPRPVRRRAPGGRAVGVLSAPGRSRPRGDRRRPGAGHHRSADLDVCAPVRASGGEDLGCPRGSRGDRRGRRVKKFRPQPGSVVQAYRFALDPDATQEAALRSHCGAARAAYNWAVGWVTASWWQRKAEETYGIPEESLTPWRPWSLPSLRKAFNEAKHTDPRFSGWWEENSKEAYSTGLANASSAFDNYAKSKNGNRRGKRVNAPRFKSKRKARDACRFTTGTIRVDAGGRHVTLPRLGTIRTHEPTAKLLTRVQAGTARILSATVRHERGRWFASFQAEVKRDLVRVARPDVAVGIDLGVKTLAVLGDSAGEIRTVANPKHDERALGQLRRASRTVSRRRGPDRRTGAKPSKRWEKANAARNKVHHRVANLREDALHKLTTSVAAEYGTIVVEDLNVAGMLKNRGLARRIADAGFGEIRRQLTYKTRQRHATRMVVADRWYPSSKTCSGCGAVKAKLPLHMRTYACDACGLVIDRDDNSARNLAALAAACTTGTGVAGDQDTTPVVPKPRGADRKTRTTRTRREASAERAGGTTLPHQRRQTEARDRTQAQALTLW

SEQ ID NO: 6310 - protein, 605 aa, Streptomyces sp.
MVVGDMSYDVSEAAEATSIVGAVRAASPSPESCMRTASRPSCTNANPHPTRAPRATYSTSTPRPGSRHCARPVRPRSSTRSSPPGAASHVPPTARTPGACPYSPTPARTQRLPGTHLQYIGLQVGGEANLMVASRFRRSRSRTAACWPASGGVPGRGTLRAWRNLVTKTTWTCITKAQCRPVPIIRISLMNHVRTVMVMQLRYTFRLYPDPGQQRALARAFGCARVVFNDAVRAREEAREAGRPFPGIGELSTRLITEAKRTVERSWLGEVSAVVLQQSLRDAETAYRNFFASLKGTRKGPKIGPPRFKSRKDSRQSVRFTANARWKITDSGRLDLPKIGAIKVKWSRTLPATPSSVTVVKDAAGRYFASFVIDTDPAADAARMPHTDRAIGIDLGLTHFAVLSDGTKIDSPRFLRRAEKKLKKAQRELSRKQKGSRNREKARRKVARAHAKVTDARREFHHQLSTRLISENQGIAVEDLSVVGLARTKLAKSVHDAGWSSFISMLEYKAERYGRTLVKIGRFEPTSQTCSTCGAVDGPKPLDVREWTCTTCGAVHDRDHNAAINVKQAAGLAVTACGAPVGPEPVLAQRGKTGSHGFPTGNRAA

SEQ ID NO: 6311 - protein, 656 aa, Streptomyces sp.
VSRKLLLAEGETSRTVCARGLLRTGVDERTGELLSAAAVAERVGWCAGLVSGMVGALTAAHWNTADVDTLASGEDAGGRKLPSNAWMALRRLGWAVELPEGVKANDRIVRMAQEQAGRALRSAKWRADLTAGVLKTWPADPARRTTGEWDAVREAVPGGQFLPSSVIKSRTRQAAAFVRKTGRMPVDVFELEPTPRIAHMLLLSACDAQQATIERADEPGRALLRLQLPTRPDPASYNDWAWVACPMVLPATIPAGAVLHLPTLRIHQGRVRADLAYTHAVPRASRTGHTIALGVDWGLNTLLSAGAARLHDDGQITALGSGGQFRAAGVLAKQHRLRRLSEHLHAKSDHYQRLTGGDEQHSLTARHTVLSDEIRHVYDRRSHLNDALASAAARWTVDQAITASATVIYVEDLRSMEARGMGRTMNTRLSQQVRGQIVDRMRHFAAEVGIALVTVPARHTSKHCPHCLTPLRHRKAPDRPTTPGWKWALCPSCRWQGDRDNGAWRRIAARGLTHQTKTVTDRTSGAMAIRTVVDTLEAGAVVTPSTDNTSRNDRSKTGPTRPRTTRPTPRRRRTPSPDRPSGPAGQRPEGHAHTDRNRLPRAAHRHQGVTTISTPTNKHQPRGAALGAGFHLHAHATPPRWTIPLPDATSDMGSLS

SEQ ID NO: 6312 - protein, 400 aa, unknown
  TnpB Polypeptide
MVYMELIRTIKLKLNQPKSMFEKTIQAYTKAYNYVCQTGYDSRDFNGVSLHHKTYKTTRKYLSADLSISARVKATESLKSWKTIKKNTEKENQKRTKYNQTHINKRPKKLLKLPKCPQSKSCSIRYNDKTFTTWFNKNLISIQTLNGRQKFKISIPKYFQQYINWKRQSAELFINKNGVFLHITFKKDVEDPTPNGKYVGIDRGINKIAVCSDNRFFGGSHIKQVSNKYEQLRSRLQSANTKSAKRHLKKISKKENSFRADANHCISKQIANTIESGTTILLEDLTGIRNRCNFKKNERKQVHKWNFYQLEQFLTYKAASKGIVVKHIDARYTSQRCSKCGHTEKANRSSQSVFKCKHCNFSLNADLNASRNIILKYLDSISYLSRADVNQPIVASSLRR

SEQ ID NO: 6313 - protein, 503 aa, unknown
  TnpB Polypeptide
MRSKTPSFILELPLKTTPAHESTILIRLDTGRQLYNACLGECLKRLDLLRQSKEYQSTIKLPKGKERTEAFKNLNKKYEFTEYDIHHYAATVRNSWINEHIGIHIAQTLATRAFRAVQNKAFKKAKHVRFKGKNQFDTLEGKNNQTGLIFRENTLHWSGIEIPCIIDENNNVMAYGLNPEHRIKYCRIVRRKINSINRFYLQLILEGTPYHNPKHKIGYEEIGLDVGPSTIAIVGDNKAELKQFCSDIVPKQKEKRKLQRKLDRQRRSNNPQNYNENGTIKKGKKKWNKSNQYNKTSSEIAELDRKLAAHRKSLHGKDINDIIAMGTRINTEKISYKSWQKNFGKSVLMRAPSMFMGRLKQKAENAGGYLNEFGTQNTKLSQICHTCGVAVKKPFSQRWHTCCDINIQRDLYSAFLSKCVDMNTNTLDLARAGMLWPGLEPVLSEAILRVNQSTSSGNCPDSFGLRNQRQSGSPVKPAASITEAMDVVIRDTIYEDESHGEVI

SEQ ID NO: 6314 - protein, 416 aa, unknown
  TnpB Polypeptide
MVRGRREMQMVYKFRLYPTSEQEQSLLFVMEVCRWIYNHFLSIWNGVTKIPSRHDLQATLPELKKDHPNLKKVNSKILQMVLFMLYNNLKALRELKKNGRKVGRLRYKKYGRFKSFILNQSGFKVKTTGNALDKLYVSKVGDIPIKLHQKIDGVIKQVIIKKYKSGEWYALICTEKDAQHKIQTPRSFIGLDMGLLHFLTDNMGIQIENPKFYKQTLKRIKIEQRRLSRKKKGSKNCLNQKLKLNKLYNKLTNQRDDFLHKLSRYYVDTYDLISIEALNIPNMVRNHNLSQSILDSSWSKFFYILSYKAESAGKILIKVDPKNTSKECSICGNIKDMPLSDRVYNCSECGIIIDRDMNAAINILKRGIMRQGLPSTLPEIAPLQNLFQVSASSIVEGRSPFPLGRGSSLKYRVPFF

SEQ ID NO: 6315 - protein, 420 aa, unknown
  TnpB Polypeptide
MITISLPYYSDDENIPYLVKLQQQFSNVVRFSYNRFYDGDNQKDIRNKIKLLNNIDLNSWLIQCALKEGEAVYKRNGKIKVIFGSKKQFYRRVKGLISNQELKEKRLSNLMIQGEESQAGNRLFKLDIINNNKIIFKVARNNHVELKLPKLRNNYKKLLYKLENINNIKQGIQGLTYSIRINMDKIYITFDDKKLENKKPKLLNTRYIGIDLNPNEIGISIKENDKILETRHFVLNINTNNHNKIKHEIYEISKKISKLFLKWNCKFIFVEDLNIKNKNHGKGKKFNKMINNQWIRNDFINNLNKRINCFGGKIFKINPAYSSFIGNCVYDFSDPINASLEIGRRGYEVIILKNKKFYPELISVKDRWKEYLTENINSWKEFFVIIKNLKLRYRISLNVKFKVLSQQSRISKVNYYCYPI

SEQ ID NO: 6316 - protein, 400 aa, Sulfobacillus sp.
MDMLKTYRYRLYPTEEQAVFLNRQFGSVRYVYNWALALATNTYQTQGQGITRFQLDKRLTALKQKLPWLGDVASQPLQQALVHLDKAFTRFFREKKGYPRFHSKRGKQSATYPQGVKIHWENGVIYLPKAGWIRTVFSRQFVGRIKTVTVSRVPSGKFFASVLVEDENQVPDAVAETWERAVGGDLGLHDFLVLSTGEKYGHPQWLESELYRLKILQRRFAKTTKGSKNRAKLRRRIARLHERVANRRQDFLHKLSTDLVRRFDTVCLEDLNVAGMVRNHALARHIGQSGWAEFRCQLEYKATWSGKHVRVIGRFAPSSRLCSCGYYNHDLTLADRHWDCPACGRHQDRDVLAANNIKHFAFAKHLTGRDTPGEPGERPPVDERRKPSEAAARRSRNPMP

SEQ ID NO: 6317 - protein, 641 aa, unknown
  TnpB Polypeptide
MELEENHPDTNEQVYRIIKCPLKCVLKRYDMIHPILEQSVIELNDIVILSYQFIRLFLLDKFNNQNELPKINKQFVLDVMKTVSYPSGKRGIKTKEENIKNVSGKTDIKYFYRENFSELVSNKPSYGNKTHILALSATEIITCIKTNISTHFVKHLFKYINCLFKYPKSIEIKKERNKATRKIMYQELNKEIRDLKHDLINNKIENSKLEYHTWILENKHLLYPSKLNKSVAYDVKVNPDKYIKYSFYINQQIETLGYKPYQVIPQRNNITPKHITINTPAIVDLIDDKKQKIFNYNKSELVLHAKKHQSHIWSKLLKLEKKHIFKQKDYVFYNQIITDGFSCSLLFIMKKYKNKKYGEVLPSVNQETNFPKLVNLSTDECNEYLTDKYKLVSLDPGKIRPISMIDENNIFFKYTACRRRYETYTKRSNYVINQEKQKYNIIPKETILSKFNSKSLNQTNYKNFIINKTIVNDEIKDFYQKPLFRKLAFRRFVRTKQSEINLLNEIENKYLTKQDKIDGKKIVILHGDYSRTTQMKGTIPTPNIGIKKLLLSRFKILEVNEFNTSKLYNKTLKEMENVKIKRKKHSKHLHEILTPKEETECRIFVNRDVNACKNILLLGKCFLTNQTRPDEFKQKKERLVV

SEQ ID NO: 6318 - protein, 409 aa, unknown
  TnpB Polypeptide
MRMAYRCRAYPDEAQQQVLNCTFGCVRVVWNRALAARHARWHTQREGTSYAETDRALTQMKKDPGLAFLSEVSSVPLQQALRHQHKAFTAFFGKRARYPRFKSRRSRQSAHYTRSAFSMRGGVLRLAKTAAPLRFAWSWPEVDVAALDPAMVIVSREPDGRWYVTFTVGAPAPAPLERTGRAVGVDLGVKDLATTSGGEKIANPRHLERKARNLARYQRRMARCRKGSANRRKAAAKVARAHRKVRDARRDFLHRVSTQLVREHDVIAIEDLAVRNMVRNRKLARAISDCGWGEFRRQLEYKCERYGRSLIVIDRFYPSSRTCSVCGHLLAELSLSTRRWTCPSCRARHDRDINAAKNILAAGLAVARNSPGDACGGDVRHSGTSRVRSPAKQEPQPARAGIPVLQGGE

SEQ ID NO: 6319 - protein, 546 aa, unknown
  TnpB Polypeptide
MGIFTYQTRLRTDEEQDALLSAHSKIWNKTKHKLHADIIKGAKPNDLKAQYVAGLSLSSKEFNSIKLELQGSHQSYLSNAKRYISEASTKVKRLTGQISRSGVPRVIIGKSKRKNILEKKILDWTSNIKDKKVPMCFGSKKLFHSQFRLEENGFSSHSEWKQAYDDKRYSEFSLVGSKDETSGNQQCQLIVNEHGSHDLKLRLNQQLHKDNKGSKYVIFKDVEFEYGMNNILDSINHCQDYNDHYKIRAKMIDDLASNQDISRKDAAKHPSVVQYMKANMDNIDGALTYRFKRDNKSWRVFVSTTVKPAKLVSSKARGALGVDINKDHLAVTEINHHGNVIDTWTLPMNLYGKSSHQRSAIIGDMVKDLMLIATEAKKPLVIESLDFKKKKASLKNQNEQYNSMLSALPYMQVKDMLEASASRYGIEVFKINPAYTSVIGRHKFMARYGLSVHHSAAMVIARRIFNYDEKPNRISMTEDNVVLDGKCSKYMQKLPVRNDSQHEWKYWASVVRKNKPLLLKHLRSIYPGGEFVSNPPTAIGVDAIRF

SEQ ID NO: 6320 - protein, 351 aa, unknown
  TnpB Polypeptide
VSELKTTVHIRLYPTPEQAALLRAHCQEYISTVNVLVQALDSEVLPDGGKGISTKDFTAALPSAVKNQALRDARSVWKRACALGRIPLLRKPICQWNNQNWRIEGNTLLLPFCQDGIVGQTAIRCAPVALDGAPSAPGLLRITRKRGRWIAEMALSLPAPEPTTAEAIMGIDLGIKVPAVVHIIGKGSRFFGNGRSQRFRRRFYAGRKRLQRAGKVRAVRKSQGKERRWMRDINHKLSRQIITHAQQQGVGVIHLEELAGIRPRISQHTARTSGGATCRKAAKARKNNRMKNTWSFFQLMQFITYKAERLGIRVEQVDPAYTSQICPACFEKNMADDRRYVCGDSAGAAVA

SEQ ID NO: 6321 - protein, 412 aa, Mycobacterium sp.
LLPTDGQAAALAEHCRHARFVWNLAVEQQRHWQPGREAPGYNEQCAQLTAARAEYDWLAAGSQTVQQQALRDFAQAMRNFFNGTHRRPTWRKAGKNEGFRQVGLKPGHIKRLSRRYGQVWIPKIGWVRFRWTRTIPGTLKSYRVRSDRSGRWHIAFAVVPEPIPGPSDGSAVGVDRGVTVSAALSTGALLRVPGLRPGETKRLRRLQGRLARAQRGSNRRARTKLEIARLRARDTDRRRDWVEKTTTDLARRFDTIRVENLNLRSMTRSARGTRDCPGTNVAQKRGLNREISRQGWGLLVTRLKHKARGRVELVPAAYTSQRCSHCGHTAPENRKSQAVFQCVACDAGPCNAARNIAAGRAVTARGDLGTSRSANREPQLCSLLLTLDRQTGLESPPCGGEDVKRSGTPPRR

SEQ ID NO: 6322 - protein, 360 aa, unknown
  TnpB Polypeptide
LIDSATTQQILRKSNESWRSFFALKKMEREDKLPPNIEKVCMPGYWKRNGKHKLMMVLRKDCYSVKDGVMKLPKGLRIPFKGKPKWTGKQGRAEVIYDDLDDEWRAFQAVNVKPLFKPQGSKTCYIDIGIIILFTIWLKGWRQPIAFSGRNLLSDWWHWNGRIADCQSILETINGRKSSKRLSKLYRIRQRRFRQLINTMIRNIVIDLYDLGVSKIVIGNLTGIRENNDKGKKSNSMIHNFWSFKYIIQRLKCTAQEYGVRVKEVSEYKTSSRCIRCGSENIEREGRLFKCLECGLEANRDAIGVLNMANLQYEGTAIRVMTHPKLLKWDGMKWQPKRAMTHRPMNTPEARIPRLKPWKC

SEQ ID NO: 6323 - protein, 374 aa, Burkholderia sp.
MVDMILVYRYRVKSLNGLLNEQSRAVNYVWNFCNDTQKHALKWGKKWPTGFDLNVLTTGSSKALGIHSGTVNATCEQYAKSRSQHRRPYLRYRGRKSLGWVPLKGRDLKREGDAFRFAGHTFRVFNSRPLPDGKIKDGTNFAQDARGNWFLNIVIEMPEVPARPIRSGVGIDLGLKDFATLSTGEKLPHDQFGRRAADKLAKAQRARKHKRHIAKLHAKVANARADFQHKLALDLVQRFDYIAIGNVSAAKLARTRMAKSVYDASWSSFRDKLRYKAIAHGATFEEVDESGSTQSCSSCGSKDSTTRPRGIAGLRMREWTCSGCGVVHDRDTNAALNILRCGRASPVAGILRLWAEEDVNVSACPLKVGTTGDA

SEQ ID NO: 6324 - protein, 380 aa, unknown
  TnpB Polypeptide
MEGGEKVKQSIKIRLLPTEEQEVLMLKSSGCSRFAYNWALNKCNEKYNNNEKYSIANIRKEFTKLKKEEKFKWLNEVSSKVTQESIRNLDKAFKSFFNKQSKYPKFKTKRKSKQSFYVRCDSLYFTDDMCNIEKIGKVRFKTNYSIPKNCKYSNPYCSYNGRCWVLSFSVEVEENQTALNEDLSIGIDLGVKDLATCSNGDVFKNINKTKRIKNLKSKLKHLQRSISRKYEDNKQGSKFVKTNNIIKLEKQVKQIYRKLSNIRNNYIHQTINKIIKHYPYRIVIEDLNVSGMMKNKHLSKAIAEQGFYEFMRQIKYKCEFNGIEFIQVDRFYPSSKTCSCCGFIKKDLKLNDRNYKCDKCGLEIDRDYNASINLSNYSRA

SEQ ID NO: 6325 - protein, 219 aa, unknown
  TnpB Polypeptide
MKIICGFRYELYTTDEQRSALSRNAGCRRFVFNKALELQNECKKSGLSLLRYKELCLELVKWKKEEKTVFLKEAMSQPLQQALKDLDRAIADSFRPKSDPARKEWPKFKSKDIGDGFRIPQFKPEHIDDANGRVKLPKIGWMHYRRSRPLAFKCADGSMKSGTVRQIHIRKDCGHWFVVFTTEFDIEMPDPKALDVGIDLGVVHAVATSDGQFFDLNTG

SEQ ID NO: 6326 - protein, 514 aa, unknown
  TnpB Polypeptide
MDLNSELLDSVPVMSQLAAEVQGISAYATYTVRNDVKLAADLAQVTVSQPAVAGRRAGVTIPAELVVKGELRRNKAGKLVEEKVFGKSRKEWLFRHRVVTECRSWQERIAAANGESGKYVTQGWKRTADASAPSYGEDAINLGAVDKRYAVIENDPFSDGEIILKMVVRGKWYRLIFSFDNERFTEGKVTLPVVKVENNQPVFIFTVVTNNPIVQFSGNYVVGVDVGINDYATVVVRNSATGRIVHQTTLSQRVHSLWNSVRASEKQVRALNKKAEKLLYQRQAHMCVIDEAQLHREAASRKKRELAILTAQEIAYLSYSYGNAVVAVEDLGWIRNTMQNGRWNRGAFTQWLTHYVTQNGGWVVAVNSANTSQLCHLCSSKVTHPTHKVSICPKHGAMDRDVNAAANIAARTVSKVEKARKTRAKNRKLQKKASLKTPVARETLKYPGRDRTKNAPTPKMAKRVAREVNLPISPARVNMTTVLVDWDAFGILETNQAAINQGNVAYECRLCNLS

SEQ ID NO: 6327 - protein, 470 aa, unknown
  TnpB Polypeptide
MVRNDVKLGDDLAQVTAVQPAVAGRRAGVTMPDFLVTGKSGRSRKEFLVQHNVVTAFRSWQERIKATEGTSSKYVSQGWKRTVDASAPSYSDGDFINLGAVDKQYAVIENNPVVDGEVVLRMVVHGRWYRLIFSFDNKRFTEGKVTLPVIKLENNQPVFIFSVVTDNPIVQFSGDYVIGVDVGINDYATVVVRNSTTGKIVHQTTLSQRAHSLWNSVRASERQVRALNKKADKLLYQRQAHMFAIDEADLHRKAASRKKRELAILAAQEIACLSHQYDNAVVAVEDLSWVSNTMQNGRWNRGAFVQWLTHYVSQNGGWMVAVNSANTSQTCHICGERVAHPEHKVSLCPEHGAMDRDVNAAANIAARAVPKVVKARKTRVKNRKLQTQARLKTPIARASLKYPGHDRTKHAPTPKRKNRTSKGVNLPISPARVNLTTVLADWDASGILETCQAAINQGNVAYECRLCNLN

SEQ ID NO: 6328 - protein, 499 aa, unknown
  TnpB Polypeptide
MDLNGELLDSIPVMKKLASEVQGISSYATYVVRNDAQLGVGLAKAGAIQPATAGRRAGVTMPDFLANGRTGKSRKEWLVRYNVVTAFRSWQERINAANGESGKYVSQGWKRTVDTSAPSYGEDAVNLGAVDKQYAAVENNPFADGEIILKMVIQGKWYRLIFPFDNTRFHEGKVTLPVIKVENDQPVFIFTVATDNPVVQFSGDYTIGVDVGINDYATVVVRNSKTGRVVHQTTLSQRTHSLWNSVRASERQVRTLNKKADKLLYDRQAHMCALDEAQLHREAASRKKKELAVLAAQEIAYLSHFYGNAVVAVEDLTWVRNTMQNGRWNRGAFIQWLTHYVTQNGGWVVAVNAAHTSQLCHICNEQVAHPTHKVSLCPKHGVMDRDVNAAANIAARAVSKVEKARKTRAKNRKLQPSVPLKTPIARDSLKYPGRDRTKHAPTPKRKNRVAGEVNLPISPARVNMTTVLADWDAFGILETSKAAINQGNVTHECRLCSLN

SEQ ID NO: 6329 - protein, 417 aa, Microcoleaceae sp.
MIVVERHYIDRQHQFFQQFDNLSFLSKNLYNHSNYWMRQHFFKSGSSVDSALNLKQLYASVKSTNDYKSLPAKVSNQVLKQVIHDWSAWQNSIKAYHQDSHLFLSRPKIPKYKHKTCGRNLLIYDNQSLGQRGKKKNNGQLHLSQTEMIIATKAKDVIEVRIVPKTATYIVEVVYEKPVSLVDLNPKLIAGIDLGIDNLVALVSNKPTFTPTLYDGKHLKSINQGFNKRLAFLRSQLATGKYTTRQIQQITLKRNKRVENYLHQTSSLIVKQLVDAQIGQLVIGLNVGWKQNLELGKKTHQTFVAIPHAKLIEMITYKAELLGIKVTVTEESYTSKCSFLDLEPVGKQESYQGKRVFRGLFRSFHGTLINADVNAALNMIRKVSGNSPFEGCSNRLEVFAVSPVRVAPVRKKPQKVR

SEQ ID NO: 6330 - protein, 411 aa, unknown
  TnpB Polypeptide
MIRSAKLKIYELNTGKNEVLSEFRAAYSEAVRQFIDIFWKEQKRIESKPSKEFTNQVQSEVLSDRAIQAAAKQSAGIVNGTMKKHLARQHRIKELIEDGMFKKARKLEQIDKKRTVSKPNPRVINPELDSRFFEVDFNNKTSFDCWVKLQSLFNRSYKNVSHRIVYIPMNRHKQFDKFFNNKEFTMLNSIMLKENFVEFRFEKKDIEKKSVSMNKMLGIDIGIKTAFSCSDDQSSNADIHGHTLESIILKKARKKKGSIGFRKAQTHLKNHIRWALNKINFDGIEKVRIEKIRYMGKHKRLPRRVKGFTYKDIFDMLKQKLELLGVQVEEVQPAFTSQRCSHCGWVRSANRSGKQFKCDKCGFSYDADLNASRNIVLDLETIPVKKIRSSGLNRTGFYWNPKSEEPIVSHT

SEQ ID NO: 6331 - protein, 372 aa, Gemmatimonadetes sp.
MKRVIQIKLLPTTEQAGALEETMRRFNAACNGVAKKAFERQLANSYALHKLYYYEVREQFDLPADIAILTFAHVAAAYKRDKSKQVSFRPLAAIPYRKGAFRYKSLTTVNIKTADGKRHDISMVMGDYQANQFDQVKQFAELVRRKDGKWFIMATVEHEPEPPCDTDDFLGVDLGVENLATDSDGEMHSGEDVEEVRVKNQTLKQVLQSAADLAANHRRRKRIRKKLKRIADRESRFRRNTNHVLSKRLVEKAKDTGRGIALEDLKGIRDRIRFRKPQRNRMGSWGFDQLRQYIAYKAQQAGVLLKIVDPKYTSQMCSQCGHIESGNRSSQSRLCCKQCGFELHADCNAARNIRAKALVNEPIVSAYAAAAG

SEQ ID NO: 6332 - protein, 404 aa, Moorea sp.
VIILEFKAKGKKHQYAAIDEAIRTVQFIRNSCLRYWMENKGVNKFDLNKYSAVLAKKFPFANALNSTARQSSAERAWSSIARFYENCKKKVPVKKGFPKFHKTCRSVEYKQSGWKLSPNKKSIIFSDKKCIGKLKLKGTWDLWRFEKKQIKRVRIVRRADGYYVQFCVSVDVIEEVEPTGTAIGLDVGLKDFYTDSIGKTEPNPRFYRTGEQRLKFYQRRVDRKKKGSTNRRKAINKLGRQHLRISRQREEHAKRLARCVIRSNDLVAYVRAACRRQDLRVRNLVKNHCLAKSINDAGWYQFRKWMEHFGSKFGKVTIAVNPAYTSQKCSECGEVVKKSLSTRTHSCKCGCQLDRDYNAAINILKRALSTVGHTGTWVIYPNAYGELSSTLPGSDLVEQDNSLK

SEQ ID NO: 6333 - protein, 409 aa, Microcoleus sp.
MLVFEAKLEGTKQQYDRLDEAIRTARFVRNSCIRYWMDNSGIGRSQLSAYCAVLAQEFPWAGHLNSMARQASAERAWRAISRFYDNCKNAKPGKKGFPHFKKHQTHGSVEYKTTGYKLSEDRRTIAFTDGFAAGSFKLWGTRDLHFYQLNQIKRVRVVRRADGYYAQFCIDAKRIEKREPTGKTIGLDVGLTHFWTDSDGQTVENPRHFRKSQKALKRLSRKLSRTLKGSKNRVKARNRLSRKHLKVSRQRKDFAVKLARCVVQSNDLVAYEDLKVRNMVRNRHLAKSISDAAWTTFRTWLEYFGKVFGIVTVAVPPHYTSQNCSNCGKIVKKSLSVRTHVCPQCGHRQDRDWNAARNILELGLRTVGHTGTLNASGDIDLCLDGETPPSKPSRGKRKPKEQSLESPRL

SEQ ID NO: 6334 - protein, 412 aa, Streptomyces sp.
MIRAYKFLMRPTAGQAAALSAMLADHCSLYNGALQERRDAYQHVSRTRVKYGDQSAQLKEIRAFDPERQGRWSFSSQQATLRRLDKAFTAFFRRVKSGEAPGYPRFRGVSWFDTVEFPKDGDGCRWDSTPHDPVTRVRFQGVGHVKVNQHRPVIGRVKTVSVKREGRKWFVVLTAEREQPEPLPNTGSVVGIDMGIVNFLADSNGAFVPNPRHGRKAAAKLEAAQQALSRFPRRKAKDRTANHRRAVEKVAALHAKARRQRLDHAHKAALDLVRQHDFIAHEDLKIRNMGRAPAPKPDPDEPGSFLPNGAAAKAGLNRSINDAGWGVFLTILHAKAESAGREVIAVDPRNTPPQAGGTPTRRCPECGHTAKENRPTQEKFHCVSCGHNAHADTVGALNVLRVGLVRRDANQA

SEQ ID NO: 6335 - protein, 396 aa, unknown
  TnpB Polypeptide
MKQKRAYRYRFYPTVQQTQLFARTFGSCRYVYNWALRLRTDAYYDRQERLYYSDLSAALTGLKKQDDKVWLNEVSSVTLQQTLRNLDRALLNFFARRNEYPNFRKKCNRQSAELTGSAFKWDGEQLFLAKMGGPLAIRWSRPLPEGSRPTTVSVSKDTADRYFVSILVEQDITHLPTNENTVGADLGLKDFVALSTGEKIGNPKFFTKDEKNLAKAQGRHAKKQPSSNNRNKARLKVARIHARIADRRRDFLHKLSTRLIRENQTVCVESLSVKNMVHNRSLSKAISDVGWGEFISLLEYKAEWYGRHLVKIDKWYPSSKRCFNCGHILNSLTLDVRHWTCPECGIVHDRDVNAAMNIKAAGLAVYNASGEAVRPGRIRSNRARLNEGRIPSFQAR

SEQ ID NO: 6336 - protein, 390 aa, unknown
  TnpB Polypeptide
MEIRRAYRVRIYPNKEQQQSMLRTIGACRWVYNHYLEERKNYYLETKKTLPLKLMSADLTKLRREMDWLSGVRLAPLQQSIRCLDVAYNRFFRKEAGFPKFKSRKDCKQTFRKPNKWRIEGKKLLIQSDIFVRARGKLPPSNAKLGTLTIFTTRTGKWYASIKSTEYTETPTERTPPIGIDLGLTHIAITSDGKKYDNLTFAKKQTKRMKQLQQSLRRKQSDSNRREKTRLKFARLHEKIANQRMNYLHQVSSAITSKNHALIAVEDLAVANMLKNHSLARSIGDVGWYDLSKQIEYKQKWSGGQFFRVDRFFPSSKTCSNCYFVRQSMSLDAREWTCERCSTGHDRDINAAKNILKQAEVQLGVEGTDGSRKVRVTGSVKRGYSMGVTL

SEQ ID NO: 6337 - protein, 293 aa, Synechococcales sp.
MPTNLTFNSLKELRILPRNGCFYAEFVYQKPDVETNLDKSKVLGIDHGLDNWLSWVSNIGKSFIIDGKKVKSNNQWYDKQIGKLKTNKPQGFWSEELANITEKRNRQMRDSINKTARFLINWCLKNKVGTIIFGWNKGQKNGINIGAKNNQKIVQIPTAKLKDRIAQLCAEYGIEFVETEESYTSKSSFLDNDELPKYGEKPVQEYKFSGKRIKRGLYKTQNGFLINADLNGAANIIRKANQNVSIQTSFDLSEVCREVLSLPHLYDIFNNLKKSYKKQASKNVVLTRFLKSA

SEQ ID NO: 6338 - protein, 397 aa, unknown
  TnpB Polypeptide
LSNKNSKFKQKIIIAHISTNMKTYKYRLYPNKGQTIKLNITLDSCRYLHNACLQQKIEKYESEKKSISAYDQMKNIKHFNIPGLENVHSQVIQQVIFRLDNSFKAFFTRIKHGDKPGFPRFKSGDRYNSFIYSQHGFKICNNTHLKISKIGIVKIKLHREINSVIKRLVIKRNPLNQWFACFIVEENNKITPTLIKSKVGIDLGCKTFATLSNGDKFEHPHYYRQSEEKLSKMQSKYSLMKEKPRENKQKIKMKKSLNKLHVKIANQRSDFLHKTSRILVNTYDMICVEDLNIKHMTMDNFKNLNKSILDSGWASFLDMLVYKAENAGKTVIKVNPAYTSQICSSCGALVKKELSERMHVCECGLNIDRDVNASINILSFGTKLFRSSDLIEAPCVS

SEQ ID NO: 6339 - protein, 612 aa, Bifidobacterium sp.
MPRGTNDNDQQFRAIITGHLKTRLMDAWRDSTDTFERLPDGTWAPAPYDENMADGSTPVAWEDVADPMDPKPDRTGCALVTLEDAEDHHRVLLVKGVTSFRVGMPGISMPGGTTPFFVPFLSHYARSDIIVIMSQKVVIESVQIRGAAPYLGMSATPDGQQVPLYSTNPDIVMRWLCDGWRCRYNQLRSRRTKWDRESQTAVPLNGRPDMRSDRQARLECSWLTAMPAMVLQSPNRIENTDWWSANKRRRTLKKKHRNPGMMPRFKSRHDDLYFVCWHNKGANANYRRLNRHHGEVVITGQNPGAYRLDGQPCRYSIHIRVRVSQPIRDYTSVGVNWTKRTLVFVNDPLPIQREASRSIVGLDRGCKHTLATSDGRFIDLPKHRLERIDREIRRRQKSQAHRINMSGKDVREYVRQPSRTYRKVQREINGLYAKAHRIIDDWQHKTTSMLVKRYDLIVLEDLNLQGMSRKAKAKNAPGRPSVFLPNGQAAKRGLNRSLRSAALGGIADKLEYKTRLADDSLLMLVNPAYTSQTCSECGHCERNNRESQAEFHCKKCGIRMNADLNAAQNILDRGWRQLSGSDGAGHATMTQDVHPAYRGADAAIGACGTSAS

SEQ ID NO: 6340 - protein, 309 aa, unknown
  TnpB Polypeptide
MITTYRLHRIIINLRNLNKCPNKTYHEESFQKNFTCKPEDRQSLCYNFILKRDKENKQYLIVSVTMKLKAYENSYYGNGAISMDINYDHFALAELDETGKLLDQKLIRFDLMNKSTGQVTNILGAAVKDIFDWCAEKDKRLIVEDIDLTIKLASRKYGNRKGNHHMTLFAYQRIASSIENQSLKREIAFYKIDPAYTSQMGKFLFMRKYGISIHQAAAYTIGLVGLGLYEKLVPDSRMLNLLKTKEGVVPEFSQETYKNIWARITNTFSGIRKHFFYRSIPYEVLEERKRPSLRTLAAEMKIRYMPIFE

SEQ ID NO: 6341 - protein, 370 aa, unknown
  TnpB Polypeptide
MKSIRTYCFKLYKSKRNTKLHRQINAAGLIYNHCIALHKRYYRLFKKQLNSNKLKVHLTKIKKLTRFSYIKEIGSQAVQDIAERIDRAYKLFFENLKRKVRTAPPSFKKVAKYKSLTLKQAGYKFLDGNRLRIKDTVFKYFKSRCFEGKIKTLTIKRDSLGDVYIYVLCQTEENEVLARTGEMVGFDFGLKKFLTASNGKDIEAPLFFKENANAVRKANRNLSRKKRGSNNRKKAKLALARLHKKVANQRSNFHWQLANYLVGQYADICIEDLNLKGMQKLYGRKISDLGFSEFVKILEYKASRTGARVLKVERFYASSQTCSCCGTINSTTKDLRVRAWTCPVCGEHQDRDRNAAINIVRKAEELNDIA

SEQ ID NO: 6342 - protein, 415 aa, Campylobacter sp.
MQITKGFKYRLYPNKEQSLKLSHQCFIYNQAYNICLNLQQEQWLKNKELDKKERTYLSATQIDNQVKLALKARNLEFKSVVAQQARINANRALEQAIKDKNKGFPKFKNSKLAKQSFNWNNQGYQILEFNDKFKIFRLMAMPIKMRYHRALPNNYKLNQITISKTHNKYFVSFSITYDEPNVVLMSSNKIDINRAVGIDMNINEIALSNGALLLTCSKSINKAKYSTTFKRLMRKQSKRVLKAKKDKIKLGSNFRKTQIRLNKIYERASNIKKDLAHKISNQIVKNFDLIVVENLKVKNMTKRAKLKNVKAKSGLNKSILDTSFYQFLSFVEYKAMHNGKVFTKIEPQYTSKACCKCGTIKENLTLKDRVFTCDNCGYVEHRDINASKNILDRGLKSFGLGTSLLDYKQEALRVS

SEQ ID NO: 6343 - protein, 448 aa, unknown
  TnpB Polypeptide
MPPLRTVVVSQVFRTVVVPHSAGPELYRVLLEVRSAVNSLVVDWMSHPAESRLDASRRSFLDLRARYPHLDAGWCTTITTETLAVLNAWDRSLRRARRQDLQRFDRMVRSVPRRKRLKAGLRSSLFALRNGQLRIRLHQDRQVIIDLTHVQNPLFAKYGMASRWTFGLTVTPTRLLFHFRIPHEVHEASGVAGIDLNFEQAVIACSDGTARAIDLTPVLRIQSRMARKRASVARNISKDQRHQKMVLRRYGRRERRRTDAALHQISNDLVRTIGDRAVVIEDLTDVTHDALHRDLRSPESRDRLSRWTHGRLVSMFSYKLNTPMVRVNPEGTSRECPRCGGHTAPPREERAFVSRATRQPSRMSRRTTCEACGAEWHRDVAAAIAVLARGFSFLRGATVPQSARDALLKAAEWRSIDGRLWGPIAEPVKGDDAIPEPLGKPEPHSDRL

SEQ ID NO: 6344 - protein, 244 aa, Acidilobales sp.
LDNRIVIPFKSSKEIKVIRVIGWDSNELSLDGYEPSIGFIHVDLRPLQSMKIAYERKKSIAQRKGIRELYEKYKARERNREKDFRNKLSAGFRRLLPNSIHVFEDLDKEDLVTRKKARRKRNHRTLWKRIHKRISGVALTASVDPRKTSRECPRCGFLVETQEGHIFKCPRCNLEMDRHKIASINIRRRYLECKRRKKRKTRMQGFPHSYEPEESMKVELWVGVTPSGRSPVIWISMKGVLRAM

SEQ ID NO: 6345 - protein, 402 aa, Actinobacteria sp.
MARSIWTGVITFGLASLPVGLYTATQDHTVHFHQLQRGSADRIRNRRVNERTGRDVPSENIVKGYELTEGEYIVVEPDELDQIAPGRSQTIDITDFVDLADIEPVYFDRTYYVAPRGKEYAQVYELLRAALEESEKAGIATFVKANQHRAVAGRVKTVSVKREGRKWFVVLSAEQDQPEPLPATGSAVGIDLGIANFLAGSGGEFVPNPRHGRRAAAKLEAAQQALSRFPRHKAKNRTANHQRAVDKVAALHGKVRRQRLDHAHKTALGLVRVHDFIAHEDLKIRNMVKAPAPKPDPAQPGSFLPNGAAAKAGLNRGIADAGWGVFLTILLAKAESAGREVIAVDPRNTSRECPECGHVAKENRPTQEKFHCVACGHAAHADTVAALNVLRAGLARREAQPA

SEQ ID NO: 6346 - protein, 435 aa, unknown
  TnpB Polypeptide
MAITVSQVNGAFQFSGRAYNPTEAKNEALEPYGMILHNYGLVLSLLPSSEQKTMFVQQIGNARFVRNHYLNDRIEYYKETGKSLSVNEYKEHMLPKLKEEFPFLMQSDKFALESSLENVDAAYKNFFAKRAKFPKFTSKNKPSGNCYKTKFTNNNIRVEMVDDLPMLRLPKVGEVQFILPAGSKLSDIVPPRTSILSVVIKRVGDSYTASLQLEAIVPKPDEITKVNERDILAADLGLKHFMVIGGVDGEEMIPNPRWIKLHERRLRRLQKSMSRKQYNEKTHIGSKNWNKARLKVLKEHKKIANQRKDFHHKLSRAIADSCDVFCCESLNIKGMVKNRHLSKAISSVGWSQFLEKVKYKMEWLGKRFIQVDRWMPSSQICSSCGYKNPEVKDLRIRKWTCPKCGKVHDRDINAKDNLLKECIRLLKNSGVAVAA

SEQ ID NO: 6347 - protein, 411 aa, unknown
  TnpB Polypeptide
MCHIAKNVYNDAMVILHNQYRTYGRIPSAYNLNKINSLYINSKVLNAYVAKSIDNEAYNAMSKYVKNPKATRCPKLLSEDELFPLIIEHKNVLASCKKRGKIKFPVSSLITSNELENVRLKEKIIREYKDVEVKVERFEINIPKEVKDKNIKRVNIVPRFDGRFFIVNITYLEGKENQEIVSQNRKGTLAIDLGINNFATCVNSNNNESFIVDGKYLKSRLQWFNKQIAYYSSHLEKDQKITCRIASLYMHKNWTIKTYVNRASRTIINYAIKHNIKTIVVGWTYFYKDKKFKLKTQDDHKRVIQLFKQFPLAELKERIRFMCVDNGINYNEVDEKYTSKCSFYDGEEVGFHYEYLGKRIKRGLYKTKNGILVNSDVNAALNILKVSKTEDDETIHRLMNSGVTVPLRIRE

SEQ ID NO: 6348 - protein, 390 aa, Calothrix sp.
MKTSYQYKIKPTKQQAGKIDKTLDMLRHQYNYLLAQKFDWYEMNRCSIDRCPLICYLPELKEQPNYYSQKASLVQLKTYRPWYKEIHSQVLQEVPKKVELAFDRWLKGDVNGKKSGRPRFKGKGQYKTFTYTQFKHHHFVDNKITLSKIGEVKVIVHRQIPDGFDIKTVSVTKKADGYYVTLSLDDKTVPTVQPDFNPNNVVGIDVGLIDFYVASDGSRIAAPKHLRKAERKLKSAQRRISRRKKGSNRRRKAIQKLGKQHKKVADTRKDFHFKTAKSLLDKYDVVVVEKLNIKGLVKTRLAKSIHDAGWGQFVNILSFKAENAGLKVIAVNPNGTSQECSNCGHKVKKPLSQRMHNCPVCHTSLCRDLNAAINIKARGTHALKAQLMSL

SEQ ID NO: 6349 - protein, 487 aa, Gordonia sp.
MARFEVPAGWTVQAYRFALDPTPAQVRAFRSHAGGARFAHNVMLAVVKAVIDQRAAERSYGIVEAELTPLLNWSLAGLRKQWNARKDEVAPWWGDNSKEAYSSGLDALARGLDAWGKSRAGKRAGKPVGFPRFKSARARRSVRFTTGTIRVETDRHHITLPRIGRIKTHESTRKLARRIDNGTARVLSAALSEDASGRWHVAFQVVVQRAVAVPGHVGAQAPVVGVDVGVKADSLLVVATPDGREVARVAAPKSLTAAQHRLRALQRRAARQRGRYDSATQTRQQPSNRWRVTQQRIGRTHARAAAVRRDVLHKATTTLAQHHQVIVVETLNAAGMGSAGGSRKRGLNRALADASLAEIRRLLGYKTRWYGSVLVEADRWYPSSKTCSACLAVKTKLSLADRVFVCDNCGVRIDRDRNAAINLARLGDTRTLGEQSPTESGSVAGRGASQETDPAQAGDAGGDETSTPHNTTSVGQTGTASPQGEAA

SEQ ID NO: 6350 - protein, 360 aa, unknown
  TnpB Polypeptide
MIKTLKIKIITNDFQHRALLSTMKMFNQVQNEISEMAFEAKEYRKYHVHKIVYHPIKQKYKEFSSQLIVRAIDNVTNTYKIKRQKTHNQFKKNGAVVYDLRILSFDEETISIWTMDGRLKNIPIIVHNKELFKYRKGQTDLKYENGKWFLLVTLDVPDQEKIKTLGCIGVDLGVVQVATTSDGHSYSGDQIKKKRKQYFEHRRRLQKRGTRSAKRRIKTIGRKESRFRKDVNHQISKKLVEKAKGTNCALVLEELKGINSRTTVRKSQRNERLSWSFYQLRSFIEYKAKENGVEVIIVPSPYTSQTCSKCGYCEKANRKNQSSFICQSCGFAANADINASINIKNLGDQSISLLLAAKAA

SEQ ID NO: 6351 - protein, 431 aa, Natrarchaeobius sp.
MYYTYKYRLEPSDTQREELDRHRDICRQLYNHTRYRLNEYRENHSELPSMTTLRSELPDLKKWWDGLSDVYSKVLQTVVERLFDNLSSLSALKQNGYGVGQLKWKPPRDFRSFTYNQSGFKLDKKGGQTVLSLSKLADIPIRLHREIPDVHKSDSSRAAHQKSEISGDDAALKQVTLKKEPTGEWFATFGVEVVREPPQKPDRPKNVVGIDVGILKYAHDTDGHAIESVDLSDEQERLEREQRKLSRKQHGSNNYEKQRRRVAECHATLKNKRRDFLHKLSDYYAREYGLVAVEDLDAKGLVELDGNSRNRAGAAWGTFLRMLEYKCEREGTHFVAVDPAGTTTECAACGVSTDKPLWVREHSCPSCGFTADRDWNAAWNILSRGIKQLGAGRSESTPVETALPTGTHSVPAKRVVEAGSPTLKREPSGER

SEQ ID NO: 6352 - protein, 486 aa, Streptosporangiales sp.
MSVQCSSRQAGTITRVSDEQYRMADRNLRKVRDSLRRRVRAIETRVSIPVGEKQGRTRGYATPAERYQKLNRLKSLKADLVRVEQDIAEGKVSVVRGGKDLLRKRGGLNAEQLEEWRPRWEAGRLFLIADGDKVAPWGNYTITWNPDKSWVEVVLPKPLAHLANRPGCRYRLDCEVTFSYRGDEVAAQAATGAVHYEIVPDAGTGRWHLEASWKTNPGPFVSLEELRAGPAVAIDLNDGHIAVAVLRADGNYIGAPFTIPLDLEGQPAAVRDGRLRAAVTTVIATAKKHGARAVTIEDLDFEEARAEGRERTGNRPSRGKRGKRFRRTISGIPTAKFRNRLVQMTSNVGLSVIVVDPAYSSRWGAEHWLGPLREQHPETTGHHAAALVTGRRGLGHRARRRANGNRPAPEDAGRPAPARARKPPTARPAPRKRVVPPGAWPPRGSKTGLPDRTTVRNQVSQDRAAAPTERYPRSLSDEERYLPCEG

SEQ ID NO: 6353 - protein, 416 aa, Thermoplasmatales sp.
MNVRRTEQVYLRENETISHMCHLSKNLYNQVNYILRQQFINKEKLTTYGNLVKIFQEPSEDEDHNNYQKLPAQTAQWTIRKVVMSWHSFFKAIRAWKKHPDKFMGRPGLPGYKARDGEFMLIFTNQQCSIENGILKFPKVTGMGVKTRLSENEVKLKEVRIVPQGTGYMMEIVYEKEIADLSVTKPERIMGIDVGVRNLVTIGNSIPEKGIAVKAGLLKSINQYFNKELARYRSINDLQGNERKQTKRIQRLFMKRNRKVKDIMHKVSKSIVEYASSMGIDTIVIGHNSGWKDSVNIGKRNNQNFVQLPFNMLITQIKYKAEEAGINVMMQNEDHTSKCSFLDNESIEHHDTYMGKRIKRGTFRSADGKLIHADLQASYNIIKKAVPEAFANGIEGIGLYPRSLSISQMITSKGQS

SEQ ID NO: 6354 - protein, 318 aa, Halobellus sp.
VSLSTVDGRVECEYVLPDDTDGTPIGDYLLNEDFEFRMSTLQYDRFEDVFYLHARMKRTIADSEEERSSSDTHSENLTVLGVDLNVDGYFVVTSTGTFIESADYLNHRRREFEKTRGSLQDTGTRSAHLTIQQMSDREHRWIQEVLHSAANDILREARRVDATHVAFENLTGIRDRMADARRFHAWAFRQLYEYVEYKSEAEGVAVEQVSPAYTSQRCSKCGCTLEENRPSKHKFCCQKCGYELNADYNASKNIARKLAKRLHSEQTSPSGGATYQLALTSGMLNLNGDFQASDRVSAEGESTDKPLPQRARSSDQAK

SEQ ID NO: 6355 - protein, 438 aa, Halobellus sp.
MSIVVRRTNTFAVRPLSDQDEQLLRELLDASASLWNELTYERRQQFFDGESVWDTADYRKQYVGVLGSATAQQVIRKNSEAWRSFFAAQEDGEDTAPPGYWGNEDEGRELRTYIRNDQYTLETGERSRLEIPVGQDLKEEYGLGYHDRLRLEVAGDPKWEGEQGRLELYSDEVDDTFRAFQPVTVPDSRRDSPLADESAALDVGANNLVACTTTTGQQFLYEGRDLFARFRKTTEEIARLQSKLREGRYSSRRIRRLYRKRTRRRDHAQDTLVRDLMERLYDEGVATVYVGDLTDVLSAHWSAEVNEKMHQFWAYRSFIDRLATTAKEYGITVEVESEAYTTAECPVCGERDDTVRNGDVFRCSCGYERHADLGASRTFLERHAGVNLEVGSMARPVRLTWDDHNWSELSRSPERASPNEERTNRSTGDGKLASVGTA

SEQ ID NO: 6356 - protein, 413 aa, Halobellus sp.
MEYSHRYHAYPTQEVAERLEHHLNVHRQLYNHVRWEYENSSEDDKPSEYDQNNKLPEWKRKWPVFGELHSKAAQATVARFYRNLSNLRKKKEKGYNVGRLKRQSPPEYRSVTYNQSGFDLDEKRDRDRFAYVRFSKIGLVKIRYHRQIPDHATIKEVTFKKETTGEWFVSFGLETDDATLPEKSDVDSLDASNSVGIDLGIQNYIHTSDGKTVDWLDLEDEYERLRREQRKLSRKEKGSNNYEKQRREVAKVKRHIRRKVLDYQHKITTWLVREYDAVFVEDLNVKGMLEQSHNARNKQDAAWRQFITLLEYKADLYGCHVVQVEAAGTTKECARCGVETAKPIWVREHSCPACGFETDRDANAAMNVLQRGFAELGLGWPESTPVETALPTDTDDFREVSAKRVIEAGSLGA

SEQ ID NO: 6357 - protein, 522 aa, Christensenella sp.
MVIKTIALQIHKPTAEKRKVMDRAIGQYNDAMGYLLEHTKGYIPDIVDEMHSGASFLSRRITALLSKELMDSLNDFGVQPFKDSLKLDYAMTMIAWIALRRSQKNARYPRLVREGRIADRAIHELLCSYDGGGIGRRALEAQLKKLYDGLHMKKPILFGRYAKNRDYCLLYDEQKDRFYAKLYLMNVRDEGRRGGIMRGNSCLRYVAGDGGLLEKDNKRERYLVLPLSFGKEQQKVLRQGLSDPSIFKTARLKEKNGKYYLLVNTAAAPAKSLPEKTFLGVTRSLVAAARYAVVDQEGRLVAERTVRMPEAPSKNDFHTAAKQIVLAAQEHKSKIVSYHLGHMGDQLSREGRLACLTAGQFNKLMSMVSYKAELKGLARPVTVSPRGLFYTCPRCGANTLKNRFMQDKFLCVKCGFAGETESVGAANAARRLQKYGGSLLPFEASVAHGRITLSNKILDIRYETDYTREAIDGFYDYIGELVEKWKANGNAPIRAGAKKISYYKKFIGITNPREEIAIVDVK

SEQ ID NO: 6358 - protein, 396 aa, Actinoplanes sp.
MSVILRSNSIIVFGAICRAVWNTGLEQRREYRRRGAWINYVDQARQLAEAKKDPLCGWLTIAPSHILQQTLRDLERACKTHGTWKVRWRSKARTAPSFRFPDPKQIRVERLNRRWGRVLLPKLGWVRFRWTRPLGGAIRNATVVRDGGRWYVAFCVEDGVAEVPPNGKSAVGVDLGVAVAVATSDGVMHDREFVTAGEQRRMRRLQQRLARSRRVHGRARQSKRRDAVRAQMGRLHARIRARRTDFAAQTAHYLTTEHGLVVVEDLRVTNITRSARGTAEQPGVNVRQKAGLNRAVLNKGWGGFLLALDHAARCHGATVVKVNPAYTSQRCSRCGHVDAKSRKSQAGFVCVGCGYRDNADVNAAKNILAAGLAVTGRGGLAVGRPLKRQPPGRLVA

SEQ ID NO: 6359 - protein, 303 aa, Moorea sp.
MQFGYRYKLKPSRQQKATMNRWLDMLRSQYNYLLRDRIESFDQAKAPRLGNYCDLKSKSEVCPLTCSVSKSHSVGYPWKSNKKNPRRTAYEAQSSNLPILKKERPWYKTINSTVLQQALRQLDVAFSKFFKGESGYPKPKRISRFRSFKYSPGQVKVDGNRIYLPGIGWMGFFNYRPIPEGFNVKSVTVRRKARGWFVSLQIEDNSIPVPPLKARDEINPERVKGCDLGIKKLISISTGKMIANPARTKSFKRRERRLKLRQRAASRKRKGLRIEAGPTPRWHLSMNALLIIVMPTIGRLPIS

SEQ ID NO: 6360 - protein, 424 aa, unknown
  TnpB Polypeptide
MKTMILTQKNRLKLSSTKLEIVKQLAYYSARLYNVALYSVRQYYFNNNAYLNYAKNYHECKGNENYKLLLSDTSQQILRIVDRNFKSFFGLLKLKSQGKYTEKIRIPHYKKEDELMNITIQGRSARIRKGYVIIGLSKAFREKHQPPFKELKFKLPKNITVDKLQEVRILPVFNGLEFDIEFVYKKEFEPISVDKNNYLSIDMGLDNFATCYDSNDGSSFIIDGRYIKSINRHYNKQKAYYQSILDRQNIKVSKKMLNLSRKRYNKINNYFNLAVKYITDYTISKNIGSIVIGDFSDIKQNINIGKKNNQNFVNIPYGIFKRKLQSKCEQLGIEYNLQEESYSSKCSFLDKEPIKKHDTYKGKRVKRGLFRTSQGYLINADTNGAANILVKFLTSNGQLQHLVIANRYGCVNHPPRLKLNDLVA

SEQ ID NO: 6361 - protein, 317 aa, unknown
  TnpB Polypeptide
MMLKGIKFRIYPNEEQKQIIEQTFGCCRLIYNKALAMRKEAFEKNEKIGYKQTSAMLTEMKTQEEFAFLKEADSVALQQALRDLDMSFSRFFKKYARYPRFRKKSDNHQAYRTLSKHICFVGNCIKLPKLGYVKVKQSMEVGQIRNVTVERSPSGRYFVVVCTEFVPKKIENKGNTITLYLGTDFFYKDSNGNVVNDPPGLDELYKKMQREQKKLSRKESGSKNREKQRIKLARVHERLSDKRNDFLQKLSTELIRENQTIIIDDSEVRDKGVNYLQSKSVSSISYCKFIEMLKYKAQWYGNEVIILGEEEEEKAEA

SEQ ID NO: 6362 - protein, 400 aa, unknown
  TnpB Polypeptide
VRRRGRAEGYQGVQARRVFPEREDEKAVLDLTRRFSAAKRFAYNRLLEGRTREELKRRDGPLCPRFRLNTRYADEAIEKARGVLDSARELGKDPCKVVFGGRKLFEQLKRKHLSGKDWKRLQREWKEKRQGLYARGDGSKGGNLNLRLLVRAGALWLRVNLGDGTYAQALVRTGHPHLDKLLERVHAGLPYNVGLSLREGQVQAHFTWPEELPPPTHTRENGVLGIDVNADPYHLALAVVSPEGNLARHLTLPLEEVDLAPNKGAKELLLWKVAHQVVALAEGHGVAVATERLKYLRKSERGDGSGRHFRRKQHRFAYQSLLEKIHALARKRGVEVLEVHPQDTSSIGMLKYAPLLSLSKDIAAAYVIGRSALGLTEKLPKGYGALLRDEGFHRARLREL

SEQ ID NO: 6363 - protein, 367 aa, unknown
  TnpB Polypeptide
MKLVANIQLKPTKEQADLLRRTLERCNEACSFLSRIGFDTGRVRQFDLHKIGYVEARARFGIAAQVAVRCIAKVADAYTTHKASGREPKLIAFRRHSAQPYDDRILRLMPDAVSIWTLDGRETIPFVCGERQRKLLAFRKGEVDLMLVRGKWFLACVCDVPDPGEIDVEGMLGVDFGVVNIAFDSEGRSYTGADVERVRQKFARRRRGLQARGTQAAKRRLKKLSGKEARFRRHASHCISKEIVATAERHRFAIAVEELTGIRNRVRARKSQRNRLHGWAFAQLRQFVAYKAKMAGIPVVAIDPRNTSRTCPCCGVVDKANRKTQAEFSCVHCGHEAAADYVAALNIRKAGVARNPTLSSAPGLPSG

SEQ ID NO: 6364 - protein, 536 aa, unknown
  TnpB Polypeptide
MTNEKYNKILKQFHKLSDRHILVVETYMSSSDIQKVVVLSDRIRKAGNELVGLMRKNYNQLMRTKKYRKLLKLYGFTADKKKRKDLANQLNEMQKQYNVTWDYCRKSMIPIGKKYGVDAVFALTKAEDVWRGTEKCLYGNGNTIHFSKYGDLSCIRAKQINRGIPMSVKDNQLQFKVGRTTFCIKVVDRFQTEEVNAVLDYLAEPEIIDNKAIQVLLDEAYCIDTYRPCYATLVPKRIRGKYKVYLHLTIEGKAKPKYDKFGNPRHKLGKGIVGADIGTQTVAYTSNTEVGLKNLAERGNSIQTSERKERLLYRAMDRSRRATNPQNYNVDGTVKKNCKIWNYSNHYKKLKAKHSELCRINAVNRQLAINEDANHLRSLGDVFITEPKNASKLMKRAKETTINSKGKFNKKKRFGKSIKNRCPSGFQTTVEKKFKVSGGIYIEVPNNYRASQYDHTADIYIKKKLSDRMYELVDGTLVQRDWYSSFLLYCYDYATQNIDKDKCIKEFEKQYNKEKALITWIKANKIRILNSGIKVT

SEQ ID NO: 6365 - protein, 234 aa, unknown
  TnpB Polypeptide
LSEITQRIVNAKGTDLRSQPWLVRIKEKGYIPTTKDGYMIRSGTVSVKAGRFYVSVLVEIPDINIDNNSNEGIGIDLGLKDFAIVSNGKTYRNINKSAGLKKLEKQLIREQRSLSRKYENLKKGESTQRANIQKQKLKVQKLHHKMDNIRTDHINKTIAEIVKTKPSYITIEDLNVKGMMKNRCLSKAVASQKFYEFRTRLKAKCDENGIELRVADRFYPSSKTCHHCGSVRKI

SEQ ID NO: 6366 - protein, 400 aa, Spirulina sp.
MRVIEFKVKATQTQQVAILEAIRTGQFIRNKCLGLWMDSTKEDKVNYASLCKFVTTLSNNTDTPFVSYLNSTARQASAERAWLAISRFYSNCKKGLAQKGYPKFKKFSRSVEYKTSGWKLAEDKKSIHITDKTGIGKLKLIGSYNREILDKLLIKRVRLIKRADGFYCQFVLDLERIEPFDFTGKEVGIDVGLNHFLTDSNGNKIDNPRFLRKAEKRLKKAQRQLSKKKKGSNKRQKQKSKVARLHLKVSRQRKDFVVKTAKALIQSNDLVVYEDLKVCNMLKNRKLAKSISDASWSMFTDWLDYFGKIHGKFVIAVNPQYTSQQCSSCGNIVKKTLSVRTHICSCGCVLDRDENAAKNLLQKANTVGRTEIQALATQRFTNGQTTHCLLGESLIDKVTG

SEQ ID NO: 6367 - protein, 404 aa, unknown
  TnpB Polypeptide
MKTNRVEQHIIKKNNPQWKLIDELCFKSKNLYNYANYIIRQEFINNKKWIRYNELFQLCKESEPYKEIGSNVGQQTLKLLDQNWRSFFAGIKEWNKNKDKFLGKPKLPNYKEKEGRYNLIIDNIKFSISDGYLRFSWSKLKPLNNKIRTNVNGKLMQVRFIPKSDTYIMEIVYEIDVPEKISYNNNIIGIDIGIDNLATVGNNIGLQSFIINGKPLKSINQYYNKEKSKKQSDLKLKHDKNWSNKLQQLTNKRNNKITDYIHKTSKYIINWCIENNIDTVVVGKNKDWKQESNMSRKVNQNFVGIPHSLFIEKIKYKCENVGINFIETEESYTSGTSFLDGEIPCKENYNKSRRVARGLFQSNGGEFINADLNGAYQIIKKVFPDAFAEGIEGVGLHPVRVNII

SEQ ID NO: 6368 - protein, 429 aa, unknown
  TnpB Polypeptide
MNYNNKINFRDTVPILKSHHFYTVLGQCFWQLKSLQSNIQNKIYFKDEDKIKQRVYNYCKPFIFQWNKLHKNVLKQSNKDKKNKEYQEFINNVLIYLNDEQLFNQMKQDIENRFWKIKSNYKIPQKKELQIWVDTYLTTKIEKKEFDWFFIISKNQKRTKKIYDNMVIPVKLSEYHKKTLEGKTIKNSLNLKLNKYGKIEITVVYEEEINYPESYPKDILGIDIGLKRLITDSNGEFIKQNVNIIKKVNNIVNKQSNRQTLEEHLKVKYNNNDFRLKDKRYLRQQTKVSDYVKNNNRYKIKQYLKSHTDYHIIMEDIKLRDSKTYDKKTNYLLRRLHIQHLKQDIFGYAKKLGIGVTLINPAFTSQQCPICGHISKDNRKTQETFCCVKCGHENNADVNASINIKNRLFEKRIKLNTPFWKVKQILQMK

SEQ ID NO: 6369 - protein, 468 aa, Faustovirus sp.
MNINKNYGYLLGDLESIIDRRNFETNKENKTSSGEYIYDNRTRLLSYITPSETFDYQTNGLVGKYNIKAKDSITISALGKVEISNYELPSEYIQCARKLRIYPTESDKTKITKLFHISNAFYNAAIDGIVKKKIFSESSKKVIREECKVSNDVCETIHINAKDAYYDTRDLATLYAVANYKAMLTNKSNGNIKHFHLSNKHSMQVVHFSEKNARFKKGKLCIHDMKINLRRCDAEWLAEHRIKQQVIIKKSKSKYYLIVPFMRKNQDNGKKSICAIDPGNRTLATYYSPDEIGKLGDNILDLIKPIRNKIDHLKKLRNSDMVKSNTRYGMKQRIAKLNTKITNIIDYHQWKFANYLTKHFRLIFIPRLANCVSKQNGKFTRELRTKINRDTRSLCHSKFIDKLTHLGNVYGCKVVETKEYYTTMTCSNCGRVNRKVGGNKVFYCKGCKFTIDRDVNGAKNIWLRSLTN

SEQ ID NO: 6370 - protein, 366 aa, Caldivirga sp.
MQKSNEAWNSFFTLLNMKREGKLSPFMRRVSSPGYWKDEATGRRRLILVVRQDRYVVDEQRRVIILKDFNLEVKFIGRLRWFGKQGRLEIHYDESKGAWYACIPVEVGVEEARTGRKSKHIVKGERRLIQIKSPKGNKAASIDLGINNLASVVVDDGTWLLYKGIRAKEDYFYMQRLISRIQSLRDALKGKLLSDAIDELNHEMRRLYGKLRRRLLHLYRNFASHLLMQLHELGVSTIYLGYPFNIAQQKGNKFTVNMWTYRKLMEAIELKAQEYGMRVFIVIEYNTSRYCAYHNVEVKRQPRGVAHCPKGHKLHSDLNGALNIMKKATGKTPLVIKKPLSFIVDHNKVAPVKRGVTPETSGNPHP

SEQ ID NO: 6371 - protein, 509 aa, unknown
  TnpB Polypeptide
VKYYDTVTRHRFITDNGVDAEQVSADLAQMIFWMAEAERDLLASPKFHDLALKTLKGDRPTGSLHYWGRKRLSRYDFEFQKHNMNEMLVSNVVSTLELYAMSVGLFQVMSTHTKETKPGKILSQYRDTYPNAPQPTSGMVRAHLRRYHLKGEHKASLPGVSAKLNLAVCDTYFAPKASRDDNDPLNVVVQVKTPSNGVTKIHLRLPSNTERFGDGKVCRPTIRLDNKGRVVFDLATEHEAQQRDTNKVVGIDLGKVEPFVATVINSEDKHRSAPYHANYKRRLGSLVKKEQQRRDLVTYLYEKADLCEKYNRTDHADTLRTEAKRVSAKATRIKHEISQCIASQIVSVADQNDAHISLENLSWLDSQGGRWPHAEIQSRIENTAKRYGLKVVKVSAKDTSRTCSHCGGKTINNSNTRVGVCTICGFELNRDVSASREIALRAVSNTRNCERMRSLLRQRAQMRSSAATRQSKPVTVLGGNQGHTGTSERKSEATLMMVRETLDSRGSPT

SEQ ID NO: 6372 - protein, 350 aa, unknown
  TnpB Polypeptide
MRFVYNWALARQIDSYELNSKKLSVTDLGKELTVLKNTKGYEWLYEVSNATLKESIRDLDKAYKNFFNGSGFPKFKSKKKSEPRFYSRYDRIYFQDNFVNLEKIGKIKCKADYDIDLTTITKFENPRVYFNGRVWVLSVGIEANIKTVKLNDFSLGIDLGISQLAITNIDELDTKNINKTNKVKKLSKKLKRLQRQCSRKYIMNKKGESYQKTKSIAKLEKKIKKLHSKLKNIRFNHIHQTTFKMVKAKPYRIVMEDLKVSNMMKNKHLSKAIAEQGFNIFLNQIKYKCEKNGIKFVQVPAFYPSSKTCSHCGTIKKDLKLSDRIYKCSCGFICDRDKNASYNLANYGLV

SEQ ID NO: 6373 - protein, 295 aa, unknown
  TnpB Polypeptide
MTLTGRDQRIDRAFQAFFRRLKAGEKPGYPRFQGHDRYHSFTYPQYGGGAVIDGGMLNLSKIGRIPLRLHRPLAGMPKTVTISREADGWYAIISCADVPMQPLPMTGQETGIDVGLKVFLVTAQGLVVENPRHFRKSERRLAKADKAGARCQQGSHGRRKAVARRAKVSQKVKRQRQDFHHKTALQLVRENDTIYLEDVQVAHMIRNRHLAKSIADAAWGQFRTILSCKAAWAGKSVMAIPAQYTSQECSGCGERVPKSLSVRTHVCPSCGLVMDRDENAAVNIFRAGQARQART

SEQ ID NO: 6374 - protein, 256 aa, unknown
  TnpB Polypeptide
VHRPLEGAFKFGRIVLRPSGWYLQCVCETAPTPLPRKDNAVGLDMGIRYLIADSDGQIVENPKYGQQTAARLAHAQHRLAKCTKGSHRRWKAKHNVARIHEHLGNQRKDTLHKASRRYVNGYQTIAIEDVQVANMVKNHHLAFAIHDASWGMFRIYLESKAESAGRQVLAVRPHYTSQKCSQCGVYVQKSLSVRTHVCPSCGYVADRDENAARNILQRGVQVLQEMARTEPSLSRGEGSSSDDESPLALKREAPRL

SEQ ID NO: 6375 - protein, 414 aa, Clostridium sp.
VKLSFKYYPKLNQQQLNIIEELSYHTTKLYNIANYNCREDTVKSYVEMNKIYNNNYHKQFLHSHNYQQCLKILEKNWKSYFASIKDYKKNPNKYLGQPRQPKFKNTNNKKNEIIFTQHAIRLQDNILKLSLSKEIKNKFQVQSLNFDLSKIKIPVDLITIKQIKIQWNNSKKQWNLNIIWAKEEVNIAKDYYNIMSIDLGLNNLATITFEDNIHSYIIDGKYVKSKNSYYYKEIARLTSIVMKQYKNSKYFKRTQQLIKLQTKRNNFIKDYIHKSSKRIIDLAIINRCHTIVIGDFKGIKQENTAKSFVQIPQQQLVEKIKYKAKLLGIKVVIQNESYTSGCSVLDLEEIGKDKYNKNRRIYRGLFKSNKGILINADVNGSYNIMRKYLKCTPKSLIKIMDNGFLDNPIRLRVA

SEQ ID NO: 6376 - protein, 440 aa, Streptomyces sp.
VSSELAEGARKFGHRARLVLSPAEVRLLDDQAHAARTLWNCLHAWWTMLPKDKRTLAAADAAIRQARKEIDFLAALPAQAAQAVLKTYFQAWKHCWEVRAGEPNFKARFRSVLSVDTPQGRDLQITRVHRRWGMVNIPKIGRVRFRWTRDLPVGKKANGDNRITGARLIKDALGWHITFRITALEAQPRPHAGPEVGIDAGVNLPLALSDGNHQDHGRPPRLPDGTSDRDKWLNTGEKARLLRLERRAAQLMRHRGPGRRSSNRLRAVYDQIGKLRAKAKRRATDWQHKTTTHLARTYGVIVVEHLDIANMNKSARGTIEKPGRNVRQKAGLNRSISQEAWGRTVTMLTYKTAKYGGTLHKVPAPGTSQRCSACGFTTPGSRESQAVFVCKNEGCGWSGNADHNAARNILHLYRMGLALIPAAGRAVVRRARRVKPATAR

SEQ ID NO: 6377 - protein, 397 aa, Streptomyces sp.
MRVRRAFKYRFYPTDVQAAELSRTFGCVRKVYNMALAARSEAWAQRRERVGYGATSAMLTAWKKTGELAYLNEVSCVPLQQCLRHLQTAFTNFFAKRAGYPRFKSKKSSRKSAEYTSSAFRFRDGVLTLAKMREPLAVVWSRPLPQGARPSTVTVSQDAAGRWFVSLLVEDPTVKPLPASGAVVGVDAGLEHLLTLCTGEKIANPRHERRDRTRLAGAQRQLSRKAPGAGANRAKARRKVARIHARIRDRRRDYLHKVTTRLVRENQTIVIEDLAVGNMLKNGKLARAISDAAWAEFRSMLEYKARWYGRELITVDRWLPSSRLCSVCGTLAEKLPLDVRTWTCDSCGTTHDRDVNAARNLKAAGLAVTACGAGVRPQRNTPGGHSATKQETLQREP

SEQ ID NO: 6378 - protein, 214 aa, Halorubrum sp.
MSTTVTKTLQATFAPPTAHEQSKLNDLLETYRDGLQEAFDSGASTMSAVSDIVTPYDLPYQVKAALCNYVPKLHKTYNAKELDDSHPIRLTNQAAKFDHSEERDYEFTWWVPRPGRGTNFWIPLRINPEQEDLWHDLVSEDAKAGEIRLQQHRKNWVLHVTVEYPVEEPATDGDATHIGLDIGETALFTAVPSRMVLRLTRSCVAETKRSISVK

SEQ ID NO: 6379 - protein, 513 aa, unknown
  TnpB Polypeptide
LPYGQKSKTDTFILTLPLITNSHDEAVLYSSFEKYCKAYNWLVQKTTEMWHQVRKTRKYRDLVSAIADTAPKSKERKALYKERTKLLESYGFTSVSFEKKLKAYAKYYHLHSAISQKIAARVWDAWYKFFYKNGKSVHYKKLDDFVSFAAKTNGTGIQFLDNNGLYIKFRGHCIPVKLRKGNTAWYQQEALERKVKFCTIKREMIRGQWRYFVQLALEGNPPIKCDSNGVMKHPVKQGRIGIDIGTQTIAFSGNDVCDLRVLAPSAIAEVRNGLTKEIARVMRQMDRSRRAMNPQYYNENGTIKRLKRKNGHKQIRHWNYSKNYYRLLHKLQDLNRKLAAVRKTEHYILANELLTYGNEFVVEDMNYKALQKRSKKTKINPKTGRAYTKKRFGKSIGRCAPALFIAILGQKVKCSGGNIIKVSTFETKASQFDHTDDSYTKKKLSQRFAKLSNGTVVQRDMYSAFLLTHLDESLQGYDKEAIDKDFQQFMKLHNEAKERLQNSHEWLPSSVGF

SEQ ID NO: 6380 - protein, 412 aa, Halogeometricum sp.
MVEDSTTRTVPIKLDVDESAADLLHQTTDHFLDAANHVVDVAWEPDWKLTSKQKLHDQTYYDVRDDSPLPANLVQAARNRAAEAVQGVIERWKGGKSASKPEFTSRFASYDARTVTINDDHATLATINGRVTAEFVLPDEHRETPHSSYLFNDNYDVKGATLHYDTVEDCFYLHVRTNPAVENDDVEQGDSKHVSVLGVDLGITNIATTSTGQFWSGGELNHWHREYEKRRGDLQQTGTRWAHENVQRVGRKQTGRFEQMLHTISNELVEEALENDCTHIVLEQLKGIRERLPYAKAVHKWAFHRLFEYVTYKADSEGLVVKQINPAYTSQRCSKCGFTHEDNRPHNNRQDEFGCLKCGYDIHADYNAAKNIGLKYLRDQQKSGRGGAPVGVRLNSGTLNVNGEYSPTVLHS

SEQ ID NO: 6381 - protein, 294 aa, Halogeometricum sp.
VSPTVNPVTRSLRLLVSNQKAPLSGDGFNLKNTSGRTRLWLSKLGEIPLTFHRDLPDNAEIKTVTVKKEPTGKWYAILGVETPDDPPEKPENPEKCVGIDVGILKYAHDTDGTAVESLDLSDERERLERAQRDLSRKKHGSANWEEQRRVVAERHADLKQKRRDFLHKLSNHYAREYDLVAVEDLDTKGWWNCRATRGTGQARRGGRSCECSDTSASAKERTSSPWIRAERRKSAPPAASRRISRCGCANTPARRVGSRRIETRTQRGNPFSRYHKAVRGGTLRINVLRNATRF

SEQ ID NO: 6382 - protein, 413 aa, Undibacterium sp.
MQRLQAYKYELMPNGEQERDMRRFAGSCRFVYNKALAMQQENHEAGNKFIGYVAMAKQLTGWRNGPDTPWLKEAPCHPLQHALKDLEKAYKNFFEKRADFPKFKRKGSGDTFRYPDSKQIKLDQGNGRIFLPKLGWLRYRNSRDVLGEVRNVTVSQSGGKWFASIQTQREIKQPLPTATTAIGIDVGISRFATMSDGAFIAPLNSFKKHQQRLARYQRRMSRKVKFSSNWKKAKARVQKIHTRIANARKDFLHKTTTTISQNHALVCIEDLQVRNMSKSSKGNSEQPGKMVKQKSGLNRSILDQGWGEFRRQLAYKVAWHGGMLLAVPPHHTSQTCPACGHVSKDNRQTQAKFLCVDCGYENHADMVGAINILERGYRLLACGESEQSGRSKKQEPTEATRKSSRSAVGIPVL

SEQ ID NO: 6383 - protein, 402 aa, Undibacterium sp.
MQRLQAYRFELQPNGKQQRQMRRFAGSCRFVYNKALALQQERHKAGEKNLGYAALCKALTEWKAQPQTLWLSETPSQTLQQALKNLERAYKNFFEKRADFPRFKKKGMGDSFRYPQGVKLDQGNSRVFLPKLGWLRYRNSRGVLGEVKNATVSHSCGKWFVSIQTEREVDQPLPQGEAVGIDMGIARFATLSDGSYLDPLNSFKKHQQRLARYQRAMSRKVKFSNNWKKAKTNVQRIHTRIANARKDFLHKASCQISQNHAMIAIEDLRIRNMSKSARGNSEQHGKMVKQKSGLNRSILDQGWFEFRRQLEYKSAWNGGFVVAVPPQYTSQTCPCCGHVSKDNRQTQARFECVDCGFEENADLVGAINILARGHRVLACGETVQSGRSVKQEPAEATQAIAA

SEQ ID NO: 6384 - protein, 447 aa, Geitlerinema sp.
MAKTFVAQVNRLPDVPELRAALEYLCTASNNLYNCTIYLARQLYFQEGKFSNGRWLSSQMKRNAHMKALYTSAAQQTCISVGEAFKAYHQLLKLWRSGGLAQKPKPPNYRRSGGMFQISYPKRWLKLIDGQVKVPMGRSCKAWFNLPEIFLPFPSNLDWAEVRELQIVPRAGYFDAVWIGVGKPVTPVVLNSEKSLAIDHGIDNWLTCVDSSGHSFIVDGKHLKSLNQWYNKRVASIKEDKPQGFWCNLLDKLTGKRNRQMRDAVNKAARLIINHCLTHGIGTVVFGWNQGQKSGASMGRKTNQKFVQIPTKKLKSRIAQLCEVHGILFIEQEASYTSQASALDLDSLPGYGDKPEGWKASGRRIRRGTYRSAAGVEVNADANGAWNIGRKAKVTGMQCTPARGVLTSPKRLRIWDLSSKPILTQKCRNPSGESPSRDSRRIVNPSR

SEQ ID NO: 6385 - protein, 421 aa, Richelia sp.
VFGCQQELIKCDKETKAIIEYLCYESNNVYNCSVYYARQIYFKTSKIITGFDLTAQMKTNKHFNAGYASSMQQICLTVGESFKSFKKVLAKSKNGELNQKPKPPNYRKPGGLFTITYPKKWLKLKDSKIRFPLGNQVKAWFGITEFFLPMPTNLNWSDIKEIRILPRNRCFYAEFVYKTESVSVEVDKSKILGIDHGLNNWLTCVSNVGTSFIVDGLHLKSLNQWYNKSVAKIKENKPQGFWSNRLAAITEKRNRQMRYAVNKAARIVINHCIENQIGSIVFGWNRGQKDGADMGKKNNQKFVQIPTAKLKTRIEQLCEQYGIQFIETEESYTSKTSFLDNDVLPKYGEKPDGWKSSGVRVNRGLFKSSTGLRINADCNGAANIIRKVATKLKLSLSGVSRGALSAPTKVRIWTLQKSPSL

SEQ ID NO: 6386 - protein, 547 aa, Streptomyces sp.
VVPAPTGVTIRDRLKGLSSQDEQVLRQVGDHLGALASRDLKVRCMAGLAFDGDAWAERKRVLTVESSSRWAGAITKATNDQWALARRGQLAHVRALEAEVRRVARRLALPLRAAGDKRAAGGYRSRREWFAKSRRLRVLEDRLRSARADWRAGVVHVVRGGRRLLNSRQHLAAAELTEQRWRERWEAGRRFLQADGETGKRFGNETIRVTPDGEVSIRLPAPLAHLANAPHGRYVLAGRVTFPHRGGQWRERVSVNRAVAYRVHEDVDRGRWYLTASWKLPSVGTAPLAAVRADGLVGVDTNADHFAAWRLDAHGNPVGRPFRFGYDLTGPAEHRDAQLRHALTRLLHWAKRHDVAIAIEDLDFTAEKTREKHGGRTRFRALISGMPVAQVRSRLAAMAAEKGIAVIAVDPAYTSRWGAQHWRKPLTGKRGRPTRHDAASIAIGRRALGFAIRRRAAPPRDDRSDRRGHRSVQVGPGTRGREETRPRLPGPRTRSAGAGSGAKAGDQGAHHRSGRPAEPGFRQRDSMALGSNGTVKPFFRVPGCLGL

SEQ ID NO: 6387 - protein, 212 aa, Salmonella sp.
MARWQGLYMAKSKAPLDVRWSRPLPSVASTVTVSRDAAGRYFVSCLCGSEPASLPITSSMVGIDVGLKDLFVTDTGFRSGNPRHTVKYAARLALRQRRLSKKAKGSKNRARARLKVARLHAKIADCRLDALRKATRKLINENQVVCVESLKVKNMIRNPSLSKATADASWGELVRQLRYKGEWAGRSVVAIDQFFPSSMLRFHHEKNAAGCS

SEQ ID NO: 6388 - protein, 380 aa, unknown
  TnpB Polypeptide
VLKGIKLRLYPNKTQQNQLWQMFSNDRFVWNQMLAMMNERYQNNKELPFLSKFKPLKQEYPFLKNSDASSLQVVNAFLNQAWKNFFNDKTGKVGKPRFHSRKYLKYSYTGKSIIQIAGKRYMKMPKLGYIKTSKTGILENTKIRRYTVMLESTGKYYLSLQVEAQPVEQFEQTGKQVGIDVGVADIAILSNGLKYPSFDGSYYEKKAVNWQKKYSRRRHLAQMLCLQDKYRKALCPRNLESFSNWQKAQRTKAVYQAKVAAQRNDYIHKLTTHLVKQYDVIVIEDLKVKNLQKNRHLAKSIANASWSMFRQMLEYKCQWYGKKLIAVDPKNTSRICSKCGYNSGEKPLNIREWTCPKCKTHHDRDINAAVNILNKAKPAL

SEQ ID NO: 6389 - protein, 474 aa, Xanthomonadales sp.
MTDTSSTLSRAYRMRAYPTPEQARLLAQLAGATRHVWNWSLAKRTSAYRERGERLNWVSLSREFTEYRRDPERPWLAALPRDPFNQVLRDQERAFANFFAKRAAYPRFKRRGGNASVRFTLDQRRRQVRDTGGRWATVDLPGLGSLKLRRTEALNGRLRSIALSRDSAGRWHGAVTADGIARPVVHAPAVGAVGLDAGLRDLLVIADGHVTRRVPAPKALASKQARLRRYQRRQSRQIETQMRAQGLDPTKPCPKGVRLGCSNRRRKTQRQIGRLHAQVADLRRDALHQASAAVVREAQVIGIEDLAVKAMSRGMGRKAFRRSVADAALGELRRQLTYKAGWHGRKLIAVNRFYASSKTCGACGAIHAALKLKDRRWVCPACGMEHDRDENAAKNIRTEALRLIAASSPATPRSGESDARGEAAAALGRTSPDGLPTSRKREPTDENLGARAARPKRLSRPRKTRTDRVAVGSG

SEQ ID NO: 6390 - protein, 525 aa, Xanthomonadales sp.
LVLPFRSLIRTPQQPDPFGSCGADSGGQAGRPAACWCPVSPGATDEVHASGMTEALATLSRAYRMRVYPTRDQARLLAQLVGASRHVWNWSLAKRTSAYRERGERLNWVSLSREFTEYRRDPERPWLATLPREPFNQVLRDQERAFANFFAKRAAYPRFERRGGRASMRFTFDQRRQQVRDTGGRWATVDLPSLGSLKLRRTEALNGRLRSITLSRDSAGRWHGAITADGISRPAIHVPELDAVGLDAGLRDLLVIADGHGTRRVPAPKALASKQARLRRYQRQQSRQIAAQMRAQGLDPTKPCPKGVRLGSSNRRRKTQQQIGRLHAQVADLRRDALHQASAAVVREAQVIGIEDLAVKAMSRGMGRKAFRRSVADAALGELRRQLTYKAGWRGRTLVAVNRFYPSSKTCGACGAIHAALKLKERRWACPACGTEHDRDENAARNLRTEALRLIAASSPATPRSGESDARGEAAAAVGRTGPAGLSTSANREPTVAGSGAKADRRQRQSRPRKTRTDRVAVGSG

SEQ ID NO: 6391 - protein, 413 aa, Natrarchaeobius sp.
MWHVTLKRTACVKLAIPDDRRDDLKRTMLTFRRVAQRFADRGWERDEDGYVITSRTRLQSLVYKQVREDTGLHSDLCIGAVNLATDSLRSAVERMKAGKNAGRPTFTAPTVEYNTNAISYFTNGDDQYCTLATYGGRIRAEFVYPPDEDCPQAQYLNSDVWEPKGATLHYDRDDGEYYLHVTVERDEPETELGEAENGTVLGVDLGVENIAVTSTGTFYSGGLFNHRRDEYERIRGSLQQIGTESAHRTIEQMGNRERRWNNDVLHRISKGLVQEAITHDCSTIAFEDLTDIRERMPGAKKFHGWAFRRLYEYVEYKAAEFGIRTKQVDPAYTSQRCSKCGTTLRENRTSQADFCCLKCGYEVHADYNAAKNVATKLLRSGQKSPVGGATNQLALKSGTLNGSGDFSPANAEA

SEQ ID NO: 6392 - protein, 428 aa, Nonomuraea sp.
MPRSSVQGGNAEGWAIFVSRLSVAVGNLLVMSRYRLQPTPAQEAALAEHCGHARFVWNLAVEQHGHWRPGRQSVPGFAEQCRQLTEARAEFAWLRAGSIIVQQQALKDFAQAMANFFAGTHRKPTWRKRRRSEGFRIVGKRGRHWDVRRLSHNVGEVKIPKVGWVRFRWSRAVPDGVKSFRITRDASGRWHVAFAAIPSPIPAPGTGAAVGVDRGVAVSAALSTGEMLNAPTLRQTEKRRLSRLLRKLARATRGSKRRARIKRAIAHLRARETDRCKDWVEKTSTDLARRFDLIAVEDLKIRDMTRSAKGTRAEPGRNVRQKAGLNRVILASGWGRLVERLEHKAPGRAVKVSPAHTSQRCSACGIVDREARESQAVFRCRSCGYADNADVNAARNIEHAAGHAVSAREGPRVAGPVHREPQPVFLSA

SEQ ID NO: 6393 - protein, 415 aa, Nonomuraea sp.
VCSTVKLVVQVKLLPTPQQAEALEATLHQLNQAAGQVSRLAFETKTFGVYGLRRQVYGELKAAGLGAQQAQHVIKKVADAYTSLRGLIRNGRLTGRRRRRAESKPLTFRPEAAHPFDDRCLSWLHDTRSVSIWTVRGRVKDIAFTGSADQLKTLAAYRRGESDLLLRDGAWYLIATCEISQAPLTADPQGWIGVDRGIANLATTSDGVNYSGEKLTGYRRRMARVRAELQARGTKSARRKLKRRAKRERRFATETNHVIANEIVADAQRTGRGIAVEELAGIRERVRLWPSQRATLSNWPFHQLGEFLAYKARRAGVAFVQVDPAYTSQMCPNRWCGHTARANRPSRDSFRCGSCGFAGPADHIAALNVSRRASAVWAFVNMPNEPARESGLSASRAGRPDRIVRRKPWALALGR

SEQ ID NO: 6394 - protein, 283 aa, Nonomuraea sp.
VAYRIHLDTDRGRWYLTASWQTLPAPAVPLQAALAHGLIAVDTNADHLAAWRLDIHGNPIGRPRHFGYDLSGTAEHRDAQVRHALSRLLFWAKTCGAAAIAIEDLDFAAEKTREKHGRRKRFRQLISGLPTARLRARLVSMASAAGIAIVAVDPAYTSRWGAQHWQAPLTRKNGKNSKNKKNQSTTRHDAAAVAIGRRAQGHAIRRRTAPPPHDRSDRTGHRTAQAGSYVPGGEGPRPRISGPRTRCVPPGCGENTGDQNAQHRSERSAGQESWHQPLLPLSP

SEQ ID NO: 6395 - protein, 411 aa, Nonomuraea sp.
VPHPVDHQQLGARDPLGDDRAVAGLGRLVRALDDQRRRLHPAQCVRRLEVRAGRVRQAVIDQGRQIAGPLQHPFLQVPLRVLVERQCGAVQHPRLLDHARHLLAPVGRRRGGDHLRVELHELGPRRRQASLGLRLPGERPHEHLALVLAQWRGTDHGERAHPLRLLDGDQLAEQPACRVADEVRAVQPVRVQHAQHVVPDVEPRVPLLLEVEGGRPAGVAVVVPDDPATGRGQPPDELVRPQDPLRHRPHHQQDRRVRGISELLGPEFHAVNVDHVRLHGSSLLWRVTHAPLWAMPFHQLGEFLAYKARRAGVAFVEVDPAYTSQMCPNRWCGHTGRGNRPTRDTFGCASCGFAGPADHIAALNVERRASAVWAFVNMPNEPAVESGLSAPRAGQPDRIERRKPRASALGR

SEQ ID NO: 6396 - protein, 419 aa, Nonomuraea sp.
VQLRYAFRIDPTPGQRIALARAFGCARVVFNDAVALRNHARQQGLPFITDAELSCLVITQAKQTPERCWLGEVSAVVLQQAPADACVAFRNFFASLAGTRKGPKLGPPRLRSRKDNRQAIRFTRNARFAITAVGKLRLPKIGDVAVRWSRRLPSEPSSVTVVKDAAGRYFASFVVEAAEAPLPATEAETGIDLGLTHFAVLSGGRKIDSPRFLRRAEKNLKRAHKALSRKERGSKNRAKARVRVAGRHAKVADARREFHHQLSTKLIRENPAIYVEDLAVKGLARTGLAKSVHDSGWASFIGMVEYKAKLYGRTFVKIGRFFPSSKLCSACGALAEQMPLAVRRWTCPCGVTHDRDVNAEINIRAEGRRIVAAGRKPVPEMGGKRRRKTPAETGKTPAPAPRGEREGTVDETGSHRSAA

SEQ ID NO: 6397 - protein, 565 aa, Nonomuraea sp.
MGRRQSTGKGLRTIVAPFTVAAPAGARIRDRLRLSERDVEVLTAVGRHLGRHARADLAERIRIGDVKAPRNQRAERKRRLTALSSSRWAGAMTRTSEDQYQLSLRSLHDERAGLRRAIATISKRLTVACGKRQGRVRGYADQDERWQKQRRLQVLTARLARVEDHIDKGRPAITVGGRRLAKARHNLTDAKLTERQWRRRWEARRMFLTADGETGAPFGNYTITVDPGDGTVTIVLPEPLRHLANAPRGRYRLTGTVRFHHRRDQWLDRVQANRAVRYDITHHSDRDRWYLDASWSADTPTLLPPDQLATSWSRLLSVDLNGDHLAACVVDACGNPIGEPITIPTALSGPAPQRDGRLRQAISELIRLAHQHGCAGIAIENLGFDDARATGRETMGRGKRGKTFRRTVAGIPTARFRERLRGMAYHRGLLVVAVDPAYTSKWGSQHWQRPLQQQTKLTTATRHHGAAVAIGRRAFGHGIRRRPGVTAGHQRMAARRATGQTASCPSAQGAATPLRTAGTPAGGGKTYRGPSDQLALFPAPKTVRGAPGPSLGPVRGDAANAGQLH

SEQ ID NO: 6398 - protein, 661 aa, Nonomuraea sp.
MSKLTATATCTAHGAIVEQTGQVVPQALLAERVAWLAGLARDLAADIVAGRWSAADLDALASGVGLDGRVLPSKGWMALRRLGWDVRPASGVHVCDRVLRCAQEQAARLLRLALHRRAVVAAIVAAWPREPGRRTDAEWAALRALLPDGVGAAEVRNRTRQVRAYRDSHDGVLPADLTEVEGPPACAAQIVLAAGDRQLATLERTSEHTAGLRVKLPLTACPASAKDWAWHLLPIALPPTVPSEAKLCSPTLRLHHGRVRVDLPFQTPIGFAPATGHVIGCGFDWGLNTLLTGTIGHLTAEGRVVTDGRPLAYDASGVSAKLHRLRDQREHLAAKRDRQERLLAGLTPTDPRVAELTPAYEVIAVEHERVCARIRRLNKALAWSAARWALDHALAAGATVIYLEDLATLEARGRRGRANARLSGQVRGQVVAAIRHLAAKHAIAVVTVPARGTSRYCPRCGTGTSALTHCPAPDRLTERGWAWAHCPGCGLSCDRDWAAAERILARGLLGQQATRTDRTTGTRAIRQVVEGNVARARRPRKATRAARRARRTRTDLHPRPAARDRSKNRPTPKRPTRASKTSSRAPDRRTVPAPLPNRGGQRPAGQAPQTTRPPAGRTGLARDPQHRTGFHRVAATPVLPLGQYADGPPRPRPPDLPEILR

SEQ ID NO: 6399 - protein, 436 aa, unknown
  TnpB Polypeptide
MKGGKTMEYRAIKTRLYLERNDKIFLLTLMHSAKSLYNQALYNVRQYFIENKQYLSYEENYKLLKDTSEHYRILNTSQGQTIIRKVDEAMKGFFGSIKKNLNHKVRLPRYLDKEGYYSLIDRMVYKPHNEYYTLPRGNFIKKISNQLLEASNKLDIRNRRELKIYEGLNVRIETPKCIQNKRIKEITIKPKFDGQYIEVIHTYINEEPVENRANTFIETMAIDLGYNNLAYCAVTNGQHLHIDGLKLKSMNQRYHKRISKLLSIRPNQNVLTKRMMSLMEKRNNQMDYGIFKAVKLIVEHAISNHVGKIIIGYNEGFKDINLSKQFNQMSRSIPIARLRDRIVYLAKRYDIETEIVNEAYTSKSSYIDKDEIPSLSDKRKTSFSGKRIKRGLYVSKNGICINADLNAALNILRKGKHDALWIGSKGLNTPKRTYLF

SEQ ID NO: 6400 - protein, 246 aa, unknown
  TnpB Polypeptide
MPSDAIVKCCAFRREAKGWTVSLTAARTVPPPRGGRRAVGVDLGVTTFAALSDGAFTPSLKAARRAERCLRLAQRALARKKQGSTSRRSARATVTRCHAATARRRANHLHQASARLVRDYDVIAIEALNVKGLARGALAKDVHDASWGRFISMLRYKAEWAGARLIEVNPQYTTQDCSGCDARVPKALGDRSHVCPHCGLSIDRDLNAARNILDRAGVGPGLGNVTDGACVQARTLVCLNGLVKDP

SEQ ID NO: 6401 - protein, 237 aa, unknown
  TnpB Polypeptide
VLHRLPEKDWKIKSATISQYGDGTYYISILFEYEDFPVSPAPVTEEQVVGLDYKSAGLYMNSNGKCQNMPGYFRMAQKELAKRQRKLRHKVPGSKNYRKQQKRIARVYRHISNQRKDYLHKLSTATAKQYAYVCVEDLNMRSMSNKGFGNGKSTLDNGYGMFLSMLDYKLAERGGKLVKVDKFFPSSQICHCCGCRNPEVRDLRIREWICPDCGAVHDRDTNAAINIKTEGMRLLAA

SEQ ID NO: 6402 - protein, 373 aa, unknown
  TnpB Polypeptide
MLTNKAYKFRIYPNQEQETLIAKTIGCSRFVFNYFLAKWNNAYKETGKSLTYNSCSAQLTQLKKELTWLKEVDSIAIQSSLKNLADAYSRFFKNQNNRPRFKSKKNKVQSYTTKHTNGNIAINGNKIKLPKLGWIRFAKSREVEGRILNATIRRNPSGKYFVSILVETEVQELPKTNSSVGIDLGLKDFAILSDGTTYANPKFFRSLEEKLAKAQRILSRRTKGGSNWNKQRIKVARIHEKITNARNDYLHKISTEIVKSHDIIGMEDLSVSNMLKNHNLAKAISEVSWSQFKTMIEYKAKWYGKQVVTVAKNFPSSQLCSCCGYQNKDVKNLGLREWDCPNCHTHHDRDINAGQNLKNEAIKLRTVGTTGIA

SEQ ID NO: 6403 - protein, 478 aa, Bacillus sp.
MALLTYNKKMEVVFSKEDELILDGQSRILNWLYNQLLTTCKKDYENNNNENQFLYDRNLRNYVTRVMKEKYPFLQTVFSSPVKEVSARLKDAFTRLFTGQNQYPNYRSWKKKWYSLFFDEPNKGWEIRENKLLIMLGKISDMPKIKGKHNPGVFGTLKEPFSLQEYETIRTCRLCKQQGGRFYVILTIERGNETDLQFKEELKQYKKEIKQYNYLKKQAKSQEEKKALPQKPVKPVQEMNVPKESWISLDPNHKNFFVGVDNKGNSIEWRKIPLVKYWDRKIDELKSLRDKCKKNYRKRTTKHGNPYTVYSPRWNKINKALNKAYHCRREQMKTTMYTIANELYKQYDVVIMGDYVPSNDTAPLDHMKRSMLNQEVIGSFRKILKWVAEKKNKHFFLVDERDTTKTCCVCGHKEKKVPSVRVFTCVPCKTTLMRDNNASVNIAKKERFFLQETYFSKLSTFTRAGYVPVGQKCVITNF

SEQ ID NO: 6404 - protein, 593 aa, unknown
  TnpB Polypeptide
MVKKKKETPPPKEIKEKTTRTDVKERKETNKDTEFTCVKMSLNSLVENNFLNGGLQDIVLNINKINFLSYQLLNYHFTRLIQENKPLPDISQNLFYQACSIVSVMKERNEKIDTTSELYISFSHYKQHLGDLPFRDRMGNLINNLNKQQLTMTENHLKLNFYKRFHKYLEIKTGENRKGVIYKWLKDIYANEYTGKNYFIHSMREWLVFPPTEKNIKDNLSHFVKIYHKILKTFENYPNEKGIRTFNLLPTKNSFTLSTIEICSSCLKDIIGYFTKEPVPEFTENKLVYWYEFFKIEKYETKKRKFANTIYTDGKIAVMRLRKPKVEAVKPKDIKNIDYEQYVGLDPGVRSLQTSCNDKGRVIETTTPSYRNDCKMKYACRKREMWYKNWEHYDMWKNIPSFKTTNLQKMLNYFQHVYPFMNSIFKFHIYTNFRGLSFRSYCRGKATMHKLCKRIVEDKKTLVGFGDFSQQHGLVKKHPTAPIKKFKSELRRYCDVIEIDEWGTSKTCNLCKNPIELYKNKVIRKKRDGTYTTPRLCQINSVIRCKLNECKLCCMDRDINASKNILLLLQLQKAGKKRPECFNPTNMNDYDTP

SEQ ID NO: 6405 - protein, 427 aa, Pseudomonas sp.
MNLTLSEYRRYCRALGIVVLSNWSSLANNPAQMPAVERLMHPTAKNPNPKHRYFDNQFYKFPSYLRRAAINFVLGQVSSFMTRYDAWIDGERSSPTAKPPAFNPVSGCYPALYAGQLLKLDAQLKVASIKLWDGKEWLWQDVSIKQTRERHKLGELKSPSLILSGKRCHLSAPVKLVPIAIPDRGRVCAVDVGINTLATASIIDSTGTVVARKFFHQAADIDRRNRRAQLIRRKARKTAKLSRGFCKSLYRKARHINEQIAQLTSRQLVDFARQNGASVIVLENLKSWRPRGGRKRSTMRQKFHNWLHRRLAALIEMKFEEHGGKVEYVYARGTSSWAFDGSGLLKRDAKHYEIATFSTGKVYNCDLNASYNIGARYWAWKLKLTHRKDGQLPEDKSSPGKPRMPVTLSTLWVSKNRESDTPHLRAA

SEQ ID NO: 6406 - protein, 402 aa, unknown
  TnpB Polypeptide
LRLSETIYKNSSDQLSKLCHLAKNLYNLANWYVRQDFLKLNNFLNYYDLEYILKDKQAYRKLPSQTSQQILKLVNRNWKSYFGALKEYRTNPKKFKNKPRIPHYKRKNGESIVIFTNQQCRIKQGYLNFPKKVNLKLLKTRIKEKLKEVRIIPLGIKYKIEIIYEKEEQDLGLNKKNLLSIDLGVNNLITAVNNIGLDPIIIKGKVIKSINQYYNKQLAYYRSIENKKSNFQDTKRIQKLHLKRNNKIYTIFHRISRLLINYCIKNNLGTIIIGYNEDWKQNINIGKKNNQKFAQIPFLKLINQVKYKSELVGITVITINENHTSKCSFFDNEEIRHHKKYLGKRISRGLFRTSNGTLINADVNAGFNIMKKVFPNSVQVDGIEAFGLMPQKIQQNIVDTII

SEQ ID NO: 6407 - protein, 432 aa, Spirulina sp.
VLNLNYCYRIYPDASQEKELLDWLEICRGVYNYALAERKEWINSRKCQVNACSLHSEYIIPADQPFPDYYKQKKALTQAKQQYPELKRVQSQVLQEVMGRLDKAFNFFWKRSFGFPRFKKYGQFRSINFPQFRENPVTGYQLRLPKLGSVVINLHRPIPDGFVVKQVQIVKKASGWYAVLCIQSDVNIPSPKPEGTSLGIDLGLEKFMATSQGELIARPKFFVELQSQLKWLQRRLSKKQKGSKNWHKAREKVAKLHEHIYNTRKNFHYQVAHHLCDQADIIFAEDLNVQAMSRGMLCKHTLDAGFGGFLEVLKHVAWKRDVYFEKVDANFTSQICPSCGVVTGKKDLSQRVHKCSHCGFVTDRDVAAAMVVEQRGLAALGLGVKLPVEEEVIATQRFATQRFAFAKRHEVNANGDVPKKTSRASRRNRKAS

SEQ ID NO: 6408 - protein, 390 aa, unknown
  TnpB Polypeptide
MISMLITYKTEINPNPKQVIKIKQTIGVCRFIYNFYISENQKAYKHNKPFRTAFNFSKWLNNEFIPNNPDYLWIKDVSSKSVKQSIVYAERAFKKFFKKEAKYPRFKKKNKSNVKMYFVKNGKSDCLCERHRIKIPTLGWVKLKEKGYIPTNKDGYVVKSGAISYKAGRYYISCLVDIEKPKKQTLKPFGLGIDLGLEKFVVVSNGNVYKNINKSEKIIKLEKQLSREQRCLSRKYEQLKNNKKGESTHKNLDKQKLKVQKIHLRLNNIRTDYINKLINELVKTKPAYIVIEDLNISGMIKNKYLSKAISNQRFYEFRQKLLNKCKIYGIELRIADRFYPSSKTCHKCGSLKKDLKLADRIYKCPICGEIIDRDLNASLNLRDTKSYKIA

SEQ ID NO: 6409 - protein, 215 aa, unknown
  TnpB Polypeptide
LCTCVTNTGKSFIIDGRKLKSINQFFNKQNAKLQSIKDKQNIKRQTKQQYLISRKRKNRVDDYINKTCRYIINYCLSNDIGTLVIGYNQSFQYKPNMSKKNNQNFTQLPFGKIREKLEYLCKRYNINYVLQEESYTSKASFFDNDDLPVYNMDNPQKYIFSGSRVKRGLYKTKDGYYFNSDCNGALNILRKSSVVDLSILYSRGALDTPKRIRIS

SEQ ID NO: 6410 - protein, 449 aa, Caldivirga sp.
MRTVRLRLLLNGAQERRLRKLADATAKLWNELNYARLVQFRTLGKIDFKGTGHEFYHRYKGKLGVNAGQVINLNNNAWKSYFKLLKLYRQGRLPRFMGKPSPPGFWKDKLLGKRVLIILVRNDRYHLEPINGGEGYIVLKDWGLKIKYAGRIKWAGKQGTLVIKLEDGRWFAYVPITVGEKPARSNPKGYVMGAYEKIRIENPKGNNKAFIDIGLNNLFAVAFNHSDTAILIKGSTIKAEYYYWKREIKTYQSIRDWLRNRGFNAWRKYHAFYLHAKYKQHERLRHYYRTAIRFLAKALHGMGVNEVFVGYPYLVSQDDGNEYNANIWWYVKIIKWLGEVLQEYGIKINVVNEHGTSRQCSICNINHENGRVKRGLYICETTGIKINADLNAARNIAKRAGYEVPMPRKILSYIITTNGVKPLTPMEGVTVETPTVKPSPQKGEEGVIP

SEQ ID NO: 6411 - protein, 720 aa, unknown
  TnpB Polypeptide
MNSVAVAVATNEINVVKAVSEEVKTAAKLDDNKRSYKANRAKSNKLALLRNFTYELNDVEDVFTSKITFFLKELNTQLNALVNSNIYTENKENLDKVLKSKGEFRKELLRLLKSPERSYKDFYQKYYFEAKIFGNKAKYFRTVIEEYRRILLSRLHRQTIIDMIVKNPTITYQEVFNKLCELNSDKVTHYKFNWISKAEFNNIIKQLSNLNKLSGLNNSTSEDATIDNLPSVAAQSQQAKTIDTYSIDYSSEDDQISEFNLTENDEYYLIEFKLKYSDYTTQSDSLLTYSCKVPKKQIKGLTTGYTKLQKFTRPRIYLREDIDITNSASPLLKHKLYISFNYELSEAQVKSVDLKELNDTWQFKTMGIDIGVAKSATAAIMTTNMCWQHSEASSSTNTAENPTSVGVAAKLGGEASKSVESSNGEQPAKQAKQGEAEIDFTQPISISNELTISDKTKSVSEHIEILKNEQNHIYKKEKAIYDLLKLKQFEDNKGVKLTNTSNTVDELVNHAKEKLNDAATPSVSAMAKLDLLDKYQRLNKLRLHLRHKVSNLKKELSFLTARDMISHAIDNEVDLITMEKLSWIRDVHHTTWDYNQIQQRIIHEANIYGIKVKKVSCAYSSAHNPLTLEKDEVDENRKLVKCLFDRDYAAAIILARRGVKLGKRKLKLSPSCEAASHINESFHAVNLSIKPSLQYRQLKLCEPKSISTICYAKFAYYSIS

SEQ ID NO: 6412 - protein, 411 aa, unknown
  TnpB Polypeptide
MDRTIRIHLHPTLEQANALSETLAQFTHAYNRVCEYGWNTTEKNGVKLHHAMYYDTKASCPGLVSDLLIQARVKATETLKSAFTWKAKHEAKHHKKVEKARKLGKPEPRFTPVKCPCSMTCGPRYNVHTYTLNWTKSVVRLSTTQGKQTIPFTVPDYCQQYIGNPFATADLLCRRGKWWLHVVVSVPEPVVPHDSTVLGIDLGLNRPAVTSNRQFLGKKHWKEIDRRAFRLKRKLQSNGSKSAKRHLKKLSQKQARFHRDCDHVLSKQIVASTPTGATIVLENLTNIRETSKMGRGKNNKNVENKRKLHSWTFAQLYSFLAYKGQERGIRVEKIDPRHTSQTCSRCGHQARNNRRSQSLFLCRKCKYSLNADLNAAYNIRDKYLATSLADFGTSLVSGVSSTTLSSQPLVG

SEQ ID NO: 6413 - protein, 409 aa, unknown
  TnpB Polypeptide
MKRSNLFQLAPTADEHQTLRELAINCAKLWNEVNYLHHQQYGNYLKLDWNPQLYKKYVPLVGSATAQQVVRKNNEAWRSFIALKRMERNGELSHSIKRVRAPGYWKRVGRYLLRILFRCDSYHIREGRVDLPRGLSIPFKGELKWTGKQGRLEVAWDALSEKWRVFQAIEVKPIITPLGFKTCYIDMGVRNLATVWLTEWRQPIAYQSGRLLADWWYWTNRIARHQQRLIRVNGRKKSKQLSRLYRIRKNRFRHAVATFARQLVRDLYREGVSTIVIGELTGIRSNSDHGRQGNAMVHNYWSHKYVADRLRWTAEEYGIRVRTVSEAYTSQTCPRCRSRHSQRILRGFRCLDCGLEAHRDAVGVVNMAARCGEYAVRPMVWPMLLRWDGCGWNRNNGMPTLQRTITVEA

SEQ ID NO: 6414 - protein, 278 aa, unknown
  TnpB Polypeptide
VETRLENHQQTETPRPNVLRCSRRITAPGQPRASRTQPSRRSRQRLCRTLEERQESLETTLHVTVRQLRRKNRHGQRRPRHARHHRRASHRRFHPPDERRDTPHSAYLFNDDYDVNGATLHYDEVEDCFYLHVRTKPAVENDEAEQGDAKHVSVLGVDLGITNIATTSTGRFWSGGELNHWHRESTKRRGDLQQTGTRWAHENVQRVGRKQTGRFEQFLHTISNELVKEALENDCTHIVFEQLKGVENAFLTRRLFTSGRSTDSTSTSRTKPSLKGLK

SEQ ID NO: 6415 - protein, 457 aa, unknown
  TnpB Polypeptide
VSAISASGPRCNGRRTKNPTASAVWSVKVLPTRKTTATAVGRIGAFYLRTAFTLELRYIRNMIVLEFKLAGAGSQRAVLDDAIRATQFIRNKCVRKWRDERGVKPYDLNRYCALLAKEFDFVGKLNSQARQAAAERAAAAITRFYKNCREKTPGRKGYPQFQKDCRSIEYKQTGWKLNDVRRAITFTDGFKAGTFRLRGTRELLGYALDQIKRVRVVKRADGYYGQFCIDAERRVSVEATGHAVGIDLGLSHFYTDSTGATVENPRHLRRSEQALKHLHRRVSSKAKGSRNRAKARERLGRKHLKVSRQRRDFAVKAARALVMSNDVIAYEDLKVRNMIQNRRLAKSISDAGWRAFVSWLGYLAHVYGKVVVAVPPQYTSQECSGCGERVKKTLSERTHVCPHCKAVQDRDHNAARNILALGVRRLEETTAGHAESNAWGQSALYLSDASPVDTAAG

SEQ ID NO: 6416 - protein, 404 aa, unknown
  TnpB Polypeptide
VKVEINRAYRTELSPDDRQRQRMVQACGAARFAYNWGLRRKTTVMNLNRASIERIKVPTAIDLHKELNGLKATQFPWMYEVSKCAPQEALRDLDAAFTNFFEGRARFPTFKSRKHGLGAFTLTGAIEVGPGHVQLPRLGWVRLKENGYLSSTVHINSATVSERAGRWFVSVNVVVQQEEPKSVSGPVVGVDRGLKSLAVVSDGFVVENPRALHRRERKLKHLQRAVSRKVKGSSKRHNAVRALARLHLEISNVRKDALHKATTKLARTKSVIVVEDLGVRGMMANRRFAKSIADAGWGEFVRQLEYKTAWYGSRLVVADRFSPSTKMCSHCGNIKETMPQSERMYSCERCGTVMGRDLNAAINLSRWPGVARTLQTPVESGVPLTATSTQPLGEAGTISLLKGA

SEQ ID NO: 6417 - protein, 318 aa, Shigella sp.
  misc_feature (275)..(291): Xaa can be any naturally occurring amino acid
MRRFAGACRFVFNRALARQNENHEAGNKYIPYGKMASWLVEWKNATETQWLKDSPSQPLQQSLKDLERAYKNFFRKRAAFPRFKKRGQNDVFRYPQGVKLDQENSRIFLPKLGWMRYRNSRQVTGVVKNVTVSQSCGKWYISIQTESEVSTPVHPSASMVGLDAGVAKLATLSDGTVFEPVNSFQKNQKTLARLQRQLSRKVKFSNNWQKQKRKIQRLHSCIANIRRDYLHKVTTTVSKNHAMIVIEDLKVSNMSKSAAGTVSLPGRNVRAKSGXXXXXXXXXXXXXXXXXTLQHQWSGWMLAWLNSPRCQMAQSLSL

SEQ ID NO: 6418 - protein, 538 aa, unknown
  TnpB Polypeptide
MISDKEYKKLLKQFHKLSDRHILVVETDMPSSDVQKVVILSDKIRKAGNELVGLMRKNYDQLMRTKKYRKLLKLYGSTKDKKKRRDLADQLNEMQKQYNVTWDHCRNAMIHIGKKYSIDAVFALTKAEDIWRGIEKCLYNNGKTIHFSKYGELPCIRAKQINRGISMSVKDNGLKFKLKGNVFGIQVKDRFQTDEVCAVLEYLLRSEIINDKAINKFLDKAYCIDTYRPCYATLVPKFIRGKYRVYLHLTIEGKAKPKYDRFGNPRHKFGKGIIGADIGTQTVAYTSNTEVGLKNLSERGNSIQTSERRERLLYRAMDRSRRATDPQNYNDDGTVKKGRKTWKYSNHYKKLKAKHSELCRINAINRQLAINEDANHLRSLGDDVFITEPKNASKLMKRTKDTTVNSKGKFHKKKRFGRSIKNRCPSGFQTTVERKFKTSGGIYIEVPNNYRASQYDHTADDYIKKKLSDRIYKLTDGTLVQRDWYSSFLLYCYDYRTKDIDKNKCISEFDKCYNKEKALIEWIKANKIKILNSGIKIA

SEQ ID NO: 6419 - protein, 322 aa, unknown
  TnpB Polypeptide
MRLLYKFNIGQNENISSLCKISNNLYNQALYIFRETLSNEDKWLSYFELDTIMKNTKNLDGNINYKLLKAQCSQQVLRILDKNIKGYYKSVQDYKKHPNKYKGKPGLPSYRKRGSEFNMYYTNQNCKIKDGKIVLSKELSIDIPQYEKYSDLIKNFKHVRIKPLACGYKIEIIYEVKDAEVSKGREEKIASIDLGIDNLATIVSEDFTIIFSGKFVKSHNQLFNKTLAKLNSIKDLQKIKGTTRRIKKLYYDREQYIEDVFHKISRKIVNLLIDSKITKLIVGYNKGWKQNVNMGKKNNQKFTQIPFARLVSYLEYKCDSYS

SEQ ID NO: 6420 - protein, 368 aa, Nonomuraea sp.
VAQIVKRAYKYRFYPTPEQAQELARTFGCVRLVYNKALEERTRAYTLHGRRVSYVESSAALTAWKRSAEYDFLSEVSSVPLQQALRHLQAAFANFFAKRAKYPTFKSKKKARASAEYTRSAFRWREGRLTLAKMDAPLAIVWSRPLPEGAQPSTVTVSRDAAGRWFVSLLVEEKISPLPPVEQRVGVDAGITALATLSTGEKIVNPRHERRDRRKLAKAQRALARKEKGSSNRAKARLKVGRAYARIADRRRDHLHKVTTRLVRENQVIAVEDLTVRNMVKNHSLARAISDVSWRELRSMLEYKAQWYGRELVVVDRWFPSSRLCSACGTLQDKMPLNVRSWECACGAVHDRDVNAAKNVLAAGLAES

SEQ ID NO: 6421 - protein, 536 aa, unknown
  TnpB Polypeptide
MRYEHLQDGQGGMTSTAIPDYPENKSALCSTLGLVAVPQVAQAMHKNLTWSDKLPSWLASILEPKWSEKLAAVSTSKDRAFLPYWSEWVQEMSARWWSLIKTDSAALDLTSLRGIAVNTGAKSWFSMIKAYLPNRNWLRTFLPSGTASVVGSTDSGSIGLQSRKIRIYPEPALAKVWKHWQAACRYCYNQAIAYQRQHGTTKTPETLRNIILQSDLPQWVKEAPCHIKQNAVMEAWGAFQQSKEAKFRSVRDKSHTLQFNNCNFSQGRWYPRLTKGLSFRASEEVPQKCPYGTKLMRVKDRWYAIFPEPVNEQCSLARGVMALDPGVRSFLTGFDGTGFIDMAKGDFGRITRLCYHLDDLQSRLSRAPRLKRRRMRQAAFRLRERIRNLVDECHRKVAAFLTDNYRLIFLPTFESAKMVAKAGRKFGSKTARAMLTWAHYRFQQFLKFQAKKRNVVVVEVSEAYTSKTCTKCGHIHTKLGGAKVFRCPKCNHRLPRDWQGALGILLRALRDTAILFTSGQDAIAAPLSDNAQQCSA

SEQ ID NO: 6422 - protein, 401 aa, unknown
  TnpB Polypeptide
MYSVRQHYFNTQSYLNYYKNYGECKNNEHYKILLSDCSQQILRLVDRDMQSFFKLLVLKNSGRYSEKIRLPRYKKQDELSTCTIQGRSCRIQKNGKLAIGLTTEFREKYNIAERRILFTIPSNIRNITEFKEVRIIPQYNGKQFVIEFIYESNNLPQQAHGNGYMSIDLGIDNLAACTVFSNGDAQQFLIDGRRLKNINHYYNKKIAMLQSSYSTNKSITTPTNRMLRLMNGRNNRINDYFNKTVKLIINACLNNDVTTLVIGYNKGQKQEINIGKVNNQNTVMIPLYKLRQKLQYQCELHGIKYCPQEESYTSKASALDNDNIPNYGDTDIPVFNGSRIHRGLYRSSKGRVLNADINGSINILKKYFKERKSNGITPNDVRVLVNAPCQRLNAFAQAHRL

SEQ ID NO: 6423 - protein, 395 aa, unknown
  TnpB Polypeptide
MLRQQGYQFEAMPNGQQLRNLRRFAGSCRFVYNKALALNTQRYGNKEKRLGYAGVCALLPNWKMEHPWLSDVPSQALQQSLKDLERAYSNFFKKRADAPEFHKKGRKDSFRVPQGFEVDNANGRIKLPKVGWMRYRKSRNIEGHPKNVTVSIVAGKVFVSIQTEREIGRGMHPSTSAVGVDWGVINLVTMSNGEVVDQCQPLKRHAKKLAKLQRRLARKKRFSNNFKKWKAKITRLHQHIANIRKDFVHKTSDGISKNHAVVVVEDLAVKNMSTSARGNGSKNVKAKSRLNRSILDASPFELRRQLEYKMLWRGGLLVVVPPQNTSRSCPECAHVSKDNRKTQARFACVECGFSAPADFVAACNIKEAGLASLACSHPSGEVSPSCQEPVEGIAV

SEQ ID NO: 6424 - protein, 277 aa, unknown
  TnpB Polypeptide
MVTVKLSPADPDGLRRTFETANRACDWISDHAWHHQTFRQLALDKLVYYQVRERFGLSAQMAVRGIAKVVDAYALDKRTKRKFRTDGAFPYDARILSWDLESETVSLWTVAGRRQMAFECGDGRRKLLERQQGESDLIYHRQAFYLATTSNVDVPEPQAVDDSVGVDLGVANLASDSDGRRYCGSEVKNVRWRNRKLRARSQAKRTRSAKRRLKKLAGRESRFARHVNHCISKQIVRTAKGTECGIRMEELKGIRTRVKVRHPQRFCTLGRSGSCTR

SEQ ID NO: 6425 - protein, 391 aa, unknown
  TnpB Polypeptide
MNIVRAYKTELDLNNAQKTACAKHAGAARYAYNWGLARKLEAHQARKKVPTALDLHRELNALKKAELGWLYEVSKCAPQEALRDLDQAFMHFFRRVKEKRSAKQVNVGFPRFKSKKNGLGSFRLYGSIHVFEKAIQLPRLGMLRLKERGYLPTRGVHILSATVSEKGGHWFVSLHVEMESPDPEPLERPVAGVDLGINRMAQVSDETYYENPGALRSAISKLKRLQRIISRRQRASVNRAKAVKQLARAHARVANIRKNALHQATSQLTKTKSAIMLENLNVSGMLKNHHLAQAIADAGMYEFRRQLSYKGIWYGCEVWLADRFYPSTKRCSQCGQVKPMMALGKRDYHCEYCGLVLDRDLNAAINLEQLLNYPLIKLPQVLREDTPVESM

SEQ ID NO: 6426 - protein, 450 aa, Acidimicrobiaceae sp.
VLSRAVTFQFTLDPNDEQKILLVKCAGARRFTINHHLARVKANLDARSVERAALSDSEDPCEFETPWLSWSAFSFINEINAWKNGESNESPFNEDGSRGLAWRHELPNDAFECASVDAARSLLNFAASRSGKRSGAPVGFPGFQAKGKVTPSFRLRNRTKPGQPPTSQPIHFTNPSHLRLPKFRAIKLFGPTRKIRRMIDAGRFHVYSATLTERAGRWIVSLTGVAAELHRAERSRASRHAIPVGVDRGIKSLAVAADANGVPFESFEGVKPLREAQQKLKAANQALARTTPGSKGRQRARARLAKTRRKVANTRRHWVHQASKALVTRSQVLVLEDLNVAGMVRNRRLAKSVSDAAMGELSRQILYKAKWHGVEVRVADRFFPSSKKCSGCGEVKSELNLSDRTYSCGVCDLVMDRDLNAAINLARWRPKGPTAGATPASKRSSLLPTT

SEQ ID NO: 6427 - protein, 377 aa, unknown
  TnpB Polypeptide
VVGDMKKTFKYRLLGNNSTFNKADNWLRLCRELYNAALAEKIYAYSGQKANISSYSQMKELPELKVAFPEYDNVGSQVLQEVLERLDRAYKAFFRRARNGNGKVGFPRFKGRDRYDSFTLKQVGWKLGGKYLIIRNIGRFKLRLSRPIEGNIKTITIHRHSTGKWYACFNCDNVSEKRLAGLGKAIGLDVGIKSFLVDSEGNRVENPQYLRQSLRLLRVRQRALCRRNKGSVGRAEARLLVAKAYEKIRNQRSDFLHKLANHYVKNYGVICVEDLNIRGMVKNHHLARSISDAGWGLFIGLVEYKAAEAGRKLIRIPRFEPTSRVCSACGVINQDLTLNDRQWVCKACGVLHDRDFNAAKNIARVGQTLQELTYASG

SEQ ID NO: 6428 - protein, 377 aa, Paenibacillus sp.
MLITTKIKLMLEQEHHDKLLETMKQYNAACNYISGFAFEQSQYNRIKLQKLVYYDVRDKFHLSSQMTILAVRKVADAYIAGKAKKKKEYKKPKSKKNVEKTLISFRETGAMSYDARTLSFTGLELASILTLDGRIKVPMKISPYHQGVMQGKNIRGQADLIWHDGVFYLLLVVELPENEPYIPIDALGVDLGIKNIAADSMGESHSGDAVNAVRHRNAKLRAKLQAKGTKSAKRLLARRRRKEARFSRDVNHCISKHMVEKAKRHRSLLALEDLTGIRERITVRKAQRRNQHAWAFAQLRSYIEYKALIAGVPVVLVDPRNTSRECPQCGHIAKENRKTRDWFCCQACEYAAPADNVAALNIRSRALVSVPNVGVAI

SEQ ID NO: 6429 - protein, 368 aa, Paenibacillus sp.
  misc_feature (191)..(299): Xaa can be any naturally occurring amino acid
MLEQEHHEKLLETMKRYNAACTFISGFAFEQSEYNRIKLQKLVYYDVRDQFQLSSQMAILAVRKVADAYTAEKAKKKKKHKKPKGKKKVEKTLISFRETGAMSYDARTLSFTGLELASILTLDGRIKVPMKISPYHQGVMQGKNIRGQADLVWHDGVFYLLLVVERPANEPYEPIDAIGVDLGIKNIAADXXXXXXXXXXXXXXXXXXXXXXXXXXXXXXXXXXXXXXXXXXXXXXXXXXXXXXXXXXXXXXXXXXXXXXXXXXXXXXXXXXXXXXXXXXXXXXXXXXXXXXXXXXXXXLAGVPVVLVDPCSTSRECPQCGHIAKENRKTRDWFRCQACEYAAPADNVAALNIRSRALVSVPNVGVAI

SEQ ID NO: 6430 - protein, 357 aa, Paenibacillus sp.
MLRAYKYRIYPTVEQAHFFARTFGCVRFIYNKMLADKISHYESTGKALKNTPAQYKNEFEWLKDVDSLALANAQLNLEKAYKNFFRDKKVGFPSFKSKKTNHHRYTTNNQKGTVAIEEGRLKLPKLKTNIRIKQHRPFTGVIKSCTVSKTPTGKYHASILVRTDLAELPKIDRKIGVDLGLKDFAITSMGEIISNPNHMRKSENRLAKLQKDLSRKKKGSQNRDKARLKVATLHEKISNQRKDFLHKTSSRMINENQVIVMEDLRVKNMVQNRNLAKAISEVSWSLFRSMLEYKANWYGRTVLIAPKHYASSQLCHVCEYRNAETKNLAIRQWLCPGCGTEHDRDINAAKNLLKLAM

SEQ ID NO: 6431 - protein, 430 aa, unknown
  TnpB Polypeptide
MAWEVTRTVRVRLDVPNDRKSDLHATNTKFQYCANRAADWAWRYPEEDCVTSKSEAESAIYDGLRDETDGLHANLVQKAIKRATDDIDNCVDRLADGQNTSKPEYDTFSIVYDKRAATYYRDKVSLATVNGRVECEYDLPENPDGTPHGEYLLNDDYSFSTSTVHYDSETDEFYLHAVMERELDSNSPEKAEDSNVLGVDCNVTDHIAVTSTGAFVGNADYLNHQRREFEKRRASLQQTGTRNAHLTIQRIGDRFGRWSKDYLHQCSRAIVEEARRHECTHIAFEDLERIRARISDGKKFQQWAFDALQTMVEYKAEAYGIVVDTVNPQYTSQQCSKCGCTLEENRDDQHFECLDCSYTANADYNAAKNVARKLALQLQRGQKSPTGGAFCQYALKSGTMTVNATDVASDTPVSAERESTDKPTPLGVGN

SEQ ID NO: 6432 - protein, 371 aa, unknown
  TnpB Polypeptide
MLKAYKYRLNPTSEQISLMEKTFGSVRFIYNWALQTKIEAYQKDKTSLTAIDLCKKLTELKKQKEYSWLSEVSNECLQQSIRNMDQAFVKFFREKKGFPKFKSKKRSRKSFKNILGVKVDFDGSRIKLPKLGWVKFYSNQTFKGKMGTVTISKSPTNKYYVSILVDNGIRVPDKYPINPDAAVGIDVGIKTFATLSDGSSFENPKYLEKSSARLKCLQRRLSRKEKGSKRRERAKLAVAKAYERISNQRNNFLHHVVNNILGENQTVVIEDLNVEGMMKNHKLANSIASASWSEFFRILSYKSEWKGVNLIRIGRFEPSSKMCECGYIHRDLKLSDRVWNCPSCGSVNDRYLLAARNIKKFGLEKQNLLTR

SEQ ID NO: 6433 - protein, 332 aa, unknown
  TnpB Polypeptide
MQIISSYGVELRKQNIPIRQTLEIYRSAVSYLIGIYVQVWEKLAEIPDAKRRFNAAEHLVHTTKKNHACFDFDIRFPKMPSYLRRSAIQHALGTVSSYKTRLDLWEKTDGKSGKPKLVYKNHAMPVFYRDVMYREGAERKDEAYLKIYDGHDWKWFCVRLEHTDMEYLRKYWSGKKASAPTLEKRHHKYFLRFTYTEEVTLTKTPVKEQVICSVDLGINTDAVCTIMRADGTVLGRKFIDHPSEKDRMYRTLGRIRRFQREHGSAQTQGRWAYTKRLNTELGKKIAGAIVRYAEENHADVIVFEYLEMQGKISGKKKAETAPVEKKRYPEVL

SEQ ID NO: 6434 - protein, 675 aa, Streptomyces sp.
VSRKLPLGEGETARTACARGLLRTGVVEKTGEVLSAAVLAEWVGWAADLASAMAAGLLAAHWNAADVGTLASGVDAGGRALPSNAWMALRRLGWTVEVGEGVKVNDRIVRMAQEQAGRTLRSAAWRAGVTAGVLATWPCDPGKRTPGEWDAVREAIPDGRHLPSGVIRSRTRQIAAFARQHGRLPAEVFELEAAPQAARMLLLSACDGQQATLTRADDPGRALLRLQLPTRPDPRTYAHWTWVACPIALPPTVPPGAVLHLPTLHVHQGKVRADLAYTHAVPTARHAGHTIALGVDWGLNTLLSAGAVQLHETGTIAAVGAGAQSRAAGVLAKQHRLRRACEFLHAKTARYQRLIGDSDHHYLAGRHAVLAEELGHVAARRSNLNDALARSAARWTVDQAITAGASVIYVEDLRSMEARGMGRTLNTRLSQQIRGQIVDRMRHLAAEAGIAVVTVPARGTSKMCPRCLVPLRHRAAPDRPATPGWKWAICPNPDCGWQGDRDMGAWQRIAARGLAHQTKTATDRADGTMVIRSVVDTLEATAVVEPGTTKIRRKDRSKTGPTRHRKTPRSAPRRRRAPSPTGPCGPAGKRPEGHAHTGRSRLPRAAHRHQGVTTISTPFPKLSASLEQGRPHPRRHRPRGAALGAGFHLHAHATPPRWETIQPIPRSADHTGSLS

SEQ ID NO: 6435 - protein, 317 aa, unknown
  TnpB Polypeptide
LANLAKAKKAGLKVGRLQYKHECNEINLKQFGNTYKIKAHNKISVQNIGVLVVNGLEQINLDGVEFANAKLIKKPSGFYIHLTVYTKKQSQPETSKEILGLDMGIKDQLTFSNGVKVNFYLEESEQLKGLTRKLNRQVKGSNQYKQTLTRIRRIYEHQNNKKSDVANKLNHVLKQNYIICFQDELLNSWKRKKSKHKFSFGKQVQHGILGRVEDKLKKNTSNVMLESSVPTTQTCPECGCLTKHSLDRRKYRCSHCGYENPDRDIHSAKNMILLSGYGTYRSLNTDTVSTNKLVSLLANLKNVGVVVTTNSMEAHCL

SEQ ID NO: 6436 - protein, 429 aa, unknown
  TnpB Polypeptide
MIIENDDHCSGLHIMIKTALVKQKRIMADSSVNTINIVRKMKLGRSERLDSLCREAGRVYTMTVVWFWRHVRRHGVWLSQYGMQKRLQNGQPTILHSQSAQKAIQCFFHALKTWRATKEMSPNAKPPRKHKCFFKAVWKRVAIRQIGGDLVLSNAKGTEPFVVKGWRFDLPVQVEIGWDGEEYELRATYKAETAALEDGRVASADLGEVHPACIGTENFHLLLNGGLLRCKRRYREKLKAKFSAKIDRKRNGGKRRKKLIQSKQRKLKRLNNQIRDIEHKLTTCAINTLHERGVRKLVIGDLRDIRIGYDKGKVQNQRMHQAPTGRIRYMFSYKAEKLGWQVPDPQDESWTSKTCLACGKRNTPTGRVYRCKCGFVGHRDVVGQVNILNKYHGNIEGCRVIGAMASPIGVRWKPHLRCNSKLVGTNRAS

SEQ ID NO: 6437 - protein, 392 aa, unknown
  TnpB Polypeptide
VRRAYKLRAYLTRPQEGRAAQLLADHFDLYNAALVERREAWRMQRIRVRYGDQSAQLKEIRAADPGGQGRHSFTAQQQTLRRLNIVFAAYFRRVRHAKGQGRRAGYPRFKPYQRFDQVLFVAGDGARWEPAGDARWAYASFQAVGRVKVNQHRRVLGRVKTLQLKREIRCWYVIVVTEIEPVPLSTTGRSVGVDLGVARFLTTSEGEIIDNPRFLDAAQRRLADLQRRKARTRPGSGNRRRLRRALAKQWRTVRNQRRDFHHKTTRALVESNDEIALEELHVDNLTASARGTVDMPGRNVAAKAGLNRSILDAGWGQFTTILVAKAESAGRRVVLVHPASTSIDCHICGARCARPRQDTVVCPVHGELDADLNGARNIATRAGLGSGQASAA

SEQ ID NO: 6438 - protein, 173 aa, Okeania sp.
VYKKLRLSQKSLSRKTKGSNNYQKARLKLARIHAKIKDSRLDYTHKLTTQLIRENQTIVVEDLAVKNMVKNHNPPPSPPGRGARGVGSDANWGEIVRQLEYKAEWYGRELIKIDRYFPSSKRCSNCGYVVDKLPLDIREWDCPECAAHHDRDINASINILAAGGAVSVCGARL

SEQ ID NO: 6439 - protein, 390 aa, Oceanobacillus sp.
MKVKKTFRFRIYPNKNQITFIHKTIGCARFVYNYFTGKQKEKDIYWYKVNEMVQNGQLLQNNWKGEFFNKNKAIKAVRELKKNYPFLKEADSIALQKAVENVNDSYTRYYKKQKRAPRFKSKKNPVQSYTTKYVNGNIAVFDKHIKLPKLGLVRMAKSREVEGRIMNVTVRRNPAGKYFVSILVEAEVDPHEKTGTSVGIDVGLTDFATLSDGTVYENPRFFRTLEEKLAKAQVILSRRQIGSANWQKQKRKVARIHEKIANKRKDMLNKISAEIIKNHDIIGIEDLSVKKMLKNRNLAKLISDVSWSVFQAMLEYKATWYGKQIVKVAKNYPSSQLCSHCGHQNQDVKNLALRAWTCDICQCHHQRDVNASRNLRKEALRLTAGTVGIA

SEQ ID NO: 6440 - protein, 374 aa, Oceanobacillus sp.
MASKDHPYIPYPFLNALFKSMKQNDYQSLPIQSSQGIMKMVFQNWRSFYGSLREYKKNPVKFKARPRIPGYCRSKEKEITFSNQDCMVKDNKFLKFPKTKARLNIGKLGYSEGRLKQVRVVPKYGQYVVELVFQIPAKAEKKESKNRFMSVDLGMDNLATIVTNTGKRPVLVKGKNIKSVNQRYNQLKAYYTGIFRQGKNTNEGPFTSKRLEKISQKRFLQIKDLFHKASFQIVKIALEEDIGTIIIGQNKDWKQHAAIGKRNNQSFTAIPHSLLIQMITYEAEKHGITVMLTEESYTSKASFLDNDEIPIYDQKSQSVVFSGKRIKRGLYLSKMCLLCIMIIPRIITLPFRYMLIYVRRNFVKLFQLHLPQYN

SEQ ID NO: 6441 - protein, 246 aa, unknown
  TnpB Polypeptide
LKEKGYIPTSKDGFTVRSGTISCKAGRYYISVLVDIQEHNIRSNNNFGIGIDLGLKNLAICSDGSIYHNINKTNNVRKVEKILKREQKKLSRKVISIKKGESTQKNFVKQKLKVQRLYQRLTNIRTDYLNKTIHSMVKIKPAFIVIEDLNLSGMMKNRHLSKAVAQQKFFEFRTKLISKCKEHNIELRVVDRWYPSSKLCHNCGHVKRDLKLSDRTYKCSECGYIADRDINASLNLRDANTYTVVH

SEQ ID NO: 6442 - protein, 428 aa, unknown
  TnpB Polypeptide
MTKIVRLDLKFVDTDDMKYAEFYEAARFIQNQIRSAKNFISSALYFDLMNDRKIECGYKQDGNKKSLRQACLDLSREEIPYLNSANVNAISDKVCSEFSSKLKRKELLSGVRAAPTYKGNQPIEIRNQAIALYYENNHFILKISFFSKEGAKEYHLKTGEIRFEIIKTKNFQNAILERLVIGEYAIAGSALIYDKENKRWIINLGYTFTPEKKDLDPEKILGVDLGICKPFYAATDTGHDTLHVNGGEIEKFRRMIDKRKADLQSAARFASPGHGRKKRLERVEKLNHKIENFRSTKNFKYAKAIVEFAVQHGCGTIQMEDLSQISTKNKMLKTWSYFDLQTKIEHKANEVGITVRKVNPKFTSQRCHKCGCIDSASRISQEKFVCTTCGHKMNADENAARNIAMKGVEDIMRKQCEVQHLKYDKETH

SEQ ID NO: 6443 - protein, 410 aa, unknown
  TnpB Polypeptide
MSGKNNTQQAASRTPWRSKNSSTPSNTPTHSGSTERPAVVARHPPGRPRPTVCPSCQSLGKILHRPQAGKKRTSRASEKGRCRDSFYVANDKFRLDGKTIRLPKIGDVAMTEELRFTGTILGATVSRTADRWFVAIQVEVPDAQCYRHRTAHEVNGIDLGVKAVATVSNGEVIDAPKPLNAALRRLRIRSRRLSRKLEAAKKAAGFGHHTCLPKGTRLPVSNNRQKSAATLARLHARIANIRADFVHTLTTRLCRENQALVIEDVNVKGMLANKRLARAISDVGFGMFRSQLEYKARRYRTRLVIADRWYPSSQLCSACGWKNEALTLQDREWVCAKCGTHHDRDLNAALNLKRLATETALPVASPSSNGGAAAERVSAAVGKVTPVRYDGCFQEASGQEENRAHVCARS

SEQ ID NO: 6444 - protein, 390 aa, Bacillus sp.
MRRLKKAYKVEIKPTEQQEQKIKQTIGVCRYVYNLYLSKNKEVYEKEKKFMSGYDFSKWLNNVHTKQTDQWIKDVSSKAVKQSAMNAEKAFKNFFKGLTKFPRFKKKKNQDVKAYFPKNNKTDWTIERHRVKIPTIGWMKLKEHGYIPTHAIVKSGTVSHKAGRYYVSVLCEVDAQNNQININDGIGVDLGIKDFAVCSHHKVFENINKTLQVKKLEKKLKREQRSLSRKYEHFKKKGGVSAAKKRANIDKNLLRLQKIHARLTNIREEYVRTVVNSLVKAKPKYITIEDLNVKRMMKNRHLSDSVRKQKFFRFKQWLTSKCNEHGIELRAVDRFYPSSKTCSCCGSKKVDLSLSDRMFKCDDCDMELDRDFNASLNLKYAAEYTVITKR

SEQ ID NO: 6445 - protein, 401 aa, Mycobacterium sp.
MGRGGVMRRAYVFRLRPTARQHVALSACLDAHRELYNAALQERRDAWAHSKTRIYYGDQSAQLTEIREARPDHAVWSFSSQQATLRRLNKAFAGFFRRVKTAKPGVKPGYPRFKGKARFDSVEWPKDGDGARWLPEAKRVYLQGIGQIKVHLHRPVAGQVKTLQIKRQGRRWILVLSCDDVPTNPLPATGREAGIDVGLVSFATTSDGEHVDNPRWGRAAANKLAAAQQRLTRAKRRSRNRDRRRESVAARHRKIANQRKDFHHKQARELVERYDLLVVEDLKIANMLRRAKPVADPDNPGQFLKNGARAKSGLSRSISDAGWGRFVSVLRAKAEEAGRTWIEVDPRHTSDGCEKCGYAAAENRVTQADFVCQRCSHRTQADEMAARNILRAGLALHAQAA

SEQ ID NO: 6446 - protein, 351 aa, Chloroflexi sp.
MAEDTMLWRTYRYRIYPTVRLRLALEAQLGFACQLYNAALEQRRYEWRGRRRSVTLYQQFRELTAVRAAGLGPANMNCSAMRDPIRRLDRAFAAFFRLRDGRLALPGIGQIKVKWHRSLPTSAVVRLVTVRRVAGRWYACFSLRASISRRILAKKLPPVGLDLGIQYFATLSTGEPIFGPRAYRVAMRKLRLAQRRLSRRQKGSCGRRAARLLLARHFERIRNLRYDHAHKLTRRLVSDFGLIAVEDLNVGGLIRGPLAKDVADQGWAAFLTILEYKAAEAGTRLIRVPPGGTSQTCSGCGVLVPKRLSERIHRCPACGLVIDRDTNAARNILRLGLSRQALTWPTGACVA

SEQ ID NO: 6447 - protein, 387 aa, unknown
  TnpB Polypeptide
MLTYKTKLLFPSEKVRTFWVGQMCLVRDCYNFASKIVFEEKIPLGMMPFHKRLYKAERAAFPKLPAQMCIKVNRQLLANYRTARENKVELEKLLEMKRPSIGLDKRLYSRMTRESFCLSNGDGIRRSEVKFVRYPKFNEMAEKYRMCDPILQYDERNDTFYACIPFLVLDTTPCPESHIGVDLGMKRIATLSDGTAIVDKEYLARRRRIRHNKSELRRHKRKSHSARRKLKVIRRREMNMCKDFCHRVANEILRHDGATIVMEDLLKIKRRTAKTEEGYNRTRHNNAMSQVPFFQLKQILTYKAPLQGKRVETVSPQYTSQMDCRNQSKEGCIRKGCRFYTADGKVFDADWNAAINICNRYHPTPFRLPIDGGLNFVGRHRQKANRE

SEQ ID NO: 6448 - protein, 426 aa, Nocardia sp.
MAYKVRAYPDPGQATQLGRTFGCVRLVWNKTLDIRHRAYHTDGTKTSYKQTDAALTAWKKTEDLAFLSEVSSVSLQQTLRHQHTAYANFFAGRARYPRFKSRNGRQSAHYTRSAFRLRDGKLTLAKQAKPLDFVWSWDPEVLATLNPTMVIVSREPDGRWFVTFAVDTDDPEPLPDTGRVVGVDLGVKDFAVLSTGEKIANPRHLDRKARNLARYQRRLAGKQKGSANQRKAKAKIARAHRKIRNARADFLHRTSTRLVRENDVIAIEDLNVAGMSRSAKGTVDKPGRNVRAKAGLNRAVRDAALGEFRRQLQYKAARAGKRVVVIDRWYPSSKTCSNCGHLLSSLTLSVRYWACPDCGTRHDRDINAAKNILAAGRAVAGETPGDACGADVNPQGASPRLSATKQELSGVSRMGIPVAQGREEVK

SEQ ID NO: 6449 - protein, 381 aa, unknown
  TnpB Polypeptide
VEQRSWWQPGRPAPGFVEQCRQLSEARAAYPWLATGSVIVQQQALRDLHAAHASWSASLRAWRMRYATTPPDERPAAPSPPSWRKRGRNEGFRIVAVDPGDVRRLNGRWGVVLVPKLGWVRFRWSRRVPAARSYRVIRDRAGRWHVAFAAVPSALPAPGNGEVVGVDRGIVVSVALSTGELFKAPELRPAERRRLRLLQRRLARQRKGSRRRERTRLAVALLKAREANRRRDWTEQVSTDLARRFDLIYVENLHLRTMTRSAKGTLQRPGRGVRQKAGLNRGILAAGWGRLVDRLEDKAPGRVQRVAAAYTSQTCNACGQIARASRESQSSFRCIACGNQAHADVNAAKNIAAAGQVVAARGGQGSPRPVNREPPTLGAVA

SEQ ID NO: 6450 - protein, 598 aa, Scytonema sp.
MSTSPQGKQPEYSEFIPNPSEDGKKKKRLPRTAHQEINEDLSNQKLKNSPESANLSLQSVMQELVHRHNETTLNDNLRSWANDSRRLNLFQKLEADSILRGKSCDPFWSEFCGEIFKNLSLPTQTDCVDLGLNWLSGYAKQIDVNSWFSITANSVLNRSWFQICCPSSTVSVHGFTDLENTEKKLDKTYGKNPYKKSQNTPPNSLVKIPIFPCKKLHAIWKQWLAAYRWVYNQCIQLFNAGTVLPKGTSLDQYIQFLQKRPEYEWTQCLGKTRQESVCEAESAKRQALKAWKAKPKTERGKFEMRFRSCRDKSQVIQFKNDAYKNGTWFPSKAKGLLFCSAIGYEVPQSCVYGTELVYQRGQWFACFPEVREVVATRSDKVIALDPGNRCFLTGYDGENILEIGKGDIGRITRLCLHLDSLISQKGSCKGKQNKRKRYKLSLAIERLRERIRNLVNDLHHKASSLLTSTYKLIFLPTYETSQMVLKTARKINRKSVRNMLSWATRRFAKHLEQAAKRNGVIVVRINESYTSKTCPHCGEIHRKLGGNKVFSCPKCKFTAPRDWVGAVNIMLAALQATAFQVKGTQLSIESLTQDVVVS

SEQ ID NO: 6451 - protein, 184 aa, Escherichia sp.
MQVATCAGSRKQEALSRKKKGSANRRKARIQLAAVHERVASARADFQHKLSRAIVDENQAVIVETLKTANMMKNHHLARAIGDAGWSGFITKLEYKATEKGVHLVKLDQWFASSKTCHCCGHKMSEMPLHKRIWQCPECGVEHDRDINAALNIKRKGILELQAAGLVVSAHGGQRKSVTQTVAA

SEQ ID NO: 6452 - protein, 376 aa, unknown
  TnpB Polypeptide
VVWNWTLAWRHARYQSEQARTDFTQANAYLTAMKASEDLGWLNEVSSVPLQQAIRHQQVAFSNFFAKRARYPRFKSRTGRQSAEYTRSGFRYRDGRLFLAKMDAPLAFTWSWTDVDAASIDPSTVTVSRDPCGRWYVCFAVDVADPVRLPATGAVVGVDLGITDFAVTSKGEKIPNPRGLARRERNLARYQRRLARCQQGSANRAKARAKVARAHRKVRAARADFLHRASARLVRDNDVIVVEDLAVKNMIRNRSLAKAISDCGWGAFRRMVEYKAARAGRHLVVIDRWYPSSKTCSACGHLLAELSRSTRTWQCPSCDTRHDRDINAAKNILAAGLAVAACGGDVRHSGSSRVRSPAKQEPRPVTAGIPVHQDGE

SEQ ID NO: 6453 - protein, 377 aa, unknown
  TnpB Polypeptide
MRKTYKYRIYANREVLDKADNWLLLCRRLYNTALEQRIAIYRQNKGSITCYNQLKQLPELRESITEYNEVGSQVLQEVIERLDKAYKGFFRRVKNGDGKPGFPRFKSRERYDSFTLKQCGWKLEGKYLTIRNIGRFKLKLSRQIEGEIKTVTIRREATGKWYGCFSCDKVPARVLEKSTKSVGIDVGIKSYLVDSEGSKVDNPAYFRQSERLIRRRQRVLCRRAKGSNGRRKARVLVAKAHEKVKNQRNDFLHKVANHYVQNYGMICVEDLNIRSMNKNRLLAKSINDSSWGKFFELLSWKAEEAGRTLTRIPRFEPSSKTCSGCGAINQELKLSDRQWICKSCGVLHDRDYNAAKNINRVGLTLQEVTYAVAQSVS

SEQ ID NO: 6454 - protein, 451 aa, unknown
  TnpB Polypeptide
MLPTPEQVVELKRTFSAARFAYNWSLGEVKKGNVKPTSTAPRDHFRKNAPMPAWATGEHAVASRILAGACKQVSDAYASNFAKKKKNSTHTFDIKYRSIRRTASEVVKIDKDTAAAKQSPLNRFEAVQRPYERSRRSIYRHNRSECLAFLGNNLKSVGGIVLQDKPHVIEKLLAEGKRLKEDAKIIFDKRTQHFYFMWTFEQPKLPDPDPTFQTKRIAANDPGVRGFQTWYSPTSGEYGELLEGFQEQIEVRLQKLDRLTSRVARRYERKAAKKNGKVCNVLKPPPDGCNRTRRQRYRTTRALAQKLSRDRQRHVGWVQSAHYFAANSQLRNHDLIIQPWLHCAALVPKSSRVLGCKTVRTMLTMSHFKYRERLQCAATRYAGRHVLITEEPGTSKTCTNCGHWKADLGAAKTYKCNNCSIEVDRDVAGARNNFFAAYGDAVRIGWDGCSG

SEQ ID NO: 6455 - protein, 398 aa, Hydrococcus sp.
MLTCNYQFKLKPTKRQIVEIEKYLTAGRKLWNYALAERKDWINSHQNNLDRCSLEKEYIIPVDTPYPNYKLQAASLTEARKVCVDLKDINAQVLQQVLRQLDRAFVEMKSLNKGFPRFKNKYRMRSFVFPQFKTNPILGNSIKLPKIGSVKMRLSRPIPEGFIFKQARVIRKASGYFINLCFQADVKVPDPFPHGNPLGIDIGLDYFAATSNNELIKRPRFFNSLHRKLKLLQRRLKNQQIGSNNRHKLNQKIARLHQTISQTRKDFHDKLAHHLCDGNGMIFVEDIDFKSWSRNMFCKHNLDAGFGQFFQILSHVCWKRDVYFAKVDKNYTSQTCPNCGVHTGKKQLSERIHTCPECGFSCQRDFAASLVIKNRGISAVGQSVLEKRFWRGSDGTWR

SEQ ID NO: 6456 - protein, 377 aa, Burkholderia sp.
MDIKRAYRFRFYPTPEQAATLARTFGCARFVYNEMLRRRTDAWHQRQERMGYHETSAALTVLKRADGYAWLNEVSSVPVQQALRHLQTAFAHFFAKRAKYPTFRSKHGKQSAEYTASAFKWDGSALKLAKMAEPLAIRWSRTIPKSARVTTVTVSKDPAGRYHVSMLCDDAVSPHPGADGKIGIDLGLTHFAILSTGERIAAPNTFRKNEAKLAKLQRRLAKKQKGSANHRKAKLKVARMYAKTADSRRDFLHKLSSRLINENQVIAIESLSVSHMQKNRKLAKSISDASWSEFTRQLAYKAQWYGRRLIGIDRWYPSSKRCSDCGHTVARMPLKVRAWDCLECGATHDRDINAARNVLAAGLAVSAYGERVSPMSL

SEQ ID NO: 6457 - protein, 557 aa, Streptomyces sp.
MPGDRSYGAEAGGVVVGGVRDLAGPFVVPGSSGVAVRGRLKHLTPEDERVLRSVGEYQGVLASRDLKVRCAQGLDHGAETWAARKRELTKVSSSRIAGAITKAAHDQWALARRGQAAHIRSLEAGIRTLQHRLSLPIGTKGTKRAAGGYRSRQEWFQKSRRLTTLEARHTTIMADWRAGRVRVVRGGRRLLNTRHHLDAAGLTQGQWRERWEAGRSFLAADGESGKRFGNETIRVTPTGQVSIKLPAPLAHLANNEHGRYSLASTVAFAHRGVEWADRIEGNRAVAYRIHLDTARGRWYLTASWQGPHVQATPWEAARAGGVIGVDTNADHFAAYRLDTHGNPVGEPHRFTYDLSGTTHHRDAQIRHALTRLLHWAQQSGVTGIGIEDLDFSTEKTREKHGRRKRFRQLISGMPTGKLKARLVSMAAEQGLTIIAVDPAYTSMWGGQHWQKPLTTPRRKMSRHDAAGIAIGRRALGHPIRRRTAPPPHDRRDRVGHRTAQAAPSEREREGTRPPATDHAPGDVPPNGTRKRQPSAPKTVRDAPRTHEWVQDPLMHTG

SEQ ID NO: 6458 - protein, 393 aa, unknown
  TnpB Polypeptide
MSRYRLLPSAAQEAVLRDHCAHARYVWNLAVEQQSWWRSGRASAPGYLEQCRQLTAARAEHDWLRAGSQMVQQQALRDFDQAMVNFFAGTHGKPGWRKAGRDEGFRIVAVKPGHVRRLSRKTGAVWIPKAGWVRFRWSRRVAAAKSYRVTLDRVGRWHIAFAVVPEPVPAPGTGQAVGIDRGVTVSAALSTGEMLRVPPLSPARQRRLRRLQRKLARAKRGSGRRARVKLAIARLRAREADARKDWAEKTSTSLARRFDLIRVEDLRITHMTRSARGTVEQPGRNVRQKAGLNREILLSGWGLLVRRLEQKAPGRVEKIKAAFTSQRCSACGHVAAESRKSQAVFACVACNFACNADVNAARNIAAGHAVTARGRSPLGGRVNREPQPVFLSA

SEQ ID NO: 6459 - protein, 487 aa, unknown
  TnpB Polypeptide
MSQLAAEVRGISSYATYVVRNDTQLEEGLAQAGAIQPATAGRRAGVTMPDFLVTGKSGKSRKEWLVRYNVVTSFRSWQERIKAVNGESDKYISQGWKRTANSAPPSYGEDYINLGAVDNHYALIENNPFADGEITLKMVICGAWYRLFFPFDNTRFTEGKVTLPVVKVQDGKPVFIFSVVTDNPIVQFSGDYTIGVDVGINDYATVVVRNSKTGEITHRTTLSPRVHSLWNSVRASEKQVRQLREKAVSLSLYDRQGRMAARDEADLHRKAASRKKRELAILAAQEIAYLSHFFGNAVVAVEDLSWITNTMQNGRWNRGAFIQWLTHYVSQNGGWVVLVSAANTSQICHMCGAEVEHPEYKVSRCPVHGDMDRDVNAAANIAARAVPKVEKARKTRAKSRKLQEQEPLKTPVARVSLKYPGQDRIKNKPTPKRKKHRISKGVTLPISPARVKPTTVLADCLTCGVAGTSQAAIKQGTITTYRLCSPI

SEQ ID NO: 6460 - protein, 340 aa, unknown
  TnpB Polypeptide
LQIVVKRVYDNLSTLKAQKENGRAVGMLKWKSPREYRSLTYNQSGFELKNTSGRPVLWLSKIGEIPIHLHRDVPENATIKQVTVKQEPTGKWFATFGINVDEATPEKPEKPEKCVGIDVGILKYAHDTDGTAVGSLDLSDERERLERAQSGLSRKEHGSANWKKQRKVVAERYAELKRKRRDFLHKLSNYYATEYDLVAVEDLDAKGLIELPGNSRNRAGASWGTFLRMLEYKCEREGTHFVAVNPGGTTEECASCGVKTDKPLWVRKHSCPACGFEADRDTNAAWNILSRGLEEVGVVHSESTPVETALSTDTSSVSAKRVVETGSPALKQRTAQAVSE

SEQ ID NO: 6461 - protein, 367 aa, Caldivirga sp.
MIARRAILIRLPRDKCDADYVKRLMALANLAYRGYEVWVPDLPKTIQYHLYGSFKNFKGSLVFGTKPKRWLAETWIPLTTLRVYQDGSRKGDGSAPVVLDFRNNIIKLHQVCRNEPRYVVTIPMPKWIIERVKEGGDVKYAMIGLKDNEPYLALIAERVVEPYVPSGYRLVVDVNAWNNGVAYGIVNPGNKIAEYSPLRPNLRLIDTWYYRAEGLHKKLGRLKRLGLDSTPEARRLAREVKALRRKIYAYLRDFAQKRARELALKALRLRAEVLIDDIIEESRRELLEMKIPSGLRKIYLAETRRFIKLLVTQLQWYGVPYRFKRLPSTVCPICGHKLIQERGRVMVCTNCGFKAPRDKIPIHWAMR

SEQ ID NO: 6462 - protein, 405 aa, Selenomonas sp.
MDKELFRFHGRRRMQRDHPTVCRDAENKELNDMKTFKFKLYRSKKTRRLDHQLWVACKVYNHAIALHRRYWKLYHKSLSKFSLQKHLAKLKKLPRFAFWNDIPSHAIQDITDRIQRGYKLFWENLKNKRKTAPPKFKSWRKYRSLSYNMVGRSIIKGNVIKIAGGKYKFSKSRDIEGAIKLLTVKRDACGDFFVYLICDTPEAKRETRMGESIGFDFGLKGAMLVAENPKNDIPEPSFFRKQKNAIAKANRKLSSKRMCSHNREKARLELARLHRRVANQRRAFHWELARTLCKKYSIICLEDLNMKWMQMGHGKKVADYGFAELVSLLEYVSPKFGTTIVHIGKFFPSSQLCNACGFQNKEIKDVRIRAWDCPKCGTHHDRDRNAAKNIHEEGLRILSEEKATA

SEQ ID NO: 6463 - protein, 384 aa, Geomicrobium sp.
MLTYKGIQFRLYPNLKQQEQIAQTIGCCRFVYNHFRASWEHTYTETGKGLTYKACANALPLLKGDVPFLKDVDSTALQKSVWSLADAYRRFYAKLGKYPRFKSKRNPVQSYTTAIQGKAQVFTNTVTNNRIKLPKLGWVKIRGSRVIEGRIIAATITRKASGRYLVSLKVEADVQPLPSTGQSVGVDLGITNFAILSSGEKMDNHRFTKAMRQKLAREQRKLSRRAEGAKRRGTPLHLAKNYEKQKRVVARLHEKVANQRKDFLHKRSTDLIKNHDRIVVEDLHAKGMLRNRKLASAISDVSWSMFVTQLTYKADWYGKQFIKVDRWFPSSQLCSSCGHHDGKKGLHVREWSCSACHTSHDRDINAAKNILQEGLRTAGAAGIA

SEQ ID NO: 6464 - protein, 665 aa, Euzebya sp.
VTTKVRRTRGKTRSPEGNWSADGLPKATIRLALDTSDPVQRRKVEKLFGACFQLRRAVQSDARHRINAYWAAHHERAADEDAPKRVRERLELTKKGLEAAAKEHLDRAPHLLCWSSKALGLHLADTVWEPTRRHLFPDKVGRRSGRPHITGWWDFHHIPGRARSHTATGNKWETFRLHGTLDATRPAMAHGGWRHHRPVTTPAPPTGMRSKDWWAWDGPLMVVMSNVGSGDLVLPVRLPTAPSERAHLEHFLGRPEAWHQIDLVRHRDPNRPGGWAYEAHLLCLTDPYVSESTQQRRQSVPAGRRAGGDVNVSNITIASHDGDGSDLAVTTIERTADQNARAQARRVKERRRQKSLDRSRRNSNADQYHLSKRQERAAKRRADRGLPNKAHMPKGPRKARADGKPERAYRRDTLTNGYRRGRAAAAKQARAATIARRQTADRMAGDLVAVHGTDLTIEHGSITAWARQWGRAVHAFTPGLLIAAIEREVAAAQPGATVKRAGTRQTAMSQHCPCGHREKKPLSQRTHRCVVCGLAGGRDAVSAVLASCVDMADPDEPSTAIVDYRLAGQLAADPASRTTIFQTAGVQEHPWASTDTPDPGILPAEGDPATSFTAGSAPRTGTVPPPTPNETPAHAGDHVGPEATTNPNAPPTGRQLAAVGLRDIS

SEQ ID NO: 6465 - protein, 230 aa, unknown
  TnpB Polypeptide
MIKGMKVMLMPNNKQNTKLFQYAGAKRFVYNWTLAKQIDNFKNGERLISDSILRKEFTQLKKLDEYSWLNKISNNVTKQAIKDCCIAYNNFFKKQKRTGIKYTKETLQKCSKQNKKPSFYDMNGHPKFKSKKHDIPKFYQDNVKIQFNATHVKFEGFSNSKKKNKQKLNWIRLAEKNRIPFGKDVKYVNPRISFDGLNWFISVGIEYKESNNILKNNGVGIDVGVSVTCC

SEQ ID NO: 6466 - protein, 618 aa, unknown
  TnpB Polypeptide
MGVRFEGTREKRRIQEKEANQRVKGLQVRQEDLIHDKKAINAALSIARNEPKMPNMVGLTNIKRITKKSPSIADSAYTYLFLAAKGTVTLERKVEVFFDLMSNWKEQAIEWYIFGRSPRIESILIYRWKVKRLYVINVLTSTRRQIDKFCNQRLKFNTMLPLLAQKEFERAIQKCNKSKCLELTSKPINSKTNVFLENLRLLALKADIVAPLLTSWNNTVHPSRWKSLKFLSKRIAESIGEKNRRLFSALRAIVIFALYSTLEKTVIEIIQKTHPTKIVHPPFRKKKKGRLPIQLIMCPKHVVLRPGSSKVMTELARKDGYFELGFVLRGFPRITCKLIFSKKILEYLNKGARIRSLLIRSNSSPSYKVRVSVIIEGTPSKFLSTKLLKQLSKKGSTKKVKSIGVDINRVSEHMIALSNKEPLSKNLLLLARKYNKLSNVIIPQLSYSLTNKGKKKDTRGYVKTKGELYRVYRRRKNILEEIKNFATHFIAAEIVKNKSNLLCVEDFQIDPRGKRGALAKAIYNMPDNQEIFEKAVLLASSILGYKVKLVYVNPRGTSTKHNGCGGKVERKIGSYDIAKCKKCGKMVNTHINAAKNVKDKGEQLLKSNSPSPHTRGTR

SEQ ID NO: 6467 - protein, 385 aa, unknown
  TnpB Polypeptide
MEVIRAWKFRIYPNGKQGKEIQTHLWISKNLWNDLLEYSKNKYKETGKFPIKTELQSMVKDSGLYSQTAQAVSHRLYGALLRYFRTKKKDRNAGFPRFKNMDRMKSLLYPQSGFKITERKLEVTPFGEISIRKHREMKGKIRTLKLKRESSGKFYAIFTTNMEMTPKENKGKQIGIDLGLMNFATLSDKTIIKNPRHLKKYEERLAKRQRELSTKENGSIRRKKQKRKVAVVYEKVRNARRDFLHKLSLHLVNSYSFVALEDLSIKKMTMEGLGKSINDAGWNEFANMLCYKAEEAGCRIMFVDPYGTTKECSNCGEIANKKLKERRHNCPSCGLSIDRDLNASINILNRATAGQAGSNARGVGQWADIEARSPAHLRWENVTTL

SEQ ID NO: 6468 - protein, 393 aa, unknown
  TnpB Polypeptide
MLIHIAYKCRLYPNREQETALSRQFGACRFVYNHFLRQRIDFHAEHKDSQGKKGLTFVDTSAMLTRLKKEQEFAWLNEVANHPLQQSLLNLDKAYNGFFNRRAKFPRFKNKRSKQSFRIADPKRFRIGNNTLFVQKIGTIRMVVHRIVEGAPKLVVVSRTTTGKFFASIVCEQETPDPIHTSNKEIGIDLGLRSFLTTSYGEKVEHPKHLIKAAKRLARLQRRIDRRKPGSNRREKARRAVAIQHEKVTNRRMDFLHKLSSRLVRENQTIHAESLNVKGMLANHRLARRISDSGWSEFLRQLDYKERWSGGCLDQVDRFYPSSKRCHICGRINEALKMSDREWRCVGCGTIHDRDRNAAINILNFRQVGREPPESTPREIPDGESPNLETASR

SEQ ID NO: 6469 - protein, 324 aa, unknown
  TnpB Polypeptide
LYDVRTIQNNEHPEWAFDCPQRIREHSINEACQAVKNAKRKYGTTHRFQQVKFRSRKDPVQRFGFDKQSLNKNFVFKGSNKILFDSSESINSELEGTRIIKENGRWFLILPQRRSIKTPDNQRLGAVAIDPGVRTFVSYYSETHHGKIGEGDFNRIFRLCVNLDRMMSKMYLSRSRRRRNIRRAAERLRWKIKDLINDLHHKTANFLVRNFDIVFLPTFETQQMVSRLRHKTARMMLTFAHFRFKSFLKAKGEEYSCEVIDVSEAYTSKTCSYCGKIHNIGSKKVLRCGCGATVDRDLNGARGIYLRALMATSIPADSRNATVC

SEQ ID NO: 6470 - protein, 276 aa, Synechococcales sp.
MMVGVKQRYRYRLYPHPHQQLALAKAFGCARVVWNNALVKSRELYAAGEKTSYPLLAKLCITQAKQTPERCWLSGPSNVVLQQSVRDLDQAFRNWWASLSGKRKGPKVRPPRFKRRRGAQSIRFMSHVFHTGEGSLTLSKIGPVPIEWSRDLPSAPSSVTVIREASGRYFASFVVEVEPTPLPANGKAVGIDLGLASLAVTSAGEKIAPPKFLRSALKRLRRLQRHLKHKQKGSNRLAAARRQVAKLHATVADKRLDFLHQFSTRIIRENQTVVLE

SEQ ID NO: 6471 - protein, 433 aa, Synechococcales sp.
  misc_feature (277)..(355): Xaa can be any naturally occurring amino acid
MMVGVKQRYRYRLYPHPHQQLALAKAFGCARVVWNNALVKSRELYAAGEKTSYPLLAKLCITQAKQTPERCWLSGPSNVVLQQSVRDLDQAFRNWWASLSGKRKGPKVRPPRFKRRRGAQSIRFMSHVFHTGEGSLTLSKIGPVPIEWSRDLPSAPSSVTVIREASGRYFASFVVEVEPTPLPANGKAVGIDLGLASLAVTSAGEKIAPPKFLRSALKRLRRLQRHLKHKQKGSNRLAAARRQVAKLHATVADKRLDFLHQFSTRIIRENQTVVLEXXXXXXXXXXXXXXXXXXXXXXXXXXXXXXXXXXXXXXXXXXXXXXXXXXXXXXXXXXXXXXXXXXXXXXXXXXXXXXXRGCSKTGSWPARLPMPAGGSSAPCWNPRPSNTTAKWWSSTDGCPPARCAQPADTTTAKRSCRFGNGSARVAERFTTAT

SEQ ID NO: 6472 - protein, 379 aa, unknown
  TnpB Polypeptide
MRKELEKLFDYRRFVWNQALEIWNDMYDASLVMMDKALRPNERKVRDELVENKADWQFERSARVLQLAVNDLSKAWTNYFNPQMPNHAKPNWKSKKRSRKTFKTDRAKIVNGKLCLDKPRGAGAWYDIKMAEQPRWNGVIKQACIVQDADGYYASLAIEAAVLIEKRPIRRVTAVDVNVGKFDYKTPSGYAVQPTLPSSLFSLYARMTHYQKQLARKRTTNPKHFNSATYRSTRTKLKQGYQRVERIQMDLLNKFTTKLTKTYDLIGIEDLDNQHMRMNHHLAKNLHRSMFGKFKIMMQYKADWNGSTLILADPMFPSTQRCSQCGYTKTGEEKIALHGNAKHRTGHDDYICYHCGAKMRRDENEVDNLIDYAKSKVQG

SEQ ID NO: 6473 - protein, 403 aa, Okeania sp.
MLVREAKLLNGTSNQYKSLDEAIRTAQFIRNKAVRYWIDNQGVDKSRLYKLSKELASEFAFANKLNSSARQASVEVAWTSISNFYRRCKEGAKKKGYPKFKKHCRSVEYKQSGWKLSDDCMSITFTDKFKSGKFSLYCDSETREDLFRLKINRVRIVRRADGYYCQFCLDVQRKESGNYTGNVIGIDLGLKYFYKDQNDHAVVYPQYLRFAEKKLKRLQRQLSKKFVRGKKRCDPASPTGARERAPRQPQSNNYHKARKRLGKCHLKVSRQRKDWSIKQARCVVASNDVVVYEDLKIQNMVKNHHLAKSISDAAWYQFTQWLEYYGKIWDKAVVSVNPKFTSQDCSNCRHRVKKTLSTRTHVCPSCHVEICRDTNAARNILNRGLEIIGIEWNQGTVGHTGTS

SEQ ID NO: 6474 - protein, 398 aa, Okeania sp.
MLDWLEQCRRIYNYALAERKDWINSRKCPVNACSISSEYIIPADRPYPDYYKQQNALTKAKKEIPKLKAVYSQVLQEALKRLDKSFKFMQERGFGFPRFKKFGQYRSFVFPQFKSNPVNGFEIKLPKIGAVSINLHRPIPEGFEVKQVRVVFKASGWYAQLILQMDVSVPETTPHGKPIGIDLGLENFLAISTGGLVERPRFFVDLQSQQRLLQRKLRNKKKGSANYRKTSAKVRKLHEHIHNIRREFHFLTAHKLCDNAGMIFAEDLNLKMTSRGILAKHCLDAAWGSFLEILKWVCWKRGVYFAKVAPNGTSQTCPHCGAHTGKKELSERVHHCEECGYVTDRDVAAAQVVMQRGLVFVADGQSVILPVEEGCVDTPMKQEKPTARKGSPRSTRHW

SEQ ID NO: 6475 - protein, 213 aa, Nocardiopsis sp.
VTEATLDCFGCVLSLAGYTTVGVSKIATTSDGQVLAGRRINRYRRRQLRLRQKLRAKGTRSAKRLLRRRRRREARHTRDTNHRISKRIVAEAERTSHGIALEDLTGIRRRVRLRKPQRVTLHSWSFHQLGAFITYKARRSGVPVVFADPAYTSQMCAECDHVDKRNRVDQAIFVCRGCGVVAHADRNASRDIASRGAVVWDAGRRSHVPPDHP

SEQ ID NO: 6476 - protein, 370 aa, Chimaeribacter sp.
MKRAYKYRFYPTPDQVELLAQTFGCVRFVYNSILRWRTDAYYERQEKIGYTQASARLTAQKKETEFAWLNDVSCVPLQQSLRHQQAAFKNFFEGRASYPAFKSKRHKQSAELTASAFKYRDGKLYMAKSKDPLDICWSRPLPCVPSTVTISKDAAGRYFVSCLCEFEPVSLPISPKMVGIDVGLKELFVTDTGFKTGNPRHTAKYAKRLALLQRRLSKKQKGSKNRVKARLKVARIHAKIADCRLDNLHKLSRKLINENQVVCVESLKVKNMIRNPILSKAIADAGWGELMRQLQYKGEWADRSVIAIDQFFPSSRRCSDCGFIMNKMPLNVRSWNCPECDTRHDRDVNAARNIKAAGLAVLAHGANVNP

SEQ ID NO: 6477 - protein, 468 aa, Streptomyces sp.
VAKAAGKGEAVHATGAEAERVKREARGVPTRIEHRQRAAGPMRRRAPEAGTRQRVYRYRCYPSPAQTAQLLKTFGACRWAYNEGLALRDKAWREHRVPLGFAESCRALTGWRNAEETRWLQEVSSTVLQQALRHLDAAFGRFFTGMAGHPRRKKKSRCRDSATYVRTGFRWVEDPERPGTGLIALAKQSGPLPVRWSRPLPAGARPVKLTVSRDRAGRFFVSVLVEEWIEPLPPVFLRDGGGPKAVGLDLGLAALVTLDDGEKAGRPRLLEKYGAKLADLQRSLHRKERGSRNRDKARQEIARLYALIGDVRRNALDQLTTRLVRENQVLVVEDLAVASLLRSPRGRGRRRKTGLNRAILDASWGELLRQLRYKCAWYGRTLVVVDRFFPSTRRCSACGATGPKLDLAVRGWSCGGCGEAHDRDVNAARNLRDEGMRLYERVASSLPPGRAMPSMIRASEVPDVERAR

SEQ ID NO: 6478 - protein, 404 aa, Actinobacteria sp.
VIRAYKFLMRPTVGQAIALGEMLRDHCSLYNGALQERRDAYRHVSKTSVKYGMQSAQLKEIRAFDPERQERWSFSSQQATLRRLDKAFAAFFRRIKSGDAPGYPRFRGANWFDTVEFPKDGDGCRWNSTPQDPVTRVRFQGVGHVKVNQHRPVVGKVKTVSVKREGKRWYVVLTAKQAQPEPLPATGSVVGIDMGIVSFLTTSNDEHVANPRHARKAAAKLEAAQQKLSRFGRVRRDKRTGNHQRAVQRVADLHRKVRRQRLDHAHKTALGLVRDHDLIAHEDLKIRNMVKTAAPKPDPETPAAFLPNGAAAKSGLNRSISDAGWGVFLTILHAKAESAGRTVIAVDPRNTSRTCPECGHVSAENRPTQEKFHCVSCDHQAHADHVGALNVLRAGLVRREAAPA

SEQ ID NO: 6479 - protein, 419 aa, Symploca sp.
MILTYCYRIKPSTEQEAYMLHTLELLRRHWNWSLGQRLDWLRRTRCQIDRCSIVSEPIGEVPLKVNYYTQQSALKETKRLFPEYKGIWAEAQQVNLQRLKKAWERWLIPDKSGRRGGRPRFKKPGQLRSFVYPRVNCPKAGAHINDGVLKLSKIGEMPVVMHRPLPDGFKFKTCTVVHKADGWYCCIAVEDESVPVAKPLDEVKTVAGVDVGLKEFLTTSEGETVAIQQFYRKTQNHLARQQRRLERKQKGSNRHKKQQNFIARIHQRLGRQRKDFHYNVAHKLVKSYDLIAVEDLNIKGLAKSKLAKSILDAAWGKFITILETVAVKCGVRVVKVNPHGTSQNCSNCGTKVPKTLSVRTHECPKCKCVLDRDENAAINILNRALHEVGLISSARGGLVGGQPVKRELLGYEGVQLSIF

SEQ ID NO: 6480 - protein, 402 aa, Escherichia sp.
VKRLQAFKFQLRPGGQQECEMRRFAGACRFVFNRALARQNENHEAGNKYIPYGKMASWLVEWKNATETQWLKDSPSQPLQQSLKDLERAYKNFFQNRAAFPRFKKRGQNDVFRYPQGVKLDQENSRIFLPKLGWMRYRNSRQVTGVVKNVTVSQSCGKWYISIQTESEVSTPVHPSASMVGLDAGVAKLATLSDGTVFEPVNSFQKNQKKLARLQRQLSRKVKFSNNWQKQKRKIQRLHSCIANIRRDYLHKVTTTVSKNHAMIVIEDLKVSNMSKSAAGTVSQPGRNVRAKSGLNRSILDQGWYEMHRQLEYKQLWRGGQVLAVPPAYTSQRCAYCGHTAKENRLSQSKFRCQVCGYTANADVNGARNILAAGHAVLACGEMVQSGRPLKQEPTEMIQATA

SEQ ID NO: 6481 - protein, 436 aa, unknown
  TnpB Polypeptide
MFVSLQFKLELKREDKEKLIQLMRKQSSAIRVAYNMLKKLEKEKTKNPHSQIYHRLRQLFPELPTKYIDSAVYKAKQYPTDKSVVFGGKRLFEKLCKNHLTDKAIERIKKQWRELRQGTLISIGSKHKTAQGNLLLRFMELNGNLHLRITTGNREFIYAKVLREPSNSKDKWLTFMAMLLESWQTQNYFAYTVELKLKEGEVYGSVSFEIPTPKVRYTKENGVIAIDTNASPIHLAIAEVSKTGELLSYQTISLHNLLGLSQNTKDHQEWILTHQIVNLAIEKGKAIAVENLKKLKRGRKGDGKAKLRKILHQWNAKKFLQKLKRVAMLKGVEVIEVNPAYTSVIGMLKYAPQLSIDKDVAGAYVIGRRALGFREDTPENYEELLKDKAYLEFALERYEEREEELRELLEKETNEYKRNAIKSELKNVEYANEAIN

SEQ ID NO: 6482 - protein, 360 aa, unknown
  TnpB Polypeptide
MGGTLIDMMQRTVSFSLEEANKGKKDALRAVMDESKRVLQAYVDHYWPQQDRIGKYVDFKVGSWLSACLLQCLGKDALSMIRALRKRKAKSKPTINRVTLNLDRRFLPDIQESVGHFDFWYQLSGLGDKKHPIKLRLPLKSHVVYKKFIQEGWSLKKSFRLKMRDDGKLFLHLIFEKEEPKPKTEGEILGVDMGYRNLLATSRGELIGSDLKQVYEILRRKKRGSKSQKSVLRRRDCEVNKVVNSLDLSKVKTIAIEALKNVKYKSRQKNKMATKVMDRVQWWSYPRTISKLQRLSEERGISLVEVPPAYTSRTCPKCGSKHEKNRQGDFFKCLDCAYEGHSDIVAAINIRARGERLVHA

SEQ ID NO: 6483 - protein, 278 aa, unknown
  TnpB Polypeptide
MSSSLKKKIPSVCFGGKKNLKNGDLETYRFKRARRMLIPGRRQGKYSNNLFKLNVDNDMLTYRSTQKDIVFNVQFHKYKDELYARVNEKHNSPDKAVAYELMDYGEYFIVKAIFEKHMNLPKTDTLYGAVAIDINVDHIALCETNMDGNIVLIKKYPIHKENTKNKRNEELYQLAIEIMEQCKSKKKSLVVEDLNFKQLKTRMLYRPKKENKTLSSFAYKKILEKVERKCLMNEVDVIKVDPKNTSKIGKEKYTKIKGLSVHYCAAYVINRRGMGFVD

SEQ ID NO: 6484 - protein, 289 aa, Symploca sp.
LLVLEYKIKAKPHQYKAIDEAIRTVQFVRNKCLRYWIDAPSEVNIKRFDLNKYSTELRSEFAFVKALNSMACQASAERAWFAINRFYDNCKSNKPGNIGFPKFQKDNRSVEYKTTGWKLHSTKRRIKITDNKGIGELKLLGKWNIHTYLVKSIKRVRLLRRADGYYCQFCIDVECVDVQPKTGEEIGLDVGIESFYTDSNGHQEPNPRFLRKAESDIKNTQRRIYKKNKGSAGRRKARARYSRKHLRVSRQKSRVGHTRSNAKGVATSTLVGATLLEQVATMNLESPRL

SEQ ID NO: 6485 - protein, 358 aa, Microcoleus sp.
MLLSIKTKLKLNKSQETVMSKHAGIARFTYNWGLATWSALYKDGLKPNKYLLKKIFNNHVKPEFTWIKETGICQKITQYAFDNLGDAFARFFSKKGGYPNFKKKGHHDSFTIDAGGKPIPVGGTSIKLPTIGWVKTHEGLPHTTCKSITISRTADSWFIAFAYEQSHEPTVKSHEVVGVDLGIKELATLSTGVVFPNPKHYKAHLTKLKRLSRVLARKVKGSGNRYKAKVQLAKHHAKIANLRKDTLHKITTYLCKNHATIVVEDLNVSGMLKNHKLAQVIADCGFHEFKRQLEYKAKKFGCEIIVANRWFPSSKTCSNCGHIQDMPLKERTYNCGSCGHSMDRDLNAAINLSRLAKP

SEQ ID NO: 6486 - protein, 448 aa, Mycobacterium sp.
MKRSAVGVVYRTAVVPVRLAGAELRLAHVAHHAAGRLWSHGIAQVRQFWATHGTGPDLAQIRVMLTGTDDELQALHAHTRQAIADDIVDAIATYRANRARGNAGRGRAPWRDKDYRPLTFTRGFGWRLDSKNSDRMWLSLGRGRPRIGVRVPDVVDSATGQLVHAHLWGEIRLCWNRDARTHELHIAYPSAATIPALDPYQVVAIDEGIINPMTLATETAAGFEVTVINGRHARALKHRRNTDVAALRKRMAKCTKGSRQWRRYDAALRRANHTASAGLRNVDHQVSRKAADVIIAAIAGRVSIGDVRGIERHTAKAERRRAGRHQRRRLSQWSRGRQERYLGEKTGIAAEHVNESYSSKTCPACLHINRPTGRHYRCRACQFACHRDAVGAINILMRTRHGAYTRIDPDTPIRVTYLRATPLTPARRDRCSTEYSPEPGHHQNLLVA

SEQ ID NO: 6487 - protein, 229 aa, Chlamydiae sp.
LGDFYLCFSVEEKEKPQKATSGEIVGYDFGLSTILTATDNRDIHSPEYLQKDLVGLKKLSRLFSKKRKGSNNWKKARKNLARLHIAIANRRKDRFFKLAHTLSSRYKLMSFEDLDMKKMAKLWGRKVLDHAFSEFLSILKHVSKGYDTVLHFCDRYFPSSKTCCLCDWYNKDLQLKDLVWTCQGCKTKLDRNRSACFNILRAGASAHGLGDIRPHPEAVSVGIQESHLL

SEQ ID NO: 6488 - protein, 372 aa, unknown
  TnpB Polypeptide
MKLTRTTKVKIETEPKTVFPTIEAYTTAYNHVCQTGWNDNDYNGVSLHHKTYQQCKKWLPSQLSVSARMKATESLKSIMTKKRKGLKVSCPQSKQISIRYDHNSYNVWFNKGILSLSTIDGRQRFTFKAPFGFSNYENWRRKSAELFIRDKKVFLAIVFETDVVDVQPTQKTVGIDRGIKKIAVTSENQFFGGGEIKKVVWHYRFLRKRLQSKGTRSAKRHLCRLSAKENRFRRDINHRVSKKIVKSLSPGTTLVLEDLKNIRKSSKKFRKEQRFWINGWSFLQLETFLTYKAEEKGCFVDFVDARYTSQKCSVCGHTERGNRVKQSLFKCKHCGFQLNADLNAARNIENNYRDAKGYPCRVFVNTPIVASL

SEQ ID NO: 6489 - protein, 366 aa, unknown
  TnpB Polypeptide
VKLISQIKLMPTEEQQTFLKDTIQQANAACNIISNFAWDNKQFRKHALQKSIYHQTKGDTGLSAQVIIRCISRVADAYKIDKKTKRKFKPLSAITFDNRILSWRVNKSQVSIWTIGGRQRILFVCGERQRKLLESRQGETGLILRRGKFYLFATCNAEEPKPDDVGGVLGVDLGIVNIATDSDGQVHSGSQVKNVRHRHRRLRTKLQKKNTKSAKRLLKKLSGKEARFAKDVNHTIAKKIVVKAKGTRRGIALENLKGIRTRVTARRQQRATLSSWSFFQLRQFIEYKARLAGVPVSAVNPRNTSRACPSCWHIDKKNRPNQSTFLCVRCGFAGLADSIAADNIRRVAVNQPYADKLSARSASPRL

SEQ ID NO: 6490 - protein, 212 aa, unknown
  TnpB Polypeptide
MPTGKWVVSFLVEVEPDDPLPKTGLSTGVDVGLKSLIALSNGEHVDNPRFFVHAEKALAKAQRKLSRVEKGSPERATALKVVHRVHERITNKRDDFVQKLSLKLVESYDVIAFEDLNIRGMVKNHCLAKHIADAAWNKLIITTSYKAEWAGKRVELVNPNRTSQICSGCGQVVQKDLSERVHRCYFCGLILDRDHNAAINILRLGLQSVAKV

SEQ ID NO: 6491 - protein, 414 aa, Ferrovum sp.
MTVMLIQRAYRYRFYPTPDQADQLARSFGCARWIYNWGLKERSTAFYNNGQRVYYKDLAARLKGLKQDPETSWLSEVSSVVLQQSLRHLDTAFTKFFKKESDYPTFKSRRDNQSCSYMPNAFAFREGKLTLAKHETPLDICWSRPFPKGATPSSVTVTRTTGGKFYISLLTEEEVSPLPKVKGEVGVDLNTSEIVCSNGKRYATPLKLQVLEQRKRRYQRACRRKVAAAKVSMGLSRNAKLSKGVKLPVSNNLRKAYWKVGRVTEHAANVRKDWQHKLTTSIVRENQTIAMESLYVRGMTASAKGSADKPGSNVKAKSGLNRSVLNAGFGEIARQLEYKTVWAGRTVVKIDRWYPSSKRCSSCGYVLKSLSLSTRQWVCPDCGQSHDRDLNASINILMAGKAILAGADGLRIHE

SEQ ID NO: 6492 - protein, 316 aa, Ferrovum sp.
VLWRVVSGSRRWFVQLMQEGIAPAKHEQACGEIVGLDIGPSTVAVVGDNSASLVKFCDTVVQPWKETRRLQRAMDRSKRATNPHCFNANGTWKKGQKFAPSKRYTAIRTEYAEVERKLAAERKRAHGELANQILGLGNVIQSETLSYLAFQKNYGKSVKVRAPGMFVEQLRRKAESAGGQLIDLHTWSLKMSQYDHTTGVFTKKPLSQRWHVLGDGSGVVQRDVYSAFLARCVMSNTHHPSHIETMWAAQKPVLLQTGWLRSEPAKIEPSGKITVATPLEQVVCDRGFAAGHGLDAVVARREPGDPSGFALRTPCL

SEQ ID NO: 6493 - protein, 352 aa, Ferrovum sp.
MIQRQFKLKLTKAQEVLLVEWLWMGTGLFNWALRKIELDAADGLYYTKQGFQNLLADHSKKLGMPSHMIQGLLVQAYISWERCFKKLAKKPRLKSARNRLNSLPFPNPIKTPVGTRVKLPFMGEVRFHRQDIPAGSIKGGRIIRRTSGWYLALTIDAQPNQIPAINDGVIGIDPGYNHLITQSNGVKVENPKELLGAIKRLGQAQRGHDKKAVARLHERIANQRKDRNHKLSRQLVAENAIIAFSKDNLRGLSRTGFGKSVTAASHGQLRSMLAYKSRAGGRKYIEVPGRNSTRSCSACGALTGPQGRAGLSVRQWECSACGTPHDRDVNAAINTLMAAVGMTVEGGLRHAA

SEQ ID NO: 6494 - protein, 188 aa, Ferrovum sp.
MSRKTKFSSNWKKAKARVQKIHTRIANVRKDFLHKTTTTISKNHAIVCIEDLQVRNMSKSAAGSSDSPGRNVKAKSGLNKSILDQGWFEFRRQLEYKQVWLGGDVLAVPARNTSRTCPACGHVSADNRQTQAKFACVDCGYENNADVVGAINVLERGHRLLACGELAQSGRSVKQEPAEATTQGLALV

SEQ ID NO: 6495 - protein, 442 aa, Ferrovum sp.
LPGHAVSCSTRRLQCRRPSTRAAKRSWAMPGCAKNSPLGKTQPETAWLKETHSQVLQQSLKDLERAYKNFFDKRADFPRFKKKGMGDSFRYPQGCKLDQSNSRVFLPKLGWLKYRNSRDVLGTVSNITVSANGGKWFVSIQTEREVEQPVHPATSIVGIDVGITRFATLSDGSHIEPLNTFRKHQQRLVRYQRALSRKTKFSSNWKKAKARVQKIHTRIANVRKDFLHKTTTTISKNHAIVCIEDLQVRNMSKSEAGSSDSPGRNVKAKSGLNKSILDQGWFEFRRQLEYKQVWLGGDVLAVPARNTSRTCPACGHVSADNRQTQAKFACVDCGYENNADVVGAINFRAMYLQCRNINRRNLMEAVIRKWGNSPALRLPTSALKEAGYHLEQKVDLIVSRGRIIIQPLKKVEYDLDALVGGVTASNGHSEFGFGKPVGKEVL

SEQ ID NO: 6496 - protein, 461 aa, Lactobacillus sp.
MTKKKKEVAAKVKKTDETKDEKPKRKTLMIPMSELPYHLGIKMRIYPSNKQKRLIAINSGISRSVYNKLIAINSELNQLKKVNVYIKQVADRIEALEERKSKLSKYYFYMDSKDVDSMNIAQAKRCYGAAWNMYHKVHSSGRPKYHKKGVNDGYQTSCIYKSDDKKIENCTPFSGSVRFLDMKHVKLPKLGRIRISGSSYRKVLAHNPNFRIGTATIKYDASGFYLSLQIGDVVPFKSQKPKTGKTTGIDLNLDNFLTDSDGTVVDNPRYYRKSLKRLKKLQRRASRRQIRAKKEGRKLWQSKNYQKARRQASRLQRRVRNQREDFLQKLSTAYINNHDVVVLEDLRGKNLMKNHALAMSISDAGWTSFQRMLEYKADLYGKTYIEIDKRNTTQRCHACGSIMGHNGHEKLTLKDREWDCPMCGAHHIRDYNAALNILEKGIAKLSDQEYKIIPYDSEAAS

SEQ ID NO: 6497 - protein, 373 aa, Xenococcus sp.
METYKFKLYQHKKNKHLHRSINAAGNIYNHCIALHKRYYSMFGKHLNKNRLMKHIAKLRRKNEYWQLVGSQAVQDIAQRIDRAYQLFFKHHKKGVRPPNFRKRIKYKSFTLKQAGYKFLDNNQLKIGNKIYRYWKSREIQGKVKTVTIKRNPLGELFIFVVTDHVDYQITSMTGKSAGFDFGLKTFLTCSDGNDIDSPLFLKQSLKRLKLASRDFSRKQKRSNSREKARKNLVRVHEKVTNRRSDWFWKLAHQLTDGYDYLYFETLNLKGMQRLWGRKIGDLAFSEFLKILEFVAQKKGKIVSYIDRWYPSSKTCSSCDYVLDELSLAERYWACPSCSCKHGRDTNAAVNILRVGASTLRVGDVSQLSAAISA

SEQ ID NO: 6498 - protein, 410 aa, Xenococcus sp.
MTYEYKLQPTKEQITDIEKTLDICRSVWNFALRQRKDWCNSRKSLVNACSINSEYIISVDEPFPSYHQQAKQLTDAKKLYPALSSVHSQVLQQTLRILDRAWDDMRSRGFGFPRFKNRYRMRSFVFPQLGKNPIKDDAIKLPKFGWIRWRKSRDIPEGFEVKQARVVRKASGYFVMLSLQLKVDTPNPLPHGHPRGLDLGYDKFVATSDGEEIKRPRFLKLMHRKLKLLQRRLKNKHKGSNNRHKLNQKIARLHQRISDTRKDWHFKLAHHLCDGTGMIFVEDINFVSWQRGMLSKHSADAGFGQFVSILEWVCFRRDVYFAVVNKDGTSQTCPNCGAHTGKKTLDIRFHHCGECGYRTTRDVAASQEIRNRGVSALGHSVVENVCGLEATGSIGHDALVGTGRSRKLAS

SEQ ID NO: 6499 - protein, 363 aa, unknown
  TnpB Polypeptide
MNICTKTLKIRVKDKHASVLSKWAFEVNQVWNAANELSAAYSWVPIPGVGYMNCNTSEFDLQKELKSIREERGLSIGAATVQSVIAQQAKSRRQFKRNKLQWRRSSGSRRALGWIPFKAAGVKLVNGQIRFCGEFFGIWDSYDLSRYTIGPGSFSQDARGRWYFNTTVKVEVKPSSGSKSVGIDLGLKAVATCSEGAGLNRRYITDEFAAQLAKAQRANKAQRVKAIHARIKNCRQDAIHKFTTSMVENYGAIFVGDVSSKKLVKTKMAKSVLDAGWGMLKTQLEYKAMARSVVFEQVSEKYTTQTCSCCGVISVNSPKGRAGLGIREWICAGCGTLHDRDVNAARNILALGHERLAVGIPSL

SEQ ID NO: 6500 - protein, 419 aa, unknown
  TnpB Polypeptide
MTKAEKIKQTLKETKERRKNLRPVVYQLKIQNLSKVREEKLNRVFLEAKWLYNWFVADINRVNIPTKEIKEVEIKVGDKLEKREIRLLGSQLKQAVQERVKDNLRALKGLKEKGYKVGKLKFKKAVSSITLKQYKVSFDIDFERNKVRIQGLGWFRVLGLHQVPRDCEIANAQLIKKPSGYYVYLTCYVKKEHFEREKVRDVVGVDFGVANKLTLSNGLAIDFEVKESERLKKLQKELARKKKGSKNREKVLKKLQREYERLTNIRRDIHNKLLALLRHYGVVVYQDDNIKAWHEGWFGSQVQHAGIGRLKARLRNNLATIPVERFEATTQECCVCGGKQKLSLSKRVYHCPVCGSVLDRDLNSAINILKKGLDLSLNQVVGVGRPELTPVERTLVAKILGSNPYIKATVLVEAGSPHL

SEQ ID NO: 6501 - protein, 236 aa, unknown
  TnpB Polypeptide
MSPSPSSRRPSRYPAVVGWWGIDRGVTVSAALSTGELLTAPRLSPGRQRRLRRLQRRLSRAGRSSARRLRVKRAIARLRARERDARKDWGEKISTDLARRFDVIRVEDLRVANMTRSARGTRADPGRSVRAKAGLNREILASGWGLLVRRLQDKAPDRVEKVNPAFTSQRCSVCGHVDRNSRESQAGFCCTACGFACNADVNAAKNIAAGHAVTARGRPGLPGRANREPQLALLPA

SEQ ID NO: 6502 - protein, 328 aa, Escherichia sp.
  misc_feature (7)..(7): Xaa can be any naturally occurring amino acid
  misc_feature (297)..(297): Xaa can be any naturally occurring amino acid
MKCAASXFAGACRFVFNRALALQNENHEAGNKYIPYGKMASWLVEWKNATETQWLKDSPSQPLQQSLKDLERAYKNFFQNRAAFPRFKKRGQNDAFRYPQGVKLDQENSRIFLPKLGWMRYRNSRQVTGVVKNVTVSQSCGKWYISIQTESEVSTPVHPSASMVGLDAGVAKLATLSDGTVFEPVNSFQKNQKKLARLQRQLSRKVKFSNNWQKQKRKIQRLHSCIANIRRDYLHKVTTTVSKNHAMIVIEDLKVSNMSKSAAGTVSQPGRNVRAKSGLNRSILDQGWYEMRRQLEXHQENTMPSTPDIGFFSHRPKYHLACETTTGI

SEQ ID NO: 6503 - protein, 328 aa, Escherichia sp.
  misc_feature (311)..(311): Xaa can be any naturally occurring amino acid
VKRLQAFKFQLRPGGQQECEMRRFAGACRFVFNRALALQNENHEAGNKYIPYGKMASWLVEWKNATETQWLKDSPSQPLQQSLKDLERAYKNFFQNRAAFPRFKKRGQNDAFRYPQGVKLDQENSRIFLPKLGWMRYRNSRQVTGVVKNVTVSQSCGKWYISIQTENEVSTPVHPSASMVGLDAGVAKLATLSDGTVFEPVNSFQKNQKKLARLQRQLSRKVKFSNNWQKQKRKIQRLHSCIANIRRDYLHKVTTTVSKNHAMIVIEDLKVSNMSKSAAGTVSQPGRNVRAKSGLNRSILDQGWYEMRRQXLRRRMSFRFQSRSGASE

SEQ ID NO: 6504 - protein, 289 aa, Escherichia sp.
FAGACRFVFNRALALQNENHEAGNKYIPYGKMASWLVEWKNATETQWLKDSPSQPLQQSLKDLERAYKNFFQNRAAFPRFKKRGQNDAFRYPQGVKLDQENSRIFLPKLGWMRYRNSRQVTGVVKNVTVSQSCGKWYISIQTESEVSTPVHPSASMVGLDAGVAKLATLSDGTVFEPVNSFQKNQKKLARLQRQLSRKVKFSNNWQKQKRKIQRLHSCIANIRRDYLHKVTTTVSKNHAMIVIEDLKVSNMSKSAAGTVSQPGRNVRAKSGLNRSILDQGWYEMRRQLE

SEQ ID NO: 6505 - protein, 411 aa, unknown
  TnpB Polypeptide
MQLTQQIKIRASPAQELVLQALSERCRLIYNFALRERKEAFEQNIKGINYIKQQNDLPQLKNKFPEYSWVYSKVLQYTLRTLDADFKSFFALNKKGDKNAKPPKFKGKKFFTTMVHNQSGFKAGNGWLELSHKHQHKTKLRFIIPKKFAFSKIYQVSIYKKYDEYFLSICYNKSEQAFQDNQQYQAFDLGIIKQTAVNLHGKFREFANQRPDKYWQKPTEELQSRRDHCRKFSRKWHLLDGIHNKCKTKLASQQKDFQHKLSRKIIDSTKANTIIIGELSPKQMCKTGKHKKGLHRALQNTGNIGRMIGFLTYKAKLAGKRIVEISERGTSKRCCTCGKEQDMPLEKREYLCDCGNRIDRDRNSAINIMLRYLSQNGLWTSYWQFASNLRQTGLTIVSHSQEALTSKCQTF

SEQ ID NO: 6506 - protein, 365 aa, unknown
  TnpB Polypeptide
MDIQYYTKTLKLRIRDKHSKFLCAQAKEVNLVWNYVNDLSMQILKREQRFCSAYDLAPYTKGSTKEGLTLHSQSVQAITEEYVTRRKQFKKVKLRWRKSGGSKRSLGWIPFKSSAIRYKNGQVFYCGKAVGLWDSYGLSKYELGTGSFSEDARGRWYLNVTVKVNQKTESGGQLIGVDLGCKEAATASDGDKVHGRRYRALEQKLALAQRARNKYRVKSIHAKIKNQRKDDLHKFSSALVKRSGAIFVGNVSPTGMAKTKNAKSSLDAGWGILKSMLEYKCRWADIVFGEVNEAYTTQTCSCCGSISSSSPKGRADLGIRSWTCVVCGTHHDRDINAAINIAKRGESQFLVGAGQCPPVVGIPVL

SEQ ID NO: 6507 - protein, 233 aa, unknown
  TnpB Polypeptide
MVTVTVTAKFHNPSLSRRKEWQRATRLYRDTKQFCINGWENGNFDKSVTTASIDNDLYSAIQNQAIREAKSDHSKDGAVRYQESQPFAINNQNWELDTTESGTVVVGFPCVSQWWYTPIEVYDDIDDHVDRLVEGNAKKTRLQVYRRGDDWYCTFNIEYDTDTSGETPIGVDIGERHISPRRPTTKTSQCWCLVVRRSTFDANIVPYAIRYRKRVRFAHVTVWVTKNSVELTT

SEQ ID NO: 6508 - protein, 402 aa, Escherichia sp.
VKRLQAFKFQLRPGGQQEHEMRRFAGACRFVFNRALALQNENHEAGNKYIPYGKMASWLVEWKNATGTQWLKDSPSQPLQQSLKDLERAYKNFFQKRAAFPRFKKRGQNDAFRYPQGVKLDQENSRIFLPKLGWMRYRNSRQVTGVVKNVTVSQSCGKWYISIQTESEVSTPVHPSASMVGLDAGVAKLATLSDGTVFEPVNSFQKNQKTLARLQRQLSRKVKFSNNWQKQKRKIQRLHSRIANIRRDYLHKVTTTVSKNHAMIVIEDLKVSNMSKSAAGTVSQPGRNVRAKSGLNRSVLDQGWYEMRRQLEYKQLWRGGQVLAVPPAYTSQRCTCCGHTAKENRLSQSQFRCQVCGYTANADVNGARNILAAGHAVLACGGMVQSGRPLKQEPTEMIQATA

SEQ ID NO: 6509 - protein, 438 aa, unknown
  TnpB Polypeptide
VPGSDRYKECLFEWLTAHAPLWNQITYRRRQQYFSEEGDVWDADTGRLEGKYKGVLGSSTAQQVIRKNSEAWRGFFENKKAYHDESNTSVTEHPEPPGFRGNEDDGRVLKGVVRKDAYSVEWGNRSRLEMVVGKDLRDGHNSAKSRLRLEIVGDPNWPDYDKQGRLDLWYDETDSTFRASQPVTVSDEIRDTPLADEKAALDIGANNLVACTTTTGQQYRYEGRSLFDRFRETTREIARLQSKLREGRYSSERIRRLYEKRTRRRDHAQEALCRDLFERLYEDGVDTVYVGGLTDVLETHWSVETNAKTHNFWAFKKFTERLACTAEEYGISVEVRSEAWTSQECPQCGSTNRTTRHQDTLTCLCGFEGHADLTASETFLKRHTSNGIRPMARPVRFEWDDHEWLESPRSHKSPKEQRTNPSTVHRDGNVASGESETG

SEQ ID NO: 6510 - protein, 374 aa, unknown
  TnpB Polypeptide
MKKTFQYRIYPNHKQNTTLDQTLDGCRWLYNHLLEQRKNSWESEQRSFSRFDQCNTFKQLKEEQPFLKDIHSQVLQNIAIRIDLAFGAFFRRIKSGEKKPGYPRFRGKDRYDSFTYPQSGFKLIKNVIQLSKIGEVKIKLHRPIEGTIKTCTVRRTPTDKWFITFACNIEHKPIEQPIEPAIGIDMGLLSFATLSNGEQVDNPHFFRQEEKILTKAQRKLSAQKKATQARAKAKKVVVRVHERINWKRHNFAHQESRKLVNRFNTIAVEDLSINDMKKGNFRSMNKSIGDAAWRMFLDLLGYKAVDAGSRVVKVNPAYTSQTCSRCHNRHKLKLSDRIYHCPACSLSLDRDVNAAINILGLGLQSVGVSVEAVS

SEQ ID NO: 6511 - protein, 267 aa, unknown
  TnpB Polypeptide
LSFQAAEPILEVMQHEPTLSLINGQWFICYAVDTITPTPTQSDLVIALDPGVRTFMTGFDGQNVLELGRGDIGRIYRLARHLDKLMSRIGLNKGGQFKQLRYRMRKAASAIRIKIKNLVSELHNKTANYLVSKYKLIFLPTFETQQMVNKGKRKLTTKTARAMVTLSHYRFKQTLKHQATKYGCVVVDVTEEYTSKTCSKCGHVHRKLSGSKTFKCPECGHTLDRDLNGAFNILLKALRDTSMSGELAAFQIMPYTVDLGTFLDLPG

SEQ ID NO: 6512 - protein, 392 aa, Lyngbya sp.
MTEKAYRYRFYPTSEQENLLRRTLGCVRLVYNKALATRTEAWYEKKERVGYSQTSSMLTNWKKKEELDFLNEVSCVPLQQGLRHLQTAFTNFFAGRGKYPNFKKKRNGGSAEFTKSAFKFKEGQVYIAKCKEPLPIRWSRQLPKNCEPSTITVKLDPSGRWFVSLRIDDPMNQKLEPVKKQIGIDLGITSLFTTSDGVKVSNPKHFNQLYKKLRLAQKSFNRKTKGSKNREKARVKVARIQAKIADTRRDHTHKLTTQLIRENQTIVVEDLAVKNMVKNHPYGFARVISDANWGELVRQLTYKAEWYGRELIKIDRWFPSSKRCSNCGYIAEKMPLNIREWDCPKCNSHHDRDLNASINILAAGLAVSACGATVRAEQSKSVKPGAKKQEPK

SEQ ID NO: 6513 - protein, 387 aa, unknown
  TnpB Polypeptide
MTELVLTTVCKLAPTPEQISKIDDTLKVFADACNWINQTVPEDLRNSVVIHHMVYKDIRNKFGLSANLAVRTINRVAANRKTALKDHSVIKNFEPTSIDYDARIFAFREKDESISLTLLRSRQRIKLVHGDYQIGRLKGSKPTSATLCKKGYEYYINIQTKSEAPEEIQTDKVLGVDLGVTDIAVTSEGQKFGGKTINRIKKHYQSMRAVLQQKASKGTRSSRRRCRELQQRLSGKESRYQRQINHEISKAIVVRAKDIPAKIALENLTGIRENVNQKAGRDRRRRINGWAFYQLREFLSYKALQAGISLVLVDPAYTSKTCHVCGSIGVRDGKHFKCSSCGWSGDADFNGARNIAFLGLYVGQPGGSKEMPSIKAVLSGLLKAHPL

SEQ ID NO: 6514 - protein, 374 aa, unknown
  TnpB Polypeptide
MKLVSQLKLLPTPEQTTALKETMKRANQACDYISEVAWDTRTFGKFGLQKLVYGHVKETFSLTAQVVIRCISKVADAYKLDKKTKRTFKPLGAISYDSRILRYKLSKGVVSIWTVDGRADVAFTCGKRQWELLQSQQGESDLAFVRGSFYLLATCEVETPTPDDVEGVLGVDLGINNIASTSDGEKMSGAHVKSVRHRNRRLRTKLQKKGTRSAKRKLRSRSGRESRFSSDTNHVIAKRIVETAKRTKRAIALEQLKGIRQRVRAKRPQRATLHSWAFAELGEYIQYKAALAGVPVIFVDPRNTSKGCSKCGHIAKANRPSQAVFKCQECGFALHADLNAARNIRDRARVMPPNVSENGSKSVHAALQEQAPRL

SEQ ID NO: 6515 - protein, 227 aa, Proteobacteria sp.
VWISAWSIWQQRLTAQRTAGNRLQRAARGMRRDANGCNVPRMSPRWTASDRKTCDGRCNGPPCAKRGFVGTSIIASVRRSLRRLTGTGRGIALEDLTGIRGRTQFRQPQRAKMAGWSFAQLRSFVEYKAKLAGVPVALVDPRNTSRGCSQCGHVAQANRRSQARFSCKACAYTANADFNAALNIKYRAPVNAPQVAGRVPQQLWLLAGVGASDKFSLDRFPAISGSR

SEQ ID NO: 6516 - protein, 318 aa, Proteobacteria sp.
MKLTLQLQLLPDALQADALRSSVERFNEAATWLAGIAFAQQCANKVALQKLAYYELRERFGLPADTTIRCIAQVVEAYKRDKRVAPTFRLHAAVPFSVRKNLGFKGPNRVSIQTLTGRVMVPYLMGTYQRDRFGCAHGQADLVLRRDGRWFLLVTVDVPDGTRIPVSDFIGVDLGVVNLATTSDGTTHSGEQIAACRTRYAKRRQRLQCAAHVAQMDGKRPKNMRRALQRTAMREARFRRDVNHCISKTLVAEAYRHRTRHSPGRLDGYPWTDAVQAAATRQDGRMELCAAQKFCRVQGQAGRCTRGVGRSSEHQSRL

SEQ ID NO: 6517 - protein, 280 aa, Bacillus sp.
GLSKYPKFKSRKKSKPSFYNDNVKLKIKNYLVLIEKVGWVKTSEQLPMNVKYNNPRITFDGKYWYISVGIEQELDKIELSSNITGIDLGVKELAVCSDGKVFKNINRTVEVKKIEKRLRRLQRRVSRKYEINKEGSRFVKTSNIIKTEKQIRLIHRRLSNIRRNHLHQTTNAIVKTKPCKVVMEDLNVTGMMKNRHLSKAIAKQGFYEFTRQMEYKCEKYGIEFVKVDRFFPSSKTCSSCGKIKRDLKLSDRVYRCECGNEIDRDLNAAINLANYDKLTA

SEQ ID NO: 6518 - protein, 416 aa, unknown
  TnpB Polypeptide
MLRAYKYRIYPTGEQKALFAKTFGCCRFVYNWALKMKIEAYKQEKRTVPYKEIQERMVNDLKKENDWLAEVNSQSLLNSILNLDTAYKNFFRNTHTAGFPRFKSRKDRQGFQCPQHCRVDFANGTITIPKAKDIPAVLHRKFKGVVKTVTVSMTPSGKYFASVLVDTDIQELPATVPLRDATLGIDLGIKSLAVCSDGRTFDNPKNLQKSLDRLKLLQKRLSRKQKGSANRGKARIRVAWLQEYISNCRKDNLHKITYAFTHDSQVRTICMEDLNVKGMLHNHHLAMAVGDVSFGMFLTQLEYKCKWYGVNLIKIDRFAPSSKTCGKCGHVYKELKLSERSWTCPECATFHDRDFNAACNIKEFGLKALPTERGKVKPVDCPLVDDRPRVLKSNGRKKQEKRGDICISEAHAFRRG

SEQ ID NO: 6519 - protein, 237 aa, Nocardia sp.
VVAQPAVRSIVGDGDQRCGGPVLRIVRRADRRSAVARTGYRGGYRSGVDDVRGVVQRQDDRFPAFLAAGRTPSTQGAAGPVAEGEGVEEPGEGSGLKVARAHARVADTRRDWAHKHSTRIIRENQAVFVEDLCVRGLARTRLAKSVHDAGWSMFVTMLEEKARTWGRTFAEVDRWLPSTRMCSHCGVVGDKKPLHVREWTCGCGVTHDRDMNAAVNILAAGRAERLNACGGTVSPAA

SEQ ID NO: 6520 - protein, 438 aa, Thioclava sp.
MTNISGVKKTMAYRFRIYPSKEQEAAFRRISGCCRLVYNLALEQRRDHWRRYRAKVGRHISVVSQINELPELKREVTFLKEVPSHTLQQALKDLDRAYKNFFAGRADYPTPRKKRGGDSFRFPDPKQFQLTKGWLHAPKFGRSKSDFGAIRICQHRKVKGQIKTITIIRDGGHWYAAVSTAREVTDPPEIKSGPRIVGIDRGVTIPVALSTGEVFGAPTEGPGQRKRLAQLQRSVARKVKGSANRRRAIAKLAAFKARQARRRKDQLHKVSVQIVKNHDVIVLEDLKIENMTRSARGTIEEPGKQVAQKAGLNREILDRGWGMFGAMLTYKAGWVGKRVIKVAPHHSSQECSQCGNVATENRASQATFACTACGHAENADLNAARVIRTRGIAILKAEGLSVSACGPSGVSPSVRQEETAGMPGGKDQTSSTSCQPAT

SEQ ID NO: 6521 - protein, 432 aa, Thioclava sp.
MKLAKTYKFRLDPTPAQAEMFARIAGCCRLVYNLGLEQRRDHWRRHKASTGKSINWYSQKNELPGLKKEFAFLSEVPSHCLQMALKDLDAAYQNFFSGRAGYPKPRRRGLDDSFRFPDPAQFHLGRSWLVVPKFGRRPNDSGRLRIRVHRKVKGQIKTITIIRNGRHWYACLSTLRNVPGRKPKTRQLRVTGLDRGVANPVVTSDGRFMGAATETEAERRKATRLAQSVSRKKKGSANRLKAVLRLAQHKAKMARRRKDAAHKISHDLVKNHDVIVLEDLKTRAMTRSAKGTVDAPGSGVRQKAGLNREILDRGWGMLGEMIACKAAWAGKRVIKVAPHYSSRECACCGHVSERNRPSQATFACVSCGHAAHADVNAARVIRARGIKILEADGLSASACGGSGIGRPVKQEETAGIACGQDQTSSDVHLPAH

SEQ ID NO: 6522 - protein, 621 aa, unknown
  TnpB Polypeptide
MLKKKKKLNISQLRKLTNSLAYIKTRFVSLVMNKRFNAIKHLEDKEDLINLIWKRCVILFLLIQTQPRQILFTLELVPKNNWMTFLDKLNTSNQKILDILHIHLFQILVLELISNEKDFKPFWTPVYKKLSEKLLLPTEIDFPDLVSNLLNVSSQKPVGQSKYSMMTVTKAQNKNLQKTYYQLSTSTVVNKWGKEVINQPMLKNLKIQLKPTLIQKKIFNEWIKTSNYVYNKTIACINKGDKVNFINLRDKCVTNQTKKTNSEYTVLINNIKDLNKNIKYENEPSQLDNLKKQLIIEKNNLKKIKFENNSFVHKWELKTPKAIRDGAVRDVCKANDTGWSNLKAGNIKHFKLGFRKMQKCQKSFVLPHSLIKLINGEFIMAPNFLKEHCKIRIGKRTLKKHGKIEINNDCRIKHERNKYWIFIPVPITIVSPTTVPVQRYCGIDPGVRTFLTVFNNNEVVEYNQNKILLKKLNKKIDILKLKRTKKKCKYKIEERKENIINELHWKSINDILKRNDYVFYGDIKSHDIVKKSSNRFLNRNINDLKFYKFKERLMYKASILNKRVFNVNEMYTTKTCSTCGYLNNVHKKEIYDCENDLCRNTLLRDISAAKNILMKGIIKFL

SEQ ID NO: 6523 - protein, 383 aa, unknown
  TnpB Polypeptide
MVNDCIRAGLKFEEENHATPSMKRLSLLCYSQLKRYKVYSAYRLTAISKAAGILSARRKSIKRGYFTKSPHVSKPLLVSCYCLEIQDGKLRVQLGDKRYEHVPLDAHTIQILSDTALRINSFTLSSTSLSLCVSREIDAAPREVTSTVGIDRNLRNLTVGNEEKVTYYDMAKVVEIAENTRGIVGSFKRNDARIRRLISSKYGMRRERTKQVIHGVTKQIVKEASANKQAIVFEGIKGIRNLYRKGNGQGRSFRGRMNSWPFHEVKRQIEYKAAWEGVPVITLSRRETRGTTMDCARCGERLQSPVRGDIEHHRQLWCGKCGRWMDRDLVAVLNISRRGRVRFARSSTEGEAGEAVRGNAEHEGEPLILRVDASKLHDAKKTQ

SEQ ID NO: 6524 - protein, 377 aa, unknown
  TnpB Polypeptide
MIRAYRFRLYPNHSQEEALRHHLWLSKELWNRMLDYSKNKYKHEWKFASKKELREMVKHQGLFSQVAQELVDRLVDATFRFVRMKKAGEDCGFPRFKSFDRLRSLCYPQMGFRLVDNRLKVTPFGELKLKLHRPVKGKVKTLVLKRESSGKWFAIFTSEEESVVSYSNQGAKVGIDLGVSKLAVVSDGSIIANPRHIRHHEHKIALLGRRLSKKKKGSHNRVKAKVKLARAYEKLANSRLDFLHKTSHSLVNRYSVISLENLNIKGMVQEKFGKQINDVGWGMLASLLCYKAESAGCRVVFVNPEGTTQQCSQCGIIVPKTLADRVHNCPSCGLALDRDLNAARNILKKSTVRHTELEACEVALKRVTMKQEAHTYS

SEQ ID NO: 6525 - protein, 228 aa, Moorea sp.
MPGDFSVILDRGRWFITYTIESEKSVNNNEQAIALDPGVRTFLTGFDGNQVLEIGIGSISRIVALCRRLDRLQSEIAKATGRTNKRKRFNKRKLAQQLRIKIRNLVDECHKKAACYLTSNYSQVIIPKFESSKMVYLAKRRINSKTARNLLSWAHYRFKLRLKTQGVLRGSQVIEVGEEYTSKTCSRCGHIHPKLGGSKKFTCPNCLHKIDRDTNGSINIFLKTISGN

SEQ ID NO: 6526 - protein, 569 aa, Mycolicibacterium sp.
VKLVAAPSGVAISTRLRTTADEERVLDAVAEHLGRLRRGDLAARSHPVPLDPGLDAEGCRRVRRDQLNTRKQALTAQSSARWANAIFTGNDDRYRLARDSQYRHITGLKAAIATIEKRLATPTADTLSLSERRARRKARGPKGYASQAERFCKQRRLQHLRAELDRAEADRAAGRIRVVEGGKRLAKARHHLAAGGLSAPQWRDRWAAARYRITAIGSGDEPFGNLTVTVTPQGQVSVRLPKPLEHLANAKRGRYVLSGTAVFSHRSQEWAARITSAKSVSYTITRKPGRPGRYLTASWATPSSTYSTRIQEDRRLAGSEVKATGPVVGVDLNDGHIAMRRLDKYGNPVGAPARFDIDLAGTSTRRDAQVRHAITRLIHYTQRHGITTIAVEDLDFADARATGRETMGRGTRGKRFRRSVAGIPTAVFRNRLAAQASRAGIELLAVNPAYSSIWGDQHWRRPYQNVSRHQAAATVIGRRAQGLKARRRKGVTPPRPEDHGVRATNQTRPEIRQATTGNRHQTGTRGITSRQPNTERKRHPGRATVTPAPLTGNGQYTGNGESTGFLDPS

SEQ ID NO: 6527 - protein, 514 aa, unknown
  TnpB Polypeptide
MRAQTPSYVVSTKVQLPESITKRLEKSFRISNSAYNEALSFGLKRFEALKRNSYYQELLEARRLALKGIAKLEKAEKKAKGLKQQVKCYNKALFELRKVYGLTKFELQKYLGKQRRQPGSPYQQIAAGELQVIAEQAYQTLEKVLFYQIKPHKVRFRSKFDLDVSYRNRVNTEATRLVPSDKKDVAYRLYIHKASTFVDIPVKVFNKYQQMSLMRSEKIKYVQIIRKTIRGKKVYYLQIVCQGFPPSKVTKGDGVVGIDPGISTVAFASPSEVALVDLVPATITQKEKHLKRLDQRIERSRRVNNPECYDARGKIKKGARFKHPSNRQLRLRNRRRKVYQALTEERKKLQGQLVNRLMSQASIIKIEGLNVKGLQKRSRDIRINPKTNRPYSKKHYGKAIFRAAPSTFRTALETRASQLGIDVEVISPKEVKPSQYNHITQTFEKKPLSTRIYDLADSYPGVQRDLYSAFLIGHIKNGHYQQAQLNQDFPDFYDQMKNFLQQPIETKRLAWYLN

SEQ ID NO: 6528 - protein, 431 aa, Haloferacaceae sp.
MQYNYKYRLTPDEAISNELLRHIDVCRQLYNHCLYELNESTDGIPTRYDLQGQLPDLEKWWSDLKGVHSKVLQMVLKRVYDNLSTLKAQKENGRAVGMLKWKRPRDYRSLTYNQTGFKLKNTSGRPQLWLSKIGDVPIQLHRGIPDDSTVKQVTVKREPTGEWFAVFGIETENDALPKPEVPEKCVGINVGILSYTHGSDGFSVGSLDLSEEREQLEREQRKLSRKEHGSANYRTQQRVVARRHADLKRKRHDFLHRLSAYYAREYDLVAVEDLDAKGLMELPSNSRKRAGAAWGTILRMLEYKCDREGTHYVPVDPRGTTKECSKCSVSTEKPLWVREHLCPSCGFEADRDANAALNIISRGLNQVGVVHFESTSAETLRVSDGLQKSRSDFRTPVETVLPTGPIAVPAQRVVEAGSPALTERTAQAVGE

SEQ ID NO: 6529 - protein, 406 aa, Haloferacaceae sp.
MNFNYRYRLRPSDVLEEQLAWTVDTCRQVYNHFLHRLNRTDDTSAHSEQKLLPSLRKWWSGLKSVHSKVLQKVVQRLYDNLSRLADAKNAGRKVGRLKWKAPGEYRSFTYSQSGFTLKNTSGRTRLWLSKLGDIPITFHRDLPDDADIKTVTVKQEPTSYWYIILGVETPDDPPAKPETPKKCVGIDVGILTYAHDTDGTAIESLDLSDERERLERAHRDLSRKEHGSANWEKQRRVVARRYADLKQKRRDFLHKLSNYYAREYDLVAVEDLDAAGLVELPGNSRNRAGAAWGTFLRMLEYKCEREGTHFIAVNPRGTTKECAACGVSTDKPLWVHEHYCPACGLEADRDANAAWNILSRGIRRVGAGRSELTPVETVHPMDTSVSAKRVVETGSPTLKREPSGER

SEQ ID NO: 6530 - protein, 408 aa, Haloferacaceae sp.
MYYAYKYRLNLSDAHREELDRHRDICRQLYNHALYRLNEHRENNGKLPSMTTIRSELPNLKQWWDGLSDVYSKVLQTIVERLFDNLKGLSKLKENGYGVGMLKWKPPREFHSFTYSQSGFKLDKKGGQTVLSLSKLADIPIRLHRAIPDDAKLKQVTLKKEPTGEWFATFGVEVDRNPPEKPDELTDVVGIDVGILKYAHDTDGTAVESLDLSNEREWLEREQRKLSRKQHGSANYRKQQHVVARRHAELKQKRRDFLHKLSNYYAKEYDLVAVEDLDAKGLMELPSNSRNRAGAAWGTFLRMLEYKCEREGTYYVPVNPRHTTKECASCGVKTDRPLWVREHSCPSCGFEADRDANAAWNILARGLKKVGVVHSDSTPVETALPTDTVVSAKRVLEAGSPVLNARSA

SEQ ID NO: 6531 - protein, 370 aa, Haloferacaceae sp.
MYYAYKYRLKPSDAHREELDRHRDICRQLYNHALYRFNQIPEDAGTLNQRVRSIRDEIPSLKDWWDDLSDVYSTVLQTAVMRIEQNVKGLSALKENGYSVGQLTWKPPREFRSFTYSQSGFKLDKKGGRTVLSLSKLAEIPIRLHRAIPDDAKLKQVTVKKEPTGEWFATFGVQMDREPPELPENPEKCVGIDVGILKYAHDTDGTAVGSLDLSNECERLEREQRKLSRKQHGSNNYEKQRRRVAECHADLRRKRRDFLHKLSNYYAREYDLVAVEDLNVKEMLESPSNSRNTASAAWQTFLSLLEYKCKREGTHFMAVNPRGTTKSVRRVASRRRSRCGSVNIPVPPAGLRRTGMRTRRGTFFLATSKI

SEQ ID NO: 6532 - protein, 250 aa, Haloferacaceae sp.
LRLHFVCRVEVDVSDVPGDGVAGIDPGICNFATVSYGDEAVLYPGGALKEDEYYFAKKRAETDDSASREARRLDRKRTDRRTHFLHTLSKEIVAECVKRGVGTIVVGDLGGIREDENGDARNWGHHGNLDLHGWAFDRFTQMLLYKAEVEGVEVVTKSEQGTSKTCSACGRSDKRQRVYRGLYVCECGFVGNADCNGAENIRRKVLPNLATDGGRDRDNGWLAQPAVRLFDRSEGRFAPREQVIQTDREP

SEQ ID NO: 6533 - protein, 353 aa, Actinopolyspora sp.
LQKRLITDAKKTPERAWLANAQHSMLQQAVRDCDQAYKNFFDSLKGARAGRKVGAPRFKSRKDNRQAIRFQPDGFRVLDTGKLRVSKIGAVPVAWSRDLPSAPSSVTVVKTADDRYFASFVVEAGDETLPDAVDEHGQDVELGLDLGVSAFAVDQHGRVIDDPRFLRRAERELKRLQRALSRKQRGSNNRRKARKKLARAHAKVSDTRQDWLHQATTSIVRENQTIVLEDLAVSGLARTRLAKSVHDASWGTFRRLLEEKAARYGRELVIIDRWLPTSQTCSDCGRVDGTKPLSVRTWPCPCGATHDRDRNAARNILAAGRAERQNACGPDVRPHTGADGDEAGTQRSAAPAQ

SEQ ID NO: 6534 - protein, 181 aa, Chloroflexi sp.
MSTVVKSNANIVYTCHYHVVWCPKYRRKVLVKRAYKYRFYPTNEQARNLAQTFGCCRFVYNWALSKRKRAYFDHGVKLYTKDLSAAIPALKKEEGTAWLREISSVPLQQALRHLDAAYTNFFEGRTQYPTFKKKHHEQSATYTDNAFTWDGNALTLAKQREPLAIVWSRPLPGSEIVSGYI

SEQ ID NO: 6535 - protein, 618 aa, unknown
  TnpB Polypeptide
  misc_feature (422)..(594): Xaa can be any naturally occurring amino acid
MAPRMPKAKPSRVFQGVHARLVFLDKEDERAVLDLMRRFSSATRFAYQRLLEGKNREELKRENGPLRALFGLNTRYADGAIEKAQALIASAEELGNDPHKVVFGGRRLFEQLKRGHLSGKALLALKREWREKRQGLLYSRGDAAKKGNANLRLESEDGALWLRVNLGDGGHVQALVKTSHPQMDALRERVYASLPYNVTLQLKDGKVYAHFTWSEELPPPVHTKQNEVLGIDVNADPYHLALAVVSPDGNLTRYLTLSLEEVDRASNRGAKELALWKVAHQVVAVAEEHGVAVATERLKYLRKSRRGDGSGRAFRRQQHRFAYRSLLEKIHSLAQKRGVEVIKVNPKDTSTIGMLKYAPQLHLSKDVAAAYVIGRRALGFAERLPKGYKVLLKDDAFLAHAQGFYQTHLQELKKLRKAEKNXXXXXXXXXXXXXXXXXXXXXXXXXXXXXXXXXXXXXXXXXXXXXXXXXXXXXXXXXXXXXXXXXXXXXXXXXXXXXXXXXXXXXXXXXXXXXXXXXXXXXXXXXXXXXXXXXXXXXXXXXXXXXXXXXXXXXXXXXXXXXXXXXXXXXXXXXXXXXXXXXXXXXXXXXXXXXSTLEDPHGSQGMTRKEPKTTAHPG

SEQ ID NO: 6536 - protein, 267 aa, Okeania sp.
MRYRSGAPQQALRDLEKAFKNFLTIPKRGFPKFKKKGRKDSFYLEGSIKVLKGNYIKLPRIGIVKTYEILPSVPIKNVTISKRADNWYISFKYDYQPTTTAKKRDIIGVDVGVNTLATCSDGTKFANIKAYRQAKKRLARYQHRVSKKEPGFLRNATQTKNRLKAIKRLAKAHKKADATPRRRKSQGNAHQAVADIRADTLHKLTTWASFKPQHHSDRSMTMSVECSKITTHPSSSPPGRGWGWVQTAVFMSSSVSSYTSASGMEAS

SEQ ID NO: 6537 - protein, 299 aa, Clostridium sp.
LHIKSFFKGESKFPRFKKKNKSDVKLYFPKNNKGDWKVYRHKIMIPSLKNVRLKEYGYIPINANIKSGTVSKSADRYYVSVLVETDIVSPNIPINDGVGIDLGLKDFAVISNGIRKKNINKTEKVKKLEKRLKREQRKLSRKYESLKLRNKDKKGDATRQNIQKQIAKVQKLHYNLSNIRTNYINKAVSDIVKQNPSFITIEDLNVSGMMKNKHLSKAVAEQKFFEFRTKLTNKCNWMGIELRIVDKFYPSSKLCHECGHIKKDLKLSDRIYKCECGYEEDRDINASFNLRDAKIYKIA

SEQ ID NO: 6538 - protein, 366 aa, unknown
  TnpB Polypeptide
MNKNFKVRIYPTQEQQILLEKSFGASRFIYNHFLKLKQYLYQEFNIKITYNHMSKMLTELKRQKLWLTVPDKCALQNTLKDLDNAYKKFYNGARYPKFKRKDGKNSYRTNQCMKVNNSFISIPKVGLLRYKDTYKLEEENILKIYNITISKDIIGYYYASISAEVYIPHFERTNQSVGIDLGLKEFAILNTGRKINNPRILKNLEKKYRKLAKAVSRKVYDSNNYKKAKLKLARFHKYIANIRKDFLHKLLTNLIKEYDIICVEDLCFKGFMKSNKAKFYQDVAQSEFIRQLEYKAEWYGKTISKIDRFYPSSQLCSNCGYKNHDLKNLDIREYDCPICGTHHDRDINAAINILREGLRILENSNI

SEQ ID NO: 6539 - protein, 395 aa, unknown
  TnpB Polypeptide
MYLTKKIRLLPTPEQEKLFWKSAGIARWSYNFFLSYSQEKYNEWLKDNTREKIIREGDVRKYINNVLKKTTHTWLKEVGSNVMKQGVKDANIALQQFFNKISGYPKYKSRKKTKPSFYVNYDRLRRTPNGFRGEKLGIVKTKESLPKIPKGQKYVNPRITYDGKFWFLSVGYEVEQKQIKLTDEEIGIDIGLKDLAIVSNKNNSCSRKYRNINKGHKVKLLEKRLERAQRKLSRKILNNIESYDENRIPTYIRPLKDCKNIQKQIHVIQDLYRKLTNIRNNYIHQVTTEIVKTKPSKIVLEDLNVSGMMKNKHLSKAIADSKWYEFRRQILYKAELYGIEVILADRFYPSSKTCSCCGNYKKDLKLKDRTYICNECGLKIDRDINAAINLANYQI

SEQ ID NO: 6540 - protein, 246 aa, unknown
  TnpB Polypeptide
MSKYFNNNIYKFGTAKLINKHNKFFLYISVTYEIKECKKSDIYNVVGIDRGINFIITTYDSVHKTSFISGKFIKNKRTHYSKLRKELQERKTPSARRKLKAIGQRENRWMQDINHQVSKALIKSNPKCTLFVLENLKGIRSATECVRKKNRYMLVSWSFYDLEQKIIYKAKQNESCVLKVNPRYTSQCCPICGHIEKSNRNKKIHLFTCKKCNYKSNDDRIGAMNLYRMGIDYLINNEVPNIDITK

SEQ ID NO: 6541 - protein, 417 aa, unknown
  TnpB Polypeptide
MANFSNILLTSVLSNIACIFSRSMTLSSNIVLNFFLIISFSLLSYTPMRSIMVLYQTGGENAMLKGFKYRIYPSQEQRTYFAKTFGCARFVYNQMLGDKIAHYQTTGLMLKNTPAQYKVEFPWLKEVDSLALANAQLDLQAAYGNFFRDPKVGFPNFKKKTNDKSYTTNNQKGTVRIDNGYIKLPKLKTMVRIKQHRTFDGVIKSCTVSQVPSGKYFVSILVECEIATLPVLATKVGIDVGLKTFAVMSNGKIVANPKHLRRSEKRLTKLQKDLSRKKKGSRNRNKARIHVALLHEKIANQRKDFLHKLSSEIVHENQVIVLEDLRIKNMVKNHKLAKAISEASWSEFRTMIEYKANWYGREVVIAPSNYASSQLCSVCNFKNVLVKNLALREWDCPQCNTHHDRDVNASQNLLKLA

SEQ ID NO: 6542 - protein, 441 aa, Moorea sp.
MEQTITAKLKLQLSPEQKQLLREITLAYRDALNYTSSVAFALNKMSSGVALQKKVYKHIRSVYKLPSQMACNIPRKVENTYKGLWTKVKQNHVHRQKGYTKRRYKGLDKSPLFISRTCTLNYKRDYSFVKGKVSVITLQGRIKVNYSGYNFHLELIRSGIAKIDAAKIWDDQRRKNYYLLVSLTIPLKELEPTELKQVVGVDVGQPYLAVSTDTQNKTKFFSGKKPRQKYSHYQRVRKRLQQKGTRNAKGRIKAIAGRERRFTADINHNISAKIVTPNTLIGLENLTHIRARTFPKRTGKKADAKQGIANRNQAKWSFAQLHSFLDYKAKLKNSLAIKVDAHYSSQQCSCCGHTSPKNRPQKGLSFECVACGIKLHADLVGARNVAHQTLLFRQDWESTGCLSATLNGSGDETKAERLSRFSELRWSLDASPTLNEVGWGS

SEQ ID NO: 6543 - protein, 480 aa, unknown
  TnpB Polypeptide
MYMVVFPIHFNQRGFHVFAHFAEHPAHPVNGIAVKHLAAIFRHKDQMDVHLENAMPAVSNFVVFFHRPSIIQDMKRLQAFKFELQPNGEQARSMRRFAGSCRFVFNKALAMQKAIYEGGEKKLGYAGLCKTLTEWRKSPETAWLADAPVHPLQQTLKDLERAYTNFFAKRADFPRFKKKGQHDSFRYPDAKQFKIDQSNNRIFLPKLGWIRYRNSRDILGQAKNITVSANGRKWFVSIQTEREVEQPVHPATSIVGIDVGITRFATLSDGSYIEPLNTFRKHQQRLARYQRAMSRKTKFSSNWKKAKARVQKIHTRIANVRKDFLHKTTTTISKNHAIVCIEDLQVRNMSKSAAGSSDSPGRNVKAKSGLNKSILDQGWFEFRRQLEYKQVWLGGDVLAVPARNTSRTCPACGYVSADNRQTQAKFACMDCGYENNADIVGAINVLERGHRLLACGELAQSGRSVKQEPTKATTQGLALV

SEQ ID NO: 6544 - protein, 561 aa, Rhodococcus sp.
MTGPGSTAPRQFAFTTRAHVAVDDATGEPIGLDDVDTRVGWLLDLIATAGTELTARLWQPVTFEILAAGRDHQDRRLPAQGHVAAARLGWNPHYPDGVYVPSRVTRVVTAQVMTSLRTLAYRDTAIAALSARFDPATGTLAPPTEPGDWVPLGFARGVRRQLLARARREGGALAGRMRITDVQGPPEVAAMARLSAADRQLAQITVTGDGLVLTVKLPSCPAPAGRAQWRPVRLTATIPGHLHGRAITGWHLPTLVLDRKGLLLRCAATELVPAADLMGGTVAVGVDWSPSTLGAAAITTEDSDGLSSDYRGVTYDDRGLGTKLARLQAEGQLLHRKAARLTRLAATAPPEVRTRLEEKIAVLDDHRTAVGVKRGKINRELGFHFARQVTDYAEAAGAQVIAVEDLTTLETRGHGKVNNNRAAQSARHKAVTALAHTAASVGIAVVAVPARGSSALCPGCDAPLARPGGYHTAWCSGCRVGGNRDRIAGVNLAKRALLGKGKVTRRRGQLPAIRVAEHAPVRKSRDKTSPTPRRRRHRRVRRSLPTVTPRAGVTKKPSRRH

SEQ ID NO: 6545 - protein, 603 aa, Rhodococcus sp.
MADTGLPALRQFAFTTRAHVAVDDITGEPIGRGDVDTRVGWLLDLIATACTELMARLWQPVTFDVLAAGRDHQDRRLPAQGHVAAARLGWNPHYPDGVYMPSRVSRVVTAQVMASRRTLAYRDTAITALAQRFDPATGRIAPPTCAADWVPAGFARGVRRQLVVHSRRTDTDAVSVGRVRITDIQGPPQTSAMARLSAADRQLAQITATDRELVLTVKLPTCPTPAGRAQWRRVRLTAAIPGHLHGRPISGWHLPTLVLDRKGLLWRCAATELVPVCDLGSATVAVGVDWSPATLGVAAITTETPDGLSSDFRGFTYDDRGLGTRLARLQAEGQLLHRKAARLTQLATNAEPEVRAQLDAKITVLDAHRTAVGVKRGKINRELGFHFARQVTDYAISAGAQVIAVEDLATLETRGHGRVNNNRAAQSARRQAVTALTHTAAEVGIAVVSVPARGSSAQCPGCDAPLSRPGGYHTAWCSGCRVGGNRDHIAGVNLAKRALLGRTKVTRRRGQMPAVRVAEHAPVRKSRDKNSPTPSRPRHRRVRHSLPTVTPRVGVTPNRYVPAPQASVWDTVKPAPPHGDAGSRATRPSPPPATQVADSMRST

SEQ ID NO: 6546 - protein, 160 aa, Geobacillus sp.
MWPFFQQARKLSIPKYLRRYEEKLAYWQRILSRRKTGGSNWNKARRKVAQLHEKIANCRNDFLHKLSTRLIRENQVVCVEDLRVRNMQKNRKLAKSISDSAWGRLLNMLEYKAKWYGRTVVRVGRTFPSSQLCSCCGHRAGRREIARHPSVGVPKLRSRT

SEQ ID NO: 6547 - protein, 395 aa, unknown
  TnpB Polypeptide
VLVRYRYRLCPSPGQRQSLARVFGCTRVVYNDCLRVREESYAAGVKIGDSEVQRQVITLAKLAPEREWLATAPSVALMQACNDARRADRNWFGSLSGARRGRRVGHPVFRRKHGRQSIRLTRNGFSLRGRRPYVAKVGQIKVRWSRPLPSPPSSVTVIRETDGRYYVSFVVDRAHAPLPHCEREVGLDVGLDRLAVTSAGEIIANPRFLRAKQGRLAKAQRALSRKQKGSANRAKARHRVAVLHRKVRETRRDHAHKTALRLIRDNQAVYAEDLAVSGLARTRLAKSIHDAGRSQLLRLLAEKAQHYGRGFYRVGRFVPTSQTCNECGAIDGPKPLSVRAWKCAACDAVHDRDVNAARNILAAGRAERLNACGGDVRPPPAVAVPVEAGTHRGAA

SEQ ID NO: 6548 - protein, 374 aa, unknown
  TnpB Polypeptide
VILTYRYRLLPLKSQHRALERLCAAQRELYNAALEERIDCYRKTGKTRTYIDQCRALTACRRELPEMGALPANLQRWTLKRMDDAFQGYFHRLKARSGKAGFPRFRGKERWEAFGFNEFSGIQFDGKRLRFAGMPGGIKLHLHRPLPDDADIRSCVFRRDGSGWFICLQIKIEVAEKRTVASAVGVDLGLKVFAWCSDNVVIPNPRIARRAEKELRRRQRALARCKRGSLRRHKVRAQVARLHRKIADTRNTWLHQKSAELVKRADVIVVEDLNVSNMLRHPTLARSIADASWSRFVSMLAYKAEKAGGHLIRVGPRNTSQECSGCHELVPKLLAVRTHACPSCGLVIPRDYNSSLNILRAGIGAGALNVIGWR

SEQ ID NO: 6549 - protein, 374 aa, unknown; identical to SEQ ID NO: 6548
  TnpB Polypeptide

SEQ ID NO: 6550 - protein, 213 aa, unknown
  TnpB Polypeptide
MTCYDSKNGKTFILGRKYLGLERYFHKEIARVQAQWYGQQSGKGVKHPTTSKHIRKLYKRKHDSVTDYLHKVTRYLAEYCREQGITCVIAGDIRNIRREKDLGHRTNQKFHSLPYNRIYIMLEYKLKRYGIRFIKQEESYTSQCSPLSPKVEKRYAEPSKRKERGLYRDGNRTYNADAVGAYNILRKYHSVSGVKRELSVTGLKTPEIIKVAV

SEQ ID NO: 6551 - protein, 519 aa, unknown
  TnpB Polypeptide
LKIEESKQEELLFEDKKLGENGKVKSTSQAPLVTFYETVSLRIKTELMSVRECERLKRITARDTRIIRDYLRIINHNEEKILKKDGKVNISLLDKLTLTTSKKNENEIRSSVPHDLKKRYPRCSHDEFQECSSKAISTYESWKAKQDVSKKELSRPEFKKKTPRPMFKGTGSRGTIKVHSEPENTEAILWLDIRDSLDTRRSDERTDSKKSGTKNHNRLWLPLAFSPYHEKKLKPENIKKVELIHKSKEQQWWAHFTLMYSVPSYHSTNPPAVLGVDLGIKKTAVAVLLTPTGKVIMDELRFIVNKERQSKIWQLEKQIGDTQRKLNKSLNNGQHTEQLNATLFLLRKRLRSVTEQELGHAVNQLVDFILQLKKSYNLFVAVGYPKNIRKSQPLGSGNKSHRRRLHKWCYRLFTTKLKYKLKHHGFESHRVVAVNESWTSQTCSRCNSTNTTRTGQGQFNCHDCNYELDADLNGAKNIGKRLIKYALKTTFNFIFDTLTEECHTLLHYNCFEPLGQWLE

SEQ ID NO: 6552 - protein, 500 aa, Sutterella sp.
VAKTDSYVVTLELELTPEQEKYLRRCENVVREIENGCKGLCLRRLRGLRSDPRWRHAAARFGELHEKKKKTAEEKAELELVQITIGKLKRKFHLTEYQLHEDAAEMRSHFGKTISINEAQKAATRAFRAFERLRKGEAHRLNYKRRGMPVTIENKSNSFGFREKDGKLLGLYGFAAKFRIDPKDLLAQDTFKDRTKYVRIYRREIRGRWRWFCQLVKEGTPRRKPKTAVGQSTHPVGCDQGPSSVAAVVAATHEALIAPLPTGVNEREEKRIRHDQKVADRALRLNNPDCFDEKNNWIKGKKAVRSKTYERRQARARNLRRKQVVRRTQEANKLSKCLIAMGVDIRTEDHGFKSMAARSKETTINKKNGKINSKKRFGSSILRHAPAAFRSTTAQKLAAVILPSGERAKLGLVRTEKLKASQLDPLTGEYRKKKLSERWTEVGGRLVQRDLLSAFILAHTTGEKLDTVDLEACRRDWSAFLEAHDAAIKAADKKSLKGVM

SEQ ID NO: 6553 - protein, 454 aa, Sutterella sp.
MKITCAFKYELYVDETRRAALSRNAGCRRFVFNKALDIQNERKEKGEKLLTYNELAHELVLWKKQPETAFLREAMSQPLQQTLRDLDHAISDSFRPMSDPARKGWPKFKAKDIGDGFRIPQFEQEHIDDANGRVKLPKIGWVRYRKTRPIAFPSADGTLVPGVVKQIHIKKDCGHWFVNFTTEFEIEAPDMKELDVGIDVGVVHAVTTSDGEFFDLDTAKIRSIEGRIAVLKRKLSLNQESRQKLAKLGRAEPFDKKQPSRKRRRLKERIQNLYRKIRCIRQDFYRKTAHALAQEYGCAYVEDLKVKNMTASAKGTVENPGKNVKQKSGLNRVILRVGFYGLHHEIEWQFLKAGGVVIAVDPRGTSITCPHCQTRDKRNRPTQAIFKCINKSCNFESNADVVGALNVLKKGRTGPSAHDKKHIAHVVSVGEQGFRPEDSTPSTGTSLSPRDRAA

SEQ ID NO: 6554 - protein, 414 aa, Actinoplanes sp.
VVIVQLRYQYRVYPDATQCTALAQAFGCARVVFNDGLRLRRQAREAGEKYISDSDLSKRVITEARQTDQRAWLGEVSAVVLQQALADLNSAYRNFFTSLSGKRQGRTVGPPRYRSRKDNRQAIRFTRNARFKVLDNGRLRLPKIGDIKVRWSRSLPSEPSSVTVIKDAAGRYFASFVVTTTEDENLPELDSEVGIDLGLTHFAVMSDGTKVTAPKFLRRAARKLKRLQQNLSRKTQGSNRRRKAVVKVARAHARVADTRRDWQHKLSTTIIRDNQAVYVEDLCVAGLGRTRLAKSVHDAGWASFTAMLEYKAARYGRTFARVDRWFPSTRMCSACGRINDKMTLTVRAWDCPCGSHHDRDVNAAINILAAGRADRLNDRRAHIRPGPVPAARSEAVTHQNTARTPRSAAGIAVL

SEQ ID NO: 6555 - protein, 519 aa, Mycobacterium sp.
VSQQVKITRARLHGSPVYLGEMTGPDGTPGPVWSTDPDAVLGWLCDGFRFRFNQRRSVRCRYLTCQDRNGDRVLVTDPAGVPVLVPIGRTVTDITDAQARRQHSFLAAIPGYVLEATLKTEHTEWFSAAKRRKTNAAAGRRPGAMPGFRRKGSDQRFVCWFNGGRNAVFTKTGRRSGVVMISGANPRTHRAPGLGPDGKPHKLGWRITLHVRLSQPIRPYTSVRVNWTRRRLVFVNEPLPVTGKVSTGEVIGIDRGVAHTVADDRGRFYDAPDTSALDKQRRFHQRRMAKSRLVAARQGRRFWESKRYQAHKSAAAGLAAKQARIRDDFAHQLSTRLVRGHDFIGIEKLPVEPMTRRPKPVRDPNKSTRFLPNGAARKRGLNRSMRAAALARLATCIEYKAALAGVAFVEVPAAYTSQRCHQCGHTARENRESQAVFRCQSHSCGWTGNADTNAAINIREEALTRWAAQQSEQLAGTSGEKPGGVAVSQAGSKSKTDPHTGPAPGPAASAMNREPPNAA

SEQ ID NO: 6556 - protein, 365 aa, unknown
  TnpB Polypeptide
MQKGIKFRIYPNREQQNLINQTLGCCRLVYNKGLAMRKESYANGEKIGYAQTSAMLTNLKKSKDFSFLKLVDSIALQQSLRDLDRGFVNFFQKRAAYPIFKSKHNRHQSYRTVNQNNKIRIVGRYIKLPKLGFVKVRQSMEVGKINHVTLERTPAGKYFAVLNVDFEPQPRTNNGGCVGIDVGIKEFYSDSNGNAVANPKYLERSMRKLAREQRRLSRKQKNSHNRDRQRLKVALVHEKIANQRNDFLQKQSTVLIRENQTICIEDLKVRNMMRNHKLAQHIGSAAWSKFFTMLLYKSVWYGNKVVKVPTMYPSSQTCSCCGYQNPLVKDLAVRMWECPVCHAVHNRDTNAGINILKKGLQMQSA

SEQ ID NO: 6557 - protein, 423 aa, unknown
  TnpB Polypeptide
MDDAPRRTVKIKLDVPEERRGDFHQTKTQFLHCANRTSEWAWRYDDYCITSKSKAENALYSELREETDLTANLVQKGIRRAIEAVTSGVEKLKQGKKTSQPEFDVWSVVYDKRSATFNDDHATLSTPNGRVTVEYVLPPKEEREETPLGRYYGSDDWDASSATLQYDEQDDTFYLHVTLKNPDYKVDGTERQEAGSRDDTRENGVVLGVDLNVTGTFAVTSTGEFIGSADYLTHKRDEYERRRGRLQQTGTRSAHLTIQSIGSRFSDWSLDWLHNRANDLIAEARDADVDGIIFEKLDHIRENIANGSKFQQWAYAKFVELVEYKVESTALFVDTVNPAYTSQRCSHCGFTHEDNRDDKQFACQDCGYEVNADYNAAKNIAVRYCGYIHRGQKSRGGWGTSQLALKSGTLNMNGDYTPTELLG

SEQ ID NO: 6558 - protein, 539 aa, Mycobacterium sp.
VVEHRDRFCRFGSEYVEAAFAAQGRELVVVDSAEVDDDLVRDMTEILTSMCARRYGKRAAANRARHAAARRGRRRSGGGLMARFEVPEGWCVQAFRFTLDPAEDQARSLARHFGARRKAFNWTVATLKADIAAWRAGGVGIAKPSLRVLRKRWNTVKDEVCVNAETGQVWWPECSKEAYADGIGGAVDAYWNWQTSRAGTRAGKRVGFPRCKRKGRDADRVAFSTGAMRVEPDRRHLTLPVIGTVRTHENTRRVERLITTGRARVLAVSVRRNGTRIDASVRVVVHRPQHAKVAQPDSRVGVDVGVRRLATVATVDGTVIERVPNPRRLDAALGELRHVCCARSRCVKGSRQYRERTTEMSRLHRRVTDVRTHHLHVLTTRLAKTHGRIVVEGLDAAGMLRQKGLPGARARRRGLSDAALGTPRRHLSYTTVWYGSQLVVADRWFPSSKTCHACGHVRDIGWDDHWLCDACLASHQRDDNAAVTLARYQETISVVGPVGAAVKRGADPKTGPRPAGGREARKGRSRKAAEQPRDGVQVA

SEQ ID NO: 6559 - protein, 537 aa, Mycobacterium sp.
MKLRVIAAPFVADPATGVCIRTRLKGLTDTDVRVLRAVGAHLGRLAAADLAERVRDGLAHDNQAWADRKRDITASSTARWAGSITKATHDQWALARRGQLAHIQSLRDAVVMIEHRLAQRLGAKGTHGMASGYRSAHEWFVKSRRLATLQARLARVEADYAAGRVSVVRGGKRLLHKRHHLDTADLTEEQWRAQWESSRWFLSADGEAGKKHGNETIRITPDGQVSIRLPAPLAHLANAPHHRYILTGLAAFAHRGDEWADRVAANQAVAYRIHHNPGTGRWYVDASWQRKAAPSVPLEAVRSAALIGVDMNTDHLAAWRLDPHGNPIGAPRTFSYQLDGAADHRDAQLRHALSGLLHWAQRTGVKAIAVEDLDFTDSTTREKHGRRRRFRQIISGMPTARLRARLLAMATQAGIAVIAVDPAYTSKWGAQHWQEPLTAAHPQTTRHHAASVAIGRRALGHRIRRRTPPPRQHQSDVAGHRTGQARPGTPRREETRHPAAGTRTRSAKPPGSKNAGNQATQHRSGPPTEQNSLPLSV

SEQ ID NO: 6560 - protein, 375 aa, unknown
  TnpB Polypeptide
MIKTFQYKAKVNKTTNEKADKWLDLCCWLYNTALEQRKMVYKNNNLTLSAYTQHSELPSLKKELPEFKQVGSQVLQDVIDRLDKAYKSFFRRVKNGETPGVPRFKSRNRYDSFTLKQTGWKLEGRNIIIKNIGRFKLFLSRPIEGNIKTITIRKTATGKWFVSFSCDNVPEKKLEPNNKSIGLDVGLNSFVVDSDGNKVDNPRFLRKSEKELRRKQRSLYRKKKGSNRRNKAKLFVAKVHEKITNQRKDFLHKTVNYFVKNYGAIVVEDLNIKDMVKNHKLAKSISDASWSIFIQFLSYKAEEAGRIFEKVNPRNTSQICSNCGEKVVKSLAVRTHKCPYCGLVMDRDKNAAINILSRAGQTLQTLTCPVGECVV

SEQ ID NO: 6561 - protein, 404 aa, Massilia sp.
MERLQAFKFALNPNGEQQRAMRRFAGACRFVFNQALEVQKQRHEGGERKLGYAELCRLLTTWRNGAATPWLKEAPTHPLQQALKDLERAYTNFFAKRAAFPRFKKKGRHDSFRYPDPKQIKLDQAHGRVFLPKLGWLRYRDSRTVPGEVRNVTVSQSAGRWYVAIQTARDVAPPVPSGGAVGIDMGIVRFATLSDGQALEPLHSFKRHEDRLRRAQQAMSRKKKFGKNWHKAKARVQRIHARIGNARRDYLHKATTTICNNHAMVSVEDLKVKNMSASATGDRAEPGRNVRAKSGLNKAILDQGWYEFRRQLAYKLAWRGGILVAVSPRDTSRTCPGCGHVSADNRPTQAVFACVACGHSRHADLVGAINILRAGHARCAYEVSDAARSPAVGTRRSGSNRLDR

SEQ ID NO: 6562 - protein, 287 aa, Pandoravirus sp.
MRQKVALWGCPSKRKRQLDRLTARMPGGEQASRTQTTLRYADGRYHLMIQCLSDKVPLRDRRPVRAVALDPGVRTFMASYDMDGRFGAVGDGQIGRITKVAQRADRIKSHIDTQLVNQGFANGDNNKGRRKRARKRVRQLNAKCRDLKVDAHWKTAKALCQRYDHILLPKFNSRGASQVLSKTTTRQMLHWSHYEFRQRLQHKAEAMGVKVHLVSEHYSSMTCGRCLYIEESFRKNASKWFECRNCGYVIDRDSNGARNILLMNAERYIGRLEAFPLGSDTGAAAAN

SEQ ID NO: 6563 - protein, 442 aa, unknown
  TnpB Polypeptide
MRTVSSYGVGLRKQNIPIRQTLDIYRTAVSCLIEIYAQAWDELAVITEPKKRFNTAEHLVHTTKKNQARFDFDLRFPKMPSYLRRAAIQHALGSVSSYKTRLELWKKMDKKGGTPKLVCGNHAMPVFYRDVMYREDTEEKDGAYLKLFDGHDWKWFRVSFSHTDMEYLRKNWAGKKAAAPVLEKRHRKYFLRFSYTEEVQLTKAPAKEQIICSVDLGLNTDAVCTIMRSDGTVLGRKFIDLSSEKDRMYRVLGRISRFQREHGSAQVKSRWAYAKRLNTELGRKIAGAVTGYAEENHADVIVFEYLETKGKISGRKKQKLHLWRKRDIQKRCEHQAHRRGMRISRICAWNTSRLAYDGSGTVVRDPGNHSLCTFQNGKRYNCDLSASYNIGARYFIRELLKPFPATERFLLEAKVPSVKRRISCVYADLRELFSEIELLRAA

SEQ ID NO: 6564 - protein, 354 aa, unknown
  TnpB Polypeptide
MIRDWHGAARYVYNQCIEYLDKGNENDWVYIKANMKELFEWKDWLNAVPYQIKGQAVRDACKAVSTEKWKAAQTGEPFHMKFKSRKHPKQSCFIPKTAVKEHGIYVRKLKGRLLRREELPGDLLDCRLVLDNGRYYLVCPYEERHHVSESQGRVVALDPGIRSFLTFYSESSCGWLGRGDFGRIQRLCAHLDDVLGQIAKAKGNRRQRLRKAAARLRVKIQNLVDELHHKTARYLVDNFDIILLPTFETKDMVKRGTRKIRSKTARMMMTFAHYRFKMFLKHKAHETGKLVLDVNEAYTSKTCSWTGEVNRKLGGAKVMVGSDGQRMDRDINGARGIFLRALGDTPALQACVVE

SEQ ID NO: 6565 - protein, 371 aa, unknown
  TnpB Polypeptide
MFKLPPSGTASMAALNRPDASDLMEEVAICLPSAVSAMMDWPCWKTYTSEFSVSGNSITGIRLSSVSLYRKSSPEALLTSAAKRINPIIRSISNPSRCFFGSSHGSRDRLAGHTSYKYCYSGRCCYSQERRREMVCHSPGQSRTIILSVFCAFCGEPLCSDPTTEAQRNKRPYSLPGLTHIIQRRANNYKSLKDKIAKLHKRINCQRDDFLYKLSRTYVNKFYIICVEDLDIKGLKEKGHNNGMHRSIHDASWSKFIFMLFSWTSSRGAADGVRCTYKAQSADRKLIKVDPRDTTQRCSACGSIVKKDLSVRVHECPYCGFSSDRDYNASRNILITGMEQPLAPIEPKPLHHISVMQVLAMTWEAAPFRTR

SEQ ID NO: 6566 - protein, 394 aa, unknown
  TnpB Polypeptide
MKRTNTFEVVPQSDADEELLRRHLDASAALWNEINCQRRTNFEDPDGDVWEIDEYRGRYGGTLGASTVQQIERKNREAWRSFFALREKGEYSRLEILVGQDLKEEYGLGYCERLRLEVRGEPNWKEYDKQGRLELSYDDVSETFRAFQSVTIDTSRLAQPLADETAALDIGANNIAACTVSTGEQYLYEGRDLFERFRDTTQRIADLQSKLREGRYSSNQIDSLYRRRTRRRDHAQDALCRDLIERLYDQGVSTVYVGDLTDVLKTHWSVRTNAKLHNFWAFRRFVGRLADTAGEFDITVEVRTEAWTSQTCPNCSSTKDTTRHQDTLTCRCGFEGHADLIASETFLRRHEEVARPMARPVCLTWDCHDWLESPRSPRPNEEHTNLQVASVDSA

SEQ ID NO: 6567 - protein, 629 aa, unknown
  TnpB Polypeptide
MSSKVKEKTPYKSFKIPLKTVIKNKELISTIDNLVSNLNDLVISSYQFLRLYILYKYNLNQPIEITSELISYSIKILGISNSKKPLNNQILLQELTYFYENQFKPTVNHVKVNLEHLSHFISNIVVQMMTCISNNCQERFISHFRRFINETLDVSEGERFKFKNNILKCCSDNISYCDNEKINLWMNTHLNNILPGNIKKSIHYDVKVRPLEYLKGMFYMNYILEGMGKKLFQFFPLRTNIIPSNIMIDTSSLVDYFYKDLNLVNDKSKIMAKINDNKNNVWVNFLLSNHKIFRSTSYQFAYSIQTDGISCSLLFIRKDLKDEKRGSKLLTLPPLPLINDFPKLIEMNESEKVFALNDNVNIIGCDPGKKSLVYMVDSFGNKLQYSAFQRKFESKSYRSEYILKHAKEEHKVSQLESSLSEENSKTVVYAKFQQYLFLKTQLNINTKQFYSHPTFRRLKLRQFIYSKKSEDKFIDRISKTFGKINGVDKTILIAYGDWSKTEQMKNFIPTLGIGLRRLIHKKYYTVTVHEAYTSQRCSTCYTKLEHYNVKSKEIYRLLTCSGCVRSENKKITFKQRDVNGATNIMNLAKYYLRYNDRIPGLCRNYTPVNQNYKSSTMIYHGIKFDSKLK

SEQ ID NO: 6568 - protein, 402 aa, Cylindrospermum sp.
VLVLEYKVKGNKLQYQAIDEAIRTTQFIRNKAIRYWMDAPKEANINKVALNNYSTALRKEFKFVKELNSMACQSATERAWSAIDRFYSNRQTKTPSKKGYPRFQKDNRSVEYKTSGWSLHPRKRRITVTDKKGIGELKLLGKWDIHTYPVKSIKRVRLVKKADGYYCQFAIQTELDTEPRVADGELGLDVGLEFFYSDSNGHHEPNPRFLRKAEKSIKHAQRQIYKKEKGKNQRRKARQRYARKHLKVSRQRHEHSKRLARCVCKANALVVYEDLRVKNMVKNHCLAKSINDVSWGLFRLWLEYFAGKFDSKIVAVNPRMTSQKCSACGTTVKKSLSTRTHKCSCGCELQRDVNAAKNILNLGKQATVGQTGSNATGLATSTLLGETLVEQAARVKVESPCL

SEQ ID NO: 6569 - protein, 411 aa, unknown
  TnpB Polypeptide
VDRRRSRKLTKDKRKNQTCKVYECKIDYSHLSDAVRSHLSALFKEAKWFYNHCLALNAMDEIDTTVHSVPVKIGDEDSEEYEDRDLTVLQGQMKQSIRTRLWGSLASLAALKKKGFKVGKLKFKGQVNSIPLVQYNKTFFIKGNRVRIQGLKKWLLVNGLDQLPPEAEIACATLVRKGKDYYINFTTFQDKEERVIPEASIGIDFGCETQMTFSNGVKVKWQVPPTKRLRRLDRKIARNKNKPRSKKKSQDYRKRKKEYERLTNKKSDIRHKIVSAVKNNFRYVCFQDESIHAWHAGNHGKKIQFSGIGGIISDLKHKSHTPLEVEKFFPSTQLCPKCGARKKLSLSERTYECECGFKMDRDVKSAICIETEGLKQIPGDNRDFKEQEISSSTFFGLLTHIGGIEVSTVRS

SEQ ID NO: 6570 - protein, 492 aa, unknown
  TnpB Polypeptide
MIRVIHGEIWSEDFTQLDSLIRDFQSCVRFCYCRFDKDKLDFNDVRKAAKLKYPTLNTRQVSDAVLQGQTQLKVFQVQLEELAERKEKIEAKLKKKLWKKTRQKLEIKLRRIAKKLYNPKLVFGGRKAWEDLKAGVITKEEWTNKRDNQIYARGDATKDGNLNIRIVGNTLRITVGTRKWATHKLFVSNKFQDELKQMMASGCAYNIRLVRKDDQHFKVIIDYQVDESERATGVGFENGVIGVDTNPDRIAFANVSADGNLVEAKTFINTRILYGNTNKRDYDIGCLVKKVINYAKEQDKGIVFENLEFKKDKSGSRQWKRMQSNFVWRKFLTLLERKCIEHGIQYKKVNPAFTSIIGKYKYRWMHKVSIHESAAYVIGRRCLGYNEKLSFYKQNTGRVKAEVIKTLAGKYEGKRVHSWVMWKHLNDNVEAVLTGLQVRLADLKEFVGNIWYRGETLRGEIFLQELIVGSNCDNNSGVRKDTLQSGKILQLC

SEQ ID NO: 6571 - protein, 441 aa, Sharpea sp.
MRIYTTYSVKIKHYSHIFKDTVAIYRRVVDYLIAVCIDKWDTVVTFKGQSRLTYIESLVHATKDNPSPEYDFDLRFYKMPSYMRRGAINEAIGKVSSYKSNMANWKGKPSGKEPSYPRAGYVFPSMYRTVMYNQTDDYAAQIKVYVRNTWDWITVDLRKTDMDYIYRYCKNRRQCAPTLQRRGKEWFLDFPFEESTTLKEASIYDKTIVSVDLGINTAATISVMRSDGTILGRHFCKLPKETDSLMHSINRIKKAQQHGNYKTPRLWAKAKGINHGIASRTANYIMDIAVLYNADTIVFEHLDKNGRVRGSKKQKLKMWRSQEVQSIVTNKAHRLGMRISHICAWGTSKYAYDGSGMVLRGKAGGFNTYELCKFQSGKIYNSDLSASYNIGARYFIREILKSLDESSRLAIEAKVPQSAKRSTCTFSTLISLNAELMSLAA

SEQ ID NO: 6572 - protein, 170 aa, Bacillus sp.
VELTNVSLGIDVGIKDLAVCSDGTKKKNINKTSTVRRVEKRLRRLHRQVSRKYEMNKEGHRFVKTCNIIKIEKKIQQFYRRLSNIRLNHLHQSTSEIVKTKPYRIVMENINFKGMMKNKHLSKAIAKQCLCKFKRQIQYKCEKYGIEFVEADKWYPSSKTCYSCGNKKMI

SEQ ID NO: 6573 - protein, 347 aa, Methanoplanus sp.
MILTYKIRHNQDFTEDLKKAFKVAEFAVRNPKCRSSKAVKDIGLKSAISNQILRKYGNQKKIKRVHNVNLVIPNQSIRVDKDNRIITIVPLKLTLNYQFPDFEKINQIEIDKKFAYISCTVKEESEMIPSAFIGVDRNTTGHIAVLANPDTGKIEKLGKKALHIHNKYSAIRKRLQRQGKFRQLKKIKDKESRIVKDLNHKISRRIVNIAKEQNAGLVFEDLKGIRNSRKQSKSFKYALNSWSFYQLQLFVEYKAKLLGVPVYYIDPAYTSQNCSICGKIGIRNGKEFKCPHCGHVDHADVNAAFNIANRQKSMVDRVQKEMYTMGALIPHDAMFEECQTTSEPHVL

SEQ ID NO: 6574 - protein, 370 aa, Methanoplanus sp.
MLRAYKYRIYPNKEQEKMFFQHFGTCRFIYNWGLENKIRTYETDGKSISRFALQKMLPDLKSEHDWMKDVNSQSIQSALLNLENAFTRFFREKKGFPKFKSRKNPVQSFSVPQHYIVNFDTHKIKLPKIGWVKTKLHRKYEGAEKTATVSVTSTGKFFISILVDDGQEQPPVQHFDADTTVGVDVGIKDFAILSNGEKIDNPRYLKQSLLRMKVLQKRLSRKQKGSNNRNKAKNAVAKIHEKIHNQRSDFQHKLSFRLVCENQAIALETLNVKGMLKNHKLSQHIADASWSSFVTQLEYKAQKHGKTILHIGQFEPSTKICSECGYYNRDLTLSDRDWICPDCGVHHDRDINAAINIRKFAFDKQNLIGI

SEQ ID NO: 6575 - protein, 247 aa, Microcoleus sp.
MQHMTQRAFKYRFYPTSEQESLLRQTVGGPRLVYNCAVATTTEAGCDRQERVRYVETNVMLAQSKKQEDLRFLTEVSNVPLQQGWQHLQTAFTNFFAGRAKYPNFKKQQNGGTAEYTKATFRLKDSQVFLPKFSEPLNIYGIREISSCVEQSTVTVNFSPPGRWTVSLLVDVDLEPSPASSNQIEIDLDITNLITLSTGAKFGNSKTFQAKNRKLCRVQKALNYQQKAPNNRYKDSLKVAVSTRERT

SEQ ID NO: 6576 - protein, 585 aa, Chloroflexi sp.
MNQSKSQNQKRTSKRTGTTSTRKNPSSFVLEMPLSVESQEAKVLRSRFEAGRNLYNALLCEAVKRLKAMRRSPEWKAACAIPKTPDYKDQRKAAFALAREKYSFSEYALHAFATTARTSWIKEHIDAVTAQTLATRAFRAAQRMCVGQAKKVRFKSKGRGLSSLEGKSNNAGIRFILDKPTEGNGGKLVWGCGKLEISALIDWQDPVIRHGLGCRIKYVRVIRRKGSSPKAEGADCTGHRYYVQLVVEGKPYLKPKNMTVGNAVIGLDLGPSTIAIVSQDAEVARLEQFCPEIRVDARAKRRLQRKLDRQRRANNPDNFDEKGQIKKPATAKGKGSKGKGKRFVWKDSKGYQTNSRRMANADRKLAAHRKSLHGKLANEIVRAGNVIKTEKVSYKGWQKCFGKSVGTRAPGMFIEMLKRTVARTGGTFLEFSTYTTKLSQVCHGCGSLEKKPLSQRTHKCECGIGPVQRDLYSGWLASYVEAKVEVDPITKTETQVEFLSVSATLKWEGVESRLSAVTDSLIQRANEGEVFPRSMGIPRARARLPQNLSPTTAKNLAFLKGKEEAVSKKRIPRLKAGGDSVVFCS

SEQ ID NO: 6577 - protein, 425 aa, Lactobacillus sp.
MKKMSDLEYHYGLKMRIYPSTNQKKIIKINGNIARTVYNKMVAIDQELYKLKQVKLPIDSIKERIKELESRKNARNLSNHYQYMQDKNIDSLAKANAIQNYQKAWKMFRKVHSSGTPKFHKKSYRLSYQTNAQYGKDAKMDVYSASVKFLDKNHISLPKLGRLRVSGSHRRIIDNKDDIRIGTVTISKDTADRYFVSMQLGSDTPFVKKLAKTNSQVGVDLNTENFLTDSFGKVVANPRYYRTIKGKIAKAQKVLSRRQRRAKKEKRSLRDSKNYQKQRVLVAKLHDRVRNQRNNFLNHVTTALINNHDLVVVENLRSKNMLKNHALAMSISDVGWRSFLQKLDYKANLYNRTVISVNPKNTTQTCYACGFIMGTNGTDKLNLKDREWTCPNCHEHHIRDWNAAKNILAKGLDKLEKLKNLAKAK

SEQ ID NO: 6578 - protein, 444 aa, Thermoprotei sp.
MITIKIIEKTIKLKIIPLTRTDKNQLLSLLNDYTSMIRESLGIIIKNDVRSRKKAHELCYKVLRERYPHLHNKFVQEAYKRALAMYRSYRKLLNKWKRLPEKKKRKISPPSLPTVEDNKVIELHADTYRLERRHDFLVLTVSKGNSVYLRFLVMEYSYVRRELEGAKLGNSKMLVEGDDEVYLLLTIRKNVEVNEHRNKLVIDINEDSIDCLLVDYDRNEAVLFSIGHDIRKIRTNYRRIRKSIQKKVKNLSIRDKLLAKYGYRERKCVEDRLKKITTLLAEIARKYNADLVRENLKDLRLNVRKKSKQLNYRLSTFPYRKFIEYIDYKFYERGLSVVEADAKKTSITCPICGYVDKRNRVDKETFSCRRCNFIFNAQYVACLNLFSHSDDGIVAIRSGRLFLVTRKTASVVAVNVAPDEPPIEMRWLREKPVQVSKILIITKR

SEQ ID NO: 6579 - protein, 208 aa, unknown
  TnpB Polypeptide
MIVIAYSERRRRITEGRSTRDRVARKALRRLREREGDVIYKTARIIEEIARKYSATVVVGNTHRGKDRMASNANKKSLRHRIHQCCASKLVEILNNKPLYDVEESEAYSSSRDPFSGKPIKRYTPSVIRIALRGGRRVKVIKIQMRQARLSNRLTIDRNAIGAINIGLRYLKSDGRDMTPPLTEPQEVLVKLVTPHQGLTLLTELEIP

SEQ ID NO: 6580 - protein, 360 aa, unknown
  TnpB Polypeptide
MVFINFQILDLFLEKLYSFWRWGLLTLSIGTMVSPESGAIELLRRYNVALNYAISKILSLDLRSVGRVHNALYRELREWFGLPSRTAVDCYRDVLANAMSWRNNPRRGRKPKVKKLSMLLHPAENLQKKYSSTRYPAWRRRGILNRIRSYHRKARNILEDWARKTSLEIVMMAKKLRYAVAREDLTGLINTLRRIKSKDHRTKLIILGYSRLGKWIDWQAMKLGAPLAIVDPNGTSSECPKCDSKLEENGYRRLKCPRYSFEADRDVIGKLNIRKRALKILGISRRSLTPLTALQMTDVAPNRWGEPMIRLKGMTINDDLKAGEGVRFKYTLNKLVIRAKLIYYETKQDQRRPHRSADLL

SEQ ID NO: 6581 - protein, 439 aa, unknown
  TnpB Polypeptide
MRQFSTYGAKLTAESTKPIQAMVRIYRETVTYLIRVCMEQWEEITQKQTLQGRQSYVERLIHHTKNRVVVSYEDFDALFYKLPSYLRRAAISEALGKVDSYKSNLNKWIHEGNGRAPGKPEAGYTYPVLYRDNMYERTGEYSARIKVWIRNTWDWMEIRLRKSDADYIARNCAGRTGLSPTIVRKGKQWFLQFPFCEEVTLSKQEPEEQTVLAVDLGINNACACSAMKADGTVIGRKLYRKPIEEDCLKHRLNRVRKEMKQGHYHFPSLWASVKNLNRQIALGTAGFIIEMAKAFRANVIVFEHLDPGGRKTGKNRRQRLHMWKCRDIQGMVTSKAHRLGIRVSHVCAWNTSALAFDGSGKVERGIHQNHSICRFTTGKIYNCDLNASYNIGARYFIREILKSLPVTAGLDISAKVPECSRRSTCTLSTLIRLNAVLAV

SEQ ID NO: 6582 - protein, 347 aa, Methanothrix sp.
MRSAYRFRLYPTEAQIKKLEDTLETCRQLYNDALAAKKEAWEDNHYNLTYYEMAHQLSANRKKNQALGAVYAHVLQDVLRRVDRAFQNFFRRVKNGETPGYPRFKGRGWYKSFTYPDAGIGYKIDGSKLILSGIGAIRIFKHREIEGKIKTCTIKRDSTGAWYAIFSTDTGEEPPRVEPRTAVGVDVGLKNAVTLSTGETFRYPRYLIQMEKKLAAAQRCLSRKIKGSKNWIKQKLKVAKIHKKIRNLRDEFLHQTSKKLVDKADLIIFENLNITNMVKNHNIAKHILDHSWGRLIQYTKWLLTVATASTIVDALTRLQGLVSRLSWSIPDIRLSDAQVVVSSYRKR

SEQ ID NO: 6583 - protein, 405 aa, Deinococcus sp.
MEFTTFPRRNKAFIVRLYPNAAQTERINRTLGCARFVYNHFLARRIETYRQDGKGMTYAATDKALTLLKREEGTAWLAEVDKFALQQSLRDLERAYQNFFRTARKSGKKVGFPKFKKKRTGEAYRTQFTNNNIEVGEGRIKLPKLGWVKTRGQREAQGKILNVTVRRVHEGHYEASVLCEVEIPYLSAAPKFAAGVDVGIKDFAIVTDGEGEFTHHANPKYYRSTLRKLRKAQQTLSRRRVGSARYRRAKTTLARIHKRVANKRQDFLHKLTTSLVREYEVIGTEHLKPDNMRKNRRLSLSISDAGWGEFMRQLEYKATWYGRLVSKISPHFPSSQMCHDCGFKNAEVKNLAVRTWTCPNCGETHDRDENAALNIRREGLVAAGIADTLNARRECVSPASAGNVR

SEQ ID NO: 6584 - protein, 345 aa, unknown
  TnpB Polypeptide
MRAYSEAFSLSAKWGFENQSWNKVNNHNATYKPTRQSIPELPSSLVQGARDCACEALKAVKCKTLPERKQLSAMRYNQRVITVNMIHGLATIASTKGRLKATFFVPLHYGKYLSWGIKSSTISYDRRNKTFYLHISLEHSDPEKVTTLNVLGIDRGIVNIAVSSDNRFFNSKKIKNRRARYAHLRKELQSKGTRSAKRKLKRMSGKERRFVTDINHCISKQVVNSEYTVFALEDLSKIRVQKRRGKEFDRKLNNWAFYQLEQFIGYKAEALGKHVLLVDARYTSQKCSNCGHTYKGNREGSAFRCRKCGFELHADLNASRNIAQAGISCLSRLSCQPAECDTPLS

SEQ ID NO: 6585 - protein, 424 aa, unknown
  TnpB Polypeptide
MRDVGLSSFTKILAGCPRLQSREECVPTPASLWHRKVHIYRYYMSIYMMQTLKVKLEPTPEQVQAIRQTMHQFNAACNFVADKAFELHTANKIELQKVVYYPIREQFNLSAQMAVRAISKTCEAYKRDKSIKPTFDPDGSVVYDQRLVSWKGLHLVSLLTLEGRIKVPVVICEYHEPRLNRIRGQADLIFERGEYYLCVVVEVPESPKIEPIGVIGVDLGIKNIAVDSTDEEFSGDGIENVRSKIDNLKADLQSCGTDSTKRHLKRLSGREARFRRDVNHCISKKLVAKAKDTSSVIALEDLQGIREGMTVSKAQRRKQHSWVFYQLRQFVEYKAAIAGVPVVYIDPAYKYQECPVCHHISRSNRPTRYQFDCVCCGFSGPADNVAARNIAARVAVNLPIVARFFAEPQALNTGEHHARQFIGG

SEQ ID NO: 6586 - protein, 428 aa, Firmicutes sp.
MTSQIKETITIAHKIQLAPNNKAITYFRKAFGCARFAYNWGLSKWKENYDKGLKKNVLEIKKEFNALKKDQFPFVYDVSKYVVQQPFINLDLAVKKYFRDLKSKKSSYPQYKKKSSSKDSFYIGGNVVTITDKRYIKIPKLGKVKMLEELRFSGKIKGITVSKKNDKYYVSIQMEITKEEYEKTHRVNKNKVMVGIDLGIKALATLSCGLQIENLKPLEKLYRKLIVRQRQLDKKQHAKTKQDVINGVCLSKNYIKHSLKLARIHEKISNIRSDYSNKLTTVLVNNFSYIGLEDLSVVDMLKSSQYSRSISDVSLSNIKRKILYKATYQGKEVSLVDRFYPSSKTCSKCGKVKQNLTILDRTFFCNDCGYSIDRDLNASINILNALKRKLGEVLPKETPVDLTALLNDFEINHIATSKVEAGIQHKLG

SEQ ID NO: 6587 - protein, 366 aa, Deinococcus sp.
MNRRHQPDRHTTQISRNSYDSCERLVRCGDLMVKRRPRSEEADPLKGVRAEETYTLSLNTRFAVLHDGAVRIGGELIHAQLSCLPTIAYRALVTGAPGFTQYNGIQELYQRVRLGQISERTLPTELERIVRQGRRPDPVPRMVTRPRTLQSRWLAQEVYLFKTQAGDWFLSLSFRTPVQPLAPNPSRRPFGLDLGLDPVTVISDGRTDQFFTLTDLPFLRRDALSPDARALYDQLTYASGRKDLDQVIGVLLREASAVYAEKLSHRGMSCGFIHGGRRRAVHDYHFSWLPQHANAVRLPFRRPGAAWSSQTCSVCGERRQCSRKGDRFVCLAASCQSSMDAHANAAREMLQRGLGHHQERSFPTWE

SEQ ID NO: 6588 - protein, 427 aa, Escherichia sp.
MHQENTMLPRRISVSLFIDQSIIWPVKRLQAFKFQLRPGGQQEREMRRFAGACRFVFNRALALQNENHEAGNKYIPYGKMASWLVEWKNATETQWLKDSPSQPLQQSLKGLERAYKNFFQKRAAFPRFKKRGQNDAFRYPQGVKLDQENSRIFLPKLGWMRYRNSRQVTGVVKNVTVSQSCGKWYISIQTESEVSTPVHPSASMVGLDAGVAKLATLSDGTVFEPVNSFQKNQKTLARLQRQLSRKVKFSNNWQKQKRKIQRLHSRIANIRRDYLHKVTTTVSKNHAMIVIEDLKVSNMSKSAAGTVSQPGRNVRAKSGLNRSILDQGWYEMRRQLAYKQLWRGGQVLAVPPAYTSQRCAYCGHTAKENRLSQSKFRCQVCGYTANADVNGARNILAAGHAVLACGEMVQSGRPLKQEPTEMIQATA

SEQ ID NO: 6589 - protein, 253 aa, unknown
  TnpB Polypeptide
MPPKYKNVENHKNHIIFTNLAVRFKNNILMLSLAKEVQTKFGVESLNFEVSDKLQTLMNLDSVQQAKNSYFNKQIAYYTSLEMKKSGSTRFKRTARIRKLQKQRNDYIQDCLHKASRKVIELALLHNCSTIVIGDISGIKQESQIKGFVQIPIQRLVEQIKYKAELVGMKVVLQNESYTSGVSAIDLEPVNKVHYNKSRRIARGLFKSNAGILINADINGSLNILRKYKNVVPELVKQVRDNGFVDNPIRIAA

SEQ ID NO: 6590 - protein, 385 aa, Oscillochloris sp.
MQRTIRIRLTPSPTQAAALAETSRLFTAAFNQFVRLGWDAKVGNATKLHYLAYYPVRESLPTLNSNLINTARAKASESLRSAFALQEQERTVSMPQSDACPPRYNVHTYRVDWESQTVRLSLVGARQTIRFTVPNYNAHYAGYPVDTADLINRNGVWWLHVVVTVPAPDVEPTDEVVGVDLGIAQPAVTSNNRFLGKPAWKAIEGRLFYLKRQLQRKGSKIAKRHLRKVKGKQARFRRDCDHVLSKQIVESASPGATIVRENLTDIRKRSKIRKQTGTSRRVHSWSFAQIKAFVAYKAEGRGCTVAGVDPRHTSQTCSCCGHQARNNRRSRGRFVCRVCGFELHADLNAARNIAAKYHADGGKAPVGGLPVNQPIVSVPTLRHRK

SEQ ID NO: 6591 - protein, 415 aa, Thaumarchaeota sp.
VKQQLARAYKTELAPDEVQEPMLYRNAGTARFVYNWGLRWKMNVMEYNRLPHPRVRLPSAFDIHRELNALKKSTFPWMYECSKCAPQEALRNLDAAFRNFFRGRAEFPKFKSRKRGTGSFTLTGTIKVRPGEIRLPRLGWVRLKERGYLPSRAHINSATISERAGRWFVSINVVEHLQDTAPVEGPVVGVDRGITSLIVISDGTTMENPRALARYERKLRHVQRAVSRKTKGSANRRKTIDALRRLHYRISSARRDVINKVTTMLAKTKSVIVVEDLRVRNMMANHSLAKSIQDAAMAEVVRQLEYKTVWYGSRLAVADEWYPSTKRCSGCGHVKEGSMPLGERVYRCHVCGLIIDRDLNAAHNLKQWPGVARTLETPVEGGVQPAVNPLVQPPCESGTTSPEREAQEHGQYKHP

SEQ ID NO: 6592 - protein, 420 aa, unknown
  TnpB Polypeptide
MESSRRDYGKALRETFYALRNCGFNKSQYRNYLQQKYGIVSRTASSIIFDAQGRFNALKELKEYERKQLERKIKHLEDTVIPKLVEKRNQNSTKLQEGVYVSLVQQRNLRLKVAAKRAKLNRMKQRLTVLEYQLKSGRLKLCFGTKRLLNRGYKKFIEQRDSQMTFVGAREESSCNQVLQLTYDRVSNQFLVRLRKDFGGYKSAKGEDRYAYGKVYFNHHKAQIVSILRSKASPLSYRIAKRNGRYYLHCIFEFQPDNDEVVTRSDYGTIGLDFNKGFVTLSETNQYGHLVKTQFLPYRFKSGNKTKNDLQGVANYVARLALKLGKDVCIESLDFRVTKSKTEAKIGKKYNEMLHSLAYREFIEVVESVAYRNKVGIIKVNPAWTSWLAEKIYCNPMKLNIHVGASYVIARRGQGYKDTI

SEQ ID NO: 6593 - protein, 400 aa, unknown
  TnpB Polypeptide
MKLCVKYRINPNPEQEETLQKLGFYATKLYNTDNYIRRQRWDETGKIPNWYEQKKLLKDNHWYKLLPSQTAQQICKNLQENYKSWFKLRKTDKDARPPLFRKKSRLSPLSFYQQFKINGNIITFTMSKKFRKETGTDKLSFEINKWKNIRGLPKMCNIIYEDNKWMTHIVYEVPEKKLNNYPEVMAVDIGIINLATTTDTKGNSTIYSGGQALAVQHYFNKEIAKVQSKTMKQYNRKGSRAITQMHKKKIRQINQIIHTVTKEVIKEAEKNKVGTIVVGDIKNIRKDKCWNKKSGQKLHSWGFAKLISQIEYKSKLSGIRMVKISERDTSKTCSVCGMVKKSNRKYRGMYRCKICENKMNADVNGARNILKKYLQDNDLSRSIGSVVEPSIWRCYNVVPS

SEQ ID NO: 6594 - protein, 247 aa, Microcoleus sp.
VAKTKKSMGVQQVLLSPDKELKALLEYLCQQSGKLYNSGVYLARQTFFKTGKLLTGKYDLSFEPSVAKSMVAKSLPSTPMQQTLMSVAEAFKSFKELRDAWVKGQLHFKPKPPGYLKGSKLFKVAYPNSGGQQPKLAGNQLRFSLGLTVRRWFGVSEFFLPMPSNIDFPKVKEFTILPKNGAFYLEMSYEVKKEKHNLDIGQALSIDLGTADNLAACVDTRGNSFLIDARAMKAMNQLWNKVRFVET

SEQ ID NO: 6595 - protein, 354 aa, unknown
  TnpB Polypeptide
VRVFVYNQTLADCKQLYEQSKHFPSQNERIKNLVPLKEKYEFLKEVDSRALQQSVRDFNSALDNFFKNRSHFGFPKFKSKHTGKRSYRTACDCGRSRVLDNKHVKLPKLGKVKTKRFEMPEAYKIFNITIEKTSTNKYYASICIETEVQPLPKTGKQVGFDLGLIDLLIGSDGIRFERPKFNYRNKDKLAEEQRKLSKMRTKLERANLNLDECKNYQKQKHKVAKLYEHVTNIAKDFNHKLSRKLVEDYDLLAFEDLNIEGMKKNHYLAYSVSDVRWYQLLNFIRYKCNWYGKEFKQVDRFYASSKICSYCGAYHKDIVNSLSVREWTCPDCGSHHDRDVNAAKNILTQALSVA

SEQ ID NO: 6596 - protein, 407 aa, Streptomyces sp.
MQLRYAFRVYPDAGQRIALARAFGCARVVFNDAVRAREDARRSGLPFPTAAALSRKLITEAKRTAERSWLGEVSAVVLQQALRDAEAAYRTFFASLKGTRKGPKVGAPRFKSRKDARQSVRFTANARWCITGSGRLSLPKIGAVKVKWSRTLPSTPSSVTMIKDAAGRYFASFVIVTDPAADQASMPATDHTIGIDLGLTHFAVLSDGTEIDSPRFLRRAEKKLKKAQRELSRKQRGSKNRDKARLKVARAHTKVADARREFHHQLSTKLISENQGIAVEDLSVAGLARTRLAKSVHDAGWSSFVGMLTYKAKRYGRTLIMIGRFEPTSQTCSTCGTVEGPKPLDVREWTCTACGTVHDRDHNAAINIKQAAGLAASACGAPVRPGAIPAQREETGSHGFPTDTCAA

SEQ ID NO: 6597 - protein, 368 aa, unknown
  TnpB Polypeptide
MKKSFKYRIEANSQTIHNATTWLDLCRNLYNAALEQRITTYRHNHKSISKFAQQKELPDLKEAFPEYKTVGSQCLQEVIERLDKSYQAFFRRVKNGDGKAGFPRFKGRNRYDSFTLKQCGWKLEGKYLTIRNIGRFKIRLSRPIEGTIKSVIIRRNPSNKWFVIFSCDNVPDKPLPPIGKSVGIDVGCESFLTTSDNVKIGNPRFFKKAQAQLAMRQQRLSRRVKGSHRREKARVLVAKAHEKVFNQRRDFHFKTANWLVRSYDTIFIEQMNAWNSYRSLNRSMRDVAWFGFFGILYFKAEEASRRVIEKPSKGTSQLCSRCHHIVPKDLSVRIHSCPFCGLTIDRHQNCALNILGDGQSLQAALYQT

SEQ ID NO: 6598 - protein, 485 aa, Halococcus sp.
  misc_feature (144)..(144): Xaa can be any naturally occurring amino acid
MAIQSVTHTHRASIRNQRQVRDGLDTLGFAAAKLWNVARWTAGRVWDACGQIPDDSVLKSAAKLWNVARWTAGRVWDACGQIPDDSVLKSYLKSHERYADLNAQSSQRVLEELAEAFRGWYGHRDNGNEKANPPGYRKNGDEHXEAFRGWYGHRDNGNEKANPPGYRKNGDEHPRATVTFKEDGFKHDEKNGYIRLSKGRNTKEHWSDFILCAYDADPDVTIENVQIVRAVFEHGEWRLHIVCRHEIEVEPPGDRTAGVDLGISNIAAVSFGDETLLFPGGWLKESKHYYKRVEYECEGENGLSRRARNAKRTLKERRRHFHHTLSKRIIAECVERGVGRLMVGDLNGIRSEDDGSGRNWGRHGNKMLHGWAFGRLTTMLEYKGEAAGIEVVVDSERDTSKTCAVCGHKNGSQRVERGLYHCENCGRTANADANGAENIRQTLLPNPDAFDRLDRDNGCMAQPATYSFDATEGRFLPQERVRCEP

SEQ ID NO: 6599 - protein, 520 aa, unknown
  TnpB Polypeptide
MPRVKTLSFVAEFPLQTTAADEKTLDTRLNAARHLYNACLQECLRRLDLMKQSKAWQAARAVPATVDKRHNKARSQAFRAELERFGFTSREIEKHALSCRNACWIGDHLGSHDTQTTSLRAFRAAEQYAFGKRGRPRFKSLNRLNSIEGKADAVIRYRAEPVPAVHYSGLVLPLMLDPKDKRDWQREALAARTKYVRIIRREIKGRVRWFCQLVQEGLPPATHTTKDGTVGLDIGPSSIAAVSSDDAILEQLCPSVVEPWNDCRRIQRAMDRSRRATNLDNFDAKGRAIKGKRRWNRSQRYQALAASKRERDRVLAAERKRSHGELANRILGQGTTIKTEELSYKSFQKNYGRSVKVRAPGMLISMLQRKAASAGGGVIEIKTRHTRLSQFDHTTGEYIKKPLSQRVHVFGDGRTEPVQRDLYSAFLATCCDTNLLDIPQVKIAWASAEPLLRTAMSSVLQPASGKGFAQPHVRNGVRAGRRIKSVGPAVEAGDDVAPLQTETARAPERLPSASLRTPWL

SEQ ID NO: 6600 - protein, 408 aa, Cyanobacteria sp.
MFMILNYSYRIKPNAEQESIMLHTLDRLRRHWNYCLGQRLDWLRMTRCQIDRCSLVSEPIGEIPDKVDYYTQQSALKETKQLFPDYKNIWAESQQVNLQRLNKAWERWLFPDKSGKRRGRPRFKKTGELRSFVYPRVNCPKAGATLNNGVLKLSKIGEMPVIMHRPIPEGFTLKTCTIVHKADGWYCCLSMQDETVPEPMPLDEVKAAVGVDVGLKEFLITSDGKAVPIQQTYRKTQSHLARQQCKLARKQKGSSPAEKQKNFIARIHQRIGRIRENFHYKTAHKLVKQYDLVAVEDLNIRGLARTRLSKSILDAAWGRFITILEAVAVKRGVRVVKVNPHGTSVDCSGCGAKVPKTLSIRLHECHKCGLQMDRDENAALNILDRALNEVGLRKVCAWRLSRWTACEA

SEQ ID NO: 6601 - protein, 238 aa, Cyanobacteria sp.
VQQGYKADNFLDRTSILTEKMGTSLPLLGGLLDRMLSARLLNKYIAVYSERMYNGCMLNLTYEYKLIPTDAQRETIDHWLEICRKVYNFALRERKDWVNSRKCDINSCSIRQEYIIPADAPRPTFARQCKTLSSAKKSIPELKLPHTHVLQQALRQLEAAFVAMWERGHGFPRFKKRMRSFVFPQLNLETVRHFDAADEVNLPKIGWVKIHLSRPIPQGFEVKQIRIVKRASGYYAML

SEQ ID NO: 6602 - protein, 349 aa, unknown
  TnpB Polypeptide
MYTTLTYRYRIKDSSTIALLQVLSSQTNFVWNYCNDVIRRRWKESRRFTNKCDLHALTKGASSELDLNSQTVQNIYEELVAKVTKHKKSIRFRTRKRNLGWIPFKGQTFKFYGNYCVYNSQKFRLWYHRRLPLGAEVKTGCFSETSEGKWFLNLVVKFKEFLPPAPKVATGLDLGLKTVVTSAHGNKFDRENLTKKYASKLAKSQRHRKKRQVKKINAKIKNSRLDFNHKTSHSLTKRYGKIFCGDVASSKLATTRFAKSVYDASWCQLKTFLSYKSIRRQGMFQEVSEYNSTRTCSSCTCLTGPQGIGALGVREWLCASCNTVHDRDINSALNHLRLGHETLNAAKAA

SEQ ID NO: 6603 - protein, 313 aa, Clostridioides sp.
LTNLKKELKWLKEPDKFSLQNVLKDLDNAYKKFFKEKAGFPKFKSKKINRFSYKTNFTNGNIMYCGQHIKLPKLGMVKIRDKQVPQGRILNAAISKEPSGRYYVSLCCTDVDIEAFENTNNQIGLDLGIKEFCISSCGEFIENPKYLKKSLNKLAKLQRELSRKTIGSLNRNKARLKVARLQEHIANQRNDFLQKLSTKLIKENDIICIEDLQVKNMIRNSKLSRLISDVSWSEFIRQLEYKANWYGRQIVKVGKFFASSQICNKCGYKNEEVKDLNIREWICPSCNETHDRDINASINILKEGLRLITIQNK

SEQ ID NO: 6604 - protein, 441 aa, Fischerella sp.
VIIYEFKVKGLDLQYRAIDDAIRTSQFIQNKALRYWMDNEKVGKYDLNKYCAVLASEFPFADELNSMARQSAAERAWSAISRFYAGLPRTKNRQASEKDNSLGQLNKPNTSLPVFRGDNANDNCKKKIKGKKGYPKFKKNCRSVEYKTSGWKLSNTRKAITFTDKKGIGTLKLKGTYDLNYYDIKQIKRVRLVRRADGYYAQFAIDVNVKIETQPTGQVVGIDLGLKYFIADNKGNVEQSPQFYRKSEKQLNRANRKKSKKFKRGAKPQSTNYHKAKIRYQRKHLRVSRQRKEYCKRVAYSVIQSNDLVAYEDLNVKGLIRNRHLAKSISDAGWSTFRSWLEYFGHKYGKVTVAVPPHNTSQNCSNCGNQVKKSLSTRTHVCPHCGYVEDRDVNAAINILRLGLSTVGHTGTYAWGDLPSWAVGASLLSNGESTNQESQCL

SEQ ID NO: 6605 - protein, 404 aa, Fischerella sp.
MYQGGYKQVRTAYQYKLRPTKQQATEIDRWLSMLCAQYNYLLADRFNWYEQNRCSINACPLVCHLPELRNNPDYYSQKKTLPLLKKTHPWYGEIYSQVLQDIVKRAKVTFDRFLSGDSKGNRSGRPRFKSRNRYRTFTYPQMKDGCLQGNLINLPMFGKVKIILHRPLPDGFKIKTASVTKKADGYYIILSLEDATVPSVKPDINPESIIGIDMGLKEFLTTSEGEAVAIPQHYRKAQKRLRVIQKRVSRRKKGSNRRKKSVQQLGKQHKKVADQRRDFHFKTAKQLLTKYDVVAHENLNVKGLSRTRLALSMHDAGWSSFLSILTTKAENAGLLVIAVNADGTSQDCSSCGVKVPKKLHERWHSCQCGCYLDRDHNAAINIRKRAVGHSVLKAQSLLSNSRIV

SEQ ID NO: 6606 - protein, 489 aa, Moorea sp.
MPKKVGVTKKISTQIVPVVGMTESVELELLSTMKKLGIVRSESYNKLGSISHWGLDWKKAYPEVRSFRTPESLGLPSKLMEWAVSDVAKAITASQAACTEAVVKKIYKRFPGKENQKTRKELCKQLKTLAFLDSPLLHRLIRKEFQRGHSWVKNQIIYQQGGYKCKRLSRNTYQLELAGLKRGKRNKIVVRSNRKIKGQIRLIYNQILKKIEIYFLVDYGTVEIPPDRRAIGVDKGYTEAFYDSDGQAHGKELGKVTTKKSDRICAKNRNRGKLWALHRKLEKLDPAKSARIFKNNLTRKTENRRYRKNQSELTAIIGAASKSLFKGEALKVFAEDLTQPIRNKRQSKAMSRKLNSWMKGQMRDSLEKWANWTGSVVTEVQPSYTSQVDSVTGTLLGKRNGDNFTRFNGVVLQSDHNAAKNILNRGTDKEITRYMNKTEVQAVLLRRTARFLEGMGLSLLDAVELGWLDSKHELCSGFQATPGRDARNV

SEQ ID NO: 6607 - protein, 380 aa, Anabaena sp.
MKRTVSIPVDLPSERFLPLMNQCAEIFNAHIDYALANSTYNKNKAHKELYHLLRVQFPSVPSALLQTVRDSALEAIKATKFKSIPKKKPTSGLRYDKRTMTLRGKQLTLSCIGKRVALILDVPKYFQEVFETWDFCGATVTYTKNTKQFWVRLVFEIEDPQHIEGQIQGIDRGLYHQAVTSDGQFFSSSKIRKVQRRYLYNRRQLQQKGTRSAKRRLKAMSGREKRFMRDTNHCVSKKLANQPGIAVFVLEDLSSIRTQRRGKKMNKWLGSWTFYQQEQFLTYKAEALGKRVVHQDPRYTSQKCNICKHIRRTNRHKSKFHCKNCGHRTHADLNAAKNVRDDYILSSTQGTEEQASVNMPDVSTDSFGQLQAPSPCGWGV

SEQ ID NO: 6608 - protein, 378 aa, unknown
  TnpB Polypeptide
MRAQTPSYVVSVKLKLSESIENHLEKSFRIANSAYNEALSFGLRRFEALKRNSDYQNLLEARHLTLSGIAGLKKAKRKTVGLAQQVKSYNKALFELRKAYKLTEFGLSAHLSQQRRKCGSSYQQLNAGELQVIASQAIKTLEKVLFYQIKPHKVRFKSKFDLNVSFRNRVNTTGTRLVSSNKKGVAYRLYIHKVSTFVDIPVKAFNTYQQLSLLRSEKIKYVQILRKTIRGKKIYILQIVCQGSPPAKVTKGGGVVGIDPGISTVAFASSKEVALVDLVPNDITRKETLMKNLDRKIERSRRVNNPDCYHADGTIKKGVKFKRPSNRQIRLRNRRLKAYRSLSEERQKLQGQLVNRLVSQASSIKIEDLGVKRLQKRS

SEQ ID NO: 6609 - protein, 205 aa, unknown
  TnpB Polypeptide
MKVYEIAEPELKTDGNIMRIDFGIKCPAVSYCSDGSVKFYGNGRRNKYLRRQYAYVRKKLQTSKKRKAVKRINDKEQRIMRDIDHKLSHDIVETAVKHHVKVIKLERLQNIRSTTRTSRKNNHSLHNRSCYKLAQLIEYKARLAGILVEYVNRAYTSQTCPICGHIHHANDRNYSCKCGFHIHRNLLGAMNICNATEFVGNRQTA

SEQ ID NO: 6610 - protein, 340 aa, Clostridioides sp.
  misc_feature (21)..(149): Xaa can be any naturally occurring amino acid
MYPNKKQQELINKTFGCCRFXXXXXXXXXXXXXXXXXXXXXXXXXXXXXXXXXXXXXXXXXXXXXXXXXXXXXXXXXXXXXXXXXXXXXXXXXXXXXXXXXXXXXXXXXXXXXXXXXXXXXXXXXXXXXXXXXXXXXXXXXXXXXXXXXIGLDLGIKEFCISSCGDFIENPKYLKKSLNKLAKLQRELSRKTIGSLNRNKARLKVARLQEHIANQRNDFLQKLSTKLIKENDIICIEDLQVKNMIRNRKLSRLISDVSWSEFVRQLKYKANWHGRQIVKVGKFFASSQICNKCGYKNEEVKNLNIREWICPSCNETHDRDINASINILKEGLRLITIQNK

SEQ ID NO: 6611 - protein, 410 aa, Halococcus sp.
MLNYRFRLNPTPAQREQLAWTLDTCRQVYNHFLHRLNRVEDTSSYSEQKRLPKLKEWWSDLKSVHSKVLQKVVQRLYDNLSTLRGLKENGHRVGQLRWKGAGYYHSFTYSQSGFKLDKKSDRDELYLSKIGSVPIVAHRDLPADATVKSVTVKREPTGKWYAVLSVETADNPPEKPTNPENVVGIDVGILKFAHDTDGTAVESLDLSHERERLEREQRVLSRREHGSNNWEQQRRKVARRHADIKRKRRDFLHKLSNYYAREYDLVAVEDLDVKGLMQLDGNSRNRASAAWGTFRRMLAYKCEREGTHFAEVRPHGTTKECARCGAETDKPLWVREHSCPACGFTADRDENAAWNVLQRGVEKADIGMGNAESTPAETVVPTATAFQPVAANHVAETGSPVLKRKPSGER

SEQ ID NO: 6612 - protein, 317 aa, Synechococcus sp.
VGANRKTAKAQGHPVKTFKPTSADYDARLFSYREQDETVSLCLVGGRERIQLCLGNHQRGKLRGQKPTSAQLGRHRDGWYYIHIQLTGQVPEPKQAVQVKGLRLAGAIGVDLGRREIAKTSTDREWDGQQLNQTRDRSSRVRRSLQTKASKGTRSTRRRARQILQRLSGRERRFQTWLNHTISASIVWEAQQKQAILALEDLTGIRERINRQPRSKTERRRGNSWAFYQLRQFLEYKALRAGVLIVLVPPAYTSQTCHKCLHIHPDPAQSYRSGKQFKCGHCGWEGDADLNGANVIAIRAAARSAKLGAAFVNQPRG

SEQ ID NO: 6613 - protein, 208 aa, Microcystis sp.
LLASFLARLSPCQLKSLNQFYNQRRAKLQSLLKGNRQSSERICRLTRCRNQKVDDYLHQASHYLVNLLVDQEITTLVIGKNDGWKQEVNLGKVNNQKFVTIPHARLIEMISYKCQLVGISVIIQEESYTSVANFLNLELLPVYGQITEKPVFSGKRISRGLYRTDKGILVQSDVMGSYNILRKAFPNAFNRYGIERCVVHPRRINLSK

SEQ ID NO: 6614 - protein, 442 aa, Fervidicoccus sp.
MRRTSVVELVVDKSSEESLKLLCSLSSKLWNEVSYARRRMFFEKKGADLKATYKEHYEKYKTLIGSATAQQILNKNEDAWKSFFKMLKLKKEGKLPPFITRANPPGYKKKNSKRLLWTVLRKDQYRVEGGRIVLKGLGAIGRIELKYKGLIHLKGEQGRLEIHYDQDRRKWYAHISFEVSEKAVRVVLASVPRKPRDNLVAGIDIGINNLMSVYVENGLAKLVNGRPLKAISHYWRMRIDEYQSTLNKHGLKTSRRLRSMYSKWRRQVKAYIDSRVRQAIEWLHSVGALVIKVGYPKYIAQENGNFSNFHIWTYGYLLRRIYEVAEENGITVVYVDEAYTSSKCPIRGEGCGKRIKRGLFKCTKLDKVFNADLVGAFNILITPSPNWDRGNGLETQPGIEPSERGNAIPNLFALAGTPCTLGRGGGQIFLVPCPPSFKLIGL

SEQ ID NO: 6615 - protein, 351 aa, unknown
  TnpB Polypeptide
MMRLNLQVKLYPTKQMRTYLDSQCDYRRYCWNQGLKVWNDIYDQRVISLPTDLKLKIKESLKDKSIPFTEEEMNLRKEFPSPTERHVRNELVANKSDWEYENSSRVLQLAVKDLSDTWIRFFKKSQESSSKPKFKRRKEPKQGFKTDSARIKNGRLLLDKPRAYTGPWESIRFKGHSIPDGAIKLCAITRVKNQYLATISINVETTPLTPTGKVTAVDANVDHFDYTDGVCTLRPQELNRLYGKVKHYQRVLARMQMFKKAKGLHRSLFGRFRLFMEYKAEKFERELVIADKYYPSTQRCSSCGHIKTDDEKITLAGNQKHGTRHDEYHCYQCGYQGDRDYNAVLNLLALI

SEQ ID NO: 6616 - protein, 417 aa, unknown
  TnpB Polypeptide
VNLITTRTITASLTNDREGVVRDLDSLARSGSKIWNVAQWTIIRIWDETGEIPTEGPLKSYMKNQQCWKDLNSQSSQAIVEELSGAFQSWFEQDDPDANPPGYRKHGDERPRSTITFKEDGFKLDTKHQQVRLSKGKNLKDGWADFILCEYETGPDADLTDVEDVQQVRIVWNGEQWEIHFVCKVAINSTDQTGENTAGVDLGICNTAAVSVGDETLLYPGNALNEDAHYFRREEYDTEGENGPSTQAEWARRKKSRRQEHFLHAVSKDIVEQCANRDVGTIAVGHPKNIREDEDWGRHGNKCLHDWAFETLLSQIEYKAEERGIDVERVDEYELATSITCCECGTKADSNRVERGLYVCDACGLVANGDLNAAENMRATVTPNPSKDRSNGCLAQPSVRLFDKLTGRVAPQEQVRP

SEQ ID NO: 6617 - protein, 529 aa, unknown
  TnpB Polypeptide
MPDTFPAREPLPDNGYSESMRGSALKQPLPATPGSVVTNRKTTFSGRSNGSQHGIRTPRSSATSDPASISTERVLGPYWNDACLENSSRLWLPTKTASAASGSNSSVGSSNGMGGRSWFSVSRQSAPHLTNSLRIYSRSSGSFPPECTGSVNTVVKSRRITLYPTPDQKAVFQAWFRASRFVYNRAVEYLKQLDGPRPHWTVVKKTILHNLPDWCRDLPYQVKSIAVRDACRALSAGKLKVKQGIIPRFNLSFRSRKAPKQSCFIPATAIKPGGIYPKLSGQLRYGEELPQQHRDSRLVWEHGDYYLVVTFSAPRQQHTREPSVGVVALDPGVRSFLTFYSPVDCGKLGDQAQQRVCRLLSHLDRLVSRMARAAGQRKRRFRLAQARLRKKIRSLIDELHWKTIRLLTTNYQTILLPKLDTKRLSGRLHRKLRNKSVRAMLGLAHGLFRVRLAHKCQELGNELRYVREDYTSKTCSWSGEIVNIGSKQEIVGSDGIRLDRDVNGARGILLRALVDTPSSFVLEHAAAGM

SEQ ID NO: 6618 - protein, 416 aa, Mycolicibacterium sp.
MLAGRRFRVEFTEAQAEFAQRIGDVCRSVWNTGLEQRRAYRRRGAWMNYAPQAKELAEAKAEHPWLKDVPGHCLQQTLMDLDKACRTHGTFRVHWRSGRRWAPSFRFPEGNKMVVEQLNRRHARIKLPKLGWVKYRSSRSLAGVVIRSATLCREGRHWYLSVLVDDGIAAGAVHAQPGASVGIDRGVAVALATSSGELIDQPFTTAGERRRVVALQRKLARATKGSVNRAKVRAALAEVRARERRRRLDFCAQTAHQLTVANAVVVLEDLKTRNMTRTAKGTMQDPGRGVAAKSGLNRAILAKGWHQLALALASAARYSGTTVVMVPAAYTSQRCSVCGQVDPKSRESQAVFRCTHCTHFEHADVNAAKNVLAAGLAVTACREPSAPAGVEGTLTQEPAGNREGLLPQPAHTAPAA

SEQ ID NO: 6619 - protein, 371 aa, unknown
  TnpB Polypeptide
MSETLIRTICIKLDVDGHEASLAATQKAFNEAATWIADICWHEGITNTNTAHHRVYGETRTRFGLGAQLAVCARAKAVEAIKAVKKQSKESCPAFGPRGSIRYDARTYRLMSLDRVSLNTLTGRVVCRLVPGPRQHEMLVDPAWKIGGADLVWRRGVYYLHVTQSQDAPEIPADDGTHLGVDLSIVNLATDSEEHTFSGAAISKARRHYQKRRQILQKVGTKSAKRRLKQNSGREQRFMRDTNHCISKALVKKAAQTRKALALEDLTGIRDRTTVRRAQRYERHSWAFFQLRSFLTYKAAWAGVRIVLVDPRNTSRTCSACGHCEKANRQSQASFHCQRCGMQMNADVNAAINISRAAVKPPVVATGLRAS

SEQ ID NO: 6620 - protein, 365 aa, unknown
  TnpB Polypeptide
MQKGIKFRIYPNREQQNLINQTLGCCRLVYNKGLAMRKEAYENGNKISYTQTSAMLTELKRQDEYAFLKEADSVALQQSLRDLDRALVNFFQKRTGYPSFKSKHCHWQSYRTLNQKDKIHISGKDIRLPKLGYVKLRQSMEVGRIHNVTVERTPCGKYFAVVNTEFMPKSLPVSENALGIDVGIKAFYTDSDGRTVKNPKYMETSMKKLLREQRRLSRKQKGSRNREKQRRKVAIVHEKIFNQRNDFLQKQSTMLIRENQTICIEDLHVKSMVKNHKLAKAVSSASWSKFFAMLEYKAAWYGRTVQRIPVMYPSSQTCSVCGYKNPKVKDLSVRAWMCPSCHTLHDRDINAAVNIRNKGLKLLSA

SEQ ID NO: 6621 - protein, 376 aa, unknown
  TnpB Polypeptide
MRKTFKYRISAKKETTAKAEYWLELCRVLYNSALAERIYAYKMQGMTISCFSQINQLPDIKQENPEYRLVGSQALQEVLERLDKAYKAFFRRVEQGGVPGFPRFRGKYRYDSFTLKQAGWKLEGKYLYVRNVGRFKLKLSRQIEGDIKTITIGRSPTNKWYACFSCDNVPERRLPQSDRTIGLDVGIKSFLTDSEGTKVENPKFLKRTLKELRVRQRKLAKARRGSSRRKKTKLRVAKCHEKIANQRRDFHHKLADKYVKGYGIIVIENLGIANMVQNHKLARDISDCAWGEFFEILSYRAEEAGREVIKAPRFEPTSKRCSYCGEVNHKLKLSDRTWACLQCGTIHDRDENAAINLKRFGQNHQEVTYASTQCVS

SEQ ID NO: 6622 - protein, 373 aa, Bacillus sp.
MLVKKAYKFRIYPNQKQEILIAKTIGCSRFVFNHFLEQWNDTHKKTGKGFTYNSCSKKLTHLKKEFVWLKEVDSISLQYALKYLIDAFARFFKKQNDIPRFKSKKNPVQSYTTKHTNGNIAIVGNKIKLPKLGLVRFAKSREVEGRILNATVRRNPSGKYFVSILTETEVQPLQKTGSSVGVDVGLKDFAILSTGKVFSNPKWFRKLEEKLGKAQRILSRRVKGSSNWNKQRIKVARIHERIANARIDYLQKISTEIVKNHDIIGIEDLQVSNLLKNHKLAKAISEASWSQFRNMLEYKAKRYDKKVITVSKTFASSQLCSCCGYQNKDVKNLNLREWDCPSCGTHHDRDINAGQNLRDEAIRILTVGNTGIA

SEQ ID NO: 6623 - protein, 407 aa, Boseongicola sp.
MTDEAQPDAGIKRIRTVTLTASIGAATHCRLDAFLRQQAELWNAALEERIDCHRKTGKTITAFDQMKSLTEIRRDDDDFSQFHAATQRSVLLRLDKAFKRFFDQVRRGERPGFPRFKGRNRGIRSFDVPDPVIRDGSLWLKGIGRFRLPSVPDAKIVQARVVKSALRVSVQFVVELEQQPSVPVGEPIGIDMGIHNRAIMSSGETVPAVTIDRRPLKRAQRVVARAKKGSVSRRRKVKALAREWERTRIRERNALHEISASIVKRHRRIAVEDLQVSNMMRHPTLARPIAEQQWGRLVQQLTYKAESAGGEVVRVRPQHTSTDCHACGHRQPMPLDVREFACGGCDLVTDRDVNAARNVLRRGVALAGWEVGPSGRPGASESVLGSDVAGLPGQGAERCPAESQPWI

SEQ ID NO: 6624 - protein, 419 aa, Veillonellaceae sp.
MKRMNEYRYFYGLVLRIYPSNRQKNIIKVNDNAARFIYNEMVAVERDIGRFGKRNIYIPFIENRIRFLKEKIATVTALKNRYTWLCNPDIDSECIANARLNYRKAWKRYRDVPGTGIPSFHKKDYTESYQTNPHYKPHKPVSLFTSNVRFLDRHHITLPKLQRIRCQGSPKILAKLFRMETVKIGTITIRKDACDRYYASLLLASDEPFYDAVPKTGTSIGIDLNLENFYVDSDGNVKENPRYYRKQKKRLANAQNKLSHRIEIAKKENRSIRVAKNIQKQRRIVAKLSSDIMRRRRDFLHRESLLLIKNHDVIIAEDLRSQNLVRNHRVALSIQDSGWRSFLSMLEYKAKCYGKTFMMVNPRNTTQTCHVCNHVLQGDDKLTLDDRQWICPVCGTHHKRDLNAARNILAKGLRQFKEA

SEQ ID NO: 6625 - protein, 435 aa, Okeania sp.
MVEKAYKFRFYPTPEQENLLRRTLGCVRLIYNKALAARTQAWYEKQERLGYKQTSAMLTNWKKQEDLDFLTEVSSVPLQQGLRHLQTAFSNFFSGRTKYPNFKKKRNGGSAEFTKSAFKWKDGQVYLAKCAEPLPIRWSRQLPQNCIPTTITVKLDPSSRWSVSVRINDTRDLKLKPVNKQIGIDLGITSLVTTSDGKKIANPKNLNKLHKKLRLAQKCLSRKTFGSNNYQKARLKVARIHAKIKDSRLDYTHKLTTQLIRENQTIVVEDLAVKNMVKKRCDPATTPVARERAPRDHKLARAISDANWGELVRQLEYKAEWYGRELIKIDRYFPSSKRCSNCGHIVEKLPLNIREWDCPECGSHHDRDINASLNILRMGTRVGDRRKGTPTKKAAGLAVSVCGATVRPEGSKSRKAGAMKQKAPNSDARKSRAVS

SEQ ID NO: 6626 - protein, 374 aa, unknown
  TnpB Polypeptide
MKTRAYKYKMKPTFKQQECLNKAFGCCRFIYNWGLDKKIQSYKQEKKTIGYVELAHELTKLKNDGEHEWLKDVNNTSLQQSLRNLDAAFVRFFREKKGFPKFKSKKKNIESAKYINAVHFDFDNWKVKIPKIGWVKLCKNKTFDLSMKYGTLTVSKDKCGDYWCSIVVYDVEEKPKTKVSIDKSVGIDLGIKDYAILSDGTKYANPKFLEKGQKRLKTLQHRFARTQKKSNRHEALRLKVAKCHRDIANRRSDFLHKLSSMLTEQYDTICLEDLNVEGMMKNKHLSNSIQSAAWSEFVRQLKYKSDWYGKNVIFIGRFEPSSKTCSKCGYVKSDLQLNDREWVCPKCGEKHDRDVNAAINIRDFALHKQNLIGI

SEQ ID NO: 6627 - protein, 403 aa, unknown
  TnpB Polypeptide
MSRIYRTYRFRLYPNKVQIDLLSKHFGCARFVYNYFLNQRIEQYRLTGKSDNYYTQAKCLTELKKQETTAWLKEVNAQTLQFAIRCLEAAYTNFFNKRAKFPKFKSKRSKNSFTVPSSASITDNKLFIYKFKEGIKCRVHRKIEGKIGKITISKTPSGKYFVSVLTEEDYTMPIKKTNKSVGIDLGLKDLVVTSEGETFNNNRYTREYESKLAIAQRHLSRKKKGSIGFENQRLKVARPYEKISNSRADYLHKCSISLVRRYDTICIEDLNIKGMVKNHHLARSISDASWGSFVAMLTYKAERNGKKVVKVDRYFPSSQTCSACGYINKQVKNLSVREWECPVCHAHHNRDVNAAINILNFGFNDISAGTVDYTDGENVKILYEIRSLRVFNSRAFHYEVRSS

SEQ ID NO: 6628 - protein, 182 aa, Escherichia sp.
LPIEARLHREITGMLKSITLSRSATGKYYASLLCDDGMEAPAKPALISNVTGLDMGLAHFVIKSDGNKIASPRHLINASRNLRRKQKALSRKKKGSANRRKARIQLAAVHERVASARADFQHKLSRAIVDENQAVIVETLKTANMMKNHHLARAIGDAGWSGFITKLEYKATEKGVHLVKLD

SEQ ID NO: 6629 - protein, 258 aa, Escherichia sp.
MRRFAGACRFVFNRALALQNENHEAGNKYIPYGKMASWLVEWKNATETQWLKDSPSQPLQQSLKGLERAYKNFFQKRAAFPRFKKRGQNDAFRYPQGVKLDQENSRIFLPKLGWMRYRNSRQVTGVVKNVTVSQSCGKWYISIQTESEVSTPVHPSASMVGLDAGVAKLATLSDGTVFEPVNSFQKNQKTPARLQRQLSRKVKFSNNWQKQKRKIQRLHSCIANIRPGHPHPVCHRPGGKPPAGPGAAPGQYPHGVAG

SEQ ID NO: 6630 - protein, 482 aa, Streptomyces sp.
VKVTRVAYSRRLNAGKYAQLVEQARRLGAVRSLVWRQFGSLAGVGVCDRTIRNTWMADGTARGFGVLANAWKETVRDAVADIKAHREASKVPVRRAIRQRTAKKTERKCLFTALKRDQWTDDPYLSRMMRRHWRRGRNRTHNQIVVRSDQYRTYSLTEGGNVWLAVPSLVRRKMVTIPLGTTVAPTGTLRLILRDGQVEVHYAIDASALKSSLRPCGTEKIGVDKGYSEVLTDSDGNHLGQELGDLLRAESDFLKAKNARRAKIRSIAEKALEQGDEAKAARITRNNLGTVKRNGRRRVFETKVRSITFASVHHVVDKAREIVAEDLTRPFVSRKKLGKNTNRRLAAWTKGVTAEALASVSERRGSVLTLVNSAYTSQVAPCCRILGKRQGDRLHCTQCGAVWQADHAGAINVLERDGDPDISLYTPHTRVRQIIQERADRRRTRLPVQDSSTPVRRANHPIRATTLKEQEAARRPDDRSDR

SEQ ID NO: 6631 - protein, 475 aa, Hoyosella sp.
MAAKFEVPQGWVLQAYQYALDPTGPQTSMLESHAGGARFAYNTMLRAVKANLGQREAEKSYGIASADLTPSMSWSFQSLRNGFNRLKHQVAVREDGTPWWEENSKEAYANACKNLAAALKNWDESRRGTRKGQRVGFPSFKSKRSARKFAFTTGTIRAEANRHHVTLPKLGTMRVHESTRKLARRLEAGTARILKATVRFERGHWLVSFTCVVARAAQRPAHVKRLAPVVGVDLGVKDLVVAATPDGREVLRVQARKEFKRASRKLRALQRKAARQAGPWDAVTESRREPSNAWLRTQQVIAKQQVRVANQRRDRLHKLTTLLAQSFDVIGTETLAVKNMMASGGARKKGLNRSIADAGLGEFSRQLDYKTTWYRSKRVQADRWYPSSKTCSGCGSVKAKLALSERVYVCDNAECGLVIDRDLNAAINLARLARAEQSACFDSGGADRKSTAPAALVAVKPESSNGSASPKSEAA

SEQ ID NO: 6632 - protein, 475 aa, Hoyosella sp.
MAGKFTVPDGWVLQAYQYALDPTQAQTAVLESHAGGARFAYNTMLRAVKANLAQRDAERSYGIADADLTPTLSWSFQALRSDFNKRKHTVAVRDDGTPWWGENSKEAYANAVKNLSLALKNWSDSRKGVRKGPRMGFPSFKSKRSTRAFAFTTGAIRIESDRHHVTLPRVGTLRVHESTRKLARRLEAGSARVLKATVRFERGHWLVSFTCVVERAAKRPAHIKRVASVVGVDLGAKDLLVAATPDGREILRVRAPKELKSTSRKLRALQRKAARQHGSWDAVVETRREPSNAWLRTQQTISAQHTRVSNLRRDRLHKLTTQLTQSFEVIGTETLAVKNMMAKGGSRKRGLNRSIADAGLGEFSRQLDYKTAWYSSQRVQADRWYPSSKTCSGCGAVKAKLPLSVRLYVCEHENCGLVIDRDLNAAVNLARMARAEQSACFDNGGADRKTTASAALVAVKPESSDGSASPQGEAA

SEQ ID NO: 6633 - protein, 427 aa, Acholeplasmataceae sp.
  misc_feature (18)..(30): Xaa can be any naturally occurring amino acid
MTFYIIKYIHKIYILSTXXXXXXXXXXXXXSRSLYNQALYNVRQHFIKTNGYLSYNENYQLLKDSEHYRYLSTTQGQMVIRKVDEAMKGFFGSLKSKVKQTIRLPRYLKKDTYYPLYDRMVYKPDDKVYTLPRSNFIKKVSKELEMDSKQIHKHTYELNEVDALSLDIQTPECIQNKEIKEITIKSYYDGKYIEVVYVYLDNELVNPFEGHTETMGIDFGYNNLAFCSVTNNEHLLLDGKRLKSMNQFYHKRIAKLASIRPDQNILTKQMIRLMDKRNHQMDYGIYKAAKLIINHAIKNKVKQIIIGYNDTFKDERLSDTYNQWTKSIPVARLRDRIIYLAEQLGIETKVINEAYTSKASYLDQDEFVKGDFSGVRIKRGLYKSQKGILINADQNASLNMIRKGNPDALWIGTKGVNTPKRTYLFGV

SEQ ID NO: 6634 - protein, 420 aa, Tolypothrix sp.
MIVLEFKAKGKTTQYSAIDEAIKTAQFVRNKCIRFWMDNQGVGQKELYRHNTALRSELPFVKALNSHACQAAVERAYSSIARFYDNCKKRKVGAEVSSDPTFVRESVPGKKGYPRFKKNSRSVEYKTSGWSLCSNRKQIIFTDKKGIGKLKLKGTWDLNFYQLDQIKRVRLVRRADGCYVQFLIRCENKVNLQPTGKTIGLDVGIKEFYTDSNGNAEPNPKFYRLGEKRLKFRQRRVSRKTKGSANRKKAINKLGRVHLKISRQREEHAKKVARCVIRSNDLVAYEDLRIKNLVKNHCLAKSINDAGWYQFRKWLEYFGVKFGRITVAVNPAYTSQDCSSCGITVKKSLSNRTHVCKCSCVLDRDHNAAINILNLGLGTTGHVGTWNAGDPNASGDLASTVLGANLFQQAGSMNEESPHL

SEQ ID NO: 6635 - protein, 127 aa, Clostridioides sp.
VIAVKKAYKFRLYPNKKQQELINKTFGCCRFVYNKYLAKRIDVYKNDKETFTYKQCSSDLTNLKKELKWLKEPDKFSLQNALKDLDNAYKKFFKEKAGFPKFKSKKINRFSYKTNFTNGNIMYCGQI

SEQ ID NO: 6636 - protein, 402 aa, unknown
  TnpB Polypeptide
METVRIFPLRGLSKSERLRLRDAQMEAARVWMYCVERHRQTRAAHQPWPNRDDLQRETKGGQYALQSQSIQMVTHQFLANVETIAELRKTDKRHRYPYHPKKYLTVEWPAQAISRHGNTLILPMGRGRKSFTCHLAGLPEQIGAVSLVWNGGYELHMVASTPVTEPSLPPATPAQATVDLGEIHLAAVTTTTGKGMIVTGREIRSLKRQQLMSQGEIQRLLSRCQKGSRRYRKLCYALERINGQTKRQVRDLRHKATRQVVDFCQQAGVQTVFIGNPDGVRKKDSGRHHNQRMARWEYGKDKHYLAEKCQQAHMTSFTGSERGTSSRCPSCDKRKKPRGRIFACGRCGFRGHRDIVGSMNMHPLAFGSRISYPAWLTYRRPGPARVRRRDEQPSPVARTGTS

SEQ ID NO: 6637 - protein, 381 aa, unknown
  TnpB Polypeptide
MVARVVRGLAFPAGEIPPALRWLMAEFRLIVNESVRIALGQDIRSRFRLARIAYRTLSADHDVYKQYIPSAFEVALGMLKGYRKRVRRGRHTDVPYLRRLMLKAENQSYRLDRETGRLRIPIRAGQQAFLDLPLSDWHRSLLGDASWSLGSLTVTPDRVIVTVRKATPEPYLPMAAIALDTNEDSLDGVIAEGRTASLVTVFFPEVRVVQATHFRRRRRITRKKAHDSRVIRRLLGREGRRERNRVRQRLHLVSKGLIQTAKERHAAIVLENLSLHGAGGRSRRMNRRLSSWPRREIHRQIEYKAALAGVPVIKVNPAWTSKTCPACGARRRDRVGKDFVCLVCDWEMDRQHNAALNILKSALASHEALARAVPVPSAMTW

SEQ ID NO: 6638 - protein, 148 aa, Bacillus sp.
MTPTGKYYVSILTEYEKEITPKEVERVVGLDFSMVELYVSSEDEKANYPRFYRQMLDKLAKAQRVLARRAKGSERWNKQRIHVAKLHEKIANQRKNFLHHKSKELAASFDVVAIEDLHMKGMSRALRFGKSVADNGWRMFTTFLAYKL

SEQ ID NO: 6639 - protein, 398 aa, Persephonella sp.
MKLKRTIKLVVKPSEEEKQILFKTLEEYKFAYNFVAEIGWKSKVSNSIKLHNLTYTTVREKTSLPSQLVISARMVASESLKSAFNRRKKGLKVSCPYSNNPAIRYDKRSYSVWFDREEISIATVEGRLKLKIKIPEYFKQYLNWKIRSASLKYDKRLKKFFFNIVVEKEIEEIPENDTVIGVDLGLSKLAVISTADGKINKFFDGRHIRAVSERYFAIRKKLQSKGTPSAKRHLKKLSQKEKRFRTAINHKIAKEIVSLVPAGGTIVLEELKGIRERIKVSKKERRWIHSWNFAQLQQFIEYKAQSKGIKVVYINPKYTSQRCNKCGHISKSNRKDQSHFKCSSCGYTINADLNASRNIAINYLVSQQERLGHRVASLPVWAVVNQPNVRGLANFSHS

SEQ ID NO: 6640 - protein, 471 aa, unknown
  TnpB Polypeptide
MYLAERTVLTEGIHKQVFAMADRNARLAKLLYNAALFRMRQAFTGWDKAVRTENEKEVFRELDLLKKAYPGLGTGRVLSYRALEKLMRVTDNPDFFSGLPMQTAQAVLKAAAGDFKNWLAALRTYKKDPSKFLGKPRMPGYCKSEKKTFTITNQDAVLYPVYRDGEGTSGKGGRVYAGMELKLPGIRQRLKLVHLPKDALLKEVKVSPYYGKYVLTMVLEVKEDPEEKGMEEMPHMAGIDFGTDNIAAIVTTDRASRVYKGGAVLAKNRLFHKEKAKAVRILTKGKRYAHASSRHLDFISRKHDGFVRDVMHKVSADIVRFCKEHRVGTIVIGANPLWKQRTDMGKANNQNFASVPHSLLRRMIMYKAGGAGIKVIIQEESYTSKADVTSKDEIPVFGKPGSEKAVFSGKRIKRGLYCCADGSLVNADCNGAANILRKAVPDAWKDVSDFRFLAYPEAVTYQGLNRCRAAV

SEQ ID NO: 6641 - protein, 418 aa, unknown
  TnpB Polypeptide
MLNLYGSASNAAGQTPRGRQRQRRTSRHHRTVQTLRQRNQHPLLARQRLQEHTEVRRQRRTLPRPESRPRPDGKSRPASHPPSRRSRQIWRRTPRKNEDTSQPEFTSDTARYDKRAATYHDDHVSLSTVDGRIEADYVLPADETDTPFEEYLNSDEWEFRTSTLHYKPFEDEFWFHIGFKRIEEDTDNTQTDAAVPEHNTVLEIDLCVKNLAVASTGTFWTGDELDHWHREFQQRRSDLQQTGAQEAHRTLQRVGKKETAYYKQYLHIVATEIVEEAVQQDCSVIAFEDLTDIPKRAQGGTLHHRWRFNRLYEYVEYKSKVYGIDVEELERSPQAKTVPAYYASQRCSSCGFTHEDNRPTQEHFECQKCGYENHAGYNAAKNVAVRCCRRLLRRNQTGGDGGAPVDVALNGGTMTVNV

SEQ ID NO: 6642 - protein, 372 aa, Flintibacter sp.
VEYSYKFRIYPTKPQEELIQKTFGCCRFVYNYFLTRRKDVYNTTKKALGFYACSKELTQLKQINLWLTEVDSYSLETSIKDLDYSFKNFFRRIKTGEVPGFPQFKSKRSSRKSYRTRNLAKDNNIRFEGRNIRLPKLGLVKCRVSKEVKGRILSATVSQNPSGKYFVALCCTDVEIDPLPGTGAVVGLDMGLKSFAITSDGVECPNHKFLAKSIRKLARLQRQLSRKSKGSKRRAKARVKVARLQEHVANQRQDTLHKLSTQLVRDYDLISIEDLAPKNMVKNHSLARSISDASWGEFRRQLEYKAAWYGKQVVTVDRFFPSSQLCSACGAQWTGTKDLSVREWTCPSCGAIHDRDINAAKNILNEGLRLLA

SEQ ID NO: 6643 - protein, 412 aa, unknown
  TnpB Polypeptide
MKQQVKQLTKEDYKNLKLLSHIAKNLANEAIYNIRQYYFSENKYLSYPKNYVLLKNSINYKMLNSNMAQQILKEVDGSFKSFFGLLKLAKKGKYKFKDIKLPKYLPKDGFTTLIIGFVRINGNKLVIPYSNSFKKEHKSIKINIPPKLVDKKIKEIRIIPKSKARFFEIQYIYKVEEVQSNVDKNKALAIDFGINNLTTCVTSTGQSFIVDGRKLKSINQWHNKENARLQSIKDKQGYKNKYTSRQLTNTRKRNNRVNDYMNKTARIIINYCLENSIGNIVCGYNETFQRNSNLGKKNNQTFVNTPFGILREKIEYLCKLYRIIFIKQEESYTSKASFFDKDDIPVYNDDNPQKYEFSGKRIKRGLYQTKKGMLLNADVNGALNILSKSKVVDLEVLYNRGELDTPIRIRIA

SEQ ID NO: 6644 - protein, 381 aa, unknown
  TnpB Polypeptide
MLIYEYKVHGNQAQYAAIDEAIRITQFIRNKALRLWMQTRGINRNDLQCSCSQLAKDYDFVARLNSQARQAAADRAWSAIARFYKNCREKKPGKKGYPRFQHDNRSVEYKQTGWRLEPDGKHLTFTDGCGIGTLRLVGNKGQRIEEYPVKLIKRVRIVRRADGYYCQFAVEAQRHIEHVSTGKQVGIDLGLKDFLTTSEGDTIATPRHLRKAEKRLKRLHRRLSRTQKQSKNRAKARKKLAKAYLKVNRQREDFARKTANALISSHDLIAYEHLRIANLVKNRKLAKSISDASWGRFLRWLTSYGRVHDIAVIAVEPAFTSQDCSACGTRVKKSLSTRTHLCPGCGLVLDRDHNAARNILARALELFRTGGQSETGLSQKR

SEQ ID NO: 6645 - protein, 583 aa, unknown
  TnpB Polypeptide
MSSVLGPTQTTPTATAPAAGRAALRPYQEEALQAVLAAVQRGARRLLVVAPTGSGKTILGARVPEYTPCVMSRGTPTFTHELPFRVRLADAHTLNTRLNHAARQIYNACLSEALTRGQLLRERRRYRRALHLPHGHPDRAILFKTARASCGFTDDNLQAYAIRIRRRAFMDHLDTHVAQKLGTRAFTAANEYLVGHRGRPRFKGRSQLKTVEGKSNDAGIRWRDDHVEWLALSLPAIIDDRDPVTRHARTAPIKFVRIVRRRIRGRDRFFVQLVLEGEPYRNPAHQIGHEELGVDLGPSTVAVVGETHAVLVPLCPEVVRKHRVVRRVQRHLDRQRRANNPNNYLPDGQTKPGRTRWTISHCERQTLDRLAELHRREAARRKSLHGKLANQILSMGTVIRKERDDLRAWQREFGSVVGLRAPGTFLAILRRKAASAGGRVIEFPTETTKLSSICHCCGTVTEKSFRERVHRCGCGITMQRDLYAAFLARFVGADEALHADQALVAWPGAEPLLRAAWSSATTPARGRLRPSAFGPASAVRSQSGLPAEEGTANADTRDVVASSSLGGENPGQVAVVALGTPRR

SEQ ID NO: 6646 - protein, 560 aa, Methanoculleus sp.
MLPEEVFNLPAIGEKAPDFEAGTTHAPMKLSDLRGQRVILFSHPADFIFLGQGGPLRKRGGIAPKRVALSPRAATLNDGGQQSIYRMALRVVSNYLHPSKMAYRILDLLAYHAKSMYNVGVYNARQHYVTYQENLRAMQALRPDLISKVEILVGSYLPFTRKKTFPHKDLCNYALSKPNENFSLLHNDVAQQTLRSVEEAYKSYFALLKRYAAGELEHHPGSPKYLPKDGRYKMAYPRAHLMIRNGFVTLGISLKFRKQYGLTGKELTFPIPPCIRPHQIREVTILPVNNGIVYKIEFCYSIPSRPKDLDPNQYLAIDLGLNNFATMVESATGTAVILDGKYLKSINRWYNKETAGLQSIKDKQEIQRITTRQARLLVKRDCKIHEAMNRYVTWIVRYAVERKIGTIVLPRWDGIKDKINHGKRGNQNFVQIPFHKFRQKLKSKCEVLGVRFDDTHSEAYTSQVDALALDPIRKPPYGRTRRVKRGLYQSATGTLINADVNGALNHLRKVAGDSVVARIISSGRVNRPVRIRAAFQPPTFAQIKLQPCDLNPIPVASPVR

SEQ ID NO: 6647 - protein, 189 aa, Scytonema sp.
LGNQTELKRRQRDDAYVETVVNQACRSITFQAKTLGVESLVESIRSTKKLSKRAKNRLDKWEKGTVADRLTHWSARHRTQICWVSAAYTSQIDNRNGTLLGTRCRDQFFTFDGVVFQSDHNAAINLRHRMTDSAITQFMPYKQVQAVLLERTARFLNAMGLTLQDAVDRLWLDIKHTQCEAFQKLLHGL

SEQ ID NO: 6648 - protein, 396 aa, unknown
  TnpB Polypeptide
MLKRRAFKFRIKSPQKHREKFQQFAGAGRWIANRGLELRAKAYKENGKTITYYEQNNELVALKEEFPWLQEIHSQVLQQALKNLDFAFKNFFRNVKLGKTPGYPRFKKKGVRDSFRYPQGVKVEGSQAYLPKIGWIEFRKSREIDGIIKETTILQEGNAWYICFSCEIEVPDPVPAPLEEDRAIGIDVGLKVFATTSSGKENILDQVANPRFLKKNLSKLKYHSKQFSKKVKKSKNSSKARLKLSKLHAIVKNQRNDFTQKLSTQMIKSHDIFCIESLDISSLLAKGSKERSRAISDAGWRSFLHCLKYKAEECGKHIVEAGKYFPSSQLCSSCSHQKEMPLELRKYECPNCGLKIDRDYNSAIVLKAAGISVLKPVELPQIRGALKQESLAFRRE

SEQ ID NO: 6649 - protein, 368 aa, unknown
  TnpB Polypeptide
MKYTISIFLVTTEADELKFRTLQDAYHWACNQIVSSVVEDRCWNRVALHHLVYKKIRKNSLLGSQMVCNAIFSVCKAYKAKTIGQKEPVPVIQFRKNRSVHFDKRTYSIEGNILSLYTLEGRIRIPMRMGAFQEAYFSKGIPTEAELICRKGRWYFNLVLEFPDPPKTEKTQMIGVDLGENVLAAISSGKLYGGGKVRHERSKYLAKRRRLQSNGTQSSKQLLKKISGKEARRMKHINHQVSKRIILEVIQQEAGIIVLEDLIHIQARIKAGKKMRTRLHRWAFRELQTMIQYKAEGQGLRVLYVNPAYSSQECSHCGCLGVRQKHHFKCLCGHQQHSDLNASRNLCRFAQSIGRATCAVNRTQVAAP

SEQ ID NO: 6650 - protein, 459 aa, unknown
  TnpB Polypeptide
MPSSGQLLGHEEREPISPAIPEEGIYEVKYKNTRTNVVRLLPNGYQERKLRKLANISAKLFNEVNYERRQQFFQQHQVDFQGTCKKYYEKYKDILGVNAQQVINKNNEAWSSFFSLLKLKKQGKLPPHMNHVSPPRYWKDRETKKRKLLLVIRQDRYVVDEQNHKLILKDFGLEIEFVGRLRWYGKQGRLEIYYDDTENACYASIPVEVGVEVTRTGKKSKWVVRGERKSIQVKAPKEIKVASIDLGINVLASVVVDDGTWLLYKGVRAKEDYFYFQKKIAEVQSQADEARNIGEYEAQEELNREKRKLFKKLTRRLLHLYRNLASHLLKQLHDQGVSTIYLGYPYNIAQEKGNKFTVNLWSYRKLVNAIELKAQEYGMKVYEVVEYNTSRYCAHHDVEVNRHPRGVVSCPKGHKLHSDLNSALNILKKAIGTVVSTMKKPLSFLVLHNGVAPVKGCNP

SEQ ID NO: 6651 - protein, 361 aa, Thaumarchaeota sp.
  misc_feature (83)..(83): Xaa can be any naturally occurring amino acid
  misc_feature (361)..(361): Xaa can be any naturally occurring amino acid
VKAVKGVKFAYQLTPQTLGLLSTFRGMVNDAIRICLAEDIKGRLKLRNRIYKDFLERYGVASSFPYCVAEVAWSIVKKHKRWXKRLMFKMDAASFSLDHSILSLPFRKGERVFVPLQYGEYQRSFLMDKTLKRGSVTMTESSIVIAFSKEGPTREPSRRVGYDLNEKSIVGSDGTYHDLSEVARLHTLYGIRRSRFYERHPHDRRLKKKFAGSTREKERVNQALHRVSTLIVEKARANNEAIVLESLKGIRYAHQKGNGEGTAKRRRIALWPFRQLQSYVDYKARWAGVAVEYVFPAWTSKTCHICGYVNRKLKVTERSWLCPNCGARLDRDPNSAINIERRGKIRCLGEVHSGARGTDEX

SEQ ID NO: 6652 - protein, 383 aa, Actinomadura sp.
VPTCTQEKILREHCRHARFVWNLAVEQYSYWRPGRRSAPAFVEQCRQLSEARAEFSWLRAGSAVVQQQALKDFARAMAGFFNRTHGRPTWRKAGRDEGFRIVGVKPGDVRRLSRRMGEVKVPKVGWVRFRWSRSVPDGFKSFRVTCDRSGRWHIAFAYIPSPIGAPGNGANVGVDRGVAVSAALCTGELLYAPVLSIKQAERLLRLQRRLARAQPGSKRRTRLKTRIATLQARATDRRRDWVEKTTTDLARRFDQVAIEDLNVLTMTRSARGTIDAPGSNVRQKAGLNRAIRSNVWGVLARRLEQKAPERVVKVNPAYTSQRCSACGIVDRDARESQARFRCRSCGHVGNADVNAARNICRTAAGYCGGSTGSPPAVGRGDEP

SEQ ID NO: 6653 - protein, 554 aa, unknown
  TnpB Polypeptide
VPRTPNRSAISRAPWPARPAAARRARAGPATSGPRPWRCAAGAGRSGGSRPPRPCRGRRRAGRRAGWSPRSRRSRPTRRSCRSRTPRPASRPRRCRPDAGRSRPSHRSKGSGGVGPHGYRGSDRRLERDRRACRTRWVGLGHDRCSFRVGWPAGCKGRGRVRRTYKFRLRPTARQHVALEQCLASHRELYNAALQERRDAWRLRGISVSYGDQSAQLKAIREARPDMAAWSFSSQQATLRRLNRAFVSFFRRAKAGATPGYPRFKSEQRFSSVEWPKDGDGCRWQPETRRMYLKGIGHLKVTVHRQVQGTVKTIHVRRVGRRWMLVLSCDQVPARPLAPTHAAVGVDLGIASFVVTSDGEQVPNPRWGRVAAARLAAAQQVLARKQRGSRNRRRARETVAARCRKLANQRRNFHHHTARALIARYDLLVIEDLKIRNMVRRPAPRPDPDRLGEFLPNRAAAKSGLHRSIHDAGWARFVSILRAKAEAAGRVVIDVDPRHTSDRCEACGHTAKENRASQAVFSCRGCGHTRNADEHAARNILRAGLARLAANPAA

SEQ ID NO: 6654 - protein, 443 aa, Halobacteriales sp.
VQSLQLTHTLSFGLDIQTGSGDDLQTGCLEARRIRNEVNRLDKEGWEWDDIKSPVVDNATHVKNTSQLIVEKALGEIETYHDHKDDDWGRPYPYIDGLYPMVMNHGEGYRVFVEDGDTVRFRISSEPYNHVKGKLRGSPDHFDRLRTAFTDDEWRVGTAEVVHKHDEWRLHVTVTHEHHRVANKTDADTVVGADVNEDCIALAAMGRDGDIQDSVVFEYPSVKEQRHEFFTKRKRMQKAKQTSCEAVVQTEERDYVHDCLHKVSRQVVEWVSQFSAPVVVFEDLKDMRDSLDYGTRMNRRLHSLPFAALQDMVSYKAAWDGIPCAEVDPEYTSQRCPRTECQHTERANRHKKRFRCVECRFQDHADRKAAVCVVQEWFDQQHENVPSLETLPRVKKVRRAASGRGGATDSHGALFASGVDRHGTSAQPSQGAREELKSVASTV

SEQ ID NO: 6655 - protein, 502 aa, unknown
  TnpB Polypeptide
VAARFAVPEGWSVQAFSFALDPGPGQLQVLSRQFGGRRKAFNWAVRQLKNDIEAYHAGTAAPDAAPPSFYGLRQQWNLAKNDECADRETGEVWWPQISKEAFADGIRGAVDAYWRWQKSREGAIAGKRVGFPRFKRKGRDDDRFTITTGTMRVNPDRRSVSLPKVGTVRTCENTRRLQRLIAIGRARILAVTVRRKGTRIFAIFRVLVSRRVSAPARPDSVAGVDVGVRRLATVAAPDGTILEVAENPRALDRHLAGLRRACRARSRRKEGSIRYREANREIARLHRRIADIRADAISKLTTRLAKTHGTVVVETLNAAGMLAQKGLPGARARRRNLADASLGRSAGIWPTSRPGTAAAWSRRTGSTPARKSARPAACRPRSAGPSSGTARAAGPITTATTTPRSILPATPRRDGRPWDQSGPASSAEPTVRQGTAPLVAMKRRTQTPTGVPHELQPQATQRQRLTLSRPRSAGEATAGQGRIRCQTSRSSATATARPPRPS

SEQ ID NO: 6656 - protein, 402 aa, unknown
  TnpB Polypeptide
VTILGQRIRLNLNDVQETRMERCVGAARFIFNLGLARWQEVYKAGGKPNWRTINAEVNARKSGDLAWLREIPWAVPNNALQDLNIAFSNFFRRVKSGDRKVGYPRFKSKKRDKPAFAIEGRAIIFDGKRVKLPKFGWVRTRQELRFPGKILSARFTKHAGHWYVSVQVEVESSWVYPHRCETQAVVGVDLGVKDLAVLSDGTRVPAPRILRRLEAKLRMLNKRLSRRLRGGKNWFKTKTQLGKLHERMANIRKDVTHNLTARLVRDFRWIGIEDLNVKGMAANSHLVKSVMDAAMAEVGRQLSYKAPLAGSEVVVADRWFPSSKTCSDCRVVFTGLKLGIKSWVCESCGSVHDRDGNASINLRNLALAQRDRAQCPGSAGFVEVDGAKLPAGWESSSYANQE

SEQ ID NO: 6657 - protein, 394 aa, unknown
  TnpB Polypeptide
LLATKCVTQSYSGGLDDLLAECLANTYNAIHYSEEHGIDNRRGMKGFYQTLKAINLPSCYKVASITRACAVVKSRKKSERRGIKALNLKPLKPMVCIISGFFVTMKGRLFIPLRRDIYFDVQLNQHTQEMLANKKVRSLTMTHDSLSFCYSEDIEPAPVKRVYGVDRNEKNITFGNREMVVGVDMTKVVKIRQATREIIGSFKRNDIRIRGKLARTYWKRANHRTDQILHAATNSIVDSAAKNRAALAMEDLTGIRKMYRRGNGQGVDYRFRLNSWSHWKAKQMIEYKAAWNGVSVIQLTKSETHGSSSTCSACGEKLRNSAKDDVAHTRMLWCSRCKAWMDRDVNAALNLSARGRSRFDRSLPSRSGEEESRSQHDDSSYPPIEREKGRQVKR

SEQ ID NO: 6658 - protein, 386 aa, unknown
  TnpB Polypeptide
MEDSRIATNEAVRAGLQAGVTSRNALCKLAYKDFREEHPNMYAQHLVSAFEVAAGILKNHRRRLKRLRTGQAVRPPYVRRLMMKAENQAYKFDRKEGVVDLPIRAGLHVKIKLVVSQYHRCYLDDEAWSLGSLTLLPDRLVVAFRRISPKSHAPKSVLSLDTNERSLDGVFVREGSSNAVRAEFPDIAIIQQRHHDRRKRLQKKKSNDRRTTRTLCRREGRREHHRVEYRLHQVANTILSFAKIQESAIVLEDLAGIKHKKNKDMNRRLSMWPRRELHRIIEYKAEDDGIPIIKVDPRYSSRKCPICGITQHSRMGTEFECECGWHMDRHINASINLLQTASSKGLAGGLRFDPGAFRHDAMMILYEPAMAARSEPNGMSEEGVVP

SEQ ID NO: 6659 - protein, 119 aa, unknown
  TnpB Polypeptide
MWRANDVQDRVTLQAHRHGMRISRVCAWGTSKLAFDGSGRTDRRSVYRYVHGEKKYNYSLCTFTTGKIYNCDLNAAYNIGARFFLREYAKLPGCPVLPKTPQRTLATLKELCYSGSMAA

SEQ ID NO: 6660 - protein, 401 aa, Frankia sp.
VQLRYSFRLYPSAGQRESLARAFGCARVVYNDALRARETARTAGLAFPKIGGLSKLLITEAKKTPQRAWLADVSAVVLQQSLRDLDAAYRNFFDGLKGKRPRMGAPRYKSKRDSRQSVRFTANARWAITPGGKLRLPKIGDIAVRWSRRLPSTPATVTVVKDSAGRYFASFVVETRPEPVLAQAGREIGVDLGLTHFAVLSDGTKIASPRFLRRAEKRLKKTQRDLSRTQRGSRNRAKARVKVARAHARVADARREFHHQLSTGLIRENQAVAVEDLAVRGLARTRLAKSVHDAGWSAFVAMLEYKAARYGRMFVRIGRFEPTSQVCSVCGVKDGPKPLAVREWTCTACGSTHDRDVNAAVNVAKAAGLVVSARGARVGPAPVPAPRGEAGTHPTLTPTGA

SEQ ID NO: 6661 - protein, 372 aa, unknown
  TnpB Polypeptide
MLKAIIYELKPTEAQKQAFRKACGCARYVYNKALAYKKERYEKDGVSLGKYDIDKMITVWKQTDAFLSDCPIHALQQKVHDMCDAFGNMRKTNAGFPKFKKKGRCRETFRVPDPCKIDYGSWTCRIAKIGTVKIYRGHNKQIDKIHSYTVEVKPALDRYFISILYEDNAGRRTTPDKATHCGIDVGIKTFATLSNGEVFENQKHLKGNLRKLRVLQRSASRKFKKGVKTEAQSNNWRKVQKSIAKLHLHIANQRKDYNDKTSRYIADNFYHVSVEDLSVKNMQKNHKLAQAISDVAWSQFITMLQYKCCVLHKIDRFYASSQTCYECGYKNEEVKNLKLRHWTCPVCGTPHDRDLNAAKNIDREGLSLLSEK

SEQ ID NO: 6662 - protein, 481 aa, unknown
  TnpB Polypeptide
MLLTYQFELNVDEKTSIILGHLCYAASKLFNVGNYERKEYQSLGFEKMPDWYDQKKRLKDSFWYKSLPSQTSQDVLARLNEAWKSYFALKSRYEYRKEKGHLKEYEGEPQAPYYKKDGSHTNFKYLQNSIKVIDNQIRFSIPKKLKEHLEEKYNIKKDFFYIPLKRTFSIIKQVEFVYMDKNRYKVYIIYEEDTKPLKEDNKHYISIDIGTKNLLTVYGNNGSSFIVSGQSLLNTNYYFSKRIAYYQSKFDKCYPHHKKGVSTNRIKHLYELKNKRINLILHRASRYIVNYCNNHDISKVIIGDVTGILHQKKEFNSNKDKHRYNQNMRAICFARIYEYLSYKLKQVGIELVIIDEAYSSGCSPKSLTVSKDYYDKTKRKHRGLFVDGNDIYNADAVGAYNIMRLFRQEARYCFPIPLKGLSNPRREYISVTDQFLNEDYINWNGKAGNVGISGRNYPDGYELVELINQSITQMLGNSIAE

SEQ ID NO: 6663 - protein, 481 aa, unknown
  TnpB Polypeptide
MLLTYQFELNVDEKTSIILGHLCYAASKLFNVGNYERKEYQSLGFEKMPDWYSQKKRLKDSFWYKSLPSQTSQDVLARLNESWRSYLTLHYKWKKRKENGLLKEKDGEPQAPYYKKDGYHMNIKYLNGQFKIIDNMIRLSIPKKLKEHLLEKYQIEEPYYYIKLKRKFDKIKQIEFSYVSKNRFKVYVIYEKPQANIKKDNKHYISIDIGTKNLLTVYDNKGSSFIVSGQSLLNTNYYFSKRIAYYQSKFDKCYPHHKKGVSTNRIKHLYELKNKRINLILHRATKKIVDYCLSNDISRVIVGDLSGLLNVKRKVVNSDEKHRYNQNIRVVCFNKIYSLLFYKLQLNGIELIKVNEAYTSSCLPNSKDVSERSANKTYRVKRGLMKCHNYIFNSDSVGAYNIMRVYRQISGNQFETPLKGLSNPTREYIPVTDQFLNEDYINWNGKADNVGISGRNYPDGYELVELINQSITQMLGNSIAK

SEQ ID NO: 6664 - protein, 376 aa, unknown
  TnpB Polypeptide
VRIVEYAYKFRLYPNQEQEKLIARTFGCCRFVFNHYLALRRDAYEQTGETLNYYACAKDMTGLKQHEETLWLKEVDATALQSSLRDLDDAYQHFFRRVKIGEKPGYPKFRSRHHHKQSYKSKCVGSNIKVLEGVVQLPKLGLVKCRISRSVQGRILSATVSRSASGKYYVALCCRLDQDLPKLPSTGAVVGLDVGIKSFAVSSDGVEYPNPKYLRQSEKKLARLQRQLSRKTKGSENWNKARIQVARLHEHIANQRRDMQHKLSTEIVRQNDVICIEDLAPKNMVRNHKLAKSISDASWGEFRRQLTYKAEWYGKQLVAVDRFYPSSQTCSECGAQWPGTKDLKVRHWVCPECGAVLDRDTNAAINILHEGMRLLA

SEQ ID NO: 6665 - protein, 313 aa, unknown
  TnpB Polypeptide
MYEESNKPNQCYLKLYKNNDWVWIPIAMRATDVKYITKYWSHCEKSAPSLEKKYGKYFLRFAFVEKVELSETEIQDRRICAVDLGLNTDAECSIMTADGTVLARKFINFPSEKDHLYHVLNRIKRKQREHGSNSAAAMWRYAKALNNDIAKKVAAAITEFAVLYSVDVIVFEHLSFTGKKHGGSKAQKLSMWKRNSIQDYVEHKAHRCGIRISRICAWGTSKLAFDGSGALKRDETNRALATFASGKQYNCDLSASYNIGARYFVRELLKPLPAMVRSQLSANVPDVEHRIQVTLATLKVLYPELKKLSTQAA

SEQ ID NO: 6666 - protein, 397 aa, unknown
  TnpB Polypeptide
MVKKVQETKEKEEKKTLRKRDIKATKSQYKYLKILSGSYRYVYNFCVKYHKDLPTKKDKRQFLLNSNSPFRPMWFDREYILNKGQEDEFKFKISYDHFEGAIIDFHSNLKSSKARQKSQRSKGNRSGNITMKRKKDKFNSFRIKHRDWKNGFPFSWKTEFITKADISKDTRIVYNRSKKKWSIIEYKTNIHVDNQDDFCGNIASLDPGVRTFQTCLSTSGDIIYFGHEYRKKLLGYSNRIDSINSMLTKGIKRKYNLLKRRQRLYDKITNTSKELHYLVIKELLDNNDIILLPDFNIKSICKSLHHKPTKRALYGLGHYRFKQRLLFKASQRNKKVLIVNEAYTSKTCFNCKGITRCKDENFKCGHCDLVTSRDLNASKNIMYKNIDLIIGHIAHYA

SEQ ID NO: 6667 - protein, 441 aa, Hydrogenivirga sp.
MSRAKEETKFLLTYKFRAYPSALLEYKMESWLYILCDLYNHVLEERKRAWKEEKKTITYSHQQNSLPELKRKDPFLKLVHSQVLQDCLRRVDNAFQKFFRKEAKYPKKKKLSRYNSFTFPQIWMKQKDKLTGDLKLTEVIKLERKNNRFAYLYLPKLGKLKIRLHREIDWVKAKTVTVKREPSGKWYVCITVESELEQILREAQEKAVGIDLGVKNLATTSEGEFIQHPKFLQKLEKRLKREQKKLSRKEKGSNNWERQRKRAAKVHEKIRNARRDFLHKLSRHLVNNYEYISFENLNIRGLVQNSSLAKLILDAGWGTLITFATYKAVTAGARVVRVDPSYTTQDCSVCGFRVPKTLAERLHRCPECGTVMDRDYNASVNILKKGLAHLTGGRVGATRTYACGESTGGAPSEGGVSHPSLKQESHTGLPGGSNLYRKLRP

SEQ ID NO: 6668 - protein, 431 aa, Hydrogenivirga sp.
MSRTREEIKFLLTYKFRAYPSVLLEYKMENWLYILCNLYNHALEERKRAWKEEKKTITYSHQQNSLPELKRKDPFLKLVHSQVLQDCLRRVDNAFQKFFRKEAKYPKKKKLSRYNSFTFPQVWMKQKDKLTGDPKLTEVIKLERKNGRFVYLHLPKLGKLKIRLHKQIDWTRAKTVTIKREPSGKWYVCITVEVELEEILREAQERVVGIDLGVKNLATTSEGEFIQHPKFLQKLEKRLKREQKKLSRKKKGSTNWEKQKERLAKIHERIRNARRDFLHKLSRYLVDSYDHISFENLNIKELVQNISLAKLILDAGWGTLITFATYKAVMAGARVVRVDPSYTTQDCSVCGFRVPKTLAERLHECPECGAVMDRDYNASLNILRKGLAHLTGGRVGATRTYACGEGSGGAPSQEGVSHPSLKQESPRGSPG

SEQ ID NO: 6669 - protein, 413 aa, Desulfurococcales sp.
MRGSTTHLAWVAPQGEYMLTLKAQGVLIEGSLEELREELYFTQRVTQHVIDALWELDKLPRINQAHQMFYKILREQGFRAHQAKQIYKYALSLVKSAKNNGGRKPVLKKLSVRLDKYDARVDLENQRVVVKLRDKEFKIKLLHNRDYIKKFAGRKWYEVIISIDRQGRIWVSIPFRWEYKPYKPRRITSPDINLRKVAVHNGRNIRRIDTEFIDALSLKIHAERIQRKHPRMWRYSERILARIRGLHRRSRNIVVDWCRKFAKYIVLKASRTRSTVVLEDLEKLWVNASRKSSSLADKLSRLAYRRLQYAIITKAIEHNVPLVFVNPRGTSTTCPKCGAKLSYNHRLAICRKCGFVADRDTIGAMNIYIRALRSMWGSQGSPLNAPAMNDETRQSGRTKDEPMTVHIKSYTNI

SEQ ID NO: 6670 - protein, 195 aa, unknown
  TnpB Polypeptide
MLKVDSFNYSLNNGILSLPNKRGRRVLIPLQFGEYQCSFLSGETLKRGSVTMTDSTIVIAFSKETATIDPLRKVGYDLNHNSIVGSDGAKFDLSRVARLHTEYSVRRSEFSERHPNDRRLKKKFMGSRREKERIKQALSNVSKQIVDKAVKNREARVLELLKGIRKAHQKGNGRGRDSRRRANLWPFRTLQQQIA

SEQ ID NO: 6671 - protein, 353 aa, unknown
  TnpB Polypeptide
MRSQKLRLKLTKEQERLAWWYSKVSRNFWNLLVDIDKRNNKGEFDEILNKNGNKTYYSKFYDREIYHLNQSDYLNLAKVVVANNYEEDNENWSWYYQPNQSFIYNFLSRELVKIRKRNKGGLSFRSIDKIQPNFNVRCDVSANKKRPSRIYLKDSGKLQIPTIGDVRFGSVRADFNLSCKKQVANISFDGKYWYLSYIEDVEVQVADLPDYTDGVGIDLGIKALATVSDGTIIPNIKTFRRVRILNKRLKRLQRKVSRKYCINKCNKHNKTKNILKLERQIKLIHRSLRNIRINHIRQFVSDLVKKQPQYIAIEDLNVKGMMKNKYLAKDIANCSFVLFTLSENSLSERQRND

SEQ ID NO: 6672 - protein, 191 aa, unknown
  TnpB Polypeptide
MNQLANKKIAQLKSSLSERGLYTSPLLVSVYNKRNRRIKDSLHKLSTHLVNQFVSHKIDTVIFGHNLGQKQDIKLGGVTNQNFVQLPFYQLISLLKYKCELQGIRFVTTEESYTSKCSFLDLEEISKQKEYVGKRIKRGLFQTKEGVQINADVNGSLNIGRKYLTKLGLYTDALHEELISHIVNPKRICLV

SEQ ID NO: 6673 - protein, 376 aa, unknown
  TnpB Polypeptide
MQLSETVKLKLNKEQLQLIQHAMDEYICAVNNTVSSAISGTNISKFGSGDIVADIPSACKNQAIRDAKSIVKKHYKACHKTVLKNRKLIKQHKNIRVTAPNLPIVRRKVCYWNNQNFEILDNGNIKFPVMINGKSKRIEVKTTMMNRQLSLFKNTHLGTMRIVIKNGVLVANITYEVPESISLTDGNIMGVDLGIKCPAVSYINNGKIKFYGNGRKNKYMRRFYNYQRKKLQKSKKIDVVKRINNKEQRIMKDIDHKISHDIIKEAVAHNVKVIKLEQLQNIRSTTRTSRKNNHSLHNWSFYRLAMYIEYKAKLAGIEVLYVNPAYTSQKCPVCGKEHHANDRHYSCECGYNGHRDIVGAINICNTTEIVGNRLSA

SEQ ID NO: 6674 - protein, 580 aa, Streptomyces sp.
  misc_feature (448)..(579): Xaa can be any naturally occurring amino acid
MAPSFVASGPSGAAVRTRLKHLSPGDEEVLRLVGAYLGSLASKDLKACCRDALEHSGDTWAARKRELTPLSSSRWAGAITKASHDQWALARRCQLAYIQNLEAGIRTLTHRLSLPIGQKGSKAVPGGYRSRREWHAKSRRLRVLEDRLAVERAGREAGIVHVVRGGKHLARTRHHLDMAGLTEGEWRRGWEAERWFCQADGESGKRYGNGTIRVSPDGEVSLKLPAPLTHLANAPHGRYVLASRVTFPHRGTEWADRVAADRAIAYRIHLDTGRDRWYLTAAWQIPPAPVIPLAAALAHGVIAVDMNADHLAAWRLDVHGNPTGAPRHFFYDLTGTALHRDAQVRHALTRLLNWARTCGVKAIAVEDLDFAAEKTREKHGRKKRFRQLISGMPTGRLRARLTSMADQTGIAVIAVDPAYTSRWGAQHWQRPLNSKNRKTTRHDAAAVXXXXXXXXXXXXXXXXXXXXXXXXXXXXXXXXXXXXXXXXXXXXXXXXXXXXXXXXXXXXXXXXXXXXXXXXXXXXXXXXXXXXXXXXXXXXXXXXXXXXXXXXXXXXXXXXXXXXXXXXXXXXXXXXXXXXG

SEQ ID NO: 6675 - protein, 402 aa, Streptomyces sp.
MRAKSARVCDALPTFGAVKLVVQMKLLPSPEQAAALEATLRACNRVAAHVSRTAFETGVTDRNGLQKLVYADIKATFGLSAQPAVRVVKKVVDAYGALAASLKAGRLGAPGARRYRKAIGSPVTFRPDAAQPFDDRCLSWQMDARTVSIWTVDGRMRGIRYTGSPDQLKTLAEYRKGESDLVQRDGKWFLIATCDIPDPEVYEPADWIGVDRGIVNLATTSDGTNHQGRRLNRYRRWQARKRAELQARQSRSATRRLARRAKKEHRHATHVNHRISKEIVSVAQRTGRGIAVEQLDGIRDRVRLRRDQRGTLSTWPFHQLGQHLAYKARRAGVPFVEVDPAYTSQRCPRCGHTERANRPERHRFSCRRCGLAGPADHVAGVNVRNRARSAWVFVTAPVPAPA

SEQ ID NO: 6676 - protein, 426 aa, Streptomyces sp.
MRGAEGAGSVAGVKLVVQAKLLPTPMQAVALEATLRACNEAATWASRVAFEKDVKKNFALREHTYGEIKARWGLGAQAAQHVIKKTCDAYATLKANLKAGNLGRPGSKRYRKAVEKPIAFRPEGAQPYDDRMLSWQIDQRRVSIWTTAGRIKDVAFTASPEQLATLALYRRGESDLLCRDGMWFLIATCEVPEAEPNTDPVDFLGIDLGIVNIATTSDGEIMAGRELNRIRVRERKLRTKLQRKNTPSAKRRLKKRRRKEARRAKDINHKIAKHVVAEAERTGRGIALEDLTGIRERVRLTKPQRATHHSWAFHQLGQFIAYKARRAGVAVVHVDPAFTSRTCAECGHIDRANRVSQTWFACRNCGFVDHADRNGSRNIRARAWELWRRGAQSTAPAPSPERTRRGGAGRKRSITASDARCASPSL

SEQ ID NO: 6677 - protein, 390 aa, unknown
  TnpB Polypeptide
MKTSYQYKIKPTKEQALKIDSTLEMLRYQYNYLLAQRFEWYEQNRCPIDRCPLICHLPGLKEQPSYYNQKASLVQLKIDRPWYKSIHSQVLQAVPKKVELAFDRWLKGDISGKKSGRPRFKGKGQYKTFTYTQFKQHHFIKNKITLSKIGDIKVIVHRPIPDGFDIKTVSVTKKADGYYVTLNLDDKTVPTIKPDFNPDNIVGIDVGLIDFYVASDGSIIAAPKHLRKAEHKLKSAQRKVSRRKKGSNRRKKAIQKLGRQYKKVADTRKDFHFKVVKSLLNKYDVVAVEKLNIKGLAKSRLAKSVNDAGWGQFLSILTVKAENAGLKVITVNPNGTSQECSNCGHKVKKPLSQRMHNCPNCNISLCRDLNASINIKARGTHALKAQLMSS

SEQ ID NO: 6678 - protein, 384 aa, Nodularia sp.
VLVLEYKIKGTKSQYQAINEAIRTTQFIRNKAIRYWMDAPRETNINKVALNNYSTALRQEFKFVEELNSMACQSATERAWSAIDKFYNNCQSKSPGKKGYPRFQRENRSVEYKTSGWSLNPTKRRINFTDKKGIGEVKLLGKWDIHTYPIKLIKRVRIVRKADGYYCQFAIKTEPLSESRIADGEVGLDVGLEFFYSDSNGHHEANPRFLRKAEKSIKHAQSQIYKKEKGKNQRRKARQRYARKHLKVSRQRNEHAKRIARNVCKANALVVYENLRIKNMVKNHCLAKSINDVSWGLFCRWLEYFAVKFNTKAVAINPRMTSQKCSDCGTMVKKSLSTRTHKCSCGCEMQRDVNAAKNILNLVSRATRAALLPSGLANPKGSTS

SEQ ID NO: 6679 - protein, 351 aa, Hadesarchaea sp.
MWKSYRELHREWRWRVGWAQQEGDERWLRKLMKREPQPPFSNWLRHKVPIWFDYRIGSLELSEIKLSPRVIRISTLKRGERITVLLNPAKYHLELLERGKIKSFQIVKRGKKFHVHVKVEYEVQDQPVRAVREVDLGIRRSTATVLLHPNEPLCRDDFSVTRDVEKVQRLNELKRRVAKLQRLKEWEALKRIRYKRRRVAEYYDRLTVKRIAEISNGCVVAIDHPKGIKYENYRGNDKRELRRLMTNWVYGRIIRYMQEECAEQGIRAVAPDERWSSMTCHRCGSRNTERMTQSVVHCYNCGLTYNANFNGAINTGSSILAEPRSRWAEVDPAQTSDESLEERDEAGSPCL

SEQ ID NO: 6680 - protein, 423 aa, unknown
  TnpB Polypeptide
MARKKKSKNDVPMQPLTARAKVVNLTDQDALLLSILGFSATKLWNVANHHRRDIWNETGKIPGFSEQCRILKTNRWYKLLPSQSSQEILGEQDDSYRSWFSHRKNGDLKARPPGFRKKETISTITFKQNAFEMLPDNQVKLKLPKTYDRQEVILKYQLSPDTALGKVQQVKLLYEKKTGDWYLYFTHKVQIEYREAGNIIALDLGIVNIIAGLTTDGFSFTVPGGELLALDRYFHKEKAKCTKSTSRRCIELNAKWGRQRKHYLHVLTRWLVNQAIAHDVSTIVVGELKGIRTDKDWGDLGNQKLHAWPFSKIITLLTYKAALAGIRVVKVSERSTSTTCPVCGKRAKNARVQRGLFMHCGLTLNADLVGAYNILQRYLRETGLVLPIRSGVVGALARPAVNLFVWRKTTPKGHKQGTFRQAA

SEQ ID NO: 6681 - protein, 391 aa, Bacillus sp.
MLVNKAYKFRIYPNKKQIELINKTIGCSRFVFNFFLGKQKEKEVYWYITEELKQNGQVLSNNWKGKLFNKYEVVKSLPELKKHYPFLKEVDSIALQKSVEILADSYVRYYKKQNKSPRFKSKKNPVQSYTTKYTNGNIDVIENYIKLPKLGKVRFAKSREVKGRILGATIKINPSGCYFVSLSTESEVKELPKTNSAVGIDLGLKDFAILSDGTIYSNPKIYRSLEKKLVHAQKVLSRRKIGGANWLKAKRKVARIHEKIANARKDYLDKISTEMIKNHDIFGMADLCVSSMLKNHRLAKAISEVSWSHFKNMMEYKAKWYGKQVVTVSKNFASSQLCSCCGYKNKDVKHLGLREWDCPSCSTHHNRDINAGINLKNEAIRLLTAGTAGIA

SEQ ID NO: 6682 - protein, 416 aa, Peptostreptococcus sp.
MYLTVKQQVKQLSKEDYKNIRELSHVAKNLANEAIYNIRQYYFQEGEYLNYEKNYVLLKDSENYKKLNSNMAQQILKEVDGSFKSFFSLIKLAKKGKYSFRNIKLPKYLPKDGFTTLIIGFVRLKGNLLTIPYSNQFKKEHSTVTIKIPQILLDKKIKEIRIIPKAKARFFEIQYTYEVEKEQRNLDKNKALAIDLGINNLATCVVSTGESFIVDGRRLKSINQGYNKQNAILQSIKDNQKYGKRPTNRQYRIAEKRNNKVNDYMSKTARIIINYCLKNNIGKIVCGYNETFQRNSKLGRINNQNFTNIPFGKLREKLEYLCELYGIEFKKQEESYTSKASFFDNDEIPTYNNDNPKEYVFSGKRVKRGLYKTKKGLILNADVNGALNILKKSNVVPLEGLYTRGELDTPIRIKVV

SEQ ID NO: 6683 - protein, 421 aa, unknown
  TnpB Polypeptide
MRQMNQMPYIIGAVIRIYPSNKQKRIIAKNDGAARFIYNRLVARDRELHALGRVKRYCEPVAARISYLKSLGTNLSDLKAAYPFLKDKEIDSLAVCNAKQNYQAAWNNFMKVPGTSIPTFHKKGYSKSYQTNCQYPSGCTDIKKGSVRMLDRKHVQIPKLGSVKFKDSGMLQHIFARTSETRIGSVKVAMDSCGDYWISMQIGSVCPFHNAMPAVGHGVGIDVNVKNLYTDSDGNEAENPKFYTKTEKKLAKAQRKLSRRMERAKKDGRSLCDAKNYQKQRLKTAKISRSVSRRRKDYLNVQSKRLVESQDFIFTENLSSKAMMKDNDYAKYIADVAWSKFITMIKYKCGFYGRIFGRVPAKNTTQMCHVCGFILTGDSRLSFNDRSWTCPDCGTFHMRDHNSAINIKNSGTRLYLPDSAL

SEQ ID NO: 6684 - protein, 368 aa, Herbidospora sp.
VAQIVKRAYKYRFYPTPEQAEELARTFGCVRLVYNKALEERTRAYRLEGRKLSYAESSAALTAWKRTEELSFLNEVSCVPLQQALRHQQMAFSNFFARRAGHPVFKSRKKSRSSAEYTRSAFRWREGNLTLAKMDGPLDIVWSRPLPEGAKPSTVTVSRDAAGRWFVSILVEEKIAPLSPAGSMIGVDVGISALATLSTGERLANPRYEASDRRKLARAQRALARKSPGSGNRARAKLAVARIYARIADRRRDYLHKVTTRLVRENQVIAVEDLTVANMVKNRSLARAISDASWRELRSMLAYKASWYGRELLVVDRWFPSSKLCSACGVLTALMPLDVREWSCGCGAAHDRDVNAAKNILAAGLAER

SEQ ID NO: 6685 - protein, 447 aa, unknown
  TnpB Polypeptide
VNDRRSICSEDKRRKIRESKKKTLHKRANQVVRCFELKIKTKRLSKIQKEQLAKIFLEAKRFYNHVLNIKRSEDIPLRLINPTHIKSVKHFDKNKDELESQLTVLSSQQKQAIIARMISNEKAIHSLIKGGYQKFGALRFKSEVNCIPLKQYGNAYKFKDDHKVKIQGISKCLFIYGTEQFWKYNCDYANANLLRKPDGYYVKVTCYIDKSKINLPKSNGQELGIDFGCKNNLTFSDGTKLNCQIEESDRLKKLQTKLNRRQKTRSNNRNKTINKIRREYQKATNKKHEFANQLHHKLKLYDLIVIQDEQLSNWQKTYRNGKKIQHSCLGLIKSKLISSPNVVVLDRFIPTTKFCSNCGKIENGLKLSDREFTCSECGIIDDRDIHAAKNMLNIFHLVANHLNEQKLLPSERGKVKFAEFKTAIDGKVFPDVSQNDEARRYQVFSLV

SEQ ID NO: 6686 - protein, 465 aa, unknown
  TnpB Polypeptide
MRVYPRYPRREALAAGREEVARSRSSALRLCPDVSCYDAIRSYARFVRLIGTRRTFEFRIKPSPPQERRMEQALEACRFVFNWGLEDRKCLWQYCQVSTTFEDQSSYLKDLKRIHSSLQEAHAHVLQDALKRVDRAYQSFFKRCRSGARPGFPRFKGRSVYSSFTFKEWGNGASFDGKRLLLSKIGRVRIRLHRPIEGEIKTCTVKRRADGWYVLFSVVLQPVWRSIDERDPVGIDVGIQTFAALSTGERVPNPRLLTANANRLRAANRKVHGRAPGSVRRRKAVQHLALEHQRVARARRSFHHCVANSITTRFGPIYVEALRIQALVKNRRLSEAISDASWGLFLRILSSKAESAGSAVVAVEARGTSQECPECGAAAKKRLSDRQHRCTNCGYTADRDVAAARVILGRGLGRPVGEGAGSHRLPAIREPASQTTRRSVTPLGPDKSEVMVGARGIEPPLSCDN

SEQ ID NO: 6687 - protein, 522 aa, Oscillatoriales sp.
MKGRSNQSKMDQDNASTLTPTSPIDLSAQSSATAESVVPSKKTTSKGKSNLCDSDTPTQRLSKTSAPDSTSKDNDCKPYWSDLCAEISSRLLLPVETSKADSDLNFLSLWQNKTVAESWFSQILFTAQNPNSQPIFLPFFTSYLVECTVSETTARKSRKIRLFLSTEQKAILKQWFGVSRFIYNTTIKYLQQPGTKANWMSIKTDILNGLPDWAKPVPFQIKSIAIKDACAAVKKAKADFKKTGKIYSCKFRSRKDTKQSLYIPKSAIGSKGIYYTKLGRSKLKEALPKDFSDGRLTLAYGEYYIVVSEEVQPRQTDNQGRVVALDPGVRTFMTFFSESSYGWLGNDSNLSIQKLCFRLDKLTSKMSKTNSRQRKRFKKAADRLKSKIQHLVKELHHKIAKFLVDSFDVILLPSFESSLMVSKSRRKIRSKTVRQMLTLSHYQFKKHLEWKAWEQGKVALTSINEAYTSKTVSWTGEVKKIGGSRVIKDASGNQMNRDLNGARGIFLRALVDTPWLHSFLAV

SEQ ID NO: 6688 - protein, 419 aa, Moorea sp.
MIILEFKAYGKNSQYSAINEAIRTVKFVRNSCLRLWIDNKGITKYDLNKYCRVLAKNFSFANELNSTARQAAAERAWSSIGRRPRYANARFYENCKKKVPGKKGFPRFQKHCRSVEYKQSGWKISPDKKSFAKRRLCRITFTDKKGIGKLKLKGKWDLWRFDKKQIKRVRIVKRADGYYVQFCVSVDNKEELKPSRKTIGLDVGLKEFYTDSDGNSESNPRFYRTGEKRLKFYQRRVSRKKKGSANRRKAINKLGRTHLKISRQREEHAKRLARCVIQSNDLVAYEDLRVRNLVKNHCLAKSINDAGWYQFRKCLEHFGKKFGRVTVAVNPAYTSQNCSECGEVVKKSLSTRTHTCKCGCQLDRDHNAAINILNRALGTVGHTGTWIIDPNALGEDTSTLPDSGLAEQVTSLIKESPFF

SEQ ID NO: 6689 - protein, 390 aa, Burkholderiales sp.
MILTYQYRVVPTKSQHRALEALLESQRLLYNAALEERIGAYRRGVSRKYIDQTKALTEWRRSDPEASFVPVALQRATLKRLDEAYNGFFRRVKLKRAKAGFPRFRGKGWWDSFAFSEFKGISFDGTRLRFRGMPGALNVHIHRPLPQPARIRSCTFRRDTKGWKVGFAVDIPVTALRDGRRSVGVDLGIATFAALSDGGFIPSLKAARRAERRLRVAQRSVARRQRNSKSRCKARMRVARCHAATARRRSNFLHQASARLIRDYDLIAVEALSVQGLARGALARDVHDASWSKFLSILRYKAERAGVRLIEVDPNNTSQDCSGCGMRVSKHLHDRWHDCPHCGLSIDRDFNAARNILDRAGVGPGLHNVADRGKRAGGNLRLTDVRCQLA

SEQ ID NO: 6690 - protein, 471 aa, unknown
  TnpB Polypeptide
MKRTIKIKANCSNNEDEILLIGTIQRNIKNYVWSRYSGIGSLLKQSGWTIRDELLQENLLSNKIPKTLSRVAIEKSASTIKTNWTITKKEVKKAISQNENLTKDDKRYLYLCLKHTPTLYGILNYKKIDYNTDYLKDLKVDVHRLNNLLRRYIRRYKTKSYTNKANVILTSNLYKFNPNNNEFSFTGKKKNSQMVITLIGNIPKLKGTLELVKNQKSNQYYLHVPLDRIISKKEMTAESEILGLDVGIIDLITLSNGSVYGANSAELFYTLSDNLVNKNRSRLFSYKRKLEERIVIEQDLSKKLLLEQKLKNLENNNLGFKKRISKIGRYKARIVSHINYELNKMVKEENIEEIVREDLNWVSKKKNTSRKQQNRFSTWSKGILLERLSIKLAEKGIKETIVNPAYTSQVCCKCNHLGSRNGKTFKCSNCNLSIDSDFNASINIKKRKFIKEINIDTPYKEVKKYYENLPV

SEQ ID NO: 6691 - protein, 417 aa, Thermosphaera sp.
MRVVELTRTVVVPSLVLTRKKLEVFRELEEMYKSVLVELVDYGFKNNISSFTRLKREKYHELRNKYPQLPSHYIHTACQDASTRIKSFNKLKKRGLARSEKPGVKRVSIWLDDHLWKRAGHTTILIHTHRGWIPVELAPHKQYWRYINSGWSMRTQPKIRIDYKQRRLLVYFVFTKTVNADESNAKHVISADINEDNVTVKVLDRVLIFKTGIKSITVGYAKYREIAQSVKGNRHVSRAIHGRERARKRDIRLKIANIIANTARSLNAVVVLEKLPEQCPRNMIRDVENPVLRHRIYQAGFRSVARDIEEKCLERGVPVVKLDPRNTSSTCPLCDSKLMRGNAPRRLKCLVCGVEMDRDVIAVLNLEKKYLALKGLMPLASMPSDPAPEVAVLPVKEWARRKSLDATNKHKLMRMSI

SEQ ID NO: 6692 - protein, 418 aa, unknown
  TnpB Polypeptide
MEYSPKYRLFPTTGQRESLDWTRDIVRQVYNHALHEFNKIPEDEGTLRQRVWQVRDELPALKQQWTDLQQVYSTVLQKAVERIRTNINNLGKLKAKGYDVGSLNWKKPTEFRSFTYRQSGFELDKKSGPRDRAILKLTKVRGETLEIPIRLHRDLPEHDAIKEVTVKKEPTGAWYASFCISTDKPEKPDPKNIDTEDTVGLDLGIRNFIHDSDGRSVDRLDLTDDRERLEREQRSLSRKQYASNNWQKQRRRVAKIHARMSNKKRDYKHKIAHFYATEYDAVFVENLDVRSMLEGAGNARNTHEVGWSDFRQILEHHCDKHGTHYVEVTPHGTTKECAKCGCESEKPLWVREHSCPSCGFELDRDWNAALNVNSRGLEKLGVVHSKATPVETATAVDTHCVSASRVCRGNLDRLSDGV

SEQ ID NO: 6693 - protein, 367 aa, unknown
  TnpB Polypeptide
MVRRSRKIRVYPQNKQKLNSWFGVSRFFYNKTIALLKDSTIQANRFDIQKDILNDCPQWAKDIPYKIKQMAIEDACQAVKNAKFKYKQTGIFNTVKFRKKKNRHDCFYVPKQAISESGIFKTKMEKFIISEQIGEITYDCRLLFDKGRYFLIVPESRAIKQPENQRLKIVALDPGVRTFITYFAPQVQGKIGEHDFGRIYRLCYHIDNLVSKMVKAKCKQKRNIRKAYHRMLYKIKDLIHELHCKTAGFLCKTFNTIILPAFETSDMVTKLKSKVARAMLGWSHYKFQQFLKYKAEEYSCNVIIQNEAYTSKTCSYCGNIQNVGSKEYWKCNKCNLSHDRDINGARGIFLRALGDSPCGLETNYCNC

SEQ ID NO: 6694 - protein, 319 aa, Synergistales sp.
MSSLLSAGTVSIASLTGRQKVRVCLDSRNLGVLLSGKIAGGALLVRSRRGGLSLVLVVDVPEPESIPAADVLGVDMGVVNIAVCSDGTAFLSDRVESARQRYARARKSLQEKGTRSAKRRLKKIGARERRFRRDVNHCISKQIVAHAEGTKSAIALEDLSGINARVTVRKNMRARRLGWSFSQLRFFIEYKAKLHGVNVLAVPPAYTSQTCPVCGHVDRKNRPSQDAFVCRSCGFEGNADYVASLNIRTLGIKILESMMPQPAQSAGLLLGACQCARNVAPSIEATVDNIEGAPLKGTDVNLNTSVPGSYKPAISIVGN

SEQ ID NO: 6695 - protein, 411 aa, Catellatospora sp.
MPAGCWWPPRTGPPRSTPRACRGGPRCVSRCSRRLRSIWAADRASRTGERKGRAVGFPRFKSKKRALLSFRVRCKTSTAGRASIRVGDHAPRTVTLPGIGTVAVRQDTRRLRRMLAKGRAKILSATVTHRAGRWTVSVTCEAADLHAAACHQPRTPTTGWVGVDRGLTAFVVAATADGTPTLRVDDPPRPARSAMVRQRRLARAVTRKQRGSRNRADAAARLGRHHARVAAIRRRFLHEVSNKLVKTHDRLAIETLTITGMLTNRHLAAAVADASWGELARQLTYKQQWHGGHLCPVDRWYPSTKTCSACRTVAAAVPLGQRVFTCQACGYRADRDLNAAVNLAIWAEQHHARVRDLPAGGPVTKARRGKGSGPRTRADETGPDDAGTAPTPPGVRHGRPRRALSHNSTEL

SEQ ID NO: 6696 - protein, 406 aa, Meiothermus sp.
MLKAFAYRIYPTKPQLKDLEEHLNRTRELYNAALQERRDAYKKAGKTVTAFEQMRSLALVKEGRPEYRRIHAHVLQGVITQLDRAFQGFFRRVKAGEKAGYPRFKSKDRWNSFHFKQVWDNSRDNWFGPGKPVGSNRIRLPNIGDVRIKWHRPLAGRPKTLTIKRDGEHLSTGASRGPMALHWYAVYVCEVEPQPLPATGGEVGIDLGVNPNFLVTSDGEFVPAPHYYRKTEAKLRRQQRVVSRRKRGGGGRKKAVAALKRLHRKVRNQRKDFHHKTARKLLEANDVVYHENLSVKAMSRSRLSKSILDMGWGQFLNILYGKAAEAGRRVVSVNPAYTSQICSGCGHVQKVPIGKPYECGACGLVIHRDVNAALNILRMGQGLPLGESDEVAHARRPQKPPALAVG

SEQ ID NO: 6697 - protein, 438 aa, Meiothermus sp.
MCYTVFVQTLTLRCTLKPTPEQAAALAASPIGEHLAATVRLFAQGCNHALRVAKERGEFRRFQLHHLVYRDLRAMGLSANLAVQAIARVGRKKGSRAKFYQPTSCTFDPRTLSLRGESVSLTTTAGRLVIPMKLGNYQRGLLKRAKSVQGGVLTQGPKGKWYLNLILRLETPTPPTGGGRVVGVDLGQKVLATLSSGVQFSGGSLKGNRLHYLAKRAEVQSKLDRPSERTRGTRRLWERLTGREARFVNHTLHTPARRIVDGLEPGDTLAIEDLTHLRSRTAKRGKKERHLHNLWPYARLRSLLEYKAALRGVQVVAVDPRHTSQECPRCGHTAKENRKSQALFRCAACGFQHNADWVAAHNIALRAGPQALPQGIVARRAGSTGMGREGSGIAAGRCAPNLCKPARILRVSSLHRFSSESPRLQPWGGLRIHSNQTL

SEQ ID NO: 6698 - protein, 547 aa, Meiothermus sp.
VQRLLDRDELARYVPDPETGDPAYIGVQKGKTTLLAVLEEFGHMIDHQAFFRGQYASRAAQQGQGPLVRWWEIVWETQAVRELRSLRRAFYTFDIEGRKKVDRGFVAYLLQPDEIFARSYRQFIAVYSGDPRLLKAIGSPKPPPEAPVFRHGEEGGGERSSLNGQKRDKLSQGMSLLSVRCKLIPDASTAEKLTRTVNQFANACNYTLQVARRDNLWNKFALQRAVYRELRERFGLSANLAVRAIARVGKRKGHKVGGFKATSVDYDQRILSVNLDTEVVSLSTVDGRVKVPMQIAGYQRHLLRTAKSIQGGQLVRGRDSWYVHLWCEYDDPPAMTPNGFLGVDLGIVNIATDSDGETYSGSHLNSVRHRHRRLRRKLQKKGTKGAKRRLKKLSGKEARFSNHTNHALSKRIVAKAQRTGRGIAIEDLGGIRDRVRLRRPQRAALHSWAFFDLGQKLRYKAERAGVVLVQVDPRNTSRTCPACGHCEKLNRVSQAQFVCRSCGLVGHADHFAAVNIAVRGWAAVNRPYLGEAESAIRHNPVPGSPRL

SEQ ID NO: 6699 - protein, 375 aa, Meiothermus sp.; identical to SEQ ID NO: 2

SEQ ID NO: 6700 - protein, 412 aa, Meiothermus sp.
MCNTAFVQTLTLRCTLKPTPEQAAALAASPIGEHLAATVRLFAQGCNHALRVAKERGEFRRFRLHRLVYRDLRAMGLSANLAVQAIARVRRKKGSRARFYQPTSCAFDQRTLSLREESVSLTTVAGRMLIPMKLGNYQRGMLKRARSVQGGVLTKGPRGKWYINLILRLEVPTPPTGGGRVVGVDLGQKALATLSSGVQFSGGSLQGKRLHYRAKRAEVRSKLDRPSERTKGINRLWARLSGRERRFVSHTLHTLARRIVDGLEPGDTLAIEDLTGLRGRTTKRGKKERHLHNLWPYARFRSLLEYKAALKGVRVVAVDPRHTSQECPRCGHTARENRKSQALFRCQCCGFQHNADWVAAHNIARRAGSMGMGREGSGIAAGRCAPNLCKPARILRVSSLHHPPSESPYQTA

SEQ ID NO: 6701 - protein, 226 aa, Okeania sp.
MLTNWKKQEDLKFLTEVSCVPLQQGLRHLQTAFTNFFSKRARYPNFKKKRNGGSPEFTKSAFKWKDGQVYLAKCAEPLAIRWSRQLPPGCVPSTITVKLDPSSRWSVCLRINDTRDLKLKPTKKQVGIDLGITNLLTTSDGETFANPKNLNKLHKKLRLAGKSLKRKTKGSNNYQKARLKLARIHAKVKDSRLDYTHKLTTQLIRENQTVVVEDLAVKNMLTSSPA

SEQ ID NO: 6702 - protein, 473 aa, unknown
  TnpB Polypeptide
MYMADTTVLSKDRYPGLFGHLEGSAELSKCLYNAALFRIRQVFTGWDKEDRSENEKEVFREIAVMKEVYPDIKAGRVLSYRALDAVMRANRNPDFFAGLPMQTAQRILKEAVSTFKGWLSAVKGYKKAPGRFTGRPRMPKYLKNGVHTFYISSQDAVLYPVYRDIDTPDSCADRTEGPACRGYAGMELKLPLIRERLYLPHIHRDSVLKEVQVKPYYGKIMLVLVLETEEVSVSASRPHAAGIDLGTDNIAAIVSTDHASRIYKGGAVLSENRSFHKKRARAVSIMTKGKKHRSAESARLRRLSLHHDGFMRDMMHKISTDIIRYCVEHGVGTLVIGTNRGWKQGADMGKANDQNFVSVPHDRLRKMIGYKAAKEGILIVEQEESYTSKADITAMDPMPVYGEEKGEPVFSGKRTARGLYACSRGYSVNADCNAAANILRKAVPGAWEGTEDFRFLAHPETMGFKALQRARTA

SEQ ID NO: 6703 - protein, 427 aa, Phycicoccus sp.
MRRVVRVKLLPTPAHSTALTDTLRVCNEAACYVSQVAFDARDSQGRTGTKFILQDVLYAQIKTRFGLGAQPAIRVISKTVDAYTTLRSNLVEGNLGLPGTPGRTKAESKPVAFRPDAAQPFDKNCLSWQHDTRTVSIWSTHGRLRGVRFVGQPSDLRLLGGNKIGETDLQNVHGQWFLIATLTLPTTPVVEPAAGFLGVDLGIVNIAFVGTDRGVAVADWSGGAITLRRKRNLALRAKLQANGTKSATRLLKKRSKKEARFVTDVNHQVSKRIVTKAQRTGHGIAIEELTGIRERVRLRKPQQVALHSWAFAQLGGFLTYKAEAAGVVIIPVDPAYTSQTCSGCGYMSRLNRPNQAEFACRSCGVLLHADHNAAVNIARRGAADLAELNAVAISQPGFDPSEPRRSLRRLTQKRRRAANPALQGQGR

SEQ ID NO: 6704 - protein, 578 aa, unknown
  TnpB Polypeptide
MQLTEQFHLPGEYHDACDRLTTLVEKHTRRLLAKKYWSDDHLDAISGHTGQSYTYIRDDNHDAFGNVDEYVYSRFKRCVYHRVTHVLDAHTDEFQAFQFVTNTVSERKIRRIGWRRLRTRLYDEDSPYIEWRVLESVVDQLNTYYDTHGQFPETYTELVETPEPNGTLPYAPDKGDYHIHELEIEDGNVRFMLNVPDSLSPESYHDWSKHELRFPTHSRLRRMLNVGDVKAPTLHASEHGYTLDVPVSIPEQEGETVADRVLAVDLGVKKQATAVVLDNGDDGTHEQVSPPQFIDHPAKDKLFRLKADAEGINDRLAELRRQGKGHTERFEHLLSEFRQTRRKERRLREQIQHDVANQLVWLAAENSCETIVFESLGQIDSPDTGGAIAWSISSWARGSLLDCVEYKAELLGIEFTMENPWGTSRYCPRCGERGRTVNAPNDHEESRHGGHFHCPECGYECDRDVVGAVNVGRKHLSEGKMEEANPAEYSSVGNHASFPSPLEGARSAGVQSATDQRKQELASGRQTHLSQHCSSSLTVTRRETATGGLHQTHGSNTGQQSPSGSITQYVLASTTDCG

SEQ ID NO: 6705 - protein, 327 aa, unknown
  TnpB Polypeptide
MDRGLRPKWRSLGYSQAIQDVTDRLYKSYQAFFSWCKKRSSGKKSPPKFKAFRKYKSFTLKQAGWKLDQERGVVTIGKNQYRYNNSRNIEGEVKTVTIKRDNIGHWHVILSCDLGESYKPEKVAPMTGKSAGFDFGLSCFLTSSENEQIKSPEFLKQSLEQLKAKSKQLSAKIKGSKNRYRARKIVARLHQKISNQRQDFHFKLANNLIHKYDHLFFEDLNLDAIKRLWGRKVSDLGLYQLLQRIEFKAEEHGKIIRKIDRFYPSSKTCSKCTRIKEDLALKDRRFECQCGHQLDRDLNAAINILTVGASTAGLDRVTRELALASVA

SEQ ID NO: 6706 - protein, 326 aa, unknown
  TnpB Polypeptide
MPKAGYVFPSMYRTGMYNQTGEYQAQVKVFIRNTWDWITVDLRKSDIDYINRHCKTRKKCAPTLQKRGKEWFLDFPFKEKTTLCNTPACDQTIVAVDLGINTAATVSVMRSDGTILGRYFCRLPKETDHLMHSINRIKKAQQHGNRKTPRLWAKVKGINHDISVKTAEYITDIAVLYNADAIVFEHLDKTGKARGSKKQKLKMWRSQEVQSIVTNKAHRLKMHISHICAWGTSRLAFDGSGRVLRGKESERTAGNYSLCEFQTGKIYNCDLSASYNIGARYFIRELLKSLPEKARLRVEAKVPQCSKRSTCTFSTLINLNAVLASV

SEQ ID NO: 6707 - protein, 424 aa, unknown
  TnpB Polypeptide
MQRRKATFKLYPNASQQQTLEDWTRLHCELYNAALQERIEAYRKAGISISYYDQQNALPEVKEFRPEFAALGSHALQQTLRRLDLAMQAFFRRVKNGQKPGFPRFKSAARFSGFSYPDPAGWKLFQQGNRGATLRLGSGKKAMMIRARGKHRFVEFRPNDVTILRKNGEWFASVTLRVPETACARQRTGDQQRGIDFGVSDWATFEDGRTVENPRFLRNELPKLAGLQRQRARKKKGSCRYRRLTKQIGRLHQRIGNLRKDFLHKETTQLAQSCALIATEELMPKNMSRSAKGTLEKSGKRIQQKAGLNREILSASFGMAHQMLSYKAEEAGTRLHLANTRQLKPSQRCCACWELTPKTLADRLHICQHCGHTMPRDQNSAAVVLIDAHTPGTGVAARSKPLARRRAKPRSKTRETPTTTSIAV

SEQ ID NO: 6708 - protein, 423 aa, unknown
  TnpB Polypeptide
LAGASFTHKTSCVSQNVGMLTMTYAYKLKPTPQQVLDIEESLNVCRKVWNYALRERKDWCASRKSPVNACSIRGEYILSADEPFPDYHVQAKRLTEARKHIPELANAHSQILQQTLRQLDRAWDDMHKRGFGFPRFKKRHNLRSFVFPQLGKNPVDAVGVKLPKIGKVVWHYSRPIPEGFVVKQARVVRKASGYFVMLALQLDVSVPNVPFHGHPIGIDVGLEYFLSTSDGVQVKRPRFFGKLQRQLKLLQRRLKTKQKGSTNEAKLRHKIARLHERIADTRKDWHFKLAHQLCDQGDSVFVEDLDFRIMAKGMLGKHTLDAGLGQFVNQILPWVCFQRGVFYGKVDPKGTSQQCPDCGAKVSKDLSVRIHHCPECGSIKPRDMAAAQVICTRGQRGIENVCGVEVTGILVTGSSQLAMKQKA

SEQ ID NO: 6709 - protein, 384 aa, unknown
  TnpB Polypeptide
MIKTHKIALRPKREHVAWFYQQCGYAKFAYNSALSDFKAELASDTFLSMYDLNKRFNQKKKAFDWTKSQDQRAAMYAVHNLGDAIDNWQSKRAKFPRLKKRGCGHSYTTDEQSVRMEGKRIKLPKIGWVKTFEVLRFKGKIVSVTISRTAHRWFASVSVEVQPPLHRCPASAEFVDWFASHTDIGTPNQIDRSIYPTIGIDVGISTLATLDDGTKYENPKALERYERKLKREQRKLSRKEFLSKNWYKQKRKVERLHYRVACIRKDAHDKATTEILIGVSGVGIERLQITKLLKNSNLSKALSDAALGGFLEKLKTKATSLGIPIFQADRFFASSKTCSMCGHKKDALTLSERQYHCSNCGTSIDRDVNAAINLRTLAAGYAES

SEQ ID NO: 6710 - protein, 370 aa, unknown
  TnpB Polypeptide
MRKSYGFKLQSQNNVIKLGNMIDDMWQIHVHILVLSRRYYRMFGKNVSAYRLNAHVAKLKRRTKPHWADLPSQVIQDVVLRYGKSQDAFFQNIKDRKAGLTTRKVGRPKIKPRQKYNSMTFTQAGYELQGNRIKINCIDTWFSFHHHREIEGLIKTITIKRDACGDYWIYFSCEHVDDSKPKSKTGKSAGFDYGNKTFLTSDAGDKIQSPQFLKQSLKTLRSLNKALSRKVKGSGNWCRTTRALARLHRKIAKQRLDWQWKLADELCTAFDTLCFETLNLDGMKRLWGRKVSDHAFYQFLQILEQKCAKHGKKLVKIGRWTATTKPCSDCGFHNKNLSLSDRQWTCLACGSHHDRDINAAINIKRAGLVA

SEQ ID NO: 6711 - protein, 546 aa, unknown
  TnpB Polypeptide
MIIQSKYTKIFHSKDLTRQKYDKLYNFAVLIRNHKNIVSQYVNENLLHYLDCTKFQFTKEMRTQFKGSVPSSFDGQLYTQVFTCYQNKFETIQRKLVFETSTFKGFEYYKRDTKKHKKGDFKRVIVEKKQTKLSSCLTYLVRYGNEGTIAYIKSNIDKCDDNKRDFYNNIIRCCDKFGFERLYALALSKRKRIINKYTIKPIEFRSLTFSGRCRKKKIIDYNSRFGSVINSFITLSGFSRKSFDIPVSFNKGWHGNMKDYRKNSPDYEYTITFNEKVRQVNIHLCKDDERYIPEPNGRTIGIDVNCKHNLFSLSDETTYDYDRKLVNDFCKLSIEIDRLKGKNKEYKVGKRKQQKLDTLKTKMIKSEQQLIANMCKTLKSQGVGHVVMENLDNGFGKCYIKDKYNEDINYNRKVKFLGLSSLKQEVEHIARKYDIAVSTVQASYTSKMCPICGCIEDGNRPNQETFECVECGHKDNADFNAAKNIRDRVLVTVLRDKLLKQLDNGAFKPRPLRREKAKEVLLSFRRSLPKVGSECIESNNTTFEYV

SEQ ID NO: 6712 - protein, 331 aa, Deinococcus sp.
VDKFALQQSLRDLERAYQNFFRTAKQSGKKLVGFPKFKKKQSSETYRTQFTNNNIQIGEGRIKLPKLGWIKTRGQPNIQGKILNVTVRRVHEGHFEASVLCETEIAYLSAAPKYAAGVDVGIKDFAIVTDGAKFKHHANPKFYRAAMRQLRKAQKTLSRRKKGSARYGKAKTKLARVHKRTANKRQDFLHKLTTSLVRKYEIICTEHLKPSNMVKNHRLALSISDAGWGEFIRQLEYKATWYGRLVSKISPYFPSSQMCHDCGFKNPAVKNLAVREWICPNCGETHDRDENAALNIRREGLVAVGMPDTQNAHGGREVCGLRSENHATSVV

SEQ ID NO: 6713 - protein, 432 aa, Dolichospermum sp.
MLVLEYKVKGKQDQYNAIDDAIRTTQFIRNKAIRYWMDAPQELKIDKFALNKYSTELRSDFTFAAELNSMAVQSAAERGWSAISRFYDNCKCKKSGKKGYPRFQKDCRSVEYKTSGWKLHKTKRRITFTDKKGIGELKLLGKWDIQSYELKDIKRVRLIRRADGYYAQFCIGIDVVDIQPKTGNEIGLDVGIESFYTDSNGHHEPNLQFLRKAEKSIKHSQKRIYKKVKGSSGRKKARKLYAKKHLKGRGEAFAYKNYATNRQLNSANASPVRQRNEHAKRIARNVCKSNDLVAYEDLRVSNMVKNHCLAKSISDASWYLFRQWIEYFAVKFDKIAIAVAPHYTSQKCSSCGVIVKKSLSTRTHNCSCGSYLHRDTNAAINILNLAKNRGGHPQINATGVEATTLLGVNLEKPSFDGECRIPVSLDRGVSIV

SEQ ID NO: 6714 - protein, 411 aa, unknown
  TnpB Polypeptide
MKLVEQHIIDRQDPRFAVIDPACFASKNLYNAALYILRQSFFDHESVPPYAKLAHTLKDTPEFRALPAKVAQWVVRQVCGAWDTFWKAHSAYQQCPDKFTGRPKLPHYKPKSDGRNLLVYTRQAISRPALKAGWICPSQLGITIQTKQKEVQQVRIVPHASHYVIEVIYTVKPTSCAANKLNPQWVASLDLGIDILAAVTSNKKRITPFLVNGRPLKSVNAYYNKDRAAIQAALPPGQYTSHRLTALTDKRNRKIKHYLHWASRYIVDWMVSERLGSIIIGHNVGWKQEVDIGSVNNQNFVAIPHSTFIHMLTYKAQLAGIKVVVQEESYTSKCSFLDLEPIRKHAQYCGRRVMRAEFISAQGQPIHADINGSYNILRKGLPSAFARGIQGVVVRPVRVQPVRKLVNWHCL

SEQ ID NO: 6715 - protein, 411 aa, unknown; identical to SEQ ID NO: 6714
  TnpB Polypeptide

SEQ ID NO: 6716 - protein, 471 aa, Anaerolineaceae sp.
MTSVRRIQLALTDEQKAILDGQSKICNWLYNHLLEKANSLRFEYRVTQSEDVARQLYTQRGLRNMIPDVKTYNKFLCTVHSSPLKNTALRLSDSIQDYQDGKHGRRKGKQTGWPHFRSWKKKWFSLLYDEPKKGFLVEGKNLKVSLGQTENGKRIRVALKLLESFPSEMVGRIRNLRITRDGSKRYFAVFTIAEKVNVSVSDINKKPKIIAFDPNHKNLVYGVGTNGNAVEIHNLAHLKRMDTRIDELKSRRDKCKRKSVKVTRDDGSYFWKSSRKWAFFNAKLDEAYRIRREQTKTFLYTLSNQICKEYDVICMGDYTPNGGGITTKMRRSMNNQSLIGRFKKTLEWVAFRSGKLYIEYNEKGTTRTCSECNFVVKNGISPDVREWTCPNCGYYHIRDENAAKNGLVNTIQDKNLLPCSGHIPAVSERWVWWVTSSGVQSALRGCDGLVIPNTAKKLNRRNANSSIQMCV

SEQ ID NO: 6717 - protein, 395 aa, Actinomadura sp.
MRFRLAPTPAQEAALLEHCAHARFVWNLACEQHGYWRPGRAGAPGYLEQCRQLTEARREFGWLAAGSQTVQQQALRDFAQAMRNFFAGTHRRPTWRKSGRHEGFRIVGRRGVQWDVRRVSRRVGLVRIPKVGWVRFRWSRTVPDDVRSFRVNRDRAGRWHVAFAAIPKPVSGPGTGRVVGVDRGVAVSAALSTGELLSVSGLREAEAKRLLRLQRRLARAKLGSNRRRRVKTVIARIKARETDRRKDWVEKTSTDLARRFDVIRVEDLKIRNMTRSARGTVDAPGRNVRAKAGLNRSIHAGGWGLLVTRLEQKAPDRIEKINPAFTSQTCYACGHRAAESRESQAAFRCRACGHADHADVNAANNIAVGRTVTARGGRPVGGPANREPHLVLSSA

SEQ ID NO: 6718 - protein, 374 aa, unknown
  TnpB Polypeptide
MLNKMFQYRIYPTKKQERQLEAILEECRWLYNHLLEKRRDTYEQTGKGLTCYEQQATYSILKQERPSLDMVHSQVLQNVAVRIDLAFKAFFRRCKAGENPGYPRFKGRHRYTSITFPQVPSGCSLKEGKLFVSKVGKIKIVLHRDLKGTPKTCTIMRSSTGKWYACFSCEVEPERLEDTPHAVGIDVGLKTFATLSDGQQIENPRFFRTEEKALAKVQRKHAQLDKGTAQRRTHRKVVARVHERIKWRRQNFTHQHSRKIIKKYGVIVVEDLTVNRLIHNHCLAKSIADASWSAFFSQVSSKAEEAGRHLVKVNPAYTSQTCSQCGHRQKMPLSERIFDCPCCHIHLDRDLNASLTLLRLGLQSLGLSLEAPRL

SEQ ID NO: 6719 - protein, 418 aa, unknown
  TnpB Polypeptide
MIINKAYKAELKPNNKQRNALARSAGCARFAFNWGLAQRIELYKNEKKSTTAVNQHKDLCKLKDEKFPWMYESTKCAPQESLRDLDKAFKNFFRGIKSGQKVGFPKFKSKHKGKDSFRISTGAVYITGSSIKLPLINAPIRLKEKNYIPVKGVKFNSYTISKEADKWYISVQVEENLLNPVMHPEEIVGVDLGIKTLATVSDGTKYANPKNLNKLERSLKRQQREVSRRKKGSSNKRKSVEILQIKHKKVSNCRKDVIHKMTSSLVKTKPKILVIEDLSVKNMLKNHKLSKALSDASFGEIRRQLTYKALWYGSEIIVADRFFPSSKLCSSCGQIKEDLTLKDRVYECGCGNILDRDLNAALNLKRYGEFHRSLSKHKACGEERSQSVAGLRTAEDGALQRSRNLTSNLSHVGRFVQV

SEQ ID NO: 6720 - protein, 385 aa, unknown
  TnpB Polypeptide
MKVIRTTKIKIKGSNKAPEIIKNYLLALNWLSPIAFDSKEMNANRLAKAYYPALREKFSLPSQLACSICKHITATYQAAKSNKKWKLAIFKNPTLPLVWKRDFNKSKKGVSLWGETISMYHPNIPQNTWKDSKLKLVKNKLYLILCYEKEVPEPVQKGSIVGVDSGIKRMLVASNSSDNKTFFFSGGKLNHLRKCIRQRRSKIQAVGTRSAHRLLQRLAHRERAITEHLLHVASKALTLYAVQSNARVVVFEDLSNIREASLKKGQDLREKVCRWPYAGMQFKAGYKLAEKGIGTEIVNPAYTSQECPRCGHIANGNRTGLQFQCVSCGHRGDADLTASKNIRSRYILREQGFRRIGSVNTLEKSGLVVLEMIAHNSVICSGSQV

SEQ ID NO: 6721 - protein, 389 aa, Richelia sp.
MQNVEKHVIKRGHEWFDYCDSITVYSKNLYNTVQFTQRQSFLYGWGVHSQVKLDSKFKLDSNYKSMPAKVAQLVLKQNADSWQAYFKAMGAYKLDPIKFTGKPKQPNFIQNKNNLVKFNYQAVGKKEFFGGYIVPSMSPIRIPVKPGLKYSDLCEVRIVPKTGCFVIEIVYEVPDKGKLFCSLNPNLAAAIDIGLDNLATIVLSDPTIQPIALNGKPLKSANQFYNKQLAHLQGFLPSRTRTSMRIHNIVRNRNNFVDSYLQQLTAMIVEQFVALGVTEVAIGKNEQWKTNLNIGKRNNQSFTQIPHARFLEMLTYKLERVGIIVKVGEESYTSKASSIDWDTIPTFDPNNKVKHQFSGSRIKRATYVSKDWILKSMPMSMGRSILVEK

SEQ ID NO: 6722 - protein, 378 aa, Clostridia sp.
MIKSYKIRIYPTKEQETLMWKHIGSCRYIYNYMLAKQEELYKVGEKHLSHFDMINLIKPLKDDGKHEWLKEVSYTALCRVCGDLDAAYQGFFKKRTGFPKFKSRKRSKPNFPIRDSVYFKNERFVVVEKIGKVKFKTDFNLPIGRETKFSNPRISSVNDKWILSFGMESENQAPVLTNKSMGIDLGVKDLAVVEFDGEPKVFHNINKSKRMKALKRKLTHTQRAISRKYEKNRKGNAYVKTRNIEKAEDKLRRIHARIANIRSNYIHQTTHSLVSLLPKRVVMEDLNVVGMMKNRHLSKAISEQCFNEFVRQMKYKCEWSGIEFIQVGRFYPSSKRCSCCGEIKTNLKLSDRIYKCDKCGTVINRDYNAAINLSRYVA

SEQ ID NO: 6723 - protein, 375 aa, unknown
  TnpB Polypeptide
MKLTLKIKLLPTDEQVNLLLDTMKEANTVCNVISDVAWEKRIFNNFKLHHEVYHNYKATFKLSSQMLIRQIAKVADAYKLDKKTKRTFKPLGSIAYDSRIMTYKPDNVVSLWCIGGRQKIDFVCHNPAYIPYIKGEADLVYKKGKFYLFQTVDVPEEDIEDVEEFIGVDMGLLEIAALSNGKNFSSKKLNDYREKRQKVRSSLQRKGTKGSKKVLKRLSGKERTTSTIINHTISKQIVQLAKSEGKGIAIEDLKGIRFSSNNKGKKFRTRIGKWNFNQLRSFLTYKSLLNGVKLVDVPPAYTSKTCHNCFHIGNRQGKKFTCTNCNSVFDADENAAKNIALLGTSVNSPEKPSMLYCQVHSFLGLKPIPSLCVGG

SEQ ID NO: 6724 - protein, 364 aa, Ruminococcus sp.
MNKAYKCRIYPNSEQKTMFAKTFGCVRFIYNRMLFDKIEYYNEYQKKLKNTPAQYKSEFEWLKEVDSLALANAQLNLQNAYNNFFRDKKVGFPKYKSKKCNKHSYTTNFVNGNIIIQDGMIKLPKVGFVKMKQHRTIPESYKLKSVTVSKNASGKYYVSILFEYENQVQKTEPQKFLGLDFSMHELYVASDGTSANYPRFYRQALKKLEREQRRLSKMEKGSNNRNKQRVKVARLHEKVANQRKDFLHKQSRQITNAYDCVCIEDLNMKAMSQAMNFGKSVADNGWGMFTTFLQYKLEEIGKQLVRIDKFFASSQFCSVCGYQNSETKDLSVREWICPCCQTHHNRDINAAVNIRNEGMRIALA

SEQ ID NO: 6725 - protein, 419 aa, unknown
  TnpB Polypeptide
MKLTYKFKYKIKNESIDALCRASNDLYNQANYLIKQEFNKNKKWLRYNDLNEVMRVTKNLENEINYTKLKAQTSQQILRLLDKNWTSYFRSVKDFKIHPEKYRGLPKPPGFRKPKGKNLLIFTNQNSIVRDNQIILEKDLMIAIPEVDIDFNKFQQIRVLPKTDYYEIEIIYNKDCVNFNLDQNNYLVVDLGINNLASCISKDKSFILSGRAIKSVNHYYNKQKAKHQSFKDKKGKNICRKKLRNLSLHRSNFIKDQFHQMSRFLINYCIVKNIGTVIVGYNEHWKDSTDMGKISNQNFTSIPHKQFLNFLKYKCELVGIIFKSKNEAYTSKCDGLSLESVKKHTKYSGKRVCRGLFQSSIGKLINADINGALNILRKVIGDGLFVKDLINSVVLFNPVKIRFRDLIGKQTLSNLLVKC

SEQ ID NO: 6726 - protein, 462 aa, Scytonema sp.
MYRAIPVKAKFTDVELAFWVNQCEHANSLTNSAIYHTRQSHYSKLEQQGDAFTLYWRGDELRYGWKTYKCDTTYPGLDKALKDSPHYKAMAAQSAQQTLKTVGESIVGYNGLVQKYYKGEVDKPSLPKYRKRGGLAAVTFPRQALNYKDGCFYPSISRDTKPHLLTEIKLQLPDFIDSDWVREVTVRPRLGEMWIDWVIDDGKEPVDNNPNLDYTHAWSFDHGGTNWLTGVSTHGKSLIIDGRKLKNINQGYCRLVAKYKQGKSEFYWDSNLDRVQCKRNNQMRDAVNKAARFIVNQCLNDRVGNIIVGWNEGQKSGSNMGKRNNQNFVVIPTGRLIERLKQLCKEYGIVLTVTEEAYTSKASFLDGDSLPKHGEKPVGWKPSGDRVKRGLYRSRDGHLINADCNGSANIMRKVATQLGLNLVEVGRASLTVPQRFDLFTRLNRSYRKRCAGALLAPVATSV

SEQ ID NO: 6727 - protein, 218 aa, unknown
  TnpB Polypeptide
LERKHHKYFLRFSYTEEVSLSKTDVKEQVICSVDLGINTDAVCSIMRADGTILGRKFINFSSDKDHLYHVLGRIRRFQREHSSRQVQSRWDYAKRLNMELSRKIAAEITKYAAEYQADVIVFEYLEMQGKISGKKKQKLHLWRKQDIQKLCEHQAHRNGIRVSRVSARNTSRLACDGSGAVVRNQENHSLCTFRTGKQYNCDLSASYNIGARYLYGNF

SEQ ID NO: 6728 - protein, 374 aa, unknown
  TnpB Polypeptide
VRKTFKYRLFTTRIQSEALDGQLGEACRLYNGALQERRDAYRSHKKSLNYYDQANQLKDIRAAGDLGLANFSCCQDILRRVDKTFKSFFLRLKRHQTPGYPRFKSRRRFDSITFPSYGDGIKLAGNTLRVQGVGEIEVKLHRPVAGTIKTVTVKRECGKWYVYFSVECDAKPLPPLDNAIGIDLGLEYFATLTDGPPVPNPRWYRQAEARLRRAQRKVTRRPSKGSHRRRKAVALLQKVHARTRNQRNEFQHRLSFWLIKNFGTIVVEDLNVKGLAGGMLAKSVHDAAWAALVSKIAYKAENAGRTLIKVDPRGTSQTCICGAIVRKVLSDREHVCTACGLIAPRDAVSAQVILQRARISPSRHNVAAFSACVS

SEQ ID NO: 6729 - protein, 367 aa, unknown
  TnpB Polypeptide
MFKAYKYRLYPNKEQQEYFAKCFGCVRFIYNRMLSDKIEYYKKTKQKLNNTPAQYKKEFPWLKEVDSLALANAQMNLQTAYNNFFKRPEIGFPKFKSKKKHYYSYTTNNQGGNIYVSDRYIKLPKIGLVRVKKHRDFDGLIKSITVSQNSSGKYYVSVLVDCKKQEKLPKSENEIGIDLGIKEFAITSDGEMIENPKYLRTSEKRLRKLQKDLSRCKKGSKNREKCRVKVAKQYERISNQRKDFLHKLSKRLINENQVICLEDLKVKNMMSNHKLAKSIADVSWSEFVRQLEYKADWYGREIIKIDTWYPSSQICSNCGHKDGKKALSVREWTCPVCGTHHERDINAAINILNEGLRIKTVGTTGLA

SEQ ID NO: 6730 - protein, 315 aa, unknown
  TnpB Polypeptide
MVKAIKVMLIPNNVQKTKMFQYAGASRFAYNWALAREIENYEKGGKFLSDAELRKEFTKLRHSDEYAWLLNISNNVTKQAVKDACTAYKNFFRGLQKFPRFKSKKRAMPKFYQDNVKIRFSNTHVKFEGFSSSRKANKQKMNWVRLAEHGRIPINAKYMNPRISFDGLNWWISVCVEFPDCRETLNDDGVGIDLGIKDLAICSDGTKYKNINKSQKVKKLEKQKRRLQRSISRSYEKNKKGESYCKTNNVIKKEKLLLKRNHRLTNIRKNYLNQTISEIVNRKPRFICIEDLNVSGMMKNRHLSKAVQGTGDFLV

SEQ ID NO: 6731 - protein, 349 aa, unknown
  TnpB Polypeptide
MIVRQLKLKLTKKQESTLNQWLWNLTGLYNWASKKIEHDAKDKIYYSVFDIFMLITGHSKRVELPVHTMQGIVRQAHTAWQRCFKKLGGKPKLKGQRNKLNSIPFPDPIRKPAHNRINMPGIGFVRYHKHDLPEAKIKCGRIIKKASGWYLCLWLDCDNVFPVKDTDIPVGIDPGFKTLLTLSDGTKVENPHELRKGAKRLAQAQRGKHKHLSARLQERQANRRNDRNHKISRKLVENYKTIYYSDDNFKGMTKRFGKSVTEAALGDLIRKLDYKCRTGGRRLEPVNSKYTTMTCSVCGALTGPSGLSGLAVRQWDCACGAHHDRDINAAMNILHAGLGASHERMLSVA

SEQ ID NO: 6732 - protein, 378 aa, Moorea sp.
MGEAAKVRGVSMEKILAYATTAKQTYTQVIPVVACQDESQILEIMGLCGTARALTYNKLGSLQGWGLNWKKADKIVRTIMTPEQIGLPSKLWEWAVNDTIKAITAQQEAAKVFIIREIYGKTSDKSERKRLLELLKTDPRADPWLHRIFRKQYQRGHTFVRNQIVYQNNGYKCKRLTRNTVELQVAGLNRGKRVSLKLKCRHVLKGQIRLIQNGQGRLEVHTIRTKAIPAVEKPVKTIGLDKGYTEAFYLSTGETVGEGLGELLSRKSLRHGRTNRNRYRLFQHAQRTPAKLETIKFNNLGYKVKSKRLAQEKATIKNLIRTDLRRAINEPTQIFAEDLTSPIVNKTQAKVINRKLNQWMKGENCPNSPTLCNSDLVR

SEQ ID NO: 6733 - protein, 417 aa, Actinomadura sp.
MYTMARKVKRGFKYRFYPTPEQATELARTFGCVRLVYNKALEERTRAYRSEGRQVSYTESSALLTQWKRTPGFEFLAERSSVPLQQALRHLQTAFTNFFTGRARYPVLKTRKRSRQSAEYTRSGFTYHDGHLKLAKMRTPLRVVWSRPLPVDATPSTVTVSRDRAGRWFVSLLCEDTIAELTPAGRSVGVDVGISSLATLSTGQKIANPRPERRARLRLTRVQRDLARKLPGSANQRKAQLRVARAHAQVADQRRDFLHKLTTRLVRENQTVAIEDLSVRSLMKNHSLARAISDAAWGEFRRMLEYKAEWYGRTLILVDRWFPSTKLCSECGHSSGTIPLPCRQWVCEFCGAGHDRDINAARNIIAAGPAERVNACGADVRPQGKLLSRRAISDETGSPAGDRRESPFSRDGEEVNT

SEQ ID NO: 6734 - protein, 388 aa, unknown
  TnpB Polypeptide
MTQTFSTRTICCKLLFDEASAAAIRATAEAFNAAATYCASVAWEERITNKNKLHHVVYGPTRSEYGLGAQLACCARDKAAEAVRAARANGSDTCPTFKPNSSMRYDARTYRLMSMDRVSLNTITGRVMGQLVLGEYQRRHLYDTSWKIGGAELVQRDGQFYLHITQTKVNPDPDEPTGFLGVDLGIVNLATDSDGETFSGEQVKQVRERWFKHRRRLQKTNTRRARWRLRQRARKEQRVQKDVNHRISKKLVTKAKMERKALALEELTHIRTRTDNGWRRSQRRLRTSWAFRQLRTFIGYKAAQAGVLVMTVDPRNTSRTCAVCGYGDKQNRKTQSHFCCRSCGHTAAADTNAAVTSAYRAGCQPAYGAAPLSSGGASTSPGASALGS

SEQ ID NO: 6735 - protein, 394 aa, unknown
  TnpB Polypeptide
MCWHSARLYNFGLYSVRQNFFETKTYLPYPQNYHYCKTNENYQILPSVIGQQTLKVVDRSFKSFFGLLKAKKKGKYQNRISIPKYLPKEGYFQLVIPKNGFQIKGDKIHIGISRQLKEETGLKHIVLDFPTQIKKESVQEIRIIPQQKATFFKMEVVYEVEEQNLNLNQDNVLSIDIGLSNLATCYDVSNNRAFIMDGRKLKSINYYWNKKNAKLQSIKDKQNIKGYTKQQFLLKRKRENRIKDVMKKTAKYILDYCVENNIGTIVVGHNKGWKQEINIGKRNNQNFVQVPFGYLMSMLESKCQEYGLRYLEIQESHTSKCSAIDNEEIKHHDEYVGKRVKRGLFKSKDGILINSDVNGAINIARKSKVISMEFTPEMIKGIVAFPKRIRIANE

SEQ ID NO: 6736 - protein, 394 aa, unknown; identical to SEQ ID NO: 6735
  TnpB Polypeptide

SEQ ID NO: 6737 - protein, 431 aa, Nostoc sp.
MALINLSFLQNIGHNVRMTQKAFRYRFYPTSEQETLLRRTMGCARLVYNRALAARTEAWYERQERVGYEKTSTMLTSWKNFEDLQFLNEVSSVPLQQGLRHLQTAFTNFFAGRAKYPNFKKKHHGGNAEFTKAAFRWKDGKVFLAKCAQPLEIRWSRQLPESAEPSRVTVKLSPSGRWTVSMLVDVAIEALPKSGNQIGFDLGITSLIALSNGEKIANNQAFKTKRRKLRKAQKALSRKKKGSNNCHKARLKVAKVHAEISDARNDFLHKLTTRLVRENQLIAVEDLSVKNMVKNKKLALSISDASWGELVRQLKYKCDWYGRNFVKIDRWFPSSKRCGNCGHIVDKLPLNIREWNCPNCGTHHDRDINASKNILAAGLAVSVCGANIRPDRREPKGQLRKTSNGEFGVVLGSPQVEQPAFPLGKKQKPKS

SEQ ID NO: 6738 - protein, 178 aa, unknown
  TnpB Polypeptide
MTVAHTIALEPNNTQATYFVKAAGIARCADNWALAEWNRQYEAWKADNSLPKPSQKSLRRQLNAIKREQFPWMLDISKCVPQMAIIQLGEAFQNFWAGRAEHPKFHKKGVHDSLTLTNDKCSIEGRRIHISKLGWVRMREPLRFKGKIRSATISREADRWFVSITVDTDSIPLRPSEN

SEQ ID NO: 6739 - protein, 410 aa, Chloroflexi sp.
MDYGITARRSRRPSRMIKAHKIRLHPMPEQEIYFVKAAGTARFCYNWARAEWEQQYEAGEKPSALKLRTQFHALRREQFPWTYEVTKCAIEGAFMDVGAAFKNFFEGRKAGRKTGFPQFKSKKRSKQSFYLSNDKFTVGDHWIKVPKLGRVNMAESLRFSGKILSARISKTASWWFVSITVEMPDETPVNTRSPVGVDAGLNRLATLSDGRKYENQRPLVHHLKKLRRLNKELARRSKGGKNWLKTKEKLARAHYEIACLRLDWLHKLTTEIAATSGIVGIEDLHVKGLIRNRCLARSFSDAAVGKLLDLLESKVKSRGGLLIKVDRFYPSSQLCHCCGRRKTDLKLEDRVFECPNLDCEYIGDRDENAAINLILEALRLFGLTLNSPSAGVATTRRKTAWGPGVRPKGR

SEQ ID NO: 6740 - protein, 376 aa, unknown
  TnpB Polypeptide
MDNHGVKKYDLNKHCKQLAEEFEWAKKLNSMARQSGAERAWFAIHRFYNNCKKQTFGKKGFPHFQKNNRSVEYKTCGWKLDPNTKKHITFTDGNGIGRVKLIGSRDIYFYCPEQIKRVRLLRRADGYYCQFYINIDVTEDVEPTQQAIGLDVGLADFYTDSKGHKEPNPRFFRKGEEELKRCQCRLCRKKKGSSNRGKARQRLAKKHLRISRQRSEHAKRLARCVVMSNDFIAYEDLQVRNLARNRNLAKSISDAGWYQFRVWLEYFAYNFGKTTVAVPPQYTSQECSNCGRTVQKSLSTRTHTCKCGCQLDRDENAAINILKKGLRTSGHEGSYAWGDTTTTQAGYVLSEQVASQNQESLISAVCGLGSVNRWRV

SEQ ID NO: 6741 - protein, 358 aa, unknown
  TnpB Polypeptide
MRTDAYFNDGVRIGYHESSARLTALKMTQEHVWLREVSSVPLQQALRHLQAALVNFFEKRARYPKFKRKDADQSAEYTRSAFKWDGHDLTLARIGRLHVRWSRSFKSVPTTVTVTKDRANRYFVTLVLDETPKKLKPVHKPVGIDLGLTTLATLSTGEKIRNPRHLSRIKTQLVRAQRRLASKEKGSNRRAAQKLRVARLHARVADARADYLHKVTTDLVRRFDVLAVEDLNVLGMAKNHSLAGSIGDAGMGEFLKMLRYKCEWYGRELRVVDRFYPSSKRCFDCGYVLEELALDCRRWTCPECGEKHDRDVNAAKNILAAGQAVTARGGKVRPKRGRPSKGTSRRSANQPKSLHKTS

SEQ ID NO: 6742 - protein, 488 aa, unknown
  TnpB Polypeptide
MSQKVRIDGVKHIGASVFLGVDHCNNPCWTRNPERIMVWLCDGWRTRFNQRREQRPCNIPVKNEAGEIVDWIEEPLGGPDVSELLSDKEARLQCSWMAAVPSSILATSNRLEDTEWSAGIKRKKTIGGRVPGFKSRRRGLGFVCWYHPSGNFYNAVFHKTGRKSGVVVITGMNPSRWRKLGEKLHWRVVIHVRVSQPIRPYTSVHVDWTHRTLVFVNMPLPLFRASAGEVGIDRGCVHTLALSDGPFIDMPKPSKAELKRLKYLQRRMARQDRTNEARGGKTAKLASKRRRKALSEFNALQGLIVRRRNDWIEKTTTSLAKANVLVAMEDLDVQAMTRRPKPRPDPANPGQYLHNGAKAKAGLDRSILSNNWSRLYGRLKDKMDANGGRLVVIPAAYTSQTCHQCGHVASENRESQAVFHCVRCGHQANADVNAAMNILGRALDKTGRGTALDVEDPHWRPDEASTPSTQAGSSFGVRAVKGIPRLQP

SEQ ID NO: 6743 - protein, 425 aa, unknown
  TnpB Polypeptide
MIRALNVRIYPNKTQRIQIRKTIGCSRFIYNQMLIERREVYERFKDDKDALKKHTYKTEKQYKVAFPFLKEADSIALQASREHLIEAYQNFFNGLKKGRKVGFPKFKSKKGKETYTTKQTNGNIKIDFERKKLKLPKLEWLRFNDKRVFSEEIKHATIKKTKSNKYFVSLTLEAQEDVKKLQEVHEKDITAFDMSANNFLVNDLVKMENPRFYRLEQKKTKKLNKELSRKKKGSKNREKARVKLARHYDTIYNRKKDWTHKLTRKLADAFDAIILENLNVKGMQKFNSGLSKSVSLDFSWYQFTTYLKYKMEWLGKHFVLVDRFFASSKLCSRCGWKNNNLTLKERAWTCLDCGTTHERDENASVNLRNEGIRILKEEKYVTIIHDDKTTVGTTGSHAFGDDVRPKEILQDLFGQFSRKKESITL

SEQ ID NO: 6744 - protein, 265 aa, unknown
  TnpB Polypeptide
MQKDNRFQSYRTINQKDNIRIVGRYIKLPKLGFVKVRQSMEIGKIHHVTIEHTPSGKYFAVLNVDFEPDSRQNNGGMIGIDVGIKEFYSDSSGNTVSNPGYLERSMRKLIREQRRLSRKQKGSQNRDKQRIRVARVHEKITNQRNDFLQKQSTLLVRENQTICIEDLNVKGMLRNHKLARSIASVSWAKFFKMLEYKAVWYGNEICRVPTMYPSSQTCSCCGYQNPLVKNLRIRIWECPECHVVHDRDMNAGINILKKGLQMQYA

SEQ ID NO: 6745 - protein, 303 aa, Azohydromonas sp.
VTKEGLGLPVQTVQEVAEQYAVKRRTAKRTRLAWRKSGGARRSLGWLPFKVRTIRYAHGQVCYAGQWLSLWDSYGLGSFELRAGCISEDARGRWYLNVTVNEPDFVGPLPMPPVSECIGIDLGLKELAALSSGEKIAAQRFYRDLDPALAAAQRAGKKARTKAIHAKIANRRRDHLQKFSTTLVRQHRGIFVGSVNAQALARTSFAKSVLDAGWSSLRTMLQTKCDRAGVWFREVNEAFSTQTCSSCGSMPPERPRGIAGLGIREWTCSACGAVHDRDVNAARNILAVGHGRLAGGITVLRGV

SEQ ID NO: 6746 - protein, 411 aa, Oscillatoriales sp.
MQLAERHIIKSTEPRFVEIDQLAFKSKNLYNAANYVIRQNLIYGWGYVNYNEMNRLMKSQVAYKALPAKVSQQILMVLDQNWKSFFEAVKAYKADSLKFTGRPKLPKYKDKVKGRNILIYTIQAISSKQLRNGIVKLSGTEFSIKTKVNPDRICQVRLVPKCDSYVIEVIYNACTERSRSEPESTAKNNNFVASIDLGLNNLVALTSNQPGLIPLLINGRPLKSINQFYNKRKAQLQSQLKGRRQTSSRIQRLTRCRNQKVDNYLHHTSRTIVDILVAQQIGTLVIGKNAQWKTEINMGKQTNQNFVSIPHARLIEMLEYKAFLVGIKVIVQEESFTSKANFLGLDPIPVYGKTKTEPVFTGKRIKRGLYKTSTGQLINSDVNGSFNILRKAIPNAFGDGIRRGRSSAEAG

SEQ ID NO: 6747 - protein, 416 aa, unknown
  TnpB Polypeptide
MIKVKRTYNVRLFPTAQEKEQFQQLSLVRNMLWNELVDIEQCAFDNHSFVSEFDLNNRLPELKQRFPLFKTLNSKACQRIAKEVYSSYRSFFALVKKDKTARPPKKVDDVNEYHTVVFNQSGWKFVNEDTLRLNGINVKYKGRTDINFMSLTAKEVKLKQRNGKWLLDICVETEVPEPERITCENKVLAIDLGLKNLVHGVDNLGNVVVLKNKARRINRYFGKNISSIKTKMSTKVKHSNRWEHLNSVRKRLCSRRNAQIKDTLHIQSKTLADMNYKTIVVGDLSVKQLMSTTGTNKRKKNIRKSFHESAIERFVKMLTYKCLTRHNEVITLSERWTTQTNSLTGKLFKKNVELGDRVVWLNDTICIDRDLNAAMNIMRRYEQYHIALVTTPLDVFSVATKYNVANLQTKNGNPSL

SEQ ID NO: 6748 - protein, 399 aa, Halopeptonella sp.
MQRLQAFKFQLRPNGHQEKMARRFAGSSRFVYNRALALQKARHESGEKKLGYAGLCKELSAWKQDSQTQWLTHAPSQSLQQALKDLERAYANFFEGRAAPPAFKKRGWHDAFRFPQGVKLDQANARICLPKLGWIRYRKSREVLGTVKNVTVLASGGKWFVSIQTECEVETPRHPATSMVGVDLGVANLATLSTGEIIAPVNALAKRQRQLARAQRDLSRKRKFSRNWIKARARIRKIHTRVGNTRCDYLHKLTTTLSKNHAAVVIEDLQVRNMTRSASGTVDQPGQNVRAKSGLNRSILDQGWGELRRQLAYKQAWRGGIVETVEPRNTSRTCSACGHVAKENRPSQSRFECVVCGHTAHADVNAARNILAAGHAATACGGDVSPYRHLGVGMAAPAK

SEQ ID NO: 6749 - protein, 410 aa, unknown
  TnpB Polypeptide
MVGRAMIIYEFKVKAKEVQYRAIDEAIRTSQFIQNKCLRYWMDNKNVSKYDLNKYCKILAKEYAFANELNSMARQSAAEKAWSAISRFYDNCKKQIPGKKGFPKFKKYCRSVEYKTSGWKLSENRKAITFSDKKGIGKLKLKGTYDLNYYQLDQIKRVRLVRRADGYYCQFAIKTDVKVVETEPTGNAIGLDVGIKYFLADSNGNTVENPAFYRKAEKQLNRANRQKSKKYKKGAKPQSKNYHKARCRYAKKHLRVSRQRKEYCKEVAYSVIHSNDVVAYEDLNVKGMEKNRHLSKSISDVAWSTFRQWLEYLGSKYGKLTIAVPPQNTSQNCSNCGQKVQKSLSVRTHVCPHCGYVEDRDVNAARNILQKALSTVGHTGTYSWGDLPSGLVGSGLSSDGESVNQESPSL

SEQ ID NO: 6750 - protein, 465 aa, Paenibacillus sp.
MYRTHQVWIKPGHRLFSYLDQVCQDAKILYNTTNFYIRQIVTAFGKNEPLQPLQQQVLETLASHIDLMNERRSERNRSLPFKLPSQESPFIHYNFLDALFKVMNQVNYRALPTQSSQGIMKVVFHNWNAFFASIKDYRQHPEKYNGKPNIPGYARNRVKEAIFSNQDCVIKERKFLKFSKSKLQLNIGKLGYTDGQLKQVRVVPSHGQYVVELIFAYPIEQKKKVQEHVLAIDLGVNNLATIVTTTEAKPIVVKGKIVKAINQYYNKMKAYYTGILRQGKKPREGAHTSRRLERLHLKRHRRIKDLFHKVSHYIVTLAVEHNIGTIVIGHNDGWKQTPGIGRRNNQSFSYIPHQMLIGMIEYKAREQGIVVILTEEAYTSKASFLDQDPLPSYGKEGTWTFSGKRMYRGLYKNTKGLIHADVNGAANIMRKVFPNVSAKGANGVEGLDGNHTINVSTPLVLSILK

SEQ ID NO: 6751 - protein, 368 aa, unknown
  TnpB Polypeptide
MKARKTFKYRLYPTPTQADRLTWALDRCRELYNAGLQERREAYRMCGVAVGYLQQQNQLPAIKEERPEYKQIGSQVLQDVLRRLDKAFAAFFRRVREGRPKPGYPRFQGRYRYNSLTFTQAGWRLDKRLHLAGVGALNVKVYRPIEGTIKTVTLKRDVDHWYVTFSCEVDIEPAPIQDKPAVGIDLGLEYYATLSDGTHVENPRYYRKAQDTIARRQRTMERRKKGGKNRAKVGILVRKAHRKVANQRRDMQHKATRRIIDTYGAVAVEGLNVAGMIQNHHLAKSISDAAWGQFIAILTSKAASAGVVVVAVNPRGTSQVCSACGAMPESPKTLVDRWHTCACGCSLQRDVNAARNILNRAGLTRQVA

SEQ ID NO: 6752 - protein, 409 aa, unknown
  TnpB Polypeptide
MNEILKAYKFRIYPTDEQIIGLNKTFGCVRLVWNEFVANFNSYGTDHYNDKLSEKDIKQQKEFLSEVSAAALQQKRMDFVETKKQFFNKKRKKKLGRMKFKKRGVSNESFRLPNQKFKLNQDQKFIQIEKIGKIPVVIDRELPENTNYRSVTVSKSKSGKFFVSVLVKINVDLFANTGKSVGIDLGLKDLFIFSNGDVVDNPRWFRKNQAKLAKAQRHLSRKNRGSNRYEIQRKKVACIHEKITNQRKHFIHNITTNLVREFDVIVSEDLNVYGMMKSKLAKSVSDASWTEFVRQLDYKCKWYGKTFFKIDRFYASSQICSACGHKDGKKTLDVREWECSNCGEHHDRDFNAATNVLLKGYSDLTGLSIKDSSAELVDYKRGEDVRLGDKIDHHLAASVKRLDKFIDLS

SEQ ID NO: 6753 - protein, 479 aa, Anaerolineae sp.
MIRTYKYRLRPTKKQAYLLGGLFFQMQTVYNDALNERRWAWSRSRQSVSYYDQWKRLRDERHTLPDEMGMINATSMQQMLRRVDKAYQAFYKGLRGHPRFKNSKRFKSVEFRYGDGCKLRDDRLYVQNVGQIKVRLHRDIPDDAKIKHVIIKRSLDKWYVCLMLELPDVKQYPNGRQDIGIDVGLTSLLALSDGTLIDNPRWLRSQLRKLRVAQRRVSRRKQGGANWRRAVKQVAKLHEKIANTRRDFWHKTTRLIVDTYGNIALEDLNLLFVTSNSHLSLSAQDAALGEFRRMLEYKAEEAGTQVVAVNPANTSQICSGCGQIVRKSLHVRTHHCSCGLSLDRDVNAARNILALGRSAWALTCPVGESVAQEAPSFKRGECVTHPGEILLEEFMKPLGLSQYRLAKDIGVTPIRISQIVNGKRSITVDTAMRLARYFGTSAAVWLRLQFRYDLEVAEMEISEQIKREVKVLQQPTPNP

SEQ ID NO: 6754 - protein, 427 aa, Lactobacillus sp.
MIVKTRIYQLYPNQTMKQVLDDWCDYRRYCWNQALALWQDLYMAHTILDKVVATVFIPKQDKKTKKWKAIHRDQHLNPSPNWRLVRDRMIEQKNDWQYAYSARTLQLAVQDLGKAWESFFNQAQPDWGKPKFRSKRNPRQGFKTDRAKIKDGRLWLEMPRETPYKDDWTGIKLSEKPLPGKIGVVSIVRINDKYYACVPYKLETPVSKAKTGKEAGIDVNVGHFNYQDGQCLILPDSLKHLYLKIKFYQKRLAKKRTVNGRIKGTQSNKYLKTKAKLQACYQRATNIQRDLMHKFTTKMADEYDQIVIESLDVKAMLMSHVASKGMQRSMFGLFRQLLAYKCAWYGKELILADQHYPSTQRCAVCGTVKKGADKITLKGNQKHGTKHNEYICYNPACPNYGKTVDRDVNAMKNLTLLISHPELNKTL

SEQ ID NO: 6755 - protein, 364 aa, unknown
  TnpB Polypeptide
MEKAFKYRIYPNREQRILLAKTFGCTRFVYNHYLAKRRDAYEKDGITFSYSACAKDLVFLKKEYEWLKEVDSVALQSSVKNLDTAYVNFFKKKAEYPRFKSKKTHRYSYTTKYTNGNIELYENKVKLPKIGFVKIKKTRAPKGRLLSATVSQVPSGKYYVSLCYTDVEEVLFPLTYNETGIDLGIKDFIILSNGEKVENPKYLKKSIEKLKKLQKQQSRKTKGGRNWIKNRIKIARLHEKIANQRMDFINKLSTRIIREYDIICIEDLKVDNMLKNHNLAQSISDVSWSKFTTQLEYKAKWYGKVIKKVDTFYASSQICHCCGYKNEGKKDLNVREWTCPKCHSNHDRDVNASINILMQGILAN

SEQ ID NO: 6756 - protein, 395 aa, unknown
  TnpB Polypeptide
MELRRTYKYRLYPTRKQERLLEQILYLCHQLYNFALEQRIRVYNQSKKSLGYYDQVYELPAFKEEFPEFKQVYAWSLVDVLHRVDRAFQNFFIRLKKRNGKAGFPRFKSVNRYDSFTYPTGAVKIENKRVKLPKIGCVKIRLTRDIEGKIKTCTVKRELDRWYVCFSVVKEVEIKKRETNREVGIDVGISNFAVLSDGTKIENPRYLQKSEEVLKKRQRRLSRKVKGSNNRNKVRMIVAKTHRKIRDQRNDFLHKTSRSIVNNYDKIYIEDLNVSGMTKNHSLAKSIMDASWSSFISKLGYKAEEAGVLVRKIPMFYPSSKRCSVCGYINADLQLDDRQWICPECKNKLDRDLNASVNILQVGRGATKFTLGEICQWTDQRTKNSLKREGLRRIV

SEQ ID NO: 6757 - protein, 709 aa, Streptomyces sp.
LVATATCTAFGGVVESSGERVSQALLYERVGYLAGLSRELTRVLVASRWDEASLQVLAAGLDGQGEKLPSKGWMALRRLGWAGAAAPAAGVYVSDRVRRGAEEYAARTLRLALHRRTLLAAVLATWPADPFRRTGAEWTALRALLPTGVSSAEIRNRTRQVRAYLAEHGKLPAGLCELEEPPEIAAQVLLAAMDRQQVTLQRVDAGLARLRVKLPLCQAPASGRDWAWHAIDLRLPATVGPEAVLHTPTLRPTRSGRIAVDLPHSRPTAVAPAVGHTLAVGFDWGINTLLTGTLGRLTGQATTARVVTDGRPLLFDATAISAKLHRLRGHREHLATRRDHYQALADGLGSPHLAWAALLDKAEVLQVEHERVCARIRHLNQALAWSAARWAVDQSAALGATVIYLEDLATLEARGKRKGNARLSGQVRGMVVEAIRHLAAKAGIAVVTVPARGTSARCPGCLGPLGHHPAPDRLAERGWTWAHCPGCHLSLDRDHAAARRIVSRGLLAQAHTSTDRATGNRTLRTVMEGTVTAVRRPKKTTRRLRRARRQAAVPPRPAGPKTTPGKMRPTPSRPAGPQVRRTRTPRPTGQQAPATVQGLAVQTSRRMPEARTVPATTPLGVVQRPAGHDTQTPAHTGPVPGHGVPAPDNRPEPAPAGRGRLSRGTCRRRTCAAGRAGFHHAHATEVHPLTPRFGPHKGDRTRPRRARKT

SEQ ID NO: 6758 - protein, 401 aa, Candidate divison MSBL1 archaeon
VFEREGLDFREKNLNKARKTVKELCYPTADRDSKYNCKGVVHFSHSHYYDTAITEATQKWNSFLTWKEKSSSSKKFPEIKNCSPVLDSQMFELDLEKGWITVKTGRGQESVHIPITVPNKSHYDDLDEDKISSIKLKKKEKCFVFLLSQKLDSPETPSPSDLGERPVIGIDLGERNLAPFVTIRPSSQQFEILNVKFFDGAEIKKLKHREENIRKNLQIKGKSSEIPKRKWKTSNKKKNHCEKIANKIRKIAKKNNVKSVFVGDLKAPTPKNSSTLSKRLNNFPFAKLKEAIKRHLEKAKIFVKTIYEGKTEKHDLGTSQKCHKCGSEGERYKGKFSCPSCNLEDYNADLNAAINIAERGVKSFGKTEGLGVVPWIDTVKWLRPKEVPVRAYKTPNHIKKE

SEQ ID NO: 6759 - protein, 546 aa, unknown
  TnpB Polypeptide
MIVDSKYAKIFNSDMLTRSKYDELYAVAVKLRDFRNEVSQLVNDNLLYYLDFSKLDFIKEMRKVFLNKVSSCFDAQQYIQVHKDYQNKFNAILRNIEFKKITFKGFELYKRNSKKHKKGDLKHVITETSQTSLTLCLSYLARYGKESTPEYLKQKVEELNTSTDKKEIKRRELYQNILDKCTKFGFDRLFRLALSRRNRTIKHYSEHPIEYKSLTFGGRSRKKFIVEFNHNYNSNINAFVSLSGFSKSSFDIPIKYSKDYHGRMKSYRKNSNDYEYLIKFDEYRKQISVIYVKDGDRYIPEAQDELIGIDVNSKHNLLSLSNGECYDFDRKLLEDFCTLSLRVDELKSKNKNYEIGKRKQRKLDTLKNKINKYEENLIAQVCKHLSEQGYHHVVMENLNNSFGKCFVNDENDVNYNRRVKFLGLSSIKDKFEHIGRKYDIAVSLVHPYYTSKQCPICGCIDDDNRKTQEVFKCVQCRHESNADFNAAVNIANRVGITVLCQKLLKQSDNGSFLPKPLKRGKVKDVLLSFRNNVVKHSEVYTVVNNC

SEQ ID NO: 6760 - protein, 400 aa, unknown
  TnpB Polypeptide
VPVLSYRYKLSPTPRQAQTIEAWLEACRWLWNWALRERKDYARARTCRVDACSLRGESIIPPDARRPTYASQCRQLTRLKRERSSLQQVYNPVLQRTLHRLETAWVDMNRRGFGFPRFKQAGQLRTLVFPQLNKQVVAGNRLQFPKLGWVKFRKSRELPQGFQIRQLQIVRKASGYYAIVTLQADVEVPEPQPHGHAVGLDVGLERFLATSDGELVPNPRRFERSQRKLRLLQWQLKHKRKGSRRWRCLQWRIARQYERISDTRRDWFYKLAHRLCDRAGSLYAEALNLKALARSQFGKQVLDAAWGEFLSVLAWVCRKRGVYFGRVEATYTSQVCPACWTHTGAKPLSQRRHDCPECGYTTDRDVAAAQVVSTVGQTGKMLAEGKGSGELVQASSRASQ

SEQ ID NO: 6761 - protein, 409 aa, Saccharothrix sp.
MFARYRYRIEPGKAQRAMLARTFGCARVVFNDAIRCREDARAAGEKVSASEVQPRMITLAKATEARAWLAEVSSVALVQAVRDVHRAYQNFFDSVSGRRRGRGVGRPGFRSRKDHRQSARFTRNGFSIRPYGRLYLAKVGEVRVCWSRDLPAEPSSVTIILEPDGHYYASFVVELRPTPLPAVESEAGVDLGIARLATVADTERRRKDIPNPTHLARRSRKLRRLEREKARRAKGGANRAESRRKIAVQHGKVTRARRDYHHKQALGLVRENQAIYVEDLNVAGMVRNRRLARAISAVGWGQFVRLLEEKAARYGRTVAKVSRWLPSSKTCSACGVVRDEMPLRVRSWTCACGVVHDRDHNAAINILAAGRAERPNACGAGVSPPLKEAIGDEAGSSPGAARQRRGARQ

SEQ ID NO: 6762 - protein, 247 aa, unknown
  TnpB Polypeptide
LFGKHIKLPKLGLVKTKVSRPTSGRILSATVSQTPSGKYYVSVCCKEVKVVTLPKTGKSVGLDLGIKDFLIFSDPSASIENPKYLQNDLKQLVRFQKSLSRKTIGSCRWNKARIKVAKLQEKIKNKRNDFLHKLSTRIIKEYDVVCIEDLNVSGMIKNHRLARNIADVSWSEFIRQLIYKAGWYGKEVAKVDRFFPSSQICNICGYKNSEVKDLSIRTWICPKCGSMHDRDKNSAINILNEGLRIVT

SEQ ID NO: 6763 - protein, 442 aa, unknown
  TnpB Polypeptide
MKSRKFTVVAQLHEKQNQDLIEYVDSCFATYGKAKRETFHVLKRNSDFNKSDFNTYLQTKYSILKRTANSIIFDAQGTLNALIELKKYEKSQLERKISSLENLIGNLEMKVSDNKTLLRLDDKSVSLVTHRNLKRKLVSKKNQLNNKKQRLKNLQYQIEHGIYKMCFGTKYLFKRDYNEFITRRDSQLSFVGTKTEKAGNQVLQLSYNHQNTQFDIRLRKDIGGFKDQRGSYVNGKIHFNHHKQELISILANRNSPLSYKIIKKGGRYYLYCTFEIQRDESSFVTRSSNGVIGLDFNKGFVTLTETNQYGHMIDTALIRYRFKNGNATQTDLELIANKVKERALVTGKDIVIENLNFKDTKAKTVSKRGKKYNDMLHSLAYRKFTDIMENVCYCNCIWLRKVNPAWTSWIAKNKYCPKMKLNIHTGASFVIARRGQGYTDKV

SEQ ID NO: 6764 - protein, 369 aa, unknown
  TnpB Polypeptide
MTIKQKAYKFRLYPNEEQKQFFAKTFGCSRAIWNMMLADKIKHYEETGETLHNTPAQCKKNFPWLKEVDSLALANVQLNLQKAYKNFFKSGFGFPKFKKKKHSQSYQTNNQRGSIALDGEFIKLPKLGWVRVKAHRQIEGVIKSATISMTPTGKYYVSILCETEISPLPKTNSNVGIDLGISDFAILSTGEKIGNERFLKKLSEKLAKEQKILSRRALAAKKAGRKLSESKNYQKQRVKVARIYEKIANMRRDFLHKLSIYLIKNHDILCIEDLSCKNLMKNHKLAKAIGDVSWSEFVRMLEYKADWYEKQVSKISRWYPSSQLCSDCGFNSGKKPLSVREWTCENCGSHHDRDINASINILNEGLRLA

SEQ ID NO: 6765 - protein, 395 aa, unknown
  TnpB Polypeptide
MLAAVKVRIYPHRQQRTALAKAFGCTRWAWNEALAQNQRTYRETGKGIPTYQLKKRLPQLKREHPWLKDAPSQALQQAILNLKAAFDNFFQGRAKLPQFKSKRGRQSVQFPQGVKLGERCIYLPKVGWVKARFHRPLVGRLKTVTVSQTPRGHYHAALLLEDGTPQPEPSADGKAVGIDLGLTEFAVTSDGVKLANPRHLARHEANLKRKQRKLARKTKGSNGWRKLKQQVAAINERIANARRDWIHKCSRRLADENQAIFAEHLNVKGMMANHKLARTISDVGWSSFRPMLAYKAEQEGKIYREIDRFFPSSKTCSTCARVVEHLPVNVRYWQCPDCGQNHDRDICAAINIRNEGIRQLASGTEATASGGGVSPCRTDGKAAAVEAGSRSSRAS

SEQ ID NO: 6766 - protein, 409 aa, Mycolicibacterium sp.
VAHRYRLYPTREQAAFMLARHSADARYVWNLAVEQFNWGRAGRSAPGPAARQKQLAQARQAFEWLAAGSSSVQQQALRDFDRAVSAYFAGTHRRPTWRRKHLDEGFCVRDSRVELVNRKWAQLFVPKLGLVKLRLSRPLPAGKLGMARITCRAGRWHVAFPAPQPSIAAGPGRQERMVGIDRGVKTTLALSDGTMLRAPVMRRSEQKKLVRLQRQLARCRKGSVRRAKVKARIATLHARVADRRRDWVEKTTTRITATYGVIAIEKLPTRNMVRAPKPKPDPDNEGHYLANGKAAKAGLNKGIYANCWGAIAQRLDHKTSASGTALVEVPAAYSSLECRNCGHSVKENRKSQAEFHCVKCGHQDHADIQAANTILARATRPALTSGPEATPADAGVLAQARRPDDAKAA

SEQ ID NO: 6767 - protein, 380 aa, unknown
  TnpB Polypeptide
LKATLKLRLHICREAEGILLDTLRQSTACFNAVTKRGWDTAERNGTRLHHATYKGLREAYPALPSQLHCAARVKATEALKSVDERLKQGRKAGRPTSELCPVRYDARSYWAKLSEGMASLATVAGRVCVRFNVCGYYRRYLDWKPCSADLCSADLCFDAKTRRFYLHVVVETDAPEAVCEGVLGVDLGITEIATDSEGNQYSGEAVKSVRRRVRRIRRLLQARGTKSARKHLKRIRQKQSRFTRDTNHVISKRLVATAAKSRKALGVEDLKGIRDRSETVFSREMRWLMGNWAFDQLKQFLVYKAESAGITLVSVDPRNTSRTCSKCRHCEKANRKSQSKFHCLSCGFETNADANAAVNIGVRASSSESLLSQLRLRPSA

SEQ ID NO: 6768 - protein, 410 aa, Euryarchaeota sp.
VITVLKAYKYRIYPTEEQKEVLWKTINGCRYVYNWALEQRKRAYEADEKMPSCFTLNKMLTAMKQDNEWLYESSNPALQFAIQNMDSAYKHFFRRVKEGKEKLGFPRFKSKKNPVQSFQMINNYRINFEKKLIKLPKLDTEVVTVLDREFEGKMKTGTVSVTSTGKWFVSILVDDGKELPEPEPYTSHSTIGIDMGLTHFAILSDGTKIENPKHLRNSEKRLACLQRRLSRKKKGSQNRKKAIRKVANMHEKISNQRSDFLHKLSIMLIRENQAIAIEDLNVKGMVKNHHLAKSISDASWGTFRTMLEYKASWYGKTILKIGRFEASSKLCSNCGYKPESMGLHIRSWTCPDCGTVHDRDVNAAINIKNIALGIDTGANRSGEPVESWSIDRAVNQELHSIGREIPTPVI

SEQ ID NO: 6769 - protein, 545 aa, unknown
  TnpB Polypeptide
MIIQSKYTKIFHSKDITRQKYDELQNFAVLIQNHKNIVSKHINTHLIHYLEYNKFQFLKVMRERFKDAIPSSFDAQLYIQVFTCYQNKIEALQRKLVFETSTFKGFELYKRGTKKYKKGDLKQVIVEKKQTKLSSCLTYLARYGNENIIDYINSKIISCDAKKRDFYDNIIRCCEKFSFERLYALALSKRKRIVSKYANNPIEFRSLTFSGRCRKKRIIDYNSRFGSVINSFISLSGFSRKSFDIPVIFNKGWYGNMKDYRKNTPDYEYTLTFDEKKHQVTVNLCKDGERYIPEPNGKTIGIDVNCKHNLFSLSNETTYDYDRKLVNDFCKLSLEIDKLKEDMNYVIGKRKQLKLNKLKKKIIKNEQQTIAIMCKNEKAKGTGHFVMENLNNGFGKCYVKDSDNEDINYNRKVKFLGLSSLKQEVEHIARKYDIAVSTVQASYTSKMCPICGCIDDGNRPNQETFECVECGHKDNADFNAAKNIRNRVLVTVLRDKLLKQLDNGAFEPRSLSRDKIKEVLLSFRRSLSKVGSECIESRMTTFGYV

SEQ ID NO: 6770 - protein, 419 aa, unknown
  TnpB Polypeptide
VIRTYKYRLYPTNAQAEGLYEARQLDCLLWQGRTLYNAALEQRITTYQETGKSLKYVDQWPHFRDLRNANPDTLGQLNATSVQQMLRRLDKAFVTFFHRLKAGKKPGFPRFKGRHRFNSLEYRYGDGCKLRFDDTERALFYVQNVGEIKVKYHRPLPHRGLRPHRDLWPEGAAIKHVILKRSNRKWYVCLQVELAVPPPHRGLWPEPHTGAAVGVDVGLLRLLTLSDGTPIDNPCWLRGSLAALRVAQRRLSRRVKGSQRRRKAAEQVARLHEHIVNQRRDFWHKATRWLVDTYSLVAVENLTLDFMTHNPRLSLSAHDAGLGLFRELLTYKAESAGTKVVAVNPQHTSQVCSGCGAVVPKPLLERIHACPHCDLRIDRDENAARNILALALAFKSARTGLSGVNVDQRVMRSLRSSPL

SEQ ID NO: 6771 - protein, 297 aa, Okeania sp.
VQNLPSSAFKWKDGQIYLAKCAEPLPIRWSRQLPQDCVPSTITVKADPCGRWSVSLRVNDTRNLLLLPVNKQIGIDLGITSLLTTSDGEKIANPKNFNKLYKKLRLAQKSLSRKTKGSNNYHKARLKVARIHAKIKDSRLDYTHKVTTQLIRENQTIVVEDLGVKNMVKKRCDPATTSVARERAPRDHKLARAISDANWSELVRQLEYKAQWYGRQLIKIDRYFPSSKRCCSCGHIVEKLPLNIREWDCPECGSHHDRDINASINILRMGTRVGVRRKGTPTKKAAGGAVSVCGARF

SEQ ID NO: 6772 - protein, 494 aa, unknown
  TnpB Polypeptide
MLDSESVLAQLTSELQSISAYATFVTRNDIRLKDELARAGAVQPATAGRRAGVTMPDFLVTGKSGRSRKEFLVQHNVVTSYRSWQERISAASGESGKYISRGWKRTVNASAPTYGDGYVNLGAVDRQYAVIENNPFVHGEIVLKMVIQGQWYRLIFRFDKARFPEGKVTLPLVKVENGAPVFIFSVITENPVVQFSGDYVIGVDVGINNYATVVVRNTETGRIVHETTLSQRVHSLWNSVRASEKQVRSLRKKAVGLLYQRQARMAALNEAQLHREAASRKKRELAILAAQEIAYLAHFYGNAVVAVEDLSWIRNTMQNGRWNRGELIKWLTHYVSQNGGWVVAVNSANTSQVCHLCGVKVTHPVHEISICPKHGAMDRDVNAAANIATRAVPRVEKARKTRAKNRRLQPQAPLKTPQKRKTLKHPSGSRNKNHATPKRKKYRILREVNLPPRPARVTTTTVLADCLTTCIAETSTAAFNQGNITYECRECSLN

SEQ ID NO: 6773 - protein, 393 aa, unknown
  TnpB Polypeptide
MISFICKVVRLMFKAYKFRLYPNNKQLELINKTFGSGRYVYNYYLDKMKNNGYVPAYTNIKDYTSTLKYDAVFLQEIDSIVIRKSLFNLDDAYKKLFNKTGGYPKFKSKYNKNSYNTTAVYNNYKNKEYCNIELDLTNRQIKLPKLNWVKIKGYRNINNINGKIKSATISREPNGKYYVSVLYEMYDKIPVINHRTIVGIDLGIKKLLTLSEGTTYDNNKYIDKYEKRIKRKQRELSRKEKGSKNYYKCKKKLAILHSKLANARKFYTHKITKNITDEYDIITCEKLKTKEMIIKGKDNKLSSKINDATFSEIVRQLQYKTKYKGKYFYQINTYYPSSQICSRCDNQDKIYKDLTRREYKCTKCGVKLDRDLNASINIMFEGLKLHMKNYAKI

SEQ ID NO: 6774 - protein, 380 aa, unknown
  TnpB Polypeptide
MKHRAYKYRFYPTFKQKELLLQTFGCIRVVYNKSLHVRQEAYINDNIKIGYHETSSLLTEWKQLEEYKWLNDVSSIPLQQSLRHVQKAFTNFFAGRAKYPNFKKKSSFQSAEFTKSAFRWDGKNLFLAKTKDPLNIRWSRYFSGDPSTVTISKDSANRYFVSILVKEEIPYLDKSENSIGIDVGLKSLVTLSTGETIKGINSFRTNETKLAKLQRKLSSKRIGSNNRDKARLKVARLHAKIADTRRDFNHKLSTRLIRENQTIAVETLSVKNMMKNSKLSKAIADASWGQLLGFLKYKAEWYGRELIEIDRWFPSSKRCSSCGYTLDNLPLSVRSWTCPECRTLHDRDVNAACNILAVGQAVSAFGENVSLVSCDISNSP

SEQ ID NO: 6775 - protein, 416 aa, Streptomyces sp.
MNHVRTVMVMQLRYTFRLYPDPGQQRALARAFGCARVVFNDAVRAREEAREAGRPFPGIGELSTRLITEAKRTVERSWLGEVSAVVLQQSLRDAETAYRNFFASLKGTRKGPKIGPPRFKSRKDSRQSVRFTANARWKITDSGRLDLPKIGAIKVKWSRTLPATPSSVTVVKDAAGRYFASFVIDTDPAADAARMPHTDRAIGIDLGLTHFAVLSDGTKIDSPRFLRRAEKKLKKAQRELSRKQKGSRNREKARRKVARAHAKVTDARREFHHQLSTRLISENQGIAVEDLSVVGLARTKLAKSVHDAGWSSFISMLEYKAERYGRTLVKIGRFEPTSQTCSTCGAVDGPKPLDVREWTCTTCGAVQDRDHNAAINVKQAAGLAVTACGAPVGPEPVLAQRGKTGSHGFPTGNRAA

SEQ ID NO: 6776 - protein, 465 aa, unknown
  TnpB Polypeptide
MQTVSSYGVELRKQNIPVRQTLEIYRSAVSYLTEIYEQVWEELAEIPDAKRRFNAAEHLVHTTKKNPARFDFDLRFPKMPSYLRRAAIQHALGSVSSYETRMELWEKSGEKAGKPRLAYENHAMPVFYRDVMYREEKEGKDEAYLKLYDGHDWKWFSVNLLHTDMEYLRKNWSGVKSSAPTLEKRHHKYFLRFSYTEEVSLSKKEVNEQIICSVDLGINTDAVCTIMRADGTVLGRKFINFPSDKDHLYHVLGRIRRFQREHSSRQVQSRWDYAKRLNMELSRKIAAEITKYAAEYQADVIVFEYLEMQGKISGKKKQKLHLWRKRDIQKLCEHQAHRNRIRVSRVSARNTSRLACDGSGAVVRNPENHSLCTFRTGKQYNCDLSAAYNIGARYFIRELLKPLPETERSSLEAKVPAVKRRTSCVYADLRKLYVEVMLSRLVDTFFSRTSWTMLLYAENHSISVA

SEQ ID NO: 6777 - protein, 425 aa, Halorussus sp.
VADDSYLRRTAITRLSVSPEQADLLEDTIDEWRIGADIATDIGWEHYETRKRKLQSLAYHDVRDETRLGSQHAILACFQAAQALKGVDERKQQGRTYSKPEFTAPTVKYDANTMTLFDDNTVSLATTDSRVRCELVLPDDENGHQYQYLDNDEWEVTESTLTARDGNYYLHLGFRKPKPNADESPAEDRTVLGVDLGIENLAVTSTAHFESGQELLHEHHEFERVRGGLQETGTESAHRTLVQRGNREERYNRDYLHRVSNRLLAEAVTYDCTHIAFENLTHIRDSMPSKRKFHRWAHAQLVQYVGYKADELGIEVVYVDPANTSKRCCECGHTSDGNRTERDFFECEKCGATANADYNAAKNVGWRFVRRGRHDSRRTGDSQLALKSGTVKPNRGFVSYSATESEVESTGKPHPQRSERVSASE

SEQ ID NO: 6778 - protein, 420 aa, Hyella sp.
MILNYRYRIYPDAQQIELLNEWLETCRVSYNYALRELKDWIASRKCPIDRCSLESEYIMAADYPFPSYHQQQNNLPKAKKKFPRLKTVPSQVLQTNIRRLHDSWDSFRARGYGFCRFKKYGQMKSMLFPQFKSNPLSDWTIQLPKLGKVQINLHRPIPVGFVVKQVRVVKKAMGWFAVVAVESDFELKSPIPHGHAIGVDVGLLSYIATSDGYTEPRPKFFKTAYSRLKVLQKRLSRKKERGKNYEKARSLVAKQHNHIAFKRTDYQFKLAHKLCDMADTIYVEDCDFRIMAKGMLGKHTIDAAFGKQRDILEYVARKRDVFVGRIDHRGTSQTCPNCRTEVRKDLSVRLHECNECGYVVDRDIASGQEICNRGQETYRGTPEKPEIGSQVVLSGNFVVGKWRSRGAMPISDNGKPALYR

SEQ ID NO: 6779 - protein, 389 aa, Boseongicola sp.
MEHMANMGRHLIRSYKYRLYPNGAQEAALSDMLGHFCDLYNAGLQQRIEAWNRQGVSLGYVDQANELKAVRDAVPELAGYSYSAEQQVLRRLDKAFAAFFRRVKAGETPGFPRFRAKSRFHSADFRVGDGLVCKGGKLRLVGIPGLVKVRWHRELPAKPVHAIVSRSNGKWFVTLQFKVRDLRVPGEEDTRPDVGIDVGLNSIVATSDGVTVPAPRHLRKAQARTRRLQRALARNERNSKRRAKARRNLARHHGRVAAARRDFLHKLSHDLASRHRVIAMEDLNMEALKRSFLARSVHDAAWRRLRDMLTYKAESAGGSVVLVDPRGTTQRCSGCGRDPDRPKTLGERVHGCDGCGLVLNRDVNAARNVLQLVQGPGTGLRSRSVRVAA

SEQ ID NO: 6780 - protein, 347 aa, Epulopiscium sp.
MQLTIEVKLVPTFAQQHLLMQTFKEFIATINNLTARMNEVGEFLKLSTADFSALLPSAIKNQCIREAKSIYKKFLSGTNKTLAVLKKPICIWNNQNYTIEENTISFPVWRKKCTKISVKAKIPTRIKNLLENKRGTLRISKKGNKYMAQITVDIPEKASTSGENTMGVDLGIKVPAVCVTSNGKVKFIGNGRENKTIRREFSGRRKELGKAKKVKAIKKINDKENRIMQDKDHQYSREVVNFALQNNVSVIKLECLNNIRNTTRTSRKNNKNLHNWSFYRLSQFIEYKAKLAGIQVEYVNPAYTSQTCPMCGLRNKAKDRHYACSCGYTGHRDLVGAINICCSLDIC

SEQ ID NO: 6781 - protein, 402 aa, unknown
  TnpB Polypeptide
MAYSKSNNSKHVRALQFEIFPNEEQKLLIEKTFGCCRKVYNLIIADKLAYYEKYNIDKDFTPAPYKKIYPYLKEPDSTAFANVQQHANRAFAQWIKDKENKSKKNKSGKPRFKKKGKCRPSYTTSFTNNNIELIGNKLKVPKVGLIDILLHRELPDWAQKIQSVTIFRTPIGTYKASILFKYEIQAPTKILSSVLGLDFSMSDLYVDSEGFCANYPKFFRQKQEKLAKEQRKLSRCKKGSKNYFKQLRKVNKIHYAITNQRKDYLHKLTTYLANNYDVIAIETLNLKGMASKDGFKLGKSVHDVAFSYFTSLLGYKLNDRGGKLEKVDRFFPSSQTCNHCHNKFPITKDLSVRQWECPNCHTINDRDANAAKNIRDEAMRLLGITAPIKAVELKGNSGIVCR

SEQ ID NO: 6782 - protein, 336 aa, unknown
  TnpB Polypeptide
MFKSFFALIKLAKQGKYNFRYIKLPNYLPKNGYYNLTIVDFKIKDNILTIPYSNTFKREKYRTKIQIKIPTVLENKKIKQIQIIPKFDARFFEIQYIYEIQEENINLNTNNALAIDLGVNNLCTCVTNTGKSFIIDGKKLKSINQLFNKQNAKLRSIKDKQNIIKQTKQQFLISRKRKNRVNDYINKTCRYIINYCLSNDIGTLVIGYNQSFQNKTNLGKRNNQIFTQLPFGDIRIKLEFLCKRYNINYIMQEESYTSKASFFDNDELPIYNADNPQTYKFSGKRIKRGLYQTKNKYRFNADCNGALNILRKSKAVDLTVLCCRGELDTPKRIRVL

SEQ ID NO: 6783 - protein, 257 aa, unknown
  TnpB Polypeptide
LITLEGRQTIPVRFREYQKVRMDRIRGQVDLILVNGVFYLCVVVEASEESPYDPVGVLGVDLGIKNLAVDSDGEVHSGEQINQTRDRCDSLKARLQSKGTKSAKRHLKKLSGRMARFSKDANHRISKKLVAKAKDTLRSIALEDLQGIRDRVTVRMAQRRSLHTWNFGLLRMFVDYKAKIAGVPLVFVDPRNTSRTCPSCGYVAKANRPNRGDFRCEACGYAGAADHIAAMNIAFRAAVNQPIVAGKHLTSVTSSGL

SEQ ID NO: 6784 - protein, 372 aa, unknown
  TnpB Polypeptide
MHKNFQYRMYPTKKQATKLTDTLGECRWLYNHLLEKRKDAYEHRGESLTCYGQITTFPLLKEEHPSLTTVHSQVLQNVAVRIDLAFKAFFRRCKAAETPGFPRFRGRDRYDSFTFPQSGFSITHDDHVTLSKIGSLKMVYHRPIKGTIKTCAIHKSRTDKWYVCFSVECEPQRLEPLETQVGIDVGLTTFATLSTGETIANPRFFRQEEKALAQVQRTHAKLATGTPERRKHRKVVARVHERIAFRRDNFTHQQSRQIVDRFGVICVEDLHVTRMTHNHCLAKSIADASWSEFFNKLAAKAEEAGRTYVAVNPAYTSQTCSQCGHRHKMPLRERIYQCPCCLLVLDRDLNAALNIRAVGRHSLGLSVEAPSL

SEQ ID NO: 6785 - protein, 159 aa, unknown
  TnpB Polypeptide
VEFEPQPRQNNGGCIGIDVGIKEFYTDSNGKSVANPKYLEKTMCKLIREQRRLSRKQKGSGNRRKQRVKVALVHEKITNQRNDFLQKQSTMLIRENQTICIEDLKVKNMMRNHKLAQHIGSAAWGKFFDMLTYKSAWYGNDVSKCRPCTKQSDMFLLWV

SEQ ID NO: 6786 - protein, 384 aa, unknown
  TnpB Polypeptide
MLHSFTRTLRFKVRSESYRWLDAAAIEVNQVFNYCNETSYLAATRTDLKRKWLSGFDLCNLTSGATEYFEHIGAGTIQRVCTEYAAKRAAARRLKLRWRVSRGTRRSLGWIPFKAASLKRKGRSIRFCGKTFRVFESQRLESVKWKQGCFAQDAVGDWWLCLPVEIPAEDSVAPLPAVGIDLGIQQAAVTSDGERLEAHRFYRDAERKLSQLQRRGHRRQAKRLHRKIGRRRADACHKFSRSIIGRYQNVIVGDVSSPKLARTSMAKGVLDSGWGMLRRMLLYKGEHAGRSVTIVCERYTTRECSTCGALSGPRGLRHLAVRTWECACCGERHDRDVNAARNILLFGSRCSTSVSGNESPYAAQPPSHTYRVREAGPDAPRMAA

SEQ ID NO: 6787 - protein, 296 aa, unknown
  TnpB Polypeptide
LQSSIKDLDISYQNFFRRVKNGEKPGFPKFKSKHNHKQSYKSKCVGTNIKVFDKSVQLPKLGKVKCRVSKQVKGRILSATVSQNPSGKYFVAICCTDVEMEQLPKTGATVGLDMGIKSFAVTSDGVEYLNHKYLAKSEKKLAKLQRRLSRKTKGSNRWNKARIKVARAHEHVANQRQDAMQKLSTQLIRENDVICIEDLTPKNMVRNHKLAKSVLDAGWGEFRRQLQYKADWYGKKVVAIDRFYPSSQLCSCCGTQWAGTKDLAVRNWTCPVCGARHDRDVNAARNILNEGLRLLA

SEQ ID NO: 6788 - protein, 267 aa, unknown
  TnpB Polypeptide
LSINTLGGRVKCSFFGEHFSAYLDGSYSLGTAKLVELNGLWYLHIPVTKTIEDFEKEKVRHVVGIDRGLRFLAVSYDEQGKTEFVSGKKIATKRRKFQEVRRQLQSKGTKSAKRRLKAISGRENRWMSDVNHRISKTLVQKYGKNTLFVLEDLTGISFEETNLSRGAKQNYALRSWSFYQLEQFLSYKAHENKSEVLKVSAKYTSQRCPKCGTIHKENRDHRRHLYSCQCGYKSNDDRIGAMNIQFLGTMWISGDNNPRYERITVLE

SEQ ID NO: 6789 - protein, 424 aa, unknown
  TnpB Polypeptide
MQKSVTRTLVCQLNIGEGSPRLLTEGQVEARRVVNEVFRLDDEGYDWKQIEEIAVDRSNHVQNTTQRLVDKAIDALERYYDEDDYGHPGQNHEHAFPVRMNHGEGYALTVDDETGSVNFRITAQKRTFVRGTLQSGPEQIEMLQTALTDEKWRVGTAEVVSRHGRHELHINVTHETATVRSEEDAVTFVGVDVNEDNVSLAAVTEAGVEDSIVIEYPEIKQERHEFFTIRKRMQSVGQTAFETTIENREQRFVHDRLHQVSRRVVEWSEQFDDPVFVFEDLKDIRDDIDYGTRMNRRLHSLPFAQLQTFVSYKAAWNGIPVVKIDPEYTSQECLSCGHTDRANRQKKRFKCVACAFQDHADRKAAVSISAKGLQKLNRNVPALNNLPVVRVRRQRNGACEPPDHDPVSSVRGYQADGDSGSVSS

SEQ ID NO: 6790 - protein, 425 aa, unknown
  TnpB Polypeptide
  misc_feature (355)..(355): Xaa can be any naturally occurring amino acid
  misc_feature (366)..(366): Xaa can be any naturally occurring amino acid
  misc_feature (372)..(372): Xaa can be any naturally occurring amino acid
METLRGYVYTLKPTPEQEILLSQTAGVTRLVYNLALEQRRVFGGKRYRGGPGRNFGAKGLSTELSELRKAFGWIGSVSQTAQNQALIDLDRAFTNFFEGRAGYPRPRKRGLDDAFRHVGREVSVRRLNQKWSEVRIPKIGWIRYRDTRPLGRSAGGDVEIKNATLRRRPDGRWDIAFALKVDVQDRELPEAAVGIDRGVAIPYALSTGDSVHLPETMARREDLIRRRLRRLSRQVRGSKRYAKTRRRIARLKGCNAACRAHAAHVLSRRLVQGYGLIAIEDLKIRNMTASARGTVEEPGRNVAQKAGLNRSILNVGWHALERMLAYKLEETGGLLVKVPAPYTSRTCACCGHVAXESRESQAEFRXVACGAXDNADVNAAKVILQRALQEDTEWRRNTASLDVEGAIAPCEASTRNVTCDLDADR

SEQ ID NO: 6791 - protein, 365 aa, unknown
  TnpB Polypeptide
VAETIRQFNECCNFFLELGFEAHTYSKKNLQRLGYYGARERWPRLQSSLVQGARDCAHDMLKRERLTRLPHKNATSAIRFNQRTFKVFLMSGELSISTVAGRIRVPFSLPKYFRRYVTAHVAELRLGQRDGRLIAGLIVEIPDVAPRTTENPKVLGLDRGIVNIAVTNNGQFFHSKELRRIQGKRTFQRARLQAAGTRSARRHLKRVAGRERRFQADSNHRIAKRIAAMDFDVLVLEDLSVGKEKDNGRRFNRALGRWAYGQLGAFLTYKCEEVGKHSILVSPRNTSRVCSKCGMKGTRARSEFFCSACGLRLNADLNAARNIAQRGNALLSRRPVNPPIVTRDEIKARNLVQRSYKPPLSLRGR

SEQ ID NO: 6792 - protein, 334 aa, Photobacterium sp.
MKDIAMKFRFYPTPSQEHLLARTFGCVRVTYNQILKHRTDAYYSDNEKINYNKASSLLTQLKKQAEFEWLNEVSCVPLQQALRHQQTAFRNFFEHRTNYPKFKKKHAKQSAEFTKSAFYYRDGQITLAKCSEPLDVRWSRKLPSDPTTVTVTKDSAGRYFVACSCQFDPKSLPISKQSVGIDLGLKDIFVTSDGVRTGNPKYTKRYAKKLAKAQRNLSRKKKGSNNRNKARIKVARINTKIADCRRDFSHKLTTALIRENQFIFTESLAVKNMIKNHKLAKHIADANWGELVRQLTYKAEWYGRTVVQIDRFYPSSKRCNGCGHVVDSLPLHIR

SEQ ID NO: 6793 - protein, 327 aa, Sulfolobus sp.
  misc_feature (89)..(89): Xaa can be any naturally occurring amino acid
  misc_feature (131)..(131): Xaa can be any naturally occurring amino acid
  misc_feature (133)..(133): Xaa can be any naturally occurring amino acid
  misc_feature (170)..(170): Xaa can be any naturally occurring amino acid
  misc_feature (175)..(175): Xaa can be any naturally occurring amino acid
  misc_feature (198)..(198): Xaa can be any naturally occurring amino acid
  misc_feature (243)..(243): Xaa can be any naturally occurring amino acid
  misc_feature (251)..(251): Xaa can be any naturally occurring amino acid
  misc_feature (283)..(284): Xaa can be any naturally occurring amino acid
  misc_feature (286)..(286): Xaa can be any naturally occurring amino acid
  misc_feature (288)..(288): Xaa can be any naturally occurring amino acid
  misc_feature (300)..(300): Xaa can be any naturally occurring amino acid
  misc_feature (302)..(302): Xaa can be any naturally occurring amino acid
MWRAKGKSNKIQLSFKYRIYPTREVEEKLLRVMQVEAKVYNALLDAVNNARKEGKRITPKDTQDMLKDLKIEGKELVYSKVLQMVNNQXWYNINSLHELKKRGKKVGKLRYKKIMKIINYNQSGFKVVGDXLXLSKIGEMKVLFHRPLEGEVKGVIIKKSAKGWYAIFQXEVEKXPLEKTGKVVGIDLGVEKLVTTSXGVVIENPKVFDKVERRIKILQKSLSRKKKGSRNYEKVREKLAKIXEYVKNLMXDYIHKVTSWLVEQYDEIYVEDLDVKEMVEDSXXKXLXKHILHSNFSKFXSXLSYKAERAGRRVVKVDPRNTSKNMC

SEQ ID NO: 6794 - protein, 368 aa, unknown
  TnpB Polypeptide
MKTLKLRIKDKHTDQLNRLSGSVNFVWNYVNDLSYKYLQRTGKFLSAYDLSEYTKGSGEYLGLHSQTIQAINETHAKNRKQFKKAKLSWRTNNPKSKRKSLGWIPFKHSAIKHIANHATGKKSLKSTLQLSLAKGQKLLIDVWDSYNLSLYQINTVEIVQDSRNRWYACITVKDYPKTICGTGSVGIDLGIKDSATTSNGDKLQIKQTFKYAKKLATAQCARNKNQVKAIHAKIKNTRQDLIHKFTTQLVKNNALIVVGDVKTTQFNSKKGKLAKSVYDSGWFEIKRQLTYKCKNAGCRFEIVNEKYTTQTCSCCGQIDGNSPKGRAGLRIREWTCAKCGTWHDRDINASKNILAVGLDRLGAGIPSL

SEQ ID NO: 6795 - protein, 406 aa, unknown
  TnpB Polypeptide
VKTLKQTFKYRAYPRKIEEQWLFAEFRHQKQLQNYMLQMRHQMWEYGQKSVSMYDQINHLKNLRASNSHYSDHPQDMQVSTIKRVNAAHEHFRRRCREGVEKKGYPRFKRSVHSLSWSLRKHTLKTGERVRQNPIRETGTRYNRLKVPKLGEVAIRQHRPLNGDPKEVTLKKTARGWYCFIVCEVPDTPKCVPKSACGVDVGTHAFLTTSEGERKPNPRFYRQAEQKLIRLQRALSRKQYRSKRWYKAKDALAKQADIVACQRLDFIAKTAYKLFHHKGFDAVVAEKLRPSNMVKNRHLAKSIADASWGMFFDWCHWVAKREGKHFHQVPPHNTSQTCSECCQKSPIKLKLSERRFHCKSCGLELDRDHNAALNIRFRAACALRGEVWDTILYETRNPLLLRACWG

SEQ ID NO: 6796 - protein, 366 aa, unknown
  TnpB Polypeptide
MKYNLAFKYRIYPNKEQELLINKTFGCVRFVYNTILYTANKFYEETGKNKIITPASLKSENQFLKEVDSLALSNAQLNVRRSFTNFFQKRAKFPRFKSKKNNVKSYTTNCVNNSIRIEENKYLVLPKLKKVKLKYHREIPKNYRIKSVTLTNSNGNYYVSVLTEFEKEIQKVASNNDKVIGLDFSMSELFVSSENQRADYPKYFRMLEEELKKLQKSLSRKVKFSKNWYKQKAKISKLHEYIKNCRRDFLHKLSKKLSEDYNAVVVEDLNMKGMSQALNFGKSVGDNGWGMFLRMLEYKLMFLGKQFLKIDKWFPSSKTCSKCGNVKDELKLSERSYKCECCGIEIDRDYNAALNIRNVGKEIMGY

SEQ ID NO: 6797 - protein, 213 aa, unknown
  TnpB Polypeptide
VEKSYKYRIYPNKKQKVLIAKTFGSCRYVYNLYLAKRIEMYALNKEIFSYEQCCNDMTQLKSELSWLKEVDSTALQSALKDLDMAYQKFFKEHSGFPKFKSKRIHRFSYRSKHSHGNIRYCGEYIRLPKLGMVKTKTKLIPRGRILSATVSQEPSGKYYVSLCCTDVEVEPLERTGNAVGLDLGIKDFCVTSDGQVVESPKYLKKSLEKLAKL

SEQ ID NO: 6798 - protein, 416 aa, unknown
  TnpB Polypeptide
MYEERNRKIKENGKATRERRSKMDCRVVSVKVQENRLSCTKYEKIVRCFLEGKWLYNAIIATDSLTLEDTSKVQVKVNDTFETREIKNLSSQMKQSIIDSAKTNVCNLSKAKKKGLKVGKLQFKRECNEINLKQFNNTYKIKSRNKISIQNIGILVVNGLEQINLDEVEFANARLIQKPSGFYIYLTVYSKKQSQSNTEKEVLGLDMGIKDQLTFSNGVKVNFYSEESEQLKGLMRKLNRQVKGSNQYKQTLNRIKKIYEHESNKKNDVANKLNSVLKQNYIVCFQDELLNQWKRKKSKHKFSFGRKVQHGILGRVKDKLKKNDSNVMLESSVPTTQTCPVCGCLTKHGLDKRQYHCERCGFENADRDVHSANMMVLLSGYGTYRSLNTDAVSTERMISLLDNLSNLGVVVTTNSM

SEQ ID NO: 6799 - protein, 382 aa, unknown
  TnpB Polypeptide
MTLVQKGIRVRLYPTEEQEVLINKTIGCCRFVHNQTLADCKQSYEQAQHLPSKNKRITNLVQLKEVHEFLKEVDSTALQQSVRDLNSSLDNFFKNRNHFGLPKFKEKHSPKQSYRTPCNHGAANVLDNKHIKLPKLGKVKTKRFNMPEVYKIFNITVERTNTGKYYASICIETEVQSLPETGRQVGFDLGLIDLLIGSDGSRYERPKFSYAFKEKLAKEQRKLSKMRTKLERVNANLDECKNYQKQKRKVAKLHERIANCAKDFNHKLSIKLVRNYDLLAFENLNVEGMKQNHKLAYSISDVRWSQLLNFIKYKCLWYGKEFKQVDRFYASSKICSCCGTYHKDIVNSLSVREWVCPDCGIRHDRDVNAAKNILNQALNVGV

SEQ ID NO: 6800 - protein, 375 aa, Methanothermus sp.
MSHIYAYKFRLYPSKEQEDKLLETLEICRHVYNYFLSEINNSKEYISYYKMCKRLTQLKKEKTELKKVYAKVLQLVLYQLHSNLKALAKLKKNGKKVGRLRYKGKWFKSFIYNQSGFKIIKTGKRLDRLYLSKIGEIPIRINREIEGKIKQIIVKRYRSGKWFALVCIEKEKETKPKTGKAIGIDVGIKHFLTDSEERQIENPRFYEKTLERIKIEQRKLSRKKKGSKNYEKQRKKLAGCYEKLRNQRDDFLHKLSRFYVDNYDVICVENLTIKNMVKNHKLAKSILDASWGKFLQMLSYKAERAGKIVKKVNPRGTSKGLTYKNKLRDYISACRILLREWGSPDSLPERKPLLRTISCKDIVSGQVFSMKQEAP

SEQ ID NO: 6801 - protein, 386 aa, Lachnospira sp.
MRKLLKSFKTEINPSKQQIAKINKTIGTCRYIYNFYLAHNKELYDKGEKFMSGKSFSVWLNNEYLPNNPDKLWIKEVSSKSVKKSIEDGCTAFRKFFKHQSGYPNFKKKYKSDVKMYFVKNNPKDCACERHRINIPTLGWVKLKEKGYIPTTKDEWKIKSGTVSKKADRYYVSVLVEVPDNKIANNSNEGIGIDLGLKDFAIISNGHTYKNINKSVKLKKLEKQLRREQRSLSRKYENLKKGESTQKNIQKQKLKVQKIHHRIDNIRTDYINKTIAEIVKSKPSYITIEDLNVSGMMKNKHLSKAVVSQKFYEFRTKLKAKCDDNGIELRVVDRFYPSSKLCHCCGSIKKDLKLSDRIYKCSCGYVEDRDFNASLNLKDALTYEVA

SEQ ID NO: 6802 - protein, 220 aa, unknown
  TnpB Polypeptide
VGIDVGIKDFAVLSNGQVFSNPKYFESAQKRLGCLQRRMSRKKKGSNRYKKAKHDVAVCHERIRNCRQDFLHKVSKRIVSENQTIIIEDLNVGGMLKNHCLAKGIASASWSEFFRMLQYKSDWRGVNLIRIGRFEPSSKMCGCGYVHRDLKLSDRVWTCPECGAVNDRDLLAANNIKKFGLEKQNLLTQENINKTPVVNREGDVELPTLVGTVKRQNVLV

SEQ ID NO: 6803 - protein, 442 aa, Streptomyces sp.
MLGFQHGVTSLNALAFVSQATLVKRKFGHRARLALSPAEELKLDRQAHAARTMWNLLHAWWQMVPKDKRTLAAADAAIRQARKEVDFLAALPAQAAQAVLKTYFQAWKNCWDGHADEPNFKARIRSVMSVDIPQGRHLHIARVHRRWGMVNLPKIGRVRFRWTKDLPVGKRAGEENRITGARLVKDAFGWHIAFRAQTLEQAPAPHTGPEVGIDAGITVPLALSDGSHRTHGNWLTEKEQAKLLRLERRAAQRKAHHKPGERTSRRLGKTYDQAARLRAKARRRLQDWQHQTTTAIADTYGTVVVEQLQITNMVKSAKGTIEQPGRNVAQKAGLNRSIHAEAWGRTITMLTYKLAQRGGALHKVPAHGTSQRCSVCGFTTPGSRETQALFVCKNPDCGWSGNADHNASRNVLHLYRIGLVAIPAAERAVVRRARRVKPTTAR

SEQ ID NO: 6804 - protein, 370 aa, unknown
  TnpB Polypeptide
MDKSLKYRLFPTKQQATLLGAQLNECRWLYNKLLEERRDNWEQRQEGLSYFKQCKRITELKTERPGLSSVYSQTLQNVADRLDKGFQAFFRRVKVGEKPGYPRFKGFDRYDSFTYTQFGFGIKDSCLNLAKIGLIKIKLHRQTFGTIKTCTIRRQAGKWYACFAIQYEPEPLPKSDRAVGIDVGLKSFATLSTGDKIANPRFFRTDGKALAKAQRKLSKWEKEAPERHKAKKVVCRIHERIFNKRHNFIHQESRKLVNQFGLIAVEKLNINGMLSNHCLAKSISDASWGQFINILSAKAEEARREFVMVNPSGTSQLCSRCHSLVPKDLSVRIHSCPVCGLVLDRDLNASFNILALGLQSLGKIPRSPRL

SEQ ID NO: 6805 - protein, 250 aa, unknown
  TnpB Polypeptide
LRSGFVCHNPRYLPHIKGEADLVYRKGKFFLFQTVEIPEENIKDVEEFIGVDFGVNNIATLSDGIQYNSKQLDKVRNRYSRTRQSLQSKGTSGGRKCLKRLKGREARFATVTNHAIAKQVVEKAKSLNMGIALEDLTGIRERTKVRKVQRRKHHSWAFAQLRFFLQYKARLAGIPFVMVNPRYTSQTCNICKMIGHRKGPSFSCPNCGNISDSDVNAAKNIAQLGIAVTDPERGSMICSIPLMPCQLAAG

SEQ ID NO: 6806 - protein, 412 aa, Halobellus sp.
VTELTKTLELKLVDPNAHKRRKLRETRKAYRHALQDAFNQNCTTQTEANDVVVTYNLSGYAKNALKKYVPQLTTTYNAGDLHDDHPVRFTNEGLRLDHKPENAIEWYVKIPHHEDYHLWLPAQPNPEQRDWLEAVNAGDAEMGESRLFEREGTWFLHVTATREVKKRSGASAEKRTPIGVDIGEASLVTVCHRDDHGSPTTPQLWADEGKTVRRLRKTYFTAKRRLQTRGSERIAESFGDDLWNQIDDVFHRVTREVVEYAESVENPVLVLEDLTYIRESMDYGEYMNRRLHGWGFAKLNAQIRYKAVEKGIPIETVNPCNTSKECHACGEIGYRSQQATFKCTNDTCWMGEYQADVNGAINIADRYLSGESYSREHTDGDDSAEDGGRLTAPQDTHADAETQQETRGTYAS

SEQ ID NO: 6807 - protein, 444 aa, Halobellus sp.
MKRVNQFDVRPRSEKEREVFKRWLDASASLWNETNYARRQNFLEDDKNVWDADTGSLEGKYKGVLSSSVVQQIIRKNSEAWRSFFSSNKYHAGKLDEKPSPPGYWGNEEDGRVLRTYVRNDQYTIEYGKRSRLEVPIGSELKDELGLNRNQRLRVEVAGDPKWSGEQNRLEIVYDELAETFRAFQPVTVDDSRLDSPLASEEAALDVGANNLVACTVSTGSQLLYEGRSLFEQFRETTERIAYYQSLLENQRESSKRIDRLYRKRTNRRDHAQDSLVRELVERLYDEGVSTLYVGDIKGVLSTHWSPHVNEKTHNFWAYRRFIDRLEDVCEEYGITVEGESEAWTSQECPKCGEREETIRQEDSLTCPCGFEGHADLVASESFLRQQNNAVRPMARPVYLKWNNNEWREHHNPPSVAVETTANEEYTDQSTTTSENIALGDSDD

SEQ ID NO: 6808 - protein, 389 aa, unknown
  TnpB Polypeptide
MLRVYRYRLYPTRAQDESMRTTLYRLRELYNAALQERRDAYRKQGRTISGYQQMAELREVRELRPEYTTIHTHLLQDVITRLDRAYRAFFRRIKAGEKPGFPRFKGRGQYSTFTFKDAVNHNGVRLLAGGKRVKLAGIGNVKVKLHRPTEGTIKQASVTLSGDGHWYIAFVCDGVQPFPLPSTGTSVGVDVGITTFAALSDGTMVANPRPYETAQRSLAMAQRRVSRRRRGSKRRRKAVVLLSKKHDHVRRVRLDFHHKTALDLVRRFDSISVEKLNVKGLAQMRLAKQVHDAGWAQFATILAGKAESAGREFFAVDPRGTSQECSGCGATVRKNLGVRIHHCPECGLVEDRDINAAKNVRRRGQRLRGGVVDGLAQDPRSPLLAVCGS

SEQ ID NO: 6809 - protein, 432 aa, Vulcanisaeta sp.
MGMPPQTTTNEARKPLRRAVAVELEVTRELNRLLYSVETTYLNIVREVVEYAVANNVTGANKLHGLFYRRYRLEYPSLNSQLIIQAIRQASQIAKSFVERRKRGLADKPYPEVKNVSIKFVETTWSYEQFIKSIAPVRIAISPISTGKRGRGSRRFEVWLRLHKRFWLYWWRVLTGEARLASTLIIKRRANRWYAVFVFEIKPKEELPRAIVAFDINENTVAVGKIDLPSTVDKVAKWNKQYLTPQLYMIRTDFGRLARRYERVRNAIIERLKPGFALPSGKYVNATNTREYRKLVRKLREEDRKVGRVRQIANELTKTPAIIVTEDLGEKPQDEMINGVSKGELRHRIKQTPFKSIEEAVEDKALERGSRVFHVSSYRNSRVCPIHFVRLERTDDWHILQCPLGHLVDRDYASVMNMTWKTTPESWTKAFW

SEQ ID NO: 6810 - protein, 444 aa, unknown
  TnpB Polypeptide
MQESGLTQTLSFGLTIQTGSSDNLHEGSLEARRVRNEVNRLDKEGWDWNDIHDTVVDNSNHVKNTTQLLVKKALEELETYHDHKDEDWGRPYPYIDETYPMRMNHDEGYALTVDGSGNVRFRISYKPYNYVKGVLRGSPSHLEQVKNALNSDAWRVGVAELVYKHNEWRLHVTVTHKTRSVPSPDDADTVVGVDINEDCVGLAAMNRDTGDVLDSVVIEYPDIKRVRHEFFTKRKRMQTVGQTAFETVVQTEEQDFVHEQLHKVSRDVTRWVSQFNDPVIVFEDLKDMRDSIDYGTRMNRRLHSLPFAALRDMVTYKAAWNSVPSDDVDPEYTSQRCPRTECLHTERANRYKKRFKCKACGFQDHADRKAAVCVAQEWFNKQNENVLSLETLPRVKKVRRTVSGLCEEADAHGAVFASGVTNAESARPEKEVRAELKTVASTAD

SEQ ID NO: 6811 - protein, 383 aa, Meiothermus sp.
VKLTAKVKLLPTPEQRGYLLDTLRRFNAACNYISDVAWETRTFKQIPLHHWVYHTVKDRFDLSAQMAVRANAKVVDAYKLDRQKPRSFRELGAITYDDRVLSWKLTASTVSIWTLQGRQTIPFAAGEYQRRLLRTRQRETDLAYVGGEFYLFATVNVEEPEPVEVKDVLGVDLGIVNIATDSDGETYSGSHLNSVRHRHRRLRRRLQKKGTKGAKRRLKKLSGKEWRFANDVNHTISKRIVEKAQRTNRAVALENLKGIRQRVRVRRPQRSTLHSWAFHDLGQKLAYKAQRAGVRVVFVDPRNSSRECPCCGHAEKANRPDQSTFRCRVCGFADHADKVAALNLRVRGWAAVNPPNVGEANRVLHGSVPASPYQSPLGFGRGS

SEQ ID NO: 6812 - protein, 446 aa, Escherichia sp.
  misc_feature (389)..(422): Xaa can be any naturally occurring amino acid
VKRLQAFKFQLRPGGQQECEMRRFAGACRFVFNRALARQNENHEAGNKYIPYGKMASWLVEWKNATETQWLKDSPSQPLQQSLKDLERAYKNFFQKRAAFPRFKKRGQNDAFRYPQGVKLDQENSRIFLPKLGWMRYRNSRQVTGVVKNVTVSQSCGKWYISIQTESEVSTPAHPSASMVGLDAGVAKLATLSDGTVFEPVNSFQKNQKTLARLQRQLSRKVKFSNNWQKQKRKIQRLHSCIANIRRDYLHKVTTAVSKNHAMIVIEDLKVSNMSKSAAGTVSQPGRNVRAKSGLNRSILDQGWYEMRRQLEYKQLWRGGQVLAVPPAYTSQRCACCGHTAKENRLSQSKFRCQVCGYTANADVNGARNILAAGHAVLACGEMVQSGRXXXXXXXXXXXXXXXXXXXXXXXXXXXXXXXXXXLQGGDIRRGFPPDQVFAVVQCIGG

SEQ ID NO: 6813 - protein, 368 aa, Escherichia sp.
MRRFAGACRFVFNRALARQNENHEAGNKYIPYGKMASWLVEWKNATETQWLKDSPSQPLQQSLKDLERAYKNFFQKRAAFPRFKKRGQNDAFRYPQGVKLDQENSRIFLPKLGWMRYRNSRQVTGVVKNVTVSQSCGKWYISIQTESEVSTPAHPSASMVGLDAGVAKLATLSDGTVFEPVNSFQKNQKTLARLQRQLSRKVKFSNNWQKQKRKIQRLHSCIANIRRDYLHKVTTAVSKNHAMIVIEDLKVSNMSKSAAGTVSQPGRNVRAKSGLNRSILDQGWYEMRRQLEYKQLWRGGQVLAVPPAYTSQRCACCGHTAKENRLSQSKFRCQVCGYTANADVNGARNILAAGHAVLACGEMVQSGR

SEQ ID NO: 6814 - protein, 295 aa, Oscillatoriales sp.
MIVLEFRLKGNPQQYRVIDEMIRTAQFVRNKALRYWIDNQGVKLLDLYKQCAIMAKEFEWAGKLNSMARQAMAQRAIFAIQRFFSNCKAKKPGKKGYPQFKKHTRSVEYKTSGWKLSTDKRCLTFTDGFAAGTFRLLGSRDLHFYSPKEIKRVRVIRRADGYYTQFCINVERTESVIPTGKAIGIDVGLNHFYTDSSGETMTNPRHLRKSEKALKRLQKRVSRKKKGSGNRKKAINKLGRKHLKVSRQRKDFAIKTALYVVKSSDFVAYEDLQVRNMVKNHKLALGISDAAWSQT

SEQ ID NO: 6815 - protein, 384 aa, unknown
  TnpB Polypeptide
MILGHTIELNPNNKQATYFSKACGVARLAYNWALAEWQKQYEADKNYRDECRANGMEIDKTKLNSPSQFKLRKQLNGIKKQQFPFMAEVTKCGPQEAIIQLGKAFDNFFKGRAKYPQFRKKGINDKFSLTNDQFKLIGRKIKIPNLGWVKLKENLRFNGKILNATVFKKGGKWFVSLGVEIDNLPKLNAKTHKSVGIDLGITDLATLSDGTKIQAPKPLKAKLRKLKRLSRALSRKQKGSKNRAKAKTKLSRLHYKISCIRKDFLHKLTTGLVKQFDVVCIENLNVKGMVKNRKLSRAISDLGFHEFKRQLVYKADMHGKTVKEVGRFYPSSKTCSCCGFVMAKEDLTLAIRLWTCPNCKASHDRDVNASLNILNKADKVLTLV

SEQ ID NO: 6816 - protein, 618 aa, Rhodococcus sp.
MTDTTDHCRFAFTTRPYLAVDDTTGDPIGLDDLDTRIRWLLDLITGAETELLTRLWHPATFDTLSAGRDRDGRALPKHGHVVAARLGWAPTYPDGVYVPSRVSRVVTAQATATLRTSAYRDTAIASLSARFDPATGRIAPPAGGEVPVPSGFARGVRRQLLARTRRADAAGASTSGAATTDDAASDAATSDAATSDAAQPERLRITDIQTPPKVTAMARLSAADKQLTELTVTDRTMVLTVKLPTTATPTTRAQWRAVRLTAALPPHLHGRPITAWHLPTLTLDGRGLLLRCAATEAVPTGDLSSATVAVGVDWSPSALGAAAIATDTGDGLVSDFRGYTYDDRGLGIKLARLQTEGQFLHRKAARLRQLAENAPPQVRSELEAKIAVLDENRTAVGAKRRKINRELAFHFARQVTDYAVAADATMIAVEDLATLEPRGRGRVNNNRAAQSARRKAADALAHTAARVGVVAVTVPAKGSSAWCPGCNEELARPKGYHDAWCESCRLGGNRDRVAGVNLAKRALLGRGAAVRTRAGRLEIRTTEHAPVRRCRDKTGPTPGRPRHRRVRHSVPAPTPAEGVNTLKPRPAPEASVWDTVEPAASDDVSGSREERGSGPPGM

SEQ ID NO: 6817 - protein, 359 aa, unknown
  TnpB Polypeptide
MNYRTYKYLLKPTKTQKEEINKTIKACAFLRKQYGNDLDSGINMPDDYKLILSYYLRQYSNLEGYDNSALMNEVFKVRDQRERKVKIIRNSYTTKYTAYMEMNTPFKNDQIFLPKIGWIAKYDSRPIATDVKIRSYTVMKERKGTYSVLVNVTLPEPKFQQFNKVVGFDYSSTHFIVDSNGVTYDIPHFYRSEKMKIIRKHKYLRTKNKGSFRYRRVHYEIGEIHDRIHRRRFDTIHKLTHELAETYDCIVVESLNMKQIATGHKLADATYDNSYYKFVSILDYKMTERGKKLIKIDKWFPSTKTCSVCGYVLKNIDIDTRTWICPNCRVVLDRDINAAINIRNEGLKMLDAGGRLAHH

SEQ ID NO: 6818 - protein, 472 aa, Streptomyces sp.
VHAHTAQAVAYDLADAIDLARANKAQGIKGVRFPWREKRYRPLVFTSRFGWKVKDSERLVLSLGRSRERLVLPTPQFTDRQGRLVTPDHWGEMKLCWDVAARCWALHISYRSTDDSLPDASANRSEGGYSLSEARLVTIAVDEGIINPMTLATVAPDGGYEVLVINGRRGRAAKQARNKAVAQLQAKMSRCRPGSRRHRRLGEANRKVRARAKRRLRDFNHQVTAKANRFVREQLAAHEDTVSGGERVVVRMVAGDVRGIEKNTEKRRRASRSTRQQLSQWERGVQERQLAYKTGVPVEHISEANSSQTCPFCLGRRKVRGRAYVCVNKDCARVLHRDAVGGVNIHTLAVNDGAFASVAPDTDVRVKYLRAQPGWSPGQRERHGFHQRVRACAGEGRRREARSSARNRAARSDDTSATGVAAAPARSRVIVDSGTAAPSGTGRASARASGKVVEGRNPEFFAGEVHTPKLSP

SEQ ID NO: 6819 - protein, 485 aa, Streptomyces sp.
VKTFRPQPGFVVQAYRYALDPNAAQEQALCSHCGAARAAYNWAVGWVTASWWQRRAEETYGVCEEELTEWRPWSLPSLRKAFNETKHTDPGFAGWWAENSKEAYSTGLANASAAFDNYAKSKNGKRKGARMGAPRFKAKRKARLSCRFTTGTIRVEQDGRHVTLPRLGTLRTHEPALKLLTRVQAGTARILSATVRHERGRWLVSFQVEVKRDLERVARPNVAVGIDLGVKTLAVMADSTGEVRTVPNPGHYDRARGQLRRASRIVSRRQGPDRRTGRKPSKRWEKANTALGKVHHRVANLREDALHKLTTAVAAEYGTVVAEDLNVAGMLKNRRLARRIADAGFGEIRRQLDYKTGQRHATRLVVANRWYPSSKTCSGCGAVKAKLLLHVRTYECDACHLVIDRDHNAALNLAALAAAAVTGTGVAGDQGTTQAVSKPRGADQKTRATRPRRKAEAGRAGGAALPHQRQTEARDRTQAEALTLW

SEQ ID NO: 6820 - protein, 543 aa, unknown
  TnpB Polypeptide
LARNQTYRAFVARPAHILSLDGELLDSAPVLIELAAEVRGISAYATYVTRNDTQLGNELACITTTVPADAGRLAGVKIPDFLVPDKKDENGEPLKDKKTGEPIKIKTGRSRKEKLVQYNVVTSYRSWQERIKAVNGESSKYVSQGWKRTMNATPPTYGEDYINLGTTDKQYAVIENKPFIDGEIILKMVIRGAWYRLIFSFDNTRFTEGKVTLPVVKVEGGKPVFIFSVVTDNPVVQFSGDYTIGVDVGINNYATVVVRNTATGKITHQTTLSQRVHSLWNSVHASEKQVRQLREKAARLLNDRPCERQAIMAALDEADLHRQAASRKKRELAILAAQEIAYLSHFYGNAVVAVEDLSWITNTMQNGRWNRGAFVQWLTHYVSQNGGWVVSVSAANTSQVCHVCNGEVTHPEHKVSVCAQCGVFDRDVNAAANIAARAVPKVEKARAKRSRNSKLQPQAPLKTPVARCSLKHPGRDRTKNVPTPKRKKKCQGVKTLSSPARAQDSYLDARVLADCLTCGVAGTHKAAIKQGEKTYECRLCSLN

SEQ ID NO: 6821 - protein, 491 aa, unknown
  TnpB Polypeptide
MAQLTTEVCGISAYATYVTRNDEVLGERLAQTGAIQPAVAGCRAGVVMPDFLVSGRTGRSRKERLVQYNTVTAFRSWQERINAVNGESEKHVSQGWQRTANAVPPSYGEDYINLGAVDKQYAVIENNPLVDGEIDLKMLILGQWYRLLFPFDNARFTEGKVTLPVVKIEGNQPIFIFSVVTDNPIVQFSSDYVIGVDVGINDYATVVVRNTATGKITHQTTLSQRVHSLWNSVRASEKQVRNLREKADSLPLYDRQGRMAARDEADLHRAAASRKKRELAILAAQEIAYLSHFYGNAVVAVEDLSWITNTMQNGYWNRGAFVQWLTHYVSQNGGWVVSVNAANTSQLCHMCGAEVEHPEHKVSQCAKCGIMDRDVNAAVNIAARAVPKVEKACKKRAKNPRLQEESPLKTPIARGSLKYPGRDRTKNTPTPKRKKRVVREVNLPISPARVQANRLEASVLADCGAYGTTGTSYAAINQGEKTYACRLCSLN

SEQ ID NO: 6822 - protein, 430 aa, unknown
  TnpB Polypeptide
MQLVEQSVIKRDDPRFAVIDAAAFKSKNLYNVANYEIRQSYIHQGKYLNYNAVQKRMQSHEAYKALPAKVSQQVLMQLHHDWESFFKARSAYEETPSKFLGRPKLPKYKHKTEGRNMLVYTIQAISRGKNGLDRGIIKPSMLPIEVQTRHTDINQVRIVPRKGFYVVEAVYEKEVKQASVNPAYYAGIDIGMNNLVALTSNKPGFRSVLVNGRPVKSINQFYNKRKAELQKKLGHTGITKRMERLTNTRNRRIDHYMHTTSKRIIDLLVKEEIGVLVLGKNDGWKQNSEMSKRTNQNFVQIPHARFIAMLAYKAKLVGIRVEIAEESYTSKASLLDLEPLPVWKSGDEKYTFSGKRVKRGLYRASDGRYLNADINGAGNIIRKVAPDAFGPEGVEGGKAVLASLVVHPVRIVVPLTKLKNKHMMAKASSQ

SEQ ID NO: 6823 - protein, 393 aa, unknown
  TnpB Polypeptide
VHRVYRFRLEPTSEQEEVFRRSAGARRWVWNWALHQKRTHYQATGKGLSEKELSARLTALKGESETAWLREMDSQLLQQVLTDLKKAFANFFEKRARFPRFKSRKRDMARFRIPQRVTLTDGFLYVPKIGRVKVRQSQAVEGVTKSATFKRDACGHWFVSLVVETEMPLVALPMASVERTVGVDLGLKDAVVTSEGERVAAPRFYHAAQRRLKRAQRSQSRKQKGSANKTKARINVARVHQKVAAKRNDFCHKLTTNLIKDHDAVCIEDLSIKGLVKTKLAKSMLDASLGTIRRQLTYKGQWYRRQVIAVDRFYPSSKLCHECGYKHDGLTLSDREWACPACACVLDRDLNAARNIKAEGLRILNVAAGHAETENACGQGVRLPMEAALAIPV

SEQ ID NO: 6824 - protein, 294 aa, Synechococcales sp.
MPTNLAFNNLKELRILPRNGCFYAEFVYQKPNVETNLDRSKALGIDHGLDNWLSCVSNIGKTFIIDGKKVKSQNQWYNKQIGKLKTGKPQGFWSDELATITEKRNRQMRDNINKCTRFLINWCLKNDVGTIIFGWNKGQKNGINIGAKNNQKFVQIPTAKLKDRIAQLCTEYGIEFIETEESYTSKSSFLDNDELPKFSGEKPAREYKFSGKRIKRGLYKTQNGFLINADLNGAANIIRKANQNVSTQTSFNLSEVCREVLSLPHLYDIFDDLKKSYRKQASKSAVLTRFLTSA

SEQ ID NO: 6825 - protein, 183 aa, Scytonema sp.
LEVETQDHGNTDVVGVDLGVKTLATLSTGEMVLGAKSYKKHEAKLSKMQWLHRQKIIGSNNWKKAQLQIARWHRKVANIRKDTLHKLTTLLAKNHGVIVIEDLNVSGMMANRKLAKAIADMSFFEFRRQLTYKCQLYGSKLVVVDRWFPSSKTCSNCGTKKKHSRSLSECLNVVSANLQLTVI

SEQ ID NO: 6826 - protein, 325 aa, Saccharopolyspora sp.
VQRRVITEGERTEAREWLSEVASAPLVQSVQDAHRAWQNFFDSCTGKLYIAKVGEVRVRWSRDLPSTPTSVTVIREPDGRYYASFVVERDPRPLSGTEHETGVDLGISRLATCADTDGNRSDAANPKHLQRQQRKLRRVQREKSRGREGSANRDKSRREEAVQHGKVARARREYHHKQALKLVRENQVVHVEDLNVAGMVRNRKLARAISDAGWGRFVRIIEEKAAYHGRAVHTVNRWLPSSKTCSACHYLMDAMPLRVRDRTCPGCGAQHERDFNAATIILAAGRAERVNARGARVSPPSFEGVLGEEAGSSGKPRGSTTRNAA

SEQ ID NO: 6827 - protein, 369 aa, unknown
  TnpB Polypeptide
MLKAYKYRLYPNKQQIEQIQKTFGCCRFVYNQTLAYRKELYKTKKESISRIDCNNWKNKFLKVQYEWLKEIDKFALDNAVINMDSAYQKFFKEHNGYPKFKSKRNNKKSYKTNYTNKNIEVSFEKNKIKLPKLKWVKTKVHREFTGKIKSATISQVPSGKYFVSILVETEHIPMKENDNSVGIDLGIKDLLITSDGEKFDNIRTTKKYEDKLAKEQRKLSHKVKGSKNWNKQRIKIARIHEKIHNTRIDNLHKISHQLISENQVIVSEDLAVSNMMKNHNLAKAISDCGWYELTRQLTYKAEWSGRTYIKIGRYVPSSQTCNVCGFVNKDTKSLSVREWICPVCGTVHDRDINAAINILNEGMKMLNVA

SEQ ID NO: 6828 - protein, 380 aa, unknown
  TnpB Polypeptide
MLKSFKTEINPTKEQIVLINKTIGVCRFIYNFYIAHNQELYKTNHSFMSGREFSVWMNNEYLPDNPEYSWIKEVSSKSVKQSIMNGYEAFSKFFQGKSRFPRFKKKHQDLVKMYFVKTNPTDCYCERHRIKIPTLGWVRLKEKGYIPLTKNDYVIRSGTISKQAGRYYVSAIVEIPDKIVNEYSEGIGIDLGIKDLAIISTGQSFKNINKSSNVRKLEKRLKREQRRLSRKQIKKKGEVAQNREKQRLKVQKLHQRISNIRTDYINKTIVEIVKTKPSYITIEDLNVKGMMKNKHLSKAVSSQRFYEFRTKLKSKCDEYRIELRIADRFYPSSKTCNSCGRINKTLKLSDRIFKCECGYIADRDFNASLNLKDLKIYTVA

SEQ ID NO: 6829 - protein, 385 aa, unknown
  TnpB Polypeptide
LIKTYKVMLLPNNKQMTKMFAYANVSRYAYNWVIEQENKSYQENKTFVQDGELRKLFTQYKKQKENEWLYRVSNEVTKQAIKDACSSYIKFFKGKSEYPRFKSKRKSKPSFFQDSCKIKVTETQIKVEGFTQSKKSNKQKINWIRLAERNRIPTGVKYYNPRFTFDGINWWVTVGVEEELEEKNPSNEGIGIDLGIKDLAICSDEIVYSNINKAKKLIQLDKKTKRIQRSISRSYENNKEGGKYRKTKNIKKKQIKFLRLNHKVSNIRHNFIHQMTSEIIRREPSFIVIEDLNVKGMMKNKHLSKAIQVQCFREIHRQLEYKCEWNNIRLVIADRFYPSSKKCCKCGNIKHNLKLSNRIYRCDVCGNIIDRDYQASVNLRNYALI

SEQ ID NO: 6830 - protein, 362 aa, unknown
  TnpB Polypeptide
MFNKAYKIRIYPNKEQRILIAKTFGCCRFVYNYFLAERIRVYKEEKRLLSYCDTNKLLTILKSENRWLKEPDKFSLQNALRNLDSAYKMFFKGSGYPKFKSKRDNHNSYTTNQNIRIFDRCIQLPKLGKVKFRDKYDIQGRIVSATVSQEPSGKYYVSLGCEVEIEQFSKTNQSIGIDLGLKDFAILSNGVKIPNLKYLAKSEKRLVKLQRELSRKPKGSSNRNKARIKVARCYEKITNQRKDFLHKLSTQLVRDYDNICIEDLNVAGMVKNHNLAKSISDVSWSEFVRQLTCKCEWYGKQLIKVDRFYPSSQLCNNCGYKNKAVKDLKIRYWTCPECGNEVDRDINASKNILREGLKLLAI

SEQ ID NO: 6831 - protein, 459 aa, Mycobacterium sp.
MAKFEVPHGWTVQGFRFTLDPSGDQARSLNRHFGARRKAYNWTVAALKADIEAWHACGIETEKPSLRVLRKRWNTVKDEVCINAETGAVWWPECSKEAYADGIRGAVDAYWNWQISRAGNRAGKRVGFPHFKKKGRDADRVCFTTGAMRVEPDRRHLTLPVIGTVRTHENTRRIERLIRAGRARVLAISVRRNGTRLDATVRVLVQRPQQPGVALPDSRVGVDVGVRRLATVATGDGTVIEQVQNPRPLDAALKRLRQVCRARSRCAKGSRQYRKRTTEISRLHRRVNDVRTHHLHVFTTRLAQTHGQIVIEGLDVAGMLRQKGLSGARARRRGLSDAALGAARRLLSYKSGWYGSQLAVADRWFPSSKTCHACGHVQDIGWDEYWTCDACSLTHQRDDNAAINLARYEDTISVVGPVGAAVKRGADRKTWPGRAGGREARKGTGHQAGEQPRDGVQVA

SEQ ID NO: 6832 - protein, 347 aa, Haloferax sp.
LFADTYSKAAQATVARFHRNLSNLKKKKEKGYKVGRLKRQAPTDYRSVTYNQSGFDLDEKRGCDRFAYVRFSKIGWVKIRYSRPIPDRATIKEATFKKETTGEWFVTLSLETEDADVPEKPDVDSLNASNSVGIDLGILNYIHTSDGKTVDWLNLEDEYERLQREQRKLSRKEKGSNNYEKQRVEVAKVKRKIRRKVLDYQHKLSTWLVKEYDAVFVEDLNVQSMLQADGNARNKQNVAWRQFITLLEYKGDLYGTHVKQVEARGTTKECASCGVETAKPIWVREHSCPACEFECDRDANASLNVLKRGFSELGLGWPEDTPVETALPTDTHSVSAKRVIEAGSLGA

SEQ ID NO: 6833 - protein, 347 aa, Thaumarchaeota sp.
MVNDAIRICLEENVKGRLRLRDRIYKELQLRYTVGSRFPYSVAEIAWSIVKKHKLWHRRPYAKKLMLKMDSRNYSLDYSILSLPFRKGERIFIPLQYGEYQRSFLIDKTLKRGSITMTETAIIITFWRDTPATEPLRKVGYDLNEKSIVDGDGTIQDLSKVARLHTLYGIRRSGFYERHPRDTRLKKKFASSTREKERVSQFLHRVSTLIVEKARANNEAIVLERLKGIRFAHQKGNGERKSTRRRIALWPFRQLQSYVEYKAGWAGVPVEYVSPAYTSKTCNVCGFINRNLKLTDRSWLCPSCGAKLDRDLNAAINIERRGKIRCLGEVRPGARGKDEAVKRNDTR

SEQ ID NO: 6834 - protein, 440 aa, unknown
  TnpB Polypeptide
LALKKIKGFAIESKSLRCKLLRNGIDLTETKTAFNQIVEFYYFLINTDPTGLDIPVTENGGWRFYELLTSVEDAQYPLPFDCPSQFKRSAIRKAIGAYQSWRSNYQRWLKRSKRHKHHRPPVPPRYFNFPPSFDSGIWKEDTGETILLKIRRNGQWVWVKFGYQDYPIDPEWVKGSPSVVLKGNSAYLTFAVERYVAATGGMKTVMAQDSVRVLGIDIDLDKNAAICSVLESDAKGHTVEVARHFIKQPALVKRRKRDLGQIAIRMKATGIIHQGFCQKCWKRLSNREVEMGRAIARLIVNIAYGYECKVIAFEHLGNLTPNRGKYSRRSNQKRAYWLKSKIYLNVKRIAYQDYAILTTRVNPRNTSRIDPWGNQLWRGSNFPTNLLGYLDYQSGADWVAGVNGYKAHSGLNAARNVGMKAIIRHKLEAVFVEQRNNALL

SEQ ID NO: 6835 - protein, 235 aa, Okeania sp.
MPSNLAFSTLKELRILPRNRCFYWEFVYEREVIVKPQLNQENVLGIDHGLNNWLTCVSNVNTSLIVDGKQIKSMNRWYNKQVSTIKENQPTGFWSNKLAAITEKRNRQIRDGINKAARIVINHCLKNHIGTIVFGWNKGQKNQIELGKKSNSEFVPIPTARLKERIAQLCEEYGIRFIETEESYTSIASFLDGDNLPNYGEKPNNWKPSGKRIKRCSAVLGVSPMSDCIKTAWFV

SEQ ID NO: 6836 - protein, 202 aa, Okeania sp.
INCLILILYALRYLSLSWKRCFKKVSGQPKFKKKGKDDSFTLDGSITVGFNQIKLPRIGWVKTYEILPDNITPKSVTISRKADRWFISFNSREKETQITEKSVDVVGVDLGIKSLATLSTGEVFEGAKSKRRLEAKLSRLQYLNRHKTKFSNNWKKAQLKIARLHTKVADIRKDTLLEEGDRRQETGDRRQEENYMGIRSPK

SEQ ID NO: 6837 - protein, 356 aa, unknown
  TnpB Polypeptide
MKITSTYSVRLRNFNRVFDDTVEVYRHAVDYFIELVMANWNTHFANLSRANDCIRVAEGLSVRTKKRLMTPYNFCHDFEKFPSYLRRVAIKAAYGQVSSYQTRLAQWKAKPGQKGRQPGLPKAGRSFPVMYRDNTFIRAGRNSVKLKVRIRNTWDWVDVELDKHDVDYIALHCATRNELSPALRKRGKKWYLDFSFEEKVILDKVSLDTQRVLGVDLGINNACVCSVMDSKGTIIGRRFKKLPVEQDSLERALRRIRKAQSNGAKRMPRLWARAKGGQQGHRRQDGRLHHDGCKRVQGRRHRHGTPRSRRAQTWLQASAASSLACQVCPADRGAPGTSLRYSHSSRVFLEYIEAGL

SEQ ID NO: 6838 - protein, 389 aa, Deinococcus sp.
MEDTTLRAYRYRLYPTKAQVALLDNTLLLCQRLYNGMLEERRGAYRKAGKSLTAYDQMKSLPEVKAVLPEYAGVYAQVLQDVAKRLDKAFKGFFRRVKSGVKAGYPRFKGRDRYDSFTYPQPSQNSVSGDGKHVYLPKIGNVRIKLHRPFAGKLKTLTVKREGMEWYAVLTCEVPRAEPLPPTGSEVGIDVGTTWFYVTSDGEFCKNHRYFQRSSHKLRVAQRALARKKRGSNRRKKARERVAKLYRKTARQRLQLHHEEAKKLVTQHGLICHEDLNVKGMDQGNLSKQIHDVGWGQFFQILSSKAAEAGRRVVAVNPAYTSQRCHICGHTDKGNRLEQANFRCLSCGHTENADVNAAKNILSMGQAFVARSLSTETASREKPRPLGLG

SEQ ID NO: 6839 - protein, 397 aa, Microcoleus sp.
ILHHKPRRALQTYEMWLATARKVWNFALAERKDWYNSRSCRIDACSLKAEYIIPADARRPTFASQCKALTQARKNNPNLNAAHSQMLQQVLRRLEKAFIGMWESGRGFPRFKKQGRMRSLLFPQLGVNPVKKNQVKLPGADWVKMRMSRPIPDGFVAKQAQVVKRASGWYVMLTLQADVDVPHVMPHGQAVGIDLGLKSFLATSTGEQIARPRFFVDIQRKLKLLQQRASRKKLGSNNWQKAQAKVARLHEHIRDTRKDFHFKLAHKLCDEAGMIFAEDLNFKAWAKGMFSKHTLDSGFGEFLSILEWICWKRGVYFAKVNPDGTSQICPNCNHHTGKKELSQRIHRCGECGYEIDRDVAADQVVRQRGLAAVGHTVKMLGEGLSTGSLMTQESSPL

SEQ ID NO: 6840 - protein, 288 aa, Escherichia sp.
  misc_feature (191)..(191): Xaa can be any naturally occurring amino acid
  misc_feature (234)..(234): Xaa can be any naturally occurring amino acid
  misc_feature (248)..(248): Xaa can be any naturally occurring amino acid
LSGLTKTSSRSGLLFPDSKSGDRMMHSATRRALSSIRKTAVNFFQKRAAFPRFKKRGQNDAFRYPQGVKLDQENSRIFLPKLGWMRYRNSRQVTGVVKNVTVSQSSGKWYISIQTESEVSTPVHPSASMVGLDAGVAKLATLSDGTVFEPVNSLQKNQKKLARLQRQLSRKVKFSNNWQKQKCKIQRLHSXIANIRRDYLHKVTTTVSKNHAMIVIEDLKVSNMSKSAAGTVSXPGRNVRAKSGLNRXILDQRIQASVARTVVIQRKRTACHKVNSDARYVDIQRTPM

SEQ ID NO: 6841 - protein, 249 aa, unknown
  TnpB Polypeptide
MQSQLMKQFCGCARYVYNRTLSLERSLYKKDDKHSFKYAEAANRLPEWKKKNPFLKECHSQVLQQSLKDLDQAYTNFFRKRANFPKYKEKFRNDSIRFPQGVELDEAKQQIRLPKIGWVGYRKSRDIMGAIKNVTVSRRGEKWDVSIQTEYEVSSPASNPSEIGIDMGVKRFVTMSNGDFVEPLNPFKQEQEKLAKLQRKLARQKKGSRNSRKTKRKIARLHRYIADSRRDFLHKTSTKIAKNHSIIYV

SEQ ID NO: 6842 - protein, 352 aa, Scytonema sp.
VYRTQQIRLTDSIPDNVRDVLVLLCENASSLANCAIFEIRQKHFEACERNEFFDKDGFFRSEFKMSKVKSASYPVVWEALKDNPHYKTLGGQQAQQIIKSVIEAFTSYNKLLPLFFKGDLNGKPKMPNYRKKRGLSIVSIPAQALKFDIETGCCRIPISRELSSDVNGDIWIPGGSSFKPYQIVELRILPRNRELYAEYVYEDGNDGATCLLALDHTQALGIDPGVDNWLSVVSTLGESFIIDGRKLKSINQRYNRAVAKIKEGKDQKYWDDQLAKLTEERNRTMRDAVNKTARFVVNHCLEHRIGNVIFGWGQGVKSEVNLGSRTNQNLYTPQRPQRIRDKGFILCRDSIT

SEQ ID NO: 6843 - protein, 272 aa, unknown
  TnpB Polypeptide
VFSKATTPTSTFSRPRSKDGEWKIGMAEALFHNENAELHINVTNTEQTVRDKQDSRKVVGVDVNEDNVALTALSESGVEDTLVIDFPEIKFERHRYFTMRKRVQNAGKDSIHNTLEGREERFVRDRLHKVSRHIVEWCCQFEKPCIVFEDLKEMRDSIDYGTRMNRRLHHLPFRALQYYTSYKASFEGIPTAWINPEYTSQRCPMCGHTERANRNSFRRTLVRLKLSRFDGIVTMEDCFRRTLVRLKLTDYYGVDITPGQKLIKTHSELQIS

SEQ ID NO: 6844 - protein, 284 aa, Catenibacterium sp.
  misc_feature (5)..(95): Xaa can be any naturally occurring amino acid
LLKSXXXXXXXXXXXXXXXXXXXXXXXXXXXXXXXXXXXXXXXXXXXXXXXXXXXXXXXXXXXXXXXXXXXXXXXXXXXXXXXXXXXXXXXXXXXRIKEKGYIPTTKDGYVIKSGHVSIKADRYYVSVLIEIKNKRIASHSSKGIGIDLGLKDFVIVSNGKTYKNINKSAKLRKLEKKLIREERGLSRKYENLKKGGSTQKRNIQKQRLKIQKLHQRIDNIRTDYINKIIAEIVKTKPSYITIEDLNVSGMMKNKHLSKAVSSQKFYEFKTKLLAKCKENGIEL

SEQ ID NO: 6845 - protein, 397 aa, Streptomyces sp.
VTANHVKRAFKYRFYPTDSQAAELSRTFGCVRKVYNMALQARTEAWTRQERVNYNATSAMLTAWKKTDELAYLNKVSSVPLQQALRHLQVAFTNFFGKRAKYPRFKSRKKSRKSAEYTTSAFRFRDGKLTLAKMREPLDIVWSRALPEGASPTTVTVSQDAAGRWFVSILCDDPGIKPLPATGAAVGIDAGLNHLLTLSTGKKITNPRHERRDRAALAKAQRRMAKKNKGSANRAKARRKVAKIHARIADRRRDHLHKITTRLVRENQTLVIEDLTVRNMVKNRKLARAISDAAWSEFRSMLEYKAQWYAREVIAVDRWFPSSKLCSTCGALQDKMPLNVRTWTCDCGATHDRDVNAAINLLAAGRAVTACGAGVRPQRSSPAGQSAMKQEVTRREP

SEQ ID NO: 6846 - protein, 368 aa, unknown
  TnpB Polypeptide
MESRCYGTCWTLVPLSGTRLITSASCGTTTRTALRATYGTPIPANSKANTKAFSALLPPKLWGERSRLEFVVGEDLRDKHNSPKSRLRLEIVGVPNWSDYEDQSRLELWCDETDNTFRASQPVTVTDAQATPLADEKAALDIGANTLVACTTTTGQQYLYEGRELFQRFRETTREIARLQSKLEDGRYSSKRIRRLYRKRTRRRDHAQEALCRDLLERLYAEGVSTVYVGGLTDVLETHWAVETNAKTHNFWAFKQFTERLVCTAAEYGISVEVRSEAWTSQECPQCGSTDRTTRHQDTLTCPCGFEGHADLTASETFLERHTEQAVRPMARPVRFEWDDHDWSESPRSHERPKEQRTNPQVASVESA

SEQ ID NO: 6847 - protein, 371 aa, unknown
  TnpB Polypeptide
LGKKVRLSPTKEQEQKLWQSVGTARFIYNWTLAKQEENYKKGGKFISDNDLRKELTVLKRTELNWLNEVSNNVAKQAVKDGCEAYIKFFKGLADRPQFKSRRKSKQSFYNDTSKLKVKENSVLIEKVGWMNIKKNAIPMNCKYTNPRISFDGKYWFISVGIEKEQPIIELTNESIGIDVGVKALAICSNGMTFKNINKTRAVKQLEKRLRRLQRRVSRKYLKNKEGSKFVKTSNIIKIEKQIKLLHRKLANITSNYNHQATNKIVKTKPSRVVMETLNIKGMMKNRHLSKTIAKQCLYEFKKQMKYKCEFNGIEFIEADKWYPSSKLCSKCGHIKAKLSLCERTYICEECDCVIDRDYNASINLSRYELVG

SEQ ID NO: 6848 - protein, 419 aa, unknown
  TnpB Polypeptide
MILTYSFDIQYNNKLNELFLNSKNLYNQALYEIKQSLKNDKFLFYNDLNKLMMNKINLDGNINYKLLKAQVSQQILMNLDKNVKSYFKSIKDWSKNKSKYKSMPKLPNYKKDKNLLIYTNQCSSIKNNIINLSKDIKIKLPLNKSIKYDFNNYKQIRLIPNNKYITIEIIYDKQIIKNNNLDENRYLSIDLGINNLMSCITDNEQPFIINGKQIKSINQFYNKQKQKLTSIKDKQKIKGYTKKLYELEHKRSKRIKDILHKISKYIIDYCIKKGIKNIVVGYNKQWKQSINLGNKTNQTFVSIPFQKLINNLLYKSELNDMNMIMNEESYTSKCDSLALESVSKQTEYKGKRIKRGLFLSSIGKIINADINGSLNILRKYLIKTNVVNKFSYIKKIIDSGLLFNQIKLNNIYNLKLNNI

SEQ ID NO: 6849 - protein, 510 aa, Frankia sp.
LTSEACAPVSPSNEKTSGTATSGSWASRSSQPTSARAASSAAPAGVAVMVPRSASARSSRSSASTATPFRSLAIQPWSSDLCWKPGLQPDRERMPFNGGNSTPVPFPYSGAMCRFRLYPTADQVAGLEKHCAHARYVWNLAMEQQSWWRAGRGPAPGFNEQCRQLTEARRENPWLAAGSHTVQQQALRDFAAAMAAFFRGGHGKPGFRRRGRSEGFRVVGSRPRQWDVQILSRNWAQLRVPKVGWVRLRRSRPVPEARSYRVTRDRAGRWHVSFAAIPEPVPEPGSGRVVGVDRGVAVSAALSTGELWQCPSLRPKQSERLDRLQRRLAKAKPGSRRRDRLKSQIARLRARETDQRKDWVEKSSTDLVRRFDLIRVEDLRIRQMTRSCKGSSDAPGRNVRAKSRLNRAILAQGWGMLARRLREKAPSRVEEINSAFTSQTCSACGIVDREARESQAVFRCRVCAYTGNADVNAARNIARGHRVTARGGGPVGQPVNREPQRTAPPFVTVA

SEQ ID NO: 6850 - protein, 371 aa, unknown
  TnpB Polypeptide
MKLIARIALLPDADQYRQLFAVLERVNAACDFISRAAWDAKAFGKYPLQKLVYADARKAFGLSANLTIRAICKVADAYKLDKKRQRTFKPHGAIAYDYQIVSYRLRDMTVSLQVLDGRIRLPFTCGARARELMATQHGESDLIYRDGRFYLFAPCDVEEPTPADAGEFLGIDLGVTNIATDSDGTIYAANHLKNVRYRHRRLRTRLQKKGTKSAKRRLKALAGKERRFATNTNHVISKQIVARAKGTGRGVALEDLTHIRTRITVRHTQRVTLHSWAFDQLGQHITYKARLAGVRVIRVDPRNTSRTCPACGHIAKANRTTQAAFRCTDCGHAGHADTIAAGNIASRASLNMPYVEGMDHCAAPLSTSSAL

SEQ ID NO: 6851 - protein, 225 aa, Symploca sp.
YDDGKNKPKTSSDGKAIGIDVGLTHFVITSDGTKHGNPKYYRKYEKKLANRQKRLSRKQKSSSNRNKARKVVAKVHQKISRCRVDFLHKLSRKLVDENQVIVVENLAIKNMVKNHKLAKSISDAGWGMFCTMLKYKAEWDGKTYLEIDRFFPSSKTCHVCLNQVVNLPLSVREWTCNKCQTKHDRDINAAVNIRDEGLRFLAGGHLASASGVRVRPSKGTAFVRH

SEQ ID NO: 6852 - protein, 387 aa, Actinopolyspora sp.
MISMRTAYKVRAYPTPEQAAQLGRTFGCVRLVWNKTLDARHRRYHTEGRITSYKETDAQLAAWKRTDDLAFLSEVSSVPLQQTLRHQHTAYASFFAGRAKYPRFKSRNGGQSAHYTRSAFKLRDGKLTLAKQTAPLEFVWSWEADLLESLTPTMVVVAREPDGRWYVTFVVDTDEPEPAPRTGETIGVDLGVKDFATLSTGETIANPRHLDRKARNLARYQRQMARKQRGSANRRKAKKKVARAHRKVRHARQDFLHRTTTNLVHRADTIAIEDLNVSDMTNSARGTEQQPGRNVKAKAGLNRAVLDAALGEFRRQLEYKTSRAGTTLAVVDRWYPSSKTCSACGYLLEKLSLSTRAWTCPDCGTRHDRDHNAAKNILAAGRAVAGP

SEQ ID NO: 6853 - protein, 314 aa, Lactobacillus sp.
MKKLPYHYGVKVRCYPSSQQKAIIKRNSDASRFVYNELVAIGRELYELKRIKLPIDTVQQRIHQLEQRKKTTRNICNEHLFLFHKDIDSLCLANAKQNYAKAWHAFRKVNRSGTPVFHKKSYCWKYQTNAQYSSKVSLPSLLNGTVKFLDRNHAKLPKLGVIRTGTVRSKIWNMREVVRIGTVTVTKDSADCFYLSFQLGSTQPFIGAVTFTNEKLGLDLNTENFLTDSNGAVVANPRYYRKILKQLNRQKRKLSRRQLRAKKEHRPLCDAKNYQKQRLLVAKMQVKVAQQRLNFLHNLTTELVKNHDFLVAKS

SEQ ID NO: 6854 - protein, 379 aa, unknown
  TnpB Polypeptide
VLLIEELVQLSVIYSATNYFDGNPYLDYFDMINRMRKEKDKDFYALPSKVAEYVIKQLHESYKSYFALLKLKQAGKYQGSVRLPRYKDKIHGRNVTTFYKELLRKTTYKKEGLIHLSKTGIKLKSKIPLERIQIVKIVPKHSFYELQVVYHADEAPKLENSNYAAIDLGLNNLATVATNVSKPFIINGRPLKSINQRWNKRKARLQSKLKKGVYKSKQIQTITNKRNRRVKNYLHQASKALINELRRLSISKVVIGCNKEWKQNISLGRRNNQNFVQIPHARFIEMVTYKAALAGIEIVIAEESYTSKCSFLDDEPIEKHEEYAGKRIKRGLFKSKTGKLINADINAAYNIMRKHLGISVHQIDSVQVLSTPNVLVLGS

SEQ ID NO: 6855 - protein, 432 aa, unknown
  TnpB Polypeptide
MPTVCRALRFRLSGELPPSLRLVLNDYRVLVNEVLREALLTGKTARGSMSRYARDRALVHQFTGNHAIVASAIALSLVKSHRSRLRRGLPSKVPYVRRPFLRTTPETFHFDVDSGKARLSLRNGEWCSFFVTVAPFHREVLAPLDVRVKQLHVSEQGVVLYLEKSVPEPFEPAALLALDSNESSLDGVTVTPVQTRAAHVPFPDVRVVQARHSKRRRDLQRRKARDRRVARKLLGKEGRREHHRIESRLHILSKRLVQGAVRAHAAIALEDLARLPRPRRWSRTAGGPFPMRSGPRLRRRLSSWPRRELHRQIEYKAAERGVPIYWVNPFRTSTTCPRCGVFNGPRSRVGTVFDCASCHWSLDRQLNAGANIAQTVLRDFGRAELGGPRLDLDALSKDARRPRYPFEKSRGQGRSGGRGRDDIRLPGNRGSS

SEQ ID NO: 6856 - protein, 539 aa, Burkholderia sp.
MQATTQTRLLLPDADTQLLDRMASLYGSMKRKLYARVAAGGGKAKSHKTAFCREHGISARMFNAMAIELQGLVDGTRELLAAERKSLRNGIRQMEKQMAVRRNRLDALAEDRLRMSPQREANLRRTVHRNALHLSKLQARLASIGRRLQANVPGICFGSRKLFSQQHHLELAGLASREAWLRQWQASRSHQIFFVGSKDETAGNQLCQLHGHADGTYSLRIRIPDQLRLPDTGKYLVIDHVTFGYDRTALDKALDAGTALTWRLHRDERGWRACVSFDHQRAPERTLDVAYGGVGIDFNVDHLAVTETDAFGNLLRTKRFRLLREDASSGQRRAVLSDALTRAVAWASDVRKPVVAEDLDFTAKKKAMAQLSPKGARMLSGLLYAKYRQLLEAKCFRSGVELILINPAWTSTIGAVKYASRRGWSVHAAAAGVIARRGQKLTERLPRAGTVIRVPVRGGHHALALPARKSGESRVAAWRGVHAAYRGMVRERWLATRGGSPRWSAKGTFGDGSCAAPLSRGDRLPCVDNLHEQICAPSN

SEQ ID NO: 6857 - protein, 412 aa, unknown
  TnpB Polypeptide
MTVHRTIRYRLHPGSSRKHQLLHGTAGACRFVWNHMVGKLKDEYEYGIKPDFRHYSLCQVFTIMRRDDGTTKWLQDYPSKVVRISLKPIETAYREYFKDREMGGKLNRQLPKFHGRYTTEPSFPVDYQSAKVVGGSLYVQKIGWMKIVGNNPYPDGAFKSGRVRFECGNWYTYLTYEVQAKASLPHSIREVGIDRNVSDGNWAVLSDGTKHGGPELEKKIARRKRYQRKLARQVKGSNRRKITKVRLQKAFRVERFSRLNWAHHTSKDIASQYDVAYTEALNIRGMTKSAKGTIENPGKSVNAKSVLNRKILASAWGTLELCLNYKAEVRKVNPAYTSQTCHQCGHVDKKNRNGIKFKCTECGHTDDADVNAALNILAFGNGATGRGGGDTGGASCHSRPVKRQEIRLSDRR

SEQ ID NO: 6858 - protein, 428 aa, unknown
  TnpB Polypeptide
MAFPDNNLPMKVHRTVRYRLHPGSSRKHQLLHGTAGACRFVWNHMVGKLKDEYEFGIKPDFRHYSLCHVFTIMRRDDGTTKWLQDYPSKVVRISLKSIETAYREYFKDREAGGKLNRQLPKFHGRYTTEPSFPIDYQSAKVSDDSLYVQKIGWMKLVGNNPYPDGEFKSGRVRHECGHWYAYLSYEVEAQASLPHTIREVGIDRNVSSGRWAVLSDGTKHSGPDLEKKIARRKRYQRKLARQVKGSNRRKVTKVRLQKAFRSERFARLNWAHHTSKSIASEYDLAYIEALNTRGMTKSAKGTKEKPGKHVSAKSKLSRQILASAWGTLELCLDYKMETRKVPPAYTSQTCHQCGHVDRKNRKGIDFKCTECGHADDADVNAALNILAFGNGAAGRGGGDTGRASCHSRPEKRQKMAKVGRESSANFRT

SEQ ID NO: 6859 - protein, 386 aa, unknown
  TnpB Polypeptide
MPLRKTKKSTKKADRKAYRFLALPDDAQKEMISRTFGCVRYLYNRMLDDRSKTYRYFKESLFLTPAWYKQLSCCRWLSEVDSLALANAQVNLNTAFQKFFDHTAGYPKFKKKSDHYDSYTTNMVNGNIKLRTSGKYLYLSLPKIPGEIQIRSHRPVKKNGKLKSVTVSREPNGKYYTSLLFEYPEKKRHHDIDPANAIGLDMSMPEFYIDSNGDKKDISHAYKKLQDRIAVEQRRLSNMKKGSSNYQKQRLKIAKLHAKAKHQRADFLHKVSRKLVDTYDIIGIEDLDMKGMSQALNFGKSVSDKGWGMFVKMMTYKATDAGKRVIKISRWFPSSQMCHECGCVSKKTKDLSVREWACPYCGVTLDRDRNAAVNIKNEAVRIYCTC

SEQ ID NO: 6860 - protein, 381 aa, unknown
  TnpB Polypeptide
MLKAFQYRLFPSKTQERLLVSTLETCRRWYNACLAERKTAWEERRESIGMYSQLRKVKDLKRENLCAAPVHSHVLQIVVQDLDKAFQAFFRRIKAGETPGYPRFKGRDRFDSFGYKELGNGFRLDGRRLKLSGIGRARVRWHRELEGEIKTVRIVRKAGKWYASFACEVEDHPLPSTGQEVGVDVGIHHLLATSDGETVENPRWYREEQKHLRVLQRRVSRRTRGGSNRRKSVIHLRRQHERIANQRKDCLNKLAYGLIRRYDRIILEDLQIGNMAQNRHLSKSILDAGWGYFKTHLMHKAAEAGREVLLVAPAYTSQECSRCGRRFEHLTLQDRWVRCGCGLSLDRDHNAALNILKRAGHARWSGTWPVAASVLQEAIGL

SEQ ID NO: 6861 - protein, 172 aa, Clostridium sp.
MNLDKAYKNFFRDKSMGFPKFKSKKANYYSYTTNNQKGTVYIKDGYIKLPKLKTMIKIKQHRKFNGLIKSCTISKTPSNKYYISILVYTENKQLPKVDKKVGIDVGLKEFAITSDGEFFSNPKWLRKSEKRLRKLQKDLSRKQKGSNNRCKARLKVAKLHEKITNQRKKFFA

SEQ ID NO: 6862 - protein, 352 aa, unknown
  TnpB Polypeptide
MRKTKTLKVRVKDKHNARLDQMAKSVNFVWNFVNQLSHRSIRERGNFLSAFDFHPYTKGAGKELGLHSQTLQCIASEYVTRRKQFNKSRLKWRKTGGVRRSLGWVPFNTGASQWKNGQVYHNGTYFKVWDSYGLSQYEFRSGSFNEDARGHWYFNVVVEVEVEQSKGMGSVGIDLGCKEAATDSNGDGVKGREYKALESKLGKAQRAKKKHRVKAIHAKIKNRRQDSLHKYSRKLVDSNTAIFVGNVSSLSLVKTKMAKSVLDAGWGSLKTMLEYKCDHASVVFEVINESYSTQTCSCCGCISDSSPKGRTGLRIREWTCSECGAGHDRDINAAKNILALGLERLAGEKVAA

SEQ ID NO: 6863 - protein, 400 aa, unknown
  TnpB Polypeptide
MQRTNVVELKPNKTQKKILKEMLILSSCVYNIANYNVRQAFFNKEKIPSFYDLQQKIQQKNDYQLLGRSYALPRLQIYGETNNARFKLIKSKTQKNVGLPKYLKNRKTNTTLPSYLVIDGSQYSLNKTKTTIPLSRQLRKKYNLKSFKIKYNGILKHKGLQKRGQIHYKQGKFYLYQTIEIKEPLIKQINNKIGIDLGIKRIFGLYSNNGLNKLIGSNRFFKQWKHYTKLISLEQQKLSEINRRTSKKLQQLYHKRTIYQNNLFNNLVAKLFRIIQQQNITEIYIGDVKNIRNSKSKNKLSNQMINNYWSFDKLYNKIENKSEEYGIGLNKISEEYSSRTCPSCLDNSINNINDRVFKCQNCGYKNDRDIVGARNILSKGMYGLYKSIHRDEIVPLEVTI

SEQ ID NO: 6864 - protein, 416 aa, unknown
  TnpB Polypeptide
MKVRRGNKFKIEPNGKQVFLMYIYADHNRFVWNKALALQKERLENKEKLYSYNALSGMLPEWKSYHPFLKEAPSQTLQQTLMRLDTAIWAALDKTDPKRFPVFKKKGKCRISFTFPQGFKVDERNSRVFLPKLGWVRYRKSKVLTDNFRSITISEKNGKWYISILTEDEIPNPIHPMHDSGPIGMDLGIKKLAAFSDGEIIKPINALRKYEKRLARLQKELCRRKKGSRNREKTKYKIALLHERISNIRKDYLHKASYRISKSHAVIFYEGLKIKNMSRSAKGTIEDPGKNVGAKAGLNKSIIDQGWGELIKQLEYKQAWRGGLFLEVPPRDTSRVCLVCGYTGAENRKTQAVFSCMNCGYTTDADINAAVNIRDKGLSLHVQALEDWRQDNAVCSNACGGRRAGGPVKQEPTEAA

SEQ ID NO: 6865 - protein, 329 aa, Crocosphaera sp.
MRLVERHVIKKNHRFYAEIDRLCFLSKNLYNYANYLVRQSFIFENTYRNYHDIQKTLQSQQDYQAMPAKVSQQVLMILDRNWISFKESNLAYKESPSKFKARPRLPGYKHKIKGRNVVVYTAQAIRKKQLKRGIINPSKTAIYLKTKVDTSKIKQVRLVPRLNHYVIEVIYEADKQQYELEENRYASIDIGLNNLATLTFNQAGIKPLLINGKPLKSINQYYNKVKSDLQSLLGENKSSQKLKKLCNKREFKINDYLHKASRLIIDTLINQKIGTLIIGHNTDWKQKINLGKRNNQNFVSIPYNKFIEMLSYKAEMVGIKVIITEESYT

SEQ ID NO: 6866 - protein, 542 aa, unknown
  TnpB Polypeptide
MISEAVAKELESKEKSSSSKLSRKSAEIEGTFEIRINNNDDKTYLFDYIYKYKHWQNIITILVTDLFKKNNSDYRYFLDYEIVRACISDTAGSIKKQEKIHYIKSKYKDNKLYKNLLEVGKNLKNHNLVMVLRRFKKDFNNYFKAIKDYKINSHKYTGMPQMPKARKISELTNYSIPLDNANGWSTKKNLIGINLDSKMRYFYIGKIIKNGKVLDKKIQSVSIKMRNREIYLSFSYINEEQNNELIESKAHNLGSINSNSAGIDIGLNNLISLFIDDKESQSIIVDGARYKYYNSKFNRFIAKLNNSISEEVIEYKTIIKKDKTEIQIPIKWTKRGHRLKRYVSFLYRKRNDFFETEFHKISKRVVEYLEINGVKRLVLSKNLAQLMNNGECNLRKKSKQNFIQIPFIQLIHYIEQKAIKNGIEVIFIDEGYTSKTSCVNGDVLAVQTKSKNNQKPTANEFKGTRAKRGLFKDIVLNKIWNADLNGAVNHIKVAFDSCFKWLKDALFKLCNPKVIKSANDFLVFNDGIVMQVKSGYQVPLKR

SEQ ID NO: 6867 - protein, 166 aa, unknown
  TnpB Polypeptide
VGDESGFRVTGIRTPSVVISRKVVLPVELESNNHSVFLMHYHLVLVVKYRRRVITDAVSDCVCVEDLDMRGMSRSLKLGKSTMDNGFGMFRALLGYKLEDRGKRLVTVGRLFPSSQLCHECGYRFSGTKDLSVREWTCPLCGRTHDRDVNAARNIRDEGMRLALSA

SEQ ID NO: 6868 - protein, 396 aa, unknown
  TnpB Polypeptide
MTDNPRLGWLLKEFRLIVNKSIRIANAGDIRSLGRLCRVAYADFSRDHEVLKQYISSAFQVALSLLKAHRRRLKKGRSSSLPYVRRPILKAGNQSFLLDRVTGRLRVPIRAREYFECALPLGDWHRTFLNDPEWRIGSLTIVPDKIIVAITRLAARPYAPRAAIALDTNEDSLDGVFVMGNHSKLITVPFQGVRRIQAVHFRRRRSLARKKRYDQRLARQLLRQEGLRERNRVGQRFHRVSKMLVRVARQCQAAIIVESLTLVGAGGRSRALNRRLSSWPRGEIHRQIEYKAALEGVPIIRVNPRNTSKTCPACGAVRRGRAGKVFMCPCVWRMDRQLNAGLNILRTAVASNEALARAVRFQPGALRDDVVIPLCDLLREGVGAREEPSGVELGVV

SEQ ID NO: 6869 - protein, 282 aa, Halorhabdus sp.
VTVSEETRATPLADETAALDIGVNNLVACTTTTGEQYLYEGRELFQRLRETTREVSRLQSKLEDGRYSSERIRRLYRKRTRRRDHAQEALCRDLLERLYAEGVDTVHIGGLTDVLETHWSVETNAKTHNFWAFKQFTDTAGCNRLKEFATPVWRISLRTYSRQYERLACTAEEYGISMEVRSEAWTSQECPQCGSTDRTTRHQDTLTCPCGFEEHANLTASERFLERQTEEAVRPMARPVWFEWDDHDWSELSCSHRPKEQRTDQSTAHRDGNIASGESWAG

SEQ ID NO: 6870 - protein, 409 aa, Cyanobacteria sp.
MIADMHLVERHIINRNHKFWSQIDRQAFLSKNLWNLANYHCRQHFFATGKKLGFTELYHLVSQSVDYLVLPTKVSKQIIRRLDKAWVSFFQAIKAWVKNPYSFLEKPKIPGYKDKTKGRNIVPYPGESVSKKAVKKGICQLSMCEIAVPTKASKVIEARIIPKACCYVLEIVYEQETENLVSGEAIAGVDLGIDNLMAVTSNQAGVKPLLINGKPLKSINQLYNKRKAKRQAIEASRQIRDLTHKRNCRVDNYLHTASRRVIDWCLVHGIGTLIIGKNEGWKQKINIGRRNNQEFVSIPHARLIEMLSYKAELVGIKVVITEEAYTSVASALDNDPLPKYGEAKPKFSGNRIFRGLYKTGKGLLINADTNGSLNIARKVIPDFIKGIEARPFVPVILPLWKTYERDICL

SEQ ID NO: 6871 - protein, 749 aa, Actinomadura sp.
MDEVGGTACGAASDAVAGAAGGLVDGATVTDPASGRRFRGKNKAPAWRRPADGPVTVVRLRLTPDPAARHRLEHLFGAAWSLKRALRRDARSRALAFRAGHRRRRTPAETKRLRVRLGLSRDALERAAYRHLDASGHLRHHLSKAVAMHIADEVWTGLERHLFADASGCRQGVPGAGAWWEFTRIPGRARSHTMPRKWETFRLHGTLAGHLAAHRAPGLPEGTTPEEAAALPPGASVLTQPRTVPVPSAPRNWGTKGLWWEHEGPLTLVYAGGPDGCRGDLVVPVRLPQGAGQWPHLLHTLADPEAFHKVDLVRRQDPAEPGGWRYEAHLMVLRPAYVPASTVVRRVQVPTGRRGGVDGNVSNLAVVSAPAEPGPAGGAAVEASPHTAVTSPGLVSSGVVSSKVTLPPDERDRIARRERKRRRRQRALERSRRASNTTQYEPGRRQRKRQRRRQAAGLPPKQVPVPGGPRIARADGRPRRAYRRDTLSGSYRRLRARDAAAAQRIAQSRKTRARQTAGQIVAVHGPNLVIEDCRISGWFRLWGRACARFTPGMLITALDHECRASGGRLLRAATRATALSQHCPCGRRVPKHLSVRTHHCRIEDGGCGLTGDRDLVAAALAAFVHLQDPCDPSTARVDYESSRRVLCAGGPGLPGALSESTAPIPTPGTSTRAGAGTGNAAATPTERRREPRRRNRRVASARRTRTSTAPTPDEPPPPTMGQGAVTPDRHRKRTRLFNKPPPRDLFNRP

SEQ ID NO: 6872 - protein, 364 aa, unknown
  TnpB Polypeptide
MGNKAYKFRIYPNAEQTVMFAKTFGCVRFIYNRMLGDKIAYYKENEKDLSCYPSQYKSEFPFLKEVDSLALVGAQNNLKTAYKNFFRDKSIGFPKFKSKRNSRKSYTTNCINENIKIIDGHITLPKVGTVKMKQHRAIPENYILKSVTVSKTPSGKYYASVLLEYEQIIEPVEIKEIIGLDFSMADLYVDSNGEEPQYNRYYRRSLDKLRRMSRALSKMKKFSNNWRRQKHKIAILHEKTANQRKDFLHKESRKIANSYDLVGVEDLNMQAMSQSLNFGKSVADNAWGMFRTLLKYKLDDMGKYFVTIDKWFPSSKLCNICGYKNDALDLSVREWNCPDCGTHHDRDVNAAVNIRNEAMRMIAA

SEQ ID NO: 6873 - protein, 343 aa, unknown
  TnpB Polypeptide
VNYVAIVGRVYPASNEDYMRLVALAWDFRRAVQVATRMIARGLEENSVLRELRRVLNKAYADSAFKTAKAMVEGCLFNGGNPLRIEVRRLFIVSEGESSRLGNRNVRLEDTHLVKVRYPHDGSWITLRAEFGERYLPLLRELVDLARQKKLSYKAIVVFREGGIYLHLSVPIQLYLKYFKKGEARGQFIAGFDLNSDRVNLVIIDEHGRIVDTRTAWFPEATSHGFPREKAKVLRLNALARLLEYCYRHGVGTVVFENLLLVKRRRFTGDRTGNRKIARFAKRQLIQHGVVMALKYGFRVLLVDPRGTSGSKEHDEIMKRFGLDKHVASAYLIALRGLRYQQI

SEQ ID NO: 6874 - protein, 388 aa, unknown
  TnpB Polypeptide
MRRAFKTRLKVNDRTATILSQWCGCARLAYNTCLAQWDDMYRQGLKPNYYSVRKWSDSIKRERFPFIMDVSKCAVEAAVKDLSDAFGRLFRKQNRHPKFHKKGAHDSFRIDGSVVRVEGNKVRLPKKPALTMHERFRYERIATKTCNVTAGHRAGCWFISITCEIPDMVRENQAKRAVGIDLGVKELATCSDGTVVANPKTLRKRERRKKHLQRALARKQHGSKNRQKARNKLARYEYHTACKRYDWLHKHTTRIASENSVVFMEDLNVRGMLANHSLAKSISDAGFGEITRQLSYKTTVRKIDRYYPSSKKCSQCGAVQDMPLSARIYECPSCGLVMDRDMNAAVNILHVGMANYPELMPVEDDNHQTGQPVLAPREAGIKHQPDKD

SEQ ID NO: 6875 - protein, 378 aa, unknown
  TnpB Polypeptide
MQLSETVKLYMTREQKSLVVMAMNEYINTVNSLISVATNGASISKYTTADVNASLPSALTNQCIRDARSIMNKYNKDCHKASAKNKKLARQKSNITIKKPIAPVLKRPCCYVNNQNFKIRDNYIEFPVLINGKSKRIFIRTSMSDKQKQIFANAKLGTMRIVYKGNKIVAQIVHEVAEPGYTDDGNVMGVDLGIKCPAVSYISDGSVKFYGNGRKNKYMRRQYKYLRRKLQKAKRIDAIERINNKEQRIMKDIDHKISHDIIETAVAHNIKVIKLERLANIRSTTRTSRKNNHSLHTWSFYRLAQFIEYKAKLAGIKVEYVNPAYTSQKCPVCGSIHHADDRNYLCSCGFHTHRDVLGAMNICNSTEYVGDKNIRHTA

SEQ ID NO: 6876 - protein, 270 aa, Halorhodospira sp.
VVGEVRNVTVSLSGGRWHVSIQARQEIEDPRHPARSIVGMDMGVACFAALSSGEIIAPAHALKKRQRQLARAQRAMSRKVKFSNNWKKAKARIQRIHTRIGHARRDFLHKTSTAISQNHAVVVIEDLQVRNMSKSAAGTVHLPGRNVRAKSGLNRSILDQGWAEFRRQLEYKQTWRGGMVIAVNPRNTSRMCPACGHADKANRKTQARFKCVACGHTAHADVNAANNVLAAGHAVMACGGDVRPHPHLGVGTAAPMKQEPTEATQIASAN

SEQ ID NO: 6877 - protein, 349 aa, unknown
  TnpB Polypeptide
VWDTADYRRQYVGVLGSATAQQVIRKNSEAWRSFFAALEDGEDTAPPGYWGNENDGRELRTHIRNDQYTLEIGERSRLEISVGNDPKDEYGLGYHDRLRLEVCGAPKWDDEQDRLDLYYDEVDDTFGAIQPVTVPDSRQDSPLADEAAALDVGANNLVACTTTTGQQYRYDGRKLFRPFRETTEEIARLQSLLREERDSSRRIRRLYRTRTRRRDHAQNALVRDLVERLYDEGVATVYVGDLTDVLSGHWSARVNEKTHQFCAYRSFIDRLATTAEEYGITVEIRPEAYTTAECPACGEREKTERDGDEFWCPCGYEGHADLDASRTFLGQQAGTNPEVGSMARPVRLK

SEQ ID NO: 6878 - protein, 342 aa, unknown
  TnpB Polypeptide
MVQLRQTGDVPLHHRRQQMGARSGHQGSRHRVPEHVSAYGQAPAIPQEGVRDSFRIDGSVIAVRGKKLKLPKGLCLRLMERFRYENQVNKINNVTISRKAGYWFASISCDVGEPARENQGAGVLGVDVGVKSLAVCSDGTVIDNPKTLYRREKRKKHLQRMVARKQKGSNNQRKAKALLARYEYRTAVKREDWLHKASSRIVRANRVCFMEDLNVKGMLSNHHLAKAVSDCSFNELHRQLAYKTTVREIDRWYPSSQICSNCGSRKPMPLSERTYRCEQCGMVMDRDLNAALNILNVGMANYPELMPAEDDTPEATGAASRQATAPDETGIDHQTLRKNRFE

SEQ ID NO: 6879 - protein, 377 aa, unknown
  TnpB Polypeptide
MLHPNNKQRTKMFQCFGVSRFAYNWALGRQQENHKNGGKFISAFDLKKEFTQLKKLLEYRWLNNYSSVIPAIAIMDACASYINFFKGNSDFPKFKSKKKSKPSFYVLGDGIEFTDTHVKLMKLSNSMRKNRRKLNWVRLAEVGRVPTNCKYSNPRVTFDGINFWLSVSIEVEDSTELPTNEGIGIDLGVKDLAICSDGNIYRNINKTKEVKRLEKKKKRLQRKLSKKYVANKYEKTKNIVKLEKELLKLNHRPSNIRQNYTHQVTSEIVNRKPIFISLEDLNVSGMMKNKHLAKAIQEQSFYSFKEILSYKARKNNIQIIEVPRFYPSSKTCSVCGTVKSDLKLSDRVFVCPECGNKMDRDLNASINLKNYGLSTLK

SEQ ID NO: 6880 - protein, 267 aa, Burkholderia sp.
VRYRSSRAVLGEVRSATVSLRAGKWYVSILTARQVEQPVPQGPAVGIDVGVTRFATLSDGSYIAPLASFRKHEQRLAKYQRRMARKVKGSSNWKKAKARIQRIHARIADARADFLHKASNTISQNHAMIAVEGLKVRNMTKSASGTVEQPGCKVRQKSGLNKAILDQGWGEFRRQLEYKTAWRGGYFVAVDPKNTSRTCPCCGHISAENRKTQALFACIRCGHEANADHVGALNVLAAGHAVMACGGRVQSGRPMKQEPTAAQGIAA

SEQ ID NO: 6881 - protein, 152 aa, Clostridioides sp.
  misc_feature (145)..(145): Xaa can be any naturally occurring amino acid
VIAVKKAYKFRIYPNKKQQELINKTFGCCRFVYNKYLAKRIEVYKNDKETFTYKQCSSDLTNLKKELKWLKEPDKFSLQNALKDLENAYNKFFKEKAGFPKFKSKKTNRFSYKTNFTNGNIVYCGQHIKLPKLGMVKIRDKQVPXLKILIIR

SEQ ID NO: 6882 - protein, 233 aa, Streptomyces sp.
MRRAGTSPASSSTPTPTPTPTPIGPAGVTRTRAAPSASTWASPSPRLRPGGPPSRSSPTAFLRRAEKKLKKVQRELARKQKGSKNRAKARLKVARAHAAVADARKEFHHQLSKSVQDAGWSQFVGMLEYKAQRYGRTFVRIGRFDPTSQVCSTCGHRDGPKPLDVREWTCPACNTLHDRDHNAAINVKQAAGLAASACGAPVRPGLVPAQREETGSQGIPGLQPEEHVNTPER

SEQ ID NO: 6883 - protein, 218 aa, Halorubrum sp.
LFYDEQAQTFRAFQPVTVDDSRLAQPLASEEAALDIGANNLVACTTTTGQQYLYEGRDLFKRFRGTTREIARLQSLLEDGRYSSHRIRRLYDRRTKRRDHAQDALARDLIERLYDEGVSTVYVGALTDVLETHWSVETNAKTHNFWAFRAFVNRLACTAEEYGISVEVRSEAWTSQECPKCGSTEDTTRHRDTVTCPCGFEGHADLTASERSFGGRRR

SEQ ID NO: 6884 - protein, 364 aa, Synechococcus sp.
VWHTGSSYRYRIYPHRHQKVALARVFGCARVVWNDALALSREPLQPRGEVPRWSGTAKAVHSQAKRTPERAWLAEVANVPRSSPTPSGLRAKNFVSRRLVQSPPSGAGPCPLRLVLAQSSRTAQGVTLPASWSQRPKLPPNGKAVGVDLGLASLAVTRDGEKIAPPKFLRSALKKLRRLQQALSRTHKTSRNRARARFLVAKCHAKVADKRLDFLHKLSTRLIRDNQAVGIEDLNVAGLLKNHKLAGSIADAGWRMFRILLESKAKMYGRVVEVFNRWHPSSQICSKCRHQSGKKTLSIRHWQCPNCEAVHDRDINAARNLIPEVAAGLAETQNACLSRSKSSLLVSGVDAGTHLNQEAQRCTT

SEQ ID NO: 6885 - protein, 206 aa, Anaerostipes sp.
MEGFSTSRKKNKQKLNWIRLAEHSRIPTENVKYMNPRIKHDRLNWYITVGIEYESSTSLPSNEGIGIDLGIKYLAICSDEHKYLNINKTQRVKKLEKRKRRLQRSISRKYENNKEGGSYCKTSNIIKREKELLKLDRRLTNTRQNYLHQTTSEMVKQEPSFICIEDLKLSDRIYRCECGNVIDRDYQAALNLKRYGEMILKQQSVA

SEQ ID NO: 6886 - protein, 369 aa, Planococcus sp.
MANKAYKFRLYPTKEQEQLLLKTFGCVRFVYNKMLAERKEIYEQFKDDKGLLKQQKLPTPAKYKQEFAWLKEVDSLALANAQLNLQKAYTNFFAGRAKFPKFKSRKAKQSYTTNRVNGNIQLLESHIKLPKLGLVRLKQHREVPSHHMIKSCTISRSATGKYYISILTEYEHEPKLKEINEIIGLDFAMDGLYVESEQGEKANHPRFYRQTQQKLAKEQNILSRKTKGSARYEKQRIKVARLHEHVANQRKDFLHKTARRLVTRYDCVVIEDLNMKSMSQALQFGKSVADNGWGMFTAFLQYKLFEQGKKLIKISKWFPSTKTCSSCGHRRDMPLSERTFSCACGFVSDRDWNAAINIKNEGRLLLGLS

SEQ ID NO: 6887 - protein, 435 aa, unknown
  TnpB Polypeptide
MKITRGYKTELDPTVKQHILLCQCAGTARFSYNYGLARKQEVYKESGKIISAIDLQKELTARKHSDLPWLKGVSKWIVQNALRDLDQAYDNFFRRVREKKAGKKHKNLGFPKFKSKSQGRGSFRLDKPIRVFEDRIQLPKLGTIRLKEHSYIPTSGVKILSATVSERAGRWYVSVLVAESVPQVIPATGKPIGVDLGISSLAVCSDGRPPIKNAKALRANLKRLKRYQRHLSRCKKGSKNREKARHQVARLHARIANIREDVLHQATSSLVHTPLSPSERISLKTHLASLLPLPKTKAEQKRGKKQVKKLIHQTTEINAPLRPQLLVLEDLNVEGMKRNRKLARAVSDVGMGEFRKQIEYKSLWNGEMLLFADRFFPSSKTCHGCNWKWEDMELSDRIFICQNPACPLFQVPQDRDQNASENLVSLADNYLASLR

SEQ ID NO: 6888 - protein, 293 aa, Bacillus sp.
MTKQNKAYKFHLYPTEEQAHLMRKTFGCVHFVYNRMLAERKEVYEKYKDDKKQLKKQKLPTPAKYKTEFQWLKEVDSLALANAQLNLQTAYKNFFRGQNDFPTFKSKKDRKSYSTNVVNGNIMLFNSHIKLPKLKMVRIKQHKEIPQDHVIKSCTISMTPTGKYYVSILTKYEKEIVQKEVETVVELDFAMDRLYVSSEDERANYPKFYLEMLERLAKAQRVLSRRTKGSIRWNKQRIRVAKLHEKVANQRKNFLHYKSKELATHFDVIAIEDLNMKGMSQALHFGKSVADNS

SEQ ID NO: 6889 - protein, 427 aa, Escherichia sp.
MHQENTMLPRRISVSLFIDQSIIWPVKRLQAFKFQLRPGGQQEREMRRFAGACRFVFNRALALQNENHEAGNKYIPYGKMASWLVEWKNATETQWLKDSPSQPLQQSLKGLERAYKNFFQKRAAFPRFKKRGQNDAFRYPQGVKLDQENSRIFLPKLGWMRYRNSRQVTGVVKNVTVSQSCGKWYISIQTESEVSTPVHPSASMVGLDAGVAKLATLSDGTVFEPVNSFQKNQKTPARLQRQLSRRVKFSNNWQKQKRKIQRLHSCIANIRRDYLHKVTTTVSKNHAMIVIEDLKVSNMSKSAAGTVSQPGRNVRAKSGLNRSILDQGWYEMRRQLAYKQLWRGGQVLAVPPAYTSQRCACCGHTAKENRLSQSKFRCQVCGYTANADVNGARNILAAGHAVLACGEMVQSGRPLKQEPTEMIQATA

SEQ ID NO: 6890 - protein, 230 aa, Fusobacterium sp.
MIPQGRILSATITQAPSGKYYISLCCTDVEVEKLGSTNKNVGIDLGIKDFAITSDEAIIENPKYLQKSLNKLAILQRKLSRKPKGSSNRNKARIKVARLFEKITNQREDFLQKLSTMLIKEYDIICMEDLQVKNMVKNHKLARNIVDVSWSEFNRILSYKAKWYGRTIVRVDKFFASSQICNCCGYRNEEVKDLSIREWTCPVCKDVHNRDINAAKNILKEGLRILGISA

SEQ ID NO: 6891 - protein, 368 aa, Levilinea sp.
MKLTAQVKLLPNPDQAFALLKTLEIANDACNIISQKAWNDHCFRQFPLHHLTYQAIREIFPLAAQVVVRCISKVADAYKVDQKVMRVFRPHGAIAYDNRILSWKMDRSEVSIWTITGRMHIPFVCGERQRELLVGIRGESDLSIREGRFYLSTSCEVKVPDPKLVTEAMGVDLGIVNIATDSDGIVYSGDSVETKRRIYSHRRRNLQRKKTKAAKRKLKKISGKQARFQKDTSHLISKRLVQKAQDTGRAIAMEDLGGIRDRVTVRGRKQRARNANWSFYQLRQYISYKAELAGVPVIFVDPRNTSRTCPKCGCVDKRNRVTQSIFSCVSCGHSAPADTNAAVNIAARAVINQPMVSNHLGSGTSHFH

SEQ ID NO: 6892 - protein, 396 aa, Coleofasciculaceae sp.
MIVHEFKIKAKPVQYKAIDEAILTAQFIRNKCLRYWMDNKGVSKYDLNKYCAVLAKEHSFANELNSMARQSSAERAWSSISRFYDNCKSGKLGKKGFPKFKKHSRSVEYKTSGWKLLDPKQIQFTDKKGIGKVKLVGTWELSFYSVDQIKRVRLVKRADGYYAQICINVDVRIDVEPSQNAIGLDLVLKYFIADSKGNTEYCPQFYRKAERHLNRANRRKSKKYRQGAKPQSHNYHKARNQYARKHLRVSRQRTEYCKRLAYSAIQSNDLVAYEDLNVKGLVRNRHLAKSISDAGWSTFRRWLEYFGVKYGKVTVAVPPHYTSQECSSCGQIVKKSLSTRAHLCECGCELDRDHNAAINILQRGLRQYPGALGNLTLQETDPLAVLDTSCTVTVRR

SEQ ID NO: 6893 - protein, 480 aa, Erysipelotrichaceae sp.
MYHTAIFDVYDTSATKELFAYMDRLTASAKCMYNVANFHIRQLMTGLKKDPSERTPNEQGVIDKVTKYLPLINDRIAERNRKRATAGKKLTKPFAMPTAKKSFVGTNFLVAMFAMDNDPDYRSMYIQAAQNTVEECVEAWKSFFALKKAGDADAKIPRYKKKEHASVTFSNQGCWIENGMLRLPGTKTRFDVGSFPHCGDKLIEVRIVPYFGHYQIHILTDDLAEEPEKKDPCEPRNAMMIDLGVDNFATITDSIGRTPIAVKGGYLKSVNQNWNRMNARLKSILMKGHDPKVYHPENTKHMNAISARRDRIFRDMFYKISHFICTVAVSRSIDMIIVGKNTGWKQNADMGHRNNQAFVQIPHAKFISTLKVTAAKYGIEVFEQEESYTSRSSFIDDDPIPTYGNPESPYINLSGRRTKRGLYRTADGTLINADVNGSLNIGRKYDPWMFENMSFGERKCYASSTAVVGYRALHPESKGR

SEQ ID NO: 6894 - protein, 381 aa, unknown
  TnpB Polypeptide
MLYYTHKINKKEVYMKLNKAFKFRLLPNQTQIDLLAKTFGCCRFIYNKMLEDKIKYYQETKKHLSVTPAKYKQEFEWLKEVDSYSLCNEQINLQTAFNNFFRIPKVGFPKFKSKKSDKSSYTTSNVSNIIRANDKHQIHLCKLGWVKFVEHRKIPTDYKIKSATITKTPSGKYYISILTEYEYEISKRVLDKNKSLGLDYSSHDFYVDNQGRSPENLHHYYRDLQGKLAFHQRKLSHMVKGSNNYARQKIVIARIHERISNQRKDFIEKESTKLANSYDVICLEDIDLSNIAQSLKLGKSTLDNAFGMFRTRLEQKMMLQGKLIIKIDKWFPSSKLCRFCGCINKDLKLSDRVWKCECGETLNRDENAAINILNEGLRRIV

SEQ ID NO: 6895 - protein, 392 aa, unknown
  TnpB Polypeptide
MKQKRAYRYRFYPTPAQEAVLARTFGCARYVYNWALRVRTDAYSQRQERLGYHEASAALTALKQQPETAWLNEVSSVPLQQALRHLDHAFRNFFESRARYPSFHKKHGRQAATYASSTFRWDAQTRALTLAKMDAPLDIHWSRPFTGMPTTVTISKDTAGRYFVAFLTEEAIAPLSVVKTMVGVDRGLKDLAVLSTGEKVANPHHLRRSACKLAHAQRHLARKQKGSKNRAKARLKVARVHARIADQRLDGLHKLTTRLIRENQTVCVESLAVKNLVRNRPLAKAISDVGWGELVRQLEYKAEWYGRTLVKIDRWYPSSKHCHACGHLLDSLDLATRQWTCPACGVGHDRDINAAQNILAVGLTVNACGEAVRPGRALPNPARPGEAGIPRL

SEQ ID NO: 6896 - protein, 524 aa, Bacillus sp.
MAKISSPSFVLSLELKKNPLLFSVAFDELEICRAMYNTILSQYLKLEKQMKREKRYKKLIRQLKAVSKKLEKDEQNKALIKDKKQIKDDLKTLREKYHLTEYSSHVWVKPIREHFGNRVNAAVAQKIATRAWNTFSRKLFGKAKKVRFIRKDEMDSFEGKTNKTGWRYIDGNIVYKDLQSPLILKKKDQYALEIIRHLEKKTEFSFKVTSKGETKTVQDFYRVKYVRIVKKEIRGKVRLFADLVIAGYPPSKNRKLGKGKVGLDIGISTVAVSALTKVSLVNLAEQVKEISREITLTQRKMDRSKRTTNPQNFHVDGTIKKGKKYWVFSTRYKKLRAKLKEFHRKQAVIRTLSHRTLANRLLELGDTFYIETMNFKALQKRKKETEVSVKTGKYKRKKRFGKSLGHRAPAMFVSILEGKVNRLGGSFIKVNTHKFKASQYCHVRDDYIKKALSQRWHQIDENTKIQRDLYSAFLLMNSNASGTKANRKRCHETFPIFQNLHDFEIKEILSQKRMIFNSGIILNN

SEQ ID NO: 6897 - protein, 478 aa, Cyanobacteria sp.
LARSKTSTFVTELPLIVDSFQEKQLLSRFQAARQLYNACLNEAMVRMNLVRNCSAYKLAKQIDRQSKKARSDAFNAARREYRYSDYDIQAYATIVSNRSKWIAQLIDSNTQQTIATRAFRASEKVLFGLAKSVRYKIPSRFRSIEGKTNKQGVRWKDSQLVWGFLKLSPLIEEDNPVIQHGLNSSVKYVRLLWRELNGKRRWYVQLINSGLPYQKQKNYVANGVIGLDLNITNIAFVGDNKAGILPFAEQVPTYEREIKALQRQMQRSQHCSNPQNYETDFTKRVGRRSVVKKGKPQKGKQQWKKSKNYQKIARKKRELERRKSAYAKSQNRRIVNEILRHGKQIKTENVSVRSWQKRYGKAINAKSPGFVQSELARKAESAGGSFIKFSTQKTALSQTHLTGERIKKKLSERVHYDQTGLAMHRDLWSAYLSRFVNEEDILLLHLAVEQWERSEPILHEAWKDFQTNREQLGASERR

SEQ ID NO: 6898 - protein, 390 aa, unknown
  TnpB Polypeptide
MKARRAVLIKLPRGMCDVDYIKRLMALSNLAYRGYEVLVSDIPKTIQNHLYNSFKDYLGSLVFGAKPKRWFARAWVPLKILRFYGDGSMKGDKGAPVVLDFRGSVIRLRQVCKNELGFVVTIQMPKWVIDRVKEGGDIKYAMIGLKDDKPYLALVAERVVEPYVPSGYRLVIDVNAWNNGIAWGLIRDRSIIRWKPERPSLREIDNLYNLSMRLSREYGRLRRLGLHRTVEGRRLWRNIKRVRRKIYAKLRDYAQKLVHRLVRKALRHRALVIIDDMIEKSRRELIEEKIPRGLRKIYLAETRRFVKLLITQLRWYGVPYEFKRLPSTICPVCQHELTQLPDRTMACTNCGFKAPRDKVPIHWALRGYNSTKGWPPPNGEVVRFTTQLYD

SEQ ID NO: 6899 - protein, 384 aa, unknown
  TnpB Polypeptide
LLKSFRTEIHPTEEQKVRIHKTIGTCRFIYNFYLAHNKELYQNGEKFMSSSKFRVWLNHEYLPQHPEYLWIKEAYSKAVTQAVNHGQTAFKKFFNHESAFPKFKKKGRSDVKMYFVKNNPKDCRCERHRVNIPSLGWVRIKEKGYIPTTKEGYIIKSGHVSMKAGRYYVSALIEIPDNKTADLSNEGIGIDLGLKDFAIVSNGKTYKNINKSARLKKLEKRLVREQRCLSRKYENLKKGESTQRANIQKQKLKVQKLHHKIDNIRTDYINKTIAEIVKTKPSYITIEDLNVSGMMKNKHLSRAVASQKFYEFRIKLKAKSRENGIELRVADRWYPSSKICHCCGMIKKDLKRSDRIFRCHCGYVEDRDFNAALNLRGVKTYKIA

SEQ ID NO: 6900 - protein, 361 aa, unknown
  TnpB Polypeptide
MFRAHKIRIDCTKEQHSLLMQTAGCARYAYNWGLEKWGKMYEAWKADNSLEEPNRYLVSRLWTLEKPEWAAKTARDPVTCAFINLGSAFKNFIRRKAKYPKKHKRSQGISFQLGNDTCSIEGNHLRLPNIGYVKLRETPRFQGKITGYTVRLIASHWYVTVAFDCPDVPKEAPESVVGIDVGLQHPAVASDGTKLELPLEKLQKLEAKKRRAQQALSRSKRNSNARERKRTKLQRIQNKITNIRQDAVHKFTTTVCKNHATIVTEDLNIQELKDKAPARNVRRAYNSSLMSTILWQISYKAVHHIKAPKYFPSTKRCSTCGHVKEAMPPNIRTYHCDHCGAHLDRDENAARNLMLQPWVTR

SEQ ID NO: 6901 - protein, 354 aa, Escherichia sp.
MRPVINTSLTGKWLPGWLSGKWLKDAPSQPLQQSLKDLERAYKNFFQNRAAFPRFKKRGQNDVFRYPQGVKLDQENSRIFLPKLGWMRYRNSRQVTGVVKNVTVSQSCGKWYISIQTESEVSTPVHPSASMVGLDAGVAKLATLSDGTVFEPVNSFQKNQKKLARLQRQLSRKVKFSNNWQKQKRKIQRLHSCIANIRRDYLHKVRTTVSKNHAMIVIEDLKVSNMSKSAAGTVSQPGRNVRAKSGLNRSILDQGWYEMRRQLEYKQLWRGGQVLAVPPAYTSQRCACCGHTAKENRLSQSKFRCQVCGYTANADVNGARNILAAGHAVLACGEMVQSGRPLKQEPTEMIQATA

SEQ ID NO: 6902 - protein, 312 aa, unknown
  TnpB Polypeptide
VSLSTVNGRVECEYVIPDDPTGTPIGEFLLNEDYEFRMSTLQYDRSTDSFYLHARMRRTTDEHEQSTGVSSDAKHRTVLGVDLNVDGSLAVTSTGEFIGNADEMNHRRREFEKTRGSMQQTGTRSAHLSIQSMDDREHRWIQDELHRASNQILDEARDHGCTHVAFENLTDIRDRIAGAKRFHVWAFRRLYEYVEYKAEMLDIGIEQVSPAYTSRRCSKCGFTHETNRRSKHQFVCQKCDYELNADYNASKNIARKLLKRLRSGQKSSSGGAPCQCALTSGTLNLNGEFIASVDSTAEGESTDKPTTSVVGH

SEQ ID NO: 6903 - protein, 380 aa, unknown
  TnpB Polypeptide
MRSVVTAKIKIESRPEIISTLKLYTKGLQFCIDTAWNKQIKNNIKLHPFVYKHLRSLGLQSQLAIACIKQACGMLKKAKTKPLVKRASLRYNFPRSASFKNNVLSIATIKGRIKVQFSVPDCYKEYFSWNVNESLLRMDKRGRCFFLFTFSKEVDTINNASQKRVLGIDLGINNLAVTSDGRFYNSHKVKQIKRKFRYLRSKLQAKGTRSAKRLLKKLSGRENRYMAWVNHNMSKNIVSNFNGNKIVMEDLRGIRKQRRGKRMNYWISNWSFYQLQSFIQYKAERKGIEVISVKPNYTSQLCHKCGQLGSRSKGCFSCSHCGFSSYSADLNAARNLAHPMLVERQALVNVPHVTCDDTFPVLTDGLLVEHSQKLRIFNAV

SEQ ID NO: 6904 - protein, 447 aa, unknown
  TnpB Polypeptide
VIIQAFKMLEVHRTHRAKILNHSQVEEPLDRHGWSASKLWNVANYHSRQVWEDTGKIPDHSDLKDELKTHSKYKGLHSQSSQRVLEELAEAFTSWYQKRKSDDRANPPGYRKKNYYDNDGNRVHEEHPRSTVTWKQNGIRHDTKNNRVRLSKGANHKEHPKAWEYILVEYETRPGVEVEDLQQVRAVYDTAKKRWELHLICKDEIKTPNAPGNETAGIDLGISNFAAVAYSTKEADLYPGNRLKQDGYYFPKEIANCDDSGGDEATRLHKKWSERRTHFFHSLSKHIVQRCIAKGVGRINVGELEGIREDENGESKNWGKHGNLDLHGWAFDRFTSILTYKAKVEGIEVVEVSERDTSKTCSVCGRKDESQRIERGLYVCEECDAAFNADVNGAENIRLNINKESNSESAGQLSGDRSTGWLAQPAVYLYDLSSGFQPQEQVVDCKP

SEQ ID NO: 6905 - protein, 412 aa, unknown
  TnpB Polypeptide
MRSQKIRLKLTKEQERLAWWYSKVSRNFWNLLVDIDKRNNKGEFDEILNKNGNKTYHSKFYNREVYNLNQSDYLNLAKIVVAKNYDKDKEKWSWYYQPNQSFIYAFVSRELVKIRKQNKGQLNFRSIHNVQPNFNVCCSVFPNKKRPSRIYIKDNGKLQIPTIGEVNFGSVRKDFDLSSKKQVTNISFDGKYWYLSYTEDIEVQVADLPNYTDGVGIDLGIKTLATVSDGTSVPNIKTFRRVRILNKRLKRLQRKVSRKYLINKCNKHNKTKNIIKLERQIKLIHRSIRNIRINHIRKFVSVLVKKQPQYIAIEDLNVKGMMKNKHLARDIANCSFYTIREHLIRKATERCIAVRLVNRFYPSSKTCSNCGDYQKDLKLSQRVYHCDNCQMKLDRDFNASLNIAKTDKYVLA

SEQ ID NO: 6906 - protein, 403 aa, unknown
  TnpB Polypeptide
VSVQLRYNYRLYPSSGQRAALARAFGCARVVFNDALRARQDAHAAGLPYLSDSELSARLTAAKATPERAWLADVSAVVLQQALADLNAAYRNFFASAIGRRKGPKMHAPRFRSRKDHRQAIRFTANARWQITSGGKLRLPKIGDVTVRWSRALPAAPSSVTVIVDAAARYFASFVVYATPEPLPQIQQAAGIDLGLTHFAVLSDGRKIGSPRFLRRAEKKLKRAQRALSRKEKGSRNRDKARVTVARVHARVADARREFCHQLSTALIRENQAVAVEDLAVNGLARTRMAKSVHDAGWSAFVAMLEYKARLYGREFRRIGRFEPTSQVCSACGTKDGPKPLHVRQWACRACGTVHDRDVNAARNIARAAGLAVTACGARVRPGAVPAQRREAGTLPKPRQQAA

SEQ ID NO: 6907 - protein, 405 aa, Thermus sp.
MTRKAFKYRLYPTQPQRKDLERTLALCRRLYNAALQERRDAYRKAGKTVNFYEQKRGLPEIRADLPEYRRIHSQVLQNVIERVDKAFQGFFRRVKQRGKAGYPRFKGEARYDSFTFPQAGTTGVKLQEGGKRVLIHGVGSVKLKMHRPLEGEIKTATVKREGDQWYIIFVCEVEPRPLPESDKAVGIDLGTNPNFLVTSDGEMIEAPRYLQKAQAKLASAQRSLSRKKPGSNRRRKAQRRVAKLHRKIANQRKDFHHKIARRLVNRYGTIVHEDLNVIGLARSRTAKGVLDAGWGQFLKILAYKAEEAGRRVVGVDPKHTSQDCPVCGHREKRPLWVREYTCPRCGAPQHRDVAAALNILAKARTEPAGMGTDKSVPLEPRSPVLKNEESSQRGVVTLPLIGGEG

SEQ ID NO: 6908 - protein, 388 aa, unknown
  TnpB Polypeptide
VFRLRPTARQHVALAACVDAHRELYNAALQERRDGWSHPSKTRISYGDQSAQLTEMRAVRPDQAVWSFSSQQATLRRLNKAFAGFFRRVKAGQTPGYPRFKAARRFGSVEWPKDGDGARWLPEQRRVYLQGIGQVKVGLHREVIGRVKTIQIKRQGRRWILVLSCDDVPTSPLPVTGRRVGIDVGVVSFATTSDGQHVDNPRWARAAADRLAAAQQRLQRARRGGKNRAAKRETVAARHRKIANQRKDFHHKQGCELVARYDLIVTEDLKIANMLRRAKPVPDPDNPGAFLPNGARAKSGLNRSISDAGWGQFVSILRAKAEEAGRAWIEIDPRHTSDGCECCGHAARDNRVVQAEFACQRCGHTAAADEHAARNILRAGLARHAHAA

SEQ ID NO: 6909 - protein, 439 aa, unknown
  TnpB Polypeptide
MTHIVPTTMPNVIAFIISNSLKKFTRCQITITPYNISMRKTFRYQLEPNKTQAKALKATLRLCCDLYNEAKCLREIVYKTSKKGLSYPEQAFYFKDEKPYCDLHSQILTDTLRRLDKSFQNFFRRIKRGETPGYPRYKAFDRYNSFTYPQPLPRGGFKIIGNKVHLGKIGHIKIYLHRPIPKDAKIKTLTIRRQCGKWYACFSCEVQPKPLPPNTNEIGIDMGLISFIATSNGETISNPRHFKKSEKRLKVIQQSLSRKKRGSKRRYKTKLALRKAHEKVRNQREDFQHKLSRNLINDNGLIAIEDLNIKQMIEKGATKLSKSIGETAWSSFINKLIYKAEEAGRVVIPVNPFGTSSTCYQCGAYRKKDLSERIHKCSCGLVMDRDVHAAMNILKRARAELLLKLYHTLRRVASLRGVPEKMPCFIGHLSLKVSSNSWK

SEQ ID NO: 6910 - protein, 460 aa, Calothrix sp.
MPYPAFVDIFCCIFVSADTRKDFLHKLSTKVVSENQTIILEDLNVSGMVKNRRLARVISLQGWREFRVFCEAKAEKLNREFRVISRWEPTSQTYSYCGYRWGKIDLSVRWLKSDCYSAVLQCVAINLNKAYANFFEGRAKFPRFKSKNHRQSIQYPQNVTIVENCLNIPKIGEVKAVFHRVIEGKIKTVTIIKTPTDKYYASILVENDGESIQTSGDKTIGIDLGIKDFAIVHDGEQAAKYSNPKHLKRHERNLARKQKKLARKVKGSKSKNKFRKLVAKVHERVSNSHQDFLHKLSIKLVNESQIIVVENLNVKGMVRNRKLSKSISDVGWGMFVNFIDYKLKAKDGQPSGFAVATTGGTPARRCSLVEIGRFFPSSKTCSCCGHIVDELPLDIREWDCPACKNHHDRDANASKNIRAEGIRILSMGGGNPVLARGDVRPISRKVERLLSMKPEAHTYC

SEQ ID NO: 6911 - protein, 369 aa, unknown
  TnpB Polypeptide
MIRSSRVKLKFANRGKLKTAFALLSDQTNQVVTDLINDLINNHDKIPALLPAAVTNQLPFGARINQLLAKEASSVARSVRSKLSKAAGRHNLQKYQQELVDKFNARTLNVAWTGNLNLDSRFVGIEQSQNSTEFDLWLNIKFPGVDRVLLPFKSTRHMRDLFSRGYELKTQSCKICRDNTVILFFEKQPQPNTNSHAIGIDVGRNKSFVTSDRVIEHTTKSILNALPKKQHGSKSKARAVRRLHQTIDREIKSIDFANLSLVVMEDLTGMKPGSRRGNINHHWSYRYIQTRIAQRCEEHDVRVRHVNPAYTSQTCSACGVTDKASRKREVFECNACGVVEDADYNASVNILHRGTNNARAQKTSNRLLT

SEQ ID NO: 6912 - protein, 346 aa, Deinococcus sp.
MYNKKNSNSNINTYNVRVLRPGYADIGQAMEQNQFKRAEGYRSGGGQGQLWQLAGGQATDQAALDDRSFAMGQTVIQANIHQLPGEAFAALVTGSHGQFERQRDISRLLTLVGMGAGAVVGAAAQTPADALSRLSLPSCVWKPSETRLIQQGHDWLLSLCFETAGGWTPQGRRAAAGVDIGLQPLATAVIGDRFLATQGPDENQVRQMNGFRPDVVEVVESLLAGQGLDLLTDELIRSAGYVAVEALTFSGLREKDSFKRFVSRARASAVVDWHQCWLPQQLRNAGIPFTRVDPRYTSQQCQCGSRMTERDGSHMHCYACGWEGDAHRNAALNICRLGQSRLRRAS

SEQ ID NO: 6913 - protein, 378 aa, Lachnospiraceae sp.
MQLSVTVKLYMTKEQAVLVMETMKTYIAAVNGLVSDAVSGISIVKYTSKDVNADLPSALKNQCVRDANSIYRKYTEACRQAASKKKNLKDTESAARVKEPKVPVLRKPCCYINNQNYRIKDDHLEFPVFADGKTHRISVKIRLTDEQRSVLSGSRLGTMRIVCKNNKIVAQLVYDVTEHASVEEGNVMGVDLGIKCPAISYCSDGSVMFYGNGRRNKYMRRHFSKLRKQLQTAKHPEAVKHMNDKEQRIMRDIDHKISHDIIQTAVAHNVKTIKLECLANVRSTTRTSRKNNHSLHNWSFYRLAQFIEYKAKLAGIRVEYVNPAYTSQKCPVCGKMNHADDRDYRCECGFHIHRDILGAMNICNSTEYVGDSNIRHTA

SEQ ID NO: 6914 - protein, 495 aa, unknown
  TnpB Polypeptide
MNKERENTRMQTYTYTLKLKTNSKMKKELNKRLRKGAHIYSETLKELLNREKKLKRDPLYKQAYKLEKGKERNAILNELDKKYKLSKFESMTIASKKRKDLCLTAYIPNRVSESLGNRAYLAFRKKLFVINNTSRVVRPKMIDSLVSSGDNAIRVRNGKVYYGVSKGKLKRHLLEIPIIYKNDEYEQEILRGKLVQNRILKKIQNGKEHFYLQMILKSEVAPRKYDTSDMFGNVGIDIGTSTVAISSYYETKLEELAPGIDKKEKEIAQLNRKLERQRRANNPQNYNEDGTIVAGKKTWTYSKKYYQTKKKLRKIKTKQAERRALAHKTLANEIVRLGDRFVVEQMSFAGLQKRAKETKLNEKTNKIQSKKRFGSTIGHRAPAMLIALIEQKCNYQGKTFIKADTKAVKASQFDHLTEEYTKHSLSTRVKFVGDDKVQRDLYSAFLLAHVEDDKKTVNVNACKSNFNTFLENQKQTMKELSTTLGSTGAKKFFEE

SEQ ID NO: 6915 - protein, 257 aa, unknown
  TnpB Polypeptide
LKEKPKLQGRIISATVSRKADRWFVSVCVERKIPAPSHVTGPRIGVDLGIKSLAFFSDGTKIENPQALVKKLQKLKRLSQQVSRKKKGSHNRRKVIIRLARLYWRISNIRMDVIHKLTTYLAKNHSQIVIENLCVKGLMKNKRLSRAIADVGFNEFRRQLEYKTKWYGSEVIIVSQFFPSSKRCSRCGHTKDELSLSERVFNCDECGLQLDRDENAAKNLVAASWAETINACLETGGYRSSLDQCLSMTQEPNTTKT

SEQ ID NO: 6916 - protein, 117 aa, Lyngbya sp.
LAHKLARAISDANWGELVRQLTYKAEWYGRELIKIDRWFPLTKRCSNCGYIAERMPLNIREWDCPKCNSRHDRDINASINILAAGLACGATVRAQQSKSVKPGAKNSSRERKKQEPK

SEQ ID NO: 6917 - protein, 437 aa, Lyngbya sp.
MRNVAKVRLYPTDEQKQALTKAFGSVRWVWNYCLELNNQAYKETGKGISGMQLKKQLPILKKKEETAWLKETYSQCLQQSVLNLSRAFVNFFEGRAKFPRFKSRHEKQSIQYPQNVKIVDSHLSFPVIGKIKANIHRKFDGNIKTVTITKTRTEKYYASILFENEEAEPQTSEEGKAIGLDLGLTHFLITSEGSKYENPRHFKKHERNLKRKQQKLSRKQKGSNSRNKARKLVARAHEKIFFARQDFLHKLSRKIVNENQVIIAENLNVKGMVSQRVGRGTRLEATGSPARVRNHNLAKAISDCGWGRFLNFVDYKSKKDGKTYLEIDRFFPSSKTCNVCLNVVQSLPLDVRHWECNHCHTQHDRDINAALNIRDEGLRVIAADPDRQFLAPGTGVTASGESVRPTKGRKSSVRQLPINDQSNDASTKVDQEAGSLR

SEQ ID NO: 6918 - protein, 371 aa, Methanosarcina sp.
MLKAYKYRIYPDKDQEKFIKVNFGACRFVYNWALEQKIKTYQQNNKSISRFDLQHILVHEVKPSNEWLKEANSQALLASLVNVESAFTKFFREKSGFPNFKSKKNPVQSYQMPQHYTVDFERNIIKLPKIGEVEAVLHRKFEGAMKTATISRSSTGKYFISILVDDGDELPAKQRISESSTIGIDVGIKDFAILSNGVKVENPKYLNNSLKRMKCLQKRVSKKVKGSNNRNKARHHLSKIHETISNQRNNFQHQLSFRLISENQAIALETLNVKGMIKNHCLAQSISDAGWSSFVTKLEYKAEWLGKTILRIGRFEPSSKICHVCGYHNGNLTLKDREWICPDCKTKHDRDINAAINIKKFSLQDQNLIII

SEQ ID NO: 6919 - protein, 387 aa, unknown
  TnpB Polypeptide
MEMLAHQIRLVPNRHQEEYFGKACGISRFAWNWGLSEWKRRQAAGEKVDGLKLKKDFNAQKPVDFPWTYEVTKYASQQPFLHLQAAFRRFFEGKSHYPRFKRKGVKDSFYVGGDPIQLSGLRIRIPRLGWVRMREEVRFRGKVVSATIRGIADRWFVSIHVELEQAPVPCENQAGIGVDLGVNRLATLSNGQKFEGPKPLRQELTRLRRLSRTLSRKQKGSNNRRKARIQLARLHYRLRCIRQDAPHKLTSYLTENFVGIAIEDLNVKGMLRNRRLARAISDMGFHEFRRQLDYKARMRGNHLQIVDRWFASSKMCSKCGVVKEELPLGERAFRCEGCGFESDRDLNAALNLFRTVSSTGTQACGEGGSGSSTRWSETVLCEAGTWA

SEQ ID NO: 6920 - protein, 389 aa, Merismopedia sp.
MFVIEFKAKGKTKQYEAIDDAIRTSQFIRNKCIRYWMDNKGVGKYDLSAHCKILAKEFKFADELNSQARQASAERAWSSIARFFENCKKQMAGRKGFPKFKKNVRSVEYKGTGWKLINPKTIQFTDKKGIGVLKLKGTWDLGYFQKEDIKRVRLVKRADGYYCQFVLSTEVKEEVEPSNKAIGLDVGLAAFYTDSLGNKIDNPRFLRKAEKKLKRLQRRLSKKVKGSQNRNKARVKLGKAHLKVSRQRKDFVVKLARCVIRSHDAIAYEDLRISNLVRNHCLAKSINDAAWYQFRAWLEYFGWKFGKITIAVPPQYTSQECSNCGIVVKKTLSTRTHACKCGCSLDRDENAAVNILRKGLSTVGHTGFQAWGEATSTLEGASLLEQVAS

SEQ ID NO: 6921 - protein, 577 aa, Curtobacterium sp.
MPERTSTTAATDVAAVVAPKRSKPGLRVLADPFVVATPTGARTRTRLHLSAAEAAALTRIGEYLGGQYRQTLANRIRLGRLDQDGRKLWRAEEKRRLTAVSSSRWAGALTRAVNDQYQLGMRGLVAEVRMLHQATEHIAARMAVPVGENVPGTVRRSKPIRGYASENERFMKSRRRGALLTRLNHARADLSAGTPTVVVGSGRLWRNREHLDEAGLTREAWEEQWAAARMFLTADGESGTIGGNHTIRVLPDGRVHVKVPAALVAELGTRQLLLTAPLTFTTHCGAEWADRVDQRKAVRYDISVEANGRWYLHPSWAYPEAPTVPLDALRQQRTLGVDVNGGHFDAAVIDVSGNVIGRPVRLEAPLEGLPASARDAHLRHTVTRLITLAQQHGCASISIEDLGFDDARATGRETMGRGKAGKRFRRTVAGIPTAKFRQRLVGMTATAGLSVIAVDRAYTSAWGKQHWLQPLIETFGGSIDGHRAAAVVIGRRALARKARRTPAGPRPRQRTRPGQPTGRPQGQPRTPRAAREGSRTTPPTPQDGFGRVAHSNVARRQHRSDGTVHRKRVVDSLTRTQ

SEQ ID NO: 6922 - protein, 353 aa, unknown
  TnpB Polypeptide
MEKTIKASIIGLTKNKRELLDFDYFNYQWWMIFGIDNGILSCFKATKGYKQKIIRYHEYSLPLWSRLIKNWFRVRNTKLTKHWIKIPNSKKKGIGIWLPLHFHQEFPKQHILKDSFLVRKKDKYYIHFCVDFPEPKPYTPKRIYGIDLGLKNPITLVDTFSRKTQFLGKEIKTTKGKYFYLRRKLGKNKNLALIKKIKNKEKRKINAILHQVSKEIITNAYKNKAALVIGKLKYLKRDKGRKFNRKLSNFSYYKLTTYLIYKAKEKGVPLFIVPETNTSKTCSVCGIIGKRTKNWFRCSCGYKDNADRNAAFNIGKRGLSYMLKSGATAFAQKSIILNGQAQNQEIAQTCSLH

SEQ ID NO: 6923 - protein, 370 aa, unknown
  TnpB Polypeptide
MKQTILVKLVPDETQFAELKDTMQHFNEACNSIAETAFQTKVFNNWQLHHIVYRQIREQFKLSSQMTVRAISKVADTYKRDKTAKPTFDLHGAVVYDQRILSWKGLEYVSILTLKGRQKIPISIGAYQEARIDKIRGQADLIFRDGQFYLAATIEAPETEPFPPKDFLGVDLGIKNIAVDSDGERWVGKELNGIRGRYVKVRSKLQSKGTRSAKRLLKKRSRKEHRFTSAINHAISKRIVQKAKDTFRGIALENLKGIRLRVTVKSSRQRRTIHSWGFNQLQNFIEYKAKVAGVPVVYVEPKNTSRTCPNCGYIAKTNRNGEQFHCGHCGFAGHADHIAAENIRRVAFQPTIRLEGFSKHISCAPLGTIS

SEQ ID NO: 6924 - protein, 510 aa, unknown
  TnpB Polypeptide
MYLLSVETVTPPQVAFLACANYTVERSKKRKFPMQLTYKYRLKPTKAQLVTIAVHLELCRRQYNYRLGERFRWWEATRTPINACPLTASIVPIGEIYKNIPLTRTQTRDGRKKDELGNPLTKKGDVFSNIEGGYVQWQTIQLADLKNTKKLFPDYKLLDSQVLQDVVNRVETSFSNFTTPDQNGNRRGQPRFKGFHYYKSFTYPQLDHLNLIKYEQNRICIDLAKIGQVPIVFHRSIPTGFKVKTGTVIGEADGWYISLTLEDKTVPVMVAEIQPTDENTLGIDLGITNYVYLSNGERIENPRFFRNSAEKLARLQAKLADRIKGSKPWKVIKDKISKLHQFVARARLDFQFKTAHKLFDKCDVLIVEDLRIKNLTRRAKVKTDIENGNLVYLPNGQAAKSGLNKSMLDASHGQFATVLKYVAWKLGKSILFVDPKGTSQQCGHCLNKVPKELSDRWHSCQCGESLDRDENSAKLIKRIGLNYESGGGTPSLKKALAQREKEACGLTVRP

SEQ ID NO: 6925 - protein, 287 aa, Candidate divison MSBL1 archaeon
LRNNQLYSRGDKSKGGNLNLRFVEKGNRTYLRVNTGDRKWIYVPAYLPSEIESRILEGKEAYGVRILRKNENYELRVSFEEKYEVETGFEKGAVGVDFNHKTIDLAVTNGQGQLKDEKTINCAPLTDARKEKREWLIGNLAKKVVNHAKYWNRGIVVEKLEDLCRENSNQHEFSHKKFLEAVKRRAEREGVKVREINPAYTSIIGKHKYVSYYHITIHQAAALVVARRGQGFSEHLHGLKTPLFEAMEAGGEGVCARSPGALMEPVEIDEGPTLPQRDGLHVPGPIL

SEQ ID NO: 6926 - protein, 301 aa, Lactobacillus sp.
MLFRHRGGYPHFKNRHSLRQSYTGRSTCKVLARRRMQLPKLGSIRTSRTGLVGDAKIKRYTVSYEPTGRYYLSLQVETEVNQLPETRQSVGLDMGLADLVISSDGVKYGTFNAEWLEKQAVRWQRKYARRRYLAQCQVWKWNHNRFDHLEELDDYSNWQRARVNKARCQKRIANKRRDYLHKLTTDLVRNYDVIVIEDLKTKNLQKNHHMARSIANASWYQFRAMLEYKCAWYGRQLVVVKPDYTSQICSNCGFNSGKKPLEVREWTCPKCGIHHDRDVNAAVNILHKGLKAIGQGLALVK

SEQ ID NO: 6927 - protein, 307 aa, unknown
  TnpB Polypeptide
VYFAKAAGTARFVWNWALAEWNRQYEAGEKPTAFKLKKQFNAIRREQFPWTWDVTKNASDQPFLDVGKAFTAFFEGVKSGKRKGRPKFKSKKRSKASFYLANDQFELGDHRIWIPKLGWVNMAEKLRFKGKVTGARITKTADWWFVSLTVEIPDEMPEKRLAAIGIDVGLNRLATLSTSEGYENQAFFRTALKKLRQANKRLHRRVKGSKNREKARRQLARLHYRITCLREDVLHKLTTRIADGYGIVGIEDLNIKGLFKNRRLSRSFSDAALGKLLTLLTSKVEQRGGQVIKVGRFFRAPRCTITA

SEQ ID NO: 6928 - protein, 368 aa, unknown
  TnpB Polypeptide
MIRSYRFRLKPTRVQHNRLREALEHCRELYNAALAERIECYRKTGRGRSFMDQCRALTELRTDPVFANYPAVMQRGTLRQVDHAYKAFFRRGGFPRFKGREWFKSLSWPQADGFRFDGRFHAKGIGSIRVHQHRQLPSKPVSCRIKREGRHWYLSLVCEVEGAANDNAEAIGLDLGLSSFAALSDGTLIPNPRHARKAQKELRRRQRALSRCKRGSKRRSKARQQVAATHAKIRRSRRTFHFQVASDLTRKFGLIAVEDLNIKGLARSRLARDVNDAAWGGFLQILTDKAESAGCQVVKVDPRGTSQTCPSCGLVEPKKLSERVHSCPCGFKADRDVAAAQVILFRAVRGPAEAKLAVAPVSPRKAAA

SEQ ID NO: 6929 - protein, 432 aa, Bifidobacterium sp.
MLEAVKVALDPTPIQERLLSSHAGAARFAYNAGLAHVKTAIEAGEKPEWSLYALRRWWNANKDTLAVDADGKTWWRENSKESYNSGLGSLADALKNWSKSRKGERRGRRVGFPRFKAKDSATPRFAYTTGSFGLVKDDPKALRLPRIGRVHCMEDVTGRVDGARVLRMTVSCRAGRWYAALTVERADPTAKRTPKGGAVGVDLGVKTLATLSDGTRVDNPHTLRTAERRLKHAQKALSRKTKGSNRRRRARARVARIHARIADRRRDLLDKLTTWLAGTYSDISIEDLNVTGMVRNHRLAKTIEDASFAGLRRRLEYKTMRTGARLHVIDRWYPSSKMCSDCGSVKAKLSLDERTYHCEDCGLTLDRDLNAAINIMVAGSAPETLNAHGGDARPAVHQDGRQTPAKCEPSSRATGVRLGADGRKTVLQTRTN

SEQ ID NO: 6930 - protein, 650 aa, Streptomyces sp.
MSRFRMYPTAAQEQRMLLHCAHARYVWNLTVEQHAHWRPGRSSAPGFAEQCRQLTEARRDNAWLRAGNAEVQQQALKDFAGAKAARFAYGFGEPTWRRKHVHEGFRVIGTDRIPEVGPDGSPKLNTKTGRQVMGRSVVVQKLNRRWARVKVPGCGWVRFRLTRAGLPVAKTFRVTFRNYQWHIAFAVIPEPVEAPGTDSIVGIDRGVTITAALSDGQKLNCPRLTTRERARVRKHQRRAARAPKGSDRKRDEYAKVARIKAREAARRKDWCEKTSTVLARTYGLIRFEKLHITTMTRSAKGTVGQPGTRVRQKAGLNRVILAQGWGLLRRRTQDKAPGRVEDVPAPYTSLRCSACGWIEKDSRKSQAEFVCISCGFGCNADENAAVNAAAGQGGIPRPRRAAGAGGVTAATGRSSAREPQPIRVGIPLLRRGRMSNRRGRMSKPGGCPQAAPDVSAGPHDERMTEHEQLLTQVAAKARETRPWGRPTLPEPVDAVILARAEAALGFELPPLLAELYLRTADGGFGPEYGLLPLLEGPPSDEPAAVAQYLANRESGREDPDWPWPEGVLPISHWGCGMYACVDCRSPQATVLLFEPNADDPDHAWFVDAPGLADWLRSWIDGTGWYEEENEGTDLALWADYSHRVTAAHTS

SEQ ID NO: 6931 - protein, 414 aa, Brasilonema sp.
MKVKGNRQQYQAIDEAIRTTQFIRNKAIRYWMDASREAKINRIALNNYSTALRKEFKFVEDLNSMACQSATERAWLSIERFYTNCKSKKPGKKGFPRFQKDNRSVEYKTSGWSLHPTKRRITFTDKKGIGQVKLLGKWDVHTYSVKSIKRVRLVRKADGYYCQFAISVDVQPETRISNGEIGLDVGLEHFYSDSNGHHEPNPRFLRKTEKAIKHAQKRIYTKEKGKNQRRKARQRYAKKHLRVSRQRNEHAKRVARNVCKANALVAYENLMVRNMVKNHCLAKSINDAAWTLFRRWLEYFASKFNTQIVAVNPRMTSQKCSDCGAIVKKSLSTRTHRCSCGCELQRDVNAAINILNLARARGGHPQSNATGVGTSTLVGETALQEGFPTEATANPKGANLLEQVLTVNVESPRL

SEQ ID NO: 6932 - protein, 245 aa, Bacillus sp.
LPKLGLVRFAKSREVKGRILNATVRRNPSGRYFVSLLVETEVQKLPKTNSYIGMDVGLKDFAILSDGTTYKNPKFFRSLEEKLAKAQRVLSRRMKGSSRWNKQRVKVARIHEYMTNARKDYLDKISTEIIKNHDVIGIEDLQVSNMLKNKKLAKAISEVSWSQFRTMLEYKAKWYGKQVIVVSKTFASSQLCSCCGYQNKDVKNLNLRKWDYPSCRTHHDRDINASINLKNEAIRLLTARTVEIS

SEQ ID NO: 6933 - protein, 161 aa, Lactobacillus sp.
  misc_feature (98)..(141): Xaa can be any naturally occurring amino acid
MVANPRFYRKAKKKLAHAQRVLSRRQRRAKQEGRNLRTASNYQKQRLAVAKLHDKIRRQRADFLQALSTALIKNHDLVVAEELRSKNLLKNHALSQAXXXXXXXXXXXXXXXXXXXXXXXXXXXXXXXXXXXXXXXXXXXXAGAAFLTCWLIRLSYMAKNS

SEQ ID NO: 6934 - protein, 709 aa, unknown
  TnpB Polypeptide
MYNRGTYISNFVAMYLYGERIPPSSFPDLLPVDINGLGCIGRDAIRYNRETALNEAKPFLDFFMPPDVRNGGFKQVFLPERWPTQTVSLDPTIQSVLDNETNLPPEPTGWKELMNPTGWDNSINRMATKLNANFQVHCRAGLSKRTSDWLGQLDFGGTYEDSVIVLMQQLLLLRPRPLNIDNRDYEMIMDLRTVLGVEDDVTWYLPKTHPFNREVVALHAFITRYGDGERSYLPVARRSRKYAYLDVKIYDALTSKYASKKRTRENDSTTNHSTTSRSLGDAMGLTSESFKETRKKIRKHIRKEIAQRKRKRPNNPSLKRLKKKRNRIGRGFMHSDTVVASIETDGVGARMCVKTPIDMRPFVKPYVPPEKIDEKEATKKRKRMSRSMGGKGRETKNKAEKTDVDDEERERLYAERLKKESPITIGIDNGRKKLFVGAISNKGYKKPTTFTFTRSRYYSEMRYWRHESWSKAQTSSEEVAKALANVSVGGGYKCCELKTWRESLGAERKHHETLDKEFILKPDYAIWKMRLHRLKRASLDRATGEIIREATANQSPKRLLLLGIGNASFSSTGKGELSAPTKAVMEALKRSLGRMKLGTGREWKIEEIEEFRSTKCCCACGEVTDSPTIWREGTEQKSRRLRLCMTCESTEGKRRDRDVQGARNMLWILQHEYYGGRENRPWYMTRKGCEKKEGHVATENDVAGSNATV

SEQ ID NO: 6935 - protein, 368 aa, Succinivibrio sp.
MNKGVIFRAYPNKVQQELINKTLGCSRLVYNKGLAFRNEKYAKGEKVGYNQTSAMLTAMKKEEKYSFLNEVDSIALQQSLRDLEKAFVRFFEKKANHPVFKSKHHYQLSYRTVNQIGKNNKDSIRIDGNRIRLPKLGLLKFRQTMEVGHINNVTVRRTATGKYFVILNVDFEPEKLESGSNFTGIDVGIKSFYTDSNGNVVNNPKYLEKSQQKLKREQRKLSRKKKNSKNRQKQRLKVARVHEKIANQRNDFIHKCSTKLINENQVLAVEDLNIKGMLKNHKLAKSISSVAWSKFFETLEYKAEWYGRKVIKVPTMYPSSQTCSKCGYKNTLVKNLSVREWECPCCHARHDRDLNASVNILNKGLSVA

SEQ ID NO: 6936 - protein, 265 aa, Acetobacter sp.
VAFRGWYDLPGVIRNITISRRSGQWFASVQWEREVEEPAPSILPAVGIDMGVAVFAATSSGETIAPGDFGRKALRTLRKAQRAVSRKKKGSANRRKAVRRVRILHAKVANARKDFLHKLSTTIAKNHGTVVVEALQVRSMSASAKGSVEESGRNVRQKAGLNRSILNQGWRMFRTLLGYKLADRGGRLIEVPAAYTSQTCSVCGSVDPANRASQARFICTACGHSENADINAAKNILRRADCPLKPVEGYRVRRPIEAGSTRRAV

SEQ ID NO: 6937 - protein, 394 aa, Acetobacter sp.
MSFRGFTYRLKPNALQEEAFLQFGGVCRLVWNLALEQRREHWRNYQARTGDNLNYVTQARELTALRRETDFIRAVSQTCQQYALKALDDAYRRFFKGLGGYPQPKKKGVNDAFTFNGREITVERLNNRWGRVRLPKIGWVKFRMTRNLMGKLTKATVCLTPLGWQISIGCKDCDIRDFATEGEVGIDRGVAVPLMLSNGTAYMLPERLDVIERRARKAQRILARRKRGSNRHALARKRVAALKAKAARIRKHWAHETTTAICRNHATAVIERLRTRDMTASAAGTVEEPGRNVAQKRGLNRAILNVGWHQIETLLFYKAHRVVKVDPHFTSQTCSRCGAVDSRNRKNQAFFVCTTCGFHANADHNAAINILHRGNTPVVEPQVTAASKRKLHPV

SEQ ID NO: 6938 - protein, 390 aa, unknown
  TnpB Polypeptide
VPQLRSSVSTLKHRERVKVNTVYRFRIYPNKSQRELFAKTFGCVRFVYNRMLAEKKAYYEKTGKNLSVTPARYKSEFPWLKEVDSLALCNAQLHLQTAYKNFFRDDSAGFPKFKSKKKPVRSYTTNCVNGNIALQNGRLKLPKAGWVRIRQHRKIEEGYRLKGATITQEADERYYVALLYSCEEPVNEIRKAESVIGLDFSMKELYVDSNGNRAAYPHFFSKAQKKLAREQRKLSHCEQGSNRYKKQKKKVARIHTHIAHQRKDFLHKESRKIANSYDIVCMEDLNMKEMNRDMCFGKRVHDNGWGMFTDFLAYKMERAGKKLVRIDRWYPSSKTCSCCGNIKEDLQLSDRIYECACGNRMDRDQNAAINICREGIRISGMILDTEKKIS

SEQ ID NO: 6939 - protein, 485 aa, unknown
  TnpB Polypeptide
MRLHFKDVIPSSFDAQLYTQVFTCYENKFKNIQRRLTFDVTIFNGFEYYKRDTKKNKKGDLKRVLIEKKQTKLSSCLTYLARYGNENTITYIQSNLNKCDDNKRTFYDNILRCCEKYGFERLYALALSKRKRIVKHYSEHPIEFRSLTFSGRCRKKKIIDYNHRFGSVINSFISLSGINRKSFDIPVSFNKGWHGNMNDYRKNNSDYEYTITFNEKEHQVTVNLCKYGERYISEPNGNTIGIDVNCKHNLFSLSDETTYDYDRKLVNDFCKLSIEIDILKENKDYIIGKRKQWKLDKLKEKIIKNEQQTIATMCKTLQSQDVGHLVMENLNNGFGKCYVKDGDNEDINYNRKVKFLGLSSLKQEVEHISRKYDIAVSTVQASYTSKMCPICGCIENGNRPNQETFECIECGHKDNADFNAAKNIRDRVLVTVLRDKLLKQLDNGAFEPKKLKREKVKEVLLSFRRSLPKVGSECIGSRMTTLEYV

SEQ ID NO: 6940 - protein, 575 aa, unknown
  TnpB Polypeptide
LSLPILARSSRVSKGELIIMPPIHTPSFITEIPLQANGTQEHTLEVRFRLAQQAYNACLGEALRRLDLMRERKAYQVARKLPPGAARTHAFRDVRNACGFSPYSLHAWATRYVSHTLLGDHLDVNTIQTIATRAFRAVEQYCFGVRGRPRFKGPNQIDSVEGKSNKQGLRWNDRALVWGDLTLSGIVSPRNPVIAHGLTHPIKYVRLIRRRLNGRGRFFAQLVCEGQPYRKAQHIVREGIVGIDPGPRTFGVAGADWGAQVDLQTPLKQSRQVIRRLQRKIDRQRRANNKDNYNPDGTMKKGKREWTMSKGHQRSRVTLANIYRKATAHRTSLHGQVAHAILSRGATILIERNSYRSFQRTYGKSVGSAAPATFVNHLARLAESAGGSVVRVPTTLRLSQTCLCGAIRKKPLSERVHRCDCGITVQRDVWSAWLARFAVTTIVTKETSTGKTGKDIVTWRLDAEAAHAAWARLPGSDAGLPAASIPLPPGRFAARVGQLGKRELASGRAARCAHVAMGEAVSPVSASELVAGKARLETREATDVVPLMRPSLCSEGSVGRENRGKLVGRRDSHGL

SEQ ID NO: 6941 - protein, 313 aa, Synechococcus sp.
LQVHYRYRLYPPPGQKQALARQFGCCPVVWNDILALSQSIYQEGRKYPGGGELQKRCITQAKRTEERSWLSEVSASVLQQSVRDLDKSFRFWWKSKGKVRWSRPLPSPPSSCTIIKDCAGRCFASFVVDLENRDLSPVFGQNIGIDLGLASLAVTSDGEKIAPPKFLRAALKPLRRLQRNLKHKQRGSNRLALARLRVTKLHAKVADRRLDFLHKPSTRLIHENQAVYIEEKSTALACPQPTPFYPRPELAERGAFSKFPGKSIGFIPVAGASAWLVPGLPGDHGGGLCGPVEPHHAHRTGVPRFAGGRCPGL

SEQ ID NO: 6942 - protein, 356 aa, unknown
  TnpB Polypeptide
MEVITKTLKVRIKDKHAKRLSSMARSVNFVWNYINELSERSIREHGKFMSGYDLQAYTKGAGKELGLNSATLQMIGHEYVTRRKQFKKRKLNWRKSMGAKRSLGWIPVRSDCVSYKQGQVYHHGTYFGIWDSYGLSDYTFRSGSFNEDARGRWYFNVVVEIESKPSQGKASVGIDLGCKEAATDSNGDGVIGREYRKLEAKLGIAQRAKNKARVKSIHAKIKNRRHDSLHKYSRQLVNANAAIFVGNVSSKGLVKTRQAKSVLDAGWSTLKTMLEYKCANADIVFEEINEAYTTVTCSCCNKRTGPSGLEGLRIREWTCAGCGATHNRDVNAAKNILALGHERLAVGIPHYSRVAA

SEQ ID NO: 6943 - protein, 370 aa, unknown
  TnpB Polypeptide
MKTYKYEFSHQSNIIMLGNLIDDLHDVHVHLLKLQRRYYRIYGKYISLSCILKHITKLKRTTKPHWNQLPSQMIQDVAIRIDLGYQAFFDNIADRKQGKTQRKVGRPQIKPNHKYNSVTFTQAGFKIEGNRLTINCIKKSFTFWKHREWTGTIKKITIKRDNVGDSYLYLICENPEPSKKLSLTGSEAGVDFGSKTFLTLSDGIKIESPQFYKQGLNAVGSANKALSRKKYLSNGWYRAKRHLSGVHKDIVNRRRDWFFKLALRLVRKYDKIAIETLNLEGMKRLWGRKISDLAFGEFALILRWTCAKYGKTLLKAGRWTPTTKPCSECGQKNENLTLSDRQWTCPECGSHHDRDINAAINILRVGVPWA

SEQ ID NO: 6944 - protein, 676 aa, unknown
  TnpB Polypeptide
MANILNYKYEIFPTAPQRTQLNKILRGTRLQWNKAVTIRKKLKRALIAGQVEHVINTCLSVEKDNRQSSRKSAIEKFQEANPAFSSLSFDVAARLHDIKTLAGNLVAIDTRHLDLSVLTREFKTKHQSELDVRKAAKKRGDKKLPKLAVYWLLMRAINQYAGYAAKTFMDKSFKSPKGMALSDIRFNVSGSANAVRWKQAVDPKKGQRAYGAAGEPQYKRRGEGFTDRVKGSGLIRPKRKQGHLICLRALPEGMRYVNIACHRPLPDGAKVKQLTVNEKSGRFFAVLSAEVPDSAWRIAPMDTGWRARVLPRAQTPQTVALENAQTGETRHLAIHYGFLEKSLDKLEKLQQSLADKHGPRRNRTPGEVQEAMSRFSSKASVRKLPDDEREKAVAKEKGRLELHMVRRQEGASKRWRLLSQKVSALHFRVSNQRADVLHKVSRALAEGCDVVGIGDWEPVRDISYRKQLRAAKKKVKDQIDGAADELKALEEEKSKQGPKGSKKRRRGGRDRAIPTLRRLLIEKAGRAGNAAYPSVKEAGSTYTCCVCGAGTGPRNDTSIRQWECNKCGANHDRDLNSGFNILRKTEKIISAAHADAPATERTATRTTAQGATGQAGQPPGPRAMVHSEKGGSTCNVSAYERPGYWGEDETVPRAVRSLTAMGVARSLWENISESPP

SEQ ID NO: 6945 - protein, 302 aa, Thaumarchaeota sp.
MLKVPLGERRYFHVPLNGHTLKVLSEAGLKVRSFTLTANLLSLTVSKYVEEIKCTGAAGLDRNLRNLTYGNEERVIQYDLSVVVRIAKTTRKIVSSFKRNDTRIGRGIASKYGKRRRSRINHLLNCATKQVVEEAYHSKEAIVLEDIKGIRRLYARGNGQGGEFRGRMNSWWFGEAQRQIEYKAKWRGVPIIHLTKGETRGTTKDCARCGERLQVAQQGQDEMKHRRQLWCGRCGRWVDRDINAVMNQSRRGRLRFDRSLPNKAKGEAGEAMKGNPTTPVILRVDASKMTRRGIPKSYQNHM

SEQ ID NO: 6946 - protein, 410 aa, unknown
  TnpB Polypeptide
MVKEIRSIEYVVLPTTKAKARKMFQIAGACRYVWNHFREKNLANYQAFRSGKGKQPQTSYFSLGVEFTKLRHETEWMRELPANPIKHTLKYFADALKEAMRGKKGFPKPRSRAKTAPGFTLPSKENFGIKNLDAKYSLLRIPLVGWVKMTRRGGNPYGDGIPKQVALRHDGHRWRAFVFYEVEVEQRPDDGEILGVDMNVRQVATSDGHFYFLPDLKKKEARRKWYQRKMARQIKGSNRRKDTKKKLAKVSRKISNIRKNWIHQTTKEIAGKCGTVTVEDLKLRNMTASAKGTIENPGKNVKQKAGLNRAILDTALGEIKKGLEYKCGRLIEVNPSYTSQMCSHCGHAEKENRKSQARFQCVSCGFASNADTNAAMNIRRLGMARLHGEDAALAVPVNREIDMRLPHDGR

SEQ ID NO: 6947 - protein, 428 aa, Hydrocoleum sp.
MYGCQQHLVKSSPEVMAMIEYLCIEANKLTNCGIYYCRQMLFKAGRFLSKAELDFELKANPHFKSMGSACAQQTLHSVIESFNSYARLAKMFNSGELAEKPKPPKYRKKDGLAVVSYPGRWVKLVNGMLKFSLGKQVKAWFGIDHFLLQMPSNLDFKQIKEYRFVPRNNCFYLEFAYEQPQTDKGQPIAGNVLGIDPGLNNWLTCVSNVGKAFIVDGRKVKSQNQWYNKQIAKIKAGKGGDYWDDRLAAITEKRNRMMRDNINKAARLIINWCIEHQIGAIVFGWNQRQKDSINIGKKNNQQFVQIPTAKLKARIAELSELYGIKFVETEESYTSKASFLDDDFLPTFGEKPERWEPSGKRVNRGLYRLATGQVINADCNGAANILRKVSTQLEINLAKVCREVLMLPQRYRLDSLTKKYRKQCVAWQ

SEQ ID NO: 6948 - protein, 373 aa, Bacillus sp.
MTVLLNQKHEIFPTEKQREMLDRWLQFCRQTYNSALLDKERKYKKAKEKYNRYDMQRQQTSDKKKYPFLKEVPSQLIQEVFVRLKKAFDNFFRKDAKYPKQKKYKDYTSMTFPQFGSNNKGKRMAMSFSDNSKLYNTKLGKIDILFHRPIEGTIKQLILKRQGKRWYAIFCVERLAISPIIDTSNSIGIDVGLNKYAVLSNGLEYENPRFLRKKEKKLKKAQRTLSKKKKGSANYIKQVQRIRQLHEKVANQRKDFLHKLSYNLSKDYSVISVENLNIRNMVRNRKLSKSISDSGWGMFRNMLAYKCEKHGGVLIKIEPNFTSQDCSCCGNRVKKSLSIRTHVCTKCGTVLDRDYNASLNILQRGLDELLVTN

SEQ ID NO: 6949 - protein, 273 aa, unknown
  TnpB Polypeptide
MGSVYKIELVLDKEFKNNVKLNEKAFIGIDLGLSNLATITNNIGLKPIIINGKPLKSINQYYNKKKSLMQENMPLYTFVRYDKKNNIYINERRQRSYSKKMDSLTRKRNAKIDDYMHKASAFIVNYCIENLIGNIVIGKNENWKNEISIGAKNNQNFVSIPFNKIINMITYKAESFSINVNIIEESYTSKSSFLDLDDIPTFKEGEKYKFSGKRISRGLYKTKNIIINADVNGSYNILRKFDNTLFKKEDIKSLLTIPKIINLSGYINKKKLA

SEQ ID NO: 6950 - protein, 401 aa, Chloroflexi sp.
MGYRAYQYRLYPNKRQTQDLLNLLAVGRHYYNMCLDLWRYVYLTEKRRPTSQEFEVMRKGYKKTIPAARGVHSHVFQGLAKRAEEAFQGFFRRVKAGEAPGYPRYKSLDRFHAIEFKQFGNGVAIDGRRVRISGVGRVRVRWHRPMQGTAKTAEIVHKAGQWFVVFTCEVPDQPELPKTGQVVGLDLGVAALFTTSDGDKVDHPKFYQQSQKRLRVLNRALARKKKGGKNRRKAKQRLQRHHHHIQNQRLDYAHKLSYALVQHYDLIALEELKVKNMVRNKHLSKSILDAGWSIFTKLLTNKAVEAGRQVLFVNPAYTSKTCSNCGALFEDLTLADRWVECRCGLSLDRDHNAARNILKQALRLWDAEVRRNVAGSPDASVPRKPLALPMGSVTAGCHVWN

SEQ ID NO: 6951 - protein, 475 aa, unknown
  TnpB Polypeptide
MKARFIHVHKETNVGKLNSLTSLYGVYRTYLQMCIDLLLEKRCTKMQRSQFLRFFPGHPDLTVHLRRGAEAHALSIVSSWFSLKYSNVIKKRISRLKREGELLEEQAKSLFTIGRTHLSSPWNFVTQEDIDLYWSWMMDEAVVGRRPCAPSRPTIVINWDSAKFKQSSDTKLTTWWLNLSSLTPRHTLKLPLSDIHPFVKSPSDLNKDGLLRQNKKGQWILQLVDKSTQEPIASPEGAPRIGLDVGLNVMAATSDGQLRGQDVKPKFNRTYDKVKALRANRQRHGLKENSPKLDYLESKLTEMMKNFVGRISNQLVKDYPGAVFVVEDLDLSGCKGQKRFAYKGLLKSLESKANLVRVNPAYTSQTCSSCEYVSRKNRVGVQFRCRGCGKKGHADVVGARGILGRSEEKSITCDTHHLEVKGIVRRRYAARRRSPALSLSEEPSQNGPESKSVEDPSLCAFIALEYFEKNRPRRK

SEQ ID NO: 6952 - protein, 316 aa, Nocardiopsis sp.
  misc_feature (252)..(252): Xaa can be any naturally occurring amino acid
MTRKSVKRAFRYRFYPTDAQAAELSRTFGCVRLVYNRALAERSAAWQQRQERVGYSRTSAMLTAWKRTEELAFLTEVSCVPLQQALRHLHTAFRNFFDRRARYPRFKSKKKSRASAEYTASAFRYRDGQLTLAKMTEPLDIVWSRPLPADARPSTVTVSRDAAGRWFVSLLCEDTITSAPATRDAVGVDMGVTSLVALSTGEKVANPRHEQRDRARLAKAQRALARKAGGSANRNKARRKVARVHARITDRXPATSNATAPGWPRRSGRWPVRPGAARTGTGPAARWRGGTPASPTGVRIFCTSSLLDSSARTKWS

SEQ ID NO: 6953 - protein, 416 aa, unknown
  TnpB Polypeptide
LFENIRREIKSKQEAIIIWNELVKNDFDINEELFKSLHKLKLYPTRSRIANIKRSNSIPELARSAVFNLDYTISEKQIFRMKQGNICEIKVSKKDWIEYEIVFPSSIDERFTGRIAKPRFIKRKRDNQYMGICSYEYEVGNYGLEDKILGVDIGKVKLFSSVIVDRKGNFSNEIINTKRSQETEYKINILYENKQILYDKIKSYEDLRLTNQPKYELWKNLYSSIKTKITNTKDYQAKLLSNEIVQLALEQKCKTIHIEDLSWLNSQGGKWNHSQIHSKIIEKATMYGIEVKKVSAFNTSKEHPITKEIGIVNGRTIEFTTGKIDRDLLAALNIAIRSTNIRLKKSLPKKAKTKRVKPKSNKKEIKEKVNILKGNGQIVSFLANVLDSTIQVELGVRPLSEVLPCNSLICYNKLQV

SEQ ID NO: 6954 - protein, 402 aa, Escherichia sp.
VKRLQAFKFQLRPGGQQEREMRRFAGACRFVFNRALARQNENHEAGNKYIPYGKMASWLVEWKNATETQWLKDSPSQPLQQSLKDLERAYKNFFRKRAAFPRFKKRGQNDAFRYPQGVKLDQENSRIFLPKLGWMRYRNSRQVTGVVKNVTVSQSCGKWYISIQTESEVSTPAHPSASMVGLDAGVAKLATLSDGTVFEPVNSFQKNQKTLARLQRQLSRKVKFSNNWQKQKRKIQRLHSCIANIRRDYLHKVTTTVSKNHAMIVIEDLKVSNMSKSAAGTVSQPGRNVRAKSGLNRSILDQGWYEMRRQLEYKQLWRGGQVLAVPPAYTSQRCACCGHTAKENRLSQSKFRCQVCGYTANADVNGARNILAAGHAVLACGGMVQSGRPLKQEPTEMIQATA

SEQ ID NO: 6955 - protein, 517 aa, unknown
  TnpB Polypeptide
VDVGADFEVHRAVVEAVSVLFELYDGDAASYTASGSPGEPLPTGWLVTAAKFEVDWPAEDEQRALVRSHFGARRFAFNLGLGQVKADLDAGKTDPGHESVDGNVKSLRWAWNRAKNTVAPWWAENSKECYSSGLADLAQGLANWKTSKNGTRKGHRVKFPRFKSARRDAARVRFTTGVMRVEDDRRTITVPVIGGLRSKENTRRVQRHLATGRAQILNMTLSQRWGRLFVAVCYALRTPTISRTVAQPTVRAGVDLGVRTLATIATIDTATGEQTIIEYPNPAPLKATLAARRRAGRQLSRRISGSHGHRAAKAELSRLDRHCVHLRREATHQLTTQLAGSYGHLVIETLDLEAMKRSMGRRAFRRSVADAAMGLVGPQLAYKTARYGAVLAVADRWFASSQVHHGCIQPDDTPCRLIGKGHIDKKLVCPPTGEVVDRARNAALNLRDWPDYASCGPVGTTAPSVPGPTEGPVGTGHGADAGSSGAGGASRSPHPSEAGSGEARTQTPQGEAPDDDH

SEQ ID NO: 6956 - protein, 391 aa, unknown
  TnpB Polypeptide
MLRRYQYRLYPTEDQKTLIAKHLGCCRFVYNWALNLKNTAYHDGGISLSRYDLTNQLPALKEELPWLKEVNAQSLQQSIIHLSRAFTNFFEGHAEAPTFKAKHAPEQAFTVPQSYTVDFKQGTVKLPKIGSLKVKYHRTFVGTMKSTTVIRQSTGRYFLSIVVEDGRKPPQPADPIPDQTVGIDLGLAHYAILSTGDAVANPKYLRNAQTRLTALQRRLARKQKGSRNRNKARLKVARCHQKIADQRKDFQHQLSSRLVRENQALAVESLNVDGMVKNRSLARAISDAGWGTFLSMLTYKCQEAGKTLLKIGVFEPSSKTCSVCGYRKADLTLKDREWTCPDCGTCHDRDLNAAINIKQFALAGAERAEEPVDSLPVGRGMKQEAPCASGG

SEQ ID NO: 6957 - protein, 389 aa, unknown
  TnpB Polypeptide
VGHHCQSLKSIFKVKKHPKGSEAMLKGFRARLYPNRKQEELLKRTFGCCRVVYNHFLAERIRSYKEDGVSLTYNKTSALLTLLKRDKDHLWLNEVDSMALQEALRNLDNAYQNFFSGRTKFPKFHSKSHKETFRTRNQNNGIRIVGNTVKIPKVGFVKVAGMRKFEGRILNATVTKTASGKFYISLCVELQPVVLPNAGGKAGLDVGLKAYCTDSNGNTVDNPKNLRKSMRKIVRAHRKYARKQKGSKNSEKQRIQLARLYEKVDNQRSDFLHKLAHKYASENEVVCIEDLNVKGMLHNHHLAFSISDASWSKFDCLLEQKVAEYGGVVVKVPRFFPTSQICSKCGYKNTEVKNLSVRQWVCPKCGAHHDRDINAAINILKKGLEMLAS

SEQ ID NO: 6958 - protein, 471 aa, Mycobacterium sp.
MVRGETASEHCGTDPYASGSVIRAYRFALDPGPLQEEQLRSHCGAQRFAYNWALRLVKANLEQRSAERTYGIADSELTPALNWSAYSLRRTWNTIKDDVAPWWRENSKEAYSSGLANLATALNNWAVSQSGDRQGRPMRFPRFKTKKSQLSCRFTTGAFGLVDTDRRHVKLPRIGRVRTHESTRKLARRVDRGSARIRSATVTYARGRWFVAFSVEVYDSPAPGTRSRPVVGVDFGLCNLAVLSTPVPGISDTHGVIPNPVLYEGSLKKLRRLQRKAARRIGPERRTGRAPSRRWARAMSDVERQHARIANHRAATLHRLTTALAERFEAVVIEDLNVAGMLRNRQLARRISAAGWGELRRQLEYKTCWRGGTLLVADRFYPSSKTCSGCGAVRANLRLSQRTFSCDACGMSMDRDRNAARNLAALAHRVAGGASSPSCGATKNEPAGNPREDGRRGRGYCHGKPLEGNVA

SEQ ID NO: 6959 - protein, 415 aa, unknown
  TnpB Polypeptide
MNKRLTRKNETKERRKSQTCKVYEAKIDRSHLSKTAEKHLGCLFKEAKWFYNFCLSHDDVDDADTTLRKVPVKVGEEYETRYLEVLTSQMKQGIKTRLFGSLMSLAALKKEGYKVGRLKFKGQMNSIPLKQFDNTYYIRDGKFRLQGMKQWLRVRGLEQIPEEAEIACATLIRRSGDYYIHITTYTNRQKKFVPKVAVGIDFGCETQLTFSNGVKVQFQVPPSKRLRNLDRKIMKGRRGKSNNQLKDKAKRQKEYERLTNRRKDIRHKLVSTITNNYRYVCFQDESVHAWSMSGHGKKVQFSGIGSILADLKHKAVAPLEVDKFFPSTKLCPNCGKKNHPMLGDRTYQCECGFKMDRDTKSAICIESEGLKQIPMEHRKFTPAEIQTATFYEQLSKINGIVVSKSESVMQEAPTL

SEQ ID NO: 6960 - protein, 373 aa, Bacillus sp.
MLVNKAYKFRIYLNKEQSTLINKTIGCSRFVFNRFLTLWNDAYKATGEGLTYNSCSKQLTALKKEVPWLKEVDSVALQSSLKNLDDAFKRFFQKQNDAPRFKSKRNKVQSYTTKHTNGNIAVEGNYIKLPKLGLVRFAKSREVEGRILGATVRRNSSGKYFVSILAEVDVQPKQKTESSVGIDLGLKDFAILSTGEVFSNPKWFRILEDKLAKAQRVLSRRTKGSANWNKQRIKVARIHERIVNARTDYLQKISTYVVENHDLIGIEDLQVSNMLKNGNLAKAISEVSWSQFRTMLAYKAKWYGKQIVAVSKTFASSQLCSCCGYKHKDVKNLNLREWTCPSCETYHDRDLNAGQNLRNEAIRLSTVGATGVA

SEQ ID NO: 6961 - protein, 382 aa, unknown
  TnpB Polypeptide
MKARLTVKAKIVHLTRVKQRLLETEYENLQRFLRGERDVPLYSAYKQQALRYYKKVKEGKEYPLSIRKDLLKIERRDTKIAEYWARIPVKGRRGGVWVAIKPHRPIEPDMEICESKLFKKDGEWWLHIVVQKEVEKPKPNPRRIIAIDIGDRNIATKVELVDGEVQNPKFYGREVRGIRRHYDWLRRRLGEKRLLKKIKQIGRKEHRRVDDVLHKISREVVNRAKELGATIVIGNLKGIRKKNRGRTLNRIVNRMPYYRLTEYIKYKAEWEGIPVLVIPEYNTSKTCHRCGKEGKRVSQGLFKCPNCGLEYNTDLNGAINIAKLSLSYMLGDGGALTRPLTPHEGVELACGLKPLSLKVENLPASAGECQYNYYWKTNYLNI

SEQ ID NO: 6962 - protein, 357 aa, unknown
  TnpB Polypeptide
MGDPLPLRYLSFAKRLQALKARHEFLREVHSQPLQQTVHDLAVAYDRDFNPKLADKIPTFKRKGFAHGIRFPQGFKVERNGVYLPKIGWVAFRVSKRTAKRRVLGEVKNVTVRLEAGKWYVAFQTEREIARPIHPNPGSTIGIDVGVTRFAALSDGTFHEGANALKSNERRLAILQCRMSRKVKFSANWRKAKAKITAIHSRIANIRKDHIHNASATISKNHATVVMEDLKITNMTASAAGTVNEPGTNVAAKSGLNKRIQDQSWGEFRRQLGYKLNWLGGTLLLVDPRNTSRTCNACGHVSAANRVTQSAFKCVECGHASNADTNAAKNILGRAGCARIVYGDLKKSAKQETPCLA

SEQ ID NO: 6963 - protein, 404 aa, unknown
  TnpB Polypeptide
LEKVKEVLKEYRKTAKVVLNTQLSLLYKNSKLNKNHKLNINTKLSARYLQTLQYQIVGMLDSYLSNRQNDFKEIVLNSSLDTKIKKELLYINKYKKWFVNEITLKDKAIEQEIIKLSRAIIKHTFKKNRFPNIKRINLQLDSKVAKIETKKENKAVEYDYWIKLSTLEKGNPIYLPIKSNNYFENIEGKIKNFVQIIVDKEEVVFMKEVKKRDYIPKTKKIAIDLGLRNLFATDRGDLIGRNFIDYLTKADEKIVKLYKPKEIVIERLNFQSPKLSKKLNRIIQNFGKSIIRKKLETLKEEFNIKITEVNPAYTSQTCHNCGYVSKSNRKSQKVFVCKFCGKKQNLDINASRNILKRSSYKNGGIYISKSKILDELVNLFIERYKGVNSCPLILTNPYFMERLE

SEQ ID NO: 6964 - protein, 402 aa, Micromonospora sp.
VRTAYKCRAYPAPGQVVVLNRTFGCVRVVWNRTLAARHARWHAEHKPTSYAETDRALTEAKKLLELAFLNEVSSVPLQQTLRHQHTAMTAFFQKRARYPRYKSRHGRQSASYTRSAFRMRDGQLSLGKTPGVLAFVWSWPDIDVTQLDPTMVTVSREPDGRWFVTFAVDVEAPAAPESTGDVVGVDLGLADFAVLSTGERIAHPKHMERRERRLKRYQRMMARKEKGSANRAKAKRKVARAHSRVRDARRDFLHKASTDLVRRFDAVAVEDLAVANMVRNRSLAKAISRTGWAEFRSMLTYKAHRDGRTVAVVDRWYPSSKTCSVCGNLLAKLSLGTRHWACPGCGTRHDRDVNAARNIMLAAGLVESRNACGADVRRDGQPFALSALNQEIRPARVGNPGT

SEQ ID NO: 6965 - protein, 402 aa, Escherichia sp.
VKRLQAFKFQLRPGGQQECEMRRFAGACRFVFNRALALQNENHEAGNKYIPYGKMASWLVEWKNATETQWLKDAPSQPLQQSLKDLERAYKNFFQKRAAFPRFKKRGQNDAFRYPQGVKLDQENSRIFLPKLGWMRYRNSRQVTGVVKNVTVSQSCGKWYISIQTESEVSTPVHPSASMVGLDAGVAKLATLSDGTVFEPVNSFQKNQKTLARLQRQLSRKVKFSNNWQKQKRKIQRLHSRIANIRRDYLHKVTTTVSKNHAMIVIEDLKVSNMSKSAAGTVSQPGRNVRAKSGLNRSILDQGWYEMRRQLEYKQLWSGGQVLAVPPAYTSQRCACCGHTAKENRLSQSKFRCQVCGYTANADVNGARNILAAGHAVLACGGMVQSGRPLKQEPTEMIQATA

SEQ ID NO: 6966 - protein, 268 aa, Escherichia sp.
MRYRNSRQVTGVVKNVTVSQSCGKWYISIQTESEVSTPVHPSASMIGLDAGVAKLATLSDGTVFGPVNSFQKNQKTLARLQRQLSRKVKFSNNWQKQKRKIQRLHSRIANIRRDYLHKVTTTVSKNHAMIVIEDLKVSNMSKSAAGTVSQPGRNVRAKSGLNRSILDQGWYEMRRQLEYKQLWSGGQVLAVPPAYTSQRCACCGHTAKENRLSQSQFRCQVCGYTANADVNGARNILAAGHAVLACGEMVQSGRSLKQEPTEMIQATA

SEQ ID NO: 6967 - protein, 361 aa, Nitrospirae sp.
MTRKATLNLNYSNADKEVKLKDFITEYTRVVTAIIDKLWDKQVFAGSFVTREFLEIETWLSARAKQCAGKQALQIVKSQRKKQNKVKPVFKGSSIELDNRFIEIQKGNNSFDIWIKLSSLGKKIIIIIPSKRHYHFNKFKDWQIKKSARLRIDGKGKIYLDVFFEKTEKEKKTEGEIVALDCGYKKLAVISNGATIGKELQDKIENISRKVQKSKAFNRALTERNEYVNKEIKRINLDNIKEIVIEDLNNVKHGTKGKIRKEFNNKLQRWVYSYFFNRLQQHCEVVGVQLHKVNPAYTSQTCFKCGDIHRSNRSGELFKCRSCGYTADADYNASLNILNRFRLQAYMVPVHKNYLNGNICP

SEQ ID NO: 6968 - protein, 266 aa, unknown
  TnpB Polypeptide
MDATKININGFENTFFTSIAINTHRGWVHLDLEPSKEFYKLLARGFKPTSHAKIKLDKKNRRVIFHLSLKKEVEIYRPEDIVKPVDVNEDSVATLYEAFAVILETDLAETTLGYSYRKKSIQRRNRSDSREARKAMKKLKERKKRDYRWKTANMIVRDALRTRGVIVIERISGEDIRVMISRYRNKQLRHRIYQSALKGELNAIIDKAREYGILVLVVDPRKTSKICPIHNASIEYGRDRIGICSKEGEKWFFMRALPRSASGFQV

SEQ ID NO: 6969 - protein, 402 aa, Escherichia sp.
VKRLQAFKFQLRPGGQQECEMRRFAGACRFVFNRALARQNENHEAGNKYIPYGKMASWLVEWKNATETQWLKDSPSQPLQQSLKDLERAYKNFFRKRAAFPRFKKRGQNDAFRYPQGVKLDQENSRIFLPKLGWMRYRNSRQVTGVVKNVTVSQSCGKWYISIQTESEVSTPVHPSASMIGLDAGVAKLATLSDGTVFGPVNSFQKNQKTLARLQRQLSRKVKFSNNWQKQKRKIQRLHSRIANIRRDYLHKVTTTVSKNHAMIVIEDLKVSNMSKSAAGTVSQPGRNVRAKSGLNRSILDQGWYEMRRQLEYKQLWSGGQVLAVPPAYTSQRCACCGHTAKENCLSQSQFRCQVCGYTANADVNGARNILAAGHAVLACGEMVQSGRPLKQEPTEMIQATA

SEQ ID NO: 6970 - protein, 466 aa, Thiorhodospira sp.
MSMNGHRFRCYPNRTQENILLRWIGCQRFIYNSKVREDRYFRAFARKALSLTGQKPPIDQQYSQFIGPDTAWLREVPSQVLRNGAVRWKQAYRRFFQKLSGRPTLHGKGGEQSVWLTRELFAFEDDGEGGYFLRIGTKKHPLGRLRYVSDRPHDLPASIVISINAGQWHVSFATEDDVIYPKPAEIQAELSQWDETDLRAATLGVDRGIANPACTCAGKVYDFDPVQKARMEKKIRQRRRWQRRMARRTKGSSGWHKARKRVARTYTYASNVRKDFAHKVSHDLVTAPGVRMVVMEDLKVASMSRRPKAKVNDRGRPVANGARAKAGLNKAILNSAWGRIKTYAQYKAPRNNVLFLVVPPHHSSQECAVCGHIHPDNRPSQSRFVCQRCGQTDHADHNASRVIAQRGVRKVVGQCKSDQKVGAVRPEPLSPDSYAGGDQNKPQAGQHPSAHRSSKPETMPTTAQAV

SEQ ID NO: 6971 - protein, 498 aa, unknown
  TnpB Polypeptide
MKKKRVQWKSFNINMPDELKPIYDFLQNELNFILSNDETRAILDNIDLSKLRGDIWLDLRDNLKFRIKDWPLHNKTWHSYILFENLRRELKSKQEAIAIWNELVKNDFNINEELFNSLHKLNIWTTRSRISNIKRSNSVPELARNAVFNLDYTVSSKQFFRMKNANICEIKVGKKDWIEYEIVFPSSIDARFTGIVAKPRFIKRKRDGKYIGICSYQYEVGDYELEDKILGIDIGKIKLFSSVVVDKKGDFSDEFINTKQSQETEYKINRLYENKQILFNKIKAYEGLRLDNQSKYETWKNLYSNITNKITNTKDYQAKLLSSEIVKLALEQNCKTIHIENLSWLNSQGGKWNHSQIHSKIIEKASMYGIKVKKVSAFNTSKEHPITKEVGIIQGRTVEFTTGKIDRDLLAAINIALRSTNIKLKKFLPKKVKTKRVKPKSNKKEIKEKVNRIKGNGQIVSFLTNVLDSTIQVELGVRPLHEVLPYNSLIDYYNKLHL

SEQ ID NO: 6972 - protein, 418 aa, unknown
  TnpB Polypeptide
MRRKKKVTENPIPTITRTHKIRIYPNKHNQEVFQRYYDYQRSIWNRTIDERNAQYKIYKEMKATGLFTQKELNKNYFPNTKNLRKMEKFDWENNFHCRIREIQFDNLCQAWDNYFNPNMPNHKKPKYKKKKDIESNKKLALRNVRIKDKWLFLPNAQKAKQEYRFAKIKMAEELRFNGRVADDFTISVENNKWYVTITVETPLEEKTAISKQSTGIDVNVGSIDYLKKDDLDKEYGKFYLLPKSLLRQYDKIKFYSRVISKKRNKNPYYIHSKSYYKTITKLNNAYTKAYNIQEANLNNIVKYFFTNYNRIVIEDLDVNSMKMNKRLCKSLHRNAFGRFKQKMVNKAGEYNVEFILADRFFPSTQTCSECGHIKTGDEKLFLWGDKYGNDHDTYVCYNCGTTQDRTENAILNLNHYGK

SEQ ID NO: 6973 - protein, 388 aa, Firmicutes sp.
MLRSHKIRLAPNNKQSTYFAKACGVARFAFNWALAEWKRQYEAGEKPTQASLRRQLNAIKREQFPWMLEVTKNAPQMAIVHLGQAFQNFFAGRAKYPTFKKKGIHDRFALTNDQFAVSDKQIRIPNLGWVRMREGLRFSGRIMSATFSRKADQWFVSITVDTKDRPPTCENQAVVGVDLGVNRLATLSDGTLIQGTKPHKALLNRLQRLSRSLSRKQKGSKNRVKAKRKLARLHVRIANIRNDELHKLTTRLASQYGVIGIEDLNVKGMMANHHLARAVGDMGFHEFRRQLEYKTGMRGSQVIVADRWFASSKICSVCETKQESMPLSTREWTCSECGTHQERDLNAAKNLMKWAVSSTVTACGEDVRPAHTEAASMKQEFNAKTTYV

SEQ ID NO: 6974 - protein, 382 aa, unknown
  TnpB Polypeptide
MRTYEYKARPNKKQEAQLMAVLIASRRLYNDALQELVKHYKATGKHLNLFDQDKRHGAREHPDLPAVVVDTTLKRLHRSFANFFRGRKDGRRIGFPRFKSANAWNTIQFRDAANCLDGNYLKTPKISGGKLRVNVHRPLDGAFRFARLVLRPSGWYVQCITDYDGERLAPSEKSVGLDMGITYLVADSDGGFVRNPKSFRASAKKLAFAQKQLTKCRKGSHRRRKAKRQVARVHERIASQRKDKLHKVSRSYVNGYQTIAVEDLKPANMVRNHSLALSISDASWGLLRFFLAYKAESAGREFVAVPPHYTSQKCSRCKELVQKSLSVRTHVCPSCGYMADRDTNAAQNILRIGLDETFAEGRRGAGSASESSVPLKREAIGL

SEQ ID NO: 6975 - protein, 417 aa, Streptomyces sp.
LLIVKLVVQVRLLPTPVQAAALEATLRACNEAATWAGRVAFEKDVKRNFALREHTYSEIKARWNLGAQAAQQVIKKTCDAYAALKANLKAGNLGRPGSQRHRKAAGKPVAFRPDSAQPYDDRMLSWQIPERRVSIWTVSGRVKDVAFTASPEQLATLALHRKGESDLVCRDGMWFLLATCEVPQAPPNTDPADFLGIDLGIVNIATTSDGEIMAGRKMNRIRARERALRTKLQKKGTPSARRRLKKRRRKEARRVRDINHKIAKHVVAEAERTGRGIALEDLTGIRERVRLRKPQRATHSSWSFAQLGHFIAYKARKAGVPVVYVDPAYTSRTCAECGHIDKANRVSQARFACRNCGFVDHADRNGSRNIRARARELWRRGASSTAPAPPPEHVRRGGTGRKRSITASDARWASPSL

SEQ ID NO: 6976 - protein, 368 aa, Nonomuraea sp.
VARLVKRAYKYRFYPTSEQAEELARTFGCVRLVYNKTLAERTRAYTSEGRRVSYVESSATLTAWKKTDELAFLNEVSSVPLQQALRHLQAAFANFFARRAGYPAFKSRKKSRASAEYTRSAFTWRDGRLTLAKMREPLDVVWSRPLPEGARPSTVTVSKDAAGRWFVSILVEETIRPLPPAESRVGVDAGIITPATLSTGEKIVKPKHDRADRRRLARAQRDLARKQKGSANRQKARVALARIHARIADRRRDFLHKLTTRLVRENQTVMIEDLAVRNMGRNHSLARSISDASWRLMRSMLEYKSAWYGRELIVIDLWFPSSKTCSACGTLREEMPLGVRAWECACGALHDRDVNAAINILAAGLAKR

SEQ ID NO: 6977 - protein, 446 aa, unknown
  TnpB Polypeptide
MAVRRQTFRLYPNKEQETKLFQARRDHAYLYNACMAHRKYEWKANGKPVNYFEQQNCLPAYKKEWVEFAYLHSQALQATAKRIDLAYNAFFQGLRKLPKFKPIRTYSGWTYPATSGWKANTSGQHGNVNLNDLGIKVRMRGQAKQWGKPTTLTIVYKPGLKQWFASFTVEVPDVEAKFGSQSDLAYDSIIAFDLGTETALTTYDGEKFESITNPRFTQKTEAKINIASKNLRRKQAPNRNKKIKASRRWKKANKRIAKLQRKVGTQRRDWQHKVTSDIASRYDIGVTEELNTKGMTRKAKQGSKRKKQKAGLNKSILSVGFGTLNKMLTYKIEAKGGLMVMLPTRTIKPSQRCPQCGAVHKEWAELSNRHHVCANCGFEAPRGSGSAMVMYNVATNQQPGLGTNLDSLYLWASLRMIGRESLIPPFLLEEVHSSFMGKFPNTSQNA

SEQ ID NO: 6978 - protein, 366 aa, unknown
  TnpB Polypeptide
MANKAYKFRIYPDKEQCIMFAKTFGCVRFIYNRMLSDKIEHYKQTKEKLNNTPAQYKEAYPWLKEVDSLALANAQIHLQTAYKNFFKSPKTGYPKYKSKKSSKQSYTTNCVNGNIRLSEGKLKLPKVGYVRIKQHREIPENYRLKSVTVSQTGSGKYYASILYEYEEETVTVVKPERFLGLDYSMHELYIDSNGQGADYPRYYRKAEEKLKKEQRKLSKMQKGSKNREKQRKKVAALHEKTANQRKDFLHKQSRQITNDNDCICIEDLNLKGLSQSLNFGKSVMDNGWGMFIDFLEYKLAEQGKKMIRVGKFYASSQTCSCCGYQNPQTKNLSVRKWVCPKCGASHDRDINAAINIRNEGMRIAFA

SEQ ID NO: 6979 - protein, 405 aa, Xenococcus sp.
MIRVAQKIRIYPTSEQQQQLARAMGCCRWWWNNALNVCNQTYKETGKGISRNGLNALLPKLKENEEYEWLKTDVYSQSLQQTTLNLSRAFINFFEKRARYPRFKSKHRKQSVSFPQSVRIQGDYIYLPKIRLVKAIFDRRYEGKIKTVTVTKDSDGRYFASIIYEVEACFISGNSNKILGIDLGIKDFAIVNDGTKTSKYANPRHIKKHEKNLVRKQKKLARKQLGSKTRQKARKLVAKVHTRISNSRHDFLHKLSRKLTNESKVIVVENLNIKGLVRNHKLAKAISDCGWGMFINFLSYKLEREDKKLVEIDRFFPSSHICHECLTQQPKMDLSVREWICINNSCNAIHDRDSAASKNIRAEGIRMLKADGAAVSASGGSVSHNRGRKSKVMQHPVKLETPSSL

SEQ ID NO: 6980 - protein, 365 aa, unknown
  TnpB Polypeptide
MLKGYQYRLYPNKEQQIYFAKCFGSVRFIYNQMLAERIELYNKYKGDKEQLKKHKPKTYTSYKHEYEWLKEVDNLALSNTQMNLNSSYRNFFKSGFGFPKFKSKKKSKDSYKTNNQGGNIRIEGNKIKLPKIGWVKIKQHREFDGLIKSCTISKTKTNKYFISILVEEQDKEIVPAKNKIGIDLGISHFAITSNDEGINKKYDNHRWLVKSEEKIIKAQKSLSRKKKGSKNREKARLILAKKHEKIANQRKDFLHKLSYKITSENQVIVIETLKSSNMLKNHKLAKSISDVSWYEFTRQLEYKCEWLGRTLIKADQWFASSQICSNCGKNDGKKALNIREWKCNNCDTEHDRDINAAKNLLSLAN

SEQ ID NO: 6981 - protein, 390 aa, unknown
  TnpB Polypeptide
MKRAYKYRLNPTPEQIVFFNKSFGCCRFVYNYMLGKRIEAYQRDKTKIGWVELAKMLTELKKEDGKEWLSEVSNECLQQSIRNMDSAFVKFFREKAGFPNFKAKHYSRQSYKAINSVSVDLDNNKVRLPKIGWVKFFPNRKFDGKVCSATVSKTPTGKYFISVLVDDGKEIPVKPAVRYDTSIGIDVGIKDFAVCSNGDVYANPKYLEKSEARLKVLQRRFSKTKKGSNRRERARKILARQYEKVSNQRNNFLHQVTSKIVRENQTIIIEDLNVKGMLKNHRLAKSISSVSWSEFFRQLEYKCEWYGRNLIRIGRFEASSKTCICGYVNSELKLSDREWVCPKCGRHNDRDILASVNIKRFGLISPLVEGVGGVEWSAVVGTVKRQYVCV

SEQ ID NO: 6982 - protein, 390 aa, Sutterella sp.
LGNQAVYIQRQKIFAKEPWLNYGGLDQATRLGHPELYRGMPSAASAQRQIKIVHEQFVSYSAAKAAYMADSSKFKGMPRLPGYSKKYRTFVVARNGYKVVDGNLILTDRNGVGFPPLKIRSCSNQPFNAKTKETIIGDVRIVPHGNAFFIELTYEVTCSTTVLLDGSRACLVDIGLRNIVTLASTASGIRPVVVKGGILKSINAMYNKDVASLQSHGKKTHRRSKVMKRTCRINDKMHKVSRFVVQFCLRNDLGTIIIGHNEGWKQNINLGKVNNQNFVNIPFNRLIHMICYKAEEYGIKVIVREESYTSRQSALDFDQLPNYGDKNANQVPSSGKRIGGLFIRSNGQKINADVNGCLNIGRKELGDGWLKKLVETDEGCLMQPVTARIG

SEQ ID NO: 6983 - protein, 232 aa, Homo sp.
MEVVYNRQEKEMMPDNGRYMGIDLGINNLSTCATNTGIAFIINGKPVKAINQYYNKRIAYLRSRIKTGLSKRIKRTTEKRNRRISDYIHKASRIIINHAVSNNINTIVIGYNKGWKQEVNIGKVNNQKFVAIPFKQLIEMIRYKAQLKGINVIITEESYTSKCSFIDKEKICKHREYIGERTKRGMFVSPQWEINADVNAALNIIRKKVSDEAVYTLIGRGKWQFPTRINCA

SEQ ID NO: 6984 - protein, 539 aa, unknown
  TnpB Polypeptide
MATRKFRLSDAERAYVRALLNELTDSFFYMMNTGNPEVVGSWVKVEEEKPQKPKQKTKRKTKTKTKTKVKEKKFEGTRFDLPDAAREDICGLIRHLVHEHLGRTPVMSSARTLWLDTGCVDVLEEILESVEKASASSKEEAAENTATAAESKAVDAVNAVKAKASGPRTQYLNIMTTRKGQRVRVPLKGFVPGSLFDGKPREDNTMKLEASTIRIIRTERGFKAVFQHDFKTLDPLPVPPPKTALFEAMNLPATMKLLRIVGLDLGVTEVFTDDDGNHWGGSEDYVVEPGRHRKGMMDARQDEAANGQIKTRTGYMPGLNALMRKFAQYRDEKLRRRNELRDQAKNTKDPVKRRNIEKNNLGSKAFDKKCAAYKAAITQIVNRAINRLFLKNPADVYVLECFGSSFDLSGFSKKTRRYLSSWVRGLIRERICFKCSRRGVKVVEVAAAYSSQACPVCHAVDHRNRSGDHHGCDFCDHEGDADAVGAYAMLTRAANPKFRRFMTRESVLEVEYGLHLAYCAKNGLEPLPEFKPRVHKRSS

SEQ ID NO: 6985 - protein, 484 aa, unknown
  TnpB Polypeptide
MRENTYRSVSNYLRLSQRQFYLIDRLAWYSKNLYNVALYNVRQHYHEWQENAAYLTGIRPDRVNGVSILVGSFLPYTRKKTFPHKDVSNYARTKPNENYPMLHSDVAQQTIRSVEEAYRSYFGLVSAYWCGKLPDCPRPPHYLEKDGRYKLAFPAAHLTMKNGYVTLGVSNQFKRRYEATRNELSFKIPSHIKPGQIREVTILPINNGLTYKIEFIYKASLTPQPVISDRYLAIDLGLDNFATCVDSITGTATIIDGKYLKSINRWYNKETARLQSIKDQQKLPQKLTHRQARLLNRRNNCITEAMNRYVKYIVDYAVERTIGTIILPTWEGIKHNARLGKRTNQNFVQIPYAKFRQKLASKCELFGIRVDDTHDERYTSQVDALARDPVQKPAYGKTRRIQRGLYQSATGVLVNADVNGALNHLRNVAGDSVIAWIISSGRVNRPVRIRFAFEGQDLDRFNKQSSCELNCGDDRRNIPTSPVL

SEQ ID NO: 6986 - protein, 414 aa, Shigella sp.
  misc_feature (133)..(267): Xaa can be any naturally occurring amino acid
  misc_feature (315)..(375): Xaa can be any naturally occurring amino acid
VKRLQAFKFQLRPGGQQECEMRRFAGACRFVFNRALARQNENHEAGNKYIPYGKMASWLVEWKNATETQWLKDSPSQPLQQSLKDLERAYKNFFRKRAAFPRFKKRGQNDVFRYPQGVKLDQENSRIFLPKLXXXXXXXXXXXXXXXXXXXXXXXXXXXXXXXXXXXXXXXXXXXXXXXXXXXXXXXXXXXXXXXXXXXXXXXXXXXXXXXXXXXXXXXXXXXXXXXXXXXXXXXXXXXXXXXXXXXXXXXXXXXXXXXXXXXXXXXNMSKSAAGTVSQPGRNVRAKSGLNRSILDQGWYEMRRQLEYKQLWRGXXXXXXXXXXXXXXXXXXXXXXXXXXXXXXXXXXXXXXXXXXXXXXXXXXXXXXXXXXXXXFRQRIQASVARTVVIQRKRTACHKVNSDARYVDIQRTPM

SEQ ID NO: 6987 - protein, 392 aa, unknown
  TnpB Polypeptide
MKKAYSFRIYPNKNQEVKLDRTLNTCRHLYNDALAERKRQAGLNRLKREFQIFPWGKPEWISYEDQANKLAKSKTPEQKEVHSQVLQNTLKRLDRSFKNFYNGFGYPRFKGRNRYNTFTYPQSGFDLIGNDLKLSKIGTIRIFQHREIEGNIKTCTIKKDVDRWYAIFTVKIKKKIEKVPVKTKIGIDVGLSSLLTLSNGKKIEPPKFLRKSEKKLAWEQIKLSRKKPGSKNRTKQRIKVARVHRKIRNQRSDFSHKASRDLVNRYEYIIFERLNIRGMVQNHHLAKSISDAGWYQLQMFTRYKAEYAGKQVNLCIPNGTSQQCHVCGNIQKMTLKDRMFRCSMCGNIEDRDINASNNIRDSKNICTYGLWGINACGEDPKGDSLKQEALAL

SEQ ID NO: 6988 - protein, 400 aa, unknown
  TnpB Polypeptide
MNKAYGFRIFPNKNQEVKLNKTLNTCRHLYNDALAERKRQIELNKLRRDFQVFPWGSSIKPEWISYEDQANNLSSNKDSLQKEVHSQVLQNVLKRVNKSIENFFNGFGFPRFKGKNRYNSFTYPQSGFEVEIEDGNEGKLTLSKIGKMRIILHRDIEGRIKTCTIKKDIDQWYAIFTVEIRKTIEKVPIEKKIGVDVGLINLLALSNGEMIEPPKFFRNSEKKLAKEQRKLSRKKLRSNNRKKQKIKVAKVHQKIRNQRKDFSHKTGRTLVNRFDFIGFESLHIQNMMQNHHLAKSIVDAGWYQLQILTASKAEEAGKRVKLCIANGTSQTCHLCGNIQKMMLKDRVFRCNQCGNIQNRDTNSANEVLNRCTVGMTGIKACKSGLRRDMMKQEAIKLVGW

SEQ ID NO: 6989 - protein, 220 aa, Proteus sp.
MKRLQAFKFQLRPNGQQEREMRRFAGACRFVFNRALARQNENYEAGNKYIPYTKMASWLIEWKSDTETQWLKEAPSQPLQQSLKDLERAYKNFFQKRTAFPRFKKRGKNDAFRYPQGVKLNQSNSRISLPKLGWMRYRNSREVVGEVRNVTVSQSCGKWYVSIQTEYEATEPQHESTSIVGLDAGVTKLATLSDGTVYPPVSSFKVKPAKAGKASTEIKP

SEQ ID NO: 6990 - protein, 412 aa, unknown
  TnpB Polypeptide
MKLKALKIRIYPNAGQTIQLNKTFGCSRFIYNTMLEERKEAYERLKDKPRELYEYKYRTEKQLKEEFGFLNEVDSISLQQARINLSVAYQNFYRKVKDTKLPSGEKGFPKFKKKNQKNSFRTVMVGGNLKIDFEKRKIKAPKLGWISFRDDRKIEDIKIHSMTFSRTTTLKYYVSVLYEDHVQNRPTIDTKSKNLKITGLDMSLTNFFVDENGNSPQYDANYRKYEKKISYLQSKISTTGCKNLKKKLRLRLNRIHEHIQNKRRDFNEKLSAKLVEENDVIVIETLSLRDMARHKMWEERRKSTDKSNHGKSVHDLGWYYFVNRLKTKADERGKLVIEANRWFASTKTCNICGYVNLDLEVKDRTWTCPRCGTSHERDVNSAVNLRNVALDIFTGGTSGSAGTLSWNRNHLQ

SEQ ID NO: 6991 - protein, 424 aa, unknown
  TnpB Polypeptide
MEVQKAYKFRMFPDQQQQDYFWHNILANRYIYNIARLQKDHYYSRHRKQRSAVFDVAREFTILKAENDFVKKADSLSLIYSMRALDQAYVNFFEGRANFPKSRNKKHKSYVTYRLGIYIDEGFIKFPKVNKPVKTIFHRDFPEGAVLKSQTISTTGNNEWYISCQFECTEELFIKKEVKEETTIGIDVGIKDFAILSDGTKYDNNRYQEKSLKKLKRLQHELERRVAYSNGWYETRNKISALHSKIVHQRNDYQHKISTKIISNFDTVVREDLNIKGMLKNHHLARVISDAAWGMFFQKLQYKADWKGKNVIKVPQFVATTKPCSACGWKNDTITLKDRVWICEKCGTKHDRDINAAKNIKAYGLNIKYPELTGESTTVDNRQPLGAVDEAVNPALTGEKPVKKRARKSKVSGSSKVKSRRVST

SEQ ID NO: 6992 - protein, 217 aa, Saccharothrix sp.
VVKRAFRYRFYPSAAQEVELLRTFGCVRVVYNRALEARTAAWFGEEEVRRAGVSERGVVGAVAAVVAALAVGVRGVLGEAVAVSAVQVPQVLHKLTTRLVRENQLVVIEDLAVRNMLRNRSLAHAISDVAWSDLRSMLEYKCEWYGRDLVVVDRWLPSSKTCSACGFLLDTLPLRVRGWICPGCGASHDRDVNAARNILAAGQAVAACGAGVRPTRR

SEQ ID NO: 6993 - protein, 397 aa, unknown
  TnpB Polypeptide
VLKAIKVRLYPNKEQQGLLNNHFGACRFIYNAALNYKKTMYSDYKIKLSKFDIQKELPNVKDDLHFQWLNSVKAECLQNTIDSLDSAFKVFYRGNGYPKFKSKRSKQSFLSKQNFKILENSNKLVFLKNKIKFKCSESNTHELRLSKIKRITYSKDNLNHYYASILIESKKDLTLPKLNNEVGIDLGLKYFLITSDGEFIDNPKFFRKSEKQLAKQQRFLSRKVKGSSNRNKQRIKVAKIHKKISNQRNYFLHEVSNKIIDENQVIHLETLAVKNMIKNHKLAKSIADASWSTFVTMLKYKSQWYGRELHQINRFSPSSKTCSNCSWINVDLTLADRIFECEDCGHVQDRDLNAAINIKNFSNQILDKNREELSRINASGEQPLGTHRKKKNQVQTL

SEQ ID NO: 6994 - protein, 481 aa, Micromonospora sp.
LGGKVTSRWTWLSSPLNSTNSVSKSAHTVRMMSSIRLRCWSEKTRRRYLVTKTKWACNAKVQCLPVRTSPRSAIDQWQTRRVQLRYNYRLYPDAAQREALAKAFGCARVVFNDGLRARQEAHEAGLPYPTDAELSKRVTVAKLTPERAWLGEVSSVVLQQALADLNKAYRNFFASLSGKRKGRKVAAPRFRSRKDSRQAVRFTANARFKILDNGRLRLPKIGDLEVRWSRELPAAPTSVTVVRDAAGRHFASFVVQTADQPLPQLDSEVGIDLGLTHFAVMSDGTKVSAPKFLRRAARKLRRLQQGLSRKQRGSNNRKKAVRKVARAHAKVADTRRDWQHKLSTQIIRDNQAVFVEDLCVTGLARTRLAKSVHDAGWSQFAAMLEYKAARHGRTFARVDRFFPSTRMCSDCGRINDKMALNVRTWGCPCGSLHDRDVNAAKNIRAAGRADLNDRGAQVRPAPVPAPRSEAVTRRDLAPSGA

SEQ ID NO: 6995 - protein, 412 aa, unknown
  TnpB Polypeptide
MPSFYRTQTLKIDGQSIFSEVNAASACVWNDCCYQMDMYQWQRGYPHAHRDFYFGKDCEGWIDQRLSNPLLHSQSRQAVLQRYFKSWKSYSALKKSGSVEKPNPPNKRKNYMTTRWKKSAIRFVECGLFGKRVELSMAQGQPKIEIPLPKSFNMSKAAHIATIDLCYNYGHWTLHFSYKYATETTETGEAVVGVDIGEIHPIVSHDGQDTHIYNGRYIRSLYRYRNKVLAEFSETISRCKRHSKRWWRLTRRKWKRIRKIDNQIKDALHKQTTKFVKYCEVRGIGTIILGDLTGIRNTISYGKRANQKLHQWAFGKIAELITYKAKALGIKVKVIDESYTSQTCPKCSKRKKSNNRNYTCTCGFKYHRDGVGALNIRAKYLGDFGVPVVAEMGSTRMAPPLGFRLEVPVASS

SEQ ID NO: 6996 - protein, 370 aa, unknown
  TnpB Polypeptide
MKTYKYELYHQKNIIKIGNLIDDLHQVHVHLIRLQRRYYSMFGKYIPLKRMLKHITQLKRTTKPHWNQLPSQMIQDVAIRIDHGYQAFFDNIEDRKNGVTQRKVGRPKIKPNHKYKSITFTQAGYKIEDSRLTINCLDTTFTFWKHRKWTGKVKTVTIKRDNVGDYYIYFTCEDPKPVQKLPLTSNEAGVDFGSKTFLTLSDGIKILSPHFYKQCLNEIRSANKALSRKQYLSKGWFRAKRHLASVHKKIADKRRDWFFKLALRLVRRYDNIAIETLNLEAMKKLWGRKISDIAFGEFSLILKWTCAKYGKTLLKAGRWQPTTKPCSSCGFHNKDLTLNDRYWTCPSCKAEHDRDVNAAINILRVGVPWT

SEQ ID NO: 6997 - protein, 417 aa, unknown
  TnpB Polypeptide
MSRYRLLPSPAQEAVLRDHCAHARFVWNLAVEQHSHWRPGRASAPGYLEQCRQLTAARAEHDWLRAGSQMVQQQALRDFAGAMAAFFDAKNPAGRPSWRKAGRNEGFRVVAVKPGHVHRLSRHVGEVRVPKAGWVRFRWSRDVPAGVKSYRVNRDRAGRWHVAFAAMPEPVPAPGNGEIVGIDRGVAVSAALSTGELLHVPGLAGRERRRMRRLERKLARARRGSERRGRVRLAIARLRARETDRRKDWAEKASTGIARRFDVIRVEDLKIRNMTRSARGTASDRGRNVRQKAGLNREIMRSGWGLLVRRLEDKAPGRVEKIKPHYTSQRCSACGHLDANSRESQARFACTACGFACNADVNAARNIAAGHAVTARGGDGVARPVNREPHLLASLTGREQLESPAFRRGRMSSASPR

SEQ ID NO: 6998 - protein, 395 aa, unknown
  TnpB Polypeptide
MEQAFRYRFYPTPQQETLLRKTMGCARLVYNRALAARTEAWYSTQEKIDYLKTSSLLTEWKKQEDLQFLNEVSSVPLQQGLRHLQKAFANFWAGRAKYPNFKKKHNGGSAEFTKAAFRWKDGQVWLAKCAEALPIRWSRELPDGCEPSTITVKLDPSGRWHVSLLVDNQTIRTLLHSDKVVGLDVGITSLIATSNGDKIANPKHFRRLRFKLKKAQKSLCRKQKGSNNRHKQKQKVAKVHAQITDSRKDFLHKLTTQLVRENQTIVVEDLAIKNMVKNPKLAQSISDASWGELIRQLDYKCDWYGRTLVKIDRWFPSSKRCGNCGHIVEKLPLNIREWDCPKCAAHHDRDINASINILAAGLAVAVCGANIRPDNLEIKGQLRKTRKGRKQKPKS

SEQ ID NO: 6999 - protein, 543 aa, Dictyobacter sp.
VKQTKKQQEPRKPRKGPATPTFLLELPLMVDAGQAVRLRAHLEAARQLYNAILSEGQKRLRRLRTDPAWQHARVLPPSHTSERAAAFAALRKAHGFTEAGLHEAVKGLRVGWIAEHIEAVLAQTLATRAYRALNRVCLGQARRVRFKSRGRGFSSIENKRNDTGLRFVLQPPEEGNGGLLLWNGDQVPARIDWQDAVVAHGLRHRIKYARLVQRAASSPRAAGADAYGNRYVVQLALEGTPLHKPKHAIGQGIVGGDLGPSTLALVPQQGEASVQVFCAELVPDGRGLRRLQRQMERQRRAGNPEHYDEQGRIKKQGSRKRQWKQSHRYQATRRRKATRERKLAAHRKSLHGCLVHQVCAQGSTIIIEKISYKAWQRQYGKSVGLRAPGMFVDQLRRTVASTGGILVEVPTRSTALSQWCHGCGRKVKKPLSQRWHHCACGVGPVQRDLYSAFLAAYLDPADPTPSCAHYQPYWEGAEARLRAAHERLIQRAKEGQDLPRSLGITRARARLPESPEEPLQESALSAAATGLKAWDEPLEPPPL

SEQ ID NO: 7000 - protein, 359 aa, Cyanobacteria sp.
NSQARQAHADRAWSAIQRFYENCRLGKPGKKGYPKYKKFSRSVEYKNSGWKLSADRKQITFTDGFAVGTMELWIKRDLVWYSEKQISRVRVIRRADGYYAQFLVDWDRREEHEFLSEMTGIDLGLKEFYTDSDGNTVENPRYLRKSERRLKMLQRRVSKKHVRGKKQSNRYQKARKALAKQHLKISRQREDKARKDALALVRSNDLIVYEDLKIRNMVKNHHLAKSISDASWYQFTQWLQYFAKVHGVIVIAVPPHNTTVDCSCCGVKVKKTLSARTHRCSACGTVLDRDHNAAKNILVKGFKLLAEYLNNSTEGHSESGVHRSKAQGETNLWLKNGDALALSWLEELRISNCAENPPL

SEQ ID NO: 7001 - protein, 372 aa, Nitrosopumilus sp.
LAVCRWLYNKFVKQAKKSFLSRNDMNYFLTELKQSEPWLYNYYSKMLQMVSTQIESAEKSLIKLNKKGYKTGTIKFAIYNEYRTFTYNQSGFKFEKRGDKTLLHLSKIGYVEIRRHRKFPDNANIKQVIVTKSKSGKWYACLTCDIVESLFNIPKIDFKKSVGIDVGIKSFTYDSDGCSTPNPLNLKKMLKPLARAQRKVSRRKKGSNNRLKAIRHLQKIHEIIANRRKDFQHKLSTQYAKNNDVVFVEKLEKLNMVKNRRLSRSIMDSSWGMFLQKLEYKCKLLVEVSSQNTTIDCSRCGNKVPKGLTVRIHRCGKCNLVIDRDYNASINILQKGLKIFGQDNLPQELWKVTPVEISMRSVKQEQIIQRFR

SEQ ID NO: 7002 - protein, 404 aa, unknown
  TnpB Polypeptide
MKVNRVEKHIIKYNNPYYKHLDDFCFMSKNLYNFANYNIRKRFIEESKWLKYNEMDKLFKQEDMDFNYRNMPTAQSAQQCLILLDKNWKSFFKAIKDWSKNKDKYTGKPKLPKYLSINGRNILILTNCDCKLKNNIIKFPKVFNKFTLNTKVDNLQQVRILPRNKHIIIEVVYRVEIPEIKQDNNRYFSIDIGLDNFATIVNNFNEKPIVINGKGLKSINQYYNKKISYYRGIAKRMNKLDYTNKMNKLTIKRNNKVEDFIHKASKFVIDCALESNVSVIVIGNNKDWKRESKMSKKVNQNFIGIPHHKFINKIIYKAENVGIKIILTEESYTSGTSFLDEEKPVKKNYNKNRRKFRGLFISNKGIKINADVNGAYQIMKKVFPNVFADGIEGVGLHPVRVNIA

SEQ ID NO: 7003 - protein, 376 aa, unknown
  TnpB Polypeptide
MRATYKYKVYTQNRNHTVRFDKQLSTACWVYNHCIALHKRYYSLYHKSLSANKLKVHLTKLKKQEKYQQWNKLSSQSIQQIAEKIDDGYKKFFKKQAKRPPTFRSWRKYKSITFKNTGWSLNGNEFVINSIGLRLRFHKSRELDGIIKTVTIKKDAVGDLWICFSLDNVQNQTQIQPKTGKAAGFDFGMKIFLTVSDGQEIASPQTLLQNLDKLRKVSNHFSRKRKGSASRKKAKLQLEKLHRKIANQREDFQWRMANDLVKKYDVLCFEDLNMKGMQMLWGRKISDLAFAAFMNKVEYLATKHEKEVKKVDRFYPSSKTCGYCGHVYKELTLKERSWTCPNCDTTHDRDLNAAKNILMVGTSTMEGGIIRPALAG

SEQ ID NO: 7004 - protein, 313 aa, Allobaculum sp.
MVMKSKKVRLEPTQEQEQFFWRFSRVNRMTWNACKAKFDEVYKTEKKYLSLKELREYIRDLRNNDPKFSDFQGVPVAVTSQSIKDLLDTYKRFYSARKKKGYDPEKSNKFKPKFKKYNKTTPSFYQRIDGIHKTDDTHIKLTGIKTPVKCTALRNVDLPDKIQNPRITYDGKYWYLSYSFEAEPQTETSQSSEETLGIDVGVKDLAVLSNGKHYSNINQETKIGKLNKRLKRLQRQVSRKYEKNATYDSQGRKIYHKTNNIKKLERRIKLLKRRIHNIQQNYIYEVINDILAIHPKTIVVENLNLRGMLKIGI

SEQ ID NO: 7005 - protein, 370 aa, unknown
  TnpB Polypeptide
MEYSYKFRVYPTAAQAKQIQRTFGCCRFVWNHYLALRKDLYEQDGKAMNYNACSGDMTQLKNALSWLREVDATALQSSIKDLDIAYQNFFRRVKQGQKPGYPKFKSKHHSKKSYKSRCVGTNIKVLDKAVQLPKLGLVKCRISKEVKGRILSATISQNPSGKYFVALCCTGVEIEPPTSTGAVVGIDMGLKAFAITSDGVEYPNHKYLTRSQKKLAKLQRHLSRKSKGSNRREKARTQVARLHEHVSNQRRDMLHKLSSQLVRNYDLIAIEDLAPSNMVKNHKLARSISDASWGEFRRQLEYKAAWYGKQVVPVDRFFPSSQLCSACGTQWPGTKDLSVREWTCPKCGTVHDRDVNAAKNILNEGLRLLA

SEQ ID NO: 7006 - protein, 533 aa, unknown
  TnpB Polypeptide
MSSKSSTPSFVLELALRVDSLDDRILCRKLEFGRQLYNATLNTAFGLADQMKQTKAWRETAAMPKGSNRNARFREIRKNWRLTEYGFHEIIKEHREASGRKAEIGINEAQKLATACFRAVERWLLHLGGRPRFKSARRGLHSLEGKTNKTGLKWKADEWCLDWCGRKYRALQNQRDDYIREALADPTDPAKKKRVKYVRLLHRRIEGRRRWFIQLVLEGLPPVKRIPAPKSIEMSIDPGISTMTCLSTDGFAEKFALASKCAWHRKEVRRLQRKLDRSRRAMNPQNFNDNGTVKPGAKAWKFSKRYEALSGELAEMHRRAASTRVNEHNETIGLLLSHAGTFRVESNNFKAFQKGRYGRSQGLHAPGQFIEMLQRKAESAGSRVIMMDARKLKPSQHDPLTGEDRKKELWERRHRLGSTNEYIDRDFLACLNLLYADAEKQSRDPQALRAGLDAVKPLLRNAGIVVEGKPRSELTEREFRKFLRRGCAPRSVGAVRSKSCRNASDVRSAEGKTGAGLKSPQCSKPRQFIDRVA

SEQ ID NO: 7007 - protein, 438 aa, Chlorogloeopsis sp.
VLHKVVQVRLYPTKEQQAQLAQAFGCSRWWWNYALNKSIEAYKETGKGLGRSALNALLLALKKAEDTCWLADCYSQVLQATTLNLTTAYKNFFEGRVGFPKFKSKHGKQSIQYPQNVKIVDGESSPEGGFPSVGNWRTRKGNVKLPGNIGIVKAKIHRPIEGKIKTVTVSKTPSGKYLASILTEVEGEKPTTTEGKIYGVDLGLKHFAVVTDGKKVSKYDNPKHIAKHEKNLKRKQKKLARKQKGSNSRNRYRKVVAKVYERVSNSRQDFLHKLSYKLVSDSQAVIVENLHLLGMVRNHKLAASISDCGWGMFTNFLAYKLERKGAKLVEIDRWFPSSKLCSHCFYQIGEMPLDVREWTCPHCGTDHDRDGNASINIRAEGIRMLKADGSAVSAVGGEVRPKMGRKSHLRHSPMSTEAHAVPTGSALGSSLSPSDNSR

SEQ ID NO: 7008 - protein, 426 aa, Streptomyces sp.
VSQDVLVKRQFGHRARLALSPARVRAADGQAHAARTLWNLLHAWWRMMPKQARTLANADAAIRQAREDIDFLAVLPAQAAQAVLKTYFQAWRNCWDGRADAPNFKGRFRTVMSVDIPQGRDLNIIRVHRRWGMVNIPKVGRVRFRWTKDLPVGRHGGAENQITGARLVKDALGWPIAFRVQTLEAKPEPHQGPQVGIDVGVTVPLALSDGETYEHGEWLTGKEKTRLLHLEQRAAQRKRHRRPGEHTSRRLHHTYDRIAGLRAKAKRRALDWQHKTTTHIARTYGTVVVEALTITNMVKSAKGTIEEPGKNVAQKSGLNRSVHAEAWGRTVTMLAYKTAQYGGTLHKVPAPGTSQRCSACGFTTPGNRESQAVFVCKNPDCGWSGNADHNAARNILHLYRMGLALIPAAGRAVVRRAKRVKPATAR

SEQ ID NO: 7009 - protein, 380 aa, unknown
  TnpB Polypeptide
MRTNVTAKVRINPTEQVIDTIKAYTKALQFCVDYAWKHKITQNFKLHYAIYQNIRQRFKLPAQIAVVCMRQACGMVKKAKSKPIIKRTSVRFNFPRSANIKGNKLVLRLLKCRQEFNLNIPECYAEYFKWDVSESLLRMDKKGRCFFLFTFSKEVTATKQNIRSQNRVLGIDLGINNLAVTSDGRFYNSAKVKQVKRKFKYLRSELQSKGTRSAKRLLRKLSGRETRWIAWINHNISKDIVSHFNGNKIVMENLKGIRKANRWRKMNYWISNWSFYQLQSFIKYKAERKGIEVIRVKPNYTSQICHKCGQLGSRLSGCFSCSHCRFSSYSADLNAARNLAHPMLVERQGVVTHPHDSGCDAEGNSQVAIEAELRVKSPTL

SEQ ID NO: 7010 - protein, 558 aa, Candidate divison MSBL1 archaeon
MSEQILAVPVKLPGEHRKSFEYLEELTLRVANQVLEEHWTEEHLTKINDHNGKAWKYFDEREAFAGIDIYLPSRFKRCILQKVGETLRSQTDKFKAFRAIESFLPEGMLSKPAERGIRSKIYESDEFVNLNEVGRLLKRIDNYYRKHGRRPDSYFGLQKCPKYRKGVLPYSADDGSERGQVIRYDYDGVFHATIKLPETRSPEDRGDWGWLDVSSDAHGYFCYLAEKGTLKAPKFLPKKKKTGEQMYFLEFSVEIDGLDRDRETGRILSVDLGVKKLATCVVLSEEGKQLSKPNFIRSKEVEKMRRLYYERNDLNAKLGDLRSNGLDHTNRFKHLQSEYKHVQNKLDHKREQLQHSATNWILALAVYYDVDTIVLEDLRGLEPRKNRGITSWNLSTWARGVLKDKLEYKAGLAGISLELVPPWNTSRTCPRCGEEGKTVKAPDQQEEKKSGGHFVCEECGYQADRDYVGALNIGRRYLENGNLKEAKPVAYTETGNTPGDRSLGVRPALFKAKKREAPPSHPSRIVPSLGTLIDGSDEPRLGGEPKGIVHHIVTTESY

SEQ ID NO: 7011 - protein, 426 aa, Pseudanabaena sp.
VRRITFRLYPSDAQERKLREWRRMHKDLYNAALANRKIQYQKFGHSVDYFEQQNSLPDFKEVWTEYKKLGSQALQATLKRVDLAFQRFFKGLGGYPKFKSIRHYSGWTYPAKSGWNADTDGENGHLDLSNLGRIQMRGQARTWGTPTTCTIVFRNEKWYASITINCEPVRTTGDGAVGIDLGCKEAITLSTAEQASKPDFIKAGQLKVKAASKNLRRKRAPNRNKKIKASRRWKKQRKVVSKLQRKVKRQREDWLHKTTSSIVSGNSLVAGEELNVKGMTRKVKKGDKRSAQKSGLNRSILDVGFGMIGKMFEYKLAEAGGFYLESPTQKLKPSQRCAKCWELTPKTLKDRVHVCSNPQCGHTEDRDVNAAQVNLIWAKGAGTVLLDAEPPSSTSCGSMRQLGVKKRQKSQQVGGSGETPSAYAVG

SEQ ID NO: 7012 - protein, 419 aa, Pseudanabaena sp.
MLTRRITFRLYPKPAQEAKLFEWRRLHAYLYNSALADRKDSYQKRGEKVDYFDRQNRLPAFKEVWAEYKELGSHALQATLKRVDFAFQRFFAGLGGYPRFKSIRDYSGWTYPCSSGWKAHTTGNNGYLDLSNLGQIQMRGKARTWGTPSTCTILYRRRKWFASITVQCEPVRETGIGAIGIDFGCLTAAAMSDSTMIENPRFMAKTQTKIKIASKQKRRKQSPNFKKKVKASKRWKKAQKRVSALQRKAANQRQDWVHKQAAEIVSCNSLVATEKLNLKGMTAKAKKGKRKRQKSGLNRSVLDVGMGMFRKALEYKLVEAGGIFVEVPTQKVKPSQTCPNCGHQEKKTLDRRVHRCSQCGCVEDRDVAAAKVMLNWALGLGTSLINAESLSSTTETRSKGSLRQLGAKKRQKPLAQRSG

SEQ ID NO: 7013 - protein, 395 aa, Pseudanabaena sp.
MTQRAFKYRFYPTPEQETLLRRTLGCTRLVYNRALAARTEAWYERQERVGYVESSAMLTDWKKEAELQFLNEVSCVPLQQGLRHLQSAFANFFAGRAGYPTFKKKRNGGSAEFTKSAFKFKDGQVYLAKCSESLPIRWSRMLPEGVEPSTVTVKLSPSGRWTISLLVDVEIKPLPIVPNQIGIDLGITSLVALSNGEKIANPKGFKAKRQKLRKAQKALSRKQKGSSNREKARLKVARVHQEISDARQDFLHKLTTQLVRENQTIAIEDLAVKNMVKNRKLALSISDASWGELVRQLTYKCDWYGRTLIKIDRWFPSSKRCGHCGYIVEKLPLNIREWDCPKCGMNHDRDINASKNILAAGLAVAVCGANIRPDRHEFKGQLRNPSNGKKQKPKS

SEQ ID NO: 7014 - protein, 377 aa, unknown
  TnpB Polypeptide
MFRKAGRPRFKSFRRGLNSIEGTNNQEIMYKPERGAIVWRKHVMTYMKPDTGYMKEALASDRRVKYCRIVRRTLNDVRRWFVQLVVEGLPPVRKVYAPKCEVVGIDPGSSRIAYFHERHAAIVEVAPHVDLKEPKIRLLQRRIDRSRRANNPDGTVKKGSSTWNTSNRGRRTAAKLAEHHRCLAATRKRDHGELVNDLLQIGGTIKIEKNNYRSFQRCFGRSTNRRGMGEFVEHLKRKAESAGCEVIELNAYKLKMSQYDPQTDAYRKKPLKERWHRWGNTGTLVQRDAMSAFLACHATEKGHDRALLLEKWTTAEALLSGSGLCRHEPCSDPEVSKDASGLTKPNCGSKAERERGLPRTLCTDGDVQAALPPERAV

SEQ ID NO: 7015 - protein, 385 aa, unknown
  TnpB Polypeptide
MIQGIKVRLEPNNKQKTKLFQYAGTARFIYNWTLAKQEENYKNGGKFINDGDLRKELTQLKKQQQYKWLNNISNNVSKQAIKDACEAYKRFFKGLAKRPKFKSKKHSPPKFYQDTDKIQFTATHVKFEGFASSKKKNKQKLNWVKLSEKNRIPTDVKYINPRVSFDGMNWYISVGVEIEDIKPELTTESIGIDVGVKDLAICSNGIVSKNINKTHRVKKLEKKMRRLQRRVSRKYIKNKKGESYVKTSNIIKLEKEIVKLHIKLANIRTNYRHEESTKIVRNKPSRIVMECLNVKGMMKNRHLSKAIAQQGLDKFKTMIKYKSERYGIEFVEADRWFPSSKLCSCCGAIKKDLKLSDRVYKCECGNVMDRDFQASINLSRYKLVV

SEQ ID NO: 7016 - protein, 414 aa, unknown
  TnpB Polypeptide
MLVFEFKAYGEKQQFAAVNEAIRTVQFIRNKALRLWTDNEKIGKNDLSKYCAILAKEFPFCDELNSMARQASAERAWSAISRFYDNCKKKVPGKKGFPQFQHDNRSVEYKTSGWRLAADRKSITFTDKQGIGKLKLKGTRDLNFYQITQIKRVRLVKRADGYYVQFCIQVDRSEVLEITGNAIGLDVGLKEFYTDSNGIAVENPCFLRKGERRLKKAQRRVSKRVKGSQNRRKARVILGKRHLKISRQRKDFAVKLAKCVIQSNDCVAYEDLRIKNMVKNHCLAKSINDASWYVFRVWLEYFGKVFGRITIAVPANGTSQECSSCGTIVKKSLSTRTHVCRCGCVLDRDHNAARNILSRGLSTVGHTGTWGSNTLNACGELTATNVEVILHQQVDSMNQESSAALARLSVNTRR

SEQ ID NO: 7017 - protein, 367 aa, Lachnospiraceae sp.
MLKAYKYRIYPNNEQKVQLAKTFGCCRFVYNQTLLYRKETYEKEKKSVSKTDCNNYCNRELKKKYEWLKEVDKFALTNAIYNMDSAYQKFFKEHTGYPKFKSKHDSHKSYTTNFTNGNIKVYFENGKIKLPKLKEVKTKLHRKFDGQIKSATISQVPSGKYYVSILVETEHEELPQTGKNIGLDLGIKDLCITSNGEKYENPKIMKRYEKKLAKLQRQLTHKEKRSRNYYKQKKKIASCHEKITNTRKDYLHKVTHEIISENQVIVSENLQIKNMVKNHHLAKLISDVSWYELTRQLEYKAAWNGRQYIKIDSFYASSQICAACGYQNTDIKDLSIREWICPKCRSKHDRDINAAKNILAEGLRQTA

SEQ ID NO: 7018 - protein, 691 aa, Acrocarpospora sp.
VVIRLPMDMSDPAARVRMEKLFSAAWSLKRALQRDASDRVAAYWAGVHRRRDDAKAWRVGLGLSRDGLEHAAYAHLENSGHLRHHLSKALAMHLADEVWTGVDRHLFPDATGRRAGRPKIGSWWAFTRIPGRARSHTQERKWETFRLAGTLQGHLDAYAAPGIPGARGASWRGRQRTAASVTVADALAMPAGTSVLAQPRHLSAPAMLSGTVETGKHAASGRRVMRAASWWDHAGPLTVVYTSAHADDLAIPVRLPPGAGRWGRVVYFLDRPHLWHKIDMVRRRKASAPGGWTYEAHLMILDRGYASAASRHRRERAAALERRAGIDGNVSNLSVFSAPAALGGSRTACPSPSGTDGSTAGGVGVVGVGGVAATLVTLTMAEQARLERERRKAKGRARALERSRRAANRDRYRPSTRQETRAQRRASKGLLERQVALPKGPRVANKRGAPSNAYRTDTLTTTYRRIRTRHAQASRSFAEARQNRARQVAARIVAVHGANLVIEDCDIRTWTRLWGRGVARFTPGMLIAALKHEAAACGGRLLRASTTQTALSQHCLCGARVAKSLAQREHRCPACGLTAPRDLVSAALASCITLTDPDDPGTARVDYTRAAHLFDTYSIQGLQEVLSESTAASPSPACRVGRDHAAATPVASAQRSAGTCGAPTPDETPTRGTTPDRCSRNPDYPDFRDSS

SEQ ID NO: 7019 - protein, 392 aa, unknown
  TnpB Polypeptide
MSRYRLVPTAAQELILQEHCTHARFIWNLAVEQQSWWRPGRGKAPGFLEQARQLTQARAEFMWLRDGSQVVQQQALRDFAQAMTNFFGGTHGRPSWRKAGRDEGFRIAAVKPGHVHRLSRKTGEVWVPKIGWMRFRWSRSVPERIKSYRVNRDRAGRWHIAFAVRPKPIPAPGRGKVVGIDRGVAVSAALSTGEMLTAPRPARARQRRLRHLQRRLARAERNSNRRARLKLDIAKLKAHDTDSRKDWAEKVSTNIARQFDIIRVEDLRIGAMTRSARGTVAAPGRNVRAKTGLNRSILASAWGLLVRRLEDKAPGRVERVRPAYTSQRCSACGHIAAESRENQALFRCVACGDACNADVNAARNIAAGHAVTARGGLRNAGPMNREPQLVAP

SEQ ID NO: 7020 - protein, 227 aa, unknown
  TnpB Polypeptide
VESEIPNEGDDENSTVLGVDLGIEQIAVTSTRIFWSGDYLTHRRREYERVRGELQRTGTESAHRTIERMGGRETRWAEDSLHRISKAIVYEAITHGYDTIAFEELTGYTRADAGRKTFHTWVFRRLYDYTAHKTKAEGIEVTQVEAAYTSTRCSKCGMTLEENRSSQATFCCQKCGYEVNADYNAAKNIGFRLLRAGQTSPHGGATRYLALKSGTLNVNGGYSPASE

SEQ ID NO: 7021 - protein, 423 aa, unknown
  TnpB Polypeptide
MKVTRSSQHILNDATSFKKGKLDEFFAEYKRVVNCFIDLFWEIDNLPPKINTTHYSQIDSWLLGKAMKCAGNQALQVIKSTRKKDKQRTYSVYKRVFSKAKKKKKKWDLVTQKWTTWSKEKHFRRRINKPVFKEDTITLNADLCHIQDAKKSNEFDLWIRIGSVFGNRFSLILPSRKHSHFNKIQASGFEMKKSIRLFKNKRGNYYVVLTHQKEIDDTPKEGKVVGIDVGVNKLMCCDDGEKHTQLGKEVKDKIKKLQTKKQGSRGYERTCREIKHYIGRQVNQLDWNDISALVMEDLNYKSMMKIKNKEDKYKKKATRKLLGHWNIQLLTDRIINKCELNRVHLEFTNPAYTSQECSRCHHIDSESRQGELFSCTSCGYQIDADDNGATNIRNRLLNHVGSVPSPAEQKRDELPLVDFGNFN

SEQ ID NO: 7022 - protein, 323 aa, Eubacteriaceae sp.
MLADKIAYYKLHGEMLRITPAAYKGEFEWLREVDSLALCSEQRFLEGAFKRFFESASVGFPKFKAKRSDRQSYTTNAVNNNIRIEGRHLVLPKLGKVRIRQHRQIPEGYRLKSAAVSRDSTGAFYVSLLFEYESEAAEMAPEDIQSIIGLDFSMPELYITSEGESAEYPKYFRASEKKIAKLQRELSLKEKGSSNYIKKKAQIAKAHKKAACQRKDFLHKRSRKIANSYDCAAIEDLNMHAMAQALNFGKSVSDAGWGMFIRFLKYKLEDQGKILAKVGKWYPSSKTCSVCGAVKKELGLSERTYACECCGSVMDRDAMQPST

SEQ ID NO: 7023 - protein, 209 aa, Moorea sp.
SSISRFFENCQKKVPGKKGYPRFHKHCRSVEYKQSGWKLSPDKKSITFSDKKGIGKLKLKGTWDLWRFDQKSIKRVRIVKRADGYYVQFCVSVDIDEQLEPSHSTIGLDVGLKEFYTDSMGNTQPNPRFYRTGEKRLKFYQRRVSRKKKASSNRKKAINRLGRQHLKISRQREEHAKRLVRSYRKKSAAFIVDRLCIKGGRFCCKAALF

SEQ ID NO: 7024 - protein, 541 aa, Moorea sp.
MQMMGRSDVRRPQDKLGSLTQKACLVLGDDNQGNQQPSVIVESVATSKQTTSPDKSPTCIPSSRKQKSSLTLGQDSTTKGKDLKPYWNGLCADISSQLLLPVENELPDSDLNSLSTWSVSTVEKSWFSTNLKAARNQNLPQIFSPSFMSSQAVSTDSENTAKKSKKIRVFLSAEQRSMVRQWFGVSRYVFNKTVKILENGEVKANWKAIKTGILNNLPEWCKTVPYQIKSIAIKDACTAVREAKNKYKKISQINRVRFRSRKNPVQSCYIPKSAVSAQGIYHTKLGVVTFTETLPENICDCRLTSTNGDYYLVIPHKVTSIKAENQGRVVALDPGVRTFLTFFSETSVGKIGNGDFSRIQRLCQHLDNLISKISKAKGGQKRRTRKAARRMIIRIQNLVNELHHKAARFLVDNFDVILLPTFETSQMSNRSVRKLLSKTVRNMLCFAHYRFKEFLKHKAQETGKIVVDVCEAYTSKTVSWTGELVNIGASKVIKSKVDGRTMDRDINGARGIFLRALGDTPWLRNQLALVSQDLLLVDSGS

SEQ ID NO: 7025 - protein, 397 aa, Actinomadura sp.
VSRYRLLLTPVQEAGLLEHCGHARFVWNLAVEQQSWWTPRRGPAPGFAVQCRQLTEARAAFEWLRGGSVTVQQQALKDFAKAMANFFAGTHRRPTWRKAGRHEGFRIVAVKPGDVRRLSRRTGEVKIAKVGWVRFRWSRPVPGGVKSFRVTRDRAGRWHVAFAAIPDPIPAPGNGAAVGVDRGLTVSAALSNGELLHAPGLTDREGQRLLRLQRRLARAKKGSNRRARIKTAIARLKARESDRRRDWVEKTTTRLAAEFDLIAVEDLNVRGMTRSAKGTIDVPGVNVAQKAGLNRGILANGWSALVRRLEHEAPGRVIEVDPRHTSQTCHACGHRAPDNRESQAVFRCAACGHAANADVNAANNIRDTAVGRTVAARGGTPLGGPMNREPQPDPLSA

SEQ ID NO: 7026 - protein, 375 aa, Streptomyces sp.
VVYNDALRARETARAEGLPFPKSGDLSKTVITRAKQTPERAWLAEVSAVVLQQSLRDLDAAYRNFFDGLKGKRPRMGAPRYKSRKDTRQAVRFTANARWSITRGGKLRLPKIGDLKVKWSRALPSTPSTVTVVKDSAGRYFASFVVETGPEEVLPETTPELGIDLGLGHFAVLSDGTKIDSPRFLRRAEKRVKKAQRALCRKEKGSKNRDKARIRVARAHARVADARREFHHQLSTKLIRENQAIAVEDLAVKGLARTRLAKSIHDAGWSVFVAMLGYKAARYGRVFVKIGRFEPTSQVCSQCGVKDGAKPLRVRVWACGACGAVLDRDINAAVNVARAAGLAVTACRAQVRRASVPAPRSEAGTHPTPQPATAR

SEQ ID NO: 7027 - protein, 382 aa, unknown
  TnpB Polypeptide
MLNKTFGCVRAYWNNLVATFNSYDKVTNPKPLFNTGKEFSDVFVYAKEVSAASLQQKFRDFSQFKNQFFNKKRKKKIGRPSFKKKGFGDSFRLPNQKIRIKDNKIRLEKIGWVKFDNHRQLPVDSRVLSITVKKDSVGDYFASVCFEYVWKPKINRMNIIESKKEVSTIKPNVGIDLGLTYLAILSDGTVFLNPKYLRESQSKLKKSQRILSRKIKGSVRWNRQRIKVAKLHRKIVRQRDWSHHNITTWIADNYNNVGIETLSIQNMMKNRKLSKSFADTSLSKFVNMLIYKVDDRGNEVVRLGTFVPSTKECSSCSHQQTVALSERTFKCECCGFAMDRDLNAAINIKKKTVGVNAVIANGDKRTLSNKKSLHPNVGVKQL

SEQ ID NO: 7028 - protein, 563 aa, unknown
  TnpB Polypeptide
VTRVLGGASPVLQVRDSRLDGPALLLYVRFDDRQRGTSAGRREVRRRPEVVPMRADGEFLPQSPRGNTFEGVHQRGHGHLRRVFDQQVHVVVLAVALDQYRPEVRAYLREHGLESVMVSTRQYRSPIFGDEDQVSVQRGNDGSTSSIVIFLVHRPTCYGGTVQLRYRYRAYPTPDQVQMLARTFGCARVVFNDALRARQDTYAAGEKVSDTEVQRRVVTRAKSTPEREWLGEVASVVLVQACQDARMAYRNWFDSLAGKRKGRKVGHPRFRSRKDNRQAIRLTRNGFGVTATGVRVAKVGNIRLEWSRELPSIPSSVTVIQEADGRYYASFVVQTQDQALPAATTEVGIDLGLTRLATLSTGEVIANPRHLRRTARALARSQRSLARKVKGSKNRRKAVHRVAVLHRKVRETRLDGHHKLALRLIRENQAVHIEDLNIAGLGKSNLAKSVHDAGWTILVRLLQEKADRYGRQVVKVGRWFPSSQLCGVCGVKDGPKPLAVRTWTCGSCGAVHDRDVNAARNILVEGLRVAAGLADTKNACGADVRPGPVLAVGREAGTHRSAA

SEQ ID NO: 7029 - protein, 396 aa, unknown
  TnpB Polypeptide
MLTATKIRIYPNKAQAEKLAKAFGSARWYWNNSLAETQKVYAETGKGLGQYQLNARLPKLKTEIEWLGEAHSQVLQSVSLHLSRAFVNFFERRAQYPQFKHKHRKQSIQYPQGAKIVDDCKVFLPKIGHVKAVVHREVTGIIKTATVSRDSSGIYFASILTENGLEAPAESFDGKILGIDVGLTDLAVTSDGSKFNNPKHLRQAQENLARKQQHLSRKAKGSNTRNKARILVAKAHERITNARKDFLHKLSTRLVNENQVIAVEDLHVKGMMSNHKLERAIGDAGWGAFTSMLKYKTARAGKGYIEVNRFFASSKTCSCCMHAQARMPLEIRMWICDKCGTRHDRDINAAINIRNEAQRMIAAGAVATANGGTVSQAKGRKSSVLARAVEVRSPQL

SEQ ID NO: 7030 - protein, 401 aa, unknown
  TnpB Polypeptide
MRIVMSHRIELQPNAIQESLFRQCVGASRFAYNWALAEWQRQYEAGEKPNEAALRRQFNAIKPVDFPWILDLPKAVPQQAIKNVGRAYQRFFQKQSQFPHFKKRGVHDSARLDNGPETFVCEGSRIRWPKIGWVRMRETLRFDGKPLSATLSREANRWFISIPVERERPEPVCESPATVGIDLGVSTAVTLSTGEKIDSPKPLKKHLRRLRQWSRRHARKQKGSHNRRKSARKLATLHARIAHIRQNWTHQTTTDLTRRFALIGIEDLNVRGMVANEKLARSINDIGFYELRRQLEYKAARSGSTVVVVNRWFPSSKTCSCCGVKAEVMPLSIREWTCAHCGAEHDRDINAARNIEREALATASGAGSHACGEEGAGRGRKTPAKPASVKQEINRGIKRYG

SEQ ID NO: 7031 - protein, 392 aa, unknown
  TnpB Polypeptide
MKNMTVTKVKFVEKSYKYRIYPNKEQKEFINYNINGSRFIFNQVKAKYEQDRDIIKQLTDKPYYLNRKIANMYLNQIRQEHDFLEDMGSTARQTAYDGLISGFRNIGKASASYPKWKSKKNPVQSYKVKDSIKIINGELKLPKIKDTVKMKYTRKIDGKILSATVTNDNGKYFVSINVSKSISKLKKPTGNVVGIDLGIKDAIVTSDGFKSGKILLDKLDEKITRYNQILSCRKLGSKNWVKTKTKLNNTYSKKKNIIQDFLDKITTDIVNQYDEIYVGDVNSQFTLKNKYLAKSTTDSHWFEIKRQLEYKSDWYGRKFKIVDESYTSKTCSSCSYIHRDFSLSIREWKCPRCGVTHDRDVNAAINIRTVGTTGIAFSKTNNIVSGLGISTF

SEQ ID NO: 7032 - protein, 396 aa, unknown
  TnpB Polypeptide
MIQRAYRYRFYPTTEQEQLLRRTLGCVRLVYNKALNTRTQGWYQRQERIDYKQTSAMLTEWKKLQSLQFLNEVSCVPLQQGLRNLQKAFTNFWAGHTKYPQFKKKRSGGSAEFTRSAFRWKDGQLWLAKCKESLPIRWSRPLPENCEPSTVTVKLDASGRWFVCLLVEDHTVKALPQLDKSVGIDAGITSLIATSDGEKIPNPKHFRRLRHKLRQAQKALSRRVKGSNNSEKARKQVAHVNAKMADARTDFLHKLTTRLVRENQTIAVENLAVKNMMKNRKLAGAIADASWSELVRQLEYKAAWYGRTLVKIDRWFPSSKRCGNCGHIIDKLPLDVREWDCPECGTHHDRDINAASNILAAGLAVIVCGANVRPDRHESIGQLRNTRKGNKQKPKS

SEQ ID NO: 7033 - protein, 537 aa, unknown
  TnpB Polypeptide
MARAYRRKDSTFETSPVKSVFLYGEPNKAKLHLLSRMQQRFCELANENIRTICETDGLFLQLVKNDKKDSVVRKLEKQFRPAGLNSAFCQAAFDYAFTRLSNRINTIRKDMYAEDQTIFTQSKVLFAMSLMRQSKKEMSAVMKDLANRKNGRNISFYKDCADTLDSLDEDEFRFLMQELVDSYAVHTAEYRIPHISRTEVPLDSRLMRIEESADIKAPYVISVTDPFNRNKRFIVPLNTSRHSLHKIKSNKMAGSVFVCVKNGNLRVGWAYTRSVKQPKTSVIRGVDTGITDVFHTSDGNAIGSMKPVLDFYHSTVEPSFAGLSDLRNKKRSISHYLRHHKALPEDVRRSLIQKMDRLDEMMQTMNAPYRKKRRYYGLLDQEIRKSVTGYMDGLKRDTLTVIERLDIKEFKKSRKVNGMFSCFARGKTQEALMRALNWKGYDFIEVAPEFTSQVCPVCGNLDRANRDGKKFRCTCCGYEDDADHVGSINIRERAVNKDLMDICEKHRYGKGLQNALKGYYMEQNKRFKKQHPQGMVS

SEQ ID NO: 7034 - protein, 256 aa, unknown
  TnpB Polypeptide
LDGLSYLKETNARIRDEATVRPLRRSENAVGVDLGLESFAILSTGEKIANPRFSRRQAKRLRHAQKALSRKAKGSNNRRKARLKVARIQVRIADQRRDFLHKLSTRLIRENQTVVVEDLNVQGMSRRVKAKPGPNSPGHYLQNGKKAKNGMNRSIRDASWSMFRTMLEYKADWYGRRLIVIDRWYPSSQTCSTCGKRTGCKPLNIRSWTCPYCGTHQDRDVNAAKNIQAAGLAVIACGDGRKGENRKQSSPEPIRQ

SEQ ID NO: 7035 - protein, 294 aa, unknown
  TnpB Polypeptide
MLDKAKNKKRKARLYLSKIGFFTLIVHRELPLERVSQVCVKLHPSGRIYIIFLVEESEVEEQPSEEPKKAVGVDLGITRLATLSDGRYLENPRPLERSLERIRLLQRRLSRKKFLSNNWFKAKRRLAKQYEHVKNLRRDLFFKLGVLLSQKYDVLVLEDLNVQGLIQKGVTRTRRMRLYDSSFSELRAVLEWEFRKRGKLVLPVPAYNTSRECFLCGRINQDLTLEDRVFHCPFCGFTLDRDLNASLVLLKRAGWVPPAVPVELRPLPPLPSLGLKKRRQGVALKQEATSVRAW

SEQ ID NO: 7036 - protein, 421 aa, unknown
  TnpB Polypeptide
MEMQRTVTIRLPDDADLRATLAAFRDVQNALSADAFNGGQPLNAIRLQRAAYHRVKGTLSSQMTITAVRLVAGVYAAAVKNRTRRVRAEAKRKAKFEAKGWRYKPRHIKPLGVCCFDRATAMFLVGVRGRDADFRRDGTLSIWTASGRKRLPYEVIPAHRPLFDAATEIDSVTVIERGGHLYGRVALTLDAPAPRGVVPVGIDLNETNALVAVDADDRELFISGLATKVRNRKTMQTTRRVQDKLTTKKAEKCDTRSVRRVLKRLGGRRSRRRRDFARVTAKRLVAWAPQDTVLVFEDLRMPEPAKGLTRGVALRRRLSQWQHGAIRRAVESKAQMAGLAVVFVNPAYTSQNCSRCGLRGIRQRHSFTCPSCGYSQHADRNAAVNIRNRFVQPRLDAVPSVAAEALPLAGEGKPHAEALGH

SEQ ID NO: 7037 - protein, 379 aa, unknown
  TnpB Polypeptide
MLRAYTFTANLSRPVHERLDAFLLEQKDLWNAALEERIAAYQKTGKSPSAYEQMKGLTEWRQDDPGSRRFSASAQRSALRRLDKAFQAFFRRVKKGEKPGFPRFKPAHRMRSFETEAFSIHTKGRVHSVSIKGIGKFRFKGELPDEGIAKVFRVVKTPRRVSVCLAWKLHDLRLVDARPPVGMDVGVDNLYALSNGEIAPAMKRDKSRVKHFQKRLSKAKKGSNNRIKKRSSYAKACQAERERTQGQLHELTARLIKDHGARWFVEDLDIQKMTAKGKASKRGLNRSILEREWGSFINKLTYKAESAGGWVEKVNAAYTSKTCNKCGGVNHHMGRTDPMNCVYCNHQDHRDVNAAKNMLLGNLCSLAGGASRHARSRAV

SEQ ID NO: 7038 - protein, 426 aa, Moorea sp.
VYRHACRYLVGIIYTHWAELGCLTADRVAWPTANQLTPAVERLMHQTAKRALIKYPQFNKTFYKFPSYYRRAVIAFAAGQVSSYVTRYSEWQSGTRKRRNANPPRLNADTGCYPALYKGQCYKLHGFDQVEIKVFNGLDWVWTTVKITGLRERHQVATNKMLSPSLIFNDKHCHLSVPFNCKPEKRKPEANVTAVDLGINTTATIAVVTHSGTVIHREFIHPGRDIDRRDKRLKSLSVRASLTMGKGGKLHKGFCSLTYLKCQRINNQIGHIVSKRIVQIAEKFNSEAIVFENLRGWKPKGGRKRSNLRQRFHGWLKAKIRNFTEMKWAELGGKVIEVVAAYTSKLAYDGSGIVKRNPKNYALATFSSGKQFNADLNGAYNIGARGVLKLTRRNDGEGRSSKSSGRPPRSWACLCDLWFRDNLRLA

SEQ ID NO: 7039 - protein, 394 aa, unknown
  TnpB Polypeptide
MNTVIIYQLNRLSPTQFRRLRDAQLEAAQVWNECMQTHKAARLAHQKWPGRQDLQKATKGRFALQSQSVQMVVHALLANIKTTQQLRQTHPQMRMHYPYKSKRFYPVSWPAQAVSREQGRVVLPMGRGRSSLILPVALPETSTSVTLVWNNGFELHVCVQRPQAERAPGNAHATVDLGEIHLAAVTTTTGKALIVTGRGIRSLKRQRTMQVRCITKKQARCTKYSRRWKKLQHAKNKQCKRAERRIRNQRHQATRKVINFCLQQEVGSLFIGNPHGVRNRKNGRHHNQRMSLWEYGKDIDYLTHKSKQARMSSFTGSERGTSSQCPSCGHKHKPRNRQWHCKVCGFKGHRDLVGSVNMHPLAFGEQVNFPRSFTYLRPSVLGKVVVGPTRPNVV

SEQ ID NO: 7040 - protein, 294 aa, Richelia sp.
VYTIIVTLIKRQGGEQVRASYQYRLKPNKEQRQIIDNTLDMLRYQYNYQLAQRFDWYERNRCSIDRCPLVCHLPELKDKPNRFSQQASLKHLKKERPWYKEIHSQVLQEVPKRVEISFDKWLAGDSNGKKSGRPRFKGVGQYKTFTYPQFKQHHFVNNKITLSKIGDVKVIVHRPIPNGFVIKTVSVTKKANGYYVTLSLDNKEVPTIKPDFNIDNIVGIDVGLIDFYVTSDNTRIAAPKYLRKAERKLKSVQRKVSRRKKGSNRRKKAIKQLGIRHKKVADTRKDFHFVRFVA

SEQ ID NO: 7041 - protein, 411 aa, unknown
  TnpB Polypeptide
VFDTVTVRTAYRCRAYPDQTQQQVLNRTFGCVRLVWNRTLAARHARWHHERTGTSYAQTDLALTAMKKDPDLAFLNEVSSVPLQQALRHQHKAFSAFFARRARYPRFKSRRSRQCAHYTRSAFSLRGGELRLAKMSEPLAFVWSWPSTDLTGLDPAMVVVSREPDGRWYVTFTVDRDAPEPLPEVGRTVGVDLGVKDFAVTSDGDRIPNLRHLERKARNMVRYQRRLARCQRGSANRAKAKAKVARAHRKVRDARRDFLHRASTRLVREHDVIVIEDLNVSGMVRNRRLARAISDCGWGEFRRQLAYKCERYSRRLLVIDRWYPSSKTCSACGHLLAELSLSARHWTCPACRARHDRDVNAAKNILAAGLAVARGSPGDACGADVRHSGFSRVRSAVKQEPWPVTARIPVL

SEQ ID NO: 7042 - protein, 493 aa, unknown
  TnpB Polypeptide
VKLSTLLVHSAPLGLDGQTRSVEHQFAMESGAVDPRLVHRTARIRLRVTRRQADRCYGLLRSAGDLWAWLLDTNRERLEQGAAPIVGYQALCRELTTRGPAGELSVVGARSVLGRYSDAWFQAAKRRRKGEPAGFPRRKRLLVPVRFHHQTFQLDGQRVRLPVARGRPALWVRIARPIPYPAAQVRAVTLVADGGQLWLAVTAAVAVQQHDLDPDRVAGVDLGIIHPYAVVAEQVGLLVSGRAIRAESFLHLRDQQARQAKTARRAPKPGQRGSRRWRRYRAKVRRVEARHRRRVHQAHHQAAGQVVAFAVRQRVGVLVVGDPTGITSHDAGRVHNLRLRQWRRTHLVQALSNKAEQAGIEVRLVDERGTSSTCPACRRRVPKPSGRRFRCPACSLHGHRDLVGATNIAATLGGGAISATLPTLVEHRRAGIVPARRDRRRHLHDQRRRQRSCLASGHPDAHKGSSGCRSSHATAHPASGEDQATRPNRANVA

SEQ ID NO: 7043 - protein, 408 aa, Acidithiobacillus sp.
MLIQKAVRYRLETTPEQENLLARAVGCVRFVWNRALSVQKSYLDHQCGTLNYAGLCDLLTTWRNTEAFGFLAESPSMPQQQTLKNLTRALKDAFDNTSVKKFPKFKKKFVHDSMRYPEPDHIRFDLKLADQDGRHVLPKIFLPKIGWVKFRKSCIIGGEIRNVTVSRAGGHWYVAIQTEKTVADPVRQATTAVGGDRNVADNVLTLSDGTMFLPVTAYRDLQKRLAREQRKLAHKVKFSANWKKQKAKIARLHQRIAATRKTILHQISTIISKNHAVVVLEDLKVQNMTASAKGTVEQPGRNVRQKSGLNKSILDQGWGMLKQMLGYKLQWAGGILLLVDPAYTSQACASCGAVDAGNRKAAVFRCLHCGHEAHADVNAAQNILARGLAPCEGLQSTAGHAGVACFAA

SEQ ID NO: 7044 - protein, 549 aa, Acidithiobacillus sp.
MITLHTRIARISPEQDSALSAYAERFNQVAHHLAADMAKEQRTGPSFKNAYLRRFDITARQFNAVRQYVEGLASNRVENLKNQENTLSGKIAATQKLLPKIEKQIAKARKAGESPEKIQRLENRLHQKKRKMGNLLERQSKVIQEMHRPFASGICFGGRSLFHRQYHLEENGYKDHAEWLSDWKAARVSQFFVLGSRDETGGCQGCVARIQADGTFLLDLRLPGENGERVTIGPLRFPYQEEKLRSALLAHAELSKKTLPKKTFTSKDGKSYSRIVYPDHLSALSWRFQQDRKGWRVLVSFDEPQVAVTTHAKVGVLAVDLNADHLAWAELDRFGNPVATGSIPCVTYGKTTEHAAAIIEGAAITLSNRAKQAGKSLVLERLDFSKKKGQITEVDGARYARMLSSLSYRKIHTAISVRAAKDGVAVKMVNPAYTSVLGRLHWADRYGLTVHEGAAVAIGRRELRLREVPAHRVVHGENVFKAPDGRNGHVTLVAPVRKRPRHVWSYLSQVNRKLKAALAAQREARKLDPPGHAVSDARKISNAPVVAVA

SEQ ID NO: 7045 - protein, 464 aa, Acidithiobacillus sp.
MITVTRTLQADIPDALRTICKAMGYVRADIWRRYGALGTIGKSANDIRKEISAAGLYSTLPVDGTIRNETTKDIVNDVLLYKAAAMQKVRKAIAARNGDEAERKRLFTLLRNDQWLTDNFLHRQMRKHFRHGKSSVANQFVVRSDKYATEVVDGHLVIVIHIAAKYGAPIRLTTTSSGKNVTLSGSNLRVVVKDGFTEIHYAATKGDGRLCGDQMMGIDKGYTEAFTDSDGVAHGEAFGAVLTEYSDQTSATGKARNKLYALEKKHREAGRIVKADHIKRCNLGRIKIDGRRDHTRKRLRTIAFQAAHTIVDKATVVVSEDLTSPIAKKQVWKQYNRRMSAWAKGVLADALDSVCTQRQAEHRLVNAAYTSQMDSVTGLLEGKRVADKFYRANGDVLQADHNAALNVLRRYEDTEITRFTPHQEVRRILLARSPAQLSVKRHELQAKTYQPCADKSSVQVCTGL

SEQ ID NO: 7046 - protein, 459 aa, Acidithiobacillus sp.
MQKVTRTDRWSLVATEEQRRMVLSTTALYRAYCRALIGVLWVHQKEIIAAPFPVAVVERLIHATARNPNPQYHYFDRHFPKFPSYLRRAAIMAALGQASSFSTRYDQWQGGIRKRRDALPPRRTGENALNPPLYRGQCIRFDEQYQHAEIKVWSGTDWIWTTLRIAAKRHRHEAPQNKALSPMLLADGSGVKLAIPFEVPVQFPSRKAAQRVCGVDLGIRKTATASIVSADGTVVARQFFHRGADIDRRDKGLVTVRSKARLTMGKSGTLSKGFCRAVYRKARHRNLDMAQRLSGEIVAFAQDHGAQVIVLEHLKQYRPRAGRKGSTLRQRFHGWLHSLLARRIRERAEESGLLVEFVNPAGTSEHAYDGSGAVKRDARNWSWVTFATGKRYNADLNACYNIAARFFAKMLGLTGRNAQACVRGKSSATQPRIPVTLSTLWRHAQAMATEHEAPTTAPA

SEQ ID NO: 7047 - protein, 416 aa, unknown
  TnpB Polypeptide
MTKKRQKKPKGLHKSINNIKLELANTCKLNLLNELGSAYLTLCQNYIDYIFDNEIKKVSSYGNLPDINSELSERYKRCAWQQAASIMKSFYANNRENKPILKNIKIQGNVNVIQIQGSKTKSFEYWLRISTLEKGKPIFVPINIHKYGKKVLGEGQLCGGVTLSRVDGLWYATLAVSISKKKPIASLNKIVGVDLGIKSLFTASTGNFFGQFSNNLKKLVDKADSVRRRKQKLNACLIQGGKPEVDLSSPKIIATVRNEIGRAANQLVNTLEKDSLVVLEKLNIKGMKFKSKRMNRILKASKIGFALDKLKEKLDYKHIRYASVPAAYSSQECNKCGYVHKDNRRTQERFKCGYCEQTENADVNAGKVLIKRFGDAELLNVDHFREVKTILMERFYRRFPDASSTSGGLEPGTVPI

SEQ ID NO: 7048 - protein, 212 aa, unknown
  TnpB Polypeptide
VNNLATVVTNDGDNPILISGRKIKSINQYYNKITSKKKALLPYNVFTSKALHRLWLKRNNKISYEIHKITKFLANYFDERDVSKVIIGNNSGWKNGINIGKRNNQNFVNIPYTKFINQLAYKCKLLGITVIVREESYTSKASFLDYDEIPNYNDEIKPKFSGKRIKRGAYKSKTRIINADVNGAYNTMVKEDTNYIIGNREQLGFNPILIKL

SEQ ID NO: 7049 - protein, 399 aa, unknown
  TnpB Polypeptide
VNHRGYKFRIYPAPEQEAVLRKTIGSCRFVYNWALAQRREAWVKEKKSINYAKSCKALTELKGSPEKAWLNEVSSVCLQQSLNNLDVAFGNFFKKRAAYPSFKARKNGGSARFTDNAFRLKGDYLFLAKIKTPFKVVWSRPLSNIPNSVTVSQNASGQWFASFLCEEEIAKLPPSDKRIGIDAGIENFATLSDGRKFQSPKAIRKLRKKLARLQRRHSRKKKGSKNRERARKKVARVHQRIADVRKDFLHKLSTQLVRENQAIALEDLSVSSMVKNRKLSRVISEQGWREFRTILEYKCEWYGRELLIVDRWFPSSKTCSCCGAKASFGLEIRQWTCGACGASHDRDVNAAKNILAAGQAVSDCGVDGRPTKNYVLRGRTQRSSKTKARASKTTSLKDE

SEQ ID NO: 7050 - protein, 400 aa, Bacterium sp.
MLKSYKYKIKPNEEQKVLLNKHFGAIRFAYNHFLNERKVEYETNKQTLNYNDNSAALTKLKKKEDFKWLREINSQSLQHSLKGLDDSYNSFFKKRTGFPKFKSKHTKNSFKVPQYVRVVDGKLIIPKFKDPIKIVQDRKFKGEIRQCTLSKTPTGEYFVSILVEGDHKKFQKTGKSVGIDLGIKDFVITSDGYKYKNNRYTKTYEKKLKDNQKHLSRKVKGSNRYNEQKLKVATIHKKITNSRMDNLHKVSTQLVKKYDTIFLEDLNIKGMVKNHKLSKHISDMGWGKFITMLEYKAEWNDKQIIKIDRFFPSSKQCGSCGWINQDLDLNTREWTCPSCKTKLDRDLNASKNILKEGIKTLSSGTDDYRRGDEIRPVLTGTIVEASKKKGLVPGNPLVFS

SEQ ID NO: 7051 - protein, 406 aa, Tolypothrix sp.
VLHKAVQVRLYPSEQQQILLAQTFGCSRWWWNYALNKSIETYKETGKGLSQVALNALLPKLKKEKDTEWLAECYSQVLQATTLNLTTAYKNFFAGRAKFPRVKSKNGKQSIQYPQNVKIVKGSVKLPGNVGVVKAKIHRPIEGTIKTVTVSKTPSGKYFASILTEVKGENPIVSEGKIYGVDLGLKHFAVVTDGEKVSKYDNPKHLARHEKNLKRKQQKLARKKKGSNSRFKYRKVVAKVYERVSNSRQDFLHKLSYKLVSDSQAVIVENLHVKGMVRNHNLAKAISDCGWGTFTNFLAYKLQRKGAKLVEINRWFPSSKLCSNCFYQMSEMPLDVREWACPYCGTDHDRDGNAAINIRTEGIRMLKAEGSAVSAVGGEVRPKMGRKSNLGHSPLITEAPSAYAAG

SEQ ID NO: 7052 - protein, 466 aa, Tolypothrix sp.
LLLNYQYRTYPSTNQKLQFNNWLRVSQYWYNKQLGERFDWYENNRCSIDSCPLICSLPKLRENPDFYSQKKQLPLIKEDLVAVQHSGELLDFTSVPSQTLQDVSKRVDLAFKRFLQGDSNRKRSGRPRFKNSARYRTLRIEGQAITVERVEKDWLFLSISKLKGWLKVRLHRPLPEGFILKNMLLTKKSDGWYATICLEDPTVPVFNPDEVIPTWENTLGMDAVLHENDYLATSEGSKLPSLKSFRKSEKRLALVSHRKEKKRKGSKSRRKLAKRQGREHQRIARARIDHAFKTANALVRTGKKVFVHEDLNLKALSKCNKAKLDEDGKFLPNGQRAKSGLNKSWNDAAFGQFFITLEYIAGKAGARVIAVNPAYTSQLLAYRDEIVFTDCDMRSYWDAKLSLNVDRDINAGINIKRVGLGLFPMLKRRKGNLVVGDSTTNSTLKEVLAVLKNAPEAYTAPVLRSV

SEQ ID NO: 7053 - protein, 400 aa, Tolypothrix sp.
MRTAYQYRLRLTRQQQATIDCWLELCRRQYNYRLAERFSWYEQNRCDVNACSLVCHLSELKDRPDFYWQKRDLVNSKKLFPEYKDLPSHTLQDVIARVEKAFDRWLRGDSNGKRSGKPRFKGQGRFRSIAFPDPLKLEHINGRFIQLPKIGKLKMILHRPLPDGFKIKTAAIVKKADGYYITLSLQDATVPVLAPDTPELDNTIGIDMGLKSFLFTDAGEEIEIPQHYRKAEKRLKRLQRSQSRKKKGSNRRKKAIKRVSKAHMLVSNQRKDFHYKSAKKLLSQGKHVAHEKLNIKGIARTRLAKSTHDAGWGQFLQILSIKAERAGLLAIAVNPNGTSQNCSGCGAKVPKELKDRTHACPKCGLTLDRDYNAAINIKYLAVGHSVNKAQVTSDAIAGVT

SEQ ID NO: 7054 - protein, 228 aa, unknown
  TnpB Polypeptide
MRRLNRELHRRKLGSRRRGQTRRRLARVHARAANVRRDALHKLTTILATQHGTIVVEQLNLAGMVRNRHLARALADAGLAGLRRQLCYKTDWYGSRLVVADPFYPSSKTCSACGWVKAKLTLAERTFTCEACGLRLDRDLNAARNLAMLAEHVAQSGWETQNARGADRKPQLAGQVAMKREAGGPGGREAGNAAFRKDAATRRSAAAGCPSASPWSASAGRDQAATVW

SEQ ID NO: 7055 - protein, 537 aa, Paraburkholderia sp.
MQATTQTRLQLPSVDALLLDSMAGLYGSMKRKLYARVAAEGGKAKSHKTAFCREHGISARMFNALAIELQGLIDGTRELLKEEQKDLNRGIHRMERQLATHQAQLDEIAVDRLRLKSPREAKLRRTAHQRGVRLMRLRARLVRVGQRLDANVPGICFGTRKLFGQQHHLALAGFSSREAWQCEWQSSRSHQVFFVGSKDETAGNQLCQLRKTDDRTYSLKIRIPDRLLATGDEKYLVINNVAFAYDHGALDGALEAGTALSWRLLRDERGWRAFVSFNHPPAERVTLDTEYGAIGVDFNVDHLAVTQTDACGNLLQTRRFALLREDARSGQRNAALSDALTAAVNWAKETRKPVVAEDLDFAAKKKAMAQLSPKGARMLSGLLYAKYRQLLRAKCFRAGVQLILIDPAFTSTIGAVKYASRRGWSVHAAAAGVIARRGQKLTERLPRAGTDVRVPVRSGHHVLALPARMAGDSRGAAWRGVHAAYRGVVREQWLATRGGKPPRSAKGTHGGGVCAAPLSRGNRLPCESKLREQICAL

SEQ ID NO: 7056 - protein, 539 aa, Paraburkholderia sp.
MQSTTQTRLYLPEADVRLLDRMGELHGSMKRKLYARIAAHGGKAKSHKTAFCREHGLSARMFNAIAIELQGLIDGTRELLRAERKDLVKGILRLERQLAVRRGQLEEIGADRLRLKPQREAKLRRTVHQNRIRLARLKAQLARVERRLERNVPGICFGTRKLFRQQHHPEAAGFDSRDAWLRDWQASRSHQIFFVGSKDETAGNQLCQLRKTGDAGYSLKIRVSDRLLSPDEGKYLVIDEITFGYDREALDAALEAGTALSWRLHRDERGWRAFVSFDHRPAERVTHDTLFGTIGLDFNVDHLAVTETDAFGNLLRTKRLALLRERASSGQRSAVLSDALTAAVAWAKDARKPIVAEDLDFTARKKAMAQLSPKGARMLSGLLYAKYRQLLEAKCFRAGVELIKIDPAYTSTIGAVKYASRRGWSVHAAAAGVIARRGQKLTERLPRAGTVTRVPVRGGHHALELPARKSGDSRVTGWRGVHAAYRGVVRERWLATRRGSPRRSVKGTHGGGARAAPLSRGDRLPCEDKLHVQICAPSN

SEQ ID NO: 7057 - protein, 537 aa, Paraburkholderia sp.
MQATTQTRLQLPQADALLLDRMGELHGAMKRKLYARIAAEGGKAKSHKTVFCREHGISARMFNALAIELQGLIDGTRELLRDEQKDLNRGIRHMERQLATKRAQLDDIAADRLRLKPPREAKLRRSAHQHGIRLMKLTARLARVGQRLDANVPGICFGTRKLFRQHHHRELAGFSSHEAWLCEWQAARSHQVFFVGSKDETAGNQLCQLRKTDDRTYSLKIRIPDQLLATGDEKYLVINHVAFAYDYEALDVALEAGTALSWRLHRDERGWRAFVSFNHPPAERVTLDTEYGAIGVDFNVDHLAVTQTDACGNLLRTRRFPLLREDACSGRRNAVLSDALTAAVNWAKETRKPVVAEDLDFAAKKKAMAQLSPKGARMLSGLLYAKYRQLLQAKCFRAGVQLILIDPAFTSTIGAVKYASRRGWSVHAAAAGVIARRGQKLTERLPRAGTDVRVPVRSGHHVLALPARMAGDSRGAAWRGVHAAYRGVVREQWLATRGGKPPRSAKGTHGGGVRAAPLSRGNRLPCESKLREQICAL

SEQ ID NO: 7058 - protein, 426 aa, Paraburkholderia sp.
MQSTTQTRVHLPEADVRLLDRMGELHGSMKRKLYARIAAHGGKAKSHKTAFCREHGLSARMFNAIAIELQGLIDGTRELLRAERKDLVKGNQLCQLRKTGDAGYSLKIRVPDRLLSPDEGKYLVIDEIAFGYDREALDAALEAGIALSWRLHRDERGWRAFVSFDHRPAERVTHDTLFGTVGLDFNVDHLAVTETDAFGNLLRTKRLALLREHASSGQRNAALSDALTAAVDWAKDARKPIVAEVLDFSAKKKAMAQLSPKGARMLSGLLYAKYRQLLEAKCFRAGVELIKIDPAYTSTIGAVKYASRRGWSVHAAAAGVIARRGQKLTERLPRAGTVIRVPVRGGHHALELPARKSGDSRVTGWRGVHAAYRGVVRERWLATRRGSPRRSVKGTHGGGARAAPLSRGDRLPCEDKLHEQICAPSN

SEQ ID NO: 7059 - protein, 481 aa, Moorea sp.
MQLGYVYKLIPNAQQEATMNQWLEMLLAHYNYLLRDRNDSYEQVKSPKLGNYCDLKTRGEACPLTCSVNKSSSIGYPWKNSQKNPQRSAYEIQSSNLPTLKKQRPWYKAINSTVLQQMLRQLDVAFSKFFKGEAKYPKPKRHSRFRSFKYAPGQVKIDVNRIYLPGIGWMRFHYSRPIPDGFTMKSVTVRRKTRGWFVSIQIEDKSVPLPPVKTTNEIRHDRVKGCDLGIKKLVSVSSGETVQNPANSKKSKRQARRLRLRQRAASRKQKGSNNRNKSFSKVASLHERVTNKRSAYHWETAKNLTNGADALVFEDLNIKGMKSRCKPKPNENGGYDRNGQSAKRGLNRVISDAAWGELIKKVEVVAAKSGIPVIKVNPRHTSQECPRCHHISADNRNGEKFVCTECGYHDDADVNGAVNIRKKGLKKLGINLTQLPSGRGKVTPMETTVAHDCAWESPSLYRVGRFNEIHLVKCVCLGIFS

SEQ ID NO: 7060 - protein, 385 aa, unknown
  TnpB Polypeptide
MYTTVYKLFRAPRNRHLKRKTWIAHTIWNYFLGWQRTRYSLGLPYLSYKEMSRAFTILRKSHPDMFAHWRELDSWAARRVLKRLDEGYQRFFKRIAKRPPKFRSFRKPYSFTMSPSGYKFASPIAGDKGFGIYSDRVTIMGRTYRFYLSRPIFGTIKTVTIKEDALGDFYMSVVTDHIQSYLKPMTGNAAGFDMGVKTMLTCSNGRRYESPHFYTESINNVRTANRNLSTKKRGSNNRERARRHHARMHRKIARQREDHHWKLALELVRRFDVLFFETLNLDGMKRLWGRKVSDIGFYAFLRKLKWQAKKRGKRIECIDQWQPTTSICHVCDTRVWLELSDRTWTCDHCKTLHDRDINAAINILKVGASTFGVEGVRLAIASTPC

SEQ ID NO: 7061 - protein, 216 aa, unknown
  TnpB Polypeptide
LQKRRIHGDDTVRVRDPSTRTRPTRAYRRIGLLLPRPVRVQRRRTSRLFAFYRRMEPRLMREQRRLSHMVKGSGNWVKQKRRIAKLAAKVGNQRADFLHKTANRLAARYDCVGVEDLDMKNMSQSLTLGKSTMDNGYGMFRTMLAYKLERQGKQLVTVDRFYPSSQLCSDCGYRNKDTKDLHIREWTCPDCGVWHDRDVNAATNIMHETRRLMQER

SEQ ID NO: 7062 - protein, 418 aa, unknown
  TnpB Polypeptide
LNKTYRLPVQQYDLARRLSRQSGRIYSKVVSTIFDIKSRKDFWLKEGDMKKYIKLYAEDIGLHSQSKQGAVEQYYTALDSYFKALNNHNNPKPPYKTYKFQKVVYKKSAIKLKNGYLRLSNGRGTEPLIVDVPDINQSPKYAELIYDNVQDKYFLYIVVDVENKEIEYNNDDVLAVDLGQIHPTTTFDSKGNCKIYNGGKLNSFIRFRNKELGKLQNKMSRCKKYSKRWKKLNSAKRKLLSKSSNKINDVLQKYTSFLIGYCIKRQLGTIVIGDIKGIRDNINFDKKSNQNLHSWVFKKLISMIRYKANSVGIKVEYIDESYTSQTCPKCSSKYKPSNRNYKCSNCDFKYHRDGVGAMNIFKKYTNGSLKDKSIRLEGDLTPPIGLRYDSNSCYLADWNTSIFNDAGYSSDTLSEEAA

SEQ ID NO: 7063 - protein, 402 aa, unknown
  TnpB Polypeptide
VRRSHKFLLRPTGKQEATLNACLEDTRQLYNAALEERREAWRMGRHQVTFYKQDAQLKEIRAEDPERYGRWSFNCERAAIRRLDRAFQGFFRRVKAGDKPGYPRFKGRGWWDSIEWPQGNGARWDSVQHPTVTRVYFQGVGHVRVHQHRPVKGRVKTITAKREGRRWYVVLSCDDVPAESLEPTGTAVGVDMGVESFLTTSGGAHVPNPRRLAAAAGQLAIAQRDLARKKRGSSRRKKAVAKVARLHGKVRRQRLDHAHKTALALVRDHDLIVHEDLKVKNMAARPKPCPDGNGGHQPNGAAAKSGLNKSIHDAGWGIFLRILSAKAESAGRTVTAVDPRYTSQRCAECGHIAAGNRVTQAVFRCLGCGHQGHADVNAARNILRAGLALRDAQKAAREAASL

SEQ ID NO: 7064 - protein, 392 aa, unknown
  TnpB Polypeptide
MQRTERHIIVNSEIIDGLCFKSKNLYNLANYHIRKEFINNGKWLRYGKIDKLLQVTDAYKVLPSNTSQQILMLLDKNWNSFFRAIKAWKRNPEKFLGRPKLPKYKHKVNGRNIVIFTNYQAKLKNGKIYFPKKSGLKPLQTNVDNICQVRIVPNATCYVIEVVYKKEIKNVLLDNKAYLGIDLGLNNFAACINNIGLNPFVINGRIIKSINQFYNKKKAELQSFIGGEGTSKRINHLTHRRNNKVDDYLHKTSRIIINYCVQHGVKTIVVGKNKNWKQEINIGKRNNQHFVSIPFAKLINQLKYKGEEVGIIVEETEESYTSKCSFLDLEIIGKSEKYLGKRIKRGLFKASNGKLINADVNGSYNILRKVFPNAFSNGIEGVGLHPVKVNIA

SEQ ID NO: 7065 - protein, 378 aa, Bacterium sp.
MKSTRAVKIKITTENPRFQDVAENFRDAANWLSKIVHARKKPGTAPSLHKEFYATIRDKFQLPSQVSCSLFRHVVGTYRSMKSNGRWSLAVYKKLIVPVVYNRDFRIVKGKLTFWKVKVEHKSRPIPKGTWRDSKLKKVGNQWWLILVVGVEIPEPKQSGNIVGVDLGQKNTLVAVETKSNKTLYVRGGILEHRRLCIRQTRAKVASVGTRSARRLLRRLGGREKAVTQELMHVASKRLVAFAKSVDARAIAVEDLNGVRKARTSRKQRARNHRWPYALLQFFVGYKTEAEGMTLEFVDPAYTSQGCSRCGHTEKSNRDGRSFRCGSCNWQDNADRNGACNIASRSILRRQASEGRAMCQLAYSGDGDHGVSQSQTRD

SEQ ID NO: 7066 - protein, 388 aa, Nocardiopsis sp.
MVVQLKLKPSPDQATVLESTLHALNQQANRVSDVAFSERAFRNYALRRLVYAEVRSAGIGSQAAQHVIKKVADAYATLRANVKAGNYGKLGSQRRKRVESRPITFRIDAAHSYDQRNLSFAVDAQTISLWTLNGRMKDVPFVCSPDALKMLAEHKRGESDLVLRDGMFYLAVSLEVFDAEVYDPDGFIGVDLGIANIATTSSGYTAAGRKLNRYRRREQRLRAKLQAKGTKSAKRLLKRRARKEQRRAKDTNHVISKRIVAEAERTSRGVALEELTGIRQRVRLRKPQRVALHSWAFAQLGEFITYKARRAGVPLVFVDPAYTSQTCAECDHVDKRSRVDQGTFICRGCGVVAHADRNASRNIACRGGVVWDAGRTSHVPPANPEVRG

SEQ ID NO: 7067 - protein, 527 aa, Microcoleus sp.
MKAKSKASKMKQDKDSTMSSPTSTVQLELPLFATVASVQPSSETTSPDKLNLCNSSTQTPKSSKTSAQESISRGKDCKPYWSDLCAANSSRLLLPVATDCAGSDLNYSSSWHNKTVEKSWFSQTLFIAQKPNSRPIFLPSFTSSVAECTVSGATERKSRKIRLFLNPEQKALIKQWFGVSRFVYNTTIKYLQEPGTKASWLTIKTGILNNLPEWAKTVPFQIKSIAIKDACSAVKAAKQGFGKDGQIRRCKFRNRKDTKQSIYVPKSAIKGCGVYHSILGKCLLKESLPIAFSDGRLTLAYGEYYLIVSEEVQQVKTDNQGQLVALDPGVRTFMTFFSEDAYGWLGVDSNLHIQKLCFRLDKLVSKISRATSRQKRRFKKAASRLRSKIKNLVKELHHKVAKFLADNFDVILLPTFETSQMVSKSRRKLRNKTVRQMLTLSHYDFKTFLKWKAWEKSKLVIDCNEAYTSKTVSWTGEIVQNLGGARIIKSQATGLKMDRDLNGARGIFLRALVDTPLLRDSLNLSVC

SEQ ID NO: 7068 - protein, 478 aa, Actinopolymorpha sp.
MLSVPGEMLGIVILSRERAPRYGLGRLVVDGLDAAVCRKARFAFDPSPGQERGLLALLAACCEVYNAGLQERREAWRRANKSVSLFDQFTQIKGLRGLRDDVLAWGIQRSVGRCGGWMQAFAGFYRRVKAGRAPGYPRFRSRRRFHTASWDEPTSWKVNIDRRLLRIQGVGTIRLPKSAGRQLARLADRGGVPVTLSVTRRRAGGTSEHPKWVWRASVGFKDVTPLRAASPSDLGNGRESGAGRVVGADRGVAVALATSEGQLHVMPGWMGQARETIAALQRRQARKVKFSRSWRALARRIAREYRKVAQRTDNWARETARQLVAQAEVVALENLDLASMTRSAKGTIDNPGRNVAAKSGLNRALQDVALGRLATWVCVKAEEAGRRAWLVDLAHTSQRCARCGHIDPNNRPARDVFVCQRCGHTAHADLNAAANIADRGRACETAWHQAGSPPLPRPSPRLRRRRRTETARPRLAPA

SEQ ID NO: 7069 - protein, 408 aa, Actinopolymorpha sp.
VIVMQLRYGFRPYPNGRQCAALARAFGCARVVFNDALRVREDARAAGLPYVPTAELSKQLTAAKKTAERAWLGEVSAVVLQQSLRDLDTAYRNFFDGLKGKRPKMGAPRFKSRKDTRQSIRFTANAGWKITPGGKLRLPKIGDVSVKWSRTLPSTPSTVTVVKDSAGRYFASFVVETGPCEVLPETTPEIGIDLGLGHFAVLSDGEKINSPRFLRRAERKLKKAQRALSRKAKGSKNRDKARHRVARAHARVADARREFHHQLSTKLIRENQAIAVEDLAVKGLARTRLAKSVHDAGWSAFTAMLEYKATRYGRAFVRIGRFEPTSQVCSVCCVKDGPKPLHIREWTCGACGTVLDRDINAAVNVAKAAGLAVTACGAQVSPGLVPAQRGEAGTHRDGQPTVVGIPVL

SEQ ID NO: 7070 - protein, 359 aa, Planktothrix sp.
VWRKWLAACKYCFNQAIAYQRQNKRVGKLKLRNIIMQSDLPEWVKETPCHIRQNAIFDAHKAYKTSVDAKFRSCRERQQTIKFNECNFSSGCWYPKLTKGLSFITSEPLPENCSNATQLTFSHQRWFAIIPQEVVVERKERSGIIALDPGVRTFLTGFDGSRFVEFGHGDIGRITRLCQHLDNLISRTHLACRKQRRRMRQAAQRMRNKIRHLIEEAHQQIVCYLTDNYRVIFLPTFETSLMVAKVRRKMRSKTVRSMLTWAHYRFELFLTQKAEMTNTIVITGSEAYTSLTCTSCGHIHQSLGGAKVFKCPSCGHTLPRDMNGALGFMLRALRDTAFTITSDGVAIAALSGNFPYCVA

SEQ ID NO: 7071 - protein, 478 aa, unknown
  TnpB Polypeptide
MVKKEKKDVEYTVVKLHVNNNNNLKTYFEKMAFASNNLINVVTYHCRQWFFYTQNLYYIENDIKDVKFYKYDSEKIDDLREHMYIYNQQLLQRNKKPVDFIKYGLDAYFLHYYFKSINQIDYNCKDLSSQTSQQITSKVTQSFKDFKKALFDYIKHREKYKAKPELPRYKKKKSMSGFYFTNQVCTIKNNQINFPKTKLKLPFTYQCKGRYVRTEVIRKYNEFELSIVFEQDPKPALKETDVVAAIDLGVNNLVTITTNKSQSLLVKDKSLKSINQFANKEIARIHSAQTTLKPNSKIVSSKQLMKVYQKRNRRIEHFMYCTASIVLKFCLDNNVSKLVIGKNKDWKQDVKLKKDIKQNFIQIPFNKLIFKIKEKLSCYGIEVLEQEESYTSRASALDFDEIPVYNGKSANVEFSGRRAKRGLYKTKNGILINADLNGSLNIMRKAFPDIEFETTDLRYLQNPRVIKNIMNSQRTAMG

SEQ ID NO: 7072 - protein, 413 aa, unknown
  TnpB Polypeptide
METIEISRTIKSRIIFQNSKDVSKMVDSQEAFRQGCNFVSEYMFDNNFPMNTTTLVKLLYNDLRSKFGLKSQMAQSCVRTVIARYRSVQTQLKKERVWDGYKKDNHGKEVKNYVNKDLEFLWKPIEFKRPQLDLVRNRDYSHKDDNTMSLNTIHGRVIVKPIFNGWEQYFDGSWTLGTAKVLKSGKHWYLHIAVTKEVEEPEFKPSHVVGIDRGLRQLLTIYDEKRKTTFVNGKAILQKRRHYKRLRSQLQSKNTRSAKRRLEAIGQRESRWMSDVNHCLSKTLVNHYGSGTIFTLEDLTNVTFNTVSKRAKKHRYEHHSWAFYDFEQKLAYKAFDKGSQVVSCDAHYTSQRCPKCGYIDSKNRNKNKHEFCCKACSYRTNDDRAAAMNIQFLGTLYNSGNPKPAFEKLKLNN

SEQ ID NO: 7073 - protein, 403 aa, unknown
  TnpB Polypeptide
MATVLKGIKLRLYPNKEQERDLIQMCGNDRFLWNKLNDMLQSRYENNKDLYNGDTSKEAKKKRRHVILSTYDMNYLLPLMKVEFPFLSYSDSSALQVVTSNLNQSYLNFFRKPEQFGLPKFKKRGVCKLSYTGKSAMFSILSKRYVRLPKIGPIRTSKTGVLKDVKIKRYTVEQDSTNRWYITFQVEVNVDEFVKTNKTVGLDLGLTDMVIGSDGFKSGRFLVSELENEIKSKQKIYSKRRHYANVKIAMDKNKKVINPRTLLDFINVEKARVTKAKSQKRLANKRKDFLHKLSTNLVKTYDIIVIEDLKSKNMMKNHKLAKAIGNASWYEFRTMLEYKCQWYGKQLIIVPPHYTSQECSNCHHNSGKKTLDIREWTCNNCGVHHDRDINAAKNILIKGLMTL

SEQ ID NO: 7074 - protein, 380 aa, unknown
  TnpB Polypeptide
MIITRTYRYKLYQSKKNKYLHDQINIAGIIYNHCIALHRRYYRLFKKHLNQYQLMQHIAKLKKRPRFEYWNKVGSQAIQDIVQRIEKAYQLFFRNLKAGIKTSPPGFKKVKKYKSITLKQAGWKLLQGNKVCIGKRIYKYSKSRDITGAIKTVTIKRDNLGAFWLCFSVQEDIITPNRTGNIAVGFDFGLKTFLVGSDGSEFNAPLYYSQALARLRQVQKQLSSKRKGSNNRKKARLALARIYQRVVNLRRDYFFKLAHELTDRYDRIFLENLNIKGMQRLWGRKVSDISHSTFVGILKHIALLKNKEVVFINRFYPSSKTCHVCGHVNKRLALSDREWTCVCGITHDRDKNAAINILVEGASSIGLGDVRPLVKKAVSV

SEQ ID NO: 7075 - protein, 385 aa, unknown
  TnpB Polypeptide
MEAATIRKTFKYKLQPTPTQAAQLGAALRVCRELYNAALQERRDAWKMCHVSINYYQQKAQLPAIRAYREDCAAIHSQVLQDVVLRLEKAFKAFFRRLMNGEKPGYPRFKGRHRYHSFTYPQWGNGASLVGDTLLLSKIGHIAVRWSRPLEGTPKTVSIIEEADGWYVCFSCADVPVQPLPLTGEETGIDLGLESFLTLANGEQIANRRHSRKAENRLVKAQRRVSKRKKGSQRRSKAVRLLKRAYQKVARARRDFQHKTARTLLQQYDTVYFESLQVANLAQNPHLAKSIYDAGWSQFCAILVFKAENAGKQAVAVPPAYTSQVCSGCGALVLKGLSVRWHECPDCGASLHRDHNAALNILRVGQTHRGAATGTRGAEPRIPAL

SEQ ID NO: 7076 - protein, 379 aa, unknown
  TnpB Polypeptide
LKTHQKHNGLHSQSSQRVLEELAEAFNSWYSSDDDRDNPPGYRKCNYYDDGGRRVHEEHPRSTVTWKQNGIRHDTKNNRVRLSRGANHKEHPRAWEYILVEYETRPGVTVENLQQVRAVYNNAKERWELHLVCKAEIETPTAPGEETAGIDLGISTFAAVAYSTEEADLYPGNRLKQDGYYFPKEIAKCDDSGGERARRLHHKWSERRTHFFHSLAKHIVQRCVEKRVGRINVGDLEGVREDENGDSMNWGRHGNLDLHGWAFDRFTPILTYKAKVEGIDVVKVSERDTSKTCCICGKEDDSQRVERGLYVCESCDAAFNADVNGAENIRLDINDKSNSESAPVLGGDRSTGWLAQPGVYLHDLSCGFQPQTEVVDSKL

SEQ ID NO: 7077 - protein, 410 aa, Peptococcaceae sp.
MSKCKNNQQKQPKTKDFDTLIEKFPLHLTSEQIILARKLQREAAKVWNATCAVHRIVYTKHHCWLGEGAMKAFVKGKYSIHSQSAQAVVETYFECCERTRQLHEKGITDWRYPHRKKYFFTVTWKTLGITHKGQILMLSNGRGREPLVLNLPKRHSTAVIKLVQLVWRRNQYWLHVTVEKPALQKVQGNVIAAIDPGEIHACTVTDGKEALVVSGRLLRSLHRLRNKVLRKFQKTISRTSSGSNRRRKLLAAKYRFLNNIERRIEHAMHTISAIVAKWCFERNVKTVYIGNPEGARKKDCGRKHNQRMSQWAFGELRKLLEYKLKRHGMKLIPDEETSTTGACPACAEYTKQTGRTYKCGKCGFTGPHRDVIGASGILDKSVNGKFTKGRKLPDKVEYTRPKVVRPKKAA

SEQ ID NO: 7078 - protein, 393 aa, Pyrinomonas sp.
VRICFGGRRLFRRQFHLEDNGYRDHEQWLEEWRRARANQFFVVGSSDETGGNQSCVATVAEDGTLRLRLRLPPALAHEYGKYLEIGGIRFRHGHQQIIAALESITIKTTTSCGRRVTKRIGRAISYRFLRDEKSWRLFVTVDEDLPPTATWRELGAIGVDVNVDHLAVVETDGDGNLVEWWLIPLRLRGKTSGERRAVIMQACARVAELARERGLPVVIEQLDFARKRAELEGVGADRARELSSFSYSQILDCIDRACCRRGVEVIRRSAAYTSVIGAVNYATRYGVSVHVGAACAVARRGLGFAERPVGSEARVPTRGGRHVTLLLPARNRGEHVWRFWACVLRALRAVHGAHTECDRRSPPSGQIVDPPGACRLGVSGEIPERESSTEPFG

SEQ ID NO: 7079 - protein, 382 aa, Saccharothrix sp.
MMAGSVVKRAFRYRFSPSSAQEVELLRTFGCVRVVYNRALEARTAAWYGERRRVNYAQTSALLTEWKRTEGLGFLNEVSSVPLQQSLRHLQTAFTAFWEKRANYPRFKSRKRGRVSAEYTRSAFRWRDGRLTLAKMAEPLDIVWSRPLPEGAEPSTVTVSRDPAGRWHVSILIETTIAHAPRTDRVVGVDAGITSLLTLSTGEKITNPRHERRDRERLARAQRALARKRNGSANRAKARLRVARVHARIADRRRDLLHKLTTRLVQENQLVVIEDLAVRNMLRNGRLARAISDAGWSDLRSMLEYKCQWYGRDLVVVDRWLPSSKTCSDCGHLLDTLPLRVREWICPGCAALHDRDVNAARNILAAGQAVTACGAGVRPTRH

SEQ ID NO: 7080 - protein, 428 aa, unknown
  TnpB Polypeptide
MDAAVTNSTLPPKGVSCYLHFAMNIIRAYKTELDPNNVQRTMFLRCAGTARFIFNWALADRKERWEQGQQNTNLYEQKRRFNAMKREQWPWLYEVPYTVQESAFANLDTAYQNFFRRVKQSLQEPGYPKFKSRKQGIGSFTLRGSIHVEQGQIKLPRIGWVKLKEREYLPSEQQVKLLSVTISERAGRWYASVQVEEDGPEPEMGKDTIGVDLGISHLAVCSDGMVFENPKALVNAQRKLTRLQREFSRRSQGGQNWHKTKAKIARCHAKIANVRQHALHQVSHYVTAKAKPETVVIEDLNVSGMLQNHCLARAVSDASFSELRRQIEYKAQWHGVNVVMAGRFWPSSKACSRCGCVKDNLTLADRTYTCDDCGLIIDRDLNAALNLAAYGQNRQTDGDCLGSCGERRPYCEPGTEQPIVAEVSDGTL

SEQ ID NO: 7081 - protein, 453 aa, unknown
  TnpB Polypeptide
MKKAKKVTRIAYSDDLNQAKYEALNEIAECCGSVRTEVWRSYGAKNGLAAKFRPVRDGWIADGFIKNLPQRIWRATLSDTLDDVKANREAAKEKVIRHIFRNIDDKDKRKKLFQKLKNDSVWTNNSYLRRLMRQYWKHGKNHTFNQIVLEPGSYKCFSHKGKNYIEVISLIRGKRIAIPIRSNYSITGQIRLILRDGQVEIHYTIDNTDDRACGLAGIKLGIDKGYTEAFADSDGVFYGEGLGQILSNETDFLNKKYQKRNKMGAVLEKLKEKNPKKNKRIIRHNLGRKKLDRRKNKHQGKVKTLIFTAANKIVGKAETVVCEELTKTFKSKNLGKNTNRRLSGWVKGLMASAIDIVASRRGSRVVLVNAAYTSQICSQCGCLGKRTGDKFHCTSGCGAVMQADVNAAINILARLHDEELHRWLPFTKVKPILLERYRRSDETAHPELQLQLI

SEQ ID NO: 7082 - protein, 366 aa, unknown
  TnpB Polypeptide
MHLTMQVKLLPSPEQAAALLRTMERFNAACDFIAEVAYAHRCANKVELQKLVYADTRSRFGLSAQMTIRAIAKVTEVYKRDKTIRPRFRPHGAIVYDQRILSWKGPDRVSILTLDGREVMPWIAGAYQQARLNRVRGQADLLYRDGKFFLLVVVDVGNTEPFDPGGFLGVDLGLKNIAADSDGETFSGAHVANLRARHARLRAKLQAKGSKSAKRLLRKRRAKERRFARDVNHRISKLLVRKAKDTGRGIALEDLKGIRDRTTVSRKQRRAHHSWSFHQLRFFLTYKAGLVGVPIVVVDPRNTSRTCPCCRTIDKRNRPTRDRFACVSCGFAAPADNTAARIIAGRAEVMPPHAAPVMPGAASRLL

SEQ ID NO: 7083 - protein, 400 aa, Nocardiopsis sp.
MQLRYTYRLYPDGDQRAALARLFGCVRVVWNDALARQNPVKASNKLLGNPIKRVAEGPYQRVPKNADLSRELIAQAKQTPEREWLSQVSAVPLQQTLRDLDQAWKAHEDSKTGKRKGAKVGAPRFKSRRDQRQSARFTANARWKITRAGKLSLPKIGDVKVIWSRDLPSAPASVTVIRDAADRYFASFVVETGTGEVLPETTPEVGIDLGLSHFAVLSDGTKVANPRFLHRVERRLKKAQRALSRKAKGSANRAKARRRVARAHVRVADARKDFHHQLSTRFIRENQAVYVEDLCVKGLGRTKLAKSVHDAGWSAFVHMLQYKATRYGRYFAKVDRFLASSQTCSQCWAVDGPKPLQVRQWSCKACQTLHDRDVNAARIVLAAGRADRQNACGGTVRPAA

SEQ ID NO: 7084 - protein, 394 aa, Nocardiopsis sp.
VHLRYTYRIYPDGEQRLALARLFGCVRVVFNDALERTAAIKASNKLLGPPRARTAQGPYQRVPKNADLSRELIAQAKKTPEREWLSEVSAVPLQQALRDLDQAWAAYEDSKTGKRKGPKVGAPRFKSRRDGTQSARFTANARWKITDQGKLPLPRVGEVKVKWSRALPSVPSSVTVIKDAAGRYFASFVVQTDDKPLPESTDDVGIDLGLSHFAVLSDGTKVANPRFLRRAERKLKKTQRSLSRKVKGSANRAKARVKVARAHGRVADCRREFHHQLSTQIIRENQAVFVEDLCVKGLGRTRLAKSVHDAGWSAFVHMLEYKAARYGRVFIKVDRFLASSQTCHVCWVVDGPKPLQVRQWTCRSCGTLLDWDVNAARIVLAAGRKLAREREAES

SEQ ID NO: 7085 - protein, 217 aa, unknown
  TnpB Polypeptide
VVNGNILVESKKIRLPKLKWIAMKKHREPVEGLRLKSVTVSMEPSGKYFASLLYEGYSCENQAAEPDYSTAKILGIDYAMQGMAVFSEKIEMEEAGFFRNHLHKLSRKIADSYDAVAVENIDMKSMGQCLHFGKSVQDNGYGLFREMLDYKLAWQGKKMVKVDRFFPSSKKCCKCGRIKKELKLSERVYHCECGNEMDRDRNAAINIREEARRMLTA

SEQ ID NO: 7086 - protein, 433 aa, unknown
  TnpB Polypeptide
LAARRKSNLSKKDKNRINQELATIRRGYGFSEYQLHAYVSVQQHRYQKHIDSLTAQKIASSVWRSVEKYLFDNGKCIHFRKYNKFESMEGKKNTSGMRFKDGRLHWRGQVIQPQIRTDYDRKALKSRVKYCRIHRKPVSAKYHYYLQLVLEGKPPVKHPVGHGTAGLDIGTSTAAVVTGDSCRLTVLGSDAKDRSAQIRRIQRAMDRSRRATNPDNYLPDGTVRKGAKKWIWSEHYKKLQFRKKSLERRYADAVNAGHRRLSNEIASKADTVYVEKMSFHGLARKSKSAVKKADGRFKSRKRFGRSIGNHSPAAFLTTLDNRLVSCGGRLIKIDTISFRASQYNHVTDDYVRKKLSCRGSFVGGHYVQRDLYSAFLLRNSNDTGTAADRQKCIDTFPTFLITHDACMDALLAENKRYPSSFGLWSYEYHKCNC

SEQ ID NO: 7087 - protein, 412 aa, unknown
  TnpB Polypeptide
MSGEVKRKITYRLHPSKRQGEAMRLLFDAHRHLYNAALEQRIWAYRSQKKSIDFKEQCRELTQLRAEDPLYRSINAQSSQVTLRRLHLAFQHFFRRVRQNKKAGFPRFRSAARFKGWGYKTHGDGWRLFPGEEMKNGHLRLSGVGNIKLRGRARSEGTPKTMEIIRDHGRWYASVTITCAPVRKSGTQEIGFDWGLESFLTFDEGGVVVNPRFLSQSQSKISYLQRQKSKKKRGGNNRKKVVLQLAREYRSSSNRRQNFHHQQSSRLVGRAKLIGTEALNTSNMIRPSRGTMKSPGTMIKQKKGLNRSILDGAPGAFLQMVQYKAEEAGVDYIEAPTRKVKPSQTCPECGSRKKKELSERVHRCPCGCIMSRDQAAAQVCLAYARKQVGNQPGGEVPPLGGPGNHETPVRAA

SEQ ID NO: 7088 - protein, 332 aa, Bacillus sp.
  misc_feature (267)..(322): Xaa can be any naturally occurring amino acid
MILAKKVRLIPTPEQEKVLRNHAGAARFAYNYCKRMSDRYYKLFGKSVSQLALQKRFTKIKKRKRYEWLKDINAQVLKQASKDFDTARKHSFKKYKNDYHTSYKSKKDVIQGFYANYERLIIGKKVVHIQSIGEVKTSQQLPRNKKTSNPRVTFDGRHWWISVGFQEDFESQELTNESIGVDVGLKELFVASNGTKERNINKDAKVKKLLKRKKSAQRDMSRRFKKGVKIQSAGYEKAKAEHLRLSRKIMNIRNNHIHQATAKLVKXXXXXXXXXXXXXXXXXXXXXXXXXXXXXXXXXXXXXXXXXXXXXXXXXXXXXXXXLLLSMFIIQV

SEQ ID NO: 7089 - protein, 393 aa, unknown
  TnpB Polypeptide
MQNAYKFRLYPTKEQEQKLQWTLDKCRYVYNFLLSELQQQKIIDKAQLQEMITDLKRIEPDLKNVHSKTLQYENYRLFSNLRALSGLKKNGRKVGSLRFKGKNWFKTFSYNQSGFAIMQNQTRYDKLWLSKIGEIPFIMHRSIEGKIKQITVKHHSSGKWFASIIAETKNEIPKTENKCKIGIDLGIMNYVYDSDENHFDNPKHLDKFLKKIRKEQKRLSGKKKGSKNRAIQRIKVAKIHEKIVNQRDDFLHKLSRHYVNNYGFIAVENLQIKNMVRNHHLAKSISDASWSKFIHMLCYKAERAGCIVMKVEPRGTTQTCSNCRIEVHKELWNRTHKCICGLEIDRDYNSAMSILKRALGQELSEYTPVENRPILLTEQVSSEKQEAPCESWG

SEQ ID NO: 7090 - protein, 425 aa, unknown
  TnpB Polypeptide
MDYVLKYRLFPDSHQREQLDWVRDTVRQLYNHALHRFNRIPESAGTVKQRVTQVRDEIPDLKDWWTDLTNVYSTVLQQAVEQIATNIENLGILKQNGFDVGSLNWKAPHEYRSFTYRQRGFELDEKSGPTGRGTLTLKKVNGDNIDVPIRLHRAIPDEPDVKHVTVKKDTTGAWYACLNVEQDTPEKPAPSEIDTEDTVGLDLGILKFIHDSAGRQVSRLDLSTDRERLEREHRNLSRKEHRSNNWERQRRRVAKVHKRMRQKKLDFKHKVAAFYTREYDAVFVEDLNVKPILEGERNGRNTAEVGWRDFITILKHHSRKRGCHVVEVDPADTTKKCNQCGVKTEKPLWVREHSCPSCGYTTDRDYNAALNVWERGLSKLGVVHSEDTPVETGTAVETEDSAAVSASAVVETGSPCLKEAAVAAE

SEQ ID NO: 7091 - protein, 382 aa, unknown
  TnpB Polypeptide
MEQQVLSIVCKLNPTPEHRDQLEATLEAFAKACHFANQTVNPKITNKNRIQGEVYKAIREQFKLTANLAVRACARVAANRKTAKLKNRPVKQFKPTSADYDARVFSYREKDQTVSLSTVEGRVRIPLVLGNYQIGKLKGKTPTSATLSKHRDGKLYIHIQVKDDVPPPQEAKDVIGIDLGRRDLAVTSEGQSWSGESVNRIRERFARVRASVQAKGTKGAKRLLKRLSRRERRYQSWVNHNISKQIVRRAKDTQSIIALEDLTGIRERTNRQPRSQSERRRSNSWAFYQLRLFIDYKAIQEGVEVVRVRPAYTSQTCHNCLHIHPQKGKSYRPGKTFKCGHCGWKGDADLNGATMIKLLGESVSLPKTRNPLSCSWLDRVTG

SEQ ID NO: 7092 - protein, 417 aa, unknown
  TnpB Polypeptide
MANQVTRTYVASIRNHQQVRDDLDSLGFAASKLWNVARWTCDRIWDETGAIPDHGVLKAYLKSHERYADLNAQSSQAILEELAEAFDSWYGHRANGNENANPPGYRKHGDDHPRSTVTFKEDGFKHDPDHDRIRLSKGSNLKDSWSDFVLCEYAADPDVDVQNVQQVRAVWTGEVWELHIVCHVGMEDSDPPGNRVAGIDLGICNFAVVAVGDEALLYPGGALKEDDYYFQKERAKCDDSASRKAQRLDRKRSERRSHFSHAVSADVVAECAARNIGTIAIGDLSGIREGTDWGDHGNLNLHGWAFDRFVTMVAYKAAERGISVERVDERDTSKSCASCGSTDDSQRVERGLYVCAECGLVANADVNGAENIRQKVLPSLACDGGDRDNGWMAQPAVRLFEKSTGRVAPREQVTREP

SEQ ID NO: 7093 - protein, 546 aa, Streptomyces sp.
VSEKKQLRALDAPFVAFGPTGVAIRDRLGHLTPQDEKVLRLAGEHLGRLASRDLAVRCRDGLEHSTNTWAVRKRELTNESSSRWAGSITKATHDQWALARRCQLAHIQSLEAGVRTLMHRLSQPVGEEGTKKAPGGYRTRQEWHAKTRRLHVLEHRLEQARAEREAGRVHVVRGGRRLLSTRHHLDAAQLTEAEWRRRWEAERWFLAADGESGKRSGNETVRVTPDGEVSIKLPAPLAGHANAPHGRYVLACRVGFAHRDAEWADRVEADRAVAYRIHYDVTRDRWYLTASWQRPAVKTIPLEAARAHGMIGVDTNADHFATYKLDVHGNPVGDPHRFFYDLTGTAQHRDAQIRHALTRLLHWARARSVNAIAIENLDFAAEKTREKHGRRKRFRQLISGMPTGKVKACLVSMAAEQGLAIVAVDPAYTSKWGAQHWQKPLTSNTRKTTRHDAAAVAIGRRALGHPIRRRTAPPHDDQSDRRGHRTAQAPSGTRGREETRPRIPGPRTRSVRAECGANAGDQNAQHRSGRSAEHGFWQQDSLPLSL

SEQ ID NO: 7094 - protein, 254 aa, Brockia sp.
VLPRIGAVRLKEKPVCRKKSGSVRTYLPQGRILHATVSREADRWFVSVTVEEEVPDPAPPKGPAAGIDLGLNSFATKAEEGGGVTQIEAPKPLAKRLRLLQRRQRAHSRKERGSKNRQKSALRLARLHRKIRNIRLDFLHKLTAELVRLHPVIAIEDLNVAGMLKNDRLARHIADVGWGTFRALLEAKAKLRGVRLVKVNCFEPTSKTCSSCGYVLPELPLSVRAWTCPVCGAHHDRDENAAKNLLKFALAVGT

SEQ ID NO: 7095 - protein, 368 aa, Desertiactinospora sp.
MVQTVKRAYKYRFHPTPEQAEELARTFGCVRLVYNKALEERTRAYALEGRRVSYVESSAMLTAWKRGGEYDFLFEVSSVPLQQALRHLQAGFANFFAKRARYPTFKSRKKSRASAEYTRSAFRFRDGTLTLAKMDRPLAIVWSRPLPEGAEPSTVTVSTDAAGRWFVSIVVEEKIPPLPPVEARVGVDAGVTAPATLSSGEKIRNPRHERRDRRKLAKAQRAHARKEKGSSNRARARLKVARVYARIADRRRDHLHKVTTRLVRENQVIAVEDLTVRTMVKNHSLARAVSGAAWRELRGMLEYKAGWYGRELVAVDRWFPSSRLCSACGTLKEKLPLSVREWECACGAVHDRDVNAAKNILAAGLAER

SEQ ID NO: 7096 - protein, 392 aa, Paenibacillus sp.
MIRAQIVRFHASKRDIERLYACNRESARVWNMCLQLAKNYHSEHRKWISQSALQKQTKRQFHLHSQSIQAVCHKYLFAREAAHQAVRKGIKSAKYPYKIKKHYNTKWVKDGFKVFDNGKIALSMGIHERKREKPIVVHVASLPAGQIKEIELGYDHGLYLAISYEDGRKNKSYRKQQAIGVDPGEIHTLAAFREDGESLIITGRKVRSIHRFRNKKLAEIHRLQSKCKKGTRQWKKYQRAKQYIRSKSKRQLRDALHKTTKQFVDWCIQQSVSDVHLGDVEGVQRNTRKKNRVSRKQAQKLSNWSMGKVKQYLTYKLEREGIALHLVDESYTSQTCPVCRKRNQPASRNYRCMCGYKEHRDLHGARNILSQALYGEFLHFDVESKRKYLRIA

SEQ ID NO: 7097 - protein, 382 aa, Escherichia sp.
MRRFAGACRFVFNRALALQNENHEAGNKYIPYGKMASWLVEWKNATETQWLKDAPSQPLQQSLKDLERAYKNFFRKRAAFPRFKKRGQNDAFRYPQGVKLDQENSRIFLPKLGWMRYRNSRQVMGVVKNVTVSQSSGKWYISIQTESEVSTPVHPSASMIGLDAGVAKLATLSDGTVFEPVNSFQKNQKKLARLQRQLSRKVKFSNNWQKQKRKIQRLHSCIANIRRDYLHKVTTTVSKNHAMIVIEDLKVSNMSKSAAGTVSQPGRNVRAKSGLNRSILDQGWYEMRRQLAYKQLWRGGQVLAVPPAYTSQRCACCGHTAKENRLSQSKFRCQVCGYTANADVNGARNILAAGHAVLACGGMVQSGRSLKQEPTEMIQATA

SEQ ID NO: 7098 - protein, 419 aa, Desulfobacteraceae sp.
MEKATRNIIFRIYPTKKQVLILDSWIDLHRELYNATLQERRDAYQKCGVSLSYRDQQNELPEVKRVRPDLIPLGSHALQETVRRIDRAFQAFFRRLRHGEKPGFPRFKGKERFDSFTYPDPAGWKILEQTNHKGRLHISNIGGIQMRGKPRVALQEGEPRTLTIRRKNEKWYAVISVRYDKNQLRRESPVDSCRFIGLDAGCTALVYPSEGEPIENPKMLGTVLSDLKKAQKSLSRKQKGSHSRLRARKQVTRIHEQVSNQRRDFLHKLSASLVSKYNFISIENLKLKNMTGSARGTKENPGRNVKQKSGLNRSILDAGVGLFFSMLESKAEEAGIRLEKVDPRGTSQRCSQCGEIVHKTLAERVHDCPFCGFVAHRDHNAAINILNLGLSQAGLEQAEMWSPGILGTWKQETITMLPA

SEQ ID NO: 7099 - protein, 733 aa, unknown
  TnpB Polypeptide
MDDEEEEDGHKVHKTRLKHLVSDFAVVERIQYAVETIHDIAALALVFGKLLYLSDLDEAVQANNGAFDASVATRMAKAFPVDAEQIEIWFDVVSSDLEHRVGRPYSPEKAAGLARLHTFYSAQAARGLLPEVKLSSTNLSNPKGHAAAHLATNYSTNVHVHFDKYVHRFVDVELTAAAKTRLGLSHRKRLPREARREVNSEVRAVVRDLLEAPPTPTCRDGQLRLWLEQNRSFLVPPRPPGAEGQHWRFLNQKKNPQRWLPYMVWINRRLEDSGSKLLSPLPQKTDFVPGHIRLDTVGLIDLLVADADGALLVKAELEGMDMPFLDGDVGPVKYDLPGLLVTGKKKNAVPQPSKGRLYVGLEQLVSPALLPRVQTDAIKHAAAFKTAVWRCLTKLGANKHVPTVYYNDMVFNNVIDTDGVSASPHYVSPSMFGLTRYNGGFTKLKETQRSQVRREKAKGATYVTDLSDDERGAVLCDPGKKTSCDPGKACIACLTDGNGKTLSYTSAQRRVESGAKAHAKAHQRMLDVRLDGDGRTARTLVSTIGRIQAAGTMSWSSKSTNLEHFEHYLRTRRAVADELSAFYRRRTFRQARYDAYVGRRASEDRFFSKAKAAFGYDAVILYGDWGRKPNIPHQPPSPGVGFRRRMCSHFRVFLVHEPYTSSVCPRCGTHGMAKPRLDRRGNEIHHLLRCPNHSCSCRWWNRDTLGGLNILKTGIHALRTGAWHPAFSAAAAA

SEQ ID NO: 7100 - protein, 390 aa, unknown
  TnpB Polypeptide
MKKLKKAYKIEIKPTDEQKQKIHQTIGVSRFIYNFYISHNKEVYKKEEKFISGMDFSKWLNNEYIPNNQDKVWIKEVSSKATKQAIMNGEKAFKKFFKGESRFPKFKKKKKQDVKAYFPKNNKTDWTIERHRVKVPTLGWIRFKEFGYIPVNSMVKSGTISQKSDRYYVSILVEEGIKVNDKAFSKGIGIDAGLKEFAVSSNGNSKKNINKTAKVKKIEKKLKREQRKLSRKYESLKLRNKKMKGEVTRQNIQKQVVKVQKLHQRLTNIRTDYINKVVSDLINQKPRFITIEDLNIKGMMKNRHLAKSVSQQKFYEFRTKLISKAKQNDIEIRLADRFYASSKICSCCGYIKKDLKLSDRVYKCDNCNASIDRDLNASINLANAKKYKTA

SEQ ID NO: 7101 - protein, 193 aa, unknown
  TnpB Polypeptide
MSEAWYFWLRRQLGLKKAIDTIKKIGHHERRIANDIIHKITREIVNRAIETDSLIVLGKLKGLRNQEKKKGIRRGRKFNRKLSGFPYFKFAEYLTYKAALAGIKVIKIFENWTSQTCRKCNQRGTRRTQGLFVCKTCGEENADRNAAFNIAYRALGYISKVGVTVNTLKTFPSVDRNAMMRKEALKGLPVYDR

SEQ ID NO: 7102 - protein, 298 aa, Bacillus sp.
  misc_feature (263)..(296): Xaa can be any naturally occurring amino acid
MILAKKVRLIPTLEQEKVLRNHAGAARFAYNYCKRMSDRYYKLFGKSVSQLALQKRFTKIKKQKRYEWLKDINAQVPKQASKDFDTARKHSFKKYKNGYHTSYKSKKDLIQGFYANYERLVIGKKVVHIQSIGEVKTSQQLPRNKKPSNPRVTFDGRHWWISVGFQEDFESQELTNESIGVDVGLKELFVASNGTKERNINKDAKVKKLLKRKKSAQRDMSRRFKKGVKIQSAGYEKAKAEHLRLSRKIMNIRNNHIHQATAXXXXXXXXXXXXXXXXXXXXXXXXXXXXXXXXXXYG

SEQ ID NO: 7103 - protein, 421 aa, Natrialba sp.
MENSHRYHAYPTQAVAEGLQRHLNVHRQLYNHVRWDYTNSPEDDKPSEYDQNNKLPEWKRKWPVFSELHSKAAQATVARFHRNLSNLHKKKEKGHKVGRLKRQTPTDYRSVTYNQSGFDLDEKRGRDRFAYVRFSKIGWVKIRYHRPIPDHATIKEVTFKKETTGEWFVSFGLETDDANLPDKPALESLDASNSVGIDLGILNYIHTSDGTTVDWLNLEDEYERLRREQRKLSRKEKSSNNYKKQRREVAKVKRHIRRKVLDYQHKITTWLVREYDAVFVEDLNVKGMLEQSHNVRNKQDAAWRQLITLLEYKANLYGTHVVQVDARGTTKECASCGVETAKPIWVREHSCPACRFETDRDANAAMNVLQRGFSELGLRWPEDTPVETALPTDTADFQCVSAKHVVETGSLGVDRESKALS

SEQ ID NO: 7104 - protein, 359 aa, Crocosphaera sp.
MPAKVSQQVLMILDRNWISFKESNLAYKESPSKFKGRPALPGYKHKIKGRNVVVYTAQAIRKKQFKRGIINPSKTEIYLKTKVDTSNKTCSWRGNLAELPCSKIKQVRLVPRLNHYIIEVIYEADQQQYELEENRYASIDIGLNNLATLTFNQAGIKPLLINGRPLKSINQYYNKVKSELQSLLGENKSSQKLRKLCNKREFKINDYLHKASRLIIDTLINKKIGTLIIGHNTDWKQKINLGKRNNQNFVFIPYNKLIEMLSYKAEMVGIKVIFTEEYYTSKASFLDNDPIPVYQKGKKNQVTFSGKRINRGLYRTSKRKLINADVNGSLNIMKKAVPNAFSYGIEGVVVHPVRVIPAK

SEQ ID NO: 7105 - protein, 390 aa, unknown
  TnpB Polypeptide
MTDASKTQLIESHQISRRHRFYAECDRLTYLSKNLWNATNYAVRQHLFSTGEYLNYNQVNLRFTHENQADYRALPAKVAKGTQRLLDKSYRSFFKKSGFRHIPGYLHKTHGRQLVHYERGALSFRQSGFIKLSKTNILIKSDKQADFVRIVPHLDYFTIEIGYTVANPAPSETTGNVASIDFGMKNFATITSNVSAPIIINGLPIRSINSYAKRLIEQHRQYTHGSSHLTRSIYRKRHNKLKDYYHKSSRFVVDWLVDNQITSVVIGRNLGWKQGNYVREFQQTAYNTFTDMLTYKCHLVGIDVILQEESYTSKASFKALDNIPTYGDNVTIAFSGKRIKRGLYKNADNTVTNADVNGSLNILRKSPLWHDDMYAQCLPHSIEPIIRYNF

SEQ ID NO: 7106 - protein, 387 aa, unknown
  TnpB Polypeptide
MEKRRYAYQFRLKLNQEQIAQFVQSAGCVRKVWNYFLAETQAREDKKYTGYENQAKALTVLKKDEAFSYLNHAPSQALQQTLKNLSQAFKAFFEKRAAYPVFKKKTNYKAIHFPQGFKLIGEGKIFLPKLGRVDFIQHRTIHSDFKIKNVYVKQKGKHFNITLQGEQAVVLPKITLRKMCGLDLGIKHFLVSSKKEFLFPLNKYQHNIEKLKFLQRKLSLKTKGSRSWRKIYTQLTQLHHHIANCRKDFNHKLSRYFADCYDIIVCEKLSIQKMLEKGSAKLNLQILDQGWQQFKIFLKYKMNWLNKKVVEVNPAYTSQTCSHCGHIAKANRPSQASFCCVKCGLTLNADENASRNILMKGFQQLNTLEQGGVVALAIAEATSFKAW

SEQ ID NO: 7107 - protein, 392 aa, unknown
  TnpB Polypeptide
LDVEMTVIYGQVIELNPNNKQATYFKKACGVARFAYNWALAEWQKQYQEDKTYRESCEQSGLAIDESQLNVPNEGKLRKQLNTIKRKQFPFMMEVTKCAPQIAIQQLGNAYKRFFKGESKYPQFRKKGERDRFGISNDRFKIQKQKGKFFIQIPKLGWVRMKEGLRFHGKIMSATISTRGERWFVSINVELSEEIQPLPKTQQSVGLDLGITHLATLSDGTKIQAPKPLKTHLKKLRKLNKSLSRKQKGSSNRAKAKAKISRLYYRISNIRKDFLHKLTTELVRKFDVICLEDLNVKGMMKNRRLSRVIQDLGFYELKKQLIYKANQFGKTVKSVERFFPSSKTCSCCGFKLEKLSLSVRKWRCEKCGAEHDRDVNASINILNFAHKVLTVN

SEQ ID NO: 7108 - protein, 366 aa, unknown
  TnpB Polypeptide
MLLTYKYKLYRSKKTKHLDELINIACGIYNHCIALHKRYYKLYYKSLNKFQLQKHLTKLKRLNKYQNWNNLGSQAIQQITERIDLAYQKFFKKQGGLPSFKKTIKYKSFTLKGNVGYKLKDNIICLHGYDFKFSKNQTIKVDDKIKTLTIKRDNVGAFYICVSLETQDKPRITTGKSVGMDFGLKNFLTLSNNTKINAPLFYLKSLKELRTKQRKLSSKKKGSNNRAKAKLELARFHQKLANQRKDYFFKLANDLAKKYDSIFIEDLNLKGMAKIWGRKIHDLAFHEFIYILSTKTHVVKIDRFYPSSKTCSNCGYIKKELPLKERIFNCPNCKSKIDRDYNASLNIFRVGASTLRGEFVRPTYVG

SEQ ID NO: 7109 - protein, 366 aa, unknown
  TnpB Polypeptide
MQLTYKYKLYRSKKTRHLDELINIACSIYNHCIALHKRYYKLYHKSLNKFQLQKHLTKLKKLGKYQNWNHLGSQAIQQITERIDLAYQKFFKKQGGLPSFKKSIKYKSFTLKGNVGYKLNGNVICLHGYNFNFSKNQTIKIDDKIKTITIKRDNVGSFYICVSLETKNKSRITTGKSVGMDFGLKTFLTLSDNTTINSPLIYFKSLKELRTKQRKLSLKKKGSNNRAKARLELARFHQKLANQRRDYFFKLANDLAKKYDNIFIEDLNLKSMAKIWGRKIYDLAFHEFIYILSTKTNIVKIDKFYPSSKTCSCCGYVKKDLTLKERIFDCPNCHTKIDRDYNASLNIFRVGASTLSGELIRPAYVG

SEQ ID NO: 7110 - protein, 412 aa, unknown
  TnpB Polypeptide
MKIVRSTKCSTKFTTKKKMLELNTILEEYGKVCNIFISYFWTHPEIDKTQLLKPIVDLPMANTWLSARLRKVAAREALDMVSSVKNVFEWNKEQVQSTITALEKKLTTVKHDTKNNRRKINNWHKKHKSLTSKLSMMQPHKPKHKGDRMAISCTIAELQVSKKQGEFDAWLHMASMGNGITLDIPINYHKHFKELNNKSVRQNAYIVTKDYVQFSFERETGPKKEVKNIIGIDTGINALASTSDKLQFGTDIKALIEKSKRCKSGSKGKQRAINTIKQRMNEVAKEILKNKDLIVVEKLSNLNDKSKLKGRLSKNIRSSIGSWNYAYWLMRLEQLCEDNRISFRTVSPYNTSITCPVCNLADSRNRVGEVFKCQACGYTDNADINAALNIVQRFLTGKYGSCYKPKETQLST

SEQ ID NO: 7111 - protein, 199 aa, Symploca sp.
IYSNGHHEPNPRFLRKSEDKIKRSQRNIYKKKNGSTGRKKARGIYARKHLKVTRQRNEHAKRVARNLCLANAKVVLEDLNVRGLVKNHKLAKSITDASWYNFRQWLEYFGEKFGREIIAVPPHYTSAECNNCGVRVQKSLSTRTHSCPHCGHVEQRDVNAAKVILSRVNGRGGHPQTNASGDISSTLVGRKTSRSKKRR

SEQ ID NO: 7112 - protein, 385 aa, unknown
  TnpB Polypeptide
MQKVKLTYKFRLYPKPEHEEKLLETLELCRQTYNYFLAQWNGKENIPGRLELQSQLPMLKKEKPELKNVHSKTLQMVLYQLYSNLRSLSQLKKKGKKVGRLRFKGKGWYKTFIYNQSGFKLIKTGKRLDVLHLSKIGEIPIRAHRSIEGSIKQIIVKRHNSGKWFAYICVEKEVEVKREEPMRVVGIDVGLKHFLTDTDRRQIENPRFYERTLERIRVLQRCLSRRRRGSKNYEKTRIKLAKAYERLVSQRDDFLHKLSRFYVKNYDVICVENLQIQNMVKNHNLAQKILDASWGKFIRLLHEKAERAAHVVVDVPPKGTSEGLKYEDPLRDFISANRIKVRGLGSPDTPAETEPLRELITVPASSIIEAGSPQPSGVGSSHLGT

SEQ ID NO: 7113 - protein, 536 aa, Nocardiopsis sp.
MAGTGIRRLRSIADPFLVPAPTGVSVRDRLKGLTPEDEAVLRAVGAHLGSLASTDLAARCVDGTGHGKDSWAARKRELTPVSSSRWAGALTKASNEQWALARRSQLAHLHRLQAGIDTLRHRLSQPLGAKGIQGVPGGYSCRREWHAKSRRLAALERRHAVAVAAWEAGRVRVVRGGKRLLNTRHRLDRAQLTETGWRARWEAARFFLSAEGESGKRHGNETLRITPEGQVSIRLPAPLAHLANAAHGRYVLSGRVAFAHRGTAWADRVEADGAVAYRIHHDTGRGRWYVSASWTPAPVPQVPWEAALAHGVVGVDANADHLAAWRLDTHGNPVGDPRRFAFELSGNSQHRDAQVRHALSRLLRWATASGVRAIAVEDLDFAREKSREKHGRRKRFRQLISGFPTARLRSRLVSMAHTLGVSVIAVDPAYTSRWGAQHWQQPLSTTRRKVSRHDAASIAVGRRAQGHPVRRRTAPPPHHRSDGAGHRTAQAAPGSPGCEGNRPPVTERARDARGRTRQERGDPAHPEPFGMGAVPA

SEQ ID NO: 7114 - protein, 373 aa, Halolactibacillus sp.
MILARKIRIKPTEEQEKQLWKSVGVARWVYNWTLDRQRENYDKGGKFLSDSILRKEITQIKQQEDFKWLGDVSNNVAKQAVKDACDSYKRFFKGLSGFPKFKSKKKSKPSFYNDNLKLKVKKNLVLIEKVGWIKTSEQIPMGKKYSDPRVSHDGKYWYLSVGIEREVIEQELTEEVIGIDLGVKDLAVCSNGKVFKNINKTKEIKKIEKRLRRLQRSVSRKYEMNKEGNRFVKTCNIIKIEKSIQRLHRRLNNIRNNHIHQATNTIVKTKPSKVVMEDLNISGMMKNRHLAKSIAKQKLYEFIRQMKYKCEKNGIKFIQVQRFFPSSKTCSDCGQIKSHLKLSDRLYKCDCGLEIDRDLNASLNLANYGKLAG

SEQ ID NO: 7115 - protein, 429 aa, unknown
  TnpB Polypeptide
MIRCLHSSFHTSKDDLNRLFACNRISALIWNKILDLSKFYRIITNGKWITESDLKALLKNVYPIYSESVQTVVEKYIQNREDTLLANKKGFKNKYPWKYKYNFPTTWKAHGFKIKDNILELSLARFNRKNQSTIKILLPKHIVKELKNKQIQQIELIYKHQLLLSFMYKIEDNNIKINNDNITGIDLGEIHSITAYTNTNKNCIITGRYLRSLRRLQDKSLGKLNHMLSRCVKNSKRYKRLKRAKRKMLIKTNNQIKDCNHKITNELVKFVKQNNISKVVIGDIRGIEKNTRKNKKKNSGKKHNGRLSKWNYGEHIRQIKYKLDSIGVDVELINESYTSQTCPCCGKRNKCKTRNYRCTCGYTCHRDIHGARNILNKYIYKRIYIKELEIEEVKYITYLRPLKNKKANLVSFLFFGESSRCLSFRPLTL

SEQ ID NO: 7116 - protein, 470 aa, unknown
  TnpB Polypeptide
MKTTVRTLLKESENKELYQYAYAGMELSRRLYNAALFRLRQNFTARNKPALTANEEQVMDEIMLTVQATGMKAPKALISYLFLEKLMRATGNPDFFSGLPMQTAQEVLKQAVRSFKGWFSALRSYKKDPTAFTGRPKMPKYMKQDSLNTIVFTNQDCVLYTDNGRSRLKFPKTGASVFGVTHPEGGRLMEVRLKPFHGRILLLCTFEAADPEVRSPGPYACGLDFGVTNTAALVSNNGLAVLYKGGLIKAANQWYNKRSAELKSIMMKGKDPSNASRYVKTAKLDALSLKRANILQDAMHKISSDIVKTCCKNGIGTIVMGINHGWKQNINIGHANNQKFVQIPLFMLQSMITYKAERASIRILRQEESYTSKADLLAMDPIPAHGTTQEVSFSGRRISRGIYRSEAGTVINADLNGAGNILRKAIPTAFGRNADFSFLQNVQVHDVLPHTKRKARQPRHRRDREVLAAA

SEQ ID NO: 7117 - protein, 400 aa, unknown
  TnpB Polypeptide
VWYAPGVDRTIRIQLQPSKEQTEALHKTTKQFTQAFNAVCHKGWEQGTGNTYTLQRLVYRSCKDAMPELVSDLHIQAIHKASEAVRSAISRLKKGRKTGCPQSAMCPPRYNLHTFKIHWDKGFISLSTSHGRMKIPFNLPEYAQYAAGYPTVTADLIYRKGHFYLHTVIALPDVAFVSNGQAIGVDLGITRPAVTSDNCFHGDRHMKEVVKRIFRLRRALQAKGTKSAKRHLRSLAGREQRFRRDCDHVLSASILNGIEPGTTIVVENLTNIRRRVKARRGEAKRRLHAWSFAQLKGFLEYKAEAIGCQVVAVDPRHTSQRCNQCGYTYRGNRKSQSEFRCRRCGFHLNADLQASRNIRDKYLVGWSTSPSDASTSTDVSSLPSPLGLGRDKLPALAGSG

SEQ ID NO: 7118 - protein, 441 aa, unknown
  TnpB Polypeptide
MDMKTITYTIKLDPAQLALTEQWFEALRRVWNQALELILECDRYSTWNKYDKTRYPSMPIFGGVDKDGIVIAPWKYRFIPANGATKSKKAKKKTDKPLEPVEPAAKIKWVPVPYTPCTSFDSYRRPYRPCCPLPLPYVEPRLDRPSAFSLSAMFSQKANPEWAELQKVPSVFVRGTLASLAIAWKEHKSGRMGEPRFKGIRNGLSTLVSNDAKSIKVKDGQIRVPGLGLIVMPESAKVWTDVEICVLKVCNLPGFWQLQLTGELPKVELKPSDRKCSLEFPRVENLLYRDDKGKEVKPFENLKLSKQLEKLQLKLAEKQSVRQNRSNKLGLHIPQSKNELELRKQIKRVEWKIAKGADQHAHKLSTFIVRTYGEIELQPAKTKPIPKPEPIPIDVEPAVYAPNGAERVARFNKKVTRLRTGRLRALLKQKAADGDRILAEP

SEQ ID NO: 7119 - protein, 349 aa, unknown
  TnpB Polypeptide
VITSTLKLRLNKKQEGMLNGWLLNLTAIYNFGLRKIELNAQNKIYFSAFDFINLLADHGKKLDIPSHTIQGVLSQVYTAWQRCFKKIGGKPRLKGLRNKLNSISFPDRIHPPKENHISIPGIGRVRYHKQELPKGIIKNGRIIKRASGWYLCLFIDSQREPIVCTGNGQVGIDPGFKNLLTLSTGEKIAHPRELEATEKRLGQAQRGHDKQLAARLLEHRANQVKDRNHKLSLRLVKENVLIAFSADNIKGIAKKFGKSVSSSGHNQLRKMLSYKSNSCGRKYIEIPSKNSTRMCSACGSLSGPSGLAQLSVRLWNCACGAQNDRDINSAVNVLNAAVGAIVEVPHAAA

SEQ ID NO: 7120 - protein, 417 aa, unknown
  TnpB Polypeptide
MKKYKYVGNKEYWYPNLRSLERTDTITGNSLTVSIYEDNKSYKIPNRPKKEKVSYQNSPSDCKTKSIKLQLDNDGQKLLSNWSYVYLKAYNIARQYDIEFPQEWTGVKNAWKNKVMKYLSENYLSYAASILRDKHSIALSICEYHKNKKSALSNLKGKNITHFNLRSKPLSKKIVVMEFEKTSANSRNPIGQVVYNFHHLINKQFAIQFNRYNRTANLLIRVSIEQLEEPNREYTPVSVDLGLRTFASCYDFNRYICVGNNNSKLNNLISLANNKQTNFSSKKAERRYRKKRFKKIKNIVKDIHYKTAHFLCSNYSEVYIGDFKSKACKEVGNNKSIKQRLNQYSFYKFKDTLDYIAIKYNTKVSRWNEYLSSRSCSWCGYDNKLLGSNEIYKCPKCKKQTYRDCNAARNGMIRVLS

SEQ ID NO: 7121 - protein, 223 aa, unknown
  TnpB Polypeptide
MQSQLMKQFCGCARYVYNRTLSLERSLYKKDNKHSFKYAEAANRLPEWKKKNPFLKECHSQVLQQSLKDLDQAYTNFFRKRANFPRYKKKFQQDSIRFPQGVELDEAKQQIRLPKIGWVGYRKSRDIIGRIKNVTVSRRGEKCDVSIQTEYEVVSSAPNPSEIGIDMGVKRFVTMSNGDFVEPLNAFKQEQENLPSFKGNLCGKRREETAERRSEKLFDCTAI

SEQ ID NO: 7122 - protein, 400 aa, unknown
  TnpB Polypeptide
MLKSLKVRLYPSQEQEKMMYKTAGCCRLVYNFFLAHAKEHKDFNYNEYSKKLTVLKKDEKYSFLQEVHSNPLQQSLRHLDVSFKRFFSKQSQFPVFKKKFVNDRFTYPTGLRLNQSATKIFLPKIGNMKFKTSKKYLKLLKTHEFRTCTVMVEAGKWYVSILIEDNTVPQPAVKINKTVGIDLGIKKYLVMSTGQSISAPNIINKLKEIDRLKSYLSKKVKGSNASKKLQLKIQRKQKYLNDLKTDFLNKLVDYLIKNHDCVILEDLKIRKMIKHKGDWKSTFNRLMTMIPMYAFRMKLEYKAEVAGKYCIAVNPANTSQMCSSCGNVDKKSRKSQSEFECTSCGFSANADYNAAINIHNVGLNTLIAAGHAVKSAQITAPAVMKANLSAVSPSSFGFSA

SEQ ID NO: 7123 - protein, 331 aa, unknown
  TnpB Polypeptide
MRTIKFFSSLQSKKEGKHNKQVHPPYYKDKVKGRNITTFYKTGLSKLTYKKEGLIHISQTNIKFKSKIPLAQIQQVKVVPKNGYYELHVDYNIEEVKPVVSENYAAIDLGLNNLATVVTTNSAPFIVNGRPLKSINHDWNKRKAKRQSKLKKGVKTSKKIRSETNKRNRKVNNYLHQTTSAIVKKFILLGISKVVIGYNNGWKENINLGKRNNQNFVQIPHSRFIKMLSYKCTRAGITAITGEESYTSKCSFLDNESVEKHDVYIGKRVKRGLFVSSNGTLINADANGAYNIMKKHLGIRFSDLDPVQVCSTPKVLKVDCGMNHKNPSHEL

SEQ ID NO: 7124 - protein, 406 aa, unknown
  TnpB Polypeptide
MYLTAKIKLNLSPEQEETLWQISDSARRLYNLALEQRKLVYAHRKHGISMFEQKKELTFLRKKYFPELHSQTAQEVIIDLNEAYVSFFKHLKSDKTARPPKYRGYKYFYTLTYPQASFHLEDNAIILHNTKWLSIKFAEGYRDLERVKKIKQAEITQENGDYYACISCEVIPERQKTTGKEIAFDPGSIILLTGYDGKQIVKIESKALKKTAKYYDKSLDSIKSKLDCSKRGSKRHRRLMQAKRRTLKKRARRMKQINHCISKELINMGYDAYYVGDWSKKETLAETGIPVVDKRINRVIQNELPVGILVDYLHYKAKLKSKQVEKVNEARSTNTCSCCGHVGKKLPVTIRAFRCEKCGHTANRDENAAINLYRWYAAPVTGPVKNRMSIKFVFGRYNKCLIQASA

SEQ ID NO: 7125 - protein, 372 aa, unknown
  TnpB Polypeptide
MRTYKYRLCPTKYQVQLLADTLESCRALYNCALEQRKLAYRQFGVSLNYYSQADELKEIKEYFPEYKQVHSQVLQDVLKRVDKAFQNFFHRLKSGKKPGYPRYKGYGWYDSFTYPQSGFSLSDNSKGNQRLKLSKIGNIKVKLHRKIQGTVKTCTIKRELNNWYVCFSCEGEPEILPKTGKSIGIDVGLEKFATLSDGMIIENPRYLRQSEAKLKREQRKLSRTKKGSNSRKKQKTKLAKMHLKVKNQRNDFLHKESYKLIDNYDVIVFEDLQVKNMIKNHHLAKSISDASWSKFIEYTSYKAESAGKEVILVNPRNTSQICSGCGVIVKKSLSVRVHKCPYCGLVLDRDINAAINILRAGTALGGATAVAG

SEQ ID NO: 7126 - protein, 510 aa, unknown
  TnpB Polypeptide
MLESTLSGYASLYGKVERTLFSETIDKGIKPESVKTAYLKRFGITARQFNAICRNLKGKVDSIKELRKSHIKERADKIKTLAKTISKLEERIKNIRYARLKGHPCVTEQKFNSFQFSLHQKKRRLHSLSLTQEHYVNEQKQGKVSLCFGSRKLFNAQFHLEKNGYATHAQWKAEWQASRNNQFYVLGSKDETTGCQGCTITESETGFVLRLRLPDSLITDNKYITMPIELAYGSEAIRQALKNKQAISYRFMRDKKGWRVFISTDAIQKSSITHKEHGAIGVDVNEHHLAVTETDRFGNPINSLSIPLSTYGKASNQSKAIIGDAVKTLMDFVHGKQKPVVLELLDFKIKKANLDGQSAKRARQLSSFAYHHILSVIKARCFDSGVECIDVNPAYTSVIGKCKFMNRYGLSSHQAAACSIARRGLSLSERPNRHDSLASSLPVWNRNEHVLSFWRKVATSKTVHVALSLLSKPQSSGARKPATVMQKRNDMAGKPCHVSQNNCSSGASLN

SEQ ID NO: 7127 - protein, 459 aa, Hapalosiphon sp.
LYRTIPVKARFTDEEQAFWVNQCEHANSLINSAIYHTRQAHYSKLEQQEDAFTTYWRADELRYGWKTYKCNTTYPEIDNVLKDNPHYKAMAAQSAQQTLKTVGESITSYNGLVKKYYQGEVDRPSLPKYRRRGGLAAVTFPRQALTYKDGCFYPSISRETKPHLLTEIALQLPDFIDFDWVKEVTVRPSLGELWIDWVIDDGKEPIDINPNLDYAQAWSFDHGGTNWLTGVSTLGKSLIIDGRKLKSLNQGYCRLVAKYKQGKSDFYWDANLDRVQRKRNNQMRDAVNKAARFIINQCLNDRVGNLVIGWNDGQKNGSNMGKRGNQNFVVIPTGRLIERLKQLCPEYGIKLTITEEAYTSKASYLDGDSLHKHGEKPNGWKPSGQRVKRGLYKSRDAHIVNADCNGAANIMRKVATQLGLYLVEVGRASLTVPQRYDLFKRLNKSYRKRSEALCLQTKA

SEQ ID NO: 7128 - protein, 246 aa, Rhodococcus sp.
MIDRGAPPQDAATYDGAYRNFFDSLSGKRKGRRVGAPRFRSGKDNRQAFRLTRNGFTVTSRCVRLAKIGDVELVWSRQLPSEPSSVSVIREADGRYFVSFVVERDEQPLPQAPTVAGIDLGLTDLAVIARSDGTREKVPAPRHLRAAEKRVARAQKALARKEKGSHNRAKARIRVAVVHRKVRETRLDHHHKLARRLIHENQVVAVEDLAVAVWSAPGWRSRCMRPGGPPWCGYFRRRLPCMGGRW

SEQ ID NO: 7129 - protein, 343 aa, Psychrobacter sp.
  misc_feature (56)..(115): Xaa can be any naturally occurring amino acid
MIRGHIIELKPNNVQANHFARACGVARKAYNWALYEWQRQYALDKAYREACLATGXXXXXXXXXXXXXXXXXXXXXXXXXXXXXXXXXXXXXXXXXXXXXXXXXXXXXXXXXXXXFDGKIMSATISKRGGKWFVSVAVEMQASSLPTKKTGKSVGIDLGITDLLVLSDGTKIKAPNPLKTNLKRLRQLNKALSRTKKGSKNREKAKTKLSRLHYKIRCIRQDSLHQITTKLINDFDVLAIEDLNVKGMVKNRRLSRAISDLGFFEFKRQLIYKANEQGKVVKSVGRFYPSSKTCSNCNHILGKDELTLKIREWICPACQVSHNRDLNASINILNNATVILTAA

SEQ ID NO: 7130 - protein, 347 aa, unknown
  TnpB Polypeptide
  misc_feature (59)..(59): Xaa can be any naturally occurring amino acid
VLIKGNEIKAVNQYFNKQIAHYRSLLRTGKKDSKGIHQTKRMKRISEKRNRRVKDILHXFPKAVLQAGCVRDRYDLGKMDLHEQKLKEVRLIPNGDTIKLEIVCEIEIMEPTITIHEATRVAGIDIGVDNLTAIAFTSGHRPVLIKGNEIKAVNQFYNKQIAHYRSLLRTGKKDSKGIHQTKRMKRISEKRNRRVKDILHKASRKIIDLCVKEGIEVIVVGNHAGWKKRIHMGKKNNQTFVQIPFHTLIEMIKYKGEAAGIRVVVCEEAIQSKASSIDEDQIPVYGNDVTHTFTGKRIKRGLYRSKNGILMNADINGASNIIRKVYPCMPERERWSRGTVNVPVTCI

SEQ ID NO: 7131 - protein, 399 aa, unknown
  TnpB Polypeptide
MKMINKTYKFRLFPTKEQEVLLNQHFGHSRWVYNHFLNERKKQYQADKKSDNYYKQAATLTKLKKEEETRWLKEVNSQTLQFALRSLDTAFLNFFRGNAQFPKFKSRKNKNTFTIPQFGVIEEGKINIPKFKSGIKVKLHREVKGKIGKMSITKTPTGKYYVSIFTEQEIEQLPKTNKQVGIDLGLKDFVITSDNTKFKNNRYTKKYAKQLKKAQQHLSRKQKGSNGFEKQKLKVAKIHEKIASCRLDTLHKVSHQLVSEYDMIVCEDLHVKGMIKNHKLSKHIADVSWGNFVTLLQYKCNWYGKELVKVNRFYPSSKTCNVCGWINQDLKLSDREWTCNNGHKLNRDHNASLNILKEGLKIISGGTLDNTDGDSNKTSVKKHKSVKSEAQPIGSAVGG

SEQ ID NO: 7132 - protein, 280 aa, unknown
  TnpB Polypeptide
MQSVTKLRFFASPDERRMLFATMERYNAACNAASPVAFSERQFSNIGLQKRLYYSIRETFGLSAQMAQLAIRKVAGSYRSTTEAIKEQNKVLAALGKPLKSLSEISFREHGAVCYDARVLSIGQNRVSIWTLDGRIHLRYSKPDHFPAVATVKQTDPVYRDGAFWLYATVETPDVEIEPPTEYLGVDLGVVNIATTSDGEIFSSAATEKVRRRYGRLRGILQKMGTKSAKRKLRQISGRERRFKTNTNHVISKRIVCATQGTKRGIALEELKGIRPADHG

SEQ ID NO: 7133 - protein, 428 aa, unknown
  TnpB Polypeptide
LDCYFYSIYNTVVIKYHILLLNSVADDYLRRTAVTRPILTDEQQQLLDATIREWKTACNLSSRIGWRTGETRKTQLQSLAYDDVLAETRLGSQHAILATHQAAAALSGIEEIENLDEEYDTSRPEFTSKTIKYDTRTMTLFDDGSVSLATVEDRVRCDLSLPDDEDGYQHQYLADEDWEITESTFSKRDGEYYLHLGFRKLKPEKQVERQADDEDRTVLGVDLGIVNIATTSTAYFASGRELRHRHREFERIRGDLQQTGTQSAHRTIQQMSGRESRHVRDVLHGVANDVIEEALAHDCEYIAFENLKHIRERAPPVKEFHQWAHRQLVDMVKYKAEAESIHVVFVSPENTSRRCPECGHTSEGNRVTQAEFECERCGAMANADYVGAKNIGWRYVRRGLQSSRRTGESQLALKSGTVTPNRGFVPAD

SEQ ID NO: 7134 - protein, 403 aa, unknown
  TnpB Polypeptide
MLVRSLVFGLENPLPVDAKFLMEDFRLAVNEAIRIGLGSKVTSRYGLSKLAYKDLRKEYPNMYAQHLVSTFEVAGGILKRHRKMLRKGRARNAPYVRRLFMKAENQAYKLDRENGIVDLPIRAGLHVKLKPVMCEYHRRYLNDDSISLGSLTLLPDKAIVAIRKHPPKQYAPESVLSLDTNERSLDGVLAKGGDLDAVRAEFPEVSTIQERHHARRKKTQKKKSYDRRTSKRLCAREGKREHHRIDYRLHEVANAVLKLAEERKSKIVLEDLSEMRPRWSKQMNRRISVWPRRNLHQIIEYKAEWLGIPVVKVDPSYSSRRCPVCGRIQDSRKGADFSCECGWRINRHINASINLLRTAAPEAAGGLRFDPGAFQHDVVMVLCGPNKAARPEPNGTSGIRGIA

SEQ ID NO: 7135 - protein, 151 aa, unknown
  TnpB Polypeptide
VSIWTTAGRLKGVLKQRSRREQRHVKNTNHIIAKTIVTEAERTSADISLEELKGIRQRVRLRKPQRVALHSWAFAQLADFIVYKARRAGVPFVFVNPAYSSKECAECGHVDRLNRLSQSKFACRSCGVVAHADRNASHVLARRGRRVNCGT

SEQ ID NO: 7136 - protein, 304 aa, Okeania sp.
MKLVERHVITKSHYLWSACDQKAFLSKNLFNLANYHERQYFFENKKKLSFNQLYHLVSKSYDYQALPTKVSKQIIRRLDSAWSSYFAVLKAWPKQRHKFLVRPKITKYKNKTKGQNILVYYHESIDKKTLKKGRCNLSMSELKIPRSQKSIIEVRIVQKSSCYMIEILSEKSEKTTDNQQVAGRDLGVNNLMAVTTNQTGVAPLLINSRPLKAINTLDNKKLSLIQSQLKTKNHQNSSNRLNALTHKRNCRVENYLHTASKRVIDWCEVHQIGTLIIGQNEKWKQSINLGKKNNQQFVNIPDYR

SEQ ID NO: 7137 - protein, 299 aa, Moorea sp.
MIILEFKAKGKKHQYSGINEAIRTVQFIRNSCIRYWMDNKGVNKFDLNKYSAVLAKNFPFANELNSTARQSSAERAWSSIVRFFDNCKKKIPGKKGFPKFQKNCRSVEYKQSGWKLSPDKKSITFSDKKGIGKLKLKGTWDLWRFDKKQIKRVRIVRRADGYYIQFCVSVNISEELKPSDANIGLDVGLKDFYTDSRGKTQPNPRFYRTGEKRLKFYQRRVYRKKKGSSNRRKAINRLGRQHLKISRKRVGEACAKRIEHAKRLARCVIRSNDLVAYVRAACRKARFESQESGQKSLFG

SEQ ID NO: 7138 - protein, 432 aa, Aquificae sp.
MIVTLDKKQKIKESLKKTKEKRKNQIAKVYQLKISYSNLNKQQKQWLKRVFLEAKWLYNYVIADIPNRLNPQTEKAKQVEIKTPNGFEIREINCLSSQMKQGILDRIRKNLSDLSKAKQKGIKVGKLKFKSQVRSIPLKQNNITFKVLKNKNRIKLQRLKKPVRLLGLHQLPENSYIAKAELIKKPDGYYIYLTCYIDKEQIKQEKINKPIAIDFGIKHQLTLSNGIKINYFIEETKRLRKLQKKLSRQKKRSRNYQKTKEKIQREYQKIYNRRKDIQNKIISLLKKYKYVLIQDEQIKQWQRGLFGKQIQNTGIGGVISRLKQNLETLISVDRYEATTKICSRCGNKKEDIKLSDRTYKCEVCGLVIDRDLNSAINILKIGLEKVEETTIKNIGLDRPELTPVERKATARILGSNPYIRVSYASLKQEAPN

SEQ ID NO: 7139 - protein, 344 aa, Shigella sp.
VKRLQAFKFQLRPGGQQEREMRRFAGACRFVFNRALARQNENHEAGNKYIPYGKMASWLVEWKNATETQWLKDAPSQPLQQSLKDLERAYKNFFQNRAAFPRFKKRGQNDVFRYPQGVKLDQENSRIFLPKLGWMRYRNSRQVTGVVKNVTVSQSCGKWYISIQTESEVSTPVHPSASMVGLDAGVAKLATLSDGTAFEPVNSFQKNQKKLARLQRQLSRKVKFSNNWQKQKRKIQRLHSCIANIRRDYLHKVTTTVSKNHAMIVIEDLKVSNMSKSAAGTVSLPGRNVRAKSGLNRSILDQGWYEMRRQLEYKQLWSGGQVLAVPPALRVLWSYSERKSPVTK

SEQ ID NO: 7140 - protein, 419 aa, unknown
  TnpB Polypeptide
MKGETMDLTRKVRLYPNKTMLTILDTLCDYRRYCWNQALDVWMSLYQQRQKHVPRDLRLKVKQAIKDKSIAFTDDENELLRQYPAPTHYTVRDILTKNKQDWQYQLSSRVLRLAVADLAKAWRYFFNNKENKALHAGKPTFRQKKNPKQGFKTDSSRIQNGKLLLEKPRKYKGDWYAIPFKGYSLPDGDIKYCSITKINNKYYASLIIDTPIEPLAKTGRNTAVDANVNHFDYTDGQYAINPQRLDTIYAQIAFYQKRLARKHHVNGKKASESKSYTVMRAKLQTLYEKATAIQNDLLHKFTTYLYRTYDIIVIEDLDVKSMQMSKKAKNLHRSLFGKFRFQMEYKAKKFNKKLIIADRYYASTQRCSQCGTVKTGDNKITLMGNAKHGTAHNEYICYDCGYKADRDMNAVMNLLALIK

SEQ ID NO: 7141 - protein, 414 aa, unknown
  TnpB Polypeptide
MDITKKVRLYPNKAMLAVLDSLCDYRRYCWNQALDVWMSLYQQRQEHLPADLRLKVKQAVKDKSITFTDDEKALLIQYPAPTHYTVRKMLTADKQDWQHQLSSRALYLAVDDLAKAWKYFFNNKGNKALHAGKPTFRQKKNPKQGFKTDRSRIQNGKLVLDKPRQYKGDWYGISVKGYSLPDGHIKYCSITKVNNKYYASLVIDTPIEPLVQTGHNTAIDANVNHFDYTEGQYSINSKRLNALYAQIAFYQKRLARKRQVNGKKAADSKSYTVMRAKLQALYEKATAIQTDLLHKFTTYLYRTYDSIVIEDLDVKSMQMSKKAKNLHRSLFGTFRFQMEYKAIKFNKQLIIADRYYPSTQRCSQCEHVKKCDDKITLQGNAKHGTAHHEYECYNCGYKADRDVNAVNNLLALIK

SEQ ID NO: 7142 - protein, 332 aa, unknown
  TnpB Polypeptide
LILTFKVRHGKDLTMELQKARQIAEFALRTKARSSKEVKQFGLKSAIANQVLRKYSRNRKLKRVGSVKLTVPSQSIRAEETQLQIPCLKLSLPVTFRRDFSKVNQIELDNEYAYVSVTIPEPPLKEVSNWIGVDRNATGHVAVAANPASGKVWKLGKSAKHVHEKYRCIRRRLQRAGKYKKAKSIRNRESRIVRDINHKISKKIVDIAEYTNSGIKLEKLAGIRKNRKRGRRFNRTLHSWSFHQLQNFLEYKAKLRGIPIVFVEPRNTSKECSRCGSEGTRLGKKFVCPQGHVDHADANAGFNIALRPSTGRFNTDRDALKGNTDIPKGATL

SEQ ID NO: 7143 - protein, 696 aa, Streptomyces sp.
VRRKVELGEGQAERVACASASAFRGLDAVTGEVLGADVLAGRVGWLTALVESMCAEVTGARWNRPDLARLACGRDLSGQRLPSNAWMALRMLGWAATVREGLYVPDRVRRVAEEQAGRALRSAWWRTQITDAVLATWPTGPDADPMRRTAGEWEALRAACPDGQGVAASVLRARTRQIAAFHTTHGRLPAGLCELEAAPGGGRQVVLAAADKQLATLARCEDDPARYAVLTVRLPVRPDPRTRGDWHSVVIRFRLPPTIPVTAALHAPTLRLRGGRLRLDVAHTTAVPTTRRDGHLRAVAFDYGLNTLLTGGTLTLAGGTQPTVHTNGQPVFFRPDGVLAKADRLRVLAEQLGAKVAHLQSLTDGRTASGLRPDPLTAAKLAVLRTEHARVSKRRTRLNEQLARAAAHFMVGHARAARASVIYLEDLRDMEARGKGRTLNTRLSSSVRGQIVAHTRHQAARYGIAVVIVPARGTSKYCPTCLSVLRHRAAPDRTTPGWKWASCPDTACGYSADRDVAAWQRIGARGLQHQHTTVLDRSSGTYVIRRTAPELDQPVRHTTHPRPATESGPQQQSAAAVDRTKAGPTRNRPVPRQRRRVPAPPGTPAARTAVAGPGGKRPAGRMPQSPTRRTQRRRRRQAPHTMSTPTRHQPYGARLGAGFHLHTHATPVTRRIQPGAQPRSLFHRSRADNPAPPRKT

SEQ ID NO: 7144 - protein, 504 aa, Trichococcus sp.
MAKSKTASFVVEMRLVTYQNEQAILDKRFKIAEKLYNKVLYHARTQLTELYKNRRYQDVLAERRSAIKAKDKKGETACNKELQTIQKTFGMTEYALHAYIGRMREAYKKHIDSFTAQKIASTVWTSVSSLLYGKGKKVHFKKFGQLESLEGKSNAAGLRFKGDRLEWKGLVLPVNIRANDRFIQESLALHRVKYCRIVRKAFNGGNQYFLQLVLEGIPPVKRNNNTGMPRRQPAPNAEVGIDIGISTVAVAGDDGVILKELFPEGKSYDRAIHLLQRKLDRSRRATNPANFNVDGTVKRGVKLAWIRSKNYMKIMFRLKNLYRRRAMALKEAHNKTANAILALGNQVYVEAMDFRALMRRAKETTVNTDGRFNRKGRYGKSIGYHAPAMLVGIVKQKAPQEGGALKEVDTFKFRASQYNHVNDTYIKKTRDERTAFVGGQLVQRDLYSAFLLKNSQPTCNETDRTKCSTTFATFMTHHDTCIQVLCQSTERQSRNFGLRDFQFA

SEQ ID NO: 7145 - protein, 429 aa, Methylococcus sp.
MVMHINKSHTLRVYPNQEQRRLFARTEGACRYVYNRALAELGTSYQQKKAGEIEKAKSVIDISRDMTQWKKQEDTAWLLELPSSPLTQALRALDDAFKRFFKGQNRSPKKHRRQKTCSIRSQLDLRQKTAADAWANQKIFFPGFGILETSQLKRLRVAQPKMLTLSRDACGRYFVAFMVEVEQALHPANDQTIGVDLGVKILVVYSTGEKIKAHKAAIKLRRKLKHAQKTLSPKQGAMKDTQHKLTDDLTQRFGLICLEDLNVKGIMASAKGTEEAPGKHVAQKARLNRGIAHAGFGEIRRQIEYKAHWRGRRVLFCDRWAPTSRTGSCCGAYQATFSLKIRAWTCSNCGAVHDRDRNAAINMVTFAPGGTPEARAGNVRSKARREVYPPGPDEAIQPTRWDLDEPRTESQLLNGQEVMPSETRCRSAA

SEQ ID NO: 7146 - protein, 311 aa, unknown
  TnpB Polypeptide
MCQASRSNNHLETWTKHSQTFFSGRARYPKFKKRNAKQSVRYVKSGCVFSNGILRIAKNKDPLDVRWSRQFSGDPTSVTISMDCSGRYFVSFAIEEAVYTFLKLDNAIGVDVGIKDVCVTSDGFRSGSPQYTRKYEEKLAKRQKQLSRCVKGSKNRAKAKLKVAKVHAKISDSRNDFNNKLTTKLISENQAMAVESLNVKGMQKNRKLAKSISDSSWKDFFRKLKYKAEWYGRELLEIDRWFPSSKRCSCCGHINNALKLSDRIWGCPLCKKRHDRGMNAAKNILTVGLAGLAFGENGRLGIESSMQSCSL

SEQ ID NO: 7147 - protein, 416 aa, unknown
  TnpB Polypeptide
MGRLKYDPHGPIVTDIVKVEGDYEILENLACIANGLWNCAIYRIYQRYAKEKKFYFYSDLCMLMKENDLYRLLPSQSAQGVLQKVDGALRSFIKLKTTYPEAKPPGFRPKNTPWIIPFKSQQLTYNEKDSTFKLTMSLRYRKEKGMDFIVVRTSSLRHKGKVKYLELYQRDGLWFASVVLEMAKRPKIRTDGNLYIDLGIPNLVAVYDEKTVTLYKGGEVSSILRYREKAKAEIQAVLATHGERTSKAMRNMSRKQTARANHAIHAMTKDIVARAKREGKGIVVGDLTHLRKNVKYNDNANQKIHQWQFGKATKQLDYKGGYSGVPFDLGSEIDTSATCCVCGIKENGRVKRGLYRCKKFHVQFNADGLGAVNISKRYRRIPLRKPSGIGVVGSLASPVVVLWDNHRWVPQDEANL

SEQ ID NO: 7148 - protein, 261 aa, unknown
  TnpB Polypeptide
MIIFFKNTKIGFPKFKAKRKTKKAYTTNNVNNNIKIVNNYLKIPKIKSLIKIKIHRNIPDKYKLKSVTISQSASGKYFASILFEYENQVIEKKSKTFVGLDFSMHELYVDSEGIYANYPKYYRQEQLKLAREQRKFSKMEKGSKNREKQRIKLAIVHEKVANQRKDFLHKLSKKLIEKFDCVCIEDLNMKALSQVLNFGKSVMDNGWGMFVNFLDYKSKEVGKKLVKVGKYFASSQICSNCGYKNKEVKRFVYKTMEMPKL

SEQ ID NO: 7149 - protein, 560 aa, unknown
  TnpB Polypeptide
MIRKELLYENTFGGKTWMKTKENILCTCIIRKDTPAGLYFGDICRKTKALRNTTNFYIRNTYTGIAKSPEERTHHETEVLHYVFTGIQKCNVHKEALFFRDLKKARKKCGLAGEAVVNRSLHRTMETPYPSVKRRMLTYETLDAVFKFTKNRDYYRLPAQVNQNAMRKTFQSWKGYFAALKDWKADPEKYEEVPGIPGYIREEEATAWFTNQTARIWKTPNGCVLFFTGTSVTAGCGTFTGTYIKTEVQPYHGEYRLLVTYDDKAECPEVPEHPQRIYGIDTGVNNFAAVAGNFGSAPFLIRGGAVKSWNQWYNKKRAALMSGLTSGQDSRHSIKHSRRLDALSRKRDERMRDFFYKCAHYICRRAVKEQVEVIVCGHNDGIKQCVDFKKKDNQNFVCIPERRFLSILAGVGAKYGIPMVIREESYTSQASAPDLDPIPTYGREKGEEPVFSGKRIKRGLYRTGDGHILNADINGSANILRKEYPEAFKDVTDFSYLWKTTETIGYRDIYKAVPEKKKEDAGKRNRPGRGSRKRHKERAARRMELKEAFPKKRTFVKKAS

SEQ ID NO: 7150 - protein, 579 aa, unknown
  TnpB Polypeptide
MAKRSKTGLREIADPFVVAAPSGAATKTRARVTSIEDEFLYLIGKTLGGERNKDLALLLATGGKRVGKADWNARKTSLTARTSARWAGAITQASHHQYAVGMRCLRAERDSLRIRIKTISERLAVPHLSANPTRKPYREGEWYAKARRLAVLQDRFDRVVDRISRGHPRIVFGGGRLWRNRENLGAAGRGEQEWRREWDAQRLFLEAPGETGRRFGNDTIRVGPDGTVTIFVPAILQNQIPPELLNPKDPKHITLSHKVSFHHRGGEWADRVHANKAVKYAFAYTPSASTTGGRWFLTASWSYPPTVSVPLSALRAQRTLALDLNKDHLAGWVVDSRGNRVGEPVTFVLNLEDFAATTRDAWLRHAVTTILKYAREKECASVTIEDLNFTKDSEGRDSPSSTRWLRRIVAGMPTAQFRDRLTAMAATQGIPIVAVDPAYTSKWAKQHWLKSLQPTPSSSRPLSNATAPPRVERHHQVSVTIHHAAALVIGRRMFGLSARRRMNGPRQRQRTLAGQPAVARDSVATIVQAKPLAEQSLTPIRESTLRQQVKTVGSHPVGSRQPFTGHSHSGSNIPTLPNT

SEQ ID NO: 7151 - protein, 330 aa, unknown
  TnpB Polypeptide
MEQEVNPEVCDEVLYLTYKARIYPNSTQEKAITANIENNRYVFNLMVTYCRLHIEGYGRLPSLNDLTRFGTLIWTRCPFFHDMYQNSMNDTAKRVLISYRRCLEKAHAIASDGSVTKGHGRPRYRKAGNCSSYGYPSSVGFSIYENGGKHYIRLGKVTARKGLKNEGIRLHGPGIPHGTPKTCTVSRKDMGTHCEYYVSVVFRTDPGFCRGEEHIELDQSQPIGIDVGISNIAAFSDGTVYENSKEYVKGIERFRKIHRRYSKTLPNTPENTRWRSRLNHAYKNLVNRRKNTIDRIAHDAVYLHDGIAMEDLSVEQLRSKALSSRNSVYG

SEQ ID NO: 7152 - protein, 394 aa, unknown
  TnpB Polypeptide
MHTVRIYRLIHLSPTLFRLFKAAQMESAQVWNYCCELHKAARVAHTTWPGQNDLQQATKGRFALHSQSVQMVAQAFLANIDATRQLRATHPKMRMKYPWKTKRFYPVHWPAQAVSRERGRVILPMGRGRASIVLHLDLPEHSGACTLVWNRGFELHVVIEIPQAEHTPGTNRAAVDLGEIHLAAVTTNTGAALVVSGRGIRSLKRQRNMRHRKLAKKQARCQKYSRRWKKLQRARNKMASRSERRVRDLRHKATRQVIEFCEREQVGTLFIGNPHGVRQENKGRHHNQRMSQWEYGRDIDYLTHKSKQACIKSFTGSERGTSSQCPVCRHKHKPKGRVWKCRKCGFKGHRDVVGSVNMHRLAYDQPVTFPRAVTYLRPGPARRSSRAGTPRASS

SEQ ID NO: 7153 - protein, 450 aa, Opitutaceae sp.
MPSQRSCSTATPPSSWTDAVMLRACRCRVEADEVTNRKLFGFADGRRWVWNACVAWTEEANLVARSAGASWAPGAAFSLTFLSRLLNQWTEANPWLKLAPKQVLQQVVHDFIKARTAFLTGAVTQPPRFQKERKAIPTMRFPQHVRLNQEAVFLPELGWIKYRNSFNRGRGIPAGKLRSATVRFEDGHWFISLLMKVEAPVATQTPMAALGIDCGVKNTVALSSRVNLQAPLMTDEESHRVLFLERRVARCSLDSNRRALAQRRLNRFRSRISRRIQDWRHKTTTALAKNHGLIAAEDLALKSMTASARGTVEAPGSNVARKAGLNRALLEPGFGIIMQMLDYKQADCGHAFIPVNPAHTSQTCPKCGHVFPGNRLDRDHFECVRCGFEDEADFVGARNVLRRAQLHSLAGLPETVLAAGPGRDCAPAAKAARAHGGSQPRTNPGSPLAA

SEQ ID NO: 7154 - protein, 395 aa, Planomonospora sp.
VAVRRSYKFLLRPTSRQAAALAACLEDHRQLYNAALEHRRTAYRKAKVSVGYGDQSAELKEIRRADPDGQGRWSAGSQQQTLRRLDKAFKAFFARVTAGRTPGFPRFKGKGRFDTVEWPALKNGATWDSVPHETQTRVHLLGIGHVRVHRHRPVKGRVKTVSVKREGCRWYVVLSCDDVPAEPLPAAGAEVGIDLGVASLVTTSGGEHVVNPRHLAASAERLAAAQRDLARKQRGSRRRREAVARVAALHAQVRRQRLDGAHKAASALVRAYDVIVHEALKVANMTRSASGTIDAPGLNVAAKSGLNRSILDAGWGVFLTILAYKAESAGRELIAVNPAGTSRTCAECRHVAKENRLTQAAFRCTACGHAAHADVNAAINILRAGLALREAAEAA

SEQ ID NO: 7155 - protein, 396 aa, Deinococcus sp.
VPDTLDIEHELYPTPAQRARLERQRQVAADVWRALSARPGLGRDRLRAVAGQVGWTDDLAGATLDDLAAAFGRAACAGPLPAGPPDVLRVAARPLSDHAVELGGLETPVAAPLFLLPHAARHAAAQWQAQFLGRLHAEQTELTRLAVLGDAAADARLLGHLARWDAPPAPPLPAPPCPVVRLTLLERPRLRWGPDPRLIWTFRVEDIAPPRQAGLIAADPGMRRLWTLRSARGVTRYDNPMPGRWRPPQAAAPPGTLRRRWDLDAARLRRQALLVTTCLRPVHDAALRELLDHPELAVEDLNLRGFERVRADYLAWAGWSGALIQHRYLLDVARLSRRLVVVPAHAGATRTCARCLTPRGVRFRGRQGRCRACGAALDRDDNAAENLYRLGQAGLR

SEQ ID NO: 7156 - protein, 368 aa, unknown
  TnpB Polypeptide
VIRTVVCKLVDPLDKKPVQELFLKYSQACTEIAQYGRNHLMPNAIQLHHKLYRDLRKKYELPANLVVTALRRASGSLKTAHCKGKFEFKPTFIGLDDRTFTLRLEDEEVTVSSHVGRIKFKLDIGDYQRETFKTGEIRSATLVNSKRGLFINVQVKSEVEEVQGTKVLGVDLGIRNIAVTSTGAKHDGKLIRKYRQDRWRIRASLQSNGTRNSKRVLKSLSGKEARRARDLNHVVAKSIVSEARNGKYSTIAFENLKGIRNRLRVPNKHSNRMVSLWSFFQLREFVRYKAALYGIKVVEVEPAYTSQTCHSCGKRGFRNQETFTCTTCGEFDADLNAAKNIAVRGARVNEPGSDGSSRKTAPVASPGL

SEQ ID NO: 7157 - protein, 414 aa, unknown
  TnpB Polypeptide
VKLIRAYKTELDPNDVQRTALLQHAGAARWAYNFGLRRKIAAYEETGKSPSAIDLHRELNALKKTAVEQGGVPWMYEVSKAAPQEALRNLDKAFQHFFRRCKGNAKVKGFPKFKSRKRGIGSFTLTGAIRVGEKHVQLPRLGKLRCKEHGYLPETGVKILSATVSACAGRWFVSLQVEQEAQNPCVTSSRVVGVDVGIASLAITSDAEIFENPRALRSAEVRLRRLQRSVSRKVKGSRNRKKAIARVAVLHYRVSNVRKNALHQASNSITKNCGTVVLETLNIAGMVRNSHLAKALSDVSLAEFHRQIEYKARWRGVRVIRADRWFPSSKMCSACGGVCGEMPLSVRRWTCQACGVTHDRDVNAAVNLRNLAVSSTVSACGDGSADPDCEIQMKLPSVKQELNADRGLSSVGLV

SEQ ID NO: 7158 - protein, 367 aa, unknown
  TnpB Polypeptide
MILSHRIRLNPSPDQEAYFRQACGIARFAFNWGRAEWERIYKDGGKPSALGLKKDFNAVKGSAFPWTYDVTKSAVEGAFSDLGKAFANFFRGMKSVGYPKFKAKHRSKPTFYLANDRFDVDGHALRIQKLIGVVNMAEVLRFVGKILSGRISFKAGHWWISIQVEMPNRTLAHPGGSVGIDLGLKTLAVCSDGVCFQNPRHLAGALKKLRGLQRSLSRKVKGSSNWLKAKARVARAYARVADQRGDAIHKMTSELVRQHNLIGLEDLNVRGMTGLRSLARSLADAAFGEIRRQLEYKAPMLGSRVVVVDRWFASSKLCSACGWKKEDLELKDRSWTCGGCGAIHDRDLNAAINIRNAVIPVVASSGS

SEQ ID NO: 7159 - protein, 416 aa, Azotobacter sp.
MLRRQAFKFRIEPTGEQQRQMRRFAGSCRFVFNKALALALQKERYEHGEKKLGYAGLCKRLTEWRNGTETPWLKDAPTHPLQQMLKDLEQAYANFFAQRADFPRFKKKGQGDSFRYPDPNQIKLDQASGRLFLPKLGWLRYRNSREVLGEVRQVTVSASCGKWFVSIETEREVAQPIPNGGAVGIDLGVVRFATLWDGHKETVLEPLGSFARHQQRLARAQRQMARKTKFGRNWLKAKARVRRIHRQIVNARQEYLHKASHAISKSHALACVEDLQVSNMSRSAKGSAEQPGRNVRQKTGLNRSILDQGWGEFRRQLDYKAQWAGGWLVAVPPQHTSQQCPECGHTHADNRQTQSLFLCVACGHSENADRVGARNIRERGLKTLEGQDDARFACEVSGAVMPPAAGTHRGESALLG

SEQ ID NO: 7160 - protein, 313 aa, Bacterium sp.
MEKRGYYPICWGSRQLFRAQYYLEENGFRSHEGWVNAYRRKRDGQVNFIGSKEEPMGNQNCQLSYDRERDCFSLRVRKDLEFMEHEKDKFFVISGLQFSLHREQLIRAIQERCTPFTFRFLRRGRKWYLQVIFTWVMEERDRISDVSCGVIGLDFNDGFLSFSETDVYGNLIGLRHFPLKFHGMGKKAESEMQETIAKIVRLAKEKRKPIAVEQLDFKKTKALTTKTRGKYGKQYNKMVHALDYSRYKTCLENAGFREKVEIVLVNPAYTSQIGMEKFGERMKLNRHQAASYVIARRGQGFQDKLQKKIRKVG

SEQ ID NO: 7161 - protein, 498 aa, Chloroflexi sp.
  misc_feature (78)..(78): Xaa can be any naturally occurring amino acid
VAQAHGSRDALAIFKRIIAGQQERIDVVNDGEMSKISYKTERERPSPSNGRGESDPARLASHAIFYRLSGEEKEETYXSPTLLRRLKAAQMEAARVWNLCTQTHKAARVTHAQWPGQRELEQATKGRFALNAQAVQQIVHAFLANVKTTRTLRREHPEMRMKYPWREKRFYPVKWPAQAVHREEGRVVLPMGKGHPSLMLPLALPENAGACMLVWNRGFELHACLEVPQASEAPGSVQATVDLGEIHLAAVTTNSGKALIVTGRGIRSLKRQRGKQLGQLAKKQRRCQKHSRRWKKLQRTKNKVCRRAERRIRDLRHKATRKVIDFCIKHQVGALFIGNPYGVRHRDCGRHHNGRMAQWEYGRDIDYLTHKSKQARISCSTGSERGTSSRCPRCGHRHKPKGRTWACRQCGFRGHRDLVGSINMHQDAFGVHLKFPRSFTYLRPGSLRTRKRSSRADTPLVSQETCCLEQPTAQPRIADTVSPEIGSPVRVVQKPIPF

SEQ ID NO: 7162 - protein, 377 aa, unknown
  TnpB Polypeptide
MLRSYKVRLLPNQIQEQLLWKHINTSRFVWNFGLSHQLERFKNKEKHLSGYDLRKMFTNLKQQEEYIWLKEISAHTISNVCLDLDVAYKRFFKKISGKPKFKKKYKCKNSFPIRQDSFYFNNNCATIEKIGKVKYQTNYELPQGINLQGKFSNPRIKFKNNKWILSFGMECNKQTQILTDNKMGIDLGVKDLAIVSCGDEFKVFKNINKTKYVKKIKKQLKHAQRIVSKKYHTNKSWSKSNNIIKAEKRVKQLHNKLSNIRKNYIHQTTKELVNKLPKRIIMEDLNVSGMMKNRYLSKAIQEQCFYEFKRQIQYKCEEYGIEFVQANRFYPSSKTCACCGFIKKDLKLKDRVFVCPDCGFEIDRDKNASLNLMNYKG

SEQ ID NO: 7163 - protein, 403 aa, unknown
  TnpB Polypeptide
MKLTQKIKIKPTEQQKEVLWILSEKCRLIYNFALKERITAWKNKKELVGYYKQQNDLPSIKTEHPEYKWVHSKVLQYVLRTLDADYKSFFALVKKDKTTRPPKFKGKKHFTTMAYNQKGFKHYDDKIKLSHKYNDISLEFDIPERFSFGHIYQISIYQTEANFYLSIVYEYKEKQFIDNKLYQTFDLGVTKQTAVNMNGKFIEITNVRPDKYWDKKIEQIQSRRDHCKKYSGRWKRYHKAFCKMEQKSSNQSKDWQHKTSKKLVENTKANTIIVGKLETKKLSGKNKYAHGLNKSLQNTGNISRLVGFLTYKAQKVGKRVIKINERGTTKTCCCCGKQHIMPLHKRVMKCDCGNEIDRDKNSSINIMFRYLSQNGLWTAYEQFVRNLRQTGVPIETYSKEAIC

SEQ ID NO: 7164 - protein, 279 aa, unknown
  TnpB Polypeptide
VACEIDYLEWKVKVAKLGWVKFYKGHNKKINGIIKSYTISRTNTDRYYISILYETADKARLDNGKSVGIDLGIKSFAVLSSGEVFENQKYLKKDLAKLKVLQRSVSRKYQKGKKREDQSNNWKKANMKVAKLHERIRFRRKNYLEKVSTWISRNYSTVCVESLEIKKIMKKNKHHNLSGEIGDCGWGMFLNMLSRKCDQVLMIDTYFPSSQTCSVCGHIERSVRNLNVRTWACPVCGSVHDRDFNAAQNILREGLSLCGHKVNLSSTCPKIPSTSVVRV

SEQ ID NO: 7165 - protein, 347 aa, unknown
  TnpB Polypeptide
MIRTVKVTSPANIGKVKGVKYFLVTYNQCVNYFIKRLWSEKIMEGKFINSRFVKPAKKFGLTSRLTQCAGKQALEIIKSQRKSNGKRIPRLRMLTSTLDGRFWRITGVRNNYEWIKFHSGFNFFLPFNKTKMWNKWIDNGFEMSKTIALSIKKERLEIIFFFEKKSVELKTMTSVEGLDLGYRNLVVCSDGQVVGGRIDEFIKKFHKREKHTYSQTRQKTFQELKKLDLSNISTLVVENLKYVRLGTRGMFSRSHNRRMSHWLYAKVREWLKQRCEEQGIRLEFKSPFATSQYCRFCGKWDRRNRSGDRFHCIHCGHEDHADSNASQNLKLLGLAEVYSLRSLTISR

SEQ ID NO: 7166 - protein, 518 aa, Thermocrinis sp.
VFVSLQFKLELKKKDKEKLIQLMRKQPSAIRVAYNMLKELEKEKTKNPHAQIYQRLRKLFPELPTKYIDSAIYKAKQYPTDTPVVFGGKRLFEKLCKNHLSGKAREKLKKQWKEQRQGTLISIGSKADKGNRLTRFEDKKGQLHLRITTGNREFIYAKVLREPSNSKDKWLTFMAMLLEGWQTHSYFPYTVELKLRDGEIYGSVSFEIPTPEVKYTKDNGVIAIDTNASPVHLAIAEVSKTGKLLSYQAISLHHLLGLSKNTKDHQEWILANKIVDLAIQKGKAIAVENLKKLKKGTRGDGKAKLRKIFHNWNAKKFLQKLKRVAMLKGVEVIEVHPAYTSIIGMLKYAPQLSIDKDIAGAYVIGRRALGFKEDMPENYEKLLKDRAYLEFALKKYEEREKELIELIATESNEYKRNALESELKVVQNAKKLLTNLVQSLQSEPSSCEGANGRNPEQGRVAKTTLQSAWQVLKVALLFPILGRVLPRDLSLLKPILVEGAWDRVRSRLVPLSAGGTSR

SEQ ID NO: 7167 - protein, 362 aa, unknown
  TnpB Polypeptide
MSAHLTKLKKLEKYRHWNIPYSWCVQNVVKRLAQSFREMRTLGRGHPQFKSCKKHKGMTFRGEQVRIEKLLDKQKHFRNHPTYHIRLNGHWYRFALHRRIKGQIREVQVTRDALGAVYITLTEDYSEVIPEPKTGKAEGFDMGIKDFLIGSDGHRYTSPMFYKQNADKLAKAQKAHARKVVGSNNQERERKNIARIHKKTANQRADHHWKLAIDLCKQFDILFFEDLNLTGMKALWGKQVSDLAFGEFIEKLKHQSHKRNRFVFKIGRWTPTTKCCSVCGHKNQSLTLADRSWICSKCSTHLDRDHNAAINILKEGVASFGLGVVSPIVLLGKIVGCAIESSNQVLNSTIAFAEKIAEAPTL

SEQ ID NO: 7168 - protein, 370 aa, Anoxybacillus sp.
MLRAYKYRLYPNEEQKIQLAKTFGCVRFVYNYYLAKKIELYETKKKQMSKTDCNNHCNRELKSEFVWLKEVDKFALTNAIYNLDSAFHNFLKKQSGFPNFKTKKSHKYSYTTNFTNNNIEVDFDNNKIKLPKLKWVRCKLHRKFDGQIKSATISQVPSGKYFVSILVDAEIEQLPKNNHVYAFDLGLKEFLIDNHNNHIKDPKAISKYEKKLAKLQRQLAKKKKGSKNWNKQRVKVAKVHEKISNTRKDFQHKLSSKIVYENQVIISEDLAVKNMIKHSRLAKRISDVAWGEFCRQIEYKSMWYGRTYHKISRWFASSQTCSACGCVNKKVKLLSIREWVCDHCGTIHQRDENAAKNILQQGLKELGLFA

SEQ ID NO: 7169 - protein, 449 aa, unknown
  TnpB Polypeptide
VDYKFPSVRVYEGGRGMLLSHKASIKISQEYSNIIGHMCYAASKLWNICNYERRHYKELGLEKYPDWYYQKKAHKGNLWHKQLPSQTAQETCKQLDKAWRSFYVLKKTGGIKDPNPPRFKQDNIPVTYMQMGIRHEKGSDQLRLSLSKDLKSYMEETYGIHEKFLYLENKIFRNMDHIKQLRIYPPENGKCDLIVIYEIEEPEQISQNGHYLSIDLGLHNLMTCYDSGNGRVFILGRKYLSLERYFHKEIARVQSVWYAQQSERGIKYPKSSKHIQRLYRKKQNAVKDYLHKVTRWIADYCRKEDIRCVVVGDIRNIRKEKDMGHKTNQKLEYKLKLYGIQLIKQEESYTSQCSPFSPEISKRYAESSNRKERGMYITDGVRINADAVGAFKYPAEISFRIREAKRIVRNRTKKSRNNKSSCIAERQAVLVSWTHPEKRRYPARFQMLW

SEQ ID NO: 7170 - protein, 282 aa, Acidobacteria sp.
VDNHNGRIKLPKIGWMRYRKSREIAGTPKNVTVSLVHGKAFISIQTEREVATPMHPSKSSVGLDWGIKRFYTLSNGKYREQLSPLQQFAVKVAKLQRVLNRKKKFSNNWKKAKFKVAKLHNKIANIRKDFVHKSSKDLSKNHAVVFIEDLSIRNMSKSARGSQEKHGKNVKRKSGLNRAVLDASPFELRRQLQYKLRWRGGLLVAVPPQNTSRRCPAVRYGFCGESQDAGEVLVPDWGRGDMMGQEDCNDDRANRDQPGDYDGKTRYSGDANHGGADPAQAR

SEQ ID NO: 7171 - protein, 365 aa, Moorea sp.
MLRAFKTKLKLNNKQKTLMAQHAGYSRWIWNWALGMWNEAYKEGLKLSTNKLKKFYTNHVKPNYSWQYTLSSRVYQFAFRHLSEAFNRFFQGKAKYPRFKKKGRNDRFTIDNCGQVMTFSGRRLKLPFIGWVSTYEPLPEIKTKRVTISRVADSWYISVAYEFEPEPTVKSRENLGVDVGVKVLATCSDGTVFPNPRADKRAKKKLARLQRELSRRQIGSKNRYKTQLKLAKAHQRVTNIRKDAIHKLTSWLSKNHAVIGLEDLNVSGMLKNHKLAGAIADSAFYEIRSQLEYKSEWYASQLVFADRFFPSSKTCSSCGHIQEMPLKQRVFSCFACGAVKDRDYNASVNLEHVAEGFSVIACVSE

SEQ ID NO: 7172 - protein, 381 aa, Streptosporangium sp.
VKLRYQFRLYPGTPQRIELAKAFGCARVVWNDALRIRQDAYAQGKPLPSVVALAKRVITEAKKTKERAWLGEVSAVILQSSLRDLQTAYSNFFASKKGTRKGPKIGPPRFKRKTSRQAVRFTKAARFSVTEGGRLRLPKIGDVEVRWSRELPSAPSTVTVIKDAAGRYFASFVVEAEDKPLPELDREGTDTGIDLGLSSYAVLRGRKVASPKFFRRQEKKLKRAQRKLSRCQEGSNNRRKAKLAVAKIHARIADQRRDFIEQETTKITRESQAVYLEDLAVRGMAKSFGKSLHDQSWGRFARTLEAKCARYGRTFVKVGRWFPSTQLCSACGALTGPKGKAGLRIRAWTCECGTIHDRDQNAEYNLRLEGRRIVAEGRPDT

SEQ ID NO: 7173 - protein, 409 aa, Acidovorax sp.
MQRLQAFKFQLLPNGAQQRDMRRFAGSCRFVYNKALALQQSNHEADGKFIGYVAMAKHLTDWRHSSETPWLKEAPCHPLQHALKDLERAYKNFFAKRADFPRFKRKGRGESFRYPDPKQFEIDQANSRIKLPKLGWIRYRNSRDIAGVARNITLSESGDRWFASIQTERELPQPVPTATTAIGIDVGIARFATLSDGSFIAPLNSFKQDQRRLARYQRRMARKVKFSNNWKKAKTKVQKIHRAIANARKDFLHKTTTTICQNHALVCIEDLQVKNISRSAKGSSEQPGQRVRQKAGLNRCILDQGWAEFRRQLAYKMDWSGGMLLAVPAHHTSQTCPCCGHVAPENRRTQQQFQCVACGHRAHADEVGAINVLERGQRLLACGEDGSGRSRKTAVQPASVKQEPAEATT

SEQ ID NO: 7174 - protein, 450 aa, Sphaerisporangium sp.
VKQARAHVARLELSAAQVAVLDGQAHTARALWNLLHEYFTFRQDRYATLKECDEAIRAARREIAWMGRLPAQAAQAVLKTYRQAWANFYNSDHPAKRPTFKARLRSRPAVDVPQARDLRVKRINRRWGAVNLPKAGRVRFRWTKDLPGITKGGPAGRITGARLVKDAFGWQIVFRTETMAATVMAAHPGPTVGIDRGITVALALSDESVREHGPWLTSGKREHLRRLEKKSARQRAAHTPDQPVSHRLTRTYDQMARLRATAKRRAVDWQHQTTTELADTFSVVVVEDLKITNMLRSAKGTIEQPGRKVRQKAGLNRAITGEAWGRTVTLLEYKTRDRGGRVVKVPTPGTSQTCHRCGHRDPACRDGTRFSCAAPTCGWTGHADTNAAINIRNAAGTVVSGRGDLGTARSAKRQPPRAPLSGYATGQSPAFSWGGVQSPCVARNDLPDQG

SEQ ID NO: 7175 - protein, 353 aa, Petrotoga sp.
MKVVDRNFKSFFALISKAKEGNYRFSDIRLPHYLPKDGYFMLIIPRFKVKGGYFTVPMSNAFKKEFGEVKLPFPERLNRKQVKEIRIFPKYNSKFFDIEFVYVQEEENLNLNTGNALAIDFGLDNLATCVTNTGASFIVDGKRLKSINQWYNKENARLQSIKDKQGIKGITNRQYINTKKRNNRLNYYMNKTARIIVNYCIENDIGNIVLGYNLDWKRSINLGKSNNQKFVQISHGNLRLKIKSLCERYGINYIEQEESYTSKADFFANDDIPVYNADNPQAYSFSGKRISRGQYKTCQGTIINADCNGALNILRKSNLMDLTVLQARGCLNQPQRIRVISQTSLKSPCPYLP

SEQ ID NO: 7176 - protein, 396 aa, Petrotoga sp.
MMRLLKSYKTEINPTLEQEQQIKKTLGVCRFIYNFYIAHNKEIYEKERRFVSGMEFSVWLNNEFIPNSQEFNWIKDVSSKAVKQSIMNGERAFKKFFKGKSKFPRFKKKKNNDVKAYFPRNNKTDWTIERHRVKIPTLGFVRLKEKGYIPTNAKVGSGSVSFEAGRYYVSVLVEEDSLTAVEKGIKQDNISFSEGIGIDVGIREFVVASNGIKKKNINKSKEIKKLEKKLKREQRRLSKKYENKKKGGTATNSAKNIDKQVLKVQKLHQKLKNKRHDYVNKVVCELVKTKPEYFTIEDLNVKGMMKNRHLSKAIAKQNFHYFKIRLENKCKHLGIQLRIVSRFYPSSKICSHCGNIKKDLRLSDRVYICEECGSKIDRDLNAAINLKNAKEYAIAC

SEQ ID NO: 7177 - protein, 390 aa, Bacillus sp.
MLVKKSFKFRIFPNPRQIELINKTIGCSRFVFNFFLSKQKEKEAYWYIVENMTQNGQLPSNNWKSEFFNKYDSIKAVRQLKEHYAFLKEVDSISLQKSVENLADSYQRYYKKQNNAPKFKSKKNKVHTYTTKQTNGNIAVHEKYIKLPKLGLVRFAKSREVEGRIINATIRRKPSGRYFVAIVTETEVMPLPKTNSSTGVDLGLKDFAILADGTKYKNNRYYKELEQKLVKAQQVLSRRVFGSSNWNKQRIKVARIHEKIENKRTDFLHKTSSDIIKNHDVIGIENLQVSNLMKNKKTAQAIADVSWHQFKVMLKYKAEWYGKAVVEVSKTFPSSQLCSSCGYKNKDVKDPGLREWTCKCGAHHQRDRNAGLNLKNEAIRLLTVGATGIA

SEQ ID NO: 7178 - protein, 124 aa, Nocardia sp.
VVEAERTGRGIGLETLTGIRERVRLRKPQRATLHGWAFAQLSSFIAYKARRAGVPVVFVDACYTSQTCCRCGRVDRKSRASQSKFDCRSCGFVEHADVNASYNIAARAARMWECGAESAAPVPG

SEQ ID NO: 7179 - protein, 248 aa, Nocardia sp.
LLPTAKQADALAATLLTANTAATWLSAKAKRDGQRSRTDLQRAHYRSVKAAGLSAQPALHVIRKVADAWKTRAANLEAGTYGPKDSTRYQRAANTPIRFRPDAAQPYDDRCLSWQYDTRTVSIWTTSGRLKGIRYTGSADQLETLQRYRQGETDLVRRDGMWFLYSTCEVPEPPLISPTRWIGVDLGLANIAVTNTGYRAAGRGLRRHREQQRELRRKLQAKGTKAAKRVLKRRRRKETRQGVCPVNG

SEQ ID NO: 7180 - protein, 380 aa, Nocardia sp.
MGDKLVKRAYRYRFYPTPEQIDQLAKTFGCTRYVYNRALAERSRAWKQEQRRLTHAETDKMLTAWKRNPETEWLRAPSKGPLQAALRNLHAAFVNFWAKRAKYPAFKRKGRTLDSATYFRNCFTFRGGRITLAKQDQPLDIRWSRPLPKSAVPSQVTVSLNARGQYYISVLVETAIDELPKVSGTVGIDVGIESLVTLSTGEKVVNPRHEQRDRRRLASAQRRLARKHKGSKNRAKARAAVAKVHGRIADRRRDHLHKLSTRLINENQVIIIEDLPVRNMMRNRTLARAIVDASWSELRRQLEYKAAWYGRQVIAIDRWYPSSKRCSACGAIIEKLPLDVREWTCACGTSHDRDVNAAKNILAAGLAVAACGDGVSPPRS

SEQ ID NO: 7181 - protein, 339 aa, Phormidium sp.
VLQDLVKRVKQAFDRFIKGDKNGKRSGKPRFKGKHRYRTFTYPQGSLDWVKGNRVRLPKIGWVRFVRHRPLPEGFSVKTVSISQKADGWYVTFSLENKSVPAQPTVDIEPTEANSIGVDAGLEYFMACSNGQTKVPPKFYRQAEEKLGRLQAKRDARSKGSKPRRKLNARIAKLHQRIARQRKQWHFETANELLEKADVIFVEDLKVSNLSRRNPAKQAEDGTFLPNGQSAKSGLNKSFADAGIAQFLNEILPFKAAKAGKKVVKVNPAGTSQHCAICLNRVPKGLSERWHDCPDCGASMPRDVNSGLLIQKVGLDVASLKNAKPRSKRSGRRSPRCTA

SEQ ID NO: 7182 - protein, 484 aa, Vulcanisaeta sp.
MLRRAVAVELEVTKELNKLLCSVEAAYLSIVREVAVYAVMNNVTSANKLHRLFYYRCRSEYPSLNSQLIIQAIRQSSEIAKSFVERRRKGLARKPYPEVKAVSIRFTEFTWSYEQFIRSTAPVRLELSLLGVRRVVWLRPHKRFWQYWWRVLSGEAELASTLMIKRRANKWYAIFIFKLKPKKEEPESIVAFDINENTVAVGRIDIKTTVDKVAKWNRQYLTPQLYTIKTDFGRLARRYERVRNTIIERLKPHFTLPDGKYVNVTNTREYRKRVKRLRERGRKVGRVRQIANELTKTPAIIITEELGSNPQESMIEDVGRSKLRHRIKQTPFKKLEKAIEGKALERGSKIFRVSSYRNSRVCPIHFTRLESTNDWHILYCPKGHYVHRDHASVMNMAWKLTPEAWTKGVWWNMKNLNKNMNWRKHEGKSNTIIPYFMAKILHTTLKEFKASEESPAMLARGKPMNPTGEANEGGGEGDLARVSS

SEQ ID NO: 7183 - protein, 440 aa, Vulcanisaeta sp.
VRTVRLRLLPSGTQERRLRRLADVTARLWNGLNYARLMQFRESGEIDFKGTEHEFYHRYRDRLGVNAGQVINLNNWMWNSFFELSRLYKQGKLPKFMNKPSPPGFWKDKVLGKRLLRILVRNDRYYLEPINNGEGYLVLKDWGLKIKYAGRIKWSGKQGTLVIKLEGNRWFAYVPITVGEKPAKSNPRGYVRGIHEKIQIENPRGSNKAFIDIGLNNLFAVVFNHSDTAILIKGSTIKAEYYYWKREIGTYQAIRDWLRNHGFESWRKYHTYYLHAIYKRRERLRHYYRTAIRFLAKTLWQMGIDEVFIGYPYMVSQDNGNEFNTNIWWFNKITRWLGEVLQEYGIKINVVNEYGTSKQCSICNMEHENGRVKRGLYICELTGIKINADINAARNIAKKAGYKTPTPKKILSYIVTTNGVKPITPKEGVTVETSTVETPP

SEQ ID NO: 7184 - protein, 394 aa, unknown
  TnpB Polypeptide
MSRYRLLPTPAQEAVLRDHCSHARYVWNLAVEQHTHWRPGRARAPGYLEQCRQLTEARAEHAWLAAGSQMVQQQALRDIAAAMAAFFDPHNQTRRPTWRKAGRNDGFRIVALRPGHVQRLSRKTGQVWVPKAGWVRFRWSRPVPSGARSYRVTMDRAGRWHVAFAAIPEPIPAPGNGQTAGIDRGVAVAAALSTGELLRVPALTRRERTRMRRLERKLARTRRGSNRRGRIRLAIARLRARETDRRKDWAEKASTDIARRFDLIRVEDLQIGNMTRSAKGSAVSPGRNVRAKAGLNREILRSGWGLLVRRVEDKARGRVERIKPAYTSQRCSACGQVDANSRESQARFACTACGYACHADVNAAKNIAAGHAVTARGGIRDAGPVNREPHLLAS

SEQ ID NO: 7185 - protein, 238 aa, unknown
  TnpB Polypeptide
MPEEGWKIKSATVSQDRDGSYHISVLCEKDAEDPERLPVDESRVLGLDYKSDGLYKDSNGDLAGMPKFFRKAQKRLAKLQKKLKNKEKGSKNYEKQLRKVAKLYAHVANQRRDYLQKLSTAITKQYDYIMVEDLNMRTMANKGFGNGKATMDNGFGMFQDMLAYKLKRKGGKLVVIDRWFPSSQLCSVCGYKNKKVKNLNVRSWICPVCGTEHDRDENAAINILVEGLRILYEEREAA

SEQ ID NO: 7186 - protein, 403 aa, unknown
  TnpB Polypeptide
MKIQLTQQIIINNKHRWYSMLDELCFKSKNLYNYALYQIRQHYKNTNKYLSYCELNSLLSKTNQVDYRSLPYAQCSQQILRQIDKQYISFYNTLKSPKMKGKKIRLPKYKDKEQGRNAVTYTNQCFILKNNVLSLKIDNNNKIDIDTYLNVQVVRIIHKGNHIVIELIYNKEYELKGDNRQYAAIDFGLNNLATLTSNVCQSVIYDGKKIKNINHFYNKRKALLQYKLNGNKKTSNRIKRISYRRNNKIKDYMHKVSHLIVAYMETNNLNTLFVGKNTGWKEGINIGKTNNQNFVTIPYNLLISMLDYKCKLAGIKMVVLNEAYTSKCSFLDNEKICKHKTYCGKRIKRGLFESKNGHKLNADINGSLNIMRLGIQKCNCDVFNIVPADKRYVYNPVRIKINM

SEQ ID NO: 7187 - protein, 371 aa, Methanolobus sp.
LEIILNKVFRYRIYPTKAQKSTLADTLELCRWAYNETLALRKNAWEFEQENIGYFESKKMLPGWKVIKPELRNVHSQVLQDVVQRVDLAFQAFFRRCKNGENPGYPRFKGKNRYDSITYTQSGFELQDNKLWLSKIGEIKVKLHRPIVGSIKRLTIRKNSTGKWFVSFLVDIDNQETIPLTGQSVGVDVGIKSFLTLSNGQDIPNPRFFVSEEKHLAKAQRRLSKAVKGSPEWKKALKIVGHIHERIANKRQDFVQKVSLELVRAYDLIVFEDLNVKAMIKNHCLAKHIADVSWNKLISITTYKAEWAGKDVELVEPSNTSQMCSGCGQIVRKNLSERTHSCPFCSLVLSRDHNAAINIHRLGLQSVAQKA

SEQ ID NO: 7188 - protein, 461 aa, Methanolobus sp.
MVRKEDQNCRNLRFSIHPTPEQEAKLEETMETCRRLWNDLLSSRVELFDVYGLYPDSRLLEKQLKFYEYTNNIHSQVRLNVFERVQQAYFKFLDDIKNGRLKGSKPKRGTFVKREDVPVGKLSYSIPSKNSSKFIQYDGILPRGHPKFKGKEGYHSFTYKQYGNGWKLTGNKLFLSKITSKNDLIKIDINNDIIQGRPKTCTIKKEGNKWFAFVTVEIPDNPGPIIPVTMIGIDLGLESLIATSDGEFIEPPELFREAEKRLAIEQRKLARMEYGSQNYRKQKKKVNRIHRKIAKARNHFSHCLSKMLVGKYDLIVFENLKIKNLVKNSRLAKSIHDAGWSRIVQHTEYKAAEKGKTVEKVDPKNTSQICSVCGKKKKTKLKLADRVFECEHCKSSLNRDINAAVNILRKSKAYKDTVRLAGINGCEVGTTTTSSVTGLQVPTMNQQLLNLVQGRDFLRVQ

SEQ ID NO: 7189 - protein, 290 aa, unknown
  TnpB Polypeptide
MYQRRKEVCCMTIYSTYKVKIKHYNHIFKDTISVYRAAVDYLIHVCIEDWDNITSYEKPLEKQRFVETLIHKTKDNPNVAYDFDVHFYKFPCYLRRGAISEAIGKVSSYKSNFASWKANPQGEAPSVPKAGYIYPSMYRTNMYEQTGTYQAQIKVHIRNTWDWITVNLRKSDIDYINRHCSTRKQCAPTLQKRGKEWFLDFPFEEKAKLCDTDVDKQTILAVDLGINTAATISVMRSDGTILGRHFCHLNKEIDHLIHSINRIKKAQQHHNCKNPSFMVKNKRHQPRYFC

SEQ ID NO: 7190 - protein, 385 aa, unknown
  TnpB Polypeptide
METTRTIVLKLHPTAEQAAEMDATLRAFAGACDHIADVARREHTTNKVLIQRVCYREVRETFGLSANLAIRAIARVCAALKVPEKAHSAFKPTSIDYDARIFSFREWDWTVSLTLLHSRQRVETRPGEHQKSVLKGTKPTAAQLVKRDGRFFMHIQIGGEALEPIEPSGYLGVDLGIAKIAATSGDPKGHCGKPVEKVRRKHNLQRKRLQRKGTRGAKKKLRRLSGKEARFRRHENHCISKTIVQTAKRTGRGIALEDLRGIRGRIRARGGDARNRLSGWSFHQLYSFLSYKATDAGIPIVQVDPRNTSRTCSQCGHCEKSNRKTQAEFLCLHCGFSADADWNAARNIRALAECNAATGLAIVEAKTGNGTAAEISRKATGLQPA

SEQ ID NO: 7191 - protein, 217 aa, Geobacillus sp.
MYRTLKTRFRAKKEVIDKLFECNRISAEVWNECLRLAKEHHLKTGKWITKTELQKATKGRFPIHSQSIQAVVHKYIFARDGAREARKKGEKTKFPYKKKKHFNTKWAKDGFVLHEDGTLELSLGIWKRKRQSPLVVKMDKEQIPKGQVKEIELVYDRGLWLCLLYEDGKEPKENKNQNRVAIDPGEIHTIAAVCENGENLIITGRKIRSIHRLRNKN

SEQ ID NO: 7192 - protein, 395 aa, unknown
  TnpB Polypeptide
MEMSKMIRTIRVMLIPNNKQKSKLFQYANTARFAYNWALAREQENYKNGGKFLPDVDLRKEFTKMKQTQEYAWLNDISNNVTKQAIKDACDAYKKFFKGLAKFPKFKSRKKSVPSFYQDNIKIQFSDTHVKVEGFAASKKKNKQKLNRIRLAEHNRIPTNCKYSNPRIKFDGLNWWITVGIEYPDPVFASKNEGVGIDLGIKDLAICSDGKKYKNINKNYGMKQLEKKKRRLQRSISRSYEKNKKGKEYCKTNNIIKKEKLLLTTNHRLTNIRQNYLHQTTSEIIKREPSFICIEDLNVKGMMKNRHLSKAVQGQCFYEFRRQIEYKAAWNNIPVIVADRFFPSSKLCNCCGTIKKDLRLSDRIYKCECGNVIDRDYQAALNLKRYGENVLKSAA

SEQ ID NO: 7193 - protein, 370 aa, unknown
  TnpB Polypeptide
MKITLKCKLNPSEEQGQILDHTLGECLKAANYVSHIAWERKCFNRVALHHLVYREIREKFGLTAQIAVAVKDRVAFSYKANREHIHIFRKPFLPLNPPRSFRLIGEEVASISTLKGRQKIPLLLGRYQKRWLEDRAKKICESLVVKRGQDYFLHLTIEVEEPPPKDPQGFLGVDLGINNLAYTSEGESFSGREVEGARLRYERLRAELQQKGTWSAKRKLKRLSGKERRFKRNINHLISRRIVDKALATGRALVLEALKGIGERAKHRKSQNGRFHKWAFGELRRFIVYKAQLAGVQVFFAPPAYTSQRCPVCGYTAKHNRPSQGKFLCRVCGFSDHADHVGALNLVWVAVSRPDVLRPARGSGRTSCRL

SEQ ID NO: 7194 - protein, 551 aa, unknown
  TnpB Polypeptide
MKSTKRDKFQSILFDFDFTKEKKLEVVQTSQNRISDLRIKDMSKDMSPMSDMSIEENGEGTNLRSEQIIISKESYPSIADKNSILASIDNISRCSHKSKNLFNQSLFQIRQAFFGKMNDCKDEKEKELRIKIRSALNKFKENGFNYKNAVYKLLDKYFKNQGNESDNYSWSAQAAQQTINSAVEAWYDYDLAREDYEKHPEKYTGRPKIPKYRKGSEYIAVFTNQQCKVETKNVFVPESIQSERIRYVKKNFVTFPDHLRIKPIETRLSDKDGDLREVRIVPQIKKGCYKVELVYRKVIDKEKIRELNLDPLRVIGIDTGQENIVTIANNIGSSPIVIKGGVLLAINQWFDKIGSKLYSVYYRQQKTVEGKTVPIGAKMRNLSFNRKNLVLDILHKISRFIVNYCVNNRIGTIVWGRNPGWKQNISIGKRNNQKFTKIPHYLLFKMLKYKSEENGIRVIDVEESWTSKCSFLDQEPIGHKDKYVGRRIKRGLFRSSLGIIINADVNAAYNLIRKVFPEAFRTIGIGGVVLHPERLSIKDLLSNRPAIVNLR

SEQ ID NO: 7195 - protein, 394 aa, Planktothrix sp.
MIVLEYKVKGKLEQYKAIDQAIRTTQFVRNKAIRYWMDNSREFKIDRFALNRYSTTLRKEFSFVNDLNSTAVQSAAERGWSAISRFYDNCKKKISGKKGYPKFQKDCRSVEYKKSGWKLHPTKRQVTFTDKNGIGKLKLLGKWDIHTYDVKDINRVRLIRRADGYYCQFCLNITVTDIQPKTGKEIGLDVGIESFYTDSNGYQEPNPKFHQKAEQSIKQSQRQIYKKVKGSSGRRKARKVYAKKHLKVSRQRNEHAKRIARNVCTSNDVVAYEDLSVKNLVKNHCLAKSISDASWYLFRQWLEYFAAKFDKLAIPVAPHYTSQKCSNCGVIVKKSLSTRTHVCNCGCELHRDTNAAINILNLGKQTRDGQSRSNATGVGISTLVGENLLEQILT

SEQ ID NO: 7196 - protein, 402 aa, Planktothrix sp.
MFQAYKYRIYPTPEQQISLAKSFGCCRWYWNYALNLCQETYKITGKGLSRAAIQGLLPQLKKEYSWLTDAYSQCLQVVALNLSTAYKNFFDKRARLPRLKSKHGRQSISYPQNVKFEGDYLKLPGKIGLVYCRRHRDFEGTIKTVTISKNPDGKYYASVLVDDGKETPNPSTNGKAIGIDLGLTHLAITSEGSKYSNPKQIAQQQHNLKRKQQKLSRKQKGSNNRQKARLKVAKVHAKISRCREDFLHKLSRKIVNENQIIAVENLGVKNLVKNHKLAKAISDCGWGMFCTMLKYKAEKEGKTYIEVDRFFPSSKTCNVCLNQVGSLPLDVRSWTCEHCQTTHDRDINASINIKNEALRILSLGTSDTANLRGCKSSDQTSVLSDAIPVEVGSPHFSTSKCG

SEQ ID NO: 7197 - protein, 503 aa, Lactobacillus sp.
  misc_feature (273)..(338): Xaa can be any naturally occurring amino acid
MVLKAFKLRLYPNKTQRNQIHVNFGCARFVWNQMLNMHIERYKNNKKAKFQGRYSMDVMLKALKIEYPWLKQAESTSLQRVNRDLDDAFQRFFNPDLQNGFPRFKSKKNTNQSYTSKFVNNNIRIVDEHHIKLPKLGLVYFKAGRILNGKIRAVTVRVNSRKQYQASILVESENQTFKKTKKSVGIDLGLKSLAITSDGQKEDILKVDDRLNKQLRIWERKKSRRYENAKKAMAFDEHDKVLFPRTDLKQFPRYQQAVRTVAKLKKHIAERRXXXXXXXXXXXXXXXXXXXXXXXXXXXXXXXXXXXXXXXXXXXXXXXXXXXXXXXXXXXXXXXXXXMAFDEHDKVLFPRTDLKQFPRYQQAVRTVAKLKKHIAERRRDNLHKLTTRLVKDYDTIAVENLSVKNMMKNHHLSASIANASWGTLISQLKYKCAWYGKRLIIIDPKNTSRICHECKQKNNEFDSLSQSEWLAAREWDCPNCHAHLDRDVNAAKNILAKGLETLA

SEQ ID NO: 7198 - protein, 443 aa, Symploca sp.
MFYQAVYVNITITFNLFLSCRICTFFNFLIVFFLAQYILSLVDKIKEVMKKVLVLEYKAVVKKTQAIAIEEAIRTSKFVRNKVLRYWMDNHGIGKKELYQYNTQLRAEYSFVKELNSHACQASVENVERAIQRFFANCKSNKPGPKGYPKFKKHTRSVEYKQSGWKLHPTKRRINFLDKKGIGELKLLGKWDIHTFDVRLIKRVRIVRRADGYYVQFCVKVEHQSIAPISHAQVGIDVGLEYFYSDSNGHHEENPRFLRQAEQDIKRSQRNIYKKKKGSSGRRKARGIYARKHLRVTRKRNEHAKKLARNLCIANAKVVLEDLNVSGLVKNHKLAKSIVDASWYNFRQWLEYFGKKFGTEIITVAPHFTSQDCSNCGARVQKSLSTRTHSCPKCGHIEHRDVNAAKVILSRVNGRGGHPQTNAGGDVSSTSVGRKTCRGKKRR

SEQ ID NO: 7199 - protein, 401 aa, Symploca sp.
MLVIEYKIKAKPAQYRAIDEAIKTVQFIRNKCLRYWIDAPREANIKRFDLNKYSTELRSEFAFVKDLNSMACQASAERIWLAISRFYDNCKSHKPGNKGFPRFQKNNRSVEYKTTGWSLHKTKRRLTITDKKGIGELKLLGKWDIHTYPITSIKRVRLLCRADGYYCQFCVDFVSSDIQSATSNEIGLDVGIESFYTDSNGYQEPNPRFLRKAEPDIKQAQRRIYKKQKGSARRRKARARYSRKHLRVSRQRNEHAKRLARNLCKSNDLVAYEDLRVSNMLKNHCLAKSIADASWYQFRQWIEYFANKFGKLAVAVPPQYTSQECSQCGRVVKKSLSTRTHVCQCGCRLHRDTNAAINILHKAKSRVGHTQSNAKGVAASTLLGATLVEQVATKNLESPRL

SEQ ID NO: 7200 - protein, 407 aa, Symploca sp.
MLLAERHIIKKGHRFWTQIDNLSWQSKNLYNCANYLIRQNFIYGHGYLTYNQMASLMKNSEQYRALPAKVSQQILRGLDRNWKSFFQASSEFKTNPHKFLGQPKIPGYKDKKKGRNILVYTIQAISKVALRKGLVKLSGTSIELTTRVASWIAEVRIVPQCDCYVIEVIYEKNKQFLAPNYKIAAIDLGVDNLMAVTSNQPDFTPLLINGRPLKSLNQFYNQRRAFLQSLLKGNRQSSHRISRLIRCRNQKVDNYLHKASRYLVNFLAQEQITTLVIGKNLGWKQEVNLGKVNNQKFVAIPHARLIDMITYKCQLVGINVVLTEESYTSSSNFFNNDPLPVYGQITEKPVFSGKRIKRGLYRTDGGFLCQADVMGSYNILRKAFPNAFTRYGIQRCVVHPRRINLSK

SEQ ID NO: 7201 - protein, 406 aa, Symploca sp.
MLVYEAKLKGKQYQYERLNEAIRTGLFIRNSCLRYWEDGHAKSRNDLYKYVTLLAKNSDFPWASRLNSQARQAMAERTWAAISRFFDNCKRQIPGKKGYPKYKRNRANHGSVEYKVTGWKLSKNRDRITFTDGFKAGSFRLYGSRDLNYYQLEQIKRVRVVRRADGYYAQFCINYDRVEDKPTTGKTIGLDVGISAFYTDSDGNKVVNPKYLRKSEKALKRLQKRVSRRLNRGQPQSSNYSKAKQKLAKKHLKVSRQRKDFAVKTALCVVRSNDLVAYEDLKVRNLVKNHKLAKSISDASWTMFREWVEYFGKVFGTVTVAVPPHYTSQNCSNCGATVKKSLSTRTHKCKCGTVLDRDENAAKNILKLGLRTVGHTGTFQSEYWINASGQMSLWCIDENLYTKFAD

SEQ ID NO: 7202 - protein, 412 aa, Campylobacter sp.
MQITKGFKYRIYPNLEQQKLLNHQFFIYNQAYNIILDLQKKQMQINKNLDKSQRTYLTAVQLDNKVKEILRQRELAFKSVVTQQARINLLRALKDKTKGFPKFKNSKFAKQSFNWNNQGYQIKDSNNPKFKIFHLMKLPLKMRYHKDLPQNYKLNQITISKSHNKYFVSFSITYDNPSVSLISSQNLDIKKAVGIDLNINEIALSSGRLIKTNSKLISKAKYDSAFKRLQRKQSRRVLRAKKEKQKLGANFVKTQIKLNRIYEKASNIKKDLQHKITSQIVNDFDLIAVEALQTKNMTKRAKLKNVKVKSGLNKSILDTSFYQFLSFLEYKASHNGKIFTKIPPQYTSKTCSKCGSIKADLRLSNRIYICKECGNEMHRDINASINILNRALESFELGINSLDYKQQALCVS

SEQ ID NO: 7203 - protein, 378 aa, Succinivibrio sp.
MFTAYKFRIYPDEKQKELFVKTFGCVRSIYNKMLADKIEHYKKTQKMLNNTPAQYKKNFPYFKEVDSLALANAQINLQTAYKNFFNNPKTGFPNFKSKKNTRRSYTTNLVKNNIELKSGKLKLPKVGFVKIKQHREIPEGYILKAVTISQNGSGKFFASILFKYEHEVIHKEPKSFLGMDYSMHDLYVDSEGNKGEYERFYRKSEQKLKREQRKLSLMKKGSKNRAKQRIKVAKVHEKIANSRKDFLQKKSRQIANVYDCVCIENLDMKGMSQSLNFGKSVHDNAFGRFTELLSYKLEEQGKYLVKVDRFYPSSQLCSVCGYKNKETKDLSIREWICPQCGTSHDRDINAAVNLRNEGKRLLLNQINKNRGALGVSLL

SEQ ID NO: 7204 - protein, 449 aa, Saccharopolyspora sp.
VGETVLQAYRFALDPTPEQEAALRSHCGGQRFAYNWGLARIRANLDQRSAEKAYGLDSDDLTPPLSWSAYSLRKDWNQAKSEVAPWWGENSKEAYSSGLANLATALGNWEASRNGRRKGRKLGFPRFKGKRAVLSCRFTTGSFGLVDADRRHVKLPRVGTVRTHESSRKLARHVERGTARIRSATVSYRSGRWFCSFSVEIQRQDPKPAQPGTAVGVDLGIKSLAVLSTGEVIANPKHLEVALRELRRLQRQAARRIGPDKRARRKPSRRWRTTQARISKLHARVANARQDGLHKLSTRLVRTYGAVVIEDLNVSGMLANRKLARHVAGVGMAELRRQIEYKAAWAGVHMHVADRWYPSSKTCSACGVVKAKLRLSERTFACEACGLVLDRDFNAAHNLAALVEHEYGASSASCVVTVNEPDGNPRKTTHLGAAGTATGRPGPQQLMLL

SEQ ID NO: 7205 - protein, 405 aa, unknown
  TnpB Polypeptide
MNYAYKFRLYPTKDQAQLLDKHFGCVRYVYNHFLERRIKFYAENKEKKDHKRSLNYYDDAGELTKIKKELVWLKETNAQALQFSLRCLEIAYNGFFSKKTKFPNFKKRHGKQSFTVPQAISLSKGKIKIPKFKEGIKYDNHREVEGEIGHATISKNKAGQYFVSINVEKEIKQLPKVEKTVGIDLGLKHLAIQSDGKKHENIRPYKNLHSQLKKLQQRFSRTEKKSKRHEKLRVRIAKLYQQIVNIRTDHLHKVSTKIVRENQTIILEDLAVRNMMRNHKVAGSFGDAAVSELVRMIEYKSGWYGRTVCKIDRFFPSSKQCHDCLYINDSLTLKDRDWTCPRCRVKHDRDLNAARNILRQGLNMLNRGNHGVGSGSGKKTSKADQGLPEGHSALKRETHPSLAGG

SEQ ID NO: 7206 - protein, 387 aa, unknown
  TnpB Polypeptide
MNKGIKFRAYPNKDQQNLINQTFGCCRFIYNKGLAMRNDAFVNGQTIGYTQTSAMLTDLKKQDDFAFLKDVDSISLQQSLRDLDRGFKNFFEKHAKHPKFKSKHNHHQSYRTINQCDKIRIVGKYIKLPKLGYVKIRQSMEVEHINNATIERTPTGKYFVVLNVDFEPELRPNNGSMIGIDVGIKEFYSDSNGKVVNNPKYLEKSMSKLIREQRRLSRKRKGSNNSNKQRIRVAKVHEKIINQRNDFLQKQSTMLISENQTICIEDLNVKGMMCNHMLAKAIASVSWSSFFSMLEYKAAWYGNNIIKVPTMYPSSQICSCCGYKNPLVKNLTIRSWECPQCHTKHDRDINASINILNKGLSVAQVINSTVGHTGIYACEDRVKLKFS

SEQ ID NO: 7207 - protein, 280 aa, Paenibacillus sp.
MQTKFEVKSLKVEIPTSFSLPHDAWIQQIRIQFCPRKKQWVFLIIYKIDEAKPKTSPHVMAIDLGLDNLAAITFSHHTDNYVICGKSLKAMNGYVNKEIARCQSIQMKQVGHQAFKSTKRIQRLRMKRDHFITNALHQASRYIVKLAKQYDVGTIIMGDMKGIKQTNQAKTFVQVPVQRLAKMIKYKVNIRGIKKVDQQERYTSGISALDLEPINRYTYNRKRRLKRGLFCSNTGTLVNADINGSLNIMRLYLKEQGTPKLIESVRDNGCVSHPRRIRVA

SEQ ID NO: 7208 - protein, 418 aa, unknown
  TnpB Polypeptide
MANAYRIERVRLYPTTAQRRQLENYAGAHRWTWNWALAVREAHFAAHQTSLSYYEQNRALTVLQQQPDTVWLVGIPRRVKVGALRDLDKAYRAAFRRVQRGERPGFPRFKARKRGDASFEIPAESRFDGRRVKIPGIGWIRARGGRDVATATTTARYVRDGAGDWWAALRYTVPLVGADPSDVSAIGVHLEPGHAMTLSTGETVNASRYVSRSDRKLRRLKRAVRRTQPGSGNQQRARRRFARATRHVANQRRDWQHTISRRLVDSYPRLVMQERGTTARATAPESQRAVWGDRTRRARVSDATWGGLTRLIREKAAVAGCSVAIIPSMVPTDVTCCQCGHVRETLPELVNIWLCERCGTLHERGTNAARNVLSVGVRENAHSERRREAPGDAKRLWTHDKTPAGASEERLASASRKQ

SEQ ID NO: 7209 - protein, 392 aa, unknown
  TnpB Polypeptide
MIQVSRFRLYPSKTVEKKLFSSFDCCCFVYDYCLENKVFKVNVLPRLKREHPELAGVHSIVLQNVVFQLQSNLHILHVLKEKGKKVGRLRRKKRFHSMIFEQSGFKLDGDTLVLSKIGRVSMKVSKPITGTMKQVIVKYNKTHKWFASVVSEDSVEPLKLAGRKAVGIDLNVSNFCTDSDGLVVEHPRNVKRAEKLLVKQQQKLSRKRKGSRNRRRQKVRVALVHERVELRRNDFLHKLSRYYVDHYDLIAVEDLNIGGLIEINGSSMRKLMLDAGWGKFVNFCVYKAESAGKRMVQVIPNGTTQECSVCGEIVWKDLSERMHRCPFCGAIMPRDYNSARNIKHRGLAMVGWGTPEPSSPDWGAKTLVEIKTSTLASEPEQVLIEEARISRL

SEQ ID NO: 7210 - protein, 442 aa, unknown
  TnpB Polypeptide
MQIISSYGVELRKQNIPIRQTLEIYRSAVSYLIGIYVQVWEELAEIPDAKRRFNAAEHLVHTTKKNHACFDFDIRFPKMPSYLRRSAIQHALGTVSSYKTRLDLWEKTDGKSGKPKLVYENHAMPVFYRDVMYREGAEGKDEAYLKLYDGHDWKWFCVRLEHTDMEYLRKCWSGKKASAPTLEKRHRKYFLRFSYKEEVTLTKTPVKEQIICSVDLGINTDAVCTIMRADGTVLGRRFIDHPSEKDRMYRTLGRIRRFQREHGSAQTQGRWAYTKRLNTELGKKIAGAIVRYAEENHADVIVFEYLEMQGKISGKKKQKLHLWRKRDIQKCCEHQAHRKGMRVSRICAWNTSRLAYDGSGAVTRDRENHSLCTFQTGKRYNCDLSASYNIGARYFIRELLKPLPATERSLLEAKVPPVKRRTSCVYADLRKLHSEMERLKAA

SEQ ID NO: 7211 - protein, 497 aa, unknown
  TnpB Polypeptide
MKKKQIQWKSFNINMPDELKPIYDFLQDELNFILSNDETRAVLDNIDLSKLRGDVWRDLRDSLKWRIKDWPLHNKTWHSYILFENIRREIKSKQEATIIWNELVKNNFNIDEALFNSLHKLNIYPTRSRISNIKRSNSMPELARTATFNLDYTISEKQFFRMKTNNICEIKVSKKDWIEYEIVFPSSIDERFTGRMAKPRFIKRKRDNQYVGICSYEYEVGDYKLEDKILGIDIGKIKLFSSVVVDSEGDFNNEFINTKRSQETEYKIKRLYENKQILFNKIKSYEDLRLTNQSKYEIWQNLYSNISNKIINTKDYQAKLLSSEIVKLALEQKCNTIHIENLSWLNSQGGKWNHSQIHSKIIEKAAMYGIEVKKVSAFNSSKEHPITKEIGIVKDRTVEFTTGKIDRDLLAAINIAIRSTNIKLKKSLPKKVKTKRVKTKSNKKETKEKVNQLKGNGQIVSFLTNVLDSTIQVGLGVRPISEVLPYNSLIGYNKLQL

SEQ ID NO: 7212 - protein, 363 aa, unknown
  TnpB Polypeptide
MKAYKYKLKPSAKIIAIFESWLALLCELYNAALQERRDAYRINHLSINYKVQANQLPEIKNDRPEFAHIHSQVIQNVLKRVEFAFDNFFSRVKKGQKPGYPRFRSSSRYDSLTYPQSGFSLKGQKLHLSKIGKVKVHLSRPIEGEIKTCTIKREADGWYVIFAVEEQRKEVAPAPKESVGVDVGIESFATLSDDEAAPIENPRYFRRAEMDLKKAQRRVSRRVKGSKGRKKAVRWLGKKHLKVKRQRRDFHFKEAGKLVNQYQSIKVEDLNIQGMVRNHCLAKSISDAGWGQFIMIVIFKAEEAGRTVIKVNPSYTSQDCSRCGHRNLITLATRIYHCSRCSLVIHRDRNGAKGIEQKGRAAP

SEQ ID NO: 7213 - protein, 272 aa, unknown
  TnpB Polypeptide
MNVDMDRTIKLKLDMSDESKETLRQTMTLSNQVFNEIAQYGFDNHTCSKVTVHHATYYNIRGKYPELPCSILQGIRDVACESLKSVELKRLPKSKQFSAIRYNKRVCNINLQKRTVTLASTKGRVKATFPIPEYYRRYLDWEIRTSTLSYNRQLDTFYLHVTVRKDSPQASGDRVIGVDRGIVNIAVASNNKFFNSSQIKNIRAKYAYLRAELQSKGTRSAKRKLRKISGREEWFVKDINHCISKAIVAMPCDVIAIEDLNSIRVQSRTKGI

SEQ ID NO: 7214 - protein, 283 aa, unknown
  TnpB Polypeptide
MNLDKAYKNFFRDKSVGFPKFKSKKTNRFSYTTNNQNGTIYIDNGYIKIPKLKSKIKIVLHRQFKGLIKSATISKTTSNQYYISILVDTENIKLPKSNNKIGVDLGLKEFAICSNGDRFDNPKSLRKSEKKLAKLQKGLSRKVKGSNNRYKARLKVAKLHQRIANQRKDFLHKLSTKIISENQTIVLEDLRVKNMMQNHKLAKAISEVSWSEFRTMLEYKANWYGKEIIIAPSNYASSQLCSKCGYKNKEVKNLALRNWTCPSCGANHDRDINASINLLKLAM

SEQ ID NO: 7215 - protein, 375 aa, unknown
  TnpB Polypeptide
MNYITLTLPFNVSGDDARKLVATARLFRLVVLKAFNTFLNEGKPPLSQFSMYKRYRKVGYEILPNRRYVDGAIDLVYGVIESVNELNRLYKELKIDEEVKLEDVKFNNWLLFQCEGESKHMNINIKIREDLSFRVLTFDFEGNKSYVIVRPTIPKRWRKILQSLWFYMQPYYARVVLKQFGNRKIIFTHGKIQVAVDYDSYLEVMRKYNLPKGKNIAGIDVNLDRINLAIVNKDGELRDYKTFWFREVKARNVPRRRIWSIIGEKVHEMLEYAYHHGVNRIYLEDLSTLGKLKLLWIKNGRRFNENYNYAVQSFRSKVIEMIRMKAPLYGMVSSYVNPANTSKIGEELMRKLGVDKHTASAYVIALRGLKLLNVT

SEQ ID NO: 7216 - protein, 213 aa, Halobacteriales sp.
MEFDHWRREYEKRRASLQQCGSHHAHENIQAVGRKETGRFTMMLHRIANGIIAEAAQNGCTVIAFEDLTGIRDRLPGASWGHEWAFERLHEYVEYKAKMYGIAVEKADPEHTSRRCSTCGFTHHGNHDREAFECLKCGYENHADYNAAKNIGLRYLRCNQTGDGGGAPVGVRLNRGTLNANREFEPPAGEPGQSGSPRENTTRNEARSSDRAK

SEQ ID NO: 7217 - protein, 417 aa, unknown
  TnpB Polypeptide
MSEVQRRVTYRLYPTPRQAVALEERRALHCELYNAAIEERREAWRRQGRSISYYDQQNQLPEIKEVRPDLEPLGSHALQATCRRVDHAYKAFFKRSREGKTPGYPRFKSRRRFKGWTWPDPTGWKLVAPEKRRRHRPRGAVLRVSDLGDIKIRGRARNEGEPVTCTITRRGGGWYASIVIDCEPVRRHGTEKVGFDWGLDSFLMFDDGSKLENPRFIGKEEVRKLRGLSKDLSRKRLGSKNWRKSARRIARFHDRIERRREDFQHKESARIVDRSALIATEGLDTKELIEKEDQPRARRRAILDGAPASFLQKVRYKAEEASTGYKEVPTVRVKPSQRCPGCFRLCGKKRLDEREHHCPFCGWRGPRDQASAKVCLQWAEGRRLPGRGPASTVEGWARKDPLGSRKPNARRASASGR

SEQ ID NO: 7218 - protein, 513 aa, unknown
  TnpB Polypeptide
LIPPEGLEPSSLPSDGSDLSIDLRREILPAQRVDVHYFCVLRAPQAGLEPACAALGKRCPSFGPLGRARGTAEDPSRPFRTRTGIVRLSIPRRGNLGLQAEEEAPPPLTSIPIRNTLRFVKLRYRFRFYPTEEQERVLARVFGACRYVYNWGLRLRSDAYKNEKLSFTYVDSSAALTALKKTPEHAWLNEVSSVPTQQALRHLQTAFVAFFEKRSKYPAFKRKAGEQSAEYTRSAFSWHASDRSLALSGVGRLKIRWSRIFRSEPTTVTVKRDTAGRYFATLCLDEEIEKLPAIHRPVGIDLGITALATLSTGEKIENPRHIKRLERRLTRAQRDLSRKKKGSHRREFQRLRLARIYAKLSDARMDYLHKITTDIVRRFDVVSIEDLNVRGMAKNHSLARAISDAALGRFRRMIEYKCAWYGPELRLVDRFYPSSKRCFDCGYVLETLDRGCREWICPQCGKKHDRDENAAKNILAAGQAVTARGGTVRPIRRGRSGASLRSANQPESTHKAS

SEQ ID NO: 7219 - protein, 458 aa, Caldilineaceae sp.
MPKSATSHLKGLAKSHRIALFPTDRQATLMMEHAGWARVAANWARDEFRRAWFTGEGEPNEWLSDMDLRKRFNAVKREAFPWSRKLSQYVAKNAIIHMGRGLDAWGEYCQARKQGRPHRKTGFPPVRKRHRKLAFTPSNGRNSIQVNGCSVHLPRIGRVRMREELRFEGDIMGVTVSKKGGRWYASFTVDTCEPAPDTRPGPDIGIDMGVKTLATVWDGEEWEEIANPKALARALKSLRCLDKAIARSLHTHGKHNPSQRRDDLYAQRNRLHFDIANLRADHHHKATTQIAKRGGTVKVETLNVDGMKRNRRLARAISDAGMAEFVRQLEYKCGWYGTAFEKVDRWYPSSKTCSACSACSACGAVKQSLLLSERTYRCNRCGFECDRDENAARNLQAYTGHKEPARTLNALPLPAARSAGGEMDVETCRTHRREACARSVKRLPDNPSAMPTGNGGQV

SEQ ID NO: 7220 - protein, 391 aa, Acidilobus sp.
MSAGDEGELTLTVRMKVSPEPENQQAVLNLMRRYRDALNYSIRVIITNKALSLSKAHRLLYKELRERYGLPSRAALDCYREAIAIAKSWLRNPRRGDMPVVKGLSMWLTHELGYRVKGDRVELIGGYRLRVIGWDRRYDDFPNREARLVFRGGRFALYVTKCVPRPAKYAPKGVLAVDVNERQIVVGNSRVEQRIETPIERALHYMRLAEGLKKKYSSPRYNAWLRRRGIKRRVKYFHRKARNIIEDWARKTAHTIISLAKQGQLAVAREDLTGLIEGLRRLPKEHKTALIALGYRRLAFWVDWQAEKGGVPLFVVDPADTSSTCPRCGAELVEVGYRRLRCPSCGLEADRDTIAVLNIERRALSQMGGSLTTPTAPQVTDVSPNRWGEPP

SEQ ID NO: 7221 - protein, 413 aa, Moorea sp.
MIIIEFKAYGKKHQYQAIDEAIRTVRFIRNSCIRLWMDNKQTGKYDLSKYCKVLAREFPFANELNSTARQAAAERAWSSIVRFYDNCKKKIPGKKGFPKFQKNCRSVEYKQSGWKFSPDKKSITFSDKKGIGKLKLKGTWDLWRFDKKQIKRVRIVRRADGYYLQFCVSVDVNEKLKPTGKTVGLDVGLKDFYTDSDGNTQPNPRFYRTGEKRLKFYQRRVSRKKKGSANRRKAINKLGREHLRISRQREEHAKRLARCVIQSNDLVAYEDLRVRNLVKNHCLAKSINDAGWYQFRKWMEHFGTKFGRVTVAVNPAYTSQNCSECGEVVKKSLSTRTHACKCGCQLDRDHNAAINILEKALSTVGHTGTWILNPNACGESTSTFPDSGLVEQVGSLKQESPRLMTGECHQPTS

SEQ ID NO: 7222 - protein, 536 aa, unknown
  TnpB Polypeptide
MINDEYKKILRKYHKLSDRHILVAEADMPYSDVLKVVALSDKIRKAGNELVGLVRKNYEQLMRTKRYRKLLFLYGNTEEKSKRKDLAVQLNVMQKSYNVTWDYCRTSMISIGKKYGIDAIFALTKAEDIWRGMEKCLYGNGKTLHFSKHGDLTCIRAKQINRGIPISVKDNKLQFKLGRTVFGIKVNDRFQTDEVNAVLEYLTKPEIIDEKAAQTLLDEAYCIDTYRPCYATLVPKLIRGKYRVYLHLTIEGKAKPKYDRLGKRRHKLGKGIIGADIGTQTIAYTSDTEVDLKNLAERGNSIQKSERLERLYYRAMDRSRRTTNPQNYNEDGTIKKSRKTWQYSNRYKKLRTKHQELCRINAINRQLAINEDANHLRSLGDIFVTEPKNASKLMKRTKETTVNSKGKFNKKKRFGKSIKNRCPSGFQATIEKKFKVTCGTYIEVPNNYRASQYDHTADDYIKKKLSDRMYRLTDGTLVQRDWYSSFLLYCYDHKTKNIDRDRCISEFKKCYSKEKALVERIKANKIKVLNSGIKIA

SEQ ID NO: 7223 - protein, 374 aa, unknown
  TnpB Polypeptide
MLNTLTYAVRVETTPDQSKTLSDTCSAYLDCCNMVSKTAWEHRTLSQKTLNQLVYRRLRDEYHVGAQMAQSSIIRVIGNYRTIKAMHGSPWATSQPEYHSPGYDLVWNRDYSILKDGRLSVNTLEGRIKVPVNWTHMPEPYRHGKFGTARLLNRNRKWFLLIPSTVELPEPSRPQQVVGVDLGIRFLATSYDGDGHTDFYDGKEVKSKREHYKRLRASLQKRGTRSARRRLRNIGKRENRWMRDVNHQVSKALVSRQSKPTLFALENLEGVRHATEKVRVQDRYVQVSWAFYQLRQMIEYKAKKAGHSVIVVDPRYTSQTCPKCGTVRKANRDKRLHEYHCSNCGYRSNDDRVAAMNIQRLGYQSLVESQSDKV

SEQ ID NO: 7224 - protein, 433 aa, unknown
  TnpB Polypeptide
MFEAVKVALDPSPAQERLLLSHAGAARFAFNAGLARVKAAMDAGEKPDWSYYSLVRWWNANKDALAVGEDGTPWWRENSKEAANTGLRSLAAALSNWSKSRKGVRKGRRVGFPKFKAKDRTTPRFAYTTGFRLIKGDPKALRLPKVGRVHCMENVAERVGDARVLRMTVSRRAGRWYAALTVERDDKPVTKLPRGGAVGVDLGVKTLATLSDGTVIKNPRCLAASERRLKKAQKALSRKVKGSRRRAKARAKVARIHARVANQRLDAMHKATTWLAQTYSDISVEDLNAAGMVKNHHLAKAVSDAAFGEFRRQLDYKTARTGAVLHVIDRWYPSSKTCSNCGAVKAKLSLSERTYRCDGCGLSIDRDLNAAINIKVAGSAPETINAHRGAVRRGSRNDCATRVPAKCEPSRHGGKPCRLGAGVRKGALQAKSN

SEQ ID NO: 7225 - protein, 408 aa, Phormidium sp.
MYVNISFRDLQNVMFKAFKYRIYPTTAQTDLLVKSFGCCRWFYNYSLNLTTETYKKTGKGLSRNEIIKLLPQLKKEYEWLTEPPSQVLQQVALDLSSAFLNFFEKISKYPNFKKKHQRQSIRFPQGMKLSGDYLTLPKLGKVYCKVSRIPEGEFKSVTVSMTPSGEFYASCLFDDGKGKPEPIKDGKAVGIDLGITHFAITSDGTKHGNPKHYRKYEKKLAKYQKRLAKKQKGSNNRNQARKRVAKVHQKITRCREDFLHKLSRKLVDENQVVVVENLAVKNMLRNHKLAKSIADLGWGQFCTMLKYKAEWDGKIYIEVDRFFPSSKTCNHCLHQVGEMPLDIRSWQCPKCGTLHDRDINAAKNIRDEGLRMLEVGHTSFASGERVRPSKGTAFVRLRSVKEESSATA

SEQ ID NO: 7226 - protein, 418 aa, unknown
  TnpB Polypeptide
MAKQTVTRTHVASIRNAKQVRDGLDSLGFAASKLWNIARWTCDRIWSETGHIPGHAELSSYLKSNERYADLNAQSSQRVIQELAEAFKSWYGHRHNGNQNANPPAYRKHGDQHPRSTVTFKEDGFKHDPENGRVRLSKGRNLKDGWSDFILCEYDADPDVDIENVQQVRAVYDRGEWQLHFVCRHEINPDPPGDETAGIDLGISNLAAVSFGDEGVLYPGGALKEDEYWFQKERAKCDDSASVEADRLDRKRTERRSHFLHTLSKDIVAECADRGVGTIVVGDLGGIRDGTDWGDHGNLDLHGWAFDRFTTMLEYKAEERGIDVEQVDERGTSKTCSGCGTKDGSQRVDRGLYACESCETVANADINGAENIRKKVLPSLPCDGGDRDNGWMAQPAVRLFARSEGRFAPREQVGDCKP

SEQ ID NO: 7227 - protein, 306 aa, unknown
  TnpB Polypeptide
VLGADWGIHTLLTATAVDEHHEQVGRPFFLNTGGFDGRQARTRRQIDELKKKVATYEQQRDALPSDDPKRAWFNQRLALYHREIDRCWRKYEHRNRALAHLASNVLVLLARVHGCSLLSMESLKTLKSTGRGKGVRGRWRNYRNNSQIRGEIWRLLRYKCHLIGLRFHTEQPRGTSHTCPHCGLPAKTYRSPSDHREAVKWGRWLFCDTCSYNGDRDYCASVNIARLGVAYLVQMKQTGKARSCPITDPRVKPVSYTGAGAALLLPPPSCHARPMVSGKICYYPGWLGSAFLQSSHKKHLFLRLCG

SEQ ID NO: 7228 - protein, 374 aa, unknown
  TnpB Polypeptide
MANKALVYAIYPNEKQNIQCQKTFGCCRFVYNQMLTVQKERHEKREKHLSKTKANTYCNQHLKKEHPFLKEVDKFALTNAIYHLADGYGRFFKHLSRFPKYKSKHKAKKSYTTNITNGNIEIGDNSIKLPKLGWVRAKIHRRPKENWKLKSATVTQNRDDTYQVSILFAYEESISPAAVTEATTIGLDYKSDGLYISSEGDICGMPHYFRQSADKLAKAQRKLRHKTIGSKNYNKQQKRVARIHRHIANQRKDFLQKKSTEITNLYSFVCVEDLNMKAMANRGFGNGKATLDNGYGMFLTMLDYKLRDRGDQLIKVGRFFPSSQLCSHCGFKNPLVKNLSIRHWDCPNCGKTHIDRDINAAKNIKKEGLRLLTA

SEQ ID NO: 7229 - protein, 419 aa, unknown
  TnpB Polypeptide
MRKCIVLNIVDLTPKKSKLLLRVFSEYLKVSNRTLKQLPKASSSSELHHLTYSIIKKTSFLPADIIEEARKDIWAKRKKIKGKIANASIRFNKDLFKFVKTERNNPCFKITYSPKKSFVIPVKLDKQLQRVDSFTSNGWTFDNINLLKDGRIAVVLEKEFEEPERDKRFILGIDIGSSTLAAVSIFDTKTSKVAKQLYFGRDVVLRQKKYSERRAKLQSLADKGSERAKNSLNRLKHSQENFVKTRSGQIAKEIILLAKKYEAYISIEKLKNIRGKRGRFNKQANAKINRIPYYKFKEFLKSNAEQLGVFVQEIDAYHTSKWCPHCGAVNEGHCPGNYSLYKCKECGLILNSDRKASLAIAVKSVLERTNNHSLNNLDFVLISNTKVPVNGLIRQDDAGFCKVVVQHINQPIESLPFQR

SEQ ID NO: 7230 - protein, 455 aa, Unicellular sp.
MAKVIRTDKWRLSPTKYQLSILKDTVAIYRDMVRRLISIVNLHWKKIAVCEAKQRYVEQLFHATKENPNPKYNKFFGLGTKLYKFPSYLRRAAINDSIGHVSSFQTKYRDWQGKIRKKRFAKPPRLNTRCGVYPDLYKNQCIKVASDYTIAEIKVYKNNDWSWEQITISSLSRRHLIPKAKQLSPTLVVKNGAASLSVPYQIPNLKTVATDKYCGVDIGINITSVCSIVDKSGFIHARKFIHDGTALDKRDKHLARIKRKASLTKKLHKGFAKLHYRKAANINKNIAFSTAKQIVNFAIDNNATTIVIENLRNWKPKGGKRKSSLKQRFHGWVKSAIADRLEQLGQEYGIKIASVYARGTSSFAYDGTGNVKRDKDNYALGSFATGKRYAIDLSASYNIAARHIAYKLKLATKYGKLLVSQSSDSKPRSWVSLSSLWGSTNNGDEPDTTTTARSA

SEQ ID NO: 7231 - protein, 435 aa, Unicellular sp.
MYSCQQILVGKNNDLINILEFLCEESHKLTNMGIYLARQLYFKVKKIIGKYDLEKEYKTNNHYKVLHSQAAQQILRSVAESFASYKKLVKAYKQGEITDRPRVPNYRKKGGLATVSYPKQALKLKGNQIRVPLGKTCKRWFGIDSFKIPMPSNLDFADIKELRILPRNKCFYFEFVYTKKVEKVKLNSNNVLGIDPGLNNWLTCVSNVDTSFIIDGKHIKSMNRWYNKQISTIKENKPQGFWSNRLATITEKRNRQMRDGINRAARIVINHCLENNIGTIVFGWNKRNKDSINIGKKNNSEFVPIPTARLKNRIAGMCEQYGIQFIETEESYTSKASFLDGDYLPTIGEKPQDWKPSGRRTKRGLYRTANNWYINADCNGAANIIRKVVTNLSILGNVSLERVSRGILTCPQRYRLWSVNANVKQCVFRPLQTPA

SEQ ID NO: 7232 - protein, 471 aa, Unicellular sp.
MGKSKAKRKTKKRKPDSMIRTDVWNLKVNKYQKKLLLLTVAEYRKFLKPLVFIVNAEWKIIGNLSDKEKINYLEKSIHVTSKNIDTKYLYYQKVINKYPSFRKFPSYLRRAAIADAIGIVSSFQTRYREWQSGRRKHKFVRPPRLTTMCQSYPALYKGQQVKYNNDYQTVDLKVWNGCDWVWLEKIPVKGHGLNRHKVIGNQIKSPALVVNSKTCQLSMPVKIKPIKKEDADYVCSVDLGINNGATCSIVGHDGTVKARKFINRARDIDRRNKRRMMITKKSKQTHKKTGQKFVKGFCQGLYRKSSNINLEISRYISREIIEFAKLHNVKVIVIEDLAGWKAKAGKRGTLMRQKFHLWCHQKIVEILNNRWTELGGIVQTVNPKYTSAYAFDGSGKVKRNKKNYSLCVFPSGKQYNADLSASYNIGARYWYSVLIGDKYFSRVFVSERSTNTLRTPVTLGTLRSLEPSGCK

SEQ ID NO: 7233 - protein, 438 aa, Haloprofundus sp.
MHIHRTYRAKILNHSQVEEMLDLHGWSASKLWNVANYHSREQWGETGEIPDDSDLKRELKTHSKYKGLHSQSSQRVLEELAEAFNSWYGKRKNDSRANPPGYRKKNYYDNDGNRVHEEHPRSTVTWKQKGIRHDTKNNRVRLSKGANHKEHPRAWEYILVEYETRPKVTVENLQQVRAVYDKATGRWELHLVCKHEVETPDAPGNESAGVDLGICNFAAVAYSTEQADLYPGNRLKQDGYYFPKEIAKCDDSGGERATRLHAKWSERRTHFFHSLAKHIVEKCIERGVGRINIGKLAGVREDENGDSKNWGKHGNLDLHGWAFDRFSNILEYKAKVEGVEVVEVSERDTSKTCCVCGRKDDNQRVERGLYVCEEHDDAFNADVNGAENIRLDINGSNSESSTSLDEDRSTGWLAQPGVYLHDLSHGFSPREQVVDCKP

SEQ ID NO: 7234 - protein, 390 aa, unknown
  TnpB Polypeptide
MVRGFQYRFYPTPEQRTALAKTFGCVRYAYNWGLSRRSTAWRERRERTSYGQTSAALTELKRQPEMAWLNEVSCVALQQTLRHLQTAYVNFWQNGAKYPTFKKRGKRQSAEFTRSGFQWKNGQLALAKIGKLDIRWSRHFSADPSTVTVSRTPAGRYYVSFRVDEPLEIFPMAEGAIGVDLGLTAFATLSDGIKHHAPRPQRRMMAQLKRAQKALSRKRKGSRNRAKARLRVAKIHQKVGDIRRDHLHKLTTDLVRENQTIAVEDLNVQGMMANHTLAGAIADSGWGEFVRQLKYKSEWHGRTFVRVGRFYPSSKLCSVCGFKNDSMPLDIREWQCPRCGVMHDRDVNAARNILAAGLAVTACGGSVRPERRQRRSGSCRRSTNRLAACA

SEQ ID NO: 7235 - protein, 382 aa, unknown
  TnpB Polypeptide
MRAYKFRIYPSKKQEELLNHHLWLAKNLWNELLEECKQMYQDFGYFPTKNTLQLMVKNYGLYSQTEQEIAHRVYNSVMRVFKLKKKGVKCGFPRFKSFDRMKSLYYPQYETGFWLDKKLKVTPFGEIAVKKHREIRGRVKTLTLKREASGKWFAVFCVETPEEIPKENKGEAVGIDLGLKTFATLSNGMKINNPQHFKKYEERLAFIQRKFSFHKKRTKNYKKVKIRVAKLHEKISNTRRDFLHKVSTELVNDYSFIVSEKLASQEMVKENYGKQINDAGWNMFANMLAYKAEGAGCRIVFVDPKDTTKECSNCHEIVKKDLSERMHNCPFCGLSIDRDLNAARVILMRATPGQGGSNACNSVMERDVALATSMKQEAHAYS

SEQ ID NO: 7236 - protein, 372 aa, unknown
  TnpB Polypeptide
MKIMRAFKTELDLNNVQKTACIRHAGAARFAYNWGLARKKEAFANGQKTPTAFDLHRELNKLKRTELSWMYEVSKCAPQEALRNLDNAFAHFFRRVKEKRAGKNVKVGFPRFKSKKNGLGSFRLTGIIHVFEKTIQLPRLGLVRLKERGYLPTSGAHILSATVSEKAGRWFVSLQVKVEVPDPVMEDQPVAGVDLGIKRMAQVSDGTYFDNPHALKSTLTKLKRLQRVVSRRQAGSANYQKSVKQLAKAHFRMTNIRRDALHQATTSLAKTKSAIMLENLNVSGMMKNHHLARAIADVGMYEFRRQLQYKGQWYGCAILLADRFFPSTKRCSQCGSERDVSLAERVYSCEACGQVMDRDLNAAINLEQLLYC

SEQ ID NO: 7237 - protein, 409 aa, unknown
  TnpB Polypeptide
MIEIVNKAYKFRIYPTDEQRVFFSKHFGCTRFIYNHLLSIRSNAYKNDGVSISGLECKKLIPLLKKQDEYTWLKEVNAQSLQEAAICLEKAYKRFFDKSLKAGYPSFKKKGNHESFTVPQHFTVNVKDSQIFIPKLKTGIKTVFHRSLKQVEKLCSITISMTPTGKYYASINVEETIKHKRPVIKIEQSTKTVGIDLGIKDFLVESNGNKINAPKFLRDAEIKLKRAQRKLSRKQKGSLNRKKQRLCVAKIYEKIVNQRKDFLHKESNRIVNENQVIYLESLNVKGMMKNRHLSKAISDCGWGEFVRQLKYKAHWKGSIIVQIGQWEPSSKLCSTQGCDYKHDSLKLSDREWTCPQCIITHDRDINAAKNIQQIGLEEPELTPVKKTASVFSIKKIQAASLKQESLASV

SEQ ID NO: 7238 - protein, 489 aa, Vulcanisaeta sp.
MLRRAVAVELEVTRELNKLLYSVESVYLGIVREVVEYAVANNVTSATQLQGLFYSKYRGEYQGLHAHLVIQAIRQAAQIAKSFMERKKKGLVSKPYPEVKTVSIRFTEFTWNYEQFIHSTAPVRLELSLPNSRTEVWLRPHRRFWLYWWRVLSGEAELASTLIIKRKANKWYAIFIFEIKPREEEPQSIVAFDINENTVAVGKIDLPSTVSKVVNWNRQYLTPQLYMIRTDFGRLARRYEKVRNAIIERLKPHFALPNGNYVNITNTREYKKFVRKLREGDRKLGRVRHVANELTKTPAIIVTEELGERPQDEMINGVGKGELRHRIKQIPFKKLERAVEGKALERGSKLVRISSYKNSRVCPIHFTRLEKTDDWHTLYCPKGHYVHRDHASVMNMAWKLTPEAWTKAFWWNMKNLNKNMDWRKYEGKSNPLIPYEIVQYIHAVLKTFVARLERCPAMLAQGNPMNHHRIQNEGGGEETSPPFRVGRGQ

SEQ ID NO: 7239 - protein, 301 aa, unknown
  TnpB Polypeptide
MESLLGCLNWLYNQALESRKTAYEQRKESLSFYDQCKWLTQLRTANEHQLGEIAIGASRGMLKRLDLAFQAFFRRVRAGEAPGFPRFRPISRCRTIDVADPHNGMVRLHNGDYLIRLKGFPRLRVRSARPLPLHAPLKAVRLTQRGHRWEASLVYAVDKQPLAPAVAAVGIDLGIRKRMTCSDGTVVARAQRDWKRKRRLQRSVARGQKGSATRRKRVAALQRFDRKQYIRERNACHRATSGIIRQHGLIAVEALKVTNMTRSARGTADRPGSNVKAKAGLNREVLAQNWVRQANWCKGRG

SEQ ID NO: 7240 - protein, 460 aa, unknown
  TnpB Polypeptide
VIAGISFKSSPTKAQKIVIGQWLGCARFIWNAKCDEDTYLSQFARRYLPIGTYPPINQTFSQYKSEELSPWLSDCPSQILRNSAVNWHKTYQNFLKGRCNKPRRKKKSDRASIYLTRELFQFETCADGNIRLFIGSKRNNIGYLAIKFHGPFQKPNSLTISRKNGKYRFSFCYDDGINSDGLCSAQEHLDHLKTLEKEDLEKFTIGIDRGVVRPVQAGSKVFDFSKEQKRKKQGKEKYIKRMQKRLSKQKKHSQRRKRTKEKLSKSYEKIANIRKDFCHKTSRAIVDDENVKVIILESLKTSNMTKKPKAKIDEKTGRWQKNNRRAKASLNRSILDKGWHQLEAFLKYKSYWAGKALFKVPAFYTSQECADCGHTHPNNRKSQELFVCDCCGYSGNADHNAAEVIKKRAINLILDSGTELSESGELLGKGRGAERKTRGAIANRAHGKEASKKKERALVA

SEQ ID NO: 7241 - protein, 447 aa, Halorubrum sp.
VKRTNTFVVRPLSDTGAQLLRDLLDASAALWNEVNYQRLMRYNDEDGFEGDIWDADTGSLEGRYKGVLGASTAQQVIRKNSEAWRGFFRVKEQYHDESNTSITDHPEPPGFRGNEREGRQLKTVIRNTSYTIEWGTRSRLEILVGKELKDRYEHTGRLRLEIAGNPNWPEYEKQGRLDLWYDETADTFRASQPVTVSDDIRDTPLASEKAALDIGANNLVACTTTTGEQYLYAGRGLFRRFRGTTQEIARLQSKIEEGRDSSARIRRLYRKRTRRRDHAQEALCRDLLERLYEEGVDTVYLGGLTDVLETHWSVQINAKTHNFWAFKKFSERLACTAEEYGISVEVRSEAWTSQECPQCGSRDRTMRHQDTLTCPCGFEGHADLTASETFLERQIGDEARPMARPVRFEWDDHEWSESSYSPVRASPKEQRTNRSTSDGKIATGETA

SEQ ID NO: 7242 - protein, 451 aa, Bacillus sp.
MARKKAIKVLRKKKKAENIQRFTQKQNIGRASLTAKEFRLLQRMSHSSKALRNVGLYAIKQSYLNTNKMATVKEVDAAMQADMNYWGVQSNSVQAIRRSLLEEVNSFFKALASWKENPEKFTGRPKFPKYSGSTEKRIIEIYQVPKVDKDGYWAIPMNVGFRKRFGSIKIRMPKNLLNKKISYIEIVPKQKGRFFEVHYTYEMQISQMKKQPTTTMNALSCDLGVDRLLSCATSKGDTFLIDGKKLKSINQYCNKAISNLQQKNIKNGISKRVVTNAIAELWNKRNNQIDGYFSQTIGLLFKKVKEFNIDTIVVGYNAGWKQESDMGKKNNQKFVQIPFQKLISAIENKCLKESIRFMMQEESYTSKASFLDRDMIPVWSKDEKTNYHFSGKRITRGLYQSKSGQCIHADINGALNTLRKSEVVELGVNLKVRTPILLKVQKRKAVASRIA

SEQ ID NO: 7243 - protein, 502 aa, Bacillus sp.
MPKKEKPTFIIELKCKTETWQQHILDTRFELARKLYNATLSNALKQIKKMKESTHFKRNLHLYRETKSLLKKTNHKSKQHLLNKQAKNYRNILDSIRLSFGLSEYGLHAYVAKPRQAVADHIDSLTAQKVASSVWRAVQKVLFEGKKAHFKKFGTLTSVEGKTNTSGIRFKSNTVHWNGLVLPVKSRKNDLFVHESLALHRIKYCRLVKKIIRGKSVYYVQLIMDGIPPAKRIHSTGAFRYKVSPDQRVGIDIGTSTVAVVSETEVILQPLASKVDALDKEKQRLLRKMDRSRRATNPHRFLSDGTVKKGKKEQWVRSQSFLKTLFQLKEVYRKRQAVLKEQHGRLANHVLSLGNEVYLEKMHFQGLAKRAKETKINEKTGKYQRKKRFGKSIGSYAPSLFVKILKQKLTYQGKELHEVNTITFKASQYNLMDNTYQKKKLHQRWSQIGEHPVQRDLYSAFLLMNSDDTLKQTDKCKRSLFFCKKHHHFFKFLRNNIYTSPK

SEQ ID NO: 7244 - protein, 402 aa, Escherichia sp.
VKRLQAFKFQLRPGGQQEREMRRFAGACRFVFNRALARQNENHEAGNKYIPYGKMASWLVEWKNATETQWLKDAPSQPLQQSLKDLERAYKNFFQKRAAFPRFKKRGQNDAFRYPQGVKLDQENSRIFLPKLGWMRYRNSRQVTGVVKNVTVSQSCGKWHISIQTESEVSTPVHPSASMIGLDAGVAKLATLSDGTVFEPVNSFQKNQKTLARLQRQLSRKVKFSNNWQKLKRKIQRLHSRIANIHRDYLHKVTTTVSKNHAMIVIEDLKVSNMSKSAAGTVSQPGRNVRAKSGLNRSILDQGWYEMRRQLEHKQLWRGGQVLAVPPAYTSQRCACCGHTAKENRLSQSKFRCQVCGYTANADVNGARNILAAGHAVLACGEMVQSGRPLKQEPTEMIQATA

SEQ ID NO: 7245 - protein, 693 aa, unknown
  TnpB Polypeptide
VKFLPVKICRSGIRSILDSQLDLYLTNINNNIHAQYWNRLKEYINIKKNVKENKRIIDSDPNKLPKDKIKEKGDITRVTTALQFDLLTNNNNSNDPDYASIFQTAKIPNLSEYKEVDLPIKIEILKKKGYPKILEELYDDFTLHRQMLNNEQPPDDRLNLLIKCVNDKEINYNNNREKIRLEVEKERIYLEQSYNYNHQFSRNPTLYLQSLFRINNLLKEDEVGKFHSLPLFKSAIPPYITLTTSSVEKLFTENNLSNGEIKDKNKDKTKENKSISDYDKWRKHFHLFKNDTIENKQGTELRKQFRRKGYHFHYILTDGVGATILFENNKISNKKNESKTKYVDKAGCPSNEKEDTPYLSDENIDASVYDGLNVVAIDPNKVDVLYCTDGHTDTYKNRINPASNDIRKKKINTFRYTKPQINHESGKRKYENIINDAKKVSKINDIESELSHTHPKSNNYKVFVEYLEVKIRTLSEKLLNHYRYDKPPNVIAEVDDASYRKMRLNYKMNLDRSESNMLNNFKKKFGDVNETIVCFGNYGQGHLKGAEPVKGKEYRRLFKKRGYKVFLIDEFKTSKLCHSCHGELKYFHKKSDRKKKENAEDVEDERDAYVHGVLRCKNCYNMESMNIAERFGKLMSIKKNENPKIWKDGKKYKVWNRDLNASLNILMKAKYEILKKDTNIIFPEIFSRKILDV

SEQ ID NO: 7246 - protein, 266 aa, Acidithrix sp.
MARMLILSCKNLRIIVKDDVIEIHYAFKKPPGRPVGADVIAVDKGYTEAFVDSDGDTHGMGLGKIMTEYSGKASKTAKARNKLHALEKKHREAGHTAKADRIKTNNLGTKKINARKNKAQKRIRNIAFKAAHSVVDKASLVISEDLSRPIAKKKPQKKYNRKMSAWAKGTLAEALESTTQQAKARNVLVNAAYTSQMDSNTHLLEGKRVGDKFHCANGDVLQADFNAALNLRHRYFDHEITLYTPHREVRRILLARSSGATMRQGA

SEQ ID NO: 7247 - protein, 436 aa, Saccharopolyspora sp.
MPRLWSSYFAVTVGAVSADAVQRYIDTQGGARMKRSYKFLLRPTTRQARALGDMLDDHRHLYNAALQERRDAYRHPSATSVRYGDQSAQLRDIRTADAEGQGRWSFSSQQATLRRLTKAFAGFFRRVKVGDKPGSPRFKGRGRFDTVEFPKDGDGCRWDSTPDDRQTRVRLQGVGHVRVHQHRPVRGRVKTVSVKREGTRWFVVLSCDEVPVEPLPETGNTAGIDMGVVHFATTSDGQHVENPRCGRRLADELAEAQRHLATSPTRKRARDRTKKHRDAARKVAKLHAKLRRQRADYHHKTALALVGSYDTSAVEDLNIAGMTRTPAPKPDPDQPGTFLPNQATAKAGLNKSILDAGWGQFLGTLADKAEKAGRRVVPVDARNTSRTCPDCGHVDGGNRVSQAEFGCQRCGYTANADVVGAANIAFRAGLVLRSAA

SEQ ID NO: 7248 - protein, 210 aa, unknown
  TnpB Polypeptide
LNIPMNNGIGIDVGVKDLAICSDKKVYRNINKSKKVKRLEKQHKRLQRQISRKYEINKDGLKYIKTKNIIKLEHKNRKVQHKLNGIRNNYTHQTTCEIVKRKPSYITIEDLNVSGMMKNKHLSKAVQQQSLYEFSRQIKYKGLWNNIEIRIADRWYSSSKICHECGHINKILALNDREWVCKSCGSVLDRDYNASLNLRDTDNYKIFKVA

SEQ ID NO: 7249 - protein, 163 aa, Methylobacterium sp.
VANTREQHLHRVSGRLAREHPLVVPEDLRIRNMTRSAAGTVEEPGTNVAQKRGLNSSILDAGWGKLVQFVRYKAERAGGGLICVDSRGTSQECRRCGAVAAKPLSLRRHVCPCGLDEHRDVNSAGVIRDRGLAVKAASEGGQPLGDADVGRRAVRRPGTLAAA

SEQ ID NO: 7250 - protein, 254 aa, Methylobacterium sp.
LLEAAGLRHEGDRIRLKGFDRPIRLNHDRALPSDAKILGVTFTRKGRHWYAGFTVETTEVVAVTSPAGEAVGGDLGVEALLTLSTGERIPNARPASRRERERVSARLAREHSLVVLEDLRIRNMIRSAAGTVEEPGTNVRQKRGLNRSILDAGWGKLVQFVRYKAERAGGGLICVDARGTSQECRRCKAVVAKPLSLRWHSCPCGLDEHRDVNSARVLRDRGLAVKAASEGGQPLGDANVGRRAVRRPGTLLAA

SEQ ID NO: 7251 - protein, 360 aa, Methylobacterium sp.
VDTAVDQSVLKAFSFRVKDATSGKRLAALGEAVNTVWNYVNEISARSANRGPVWATKKQLRDLTKGAGKLLGLPSQVVQEVIDEFVLRRRDAGHPKLRWRASRGSRRALGWVPFTNQDIALEGEAVLLRGQRFRLWLHRAVEGRIKSGNFSQDARGRWYCNLVCEIPCRQGGGREEFGVDLGLKSVATCSDGTRLEQARFYRDLEPKLAEAQRKGRKRQVRTIHAKIANRRKDTLHKFSRALVDRARKITVGDVSASAMAKTRMAKSVLDAGWSTLRGMLRYKCDHAGVAYAVVDEANTTRACSSCGCLSGPTGLVGLNVRRWTCSECGAEHDRDRNASVNIARLGCETPRPARHGSPAF

SEQ ID NO: 7252 - protein, 409 aa, Methylobacterium sp.
MIARGFRFKLDPTPEQDALLRQFAGVCRLVYNLALEQRATWGRKHRIGYVGQAAELTRLRAELDWIRAVYVSCQQQALRDLDQAFQNFFAGRASYPQPRKRGLNDSFRFPGREVETKRLNAKWSAVRLPKLGWVKFRDTRPMQGTLKNATVSLDATGWHVSFAREIAHDARAPCPGRVGIDRGVATTLALSTGEMLRLPETLERIEVHKRKAQKVVARRKRGSNRRRRAQARVSRLQARQARIRRDFHHRVALDIARRFGVAVLEDLNTRGMTASARGTVGELGRNVRQKAGLNRVILNASWHQFATILAYKMEERGGQVVTVPARFTSQTCAACDVVDARSRESQARFVCVSCGHTDHADINAAIVIKRRANSALLDVEGLHQRPYEASTGRDLTVSENPRPLGRGRC

SEQ ID NO: 7253 - protein, 371 aa, Paraburkholderia sp.
MPVKRAFRFRFYPTAEQEQRLAQHFGCVRFVYNHMLARREQRYKDGLKSSYVDDAAALTALKQTPGCVWLREVSIVALQASLRHLETAYKNFFARRAGFPRFKRKRAAQSYSLMRNGFNLRDGKLTLAKIAAPLDVRWSRQLPGTPSSLTVSRDAAGRYFVSLLCDDEVAPLPVCDKLFAADLGLTHFLTFADDQPPLSPPKFLAELLHRVRRLSRALSRKQQGSKNRNKARQRLARLHARIADSRKDFLHKLSTQLIRENQAVFMEDLCIKGMMRSHLARSIGDAAWSELLRQLAYKAAWYGRTYWQADRFFASSKTCHACGFKHKSLPLNIRQWACPACGEIHDRDRNAARNILNAGLLATGTAGRAEP

SEQ ID NO: 7254 - protein, 453 aa, unknown
  TnpB Polypeptide
VTLNTTIGVTGAFLVCMISTAQKIMLIVDRKTASALNRACGCARYAYNWARDTWFAKKKAGQKAVTCAELRKEFNAQKADWMYESPKGSMDQAIKNFVLAKKRHYENPDRFGFPKRKKYKSKRSFYIENDKARIADPTHIKLPLIKTPVRLAEPVRSECLSGKINNFVVSKGSNDRWYISISYTFDDTNSLYGTDDNGIVGIDMGVKTLMQLSTGECVANEHINKLHYKRLKRYQRMMSRRKYNSTHYKDIKNTFDKKNAYIKNFRKDLIQKATTEIVKHNMVVAIEDLNVKGMVSNHKLASAISDCGFGMIRRFLEYKSAKYGTLLLKVGRFFPSSKKCSGCGHVKEKLSLSEREFICEECGLVIDRDTNAAINILAEALFNELNNRFNTDIARRKFTPADLVALATSLSGCSETTEVDAHCLLTRDGRATMVDEFFNRLWNQVANATINCI

SEQ ID NO: 7255 - protein, 133 aa, Okeania sp.
LIIPISAPTQLIRENQTVVVEDLAIKNMVKNHNPPPSPPGREARGVGSDASWGEIVRQLEYKAQWYGRELIKIDRYFPSSKRCSSCGHVVEKLPLNIREWDCPECSSHHDRDINASINILAAGGAVSVCGARF

SEQ ID NO: 7256 - protein, 361 aa, Okeania sp.
MYKSIRTKLKLNNKQKTLLAQHAGYTRWCYNWALSLWNQAYKDGYKPNARKLREVFTNHTKPLYPWMKNLSSRVYQYAFLNLGEAFKRFFKGLGKYPKFKKKGRSGSFTIDNCGKPIELNGWSHKLPFIGVVKTYEPIEATTKKITISRQAGDWYLSCSYEFHAIATPKKTDVVGVDLGVKTLATLSDGKVFKSVRSYHKFEAKLCRLQYLNRHKEVGSANWKKAQLKIAKLHRKVANIRQDALHKLTTYLAKNHGSVVIEDLNVRGMLANHKLAKSIADQGFYEFRRQLEYKCEWYGSELVIVDRFFPSSKTCSNCGHVQDMPLHLRTYDCPDCGLSIDRDLNASINLRNAVGSVVNACG

SEQ ID NO: 7257 - protein, 476 aa, unknown
  TnpB Polypeptide
MNEKSKQRKKKKHVTVGEPYLVTRALTHIRLVEVNSGKLAALDALAPVYLALCQQYVTLFCTQEMPTKLRDPLYATSLSERWHRVAIMQAAGIAQSWRSNRAAAYQQYQDDLVQYKKEQTDEARTTKAQEPRWREWYVPTLREPCIQANVNVVKLEASQASTYDHWLTISTLEKGQPIAVPVKLAPYHKEALTDPKTGQTRKLNSSVQLNKRDGVWWLTLSYDAEHLMQTPPDAPVVGIDVGIANFVTTSTGKHYGAFHKDLRARHKRDRAKRRRKAKLRACLKKKRGKKLPSTSSRSGGRLIRHVKQEINHAVNQCFTDPEHEGVQFAYEQLSVASMRFKARAQNAYLRASHLGHIPRQIVWNSQKRGVQATPVISAYSSQECSVCHYTDRKNRPDQRTFRCQVCGFEAHADHNASVNISRRVGDRQLRACRDRTAIKAVLMKRHEAWKQQQGMGNNSPVKHRERGKSSAATSSI

SEQ ID NO: 7258 - protein, 407 aa, Lachnospiraceae sp.
MQLAEVLKLKLNTTDEISLAFGETAYQYMLACDDISRYVFDHDLLLNSVKLSKELYSHIRETFGLKSQMAQSAIRTVTARYQTVDTQYRKEPYTFKADNRWYRIPRDIRWLGKPLHFHRPQADLVRNRDYSFLNGGRDISINTLSKRVVCPFTAAGSMGRFLDGTWKFGTAKLVKLKGIWYLHISAAKEVPDFQRDDVKRVVGIDRGLRFLETVYDSDQKTCFVSGKDILSKRRKFDSVRAQLQSRGTKSAKRALKRISGRENRWMADINHQLSKALTTKYGPGTLFVLEDLEEVSTDARNFKSTQQAHDLRSWAFYDLETKLTYKAHESGSEVLKVDASYTSQRCPRCGRILGENRDHRMHAYHCDKCGFTTNDDRVGAMNIWLLGTLWVSGSDSPTFNIQAQGSV

SEQ ID NO: 7259 - protein, 203 aa, unknown
  TnpB Polypeptide
LPEIATQVGIDVGLKTFATLSNAEEIPNPRFFRKEEKALVRVQRTHSKLAKGTPESRKHRKVIARVHERIAFRRDNFTHQESRQIVDRFGVICVEDLQVNRMAHNHCLAKSIHDASWTGFFEKLSSKAEEAGRQFIKVNPTYTSQDCSRCHHRHKMPLRERVYHCPCCLLVLDRDLNAAYNIKALGLQSVGLSLEAPRLEAGE

SEQ ID NO: 7260 - protein, 297 aa, unknown
  TnpB Polypeptide
MGLDKSWKRWLIPDKTGKRGGKPRFKKQGDICSFTFPRVNSPKAGEIPVVLHRPIPDGFAIKQATIVSKADGWYVSFAIEDNTVPDPLPMDEIKSAVGIDVGLETFLTTSNAEASAAPRFYRKAQTNLSRKQRKVARHEKGSNNYHRQANKIARLYLPIARQRKDFQYSVAHYLCTAYDLIGFEKSILQVPWRTFLNIVQAVAVKRGKHTQEVDARSRSIQCFSCEESVVKDLSIRVHDCPNGGVSLDRDLNASLNILKRTVGQPFAACGGLVDAQPVRQELSCVNLKSPRQTPLSS

SEQ ID NO: 7261 - protein, 438 aa, unknown
  TnpB Polypeptide
MKEGGSMQLTEQHIIGRDDPRFAAIDAAAFKSKNLYNAALYEIRQAFIHHGTYLDYNEMDRCMQSHEAYQALPAKVSQQVLRQLDNNWTSFFEALEAYKEDASKFTGRPRLPKYKHKTEGRNVLIYTLQALAGGQTLHKSRGKNILRRGRNVLRRGIIKPSMLPIEIKTQQDPKTIDQVQIVPCHGYYVVEVIYSRDPIQASVDPSFCMAIDLGVTNLAAITANREGFVPRLVNGRTLKARNQWYNKRIKELTLCLPKAERDRVTKQMQRITNKRNRQVDHYLHATSKAIIDLMVKEGAGTLIIGKNPLWKQEVNNGRRNNQNFVCIPHARFISMLTYKAEFVGIQVELQEESYTSKASFLDLDPIPTYQPNDETEYTFSGKRMGRRNRLYRAKDGRKICADVNGSYNILRKRRPDAFSEAKGVAAYVVQPLRLAVTV

SEQ ID NO: 7262 - protein, 324 aa, Pseudothermotoga sp.
LDKAEKIKQTFAETKLKRQSQRLVVYQLKLQNLSKHKAELLKRAFLEAKWLYNWLIADIKRLDLPVHKVNVVEIKVGDNFEHRELQVLGSQIKQEIAQVIENNLRAIAALKANGYKFGALKFKEYVNYIPLKQYGVTYKLDFQRNRVHIQRLGKFRVLVLKPSGYYLHVTCYLPKESDGPVFDKPIGIDFGVKNKVTLSNGMCIDFEIHETLRLRRLQRRLARKKRGSNNYKKTLQLLRREYEKIANKRRDAINKLIGFLKMYKVVVYQEDAVAGWMSKFGKQLQGAGVGGLKAKLSHSLATSIPVPRFEKSTKICANCANNTI

SEQ ID NO: 7263 - protein, 163 aa, Pseudothermotoga sp.
MLRRTRQRIKDILHKITSNFLRMCLQKGIGTIAVGDITNIRERVQGNDSANQKLHQWCFRKMIDMLTYKAQLMGIDVVLVSEEYTSQSCPACGSRNHSKGRNYKCQNCGFEYHRDGVGAMNIYGRYLGIGTSQVVAELAPVRGVRYNPHLCGHGASNVPWKAA

SEQ ID NO: 7264 - protein, 225 aa, Chelonobacter sp.
MLIRKAFKFEIMPNGEQVRKIKRFCGCSRFVFNKALAWQNEQYEQDNDHKFSYTKMANLLPQWKKNKTKFSRNWQKLKAKIAKLHHKIANCRKDFLHQTSSKISKKHAIIYVEDLQVQNMSASAKGTVEAQGKNVKQKSGLNRSILESWFEFRRQLDYKTQWLGGFLAAVPPQNTSRTCPCCGHSAKENRQTQVHFECVECRYRENADVVDAINVLACGRAIVQA

SEQ ID NO: 7265 - protein, 474 aa, Bacillus sp.
MAKEKKIRYIVELDVLLETFQLHILETRFEIARHISNACKGKMLENIALMRADEEYQLWLKKEKSEVRSAALGEIREKYDVSQTGAERIVKEMGKHFKQKKPKNLKHKQKVHLDSHIVQKIALQVWKSISDYLFGKGKKVHFKKYGQFDSVEGKNNEAGLTYENGVLYWNGLEMKVHVPMKDKYIQKALHDEIAYCRLVRKTIRGKVNYYLQLVLKGTPPQKHKTCDGEVGLDIGISTIAAVSDKDVMIEEFCDGLEMMEKEKRRIFRKMDRSRRATNPNRYKENGTIKKGNRDKWIRSKHYWKQLFKLKEICRKIASVRKIMHNKLANTILNMGNQVYCEKMNYKGLQKTKFGKRIGYKAPSMFLSIVNKKLSYQGLKIEYVNTWTVRASQYCHVLNDYQKKKLSQRFHVLPDGTKIQRDCYSAWLIKNVNNAKNKVNRKKCITEYLSFLENYKKTEKLLRSLNKKFIFSIGF

SEQ ID NO: 7266 - protein, 407 aa, Kitasatospora sp.
VSAVHVKRAFRFRFYPTGAQAAELLRTFGCVRLVYNRALAARSEAWTARGERVGYGATSAMLTAWKRTEELSFLTEVSSVPLQQALRHLQSAFSNFWQRRANHPRFKSKKRSRDSAEYTRSAFRYRDGQLTLAKMAGPLDIAWSRPLPEGAAPSTVTVSRDAADRWFVSMLCDDPGVRPLPAVDAAVGLDLGVTSLVTLSTGEKIPNPGHERGARKRLARAQRALARKAQGSANREKARRKVARIHAQSADRRRDHLHKLTTRLVRENQTVVIEDLAVRTLLRNRKLSRAIADCAWSELRAMLAYKCAWYGRELITVDRWFPSSRLCGGCGTVRASLPLNVRDWTCDCGAVHDRDVNAARNILAAGPAAAACGDGVGPQRSTPGGQSSMKQEVVPPPRSRAAARSRD

SEQ ID NO: 7267 - protein, 435 aa, Kitasatospora sp.
VQLRYNFRVYPTPGQRVALARAFGCARVVFNDGLRARQEARAAGLPHIGDTDLQKRVITMAKRSPERAWLSEVSSVVLVQSLRDLHTAFRNFFSSAAGERKGPKVEPPRFKSKRDGRQSIRLTANGFRLRESRRLYVAEIGDLEVRWSRRLPAPPTSVTVTKDAAGRYWASFVLEALPEILPETGVEVGIDLGLTHFAVLSDGRKLDSPRFLRRAEKKLKRLQKELGRCEETSKNRAKARVARQHAKVADRRRDWHHQESTRIIRDSQAVYVEDLAVSALGRGWPATSVHDAGWSRFVAMLEYKAAKHGRHFARIGRFEPTSQVCSACGVKDGPKPLEVRRWTCGACGAVHDRDVNAARNILAAGRADRQNACGARVGPVSVPAPRREAGTPLSRSADRDRNPGPSGPGGRQENRSPGWMLPAREPAVAPVGWGV

SEQ ID NO: 7268 - protein, 369 aa, unknown
  TnpB Polypeptide
VDTESEQKLHITRTLYRDVCNSLVDFVCKDPAQRNWQRFNLHHAAYHTVRATMPDLGSQMVCNAIRSVSSAYKAELSKHPRKNKTDPLKRIVFKNPSIHLDKNTITYHSDLTAATVYTVQGRVKVDLCPGEFQKRLLQHGKLKESNLVYRKNKKGGFWSLHITLEFESTLGALPKELSKEEVIGVDVGENNIAAISTGQLWKAGQLKFKRDKYLGLRARLQRNGSQSARQHLRKASGRERRHVTHINHVVSKSIVQEAVKRKAKLVVLENLTHIRERIKCGKRVKSRLHRWSFRELQQQIEYKAQRKGIHVIYVDPRYTSQTCSSCLTIGKRDKHCFVCPNCGLRAHSDLNASRNLQGLGYQLMVQGLL

SEQ ID NO: 7269 - protein, 203 aa, unknown
  TnpB Polypeptide
LGEVLSKESDSLKKKYQSRNKIKAVLDKVEQKNPKKAKRIRNRKKLNRRSRRHQAQVKTIVFTAVNRVVDKAKTIVCEDLTKTFKSKSYGKNTNRRLSGWVKGLIGNAIDIVAFRRGSRVVQINAAYTSQMCSKCGCLGKRTGETFHCAFGCGAVMIAPLNAAVNVKARLEDKELHRWLPFQKVKQILLERCRRPDETAHLGL

SEQ ID NO: 7270 - protein, 370 aa, Absiella sp.
MMIKMRKGYQYAITPTQQQAQKIEQNIGCARFIYNKLLEDKIKYYETNKKSIRLTPAPYKSEYPFLKDADSMALTNAQINLETAFKKFSDEPKIGFPKFKCKHKCRASYTTNRVNNNIRITESDQNHRMYIKLPKLGEVKIKLHRLPQGSLKSVTVFRQADKYYVSILFEEEIEISKCPIIKGIGLDYSQKELYVNSEGNHCGYPHYYRVSERKLARENRKLSKMKKGSNNYIKQKAKIAKLHLHIANQRKDFLHKESRKIANSYDYVAVEDIDMKALSQALHLAKNLLDNGFGMFRKMLEYKLEEQGKVLVKVDKWYASTQICHQCGSKQKMELKERQYICPKCGYEADRDENAAKNLREEGKRILESI

SEQ ID NO: 7271 - protein, 448 aa, Moorea sp.
MMIILEFKAYGKKAQYQSIDEAIRTTKFVRNSCLCLWMDNQGLSKYDLNKYCKTLAKNFSFANELNSTARQAAAERAWSSIARFFENCKKKVPGKKGFPKFQKHCRSVEYKQSGWKLSPDKKSFAKRRLCRITFSDKKGIGKLKLKGTWDLWRFDKKLIKRVRIVKRADGYYVQFCISVDVKEQLKPADATVGLDVGLKEFYTDSRGNTEPNPRFYRKGEKRLKFYQRRVYRRNKGSSNRKKAINRLGRQHLKISRQRVGVGVGVGVGEACAKRTACAKRTACAKRIEHAKRLARCVIRSNDLVAYEDLRVKNLVKNHCLAKSINDAGWYQFRKWMEHFGKKFGRITVAVNPAYTSQNCSECGEVVKKSLSTRTHVCKCGCKLDRDHNAAIRRSRRYANNILNRALGTVGHIGTWINDPNACREETSILPGSGLVEQVTSLKQESPRL

SEQ ID NO: 7272 - protein, 562 aa, unknown
  TnpB Polypeptide
MTQQARTFQARIDGHPALDATAALLSRAERCLWAEMAKGRKPNDCKSEFLRRFGITARQFNALAVAAKGKASSLKEIAKLRLRELDARIKATLKTIRKIEKRKASAAKLHQKKRRLGILRDRQKEIRAEMKRPAPALCFGSAKLFNAQHHLEANGYADHAEWQDAWRADRASQFFCLGSKDETGGNQTCTATTAAGGSIMLRLRLPDAVWRELGVKKYAELGPVIFGYGHDVVTAAIQAHTTSQGEALSWRFVRDAKGWRVFVSLFQALPDAAPDFAHGCLAVDMNAGFLAAAFVDAQGNPNGRFTVPMLTQHRRTDQVEAAIGNAAARLVALAKRRGIPIVIEDLDFETKKTRLREEAQPRMARLLSAFAFNGFRTMLERRAAREGVAVLAVDPAYTSFQGRARFMERYGLSVHHAAAVVIGRRAMNYSERLPLSLALPAGDIPAARKRNQSHVTLVRPARIGRRHVRDQWARVMGAWKAALKGLRPIGRRKTAGPSPARTARAAPAWDRSLEDDAEFLANPMFPPRTHDGAIPSREPAAKLLGGRPCATLVRDDQRCAGF

SEQ ID NO: 7273 - protein, 378 aa, unknown
  TnpB Polypeptide
MVKTTIRHKSYKFRLYPNQEQMLLFEKTFGCSRFIWNKMLADKIQYYKETGQTLKNTPAQYKKDYPWLKEVDSYALCNVQLNLQKAYQSFFKSGFGFPNFKSKRKMAYQSYQTNNQRGMIRLSNNNKIKLPKVGWVKVKVHRQVKGLIKSATISKTATRKYFISILCEEEIVPLLRTDSNIGIDLGLKHFAILSTGEKIENPRFLVSLSKKLAKEQKILSRRGFLAKNRGVKLSESSNYQKQKLKVAKLHEKISNKRRDFLHKLSTTLIKNHDKICMEDLASKNFMRNHCLAKAIGDASWSEFVRMLEYKAEWHGKQIVKINRWYPSSQICSNCKVNSGKKPLYVREWTCKNCQTHHDRDLNASLNILEEGLRLINII

SEQ ID NO: 7274 - protein, 381 aa, Zetaproteobacteria sp.
  misc_feature (145)..(145): Xaa can be any naturally occurring amino acid
VENAIVNVTKKIRVYPSNQQAIFDLLSASRRGYNLAIAIIKEDKQAKLLDVRRTVKAQVKEEWQGRFFQAEIVGEAVRHAFATRSDIIKRRMRGEKCDYKFQSIKQSIQSFVQQRLNKKFCNSFALSEDIPEDSLGRTTTISWEXGRWFINAITKIAISEGSESQRLRMAAVDPGVRTFATVFSTDKVVEYGKGFQKNEIMPLLQKLDGMYSTRKLFLNSKPNRDSQVFKNTMRMFQKRIFKISNRVQDLIDDLHRRVAFDLVDNFDVILLPTFEVSDMVEKDNRVLSNKGVRAMLGLKHYQFKVMLKWMCKKYGKTFIDVNEAWTSKTASWNGEIVKDLGGRKRIRSQNKVVDRDVNGARGILIRALSMGSFHPLSSVET

SEQ ID NO: 7275 - protein, 431 aa, Acidobacterium sp.
VLNRKVTYRLYPNAEQEARLQETLGLHQRLYNTALEERIRVYREIGKSLSFSDQCKMLTQWRKTVPALARLNAQSEQVTLKRVHLAFQHFFRRVKNGETPGFPRFKSLRRYPGWGYKTHGDGWRLHPGKNGKHGKLYLQGVGQVPIRGEARTVGIPVTCEILHKAGKWYASVTLEMETVQRERGMGMGAFDWGLKDFLTIATPNGIETVANPRHLKNQLVELKRLGQKVSRKIRMAQKLSGRQKGFPISANLRKDIQHLARLHAKVARSRKDFLHQTSAWLVKRFGAIATEMLDVKSMLHSGGSRKKRLNREIHAAAPSAFLKMTKTKAEEAGSWYEEAPTREIKPTQRCHACWRLPDEKKKLSDRQHRCPHCGVTCSRDENAALVLLRWLEMRLAGNPGHCSPQGAGREPSEVWSGGSFAAAKHETHAIP

SEQ ID NO: 7276 - protein, 419 aa, unknown
  TnpB Polypeptide
LFGCQPILIESTPVLEFVCGEANKLTNQGIYYARQWYFKTKKYVSKFDLNYQCKSSPHFSALAAQASQQVLGSIYESFKSYRELLKLWRAGELAEKPKLPNYRTKGGLAVVSYPKQAVKLVDGMVRIPLGQKVKAWFGLDSFTVPMPSNLRFEDIREVRILPRNGCFYAEFVYRLELVKSDVDPACVLGIDHGINNWMTCVDNLGNSFIIDGKHLKSLNQWYNKEVARLKEGQPQGFWSKRLAQLTETRNRQMRDAINKAAKLILTHCLNHKIGRVVFGWGQGIKQGARLGRKTQEFVQIPTARLKNRLAQLFEQYGIELIENEEANTSAASFLDGDSLPKFGEKPEGWKGSGRRVKRGLYRTAQNWYVNSDCNGAANIIRKVATMLGLDLSGVSRGTLTSPQRIFLWQLAGKREAVRL

SEQ ID NO: 7277 - protein, 411 aa, Microcoleus sp.
VLPRAIQVRLYPTEKQQIQLVPALGCARWCSNYGLNKSIEFYKKTGKKLGDSELNTLLPDLKKSYRSAWLGECYSQVLQATTLKLTTAYKIFSHKRAGFPKLKMPHKKQSVPYRQNLNIVGESIKFIRYIGIAKPQISRLIECKNNSVIIIRKNYSGKSLASIILNEIECENQTTKEGRIYGIDLGLKHFAIVTEGEKKSKYDNAKHFANHEKNLKRQQQKLTRQQTRNNCGYKYKKVVAKVDEQLRNSRQYFLHKLTYKLVSDSLAVIVENLHVLGRVRNQNLAKAISDDGLETFTNFLAYKWERKGGDLVEIDRWFPSSKLCFNCFHQMTEMPLDVREGTCPHCAIDRDRAREGKAAINMRAEGIKILQVAGSAVSALGGGVRPKLGRKFKLRHSPMSTEAPTIFGTRI

SEQ ID NO: 7278 - protein, 368 aa, unknown
  TnpB Polypeptide
MIDLPKKTEYIRVHHCRLVTTPQLEKRYAENIDVLNKAYQYTVKYLEKTYGYKHLNRPYPTDKKGKIYVIKDQIMPRFLHDVYHIDKWDGKKVPIHSQALRDEFMVSIMTNFVEYRKVLKKAARMTKQEKEDYRNNKYGNNPQHRSWYRKGSLAYLRNGKSHTTVSLPSNGQIEVLSAHHIKIQDYGDLQTIDNIKHLKHLTIVTSKIKRKGDGTFELQLVLKDQHRRRKPTKKIGADWNMKDNKIFHTSENQRIYLNPKVSVDADKYEYIINNLKSQRSHLEKFLNHKSSRLVKLTELIRYYNVRRTNVLTEAYRHMAKKLFEGHNLIAIEQLDAKEMRRESTAFNKAGDFSASHRDMDFNGLCIGI

SEQ ID NO: 7279 - protein, 358 aa, Exiguobacterium sp.
MSQKLTVNIKLNPSKEQESSLNEMSRLYVDTVNMLVAEMVEVKLILKKTSKDVKVILPSVVKNQAIRDAQSLFYKAKKKKFENVSILKKPICFWNNQSYTFDCDYIYIPIILDGKVKRAAIQAHMIDKDDRNFSLLKHKLGALRITQKSNKWIAQIAITVPTVEKNDGKIMGVDLGLKVPAVAITDCGKPKFFGNGRENKYMRRMFQSTRKELSRNKKVKAVKNLGNKEQRWMRDKDHKISRKIVEFAKVNDVSVIRLEKLTKLRQTARTSRKNTKNLHTWSFYRLSKYIEYKAKLDGIKIEYVNPAYTSQMCPSCGKKNKAKDRVYSCSCGLKKHRDLIGAMNIRWAPVVDGNSPSA

SEQ ID NO: 7280 - protein, 499 aa, unknown
  TnpB Polypeptide
MFVYTLKLNTNNYHHNRLARRFKMAQDIYRKSILEILKREAKQKKDPRNKKIKDSYEKINSLKDQILNLNNDLETKPKSEQKKIKDNIKSFNNEIKELEKQIKALYKELDTDYDLRGSFSFGKFANNYRNARNYSNYIPSDVAIKLGMRAWDAYEKVKFKKGAKQINKYPELMSFEAKSDSGIIIRDGILKMGTKGKGIEIPVIYKNDDFEREVFTNEFKFNRILRRFENNKWNYYVQMIFDGIPPQKIDNYLTGTVGIDVGITKVTISTPNEVKILPLAPELQNFDAEIRRLSRKLDRQRRANNPDNYNEDGTIKRGKKTWHDSKGYIKTKNELANLKRKQAEYRKISHKTLANAIVAMGDKFIIKQSNFEELMKRSSETKVSKTGKFLSKKRAGKKIGNHAPAYFIQQLTYKAMFQGKDVITLTNKEFNPYEYNHVTHEFQETNKNTQTRLINGVDVQRNLYAAFLTSQYENLDNSKIVQSNFETFLRNQEHYLETA

SEQ ID NO: 7281 - protein, 372 aa, Brevibacillus sp.
MQVTITAKVKIKPTTEQATLLQDTLYAYRHGCNFASALVFETRQLVQTTLHRLTYKSLRGQFRLRSQMAQSVLKTVIARYRSLKSNSHDWTKVRFKKPEYDLVWNRDYSLTKGLFSINTLEGRVKVPFETKGMEPYFDGSWVYGTAKLVYKYGKFFLHIPMTKEIEPACEEHINQVVGIDVGINFVAVSYDSQGKSLFFTGKTIKNKRSHYKYLRKQLQQKGTASARRRIKRIGQRENRWMSDVNHQVSKALVNRYGPRTLFVIEDLKGVRVATERVRVKDRYETVSWSFHQLRQMLAYKAVLHGAKVMAVDPRYTSQACPKCGHTEKANRNKRTHTFCCCACQYQSNDDRIGAMNLQRIGMEYIVEVTTSV

SEQ ID NO: 7282 - protein, 469 aa, unknown
  TnpB Polypeptide
LKVVKTVLLKVYEANKEKREALERTLSLYADILVFYLNVIRKAGIYRVVSLKKEQALTFLESITISTKAHPNPQFPIEEKIKAPVQTNLRRSAINKAYGMVKSYVSNLKNWHKEGKELGYNKPTYPDPKNFSFTYYATDVELQDIFLRDGKEFHFVRLKVLSESGEYSKKNYPVKVYKRVFELMDNGYVAKNTATLIKRDKDFYLAITLEKTVKRKKKPQKPKIVIIVDLNVERNLACIGVFEIDWKKRESKLKKIHFVNGELLRPVRKRDYLLHQVRIKQRQTGRSPTREDNKKLWKKINNLNRDIALKTAREIAKIAKEYENVIVVFERLKGLRGRKKKRSKRLNRKLSYWLRKKIGDRVQEISIAEGFKIDFVYPRWTSKRCSFCGARGERFSPCGSTALFKCPVCGYMVNADVNAVFNEHFLYLSHLLKAGGKRGCVVSPGVFLKSPQKRTQFKVSLKSNSYVYV

SEQ ID NO: 7283 - protein, 446 aa, Pyrodictium sp.
VPWGRRANGVIRTAVLRLEPGPEEEEKLRLVCELASKLWNELNYRRRRLFFEGKLTQQKLYETYKEFYYMYNRLLGSATTQAIIAKNDTAWRSFFRLLALKKKGRLPPHIARASPPGYRKRSRRRRRLWLALRQDQYRVDTERGIVEIRRLGVAGVVRVRYRGLIHVRGRQRGAEIWYDHDRRRWYIAISYTVEEKLIHGRGWVRVPMKPRGSLEAGVDLGVDNLLAVYVENGEGFLVNGRPLKAESFYWQRRIARYKSVLDRADGAGSTSRRLRLMYRRWRARIRAYIDAAVRRAMEELYSRGVARIYVGYPRGIARRGDGNGKLNFERVHVWTYGLLLRRLKEVAWEYGIEVVEVDEAYTSQRCPLCGAVHPRARVHRGLYICPHRRLAMNADMAAAYNILAKGTKRTITPSPEALTHPHRLGVGVTPPRPGARGGAYPRPSNQ

SEQ ID NO: 7284 - protein, 361 aa, unknown
  TnpB Polypeptide
VIKAHKKFAVPTMRRSSRIFPVDVNPGKAVALRAFLLLCRNVTQYFIDLFWQRGDRSAALSDLKTVHRGRDRFAITTRLAQALAKQAKEAVRAVTDGRRPKKRRPTVTLYSHFVQVSKFDGSFDYALCLIGSGAPRMTIPFKSTTHLNRLLADGWQISKSVRLGIIGNRLFVDLLLEKPRPAKRVDGAVVGMDSNYKAGFVFSDGQVVGADAYNKIAAFAKRQKHTHAEIKSLVGQAVKQIDWSNIKLLCVEDLKRVKFNTRGKFPRSLNRRLSHWLYAYAMDLLNRHCEEQGVRLERKDPWKTSQYCRFCGKWDRRNRRGDRFKCVHCSQPDHADHNASKNLELLGLAGVYSLRSLPSPG

SEQ ID NO: 7285 - protein, 400 aa, unknown
  TnpB Polypeptide
MQLTEIHQIRPNHKLYSICDELCFKSKNLYNAALFEFRQSFFDKELNTLTWQNINRIFNQSSQFDYRELPSKVSNTVLKKLGNNISSFWSLVKKSDYKQKVNLPKYLHKTEGRFIVEFNKQTFSNKRDDNNNLIICKSSLDLRIPTKVEKPQQVRIIPKVGCYVIEIVYEVEENRLKQNQRVAAIDLGLNNLATVVTNDGDNPILISGKKIKSINQYYNKMTSKKKSLLPYNVFTSKSLHRLWLKRNNKISYEIHKITKFLANYFDERDVSKVIIGNNSGWKNGINIGRRNNQNFVNIPYAKFINLLTYKCQLLGITVIVREESYTSKASFLDYDEIPNYKDEVIPKFSGKRIKRGLYRSTFRKINADVNGAYNIMVKENPNYIIGKREQLGFNPILIKL

SEQ ID NO: 7286 - protein, 471 aa, unknown
  TnpB Polypeptide
MKRTVKIKANCSNNEDELLLIGTIQRNIKNYVWSRYSGIGSLLKQSGWTIRDELIQKDLLSKKITKTFSRTAIEQSAATIKTNWIITKKKVKKAIKQNENLTEDDKSYLYLCLKHTPTLYGILNYKKVDYQTDYLKDLKVNVHRLNNLLRRYVRRYKTKSHTNKTNIIINPNIYKFDSNNKNFVFTGKKKNSRIVITLIGNVPKLKGTLELVKNQKDNQYYLHVPLDRIINKKDMTEHSESLGLDVGITDLITLSNGSVYGANSAELFYTLSDNLVNKNRSRLFSYRRKLEQQIATEQDPSKKVILEQKLKNLEDNNLGYKKRSSKIGKYKSRIASHINHELNKMIKEEDLKEIIRENLNWVSKKKNTSRKQQNRFSTWSKGILLERLSVKLTEKGIKETIVNPAYTSQVCCRCNHLGSRNGKVFKCSNCNLSIDADFNASINIKKRKFIKEIDIYTPYKEVKKYYENIPV

SEQ ID NO: 7287 - protein, 253 aa, unknown
  TnpB Polypeptide
VKFVYDEVNDLIKCFKIYEVEQPKLKKDNSRYFSIDPGLNNIVSIYNNIGIRPLLYNGRPIKSINQYYNKTNAKLKSELPSDVKSSKRLRQLSFKRNNKIDYEMHKISTHIINEAVKNNISKIFIGNNIGWKDEINIGRRNNQNFVNIPHTKLFNQLLYKGLLNGIEVIFTEESYTSKASFFDKDYLPKYGESDNHKFSGRRIKRGLYKDGKGNIWNADLNGAANIMRKCSDKAYKGIRKTKEMMKRPILVTL

SEQ ID NO: 7288 - protein, 477 aa, unknown
  TnpB Polypeptide
MRQLYKGVIPSSFDKQLYTQVIDAYQNKFDAIQRRLVFDVVTFKGFDFYKRNTKKHKKGDFKKVILEKKQTTLSNCLTYLARYGNENTIEYINGQLSNCDNKKREFYNNILRCCEKFGFDRLYNLALSKRQRIIKHYLEYPIEFKSLSFSGRCRKKHIVDYNSNFGSVINSFVSLSGFGRKSFDIPVTFNKGWHGNIKDYKKNNPDYEYTITFDEKHKQVKVHICKDGERYIPQAGNNIIGIDVNCKHNLFSLSNETTYDYNRKLVNDFCKLSIEIDGLKEKNKEYKPGKRKRQKLDILKAKMVKSEQQLIANMCKTLQSQGINHIVMENLDNGFGKCYVKDKDNNDINYNRKVKFLGLSGLKQEVEHIARKYDIAVSTVHASYTSKMCPVCGCIEDENRPNQETFECIECGYKNNADFNAAKNIKNRVLVTVLRESLLKQLDNGAFKPKKLKREKVKEVLLSYRTSLVKGREPNFY

SEQ ID NO: 7289 - protein, 212 aa, Bacillus sp.
VSLLVETEVQELPKTNSYIGMDVGLKDFAILSDGTTYKNPKFFRSLEEKLAKAQRVLSRRMKGSSRWNKQRVKVARIHEYMTNARKDYSDKISTEIIKNHDVIGIEDLQVSNMLKNHKLAKAISEVSWSQFRTMLEYKAKWYGKQVIVVSKTFASSQLCSCCGYQNKDVKNLNLRKWDCPSCHTHHDRDINASINLKNEAIRLLTARTVEIA

SEQ ID NO: 7290 - protein, 415 aa, unknown
  TnpB Polypeptide
MEQRAYKFRIYPKTDEKERLERTLYLCKKLYNTELEQRILAYRVQRKSVKVREQENELPRLKEEMPEYREIYSQVLQNATKRLDKSFDNFFRRNKLRKQGYKIKVGFPRFKSSKQYKSITYPQNANSAFVIMADGNLMLAKIGKIRMFKHREIEGKIKTCTIKKHSDNEWYAIFTVEREEKTKKVPKTAIGIDIGLKQLIKATDGTTIEPPKYLRKSEEQIKHWSREVSYKIKGSGKRKKCIKKLARAYRRVERKRDDYLHKVSRDLVNRADIIVFEDLRIQNMLKNHKLAKSIGDASWGKLIRYTSYKADSAGGSVYYVNPNGTSQICSRCGNWVQKDLSERIHSCPSCGYKSDRDLNASFNILNRYLKKRVGADSLELYNKTPVEMLPLPSPSQDLACNVEEAGSPKGMMSPL

SEQ ID NO: 7291 - protein, 136 aa, Okeania sp.
MNKSEATAQRITISRQAGDWYLSCSFEFHPQITPKKTDVIGVDLGVKTLATLSDGKVFPSIKPYRKAEKKLTLLQRQVSRKVKYSNNWYKTVIKLTRQHRRVTNMRKDALHKLTTYVSQEPRQCCHRRFEHQWNVS

SEQ ID NO: 7292 - protein, 425 aa, unknown
  TnpB Polypeptide
MTRVTRTEHIWLTPTTTLSHLCHLSKNLYNEANYAIKQSLKTQGRWIRYTQLYHQLKHSTNYRQLPAQTAQQILRLLDKAWKSFFRVIKEWKQHPEKLKKKPRPPKYKKKNGEHLLVFTNQQCRIKNGVLLFPKNLTFDDDIATRLADTTDLREVRVLPKGVGYVCEIVYQKVIQPKATDKRRIAGIDLGVSNIITLVNNIGKKPIVVKDDGRGIKSINQFYQKEKARLQSMYDKQGIQGGTKMKRLRVKYDRKSKDYLHKLSRGIIIRCVQQRIGKLVIGYNPEWKQQVNLGKRNNQSFVLIPYMKLINLIKYKAEEQGIAVELVEENHTSKCSFLDNETIEHHEQYPGKRIRRGLFRSAQGRLINADVNGAGNIVRKSEPNAFTRVKADGVGGCVIGLHPVRWNLLINNYITRSRLNHMAQIA

SEQ ID NO: 7293 - protein, 413 aa, Leptospirillum sp.
MPTMKRIQAFKLRLVPTIEQERLLSRHAGCVRFVWNKALDLQTRRLEAGMPLLSYGDLAKILTLWRSSKEYGFLSSGPVHPQQQTLKNLDRAIWEALDRTNPKRFPRFKRKGEGDSLRYPDPLQVKLDLATRDAEGRNLLPRIFFPKVGWVKVRLSRPVVGEIRNATVTRKAGRWAVSIQTERNVQEPTPRTSPEIGLDLGVVSFATLSDGTRIHPDERLLRAMERAEVRLRWEQRKLSRKYRKGPKSRNFAKQKLRVARAFEEVANMRQDFLHKTSTATGETQAVVYVEDLKIRNMTRSARGTRETPGRNVRQKSGLNRSILSQGWGTFLSFLEDKLTRRGGRLVRVDPRNTSRTCSDCGHVSAENRPDQATFRCVSCGHADHADVNAAKNILRAGHARRACSPGQPGEFVA

SEQ ID NO: 7294 - protein, 330 aa, Leptospirillum sp.
LALRDSFTDPPAVPQGPRPGLQKLLRKTGGLSEVPQEGLERFVPVPAGRKARRAQRPDLAPEDRMGPLPQEPDCSRHDQERHCPEVGRQVVRVDPDGTGDRVAGSSEPRDRWDRSRRGPLRHPLGRDGDRPGTLFLPARGPAETPPTRPLSQEKGLENREKVRKKLARLHRNMADARNDFLHKVSTTICKSHAVVVVEDLNVKGMSASAAGTVETPGRKVRQKSGLNRSLLDQGWSAFLRMLEYKADGSGGRVVRIPPQYTSQTCAVCGHVSPENRTTQALFRCVSCGHAENADLNAARNILRAGHARLACGTNTSSEVGASAQEPTEAA

SEQ ID NO: 7295 - protein, 268 aa, Leptospirillum sp.
MKRRQAFRFTVRPTDTQERIFRQFAGAFRFVHNRALVLEIDRHASGKAHLGYVGTANLLPLWKRDPETVWLSGIHSQILQQSLKDLDRAYKNFFGKQAGFPKFRRKGWNDSFRFPQGARLDEPNARIWLPKIGWARYRKSRTVLGTIKNVTVRRSGDRWFVSIQTEREIESPVHPNPGIVGIDLGVARFATLSDGTVIAPGRFFSRHEARLKRLQRALSRKKKGSKTGRRSERSWPGSTGTWPTRGTTSCTRSRRRSAKATRSSWSKT

SEQ ID NO: 7296 - protein, 461 aa, unknown
  TnpB Polypeptide
LRSERRGGAHHQQRRGYDLRGRFSQGRVGNHHGILGAALRQPLAQEPKIAGRREAGRGGRVMLIAHQIALNPNNVQATYFARAAGTSRFAYNWALAEWQRQYEACKLDAAKPKPSQMALRRQLNGIKAAQFPWMLEVTKNAPQMAIIQLGVAFKNFFAGRAKYPKFRKKGLHDRFSLTNDQFSVDGSRIRIPNLGWVRMRETLRFTGKIMSATISRVADRWFVSINVDTQDDSHLPEAKNQGAVGVDLGVSALATLSTGEAVAGPKAYKALLCRLQRLSRGLSRKVKGSENRKKAKVKLARLHARIGNIRRDALHQLTTDLTRRFHTVGIEDLNVKGMMANRHLSRSVADMGFFEFRRQLDYKSAQRGGVVVVADRWYPSSKTCSCCGHTLETLPLKVREWTCPECGSLHDRDVNAAINLKNLAVSSTVSACGEEGSGLGRKLETKLASVKQESSSKATHG

SEQ ID NO: 7297 - protein, 299 aa, Oscillatoria sp.
MVGIHENTYQCLAKIGQVPMVFHRPIPTGFKVKTGTVIREADGWYIALTLEDKTVPVTVAEIQPTTENTLGIDLGITNYVYLSNGERIENPRFLRKSAEKLAKLQAKLASRVKGSKSWHILKSKISRLHQFVARARLDFQFKTAHELFGKCDVLVVEDLSIKNLTRRAKIKTDIEDGNLVYLPNGQAAKSGLNKSMLDAAHGQFANVLKYVAWKLGKNVLFVDPRGTSQHCWNCLNKVPKELSERWHSCQCGESLDRDENSAKLIKKIGLIHQSGGGTSSLKKALAQREIEACGLTVLR

SEQ ID NO: 7298 - protein, 494 aa, Oscillatoria sp.
LLLSFKYKLRPNQQQSKKLNQWVDMLRATYNWCLRDRIDGWYQQFLCGDYCDLRTQIEITPLTCGITKGTQLANPWKDGGGKAKKEGDKDQSPKRSASLMQDANLQELKDSRPWYQTIDIGVLQSMPARVNESFSKFFNGAGFPKFKRRHDFKSFSYKPGRVKVKGNKIYLPKIGWMRFYNSRSIPDGFEIKTVTVRQKADGWYVSIRIENKTVPDFPVISDSEIKTITGCDLGLGKLVYLSDGSSIDNPRFATNKKAKRLMRIRQRRVSRKQKRSKNRSKDQLRVSKLHNKIQQRRESYQWDVAKRILKRSDAVAVEDLQVGNMMKRCQPVKSETGRFLSNGQSAKRGLNRSIADASWYSLTQKLEYLAVKSGKKLYRVNPQYTSQTCSKCQHVDKNSRNGEKFICINCGHIDDANLQAARNVKVKAIETYGLNIVKIIKSKMVRRDSSEPVQLSLFEAKLYERSSDINTLPLKGKRRVGENPEYKQLSIWDI

SEQ ID NO: 7299 - protein, 365 aa, unknown
  TnpB Polypeptide
MKKIKLYPSQIQRKILIEWFNTSRYVYNKVLNSIINEDEKINKFELRNKYVTWNKGTNNNVKEFETNTPKVIRQESINDLCKAYKTCFSQLKSRMINKFNINFKTKKNKIQSIGIERSAKLDKKNKTIKLFKNIMKENHVFKIGKRQSKDKELKDLEIKNDCRICYDGYNFYLCIPVEEQKIENGLKNEIIALDPGTRTFMTGYDPDGNIIEYNRRDNLLNKLKDKLSLLQSKRKKRIKIVRQKIKNCVDELHWQTINNLTMNYKKVLLPHFESQKMSMKSHNKILNRDFNILSHYKFKQRLYYKSIVNGTKIYDVGEEYTTKTCTNCGNINNVGSDKEICCNKCSIIIERDYNGARNILLKHLE

SEQ ID NO: 7300 - protein, 397 aa, unknown
  TnpB Polypeptide
MLTHKFRLYPNKQIEQKMLNTLDLCRQTYNDLLGLLNEQKVIDKSQIQGIIPDMKICDPRFKQLHSKTMQYECYRLFSNLSALAKTKKHNRKVGSLRFKGKGWFKTFTYNQSGFNLINTGKRCQILHLSKIGNISIRCHRNISGKIKQITVKHEQSGKWFASIAEETENPEQIKIIKKVVGLDLGLTDIVYDSDNNNIANPKHLKQHAERLAFLNRKFSKKSKGSNNRNRWRIRLARQYERLANIRDDFLHKTSRYYVDNYDAIGFEDMPINSMAKGHFSKSILDASWGKLRRYISYKAESAGKICVPVDYRGTTQRCSDCHNTVKKEIWQRAHQCPFCGINIPRDYNSAIEIKNLTIRKIRQELPESTLVEMEGYSPTWQCPSMNQEALTSTSRSS

SEQ ID NO: 7301 - protein, 448 aa, unknown
  TnpB Polypeptide
MRNHAISVPGTLPFQALAREKAMSFQRQWNVIALLATMKALLILAVCKTEYTILVRMLKTFKYRLYPTPAQERQMFLVLDICRHWYNMCLSERKWVYELEQRAVTKGDQEKMGIHYRQTFPQAQIVFSQTMQTVCDDLDKAFGAFFRRVNAGETPGYPRFKGRDHFHSFAFKQFGVGARLDGRRLKLFGIGRVPVRWHRPIEGEIKTVRIIHKAGRWYACFAVEVPETEPLPNTGKAVGLDVGISAMLTTSDGDKVDNPAYYRRAQAELRIAQRSLSRKQRGGKNRRKALQRVQRLQEHTANQRSDYAHKLARQLVKDYDLIALEDLQIRNLVRNRHLSKSILDSGWSSFRQLLTYKAESAGREMVLVNPAYTSRCCSNCGAVFQDFDLSTRWVTCACGLSLDRDHNAAINILNRAGRDTSVQRNVDPLAAGARAAGKVMRAVEAARL

SEQ ID NO: 7302 - protein, 370 aa, Halonatronum sp.
MTVREKAYKFRLCPNKEQKILINKSVGCARYVYNHFLDKAKENEYQSYSKFSKQLTQLKKEMKWLKEPDKFSLQNALKDLDRSFKNFFKGKYGFPKFKSKKNPKNSYRTNKFTRKSGTTNIEIKYNKIKLPKLGWIKFRKSKEIKGEILNVTVTRTNTDKYFISIAVTEDIEGLAKTDKQIGIDLGLKEFAIISDGEKIANARILKQYEKKIGRLNRSLARKEKGSNNWYKVKNKLGKVHEKIANIRLDFLHKLSTKLIKENQLIVVETLKVKNMLKNSKLAKSISDVSWSKFIELLTYKAKWYGRDLVKIDTFFVSSQLCSNCGYKNENVKDLKVRKWECPECKSFWDRDINASINILNEGLKIKASTT

SEQ ID NO: 7303 - protein, 404 aa, unknown
  TnpB Polypeptide
MAMVKVNKVLRCRIKPEPAQRIIFWKTFGCCRKTWNLLLDERIKSNRELGGVKFKNTTPAHLKKSYKYLNEVDSLALANTQLELNQACKRQFAKGKNPNFKRKGRDKRSYTTNATNNNIRLIHKSDTLNLLRLPKAGDVKIILHRNIPGGELKHVTIKETASGKFYASLVYEVQKEEVKLKEHFAADKVEAFDYSMPSLIVSSSGSFDVTEKDIKWYRKLEKKLSCAQRKLSRMKYGSHNYWKQSHKVGAIHEKAANRRKDFLHKLSHNVADNFDAAAVEDINLQAMAKALNFGKSVYDNGFGMLRNFLAYKLQAKGKILVKIHPLYPSSQLCSHCKTKNPEVKNLAVREWDCPVCGHHHHRDKNACENLKDHAIELLGRWTSGDSSLILTPQGVLNEKEAPTS

SEQ ID NO: 7304 - protein, 392 aa, unknown
  TnpB Polypeptide
MYAIKRELKLNKKETSLMRGLAGFKRFVYNYCIDLLVASWEFEGIKAGDSKRIEAIKKVFTQVAMRKPENAWMKKYPSTVYQSAFMDVKDAFARWRKGLGGFPKKKSKKKGDSFTVYKTSGVYPQKGKPALPFTNRVVIEAAKSIRLPGLKTIRLKERIGFTCSSQTFTVSRTADRWFVSFVLDAEKIPPIIHPIHKVGVDLGVKCLATVSDGTTYEMPVTTKQAKTKLGKLCWRNRNKVLGNWKLGVKASNKARRYRITLARQHAHLANIRHDTLQKITTDLSRKADVIRIEDLNVSGLIANRKLASAIHNNCFYEIRRQLVYKQTHYGTKVELVDRWYPSSKTCSQCGHVQDMKLSERMFNCQSCGHSQDRDANASINLEKAPEHKVRLA

SEQ ID NO: 7305 - protein, 191 aa, Calidithermus sp.
MCAAPTSTASWQRCRGPRAITPSSQESARKKRQQVEHLLHMVTSHFVRECVKRRVKEIAIGDLTGIREAIDYGDRLNQRLHAWPYRKVIHMIRYKAALVGITVRDEVDEQNTSRTCHVCGRVREANRVHRGSYRCECGWAVQADVNGALNIYERAFQVSPVKGSSGRVARPVVLSFQPGWHTVHEPKSRAA

SEQ ID NO: 7306 - protein, 462 aa, unknown
  TnpB Polypeptide
  misc_feature (31)..(31): Xaa can be any naturally occurring amino acid
  misc_feature (33)..(33): Xaa can be any naturally occurring amino acid
MLRQESAPSLEAESVKRATHRYRPAGCAKEXSXSSQQQQEVNRMQLVEQHVISKHDPRYGVIDEAAFKSKNLYNAALYEVRQAFIHEGKYLNYSEMDKRMQSSDSYKALPAKVSQQVLVLLDKNWTAFFEARAAYEQDPSRFTGRPRLPKYKHKQEGRNILVYTMQAVSRGKRSLQRGIIKPSMLPIEVKTQQDPKQIDQVRIVPRNGHYVVEVIYSKAPVQAHVDPSFCVAIDLGVTNLAAITSNRVGFIPRLVNGRTLKAMNQWYNKRMKELTLCLPKAERERVTRQMERITNKRNRQINHYLHAASKRIIDFLVKEGVGTIIVGKNPLWKQEAGMGKHNNQNFVAIPHARFIDMLTYKAALVGIQVEIQEESYTSKASFLDLDPLPTYKPDDDTEYSFSGKRIGRRNRLYRTKDGRIMCADVNGSYNILRKRKPDAFAHVDAKGIAAYVVQPLRLAITV

SEQ ID NO: 7307 - protein, 441 aa, unknown
  TnpB Polypeptide
MLKKKKGYNIVTKSAKCKLLHDGFDLAETKLAFNEVVAFYFALVNTHPEGIDIPVVENGGWRYYELLTIGSEPQYPLFNDGFPSQLRRAAIRKAIGAWKSWNSNYQQWLKRSKRHKHWRPPVQPRFFNFSPSFDSGVWKEDDGASIVLKILVRGQWKYIKFHYQAPSIGGEWTKGSPSVVTKGNAAYIVFPLEKYNPATGGVKKIMDQDSFRVLGVDIDLDKHIAICSVLESDAKGKVFEVVRHFINQTSHTKRRKRDLGTIADKMQQTGIIHQGFASSMWKRVHNREIEAGRAYARKISELALFWGCQVISFEHLGNLIPIRGRYSRRSNQKRSYWLKSRVYQETSRVAFQEYNIISTRVSPKNTSRFDPWGNPVWRDNEFPTTLFDFQHYQSGANFVGTVDGYIAHSGLNAARNIGLRAILRHRTNAEFQSGVKATTPN

SEQ ID NO: 7308 - protein, 427 aa, Escherichia sp.
MHQENTMLPRRISVSLFIDQSIIWPVKRLQAFKFQLRPGGQQEREMRRFAGACRFVFNRALALQNENHEAGNKYIPYGKMASWLVEWKNATETQWLKDSPSQPLQQSLKGLERAYKNFFQKRAAFPRFKKRGQNDAFRYPQGVKLDQENSRIFLPKLGWMRYRNSRQVTGVVKNVTVSQSCGKWYISIQTESEVSTPVHPSASMVGLDAGVAKLATLPDGTVFEPVNSFQKNQKTPARLQRQLSRKVKFSNNWQKQKRKIQRLHSCIANIRRDYLHKVTTTVSKNHAMIVIEDLKVSNMSKSAAGTVSQPGRNVRAKSGLNRSILDQGWYEMRRQLEYKQLWSGGQVLAVPPAYTSQRCACCGHTAKENRLSQSKFRCQVCGYTANADVNGARNILAAGHAVLACGGMVQSGRPLKQEPTEMIQATA

SEQ ID NO: 7309 - protein, 284 aa, unknown
  TnpB Polypeptide
MLLSHRTSLKICPEYSNIIGHMCYAASKLWNVCNYERHHYKELGLEKYPDWYYQKKAHKGDLWYRQLPSQTAQETCKQLDKAWKSFYVLKKTGGIKEPNPPRFKQDNIPVTYMQMGIRHEKGSDQLRLSLPKDLKSYMEETYGIHEKFLYLENKIFRNMDHIKQLRIYPPENGKCDLIVIYEIEEPEQISQNGHYLSIDLGLHNLMTCYDSGNGYYKQEDDKLVCQNCGNSFTMDQVGETAGGCNPWPILESDWILADGKIQISYDFLKDSADIFANWKGAYQS

SEQ ID NO: 7310 - protein, 386 aa, unknown
  TnpB Polypeptide
MIKGFKIRIYPTKEQEELIWKHIHASRFIWNYMLDLQEKNYDDGGKFISAFSMNKLLTPLKKREEYVWLNDVSTTMLQRTCADLAEAYNKYFKKIVNHPRYKSRKTAKKAFPVCCNRFSFNGNIAHIQKLGYVKFKSDFVFPQGCGHKFLDVRLSYINGKYMLSFSMECENQAPQLIEESMGIDLGIKELAVVACGDRQFVFHNINKSKKMRDLEKREKSVQRRISRKYEASKRRTGRYEKTENIKKEEAKLKKICKRKADIRKNYIHQTTHTLVTMLPKRVVMEDLNVSGMMKNKHLSKAVQEQCFYEFIKQMRYKCEWSGIEFMQVDRFYPSSKTCSCCGAIKRDLKLSDRAYVCPECGYTIDRDLNAAINLSKYTASSTRAVA

SEQ ID NO: 7311 - protein, 404 aa, unknown
  TnpB Polypeptide
VQLLGYKYRLYPNKEQKEFLAKHFGCVRKIYNHFLGEHEQAYKDSKKPWNFYEYKRELPVLKEQFPFLSEINSQSLQDSLGNLDRAYKNFFEHRAKKPSFKSKWYDQACGIPQNAKVDFENGLVFVPKLKSGIKCEFHRRFEGNIKHATLMKNRQGQYFISLTIERDIMLEIQKTFEQAKAIGIDVGLESFLTISDGTKIDNPRWLKQAEKKLKKLQCRLSKKIKGSNNRNKQRMKVAKQHAKVANQRKDFQHKLSRKIVDDNQVSMIFVEDLNINGMLKNHKLAKSISNVAWGQFLRFLEYKAHWKGKLFQRIGRFKASTKLCSVCGYHNNALELSDRIWQCPKCLTTHDRDINAAVNIRQIGLSTAGIAGTHACGEGTPTVELSVLQQVLSLKQEAPQFIEG

SEQ ID NO: 7312 - protein, 344 aa, unknown
  TnpB Polypeptide
MHRKPTLKTYKYRIYPTDAQVVFFAKTFGCCRFVWNKMLDEKLRAYKKKERIPRPTPAKYKKEFPFLKEVDCFAIVAVQNHIENAFRNHFKNRKQFKPPRFKKKRDKQSYTTYNVHNSIKVDFERSLLYLPKLREGIKIELHRKFDGKIKSVTVSKTTDGNYYASVLVETQNPRNKVVEPKSKACGIDLGLERFVTVTNDFGSYKVEHPKYLRQGEKRLKRLQKSFSKKQKGSKNSEKARLRFARQHAYISNARNDFLHKLSKAIIDENQVVVVEDLNVNGLLKSRLAKSVADSGWSKFLAYLKYKAEWYGRTFIQVDRFFPSTKLCHRCGRKKEDLALNDRTW

SEQ ID NO: 7313 - protein, 461 aa, Actinoplanes sp.
MTWKPDSEKVLVSHTGHRLVRRTAFKFALDLTDEQESRCRQYAGAARLAYNHHIGRVKANLGQRAAELSYGMTATEMTPAVSWSKVAFINEMNAWKNGKAPDSPTSDGTGERGLLWRDSVCADVFECASVDAAESLGNWKSSKAGRRKGRKVGFPKFRAKRKDKPRFRLRSKSKPGETAPVRVTGPKRIRFSKLGEMRVHGCTKRLRRMITQGRFHVYSVSFSCEGGRWWASVEGVAAVFNRARRTARPMAGVVRWDKPAGLDRGVKDLAVIADVEGNVLHVESGVKALAAALTRLRAANKTLARTKPGSSGRAKAKQRLTRIHAWIAQLRAHSLHQLSWWLSHHLSALTMETLNITGMAGLRSLARRVADQAMGQLGTQIRYKADWYGLDLVDADRWYPSSKTCSGCGRIKRDLRLSERAYRCPIANGGCGLVLDRDVNAAINVARWPAKRPPQPIRAGA

SEQ ID NO: 7314 - protein, 353 aa, Acinetobacter sp.
MKTLKLRIRDKHCKMLDQLASEVNFVWNYVNDLGFKHLKRKGEFLSAYDVAKYTKGASKECNLHSQTIQAVTEELVTRRKQFKKAKLKWRVSNKKSARRSLGWIPFKKVAIKSADGSVQYGKHQFKLWDSYGLSQYRIKTGSFVEDSRGRWYVCLVVDSPKQAKPTVTKAIGIDLGLKDIATCSDGTVISNPKFYRKYEQKLGIAQRARNKKRVRALHAKIANCRKDHLHKASTQLARENALIVVGDLSAKKLVKTKMAKSVLDTGFSKLKTMLKYKCENAGVMFEEVNEAYTTQICSCCKQISSSSPQGRVDLGIREWTCQSCGTVWQRDLNSALNILALGHKRLAVGISFF

SEQ ID NO: 7315 - protein, 400 aa, unknown
  TnpB Polypeptide
MHRAHKIKLQPSKAQEQYFARACGTARFAFNWALAEWEKEYKAGGKPSEAALRKKLNSIKATKFPWMAEVTKCAPQQAIKNVGTAFQNFFRRVKQGGKPGYPKFKRKGQHDSFRADNGPADANSHAVECIGKTIKLPRCGAVKMREALRFTGRTLSATVSKQADGWYVTLLVDTADIMSGPLGGGTVGVDLGLKNLAVLSTGEVLSPLKPHRALHSRLVRLSRSLSRKKNGSSNRAKAKTKLAKLHKRIADIRIDALHKLTHRLATEFDTIAIEDLNVKGMVRNRYLARSVSDAGFGEFRRQLEYKAAMTGASVFIVDRFYPSSKTCSACGEIHEMKLNNRVMVCDCGNVMDRDLNAAINLKNKAVSSTVTACGEDGSGRGGNTATKPASVKQEDLSTSC

SEQ ID NO: 7316 - protein, 206 aa, Clostridioides sp.
CIDVDIEVFENTNNHIGLDLGIKEFCISSCGEFIENPKYLKKSLNKLAKLQRELSRKTIGSLNRNKARLKVARLQEHIANQRNDFLQKLSTKLIKENDIICIEDLQVKNMIRNRKLSRLISDVSWSEFIRQLEYKANWYGRQIVKVGKFFASSQICNKCGYKNEEVKNLNIREWICPSCNETHDRDINASINILKEGLRLITIQNK

SEQ ID NO: 7317 - protein, 231 aa, Ruminococcus sp.
MNKAYKFRIYPNNEQKIMFAKTFGCVRFIYNRMLSDKIEYYNEYQKKYKSEFEWLKEVDSLALANAQLNLQSAYNNFFRDKKVGFPKYKSKKSNKHSYTTNFVNGNIIIQERTIKLPKIGFVRMKQHRTIPENFTLKSVTVSKNASGKYYVSILFEYENQVQKTEPQKFLGLDFSMHELYVASDGTSANYPRFYSQALKKLEREQRKLSKMQKGSNNRNKQRIKVAKRNTS

SEQ ID NO: 7318 - protein, 332 aa, Bacteroidetes sp.
MQSDKDLQENDPMLWQKEVPYDTRQNAIAQCITSYKSCITKLRKHQITHFDVSYKSKKKQTSQSFLVNKDALNCEEFTIFSQRLKKKKKIRVRNRDISTFLEGTNGDVTILKIRPNYWYICLPIKKEPPIFQNAIYKSAFLDSGVRTFQTLYSPDGICGKIGNSEFSDKLKQLSNKHDHLWSISDSKLISSKTKKNIRSRCAIIRKKIKDIITDFHWQTCSFLCKTFQNIFIPRFEVSQMVHGSPLGNKITRKMLQLSHGIFRERLLYYGKKYNRNVYLVGEEYSTKTCGCCGQLKDMAGLKTYKCSNCQIEIDRDYNGARNICLKLLSKFL

SEQ ID NO: 7319 - protein, 348 aa, unknown
  TnpB Polypeptide
MSQWLEDCRWLFNHFIAERKEAWEQEQKSINYYTQAKSLPVLKEQRLSLANIHSQVLQNVAVRVDLAFKAFFRRVRAGEKPGYPRFRGKGRYDSFTFPQNGFSLNGNVLRLSKIGDIKVVLHRPIEGKIKTCTIKRSFTSKWYVMFSCEWESTPLPQNNEAVGIDVGLHSFATLSTGEKIENPKFFRREENELVKAQRKLSKAEKGTRERKKRRKVVARIHERIAWKRQNFIHQHSRKIVNCFGIIAVEDIYVNRMLHNHCLAKSISDAAWSGFFRLLAMKAEWAARKFVAVNPAYTSQNCSNCGHRQKMPLSKRVFKCPCCGLVLDRDVNAALNILGLGRQALGINP

SEQ ID NO: 7320 - protein, 420 aa, Rhodothermus sp.
MNVHQAFRYELAPNVEQRRALAQHVGAARFAYNWGLEQCLKALEAGERIPSAVELHRAWNRWKRAHAPWWVEVSKCAPQEAFRDLERAFRSWREGRAGFPRFKRKKSLDDNKARFTGAIRVFARHIQLPRIGKVRSKEKTDRLLTLLSAGKARILSATISREADRWYVSLTCEVERPDPEPKEVRSEHDVVGIDLGLSAFAVLSDGTRIEAPRPLWKALRLLRRRSKALSRKQNGSNNYRKATLRLARLHRRVRNIRRDFLHKVTTELARTKPVLVIEDLNVKGLIRGRLSRSVADVSWSEFRRLLEYKCHWYGSRLIVVDRFFPSTQTCAQCGTAGRKLPLSERTFRCEQCGLELDRDLNAALNLWRYGLAHLTGPTGSSPGSDACGDSSDGGTASGGRSTSHGSRKQEVAGHLDCLPD

SEQ ID NO: 7321 - protein, 516 aa, Shigella sp.
  misc_feature (415)..(504): Xaa can be any naturally occurring amino acid
VKRLQAFKFQLRPGGQQECEMRRFAGACRFVFNRALARQNENHEAGNKYIPYGKMASWLVEWKNATETQWLKDSPSQPLQQSLKDLERAYKNFFRKRAAFPRFKKRGQNDAFRYPQGVKLDQENSRIFLPKLGWMRYRNSRQVTGVVKNVTVSQSCGTWYISIQTESEVSTPAHPSASMVGLDAGVAKLATLSDGTVFEPVNSFQKNQKKLARLQRQLSRKVKFSNNWQKQKRKIQRLHSCIANIRRDYLHKVTTTVSKNHAMIVIEDLKVSNMSKSAAGTVSLPGRNVRAKSGLNRSILDQGWYEMHRQLEYKQLWRGGQVLAVPPAYTSQRCAYCGHTAKENRLSQSKFRCQVCGYTANADVNGARNILAAGHAVQGVEDVNNGACVRGVKMHGRAGWGHFVHAHKMAIRRWXXXXXXXXXXXXXXXXXXXXXXXXXXXXXXXXXXXXXXXXXXXXXXXXXXXXXXXXXXXXXXXXXXXXXXXXXXXXXXXXXXXXXXXXXXDARYVDIQRTPM

SEQ ID NO: 7322 - protein, 392 aa, Vibrio sp.
MLIRKAYKFRLKPTDEQSARLAVLCGHARFVWNNALRHCLSKLDNGEKVPSYAELCKLVTQWKKDDDLSWLKEAYTDNLQQKLKDLHGAWMRCFNKSLAAEKPRFKKKGKNQDSIRFVNFNKYCQLDGKRVKLPSKIGWLKFSKSQEVQGNIKNCTVSFKSGHWYISFQVEQEIDEPKHSSTSAIGVDMGIAKFITLSDGSALNSLNAFRKHEKRLAIEQRKLSRKVKFSANWQKQKAKIQKLHTLIADCRKDYLHKASHLISKNHAMIAIEDLRVSNMSKSAKGSAEVPGKNVKAKSGLNKSILDQGWYEFRRQLEYKQLWNGGLVVAVPAQYTSQTCPCCGHASKDNRKTQAHFECVECGYTNNADIVGALNILERGHRLLACGESALVA

SEQ ID NO: 7323 - protein, 369 aa, unknown
  TnpB Polypeptide
MLTYRYKLYSSKRNRKIDAMLREACFVWNHALALQKRYYRLFNGYIGLNTMQKHFAKRISRCRLHSQTVQEILERLDASYQRFFLHLSTRPPKFKRAEQFRSIVYKQGGFKLNSNVLVLNSIKQHFQFSYSRPWEGQVKQIRIRRSPLGEYYLYIVTDAVAQPRRKTHDGASVGMDFGLKTYLTLSDGTKIDNPLFLRQGLSDLRKASRRLSRCERGSSHRRAARLALDRIHEEITNRRDDWQWKLAHELCRAYDTLCVEDLQLTGMSRLWGRKMADLAFGSFVQKLEHMASKYGCEVRKVDRFYPSSRTCSVCQYVNEHLSLRDRHWTCPECGTHHDRDANAATNILRQGIASSGSTRKTKVRLRKVR

SEQ ID NO: 7324 - protein, 453 aa, unknown
  TnpB Polypeptide
MSKKLWSATKTDLSGLVETLSSGSINKKIANSWFSTFVTYLQNEKWLRISLPSSMSSVAGSMDSESTNLLSKKIRVYPETALAKTWFQWISAARWCFNQAIAILKKEKIGKYDLRKTVMNMAPSWVIKTPYNPRQLAVFQAYEAHKAARKSGGNAKFRSVREPVKSIRFQKNNWRKGTFYPTQTKGLRFKANEPIINKMHHEPTLVLDRGRWFICYAIDVPKLEPLNSELAIALDPGVRTFLTGFDGQEIWEVGLEDMGRIYRLASHLDRLLSRIGLSKGRQFKRLRYCLRKAAQKIRVKIRNLVDELHRKAANYLCTKYKVIFLPTFEVKNMVKRGKRRLSTKTARKMVTWSHYRFKQTLKHQAAKYGCVVVDVTEEYTSKTCSKCGHIHVKLGGNKRFACPSCGHNIGRDLNGAFNILLKALRDTSTSGVIASFQIVPYSETSSNCKIFPG

SEQ ID NO: 7325 - protein, 382 aa, unknown
  TnpB Polypeptide
MEDFRLAVNETIRIGLGFKVTSRYSLSKLAYKDLRKEHPGMYAQHLVSAFEVAGSILKNHRRMLRKGRASNVPYVRRLFMKAENQAYKLDRESGTIDLPIRAGLHVKLKLVMCEYHRRYLDDESISLGSLTLLPDRVIIAIRKHPPKQYAPESVLSLDTNERSLDGVLSKDGNLDTVRAEFPDVSTIQERHHTRRRKLQKKKSHDRRTSKRLCAKEGKRERHRINYRLQKVANAVLKLAEERKSKIVLEDLTDIKPRFSKTLNRRISIWPRRKLHQIIEYKAAWLGIPVVKVNPRYSSRRCPVCGRINDSRKGADFSCKCGWRINRHINASINLLRTAAPEAAGGLRFDPGAFQHDAVMVLCGPNKAVRPEPNGTSGIRAIA

SEQ ID NO: 7326 - protein, 408 aa, unknown
  TnpB Polypeptide
MASQGKVPYPQPPKFNPKETDAEERYRKRLAAFEKLKKDIETVKRYAVAKRVYCAIKKVRRKIRLPHCRLTSNRADFDSCCWRLNSKDQNELRLTSYAEGAKKRAPIALRILGKGVLRGTIQLIKKLDVYELRVCREAFCKPERTEGEIVGFDTGYTEVAALSNGAFVGQRFGEKLTRFSDYCKDKGQKRNKLWAKARELESSAKDKDRRKAQNIFKHNLGRKKHNAKYRRAQDSIKQEISKAINSIVQGKGDGLDGVKVKELVIEKLSAHMGKTRSKNWNRRLSSWARGYIRQCLEQKCKQFGIRLTQVNACHSSRVCPACFYPSKENRVSTDRLKCRQCGYEGHADTCAAKEILRRRSGDIPLYAPPGKVFEMLMVQYKRGLEVPKAPPFSCKTQLNESEGEKKSL

SEQ ID NO: 7327 - protein, 211 aa, Halopiger sp.
VSIGDETLLYPGNAVKEDIHYFRHVEYDTEGEAGPSKKAEWARKKKDRRRKHSLHALTRDIVEQCADRGVGEIAVGHPKDIRDDAEWGRHGNKKIHDWPFDTIINMIEYKAEERGISVTRVDEAGHRTSKTCCACGMKASANRVERGLYVCDDCGLVANADLNAAENMRATVTPSPAKERSNGWLAQPAVRLFDKYTGVVAGREQVADCKP

SEQ ID NO: 7328 - protein, 410 aa, unknown
  TnpB Polypeptide
MKQMRGHVYRLYPTADQEVLMRQFAGVCRLVYNLALEQRRIWGRSHGCNFYTASADLKHLRAEFDWIGAVSQTAQLQTLRDLDKAFSNFFAGRAAYPTPRRKGENDSFRFTGREVSVRRLNRRWSEVRFPKIGWVRYRDTRPLAGETRNATVSLSPLGWQVSIMCCSEVAEPTRLPGSVGIDRGVAVPVMLSTGESFGLPVSISKLDQQHRRAQRAASRRKRGSRRYAKAMKRAAAIKSKAARVRAHWQHEVTTGIARRFGVVAVEKLKTRNMTRSAKGTIAKPGRNVAQKRGLNRSILNVGWFGLEAKLAYKLAERGGLLVRVDPAYTSQTCSDCGAVDSRGRESQASFVCPHCGFRANADLNAAINIERRGNAPLLDVEGGQLGLPMKRQLFRAASAPPWKSPEFSPG

SEQ ID NO: 7329 - protein, 255 aa, Streptomyces sp.
VIETDPGADLARMPDADGLPSVGIDLGLTLPQALNSVRAGGTPIAVLSDGTKIDSPRFLRRAEKKLKKAQREWSRKQKGSKNREMARLRVARAHAQVADARREFHHQLSTQLIRESQAVAVEDLAVKALARTRLGKSVHDAGWAQFLAMLEYKAGRYGRVFVKAGRFEPTSQVCSVCGVKDGPKPLHVRSWTCTHCGTVHDRDHNAAKNVKQAAGLAVTACRAQVRPELVPAQREEAGSHGIHTGARAAQRHSTR

SEQ ID NO: 7330 - protein, 195 aa, Streptomyces sp.
MIDSPRFLRRAEKKLKKAQRELSRKQKGSKNREKARFKVARAHAKVTNARHEFHHQLSTQLIRDNQAIGMEDLAVSALARTPLAKSVHDAGWSTFVSMLEYKAARYGRTLVKIGRFEPTSQTCSACGIKDGPKPLNVREWTCSACGTLQDRDHNAAINVKTAAGLAASACGAPVRPGLVPAQREETGSHGFPCAA

SEQ ID NO: 7331 - protein, 402 aa, Streptomyces sp.
LIRAYKFLMRPTVRQTQALSEMLRDHCSLYNGALQERRDAYRHSSKTSIRYGDQSAQLKEIRAFDPERQGRWSFSSQQATLRRLDKAFQAFFRRVKAGQTPGYPRFKGAGHFDTVTFPKDGDGCRWDSTPHDPVTRMRLQGVGHVRVHQHRPVKGRVKTISVKREGRRWHVVLSCDEVSVEPWPATGSIVGIDMGTVHFFTDSNGVHKDNPRFCASMGEELAAAQRHLDTFPRRTRRRTKKHCAAARKVAKIHAKIRRQRLDHHHKTALALVREHDVIGHEKLNTAGMTKTPASKPDPDNNGAFLPNGAAAKAGLNRSILDAGWGLFLGILAQKAESAARRVIPVNARNTSRECPECGHTGKENRVIQAKFECVKCGHIGNADHVGALNVLKRAGLVLCAQA

SEQ ID NO: 7332 - protein, 380 aa, unknown
  TnpB Polypeptide
MRTFEYRLFVNKEQDSKLMACLIESRGIYNAMLETVKAQYEQEQTFPSKYDLEAAFKGQGAHVPATTVQMLADRLSKSLKRFLAAKKHGIPDVGFPRFKKPNRWHSIQLRQYGKDTYVHEDKKHLIVPAKIGKSLKIKMHRPIEGTPKTAHLVLRADGHWYALIVCEIEPHNEHDPSDCNHPDIGIDVGLKSFLTDSEGNTRENPRFYRISQRTLRRKQRTIARRKKGSHRRRKAARSTAQTHLKINRQRRDHHFKTAKPYAEGYQVIAVEALQITNMVKNHHLAKSIMDASWGAFLAILSHKAESAGHQMIRVNPRFTTQACSHCGELIQKSLSVRTHICTSCGFVADRDVNAAKNILTRARLGHSLQEPTYTDGCSVS

SEQ ID NO: 7333 - protein, 439 aa, unknown
  TnpB Polypeptide
MLIAHRIELEPTKEQVDYFRRACGAARFVWNWALAEWNRLYEFGQKPKAAALKKAFNAIKYQQFPWLTEIHRDAHAQPFAHLGKAWNRFFDNIKSGSKAHAPVFKKRGQCVDSFYVANDKLTMSEMSVRLPVIGHVKLKESLRFGGRILGASVQRDADKWFLSVQVEVDVSWLIKENRRPVLGVDLNVAGIVCSDGKLFDTPLPLKKAARRMRMQQRSISRKLEAATRSVGIEPGKRIPKGTKLPVSKNRAKASRRLADRHYKVKCIRHDFLHKTTSTIARENQTVVIEDLSVKGMTSSSKGDIDNPGKCVKQKAGLNRSILDVGFYEFRRQLTYKAEKYGTFLMVADRFYPSSKRCSCCGSINATLTLKDRTWTCATCNTIHDRDFNASVNLEQLALLPEAFGKVTSVRHDIRHQKESGQKPQTREGEHHAHICARFG

SEQ ID NO: 7334 - protein, 452 aa, Mycobacteroides sp.
VAHRYRLYPTGEQAAFMLARHCADARFVWNLAVEQFNWGRAGRSAPGPAARQKQLAEARQASEWLAAGSSSVQQQALRDFDRAVAGFFAGTYRRPTWRRKHLDEGFCVRDSRVELVNGKWGQLFVPKLGLVKFRMSRPLPASKLGMARITWKAGRWHVAFPAPQPSVTPAPGRDGRAVGIDRGVKTTLALSDGTMLRAPIMRRGEQKKLVRLQRRLACCRKGSIRRGKAKARIAKLHARVADRRRDWVEKTTTRIAATYAVVVVEKLATRDMVRAPKPKPDPDNEGYYLPNRKAAKAGLNRGIYANCWGLIARRLEHKTSASGTALVYVPAAYSSLECRNCGHSVKENRKSQTEFQCVKCGHTDHADLQAANTILARATTRLAHTSGLEATPADVGVLAQARRPNDARTRQGESRDLHSREKVKHDCPSQAGESTHDEHIGQCGQGVDRAVL

SEQ ID NO: 7335 - protein, 415 aa, Mycobacteroides sp.
MVVKRCVKYPLAPSLAQAHILQRQADAGRALWNLIHAHHTFREASRRWPTWSQSDAAIRQGRKDIEWLAILPAQAAQQVLRAYIQAWSNYWNGSHGRPTWKTRRARRAVDVPQARDLNVTRLNGKWGTVAIPKVGAVKVRLHRAMPERITGARVVLEATGWMLVIRGENKVVQPRRRRAERGSIGIDRGVTHTLAISDGSFLDQPATLAAGEKKRLYRLERKAARQRARRARGHRHSGRARRTYAQIGGLKARQARRRYEFAHQVAAALVGTGAAVLVVEDLLVKNMTRSAKGTIESPGVNVKQKAGLNRCILDQGWTQIVALLTYKADQAGARVIRVRPHGTSQTCHRCGSTALGQRESQAVFRCADSVCGWTGNADTNAAIVIKQRGQEVALQDVEPNATRQAAKRQNPKTAA

SEQ ID NO: 7336 - protein, 500 aa, Vulcanisaeta sp.
MPPQTTTNETRKPLRRSIAVELETTKELNKLLYSVETAYLSIVREVVEYAVKNNVTNATQLHGLFYSRYRLEYQGLHSHIIIQAIRQASEIAKSFLRRKRKGLVDKPYPEVKAVSIRFTEMAWSYDQFIKSIAPVRLELSLLGERREVWIKPHKRFWLFWWKVLIGEARLASTLIIKRRMNKWYAIFIFKLKPKEEEPKSIISFDINENTVAVGRIDIETTVGKVADWNRQYLTPELYTIRTDFGRLARRYERVRNAIIERLKPHFTLPSGKFSNVTDTREFRKRVKHLREGVRKVGRVRHVANELTRTPSIIITEELGENPQESMIDGIEKDELRHRIKQTPFKALEEAVEGKALERGSKIFHVSSYRNSRVCPVHFVRLVETNDWHVLYCPRGHYVDRDYASVLNMAWKLTPESWTKCVWWDLRKRMGWREHEEKSNPLIPYPIVHHLYATLREFMASLEKSPAVLARGKPMNPAGGADEGWARKPPTPPQGREEVSQ

SEQ ID NO: 7337 - protein, 406 aa, Nocardiopsis sp.
VSHKQGVRFELAPTGGQAVAMGRHCGLSRVVENFCLETVRKKYAQRKAEESYGITGDGLTKVPWSAPALEREWRAAHPKRYPWFSQGGLSSRIPKEACRVRAAGLKNYFASRAGKRKGTRVGWPRWRRRKHGSRFRYDADRAKPLDARTVRLPAIGDVAVREDMSWLTDRTATGRARILGATVREQAGRWWVSFQIEVDRDDVDKRRQAPDGAPACGIDLGLKTFAVIKSSDGTTEEIHAPKPLKAAQRALKRAGRRLSRSAEGSKNRAKARERVGRLHLRVADRRRDFLHKTTTWLTRTKSAVAVETLNVKGMVKNRRLSRAVTDAGFAEFVRQLEYKAGWYGSRVWRADRWFPSSKTCGECGRINRVLILADRTWACPGCGAVHDRDHNAAGNLLDSMLADTDA

SEQ ID NO: 7338 - protein, 118 aa, Bacillus sp.
MQELPKIHFNIGVDVGLKGCSILLDGTIYKDTKFFRSLEEKVVKVQRVLSRRMKGSSSGNKQRMKVARIHERILNARKNYLDKVSTEIIKNLDVVSIEDLRVSNMLKNHKLAKAISKV

SEQ ID NO: 7339 - protein, 314 aa, Sutterellaceae sp.
VKEHRTKGGFTKRIGINEAQKIATRVWQGIERRLLHQGGQPRFKSAKRGLHSVEGKSNKTGLRWKAKTWTLEVLDLVIKAEAPDAWQKEALLSATDPSGFKRVKYCRLVRRMIRGRMRYFVQLIVEGVPPVKHVYAPKDLKVAVDPGPRTMTFYSPEWQQKILVSAGTVSQEKEIARLLRAMDRSRRDTNRECCNADGTVKAAGKTIVWKESKTYKATKAKLADLYRRQAETRRCLHGEVINQVFGRAGTVIVEKNSYKAFQRAGYGKSLGKSGIAGLITRMTSKAESAGCCVVKVSPRKTAPESARSRNGNVP

SEQ ID NO: 7340 - protein, 473 aa, Sutterellaceae sp.
MPKGKDRNKRFKEIQKSALLSEYALHDVVKEYRAKGGFTKRIGINEAQKIATRVWQGIERWLLHQGGQPRFKSAKRGLHSVEGKSNKAGLRWKAKTWTLEVLDLVIKAEAPDAWQKEALLSATDPSGFKRVKYCRLVRRMIRGRMRYFVQLIVEGVPPVKHVYAPKDLKVAVDPGPRTMTFYSPEWQQKILVSAGTVSQEKEIARLLRAMDRSRRDTNRECYNADGTVKAAGKKIVWKESKTYKATKAKLADLYRRQAETRRCLHGEVINQVFGRAGTVIVEKNSYKAFQRAGYGKSLGKSGIAGLITRMTSKAESAGCCVVKVSPRKLRPSQHDPETGTYRKKALWERSHQLGDTDWYMDRDVAAAMDLYFADPATDSYDLKAEQSALARLKQVSGNAGSIVQYKPENRQDEAVLRRNRRIELMKPVPVERLRFKCSCGAGDARADKASKTLPVAGKPALCQETLRFQARVV

SEQ ID NO: 7341 - protein, 415 aa, unknown
  TnpB Polypeptide
MTLTDKNQLRGLSKYGYSVLRELCKLSKNLYNEGLYSVRQYYFKEKKYLRYEGNYHVCKNSENYKAMNTDIAQQTLKVVDRCFKSFFSLISKARCGSYQFNQIHLPHYLPKDGYFPLIIPRITIKDGFFSVPVSRYYKKEHEDIRIQIPERLLDKNILQVRILPKHNAQFFEIEYVYEQEECHHDLNPVKFLGVDLGLDNLASCVTNDGASFIIDGKQLKSYNRLYNKENARLQSIKDKQGIKEETRRQYLNLRKRNRRVNHAMSVAAKRIVDYCIDNKIGNIVVGYNPDWKRNINIGRKNNQNFVQIPHGTLRGKLQYLCKLHGINYIEQEESYTSKASFFDNDYLPVYNADNHQEYTFSGKRITRGQYRDSDGYVLNADINGALNILRKCTLIDLTVLQDRGCVSQPGRIRVF

SEQ ID NO: 7342 - protein, 403 aa, Frankia sp.
  misc_feature (48)..(48): Xaa can be any naturally occurring amino acid
VIVQLRYSFRLYPSVGQRVALARAFGCARVVYNDALSTRETARAAGLXFPKSGDLSKMLITEAKWTPERAWLAEVSAVVLQQSLRDLDTAYRNFFDGLKGKRPRMGPPRYKSKRDSRQAVRFTANARWSFTSGGKLRLPKIGDVDVKWSRRLPSTPSTVTVVRDSAGRYFASFVIETGPQETLPGSHAEIGVDLGLTHFAVLSDGTKIDSPRFLRRAEKRLKKAQRDLSRKKKGSANRAKARLKVARAHARVADARRDFHHQLSTRLIRENQAVAVEDLAVKGLARTRLATSVHDAGWSAFVGMLEYKATRYGRVFVRIGRFEPTSQVCSTCGVKDGPKPLDVREWTCAACGSHLDRDVNAAVNVAKAAGLAASARGAQVRPAPVPAPRGEAGTHPKLAPVGV

SEQ ID NO: 7343 - protein, 337 aa, Cyanothece sp.
MHNTWEAFKKRGFGFPRFKKYGQFRSFLFPQFKDDPLTGYQIKLPKIGSVLIELHRPIPEGFVIKQVRVLSRARGTKWYVVITVQSNVEVPNPLPKGRGLAIDIGLENFLTTSDNFTVKRSLFFRDLQSRLKELQRKASRKKRVRNSASQAECKTHSRQKGSKNWEKAQIKVAKLHHKIANSRKNFHFQVAHQLCDQGDMIFVEDIDFRVSAKGFLGKSMLDGGFGQFRTILKWVCWKRDKFFAQVDHKYSSQICPNCRTHTGKKPLSQRQHICPECNYQTTRDHAAAEVLLQRGLNVIQEVRMDVAERKLPSNGDLSRSVCDWLDKCRSRNTQERS

SEQ ID NO: 7344 - protein, 477 aa, unknown
  TnpB Polypeptide
MKNDNDNEQYLTQNTKVKTFYIGINFELGKKIEQLLLNYYHFENILVNIISKNYNLYKRGMDVNDYHILTSPRLIINILYYYNYQYSEQQEYLRNKYKDNQLWQALKETAKKLNPYNLTYIIERVRTAFDTYFTNLELYEQNPNLFQEMPLSPIARNFSKPTNYSIELDKYASLSFLRLEKDNLVGINLSDQMVYIPVTKEQVKKLIEIERLFSVKVVYDNEDLYLQISYLKELNGTKNEQIKHKVENYKSKHITKDEQVKYAGIDIGERNLMAVFVDDENTLSLLVDGEPFKHNENMESIIEQLQKMVRLVFEYLHLHKVTDIYTSKNLANHNLAKIPFIKLIEAIEHEAQEYEIKVHYVDESFTSKASCISDDIKSIIGNRLKPSSIKSILENLNLSRVFNGKRSSHGTMFFDTVINEKFYADLNAAVNHIKVGTDKNFEWLKDKLFKLQDPIKITSEKEFREILMKLQDTKPDI

SEQ ID NO: 7345 - protein, 422 aa, Microcoleus sp.
MQLTERHIIKSTEHRFAQIDELAFKSKNLYNAANYALRQSFIYGWGYINYNEMNRLMKSHEAYKAMPAKVSQQILMLLDKNWKSFFEALKAYKKDASKFTGRPKLPKYKDKVKGRNILVYTIQAISSRQLKSGIIKLSGTEISIKTKINPEQICQVRLVPKCDAYVIEVIYNEPESTARINNFVASIDLGLDNLAALTSNQPGFIPLLINGRPLKSINQFYNKRKAQLQSQLKGNRSYSSRIQRLTRCRHQKVDNYLHHTSRLIVDILTAHQIGTLIIGKNAQWKTGIELSKRTNQNFVSIPHARLIEMLEYKTRLVGIKVIVQEESYTSKSSFLNLDPIPVYGHTDASNVIFSGRRIKRGLYRTSVGKLINSDVNGSYNILRKAIPNAFSNGIESCVLGPRRVNPLKVKAKGEGFNASRVM

SEQ ID NO: 7346 - protein, 185 aa, Salmonella sp.
MVGTDVGLKDLFVTDSGFRSGNPRHTAKYAARLAPLQRRLSKKAKGSKNRARARLKVARLHAKIADCRQDALHKATRKLINDNQVVCVESLKVKNLIRNPSLSKATADAGWGELVRQLRYKGEWAGRSVVAIDQFFPSSTRCSCCGFTIKKCLLMFVNGSALSAELTTTGTLTRHVISKLPGWQC

SEQ ID NO: 7347 - protein, 461 aa, Deltaproteobacteria sp.
LKYAIKIEYILDEQNKSVLDGQSRICNWAFNHLLKVANDLKEDFIKSGNETLCKTIYTQRGLRNLLPKLKDIHLFLKSVHSSPLKNSALRLSQSIKNYQDFRKGKRTGPKVGWPRFRSFKRSFFSLLYDEPNKGFKVSGSSLTLSLGVTDLGERLKVTGTLKNSLSKFKGAQVKNLRITKNGERYFAVFTVEKTAKKPREIKTVASIDPNHKNLGYVVGSDGRAMEIANPYFLKNLQKRIDHLKSRRDRCLRKAKKIELKNDKFFYLPSRRYQKFDETLKRVLQLRRDQTKTYLFTLANKLFKEYDLVGIGDYTPRGGGLGKKMRRSMNNESLIGRFKETLAWVAQRGGKSFEIWNEKNTTKTCSTPGCNFVHEKSLDPSIRSWKCPSCGITHIRDENAAKNGLKKLIKKLPCLGHLEEEIRTRCAWRFNGLGIQNLEFRGPSALETLIVGQGFQEIKPAM

SEQ ID NO: 7348 - protein, 529 aa, unknown
  TnpB Polypeptide
MMPQRHIRSQTYAAELTGDQVAEFDLCRAGATWFYNEAVASQLDRSRHRVPVESNMSLGYAVSVARKAGVEFPYRGTMRPVSDVPARMLHGALRQLSASWTRHLKALAEWRKRPHGPGEKRPSSPPGFRSVHRGGSLYWQVQDGGAPCPLGKFVLVTRKGTRDRPAMATLRVPGRIGLVVIRYHRELPADTMIRFASLRVDDLGKYWVTVQYDTAQVKQGAESGVVGVDVGVAVTAATSDGAVYDAPRLSPGQQQRKDRLQRAMSRKRRLNPCKHDRFVTKNGRTRLVRGHCAPPGHPDHDCACWKHSRRYAQNKAEFLKLTQRQARQRTAGAHLASRTLADRYAVVVVEDLDVSGMTGSAKGTEEQPGRNVRQKAGLNREILASNWYQLRQFTAYKTELVTVPAPRTSQTCPRCGCIDPANRPERDLFRCVACGLTGHADIIAAQNIRDRYTAPTAVAQAVAAREICLVDGQQPANSLPNSIAAPGQEIILQPAGNLIPERWGRVGARKRPERRRSRKPKKASPGKSS

SEQ ID NO: 7349 - protein, 312 aa, unknown
  TnpB Polypeptide
  misc_feature (308)..(311): Xaa can be any naturally occurring amino acid
MAVGDSQSHVLSVKIETNIRAKREVFRVLVNKAYKFRIYPNKEQEIFIAKTIGCSRFVFNYFLAKWKAASKETGKAFTYHSCSAELTQLKKEFVWLKEVDSIALQSSLKNLANAYARFFKKQNKAPRFKSKNHKVQTYTTKHTNGNITIVGNKIKLPKLGFVKFAKSREVEGRILNATIRRNPSGKYFVSILAETDVQPLEKTGSSIGMDIGLKDFAILSTGTVYKNPKFFRSLEKKLAKEQRILSRRKERTLQQKKSLEEARNYQKQKVKVARIHEKIAHARTDYLQKISTDIIKNHDVIGIEDLQXXXXT

SEQ ID NO: 7350 - protein, 397 aa, unknown
  TnpB Polypeptide
MKTYRFRIYPNKQIEQKLQRSLDLCRFTYNNLLSEFNSWDTISKYELQSRIVDLQICYPELKEVYSKVLQYENYRLFSNLKALGETKKKNRKVDKLRFKGKGWFKTIHYNQSGYKLLMKGKRCQTLKLSKIGEIPIRCHRKINGNIKQVVVKREASGKWFASLITNEKKQVHKKQIKKVVGIDLGLNDSVWDSDNNKTENPKFLNKYSLQLAKRQRQMSKKKLGSKNRNKFRIRLARSYELLTNTRKDFIHKLTKYYADNYDCIGMEDMPINNMVKGKKNKFSKSLLDACFGFIRSEMQRKAENAGGVFIPVNYRGTTSRCSQCGNNVKKEIWEREHNCISCGFSASRDYNSALEIKRLALIEIGMGRPESTLEEMEALHCKVQLPSMSQEATSFTA

SEQ ID NO: 7351 - protein, 489 aa, Brasilonema sp.
MVKRKPKNLVQKLSTQVVPACGVDSASKAELLKIMERLAIVRAESYNKLGSIRHWGMDWHKAYPEVRSFRSPESLNLPSKLMEWIVSDVAKAILAGQAATIANLKKHIWNRYKGEKNEKVRKQCLEKLKSTAFLDDSFLHRIVRKEFQRGHTFVGNQIVYQPDGYSCKRVNRHVYLLELAGLTRGKRIKIKVCSNRKISGQIRVVFDKNLEQFEIHFLVNFGEYTKDSGAINTEVGIDKGYTEAFIDSQGTEHGPGLGKLLTQKSNRITNKNRNRGKLFALSRNLKQHDPAKSARILKNNLTRKTENKRYNKDQSAIASLIGFASKSLFEEKFLKIYAEDLTQPIKNKRQSKAMSGKLNSWVKGYLRDSLEKWASWSNSTITEVAASYTSQVDSVTGTLLGKRDSDTFTRFTGVVLQADLNAALNILARGTDKEINRYMKADEIQAVLLRRTARFLKGLGKSLTDAVELGWLDPKHTKNSTFKELVNGS

SEQ ID NO: 7352 - protein, 290 aa, unknown
  TnpB Polypeptide
VEDKETCPGDPFDLVIRLSTLKRGKRIAILTNRTKPLNKWLCRPNARLVQGCSLSEDWLTLWVEEPNPFILYSPGPEAVVYSGDLGMRKLLTVQDNEERTAYLGREYHDLQDRIRRARPGSENRKKLLTERDHVIGRALNAVPWNLIDVFGVEDLNGITRGKHGLGKNKEFRRKRLPWAHRSVLERLLAKAIENRVLLIAVYARGTSRECPNKVQPCGCASALNRKGEVFRCIACGYTADADRVGAHNIRSRTLAILALRRDWQREHPLGRSRGRPTLRAKDALLCTSAA

SEQ ID NO: 7353 - protein, 378 aa, Gracilibacillus sp.
MAVQHKAYQYRIYPTKEQQTFIAQSFGCSRFVFNHFLEKIKCADEEKRKTLQVNAFRNELKSMKTDYEWLKLVDSISLQASVENLNDAMVRFFKKQNRFPVFKSRKHPVKSYTTKSVNGNIKVTDTHIKLPKIGCIRYANSRYIPDSAVIKYAVVRQNAAGKYFVAINVKEHVDKTNKSHQTIGLDMGGLTDFVIDSNGNKINNERYFHSSEKKLAKAQRSLSRKQKFSNNWYKQKKKIAILHEKIVNNRKDFQHKLSSKLVQHYDVIAIEDLCVSDMLKDKTYSKSIQDASWSEFITMLAYKCDWYGKELVKVGKHFPSTQICSTCGTKHPITKDPSIRSWTCPTCHTSHDRDVNAALNIHKEGLRLLTVGAMGGIA

SEQ ID NO: 7354 - protein, 494 aa, unknown
  TnpB Polypeptide
MAKCNTKSYVVEIDLATSENDDVILETRFHIVHHITNVLVKHAIHCISNLERDKTYRIIMSNYSKTKKFSKEEKDVLSSLRLKYGLSEYQFHNYAKTQSEMYNLGSAIIQKIATRTWNSVYSYLFKNGKMIHFKNYHDIKSYENKCNGANITFKNNIIYNNGLKMPIKYKKNDVLINNALKDIENNYTKVKYCRIIRRWHKNKYVYKCQLILEGIPPKKKNIPTLIDKTVGIDIGTSTIAVVSDNKHIFKELAENIALIDREKRRLQRHRDRQNRANNPNNFNIDGTVKKGCKYWYRSNAMIKTDNKIKTLCQKRSNQLKQSHILLANEILRLGSNIIVEDMQWSTLAKKAKKTEIFDKTGKYKKRKRFGKTITNHAPSMLISIINTKLSYIDKQVNKVDCFKTCATKFNHVTGEFKDTDLNTRFVNINGNEIQRDLHSAFNLKYIIISKDKYDYDVNAMNENFDSFISKHNELLDSLKNQKQLGHKFPSCMGI

SEQ ID NO: 7355 - protein, 390 aa, Actinomadura sp.
MVTIVKVMVQVKLLPDAVQAAALKRTLPEINEAANWVSAVSFENLALKACVRDLRNLCYGELKARGFGAQAAQHIIKRVADAYTSLRAAIRAGNFGPNGSRSRRKVDSRPIMFRPHAAHTYDDRCLSWNYDRRTVSIWTLDGRVKNVRFACSSSALRQLADYRRGESDLLFRDGKWLLAATCEMPEARQYEPSGFIGVDRGITNLATTSDGHDHSGRRLGRYRRWQARKRAELQAKKTRSARQALKKRSRREARHAAHINHKIAKTVVAVAQRTERGIALEELGGIRERVTVPRDQRARLSSWPFHRLGAFIAYKAKRAGVPFIEVDPAHTSQRCPRCGHTGRANRRTRDHFSCRRCGLAGPADHVAAVNIAERAATAWVFVNMPQPAPT

SEQ ID NO: 7356 - protein, 511 aa, unknown
  TnpB Polypeptide
MAPKTIVSRTYPRVPYAAFDKNGEPLDLDEVLDGVRADAELVAHYALKEMTEQNLALVTYFDRLKPSGAGYMMGLKLPVEVKKQFKNGASRLEKMFQKQVVTNLRSWSARVEVMTQTSTKYVSAGWRRSASKSNPTSMSPRLALSAADKHYREMSVTPERITLDMVVQGKWITLHFPTPPQLLEVGCEPGVPDIWVDKNNRVVFGFCGKTDPGRPEFSERYVVGVDVGITNSAAYVVWDTEKKQVVERSLLGQRARSLNNKIKRGKTQVASLKRKGKDEEAVSHRQHLSNRRKELSIFIAQDLADASWRYGNAIVSFEDLSHIKNTMKYGRWFRGEVYRRTRDMVEADGGRVMKVNAAYTSKRCHVCQSDLDMSNYSEPRCTICGITHHRDLNAAANIAQRANVKKACQTRKKHATARKTRKSKCRIKSLKHPGTKNKPTPKAPQNQKKTKTHTRPPLPSKEVSKRMCPAESRVSAVDHREDSGFQTISGTTNPTENTSTVNTVDVVYLKE

SEQ ID NO: 7357 - protein, 510 aa, unknown
  TnpB Polypeptide
VKYYDTVTRHRFTTEKGVDAEQVERDLAQMVTWMADAEREVLSNTEFHDLAVKTLKGDRPTGSLNSWGRKKLSRYNFSFQKHNMNEMLVSNVVSTLELYAMSVGLFQVMSTHTKETRPEKIICHYRCAYPDAPQPTSGMVRAHLRRYHLKGEHKASLPGVSAKLNLAVCDTHFAPKASRDDNDPLNIIVQVKTPNHKLTKICLRLPDDNERFGKGKICRPTIRLNNKGQMVFDIATEHDIDEKQTNKVVGVDLGKVEPFVATLIDPESNHRSAPYHVRYKGRLGSLVKKEQQRRNLASHLHKKADLCSIHNRTDHANVLRTEANRVSAKATRIKHEISQCVASQIVSVANQNDAHISLENLSWLDAQGGRWPHAEIQQRIENTAKRYGLKVVRVSAKDTSKTCSRCGGKTSNNSKTRIGSCNTCGFELNRDVSASREIALRATSPSSRSRNRMRSLLRQRALERSSAATRQSKPVNALGGNQRHTGTSERKTEATLMMVRETLDSRGSPT

SEQ ID NO: 7358 - protein, 496 aa, unknown
  TnpB Polypeptide
VPYAAFDKDGGPLDLDEILNGVRKDAELVAHYALKEMTEQNLALVTYFDRLKPSGAGYMMGLKLPSEVKKQFKSGASRLERMFREQVVTNLRSWAARVEVMTQTSNRYVSAGWKMTASDSKPSSMRPCLALSATDLGYHKNFSVTLERISLDMVVQGQWTTLHFPTPPQLLEKGCELGVPDIWIDRNNRVVFGFHGKTDPGRPKFSERYVVGVDVGITNPAAYVVWDTEKKQVAERSLLDQRARSLHNKIKRTKTQVASLKRKGKDEEAVSHREHLSNKRRELSILIAQELADVAWQYGNAIVSFEDLSHIKNTMKHGRWFRGEVYRRTRDMVEADGGRVMKVNAAYTSQRCHVCQSDLNMSDYSKPRCTTCGITHHRDLNAAANIAQRVNVKKACQTRNRHATARKTRKSKCHSKPLKHPGTKNRPTPKAPQNQPKTHGRTYPPLPSKEVSVRMCPADNRVSVVDHIEWFQTTSGTTNPKENLSINNVDWVYPKE

SEQ ID NO: 7359 - protein, 410 aa, unknown
  TnpB Polypeptide
MTRRVQRSYKYRWYPTDEQAAELARTFGRVRLVYNKALEARTAAWHTEQRRVGYVGTSALLTGWKRTDELAFLNDVSSVPLQRALRHLQAAFAAFWNKRGNHPKFKAKKRSRASPEYTRSAFRYRDGQLTLAKLDGPLAIVWSRPLPPGAEPSTVTVSRDAAGRWFVSLLVQDAMAPLPPAIHPDTGEAHVVGLDAGLTSLVTLSSGEKLANPRHERRDQQRLAKAQRGLARKQRGSRNRERARRKVARVHARIADRRRDHLHQLTTRLVRENQTVVIQDLHVRGMTANHALARAISDAAWSELRRQLEYKCTWYGRDLVVVNRWLPSSKTCSACGRMAAVMPLAVRAWACQACGARHDRDVNAAKIILAAGLAVAACGAGVRPQREPSRMGRPATKQETQRTTAGIPHI

SEQ ID NO: 7360 - protein, 408 aa, unknown
  TnpB Polypeptide
MKRTNLFCLAPTREQHRILQGLAVNCAKLWNEVNYLHRQQYSDYLRLDWNAQAYKRYVPLVGSATAQQVVRKNNEAWRGFLALKRIQKNGEHSSMIMRVKPPGYWKRDGRYVLRMLFRCDGYHIREGRVDLPRHLSIPFKGELKWTGKQGRLEVSWDALSKKWRVFQSVQVKPIITPLGSKTCYVDLGVRNLATVWLPEWRQPVAYQSGRLLADWWYWTNRIAQHQQRLLTVNGRKKSRQLSKLYRIRKNRFRHAVATFARQLVKDLYAKGVSTIVIGELTGIRESSRQGRQGNAMVHNYWSHKYVVDRLRWTAEEYGMKIRTVSEAYTSQTCPRCRSRHSLRVLRGFRCLECGLDAHRDAVGVLNIAARCGEHAVRPMVWPMLLRWDGCGWNRNNGMPTQQRITVEA

SEQ ID NO: 7361 - protein, 440 aa, unknown
  TnpB Polypeptide
VKLQVVKTVRVPVHHAITKRKLSILDSLTARTTHAVWLWSKLFKEHELKGSYMDRRLFYGQVKRDAKLGTMTQCCFDTAAWMWWSYREAHKAWRRNVAIARRESDKWWLRKLLRREPQEPFTNGMHGKVPIWFDSRFGAIEQSKHMKLCSYVARVSTLRRGVKLTIPLNPAKRHLDMLEQGTMKSFQLVKRHGKYYVHVKVEFHVPDQPVHAVRGIDLGVKRSVASVMLRPNQPLRSSDFSILQDGLKRKRLNRLEKRIEKLQQARKWEPLKRIRHKRLRVSEQYDRLAAKQVATTSQNCFVVVGYPKGIKYKNPRGNGQRQQRKRLAHWTYGKMICYIQEECVKQGIPSEAPEEFWSSRTCHRCGSRHTERISQSVFHCWSCELVYNADYNAAINIGSRFMPTATTRRATDDLAYARNEQAREIVACEPRSPHPFTGWS

SEQ ID NO: 7362 - protein, 388 aa, Rhodothermaceae sp.
MPTVRYRYRFYPNAKQRQMLARQFGCVRYVYNWALALKRDAFRERGEKIGYAETDRRLTELKRDPNHAWLRDVSSVPLQQALRHLDKAYTAFFRSTARFPRFKAKKHRQSATYTRRGFSLRDSGVRGQPVVKLARMSTPLKIRWSRPLPSAPSSLTVVQEPDGTYYISFVVEVEHKPLPRTRREVGIDLGVKDVVVTSDGWRSGNPKHLKRALDRLAREQRKLARKQKGSANWHKQRRKVAKLHAKVRNQRTDFLHQLSTRLVRRYDVIYAESLCVRGMVKNHSLARAISDAGWSAFVGMLSYKATLYCKRFVQIDRWYPSSKTCSRCNYTMETLPLDVRAWVCPRCGEEHDRDINAAQNILAVGHTVSACGDGVRPALALVSEGNCR

SEQ ID NO: 7363 - protein, 192 aa, Aphanizomenon sp.
VIHKAVQVRIYPSKEQETQLAQSFGCARWWWNYALNKSIETYKETSKGLSRAALNALLPILKKAEDTIWLGDCYSQVLQATTLNLTTAYKNFFDKRAGFPKFKSKHGKQSIQYPQNVKVVDGNIKLPGNIGIVKAKIHRHIDGKIKTVTISKTPSGKYFASILTEVEGVVTPLNTRGRNRKSNYFRREDLWY

SEQ ID NO: 7364 - protein, 210 aa, unknown
  TnpB Polypeptide
MIPEMAGLLSWEENTFHWKDIFIKEIARVQSVWYAQQSERGIKYPKSSKHIQRLYRKKQNAVKDYLHKTTRWIAEYCRKEDIRCVVVGDIRNIRKEKDMGHKTNQKFHGLPYNRLYIMLEYKLKLYGIQLIKQEESYTSQCSPLSPEVSKRHAEASNRKERGMYITDGVRFNADAVGAFNILRKHLSVSGKQKELSVTGLKTPEIIKVAA

SEQ ID NO: 7365 - protein, 275 aa, unknown
  TnpB Polypeptide
MLLSHRTSLKICPEYSNIIGHMCYAASKLWNVCNYERHHYKELGLEKYPDWYYQKKAHKGDLWYRQLPSQTAQETCKQLDKAWKSFYVLKKTGGIKEPNPPRFKKDNIPVTYMQMGIRNEKGSDQLRLSLPKDLKSYMEETYGIHEKFLYLENKIFRKMDRIKQLRIYPPKNGKCDLIVIYEIEEPEQHSQNGHYLSIDLGLHNLMTCYDSGNGRTFILGRKYLSLERYFHKRDCQSAVRMVCTAVGKRNKISKIIETYPETLQEKAECSEGLPS

SEQ ID NO: 7366 - protein, 430 aa, unknown
  TnpB Polypeptide
MRKKKTKDLNRHNKAFKYRIYPNAEQIILFSKTFGCVGVIYNKELYESMEIYKTTGEHYIRPYARYKEEFEWLKEVDSLALANAQLNLETAYKNFFDEKEHKFSKKTIEKAERTGKTLTFYDLEKHPKFKRKHDPCKSYTTNYVNGNIEIIDGMLKLPKVGKLKMKQHRSVPNGYVLKSVTVSKTPSGKYYASILFEYDKIIIPATVRKIIGLDFSMAELYVDSNGEEPLLNLIENSDKQSLSNFQQVQRYNRFYRRSLAKLQKMSRALSKMVKFSNNWYKQKHKIAVLHEKIANQRKDFLHKESREIANSYDLVGVEDLDMQDMSQCLNFGKSVHDNGFGTFRKFLQYKLEEQGKHFITIDKWFPSSKKCSTPGCNYIYKDMTMDIREWTCPECGVHHNRDHNAAINIRNEAFRIYSENLVGENQLVLV

SEQ ID NO: 7367 - protein, 391 aa, unknown
  TnpB Polypeptide
MKAYRYRIEPDEKQVEFLAKQFGCSRFVYNWALDLKTKAWQTERKGISVFEISRQMTLLKKEKEWLSEVASQPLQQSLIHLDKAFTGFFKKKTDYPRYKSKWGKQSASFPQNVEVEFSSGTIVFPKIGRIKARFSRTFTGVVKTVTITKTVTGKYFASVLVESENQAPVPVPVPDVEETAVGLDLGLTHFLTLSTGEKVEHPKHLEKDLDRIKALHRRVARKKKGSKNRRKAIVKLALAYERVSNKRDDFLQKVSTRLVRDFGTLCFEDLNVAGMTQNRHLSRHIGQSGWSKFKILCEGKASANGKHIRTIGRFEPSSKLCSCGYRNKDLSLSDRTWVCPVCKTTHDRDILAANNIKRFAFVKQNTSGGTGGESGEMPVNKRDRRTRKSQE

SEQ ID NO: 7368 - protein, 216 aa, unknown
  TnpB Polypeptide
MRSDGTVLGRRFIDHPSEKDRMYRTLGRIRRFQREHGSAQTQGRWAYTKRLNTELGKKTAGAIIRYAEENHADVIVFEYLEMQGKISGKKKQKLHLWRKRDIQRRCEHQAHRKEMRISRICAWNTSRLAYDGSGAVTRDRENHSLCTFQTGKRYNCDLSASYNIGARYFIRELLKPLPATERSLLEAKVPPVKRRTSCVYADLRKLHSEMELLKAA

SEQ ID NO: 7369 - protein, 345 aa, unknown
  TnpB Polypeptide
MRSVVTAKVRVNPTPQVVATIKAYTKSLQFCVDYAWEHEITQNFKLHYAIYHTIRKRFKLPAQIAVACMRQACGMVKKAKSKPTIKRTSVRYNFPRSANIKGNTLVLRLLDCRQESKPNIPICYAKYFSWEVSESLLRMDKRGRCFFLFTFSKEINATEQNNASQNIVLGIDLGINNLAVCSDGRFYNSAQAKQTKRKFKYLRSKLQSKGTRSAKRLLKKLSGRETRWMKHINRCVSKDVVSNFNGNKIVMENLKGIRKQRKGKKMNWILSNWSFFQSQGFIQYKAERKGIVVDRVKPNYTSQICHRCGQLGSRLSQGCFSCHCGLSSYSADLNAARNLAPSHVG

SEQ ID NO: 7370 - protein, 388 aa, unknown
  TnpB Polypeptide
MMILTFKYRLLPSKTQYAVLAVLCEQQRQLYNAALEERIGCYQKTGKTLTGMDQCKSLTEWRREDVEARGIPANIQRWTISQLDKAFNAFFRRLKARNGKAGFPRFKGKDRWKSFGFNEFWGIRWDGKRLRFKGMPSGLHVHLHRPLPKNVDIRSCIFKRDHKGWFVCFQIKLETPDKQPVKSAVGIDLGLKVFGYQSDGIIIPNPRIARKAEKEMCRRQRALARCQHGSKRRRKVKAQLARLHTKIVNTRTTWLHQQSARIVNQYDLIAVEDLNVKDMVQHQAFARSIVDASWSKFLGFLDYKAERAGGYLIKVDPKNTSQKCSSCGELVLKSLTVRIHSCLYCGLVIDRDWNASLNILNAAVLGGEAGNVTQQGERWPGKLSLVTD

SEQ ID NO: 7371 - protein, 338 aa, Acidimicrobiaceae sp.
VPEPVQGLHQLPRGPLEVPDVQEAGQGGSVSFLASAVRLADSHHVRVTRIGEIKTYESMRKIHRHLERGTGRIVSSTVSLSNGKYFIAFNVEVMRVIPVTRAPDRIIGIDVGLTTLHTGATPDGEHVLRVENPRHYVDAEKKLAHAQRIASRRQGPKKGVAPSNRWKKANGRVQKIHVATRNARTNLIHGTAARLAKNYDVIVIEDLNVAGMVKNHSLAEHIQDAAWGEFTRQLEYKTKWYGSTLVKAGRFYPSSKICASCGTVKAKLSLTTRTYACEVCGHTVGRDLNAAINLARMGLPGTSFGTRRGGEVSSAQQKLVAMAHPGEASTETPPEVGA

SEQ ID NO: 7372 - protein, 364 aa, unknown
  TnpB Polypeptide
LRTSFKRRFDALSRLRKRCRPTQKGRDHQSTTHFDAWSVVYDKRSATFHRDHVSLSTVNGRVECEYVIPDDPTGTPIGEFLLNEDYEFRMSTLQYDRSTDSFYLHARMRRTTDEHEQSTGVSSDAKHRTVLGVDLNVDGSLAVTSTGEFIGNADEMNHRRREFEKTRGSMQQTGTRSAHLSIQSMDDREHRWIQDELHRASNQILDEARDHGCTHVAFENLTDIRDRIAGAKRFHVWAFRRLYEYVEYKAEMLDIGIEQVSPAYTSRRCSKCGFTHETNRRSKHQFVCQKCDYELNADYNASKNIARKLLKRLRSGQKSSSGGAPCQCALTSGTLNLNGEFIASVDSTAEGESTDKPTTSVVGH

SEQ ID NO: 7373 - protein, 198 aa, Salmonella sp.
LHREITGTLKSITITRSATGKYYAALLCDDGIEAPAKPTLVSTITGLDMGLSHYAIKSDGDKVANPRHLINASRNLRRKQKALSRKKKGSANLRKARIHLAGVHERVANARADFQHKLSRTIVDENQAVIVETLKISKHDEEPPSGTSDRRCRMEWFYLKAGIQSSRKRCSCGEAGSMVRQFENLSLLWSQNAGNAAE

SEQ ID NO: 7374 - protein, 367 aa, Caldanaerobius sp.
MKGGATMEQTITLKLKLYNPTKDKQKMYQTMADRVTDFANRYLFLDKKSRPKTSKEAKQYSEPLPAAVLNQAIRDIKAAKNAKKFKRLWPNFNNQSFRVEKESTKDGETVWKVSFPTFEKRIGVPVEVNRHHANFLEKLLTGEAKQGSAKLVKQRGKWYVMLSMTLHIEEKAKEEEKIMGIDLGLIDLLVANVNGQTLFFHGGRVAYMRRRYQSLRSRLQKVGAYRTLKRTGDKEHRVITDINHKIAKKVVEFAVKHGVTKIRMEDLSGARWTMEQRTEQRKDGGRSLQSWAFYQLQQFIEYKAALHGISVEYVVADGTSMICSVCGEKLSSRPKGRMFTCPNCGSTRHIDANAAKNIADAVSGIAI

SEQ ID NO: 7375 - protein, 472 aa, unknown
  TnpB Polypeptide
MKRTVKIKTNCLNNEEEILLIGTVQRNIKNYVWSRYNGIGSLLKQSGWTIRDELIQKDLLSKKITKTLSRVAVEQSAATIKSNWTTTKKKVKKAIAQNENLTKDDKHYLYLCLKHTPTLYNILNYKKVDYATDCLKDLKVDVHRLNNLLRRYIRRYKTKSYTNKANVILTSNLYKFDLNNNIFSFTGKKKNSKVTITLIGNIPKLKGTLELVKNQKSNQYYLHVPLDRIIIKKEMTEQSEILGLDVGITDLITLSNGSIYGANSAELFYTLSDNLVNKNRSRLFSYKRQLEERILTENDPSKKSILELKLKNLENNNLGSKKRISKISKYKSRIVSHINCELNKMVKEEDIEEIVREDLNWISKKKKNVSRKQQNRFSTWSKGVLLERLSVKLAENGIKETIVNPAYTSQVCCKCNHLGSRNGKVFKCLNCNLNIDADFNASINTKKRKFISEINIDTPYKEVKKYYENLLV

SEQ ID NO: 7376 - protein, 276 aa, Clostridium sp.
  misc_feature (95)..(188): Xaa can be any naturally occurring amino acid
MCCYINNRNFRISDDCISFPVIINGKSKRISVKTKISKRQKSIFSSSKLGTMRIVVKGHDLVAQIVYDAKEDAVFSNDNVMGVDLGIKCPAVSYXXXXXXXXXXXXXXXXXXXXXXXXXXXXXXXXXXXXXXXXXXXXXXXXXXXXXXXXXXXXXXXXXXXXXXXXXXXXXXXXXXXXXXXXXXXXXXSRKNNHSLHTWSFYRLAQFIEYKAKLAGIEVEYVDPAYTSQICPICGSVHHAKDRNYICRCGFHTHRDLFGAINICNSTEYIGNRYTA

SEQ ID NO: 7377 - protein, 394 aa, unknown
  TnpB Polypeptide
VSRYRLYPTRAQESLLRQHCAHARFVWNLAVEQHLWWRPGRDSAPGYVEQCRQLTEARAEYKWLRAGSQTVQQQALRDFSQALRNHFSGTHGRPTWRKAGRNEGFRIVAVKRTDVQRVNRSIAHVWIPKVGWVRFRMSRPVPECAKSFRVTLDRAGRWHIAFAAIPSPKPAPGNGFVVGVDRGVKVSAALSTGELLTVGRLSPERQRRLLRLERRLARCQRGSNRRARVKRDIARLRSQQADMRKDWCEKVTTRLAVSFDLIRIEALDVRAMTRSARGTAAQPGRGVAQKAALNRGILDNCWGMFVTRLDQKAEGRVQKIHPAYTSQRCSACGKVDAKARQSQAVFACPSCGYAGNADVNAARNIAVGRPATARGGVGIAQPANREPQPILLSI

SEQ ID NO: 7378 - protein, 351 aa, unknown
  TnpB Polypeptide
LLRNYKAFFNSLKVYKVNKDVFTGRPKMPGYKKEGSFTTAILTNQICKIVDGRYLKVPGYKYKLNLGEIGQNTFLKEVRIKHSADVFIVDVVLEIDAPVAVYKVHPELSDEQLAKKFKTCTNSHKYRVIGIDPGLNNFCAVTNNFGDRPFLVNGRTIKSVNNYYNKRLAKLKSQAALCNNREYTKRINRLTYKRNCMIKDKLHKISKYIAEYAKNNNVDVVILGHNIFQKQKINTGAANNQSIVQIPYCVFAGMLQYKLEEYEIRLVLTEESYTSKADFKAEDKLPVFNNASTKSYTFSGKRIKRGLYRYNDGSIGNADINGAANIIRKVFPNIKGWDKGVVDIPYAVTIA

SEQ ID NO: 7379 - protein, 516 aa, Lachnospiraceae sp.
MTGTKTPKPMHTVCLRLDASEYEGYLIDRSFHALSHIHNVLVKHARKLLIQLEHDQDYQQLRTEYTAFLKNHKNDGKLSKTDASYQKELSDRMKTIRQDMGLTEYSFQSYIKKCAKLYNKLLSSQQVQKEATRVWQSVEKYLFGDGKAVHFKKYRDFDTIGGKSTKNGMRFDKETFSAVWMGRTYKVKRPKKSSMDYVYKALSSDISYCDVKRRMFPNGRHYYIVVVLKGPAPKKLTAGDNTCGIDPGVSTMAAVSDEDVYLEELAPDIGKYNKEIIDTQYHMDLSKRASNPDKYNPDGTIDKSNHDRWEFSKTYIRLGNRLKYLYRVRSDYIKQSHSRLINKLLKDARNFYIEDMDYKALAKRSKNTERSDRIYEVKAEDGSIKQVHKYKRKIRFGRSLNNRAPALFIHLLEQKAALYGGSVTKIATKDYKASQYDHSTDTCTKAPLSQRTKTIDGRTVQRDLYSAFLILNTDDTLTHPDRDKCISTFDSFVRRQDKLISEMKKSNISMKQCFGF

SEQ ID NO: 7380 - protein, 398 aa, unknown
  TnpB Polypeptide
MSRYRLLPTPTQQAVLQQHCGHARYVWNLAVEQHAHWRPGRPSAPGYLEQCRQLTQARAAHPWLAAGSQMVQQQALRDFTQAMAAFFDPRNPAGRPSWRKAGRDEGFRIVGRRGRQWDVRRVSRKVGQVWVPKAGWVRFRWSRTVPPGVKSYRVRMDRAGRWHIAFAVIPEPIPAPGNGQAVGIDRGVAVSAALSTGELLHAPGLTGPERRRMLRLQRKLARAGRGSNRRGRVKHAIARLKVRETDRRKDWAEKASTDIARRFDLIRVEDLKIDNMTRSARGTAGNPGRNVRAKAGLNREILRSGWGLLVRRLADKAPARVERISPAYTSQRCSACGQVDAISRESQARFACTACGYAGNADVNAARNIAAGHAVTARGGFRDAGPANREPQLLLQSA

SEQ ID NO: 7381 - protein, 403 aa, Limnoraphis sp.
MLTLTYEYRLKPTQQQVEVIERTLDVCRSVWNFALKERKNWLNSRLAPVNACSIVNEYIIPADAPFPGYHYQTKALTQAKKNNERLKSVNAQVLQQILRTLDRAFVDMKARGFGFPRFKNRYRMRSFIYPQLKGEIVNGNRIKLPQLGWVKVFKSREIPDGFKPKQARIVRRASGYFVMLSLQSDVSVPNVPFHGHPLGIDLGLEKFLATSDGELINRPRFLNRFHRKLKSLQRRLKHKQKGSNNRHKLNQKIARLHQRIQETRKDWHFKLAHHLCDRGQSIFIEDIDFRSWGRGMLSKHCLDAGFGQFVTILKWVGWKRGVFVGEVNKDYSSQICPNCGATTGKKLLSERVHNCPECRYITHRDVAAAQVIRNRGIDALGQSVSENACGDLLAGGFGSSARV

SEQ ID NO: 7382 - protein, 360 aa, unknown
  TnpB Polypeptide
MRRAIKVSLGFTTVKKRKQISALLEAYRGAVNFYIKSLWATRGKLDKGTLARLKNTRLSERYKSQALKQALETVIATKKSAKELGKRVSIPTFTGSAVLDAKFVTIQEGEKSFDLAIQLSTLNKGKRITLLTKKTAMFNKWMQPLAKLIQGCALSENSLVIWVELPGFTCKTKGDVLGVDLGVNKLLSDSDGNHYGKEFRDLRDKIRHKRSGSEGHKRACREREQFINKAIKLLPFDRLKAIGVEDLRNLKKGKKPNRSKSFRKAMVPWTYRHCLNRISNLAQENRVLLVSVDPANTSRTCPMCGAVHKENRKGEVFRCITCNHTGDADTVGSLNILARTLETLRSLESLMPKEVNYSYA

SEQ ID NO: 7383 - protein, 573 aa, unknown
  TnpB Polypeptide
MEEKERKRPDVVQRLKDRKGKQERVVKCSLQGRLLEKSLMPEIQRWVLTTSKITNKGALVFNRLLLHCLNRGLPLPDLTDQTLYLQCFNIGVGKLYKANDVLKEVWDGCFQAFPAIEKCRGDTQAYVYASKQYMTNFKNSLVFTFDKRQKSYVARWCEQNDIAKEHGYAIRCAINGWGCRAEVPEGARAFVHQQRELLGTEEDGITLTWLGTHMEKVVRYFYHILQFMETLEDGKRFTLAPLTRIKCHFLTIDTTVLWEMMKNVGLTQANKADFMALRDEHFGSVFKLNGLCSGEFSHMVETDGVSMCFHFHVPKAVSDVGNRQLKRAERVIAIDPGRTNLMFGVEELSNGEVKSYKLTRGEYYTSAGMKTANRKATKWEAEIAEAELTYRQTSPKTINENTWDKFLADYISVYPTLWEAKTAKKWGRERFRVYCLKRKTLDTFFQTMNGEVKPVIAYGAAKFNPTSKNELSAPTTYVSKRCAKHFPIIFVDEYNTTKVCHCCDERLCPVMKDAREVRGLRWCCSTKCRTFLNRDMNAALNILRCFRSGTNRPYSLARNSGIVPKPVKAIKLY

SEQ ID NO: 7384 - protein, 412 aa, Mycobacterium sp.
VVPVRLLCGAGQWAHLRHFLADPHVWHKIDLVRVADHQAPGGWRYYAHLLTHQAGYQSASTTARRAGIPVGRRGGVDANVSNLSVASFPADGPDDGLVTDQIICTPEQQNAAARAAVKTRARQRALDRSRRNTNREQYGPSVRQATRAERRCQAGLATKQISDPGGPRAARADGVPLRAYRRDTLSTRYRKTRWDHRDDARKTCQAKQARAADIAARIVAAHGNTLTVEDCRISTWAKLWGKRIALFSPGMLVSALERECAATGGRLYRAGTSSTAMSQHCLWGQRVAKTLDQRIHDCQRCGLHAERDVVSAMLAACVDFTDPEDPRTARVDYTLAHVLRTWLAPQQEWGGSVNRHQPPAPSGAEPARTGSHHPVASAEYAALGPPPNRPDHKSGRRGSSRKKQPPKLFGTA

SEQ ID NO: 7385 - protein, 323 aa, Bacillus sp.
  misc_feature (300)..(301): Xaa can be any naturally occurring amino acid
MTKQNKAYKFRLYPTEEQAYLMRKTFGCVRFVYNKMLAERKEAYEKYKDDKEQLKKQKPPTPAKYKAEFEWLKEVDSLALANAQLNLQTAFKNFFSGQNDFPTFKSKKDRKSYTTNVVNGNIMLLNSHIKLPKLKMVRIKQHREIPQDYMIKSCTISMTPTGKYYVSILTEYEKEIVQKEVETVVGLDFAMGGLYVSSEDEKANYPKFYREMLDRLAKAQRVLSRRNKGSERWNKQRIRVAKLHEKVANQRKNFLHHESKKLAANFDVVAIEDLNMKGMSQALHFGKSVADNGWGMFTSXXPISVSINSNKTTFGTRELARLS

SEQ ID NO: 7386 - protein, 544 aa, Arthrobacter sp.
LPPDRVCAGPPGEPAKRVGLLADGTFTVTCRWSCSPLDSVDSASSAERACSVARWPVPGIAWSKNRRRCGGEPRATRGCCAGSAPEVRRLSTVRRAVRAGRHPGKTGAWTPAGEITVSGCIPHPNRPLSWNARAMPHVPCGTLSTEHGRPTASGSGLTGAPRKSRTTARTKATVGSPTSPPTFKKRHAKMGIDIPQASHFKPTRVNNKYITVNVPLAGKLKVRLHRKVDSTAVTGARLVRDGLGWHLTFRARTGPIARPAAHKRAAIGIDRGITVPLALSDGTNFEHPDVLTGTEAKSLLRLERQLARQEARRRTSNARTSNRQRRTQAWIPSIKNRRARRRKDFLDKTSRKIATDHTLIVLEELDIANMTKLPKPKPKPDPENPGSWLPNRDAAKTGLDTAILNEGSGDFHRMITYTAAAKTGLDTAILNEGSGDFHRMITYTAAEHGGTVTTVNARYTSQTWATCRGIGNRESQADFRCTNDACHMFGIRVNADTNAAQEIETRGTELASSGMTVATAGPAPTTVPIPPSMVRAEAHTIKCG

SEQ ID NO: 7387 - protein, 379 aa, Vulcanisaeta sp.
LSGEAELASTLVVKRKANKWYAVFIFKLKPREEEPKSIVAFDINENTVAVGKIDIKTTVSKVVDWNRRYTTPQLYLIKTDFGRLARRYGGIRNTIIERLKPHFTLPSGNYVNVTNTREFRKQVRKLRERGRKVGRVRHVANELTRTPAIIITEELGENTQESMINEIKRNETRHRVKQTPFKAVERAVGDKALERGSKLIRVSSYRNSRVCPIHFTRLGETNDWHTLYCPVGHYVNRDYASVLNMAWKTTPGSWTKAFWWNMRKRMDWREYEGESNSLIPYEIVKYIHAALKTFTASEQSPAMPARAKPMNPAGEANEGGGEGTPHALLGQGGGQKAKIKPPRTRHYHGGNGSMNDSLLLWAFLFNTQVLNYICEKFYL

SEQ ID NO: 7388 - protein, 373 aa, unknown
  TnpB Polypeptide
MEGGVTSLNKTFKVRIYPNKEQIRIIENTLNSTRYLYNYMLNLKDKLYKFFGINLSYNQSSKVMTELKKHRTWLKLVESTALQQCLKDLDNAYVSFFSGKSKYPKFKSKKRSKNSYRTNMNISLDIESHTIKIPKVGSIRLRDKSKFDGITKIYNITISKSSSGKYFASISAEVDIRHFEKTNQNVGIDLGLKDFAILNTGEKIHNPRILKYLEKRYRKLAKSLSRKVKGSANYQKARIKLAMFHEKISNIRKDFLHKLSTNLVKTYDIICIENLNISGLMKNHKLAKSFQDVSLYEFIRQLEYKAKWYGKTISKIDRFYPSSQLCSNCGYKNKDVKNLNIREWTCPECGTYHDRDINSAINILNEGLRILSL

SEQ ID NO: 7389 - protein, 470 aa, unknown
  TnpB Polypeptide
MVRTVKLSYTTVPQAVEIIAQWRKAQSVVIRTSYNRVREGKKDKEILDLLRVMPQGKLDSWLTLSALKRARALHRASPGRTVVFGGKHNLQLRAQGKITEEEWKAKRLLPLYFEGHAKSHGEQGGNHRFVLDIKHNTVWFYPKAKVALPLQIKLGKKTNYRELLDVLQFRCTWRRDVPFTVSLTATHISISWDEKAEPLKRKTHPGRVLALDLNPNRIGAAVLEREGEACKPLNWSIYDYPELNRKVKRASDHPDSIHQRDKRVYELSCMAKEIVALAAHFQCSAVITEHLNIRSQDHGKGRSFNRAVNNQWTRKGFILPLVRRLEAAGLRHMEVNPAYSSKLGNLLWGWPLLIPDPACAAVELGRRFLQGDPKSSECMNGGNRRKEERQAQASQDAEARTEWKRVWNQLHPQSGDTPRCTLLALRQKFPAACPSSSPFKAPQSLVSRLEPARIASDLRIHMRKDLWRCV

SEQ ID NO: 7390 - protein, 406 aa, Burkholderiales sp.
MHRAYRYRFYPTAEQEAQLARTFGCVRFVYNWALNLRSTAWNADQARVNYHETACRLALLKREPERSWLGDVSSVALQQSLRHLDKGFANFFAKRAQYPRFKSRRDNVQAASYMANGFTFRDGALTLARQDAPLRIRWSRPLPPDAKVSSVTATKDAAGRYHISFLVDEDVAPLAPVDKAVGVDLGLIDLAVTSDGQRIANPRFARAKQQRIARWQRKLARKREAAKAAMGLEGKAVPKGTRIPRSNNAAKMSKRIARIHASVRDARRDHLHKVSTQLIRENQTVCVEDLAVSNMVKNPRLARSISDVAWRELRAMLDYKAALYGRDLQVVSRWLPSSKRCSACGYTMESLPLKVRQWPCPHCGADHDRDVNAARNILAAGRAQQHAQHTAGLAGIHACQAPKGAT

SEQ ID NO: 7391 - protein, 474 aa, Burkholderiales sp.
MQTGFRFRCHPTAAQAQILLRWIGCQRFIYNAKVREDRYFRTFARKSLQHVGQYAPQDQQYAQFIGEDTAWLREVPSVLLRNGAVRWKQAYGRFFKKLAGRPTLQRKSGAQSVWITSELFRFDVVTDAATGEVTHHLALGTKKFPVGAIPFKVSGAFKAPASIHVTVEAGHWFVSGSFDDDAVQPTPDETADWLATFGREDLRERTVGIDRGVAIPAMASTGQAFDFTEAQKARMDKKAASIRRWQRKLARRVKGGSNRRKAAKRIEALHQYSKAVRQDFAHQTSHTLVSDPGTLLIVFEDLGVQRMTRRARVKQDAQGRFLRNGAAAKSSLTAAILRSAWGRVKAFSTYKALRAGKLCLHVPAHHTSQDCAACGHRHPDNRATQALFLCQRCGHQDNADHNAARIIAQRGVDRILSGIQAEAPRRVMRLRAKGRVGAERSEVTPGEIAVRPYSANAPHGSDRSQETPATTPCV

SEQ ID NO: 7392 - protein, 353 aa, Okeania sp.
MLSKEYKQQWITCALPDKNGKTSGRPKFKGKHYYNSFSYPQLSNTNIVKNANGRFCVNLPKIGLVPFVYNRPIPVGFKVKTGTVIREVDGWYISFTIEDKAVPLRRAEIQPTEQNSKGIDLGLLHYAVTSDGEFIEVPKFFRKSEHRLSKLQVRLTKKQKHSKPWKILKHKIAKLHQLVARQRLDWQFKLAYHLFSDVSVIFIENLQIANLVRRCKAKLGDNGQFLPNGQSAKSGLNKSLQDAAFGQFVQVLEYVGWKLGKRVIKVDPKGTSQHCWECLNKVSKSLSERWHSCPKCGQELDRDYNSALLIQKIGLLSTQGEDITSVKTAVRAFLTEESRVVAYATTSGVCQPR

SEQ ID NO: 7393 - protein, 414 aa, Okeania sp.
MQLVEKHLIARQHRFWKECDNLALLSKHLYNCANYIQRQYFFETGKYYNSIDIYHQTKNLEAYRYLPTKVSKQIVRRVSEAWKGWLAALKDWTKHPQKYLGKPKIPGYKHKERGRNVVIYPIDAISKPALTKGIVKLSQANIEFSTNAQNINQVRIVPKLDHYVIEVVYTVDEPVKSTGKYIAGVDLGLNNLMAITSNHPGIVPLLINGRPLKNINQFFNKRVAKAQSIEARRQIKQLNSKRDRRIDNYFHTVSRRVIDWCQLNDIGQLIIGNNQGWKQDINIGKKNNQAFTKIPHAKLISFLTYKAQLVGIEVILTEESYTSKASALDGDKLPSYNRKTQSKLVFSGKRVQRGLYQTSTGKTINADTNGSINIARKVIPNFMDGIEGLPFIPVVLDLWTKITNVYVYGLSIYW

SEQ ID NO: 7394 - protein, 442 aa, Brasilonema sp.
LFNLRSEILKFNALFFMAAYTTYLRLCYHVYNKGGEKQVRTSYQYKLRPTKQQAVEIDRWLSMLAAQYNYLLADRFHWYEQNRCPINACPLVCHFGELRENPDYYSQKKTLPSLKKTHPHYGEIHSQVLQDVVKRVKITFDRFLSGDSNGKRSGRPRFKSRDRYRTFTYPQIKDDCIQGNLINLPKLGKIKVIFHRPIPDGFKVKTASITKKADGYYVTLSLEDLTVPTVKPDINPDLITGIDLGLKEFLTTSEGETVAIPQHYRKSQKRLRVIQKRVSRRKKGSKRRQKAIKQLGKQHKKVADKRKNFHFKTAKQLLSKHDVVVHEDLNVKGLSKSKLAKSVHDAGWSSFLSILSNKAAKLAGESTLPGRLCENAGLLIVAVNPKNTSQDCSSCGIKVPKKLHERWHSCQCGCSLDRDHNAAINIKNSAKLERRLPPIQAL

SEQ ID NO: 7395 - protein, 508 aa, Brasilonema sp.
VIRSSTLSFITEVPLIVDSKQEAELLSRFQAGRQLYNACLNEAMKRLELVRNSELYQAARQLPKAEKKERSDAFKKAREQYRYSEYDLHSFASLTSKNAKWIAEKIDSNTQQKLATRAFKASERVMLGFAKDVRYKVPSRFRSVEGKTNKQGLRWKDDCLVWGKLVIQPIIDSTNPVIKHGLESPVKYVRLLWRILNGKRRWYAQLVNEGSPYQKPQNYVADGLVGLDLNISNIAYVGDNHAGLLPFAELVPIFQSEITKLQQKMQRSQRTNNPDNFEPNFDSRKGRKTIVKKGKVKKGKAQWKKSSNYLKAANKKRELERRKAAYAKAQNRRVVNEILRHGKHIKTENVSVKGWQKRYGKAISAKSPGFVQSELLRKAENAGGSVIKFSTQTTALSQTHLDGSRIKKTLSQRVHRDVTGLPEHHRDLFSAFLSRHVNQNKLVLQSAQNEYLGLEPILLEAYQQKIIREQVGKPESTQSDSPSERVSNEPLTVSQIVIKDEKLNGDVA

SEQ ID NO: 7396 - protein, 406 aa, unknown
  TnpB Polypeptide
MNKAYEYRIYPTANQVSIFNKTLGLCRLYYNLVVENKNKNHAMPVEGYKPTFTKFKPEALEWIKEVDSMPLGQVWSDVRGAYTNFFASIKGVRKGKPVQPPAFKSKKNLKASFRYAMQGNTAHINSNGLFVSRRLGYIKIASSCRFCGGKWKNITFKRSAGGKWYVKICVELKEEQDKIQNGKAVGIDWNCNSDSFLTLSDGTKIKCPRFLKRKEKQLEKYQQIQSNRFVKGNETQSHRYDKAKLKVARLHEQVANQRKDWLHKVSRELANKYQYVFVEDVNLNKMASELEHGKAIGDQGFGLLRQYLSYKMNLVKVPANNTSKMCHHCGNINSQVVLGVKQWVCPVCNTQHDRDVNAAQNILYLGVKRTIGREPTDVLKNARITPRMPKTISGVVRCKLGNPTRL

SEQ ID NO: 7397 - protein, 365 aa, unknown
  TnpB Polypeptide
MANKAYKFRIYPNAEQKILFAKTFGCVRFIYNKMLSDKIKYYEETKQKLKNTPAQYKAEFEWLKEVDSLALANAQMNLQKAYNNFFRSPKTGFPKFKSKHRNRNSYTTNNQKGSVSIENSYIKLPKIGFVKLKQHRNIPSDYKLKSVTVSQTPSGKYYASVLFEYENQVQETKPYKFLGMDFSMHELYKDSNGNEPQYPRYYRQAERKLKREQRKLSKMQKGSKNRDKQRIRVAKLHEKVANQRKDFLHKQSRQITNAYDCVCIEELDMKAISKCLNFSKSVSDNGWGMFVTFLQYKLEESGKKLVKVDKFFASSQICNVCGYKNTATKNLSIRAWDCPECGTHHDRDINAAINIRNEGMRIINA

SEQ ID NO: 7398 - protein, 374 aa, unknown
  TnpB Polypeptide
MLVNKAYKFRIYPSKEQEILIAKTIGCSRFVFNHFLAKWNDTYKATGKGLTYNSCSSQLTQLKKELVWLKEVDSIAIQSSLKNLADAYSRFFKKQNDTPRFKSKKNKVQSYTTKHTNGNIAIEGNKIKLPKLGWIRFAKSREVEGRILNATIRRNPSGKYFVSILVETEVQPLEKTGSSVGIDVGLKDFAIISDGTVYSNPKFFRRLEEKLAKEQRILSRRKKGGSNWDKQRVKVARIHERIVNARTDYLQKISTEIIKNHDVIGIEYLKISNMLKNHNLAKAISEVSWYQFRTMLEYKAKWYGKQVVTVAKNFPSSQLCSCCGYKNKDVKNLNLREWDCPSCGTHHDRDINASLNLKNEAIRLLTVGTTGIAY

SEQ ID NO: 7399 - protein, 286 aa, Cupriavidus sp.
LQTWDEADLRAAAVGVDRGIATPIYASHGMTAELSSVQQARIDKKERARKRWQRRMARRVKGSSGWRKAKQRAAQCQRYARNVRHDFAHQTSYRLLERAEVRLLAFEALRVKAMSARPKAKQDESGHWLRNNARAKAGLNERILASAWGKTLVFAQYKALRRNKLVVTVPPHHSSQECSQCGHTHPDNRPTQAVFVCQRCDFRAHADHNASLVIRDRGVALVRSGDFEPRGRKKTMRFRTKVGAGCSEPMAEGLSTPEETPVRRRAGNRSSQESQNPETPATSRRL

SEQ ID NO: 7400 - protein, 450 aa, unknown
  TnpB Polypeptide
LLVRRQTFRLYPNKAQTKALLGARRLHAYLYNACIVHRKTEYEHFGLSVSYFDQQNCLPAFKDCWPEYKEIHSQSLQATVKRVDLAYNSFFQGLRKRPKFKSIRDYSGWTYSAKSGWKAHTEGTHGTVTLNDLGITIRMRGKAKEWGIPTTLTIVYKPHINQWFASITVEIPASQVKFGSQSSQPYESIAAIDLGTETALTLYNGKEFEEVTNPRFVRQSEKRVKQASVKLKRKRAPNKKKKIKASKRWKKARRGVSRLQRRVATQRKDWQHKVTTDIARRHDIVVTEKLETKKMTRKGKKRKKQKAGLNKSILDVAFGTLNKMITYKIEAKGGLVFFLPTRQLKPSQRCPKCGTVHKEWAELSNRYHVCDCGFEMARDKTSTVVMYQSLLDKQPGFGMSLDNRGCSSSTSKTGKRKHTGSMKQLGQKKRKKPQSVDGGAKTTPSVYTAG

SEQ ID NO: 7401 - protein, 280 aa, Micromonospora sp.
MSACVRRDGGRWHVAFCVEVERPERLPARPGAVLGVDVGIRHLAVLSTGKLIDNPRYLTTAHQRMRALGRALARKTGPDRRTGRRASKRWERAAARLGRAHARVANLRRDGLHKLTTRLTREYGTVVIEDLNVTGMLRNCKLARHIADAGFAEIRRQLAYKTGWNGGRLILADRWYPSSKTCSGCGAVKTKLALSEREYQCESCGLVLDRDLNAARNLAALAANATTAGSGPAPGRGADRKTPLAGLVALKRQPGTAPAGQTGTVSPQGETANRVLARAH

SEQ ID NO: 7402 - protein, 373 aa, unknown
  TnpB Polypeptide
MYKGFKFRMYPTDKQKEIINMNFRTKRFIYNHYLEEAKTSGKLNTKLNIKDYNQNLKKDNQFLQNADENIIYKTLFLLEDSYKKTKNLETMKYKSKFRKNSYTIPVTTTNYTSNVTLDLERKMVTLPLLENIKIKGYKKLSKLNGKIKSLTISKEPNDKYYISFLCEILNNSLIKYPKTIVGIDLGIKELLTLSDGTTIDNIHTQEKYEKRIKRKQRELRRKTKGSKNYYKCKKELAILYCKLANSRKYYTHKITKNITDNYDIIATETLSIKQMIMNKQNNLSKSISDAAFQEITRQLEYKSKEKGKYFYKINAYYPSSQICSVCNNQDNKYKDLGERTYNCKCCKNELDRDFNASVNIMFEGLKLYIKSYA

SEQ ID NO: 7403 - protein, 381 aa, unknown
  TnpB Polypeptide
MTKVQKGIRVRLYPTNEQEVLINKTIGCCRFVSNQTLADCRQSYEQTQHFPSKNKRITNLVPLKEENEFLKEVDSTALQQSIRDLNSGMDNFFKNRSHFGFPKFKSKHDLKQSYRTPYNGGNADVLDNKHIKLPKLGKVKTKRFDMPAVYKIFNFTIEKTVTGKYYVSICIETEVHPLPKTGKQVGFDLGLIDLLIGSDGTRFERPKFAYVYKDKLAKEQRKLSKMRTKLERAKLNLDECKNYQKQKRKVAKLHEHITNCAKDFNHKLSIELVRNYDFIAMEDLNVSGLLKNHYMAYSIADVRWSQLVNFIQYKCQWYGKEFRQVDRFYASSKICSCCGTYHKDIVNSLSIREWVCPDCGTHHDRDVNAARNILNQALSVA

SEQ ID NO: 7404 - protein, 390 aa, Alkalinema sp.
MTQKAFKYRFYPTPEQETLLRRTMGCTRLVYNRALAIRTEAWYSEKKRVGYSDTSAMLTEWKKQDDLQFLNEVSCVPLQQGLRHLQKAFSNFFEGRAKYPTFKKKRNGGSAEFTKSAFKWKDGQVYLAKCSEPLAIRWSRELPEGAIPSTITVKLSPAGRWTVALLVDVEIEPLPQSSNQIGIDLGVTSLVALSNGEKIANPKGFNAKRRKLKKAQKALARKQKGSRNRHKARLKVAKVHQEISDARKDFLHKLTTRLVRENQTIAVEDLAVKNMIKNRKLALSISDASWGELVRQLEYKCDWYGRTLVKIDRWFPSSKRCGNCGHIVETLPLNIREWDCPNCGTHHDRDINAANNILAAGLAVKVCGANVRPERHKSDGGCYEAERSKK

SEQ ID NO: 7405 - protein, 422 aa, Sphingomonadaceae sp.
VRPPPRNHGSRTKDSGRPRNEAPASPLPWMVLCRSSLKIPCREVTKSCRVFGNVAERSVSFLTYKFRIKDASTGRHLRRYSTACNQVWNYCVAVQREAEARWKSGTASRWPTAIDLCRLTVGGGLLLGLHSDTVNQICRQFVAARNKRRRSPQFRSSFGARRSLGWIIFIPRAVRISAGQVSYMKRPFKFWQSREIKGEFKSGAFVEDARGRWYVCFNCEVEDDMPAGNGKVGIDLGLKDVATLSDGGKVPALQHYRQYADALAGAQRAGNKKRVRAIHAKIANARRHHLHEQSTKIARKNSLIVVGDVNAAQLAKTKMAKSVLDAGWATFRHMLRYKAARRQAAYVDVDERWSSQTCSACGCLPASRPRGIAGLGMRRWDCSDCGASHDRDVNAARNILRVGLECQPPAGEIDSCEANRRH

SEQ ID NO: 7406 - protein, 413 aa, Ktedonobacterales sp.
MLLCTKIRIEVSDQDAATLEFMQGKCRGLYNWLVMQQRDGARWNLYEAKKTLRESKQYDPELRQVYGKLLQEVYFRLDKAMKAFFTRVKAGKTPGFPRVRPRHCFFTLCYPAMYLTVEHGTIELPTGGKGKNKRYPNIIAKLTEEPPMAFKEVAISRDARGHYYASFVSEHPEEPCEDNGVIAFDLGIKTLATGINEQGRIYTIGGFKGARWYNRQLDHIRSKRDKCTKKSRRYKHLSTVHKRVSEKKRQKQRDSLHKASHLISHKLVESTVVVGDLSQRQMVMKEHQQKNKRLNRMVYNDWGLFMFLEMLTYKCQLYGKELHMIDERDTSKMCSQCHELKPMPLWKRTYCCVECGLVMDRDENSAINILTRFLARRGPHTDSSETCGVLQKDQNSGEVMETSCPTLVQQRRL

SEQ ID NO: 7407 - protein, 382 aa, Ktedonobacterales sp.
MALIVRGYKTELKLNNAQRTACLKHAGAARYAYNWGLRRYQEEREAGRKAPNAMSLHKELNALKQTELHWMYEVSKAAPQESLRDLEKAFRNFWKRCQKKKQGTFRGKLGFPRFKSKKRGIGSFRLTGTIHIGKDWVQLPRLGKLRLKEQGYLPTKGVHILSATVSERAGRWYVSVQVEEEHAEPGIALGETIGIDVGIKAMATLSDGRVFRNPKALGSHLKHLKRLCRQHARKQPGSKHRQKAARKLARLHAHIANLRKDTLHQVTSLIVAKTKPDQERPTCIVLEDLQVSGMVKNRKLSRAIVDVGFAEFRQQLDYKAKQAGSLIYTVSRWEPSSKTCSWCGWIDEDLTLSDRLFQCKECGYVIDRDLNAAINLALKAAG

SEQ ID NO: 7408 - protein, 417 aa, Ktedonobacterales sp.
MHLVERHLVKQDDPRFAVLDTAAFASKNLYNQANYQIRQTYTQEDKYLSYVEVFHRVKGMECYKALPAKVANSILILLHKNWISFFEAKKAYQEDPSRFTGRPTLPKYKDKIKGRNILIYDKQALGKRAFKKTAKLIPSGLPIEIDTCVAEFWQIAQVRVVPCSDGYMIEVVYEQQEEQGQADVDPALVAAIDVGVNVLAALTSNKPGFVPRVLSGKPIKSLNQGYNKQRAQAQSRLSREKRLTSRQLDRRTTKRNRRVEHYLHTASRRIIDLLVEESIGTLVIGKNPLWKQEVSMGKRNNQSFVQIPHARFIDQLTYKAKLVGIRVILAEESYTSKASFLDRDPIPTYRADQTNPAVFSGKRIARSWYRAKDGQIIHADVNGSYNILRKSSSDLSQLGRGVGGSCSSPQAAGRLNG

SEQ ID NO: 7409 - protein, 431 aa, Ktedonobacterales sp.
MKTAHRIRMNPTPEHVEYLKRACGTRRFIYNWGREQWEKQYQAYKLEQETVPEEQRVLTPPNAFSLKKQFHAIRADVYPWTYEVTKCVVEGAFDDLGKAYRNFFAGRAAYPHYKKKGKSHESFYLSNDKFTLGSHWIAIPGLGRFILDQRKQEKKRGKLRRKLGTVNLTEKLRFVERGKASVPPKKRNRRKQVLCENVTILGATVSCEAGQWYLSIQVEIKKSSPQTPVSVVGVDVGLKQVAVVSDGRVLENQKPLAHHLNKLGKLQRQLSRKQKTKDPETGKTTFSNNYQKQRVKVARKHQQIANIRRDVQHKFTIELARTCGTIGVEDLNILGMMSNRKLSRTVADVAMGQLLQFLKTKVAASGGTLFIASRWFPSTKRCSGCGHVKKRMPLKHRTYQCLACGLVIDRDLNASLNLAQFAQDMLRHLSA

SEQ ID NO: 7410 - protein, 259 aa, Ktedonobacterales sp.
LALSASQVQSMSSRIIFNFPRLGVLRLYEHGYLPTTAKVLSATVSEQAGHWFVSVQVEESILEPKEATGTVIGVDLGIKALATCSDGTVIANPNAPRSNLNKLQRVSRQHARKQKGSKNRLKATRTLARLHAHIANIRKDTLHKATSQIVAKTKCDQERARVIVIEDLNVSGMLKSRRLSRAIADVGFYEFRRQIIYKAEQAGCETLLVSRWEPSSKTCSSCKVVREELDLSERTFVCHACGLVIDRDLNASYNLADLA

SEQ ID NO: 7411 - protein, 375 aa, Ktedonobacterales sp.
MLIYEYKLDGNKTQYVAIDEAIRVVQFIRNKCLRLWMDDHASKNDLQKYCAVLAKEFPFANTLNSQARQASADRAWNAIQRFYDNCKAKKPGKKGYPRFQHDNRSVEYKQTGWKLEPDGRHITFTDGCGIGRLRLVGTRDIETFPVKQIKRVRLIRCADGYYVQFGVQTDRVIEHEMTGAIVGIDVGLKAYYTDSDSNTVENPRHYRKAEARLKRLQRRLSRKKKGSKNRLKARQQVARAHLKVQRQREDFARKEANTLVTSHDLIAYEDLKIANMVRNRHLAKSISDAGWGQFLSWVNYYGALHAIPVIKVAPHFTSQNCSGCGTLVKKSLSVRTHICPTCGLVMDRDHNAARNILNKALSTVGQTGTDAPQSA

SEQ ID NO: 7412 - protein, 378 aa, Bacillus sp.
MEVKLMIINKAYKFRIYPNKAQATLVNKTIGCSRFVFNHFLSLWDNAYKETGKGLTYGTCSAKIPAMKKEFVWLKEVDSIAIQSSVRNLADAYTRFFKKQTSAPRFKSKKNNVQSYTTKQTNENIAVVGNKIKLPKLGLVRFAKSREVKGRILNATVRRNPSGRYFVSLLVETEVQELPKTQSYIGMDVGLKDFAILSDGTTYKNPKFFRSLEEKLAKAQRVLSRRIKGSSRWNKQRVKVARIHEYMTNARKDYLDKVSTEIIKNHDVIGIEDLQVSNMLKNHKLAKAISEVSWSQFRSMLEYKAKWYGKQVIVVSKTFASSQLCSCCGYQNKDVKNLNLRKWDCPSCRTHHDRDINASINLKNEAIRLLTARTAELA

SEQ ID NO: 7413 - protein, 656 aa, Streptomyces sp.
VSRKLPLAQEETSRTASTRALLRAGLDEETGKVLSPGMLAERVGWCTDLVSGMAMKLLSKRFNSCHVNALSSGEDAAGRKLPSNAWMALRRLGWSAAPPKGVRVNDRIVRMAQEQAGRALRSAKWRADLTSGVLATWPVNPTKRTAAEWEQVRAAVPSGQYLPSTIIRARTRQAAKFLTAHGRLPVDVFELEGIPRVSGMLLLSACDRQQATFERSETDPARALLRLQLPTRPDPAAYGDWTWVACPITLPPTVPAQAVLHLPTLCTVDGKVSVDVAYTHAVPKVQSTGHTKALGVDWGLTTLLSAGALRLHVDGRITAIGVGGQFRAAGVLAKQHRLRRLSEQLHTKNDQYEQLTGNHDDHRLAPKLSVLRTEIRHVSQRRSNLNDALAQAAARWAVDQAIAAGASVIYLEDLRSLEAGGMGRTHNTRLSQQVRGRIADRMRHLAGEQGIAVVTVPARNTSKLCPHCLTPLRHRKAPDRPTVTGWKWAICPNSDCGWQGDRDLGAWRRIAARGLTHQVKTLTDRASGQLMIRQVVDELEAKAVVTRPQTSRKDRSKTGPTRHRATRPAPRRRRTPSPARPRGRAGQRPEGHAHTDRPQLPRAAHRNQCLHAISTPTNRHQPRGAALGAGFHLHAHASPPRWETTPETNSNSGSLS

SEQ ID NO: 7414 - protein, 742 aa, Streptomyces sp.
LSVVVVSFRVIADPPHGRAGLHQLACSKEVGQHVSASLLDAAPAPDAVSARRFRGKNKGQRWKRGEGTELAVIRLPLDVHRLEDLPRVENLYSAMWSVKRALQRDAVDAYWAGDARRARDAKAWRAGLGLSREGMERRGYRHMEHSRHLGHHVTKALVMHQADEVWEGVSRHLFPDASSRRFGRPKPGMWWHYTRIPGRARSHTTPRKWETFRLHGTLAGHLAAYRHRDLGPAVLTPEQAAALPPGTRVLEQPRRLPAPAQPSGRVPTGEVTAKGTPKTRAATWWDHTGPLALVFTGGADSTRGDLVLPVRLPSGAGRWPRLLHFLNNPDTWHKVDLVRRRDTCAPGGWAYEAHLMVLTAGYTSPATRSRRNAAAKLARVGGIDGNVSNLSVVSLPDTFDPTDGPVVATRLEFTDDELVVLEKARRKERGRKRALDRSRRATNPDQYGPSKRQQARSERRRTAGLPARTVQVPGGARDSNKAGVPKQAYRRDDLSAGYRRNRARLAEAAATAAKDHRARRIAGRIVADHGANLTVEDCDIRTWYRLWGKALQATTPGRLITAISRECEKSGGRLLRASTFTIKLSQTCLCGESVTKTLADRVHRCTYCGLIADRDMVSAALAAHVRLTNPDDPRTASLDIVQARMTQIVFAEGLQEALSGQPQRGARPRRGRTPAAAQRPVPGQRASARQNTTDRYRPTPNETRPALMRHKAHVGTAIPVGNAPPTDGAPEQELIGRHPTTG

SEQ ID NO: 7415 - protein, 458 aa, unknown
  TnpB Polypeptide
MAIEVSDLCKRSTFVPRYFYRKSRKAPRFIYGDIRLRAVLTARCHSYGTMPFLRHDAILTARCHSYGTRLTPRGLHNACWYTRLVQTLCLRYRLFPTKEQTRKLEDTLETCRLVYNSLVNDRVFRYETAKVSVGRYDQQKMFPQWSKDFPEVKAVHSQVLQNVAVRVDLAFLAFFRRVKAGETPGFPRLKGKGQYDSITYPQSGFKVGASTVSLSMFGKQVQIKAKLHRPVVGTVKTCTVRRDGRKWFVCFSVEQEDEFLPPCTDAIGLDAGLNSFLALSNGEFVDNPRFFRRDEKELAKAGRKQAKTKKRSKERRKANKVLSRIHERIRNRRHDFVHQTARRLVNRFGVIAVEKLNVKNMLGNHCLAKSISDASWSMFRCVLTSKAESADREVIAVNPAYTSQDCSGCGYRPDGLEGRTKKKLSDRWHFCPKCSASLDRDTNAAVNILALATSCDSP

SEQ ID NO: 7416 - protein, 407 aa, unknown
  TnpB Polypeptide
MMSVGRGKLAREMSRHTTFKFCLDPTLEQGVLLARHVGAARFAFNECLRMVKTALDQREADPNLDVPWTGFDLINTFNAWKKSEDAGRVFAVDGDGVAEMVGIGLRWRREVCQQVFEEAAVDCSRALSAWSDSRSKKRKGRRVGFPQFKKKTVAHATFRLREKRPEGRPATIRIGDNARPRSVTLPGIGLVAVHDDTRRLRRMLAKRRAKILFATVRYHASRWWVSLNVAAADLHPAHQHPPRDRTDHSGWVGIDRGLTEFLVAASIDGQEVARITNAPKPLATGINRQRQLAKAVARKERGSRNRRDAAAKLGRHHHHVANVRRHFLHQVSNQLVKTHDRLVIEDLQVSGMLRNRRLARAISDAGWAELARLLAYKQHWRRGKLATADRWYPSSKLCPSCGALSTT

SEQ ID NO: 7417 - protein, 379 aa, unknown
  TnpB Polypeptide
MISYKYNIYRSKKTKYLDKMLRECCFVWNHALALQRRYYKLFGKYISIGKMKKHFAKRIKRNLLYSQTTQEILERLDESYNRFFKRKSKRPPKFKRSDCFNSFVFKQGGFTLNGNILTINKGKKRFKFSYSRAYEGNVKQIRIVRETCYRFSLIIVTDYNPANSYRKTYDGASVGLDFGLKTYLTKSDGNKIGSPLFFKQYQNKIRKLNRKFSNAKKGSNNRKRRLFELQQAYRKINDFRSDFQWKLAHELCKRYDYIFIEDLNIEGMKRLWGKKVSDLSHSSFINKLTYIASKYGVIVHKIDKWYPSSKTCECGFVNKNLSLRDRTWCCPKCESINDRDVLAARNILRKGISELESKSNSSDSNIGVSCVCIQESHLL

SEQ ID NO: 7418 - protein, 404 aa, Symploca sp.
MQHQAIKVRLYPTIQQEEILAQHFGCARWWWNYGLNLCIETYQSTGKGLTRAALNKFLPKLKKQEETAWLKECYSQVLQATTLHLVTAYKNFFDGRAKYPRFKAKKNRQSIQYPQSVKVVENSIKFPGRLGVVKAKLHRLIEGVIKTVTVSMTPSGKYYASILTQQEGDNPTAKTEGKVAGIDLGVKDFAIVHDGRKTSKFANVKHLSKHECNLKRKQQKLARKIKGSNSRNKAKKLVARVYERLSNVRQDYLHKLSRKLVDDNQVIVVESLYVKGMVSNHKLAKAISDLGWGMFVNFLQYKLDQEGKVLVEIDRWFPSSKLCSKCHYQISEMALDVRSWTCPSCGAHHDRDENAAINIRAEGIRILSVSGTGTAADGGEVRPKLGRKPKLRHSPVKSEAQTSA

SEQ ID NO: 7419 - protein, 409 aa, Lachnospiraceae sp.
MENIRQRVEKHVLRPCHSHYSLLRGFCHLSKNLYNHANYEVRQAFIKEGRWIRYKKLDQILKADLEYPDYAAMPSAQSAQQTLRILDRNWKSFLAGLRDYKENQEKYRGRPRMPGYLEKEGFFQLVLTNQNCRLKDGYLCFPKAFEGFTLKPAFTSRQDLLSFQQVRMIPHRHRIVIELVYNITVKEEQADRGRYAGIDIGVNNLAVVCNNAGLPAFAVNGRPLKSINQYYNRKISHYREICKKQNRRDYTRRMDSLTEKRNRKIEDYLHKASRKIVDLCERNGINTIVIGKNDGWKQNSALSKKNNQHFVQIPFARFIRMIQYKAEEKGIAVILTEEIYTSGTSFIDGERPVRADYDRTRRVHRGMFIAGNGMKINADLNGAYQILKKAVPVKWDRGCALHPAVVNVV

SEQ ID NO: 7420 - protein, 271 aa, Escherichia sp.
  misc_feature (227)..(260): Xaa can be any naturally occurring amino acid
MASWLVEWKNATETQWLKDSPSQPLQQSLKDLERAYKNFFQNRAAFPRFKKRGQNDAFRYPQGVKLDQENSRIFLPKLGWMRYRNSRQVTGVVKNVTVSQSCGKWYISIQTESEVSTPVHPSASMVGLDAGVAKLATLSDGTVFEPVNSFQKNQKKLARLQRQLSRKVKFSNNWQKQERKIQRLHSRIANIRRDYLHKVTTTVSKNHAMIVIEDLKVSNMSKSAAGXXXXXXXXXXXXXXXXXXXXXXXXXXXXXXXXXXDIGAPPQLLAK

SEQ ID NO: 7421 - protein, 402 aa, Escherichia sp.
  misc_feature (102)..(102): Xaa can be any naturally occurring amino acid
  misc_feature (139)..(139): Xaa can be any naturally occurring amino acid
  misc_feature (173)..(173): Xaa can be any naturally occurring amino acid
  misc_feature (210)..(210): Xaa can be any naturally occurring amino acid
  misc_feature (229)..(229): Xaa can be any naturally occurring amino acid
  misc_feature (308)..(308): Xaa can be any naturally occurring amino acid
  misc_feature (312)..(312): Xaa can be any naturally occurring amino acid
  misc_feature (369)..(369): Xaa can be any naturally occurring amino acid
VKRLQAFKFQLRPGGQQECEMRRFAGACRFVFNRALARQNENHEAGNKYIPYGKMASWLVEWKNATETQWLKDSPSQPLQQSLKDLERAYKNFFRKRAAFPXFKKRGQNDAFRYPQGVKLDQENSRIFLPKLGWMRYRXSRQVTGVVKNVTVSQSCGKWYISIQTESEVSTPXHPSASMVGLDAGVAKLATLSDGTVFEPVNSFQKNQKXLARLQRQLSRKVKFSNNWXKQKRKIQRLHSCIANIRRDYLHKVTTAVSKNHAMIVIEDLKVSNMSKSAAGTVSQPGRNVRAKSGLNRSILDQGWYEMXRQLXYKQLWRGGQVLAVPPAYTSQRCAYCGHTAKENRLSQSKFRCQVCGYTANADVNGARXILAAGHAVLACGEMVQSGRPLKQEPTEMIQATA

SEQ ID NO: 7422 - protein, 361 aa, unknown
  TnpB Polypeptide
VLKAYKYRLYPNKEQRIYLAKTFGCVRFIYNQMLADRIKTYEENKDLDIKQIKYPTPAKYKKEYIWLKEVDSLALANAQMNLDKAYKNFFRDKSVGFPKFKKKRNTNSYTTNNQKGTIYIKNSHIKLPKLKSMIKIKQHRQFTGLIKSCTISQVPSGKYFISVLVDTENIQLPKSNNKVGIDVGLKEFAITSDGEMFENPKWFRKSEKRLAKLQKDLSRKKKGSNNRNRARIKVAKLHEKISNQRKDFLQKVSTQLIRENQSIVIEDLRVKNMLQNKKLSKAISEVSWTEFRRMLEYKAEWYGRNIIIAPSNYASSQLCNVCGYKNVNTKDLSVREWTCPVCHTHHDRDINAAINLLKLAM

SEQ ID NO: 7423 - protein, 470 aa, unknown
  TnpB Polypeptide
MVRTYRYRVYPTKAQVVALEEQLAWAADLYNAALQERRDAWRLARRSIHFSGQSAELTEYRREGGQTPTGMAALVQHEVLRRVDRAFQAFYRRCKSGQKPGYPRWRAKDRYDSLTFGLTHDNTAGPGTLRDGALQLTGIGRLKVRWHRPLPEEAVAKTANVRRSCGKWYVSLGLELPEPAAASGGNRPAAGIDLGIHCWAVLVSEEPAVAAAVREDLAKAEVVAELDPRDGSAVLIRGPRAGRRSAKKVKRLQRALARCQRKSRRRQKAVARLAKAREHERLVRRDHVHKVSSVVVRHHGSVFVEDLNIAGMSTSARGTIEAPGRNVSAKSGLNREILDQGWYDIRQALTYKAEGAGRSVVGVPARNTSQMCSACGEVVRKPRACREHRCPECGHEADRDVNAAHNILRAGQVRRSATAADAVDRECSSDRQPPGCADVTLPEARDRGSRARSRSVGVTPWRGHQMPACP

SEQ ID NO: 7424 - protein, 672 aa, unknown
  TnpB Polypeptide
MLTANATCSAYRALDETTSQTIRTRELSQRVGWLASLTGQIAQDILRSNWDDQMVTQFNRDTDDDGRPLPRKGYMAVRRLGLGKRLAGLYVPDRVYRMGQEHAGRLLRSAGYRQQLLNIILFTWPNNPSKRTQAEWDQLRTAAPGVVTADLRNRTRQIAQFLTARNTLPSGLCELEASPQVSPVVLAAAADRQAVTLIRIDNNTAQLRIMLPSCERPAVRADWSWVLIVLRLPPTVPAAARLRTPSLRALPGRLAVDLPFELPAPALSGHGHTRALGFDWGTCTFLTGTAAYLSADSTGRQVAITDGRPLRFDPAGAVAKWQRLRQQGNLLRDRIQHLEKLIKGRPDHPAASKLETLRQENLLLCARQRHLGQAIAWAAAHWAVEHAFAFRATVIYLEDLSTLEPGLDRKRNVFISGSVRGQLQAAMAHVAAKHGIAVICVPAQDTSSGCPSCLGSLAHWTCPQRTKRGYHWAGCAHCPLSLDRDHAASRRVVARGLASQGCTRWDRKAARFIVPQIADIPVVVVPLPRPQPAALPAASQNAAHPEPRKVRPTEVTAVLKPSRGVGRQDAQMRPARPAVFNDLRSVSLRRRVPSLSSAQIADGSQRPEGPVPTVSTYGANQDRNNTRLSDVYHPVRHRPRGARLGCGFHFNAYATPVLVTDGLAGTDVHRRI

SEQ ID NO: 7425 - protein, 385 aa, Okeania sp.
MPQYLVRKIKIGKTSQLDDLARAAGELYSRTLISFWRTVRKKNIWLSGYSMEKWHISSKLHAHTCDAITQSFYASLKSWRSRKKLDPNSKPPKRRRWFYKVIWKQSAIKLKDGKLRLSNGKGNQPLIVNWHWEKPKQIEMGWNKQSQCYELRACYRQKKVMPKETGNISGCDLGEIHPMAFSDGVDTDIFNGRLLRSKRQYQNKLKAKLSKLIDTKKRGSKRRKQLIKSKQKQLAKINNQIKDIEHKLTSKAVSMLQKRGIQTLVIGDVRNIRKNINYGKKANQKLHQWSAGSIRQKLEYKCAKVGIKTELINEAYTSQTCPACGERHKPKNREYKCKCGFRHHRDGVGCYNIRKKYLGFVPVVGLMASPVGVRFHPHLQCNPID

SEQ ID NO: 7426 - protein, 321 aa, unknown
  TnpB Polypeptide
MGVSPEPEAVELFRRYRIALNYAMNKILNLNLKTIEEVHRELYRELREWFGLPSRIAVDCYRDAIANAKAWRNNPKKGRRPRVKRLSMLLHPGSGYRIKEGYVEIIGRIKLKIIGWDRRYDQYENREARLVYKEGEMILWISKRIPGPKQYQPRDVVAIDINERMIVYGDDRINRDIDRAIDRAYRWKVLAESLQRRYSSSRYPAWMRRIGILNRVRSYHRKARNILEDWARKSSLKIVRLAVKHQHAVAREDLTGLVESLRKLPKNHRTKLIIMGYSRLGKWIDWQSLSTEHHLQQWIPGAHPRNAHYVIQSLMRTDVED

SEQ ID NO: 7427 - protein, 656 aa, Acidimicrobiaceae sp.
MPSSQATSTFVASLDTSDAHARKRLETCYFTMYNLRRALQRDAQRLCREYWARKEDRGTLGWKIVAEDLGLNRNGFERLARAHALNCGWASDHVSMALVYHMADAVFEDAARHLWSDASGHRSGPLRVRPLHQFATIHGRARSHTTENKWETFRLYGTLEGHLDTYRHGDLGTHPTLSQVAARPAGTPVLRQKNRMQTPGATKWSSYAGPLMMVFAGGPQSNEPELQLPVRLPQGRGSWDRVVHFLTQPNLWHKIDLVRRADSSQSGGWRYEMHLLLLGEGYVSPRSRALLELAPTDRTACVDVNVSNLAVVSVEAGHHDPRSTMVRADPDERERLARAEAKKRRGLRRVDRSRRASNAAQYAKSKAQLQRDERRAIRGLRPVTDATSRGGRLSHTSGVPRQAYRRDQLSGAYRDLRRRHGESARAQSLTKQSKAHDVAVQLVATHGVHWMLEDCNLTAWAKLWGKSIHAFAPGMVTAELAALVARLDGSFTKVATGPTALSSHCLCGRRSKKDLSTRVHRCDVCGFTGHRDLVSAALGTCVVRTDLSDPRSARVNYAAAGVLQAELTATSTNQISTKPGDQGALTSQTHPLVAPRRSDFVSQGARSVRHPHRTARLRARSTAQSTNGSRHLGPAKVAHDSALRSSSPPGDLRLNS

SEQ ID NO: 7428 - protein, 390 aa, Trichococcus sp.
MLIHKAYKFRIYPNQEQQILIAKTIGCSRFVFNHFLSEWNKTYQETGKGLNYNTCSAKLTLLKKEEETLWLKEVDSTALQSSLRNLSDSYDRFFKKQNSFPHYKSKKNPVQSYTTKHTNGNIAIVGNKLKLPKLGLVAFDKSREPEGRILNATIRRNPSGKYFVSILCEVETHPTPKTNTTVGVDVGLKDFAILSDEDKTVFENPKFFRTMEKKLAKEQKILSRRMEKARKDGKKLFEAKNYQKQKRKVACIHEDITNKRNDYLHKISTAIIKNHDVIGIEDLQVSNMVKNRKLSKAISEVSWSQFRTMLEYKANWYGKEVVVVAKNFPSSQLCSCCGYQNKDVKNPRVRKWTCPECGSYHDRDYNASINLKQEALRILASRTVGATGLA

SEQ ID NO: 7429 - protein, 413 aa, Anabaena sp.
MYLTQKNQIRGLKANEFTALKELCRLSKNLYNVGLYTVRQYYFQERKHLKYESNYHYCKGNENYRMLNTDIAQQTLKVVDRTFRSFYGLITSVKSGSYSSKVRLPHYLPKEGYFPLIMPRVKVKDGKFRIPMSTAFKAQSGEIWIPFPNRLNQETLKEVRILPKYNGRFFEVEFISEAEETPIETKAESAIGIDLGLDNLATCIDTNGASFILDGKPLKSFNQWFNKENARLQSIKDLQKIKGTTERQARLAVNRNAKIRDYLNKAARYVINHCIEHRIDKLVVGFNIEMKQSINIGSRNHQNFVQIPHSSFRFKLKALCERYGIKYVEQEESYTSKASFLDNDNIPVFNADNPKKHEFSGKRIQRGLYRTQFGILVNADCNGAANILKKSKHNALSGVSSGCLAQPLRVKIS

SEQ ID NO: 7430 - protein, 230 aa, Anabaena sp.
LDVGIESFYTDSNGHHEPNPQFLRKAEKSIKHSQRRIYKKVKGSSCRKKARKLYAKKHLKGRGEAFAYKNYATNRRLNSANASPVRQRIEHAKKIARNVCKSNDLVAYEDLRVSNMVKNHCLAKSISDASWYLFRQWLEYFAIKFDKIAMAVAPHYTSQKCSSCGVIVKKSLSTRTHNCVCGCELHRDTNAAINILNLAKNRGGHPQINATGVGISTLVGDSARSWGFPP

SEQ ID NO: 7431 - protein, 374 aa, Anabaena sp.
MSKAKKLMGVQQVLLSPDNETKAVLEYLCQQSGKIYNSGVYFARQTFFKTGKLLTNKFDLIYEKSISKSLVAQSMPSVPMQQTLISVAEGFKSFKELRSLFLEGQLHFKPKAPDYLTGSKLFKVAYPTSGGQPPTLINGQLRFSLGTTVRRWFGISDFFLTMPSNIDYSKVKEFTILPKNGAFYLEISYEVKRQKHDLDINQALSIDLGTADNLAACVDTLGNSLLIDSRSMKAMNQLWNKQVSTRKEGKPEAYWDNWLDRVTRKRNHQMKDGVNKAAKLIIDHCLKYGIGTLVIGWNEGFKSNANMGRLNNQRFVQMPLGKLKDRLKQLCDLHGIRFQETEESYTSKASFLDGDSLPVYGQKPEGWKALLLAR

SEQ ID NO: 7432 - protein, 199 aa, Anabaena sp.
MGPRFISVKYEIEKPPILADRPTIGVDVGIKELAVCSNGEIFKNPKAYRRMSKRMKRLQRSVSRKVKGSNNRKKAVRKLAKLHAKVSNIRQDSIHKLTYYLAKNHSVIKIEDLHVKAFLKNHKLAGAIADCGMYEFKRQLEYKTEKFGSELILVDRFFPSSQICSNCGNHRHKMPLKNRFLTVAFCAFNDILNCLCPKL

SEQ ID NO: 7433 - protein, 491 aa, Streptomyces sp.
VNPLRSCGDPGAKHTRAQPLLLCQQQPAAPPRPAVHLVLRRMPWRSRRGGIRTPQGASGRSRGGSRTKFAGRCSGRLQQAHRASVTWCFVRTAYKCRAYPSPEQAAVLNRTFGCVRKVWNEALEWRTKRYRAEGKTTSYAESDRYLTGLKKTKDLAFLSEVSSVPLQQTLRHQSTAFANFFAKRARYPRYKSREGKQSAAYTRSAFRMQDAELYVAKTPGALCFVWSWPDIDVASLHPTTVTLSRERDGMWYVSFAVGTDDPEPFAQTGDVVGIDLGIKDFAVTSDGQRIANPRHLERKRRNLARYERRKARTCRGSANRKKAARKVAVAHGKVRRAREDFLHKTSTELVRRYDTIVVEDLNVSGMVRNRSLARQISGCGWGTFRTYLEYKTARWGKRIVVIDRWHPSSKLCSTCGHLLARLSLSTRHGTCLDCGTLHDRDTNAAKNILAEGLSASACGADVRRTGTSRTRSAVKQEVPRSDPGRASGGRT

SEQ ID NO: 7434 - protein, 402 aa, unknown
  TnpB Polypeptide
LRLSETIYINSSAQISKLCHSAKNLYNLANWYVRQDFFKLNIFLNYYDLDYILKDKNVYRELPSQSSQQILKLVNRNWRSYFGALKVYRANPNKFKNKPKIPHYKKKNGEFIVIFTNQQCRIKEGYLYFPKKVNLKRIKTRIKEKLKEVRIIPLSIKYKIEIIYKKEEKDLGLNKNNILSIDLGLNNLITAVNNIGLDPIIIKGKVVKSINQYYNKQLAFYRSIENKKSNFQDTKRIQKLHLKRDNKINTIFHRISRFIINYCIKNNLGTIIIGYNNGWKQNINIGKKNNQKFVQIPFLRLINQVKYKSELVGISVITINENHTSKCSFLDNEEIRHHKKYLGKRISRGLFRTSNGTLINADVKAGYNIMKKVFPNSIQVDGIEAFGLMPQIIQQNIVDPII

SEQ ID NO: 7435 - protein, 365 aa, unknown
  TnpB Polypeptide
MNISFKVRIYPNKEQQVLLEKTFGASRYVYNHFLKLKSYLYQEFKIKITYNHTSKMLTELKRQKSWLKVPDKWALQNALKDLDSAYKKFYNGAGYPKFKRKDDKNSYRTSSNIKVDNSFITVPKVGIIRYRDNYNLEGKNILKIYNITISKSSSGKYFASISAEVYTPCFERTNQSVGIDMGLKDYLILNTGEKVKNLRILKHLEDKYRKLAKSLSRKVKGSANYRKAKLRLSRFHEYVANIRKDFLHKLSTKLVKTYDIICIENLNIKGLMQNHKLSKSFQDVSLYEFTRQLEYKSKWYGKTISKVDRFYSSSQICSNCGFKNSDVKNLSIREWTCPECGTHHDRDVNSAINILHEGIRILESV

SEQ ID NO: 7436 - protein, 418 aa, unknown
  TnpB Polypeptide
MYLTIKQQVKHLTKEEYNILRELCRISKNLTNQAIYNIRQHYFQEKQYLRYEANYYRVKNCENYKLLNSNMAQQTLKNVDSMFKSFFALIKLAKQGKYNFRYIKLPKYLPKNGYANLIIGMINIKDSIITLPVSNAFKKKLDRRLKVQIKIPKVLEDKKIKKILIIPKFNARFFEIQYTYEVQEENIKLNTNNALAIDLGVNNLCTCVTNVGKSFIVDGRKLKSINQFFNKQNARLQSIRDKQNILRKTKQQFLISRKRKNRVDDYINKTCRYIINYCLSSDIGTLVVGYNQSFQSKVNLGNRNNQIFTQLPFGKIREKLEYLCKRYNINYILQEESYTSKASFFDNDELPIYNADNPQTYEFSGKRIKRGLYHTKNGCLFNADCNGALNILRKSKAVDLTILGCRGELDTPKRIRVS

SEQ ID NO: 7437 - protein, 354 aa, unknown
  TnpB Polypeptide
MEQQVLLEKTFGANRFVYNYFLNLKSKLYEFYKINLSYNNSSKIMTELKKQKSWLKEVDSVSLQQSLRDLDSAYQNFFSGKSKYPKFKQKDGKNSYRTNSNIKISNRYITVPKLGMLRFRDNYNLEDKNILKIYNVTISKTSSGKYYASISSEVYILCFEKTNQNVGIDLGLKDFAIFSNGKKIDNPRILEHLEVKYRRLSKSLSRKVKGSANYQKARLKLARFHEYIVNIRKDFLHKLSTSIVKSYDIICIENLNISGLMKNHKLAKSFQDVSLYEFIRQLEYKAKWYGKTLSKIDRFYPSSQLCSSCGHKNKEVKNLNIREWACPRCGTHHDRDVNSAINILHEGLRLLESM

SEQ ID NO: 7438 - protein, 391 aa, Gottschalkia sp.
MIKGIKVMLKPNNKQKIKLFQSAGVSRFAYNWTLSRQQENYKNDGKFISDSELRKEFTKLKQTEEYKWLNNYSNNITKQAIKDACDAYLKFFKGLSKFPKFKSRKRSAPKFYVDTEKIQFNKTHVKLEKLTTSGKRNKQKLNWLGLCERGRIPYGEKIKYINPRVSFDGLNWWISVGIEYEDTKEIPTNEGIGIDLGIEKLAICSNVEKPYNNINKTKKVKKLEKRKKRLQRKVSRKYEKGREGNCYKKTNNIIKLEKKLKFLNQRLTNIRHNYSHQVTSEIIKRKPSFIVVEDLNVSGMMKNRHLSKAIQQQRFYEFFRQLQYKSEWNNIKLIVADRFFPSSKRCSECGNINKDLKLKDRIYRCSCGLKIDRDKNASLNLKNYGQLVINQ

SEQ ID NO: 7439 - protein, 635 aa, Cyanobacteria sp.
MPIGFSPGSPSLGANRFDPWAGSNLRVFRAVRTSGENDVPQTITVELFAPTIAKQETFRQMQAEFNRLANELAEASLGTLSGQASDTLEWMIPSAWHGSLYRMVQGRLKTMAVRGDGARLARFKPHHPVIFDPAAWQLSAADGAWKLTIPIFGRTVSVPILVPSSQMKSLSRMLEAGTPLEGRLYQKKGRWYFAATFLNRALPTDGGGRMVAFRSVGVDLGQRMLAVAYDSVRNRRMFFSGKDALYHRKRYERILKRLRKAGTPAARRAAKRVEAKYARFLEHRDRRVANAVVRFAAPASRPVPGMPVSGWLARRVVIKFEDFQTAPATAEVASYRRIQGLVARRAELAGIPVVAVSRHETSTRCSACGTVQPGNRRRQAFACSCGYRSHADLNAARNIAQSAIQSEGIGIVPAGYESGSQAVGTAVSRAVLWLKGTSDHMRSALAHATPQIPPSLAVQTQLTHMEVIQMASIVKDLTDTSTKFVTGSLDNLRTYVDRTSDELGKVDMVGVTRRVLDTAIDNTKAVVKMAAEPNGLDFFGKAKAVADGSLEAAKEVVNTISEEGKKTDFFGMATRMTMDSLSSLRNQVDLTLETTKSVSTRLMPLATAAKPVATRAPQVTRVEIEQEKPSKASKS

SEQ ID NO: 7440 - protein, 440 aa, Halorubraceae sp.
MQECPTYSKGVLPYSADDGPTSGQSVKYDYDEDTQTLTVKLKTPDTLEPEFRGDWTWTKHELEGYEAFHELLEHGSLSAPSFHPAQTKTGEDYYELLFPVEVEHAEKPDNVETVLAIDGGIRKDATAAVVNDDGEQLSVPYFIQNTERERMKRFARERNQLNSKLSYLRREGRDHTDSFTHVQAEYERVNNKIRHKREQLVHDVSNQILALALVYDVDAVVHEDLRSLNPPRGEGQLSWELSSWARREIISKIEYRAEIAGLYVKRVHPGNTSRSCPRCGATGHTTKSPDHSYEVWWGGHFRCDNARCGYQADRDYVGAVNVARVFFSDSATLEHDFTSSYTGAFEIVPASRSAGESFSERRSSSELASDGGPRLAFGDAPVAYLGQSEKDVTAGGGSCFIAPAVTPTETKNNSSNPCASSPAMLGTTRFARVTPNCYRK

SEQ ID NO: 7441 - protein, 394 aa, unknown
  TnpB Polypeptide
MYAVKRDLKLNKVETSQMRGNAGFKRFVYNFGLDLIKASWGFEDIKATDGKRIDTIKKVFTQVTMQKPEYAWMRNYPSMVYQSAFNDLKDAFSRWRKGKAELPKKKTKKKGDFFSVYKISGIYPEKGKPFLPFTNRVVIKPGKLIKLPGLKQLRLKQKIDFMCSSQTFTVSRIADRWFVSFILDAEKLPPIIHPVHRIGVDLGVKCLATCSDGSKYDMPVTTKKAKTKLGKLQWRNRNKILGNKKLKVKASNNARKFYIKIANQPARIANIRQDTTQKMTTDLSRKAYNIRIEDLNVAGMIANHKLASAVNNNCFYEIRRQLTYKQVHYGTKVELVERWFPSSKTCSKCNHIQPMKLSDRVFECQNLECGHIQDRDENASINLEKAPDDKIRLA

SEQ ID NO: 7442 - protein, 397 aa, unknown
  TnpB Polypeptide
MNRLQAYKYELKPNGEQQRNMRRFVGSCRFVFNKALAMQKVRYKQGEKKLGYAGLCKSLTEWKTQAETIWLTETPSQALQQTLKDLERAYTNFFAKRGDFPRFKKKGQSDSFRYPQGFKLDQDNSRIFLPKLGWIRYRNSRDILGTPKNVTVSCNGGKWFVSIQTEREVVEPVHPSASIIGIDVGITRFATLSNGSFIEPLNTFRKHEQRLARYQRAMSRKTKFSNNWKKAKAKVQKLHTRIANVRRDFLHKTTTTISQNHAIVCIEDLQVRNMSKSAAGNSEAPGKNVRAKSGLNKSILDQGWFEFRRQLEYKQVWRGGEVLAVNPRNTSRTCPCCGHVSAENRQTQARFACVECGYENNADLVGAINVLAAGHAVLACAAKQEPTEATTQGLALV

SEQ ID NO: 7443 - protein, 523 aa, Blautia sp.
MQIISSYGVELRKQNIPIRQTLEIYRSAVSYLIGIYVQVWEELAEIPDAKRRFNAAEHLVHTTKKNHACFDFDIRFPKMPSYLRRSAIQHALGTVSSYKTRLDLWEKTDGKSGKPKLVYENHAMPVFYRDVMYREGAEGKDEAYLKLYDGHDWKWSCVRLDHTDMEYLRKCWSGKKASAPTLEKRHRKYFLRFSYKEEVTLAKTPVKEQIICSVDLGINTDAVCTIMRADGTGAEGKDEAYLKLYDGHDWKWFCVRLEHTDMEYLRKCWSGKKASAPTLEKRHQKYFLRFSYKEEVTLTKTPVKEQIICSVDLGINTDAVCTIMRADGTVLGRRFIDHPSEKDRMYRTLGRIRRSQREHGSAQTQGRWAYTKRLNTELGKKIAGAIVRYAEENHADVIVFEYLEMQGKISGKKKQKLHLWRKRDIQKCCEHQAHRKGMRVSRICAWNTSRLAYDGSGAVTRDWENHSLCTFQTGKRYNCDLSASYNIGARYFIRELLKPLPATERSLLEAKVPPVKRRTSCVR

SEQ ID NO: 7444 - protein, 395 aa, Lactobacillus sp.
VHRMVLKAFKLRIYPNQQQQDYLARAFGHTRWVWNQMLMMLLARRENLPKQWYLNNFALNYLLTRLKAETPWLREVDATMLINATRDLHDGFTRWFKHQNQMPKKKVRRWAQSATSNAVNGNIKILDDHHLQVPRMGVVYFRAGRLPAGKVKQLTLRQNAAGQYYVAVLCECENQTLPKTGKVVGGDLGLKALLNLSDGQIEPLFRYDKRLSKQLHEWEKKMARRRIGAKKAIARDKHEHPGNVRTLADFANYQKARRKVAAIKAHIANQRADQLQKYTTWLVRAYDLIVLEDLNVKGLLKNHKLARAISNASWGKLVTMIQYKCAWYGKQLILVPPAYTSQECAVCHARNHRLGLSKGQWLKVREWDCPNCGAHLDRDVNAAQNILSKGLKQSA

SEQ ID NO: 7445 - protein, 309 aa, Moraxella sp.
MKTLKLRIRDKHTNQLNRLSGLVNFVWNYVNDLSYKYLQKTGKFFSAYDLNEYTKGSGELLGLHSQTIQAINETHAKSRRQFKKAKLNWRTNNPNSKRKSLGWIPFKQSAIKLLATHQTGKKGLKSTLQLSLAKGQKFIIDLWDSYNLALYDLNTVEVVQDSRNRWYACITVKDYPKTPCGTASVGIDLGLKDSATASNGDKLTIKQTLKYAKALATAQRAKNKQRVKAIHAKIKNTRQDLIHKFTTRLVKDNALIVVGDVKTTQFNSKKGKLAKSVYDAGWFELKRQLTYKCENAGCRFEIVNEKYTT

SEQ ID NO: 7446 - protein, 379 aa, Bacterium sp.
MPIVKLNRAIKYRAYPTAEQAAQFAKTFGCTRFIWNHMLADAQFFLCAADKFFIPTPAKYKAEFPFLKEVDSLALANAQLDLQKANKRYLEDKHIGAPRFKSKRKSKLSYTTNNQMHALKDGSRKGTIVLGKNFIHLPKVGDVRITKHRSPKNGWRLKAATVECTRSGKYYISVLFEFEQDIQPVQVTKETSLGLDYSSHDFFVDSNGNAANYPRYYRQSEHKLAIAQRRLSRMQYGSNNYARQLQKIRLLQEHIANQRKNFCHTLSTAIAKQYDAVFVEDINLRGLAGSLKLGKSTNDNGFGMFRCMLEYKLTAQGKTLAKIDKWYPSSRTCSVCGLVKDDLTLADRSWTCCGCGTTHNRDHNAAINIRNVGLAGLSA

SEQ ID NO: 7447 - protein, 462 aa, Moorea sp.
MQLGYVYKLIPNPQQEATMSRWLDMLLAQYNYLLRDRNDSYDQVKYPKMGDYCDLTNKGEACPLTCSVNKSTSLGYPWKNSQKNPSAKPTLRERRSTYEIQSSTLPDLKKTRPWYKEIHSTVLQQMLRQLDTAFKKFFKGEARYPKPKRRSRYRSFKYAPGQIKLNGNRIYLPGIGWMKFHNSRPIPDGFTLKSVTVRRKSRGWFVSIQIEDKLAPSPPVKNSKEVSPTRVKGCDLGIKKLVSVSDGQIIANPAKSSKFERQSRRLKLRQRAASRKPKGSKNRKKSFKKVASLHERIENSRSAYHWETAKKLVNDADALVFEDLNIKGMKSRCKPNKNENGGYDRNGQSAKRALNRSISDAAWGELIKKVEVVAAKSGIPVIKVNPRHTSQECQKCHHTSADNRSGEKFVCTECGYHDDADVNGAVNIKMRGLKKLGIDPSQLPSVRSRSVAYGQGKSRPWS

SEQ ID NO: 7448 - protein, 412 aa, unknown
  TnpB Polypeptide
VKRTLRFRAYLSDAVASEAWRQIDILRQIRNHAVRGYYHSDYNERPTEFEQNNKLTEWAERWPTFAEPSRHAAQQAISQIHSDLETLKERRNNGYNVGRLRLQGRGEYRSVSYNQPCRWNVDHNTGGERCVQFRLEKIGWFKIRAERTVPDADEISEAILKKQKTGEWYVSLVIDVDDVPEKPGLSEIEPQDCVGVDLGITNYIHTSENLTVDTLDLSDEYERLRREQRNLSRKQHGSNNWEKQRRKVAKATRKIKRKVKDFQHKLTTWLVTEYDLVAVEDLDVKPMLESSQNAKNKQDAAWSRFIDLLEYKADLHGTHVVTVDPAGTSKECASCGVATDKPLWVREHSCPACGHTQDRDLNAAKNILNRGLKQVGAGRSESTPMQTALPTSSPQREAIDAKRVVEVGSLGA

SEQ ID NO: 7449 - protein, 430 aa, unknown
  TnpB Polypeptide
MAWDITRTVQVCLDVPDDRKSDLHATNSKFQYCANRTAEWAWRYPDEDCVTSKSEAEAGIYDELRHTTNGLHANLVQKAIKRATDDIGNCVDRLADGENTSQPQYDTFSIVYDKRAATYYRDRVSLATVNGRVECDYDLPGNIEDTPHGEYLLNDDYSFSTSTVHYDSEADEFYLHAAMEKEIEASTPEKAEDSKVLGVDCNVDDHIAVTSTGLFVGNADYLNHQRREFEKRRASLQQTGTRSAHLTYHQIGDRFGRWSEDNLHQWANEIVAEAQRHTCTHVAFEDLEQIRERISDGKKFQQCGFNELQELVSYKAEMAGIVVETVDPSYSSQQCSNCGCTLEQNRDGQQFACLDCSYSVNAEYNAAKNVARKLALKLQRGQKSPAGGAFCQYDLNSGTLIVDATDVASDGYVSVERESTDKPTASAVGD

SEQ ID NO: 7450 - protein, 585 aa, unknown
  TnpB Polypeptide
VCIRRRRVAGFGPATFVGAGGQDGDVGERLRVIGDPVVAGAPAGVRIRTRIHPTVAEAEALAAVGELLGSVYRRELAGRVGLGRLDHKAHAVWRAKRKQGLTAVSSSRWAGAITRAVEDQYQLGMRGLVAQVANLRAAEEVLEQRCVLCPGELAPVEDSNTGGRSRRRRRRGYRNAAERFAKTRRLAVLRTRLATAEEALTVGQPSIAVGGKRLWRNRNHLDDAGMTDQQWRTKWDAARMFLTADGESGKAGGNETIRVDEAGRLRIKVPGALVDEFGTHLVIAAPVQFSHRGAEWWGRVAARQAVRYDISYDPGRGRWYLDATWATSPAPPPELDDVRAGPVLGVDLNADHLACCLLDSSGNPLGEPVSIAVDTAGLKASRRDGRVRAAISTLLELAHQQNCSAIVVENLDFADARATGRETLGRGGRGKRFRRNVAGIPTGKFRTRLTGMASRCGIAIIGVDAAYTSRWGAQHWRKPLQQQTSDPATVTVHHGAAAAIGRRGLGLAIRRRPAGPRTRQRTSVGTSPARPDHQPSTTPRRCRSSGSPPRPQRRRGVPVHRTTPTAAANTVRAAQDSLLLSNQER

SEQ ID NO: 7451 - protein, 514 aa, unknown
  TnpB Polypeptide
MFRVTTPTFIAEFPLRTTAADERELAIRLDASRHIYNAALGEALCVLDRMRESKDWQRARQMPRGKERAARFRACVQRFDFKSSMTDRFAIACKNACWIGDHMTSNETQKAALRAFQAVQQYSFGKRGRPGFKRFATLRSVEGKTNNTGIRFREGAVEWDGLRMPVIDGKDPWQVHALACPTKYCRIVRRTLRGRDRWFVQLIQEGRPLAKHAVGDAVVGLDIGPSTIAAVSAADATLEAFCPTVEQPWKELRVIERGMDRSRRATNPDNYQPDGTIKNGPKRWSKSERYKARQRRRAGRAEVERRLTAERKRAHGELANRVLGQGRAIKTEKISYRSFQKNFGRSTKVRGAGRFVATLSRKAVAAGGGVSEFSTRSTRLSQFDHMSGGYLKKPLSQRQHVFADGTVIQRDLYSAFLARFVEQDRLDARSAAWAFPAAKPLLERAASSDGQPASGVRFPLPQVLRGLRAGRPLKRNSGSVEAKDVVAAIVVGESLGETGHIASSEPPGFSRGEV

SEQ ID NO: 7452 - protein, 553 aa, unknown
  TnpB Polypeptide
MLRRAVAVELEVTRELNKLLYSVESAYLGIVREVVEYAVANNVTGAIQLRGLFYSKYRLEYQGLHSHLVIQAIRQASGVTKSFIERRRKGLAQKPYPEVRNVSIRFDKTAWNYEQFIRSTAPVRLSLSLLGERREVWLRPHKRFWLYWWRVLTGEAELASTLTIKRRLNRWYAIFIFELKPKEEEPKSVVTFDINENTVAVGRIDLLTTVNEVTNWNKQYLMPQLYTIRTDFGRLARRYEKVRNTIIEKLKPRFALPNGKYVNVTNTREFRKRVRKLRERGRKVSRVRHVANELTRTPAIIITEELGDNPQESMIEDVGRGELRHRIKQTPFKSIEEAVEDKALERGSRLVRVSSYRNSRVCPIHFVRLERTDDWHTLQCPLGHLVDRDYASILNMAWKTTPEAWIKAFWWNIKNLSKNMNWREHEGRSNPLVPHEIVKHIHAALKTFKVSLKQSPAVPARGKPMNPARGANEGRARKPPRPKGTLTLQGGEEVSAHCLFNSENTSFQVGFSNGPNQILSASSACLTRISRPSMYLIECLLANFMSDVSPFTV

SEQ ID NO: 7453 - protein, 409 aa, Jacksonvillea sp.
MLRVVKVRLYPDAQQQQSLAQAFGWCRWLWNYYLNLTNQTYKETSKGLSGYAVKKIIPQLKKEYEWLTSTYSQCLQQVFLNLGVAFNNFFEKRAKYPRFKSKHGQQSIQYPQNIKIVDNYLSLPKIGDVSAIIHRPIEGKIKTVTISKNCSNQYFASILFDNSVDQPESNTDGKAIEIDLGLTHFAITSDGSKFDNPRILNKHEKNLKLKQQQLSKKQKGSNNRIKARKTVARVHRKITNCREDFLRKLSRRIVNDNQVIVVENLNIKGMMQNHRLAKSIHQVGWGRFFTMLKYKADMEGKIYQEVDRFFPSSKTCHVCLNQVGSLPLDVRVWTCDNCQTKHDRDVNASINLRNEGLRILTSGTGDKACRPDVNRSKGGRKKSTTALSVGQEAHTVPDGTVWVVHEINN

SEQ ID NO: 7454 - protein, 386 aa, Jacksonvillea sp.
MLKAYKYRIYPTGEQEILLAKSFGCVRWFYNYALNLTNETYKATGKGLSRNDIINLLPSLKREYEWLAEPPSQCLQQVALDLSSAFLNFFEKRANYPNFKKKGQKQSIRFPQGIKLSGEFVTLPKLGKVYCKVSRLPEGELKSVTVSLTPSGQHYAACLYDDGKDQPVASSEGKAIGIDMGISHFAITSDGSKHGNPKYYRKYEVKLTKKQKQLSRKSVGSINRKTARIKVAKVHNKITRCREDFLHKLSRKLVDKNQVIVVESLAVRNMVKDHCLAQSISDAGWSQFCTMLKYKAEWEGKTYIEIDRFYPSSKTCNHCLRQVDKLSLDLRSWQCPTCQVVHDRDINAAMNIRDEGLRLLAGGHLAAASRQRVRPSKGTAFRGNVG

SEQ ID NO: 7455 - protein, 367 aa, unknown
  TnpB Polypeptide
LLKAYKYRIYPNNAQKVQIGKTFGCCRFVYNQTLAYRKETYEKEQKSISKTDCNNYCNRELKKEYEWLKEVDKFALTNAIYNMDTAYQKFFKKHAGYPKFKSKHDNHKSYTTNFTNGNITVDFENGKVKLPKLKEVKAKLHRVFQGQIKTATVLQVPSGKYFVSVLVETEHRQIPPANGKIGLDLGIKDLCITSNGTKYENPKTTRRYEKKIANLQRQLAHKEKGSKNYYKTRKQIALCHEKITNTRKDYLHKISNEIISENQVIVSENLQIKNMVKNHHLAKAITDVSWYELTRQLEYKALWNGRKYVKVATFFASSQICSECGYRNQDTKNLSVRNWICPVCGREHDRDINAAKNILSEGLRQIA

SEQ ID NO: 7456 - protein, 388 aa, Rhodothermus sp.
MQTLTVKCKLVLSKEQREALDTTMRAFAAACNDAIAVGRRLNTTSNIRIHRVCYSDLRARHGLTANLAVRAIARAASILKIKERRNSTVRPTSIDYDARIFSFREADWTVSLSTVQGRIRVPIAVGAYQKRLLSSRKPTSAVVWKTRQGDYYIGIHINVETPPPEDEHGWIGVDLGIASIATLSDGTVFSGDQIERVRARYERTRRSLQRKGTRGAKRVLKRLSGRERRFQQSINHTISRRIVDRAAAEGKGVRLEDLSGIRKRVRARNKSQRRRIHRWAFHDLRTKIAYKCALAGVPFELIDPRYTSQRCPVCGHVEKANRKSQSEFVCRLCGLEANADVVGAINIALGGVVNRPEVALASVLTVLHGQNRNGSKSSYKPMTSVVGS

SEQ ID NO: 7457 - protein, 382 aa, Rhodothermus sp.
MQTLTLRTRLEPTPAQADALQETLERFAQACNLTLEVARACRTFSKFKLQRLVYGQLRALGLSANLAIRAIARVGRRKGHRAKHYRPTSCDYDQRTLSLRGESVSLSTTHGRLRIPMRLSPYHRYWLARARSVQGGRLLRDRRGRWYVHLTVRVAVPEALPTGRVVGVDLGQRLLAALSTGERLSGGALKTKRLHYRAKRAEIRSKLDRPSERTRSLRRLWARLSGRERRFVRQVLHEASRRIVDGLAPGDVLAIEDLRGLRGRTKRKGKAARHLHQLWPYGLFRHLLEYKARLKGVRVVVVDPAHTSRTCPRCGHIDRRNRRSGRLFRCRACGFQHNADVVAAMNLARRAGSEGMGRCQPAPGAIPAGGREGKPTTSVVGS

SEQ ID NO: 7458 - protein, 366 aa, unknown
  TnpB Polypeptide
MQKGVKFRIYPNREQKNLINQTFGCCRLVYNRGLAMREEAYKNGNKIGYSQTSAMLTDLKRSGDFTFLKAVDSIALQQSLRDLDRGYVNFFQKRASHPTFKSKHNNHQSYRTINQGDNIRIAGKYVRLPKLGFVKVRQSMEVGKINNVTIERTPTGKYFAVLNVDFEPQLQQNNGAAIGIDVGIKEFYSDSNGNVVSNPKHLEKSMHKLIREHRKLSRKEKGSNNRNKQRVRVALVHEKITNQRKDFLQKLSTELIKNNDLICIEDLQVKNMIKNHKLSRSISDASWSEFVRELQYKAQWYGKQIIKVDKFFASSQTCSVCGYVNKEIKNLSIREWDCPRCNTHHDRDINAAINILNEGLRLLDVA

SEQ ID NO: 7459 - protein, 290 aa, unknown
  TnpB Polypeptide
MVDLSLHTRIKLFPKFLSINTKIKQFTDIDCVRIVPKLGYFVIEVIYTIPDTPLLEDNNNYLGIDLGINNLATLSSNEKSFKPIIINGKPLKSINQFYNKKLSKIKSTLEVRNKKSKSKKLYKLTNKRHFKVETYLHKASKEIVKLAKNNNINTIIVGKNEQWKQNINIGKVNNQKFVSIPHSRFIEMIQYKCEKEGLNFKINEESYTSKASFLDLDEIPTYNSKNKETYNFSGYRKYRGLYKSKITGKQINADVNGSYNIIRKAIPNVFKNDGIEGVGVHPIIKQISFN

SEQ ID NO: 7460 - protein, 451 aa, unknown
  TnpB Polypeptide
MLRAYKYRIYPTDEQKVLFAKTFGCCRFVYNWALNLRIEAYKSDKRTVPYKEIQDCMVNELKAEHDWLKEVNSQSLLYSLRNLETAYTNFFRNTKAVGFPRFKSRKSRQSFLCPQHCRVDFERGTITIPKAKDIPAVLHRKFRGAVKTVTVSMTPSGKYYASVLVDTSIQELQAAEPQEKTTVGIDLGVKSLVVCSDGRTFENPKNLQRSLHRLAMLQKRLSRKQKGSANRDKARVKIARLQEHISNCRKDNLHKITHTLTHDSQVRTICMEDLNVKGMQRNHHLAQAVVDASFGMFLTMLEYKCRWYGVNLIMQQVGNMLLARAVLTKYHHAHIGGGYQPYAVHDFLKGGTFTGEYRHTALSCLTFFQYGTDQGDKFILHKLFGNIVYRAEFHAFHGGINFGVVGHNDEGLHLSLLSHPAQKVYATAVRQTQVGNHDIIICCLLQMFLRG

SEQ ID NO: 7461 - protein, 434 aa, Aromatoleum sp.
MQRLQAFKFELSPDGQQERQMRRFAGSCRFVFNKALALQKERYEQGEKKLGYAGLCKRLTEWRNSPDTGWLSGAPVHPLQQTLKDLERAYANFFLKRADFPRFKKKGQADSFRYPDPKQIKLEQANSRLFLPKLGWLRYRNSRDVLGTVKNVTVSQSCGKWYVSVQTEREVEQPLPNGGAVGIDMGVARFATLSDGTFYAPLNSFKRHQTALRRAQQAMSRKTKFSNNWKKARAKVQKIHSRIGNARRDYLHKTSTTISQNHAMVCIEDLQVRNMSRSAAGSSEQPGKQVRAKSGLNKAILDQGWAEFRRQLDYKLAWNGGHLIAVPPRNTSRTCPCCGHVSSANRQTQARFECVECGFEENADVVGAINVLRAGHARLACEVNGAVMPSAAGTHRSDSGAAQCPRLSAAGISGLQAGEDVKTLLVKAWRGKRT

SEQ ID NO: 7462 - protein, 2365 aa, unknown
  TnpB Polypeptide
MDRIQRKKPEFRRIAAMIMAVAMIISVIPFPEGLFHVTAAAAVKMSATWTYTDTMYDSSNNEVSELSGSIGILVNTNNDVLNVDASSGKMSNRKKLGYGSDFQINNGTVLTFPIIKGAKRCTITIQAFNELTTENITAAGLDNVTITPLSNNGWKKYEISGNVEKNTEEIKLTVGLDTYFQEMTVDSSTSLAVTSASFADGGDTTAEWTNSNGSVQASNSTSSIQSTTGTYTNTDGDVLYVDASAGKFAPSGNYIQINSSTKLTVPATGDKAVLTAVVYKGGTGTDISEVLDGSHLNLTGTGLLKAECVSNVTAPEDSSSRKVEIICYLDGQEGELTLEVLTNTYFKSLAIACETLDKTTIKGSITSSAEIPDGTAIVATNQTTGLSYTGVITNGTYEIAVPAEDEEMTYELSVSDAEYQIASGVTTHVISKDKSADITANLKLVKLSTCVVTGSISGFADDYDISSLDVLFKAAGETEYVPEVTVDTKNKTYTAKLEKDMPYSVALQGVNDYELTAPAENVTYSEDSTLNMTAALKPTYQVSLTLPNTPDLSGKNITYTYVNQDDGYTYIFSNKEAISLRDGTYLLQLSGDFLAQPYCVKSGLYVTVAGKKAAQTLTFEEVTSWSFVYSDDGNYYQQSINGTTGYYNGLYVDAATGKLVPNGPTPNSAQFTTGAKISVPVSGKCTISVEAYQPKFALYTIGGTAADTTTAVSTYTYDSEEAGTVEIVSTGTAYLSKISVVYAAKDVEYVEQPEMPKTYDYGTPDALIVQPTGQRLVVTQTGGTLTGKESISDSVSYFGFNETADINKLTADVTILECGTSSSNGVFFGAFNGNGIATAGIRKGTELKMIYSKSSSEMVGAAGTLTGNVTLGTRVRFELVKTDEGLVISITPKDDKEQQIVYKYSSTMLLQTDRENTAVSYGFVFAGVKAVIQNMKYTAEDGTCLYDQNACYYAQGTAPVVESVTAQQAETRDYITVSWTNSVEADGDGMYVLQVSDDGGQTWKNVDTAITDTTYRYELKNAGDYNFRVCGKLGVSGEYNDFVQTDAITVIAPLSTPAVSISSTADKVKLAWDKVYDATAYDVYRYSYDETEENAKKIATTTECAYEDTDITEEMPYYYYIVANSYIGTTLDNYSNPSETVWAVPSAGHKGDYVYEDDAVGFTITKRSYDTVFDGKITLEGVVEKMADVSLVINGETVDTQSVKAKETFAFDDKEIAQGRNDVELRFTDKDGNITRETFNFVYLTNYQKVVDAAYDGTDGEEVNGIATYKTVQAAVNSVAASNTRRVVIFVKEGDYEEHLSVTSPYITLIGEDSEKTRIYYDTKEWVGGDMSQRCAVSIGKAATGFSAENLTIENTYKYLGDGSLSNESCDALRNDAENTLYVNVRILGYQDTLCANAGTQYYYKCYIAGNVDFIYGNEPRAFFNDCKLVFRYSAAKNSGYVCAPKTGADATYGLTFYKCRVLSETGCSGSRYYLARPWGADAYITWIDCYMGKILRANTANPYSDMSGNPAAGARFFEFGSFGPGYAINVNRRQISSAKAEEMTTTGYLGWDPYTIVAMIGGRYVGTVNTGIENKFVEKEYVSDTYSGMEGDDTGLDKYVLEGYAQSGKTTGGGLLMESSKDYYTAGSAEEFLQAIQSIKASGRPSVLELTSDIALGTNEVEGFENYKAFITAHKLAPLTHPTLIQTGVSMLKLQDMSDLTIYSKNGAKITHTCIDITGSSNIIIRNIEFDEIWEWDDETEGAYDRNDWDYMTIEKGSSNIWIDHCTFYKAYDGVIDVKTPADSSNVTISWCEFLPASEDSVFFDTMMNAMKENPDNYPYYKHLLEAGMTDQQIYNYAYGQKKTHLLGQSDTDTSAKNITVTLANNYYKNSMDRMPRLRFGTAHVYNCIMDAQDLRDMRLDIQNTVGSAFSQKIVSNGASSNCGAHMLLENCYMSGMTNALISGNGDSEAGYINAFNTLYLLDGKEEDLKVVLNTSKEGETALVQDRGEFIENLPYSGYTLYAASNLETQVQPYTGAGKLTMTTLQWEKTDGKSGKPRLVYENHAMPVFYRDVMYREGAEGKDEAYLKLYDGHDWKWFCVRLEHTDMEYLRKYWSGKKASAPTLEKRHRKYFLRFSYTEEVTLTKTPVKEQIICSVDLGINTDAVCTIMRADGTVLGRKFIDHPSEKDRMYRTLGRIRRFQREHGSAQSRGRWAYTKRLNTEMGRKIAGAIVKYAEENHADVIVFEYLEMQGKISGKKKQKLHLWRKRDIQKRCEHQAHRKGMRISRVCAWNTSRLAYDGSGNVSRNPKNHSICVFQTGKQYNCDLSASYNIGARYFIRELLKPLPVTERSLLEAKVPSVKRRTSCVYADLKELHLQMEILKAA

SEQ ID NO: 7463 - protein, 446 aa, Deinococcus sp.
MRVTVSAKLKLRHTPGQKEALDAVTLAYRDALNFASEKAFEMNKTSSAPKLHQAVYETLRERFGLGAQMACTVEKQVAATYKAQWTKLKQNIKAREAGFTKKRYKGLDSAPKFVSRTLEYQHGRDYSWKPGQKVSIGTLGGRLVLEYEGYAKHLDAIAAGCETGAAKLYYQRSKKQYFLIVALNLELPDPQPTGHPHVVGVDVGQRYHFVAQSNQGGTMFQAGGRARHTKDRFARARRSLQRKGTRSAKRRLVALSGRERRFIANWNHRIAKELLTRFPQSLIGLEDLTNIRDRTEGRSNPHASRKAKRGKRRRSQWSFAELQTFVAYKAPLMGSMAVKVHAHHTSQSCPKCGHASKANRPGAGLEFVCEVCGYRGHADLVAARNIALRTLLVRQDWMSTGALSMRPDRPQNADPQAGSAGRDVSYDEVKAAYAELRWSTDTSPRL

SEQ ID NO: 7464 - protein, 322 aa, unknown
  TnpB Polypeptide
LNSGKTSTAEAALVKGEAGEGSLLRAVRQGDLRHQFPADHREDLLQLAAVLRGEAGHDAVHDLRHIVGGDVVVIDILLGDLQMELPAVRGGLDLADVALFHQTVYLIGGVGRGDAHEGGELVHRRPPQRHDALHAEGLHRGETGFPVLKPAEDLLIKVKLEFGVYFVKSLMQHGASPSCGMKKSKLSIPILTEKGKSSPDGGGTVFPYRPLWVFSAFVQNPQSGKNMMWNHKLALHIADTSWGEIRRQLTYKADWYGKELIVIDRFFPSSQTCGCCGYRNKEAKDLSVRLWECPECGALHNRDINAAQNILKEGLRKRTPAA

SEQ ID NO: 7465 - protein, 483 aa, Proteus sp.
MIYTTGTVSTVSGSAIVKGTDTKFKNNNPAINIGMTILIKSGNTNIPYMIKSVNSDTELVLAQPALVTATNTTFSIHITEPDNNSDAARTMVAINAYTQYFLDAMNTWMSETGQTKIEMPNGEVVTLDSIKKHVYQRHGVNLNPRKDLKPLLAVAKKSHRYGWLKEYDSIALQQAVINLDVAFSNFFNPKLKARFPTFKSKHGKQSSYHCVGIKVIDGAIKIPKIAPIEARLHREITGTLKSITLSRSTTGKYYASLLCDDGMEAPEKPALISNVTGLDMGLTHFAIKSDGYKIANPRPLINASHNLRRKQKALSRKKKGSTNRRKARIQLAAVHERVANARADFQHKLSRAIVDENQAVIVETLKAANMMKNHHLARAIGDAGWSGFITKLEYKAAEKGVHLVKLDQWFASSKTCHFCGHKMPEMPLNKRIWQCPECGIEHDRDINAAINIERKGILELQAAGLVVSAHGGQRKSVTQTVAV

SEQ ID NO: 7466 - protein, 403 aa, Azotobacter sp.
VILAHKIALAPNNAQATYFARAAGVARFAYNWALAEWGRQYEAHKADLAQPKPSQAALRRQLNAIKREQFPWMLEVTKNAPQMAIIQLGDAFKNFFAGRAKYPRFRRKGVHDRFTLTNDQFALDGCHIRIPNLGWVRMREALRFSGKILSATISRVADRWFASITVDTQDLTHLPKAENQGAVGVDLGVSALATLSTGEVITGPKAHATLLKRLRRLSRSLSRKQKGSANSKKARARLARLHARIANIRQDALHQLTTGLTRRFPVIGIEDLNVAGMMKNRRLARSIADMGFFEFRRQLDYKSEMRGGEVVVADRWFASSKTCSCCGHVRESLPLAVRTWTCPDCQARHDRDGNAAINLKHYAVSSTVSACGGEGAGPGGNARVKPAPSKQEVSKKLPMGSFG

SEQ ID NO: 7467 - protein, 417 aa, Nonomuraea sp.
MVVCAIVKLVVQVRLLPTPEQAAALEATLRTVNRAANEVSRVAFARKIHAGRDLRRVTYGQVRAAFGLGSQPAQHTIKKVADAYTALRANLRNGTYGPANSPRRLKAESQPISFRPLAAQPFDDRCLSWDHDARTISIWTSSGRAKNVAFTGSAAQLAQLRKHRRGESDLLSRDGMWFLLATIEIPEAPLREPDGFLGVDLGIANIATTCPATTPSTTPIGAATPAAGTEPATGAGPSPARYSGAKLNAVRHRHRELRRRLQAKATKSAKRLLKKRRRKEARFAADTNHVIAKRIVTEAQRTGHGIALEDLQGIRDRVRLRKPQRVTLHSWSFHQLGGFITYKARRAGVAVIHVDPAYTSRQCSACGHTDRRNRPSQSTFSCTSCGFAEHADVNAARNIATRGVADWAVSHAADDAA

SEQ ID NO: 7468 - protein, 348 aa, unknown
  TnpB Polypeptide
MKLVYRYRVKSLTGLLNQQARVVNFVWNFCNDRQKDALRFNRRWHTGFDLIKLTTGSSKELGLHSGTINDICQQYARSRSQAHRPYLRYRGRKSLGWVPLKGRELKREGNAFRFAGNTFRVFYSRPLPEGKILDGTNFSRDRRGNWFLNIVLDLAEPAARTPVRGIGIDLGLKDLATLSNGEKIAAPQIYREAEAALAVAQRARKARRAKAIHAKIANRRRDFLHKCSTRMVRDFDYIVVGRVHAAALAQTTMAKSVFDAGWSSLRIQLAYKAVKHGAWFEEVDERFTTQVCSNCGAMPDSRPKGITDLGIREWQCSDCGAEHDRDLNAALNILRRGRATLAAGISVL

SEQ ID NO: 7469 - protein, 394 aa, unknown
  TnpB Polypeptide
MMKNYKGIKIEIKPTGEQIEKINKTIGTGRFLYNFYIAYNKEIYEKEKRFVTGFEFSKYINNVFIKENPDKSWIKDVSSKSNKQAIMNSEKAFKRFFNKISSFPKFKKKSHNNQKCYFFKNNKTDFEFYRHKIKIPTLKFVRLKEYGYIPKNANIKSATISKEGDRYFLSLILEIKKEIEKNSIQKNLQTKEGIGIDLGIKDFATCSDGQVFKNINKTFKVRKIEKKLKREQRKKSRKYLSCKKMGKNFYECKNFQKQKLVIDKLFFRLNCIRNDYINKVINMLTKTKLKYITIEDLKVSNMIKNKHLSKVISQQKFYEFRTKLLNKCKENNIELRIVSTFYPSSKLCSNCGNKKQDLKLKDRIYKCCNCGLEIDRDYNASLNLRNSIEYTILK

SEQ ID NO: 7470 - protein, 500 aa, Moorea sp.
MSLKVGATKRLSTQIVPVVGMSKSVEFELLQVMKKLGVVRAESYNKLGSINHWGLDWKKAIPEVKSFRTPNTLGLPAKLMDWTINDVAKAITASQAACTDAVVKKIYKRLPGKENQKARKEYATQLLTLAFLDNPLLHRLIRKEFQRGHSWVKNQIVYQQVGYKCRRLSRNTYQLELAGLRRGKRNRIIVRSNRKISGQIRLIHNQTLQRFEIHFLVDYGTVEVPANRRPVGIDKGYTEAFYDSDGQGHGLNLGKATTKKSDRICAKNRNRGKLWAIHRKLEKLDPVKSARILKNNLNRKTENKRYRQNQSELTAIIGAASKSLFNGESLLVFAEDLTQPILNKRQSKAMSRQLNSWMKGVMRDSLQKWANWTGSVVTEVQPSYTSQIDSVTGTLLGKRSGDSFTRFNGVVLQADHNAAKNILDRGTDQEITRYMAKTEVQAVLLRRTARFLEGMGLSLLDAIELGWLNGKHSKTKAFKELLAEMPGTPRQISGRLDSNC

SEQ ID NO: 7471 - protein, 389 aa, Okeania sp.
MKARFKYRIYPTGQQKYRLAKLFGCVRVVWNDSLTCCQEKYKLGEKKPTNSELQKLFITQAKKTEYREWLSEVSVVPLQQSLNDLHQAYQNFFKSTKGQRKGKQIQPPKFKSRKSKQSARFTLRGFKVYQNKVYLAKIGKLKIVWSRELPGQPSSVTIIKDSAHRYFLSFVVEINPETLPQTDNSVGIDLGISTFATFSNGMKVDAPKPLKKRIQKYRKLSKSLSKKTQGSKRYETARLKVAKFNAKLKDTRIDFLHKLSTEIISENQVIVLEDLNVSGMVKNRKLSRAISDLGWRQFRTLLEGKSEKYGRDFRVISRWEPTSQVCSCCGFKGGKLDLQVREWECFNCGAKHDRDENAAINILVAGGQSETLNGRGGKCKTSASVSNSQ

SEQ ID NO: 7472 - protein, 375 aa, unknown
  TnpB Polypeptide
MEVRATAKVKIKASPEIIKTINIYKKGLQFCINQAWKRKINNNIKLHPFVYSHLRSLGLQSQLAVACIKQACGMVKKARSKPIINKASIRYNFPRSASFKNNMLSLATIKGRIKIPFNIPDCYKQYFSWNIRESLLRIDKKGRCFFLFCFAKDIKAKGSNFQNRVLGIDVGINNIAVTSNRRFFNAKQIKQKRIKFQRLRNKLQVKGTRSSKRLLKKIAGREKRFMAYWNHKISKEIVNCDAETIIMKNLKGIRKIKRGRRINYWINGWSFFQLQEFIKYKAERKGIKVVKVSPYITSQTCSNCGNLGSRSKGFFVCPHCSYSLNADLNASYNLAKHHSKSDGVSASVTMPYIQADEHKVSIATECEVMDKCHKL

SEQ ID NO: 7473 - protein, 483 aa, Brevibacillus sp.
MPDQYYKTFQICIKKGHRLFPYCKQMCQNAKHLYNTTNFYIRQVYTAFRQQKSLQPLQQEVLNTMQQYIEAMNERQRQAYWSRVTKEQQKPVEQRKEIRCNEFVLPSEESPYVDYHFLDSLFKISEQKDYRSLPTQSSQWVIKRVFQNWKSFFASIKDFRQHPEKYSGKPRIPTYSRAKEKEILFTNQDCAIREGKFLKFPKTSQRLNIGKLGYTGGKLRQVRVIPKYGQYVVELIFACPFETKMTEKDKYMAIDLGIDNLATIVTTTGSRPVLVKGKHIKSINQYYNKRKAHYLGILRQGKQTKEGQHTSKRLERLHHIRYFKIKDLFHKASYQIVQLAARQNIGTIIIGHNPGWKQEANIGKRNNQSFCHLPHHMLTCMIQYKAAQQGIDVQFTEEAYTSKASFLDRDPLPSYEQGITQRFSGKRIKRGLYKSRKGLINADVNGAANILRKVVPAASAHGIEGLDGSQSVNVRAPLVLRIW

SEQ ID NO: 7474 - protein, 454 aa, Mycobacterium sp.
MAEHAPDDFVVPQRLWRATVEDTVDKIRAWQQAVMASEVRPKIYARTDDDNGERKRMLVLAKTGRWRQDAWLSRQCRKAFAGKSPRPRRSGRIVADNCSYDVQRDAQGRVWLAVMTPTRGDRLRLNLGPLPEELVPTSTIEISRDGRESWQVIGAYPDKRVCSIRPRHKNLTPSDGIDAGVSEVFTTTDGRRYGAGQYQTIAKRAERDRARGKARNKLRAVRNRHLARAAAAAEAGDGATARAAKAKARKIERHNLGHKKLSAQRSHDRAVTKDTVYQAVHDLVDSTAHIVAEDLSGLRGKSKFGRTASRVYAAWQRSFLADALASVPSRRGSAVTLVNPAYTSQQVHPCGHLGVRRGKNVYCQTAGCPQQGIVFDTEINAARVIRDRATDPQITRYTSKHEVKRILVQRAGTVENCPTTTQATTVMDGGCERNNLPPKRTLPRSKEQRLWTSV

SEQ ID NO: 7475 - protein, 376 aa, Caldalkalibacillus sp.
LWAGDADMANKAYKFRLYPTQEQEQLLAKTFGCVRFVYNKMLEERIQIYEKFKDDKEALKQHKFPTPAKYKRDFPWLKEVDSLALANAQLNLQKAFTNFFSGRAGFPKFKSRKAKQSYTTNVVNGNIKLADGYIQLPKLKWVKLKQHRQIPVHHIIKACTITKTKTGKYFISILTEYEHQPVPKEIENVVGLDFSMNTLYVDSEGKRANYPRFYRQALEKLARAQRVLSRRRKGSNRWHKQRLKVAQLHEKIANQRQDFLHKTSRQLANRYDAVMIEDLNMKGMSQALHFGQSVHDNGWGLFTTFLQYKLEEQGKKLIKIDKWFPSSKTCSCCGRVKVSLSLSERLFRCECGFVADRDTNAAINIKKEGLKQLGIA

SEQ ID NO: 7476 - protein, 418 aa, unknown
  TnpB Polypeptide
MTELAKTLEPTLVDPTVQKRQKLRETRDAYQQAFQVAFSTGCDTQSAANDVVVEYDLSGYAKNALKKYVPQLYNSYDADELHDDHPVRFTNEGLQFDHQPQNAIKWYVKIPHHEDYHLWIPARANPDQREWIEAVYADDAEMGESRLFERDGTWYLHVTATRDVEDQSSASADERTATGVDIGEASLVTVCHRDERVSPVRPRLWADDGKAVRRLRKTYFTATRRLQKRNSERIVESYGESLWDQIDDVFHRVTREVVAYAESVENPVLVLEDLTDIRENMDYGEYMNRRLHGWGFAKRHAQIRYKAAEKGIPVETVNPRNTSKACHACGEHGSRPRQATFRCSNESCWVGEYQADVNGAINIADRYRSGESHRRGDRSSRQKAGDDDSATDGASLTGPQDSQADADTQQTTPGTYAS

SEQ ID NO: 7477 - protein, 387 aa, unknown
  TnpB Polypeptide
MVVMMDKIMKAYVFRMYPNESQVNLIEKSFGCSRFIYNHFLGLNDKYINKYDYIKQLPLLSKNNIWLKEVDSCLLRCSIFDLEDAYKRYNTNLGRKPKFKSKIKSRQSYRTNNIRSSYKGKDYNTIEIDLENRLIKLPKLKYVNIRGYRNLKSINGRVINATIYKEAGKYYVSVCLEEFVFIPKVTPTKIVGIDLGLKDLVITSNGEYFGNQKYIKKYEKKIKGLNRWLARAKAGSKNRYKIKKKLQTVYRKLKTSRKYLLHSISKELTDNNDIIVSESLKVKNMVQNRHLSKSIMDASWSELIRQLKYKCSWKNKRFYQVDTYYPSSQICSRCGYKESRVKDLSVRVWECPNCTNMNNRDLNASINIMFEGVKIYMERELAELQVN

SEQ ID NO: 7478 - protein, 370 aa, Halomonas sp.
MKTERAFKYRFYPTPEQATLLARTFGCVRYVWNAVLRYRTDAFYERQKKVGYNDASAFLTQLKKQPDTAFLAEVSSVPLQQCLRHQQTAFKHFFAKRARYPNFKSKKHRQSATFASSAFSYRDGQITLAKCKEPLNIRWSRELPATPSTVTVSQDAAGRYFISCLCQVDTEALPITPQMAGIDLGLKDLFVTSDGKRVNNPRHTARYAQKLAKAQRQLSRKQKGSNNRAKARLKVARCHAKIADTRLDHLHKLTTQLINENQVIAAESLAVKNMVKNRHLSKAISDVGWGELVRQLEYKATWAGRQFVQIDRWYPSSKRCHGCGYVMASLLLNVRTWDCPSCGTQGIDRDVNAASNILQAGTALLAGGER

SEQ ID NO: 7479 - protein, 179 aa, Halomonas sp.
LPTAVIDRQSFHQNQRTRGVADQRRDATHKLSTQLIHENQVIVAESLQIKNLLKNHSLAKAISDVGWHQLTQQLAYKAERCGRDVVQIDKWYLHSKRCFHCCHITGKMLRNVCTWDYPSCATQGNDRDVNAACNILQAGKAFLAGAGKLRQHEKTTVGLTGILARCVCASSPSNFNVGN

SEQ ID NO: 7480 - protein, 443 aa, Halomonas sp.
MLIIRSDTLTLQVTSADQRQALANTLALYRRLVRDLMTVAYTHWPTVGASQGNQAVKIIEALIHPTAKRPQVRYTYFANRYYKFPSYLRRVAIMDAVGQVRSFVTRFDQWRCGQRKHPHAKPPRLTSSTKTFPSLYGSQCAKINADATHAFIKVRWQNDWIWMRFGLKGTCRFRGKGKAKSPLLTTNGRQWQLSLPEQFEPPKPVKGAPDRVLAVDVGINTAATWAVVDTQGTVHARGFISRTDKDREYRLMARIRQTAKKHTRHGSRLPPGFCRRDHQRLSHLADNQAHQISRQLVNLAVDHHCQAIAVENLKGWRPKAGQKRTPMKARFHRWFHRQLVARIGSKAVEVGLRCVAVYARGTSRHAFDGSGQVKRDKSNYSQCTFRSGKRYHADLNAAYNIAARGHVVFQGGQRKPTARVRSQMSTHIPRTPVTLSTLWPQSA

SEQ ID NO: 7481 - protein, 390 aa, Halomonas sp.
VLTATKVRIYPTPEQADFLNQQFGAVRFTYNKALHIISSQYKRHGTKLRAKKDLKPLLAVAKKSRNYHWLKAFDSIALQQACINLDRAFQNFFNPQLKARYPRFKRKHGKQSSYHCTSVKAGDDWIKVPKLTPIKARIHREIAGTLKSITLTRTPTGKYFASLLVEDGVEAAAPLQTVETVLGVDMGLTHLAIDSTGRKVANPRFLKLAPANLRRKQKALSRCQKGSKRRAKARLMLAKAHERLANARADFQHKLSRQLIDDNQAVVVETLSVKNMLKNRKLAKHIADASWSRLIEKLAYKAKQQGKHLVRIDQWFASSKTCAGCGHKVEQMPLSVRTWDCPSCGTKAIDRDVNAAITIRQQGILKLKAEGLSVSAHRGLCKTGHAPAAA

SEQ ID NO: 7482 - protein, 460 aa, Halomonas sp.
VPQSYFPVCWVARCKLQRTRIAILGLAKIRVNPRPIEGGDTSGQRASAAGVVVSYLSGTIHSYSQRVEAVVLTATKVRIYPTPEQADFLNQQFGAVRFTYNKALHIISSQYKRHGTKLRAKKDLKPLLAVAKKSRNYHWLKAFDSIALQQACINLDRAFQNFFNPQLKARYPRFKRKHGKQSSYHCTSVKAGNDWIKVPKLTPIKARIHREIAGTLKSITLTRTPTGKYFASLLVEDGVEAAAPLQTVETVLGVDMGLTHLAIDSTGRKVANPRFLKLASANLRRKQKALSRCQKGSKRRTKARLMLAKAHERLANVRADFQHKLSRQLIDDNQAVVVETLSVKNMLKNRKLAKHIADASWSRLIEKLAYKAKQQGKHLVRIDQWFASSKTCAGCGHKVEQMPLSVRTWDCPSCGTKAIDRDVNAAITIRQQGILKLKAEGLSVSAHRGLCKTGHAPAAA

SEQ ID NO: 7483 - protein, 385 aa, Betaproteobacteria sp.
LRPTARQHVALAACVDAHRELYNAALQERRDAWSHASRTRIRYGDQSAQLTEMRAARPDQAVWSFSSQQATLRRLNKAFAGFFGRVKVGQTPGYPRFKGKARFDNVEWPKDGDGARWLPERSRVYLQGIGQVKADLHRQVAGRVKTIQIKRQGRRWMLVLSCDDVPTKPLPVTGRQAGIDVGIVSFATTSDGERIDNPRWARAASERLAAAQQRLQRARRGGRNRAAKRETVAARYRKIANQRKDFHHKQARELATRYDLIVVEDLTITNMLRRAKPVADPANPGHYLPNGARAKSGLNRSISDAGWGQFVLILRAKAEEAGRAWIEVDPRHTSDRCEACGHVARANRVTQAEFACQRCAHRTQADEHAARNILRAGLAHHAHAA

SEQ ID NO: 7484 - protein, 228 aa, unknown
  TnpB Polypeptide
MFQVPVKEVVQDASGIKERIAAERNVCGVQFGTKDVFAVASVLTADEKEAAVRYFKGGNRYTDQCRRVVEHIDKSHASHGENGNGPVNQRYWMQIKHLNSHYAHQVSREIVEYCKAHEVGIIAFPKYAESYEKHVKKASGNYSALHLSTRIREYLTYKAWQSGILVIDIHAKGLHENCAVCGANIVSVDKKTQECTCEAGHKTNRYLNIARNTAKRCLTQFQRTENIR

SEQ ID NO: 7485 - protein, 405 aa, unknown
  TnpB Polypeptide
MIVEQQIIRQSHQKYKTIDEMCSHSKDLYNYANYLIRQSFIINDEYISYRKMNFDLKTHELYKLCMSQPANCLLRRLDKVWKSYFESIKDWSKNPSKYLGKPKIPKYLKKDGRYCWEIPNNTCSIKDGYIVFKMKKLNDIKWRTRLAGKLIQVRFVPNGCNYIMEVVVEEKQKETPQLNQNNIASIDLGVDNFVTLTNNIGLNPIIINGKIIKSINQFYNKRRAELQSKLPKDIFWSKQLDSITFKRFNRIKNFIHHASKFIVDYCVKNNIGNLVCGLNKEWKQNSKMSKKTNQNFVGIPYNMLIKQLEYKCKQNGIIFQTTEESYTSGTSFMDGEIPVKENYDKSRRIRRGLFKWSDGYINADVNGSLQIMKKVFPNAFADGIVVYLIPIRINLINSNKSRNKM

SEQ ID NO: 7486 - protein, 423 aa, Dolichospermum sp.
MYGCQQVLVKSDKSTIAILEYVCTQAKRLINCGVYYSRQMYFKTGCIPNRADLHKQLGTYQKNIHYQALYSDTSQQILASVSESFKSYIGLIKGVKKGEVSQKPKLPNYCKSVMTVATFTSRSLKLIDGMIRFPLGTKVKAWFNMDCFYLPMPSNLDFKSIREVHILPRNRQFYAEFVYQVNEVRSDVDKKNVLGIDHGLNNWLTCVSSLGTSFIVDGLHLKSLNQWYNKSVAKLKSDKPQGFWTNRLTAITEKRNRQMRNAVNKAARIVVNHCIDNKIGTIVFGWNKGQKDGIDLGAKNNQKFVQIPTAKLKDRIAQLCKQYGIDFIETEESYTSQSSFLSGDNMPKFGEKPEGWKASGKRVSRGVYKTSDGFKINADANGAANILRKVVVMLGIDLSGISRGCLSQPKKVRLWTLQKSPVF

SEQ ID NO: 7487 - protein, 392 aa, Sulfurovum sp.
MGKDQHNEKKIIASKKIRFYPENSDLYHQALTLYRRAYNLAVDCYINNKYLDENDKFTNLRPQIKEQCKEEQKEKESIYNSIIVDNAVLQALTTFKAVVSKNKKLKGSKSGFSSLKFKSRKGSKHSFSMDRMPKGLNPATRVLGKIYLTESIPKEAINKKCIITYDKGRWFIQVQQHIEVNAEIQGDVKCIAIDPGVRTFATCYSDKEVIVAGDDFAKEKLFPLMQSVDRLLSKRKLIENTKKSEEQWYQEKIRGIDKKIDRLKSKKDDLLLDLHNRLAYELVQKYDVIFLPTFETQKMSKKQGRRIRRRTTREMLSLGHYDFKLRIKWYAKKYGKHVVDCNESYTSKTRSWSGEIDDKLGGKKIIKDNKFIVDRDVNGARGILLKQLSKVA

SEQ ID NO: 7488 - protein, 425 aa, unknown
  TnpB Polypeptide
VTKGILFGTNSTQVDIAAGTVYASQESTEQGVQREMARKPDDKSVRNTTIKVRLDPTPAQAELFEKTFGCCRYLWNQMLADEERFYNETNVHFIPTPAKYKAGAPFLKEVDSGALATVHQNLRMAFQHFFDNPSAYRHPTFKTKKRSKNSYTVYCQYYAAGKGSNIYLTENGIRLPKVGVVKARLYRKPLHWWMLKTATVTKTPSGKYFCSLMFAYAAKPVAPVQPTPKTTLGLNYSLSHFYVDSNGHTPDPPHWLAQSQKKLSAMQQKLCRMQRGSHNYEQQLRKIQRLHEHIANQRKDFVHKESRRIANVWDAVCVKETDLAAMARTIKLGNVLDAGYGKFRICLQYKLEQQGKPYIVVDKYFPSAKACNRCGAVHDALAPDAKRWRCPACGAVHDRGRNAAENLRDQGLAQYYGTEGQRISA

SEQ ID NO: 7489 - protein, 433 aa, Thauera sp.
MSEGTGFHRAYRYRLRSNRKAEAVLRRWAGCSRKVWNLALAEQQARRERGEKYAGFAGMCQWVTTWRKATGTAYLAEVPVHVLQNVVRALDGAFQRFFRKEGGYPKFKRRGDPIGLRETDVKCFSVDAANGRIRFPKVGWLRYRASRPIEGRAITATLRAEADGWYVSIACAFEPKALERSPKACGIDRGVANFAAFDTGQRIAPLDAHKRAVQCLRRYQRAVARKLEAAKVAAGIPKGKPFPKGFRLQPSNRLRKAQARVAKIHQGIARQRADFLHKLSTQIAREHALVCLEDLKVRSMSASAAGTQEAPGKRVRQKAGLNRSILDQGWSMFKDQLAYKLEWRDGVLVLVHPAYTSQRCHACAHTHADNRKGEVFRCRSCGHTDHADVNAAKNILAAGHAVLAGDGHALVEGQVQSGRPVKREPTEGLRRAA

SEQ ID NO: 7490 - protein, 191 aa, Methylobacterium sp.
MPQGLEPAAQVKARLARQLRAVANTRDQHLHRASARLVREHPLVVLEDLRIRNMTRSAAGTAEEPGTNVAQKRGLNRSILDAGWGKLVQFVRYKAERAGGGLICVDSRGTSQECRRCKAVAAKPLSLRRHVCPCGLDEHRDVNSAGVIRDRGLAVKAASEGVSPSGTPTWAVGPCVVPGRSSPPEGSAGER

SEQ ID NO: 7491 - protein, 231 aa, unknown
  TnpB Polypeptide
MIKGYKYRLDPTPEQIVQMEKTFGCCRYVYNWALDLKIKTYQGEKRSMSAVDLCKQLTLLKKDENHLWLNEVSNECLQQSIRCMDSAFTKFFREHTGFPKFKSKHRNKNVFKNVNSVKFDFENNRVKIPIIGWIKFFANRSFEGKIGTITISKSSTGKFYASVLVDDGIPNLDKFIIDSDTTVGIDVGIKDYAVLSNGQVFGNPKHLESAQKRLGCLQRRMSRKKGRKQPI

SEQ ID NO: 7492 - protein, 510 aa, Acidimicrobiaceae sp.
  misc_feature (324)..(325): Xaa can be any naturally occurring amino acid
LAPWWAENGSSTYNDATQRLAKAIGNWRKGRAKFPTFKSKGQGGSVRFMGPAVRLVDSHHARISRIGEVKTYESTRKLFRHLERGTGRIVAATVTQRCGKWQVSFTVEVTRQVPATRAPGKIVGVDVGIMTLYTGATADGVHVLDVDNPRHFVRAQKKLARAQRIAARRQGPGPGKVPSKRWRKANGRVQKVHAGVANARKNLIHETTSMLAKSYDVIVIENLNIKGMVKNPSLAKHIADAGWGEFGRQLEYKTAWYGSTLVRVDTFYPSSKTCSQCQTVKATLSLEMRMFHCEACGLVIDRDLNAAINLARKGLPGTSSGTGXXSRAAETCGNGTPRRSVNRPVTRRRRCRRCFGLELGLVCDCRTPGGPEFAEGGPTKSVRLRRGSWRHHPGRATIRRRRARMLMHPFTSRPGSRVKLEQRPVPGTGPRSLGSATSPASATDSPLDGPIGGGTADGEMAISSGSRDPRGMETRQFWNGYAALSTSREFRLNYWFQVGSPKQRTTLGQR

SEQ ID NO: 7493 - protein, 372 aa, Clostridioides sp.
VIAVKKAYKFRMYPNKKQQELINKTFGCCRFVYNKYLAKRIDVYKNDKETFTYKQCSSDLTNLKKELKWLKEPDKFSLQNALKDLDNAYKKFFKEKSGFPKFKSKKINRFSYKTNFTNGNIMYFSQHIKLPKLGMVKIRDKQVPQGRILNATISKEPSGRYYVSLCCTDVDIEAFENTNNHIGLDLGIKEFCISSCGEFIENPKYLKKSLNKLAKLQRELSRKTIGSLNRNKARLKVARLQEHIANQRNDFLQKLSTKLIKENDIICIEDLQVKNMIRNRKLSRLISDVSWSEFIRQLEYKANWHGRQIVKVGKFFASSQICNKCGYKNEEVKNLNIREWICPSCNETHDRDINASINILKEGLRLITIQNK

SEQ ID NO: 7494 - protein, 372 aa, Clostridioides sp.
VIAVKKAYKFRMYPNKKQQELINKTFGCCRFVYNKYLAKRIDVYKNNKETFTYKQCSSDLTNLKKELKWLKEPDKFSLQNALKDLDNAYEKFFKKKAGFPKFKSKKINRFSYKTNFTNGNIMYFSQHIKLPKLGMVKIRDKQVPKGRILNATISKEPSGRYYVSLCCTDVDIEAFENTNNHIGLDLGIKEFCISSCGEFIENPKYLKKSLNKLAKLQRELSRKTIGSLNRNKARLKVARLQEHIANQRKDFLQKLSTKLIKENDIICIEDLQVKNMIKNHKLSRSISDVSWSEFIRQLEYKANWYGRQIVKVGKFFASSQICNKCGYKNEEVKNLNIREWICPSCNETHDRDINASINILKEGLRLITIQNK

SEQ ID NO: 7495 - protein, 418 aa, Ktedonobacteraceae sp.
MAITTYKYRIYPKKATADKLQWVLDRCRELYNAALSERKDAWRMAHTSIGYYEQKRDLVEIKEIRPEYQEIASHVLQDVIGRIKRAFDNFFRRVKNGEKPGYPRFKGYKWYDSFAYPDKAGWKLDTRTRPPNKRGMVKANLHLTKIGTMKLHLHRDLAGTIKTLTIKREGEHWYACFSCEIGKPKPLPISYEDVGIDLGVTHFAALSNNELIEYPRYYRCAEKTLKTLQVALSRKKRGSHRRARAVKRVARAHRTIRNQRRDFHHKASRTLVNRYQVIVFEDLQTKNLTRAPKPKQDEATGQYLPNGAAAKAGLNKSILDAGWATFTEMVSVKAASAGRTVIFVNPFKTSQKCSGCGKEGPHKDLAERVHRCPHCGLVLDRDTNAAINILRDGHDHLSGRDAPNARGVEAPVRPGHVH

SEQ ID NO: 7496 - protein, 375 aa, unknown
  TnpB Polypeptide
MKLSVQLKLQPTSEQADALQRTLERANEACNSISRVAWETKTFRQFAVHKLVYQDTRETFGLTAQVVVRCIAKVANAYKLDRTVQRTFSLHGAIAYDDRILSFALPKSNVSIWTLDGRQAIPFVCGDRQRQLLLLQRGETDLALVDGAWYLFAVCEVETPAPIDVEGVLGIDLGVTNISTDSTGEIHSGKGIKNVRYRHRRLRQTLQRLGTKGSRRRLHRLAGQERRFATWTNHTISKRIVAKAERTKRAIALEDLSHIRTRVRARRSQRAILHSWAFFQLRAFIAYKAALAGVPVYLVDPRNTSRTCPACGCIDKANRKTQASFVCISCGFAGHADVIAAGNIARRAPVSVPYCSDADLRVGSARAKSTRCSGG

SEQ ID NO: 7497 - protein, 410 aa, unknown
  TnpB Polypeptide
MLRAIKIRLYPNETQKSYISNLMGSYRKVYNLSLNYKIEMYKLSGETANIKSIGNEFHNNWTKSEEFFYLAEHNTKVMKQAIINMLDSYKRFFVNGNGFPKFKSKNDNQQSCRFPSEAISSKNDYSTFKLTLIKQLKNIKFKCSDEYAAYLNKHKATIKSATLTKNKSGNYFLSILVDGDLMKVLPKPINDFIGIDLGIKTFIVDSKGNEYENIKIKRNNEKKLSKLNRELSRKEKGSKNKDKARVKLAKFHEKLNNKKQQYLHNISNKLLDENQVIAMEDLNVSGMMQNHHLAKAIQELSLYDFKSKMLYKAEWYGRYIIEVGRYFASSQLCHKCGYKNVDLTLKDREWICPKCGTKHNRDHNAAINIENEGIKIFNNKIPTRCGKLTPLETSDYAVDELGNRDLCNIT

SEQ ID NO: 7498 - protein, 232 aa, Hyella sp.
LIRRADGYYCQFCISIEVKENVEPTSKAIGLDVGLKYFYADSNGHTEANPRFYRQGEKKLNKLNRRKSKKFKKGQKQSNNYHKARNRYARVNLRISRQREEHAKRLARTVCTSNDCIVYEDLQVKNLVRNSKLSKSISDAGWTQFRRWVEYFGWKMGKITIAVPPQYTSQDCPSCGKRVKKFLSTRTHVCECGYTKDRDIAASINILKKGLCTAGHVGRDSFVRNPEVLWRD

SEQ ID NO: 7499 - protein, 486 aa, Bacillus sp.
MSKKEGNQAITYTGVIRNPSGNESMILDELMRKFQSAKRFMRERLFDGLDRKKAVAKAKPLFLNNSRYMRDAFLEAEASISSQKKLLPMYVEQYKSAIQKIEEQIEKIQKSTKSNKSDLILYKQSRIQKLTKKMNYYHYHIENGSVPKVVDGTKKRLTLLNKHKITKQEWIDSRTNALFSRGEASKGGNENIKLRYAEERSVEMKILNPLSSKKNDRLCFEVQFSEKHIMTILSYLSSEQAYSVRILRENGKYYVHLTFNQGITSSNDFSNGCAGIDINPDNLAVTIVHPNGNFCKSKVFWMNDLNSVRANKRNGMIGTTVASVIEWVKSNGIEIIAIEDLYFKNDLSKNTKFNRMSSNFVYRKIITTLISKCVKEEISLAQVPAYYSSLIGRVKYQKTYGLSIHQSAALVLARRAMGYKEKIPHQMMSVLFAKEAKKGHQVSDLFKHWKKVQAWLSALKEMAFQNHKHVKQWYIDDFIDYAVIQE

SEQ ID NO: 7500 - protein, 373 aa, unknown
  TnpB Polypeptide
MSKAPQTNIRVLRERVKDKHCTFLNGLSKEVNLVWNYCNELSSKHTERTGGFMSSYTMDQYTAGATKEGLNIPASTVQAISSEYCTRRKQFKKLRLAWRKSGGAKRSLGWIPFKKDAIVYRNGQIFFQKKPISIFKSYDLRGKIIKCGSFSQDARGRWYINLTVEVQIATINTSTKAVGIDLGLKTTAVTSDGGQLISRRYREFESKLGMAQRANKAKLAKTISAKMKNRRSNDQHQFSRLLANEYGAIFVGDISSSKLIKTKMAKSVYDAGWSQFKTMLEYKCHEAGVVFLEVIESNTTQTCSSCGQKPPSRPKGIAGLGIRQWACECCGVIHDRDINASKNILRIGLDTLAVGASQLNQGRFEPLCFSYGE

SEQ ID NO: 7501 - protein, 364 aa, unknown
  TnpB Polypeptide
MKLSMKLKLITTETQKQALLNTMQRFNSACDYISDIAFENKAFGQIKLHHLTYYEIRKQFGLASQMAVRAIGKVVESYKVDRIHKHTFKPYGAIVYDSRILKFKFPDKVSISTLEGRQEIPFIFKNYRDIELRRASGQADLVYHDGIFYLVVCVDVPEPPEDDTKEFLGVDMGIINIATDNTGTQYAGKKLNSVCNRYYKLRKKLQKKRTKSAKRLLAKRKRKERRFAKDVNHVISKQLVDKAKALGLGIALENLQGIRDRITVKKAFRRRHASWSFFDLRTKIAYKAQLAGVKVVFVDPHNTSRMCSVCGYISKKNRPNQSTFLCQVCGYSCNADENASVNIAVRARATVNLPDVACDETKAA

SEQ ID NO: 7502 - protein, 317 aa, Paenibacillus sp.
LLAYDFRVLLSLPQYKKEFEWLKEVDSLALANAQLNLDKAYKNFFRDKTIGFPSFKNKKKNNHSYTTNNQNGTISVEDGYLKLPKLKNRIKIKLHRQLVGLIKSCTISQTLSGKYYVSLLVETDIQPMPKLDSKIGVDLGLKSFAITSDGEIIDNPKHLRKSEKRLAKLQKDLSRKKKGSTNRNKARMKVAILHEKIANQRQDFLHKKSSKMISENQVIVLEDLRVKNMMQNHKLAKAISEVSWSMFRSMLEYKAAWFGRDLIIAPKNYASSQLCSCCGYKNADVKNLGLRQWTCPSCNVHHDRDLNAAKNLLKLAL

SEQ ID NO: 7503 - protein, 361 aa, Paenibacillus sp.
VREITQAMTLKIKLNPTRKDIQLLKSSSLNYIQTINFLVSEMVTEQKATKKTSKDVIAPLNSAVKNQAIRDAKSVFQRAKKTKFSIVPILKKPVIIWNNQNFTVTPNSICMPFVVDGRSKKMSISALVQQRDLDYLTQAVKVGTLRVTCKGAKWIAQIAIEVPTQFSSSTKIMGVDLGIKVPAVCVTDENEVKFCGNGRQNKYVRRYQNSRRRELGKAKKINAIRKSQDKEQRYMKDQDHKISRAIVDFAIDKKVGIIRLEQLVNIRKQTRKSRKNNHSLSNWSFYRLGQYIEYKANLVGIQVEYVNPSYTSQRCPDCGHLNHANDRDYHCISCGSNYHRDLVGAKNIIFAPVLDGNSQSA

SEQ ID NO: 7504 - protein, 464 aa, unknown
  TnpB Polypeptide
MSAIVNKKVYANEKNAQIARTRQETRKRRSQQTCKVYELKVDMDKLNLQQREALDKVFLEAKWIYNAALNTDKPTSYIPGKTVPVMNREGQMEDRKICYLGSQLKQSIVSSISRNLSSLKALKEKGHKVGSLKFARKVQSIDLKQYKTTYKINFLEKKASIQKIPGSFKVYGLHQIPQDAELANAKLVKKASGFFIKITAYTSQVDVDDFIPNTAIGIDMGIATHITLSTGEKISTTIEVPQRVKRLQRKLDRQYRQAKKRKNQEGLSYIPLSHNYFITKKKLNKEYDKLNNKKDNLAKQIVSLLMKNEYVFFQDESLSAWKMRFGRKLHHSVLGRVKSLLKAHPRAFMVDKWSPTTQWCSSCDKNTKHSLKEREYVCKYCGATEDRDTHAAKNMIDFGLSEHNIPMEHRELTPVLIGQNSYLCQLDYVFYEHSERGMDLQEPAAMQGTVSSMKQETNSSLVSW

SEQ ID NO: 7505 - protein, 251 aa, Clostridioides sp.
MYFSQHIKLPKLGMVKIRDKQVPKGRILNATISKEPSGRYYVSLCCTDVDIEVFENTNNQIGLDLGIKEFCISSCGDFIENPKYLKKSLNKLAKLQRELSRKTIGSLNRNKARLKVAGLQEHIANQRNDFLQKLSTKLIKENDIICIEDLQVKNMIRNHKLSRLISDVSWSEFIRQLEYKANWYGRQIVKVGKFFASSQICNKCGYKNEEVKNLNIREWICPSCNETHDRDINASMNILKEGLRLITIQNK

SEQ ID NO: 7506 - protein, 403 aa, unknown
  TnpB Polypeptide
MNLTLKLKLACSPGASGILKETIHQSTSAFNRATKQAFEAKTINGVQIHKMRYHAERALTQLPAQLVCATLAKATEALASVRALQKKRAARDVAAGRNPARAYRCPQSERQAVRYDGKRASMVRLKEGWATLASVSGRQEVKFKLPGNFNRYADWKVCSSELVWAKQDQLFLHVVLEGDGKPFVPSGMVVGIDLGICRPAVMSTADGSFNRFLGKKEWRAIERRRHEYRRILQRKGTKPARRKLKALSGKVNRFRGDCDHVLSRQVVDSVPTGTTLVLENLRDIRERCGRGKGKQQNGRMHRWSFARLFGFIEYKARLAGDRVARVDPRNTSRRCSRCGDTRKRNRKSQGQFLCHECLFPLNADLNGARNIARKFASSGMPDDDGCCQPAQRRLTLERQAAPL

SEQ ID NO: 7507 - protein, 284 aa, Shigella sp.
  misc_feature (284)..(284): Xaa can be any naturally occurring amino acid
VKRLQAFKFQLRPGGQQEREMRRFAGACRFVFNRALARQNENHEAGNKYIPYGKMASWLVEWKNATETQWLKDAPSQPLQQSLKDLERAYKNFFQNRAAFPRFKKRGQNDVFRYPQGVKLDQENSRIFLPKLGWMRYRNSRQVTGVVKNVTVSQSCGKWYISIQTESEVSTPVHPSASMVGLDAGVAKLATLSDGTVFEPVNSFQKNQKTLARLQRQLSRKVKFSNNWQKQKRKIQRLHSCIANIRRDYLHKVTTTVSKNHAMIVIEDLKVSNMSKSAAGTVSX

SEQ ID NO: 7508 - protein, 369 aa, Nonomuraea sp.
MAQIVKRAYKYRFCPTRAQAEELARTFGCVRLVYNKALEERSRAYTLHGRRVSYVESSAALTQWKKSPELAFLGEVSSVPLQQALRHLQAAFASFFARRARYPTFKSRKKSRASAEYTRSAFRFRDGQLTLARMNAPLDIVWSRPLPQGAQPSTVTVSKDAAGRWFVSILVEEKIAPLPPVERSVGVDAGLTALATLSTGEKIANLTCERADRRKLARAQRVVARKEKGSNNRAKARLRVAKVYARIADRRRDLLHKVTTRLVRENQVIAVEDLTVRNMVKNRSPARAISDAAWRDLRMMLEYKAAWYGRTLVAVDRWFPSSQLCSTCGTMHDKMPLNIREWTCPACGEVHDRDVNAARNVLAAGLAES

SEQ ID NO: 7509 - protein, 374 aa, unknown
  TnpB Polypeptide
MRGGVTSLNKTFKIRIYPNKEQIRVINGTLNSTRYLYNYMLNLKDKLYKFFGISLSYNHSSRVMTELKKHKTWLKLVDSTALQQTLRDLDSAYQNFFNGRGKYPKFKSKKRSKNSYRTVSSTISLNTDNRTIKIPKVGCVRFRDKSKFDGLTKINNITISKTSSGKYYASISAEVNIKYSEKTNQNIGIDLGLKDFAILSNGDKVDNTRYFVNAQKKLARMQRKLSKKIFGSNKYQKYKIKVARFHEKIKNQRLDFLHKLSTNLVKDYDIICVETLKVKNMVKNHRLAKSFQDVSLSEFIRMLEYKCLWYGKTLSKIDRFYPSSQICSSCGYKNKDVKNLSIREWICPECGTYHDRDINSAINILNEGLRLLEI

SEQ ID NO: 7510 - protein, 344 aa, unknown
  TnpB Polypeptide
MNKSFKVRVYPTKEQQVLLEKTFGANRFVYNYFLNLKSKLYEFYKINLSYNNCSKALTELKRQKPWLRHVDSVSLQQTLRDLDSAYKRFYGGSGYPKFKRKDGKNSYRTSSNTKIDNSFITIPKIGLLRNSDSVGRYYASISADVYISCFERTNQNVGIDLGIEDFAILSGGEKIKNPRVLKHLEKKYRKLAKSLSRKVCNSSNYHKSKLKLARFHKHVANIRKVFLHKLSTNIVKLYDIICIENLNISGLMKNHKLSKSFQDVSLSEFIRQLEYKARWYGKTISKVDRFYPSSQLCSNCGYKNKDVKNLNIREWSCPECGTYHDRDINSAINILNEGLRILNS

SEQ ID NO: 7511 - protein, 263 aa, unknown
  TnpB Polypeptide
MGDSRKENPKSKNCFARIKNSLFSWNGKILRLTVIPRERYLVFDLSNTWFIERTEGWKLREIILKENELILMFSKEKEEIPSRGIIAWDSNKYSLDGFGDIGYVKIDIKQLYTIHITYHNIRRKLQQLLRKTPKTARKLLKKYNERERNRVKDFINKITTQISKKFGEYVHCFEKLQKQGMFDWSKKHNRDISVINWRTIKQKLEYKVIKMREINPKYSTKTCSRCGSRNTTIKNGEVICRDCGLRIDRQLNASINLFLRAKN

SEQ ID NO: 7512 - protein, 378 aa, Bacillus sp.
MEVNQMIINKAFKFRIYPNQAQAILINKTIGCSRFVFNHFLSLWDHAYKETGKGLTYGTCSAKLPAMKKEFIWLKEVDSIAIQSSVRNLADAYTRFFKKQNSAPRFKSKKNNVQSYTTKQTNENIAIVGNKIKLPKLGLVRFAKSREVEGRIVNATVRRNPSGKYFVSLLVETEVQEIPKTQSYIGMDVGLKDFAILSDGTTYKNPKFFRSLEEKLAKAQRVLSRRIKGSSRWNKQRVKVARIHEHMTNARKDYLDKVSTEIIKNHDVIGIEDLQVLNMLKNHKLAKAISEVSWSQFRSMLEYKAKWYGKQVIVVSKTFASSQLCSRCGYQNKDVKNLNLRKWDCPSCRTHHDRDINASINLKNEAIRLLTARTAEIA

SEQ ID NO: 7513 - protein, 444 aa, Natronococcus sp.
MKRTNQFDVRPRSEKEREAFMRWLDASASLWNETNYARRQAFLSDDDKNVWDADTGKLEGEYKGVLSSSVAQQVIRKNSEAWRSFFDLNGKHHAGKLDERPSPPGYWGNEEDGRVLRTYVRNDQYTIEYGERSRLEVPIGSDLKDELGLNRNQRLRVEVSGNAKWSGEQNRLEIVYDETADSFRAFQPVTIDTSRLESPLADNSAALDVGANNLVACTTTTGSQLLYEGRDLFDQFRETTERIASYQSLLEDQCKTSKRIDRLYRKRTNRRNHAQNTLVRDLAERLHADGVSTLYVGDIKDVLSRHWSPHVNEKTHNFWAYRRFIDRLEDVCEEYGITVTEDSEAWTSQECPECGEREGTIRHEDSLACPCGFEGHADLVASESFLRQQTEVGSMARPVYLKWNNHGWREYHSSPSLVETMANEEYTDQSTASSGNVALEDSDD

SEQ ID NO: 7514 - protein, 319 aa, unknown
  TnpB Polypeptide
MIFRDIMTDLVLTVRCKLKPSDIQAKSIGDTLIAFAGACTWINQNVDPKIKGKIRIQHMVYRDVKNKFELSANLAIRAINRVASNRKTAGENGIKEFKPTSVDYDQRIFQYREADEQVGLTLLNGRERVPLDIGNYQRNLLKGQNPTSATLVKKGSNYYIDIQVKSEAPDPIEPDEVIGVDLGITDLAVTSEGDTYSGSEVKRVRKHYAQVRTDLQRKASKGTRSSRRRCRALLKRLSGKEHRFQKWVNHVISKRIVQRAKETKSAIALEDLSGIRQTSNRRIKSLHTWAFYQLRARSEITCAYTCTPITRNRYEADPV

SEQ ID NO: 7515 - protein, 596 aa, unknown
  TnpB Polypeptide
LKSVHSQVLQDVVKRVDLPYQAFFRRVKNGETPGYPMFKGKGRYDSFTYTQSGFSLKSGKLWLSKIGDIKIKLHRALTGEIKRLNIKKTPTGKWFASFVVEVEPDELLPKTGSSAGIDVGIKSFATLSNGEHIDNPRFFVHEEKALAKAQRKLSKAGKGTPDRAKALKAVRSIHERIANKRNDFIQKVSLKLAKSYDLIVFEDLNIEGMVKNHCLAKHIADASWNKLITTTSYKAEWAGKRVELVNPFNTSQICSGCGQIVKKDLSKRVHRCSFCGLTLDRDHNAAINILRLAFQRIAGRVPALLAGIDYSLCIKMLDAPYFNRGSSHYSSARWLHRRSCWLLMAMTGAEDRWALPDQKSALEWCGERNAEGIRCILDVLGENAKTEVQAARSLEAYISCAKAVEDGGLDASISVKLTDLGALFDETVCQENVRTLARDAASRGVGFEIDMEGQPLVDFTVKTALDCAAKWPLTLALAANFDRTPEDLKALLQRGIRPRLVKGAYLGDVGGFEEVQGRLKGLVEIVLAAERSFSLATCDPVVIGWALQRVPKAGGLLEFSFLKGLSDVTKTELAGRGLSRSTCPSAHTGRRTRPGG

SEQ ID NO: 7516 - protein, 218 aa, Hydrocoleum sp.
  misc_feature (6)..(6): Xaa can be any naturally occurring amino acid
MGQNLXRISKRANNWYISFKYDNEPTQTAKERDVIGVDVGINTLATCSDGTKFANAKAYKQAKKRLTRYQRRVNKKELGSKNRAKAVKRLSKLHKKVADIRADTLHQLTTWLAKNHSTIVIEDLNVSGMLKNHKLASAIADCGFYEFKRQLTYKCEWYGSELVIAPRFYPSSQICSNCGHQQKMPLNLRTYECSNCGFTADRDFNAAVNLENYGMEVA

SEQ ID NO: 7517 - protein, 196 aa, Hydrocoleum sp.
MQSIKTKLKLNNKQKTILAKHAGVARHAYNWGLATCISEYEQTKKRPSAITLHKRLVAEVKSENSWYYEVSKCAPQQALRDLERAFKNFLTIPKHGFPKFKKKGKKDTFYLEGSIKIIKGNYIKLPRIGIVKTYCILPSVPVKNVRISKRANNWYISFKYDNEPTQTAKERDVIGVDVGINTLATCSDGTKFAENI

SEQ ID NO: 7518 - protein, 414 aa, unknown
  TnpB Polypeptide
MKAFKYRIEANRATIKRLQWVLDCARELYNAALTERRAAYETHVKRHPGYYDDETRQRLTRELTVDYYGQKRDLVDIKELRPEYQEIASHVLQDVILRVKHTFDRLFERMKNGEKPGYPRFKGRNQYHSFTYPGHAGWKFTQGAGKSKALLSLSNIGAVKVKMHREMEGKIKTLTVKRDGEHWYCIFTCEVEAVPLAVSYEDVGIDLGVTHFAALSNGEFIDHPRHFKHAEKKLASLQQAVSRKKKGSHRRARAVKILAKQHRKIRNQRKDFHHKASRTLVDRYQVIVFEDLQTSSLTATPKPKQDEKGTYLPNGAAAKAGLNKSILDAGWSTFTQMVVVKAASAGRTVVFVNPSKTSQTCPNCGTIRKKTLDERWHSCACGCELDRDTASAKVILDLGHKALPGGTRPTSATA

SEQ ID NO: 7519 - protein, 346 aa, unknown
  TnpB Polypeptide
MRCYSLYSVKIKHYNRILKETVSFYRKATDFFLQVCLKEWDILSAKTAHQKLLYMEQLCHQTKKNPNVTYKTFDQKFYKFPSYLRRAAITEAIGKVSSYKSNLENWDKTDPTIRGRKPSLPKAGLIYPCLYRDNMYQQTGEYTARIKVYVCNTWDWIDIRLRKSDVDYIAHHCSNRKQCAPTLQKRGHQWFLDFPFEETVTLNNTSIYEQTILAVDLGLNSSATIAVMKADGTILGRHFLRLSKEYDSLTHAVNRIKKAQQYGNCKIPRLWSKANGINTHIATRTATFIMDVANQYNANTIVFEHLDTTGKKKGSKKQKLHLWKSQYVQNIVTDKAHRFGMRVSHI

SEQ ID NO: 7520 - protein, 418 aa, unknown
  TnpB Polypeptide
MVNLVTTRTITATLTNDREGVVYDLDSLARSGSKIWNVTRWTISRIWDQTGTIPDEGPLKSYMKNQACWKDLNAQSSQAIVEELSSAFQSWFEQDDPDANPPGYRKDGDERPRSTITFKEDGFKLDTKHQQVRLSKGSSLKDGWSDFILCEYDTGPDAALTDAEEVQQVRAVWNGGHWELHFVCKVAINAADPAGEKTVGVDLGICNTAAVSVGEETVLYPGNALKEDAHYFRQEEYDTEGENGPSTHAEWARQKKSRRQEHFLHALSKDIVEQCADRGVGTIAVGHPKNIRTDEDWGRHGNKRLHDWAFETLLRYIEYKAEERAIDVERVDEYELATSITCCECGMKADSNRVERGLYVCENCELVANSDCNAAENMRATVTPSPSQDRSTGCLAQPSVRLFDTSTGRVAPQDQVRP

SEQ ID NO: 7521 - protein, 391 aa, Escherichia sp.
  misc_feature (146)..(149): Xaa can be any naturally occurring amino acid
  misc_feature (269)..(308): Xaa can be any naturally occurring amino acid
VKRLQAFKFQLRPGGQQEREMRRFAGACRFVFNRALARQNENHEAGNKYIPYGKMASWLVEWKNATETQWLKDSPSQPLQQSLKDLERAYKNFFQKRAAFPRFKKRGQNDAFRYPQGVKLDQENSRIFLPTLGWMRYRNSRQVTGXXXXQENSRIFLPKLGWMRYRNSRQVTGVVKNVTVSQSCGKWYISIQTESEVSTPVHPSASMVGLDAGVAKLATLSDGTVFEPVNSFQKNQKKLARLQRQLSRKVKFSNNWQKQKRKIQRLHSXXXXXXXXXXXXXXXXXXXXXXXXXXXXXXXXXXXXXXXXGQVLAVPPAYTSQRCAYCGHTAKENRLSQSKFRCQVCGYTANADVNGARNILAAGHAVLACGEMVQSGRPLKQEPTEMIQATA

SEQ ID NO: 7522 - protein, 352 aa, unknown
  TnpB Polypeptide
MAHRRRQDNSKEKEHITIVGRLEFPDIVTKAKVLYTMRLFKESIERSHILLKKGLKDKEIVMRITRYMNNAHYSYSALKRAKMYRKQNKLNLRKPQLYSVGKACEKGNRNVRLISTDTVLVKVPHANGRHEWIKCKVKFGRKHIPIVSELVNPGFSYSAGIVLNDGKFYLHVTIPLEIVVRYDSHPRISEKSKYIAGFDLNSDRMNMVIINENGEILDIKNKHFPEITQPGHSKDKARDIILKSLSELIDYAVHHNVRYFVFENLNNIKRGKTGNKNANRKIARFPYRILVKHARIMVKKRNGNFATVSPAYTSIDAIPLSRKLGLDVHTTAAYILTFRYLSLHKSIYVYEK

SEQ ID NO: 7523 - protein, 401 aa, unknown
  TnpB Polypeptide
MSNSTYIKGFKYRIYPNDCQKEIINKFVDMYRFVYNWGLALEEETYQKFLNGESEKRFLYFFDLCAEFKKFKSIEENSWVCELPNTTARLALRDVIYSFQKFFKKINRYPKFKSKKRSVKTFKTRSDRFSFNDDGKLRFEGLPKAFVDAASDRVDLHFDCGFRDEKFIQPSISIDNLGRYWVSFSVETECEVLDTPKTEPIGIDLGVKTTITLSIGEKFNKPKEKLEKIQRQIKKANRRVSRDINRRFAESRRTKTKYEDIPKSNRAIKRQEKLSKLCKRRYNIKRNFYHETAKKIVLRNPEGIVMETIPVLETMRKYKKTAKFLADADFYLITQIFKEKCTKYSVPFMQADRSFPSSQICSNCGSTRKIGGYHTYICHKCGMRMDRDINAAINLRNLFFA

SEQ ID NO: 7524 - protein, 371 aa, Paraburkholderia sp.
MPVKRAFRFRFYPTAAQEQLFAQHFGCVRFVYNHVLARRQQRYKDGLKSNYGDDAAALTALKRSLEFVWLRDVSIVALQTSLRHLDTAYRNFIARRAGFPRFKRKQAAQSYSLMRNGFILRDGKLTLAKMKAPLDVRWSRGLPGAPSSLTVSRDAAGRYFVSLLCEDDVAPHSATDNVVGADLGLTTFLTFSDDRAPVQPPKFLAELLHRVRRLSRVLSRRQTGAKNRNKARQRLARLHARIADTRKDFLHKLSTQLIRENQAVFMKDLCIKGMMRSNLARSIGDAAWGELLRQLAYKAAWYGRTFWQAARFFASSKTCHACGFKLASLPLSTREWTCPECGEIHDRDKNAARNLLAAGLLATRTAGRAET

SEQ ID NO: 7525 - protein, 402 aa, Escherichia sp.
VKRLQAFKFQLRPGGQQECEMRRFAGACRFVFNRALARQNENHEAGNKYIPYGKMASWLVEWKNATETQWLKDSPSQPLQQSLKDLERAYKNFFQNRAAFPRFKKRGQNDVFRYPQGVKLDQENSRIFLPKLGWMRYRNSRQVTGVVKNVTVSQSCGKWYISIQTESEVSTPVHPSASMVGLDAGVAKLATLSDGTVFEPVNSFQKNQKTLARLQRQLSRKVKFSNNWQKQKRKIQRLHSCIANIRRDYLHKVTTTVSKNHAMIVIEDLKVSNMSKSAAGTVSQPGRNVRAKSGLNRSILDQGWYEMRRQLEYKQLWRGGQVLAVPPAYTSQRCACCGHTAKENRLSQSKFRCQVCGYTANADVNGARNILAAGHAVLACGEMVQSGRPLKQEPTEMIQATA

SEQ ID NO: 7526 - protein, 384 aa, unknown
  TnpB Polypeptide
MSVPFTRTLRFKVRPESYAWLNAAAVEVNGVFNYCNQISFATATRTDRKRKWLSGYDLCNLTAGATEYFQRIGADTIQRICVEYAQKRMAARRLKLRWRVSRGARRSLGWIPFKAASLRRKGTAMRFCGKTFRLFGRERLDAVTWKQGCFAQDAVGDWWLCLPVELSIEQTAAPKESVGVDLGIKDAAVTSDGDRLDAIRFYRDAQHRIGALQRRGHVRQAKRMHRRIRRCRQDACHQFSRKIINTYQKIVVGDVSSLKLAKTRMAKSVLDSGWGMLKRFLQYKGECAGRTVRVVNERNTSRGCSSCGALSGPSGLRQLAVRQWECAHCGEWHDRDVNAARNILMAGSRCGTSVSGNEPLPTGRAPSQTSRLREAGSDVPRAAA

SEQ ID NO: 7527 - protein, 371 aa, unknown
  TnpB Polypeptide
MEYSYKFRIYPNAEQENLIHRTFGCCRYVYNHYLSKRMELYKENGSTMNYVACAKDLTQLKRELPWLAEVDATALQSSLRNLDNAFKNFFRRVKNKERPYGYPKFKSKHVHRKSYISKNNHGTIALSDKKIRLPKLGMVKCMISKEVQGRILFATVSQNPSGKYFVSLCCTEVEIEKLPAAGKVTGVDLGVKALATTAEGDIYPNNKYLNQSDKKLRRFARRLSRKKKGSRNYEKARIRKAQLEEHIANQRRDDIQKATTDLIRKYDVICLEDLKTKGMMNDHRLARSIGDASFFEFRRELEYKAEFYGREVTVIDAFYPSSQMCSHCGYRNPDTRDLKVRLWTCPDCGTNHDRDINAAINIRNEGLRLRR

SEQ ID NO: 7528 - protein, 398 aa, unknown
  TnpB Polypeptide
MLWTKEVCRRAYNRFLHLYNSGEQDWVTLQALLPVWKAADSDFEGVYSKLLQYELHRLFSNISAMEEMRRRGRKIGKLRFKGQRHFKTFSYNQSGFKIIKKNKKFGFLHLSKIGDIPMRLHREIAGHIKGITIKHAASGKWYANIIVDNGTCAPEITLINRSIAIDVGLTTYIVDSDANEVENPRHLKQALKKLRREQRRLGRCQKDSINREKQRIVVARQYERVKNRREDFQHKLARHYVNGYDLVVTERLSINEMIKDYRFAGSISDAAWKSLNHKIAYKAENAGKLFVQVNPRNTSQLCSKCGVIVPKTLAQRVHRCPNCGIILGRDYNSSLVILERGLQKIRSERPEFTLADNRPLCGTRSPVQVDWLKQEIPLKVRDGSPIGRRGKGRRAPAR

SEQ ID NO: 7529 - protein, 509 aa, unknown
  TnpB Polypeptide
  misc_feature (245)..(245): Xaa can be any naturally occurring amino acid
VCELPLRVSPAQEKALLARLEAARQLYNACLGEALKRVDLIQQSVLWQRAWKAKDQEQRSALIREACSRYGFTDPTLQHYAVEIRRSCWIGDHLDVHAAQKLGTRAFRAAQRVLFGRARKVRFKGKNQMDTVEGKSNGAGIRWRDGCVVWKGLVLPAVIDLEDPVIRHALSCRVKYVRLVRRKINGHNRFYTQLVCEGTPYRKPKNALGEGVVGIDAGPSTIARVSGTEARLDRFCEELAKKEAXIRRLQRRLDRSRRVNNPENYNPDGTVKKGPKQWKRTKTYLKTQARLAEIWRKLSAHRRSLIGRMVNETLRMGNVFKFEKLSYRALQKMFGKSVNTRAPGRFFRELARKAESAGGKVLEFPTRLKVKGTETHIGLSSYCICGEHKKKSLSERWHMCSCGVSCQRDLYSAYLARFVEEAGDNQFELDAGLAARQWPGAEPLLQAASGRIPNLRVSARSGQPREGTEGVAAKEGTAKAEARDVVAPLSGGGESPGEVAVVPLRTPGL

SEQ ID NO: 7530 - protein, 418 aa, Cyanobacteria sp.
MPRAIKVRLYPTPFQQSQLNQVMGCARYWWNYALALCKQHYKDTGKGLGRTALNAYLPELKRQEETAFLKDCPSQVLQATTLNLTRAYKNFFEGRARYPRFKSFYQRQSCQFPQSVKIVDNKALKLPKMKGLVKAKIHRLFEDGKLKTVIISRSPTGKYYASLLFETQQEEPTPVTEGKVAGIDLGIKDFAIVNDGEKCSKFPNPKHLSKHEKNLKRKQKKLARKQKDSQSREKAKKLVAKVHERVSNTRQDYLHKVSRKIVDHNQVVVVENLNVMGMVRNHKLAKAISDVGWGMFVNFLDYKLKEKGGVLVEIDRWFPSSKLCSNCHYEMKSLDLSVREWTCPKCGTHHDRDENASANIRAEGIRMLTVSGTGTAAVGGDRSPKLGRKSKFGHSPMEESSDSSESTEAPTTASAYSG

SEQ ID NO: 7531 - protein, 860 aa, unknown
  TnpB Polypeptide
MRPLKLTMSAFGPYAGEVSLDMRKLGNGGIYLICGDTGAGKTTIFDAVCFALYGKASGDIRDKSSFRSKYANDETKTYVELEFEYNGEMYKVTRNPEYLRKSKRGEGFAKQGANATLILPNGTVVSKTNEVTAKIEEILGVDKNQFSQIAMIAQGDFRKLLNCDTKERKEIFRKIFKTEPYSQIEYKLSSLFNELKKKREREKQSINQYISQFSCGENDTLSPSLESAKNGEVLIDDVISLMNKIVEKDSARYNELNNFLEKTDKETAKLTSALAVAKNQEESKKEYANILKEIEIADKNFNESKKVNSDSAAKNETLEALSKKINLIEDKMPKFDEFEKVQNELNIDIQTVKENEQLLKIKENEYASLTCDIEEKTKRLQIYKNSLIDIERLNSKLNDIKNKVQSLEELKNEIKKYKEEKEKYSLLQEKAKSALDKYNNLNDEYSMKYTAFLSEQAGIMASELKDGEPCPVCGSKNHPNRAVISENAPSAADVEKAKALAQKSQEYASEAGKECSCKKAVIDTLLQNVKAKAEKLFDTSENIIENVNLQNGELKKEYEWLKEVDKFALTNAIYNMDAAYQKFFKEHAGYPKFKSKHDNHKSYTTNFTNGNITVDFGCNRVKLPKLKGIKAKLHRNFIGQIKSATISQVPSGKYYVSILVETEHVELPHINQNTGIDLGIKELCITSAGKKYENPKIIRKYEKKLVKLQRQLAHKEKRSQNYCKTKKKIALCHEKITNTRKDYLHKMSHEIISENQVIVSEDLQIKNMVKNHRLAKSISDVSWYELTRQLEYKAKWNGRKYVKIDTFYASSQLCSACGYQNTETKNLSVREWTCPVCGTNHDRDINAAKNILEEGLRQIA

SEQ ID NO: 7532 - protein, 407 aa, unknown
  TnpB Polypeptide
VSDLTKTIKLRIHVSPEQEILFRQMTEHYRQACNFVSQYIFDNQFNLAYQSLNKTILRASCVVGLKSQLAQSSIKTTMARYKTVKQQLLPKAIQIQGPDGSWKYITKTLEWLWKPIFFKRPQADLVRNRDYSFVDNGQSLSINTLGKRTKCTFKSKSFSKYLDGSWTLGTAKLVELKGRWYLHIPVTKSVEVFQRENVRHVVGVDRGLRFLTVSYDEQGKTEFVSGRKIAAKRHQFLKVRQQLQSKGTKSAKRRLKALSGRENRWMSDVNHRISKTLVTKYGKDTLFVLEDLTGVSFEETNLSRTAKQNYDLRSWPFYQLEQYLTYKAHENGSEVLKVSAKYTSQRCPKCATVHKENRKPHQHLYSCQCGYKSNDDRIGAMNIQLLGTMWIAGDNHPRYERKTTASE

SEQ ID NO: 7533 - protein, 387 aa, unknown
  TnpB Polypeptide
MAHYTYKFRIYPTEQQQQTLAKHFGCQRFVYNYFLNKRNERYRDGETSSYNKDAADLTHLKNEYEWLKEPNSQSLQRTLNNLDTAFRRFFNKKAKFPKFKSRRDKQSFCIPQNTRVEDGKLYIPKFLEGIKIKQHRPIEGTIVNSTISKRPCGHYYICIVVERNIKKLKKNKKVVGVDLGVKDLATCSDGTRYKNIKSYRTLEQRLTRLQRRHSKKTKGSANREKSRKKVARLYERIVNIRNNHLHQATHRIISENQTIVLEDLNVRGMLKNRRLAKSIADVSLYGFVRQITYKGEWAGRTVIFVDRWYPSSKTCFHCGFVNQNLTLNDREWVCPKCGRKLDRDFNASQNIKQEGLKIVGTTRLACGEDARPSVRRRSSVKQEAPTL

SEQ ID NO: 7534 - protein, 441 aa, unknown
  TnpB Polypeptide
MQRTYSCNMTQVLTISCKLKVSAPQAAKLDATLDAFAQALNWVNQNTPEKVVNAIKLQSLCYREIRARFGLSSNKDSVPLARLAQQVGRRLAAARKSAQQKNRPVKVFKGGFVTYDARIFFFRERDWTVSLTTVEGRERFELDVGSYQRGRLTGSNPKAATLVKRQDGSSFIQIGVESVRVSGPEALVPELEHAVKAMGVDLGRRDIAHTSEEDHWNGQQLNQVRDHYSRLRAALRRKASQGPRSSRRRCRELLQRLSGRERRFQTWVNHCISTRVSGTESLALVARAKATCSLIALEDWTGMRERTNRQSRSTVEWRRANSEAYGPLARGAFSQWRQFLEDKAARAGVKVVLVSPAYPSQTCHRCLWLGQREGKRFRCVNPACGWEGGADLNGANGIALFGGRCKPACPPTSPRIRGDRGGFVVGLPTAGLPFASAARSA

SEQ ID NO: 7535 - protein, 376 aa, Escherichia sp.
MKRAYKYRFYPTTEQAKLLAQTFGYVRFVYNSILRWRTDAYYERKEKIGYLQANARLTALKKEPEYIWLNDVSCVPMQQVLRHQQQAFANFFAGRAAYPAFKSKRHKQAAEFTASAFKYCDGKLYMAKSRSPLDIRWSRKLPSAPSTVTITRDAAGRYFVSCLCEFEPVSLPITASMVGIDVGLKDLFVTDTGFKSDNPRHTAKYAKRLALLQRRLSRKQKGSRNRLKARLKVARLHAKIADCRMDNLHKLSRKLINENHVVCVESLKVKNMIRHPKLSKAIADAGWSELVRQLQYKGKWAGRSVVAIDQYFPSSRRCSCCGFTMQKMPLNVRKWHCPECGADHDRDINAARNIKAAGLAVLAHGEPVNPEPQHAA

SEQ ID NO: 7536 - protein, 403 aa, unknown
  TnpB Polypeptide
MRGFRMKFKPTLAQRRYLTRAFGVARFVWNWALSTKRAAYQQDQSSIGFFELSRRLTALRVEKPWLTEVARQIQQQSLRDLDQAYKNFFTVRARFPKFKSRRSPQSIRFELDARHLGKVRAWADRRLILPGLGPCRLIDSFTDWPSMPKMVTVRRDACGDYWISFMAKVDHLPQAPDRKIGVDVGITDLAVTSDGWKSGQQPVCKKKANRLRRYQRQMSRRIPGSTRRGTVKRRAARLQRDIANIRKDFVHKVSHEITSSARTVVLETLNVKGMLSNHHLARSLSNASLGELHRQIDYKVKQRGGTVIRVDQWEPTSKRCSNPTCGAVTDTLPLSVRSWICPSCGSEHDRDVNSARNMLAIGLGTAEFTRGDWRVRERVTPYRYARWNRESTQSPAGGWTACG

SEQ ID NO: 7537 - protein, 403 aa, unknown; identical to SEQ ID NO: 7536
  TnpB Polypeptide

SEQ ID NO: 7538 - protein, 382 aa, unknown
  TnpB Polypeptide
VQLRYNFRLYPTAGQRAALAKAFGCARVVFNDGLRLRQEAHAAGLPYIKDADLQRQVITEAKKTPERSWLGEVSNVVLVQSLNDLHKAYRAFFASVTGKRKGPKVAPPRFKSKKDNRQAIRLTRNGFSIRPNRRLYVAKVGEIEVRWSRALPAEPSSVTVVKDAAGRYFASFVVEVPGEPLPETTGEVGIDLGLSHFAVLSDGRKIDNPRFIRRAERRLRKAQKALSRKQKGSVNRAKARARVAKLHAKLADARRDWAHKLSTQIIRENQAVYVENLSVSGLARTRLAKSVHDAGWSQFVAMLEYKAARYGRTFHQIDRWFPSSKLCSACGTLQESMPLNVREWTCPCGAVHDRDVNAARNILAAGRAERLNACGGTVRPAA

SEQ ID NO: 7539 - protein, 398 aa, Thermoanaerobacter sp.
LKIIVKRVEQIQINENHELYFYCDKTCFAAKNLYNYANYIIRQEFINNRKWIRYRKLNKMLKEHETYRNLPAQTAQQTLRLLDRNWKAFFRAIKEWSKDKEKFNGRPHLPKYKKKNGRSIAVFTNQQCKIKDGYLTFPKTDLRLKTRITENLREVRIIPKGSVYVIEIVYEKEITGAERPPKKIAGIDLGLNNFVTLVNNIGIKPIVINGKVIKSINQYYNKKKAELMSYVGDKGTSNKIEKLTLKRNNKIKDLMHKVSRFIVNFCKQYDIDTLIVGYNPKWKQEIELGKINNQNFVSIPYYQFINMLKYKCEEEGINLILVEESYTSGCSFLDGEEIIKETYNITRRIKRGLFRSNKGILINADVNSAYNIIRKVFPKAFAEGIEGVGLHPVRLNIT

SEQ ID NO: 7540 - protein, 224 aa, Thermoanaerobacter sp.
LRKVEELVKGPSLKICAVDLGMNRHAVMTIQDTEGRVYAVKFISAAKDNHLRKRYLEKIINLQKQTGIILEGERFAKHLWDKISNLNDDIAHRVSKQIVEFAETHDAKIIVFEYLDSLGPSKGTKSHRINQRFIFWVKGRIYRYVRYKALHEGIVTCRVSPKKTSSRCPYCGFLNIVRYNKGKNRENTRSVDLAKCTNCGIHDVNSDFIGSLGIGRNFRLKYCS

SEQ ID NO: 7541 - protein, 446 aa, Thermoanaerobacter sp.
VAKNMIVIQAKLIFLNQEDKQIVLDLMRRWSSCMRFAYKRLLEGYNRNTLKRELQGIFNLNSRYVDDAIMKARGVLESSRQLDNNPKKVIFAGRDLFKKLQKRHINGKEYQKLKIRWQEKRKGNLYSRGDKSKKGNLNTRIEVKENGTFLRINVRERKYVYARIEAGYKKNKSREELLQEIAQSSIPYSVELKLKNGSIYAYFAIEEEYPEIKITKEKGVIGIDINACPDNISWTETDEKGNLISCNKIPMPELASGNKDKREYFRWKYAHEIVKIAKEKGKAIVIEELEIKEKGKRGDFSGRKSRRIRHNFSYKSLLSKIKTLAKREGIEVIEVDPSYTSIIGMLKYAPQYMITKDIAAAYVIAKRGLGLQEKIPDNYIKFLNTLTVNELEELKEQVKKTVRNKHIKKKHIKEINRAIKFLQSLESEPGRVLEPLDGTSFSAYDF

SEQ ID NO: 7542 - protein, 482 aa, Thermoanaerobacter sp.
VAKNMIVIQAKLIFLNQEDKQIVLDLMRRWSSCMRFAYKRFLEGYDRNTLKRELQGIFNLNSRYVDDAIMKAGSTLESARELDKSPKKVIFGGRDLFEKLQKRHINGKEYQKLKTKWQERRKGNLYSRGDKSKKGNLNTRIEVKENGTFLRINVGERKYVYAKIQAGYKKNKRREELLQEITEADIPYSVELKLKKGNIYAYFAIEEEYPEIKITKEKGVIGIDINAYPDNISWAEVDEKGNLISYGNIPMPELASGNKDKREYFRWQYAHEIIKIAKEKGKAIVIERLDIKDKGKRGDFSGRKSRRIRHSFSYKSLLSKIKTLAKREEIEVIEVNPSYTSIIGMLKYSPQYMITKDIAAAYVIARRGLGLQEKIPDNYIKFLNTLTGNELEELKEHVKKTVRNKHIKKKHIKEINRAIKFLQSFESEPERVLKPLDGTSFSIYDFWRVLKVAVVTSLSPGKVPRDFSALRELLIQGKWRDP

SEQ ID NO: 7543 - protein, 409 aa, Okeania sp.
MRTAYQYKLRPNKQQIATIEMWLELLRRQYNYRLGERFSWWSENRCPVNACPLVMPIPQLRDHPDYYSQKKDLVNTKDKFPEYKLIYSQVCQDCIKRVKLAFDRWFKANKNGHKLGKPRFKGKGRYRSFTYPQIKQNCIKENHINLPKIGKVKLIQHRPIPEGFIIKTVTISRKADGYYVTLSLEDKSVPTFNSDVKPTAENTLGIDMGLKDFLVTSDGESVPIPQYYHSSQKRLKTLQKRLSRKKKGSKRWLKAVKAVAKQQKKVADRRKDFHFKTANELLSKAEVIAHENLNIKGLAKTHLSKSINDAGWGQFLTILTVKAGNAGQKTIAVNPKNTSQDCSNCGEKVPKELNIRTHSCLHCGIVIDRDLNAAINIKNRAVGHSVLKARGVRRGTGTTKREAHTIALV

SEQ ID NO: 7544 - protein, 408 aa, Symploca sp.
MLVFEAKLEGKKQQYERLDEAIRTARFVRNSCIRYWRDNKGVGKYELSAYCAVLAKQFPWAGNLNSQASQASAERAWSAITRFYDNCKKGKLAKKGFPRFKKYQTHGSVEYKTTGYKLSEDRRTITFTDGFKAGSFKLWGTRDLHFYQLKQIKRVRVVRRADGYYVQFCLNVERVEKRAPTGKTIGLDVGLNHFYTDSDGQTIKNPRHLRKSEKALKRLSKRLSRTQKGSKNRAKARNRLSRKHLKVSRQRKDFAVKLAKCVVQSNDLVAYEDLQVRNMVRNRKLSKSISDAAWSAFRDWLEYFGKVFGVVTVAVPPHYTSQSCSNCGKVIKKSLSQRTHRCHHCGFVLDRDSNAAINILELGLRTVGHTGTLNVSGDIDLCIGGSEAGRSPETPQCKLSRRKRNSQE

SEQ ID NO: 7545 - protein, 270 aa, Bacillus sp.
MEVNQIMMNKAYKFRIYPNQAQAILINKTIGCSRFVFNYFLPLWNHAYKETGKGLTYGKCSAKLPVMKKEFVWLKEVDSIAIQSSVRNLADAYTRFFKKQNSTPCFKSKKNNVQSYTTKQINENIAVVGNKIKLPKLGLVRFAKSREVKGRILNATVRRNPSGKYFVSLLVETEVQELPKTQSYIGMDVGLKDFAILSDGTIYKNPKFFRSLEEKLAKAQCVLSRRIKGSSRWNKQRVKVARIHEYMANARKDYLDKSQPKSSKTTMLSV

SEQ ID NO: 7546 - protein, 397 aa, Thermoanaerobacter sp.
MEVTRVIVFQLSHCSREHRIILGHLTYSASKLWNVANYAVQNREISVNQLEKCLKDNFWYKNLHSQSAQAILQKLQIAWKNFFDGYTKKPKYQPKNGHIPVRWKKNGIKIINNKIRLSLSTQTKQYLKEKYGIESKYLWIDLPKNLSLNTVQEIEIVPKTLYGHTTYFVHIVYKKDIPEVEPADKKMMGIDFGIKNFAAIVIEENPETFIIDGGYLISRLRLLAKEKARIQSVISKQGYKTSYKLHNLIIKEKNFVKDYIHKVSRYIIELARQNGVSKIIIGGMSDGIRDMDIGHKNNEKLHKIPFGRLFDMIKYKAREYGIEAKKVEEAYTSQTCSVCGIVEKNNRIYRGLYVCSRCRTVMNADINGAVNILKRVTLNPRLDRGRGFGNPKRIRVA

SEQ ID NO: 7547 - protein, 228 aa, Thermoanaerobacter sp.
VYEEEEKSYDLDRNRYLAMDLGLNNFAAVIDTIGTAFLIEGRYIKSVNRWFNKERARLQSIYSKQGIKYGKKLVQISFKRQNVIDNFLNQTANLIIKHCLKNQIGTVVVGEMKEIKQEIELGRVNNQNFVGIPYKKFKRKLKSKCEEYGIEYIEIDESYTSQKCSRCGVVRRSNRKYRGLYVCKECGYVLNADINGAINILEKVAGESAMKQITSSGCVNHPVRIRAV

SEQ ID NO: 7548 - protein, 423 aa, unknown
  TnpB Polypeptide
MQLTEKVRIYPTQEQIEVLWFLSERCRLIYNFALAEREKEWILNNLRADFEVFPWGKPYYEVDMKKQQNDLPEIKEKYPKYKAVYSKVLQMAVRTLNADYSSFFELRRNGDTNAHPPGFKGKDHFTTMMYNQSGFTIKEQEISLSHFYNKVPLVFELLRKYDKVYQVNVYQKAGKYYLGIVHEVPEKSYIDNGLYQAIDLGVTKTATAINTQGKFHETSNPRPDNYWNPKVDAIQARRDHCIKGSKHWHRLNRAKNKLTRKCSNQIKDIQHKLTRKMVDNTKANTIIVGDLDVKEMAQSKSIKISKKAQKSLNRSTQNNGYLSQFVGFLTYKAALIGKKVIEVDERYTSKKCYVCGKKHDMPIWKRTMECDCGNLIGRDRNSAIFIMLRFLSQNAMWNGYQQFVDNLRKTGLMLPKQAPSAYS

SEQ ID NO: 7549 - protein, 518 aa, unknown
  TnpB Polypeptide
MKRSKTLTFLLELPLAIDAGQAKRLHAHFETARCLYNALLGEALKRLRRMRADPAWQAARAIPKAQKQERQVAFSQLRQAYRFSEYALHDFAKEANCTWISDHIDSMMAQTLATRAYRAVNRVCLGQAKHVRFRSKRRGLDSVENKWERSGLRFELQAPEEGNQGWLIWGRDRLSALIDWKDPVVKHGLAQRIKYARLVRRKASSPQAQGADVEGYRYFVQLVLVGKPYHKPKHAVGTNIVGLDLGPSTIAIVPREGEARLLPLCAELQPDTRAKRRLQRGLERQRRANNPHNYDDKGRIKKHGKQRLVWKNSKGYLTTKRRLAHKERKLAAHRKSLHGRMVHEIVRRGNTIRTEKLSYKAWQKQYGKSVGHSAPGMLIDHLRRTVASTGGTLDEFPTHSTKLSQYCHGCQSYVKKPLSQRWHQCACGVGPVQRDLYSAWLAAHLDPANNIPSIAHDEWEGADLRLRAAVEVLQQRAKEGQVLPRSVGIPRARARLPESLAPNRLELIYRHGRIEALG

SEQ ID NO: 7550 - protein, 432 aa, unknown
  TnpB Polypeptide
MTRVARTVIVRSIRLPRKVFRLFVELEGMYRNMVEQLVVYAVSNNIKSFIKLKTFKYREMRSLYPQLPSHYVYTACQDASTRIKSFLRLKKLGLVKRDYPEVKRVSIWLDDHLWKLNNLTSIRIATHKGWVTVEFEPHKQYWKYVNKGWKLASESKIKLDRKSKQLIIYLSFVKEVEEYKPKSKLSVDVNENNVTILIDGVAYLFETNIEKLVLGYYYRRKRIQEKYDELYGVKSRVKRKILRKLKEREKKLDIKWKIANIIVKIAYEKRYAIVLEKLGKKPANNMIKRIRDKQLRHRIFQASFRGIQKAIEEKAKEYGVPIIYVNPKNTSKLCPIHNAPITYNSNTRIGKCSKGGEIWHRDVVACYNLLLKALWGDGSYAPNLVGYNLDGRFVPLVSTVTHDPMGIPKSLWTRWKTLPQTYFAIILNRMKR

SEQ ID NO: 7551 - protein, 354 aa, unknown
  TnpB Polypeptide
MVLASQRPRAACLGQRVLLAKHAGAARFAWNWALAERIRRYRENEGRARFTNAVEQHREMNARKASEFPWMYEVSKCAPQEALRNLDPAFRNLVRARKAGRYRGFPRLKRKGIDDAFRLTGSIRVLGRGVQLPRFGAIRSKEGTEKFRGRILSATVRREADRWYVSLTVEIERARPESVVGPVVGVDLGLESFALISDGKREEAIKAPKPLGRQLRLLRRRSKRHSRKVRGSRNRARSAVGLARRHRRIRNVRTDSLHKLSTTLARTKSVVVLEDLNVRGMMRNDRLARHIADAGWSCFRRMMEYKTQWYGSKLAVAPRFFPSSKTCSDCGHVLDALALSVWRALWRGGGASPR

SEQ ID NO: 7552 - protein, 197 aa, unknown
  TnpB Polypeptide
MYVKVGEHSYHHKTFININKTRKVIILEKSLKRQQRKLSRSYEQNKHRKRGEICYKNRRKQLLVVQKLHARLANIRTEYVRSVVNQLVKTKPTFITIEDLNVKGMMKNRYLSKAVAQQNFYSFKEWLLAKCKEYSIELRKVDKWYPSSKLCSCCGRKKVQLSLSERLFKCDHCDTELDRDFNASLNLKYATDYTVLT

SEQ ID NO: 7553 - protein, 255 aa, unknown
  TnpB Polypeptide
VTKTLHEIRIVPEGNRYKIEIIHEHATPEPASQKPCQIANIDLRLNNLVTLTNIIGEIQIVINVRIVKSMNHYYNQKKSKLMSIVGDRGTSDRLWKLSLKRDHKINDQMHKVSRFIVNYCIAHEIDTIIIGKNDEWKQEINMGKRNNQNFVPIPFKSLLEKLAYKCEDAGKRLVKQEESYTSKYSFLDGESLEHHDAYPGKRIEGGLFRSAEGTWINADVNGSYNIIRKAFPDAIQLAGGDTRCALHPIRINITR

SEQ ID NO: 7554 - protein, 429 aa, unknown
  TnpB Polypeptide
MLEEVLKLIVLKNSELDKDVEDLILLIQEKVKESDQLKDSELTPLDKFQSELELNLLIDFSLKKLQTKLSSLKVKQFNRICNVILSRTKPELVEEELVLESKITTIKSDKVSEPVKVISPVTGTAKARFLVYDDERFFVDEIVTQEPKPGVVIVPTDFTGTIEEDFLEQKKKVVNPYPGVFTSVFEKPENFFESKFFRKLTGSIGGKRLKFSDLNPSFSKESEFKLSETDLIAGIDIGGTPTNLLTIAFSNKSSGIQMGSAKIFEVSKKYSNLFSRKIGNIEPTDLKLISDGVKDITDNLFKRFSKRGVKAIALGIVGGVDLSKPSIGDESVFQYFFRVMVEELLVSKFYLILCGERHTSQVDPTKGELACDIDVKTTKLKRHGHKATISSGNIVDADLNAAYNIIRIVRPFTKVSYSDNTYNLVRLTA

SEQ ID NO: 7555 - protein, 367 aa, unknown
  TnpB Polypeptide
MKEVTKSFKYRIYPNKEQQQRIENMFGCCRFVYNYYLDKRINLYKENKETFNYYKCANDLTLLKSELLWLKDCDATAYQHSLKNLESAYKNFFSKNGKFPKFKSKKSAKQSYTSTNNSNSITYLDGYIKLPKLGLVKTKNNLSISGKILSATISRTCSGKYFVSLNCKNSIIEEYENIGSAIGIDLGLKDFLTTSNGDKVNNPKYFNKSQKKLALLQKRLSRKSIGSKNRNKARILVSRLYEKISNQRNDFLHKLSTNIIKENDIICLEDLSVANMVRNHKLAKSISDASWSEFVRMLSYKAEWHDRKIIKIDRFFPSSQICSNCGYKNIEVKNLSIRHWNCPSCGCLHDRDINAAINILNKGLLRM

SEQ ID NO: 7556 - protein, 372 aa, unknown
  TnpB Polypeptide
MCYICIVKLTAKVKLLPTPEQAQSLKQTLEMANSACNYISELAWEKKTFRQFPLHKLAYHDARSKFPLTAQIVVRCISKVADAYKADRKSKRVFKPHGAIAFDNRILRWYVDRSEVSIWTINGRMRIPFVCGEHQLQLLKSQRGESDLVFVSGQFYLFTSCDVEEPNPLDVEDVLGVDFGIANLATDSDGEIFSGEAVEENRRKYEHRRRNLQRKGTKSAKRKLKRLSGKQARFQSNVNHVISKRLVKKAQDTQRGIALENLKGIREATVRRKQRSKHANWSFYQLRSFIEYKARRAGVPVVLVDPKNTSRTCPVCGCVDKANRRTQALFSCVSCGFSAPADTVAARNIRARAVVNLPMVSNPVCSGTSCRL

SEQ ID NO: 7557 - protein, 411 aa, unknown
  TnpB Polypeptide
MTKEIRTVEFVVLSAAKAKARKMFQVAGACRYVWNHFREKNFADYQAFKNGKGEKPKTNYFSLGLEFTRLRHNTDWLLELPANPIKHTLKYFADALGEAMAGKKGFPKPRSRKRTAPGFTLPGKENFRIKNIDKKYSLLLIPRVGWVKMTRRGGNPWKSGTPKQVVLRHDGHRWRAFVSYEVEMEKRADDGEVLGVDMNARQVATSDGHFYFLPDLKKKEAKQKRYQRRMERQVKDSNRRRDTKKKLRKVSREIANTRKNWVHKTTDEISEKCGTVVVEDLKVKNMTASAKGTIENPGRNVRQKSGLNRVMLDTAMGEIRRNLEYKCGRVIEVNPAYTSQTCFECGHTDKENRKTQARFQCVSCGFVSNADTNAAINIRRLGMAQLHGEGRRSVLKRTPTTREIDARQPDG

SEQ ID NO: 7558 - protein, 493 aa, unknown
  TnpB Polypeptide
MSIITYCKGLPTPIEEMNAIGETKFEMFLNAFSPIFHEAVCKTVNYLLSESSFNKSRWNTHLQKAYQINKRHANSVISNALGKVDSAKKSTQLHIKTTRGKLKSIENWIAGAEKKLKLAQRFYSKKNWQESRTGCNFPRVSYLDTRNTNWQSLKFQLHQKKRKAYLLKNKVEHLTESPTQVTVSRNQLFSVGSKDETCGNQICQGDGSKLKFRVPACLESKFGAYVTTNIGDFERNINRLPADGAKTWHFYRKDNKWKVAVQFTPAPVKRVSRHSAYGSIGIDLNPGMVGWACIDMYGNLKSHGQIPLQMGLPKGKQDAQIIDACLQLALLAGTFACPIVCEELDFSDKKEQLKEKGRKYARMLSSWAYSRFHELLASILSNRGIYLLTVNPAYSSLIGLVKYAKLYGLASDEAAALAIARRGMRLSEKIPDSITAYLSVKDGKHVWSLWNQLNTIYKKSGINRHQVYSISNWGSLVKRQEETSSFPGSKRKR

SEQ ID NO: 7559 - protein, 390 aa, Halovibrio sp.
MDIAFKTQLRPNNRQRTYFARASGTARFCWNWGLAEWNRQYELFRDGQGDRPSGMALKRQFNALKKTDYPWVYEVTKYASQQPFIALQRAFSDWMKDLKSSKPAHLKKRQPRFKKKGKATDSFYVGGDQVKVDGHWLKVPNLGWVRMAEPLKYGGHINGMTISRQADKWFVSFSLNVDLCPLPSESQARCGVDLGIKTLATISRGPETEWESPKPLQNALRKLARYQRRLAKKVKGSNGYRRLKMRIARLHKRIADIRANTLHQLTAYLSTHFSEVVIEDLNVKGMMANGRLARHIADVGAFEFRRQMTYKMDWRGGMLTVADRWYPSSKLCSGCGSHKPDLTLADRVYHCGECGHRQCRDANASINLEHYTARSVGIHAAGDDGSARAA

SEQ ID NO: 7560 - protein, 414 aa, unknown
  TnpB Polypeptide
VIGKVFKPNPNKVLALNMTLKEYFRLVRRYLSFNSTSKTLLHENGYEKAKRLFKLNTALIQTARDKTIEILKSFQKNRKDNSALRPNRVSIRFDKRCYSFSKTTNVLTPYWLTLSLFRGRRVSLPIVFGEKQKARIEEAFRGEWSFTTVEMVKRDGEWYAHFVLKKTVELPDEPETVIAIDRGEANLAVAVAISKKDPVKPMKGRFWRGGEIKRIRGLYSHIRRKLQEKNRIGKVKELGRRERHKVNQQLHIANEIVAYAKQFPKPIIVMEDLNGIRRKFKKSKRLNRRFHSLPFRKLQTYIKYKANLKGIEVRYLSKKETKNTSKICHRCGYVTQVKGRIFKCPNCGMEYDRDLNACINITHRLMSSMGWGSCEPPEPADVTGGVKPQPNAGSPRLQSGEAHICFGTSWSDGE

SEQ ID NO: 7561 - protein, 335 aa, Streptomyces sp.
LIRAYKFLLYPTMRQTWALGEMLRDHCSLYNGALEERRSAYRHASRTTVRYGRQSGQLKDIRAFDPERQGRWSFSSQQATLRRLDKAFTAFFRRIKSGEAPGYPRFRGVRRFDTVDFPKDGDGCRWDSTPHDPQTRVRFQGVGHVKVKQHRPVAGKVKTVSVKREGRRWYVILTADQAPPEPLPATGAVVGIDLGIASFLTTSDGRHVDNPRHSRNAAKKLEAAQQALARSKRGSKRRRKAVERVATLHRKVRRQRLDHAHKTALGLVRGNDLIAHEDLKIRNMSKALSRARTGTEPTPRTEPRRRPDSTEASPTPGGGCSSRSWPPRRKVPDGK

SEQ ID NO: 7562 - protein, 427 aa, Streptomyces sp.
  misc_feature (427)..(427): Xaa can be any naturally occurring amino acid
VSDRGLETRQFGHRARLALSPAMALKADDQAHAARTMWNLLHAWWQMMPKEKRTLANADAAIRQACQDIDFLAVLPAQAAQAVLKTYFQAWKNCWAGRADTPNFKGRFRTVMSVDIPQGRDLNITRVHRRWGTANIPKVGRVRFRWTKDLPVGKREGAENRITGARLIRDALGWHIAFRVQTLEVRPDPHQGPDVGIDVGVTVPIALSDGETYEHGEWLTGKEKARLLHLEQRAAQRRRHRNPGERTSRRLRRTYDQIAGLRAKAKRRALDWQHQTTTVIARTYGTVVVEALTITNMVKSAKGTIEEPGKHVAQKAGLNRSISGEAWGRTVTMLTYKTAQLGGTLHKVPAPGTSRRCSACGFTMPGSRESQAVFVCKNPDCGWSGNADHNAARNVLHLYRMGHALIPAAGRAVAGAHRASSPPPQGX

SEQ ID NO: 7563 - protein, 405 aa, Kitasatospora sp.
MQTSHAKRAFKFRFYPTEAQAAELLRTFGCVRKVYNMALAARTEAWTLRRERVNYNATSSMLTAWKKTEELAFLSEVSSVPLQQALRHLQGAFSNFWQRRAKYPRFKSKRKSCDSAEYTTSAFRYRGGGITLAKMSEPLDIVWSRPLPEGASPSTVTVTRDAAGRWFVSMLCGDPGVRPLPLVDAAVGIDVGITSLVTLSSGQKIANPKHERKDRERLAVAQRELCRKARGSKNREKARVKVARIHARIADRRRDFLHKLTTRIVRENQTVVIEDLSVRNMLKNKRLARAISDASWSELRTMLNYKCAWYGRELVTIDRWFPSSKLCNVCGVVRVDLPLNVREWTCDCGAVHDRDVNAARNILAAGLAVAACGDGVRPQRSTPSGRSSMKQEVVPPQRMHAAAQP

SEQ ID NO: 7564 - protein, 518 aa, unknown
  TnpB Polypeptide
LSKKIETQPVTYADIRLYPIGGREGHLQLQDAQDRLRVFYNDLVAIQRRRDRAVAEYNAYNGITQPSKRLSSQFNEYDYNGYITRRRKFDASIAGLGVNPLRGCVKRLKGALSGYRELRKSKRYERIIAKRKRRGKRVSGVGKPRFKSVERFRTISFQATNSNVKGDKLVLSGYGLGDFRMSKHGRRINGKVKQIAITYKPTGLYASVTCDVPLAQTRSKFGRKPRKTVGIDLGVTDRVTLSTGKRIQGRRLSDMPTRERGGHRTRNAERMWLESEIKRLQRQIAKCKPRRGDSEPSPSRGRTNTELAMARRRKCRGWCKRGSDSCPCQTVSNNQLRLELQLASLQHRATLAKRNEDHRLTTNLVRTFGRIAMEDLEIRNMTQSAKGTVSEPGRNVKAKAGLNRGIGEQGWGRLVTQMTYKAERAGRELVQVDARNTSRTCSVCQHVDAASRNAKRYYCVNCGFDIDADVNAARNIAIAAFGVNAVARGQDANAAVGSPRHGGGIQVEIPYLSPPIPG

SEQ ID NO: 7565 - protein, 477 aa, unknown
  TnpB Polypeptide
LLTNYVYKLRPNITQSSTMSRWVDMLRSHYNWCLNDRLTQYAQQFIQGDYCDIRTKAEACPITCFVSKNGATGEPWKDDKKANPRRAAGDIQITALPTLKKARPWFATIDSTVLQQNVKRLDIAYKNFFVRVASGTGEGRGFPKFKNRSNFTSFTYQMGIKVQKNKIYLPKLGWMRFYNSRQIPDSFTIKAATIRKRQDGWYVSIRIEDKTIPDYVAKSFIDVNKIIGCDLGITKLVHLSDGHQIENPKFLTNKKTKRILKNRQRKVTRKLKGSKNRKKAATNVGRFHQKIADKRQAYQWYVANKIVSRNVDAIAVENLNVSAMKKRCSEKIEEETGRFLKNGQSRKRGLNRSISDASWGELILKIEYLAAKHGKVVLKVSPKHTSQKCQNCGHIDALSRDEEKFICTNCGFMSHADINAAKNIRDRALSMVREDFAEPEPKGSKRPKNCKEISPRSMSKRGEPGNLSNQDIKTAMS

SEQ ID NO: 7566 - protein, 202 aa, unknown
  TnpB Polypeptide
LTNEVIGIDLGIKYLAICSDGVVYKNINKTHVVKKLEKRLKRLQRQVSRKYEMNKRGGRYVKTNNIKKLEKDIRRIHRRLKNIRLNYLHQTTANIVKTKPYRVVMEDLNITSMMKNKSISKQLCKLGLHEFTRQMKYKCEWNGIEFIQVDRWYPSSKKCSHCGTIKKDLKLSDRRYKCNECGLDVDRDFNASLNLMNYGLSH

SEQ ID NO: 7567 - protein, 482 aa, unknown
  TnpB Polypeptide
VEQTIQTRAVVVPLDPTPAQDQLLRSYCGSARFAYNWTIGKVKENLDARSREREEGVGESDLTKSLSWSPYSMTPLWNSMKDDVAPWHHDVTMHAFRCGVTNATVALKNFSESKGGARHGRSVSFPTFKNRRSKLSVTFTETRTQAGWFADDSRHVRLILPLGAADPRIARRREQLQWLHTTESLRRLKKKVSSGEWRIQSVTISFTGGRWQASFLTRQLIVSTPSGTRLLGPIVGMDLGVKYLATLSVPVSGVSDENGHVANPRHLDAELERLAKINRLSSRAVKGSKNRAKLQKRRQLLYGRITRTRNVYLHRLTSTLARSFETVVLERLNVAGMVEKSKQGTTHGLSRSVLDAGFYELRRQLTYKANDRGHRVITVDRYYPSSKLCSHCGETKAKIALSERLFECSNCGFRLDRDVNAARNIHREGLRLLGNEGTVAGHQPETLNADPRDQKTTAPRCDGGDRYQGRTTQPFREMSVSA

SEQ ID NO: 7568 - protein, 482 aa, unknown; identical to SEQ ID NO: 7567
  TnpB Polypeptide

SEQ ID NO: 7569 - protein, 544 aa, Mycobacterium sp.
MRAHEIVGSQWEPGCRMTRHTTFKFCLDPTAEQRDALTRHAGASRFAYNQCVRMVQSAMRAQRAGERIAMPRTGFDLIIAFNRWKKSEAAGRVWAVASDGSAELISTGLAWRDEICQQVFEEGAVDCARALTAWSDSRSGRRKGGRIGFPKFKKKKSTPPAFRMRNTQRKGRRPAIRIGDAGRTRSVSLPRIGVVAVHDDTRRLRRMLATNRARILFATVSHRAGRWWVALNVEAEDLHPALRHPPRSDADRSGWVGVDRGLMAFAVAADVSGALVTRVGAPPQPLRRAVTRQRRLARELARRKRGSHGHEITLLKLRRLHHRVANVRRHFLHGVSNSLVKNHDRLVLEDLNVSGMLANHRLAQAISDAGWSEFARILRYKQAWRGGQLVYANRYFPSTKRCSRCGAVRTQMELGERLFSCECGHTADRDHNAAVNLALWAQETADQPPDPQAGGRVTNARGRNGGNQLGARAGYVAPIEAGTKVRTHSELRTPEEGGATSQPRSDTLDSSVGSHARRQRLRDSESPPIEWLRPRSSLGRAADF

SEQ ID NO: 7570 - protein, 403 aa, Scytonema sp.
VLKAVKVRLYPTTEQEIALAKSFGCARWYWNYVLNACIQHYEETGKTLKLSVYKAYLPQLKIEHPWLKEDCYSAVLQCVAINLNKAYTNFFEGRAKFPKFKSKHHKQSIQYPQNVKVVGDCLEIPKIGVVKTVFHRPIKGKVKTVTISKTPTDKYFASILCEIEDGINQSTDGKTLGIDLGLKDFAIVHDGEEVTKHSNPKHLKRHEKNLARKQKKFARKVKGSNSRNKYRKLVAKVHERVSNSRQDFLHKLSRNLVDESQIIVVENLHVKGMVRNRKLSKSISDVGWGMFVNFLDYKLKAKDGQLVEIGRFFPSSKTCSCCGHVQYELTLDIREWDCPKCNTHHDRDGNAALNIRNEGIRILSMGGGNPVLAVPRQSKTNKPQGGKAFVNDAGSLHRTARSV

SEQ ID NO: 7571 - protein, 433 aa, unknown
  TnpB Polypeptide
MRQAFVYRLYPSRTQERTMEAILTTTCIFYNSLLVERKQAWEERKERVTKVQQLRRVKERKATNPYAASVHSHILQIVADDLDKAFLAFFRRVRTGEKPGYPRFRGANRWTSFGLKELGNGFKLDGRRLKVSGVGRLSVRWHRPIEGDIKTVRISKKAGTWYAAFSCVAPDKDPLPATNRSIGIDVGLTHLLTTSDGETVEKMLLANPLPRVSGASNCMGSRVPPTRRRGSIEVRQQHLENPRWYRAEQATLRVVQRRIARRKKGGNNRKKAVAQVQRQYERITNRRKDYLNKLVADLVGSHDLIAIEDLRITHMARNRHLAKSILDAGWGYLADHLARKAACAGRWVSMVDPADTSKTCSGCGERLTQEITLAARWVTCGSCGLSLDRDYNAAINILKRARGASAQQPARTSPLGVNVAGLPACVAQEAVPL

SEQ ID NO: 7572 - protein, 458 aa, unknown
  TnpB Polypeptide
MKTTRHATYNLNYHLVWLPKYRNSVLVNEVADRVRTILHEIADDKGLEILDLTVQPDHVHLFVSSPPKHAPSLLANWFKGISSRKYNHRYADRRREKIGWVRRLLRRGQGTYRARRSRTTSSVTRRTSRDHAHEDAGTETGRARRAQAEKTLRETREAYQQALHDAFDAGCTTQTEANDVVVNYKLSGYAKNALKKYVPQLTTTYNAGELHDAHPVRFTNEGLRLDHKPENAIEWYVKIPHHEDYHLWMPAQPNPEQRDWLEALNAGDATMGESRLFERDGTWYLHVTATRDAEGGSEVSDEERTPIGVDIGEASLVTVCHRDDHGCPTAPELWADEGRPFVGSARPTSPPRGDFRHAVANVSQESFGDDLWNQIDDVFHRVTREVVDYAESVKNPVLVLEDLTYIRESMDYGEYMNRRLHGWGFAKLHAQIRYKAVEKGIPVKTVNPRNTSKECPCV

SEQ ID NO: 7573 - protein, 349 aa, unknown
  TnpB Polypeptide
MITSTIKFRLNKKQEVTLDGWLWNLTAIYNWGLRKIELNAQDNIYFSKFDFVNLLADHGKKIDIPSHTIRGVLLQVYIAWQRCFKKIGGKPRLKGQRNKLNSISFPDRIHSPKKNHISIPGIGKVCYYKQKIPKGTIKNGRIIKQASGWYLCLFIDAQREPIVCTENGQVGIDPGFKSLLTLSTGKKIEHPRELEAIEKRLGQAQRGHDKQLVARLSEHRANQVKDRNHKLSLRLVQENKLIAISKDNIKGVAKKFGKSVSSSGHYQLRQMISYKSSSCGRKYVEIDSKNSTKTCSSCGKLSGPSGWIGLSVRFWDCACGAHHDRDINAAINVLNTALGASVEVLHAVA

SEQ ID NO: 7574 - protein, 366 aa, unknown
  TnpB Polypeptide
MRLGNLLDELADVHNHFLALEKRYYRIYGKYAGRYRLQPHLTKLLQRTKRHWAWIPRDTIDAVIIRLHLAWEKFFDFLKKGKRGRRVGPPKFKKPEKYRSAKFPYAYKLENGRVRISFRVWNPLSEKFNKYNKRYFSFHQHRDWKGVVRYIQIGRDAVGTYWLYVITDNTSKKVLSATGESVGIDFGMETYLTLSTGEKIHSPEFLKHSLNQLRKLNKAISRKVKGSNNWWRAIHQLARLYVKITNQRRDWHYKRATDLCRRFDHIVTETLNLEGMKRLWGRKVSDLAFYQFVEILKFKCLKHNRAFLQVGQWTPTTKPCSDCGFHNENISLSDRQWTCPECGSHHDRDVNAAINILRGCLDPLVE

SEQ ID NO: 7575 - protein, 376 aa, unknown
  TnpB Polypeptide
MSITAKIQVVASDEDKTLLDETMSVYREACNYVSDYVFRTHDLKQFSLNKALYPTLRAEFGLKSQMTQSVFKTVIARYKTILENQKEWIKPSFKKPQYDLVWNRDYSLTQDRFSINTLGGRVKLPYFAEGMSKYFDRFIYRFGTAKLVNKHGKYFLHIPVTHDVEESNLSDICNVVGIDRGINFVVATYDSKYKSGFVRGRPIKQKRAHYSALRKELQMRHTPSSRRRLKRIGQRENRWMQDVNHCVSKALVVNNPAHTLFVLEDLSGIRHATERVKTKHRYVSVSWAFYDLERKLIYKAKQNHSSVIKVDPRYTSQCCPVCGHTEQANRNKKIHLFTCKNCGYKSNDDRIGAMNLYRMGINYLYDSQVPDTVAAE

SEQ ID NO: 7576 - protein, 425 aa, Lawsonibacter sp.
MPTIAITMKLHLRPSEEDVLAFGVMSKAYMEACNFVAQYAFDNGCFLSVLKLHKALYQTVRSQFGLKAQLAASVFRTVVARYKAVREQLWQRPFRYKDENGERQSITRDLNWLQHPVQFHRPQADLVRNRDYSFAQKGNKISVNTLGKRAIMSYDAPECFAGFFDGSWTFGTGKLVSLLGEWYLHIPATREVDDATLAELDSYAHIVGIDRGIRFLSVSYDEKGKTSFVSGREIMENRQSFADVRVELQSRGTKSAKRALKRISGRENRWMRDVNHCLTKALVSEYGAGTLFVVEDLAGISFAEGNQRDAKGNRELHSWAFYQYEQFLSYKAQLAGAEVLKVLPKYTSQRCPRCGRILKSNRHRETHEYVCDACGYRTNDDRAGAMNIHYLGRMYAAGDPEPKFVLPKPAPAAADASGPGEAKLA

SEQ ID NO: 7577 - protein, 404 aa, unknown
  TnpB Polypeptide
VLEAQLEAACKLYNTLLHVEKVEYEKNKHTMNRNELRQLALDLRKRKAEFQALHSQVAQQVAERFYQARQRFFEALANKPRKKKPHKYLSLVYPQSGWRLSNIREVGEGENTEKKTRARLYLSKIGFFTLVIHRDFPLERVCQVCIKLNPSGRMYVVFFVDESEGERPEEPTKGRGEAVSVDLGITRLATLSDGRFLDNPKPLERSLDRIRALQRSLSRKRKFSKNWFKAKRRLAREHEHIVDFRRDLFFKLGALLTREYDLLVLEDLNVVGLIRGCVTGKRRMRLHDSSFSELRRILEWEFEKRGKAVAAVPAYNSSRECSRCGGINRDLTLEDRVFRCPHCGFTSDRDLNACLVLSKRAGWVPPSVPVELQPIPPPPSLGLVGRGRHGGGATMREAPPFRAG

SEQ ID NO: 7578 - protein, 474 aa, unknown
  TnpB Polypeptide
VDKVFGTIQVRLNVSDEVLAYLTYQCQQSNSLSNCTIFQVRQDHFEDCERVEFFDSNGLYRSEFKTKSVRASYPELCKVMTNNPHYKALGGQCAQQALKSVVESFSSFNGLLKLFWKGEINQPRMPSYRTKGGLAPISYPAQALSFDIETGECRIPISRELSDSVKEHLAVKELRINGAYGIKPSQIVELRIIPRNNEFYAEYVYKYGNEGASCHLGLNPKLALGIDHGVGNWLTCVSTVGKSFIVDGLKLKSINQNYNRRVASLKEGKSPKYWDFELARITEKRNRVMRDAINKTARFIINHCIQNQLGVVIFGWNARQKDGSDMGRENNQEFVQIPTAKLKIRIQQLCAEVGIQFIETEESYTSKSSFLDHDFLPQYGAKPISWKPSGKRGKKGDGIGRGQYRTAQGFLLNSDCHGAINIVRKVSTQLGLDLAKVCRAVLNLPKRYDLFNSLTKSYRKRCEVGLLDPVATSA

SEQ ID NO: 7579 - protein, 466 aa, Moorea sp.
MVKRKAQIGVQQIWLHPDTETEAILNYLCQQSGKLYNMGLYLTRQLFFKTGKILTGKFDLCYEESISKSLIAKSLPSTPAQQTLYSVIEAFKSYKSLRDLWYKGQLSYKPSPPKYLKGSKLFKVAYPNSGGQKPKIKNGKLVFSLGLTVKRWFGVKNFSLPFPSNLEGRKIKEWTILPKNGAFYLEVSYEIPNQTPVTQNANEALSIDLGTSSNLAACVDTLGNSFLIDSRAMKSYNQHWNKQVATRKEGKPQGYWDKWLDQVTRKRNHRVRDGINKAARLIINHCLKHGIGTIVLGWNEGFKTSANMGKINNQKFVQIPLGKLKDRLSQLCDLYKIKLVLTEEAYTSKASYLDGDSLPMFGSKPAGWKASGRRIKRGLYKSASNSIVNADLNGSANILRKVARNLGLDLGRLGRRPLTTAARIRLWAQARVYPVRRIPASNDRGVSILLSNKTKPYRFASQIQTL

SEQ ID NO: 7580 - protein, 456 aa, unknown
  TnpB Polypeptide
VNSVQQIITAKLKLLTATEQAHGLRETQLAYRDGLNAVSQYAFAHSKTSSVTKLHKGMYAELRIRYQLPSQLACSVERQVSATYKGLWTKLLKNAEHRRMKITKKRFKGLDQPPHYSSPTVQYTYERDYTFQCDSRVSLGTLHGRLSVPYQGYDKHVALIRQGATIGDAKLWYDRQKKTFYLLVSLKIEVPEPTCEQLSEVVGVDVGIRYLAVTSTSTGKTSFHPGKRTRHQANHDARLRKRLQQKGTRGAKRRLKRIAQRERRLKMQANHYVAKQIIKQHPHALFGLEQLTDIRERTKRRKRTRKKNGKGTERVSSKARKANRVYSQWSFAELQALISYKAALAGSLAVKVDADYTSKACPMCGHTADENRPRKGLLFVCQNPKCGYTLHADLIGARNVTLRTLLIRHDWIKTGCLSLIPDASDKEAKAARLLRYAELRWSPGVNPSLRCLTGGS

SEQ ID NO: 7581 - protein, 326 aa, unknown
  TnpB Polypeptide
MLQMVGKKIATANKALKALRKNGHKVGRLKYLHSEDYNSFTYNQSGFDITAVDGQLWLSKIGKLKIRLHRQVQNIKQVTVKREGKRRWYAIICCELAEPIFKFIDISKSVGIDVGITKFVHDSDNHEVENPLFLKKMLKPLRRASRQLSRRQKGSANYQKAKNRLQVLHERIKNQRMDFLHKQSSSYSARYDLIFLEKLLRVLNMTKNHRLARAILDSGWVTFGSMLKYKAKHLVEVYSPNTSVDCSHCGNKVQKSLAVRIHRCDKCFLVLDRDHNAALNILQRGLKSLAATKSSLPMERREVTPVETEKSVKQESIEAHDFSSRG

SEQ ID NO: 7582 - protein, 536 aa, Bacillus sp.
MAYAWQTKHLRTGNKPYEGTLHLAIKKRFQLDNYYTNSAVQQANALRTSQKELQALYVKQVDIVMKSIQKKLKKERSKLTALRNMKQSIVDRKPKLHKRMGYRMHQTASGVVYALHRKNETQVWFSPYLFEHRHLDKEIKRLKARIGQLRHRLLRQEQKKEKLRREIPSVLFGSRSFFRKQYTMCKDQKSYVAWRHAFCYKRNAKMTLSGRKDAKYGNFVFQYDAPSQTLHIRSTTGRALVLPYVYFPYGQDQVQESIARQLSCQNKKKDGKPIGWSIEDHGTYYIIKCIVEEPEHPHLNHAKADGVIGVDVNYNHIAFSNVNGQGQLLSSSCLYFSLAGKRSGQITKILEAEAIRLVDIAVQRNKPIVLEALDTTLSKSAGRYRNRKQNRRMSLFAYKKMQDGIHSRAAKMGIAVFEVNPAFTSQIGKMKYMKQMHISIHQAASYVIGRRGMNLKEQVPKLLRIYTERKDGEHHWKQWSVLTKAFKALRPHVFYHVSGQSYPLFNKEICNYGLTQVERDSLQKYVPKIWLEEREA

SEQ ID NO: 7583 - protein, 169 aa, Clostridium sp.
IKREQRKLSRKYESLEIRNKNIKEGRATRQNIQKQVVKVQRLHQRLRNIRTDYINKTVFSIIKQKPSYITIEDLAVSNLMKNKHLSKAIASQKFFELKTKLMSKCKQNNIELRIVNRFYPSSKTCSNCGKVKKDLKLSDRIYKCDCGFNIDRDLNASINLKNAKKYKIA

SEQ ID NO: 7584 - protein, 229 aa, unknown
  TnpB Polypeptide
MVATATKTLEATLAPPTTHKERKLDDLLDTYRDGLQEAFATEADTMSAVSDIVTPYDLPYQAKAALCNYVPQLHNTYDAREIEDDHPVRLTNQAAAFDHSAERDYEFTWWVPRPGRGTNFWIPLRINPEQEDLWHDLVDGEASAGQLRLQRHRRNWVLHVTVEFPVEEPDHDADADDVTHIGLDIGESALITGCALKDGSPTGPFVCDGSRAKHLRKEMHNDPETPARA

SEQ ID NO: 7585 - protein, 381 aa, unknown
  TnpB Polypeptide
MLKSYKYRIYPSQEQKELLSNIFGQVRFVYNLGLETKIIAYTGNKKHLDMFNLTKQITELKKTDAPWLKDSPSQSLQSSIRNLDIAYTNFFRGAGFPKFKNKYSKQSFQLPQGVWLSNNNKQIFIPKLKLVDIDLHREFKGEIKTVTVSKSITNKYYVSILVDNKKELPKKKPIKLKTTVGVDLGIKDFAIISDGKKFKNQDFFKSSMKKLRVQQRSLSRKKKGSNRYLKQKMKVALLHEHVRNQRQDYLHKISKYLVDNYDTICIENLNVSGMVKNHNLARAISDMGWGEFRSMLEYKSEWYGKNLSVIGRFDPSSKTCSNCGSINKELKLSDREWVCKKCGSTHDRDINAAINIRNFGLRDQPSVTQSEWLHCACDVKI

SEQ ID NO: 7586 - protein, 293 aa, unknown
  TnpB Polypeptide
VVRHVPVLETPPRSAFRFRDGELTLAKTTAPLDISWSRPLPKGVEPTSATVSLDAAGRWHVSLLCEDRSIKPLPKIKTAVGIDLGISALATLSTGEKIHNPRHSDSEQARKRLFAKALSRKQKGSKNRFKARMKLARMHARIVDRRRDALQKLSTRLIRENQVIVVESLNVSGMVRNHCLARVISDASWSALLNMLAYKAAWYGRRLVQVDRFFPSSKTCHCCGFVVEALPLSIREWACPVCGVVHDRDHNAALNLLAAGHAVSREGKACGPGVSRRILRNQVQLGLKQEPGA

SEQ ID NO: 7587 - protein, 243 aa, Geobacillus sp.
MMPTITLKLELHKPTKAKQEMYERMSDINTQFANWLLDHPELNKATSKIFKEFSSQRFPSAIACQTIRDVKSQKKHQKSKKFRKQWCCFNNQNWKVKRKGEFYTVSFPTLEKRIGVPVVTRPYQEAWLNRLLDGTAKQGAAKLYKKKKKWYFAVAITFETKQREETNVMGVDLGLRYIAVASVGTKSLFFKGNQCAFIRRRYAALRRTLGKAKKLHMIRKIGHKESRWMKDMNHKISRQIVHF

SEQ ID NO: 7588 - protein, 411 aa, Halobacteriales sp.
LFDWLAAHAPLWNQITYRRRQQYFSDDGDVWEANFNDLYDDYAPILGKATCQQVARKNSDAWRSFFRLLEKYHDNGDSTVTEKPRPPGYWGNRDDGYELHGLIRNDLYTFDWDETQSTLEFGVGDVLELVYDEAADRIRVTHPVRIQPAHLREQRRDGFTHTLHPENATHSAAIDIGANNTLAIVTDHGETAVYHARPEFDRFRRLSDRIAERQSQLPDNRYSSRQIERLYDERGRKRDHARDAAVKHAAEWLLARNVDTIYVGDLTDVFDAHWSAEVNEKTHSFWSHRQLLDRLELTFGDVGIDVMEVSEADSSSSCPACESETVRRRGDEFRCRDCKLEAHSDIVGAWNVLQAEEGPMARPAALCAGRRRDASESGAYWEWDGHEWRPAMFGERSRPIDRTSVGEPASS

SEQ ID NO: 7589 - protein, 374 aa, unknown
  TnpB Polypeptide
MKVIRSTKCSLKFSSDSKKKQLRYVLAEYSKVVNLFINHFWNNPTDAKKSQLLKPIVDIPETWLSARLRKVAAREAIDMVSASKKRHGDDAVMPTHKGNKMYVSCTIADLIPSKNATEFDAWLHLASIGDKTILDLPIRYHKHFNKYNTIGKRLNSYLITDRYVQFSFEIVTEEKRTGTKAIGIDTGINALASTSTNNQYGLDIKDCIERVKRCKYGSNGQKRARRALKQRIDETVKEFFINENPDLIVVEQLKNMGHKSKAKRLLAKNIRRSIGIWNWRYWLKRLQEHTELNRVSFRSVSPYYTSQTCPKCNHVDRMNRKGELFTCLSCGHTDNADINAGVNILFRFVMGKYGSHYKQDVLREAELMASPSFT

SEQ ID NO: 7590 - protein, 432 aa, unknown
  TnpB Polypeptide
MANRKVTYRMYPNAAQEERLMEMLGLHQRLYNTALEERIRLYQETGKRASFPAQCKALTQWRKVSVGLAGMNAQSEQVTLKRIDLAFQHFFRRVKNGEKPGFPRFKSVRRYPGWGYKTHGDGWKLHPGNGNKHGKLHLQSVGDIPIRGQARQIGMPKTCEILHKAGKWYASVTLEVESIQRECGTRMGAFDWGLTDFLTIASPQGMETVSNPRHLRRQLEELKRLGQEVSRKIRMAQQLSGKPKGFPVSASLRTAIQHLARLHAKIARQRKDFLHQTSAWLVRQFGAIATEALSVRNMVSGGGSRKKGLNREIHAAAPSAFLQMARTKAEEAGSWYEEAPTRELKPTQRCHACWRLPDEKKKLSDRRHQCPHCGASCGRDENAALVLLRWLEKRLAGESGHCSPQGTGREPSEVWSGCGLPASKHETHAIAV

SEQ ID NO: 7591 - protein, 514 aa, unknown
  TnpB Polypeptide
MKATTPTFVIELPLRVNDQQNRFLTQAFEFGRTLYNATLGTALGQLQRMRESKEWRETRDMPKGKERSERFSELQRTRRLTENGLRTIANNHRKASGRNDIGAHEAQCIGRTVWRALERYLFKDAGKPRFKSKSRGLNSIEGTDNHEIMYKPERQAIVWRKQVLRLVDVDTPYRKEALADSLDKSRSKRVKYCRIVRRTINGKKRWFAQICLEGQPPVRKIYAPQSEVVGIDPGPSQIAYYHENYVDIVKVAPNVNLQEKVVRRLQRKIDRSRRANNPDNYEDDGRIKRGPLKWKFSHRLNKLSRELAEHHRCLAATRKRDHGALANLLLQIGGTVKIEKNSYRSYQRNFGKSTTRSGMGAFIEHLKRSAERAGAKVVELNAYALKMSQYDPATDTYRKKTLKERWHRWGNSETLVQRDVMSAYLACYATEKGHNRALLLEKWPTAEVLLSGSGLCRQQPRSDQGEQSLRLTKPQSESETARARGLPRTLCATGDVRTARAKATPSERACCWSK

SEQ ID NO: 7592 - protein, 508 aa, unknown
  TnpB Polypeptide
VNAWWATACCSPVPRHYTGTPAMPASATHLWKKSKHGRCWSSTTIRTCDCCASVSAATTICFAHASKSTNRWKPTWRITNSISSSVVRGATECKGDRTIVSNTMRIYQTYRYELKPNNRQVGLLRECCGTARFAYNWGLAQQFEALRTEEKFPSANVLHKRLNQRKNEDLPWVRNVSKWIPQNALRNLDRAWRNKKLGHAQTPRFKSRRGSKDSFRVDAPVHVKGKTIQLPKLGQLRAKESTVKLQGRILSATVSREADRWFVSLSVERDRPDPTAPAGRPIGIDLGIKSFIVTSSGVDVKAPKPLKRGLRKLQRLSRQVSRKQKGSRNRRKAANRLARHHRKVRNIRQDFLHKLSSDLTKTKQIIVAEDLNIAGIVRNRKLSRAILDLGWGEFLRQLDYKAEWYGSEVIKIDRWFPSSKTCSCCGFKLKKLELGTRAWTCPGCSTELDRDLNAALNILLEGCGEELIDQYPEFQGNLRLWRSSKSGGNVSKDLGSRKQMPNGLVSFG

SEQ ID NO: 7593 - protein, 373 aa, unknown
  TnpB Polypeptide
MITKTVQLKIKEPDILKFKLLRQEYSKALNLGIEYLSSQWPNKIKHSQKRIKTSIPHFRNTAAVSFNNQNWSIKENEGIYSVGFPIDGLKSYSALTLSDRQRNVLDRLSTAQIKPGNGHLFERKNKWYFVASLGFSEPRQAVGTNTVGVDLGLNNIAVCYDKEQGKTEFHSGKEVRFYRIKYASQRKSLGKVKKLNVIKKSKNKERRWMKNFNHKLSRKIVNFAAKMKAGIINFENLKYIRTTAKTNHKQRQLLGNTLHNWPFDQLKQFIIYKAKELGIIVNLIDPAYTSQECPVCHHIDSSNRSGIYFRCRACGYRSHADRVGAINITNRQPGDVVTASLPGIVYPSRDGLPDTALNLRVARTGNGQRTLTT

SEQ ID NO: 7594 - protein, 404 aa, unknown
  TnpB Polypeptide
MEKQTLRKTYKYRLYPTKSQQEILEKQLSLCRWLYNHFLEERKTFYEKNKTKLTGYDQIKKIPKLKKEKSELKKVYSQTLQDVVRRLDKAFQGFFRRVKAHKEGTKKTKPGYPRFKEYWRYDSFIYPQSGFQLKTKEKKLELSKIGSLKIKLHRPIKGSIKTLTIRRTKTNKWYVCFSIENNQELPEKKEIQQIIGIDVGLNSFLTTDKGKKIENPRYLIKSEGKLSEFQRWHSRKKLKSKNRKKSRLKVARIHEKVAEQRMDFLHKLSNQLVKNFQLIAFEKLNIKGMIRNRYLAKSITDASWSRFLQQLKYKAEEAGIWAIEVNSKNTSQMCSGCQNLVPKTLATRNHKCLKCGLTIDRDINAARNILQLAFNTVGTTGISACGVGRLLPTMKQETTDFNQG

SEQ ID NO: 7595 - protein, 387 aa, unknown
  TnpB Polypeptide
MVAIKIQPCVRTLRLKVKAEGYAWLNAAAIEANQVWNYANATSCKAALPFAGTGKLLTAFDLDKLTAGATEYFERIGSETIQRVNAEFATRRKQFKRPKLRWRVSKGSKRSLGWVPFKATQLKRKGKTLRFSGKAFRVFEREHLERAVWRSGCFAQDVVGDWWLCLPVKQAVERVTAAKEAVGLDLGLKNTVATSDGEKLQAGHFYRSIEQKIAGAQRRGHKHQAKRLHRTAARRRKDALHKFSRKIVDEYQKIKIGDVSSVKLAKTRMAKSVLDAGWGMLKTQLQYKGQQAGRCVLIVSERNTTRTCSSCKALTGPAGLDMLVVRTWVCNACGDTHDRDVNAARNILSAGRSPPSVSGNESSLAVAPPSQTSSRCEAGSSALKAAA

SEQ ID NO: 7596 - protein, 411 aa, Lentzea sp.
VQLRYNFRVYPAPGQRDALARAFGCARVVFNDALRARQTARENGRPYLSDGELSKQVITLAKATPQREWLGEVSAVVLQQALADLNTAYRNFFASVTGKRKGRKVAPPRFRSRKDNRQTVRFTRNARFAVLGNRRLRLPKIGDLDVRWSRELPAEPSSVTIAKDAAGRYFASFVVTTGRDEALPTAESEVGIDLGLTHFAVLSDGTKVAAPRFLRQAARRLARLQKSLSRKVKGSNNRKKAVVKVARAHAKVADRRRDWQHKLSTAIIRDNQAVYVEDLCVAGLGRTRLAKSVHDAGWAGFTGMLQYKADRYGRVFARIDRWLPTSQTCSECGRIDGPKPLSVRSWTCPCGSVHDRDINAARNVLAAGQADNSNDRGAQVRAAPVLAPRREAVTHSDAAPSTRSVERISTH

SEQ ID NO: 7597 - protein, 417 aa, unknown
  TnpB Polypeptide
LWSQLFKKHRLKGTYADRRRFYEQVKAEAKLGTMAQCCFDTAAWMWWSYREAHKAWRRNVAIARKEGYKWWLRKLLRREPQEPFTNGMNGKVPIWFDSRFGAIERSKHLKLCPYVARVSTLRRGIKLTIPLNPAKYHLDPLERGTLKSFQLVKRHGKYFVHVKVEFQVPDQPVHAVRGIDLGVKRSIASVMLKPNQPLRSSDFTIMRDGLKRDRLNRLEKRVVELQHARKWAPLKRIRHKRLHVGEYYDRLAAKQLVTTSQNCLVVVGYPKGIRYENFKGNGEAKLRKILAHWTYGREIRYIQEECAKLGVPTEAPDERWSSRTCHRCGSRHTERLTQSIFHCLNCGLTYNADYNGSINIGSCFLASPLIRRAIDDLAYARDEQARGIVACEPRSPHPFIYVKASEFILESACLAAV

SEQ ID NO: 7598 - protein, 403 aa, Syntrophomonadaceae sp.
MNKAYKYRLYPTNEQAILINKTFGCVRFVYNQMLTNRKTVYEQYKDDQETLKKQKYLLPADLKKEYAWLKEVDSLALANAQLNLNTAYNNFFRDKTVGFPRFKSKHGDKKSYTTNNQNGTIRLIDSKTIRLPKLKDVKIKLHRQLPPNSLIKSATITQTATGKYYISILLEYHKEIKPIEATPETTLGLDYSSPSLYVDSQANSAEYPKYYRQAEAKLQKEQRKLSKRKKGGKNRQKQRLKVAKLHEKVVNQRKDFIHKITRQLSDDYDAVIVEDINMRNLAGGLNLAKSTNDNAFGMLRTFLQYKLKEQGKQLIIIDKWYPSSKLCHYCGHKNTELTLSERAWTCSGCGSVLQRDVNAAINIKNEGCRLLGMPSNNKNRWANGDSLVIISALAGTSQEAPTS

SEQ ID NO: 7599 - protein, 266 aa, unknown
  TnpB Polypeptide
MHGEEWRFYLLVSLDVETPDMHKNIIGVDVGVRYLAVASTTKGDSSFYTGKHIVPKANHYARLRKRLQHKGTRSATRRLIAMSGRERRLKQDANHVVSKRIVERYPHALIGLENLTDIRERTKRRKGKRASVKQRRANTRHSKWAFAELHSMIAYKALLCESMTVKVDAHYTSQACPLCGHTSKDNRPQKGLLFVCQNCQYTLHADLVGARNVTLRTLLIRQDWMRTGVLSVCPDVSDHEAKAARLIRYAELRWSPDTSPRLPDVG

SEQ ID NO: 7600 - protein, 408 aa, unknown
  TnpB Polypeptide
VKNEMLVKGVVFYLESNLPSEAKFLLEDFRLAVNNAVRAGLQARVTSRNALVRIAYKDFRQGHPKMYSQHLVSAFEVAGSVLNNHRRRARKGVACRIPYVKRLMMKAENQAYRLDRKSGIIDLPIRAGCHVELKLVVSQYHRKYMDDTALSLGSLTVLPNRVIVAFRKNAPRQYAPESVLSLDTNERSLDGVFVGGDVAKVVKAEFSEVAIIQLRHHDRRKRLQKKKARDRRISRGLCRREGTREHHRIECRLHQVANAVLKFAEERRSAIVLEDLKGFKSKRSKELNRRLSMWPRRKLHQIIEYKAQWRGVPVIKIDPRNSSRTCPICGRIKDSRMGAEFACECGWHMDRHINASINLLQTAFSKGMAGGLRFNPGAFQHDVMMILYDPVTGARSEPNGTSGICGVT

SEQ ID NO: 7601 - protein, 442 aa, Frankia sp.
VRTVQAYRFALDPNEVQRAALTRHAGAARFAYNWGLSRVKAALAQREAEKSYGVPGDLLTPVPWTLPALRLEWNKAKAGVAPWWAECSKEAYSAGLDQLARGLKNFTASRHGRRKGRRVGFPRFKKRGKARDSFRYTTGSYGPDGDRHVKLPRIGRVKACEAMGALTGRLAGGRARLLGATVARTASRWFVSFTVEVDREVPTGPSRSQRTAGPVGVDVGVKHLAVLSTGEMIANPRYLAGSLRRLRSASRAYARSTPGSAGRRKRAARLARIHARVAHQRRNGLHTLTTRLAKTHDTIVVEDLHVAGMVRNRRLARAVSDTGMAQIRRQLTYKTGWYGSRLIVADRWYPSSKTCSGCGWRNPSLTLSDRTFRCQPCGLVLDRDVNAAVNLRNLVAASASETENTRGADRKTHSGGRVAGKREPGTASAGQTGSAAPQGTAG

SEQ ID NO: 7602 - protein, 386 aa, unknown
  TnpB Polypeptide
MRLTYKYRLLPTKAQAKLLKEQLELCRSVYNATLAVRKNAYERDGVSLNYYTTAKLLPIWKSIATDLSKVNAQVLQNVQVRVDLAFQAFFRRVKAGEEQVGYPRFKGKGRYHSLTYPQVGEHGGARLNGNLLALSKVGIVKVNLHRPIEGEIKTVTVQRNSVGKWDVCFSCEVEFKPLPVNTQIVGVDLGLKTFAFLSNGVKIERQRWMERDAKDIARLQRKKEKLPLGSPERKQVVHALQHAYQRSANRRDNFAHQESRKLVNQYQMIVFEDLDITNMQSQGKTVINRGIADVAWGQFVQFTTYKAENAGRSVLLVNPRGTTQTCSGCGQLVPKDLSVRIHDCPHCGLKIDRDLNAALNILGRGLASVGTGLPASHRSPRINAGE

SEQ ID NO: 7603 - protein, 392 aa, Planktothrix sp.
MYAIKLELKLNNAERTLMAQHAGFSRFVYNYGLALYKQVMDIKGGVTKKISTIRQVLTNLTKKKPEYAWMNQLSSRVYQNAFIALKNGLTRFFKGLGKFPVFKRKKDRDSFTVDSCNGLVTVSVGNFIKIPTLGTFRLYEPVPFTIASQTFTVSRHADKWYVSFAEKVPPLFHKVEKVGIDLGVKTFATFSDGTTIEAPASIKQVKIKLAKLQWRNRNKQLGNKKAGIPTSNNANKYYRQVAKLHAKITNIRRDFLQKLTTKISQKYHCIRIEDLNISGMMANSKLADAISNLGLYELRRQLTYKQSMFSTVVELVNRWFPSSKTCSECGHIQPMKLSDRVFHCQGCGSIKCRDFNASLNLEYAPPDKVRRASPELNDCGQSAADSPGRSSK

SEQ ID NO: 7604 - protein, 415 aa, unknown
  TnpB Polypeptide
MYLTIKQQPKLSKANYDILLELSRYAKNLFNEALYSCRQYYFNEGKYLRYEENYHLLKSSENYRMLNSNMAEQILKEVDGSFKSFFMLLAKAKEGSYSYKDIKLPHYLRKEGYYPLTIGFVRVANNILVLPMSNSYRKEHSKVEITIPPMLVGKRIKEIRIIPKSDGRFFEVQYTYEAGQDIKEELDFNKSLSIDVGVNNFVTSITNEGKSFILDGRRLKSINQWFNKNNARLLSIKDKQKITIKTKQQALLERKRNNCINDYISKCARHIINYSLDHNIGNIVIGYNPKLQNETNLGKRNNQTFANIPFGKLQNKLTYLCEYYGIRLIKQEESYTSKASFFDRDDVPSFTNGDDKEYVFSGKRIKRGLYKTSTGKLLNADVNGALNILKKSNVVDLTVLYSRGEVDTPLRIRIA

SEQ ID NO: 7605 - protein, 528 aa, Nitriliruptoraceae sp.
MYTTVVSHLCGTITPMPNENVPATPAERGQFTRAVEIVLDPSPSQQRWLRSYSGSMRAAYNWALEQVTTNLETRRDERARGFREDELTPALSWSRESLMALWRQVRDEVHPWWRDVSIHAFRTGIDNAALALKNYSESRSGRRRGRRVGFPRFKNRHSRQAVTFVELAEGVDHRHWINPDTRGHVRLMLPRRAGDDSWERRHTRPKAQQEAGRDRRAELAWLHTHQPDTVGEVWQLCEAGSAKVQALTIKFEGGRWKAVFRLRLLDGATRLRNPGEPVRQHGGAIGVDLGLKHLVTLDRPIAGLTDEHGHVPNPRILEQHLARLRRHDRAIARCEKGSRNRAKLLRRRAKLHGKIAATRKLFLHELSRRLAGGFDVVCVEDLNVAGMARRKGLRNGRSVAEASMGELVRQLDYKTSDRRAMLVKVGRYYPSSQTCSGCGARTKLALWQRVYHCTTCGLTLDRDVNAARNIRAEGQRLAREQHHVASIRGETSNGEPRPDETEPAPSGVGGRGSFEAATDPAAVRVVAA

SEQ ID NO: 7606 - protein, 363 aa, Moorea sp.
VFLNPEQRSLVRKWFGVSRYVFNKTVKLLQSGEIKANWKAIKTEILNDLPEWCKSVPYQIKSIAIKDACAAVREAKRKYKKTFQINRVKFRSRKNPRQSCYIPKSAVSEKGVYHTKLGEISYAERLPNNIGDGRLTSHNGNYYLVVPHEATKEKLDNQGRVVALDPGVRTFLTFFSETSVGKIGHGDFSKIQRLCQHLDNLLSKISKAKRGQKRRMRKATRRMIIRIQNLIDELHHKAARFLVDNFDVILLPTFETSQMSKKGNRKIRSKTVRNMLTFAHYRFKEFLKHKAKETGKTVVDVCEAYTSKTVSWTGELVNIGGSKIIKSKVDGRSMDRDINGARGIFLRALGDTPWLRNQLALVG

SEQ ID NO: 7607 - protein, 423 aa, unknown
  TnpB Polypeptide
MGKHTKIRAKRPKLAKKVYDNCRSFQYKAEVSQQTRQNLIRTLISCQKLYNDCLNQKKQAWSRSRTNINYNDQQNELPDFKLEFPEHKDINAFILQDVLRRLHKAFANFFRRCKEGAEDPGYPRYKSRSRYKSITLGNQSGWTLTGNILDVKNLGRFKLFLSRPILGEIQTINIKLDSCRDIFVTFICNHVPKKIYPEIKSNSDYEDDSVGLDMGLIYFLADSDNQTIKAPKFFRKAEKNIVKKQRSLSRKKKGSKNRDQSRIQVAKAHRKVSRQRRDFLHKVSYKYIKNYQTVYIENLTIKKMVLNHLFSKSIHDASWYLFFTFLIYKAEEAGRLVVEVDPYQTSQRCSRCHKLVPKTLSNRIHKCPYCGLVLDRDTNSAKDIKWVGTSLRSKITGFQTIVGPRNSLTDVTGESESPDFRRE

SEQ ID NO: 7608 - protein, 358 aa, Marinobacter sp.
METARYTKTLKVRIRDKHSKVLASWAYSVNQVWNYCNELSHRSIKERHTWLSGYDLQNYTKGAGKDLGLNSATVQMIGHEYAVRRKQFKKNRLNWRKSGGVRRSLGWIPVRKDCIGFKNGCVYHNKQYFKIWDSFGLSQYTFRSGCFTEDARGRWYFCVVVTAKPEQTCGTGSVGIDLGLKTTATPSSGEPLEAGRFYRDQEQKLGIAQRTRNTQRVKAIHAKIRNRRHDALHKFSRGLVNDNGLIVVGNVSSSGLAKTNMAKSVLDAGWSTLKTLLEYKCEHAGGVFLEVDERYTTQACSCCGSVSPNSPKGRAGLGIREWTCECGVTHNRDSNAARNILAAGHCRLAVGIPLQKAG

SEQ ID NO: 7609 - protein, 367 aa, unknown
  TnpB Polypeptide
LREIRSDDGSRVAVLDLMLEVPAKYVSPLEQETRVLGFDWGVRSLITVSILEKPEGDEAYRQVSRPVFLDTGGIDGRQARLRREIDRLQACRDRYVLLVKQALTAKDEQEIPLPVHFPGWQKQVGTYEARMKQCWKTYERRNRELAHLASNVLILLALLYDCRLICGENLTTLKTEGRGRGVRGRFRNWRNTTTVRGELWRVLKYKCHLLGLRARQVEPRGTTHTCPHCHQPAKTFASSAPADRKKAIEWGAWLCCSNPDCLWNGARDYAASVNIARLGMAFLITYQETKRYVAYRMADSSVKPALYSSAGATLLLPSQGITPRPSEGKHSYYAGWSYSTLLRTSRPKRLLAVLSTSQLRKYVLRSA

SEQ ID NO: 7610 - protein, 404 aa, Thermodesulfovibrio sp.
MLKAYKYRLYPDEEQKIQLSKTFGCVRFVYNYYLAKRIELYKTKQKFMSKIDCNNHCNKELKNEFVWLKEVDKFALTNAIYDLDNAFQKFFKEHSGFPDFKRKKSYRYSYTTNFTNGNIEVDFDNNKIKLPKLKWVKCKIHRKFNGKIKSATISQVPSGKYFVSILVDTEIKQLPQNNNVYAFDLGLKEFLIDTHGNHIEDPKAISKYENKLAKLQRQIAKKKKGGKNWNKQRIKIARLYEKISNIRKDFQHKLSSKIINKNQVIISEDLNVSGMIKNPHIAKRISDVAWSEFCRQLEYKAMWYGRTYHKISRWFASSQTCSECGHINKDVKLLSIREWVCSNCGTIHQRDENAAKNILNQGLRELNMVQSTVGTTGIKTPVELVGYEDDEAGNSNREVRSLRL

SEQ ID NO: 7611 - protein, 358 aa, Chloroflexi sp.
LSKATRQLRLYPTAEQSHLLMAHCQEYISTVNVLAAAFDADLLPAKVSTKDFRAVLPSAVKNQTLRDARAVFKRSLQLDCLPVLKKPICQWNQQNWRMEAGLLILPVSLAGKTQQVRIPCANVPLEGKPGILRIKKKRGKWIADISLTVADAHSSDGQAVMGIDLGIKVPAVAHIRGQGTRFFGNGRYQRHMRRRFYSRRKKLQKAKKTRAVKKGKGKEARWMKDINHQLSRQIVNHAQEQGVGTIKVESLAGIRKSTTRTSRGAKARKNNRMKNSWSFSQLRLFISYKAAHLGIKVEQVDPAYTSQQCPGCSARNKAQDRSYVCAACGWRGHRDGVGAINISRRAGLSGKRASATGA

SEQ ID NO: 7612 - protein, 387 aa, unknown
  TnpB Polypeptide
MLIAHKIELRPTPEQADYLNQACGARRHCYNHLLDHFSQPGVMWSKAAAYQHYMTVLRVAFPWYSDVSSRVTRNAIDDLDAAFKRFFKRVKAGIKPPGYPQFKKKGARDSFALREETKFDVEGRGLRIEKLHGRIPMRQELRFTGRTKQVTISKAAGRFYASILVETDDYNPHAPMEPSVGVDFGVKELAVLSTGEVIPANQKLKKNLKTLKRRSRNLSRKQKGSRRRAKAKRSLARLHQRIGNQRAAALHELSDKLTRTYQVITIEDLNVKGMVRNHSLARSISDAGFGELRRQIEYKAAFRGVTVVFADRFFPSSKMCHACGQLHDMPLEKRTMVCDCGHVMDRDINAALNLDRYGLDRLDALRPDVKRTQEPCQTATAAMVMTA

SEQ ID NO: 7613 - protein, 223 aa, Planktothricoides sp.
VVGIDLGIKALATLSTGASIKGDASYRNQSKKLALLQRKVSRKVSGSANRYKAQVKVQRLHRKIANLRKDTLHKLTSQLCKNHAINVIEDLNVSGMLANHKLAKSIADMGFYELRRQMEYKSELYGSQLIIVDRFYPSSKTCSNCGAIKDSLPLSERVFYCEHCHLKIDRDLNAARNLEKIGRATAKSTPVDNLEPTPLVEAGSKTNSNVVKIKLSDLMSKFG

SEQ ID NO: 7614 - protein, 401 aa, Cyanobacteria sp.
MLVLEYKIKAKPNQYQAIEEAIRTVQFVRNKCLRYWRDAPKDAQINFAALSRYSTELRNEFKFVKDLNSMAVQSSAERSWLAISRFYDNCKSKKPGKKGFPRFQKDNRSVEYKTSGWSLHPTKRQITITDKKGIGLLKLLGKWDIHLYPVKSIKRVRLVRRADGYYCQFCIDVECTDIQPKTGKEIGLDVGLESFYTDSNGYHEPNPKFLAHAESDIKHNQRLIYKKKKGSNNRRQARKRYSKKHLRVSRQRNEHAKRLARCVVKSNDLVAYEDLRIRNMVKCHNRAKSISDASWYQFRLWIEHFAKKFGKTAIAVPPHNTSQECCICGQKVKKELKVRIHSCGCGLTIHRDINAAINILLRAKSRDGQSRSNATGVVASTLVGAILLEQATTLNVESPLL

SEQ ID NO: 7615 - protein, 409 aa, unknown
  TnpB Polypeptide
MVHIAFNRFQEGYSEKQITEYLNARFVANCWVIRSAIKEAHVLFDVQGQRHIVFGGKWNLKQYLKGLITKEQFKKNRYMPLCSIGERQYAGNRLFDFDFINRAVVFKPGKGIRKEIRFCPVKKKLAQELAKVQELAEQKKIPVTVKFTDKHLFLTYDESLIYNEAYKGLKHNRVLGIDMNPNYIGVSVIEFDEHDEFKVLHKEVYDLTTLTKSSGEASPHTKSKYYTNKLRHETIAIAHRINKLVDYWKCSKLAIEDLSIKPSDKQKGRNLNRLCNNRWERQLFVNKLKMLAGIHRYELVEVNPAYSSIVGNFAYGNENTPDMVASAVEIARRAYKKFEKGWFYPRFNVERFDEQWKQTLSGVKTWKDLFRKVKEAKLKYRFLLSDYIGNAVFSKFYNPHRWSFYLFAK

SEQ ID NO: 7616 - protein, 428 aa, unknown
  TnpB Polypeptide
METVRSEDTKARIRESISETRARRQTQVCRVFELKVSIRHNPKEVFTKLAQCFKEAKWVVNDMLSLSNKSKDISLFDYKYTEHKNVVHYDKDKNPITDTISLPSVLHRATVAQKRTDIVNLAKAKKKGIKVGALKFKSEVNCLPIITGYTQILDGCRITIPGFRKLRVHGLDQLQQFEKFEIADAKLVRKASGYYLKVSVMLPKSKRIPTHKNVGLDFGIKDSITTSYGDKYKCDVREIDYLKFLSRKLNKRGVEKNKKKSKRYYRCMSQLRREYERLANRRKDFANKIYHKLTTDYDVIYFQDEQIKGWQKGLFGKQVQSSCLGSLKQRLVALEASGRSFKISKWEPTTKMCPACGCINHPTLADRTYKCGCGYTMDRDTHSARVVLMIGSSKRAVCLEQATVEGVATMPASDSGTHANPLMRKQSI

SEQ ID NO: 7617 - protein, 367 aa, unknown
  TnpB Polypeptide
MVEVKTYRYKLYNRDALQYLDRILVISSHIYNHCIALHRKYYALYHKSLHKYALSKHLTKLKKRYTEWNEVPSQAIQDITDRIDRAYRLFYAKLKNSIKPSPPHFQKSSKYRSFTTKQCGYKFHDGNKVRIGVKEFAYWNSRPFDGRIKTLTVKRKSNGYYIYVVVEQESKTETLAKSGKIVGFDFSLNNFLVASDNSDCSIPKLMRKNLKSLRNLSRKYSLSKGKRGSLHRLQKLHEKITNQRNDLHWKLAHRLCKAYDVMVFETLDLASMDRRFKKSINDFGFNAFLSILEYVAHRTGKTVMYADKYFASSQLCSDCGYKNAALKDIRIREWVCPNCGSHHNRDFNAALNLQKVGASTFSQCCSN

SEQ ID NO: 7618 - protein, 399 aa, unknown
  TnpB Polypeptide
VLSATRVRLYPTDTQKGALAAQFGCARWAWNEALVLTQQVYRETGKGLTFVKLCARLPELKGAHEWLADCDSQVLQASLRHLAAAFQNFFEKRGRYPRFKSKRDRQSIQYPQRVKLDGDRIRLPKVGLVKCVVHRPIRGAVKTVTVSRNACGHYYASILTQDDLPMPTVSTDGKVLGVDVGLLHLAVTSDGSKFENPRHLRKAEKNLKRKQHSLSRKKKGSSNRNKARKIVARVHERVSNARSDFLHKLSRRLVNENQVIAVEDLNVKGMTKNPNLAKAIHDVGWGAFAKMLEYKCERDGKALVKVGRFFPSSKTCSDCGFVRNAMPLDVRTWTCVNCGSLHDRDVNAARNIRQEAVRTILAGGAPATATGGNVRRTSGRRSRSAQLPAKVEAPSFRAG

SEQ ID NO: 7619 - protein, 215 aa, Streptomyces sp.
VPSRIGLTHFAVLSDGTKTDSPRFLRRAEKKLKKAHKELSRKQKGSKNRAKARLKVARAHAKVADARREFHHQLSTKLISENQGIAVEDLPVAGLARTKLAKSVHDAGWSSFIGMLEYKAERYGRDLVRIGRFTPTSQTCSTCGVKDGPKPLNVREWTCAACGTVHDRDTNAAINVKTTAGLAVSACGAPVRPGAIPAQREETGSHGFPTRHRAA

SEQ ID NO: 7620 - protein, 441 aa, unknown
  TnpB Polypeptide
MKVKRTGRFKVKATHPDYKMIRNHTIEAKEIYNYANYIIRQIYFKNSKNHDYSMEFIHEYPELSEDFNSYLSEKTQFTTTFYRIMCKFSKIKGYSVNSKITQNIVDTLKRDWKSYWKLLKLKTNGKYDNPVNIPKYKKKYSIVEYNSQTISKTKLKNGYFGTLKMKEGFKIPKFYKEYDLKSARALWKNDSLYMEIVYEKEIPEAISNEKAASIDLGGKILMAVVYNFNRRGICISANMLRSLNHYYNKIIGIMTSLLPKGIKISNAIQNLWRKREEQIRNLFGYYTNRLIEEFASLNVSKLIIGKNKEQKQEIDLHSKLENRNFCMIPFNKLIEILKYKCQENGIECIEQEESYTSKASFLDNDYIPVYGEENREYEFSGWRNGRIYKIKEKNQKIHADLNGAFNIMRKAGHELTTDIPSLRKSCIFPIGKFKAKNLNYA

SEQ ID NO: 7621 - protein, 444 aa, unknown
  TnpB Polypeptide
MVTLTWKFTVIPTQQQAEVLWELSETCRLLYNHALAERKYVYDTYNYFITYREQQNALPQVKKLFPRYNQVYSKVLQMTLKKLDAAFKSFFGLLKRGDNTARPPTFRGKDYFFTLCYNQSGFTITKQTIRFSHRHPSKTELLFPVPFDFSAYVIKQIEIFQDQYDKQFYLAVTFEHEDPPFIDNGLYQAFDLGTTKHTAINLHGKFLESTVKRPDRYWEPKIRSLQRRRDHCKQGSRRHRLFSQRLVTIKRKCRNQTRDWQHKQSLNLLRNTKASTIIVGDLSPKQMTGKKNGKIKGKKKKYQKSVNRGVHNTGHLGRFIELLTYKAKKLGKRVTVIDERDTTKTCAVCGHIKERMLLSERIYQCEICGIVRDRDQNSAINIMKRFLSHNALWTGYQYFINRIDNLRYTVNGKTKVPPHLVDKGFGELVGSPLLQLVAVHMRIY

SEQ ID NO: 7622 - protein, 358 aa, unknown
  TnpB Polypeptide
VPPRRFIWGRGPKEAFRDLEKALRNWRQKRARFPRFKKKKHMNDNTARLTGSIRVFPRHVQLPRIGKVRTKEWTDKLLALLESNKARILSATISREADRWYVSLTCEVERPDPPQREGEPMGIDLGLSAFLVLSDGTRIEAPRPLKRKLRLLQRRSKQLSRKQKGSNNFRKASLRLARLHRRVQNLRRDFLHQVTTWLAKTKPVMVWWFIWGRGPKEDLNVRGLARGPLSRPVADVGWGTFRRMLEYKAGWYGARIIVAPRHFPSTKTCSRCGWVVPEMPLWARVFHCPRCGLEIDRDLNAALNLRQYGLAVLSGPTGSSPGSHACGDPSSGGTVGNNRSTSYGSLKQEAGSGRLFSR

SEQ ID NO: 7623 - protein, 536 aa, Burkholderia sp.
MDYPLGISGVKYRLFPTRDQAETLSRWMGCERVIYNAKVNEDRYHWAFKRKAVALAGERTPYDARYAQFKSDELTPWLSEVPSQILRNGATKWHDAKGRALRGEAGQPKLKRKSGRQSVLLTSELYAFVPLATGETSPRGDFVRHKLVVGTKKLPVGEIEFEAHRPYRLPKQIVVSRERGLWFVSFCFGAEAEDWAPDDEADRPWWAQGTHPDLRRTRSERLYELEALGEEALAHVVLGIDRGVINPAVDSRGVFRALDPVVVERIARKQEGAKRHQRRLARQVKGSKNSSKTQRRIARKRGYETRARRDWVEKVSHAIATDDTVQVVAMEGLRIKNMTKAPAAKPDPKNEGQYLRNGAAAKAGLNAAILASCWGLLEERLGKKLSVRDKLLVKVCAAYSSQECSACGHTHPDNRPEQSVFKCLACGFAAHADLNAALVIAQRAVEQILSGSEREAASVDERERAGRAGRKAAAIAAKAAQKEGRKGAASKAAAGNAGVGRSRVPEEGTAVRPGRKPGRAAPLRQETMKSVGCLGL

SEQ ID NO: 7624 - protein, 265 aa, Acinetobacter sp.
MKTLKLRIKDKYCKELDQLALEVNFVWNYVNDLCFKYLQRKQQFFSAYDVAKYTKGASKECNLHSQTIQAVTEELVIRRKQFKKAKLKWRVSNKKSARRSLGWIPFKKVAIKYADGYIQYGKHQFKLWDSYGLSKYNIKTGSFVEDSRRRWYVCLVVENVQQVKTNAKTSIGIDLGLKDLATCSNGMKLKAPQIYRQYEQRLGIAQRAKNKKRVKAIHAKIKNIRQNMLHQFSHKLVNEHAAIFVGNVNAKALAMSMPKHWHRPN

SEQ ID NO: 7625 - protein, 372 aa, Bacillus sp.
MILAKKVRIKPNKEQEHQLWKSVGTARWAYNWTLGKQEENHKHGGKFLSDGILRKELTVLKQTEEYAWLYEVSNNITKQAIKDACEAYKRFFKGLADKPRFKSRRKSRPSFYNDNIKLKIKKKQVLIEKVGWIKTSEKLPLDVKYSNPRVSFDGKYWYLSVGIEQEFEKEKLTDVSLGIDIGIKELAYCSDGQKKKNINKTKVVRQAEKRLRRLQRQVSRKYEMNKEGTRFVKTSNIIKIEQEIQQLHRRLSNIRNNHLHQSTSEIVKTKPFRIVMETLNIKGMMKNKHLSKAIAKQCLCEFKRQIQYKCRKYGIEFVEADKWYPSSKMCSNCGNIKKELKLSDRIYKCNCSHEIDRDLNASINLSRYKLAS

SEQ ID NO: 7626 - protein, 425 aa, Lactobacillus sp.
VIIKTRTYRLKPNQRMKKVLDSLCDYRRFSWNLGLETWQNMHEARQLALTQHLKAELKKPRKKQKLTNAEREILANNPVSSWRRIRDELTENKQYWQTKLPAHVFNLAIQDLGNAWQNFFDKAQPGWGKPKFKSKKAPRQGFKMDQAKIKDGCLFLEKPRAVKETWNGFKLSSAPLSDDFGTISFYKEKNRYYASIPFKISDPEDKPKTGRYTGVDINVGHFNYRDGQCIVMPKSLAAVYCKIKHYQRQLSKKRVVNGKIKGMQSKRYMKARNKLQAAYARAKNIQNDLMQKFTTKLVSEYDSIVIEDLSVKGMLMSHVASKGMHRSMFGRFRQILTYKCEWYGKKLIVANKLYPSTQRCAACGLVKKGDEKITLRGNKKHGTKHNEFVCYNPNCRNYNKKVDRDENAMLNLIILVKHPELNKAL

SEQ ID NO: 7627 - protein, 391 aa, unknown
  TnpB Polypeptide
MLIQRTIPITLEKSNDLLQTIEEFNRYQKGISEDCFNSGEAKNALGLHKSVYYSVDSQLTSQLKCSAIRLVAGAYASAKSNKRPATRPFIFRRKRALFLIGKRGRDASFSKCGKISISTIDGRKKVGFKIPKAFQADFSNASCIDSLNIGLDGKGSVCITLEVKDPKAITPVGIDLGVRNALVASTKQNTLVISGKELSEKRKRIRKTRSRIQSKKSSKKELGKDTRSVRRVLKSLSRKQRNKTKTFCGETASKLCKWAPENAVLVFEDLKIKRSSRKEHIRKGTRRKLNSFCYNLMIQSVTNRAERDGLAIAFVDPSYTSQICNQCGLLGDRKGSRFSCSLCSHNDCADRNASLNILSRFAVLRGGAHLSMCAEARASATGKLVPLGTSN

SEQ ID NO: 7628 - protein, 254 aa, Oscillatoriales sp.
MLVFEFKAYGNQQQFDAIDEALRTVQFIRNKAIRLWMDHVNIGKNELSKYCAVLAKEFPFCNKLNSQARQASAERAWIAISRFYNNCKKKVVGKKGFPQFQKDNRSVEYKTTGWKLAAHRKSITFSDKNGIGQLKLKGTINLHFYQFNQIKRVRLVKRAGGYYVQFCIDVNRCEVVETTQNAIGLDVGLKEFYTDSKGVSVENPRFLRKGERRLKKAQKCLSKRVKGSKNRGKARQILGKRHLKISRQSYCTML

SEQ ID NO: 7629 - protein, 374 aa, unknown
  TnpB Polypeptide
MRLTIQLKLLPTLEQADALRRTLVRANEACDYISQIAWEAKTFRQFAIHKLCYKGVRETFDLAAQLTVRCISKVADAYKLDTKHQRTFAPLGAVAYDERILYYNRASVSIWTLDGRQAIPFVCGERQRALLQSQRGETDLAYSEGKWYLFATADVETPLHIDVAGVLGIDLGVSNIAVDSDGEIHSGTAIKHVRYRHRRLRNKLQRKGTKRSRYRLKILAGQEARFAKDVNHVLSKRIVAKAERTKRAIAVEDLTHIRTRIRARRSQRATLHSWSFAQLQAYIAYKALRAGVPVHRVDPRNTSRTCPACGGIDKNNRKTQALFVCTSCGFAGLADVIAAGNISRRALVSAPYVSDTSRAATGSARDKPKPFRLG

SEQ ID NO: 7630 - protein, 441 aa, Pseudanabaena sp.
MAKLKKLMGVQQNLLDCDKETLAVITYLCEQSNSLYNCGIYWARQIFFKTNRIISKFDPIYEVGGNIHAQAMPSVAAQQTLLSVSEAFKSFKELRAMFYRGELEKMPKVPNYRDSGGLFKVAFPNRGDGKPTFKDGMVRFPLGLQVKRWFGIKEFFLPLPKNLDFTKVKEFTILSKNGSFYLECSYAMEKVQVDVDPNQALSIDLGTSTNLMACVDTLGNSFLVDSRQAKAMNQLYNKRVANHKQGKAKDYWDKVLDGITRKRNHQMRDMVNKSARKVINHCLKHGIGTIVVGWNDGIKTESNMGKTNNQSFVQMPLARLKGRIEQLCLIYGIYFVQSEEANTSAASYLDGDSLPEHGQKPVGWKASGRRTKRGLYRTSDKSLINADLNGAANILRKVARNLDLDLCRLGRRCLSTVSRVRIWLTKPNLVRKTPRLFRAGS

SEQ ID NO: 7631 - protein, 396 aa, unknown
  TnpB Polypeptide
MEITKTLTLRLLFTEEQANMAKQHADAKRACYNWALKESMSEFENAGKRPSQAELSRRLTVLKNTATAPWWTKVARATLTVAITDLDQAYQRFFRVQKEGVKFTDKVKQKAARQKRKLTPYDMKGHPKFKKRENDRLSFYARYDRLAIRGNTLCLETIGRVSFRSSIEIPSESKVSNPRAVYINGKWLLRVGVTFQQQEIDLNDCEMGVDVGIDNLAAVNFGEIDLIYKHVNKEKRIKRLERRIRITQRALSRKVRGSKRYEKTRERLREYHFHLSCIRLDHIHKITRKIINLRPKRIVLETLNVNGMMKNRHLSKAIQSAMLYEIHRQLEYKAKWFGIKVDRVSQFYPSSKTCSACGAYKKDLKLKERVYKCSCGLEIDRDSNAARNLKQYNGKS

SEQ ID NO: 7632 - protein, 328 aa, unknown
  TnpB Polypeptide
VQNHIENSFRNHFKNRKHFKLPKFKKKKDRQSYTTYNVNNSIKVDFEKNILYLPKLREGVKIELHRRFDGKIKSVTISKTNDGRYYASILVETENPRNKVVEPKSKACGIDLGLEHFATVTNDFGSYKLEHPKYLRLGEERLKRLQRHFSRKQKGSKNGEKARLRLARQHAYITNACNDFLHKLSKAIIDENQVVVVEDIHVKGLLKSRLAKSVADSGWAKFLSYLKYKAEWYGRTFIQVDRFFPSSKLCHRCGYKNDDLTLNDRTWCCPVCGETHDRDVNASVNLYFVGLGRPEVKPVERALVNDRSPHGLPKKPSCDETGSSTAKG

SEQ ID NO: 7633 - protein, 537 aa, unknown
  TnpB Polypeptide
MNKEVLKILTEKKSNSNFVTVECLLAFDKEEDKGRVLTLMRKFSSMVRFAYKRLMEGASSKELKKLLAQKYGINTRYSSDAILLAQQTLESCVEREQNPKKLVFGSRKLFEQLQKKHLKGKRREELRQKWEERRYGILQSRGDKSKEGNLNIRLVNLNNQWNLRINLGNGEYVWAKVIRSAKRKTDKWISFVSSLEHAAKTGDWFPYTVRLKLRNGKIYAQFSREEKLPEVSITKDNGVIGIDINAYPFHLALVHTAKDGNLEKYERISLDSLLEGSSEKREYLSWQIAHQVLESAKRERKAIVVENLEKLPKGKRGDGLPKLRQKLQKWIYKALLQKIEIVAKRNGIQVIKVNPAYTSIIGKLKYAPLYNIDKDTAGAYVIARRGLGFKERLPKKYKDLLKDAEFLSYAIARIEDKIAKLKQEIREEKNEYKRNRLKSALWKTRKELNLLYKHFRGSGESEPATQQTVNRKMERVRGFTQVERKSWQVLSVALAFSCLESLRDFSPLKRVIFARDWVGAAKPNGLVPPYLVRGRLC

SEQ ID NO: 7634 - protein, 407 aa, unknown
  TnpB Polypeptide
VLIAHRIALDPNNVQATYFARAAGTARFAYNWALAEWKRQHEAAKANPALPKPSQQSLRRQLNAIKREQFPWMLEVTKCAPQMAIIQLGQAFQNFFAGRARHSQFRRKGVHDRFTLTNDQFDIDGCRIRIPHLGWVRMRESLRFAGKPMSATISRVADRWFVSITVDTPDTSHLPQAENQGTAGVDLGVSTLVTLSTGETIPAPKPHKALLDQLRRLSRSLSRKQKGSANRKTAKARLAKLHARIANIRADTVHKLTTDLARRFHTTCIEDLNVRGMVKNRHLARSIMDTGFFEFRRQLEYKAAMRGGVVVVADRFFASSKTCSACGRKLDDLPLSVRQWTCPDCGSIHDRDVNAARNLLAYGLAALSGSTASSAGCQACGEAGSGPDRKTRVKPASMKQEVSFAPV

SEQ ID NO: 7635 - protein, 408 aa, Sulfolobales sp.
MKLRVRVDHSTYSALKEVEKEYREVLEDAMNYGLSNKTTSFTRIKAGIYRSEREKHKDLPSHYIYTACEDASERLDSFEKLKKRGRAYTEKPSVRRVTIHLDDHLWKFSLDKISISTKKGRVFIFPTFPKVFWKYYNKGWLIASEARFRLMKGNVVEFYVVFKRDEPKPYEPKGFIPVDLNENSVSVLINSKPLLLETNTKKITLGYEYKRKAITAGKSTKVREVRRKLRKLRERDKKADIRRKLAKLIVKEAFESRSAIVLEDLPRRAPEHMVKDVKDKQLRLRIYRSAFSSMKNAIIEKAREFGVPVILVNPSYTSSACPIHGAKVVYRPDGGSAPRVGVCEKGKEKWHRDVVALYNLKKRAGDVSPVPLGSKESHDPPTVELGRWLRAKSLHSIMIERKMTEMRV

SEQ ID NO: 7636 - protein, 384 aa, unknown
  TnpB Polypeptide
MYKSFKVMLHPNNKQRTKLFQCFGVSRFTYNWALGRQQENHNNGGKFISAFDLEKEFVQLKKLPEYTWLNMFSSYISNMAIIDACTSYKNFFNGNSDFPKFKSKKKSKPSFYVHNCKIKFTSTHVKLIRLSDSKRKNKRKLNWVKLAEVGRVPTDCKYSNPRVTFDGINFWLSVSIEVEDSTEILTSEGIGIDLGVKDLAICSDGVTYKNINKTKEVKRLEKKKRRLQRKLSQKYVANKHEKTKNILKLEKELLKLNHRLANIRHNYTHQITSEIVKRKPSFISLEELNVSGMMKNRHLARAIQEQSFYSFKAILSYKAKLKNIQIIEVPMFYPSSKTCSVCGTVKSDLKLSDRVFICPECGNKMDRDLNASMNLKNYGLSALK

SEQ ID NO: 7637 - protein, 368 aa, unknown
  TnpB Polypeptide
MKRNKAFKFRLYPTYEKEVLINKTIGCCRFVYNKMLAERKESYELNSESISRTPAELKIEFPFLKEVDSKALASEWINLNKAYGNFFRDKRVSFPKFKSKKNDRKSYKTFLSKTKAFDTSRKFIKLPKIGFVRCKVHKEIPSDWRIKSATISQTPTGKFYVSILCEYETEIEPIIPDRNNTIGIDYKSNGFGVTSEGETLSNHRYFRENQSKLSREQRRLSRKKKNSKNFNKQKLKVALIHEHISNCRLDQVHQLSHLLAEKHDVICLEDINLQNIAQSLNLGKSTNDNGFGMFRSFLKYKMEERGKYLIYIDKWDATSTVCSECGAYHKDIVNSLKVRKWTCPDCGTHHDRDVNAAKNILRLGLEQL

SEQ ID NO: 7638 - protein, 395 aa, unknown
  TnpB Polypeptide
MIRTFQYKLYPNQSQIKTLSRWLGKCCWLYNNALSQRIKAYKRRGESVSYNDQQSLLTEQRRRIESLRLVPVAFSRDALRRVDRGMKAFFRRCKSGDKPGFPRFRSGHRYNSLECLAVGVYLKCDRIRIPNLGTIRCRGRLLPEGEHKALRVIRRASGWYAQIILDDGKQPPVTKPAESSVGIDVGLTHFATLSDGTKIDNPRFTKTSQHKLTALQRRVSRRKKGSDNRRKAVKALRRQHERIADQRKYFCHQHTTELVSRFDLIAFENLNISGMVRSRFGKSILDAAWGIFIAQLVVKAANAGRLAVAVKPRGTSQECPNCGRVVPKLLSEREHNCVCGLRCHRDHASARVILARGLVVTGSNRPWTDSATDSAPVAHDQADRLKRVDRKLAKR

SEQ ID NO: 7639 - protein, 355 aa, unknown
  TnpB Polypeptide
MAHKIALDLNDHQRTYMLRATGVARFAYNWALEQWGIQYRAWREDDTLPKPSQFSLRKQLNEIKKESFPWMLEVTKCAPQLAIIQLGEAFKNFFAHRAAYPKFRKKGVHDRFSISNDQFAVQGKRIRIPKLGWVRMREALRFSGKLVSITVSRMADRWFVSITVDTEDRRQQHNENQEAVGVDLGVSALATLSTGEVVQGPKAYSKLVKRLVRLSRSLSRKARGSNNREKARRKLARLHAGIANIRQEGLHQLTTSLARRFSIIGIEDLNVRGMLRNRRLSRSIAMAPFMSSVGSWNIKAAYMAGQLLWPTAGSPAAKHVPTVVTGWKPCLCPCVIGYAPNAGHTMIVTSMLPSI

SEQ ID NO: 7640 - protein, 491 aa, unknown
  TnpB Polypeptide
MAQLVSEIQGISSYATYVTRNDTQLEAGLAMAGAVQPATAGRRAGVTMPEFLANGRTGRSRKEWLVRYNVVTAFRSWQERTKAVNGESSKYVSQGWKRTMNANPPSYGGDYINLGTVDKQYAVVENDDPFSDGEIVLKMVIRGAWYRLIFRFDNARFTEGKVTLPLIKVQDGAPVFIFSVVTDNPVVQFSSDYVIGVDVGINDYATVVVRNTKTGEIVQQTTLSQRVHSLWNSVHASERQVKQLREKAVSLSLYDRQGRMAARDEADLHRAAASRKKRELAILAAQEIAYLSYCYGNTVVAVEDLSWIKNTMQNGRWNRGAFMQWLTHYVSQNGGWVVAVNAANTSQTCHVCGAEVEHPEHKVSQCPKHGDMDRDVNAAANIAARAVPKVEKARKTRAKSRKLQPQAPLKTPVARCSLKYPGRDRTKNTPTPKRKKKGVKTFSSPARAQAYRLEASVLADCNTCSINVAETSPAAIKQGEKTYTCRLHNPN

SEQ ID NO: 7641 - protein, 423 aa, unknown
  TnpB Polypeptide
MQLTERHLIKPNHELYATLDDLTFKAKNLYNHGLYLYRQSYFEHKSNPDVPVLSWAEIDKSLRKQGHDDIRALPSKVANAVLKNLGENISSFWKLVRLKNKGGLAQKPKLPGYLHKTEGRYPLSFNYQTFGAKRGSNLELFLCPKGINLPIPTKVTNPKQVRIVPNHNNFVIEVIYNVEESAPKHTSKYAGIDLGVDNFATVTFSTKNRPLIIKGLELKSINQGYNRLIAKAQSLLPASCKTSKSIHRLWSRRSWILRTKIHQMTAFLANLFDEMQIEKVFIGKNTGWKQKLPFGKKVKQRFAYLPYETFIEQLQYKCQLRGITVITQEESYTSKASFLDNDDIPVYGETDNPKFSGRRIKRGLYRSSKGQLINADVNGSYNILKKGLVNNHLSFNVDNPLIQPLVVKGIGKEPNEKLVQLYM

SEQ ID NO: 7642 - protein, 406 aa, unknown
  TnpB Polypeptide
LSSITQGITIKVKLDLHRIEDVSKVTNTMEQYRQACNYISEYIFTHGFQLSQLKLQKGIYSEIRVKFGLKSMMAQSAIRSTIARYKTVKTQLKQNPYRFQDKNTKKRYHVSRNLEWLEKPINFAHPQVDLVRNRDWSKLANGNLSINTLEGRIFATPICSDNFDKYFSSDWKLGSAKLVEHDGSWYLHISATKLIEAVNTEQIAHVVGIDRGIRFHAVCYDEQGKTTFFSGNKARTKRNRFAKVRAELQSKGTKSAKRVLKRISGRENRWMTDVNHCLSKTLIKKYGKNTLFVLEDLTGITFDEDNLKGSTESRCEKRSWAFYQLEQFLTYKANLNHSAVLKVPAQYTSQRCPKCGCIDKKSRNHKSHIFRCKCGYCSNDDRVGAMNIQQLGVRYVSGEKKPKLTA

SEQ ID NO: 7643 - protein, 370 aa, unknown
  TnpB Polypeptide
MLKAYKYKLEPTTEQKVLIEKHIGSCRYIYNWALSLKVKSYEETGKSLSQFDINKRITSLKVENKWLGEVNSQSLQGMTRNLESAFTRFFREKKGFPNYKSKKNPVQSFPVPQHYSVDFENNTVKLPKIGVVKAKLHRVFEGKLKTATISKSRTGKYYISILVDNGKELPAKETFSEITTIGVDVGIKDFAVLSTGEKIENPRYLKSSLKRLKVLQKRVSRKQKGSKNREKAKQRLAVLHDKITNQRNDFQNKLSFKLISENQAIALETLNVKGMVKNHHLAQAISDSAWGSFVTKLEYKAEWAGKTILRIGRFEPSSKLCSVCGYHNSELTLEIREWTCPDCKTKHDRDINAAINIKKFALIDQNLIGV

SEQ ID NO: 7644 - protein, 366 aa, unknown
  TnpB Polypeptide
MNVDRTIKLKLGVSEEDQETLKKTITLFNTVFNEVAQYGFEHKTHSKVSIHHATYKQIREKHPELPSSLVQGARDVACEALKGVKLKHLPTAKPFSSIRYNQRVITYYLRYGKVSMATIKGRIKATFQIPRYYQNYINWEVRSSTLKYDVRKDAFFLHIIFRTESPKPSGDRVLGIDRGIVNIAVCSNNTFFNGKQIKNVRGKYAYLRQKLQSKGTKSAKHLLRKISRKERQFVTDTNHCISKTIVNMPYDIFALEDLTSIRVQSRKGKDFNRKLNSWAFYQLAQFIEYKAESLGKSVIYVDPRFSSQKCSKCGDIRKSNRKGNSYHCKACGFQLHSDLNASINIAQAGISCLSRLSVNQPNVETV

SEQ ID NO: 7645 - protein, 371 aa, unknown
  TnpB Polypeptide
MKATLRLKLHTDPATTAALHTTLRLSTACFNAVCRYGWHHHERNGIRLHHGTYRNLRAQHPTLPAQLVVSARMKAGEALQSVEARRQQGRVVACPQSAHCPIRYDARSYGVHLPEGCASLATVSGRVRVLFRLPAYCARYADWKPCSADLCLHNGVFFLHVVVEADTPEPACEGVLGVDLGIAEIAVDSDGNMYSGALVQAVRKRVKRLRGLLQKKGTKSAKRHLQKIARQQSRFVRDTNHVVSRQLVRTAVLSRKAIALEDLSGLRERASVSRTLRWLLGNWAFHQLRAFVVYKAEAAGLPVVTVDPAYTSRSCSGCGYCDRRNRKSQSQFQCLQCGLTLNADFNAALNVKTRAELSDGLLCPAGASASA

SEQ ID NO: 7646 - protein, 381 aa, unknown
  TnpB Polypeptide
MKSYKIEIQLTNKQIIMFRKSVGTCRYTYNLFIKENKERYLHGIPFLNAISFSKWLNNFYLPNNPSLNWIKESSTKATRQSISNAEQAYKRFFRGQNKFPRFKKKKDNNISMYFVRSNSKHVIGIKEKRIKIPVLGWVKIKEFGYIPLSCKITSGHIIERAGRFYMAVNTEESLEIKKNNYNDGIGVDLGIKYFAIASNGQIFKNINKTTKISKIEKKLKREQRKLSRKFKNKKKGDAVGKNQYKQSIKVQRLYLRLSNIREDHRNQIANTLAKTKPKYITIENLNIRGMMKNRHLSKAISKQGFYSFIQKLKFKCIENSIELRQVDTFYPSSKMCSKCGKIKKDLKLSDRVYKCDCGLTINRDLNASLNLKQAIKYKIVT

SEQ ID NO: 7647 - protein, 380 aa, unknown
  TnpB Polypeptide
MKSYKTEIKLNNEQKEQFLKTIGTCRFVYNLFIDINKERYEYGQPFMSGMSFSKWLNSQYIPNSPDKQWIKEVSSKSVKQSIVNAEKAYKAFLKTKKGFPRFKSRKSSMNMYFVKTDNKQPIICKRHKIKIPTLGWVRLKEYGYIPVSEDITSGNISMKAGRFYVAVVTHEEHKIQNNNTNTGIGIDLGIKELAVLSNGKTFKNINKTIAIKKLNKKLKREQRKLSKKYENKKKGATLGSNFNKQLLRIRIIYKTITNIKQDYQYKVVNEIVRTKPSYITIENLNIKGMMKNRHLSRAISQQGLYGFIQKLKFKAYLNGIEIRQVDRFYPSSKLCSNCGKIKKDLNLSDRIYKCECGLIIDRDLNAAINLQQATDYKIAC

SEQ ID NO: 7648 - protein, 403 aa, unknown
  TnpB Polypeptide
MGDNRYRVNAASLFSLRYHLVWCPKYRKRILVDGLAKRLRELLNQKAKEIKAKMQALEIMPDHVHLVVESDPTMAPARLAAQFKGFTSHQLREEFPWLKSYLPSLWSRRRVNKTFEAFFRRVKRGEKCGYPRFKSRRRFDSITFPSYGDGIKLNGNMLRIQGIGQTEVKLHRPVGGKIKTVTVKRECGKWYACFSVACAGQPLPANSNEIGIDVGLEKFASLSDGQSVPNHRWYQRAEAKLRRAQRKVARRKKGSHRRRKAVALLQKVHQRIKNQRHEFQHKFTFWLVQNFGVIAVEDLHAQGLAGGRLAKSVHDVSWAAFFSKLTYKAENAGRELQAVNPRGTSQTCTCGVKVGKELSDREHVCTACGLLAPRDVVSAQVILQRARMSPSNRNVAELIASVV

SEQ ID NO: 7649 - protein, 253 aa, unknown
  TnpB Polypeptide
VKVAVARPQQPGVTQPDSTVGVDVGVRRLATVATSQKVLGEVKNPKALAHRVSELRRLNRQRSRRTKGSPCYRETAKRITRLHADVANTRKHAIHVFTTNLAKTHGTIVVEGMDVAGMLQQKGLPGARARRRGLSDAAMGEIRRHLRYKCTWYGSTLIEAGRYFPSSKTCHECGNVQDIGWSEHWSCDSCGKAHQRDDNAAINLARWASLGSVRAPVKRGAEHRTEPRSAAGEDTRKGGPASAGLNNSVRSAT

SEQ ID NO: 7650 - protein, 253 aa, unknown; identical to SEQ ID NO: 7649
  TnpB Polypeptide

SEQ ID NO: 7651 - protein, 352 aa, unknown
  TnpB Polypeptide
MRRSARVFLRRANAGKTARLRKFLRLYQNIVNYFIVRFWSLKEFKRALADQDATSKAIRRFGITARLAQCAAKQAKEIVCGQQERWGSGARIPRLKSLVANLDGRFVTISPFDGHFDFALVFGSGVPGMVVPLGRTKPCLKFEAAGWMLAAGIRLGEKDGKVFVDLVYEKTKPVAQPEGKVLALDTGLNRLFTGSDGQEVGNDFKETVKRAGKRRKTWHDHIDTEIDRNIKKIDLGGVSVVVLENLKNVKHGKRGKFSRRSNRLLSFWHYAKARRRLECRCEELGIRVAFKDPAYTSQRCHACGNIDGKSRRGTKFKCVRCGMECDADYNGSKNLEFLWLAGAYSLRSLKSA

SEQ ID NO: 7652 - protein, 271 aa, unknown
  TnpB Polypeptide
LLQKDYIKFIKKRDSEIYFLGRAGDNTCNNNFQVEYSSKTNQFYFRIRKEIDLENGRFVCGQFNFNNKIYTNLLKNLLKTKESALTYRIKLKDNRVFLQIIYNFEHNKDLCVTRNSYGVVGVDFNKGFISVSEIDRYGNLINTFNIDYQYGKGNQTTSDFQYIATKLKDYCLNVGKDLVIEKLNFNKKRDNLISKKCKKYNEMLASLAYSKFDSIITSKCVKNRIFLHKVNPAWTSWIAKQKYCPKMKLNIHFGASYVIARRGMLLKDKIK

SEQ ID NO: 7653 - protein, 399 aa, Okeania sp.
MLVYEMKLEGEKAQYKRLDEAIRTGRFVRNSIVRAWIDGQVKSRNDAYKYCKILADNPEFPWAKKLNSMARQAHAERAWEAIERFYKNCKAKAPGKKGYPKFKKYQVSGSVEYKTSGYKLSEDRRYLTLTDKFEAGTFKLWGSRDLHYYQLKQIKRVRIVRRHDGYYAQFVIDHTREEKKELTEKQTGLDVGLNHFYTDSEGNKVDNLRFFRKDERKIKKLQKRLSRTKKGSKNRIKAKNRLGRAHLKVSRRRNDFACKEAQRVIRSNDLVAIENLKVRNMVKNHHLAKSINDAAWYKFREWLEYFGIIFGVPVIAVEPKNTSQNCSNCSNKVTKTLSTRTHKCPHCGYEADRDENAAINILQSALKQLSTTLGRRESNTSGETDLCLNEETQTSKPTR

SEQ ID NO: 7654 - protein, 407 aa, Nocardiopsis sp.
MARSTVKRAFKYRFYPTPAQAAELSRTFGCVRLVYNRALAERTAAWFTEQRRVNYNESSAALTQWKNDPGLAFLNEVSSVPLQQGLRHLQTAFRNFFDKRAKYPRFKSRKRSKASAEYTRSAFRYRDGQLTLAKMPGPLDIVWSRPLPEGAAPSTVTVSRDAAGRWHVSILCEDTVGTAPAPSDAVGVDAGITSLVTLSTGEKVANPGHERRDRARLARAQRELSRKAEGSANRDKARHRVARVHARITDRRKDFLHKLSTRLVRENQVVVIEDLTVRTMVKNGRLARAISDAAWSQLRSMLEYKAAWYGRELVVIDRFFPSSKLCSACGALAEGLAPDVREWTCSCGVTHDRDINAAINIKAAGLAASAWGAGVRPQRESSRTGQSVSKQEGRGATRDGARAPNRR

SEQ ID NO: 7655 - protein, 451 aa, unknown
  TnpB Polypeptide
LTDKKSSKKAKSRARAILKQTQEEYGFTRPAFEAASSELCGGWLKDRLYSMVRQKVAADCWRAFSTLLGGKGKEVKYRGFHDKEAALQNKWNQGPFRYDNGYFIIGKLTIPVEFPKHDPYVEACMAHRVKYCSLSRYEIRGKTRYQLLLYLEGFAPVKVTKDGEFKHPIAPGEEVGIDIGTQTIAISSRNGVWAGVLASELGDVQSLENKINCLNRAMDRSRRATNPWAFREDGQVIPAVELPPEHRNRYGRHDWHESNHYAAMKARRKELYRKRAAIRRQSHWLLIQRIVSLGTVIHVEKMNFNTLAKRAKQTKKSARTGRCLSKKRFGHSIANRAPAMLIEMLGNKVAALGGTLYKSNPWEIKASQVDHQTREYTKKSLSQRFHYLKDGTAIQRDYYSAFIEQHVDEENNIVNFEACARDFPGFYKMYQADYARLAALNGYLPTRMGIK

SEQ ID NO: 7656 - protein, 402 aa, unknown
  TnpB Polypeptide
MINTINKTYRFRIYPNASQKELLAKHFGCTRFVYNYFLNQRQKQYKEKGESDNYYAQAKVLTELKKQEANSWLKEVNSQTLQFALRNLETAYTNFFQKRAKFPNYHSKKGKNTFTVPQFATIENGKLWLPKFKSGISIRLHREIKGKLGKVSLTKTPTGKYFVSVFTTEEYNTPIEHTGKSVGVDLGLKDLLITSDGEVFKNNRYTKRYERKLAKAQKHLSRKKKGSSEYENQRLKVARLHEKISNSRADYLHKCSISLVRRYDTICIEDLNVKGMERNHHLAKSVTDASWGSFVSMLTYKAQWNNKKVVKIDRFFPSSQTCNVCGYINKQTKDLSVREWDCPVCHTHHNRDVNAAINILKLGLNNTSAGTVDYTGGEGVRADLMESLPSEKPEANESLAHW

SEQ ID NO: 7657 - protein, 434 aa, unknown
  TnpB Polypeptide
LHFEGISTRKEGISEGVVNYMSTIYISRKFQIFPDEQQKKIINNTFGCCRFMWNKLLEKLSQTFFNEEISNKIVNCCDIVSEHPFLDKSNKDLIIDRHAVSNEKMFLKQAYNRMWDIYRKNKNIWKFRKDGKPVGFPRFKKKMNKQSYTNYNVGRGMQINWNDRLMKLPVIGWTKFSQREKQHPNYWILRNITISKSSSDKYYISICYHYEDDRDGISGKCFILNPKNELNILGLDYSSKSLYVDSNGNSAEYPRYYRKAQKRLRLLSKKLSRQAKYGKNWNKTRVKLSKLHEHISNQRHDFLHKLSSSITKNYDVIGVEDINMQNIGRSLKLGKSTYDNAFGMFRTMLEYKQDRQPFHIVVRANMFFASSKTCSRCGYVNKDLQLSDRVYECPSCGLTIDRDYNAAINLRNEALRQINSWSMRKFTIKETFVP

SEQ ID NO: 7658 - protein, 392 aa, Actinomadura sp.
MIQSQIVKLVVQVKLLPTPEQAAALADTLRQVNAAANQVSAVAFEEFGLRGRETPLRRLCYGDLKADGLGAQAAQHVIKRVVDAYTTLRANIRNGNLGGPASPRRRKAESKPIVFRLDAAHTFDDRNLSWQLDAGTVSIWTTTGRSKSLPFACSTDQARTLAAHRRGESDLVQRDGTWFLIATCDVPEPQVREPVDWVGVDRGIVNLATTCDGDNHQGRRLDRYRRWQARKRAEIQAKRTRSAARLLKKRARREARHARHVNHKISKQVVAVAARTGRGIALEELGGIRERVTVPRDQRARLSSWPFHQLGVFIAYKARRAGVPFIEVDPAYTSQRCPRCGHTERANRPARDHFHCRRCGLAGPADVVAGVNVRDRARSAWVFVNMPDPAPA

SEQ ID NO: 7659 - protein, 505 aa, unknown
  TnpB Polypeptide
LNEGTTRWVTRELALKPLRPLEAHDDDFAMAMDIREALGLRKDAYPESTVSLTAKALALHVFLVQQSDGGPKARTILPVAGRGRAYCYVDAKIAASLLGRPEKSRPEEDDDEDEDRGSTSGGELLDWPPERLQRQNAAVRREVRRKIRRSLRHGGPGDQKRRRRLRDRARRLGLGRIDAFARADSFETDGVGLRICFNVPTDEPLDHLELPRPPAPRPRRTRRAQAPPLADMVPAGAPPPVLVGVDTGRCKLLTAAISRCGRKKPETYVYTRREYYAAMGYHRHQRWCNARSSTGPLGDALAALAATGGLTGCRVERWRACLAAERQHAEVLAAEYLESHEHALWRMRLFRKKRAALDLAAHGLIAAACRGEPVDRPVLLGIGDASFAPTGRGELAVPTTALGEALKRAMKRARARVLATKVDEYRTTMCCCGCGAVTQAPMVWARRSGDPEPVWRRSGRLRVCTGCETQGKRRDRDVQAARNMLWLLQHEYHGASRPWYLCRGG

SEQ ID NO: 7660 - protein, 329 aa, unknown
  TnpB Polypeptide
VVRNWKSYFRALKEYKRDFKKFKKKPKIPRYKKKNGESIVIFTNQQCKIKEGYLYFPKKVNLEPIKTRIKEKLNQVRIIPLGIKYKIEIVYEKEEKDLGLDKDHVLSIDLGLNNLITAVNNNGCRPFIIKGGMIKSINQYYNKQLAYYRSIENKKGNLTDTKTIKKLHLTRNNKINTLFHRISKSIIEFCTLNNIGTIVIGYNHGWKQKINIGKRNNQKFVQIPFLKLVKQIEYKSQLKGIKVLTIDEAHTSKCSFLDNEVIEHHDKYLGKRTSRGMFKTSKGKTINADVNGAYNIMKKAFPNAISVDGIEAFGLMPQIIQQNIVDNII

SEQ ID NO: 7661 - protein, 522 aa, unknown
  TnpB Polypeptide
VRGVPPPGRRRAPANRARARCRPRRPRPRRSPGRPSGACRPCPCSARRAARPAARPQSRCAAPSEHLPLDNAVATPLSCRHETPSRHHPSGPGPQGLARRRGRAAPVFRVPSHSRPHRSAAGGDVTILGQRIRLDPNNVQTSTLERFAGTARFVWNWGLVRWQGMYAAGEKPSWRALNMELNARKVTEFPWMAEFPWAITNRALADLGAAFGHFFRRVKTGGGKPGYPRFKSKKRSTPSFTIEARALTFDGQRVKLPKLGWVRTSEALRFPGKPLSARFTKRAGHWYISVQVEVDDSRWSYPHRCETQAAVGIDLGLRDLAVLSTGERFPAPRSLRRHASKLRRLSKELSRRHKGGANWRRTKAKLGRLHERIANVRKDVTHKLTADVVRRFRVIGIEDLAVGGMGRTRLAKSVSDAGLAEVRRQLAYKAPLAGCGLVVADRFYPSSKACSACGLVRKSLPLKVRRWTCECGAEHDRDENAARNLMKLAAAHAVTACRPGSAGVFRDVELLVGQEAGGLAVN

SEQ ID NO: 7662 - protein, 365 aa, Glycomyces sp.
MAYRHGVPREYALRQHTYTSLKDRGLGSQIAQLIIKKTCHAYATIAGLIKAGRLAGKRAAQATSKPVVFRPEAAQAFDDRCLSWQHDARTVSIWTTRGRMRGIAFTGHVDHLKLLERHRQGETDLVCREGTWYLLATVDVADADANTDPGDFLGVDMGIVNIATSSDGDNFEGAGLRRYRNRMAKVRAELQAKATKSAKKKLKKRAKREARAVKDNNHRIAKQLVGKAERTGRGIGLEELTGIRDRVRLTAAQRGELNAWSFYQLQAFIAYKAKRAGVPVVVIDARNTSRRCPLCGHTAKNNRPTRDYFACQGCGLAGPADQVAAVNVRDRARTTWAFVNTPNVADTPRPAAGTSDKPRKSFRGS

SEQ ID NO: 7663 - protein, 395 aa, Glycomyces sp.
LSYLTGTVPVVHLRYSFRVYPTVPQRAALAKAFGCARVVYNDAVAARRAAHAKGLPYPTAAALSKALITDAKRTAERSWLGEVSAVVLQQALADAGRAYKNFFASLKGNRAGARVGLPRFKRRAARQAIRFTRNARFNVLDNGRLRLPKIGDLKVAWSRELPAVPSSVTIVKTTTGKYYASFVVAATDGVDLAEPLEDHEAETGIDLGLKSFAVLRGGKTIESPKFFRAMERRLKKAQRALSRKQQGSVNRAKARLTVAKIHERTRNKRDDWLNKQVAALVRENQALYVEDLNVKGLARGRSAKSVHDAALGMFLTRLESKAVRAGRAFAKVDRFFPSTQMCSVCGALTGPKGLEGLSVRAWACGCGAVHDRDGNAEANIRREGRRMVAAGQADT

SEQ ID NO: 7664 - protein, 204 aa, Clostridioides sp.
VVDIEAFENTNNQIGLDLGIKEFCISSCGEFIENPKYLKKSLNKLAKLQRELSRKTIGSLNRNKARLKVARLQEHIANQRKDFLQKLSTKLIKENDIICIEDLQVKNMIRNRKLSRLISDVSWSEFIRQLEYKANWYGRQIVKVGKFFASSQICNKCGYKNEEVKDLNIREWICPSCNETHDRDINASINILKEGLRLITIQNK

SEQ ID NO: 7665 - protein, 447 aa, unknown
  TnpB Polypeptide
MKMCYIASMNTALTAKLKLHTTPDQFRALRQTQLAYRAALNYVSRYAFSHGKISNKVALQEGTYADIRTQFGLPAQMACSVPRQVGATYKTLWTKVKANAAARAAGYTTKYYRGLDAAPKFISPTLTYQLGHDYSFKTGQQLSILSLDGRVVVHYTGYARHVALIQHGARSGVTIGAAKLWYDQPRKQFYLLVSLEIKVADPIPESHQRIVGVDVGQRYLAVATDTQNRTVFFPGQAVRAKADHYARLRRRLQRKGTRAATRRLVVIAGRERRLKQACNHSISRCLVDAYPQSLLGLEDLTHIRERTHRKRGTRASTKQRRANRRASAWAFAELHGYVAYKALLVGSMAVKVDAYHTSQCCPRCGYTSPDNRPGKGLLFVCHGCHLVLHADLVAARNVALRTLLTRQDWVRTGVLSERPDVSYSEAKAAWRQRYAELRWSPDTSSRL

SEQ ID NO: 7666 - protein, 344 aa, unknown
  TnpB Polypeptide
MEWSQIPVKYDISKPDMPGEKNYINESLSIGVIKYCEIERLWFKSGWHYYVKLYITENAPKKIAPGKSTMGIDEGPSTIAAVSESSVFLEELSPKCKDYNKQIASLQRKIDKSTRVTNSDRFNEDGTAKKKTKSLPPWKFSKTCQRNKAKVRELYRRKTEYTKCQHETLLNSMIKDSSIFINEPMDFKALAKKARETKRRDKASVIKNADGTEKTVYKYKRKKRFGKSITDRSPSFLIARLKQKCEQYGMIYLETDKWKYKASQYNHVLDDYIKTALSERFKSIGAITVQRDLYSAFLQSCMNTVEKPDRKKCIQLFDNFVKMQNDLITEMKASGKSYPACFGF

SEQ ID NO: 7667 - protein, 422 aa, Methanobrevibacter sp.
MSSCIDENNYYGGKQDVTEAVKIRLYPTDEQKKIINQNIGNRGFIWNKLLVKIKYENVKPTQKNLNNILKELKNEYPFLEKSESSSRQQVYRDLIKAYNKHKKEGRGFPKFKSEKNPNISFRIQANNNNIHLNERKNRIQMPTIGKIKFKTSKEHKQKIQESQINNITIKHENGIYIGIININTINTLLKYCFEAVGIDMGIRRPLTCSNGLKIEEFDLTREEKNVKYYQREMSKKQPGSKNYCIAQKRYWQALNKKINKKNDQYHKITHHIVKNNQVIVLETLNIKGWFKNKHWAPKLHRISLYEIIRQLKYKSERNNRKIIQVGRFFPSSQKCSNCGYQYHDLELGEEDWICPVCGKHHDRDLNASINIKNEGLRLIREKIIKTISYWDCHGLRCAGIGSKVLTFHSTKSMLKNRESPTS

SEQ ID NO: 7668 - protein, 562 aa, unknown
  TnpB Polypeptide
MPKKTKSNTSKTKQDNDFTMSNPMQGELAQGELFSIAGYPAQSKDQTLSAKQNISLIDSQEQKSSKILAQDSTTKEKDLKPYWNDVCEAISSKLWLPTEIDFAGSDLSSSNLLLNKPVEKSWFSTIKIATQKQSSQKTCYPSSTLHVAGCTENAVIAKSKKIRIYPTLEQRALLKHWFGTSRYVFNKTVEYLKQPGTKARWMKVAPIIKSELPEWADPVPCQIKQIAVRDACFAVRDAKKKTIKGEHSFVKFRSRRDRVQSVFIPSTAIKPKGVYHTILGELRLSQELPEKIRDSRLILHRGQYFLCVSTETSVVATENQSGNICALDPGVRTFLSFYSPRCAGKIGDKDFGRIHRLCFYLDQLVSRISKAKARQKRRLKKAADRLRTKIYNLINEIHHQAANWLTKNFGIILLPTFETSQMASRSNSRKGAKAQRDAIKLNSGKSTAGFTIRVHPRSSAVRKLRSKTVRAMLTWAHYRFQEFLLDKAKERNKQVLLVNEAYTSKTVNWTGEVDGNLGGKKKIKSKLTNTWMDRDINGALGILLRALVDTPSLESIRSAFVN

SEQ ID NO: 7669 - protein, 402 aa, Shigella sp.
VKRLQAFKFQLRPGGQQECEMRRFAGACRFVFNRALARQNENHEAGNKYIPYGKMASWLVEWKNATETQWLKDSPSQPLQQSLKDLERAYKNFFRKRAAFPRFKKRGQNDAFRYPQGVKLDQENSRIFLPTLGWMRYRNSRQVTGVVKNVTVSQSCGKWYISIQTESEVSTPVHPSASMVGLDAGVAKLATLSDGTVFEPVNSFQKNQKKLARLQRQLSRKVKFSNNWQKQKRKIQRLHSCIANIRRDYLHKVTTAVSKNHAMIVIEDLKVSNMSKSAAGTVSQPGRNVQAKSGLNRSILDQGWYEMRRQLAYKQLWRGGQVLAVPPAYTSQRCAYCGHTAKENRLSQSKFRCQVCGYTANADVNGARNILAAGHAVLACGEMVQSGRPLKQEPTEMIQATA

SEQ ID NO: 7670 - protein, 299 aa, unknown
  TnpB Polypeptide
MRLRLKQLQWEMKTGHLKICFGTKKLLKAGSKEFALRRDSRMSYMGSQDETARNQMLQLEYHNKTNQFAIKLRKDFGADEKEKYVYGKCYFNHHKNKLIHILSNANSSPLTYVILRRAGRYYLHCTFEERIKNHSCFVTSKANGTIGADFNKGLIAACETDKNGNLLGTQMYRYRFGQGNKTKSDLEKIILTMVRKCMNTGKNLCIENLDFKNTKAKAVQGKSEKGKKYNQMLHTLAYSMYDQLVSDISFRNRVYVEKVNPAWTSWVAEQKFSSRMKLNIHSGASYVIARRGMGIFDTL

SEQ ID NO: 7671 - protein, 406 aa, Corynebacterium sp.
MAPRKPHTKDLDDKARLAKNKRIAQSQKETRKRRKNMDVLVRTVKIQRNKLSSSQREKLDRLFLEGKWLYNTALAHDRFDEKFRKSLNHTAEVKLPSGEIEIRDLEVLGGQLQQGVLSRMRDNIKGLAALKEKGHKVGSLGFISEMNSIPLKQFGGTHRIRGSKVKIANIPGWMRARGLNQFSDTDEFSSAVLIRKGKDFFVALTVYRSKDEHSSLATKRFIPDTTIGLDMGVSTHITFSDGSSVNARVEESDRLKRLSRKLARQEKGSKAFAQTKELIGDEHRKVVNRRNDAANKITSWILGHENVFMQDENISSWRKKYSKARGSRSVQYGILGRVKARLVDHPRVTVLKRNVATTATCICGEKTPHSLDERTFSCPTCGYSAPRDLHAAENMYRLATKENIKE

SEQ ID NO: 7672 - protein, 382 aa, Enterococcus sp.
MERLKAYKLRIYPTEEQETFFAKSFGCVRKVYNLMLDDRMKAYKETRKNSSKKMSFPTPAKYKQDFPFLKEVDSLALANAQLNLDKAYKNFFRDKSAGFPRFKSKKNPVQSYTTNNQNGTIALIDNQFVKLPKLKSLVKITLHRQPKGLIKSATISRHSSGKYYISLLCKEEIAELPKTNSAIGIDLGITDFAILSNGQKIDNNKFTSKMSKKLKREQRKLSRRALLAKQKGINLFEARNYQKQKRKIARLHEKVMNQRNDFLNKLSTEIIKNHDMICIEDLNTKGMLRNHKLAKSISDVSWSSFVTRLQYKADWYGRKIIEVDKWFPSSQICSNCGHKDGKKSLEIREWTCPVCHVHHDRDINASINILTEGLRLHSMGLA

SEQ ID NO: 7673 - protein, 184 aa, Hydrocoleum sp.
LGIKTLATLSNGKVFQSVKSYRKFEAKLSRLQYLNRNKIIGSANWKKAQLKIAALHRRVANIRKDALHKLTTYLAKNHSLVVIEDLNVSGMLANHKLAKSITDQGFYEFRRQLEYKCQWYGCELVVVDRFFPSSKTCCRCGNIQDMPLNLRTYDCRSCGISIDRDLNASINLRNAVGLTANACG

SEQ ID NO: 7674 - protein, 200 aa, Burkholderia sp.
MILVYRYRVKSLNGLLNKQSRAVNYVWNFCNDTQKHALKWSKKWPTGFDLNVLTTGSSKALGIHSGTINATCEQYAKSRSQHRRPYLRYRGRKSLGWVPLKGRDLKREGDAFWSSFRNKLRYKAIAHGATFEEVDESGSTQSCSSCGSKDSTTRPKGIAGLRIREWACDGCGVVHDRDTNAALNILRCGRASPGVGITCL

SEQ ID NO: 7675 - protein, 448 aa, unknown
  TnpB Polypeptide
LVWYFVVVGKKGASVVFEAVKIALDPTPAQERLLLSHAGGARFAYNAGLAHVKAALDASEKPERSFYSLRKWWNANKDTIAVGEDGVIWWAENSKEAYSYGLESLAKGLSNWSKSRRGDRKGRRVGFPKFKAKDKATPRFAYTAGGFGLIDGDPKALKLPRIGRVHCMEDVAKRVGGTKVLRMTISQRAGRWYASLTVERDEPEVKEAPKGGAVGVDLGVKQLATLSDGTVVENPRYLRKAEKRLKKAQRELSRKAKGSKRRDKAREKVANLHAHVANQRSDALHKLTTRLTRKYSEISIEDLHVAGMVKNHHLAKAVSDAAFGEFRRQLEYKTTRSGARLHVVDRWYRSSKTCSKCGSVKAKLSLAERTYTCDNCGLTMDRDLNAAINILVAGSAPETLNAHGGTVRRGGQIGRATRVSVKCEPSGGANRVRLGAGGRKGALQATVE

SEQ ID NO: 7676 - protein, 363 aa, unknown
  TnpB Polypeptide
MLIRKAFKYKLEPIVEQEIMLNKTAGCCRFVYNYFLKLNIDQYAKDETFVFNHQMVNMLPELKKEYPFLTEVFSQSLQTAVRNLGAAFKKFFNKQSAFPTFKKKGKQESFTCPQKFRIEEERDRIFIPKVGEVKYRNSRPIEGEVKSITISKNCGKWYVSILTEQEIQEQPKTFNNPVGIDVGLKEFAVLSTGEIISNPRFYRTLEEKLAKEQRKLSRKEKYSNNWKKQLAKVQKIHSKIANARKDFLHKLSTQIVNNHDIIGVEDLNIKGMVRNRHLAKSIADAGWNMFNNFLEYKSLWQSKTYQKVERFYPSSQLCSECGSKQIMPLYLRIYVCKDCGTVKDRDYNASKNIELRALQLALS

SEQ ID NO: 7677 - protein, 415 aa, Cyanobacteria sp.
MLNLTYSYRIYPSLDQEAQMLDWLERCRRVYNYALAERKDWINSRKCPVNACSIKQEYIIPADAPYPDYYKQQNALTKAKETIPEFKAVHSQVLQDALKRLDKSFKLMQERGFGFPRFKKFGQYRSFVFPQFKSNPVNGFEIKLPKIGAVPINLHRPMPDGFEVKQVRVVFKPSGWYAQLILQSDISVPDVTPQGEPIGIDLGLEKFLAVSTGELIERPRFFVDLQSKLRWLQRKLRNKKKGSANYRKIQAKIRALHERVYNVRREFHFKTAHKLCDGVGMIFAEDLNLKATSRGILAKHCLDAAWGSFLEILSWVCWKRRVYFAKVDPNGTSQTCPQCGAHTGKKELSERVHHCDECGYTTDRDVAAAQVVMQRGLILVADGQSVILPAEEGCARTPMKQEKPTARKGSPRSTR

SEQ ID NO: 7678 - protein, 398 aa, Kribbella sp.
MTRFRMYPTPAQQAALLQQCGHARYVWNLALEQWSMWTRNKGPTPGYVEQARQLTEARGAVGWLRAGSQTVQQQALRDFDQAIKNFHAGTHRRPTWRKAGVNEGFRIVGAQASRVMKLSRKWARVLVPKIGWVRFRQSRAIPDAKSYRITYDGAGRWHIAFAAIPPPIPAPGTGEVVGVDRGVTVAAALSTGELLTCPGPSETEQVRLKHLQRRLARCRRGSKRRQRVKAAIAKLHARARDRRKDWVEKTSTDLARRFDVIRVEDLRVTQMTKRPRPKPDPGRPGSYLPNRRRAKAGLNRGILANGWGLLVQRLEHKAAGRVERINPAYTSQTCSDCGHCAPENRESQAVFRCTACGHQANADVNAAVNIAAGRAASARRETPVRASPKREPQHATSR

SEQ ID NO: 7679 - protein, 178 aa, Lachnospiraceae sp.
MRKGGYENGEKIGYSQTSAMLTELKKQEEFAFLKDSHNREKQRIRVARVYEKVTNQRNDFLQKQSTMLVRENQTICIEDLNVKGMIRNHKLSKSIASVSWAKFFEMLEYKAGWYGNEIHRVPTMYPSSQTCSCCGYRNPRIKNLGIRIWECPKCHAVHDRDTNASINILKKGLQMQSA

SEQ ID NO: 7680 - protein, 431 aa, Pleurocapsa sp.
MILNYAYQIYPDAKQQESLLEWLDVCRASYNYALRELKDWIASRKCQVDRCSLESEYIMSADYPFPGYHQQQNNLPKAKKEFPRLKQVPSQVLQTNVRRLHDAWDFFQKRGYGFPRFKKFGQMKSMLFPQFKTNPINAGAFRQRSCRRTPVRGWQIKLPKLGLIPINLHRPIPEGFVVKQVRVLKKAKGWFAVVAIQSDIEIPEPTPHGHCIGVDVGLLSYLCTSDNYVERPSKFFKQSYRRLKVLQKRLSKKQKRSANYEKARKKVEAMHNHIAWQRKDYQFKLVHKLCDMADTIFVEDCDFRIMAKGFLGKHTLDAAFGQFRQILKYVGKRRGVFVDEVDHRGTSQTCPNCRSEVRKELSDRYHVCHECGYGVHEKVDRDIASAQEICNRGVEKHSTQGLWGKEIGYQVGLSGAFCLDKWRRIAMPSRD

SEQ ID NO: 7681 - protein, 365 aa, unknown
  TnpB Polypeptide
MHKAYRFRIYPSKAQQELIHKTFGCCRYVFNHFLAKRKEVYDTEGKTLGYNACSALLTQLKKELPWLKEPDATALQTELRHLDDAFKRFFRKEGGYPRFKSKKHPVQSYTSKNNGGTIAIQGNRIRLPKLGWVKFAKSREVAGRIISATIRRNPTGKYFVSVLVEEDIQPLPPVNRQIGIDLGVKDFAVLSTGERVANPKYLHKYEQKLIRWQRILSRRKQGSRRWEKARLKVARLHEKIANCRRDFLHKLSTRLIRENQVICLEDLQVQNMLKNHRLAKSIANASWTEFRRQLEYKARWYGRTVVVVDKAFPSSQLCSNCGYRNPDVKNLGLRSWVCPACGTHHDRDINAARNILKEGLRLLAS

SEQ ID NO: 7682 - protein, 334 aa, Streptomyces sp.
YAELKASGLGAQAAQHVIKKTRDAYTTLKANIRAGNLGRPGSKRRVKAESKPVTFRPDSAQPYDDRCLSWQYDARTVSIWTTAGRLKSVRFTCSAGALKTLREYRNGESDLIERDGAFYLIAVCEVPEAQVNENPSGFIGVDLGIVNIATTSTGYRAAGRGLNRHRNRQLELRRKLQAKGTKSAKRRLKHRSRKEARHAANINHVISKKIVSAAERTGRGIALEDLTGIRDRVRLRKDQRAPLHSWSFHQLGRFIAYKALRAGVPLVYVDPAYTSQQCSECGHIDRKNRVDQATFACRSCGIVLNADDNASHNIDRKGEAAWTAGRESRVPATS

SEQ ID NO: 7683 - protein, 411 aa, unknown
  TnpB Polypeptide
MSLPVRATVTAKVEAVTPKGDEGLLVEFLRVYRSSVQFVVDEIWGLDEAPSWTELHVMFYNRLIRMGFRTHHVSEIYKRAKEVVESTRKNNGSKPVLKKLTARIHTLDYRLDLDKKILRVAILHDKWVELKLEWYSYLNKYLDKTWKPGEILLSYKYGRILVYITFHRDVVFREPQAIMGVDLNFNNITYTIVNLSSNLVSIGVIPFRGLSRALHYRKLAEELQRKHPKNWRFLKWARRTRARWLNKARYILVDSAHRVSKKLVEVAREYNAVIVFEDLEKIRENNNSDRKLSWEKPLWCYRRIQEYTEYKALLEGIKTVYVNPAKTSRKPPNGKKIKFINYRFLQLGEVVTTRDVVASWNIALRGLKRMRGLGVTWSPDSPRNEAVKTRAKRGNPEARTTYSKIFTAIHK

SEQ ID NO: 7684 - protein, 268 aa, unknown
  TnpB Polypeptide
MPTSQWRLNNEVKVEGGLRASVDLGIVNLATVYVEDGDWYIFKGGGVLSQYECYSKRISRVQKLLARHKQRGSRKLKLLYDKRRRFLRHALNCMVRRIMSDLKEKGVGEVVIGYPKDISRKHGNKLNTNFWNYGYVIKRFEDVGEELGIKIVKVGEGYSSKKCSLCGEAHEGGRIKRGLYKCPRIGKVINADLNGAMNILHIPESLRAADGGLSAARDRGNGLKTQPAVYRWTSGAGWVLDAPTSREAVRMKAVNHEPMTRPKGTPAL

SEQ ID NO: 7685 - protein, 439 aa, Thaumarchaeota sp.
MKTAFRFRLYPNRKQERKLLRMIEAGRRLWNDALAHRKQRWEERRLSTSYSQQCLILTAERQGDLLLGELYSQAGQEIIKRLDNAFKAFFEHRAGYPRFKKFSESGSFTYPQAYKGSVKPDAVRRRLFLSKIGNVKVVFHRELPPRGAKLKTCTVVREPNGEWHASLVYEEDDEDATQPQKFASPVGVDLGLKSLIATTDGAKIPHPRFLGKAEERLKRLQRSFSRTRIGSENRGRARRLLAVQSSRVARQRKDFDHKLSTDLVKKHDLIAFEDLKIRNMVRNHALAKSITDAGWGQLRRFTEYKGRRMGKLVVNVLPAYSTQECYFCGALNQVPLSVRSFDCRGCSRMLDRDFNAAWIVLKRGLAQVGQDMSELKPVETGPLPIPTTGRASPVVEAGTIRGEDDATQQDARRWKPTASVAGGCHLRNSFVIFSISSSL

SEQ ID NO: 7686 - protein, 409 aa, Actinomadura sp.
VAVKIVVQVKLLPSPEQAAALAATLHAVNTAASQVSAAAFGRFGLKGRVFDLRRACYGDLKAAGLGAQAAQHVIKRVVDAYTTLRGQIKAGRLGADGSPRRIKATSKPIVFRRDAAHTYDDRNLSWRVDARTVSIWTVQGRLKDVAFTGSPTQLRTLAEHRQGESDLLYRGGKWFLAATCDIPEKPLNGDPRDWIGVDRGIANLASTSDGVNHQGRGLERYRRSMARVRAELQAKGTRSAKRKLKNRARREARHATHINHAIAKTVVADAERTGRGIALEKLDGIGDRTRVPRHQRATHSSWPFRQLGEFLRYKALRAGVPVIEVDAHYTSQTCPRCGHRSRKNRPTRDDFSCAVCGLAGPADHIAAVNVQRRARTAWVLVNAPHATVSPSSPSGAVTSCKPGSSGPGR

SEQ ID NO: 7687 - protein, 376 aa, Escherichia sp.
MKRAYKYRFYPTPDQVELLAQTFGCVRFVYNSILRWRTDAWYERQEKIGYPQADKRLTAIKAMPEYSWLGDVSAVPLQQAIRHQQTAFSNFFAGRAKYPTFKSKRHKQAATFMNTAFKYRDGKLYMAKSKAPLDVRWSRALPSAPSSITISRDAAGRYFVSCLCEFEPVSLPITAKTVGIDVGLKDLFVTDAGFRQSNPRHTAKYAARLALLQRRLSKKAKGSKNRAKARLKVARLHAKIADCRLDALHKTTRKLINENQVVCVESLKVKNMIRNPSLSKAIADASWSELVRQLRYKGEWAGRSVVAIAPFFPSSKRCSCCGFTMQKMPLDVRKWHCPECGADHDRDINAARNIKAAGLAVLACGEPVIPKPLNAA

SEQ ID NO: 7688 - protein, 378 aa, unknown
  TnpB Polypeptide
MLTYNAELRTENENDMSLLMQMMHEHKVVVNKASELQFSKQLNSITILHKEFYYKTREEHRELPSQIVIKAEQESLSIYKAIKSNKHKIKKAFEKRNLSLRLDKRIYSKTKERNKIRITTYDGRKEFEIMLYPKLQQLLDKCDYLDPLIYVRNGKLMISLVFDTTPVEPLKKTLCLGVDLGIRRVAACSDGRLIIDRKFNKEKRKLRYLKSQLQSKGTKSARKHLKKLKHKERNKNKNQTHLVVNEILKTDANIIALENLKGIKAKKHKYQNKNAISQIPIFESRRILTYKAKNMGKHICLVSPTYTSQIDSITGIKEGLRKGCRFYAKNGLVYDADLNAAVNIARRSKHPISQGDLLDGQGIVNCPIACKSFLFERA

SEQ ID NO: 7689 - protein, 501 aa, unknown
  TnpB Polypeptide
MLTKSYKIVVSEEDKVMLQQMQQRYSYAFRKCYNNMDLTIDVGFIKEIRGKYKISAKAYEYLVKECECFYKRNEATITKRTKLIEELRAKLKKEPLANKRQKINKAIIKLTHSLKHDVIFGGKVFLQNHTEASIEKYRQSRILPLCFYGETSRSGNRFFNLKGLSDGFILFKYEGSDVKINVELKFKKSDMLLLSKLEELALAKQCAITIKLTSERIYITYDEALINGNKFDEKAVYQSIKDIKDKEKRKSLIRQAHIEFENNMLRNKNRNRFLSVDMNPDGIGYSILEKTSDSPEGEFIILNKGYLDFAKLSKQETNKRKYELSIAIKFLFGQLSHYNCAYFVSEELNLNNGDHGNRTANRKINNLWNRTYIDNLFNKYCNIRGIKRIEINPAYSSFIGNINYKTFDPIAASIEIGRRGIIKYIRGAKVIPEFCMSNIVNGLGELPKKIYDDIHECKTWKELFHVFSTAKMSVRRKMKDFIFAGKYLKNKKSTVKILCFL

SEQ ID NO: 7690 - protein, 442 aa, unknown
  TnpB Polypeptide
LRPHESTGRKRRRGHKARLYPSTSQEAALNDQAHAARAVWNLLHEWYTCRDGGIAKRPPIAEVDRQLRDARTNPLPNWEWLNDLPAQAMQQLLKHYLRAWDRYFRGVAGTPRFKRRKCNMSVDVPQAGKLKVKRLNRRWGRVQIPFLGQVRFRWTRPLPGASRDCPGRITGARLVHSSLGWHVCFRIEEPAVEVTPNPGPPVGIDRGVVHTLTLSDGRALDMPSLLSSGERRRMIGLERKAARQQLVRSGGSSPERLKRPMSSRHRRTTAQIAALRAREARRREDWLHKTTTELAKSHGLIAVEDLQIVNMTRSAHGTIQQPGKNVRAKAGLNRSILGMAWGNAERMLTYKCPLFGGMLVKVDPRSSSIECARCGHAAKENRVSQPAFRCVACGRLANADTNAAQVVLKRGLTARSGATPGCGGTAREARAIVPHREPLSSR

SEQ ID NO: 7691 - protein, 407 aa, unknown
  TnpB Polypeptide
MLDKTFCIDYNLDMNTYKFKILPTRAQQDRLDQMFGCSRFVWNYFLDLNNKIYLEAKEKDLKKKHLNYYDCANQLTDLKKKNEWLKEANSQSLQQTLKDLDTSYNRFFKKQSGFPNFKSKKNRQSFRIPQFFELNENQISFPKFKEGIKTIVHREIKGNIKYAAISKTKTEKYFVSITTDYEVKKKRTSNNSIGIDLGIEDFAVSSDGKKYNLELKRNDSKIKFLHRKLSKKKNGSNNKKKARLQLALQYEKAENRKQDFQHKLSDKLCKENKLIAIEDLNIKGMVKNHCLAKSISNQSWYSFITKLEYKSERYSGKIEKTNRFYPSSKTCSNCGYINQDLTLKNREWTCKECGVKHDRDILASQNILAQVQRELNLKGGGNRHLKPVELSSSDEAMKQEAIGSLAR

SEQ ID NO: 7692 - protein, 251 aa, Clostridioides sp.
MYCGQHIKLPKLGMVKIRDKQVPKGRILNATISKEPSGRYYVSLCCTDVDIEAFENTNNQIGLDLGIKEFCISSCGDFIENPKYLKKSLNKLAKLQRELSRKTIGSLNRNKARLKVARLQEHIANQRNDFLQKLSTKLIKENDIICIEDLQVKNMIKNRKLSRLISDVSWSEFVRQLEYKANWHGRQIVKVGKFFASSQICNKCGYKNEEVKNLNIREWICPSCNETHDRDINASINILKEGLRLITIQNK

SEQ ID NO: 7693 - protein, 529 aa, unknown
  TnpB Polypeptide
LIFKFLYFILNLNKSDKEKAMTEKKRIISIMTGLDPDKKQQDILSEIFRVVNSYKHRFFKQSLVNPSLTEKDFRHEDNRLDRRWSRSVEEDVVGMKDSIQSNRKNYLADKKDRLVSLNKTIQKISHKYHNALTFPENFSQQLPGLLKTLRFHYRKKALLEQSIRKLNYDLQNHRFSICFGSKKLFSKQFNPCVTHSDWQRQWQESRYHSFRLTGAKDETCGNANAQLHFVKNNCYSLKLRIPLVLEKQYGKYLAIDNIHFPEKTQSFMQNIILANNDKSSTARQPLTISVSKIKGKYRLTIQCTPEKVDVVTTDTFGVVGMDMNADNITVADIDRNGKIQETKIFRFNLNGKSTGQRENIIIEAINKAVDFAQSKGKDLIYEDLDFSQKKQQLYKSENKDYNRMLSSFSYLKMKTQLLSRAYKCGVRISKVNPAYTSLTGRLLHSKRYGLSVHEAAAYAIARKYYEIKEIIKKIITLNVKGKTFMFTVPEKILKSESRSQYRLLQKWFKNLWLSQSTWKLCSSHVNPSG

SEQ ID NO: 7694 - protein, 326 aa, unknown
  TnpB Polypeptide
MVQQQALRDFSQAMANFFAGTHGKPSWRKARHDEGFRIVAVKPGQVHRLGRKIGEVWIPKAGWVRFRWSRTVPKATSYRVTMDRAERWHIAFAALPEPIPAPGDGEVVGIDRGVVVSAALSTGQMLTVPRLSPARRRRFCHLQRRLARAMRGSKRRERIKLAMARLKAQEADARKDWAEKVSTDLARRFDVIRVEDLRITGMTRSAKGAVGQPGRNVRAKAGLNREIMRSGWGLLVRRLADKAPGRLERVHPAFTSQRCSACRHVATGSRESQALFRCVACGYVCNADVNAAKNIAAGHAVTARGGFRGAGPVNREPQLFASLAGT

SEQ ID NO: 7695 - protein, 349 aa, unknown
  TnpB Polypeptide
LDTCRQVYNQTLAHRKEAWEQRQAPLSLYATNALLTQWKRQRPSLTHVHSQVLQNAQERVDLGYKAFFRRVQAGEQPGFPRFRGPGRYDSFTFKQSGFRVQDSLVSLSKIGSIRMVLHRLIAGTIKTVTIRRTPTAKWHVCFSVDTTPITMEPCPLAVGVDVGLTHFATLSTGEYLANPRFLRTDEQALARAQRRLAQADKGIPARRQCRKVVAHIHERIANRRYDFCHQTTRTLVNTYGILAFEALQIPTMMQTHCLAKSIADVAWGQFVRIVTDKAAWAGRVAVQVPPAYTSQDCSRCGNRVPKKLSERVHQCPACQLSMDRDHNAAINILRLGQQSLGLVPRSPRL

SEQ ID NO: 7696 - protein, 361 aa, unknown
  TnpB Polypeptide
ILRTQKIELNPNNKQATFMAQHAGYRRVAFNFALSAFKSGLDEDNYQSEQDLRKAFNAVKREKFPWSIPLSQNASKNAIRDLGDALTRWKKGQNRFPVYKNRSGKCSYQADNGAGTVKVHKKRIDLPKIGWVRMREELRYTGDITKVVVSRTDDRWFVSITVRCDSNNYRHQPPLFDDKQPIGIDVGINTLATCSDGTTYENPRPLKRYERKLARANRALSRKVYQSKNWYKAKKRLGAVHYRIACIREDAHHQATTQIVRKAAAIGIETLNISGLLKNRKLAKALFDSALSRFLTMLKYKAERRGIPITQADTFFASSKTCSSCGHKKKHLMLSDRIYNCLTCGLSIDRDLNAAINLCPA

SEQ ID NO: 7697 - protein, 393 aa, Chitinophagia sp.
MQGIRLQAHPNIKQKKILSQWMGCARLIWNAKCDDEAYMTSYARRYCSIGTYAPIDQTFSQYKSPELTPWLSDCPSQILRNSAVNWYQTYCKFMRGECGKPNRKPFKDGRGSIHLTRELFSFETCEDGNIRLWIGSKRNNLGYLSIKRHRDFIIPNSIYITKKNGQYWVSFSYGEDNVSCIAFNRDNLKYLSTLDEAYLNQYTVGIDRGVVVPVQAGLESFDFSPNQIKNKQKHERYIKRLERQKAKKKKGSSRYQKCKRRIAKRHERIKNIRKDFCHQTSRKIINDKNHKVIILESLNIQNMTKRPEPKPNDKGNWGKNCARAKAGLNKSILDKGWHQFEIFLAYKSQNAGKALFSTGIPIIVELRVYLYASVVVTLIMLIGMQHWLSKSEQ

SEQ ID NO: 7698 - protein, 447 aa, Clostridium sp.
  misc_feature (8)..(59): Xaa can be any naturally occurring amino acid
MIWRRHLXXXXXXXXXXXXXXXXXXXXXXXXXXXXXXXXXXXXXXXXXXXXXXXXXXXXMIKTLKIMLIPNNKQKSKLFQLTGVARFAYNWALGREQENYKNGGTFLSDYDLRKEFTKLKSKKEYKWLNDYSNNITKQAIKDACLAYKRFFKGQSAFPKFKSKRKSKPSFYMDTDKIQFTDKTVRLEKITLSRKKNKQKLNWIRLSERNKIPTDGKYINPRITFDGISWWISVGIEYADNTQTPVNDGVGIDLGIKDLSICSDIDKPYKNINKTQKIRKLKKKKRRLQRKISRKYLINKKGDSYCKTSNIIKAEKKLLKLNHRLTDIRHNYLHQTTTEIINRKPKFIVLEDLNVKGMMKNKHLSEVVAEQCFYEFYRQIEYKSLWNNIKFIIADRFYASSKICSCCGAVKKDLKLSDRIYKCDNCNTVIDRDKNASINLYNYGKSIA

SEQ ID NO: 7699 - protein, 360 aa, Shewanella sp.
VSDGIRPEHTLLKKDEWMTDNFLHRQMRNHFKHGVNHTHNQIIVRADMCKTFELNGQCWLKVPSLVPRQTIKIPLNTTVDFAPQGTLRIILKNGNVEVHSTYDAVETQDCGQETVGVDKGYSEAFVDSDGEVYGNGLGKLISSESDYLNQKYKRRNKLRAISKAKPHKKQKIELNNLGRKKLDKRQDAQKAKLKTLIFTATHKLVDKAKVIVAEDLTAPIQSKRSYGKNTNRRLNTWVKGLLADALTGISHRRGSTVHLVNSAYTSQSDSFLRGLLIGTRKGDRFHRFNGEVVQADWNAARNVLARLNDNEISRYTPYKTVKRILQERTDRYKSELTDSGSSYTFGNKTLTECELVLDYV

SEQ ID NO: 7700 - protein, 415 aa, unknown
  TnpB Polypeptide
VSYPVRGEEPVVVEALRVRALPEGSCDKLLEFLRLYRDAVQMVVDRIWGINEGLSKKKLHRLFYSDLMSMGFRAHHAKEVYLYAKSLVESARSNGGRKPVLRRLSARIDRYDYRLDLDSMVLTLKLHGNYEVRLRLVTSKERVERFRGWSNYELVVRYDGESFWVSVYFRKTVRTVKPRTVMAIDLNFDNVTLAVFTLDGKLIRLKRFKPPHRRVLTHRMWIERIQGRYPRSWRFVKGIRRAIERHGERIRSISWDYAHKLGDSIAELALRFRSVVVLEDLGELKENSKRDRRFNKRLGLWFYRRVQFCVEYEARERNLEVVKVNPRGTSSRCPRCGGRLFEDGHRVPRCRRCGFIGDRDVIATVNLYRRYVSRYPRCGVPGVALNASKPDEVPSGMRGNRDEAMKTTSSYYEFI

SEQ ID NO: 7701 - protein, 371 aa, Romboutsia sp.
MILAKKVRLYPSELQEQKLWQSVGSARFIYNWTLAKQEENYKNGGKFISDGVLRKEITQLKKNELSWLNEVSNNIAKQAVKDACDAYKRFFKGLSDKPRFKTKKRSKKSFYNDNVKLKVKDNKLVNIEKVGWIKTNEQLPIGVKYSNPRISYDNKYWYISVGIEQEENQEELTDISLGIDLGVKDLAICSDGTVYKNINKTYVVRKIEKRLKRLQKQASRKYEQNKQGKEYVKTKNIIKLEKQIQQMHRRLANIRNNHLHQTTTSIVKVKPYRVVIEDLAVSNMMKNKHLSDAIRKQGFYEFRRQLEYKCNFRGIELVVADRFYPSSKSCSQCGVIKKDLKLKDRLYKCSCGLNIDRDLNASINLSKYKLA

SEQ ID NO: 7702 - protein, 485 aa, Mycobacterium sp.
MIVRMRSCAQAAKVAEATGGVQLAGKPKPDGTPTFSRYVEIGVDFEAHRPVVESVSVLFELYDGDANSYAATGGPGAQLPSGWMVTAAKFEVEWPADPQRAGLVRSHFGARRKAFNWGLAQVKADLDAKAADPAHESVDWDLKSLRWAWNRAKDDVAPWWAENSKECYSSGLADLAQGLANWKAGKNGTRKGRRVGFPRFKSGRRDPGRVRFTTGTMRIEDDRRTITVPVIGPLRAKENTRRVQRHLVSGRAQILNMTLSQRWGRLFVAVCYALRTPTTRSPLTQPTVRAGMDLGVRTLATVATLDTATGEQTIIEYPNPAPLKATLVARRRAGRELSRRIPGSHGHRAVKAKLARLDRRCVAPTAGSSPPAHHRVGGHLWPGRDRRPRRGRDETQHAPAGVSPIGLRCRNGFGRAAAGLQNGQVQRRADGGGPLVCLQPNPPRLHQPRRHTVPAARQGPHRQTPALPCNGRGSRPRQKRCFESP

SEQ ID NO: 7703 - protein, 382 aa, unknown
  TnpB Polypeptide
MKTKIVNKAYNFRIIPNKAQEELINKNIGCVRFVFNYFLAQSKDNQYLSYSKFSKMLPQLKKEFNWLKEVDSISLQQSLKDLDKAFNRFFKGISGFPKFKSKKRSKQSFQTQYFKRSSGTESIEIKDNKIKLPKLGWLNFKKSREVKGRIQNVTIRKSKVGKYYISVCVETDKKTIKKEFNEQNKNQMKETKKEIGVDLGLKDFLITSDGEKIKNPRIAKKYEKKIAKLNRKLSRKEIGSKNWKKIKNQLAKAHEKIANIRKDFLHKLSTKIIRENQTIVVESLKVKNMLKNSRLAKSISDVSWSKFVEFLTYKANWYGREIIKIDTFFPSSQLCNKCGYQNKKVKDLSVRKWECPKCHLIHDRDINASKNILKEGLRLKTV

SEQ ID NO: 7704 - protein, 417 aa, Saccharopolyspora sp.
VQLRYRFRLYPTPGQQSVLARAFGCARVVFNDAIAARRDVYEAGGKTPTASELSKKLITNAKNTPERAWLGEVSAVVLQQALRDAQRAYENFFGSLSGKRKGREVGAPRFKTRRDRRQSVRFTANARWSITPGGKLRLPKVGEVPVRWSRTLPSKPSSVTVIKDAAGRYFASFVVDTNPESLVDEAPEIGVDLGLEHFAVLSDGTKIKSPRFLRRAERKLKRAQRDLSRKEMGSKNRDKARTKVARAHVRVADARREFHHQLSTRLIRENQAIAVEDLAASGLARTRLAKSVHDAGWSSFVSMLEYKAALYGRKLVKIGRFEPTSQVCSKCAVKDGPKPLHVRTWQCLACGVWLDRDINAAVNVAKAAGLAVTACGAQVRPEHVRAQREEAGTHRGDPMRTDNRAVGRGRNHRFSQR

SEQ ID NO: 7705 - protein, 405 aa, unknown
  TnpB Polypeptide
MRVLVTARVKAVTPNPQPLIQFLKAFRDWTQYVIDEMWELDHIPSIRELHYRFYKLLRQQGFRAHHCHKIERRAREVVKATKKNNGSKPVLRKLTARLDKWDYRLDLNDKVLRIAVLNGEWVELKLQWYDYLNKYFSDGWRLKEILVSYGNGEIWIYLTFEKEVALIIPKHVMGIDINFNNITYTVVDVSGKLVSMGAIPFNGLKRGLAHKIIAEKIQKKYSKKWRYVKGIREAIRRHGRRARNILTDSCHYISKRLVEIAKEYGALIVLEDLNKLRSRANDSRSFNKRLSLWTYRRIQSYIHYKTLMEGLSVIHVDPRRTSKSSPLGGELEFINYRWVKLPNGIITTRDIIASWNLALRGLKLLTRDVGLRGFVVALKAPDQMQTQEGMKGKPVPEVILGNRSN

SEQ ID NO: 7706 - protein, 413 aa, Halorubrum sp.
MRYTYRFRLDPTPEQRELLDQHRDTCRQLYNHALTEFEKIPESAGTLTQRVRQVRDQLTDLKVWWDELNDLYSTVAQAAVMRIEDSIKALSQLKQNGYNVGSLNWKAPKDFRSFTYIQSGFEFDSKNGQTVLSLSKLADVLLIKHRTIPDTETIKQVTIKKEPTGNWFASFVVDGKETPEKPTDPDRCVGIDVGILKYAHDTDGYAIESPDFSDERERLERAQRDLSRKEHGSTNWETQRQTVAEHHADLKRKRRDFLHKLSNYYATEYDLVAVEDLDVKGLVELPKNSRNRVGAAWGTFLGMLEYKCEREGTHFVAVNPRGTTKECASCGVKTEKPLWMREHSCPACGFEADRDANAAWNILSRGLEEVGVGYSESTPVETALPVDTPVSAKRVVETGSPTLKERTASAVSE

SEQ ID NO: 7707 - protein, 375 aa, Crocosphaera sp.
VYRLAINPTFCANSCSLALKITVSSVRDPYFKKKRNGGSAEFTKSAFKWKDGKLFLAKCKEHLNIVWSRFLPQDSTPSTVTIKLDPSGRWFVSILVKDPTVKPLPKTNKKVGIDVGITSLITTSNGEKVANPKQFNRLYKKLRRKQKALSRKTKGSNNRDKACLEVAKVHAQIKDARTDFLHKLTTKLVRENDLIAIEDLAIRNMVRNAPPLSTADPAGFEIQQERGSAFHALNSIQGGSAVKNHKLARSISDASWGEFNRQLEYKCEWYGKELVKIDRYFPSSKRCGNCGHIVDKLPLDIREWECPKCGTNHDRDINASHNILAAGLAVRQRGLGGFPHSLLPNPFGVSVCGASVRPEESKSRKATALKQKPKS

SEQ ID NO: 7708 - protein, 186 aa, unknown
  TnpB Polypeptide
LDYSSHDFYVDSNGKVANYPQFYRQSEEKLAKEQRKLSRMKVGSHNYDEQLHKVQLLHEHIANQRKNFCHTTSAAIAKQYDAVFVEDINLRGLAGSMKLGKSTNDNGFGMFRAMLEYKLTSQGKTFAKIDKWYPSSKTCSVCGFIKDDLTLADRVWTCSACGTTHNRDHNAAINIRNVGLLGLYPA

SEQ ID NO: 7709 - protein, 372 aa, unknown
  TnpB Polypeptide
MELIKTVSCKLDAAPDQAEALRITLQSFACACNDVLKVSKENHTTNKVKLQHLCYHAIREKHGLSANLAIRAIARVAESSKKKLRKVREFKPTSVSYDQRIFSYIPGREMVSLSTVKGRIKVPLILGNYQRHLLEGQKPTSAMVVYRRNTRQKGFYISIVLGVPVPTPNGAKPIGIDLGINNLAVTSNGLRFSGKEAMHIRRHFADLRASLQAKGTKGAIKLLQRLSGKESRIIRHINHVISRRIVDSASPENILVIEDLKHIRERTKVRKAQRYIHESWPFAQLQNFIEYKGLAKGIGSLYRNPAYSSQDCSRCGSRGRRDGHLFSCSCGYRNNADFNASYNHSLGGNALSDGLRNQALNQRLVAVESPAL

SEQ ID NO: 7710 - protein, 412 aa, unknown
  TnpB Polypeptide
MANRYRLTPTPEQQSAMCEHCAHARFIYNLAVEQHSWWRPGRGRVPGYLEQARQLTEARAAEPWLRNGSIIVQQQALRDFDKALSAFFDPKNPTAKPSWRKAGRDEGFRIVGKQRDVRRLSRHVGEVWIPKVGRVRFRWSRAVPDDVKSYRVTRDRVGRWHISFAAPQPALDRQPTGAVIGIDRGVRTALVTSDGQHYRAPRISDRRATRYLALQQRMSRQQKRSRKREKTKWAMARIAAGVTDRRRDWAEKVSTRLVVDHDLIVFEKLNTKGMTRKPAPKPDPDQPGSFLPNGARAKAGLNRGILASCWGLLATRTERKAAASSVAVVYVNPKHSSQQCRVCGHIAAESRKSQAVFLCVQCGHGDHADANAARNVLARGLASAGLRAGPGARGVCPRQPAQAAAGTIRSAA

SEQ ID NO: 7711 - protein, 532 aa, unknown
  TnpB Polypeptide
MNPGMPKGAASKLYLGVHARLVFLKKEDEQAVLDLMRRFSSATRFAYNRLLEGQDRKELKREDSPLCRLFGLNTRYADGAIEKAQAILDSAKELGQDPRKVVFGGREVFEQLKRKHLSGKALLALKREWKERRQGSLYSRGDATKKGNANLRLESRDGALWLRVNLGNSAHVQALVKTSHPQLKALIERAYAFLPYNVTLQLKDGKVYAHFTWSEELPSPVHTKANGVLGIDVNGDPYHLALAVVSSDGNLIRHLTLSLEEVDRAPNKGAKELALWKVAHQVMALAEEHGVAIATEKLKYLRKSRRGDGSGRSFRRKQHRFAYRSLLEKIHSLARKRGVEVLEVSPQDTSTIGMLKYAPSLHLSKDVAAALVIGRRALGFEEKLPKGYRALLQNKSFFAYTEGFYGSRLQELQKLKEAEKNPYLKRRLSREIGKARRALSLLLSFPGPQRGRKASFQGSPGSQKGSTDGRNPSGANPWRVLRVGLFLPLLGLEVPRDLSPLKPILHGSWEGWKVGSGPSPGGGPVCANVHFC

SEQ ID NO: 7712 - protein, 308 aa, Enterobacter sp.
VIKKQAFKFLLEPNKTHMNDFLVFAGSCRFVYNKGLALINENYDSGKKFLNYNQLASELVNWKNEECLAWLKMVPSQCLQQSLRDLDRAFKNFFSGKSQYPRFKKKGRNDSFRVPCQRVRLDQEKHLVSLPKLGWVKYRKSREITGVLKNVTISRKLDKWYISFNTEEVVPEPLHPSFSKTKILLNNEWLMQLTACESLVEQFANMEGNKKLRNLNNILGRKVKYSSNWLKTKKKIDGVKARSSRRRLDALHKITTAICKKHAIVELVNLTDSLPDKNNGSVSMTYEFVRQLMYKQEWLGGKVIRLGD

SEQ ID NO: 7713 - protein, 407 aa, unknown
  TnpB Polypeptide
MRFVRAKRLKIESQPIFSQINAASAEVWKECCDLMEWYQYQRGYGHAHMDFYIGEDCEGWMDKNLTKSQPLHSQSIQAVRASYFKSWISYSVLKKTGGVRNLKPPNKRKKYRTTQWKKSAIIFVESSFFGKRVRLSMGAGRPKLDIKLPKNFDMSTNHLIATIELVYDYGQWELHFTYYETIEPPESGKGVMGVDMGEIHPMVCFDGQDAMIFNGRYIRSLYRLRNKVLAGFNSAISQCQRHSKRWWRLTRRKWKKIRRIDNQIKDGLHKHTRKLLDQCELRDIGTIVVGDLTHIRDNIDYSKKSNQKLHQWPFAKLITMLTYKAKTLGIKVKHINEAYTSQTCPKCGNRKKPTNREYSCKCGFTYHRDGVGAINIRQKYLGCLGVPVEADMASPLGFRLEVPVALA

SEQ ID NO: 7714 - protein, 362 aa, unknown
  TnpB Polypeptide
MNKGVKFRIYPNKEQQNLINQTLGCCRLVYNIGLEMRSKAFKSGEKVNYSKTCAMLTEIKRNDEFSFLRDADSVALQQSLRDLDRGFKNFFEKRTKHPRFKSKHGRQSYRTMNPRNNIRIVGKCIRLPKLGYIKVRQSMDVGKINNATVMRTPSGKYFVVLNVDFEPELKQNAGGSIGIDVGIKEFYSDSNGNIVANPKFLEKTSKKLCREQRKLSRKKKGSNNRNKQRLRVAKVHKKITNQRDDFLQKISTMLISENQVICIEDLKIKNMVRNHKLARCISSVSWGKFFDMLEYKADWYGNKLVKVPTMYPSSQTCSCCGYKNPLVKNLAVRKWECPNCHTVHDRDTNASINILNKGLSIA

SEQ ID NO: 7715 - protein, 437 aa, Thermococcus sp.
LKLSRTVVLESYPLTRRKFKAVKEIYEDYSGLLLILTEYAFENKIRNPIKLRSSIPDEVKEEYELPSHYYYTACQDAVTRVKGFLEKKRKGKAKTERPVVKNVSLWLDDVLWDYKRFPQFNTLKNGKKILIIRLTTKRRPIKLPLKPHKLFFKYLSEGWRVKAGVKLKLVEEERKVLAYFTFEKEFDEPEVTGSFIAVDYNADNISFGNHDFLVQVKTGLGRMTRFYSDVRREVQRTHLTGWKKKLPSRKGRELLKKFGQRKMNRKVDLQRKLALRLVELAGELNATIILEAIPKNFNQKVVKRRRKREKKLRNILHNIGMNSFQRFVFEKAVEHGVPVVFINPAYSSQVCPNCGAFRVKPNDDALRQRAFTCPVCGFTADRDFAAVLNLLGLFPFSPKADEPPAEGSVSPVTLVAEANLLHQKNSLVIISQGLKRQ

SEQ ID NO: 7716 - protein, 200 aa, Thermococcus sp.
MSLDVYHSEKGWIKVDISYIHRVKERYEGIISMLQSIHRKAPKRISRLLEKYRTRMRNRIEDYLNKLAVQLTREFPNTVFVLEDLDKLNMFRGNSKEFNRKLSRAVWGKIVQKLSYRVPVEFVNPRGTSGRCPRCGSKLESQDGRLLHCPKCGFIADRQFVGAFNIWMRGVGVPLSGGKANDILPNEPREANEPQVRREG

SEQ ID NO: 7717 - protein, 531 aa, unknown
  TnpB Polypeptide
MQTKTKSKQSELPAGTGCSTPIHFRANRLSDQPQSAIVELVQPNKNQVSLDKLLNLEPNSPKQTSSKMWDPSSTSKEKGLGPYWTDCFKEIVSHLSWLAETGSAGLDSSCLSIWSPKTVEKSWFSTNLKQVRNQNWFKTCCQSYLSSLAESQDSTDTTMISKKIRLLPTQQQKQQLNSWINGFRFVYNQSLEYAQKQTTTPSWFKTKKQLLDQLPSWTKQIPYQIKSIAIKEAFDNLRQRKKQAKFKHTKFKMHFKSKKEPQQSCYLPKSAVLTKGIYPRLLGKLKYTESLPSNIGDSRLVYVYGKFYLTIPTTKQRSLTENQGRIVALDPGIRKFITFVSHDSAGCLATHDIGRIYRLCFYLDQLVSKTSKAKSKQKHNLRKAANRIREKIKNLIDELHNKVAYFLVNNFDLILLPTFETQQMVSKAHRKIGSKSARAMMTFSHYKFKQKLKHKAFEYGKVVVDVCEAYTSKTNNFTGVVDKKLGGKEYVLVGGKKVDRDINGALGILLMALGDTPYLDNSVHNCTANHY

SEQ ID NO: 7718 - protein, 269 aa, unknown
  TnpB Polypeptide
LRITVTRSRLERGGSLVGGNKSDNGNRGIKFHVFQDHVEIKVKDPWGKWVHGKAYFGKKYLPLLKELEELSRRKEEGYGAIVSFKDYPMIHLQIPLWLYLKHFSSPKPNGYGLFAGFDLNSDRLNVVVISKDGEITANKTWWYSDVTRPGFPKGKAMALRLNALSESLNFLSRVGVDYVVFEDLFLVKRRRFTRGKSGNRKITRFAKRQMLTHGVIKALRLGFNVVLVNPKGTTNSEDHDKVMREKGFDRHTASAYLITLKGLEVIKNN

SEQ ID NO: 7719 - protein, 374 aa, unknown
  TnpB Polypeptide
MGGSRKAGESMIQQISVIGKVVGLTNIKEAILQQEYDSFNNICQQVQECRNNDIEPQYSWFKNKNIYCSTVTNAFYTIKEPFRNLTEQPLYLRNDVSRLEKQPTKEFKYWLKIPTKQRKQFWVALQFAESKEELLDKHKICDSKITKRKNGWFAHITIEKEVILRTDYTDILGIDLGSRRTASVIRLSDGIPKYYGKEIRQIRGHYFYLRKQLNRRTIRKINDKEKRQVKDQLHKISRAIVNQAIKTNSLIVLGDLTNIRKGGRKKKNNPNYKGKKFNRKVNSMPFSKLSQYIEYKAYWEGAMVIKVNEAYTSQTCSRCGQLGIRTKGLFKCPHCGYQDNSDRNGAINIAKRGLGQASKSGASVIMPRTIGRTL

SEQ ID NO: 7720 - protein, 370 aa, Aneurinibacillus sp.
MANKAYKFRLYPTEEQEQLLAKTFGCVRFVYNKMLTEQQETYEKYKDDKETLKKQKFPTPAKYKKEFAWLKEVDSLALANAQINLQKAYTNFFSGRAEFPKFKNRKARQSYTTNVVNGNIMLLDGYIKLPKLKLVKIKQHREIPSHHIIKSCTVSRTKTGKYYVSILTEYEHPPVQKEVQAVVGLDFSMNGLFVDSEKGKKANYPRFYRQALEKLAKEQRILSRRKKGSSRWHKQRLKVAKLHEKIANQRKDFLHKESHKLVKRYDCVVIEDLNMKGMSQALHFGKSVADNAWGMFTTFLGYKLEEQGKKLIKIDKWFPSSKTCSCCGQVKKSLSLSERKFRCDCGFVADRDWNASINIKREGLRLLALI

SEQ ID NO: 7721 - protein, 418 aa, Planktothrix sp.
MFQGYKFRIYPTTEQQITLAKSFGCCRWYWNYALNLCQETYKQTGKGLFRKAIQGLLPQLKKEYPWLKDAYSQCLQFVALNLSTAYKNFFEKRARLPQFKSKHGRQSISYPQSVKFEGDYLKLPGKVGLIYCRRHREFKGLIKTVTISKNRDGKYHASVLVDDGKEIPNSSTNGKAIGIDLGLTHLAITSDGDKYSNPKHFAKHQRNLKRKQQKLSRKQKACTERSRSGSNSRQKARLKVAKVHAKIARCREDFLHKLSRKIVDENQVIAVEDLGVKNMVKNHKLAKSISDCGWGMFGTMLKYKAEKEGKTYIEIDRFFPSSKTCNVCLNQVGSLPLDIRSWTCEHCQTTHDRDINASINIKNEALRILRLCSVQVLSLGTSDTASLRGCQSPEQTSVSSDAIPVDARSPHLLVEKCG

SEQ ID NO: 7722 - protein, 218 aa, Sulfolobus sp.
MVRRGNKVIRATVSMKIALSELLLALVNNYVKALRFTLFWLKENVLNPNEKGVLSKVHEALYEKLREEYNLPSKVAEDCYREALATYKGWYNNPRRGRFPRVYRPTVWLTPKASYDVDFERMNVRIASVGELPILGYPRNLKEYLSWRMKEARLVVRDGKAFLKVVFENEGEEVKPRESIVVDINMSEVVVGKDDKNYVRIPSRLEEVHHWKSLAENL

SEQ ID NO: 7723 - protein, 364 aa, Sulfolobus sp.
MMRSKLIASKEAIDNFQFITINGKVIFNEKERVVRIARAYSQVIKSAIKPLFDGKSVDELTKEFYNVLPNYVYLETALKQAKTIVEGLLEREEERGEIIHSRIRKFWFGSRGNKSDKGNRNVKFHVLENYVEVRVKDPWNKEWIYGKAYFGKEYLPLLKELEDLSQRKEEGYGAVISFKEKPMIHLQVPLWLYLKHFSSLKPAGYGLIAGFDLNSDRLNVVAINKDGKVITTRTFWYSDVTRPGFPKEKARALRLNALSNALEFLSRIGVDYVVFEDLFLVKKRKFTRSKGGNRKISRFAKKQLLIHGVIKSLRLGFNVVLVNPKGTTNSEEHDRVMREKGFDKHTASAYLIALKGLGMLNDIK

SEQ ID NO: 7724 - protein, 212 aa, Moorea sp.
VELIGVAIDNIDVGVAIGIAIGAAIKVRETIGVDIGINTLATCSDRTKFANIKAYRQAKKQLIRHQRAVSKKVIGSKNRRKAVKKLAKVHKKVADIIADALHKLTTWLAKNHSTIVIEDLNVSGMLKNHKLASAIADCGFYEFKRQLTYKCEWYGSELVIADRYYPSSQICSNCGHQQKMPLHLRTYECSECSFEADRDLNAAINLKNYVHQ

SEQ ID NO: 7725 - protein, 352 aa, Methylococcales sp.
MKVSRYVYNATIALLRDYEGDTKPSWMDIKKMFTRLLPDWTKDTPFQIKGIAIKDAHNAFWKTCKANKDSGKPTTFRFRSRKDPVQSCFIPKTAISHKGIYPQVSGNGLVYAESLPESCLDSRLVWKAGKFYLAVPAKHRVPYGENQALGVVAIDPGVRTFAAFYSVDSCGFIGSGDFSRIQRMAHYLDDLISRASKAGKQKKKSMMLAGLRMRQKVQNLIDELHHKAALFLVKNFDCILLPTFETSQMVGRAGRKIRSKTVRNMLTFAHYRFKQFLKNKAFEQGKTVLDVCEAYTSKTHPETGEIKQIGGAKRIRLLSGEWVNRDIVGARNILLRALVDTPRVFNVAVNES

SEQ ID NO: 7726 - protein, 314 aa, Escherichia sp.
VKRLQAFKFQLRPGGQQEREMRRFAGACRFVFNRALALQNENHEAGNKYIPYGKMASWLVEWKNATETQWLKNAPSQPLQQSLKDLERAYKNFFQKRAAFPRFKKRGQNDSFRYPQGVKLDQENSRIFLPKLGWMRYRNSRQVTGVVKNVTVSQSCGKWHISIQTESEVSTPVHPSASMVGLDAGVAKLATLSDGTVFEPVNSFQKKQKTLARLQRQLSRKVKFINNWQKQKRKIQRLHSRIANIRRDYLHKVTTTVSKNHAMIVIEDLKVSNMSKSAAGTVSQPGRNVRAKSGLNRSILDQGWYEMRRQLEYK

SEQ ID NO: 7727 - protein, 403 aa, unknown
  TnpB Polypeptide
MQSVTKLRLFASPGERLLLFATMERYNAACNAVSPVAFSERQFSNIGLQKRLYRHVRETFGLSAQMTLLAIRKVAGSYRSTREAIKEQNKVLAVLGKPLKTLTEISFREHGAICYDARVLSIGRNRVSIWTLDGRINLRYSKPAYFPAVATVTQTDLVYRDGAFWLYATVEIPDVEPADPSEYLGVDLGVVTIATTSDGATFSSDATEKVRQRYGRLRGILQKTGTRSAKRRLQKIAGRERRFKTDTNHIISKQIVCAAEGTKRGIALEDLKGILLRTTVRHDQRERHHKWAFHQLRSFIEYKARRTGVRVQVIDGAYTSQQCSACGFVHPDNRSSQAAFCCLACGHTENADINAARNIAARAAVNRPIAVCSPDTGGEVESQACKEHGATYGIMPPTEVGGS

SEQ ID NO: 7728 - protein, 309 aa, unknown
  TnpB Polypeptide
MLRAFKIRLYPNKEQEQSINKLLGCYRFVYNHMLALKQKEYDDNKINLSANELSKYFYGKLRKNEEYFWVKEQNTQVMTQSIRQMLTAFDRFFKLHTGFPKFKSKKDKLSALFPITAISKRNTFEQRKITLTKSFKDLKFRCSNLYLSRLRRYKNKIRSATISKTKSGNYILSILLDIPQDEYVKFNKTGKSVGIDLGVKDFVITSDGKKFENKHFLKKQENKIKKLQHQLSRKVKGSNNWNKARHKLAKAFEHLVNQRENYIHEVVNDLLVNYDTIFMEDLNVSGMLKNHKLAKAIQEVGFFKFKEIL

SEQ ID NO: 7729 - protein, 445 aa, unknown
  TnpB Polypeptide
MEIYSTYSVKIKHFNHIFKQTVSIYRDAVDFLIAVYLEEWDTLSLLDGRARNNYAECLVHATKANPDVKHKNFDKRFYKMPTYLRRAAISEAMGKVSSYKSNLKNWEEENHNTRGRKPSVPKAGFVYPCMYRVEMYKQISDYEAKLKVYVRNTWDWITVKFRKSDMDYIKRHCSNRKECAPTLQKRGKEWFLDFPFKENAQLNDTPVEQRTVVSVDLGINTAATISVMRADGTILGRHFCKLPKEIDSLDHSINRIKKAQQHGNRKMPRLWAKVKGINHDISVKTAQFIVDVAIFYNADVIVFEHLDKKGKARGSKKQKLKLWRSQEVQNIVTDKAHRLGVRISRICAWGTSKLAYDGSGTVLRGRYGGFSAYELCRFTNGKIYNCDLSASYNIGARYFIRELTKSLDESSRLLIEAKVPQCSKRSTCTLSTLISLNAELMSLAA

SEQ ID NO: 7730 - protein, 275 aa, unknown
  TnpB Polypeptide
VDLGIIHPYALAGPDGALVVSGRALRAESRLHLAESKARRRAVARRAPSRGQRGSRRWRHYRARTKVLEARHRRRLSQARHEAARAVIEHAQAQRIGTLVLGDPRGLLGRDAGRRQNLATRNWVPGQLISALKDKAEVANIAVVLVDERGTSSTCPRCATRVPKPKGRCFSCPTCLLRAHRDVVGAANIAARSPRGGTVIDPTGLVTTHRRAGRHLPGRTRRDPRRVALGNRVRDGRPWPAVARQSDVDPGAAQESLALDAKASRARNRPSLPKG

SEQ ID NO: 7731 - protein, 275 aa, unknown; identical to SEQ ID NO: 7730
  TnpB Polypeptide

SEQ ID NO: 7732 - protein, 506 aa, unknown
  TnpB Polypeptide
MIHTAIFRLYPTSLQEKKLHSIFTIYNRVKRIGYKILFDLKDTDLTKNDKWKIAQPILMQICHNNSYVNTIIKKNEILLKQQKTWHKKRITYMNHQTEQIQKKINSIKAQDRRDRRLKRLYSRLSSVQNRLNSLALKPVVFGMKLLFRQRILEKLSREEFFIRRDASFCCIGKKQKINVNLKILPNKTIKIHTFSKQKAKKWFTIPFSVNQKQAKWFNEILNAEKYTVTIKRRIIKGELRYFADVSYDIPESELQFNFKNGAIGLDFNYNFVSLSNVDKDGNFKSYHEISFRNLQTFRKNKRNDYISFKMDNVVNYCINKKKGIVIENLNFDQIFSYNKKLNKKLSNLKSSALELLERKCKKRSVAIKKVHPSYTSLIGKYKYSCSYNLSTHVLASYVIARRGLGFKEEFPAIYKWLLSQVGDYLKPRLKKGSPYYKWSQIHDIFKHSGITSFKTSEVMKKTLQMKYVLNSATSEQSDNLKIGLSPSGKIDDWNKLWKSIKASACL

SEQ ID NO: 7733 - protein, 372 aa, unknown
  TnpB Polypeptide
MQTKIGDKAYSFRISPNKNQKELINKNIGCGRFVFNHFLAQSKAHKYLSYSKFAAQLPELKKEYNWLREVDSISLQQSLKDLDKAFKRFFKGLGGFPKFKSKKNNKQSYRTQYFKRSSGTESIEIRDNKIKLPKLGWVKFRKSREVTGKIQNVTIRKSKAGKYYISVCVQEEIKELPQNNKAIGIDLGLKYFLITSNGEVVSNPRNLSKYEKKIARLNKRLAKKEEGSNNWYKAKNKLAQVYEKVANIRKDFLHKLSTKLIRENQTIIVENLKVKNMLKNSRLAKSISDVSWSKFIDYLDYKANWYGRELIKIDTFFPSSQLCSECGYQNKKVKDLSVREWECPKCHSIHDRDINASKNILQQGLKLQLAGR

SEQ ID NO: 7734 - protein, 456 aa, unknown
  TnpB Polypeptide
MEITSSYQAEILTNADIKSTVQIYRKALAFFIDVCNKEWTNISPIDTQQKRQRYVERLIHPTKSNPNPRCPFDIKESEYYKFPSYLRRAAINDAVGAVSSYRSNYTNWENNGKKGNAPTLQPDRHSMPVLYNKNMYKETAPKNAKYPKGIRPDDENVRWLKLYKNNDWVWVPVKLRKTDIEYIDKCWGLYSDVSAPILEKRRNKYYLRFSFTKVINLTDTPVKKQIVCSVDLGINTDAVCSIMDADGTILARKFIDFPSDKDRMYRAMNRTRRKQSEYGPRSAASLWAYVRRLNEDRAKKISSAIIDFASQHSVDVIVIEHLDFKGRKKRGGKAQRLSVWNHAAIREHVEHKAHLRGIRLSTICAWKTSALAFDGSGKVTRDENNHALAVFPSGKQYNCDLSASYNIGARYFIRELLKSLPATEVSRVKVKIPDVGRRTSCTLSTLRALVKELSAA

SEQ ID NO: 7735 - protein, 339 aa, unknown
  TnpB Polypeptide
MVLKAILEAVGNWTTCIANEKDNFEPPIKKNLSMVLDKRLYNNLTRNTVDLTVPGFKRVRCTIETYEQLDKLFEAYRPQNCNVFYRNGQYYLTIQFDVPEIEQIEGEALGVDRGIRRIVTCSDGTGWINRDFNRERRKLRYLRRCLKAKNTKSAERHLKKLSRTERNRSKNEIHRVVNWLLAKDYTTYVLEDLSKIKKSTSKKTIKIDGKNTEVKRKKHNNRFGQIPLKEIQTTLEYKAPLLGKKVVTVEPAYTSRLDYRGLPEGKRLGTRYYASDGELLDADGNGSCNIVLRHHPDSIVVKPTYGSMVFSGRPMSTGQSWLQLVQTVATASSPPLGGV

SEQ ID NO: 7736 - protein, 411 aa, Clostridiales sp.
MMPELVKTLKLHLHTDSETDALFKELTCRFSAACTDISKYVFEHGFILNFMELQDRLYQYVRDTYGLKAQMTISSFKTVTARYKTVRTQLEKKPYKYKGKDGKYVYIPRTLEWLWRPIVFKRPQADLVRNRDYSFVSKGNLLSVNTLKKRVLVSYDLPEVFAPYFDGTWQFGTGKLVSLKGEWYFHIPVTKAVPDMFDSHAPKHVVGIDRGLRFLTTEYDETGRTVFVSGKDIMAKRDTFANVRAELQSKGTKSAKRVLKRVSGRENRWMSDVNHQISKTLVRKYGTGALFVLEDLEDVSFSDENLQSRTSDGKRKLRSWSFYQLEQFLTYKAEASGSDVIKVDADYTSQRCPRCGRIRKENRHHDVHEYICDACGYRSNDDRVGAMNIYTLGTMYVSGDSNPRFGARKTK

SEQ ID NO: 7737 - protein, 373 aa, unknown
  TnpB Polypeptide
MITLAYQYRFFPDNDQKAQLANEFGCARFVWNWALDQKKSCWKNGKLNVSYEEISKEFTQLRNATGFEFLKIPARTTSTNKLRDLDQAFSNFYNSRTRKRKGELIGKPKFKNIDSKKSIRYRDVFLKNKQLKIPKLGKYINIKWHRDLPVDARILSATISQNLIGGYYISICFESNISNILEVNSNQIGLDLGIKNYVVDSNGDKRNLPSKLKQLDKKLKKLSSKFSKAKNGSKRQKKLKHRKRRCQNKINNIKKNFIHELTTEIVKLNQLICIETLKIKQMQKNRSYAPKIQVQSWGEFYRCLKYKAVKFGRVVVEVDQYYASSKICNSCGYKNTELIGTKDRSWICPVCETNHDRDINAAINIRNEGIKIL

SEQ ID NO: 7738 - protein, 366 aa, unknown
  TnpB Polypeptide
MSQRTIKCKLVTAEPIQDALLETATAFSVACNLILAESKTLKTSNKIKLQHASYYQVRQQTKLSANLVIRAIARVSAAVKVASKKKRVVESFKPTSVDYDQRVFTYREKDESVSLSTLRGRLHIPLSLGDYQRAALKGKNPTFATIVLRQKTWFIHIVIEEDKPNPKTDPEKFLGVDLGIRNIAVLSTGTFFSGKDLQAHKEKRGRVRASLQSKRTKGSKKVLRRLSGRERRFVRDANHRVSKQIVREAVDGGYGVIRMENLKNIRIRTKSWNKHLNRKVSGWSFGQLKSFVQYKAEREGILVEEIDPSYSSQTCHACHSRGLRNGKTFSCPTCGLVADADLNAAKVIAAGGASVNTPRSNRRVSA

SEQ ID NO: 7739 - protein, 617 aa, unknown
  TnpB Polypeptide
MKSIQKIVAVYLRIGSFLFAYACELHTMDSRAQMKGGQLMAFGSKESTPSFVLTLPLDINSNEQDYLYKEFKKCNTIYNQLVSATTKMWHQLRKTRKYRNLMVAIAKATPDSKEQKDLLKQRQKMIQKSGFSEGAFHIMVEPYAKHFAIHSHVAQKVASSVWTAWESFFFSKGKAVHYKRLEDVTSISGKNNTTGIMFHPANLTTSIIKSAKDKKKKTIEQKYIDMYKRPDAKEDEEVIIPDEAKKQMQDEIDAAVAKVKTTIGKGSLRIKYNNHEFPVVLRNPNTPTGRYQQEALKCGVKFCRITRKWVRNKWKYYAQLVLEGYPPVECDGNGVMKHPVNQGRVGLDIGTQTLAISGNDICDLRVLAPSARAQAKSFVNEIARTQRAMDRSRRATNPKYYNPNGTIKRLKRKHGQKQKRNWKYSRHYYRLRAKLRDLNRRLADIRKMEHNILANELLQHGNEFVVEDMNYKALQKRSKETKVNPKTGRAHTKKRFGKSLSRCAPAMFISILNKKANRYGGSVIKVSTFETKASQFDHTDESYTKKRLSERMAHLSSGEVVQRDLYSAFLLEYIDTESLEYNTKALNSAFPAFLEMHENTKRRLQAVGSSLPASIGF

SEQ ID NO: 7740 - protein, 127 aa, Bacillus sp.
VSILTETEVQPLEKTGSSVGIDVGLKDFVILSDGITYKNPKFFRTLEEKLAKAQRILSRRTKGSSNWNKQRVKTARIHEHIANARADYLHKLSTEIIKNHDVIGMKDLQISNMLKNRKLAKAISEVS

SEQ ID NO: 7741 - protein, 406 aa, unknown
  TnpB Polypeptide
MIVYEAKLEGDTDQYQRLDAAIRTGRFVRNSIIRAWLDNQIKSRNDAYAYCKILADNPEFPWAKLLNSMARQAHAERAWAAIERFYKNCKAKIKGKKGFPKFRKHSSRASVEYKTSGWSLSEDKRFITFTDGFKAGTFKLWGSRNLHFYQLTQIKRVRVVRRHDGYYAQFAIDYQRQEEKELTGKQVGLDVGLSHFLTDSFGNKVDNPRFLRRDEKKLKRAHRRFSRCQSKSKNRAKARNKLGRVYLQVSRRRNDWACKLARRVILSHDLVAIENLKIRNMVKNHHLAKSISDAAWYRFREWLEYFGVVFGVPIIAVDPKMTSQKCSNCGEIVTKTLSTRTHQCPRCLYCADRDENSGINILRSALKQLVTTMGRIESNVSGENDLCLDVVTQPSKPTRGKRKPNQ

SEQ ID NO: 7742 - protein, 412 aa, Halosimplex sp.
MTELTKTLELKLVDPNAHKRRKLHETRDAYQQALADAFDAGCTTQTEANDVVVNYDLSGYAKNALKKYVPQLTTTYNADELHDDHPVRFTNEGLRLDHKPENAIEWYVKVPHHEDYHLWMPAQPNPDQRDWLEALNAGDAEMGESRLFQRDGTWYLHVTVTRDVEDCSEASEDERTPIGVDIGEASLVTVCHRDDHGSPTHPKLWADEGKTVRRLSKTYFTATRRLQKRSSERVAESYGDDLWNQIDDVFHRVTREVVAYAESVENPVLVLEDLTYIRESMDYGEYMNRRLHGWGFAKLHAQIRYKAVEKRIPVETVNPRNTSKECHACGEGGYRPKQATFTCTNDDCWMGEYQADVNGAINIADRYLSGESRSREHKTDDDSAEDGARLAAPQDSHADADTQQATRGTYAS

SEQ ID NO: 7743 - protein, 220 aa, Halosimplex sp.
MKSMHRTASASISASTSRERLEREQQSLSRKTEGSNNWSKQRRRVASVHASMTTKKRDFKHKLAYFYTTTYDAVFLEDLNVRDLMQGEGSTRNTAEVGWRDLITIFEHHGRKNGCHVEPVSPSGTTKECASCGVSVEKPLWVREDSCPSCGFDADRDLNAAANVLARGLQQIGVGHSEATPAETATAVSTDGGDASVRVDASGVVESGSPALKETVSTVE

SEQ ID NO: 7744 - protein, 441 aa, Clostridium sp.
MQIVSSYGVEINKKNIPLCSTLDIFRKAVSYLIPVYAETWEELSEIRNPQKRFNEAEHLVHETKKNHARFAFDRHFPKMPSYLRRSAIQHALGAVSSYYTRLDLWEKGELKGKPKLVCENHAMPVFYRDVMYKEAEPGEDVAHLKLFDGREWKWFQVKLLHTDMEYLRKKWSGKKASAPTLEKKHHKYFLRFSYTEEVSLSKTEVKEQVICSVDLGINTDAVCSIMSADGTILGRKFINFPSDKDHLYHVLGRIRRFQREHSSGQVKSRWDYAKRLNMELSRKIAAEITKYAAEYRVDVIVFEHLEMQGKISGKKKQKLHLWRKRDIQKLCEHQAHRNGIRVSRVSAQNTSRLACDGSGAVVRNPENHSLCTFQTGKQYNCDLSAAYNIGARYFIRELLKPLPETERSSLEAKVPAVKRRTSCVYADLRKLYIEVSDLKAA

SEQ ID NO: 7745 - protein, 307 aa, Halorubrum sp.
MINKLPHHEDYHLWIPARANPDQRDWLEALNAGDAEMGESRLFERGGTWYLHVTATRDVEDGSEVSTEERTPIGVDIGEASLVTVCHRDDHGCPTAPELWADEGKTVRRLRKTYFTATRRLQTRGSERIAESFRDDLWNQIDDVFHRVTREVVEYAESVENPVLVLEDLTYIRESMDYGEYMNRRLHGWGFAKLHAQIRYKAVEKGIPVETVNPRNTSKECHACGEVGYRPRQATSKCTNDACWMDEYQADVNGAVNIADRYLSGESRFREHENDDDSAEDGGRLTAPQDTHADAETQQGTRGTNAS

SEQ ID NO: 7746 - protein, 391 aa, unknown
  TnpB Polypeptide
MLKSFKYRLNPNKTQEELINKHIGCARFVFNLALECKQMAYAGAKVNLTCFDLNKQIPELKKECVWLKEVNSQSLQSSIVNLDRAFTNFFKGHNDFPKFKSKHKGTQSFQVPQFVMIENDKIFLPKFKTGIKIILHRKLKGEIRTVTISRTPTGKYFASVLVDNKKEPLNKKPIRENTSVGIDLGIKSFIVTSDGLQVDNPKYLKNSLLHLKYLQRQVSKKVKGSNSRKKSVFKLAIQHEKVANQRKDFLNKLSSKIISENQTICIEDLTVSNMIKNHKLAQSISDCGWSMFVSMLEYKASWYGKNLLRIGKFEPSSKLCSKCGANNDTLTLADREWLCANCGTLHNRDLNAAINIKTFALRNHLTVERSRKNLMELPTLVGALKSEAPTL

SEQ ID NO: 7747 - protein, 554 aa, unknown
  TnpB Polypeptide
MDELSSAEQDMVRLTFLRYNRMKEWYYNQSYNEKYLGIPFAVDGKTETALLKEHYRALYGGKLSDYYITSLFSSVNGMRKSQKELIKLAEQERMQRQENRREKADSLKERLVWMQAGKDWLKAFGRYLAGKGAEPKAPSVQEQGFTYSGGKLFYRGKKNQLMEEDPFVYERELEKRIRQTKARIAQIGDKIRRTDEEAGRIPSRITFGSKKQYKKKDTLSLTGKDLEAWHQERDFARNRIVNFSGRAVSPDGNYLCKYDPERHTLEVTMINGEKILFHEVHFPYRGEELGQYLKDRKGSVGYMMECKKDGNGREYLIFKATLTVKKESLNHSTSDGVFAYDFNYDHIAWADVSLNGNLIKAGVIPFTLDGLSSGHAKEVLGVAVKKLVALATDRRKPIVREDLDFVRKKRQMEYREKRQNRKLSALIYSKAAAMVEARAFREDTVVLKVNPAYTSLIAKVKYMKLKNLSIHCAAAYVIGRRGMGFSEKLPSYLNHLVPKTRKNRWRTVFTHAKKAGSSYFREDLPVWDKWKQFDANVHNYNENYALWKESYSMQ

SEQ ID NO: 7748 - protein, 510 aa, unknown
  TnpB Polypeptide
MNSPTTSWKLLQSLQPDTTEVESIKKLRVPKKQPTENTEVKPDIKQILRSRKFRIKFIDKRTIGFLRLCFEAYDTFYNLAIKEINKRYNDRKNEFIKSLTCISNNCKKQKCENSWHCKEHTNNTIHWKLNISTIEFRKVLPINKENILKDDYLKKFINVPYDLKNEAIEHAIIAYKTNVCSVVNGSKTNFELKERIIKQAYEVKQFDLPFDFLDINKSVINICKNGILSEYRDSIDKERKEQKKLKQSITNTWCQLLLTPKSMKVINEQYTKDKCFFKIYKSKDSKYYLIMTKNIQKETFANKSHIVSLDPGVRTFQTCYDPSGFILEAGSSIKHTIETIIKQIDNHETIINDDINNYKRRKTNKKKKIKKYKKISNIVDNMHNQLSSYLTKNYNNILVPQLPVKKLVRKWDNKKNDEPKLINRVINSITSRIMNYLSFNKFLTKLKSLSSIRNTNLYIVDEIYTSKTCGRCGYIKTDLNSNKTYKCNDCNLELDRDYNGARNILLKHLI

SEQ ID NO: 7749 - protein, 421 aa, Synechococcales sp.
MLNMTWEFKLEPTSEQVAEIEDILDVCRNVWNFTLRERKDWLDSRKCPVNTCSIRQEFILSADAPFPVYARQCKALTSAKADFPRLKTVNAQVLQQVLRKLENSWESWRLKRSGLPRFKKPNRMRSFVFPQMLKNCISTEGIKLPQLGLVKVRWSREIPALLQVKQARIVRKASGYFVMLSLEAEVNIPSTMAHGHPLGIDVGLEYFLSTSDGEQVKRPRFFNKLHRKLTLLQRRLKTKQKGSANWLKLQKKIGRVHQRIADTRKDWHFKLAHHLCNQSGMVFVEDLDFRIMAKGMLGKHTLDAGLGQFANQILPWVCFKRDVFYAKVDARGTSQECPDCGAEVKKDLSVRVHQCPDCGSIKPRDIAAAQVICTRGQRGIENACRVEVTGASVMVSSQLVLKQEIFGVTQRISNHTVRLVG

SEQ ID NO: 7750 - protein, 545 aa, unknown
  TnpB Polypeptide
MIINSKYTKIFHSKDLTRQKYDELYDFAVLIRNYKNIVSQRVNENLLHYLDCTKFQFLKEMITNFKGSVPSSFYTQLYTQVFTCYENKFKNIQRRLAFKLSTVKGFEYYKRDTKKHKKGDLKQVIIEKKHTPLSNCLTYLARYGNENKIAYIKSNIDKFDDNKREFYNNILRCCEKYGFERLYKLALSKRKRIINKYANIPIEFRSLTFSGRCRKKRIIDYNRRFGSNINSFISLSGLSRKSFDIPVTFNKGWHGNMKDYRKSSPDYEYTITFNEKNHQVNVNICKDGERYISEPNGKAIGIDVNCKHNLFSLSDETTYDYDRKLVNDFCKLSIEIDRLKENKTYVIGKRKQRKLDKLKEKIIKNEQQLIANMCKTLQSQGVGHIVMENLDNGFGKCYVKDKYNGDINYNRKVSFLGLSSLKQEVEHIARKYNIAVSTVQASYTSKMCPICGCIEDVNRPNQESFECIECGHKDNADFNAAKNIRNRVLVTVLRDKLLKQLDNGAFEPKKLKREKVKEVLLSFRRSLPTVGSECIESNNTTFEYI

SEQ ID NO: 7751 - protein, 402 aa, Sulfolobus sp.
MPTLGFRFRAYADEQTLRALKAQLKLACKIYNTLRWADIYFYQRDGKGLTQTELRQLALDLRKQDDEYKQLYSQVVQQIADRYYEAKKRFFEGLARFPKEKKPHKHYSLVYTQSGWKILHVREIRKGKKKLITLKLSNLGTFKVIIHRDFPLDKVKRVIVKLTRSERIYITFVVDHEFPKLPNTGKEVAIDVGVEKLLVTSDGEYFPNLRPLEKALWKVKHLHRELSRKKFLSHNWFKAKVKLARAYEHLKNLRTDLYMKLGKWFAEHYDVVVMEGIHAKQLVGKSLRSLRRRLSDVGFGELRDVLKYQLEKYGKKLILVNPAYTSKTCARCGYVKNDLSLSDRVFVCPNCGWIADRDYNASLNILKSAGSERSLVPVELRPLPVLWHGRAVKQEAPSFMRG

SEQ ID NO: 7752 - protein, 322 aa, Methanolobus sp.
VFCYHIYPTKAQKSTITDTLELCRWTYNETLALRKNAWEFEQENIGYYESKKMLPSWKVIKPELKNVHSQVLQDVVKRVDLAFQALFRRCKDGDNPGYPRFKGKNRYDSITYTQSGFELQDNKLWLSKIGAIKIKLHRPVTGEIKRLTIRRNSTGKWFVSFLVDIDNQQTIPLTGQYVGVDVGIKSFLTLSNGQDIPNPRFFVSEEKNLAKAQRKLSKAVTGSPEWKKALKIVGHIHERIANKRQDFVHKVSLELVRAYDLIVFEDLNIKGMVRNHCLEKHIADVSWNKLISIITYKAEWAGKHVEIVNPRNTSQMVLVVVR

SEQ ID NO: 7753 - protein, 387 aa, unknown
  TnpB Polypeptide
MNTVRIYPLNNLSPTQFRRLRDAQMESAQVWNYCMRVHKDARLQHNKWPERDELQKATKRQFALHSQSVNMVVHAFLANVETTQILRQTHPQMRMRYPYKDKRYYPVHWPKQAVSREQGRVVLPMGRGRKSLVLPLDLPENSGACTLVWNKGFELHVCVEVEQRENAPGDKHAAVDLGQIHLAAVTTNTGKAMIVTGRGIRTLKRQRTMQVRTITKKQSKCKKYSRRWKKLQRAKNKLSRRAERRIRNQRHQATRKVINFCIERNVGTLFIGNPHGVRNRDSGRHQNQRMALWEYGKDIDYLTHKSKQAHIVCFTGSERGTSSQCPVCGHKHKSKNRRWNCKQCGFKGHRDLVGSVNMHKLAFSEQVKFPRSFTYLRPSSLGKVVVG

SEQ ID NO: 7754 - protein, 401 aa, Streptomyces sp.
MQLRYAFRLYPDPGQQRALAKAFGCARVVYNDAVRAREDARAAKQPFPKAAELSKRLITEAKQTASRAWLGEVSAVVLQQSLRDAEAAYKNFFASLKGARKGPKMGAPRFKSRKDNRQSIRFTANARWSVTGSGRLNLPKVGAVKVKWSRTLPTTPTSVTVIKDAAGRYFASFAVDTDPHADTGETVGIDLGLTHFAVLSDGTKIDSPRFLRRAEKKLKKAQRELSRKEKGSKNREKARLKVARAHAQVADARSEFHHQLSTKLIRDNQAIGVEDLAVNGLARGRLAKSVHDAGWSAFVHMLEYKAARYGRTLVKIGRFEPTTQTCSTCGVKDGPKPLNVREWTCTACGSVHDRDHNAAINVKTAAGLAVSACAAPVRPGAIPAQREETGSHGFPTEPRAA

SEQ ID NO: 7755 - protein, 469 aa, unknown
  TnpB Polypeptide
MFRVSERPRRTNEYTADPTSERYRQCLFEWLAAHAPLWNQLTYRRRQEYFAEDGDVWDAEYADLYDEYAPILGKAACQQLARKNSEAWRSHFRLLGQYYDDTDPTITDKPSPPGYWGTREEGYELHGLVRNDLYELDWDEDGSTLEFGVGDVLEEKYDFAYQERITLDVRGNPHWEGEDARLELVYDEAADVLRVTHPVRIRPDHVQEQRLDGFTHTLDPENTTHAAAIDVGANNTLAIVTEQGDTAVYHARPEFERFQTLSDRIAALQSELPDDQYTSTRIQRLYDERGEKRDHSRDAAVKHAAEWLLARNVDTVYVGDLTDVLETHWSATINTKSHAFWSHRQLLDRLELTFGDVGISVEAVSEAGSSSECPDCGSDDISRDGDSFRCQDCELDAHSDIVGAWNLLQNEIGPMARPAALSAGRQRDAPSDGAYWEWNGHDWLPARFGKQTRPLDQTSLGKPASSQPG

SEQ ID NO: 7756 - protein, 424 aa, unknown
  TnpB Polypeptide
MGRRVWNMALAEQRARHARGEKYAGHAEMCKWLTAWRNAPSTAWLAQGPSQAQQQVLRRLDEAYKRFFAAAKAGQAGGRGRTGPPEFKRYGDEPGIRFPDPKQFSLDAPNGRIQLPKLGWVRLRMSQPVEGKLRNVSITKEGSGKGAKWFASIQVETNETVPALGIEPTLGIDLGLAQFAAFSEEVLCTAGNGNAPRALQHHVAPLKALAKQQVRLKRYQRSVARKKKGSANRKKAVAKLGNLHRRIAHQRNDWLHKLSTDLADAHPVIALEDLRIRNMSASAKGTVEAPGKMVRLKAGLNRGILDAAWGEFARQLSYKVEWRGGRVILVNPAYTSRTCRICAHEDAENRKSQALFECVACGHAENADVHASKNILAAGHAVWARASKDASLDACGGEVSRGRRASAGRAAPSKQEPTEAKVLV

SEQ ID NO: 7757 - protein, 594 aa, unknown
  TnpB Polypeptide
MRQLFTGLKKKPEERHELESSTIEDVLNVAKKYKKEVVLNEEQRLVSYQFLDFYFKTKKNENYNSSLPKQSAQATIKEAHSKFIEWLKALKDYGKNPSKYTGRPKMPKYKKSGGYSSFQMTNQGVIFRKKKFNYLIKLPKTKETISFNKKLGNERLKTVSVRKEYGMFKITFIFEDLNEAFPSINSNISCGIDLGVDNLAAITTSNGYTLLVKGGFIKSKNQWFNKKIAKNHRGQTIGTTNKATSSKALNRLYKRRQFFIEDALHKVAKKIVLWCVDKNVSTIIIGKNKGWKQEINIGKTNNQNFVQIPHALLINYIKTVASKFGVTVIETDEAYTSKASFLDKDLLPTYNPEGNITYLFSGSRIKRGLYKDSLGRVINADLNGAGNIMRKLISDNEINVNVNNLVSPSILTAKEIYAKCNPVKRIEGAVNRPYRKDDLCCRSLLKNCSFVFSANKETPLYSFAIGGEVHPERLLKYKNRKKFFKNRKSKEISREKIVRSGDCEKILKHYRKATLKKNHKGLPYFEEEIYDEKKCRKYKSICKTSRVLKKTRVITKRRILKSPLLASLNLDPSEENFEKLQGLFSSKDKTEYRY

SEQ ID NO: 7758 - protein, 369 aa, unknown
  TnpB Polypeptide
MRITYKYRLFPSSAQCTRLGHVLEQCRRIYNRTVAVRKDAWETKQRSVSRYDTIKMLPEWKRESPALKDVHSQVLQEVCTRVDLAFQHFFRRVKSGEEPGYPRFRGQGWYKSFTYPQSGFALLNSGCLRLSKIGDVRLKLHRPLEGEVKTLTVKRDMFGNWYACFSVEIEPESLEPSPHVVGIDVGLTHFATLSTGDKTENPRFFRSEEKALAKAQRRLSQYEKGTVEFRKHKRVVRHIHQRIVNQRRDFSHKLSRRLVDTFQVIALENLDIKDMQDGNFRGMNKSIGDAAWNQLVQHISYKAEKAGRNVVLVDPCNTTKACSDCGEIVPKRLSDRIHSCLHCGCVLDRDLNAALNILARGLSCMGANP

SEQ ID NO: 7759 - protein, 398 aa, Zetaproteobacteria sp.
MIIRKGFKYRLEPSAAQRADMVMFAGHNRAVWNKDLALTKDRLERKIPISWYHELNWNMTNFWKKSDEMNWLNDAPSQCLQQTLKQFDRAMRDCFDKNQPNKRMPRFKKKGVKDSFLFPQGISFEGNRIKLPKLGWVKFRKSRDLEEKLKSATVSRNGKHWFVSILCEIEVAEPVHTSNTAVGIDRGVAIMAACSDGREYIGAKAFKKHEKKLARAGRLLARKVKFSNNWQKQKEKVQNIHSKIANIRKDALHKASTDISKNHAMIVMEKLGVSRMSKSAKGNSEKHGSNVKAKSGLNKSILDAGWAMFAAMLEYKQAWLRGMVEYVPAAYTSQRCSECGHTVKANRLSQSKFQCVQCNHAENADFNAAKNILAAGHAVLACGVGAVVTTMKQEPLAV

SEQ ID NO: 7760 - protein, 455 aa, Desulfotignum sp.
MLMGIKLQAHPTEDQKLVLSQWMGCARTIWNAKCQEDKYLTAFARKYMPVNTYAPVDQSFAQYKDKGISPWLFKCPSQILRNSAVNWYQTYQQFFKGLCGKPRVKKKRDGGSIHLTRELFRFEKCNDGVIRLFIGTKRKNIGHLCFKTHRKFEEPKSIYIKKKNGRYSVSLAFDDGVDESDLMDQKAYLKVLSQCPKKELEQIVMGIDRWVVRPVQAGEDFFDFTPGQKKNKVGKEKYLKRLQRRLARQKKGSNQREWTKQKLARAHEKIGNIRHDFCHQTSRKLVDKPDARVYVFEDLRTKNATKSAKGTMESPGRNIRAKSGLNRSILDKAWHKLEAFTKYKAYRAGKITYRVPAPYTSQECAVCGHIHPDNRQSQELFLCSICGNTDNADNNAAKVIKKRAINLILDSGTELSKRGVLLDKGRGANGKPHGAKAKCAHGKETSKKTGLANAA

SEQ ID NO: 7761 - protein, 413 aa, Herminiimonas sp.
MQRLQAYKYELMPDGKQERDMRRFAGSCRFVYNKALAMQKENHEAGNKFISYVAMAKHLTRWRNGVETPWLKNAPCHPLQQALKDLERAYKNFFEKRADFPIFKRKGSSDSFRYPDPKQIKLDLSNDRICLPKFGWLRYRNSCDVLGDVRNVTVSQSGGKWFASIQTQREVEQPLPTATTAIGIDVGIARFATMSDGSFIAPLNSFKKHQQRLARYQRRMSRKVRFSCNWKKAKAKVQKIHTGIANARKDFLHKATTTISQNHTLVCIEDLQVRNMSRSSKGTVEQPGKKVSQKSGLNRAILDQGWGEFRRQLAYKVAWNGGMLLAVPPHHTSQACPCCDHVSKDNRQTQAKFLCVDCGYENHADVVGAINVLARGHRVLACGESAQLGRSKKQEPTEATRRSSRSAVGIPVL

SEQ ID NO: 7762 - protein, 328 aa, Bacillus sp.
LGVLALYSIISYPYGITHTKRQEKGLTYGICSAKLPAMKKELVWLKEVDSIAIQSSVRNLADAYTRFFKKQNSAPRFKSKKDNVQSYTTKQTNENIAVVGNKIKLPKLGLVRFAKSREVEGHIVNATVRRNPSGRYFVSLLVETEVQELPKTQSYIGIDVGLKDFAILSDGTPYKNPKFFRSLEDKLAKAQRVLSRRMKGSSRWNKQRVKVARIHEYISNARKDYLDKISTEIIKNHDVIGIEDLQVSNMLKNHKLAKAISEVSWSQFRTMLEYKAKWYGKQVIVVSKTFASSQLCSCCGYQNKDVKNLNLREWDCPSCRGILTQASI

SEQ ID NO: 7763 - protein, 166 aa, Sporanaerobacter sp.
LQRKVSKKYEINKIETKGGETRYKKTRNIIKLENQLKKLNQRLTNIRHNYSHQVTTEIIKRKPSFIVVEDLNVAGMMKNKHLSKAIGEQRFYEFYKQIQYKSEWNNIKFVVADRYFSSSKICSQCGSYNKDLKLSDRKYICECCGSVLDRDFNASLNLKRYGQEIA

SEQ ID NO: 7764 - protein, 400 aa, unknown
  TnpB Polypeptide
MIQRKAYKFRLVPKLENRKKFAQFAGCNRVVWNKAWALIKEALSKKEKIERYNTIAKRLPLWKLDEETAFLKDAPSQALQQTLKDLDRAISDFFKKQKKAPRFKKKNQNDSFKYPQGFRFQSNRIFLPKVGFVKFHKSQDIEGTPKNVTVSKRAGEWYIAVQVEMEIEEPKHPSEKVIGIDMGIANFAALSEGKILKPHNAYKKNQEKLVKEQRKLSRKKKGSKNREKQKWKIQRLHKKIVDSRLDYLHKATTWVAKSHGKVVLEDLKIANMTKSAKGTMENPGKNVAAKSGLNKSILDQGWLEFKRQLGYKLDWLGGELVLVNPRNTSRRCQKCGQISAENRKTQAKFKCVSCGHEDHADINAAKNILTVGQTGLACGSNLTRRSSKQELLVQRELLPA

SEQ ID NO: 7765 - protein, 491 aa, Anabaena sp.
MPTLSYVKGLPTPAEELNNLGLTEFEMFLAAYSSVFHKAACETANHLLTVNSFHNSSWNTHLQKTYGISRRHATGVIKFTEGAVNASKESRKLHIKTLEGKLKSLNSWITKSDKKLSDSAKFYAKKNWRNSKTGCRFPLSCSLKLRNTNWNNLRFKIHNKKRRAYKLAKQIEHLRTSHIQTIIPRNQVFVVGSKDESFGNQVCQWDGNILRFRVPPCLESRFGKYVQTLLGNFNRNINRLPEDGAKTWHFFRKHNKWNAAVKFTPVPVERVSKHSAYGCIGIDMNPGSIGWAYIDRDGNLKSHGQIPLQMGLPSGKQDAQIVEACLRLARLATTFACPIVCEELDFSTKKEQLRERGRKYARMLSGWAYSRFYQLLDSILSNRGIYLIKVNPAYTSLIGMVKYARQYGLSSDCAAAIAIARRGMRLTENIPGSITAYLSVKDGKHVWSLWSQLNKLIGKSSIKRHNFYAISNWGSLVKRLSEQSGKSKLRH

SEQ ID NO: 7766 - protein, 284 aa, unknown
  TnpB Polypeptide
MLKIVNSKTVSIPFFRKLKVYGLEQFINIPGFEIANANLIKKASGIYIKVSVCIPKSQFNRKPTGKEVGLDFGIKDNIITSDGEKFNCSVQETDYLKFLQRKLSKKQKGSKRYYRCLNQLQKEHEHLTNKKNDDSNKLISYLLKNYDVIYFQDEQISKWRKFCPGFARNIQHSYLGRVKSKLVMLEKSGRSFKISRSLPTTKYCPQCGNLNKEITLADRIYNCSCGYSYDRDVHAAKNVKLFGSTKRAECLEQASVETLASTALNLCSMPQVKSMKRKQEADSL

SEQ ID NO: 7767 - protein, 378 aa, Lachnospiraceae sp.
MITAYKYRIYPNAEQQVFFAKSFGCCRKVWNLMLSDRQTYYQACHKSLYVTPAQYKQQYPFLKEVDSLALANVQLQLQKAFRAFFEHKAKYPQFKSKHHTHKSYTTNNQNGTAAVLSKAIRLPKAGIVRAVIHRPPPAGMILKSVTISQDSDGRYYASCLYKNDEPDLSIPADTLTDKDVLGLDYKSDGLYVDSGGYCPGSPKYFRKQQKRLKRQQRKLKRKTGQKKGETPSNNCLKQRHKVNVIYAKTKHQRQDYLQKLSAAIAKQYKAVCVEDLNLKGMSSKKGYRLGKATMDNGYGMFVRMLEYKLQRNGGYLVKISRWYPSSQICHICGHKDPITRNLKVRTWICPVCGSVHDRDRNAAVNIKNEGLRLLKAAA

SEQ ID NO: 7768 - protein, 447 aa, Streptomyces sp.
MNRTDNAIGLPQPLGSVASRSVVETGVATRRFTGHRARLELSAAQADKAETQAHAARGLWNPLHARWQMMPREKRTLAHADAAIREGRKEIHWLGALPAQAARQVLKAYARAWQNHWAGRAEAPTYKHRSRSPLSVDIPQGARLQVVRVHRRWGMAGIPEIGRVRFRWTRELPVGRRAGQDRRVTGARLIGDALGWHLAFRVQACVPTPPPHPGPAVGIDLGVTVPLALSDGTVSRHGPWPTVPEQAKLLRLQRRAAHRRSHHDPGLPPSRRLGRTYDQIATLRAKAKRRALDRQHKTTTTIAATYSTVVAEDLALATLVRSARGTEDTPGTNVAQKAGLNRVIHGEAWGRTVAPLSTRPTEAVAHSSVSHRREPHSAARPAGTRHGAAASPRRCSSARTPSAVGPVTPTTTRRATSCTSTGSALWRSRLPGGQSSGARSVKPVVAR

SEQ ID NO: 7769 - protein, 328 aa, unknown
  TnpB Polypeptide
LAGWVGEVSPLQTQGSARQLLPGREYSHFWQPHQVPIFGWLRCAELLPATTPKNVVISLRAGHWYISFKYEAPAPHVEKTGDVVGVDLGIHHLATCSDGEVFANPKPYRKARQRLVRLQRRLSRKQKGSTNRKKAVVQLGKAHKRVADIRTPSRLRDRQDSLHKLTTYLAKRYRVVVVEDLQVKNLLQNRKLAGSLSDCGFYELRTPSRYRERRQLEYKARLYGCQVVVADRFYPSSQLCSGCGHRQKMPLQERVFCCPCCGLELDRDLNAALNLLRWYRTTPSSGGSDACGDSSGGVVGVNSAASHGSLKQEGSRSAAGTEHSGSVC

SEQ ID NO: 7770 - protein, 218 aa, unknown
  TnpB Polypeptide
LSVNQLFAVCNVDEPTPIDIEGMLGVDLGITNLAVDSDHTIHQGKTVKRVRYQHRQLRRKLQAKGTKSTRRRFATWTNHNISKRIVEKAKDTKRGIALEDLSGIRDRVTVRKAQRSTLHSWSFHQLRGFIEYKAQLHGVPVVAVDPRNTSRTCPCCGHVDKANRRTQAKFLCIDCGYFGLADYIASVNIRRRAIVNWPNVSTVDINFYPQRQGQSPRL

SEQ ID NO: 7771 - protein, 470 aa, unknown
  TnpB Polypeptide
MRKQRRKRAKKGEPQRITKAVTCIRLAETNPGKLVALDQLAQVFLPLVQQYVTFFCTDEMPDAFHAPMFPTELSERWHRVAIQQAAGIAKSWRTNRTHAYRSYLDELAEYQEQEADGTLEAGAKEPEWCEWNVPTLREVCIQANGNVVKLEEATDSTFDYWLKLSTLDKGHPLLIPVKLADYHKAQLTDPETGKRRKINSSVTLNKRDDAWWLTLSYDEIVEVETKPDAKVVGIDVGIANFVTTSDGKQYGTFNGKLRERQKRDREKRRRKARLRACLKKQGVPEERLPSTSSTTGQRLMRHVKQSINRAVNLCFEEHEDCQFAYEQLSVASMRFKARAQNAYLRASQLGQIPKQIAWNALKRGVQATKVKSAYSSQECHVCHYVDRKNRPDQGTFLCQVCGHTAHADTNASENIADRLHDEELRTCQNRAEVRALLLRRHEQWKQKFGLAVVQPPVQLGLWAIPRLQRT

SEQ ID NO: 7772 - protein, 513 aa, Streptomyces sp.
VRAPVREAGGGEGPGRARGGGGDRRGGGVKRFRARPGFVVQAYRFALDPNAAQERALRSHCGAARAAYNWAVGWVTASWWQRRAEETYGIARAELTGWRPWSLPSLRKAFNQAKYTDGRFTSWWEENSKEAYSTGLANASAAFDNYAKSQQGKRRGKRMGAPRFKSKRKARLSCRFTTGTIRVDTDGRHVTLPRLGMIRVHEPTRALLARVEAGTARVLSATVRHERGRWFVSFQTEVKRDLERVARPDVAVGIDLGVKTLAVMADSTGEIRTVANPKHYDRARGQLRRASRVVSRRRGPDRRTGAKPSKRWEKANAARNKVHHRVANLREDALHKLTTSVTAEYGTIVVEDLNVAGMLKNRRLARRIADAGFGEIRHQLTCKTRQRHATRLVVADRWYPSSKTCSGCGAVKAKLPLHIRTYECDACGLVIDRDDNSARNLAALAAIAVTGTGVAGDQDTTPVVPKPRGADQKTRATRTHRKAEAGRAGGATPSHQRQTETRDRTQAEALTLW

SEQ ID NO: 7773 - protein, 534 aa, Methanoculleus sp.
LKRQSGKIPCANWGIRAAPKRWIHLHPARLFFMLGNTKYRMSESAGEFPMYVTTKIKIQVTPEQEDVLWHLSEKCRLVYNFALAERNRNYQENKDRPDKQYIRYAQQANALPELKKKYPDYRWVYSKVLQTTLKSLDDNFKSFFALRQNGDETANPPRFKGKDHFCTLRYNQSGFKIEGNRIRFSHFYNNVPLVFTLPEGSQFTNVKQVDLFYDDIKGAYYVSIVHEVQPQQDYRDNGLYQAFDLGVTKHVGVNSHGKFIEFSVARPDTYWKTPIAELQARRDHCKKKSRKWQKLNRLKRKCERKQRNQIKDFQHKVSRKIVENTRANTILVGDLSVKQMPQSKQATPGLNRSTQNTGHLSRFIGFLTYKAALAGKRVIKVDEQNTTRACCVCGALHEMPLWKRVMTCECGNTLDRDRNSAVNIMVRFLSQNALWTGYRQFAGNLRQTGPRIPEIPGHSQEAPCVSGGSSHPALRRNTFKYHAFHKHRHQRPADLDRTFKPPFPLRIDGEDGVVLLDPGPFLCVDLEPRAVIVG

SEQ ID NO: 7774 - protein, 391 aa, Methanoculleus sp.
MLRRYQYRIYPTRAQEILIAKHLGCCRYVYNWALDRKNQAYHANGISLSGYDLIKELVPLKTEHPWLKEVNAQSLQQSIIHLARAFTNFFAGRAEEPTFKKKHAPEQTFTVPQSYTVDFKQGTVKLPKIGGIKVKYHRTFVGTMKSATVIRRSTGRYFISIVVEDGKKAPKPADPIPNQTVGIDLGLMHYAILSTGDAVANPKYLQNTQQRLAVLQRRLGRKQKGSKNRNKARFKVARCHQKIADQRWDFQHQLSSRLVRENQALAVESLNVGGMVKNHKLARAISDAGWGSFVSMLTYKCQEAGKPLLQVGMFNASSKTCSVCGYRKTDLTLKDREWTCPECGTHHDRDINAAINIKQFALAGAGRAEEPVDSLPVGRGMKQEAPCTSGG

SEQ ID NO: 7775 - protein, 242 aa, unknown
  TnpB Polypeptide
MLKSFKYRLYPNKTQEIQIQKTFGCCRFVYNQTLAYRKNLYETEKKSMSKFDCNTYCTQVLKKEYVWLKEIDKFALNNAVFNMDSAYQKFFKEHSGYPKFKSKKDNRKAYSTNSTNNNIEVDFENNRIKLPKLKWVKAKVHREFVGIIKSATISQTPSDKYFVSILVDCENFQMKPTGAMIGIDLGIKDLVITSDGDKFENSKTLYKYEKKLAKEQRKLAKRQKVVATEINSVLKLQDFMRR

SEQ ID NO: 7776 - protein, 295 aa, unknown
  TnpB Polypeptide
VPREAGQQDQRTGCAARLPTLCDRLFDTVRVRTAYRCRAYPDTDQQQVLNRTFGCVRVVWNRTLAARHARWQAEHTSTSYTQADAALTIMKKDRDLAFLARRARNLARYQRRLARCRKGSANRARAAAKAARAHRKVRDARRDFLHRASTGLVRSADMIVIEDLNVSGMIRNRHLARAISDCGWGEFRRQLQYKCERYGRDLVVIGRWYPSSKTCSACGHLLAELSLGTRQWTCPSCGAWHDRDINAAKNILAAGQAVTACGAGVRHPGTSRVRPAVKQEPRPVTAGIPVLQGGE

SEQ ID NO: 7777 - protein, 400 aa, Actinomadura sp.
MRTAYKCRAYPDPEQAAIFARTFGCVRLVWNKTLAERRRAWQTDRTPTTYKQTDAALTAWKKTQDLAFLNEVSSVPLQQALRHQHTAFANFFAGRARHPRFKSRTGRQSAHYTRSAFRMKDGHLWMARTTAPLAFIWSFQDVDPAGLNPTMVVISREPDGRWYVTFAIDADVPEPLPATGHAIGIDLGVKDFAVTSDGDRVANPRHLDRKAANLARYQRRMARKQPGSNNRRKAKTKVARACRKVRNARHDFLHRTSTNLVRQADIIVIEDLAVANMVKNRSLARAISDCGWGEFRRQLEYKAGRAGRVLIVIDRWYPSSKTCSACGHLLTKLSLSTRHWTCPGCRTRHDRDHNAAKNILAAGRAVAGAGPGDVCGADVRRQGPSLPQSAAKQKPPRREP

SEQ ID NO: 7778 - protein, 513 aa, Saccharopolyspora sp.
LVPGRRAQLRGGSPGRRGNAAAHAGGAADGPHQPDVPAPGRAVVRRGGRDPVPRHRLRDPDRRQRPRDRAASRPRMQGGVRGHRPGGRRAHPALARRQPALRGPPSRSPRAGGDPGRTGAARPARPRPAGGPADDRGSALRARRGGSARLDRPLPGRAGRRQLLRHRARQPEHRTDAFRTPARRAQQVRALGGPGEPALAAGGRGDVRRFRPGQPRRGLAAGLAPHQRRDPRGQRGAERRLRRSRPQAPDKSSTVATPFPLQHFVVANDQLGRLAASRLGDILIDNPEHLEAALRELRRLQRQTSRRTGPDHRSEQKSSNRWRTTQARITKLHTTVANTRRDGLHKLTTWLVRTFGAIVLEDLNVAGMTRNRRLARQVAGAGMAELRRQVEYKASWAGLRVHIADRWHPSSKTCPDCGAVRTKLRLSDRIFTCPSCGISMDRDLNAAHNLANLVEATTSSPNCGATENEPDGNPHKTRTTRAADIATGRPAPNNAGQRRHRKAPAHDTLSHVS

SEQ ID NO: 7779 - protein, 255 aa, Saccharopolyspora sp.
MVVVSRDADGRWYVTFQVDTADPEPMPETGHAVGVDLGVKDFAVTSDGERIANPKHLERKARNLARYQRQMARKQKGSANRRKAKGKVARAHRKVRNARQDFLHRTSTNLVCGADVIAVEDLSVSNMVRNRRLARAISDCGWGEFRSQLEYKTSRAGKILVVVDRWYPSTKTCSSCGYVLSGLKLSVRAWTCPGCRTRHDRDINAAKNILAAGQAVARGTSGDACGADVRRGELPRAQSAVKQEPQPVRVGIPRL

SEQ ID NO: 7780 - protein, 418 aa, Saccharopolyspora sp.
MITGVGPLCKMISVRTAYKVRAYPDPEQAAQLGRTFGCVRLVWNKTLVERHRSYHATGTKTSYKETDAALTAWKKTEELAFLSEVSSVPLQQTLRHQHTAYANFFAGRARYPRFKSRNGRQSAHYTRSAFSLRDGKLKLAKHNTPLEYVWSWGAEVLQSLNPIMVIVSGEADGRWYVTFAVDTDEPEHAPVTGRTVGVDLGVKDFAVLSTGEKIPNAGHLDRKARNLARYQRQMARMQRGSANRRKAQAKVARAHRKVRHARQDFLHRTSTDLVRNNDLVAVEDLAVKNMVRNRKLAKAISDCGWSEFRRQLEYKAERAGKIVVVVDRWYPSSKTCSNCGHLLKNLKLSVRHWTCPDCGTRHDRDHNAAKNILAAGRAVAGWKSGDACGAGVSRGELARAQSAMKQETQPVKVGFPRL

SEQ ID NO: 7781 - protein, 345 aa, Saccharopolyspora sp.
LKNWNDSKKGTRKGGKLGFPRFKGKRAGLSCRFTTGSFGLADGDRRHVQLPRIGVVRTHESTRKLARPVETGAARIRSATVSYRAGRWFVSFSVEITRADPAPARPDVTVGVDLGIKSLAVLSTGEVIANPKHLEVALRELRRLQRQASRRTGPDRRSGQKPSNRWRKTQARIAKLHAKVANARRDGLHKLSTRLVRTFGVVVLEDLNVAGMVKNRRLARQVAGVGMAELQRQVEYKASWAGVCVHIADRWYPSSKTCSGCGVVKAKLRLSDRVFTCFSCGMSMDRDLNAARNLAKLVEVTTSSHSWWATENEPNGNPHKTRTTRAAGTATGRPAPNGAGQRRHC

SEQ ID NO: 7782 - protein, 208 aa, Saccharopolyspora sp.
MNIVVQVKLEPDATQVSVLESTLYALNKQANKVSEVAFDRDVKRNYDLRKLTYNDLREAGIGSQAAQHIIKKVCDAYVTLKANIKAGNLGTQGSQRRVKAESKPISFRLDSAHPYDARNLSFALEKKTISLWTLEGRMKNIPFTGSEHGLAKLARFKRGECDLMRRDGMWLLAVTVDIPDTERYEPTGFIGVDLGIVNIATASSDPAG

SEQ ID NO: 7783 - protein, 454 aa, Saccharopolyspora sp.
VSVVLQAYRFALDPTGEHDAALRSHCGAQRYAYNWGLARVKANLDQRTAEKSYGLAGDESTPSLNWSAYSFRRDWNQAKPVVAPWWGENSKEAYSSGLAHLATALKNWDDSNNGRRTGPKIRFPRFKGKRSGLSCRFTTGSFGLADDRRHVKLPRIGTIRTHESTRKLARHVERGTARIRSATVSLRAGRWFCSFSVEINRNDPAPTQPHTAVGVDLGIKSLAVLSTGHVIANPKLLELAQRDLRRLQRQAARRTGLDRRSGQKPSQRWRKTQARIAKLHITVANARRDGLHKLTNRLVRTFGAIVVEDLNVVGIVRNRRLARHVAGVGMAELRRQIEYKAAWSGVHVHVADRWFPSSKTCSGCGVVKAKLRLSERTYQCESCGMSMDRDLNAAVNLAALVEASSSSCGATINEPDGNPYKTSALLAAGTATGRPTRSTPRRKATAQDTLLHVS

SEQ ID NO: 7784 - protein, 311 aa, Saccharopolyspora sp.
VLATRASSRVTDVGRRTNTRSAFSLRDGKLKLAKHNAPLEYVWSWGAEVLQSLNPTMVIVSREPDGRWYVTFAVDTDEPEHAPATGRTVGVDLGVKDFAVLSTGEKIPNAGHLDRKARNLARYQRQMARKQRGSANRRKAQAKVARAHRKVRHARQDFLHRTSTDLVRNNDLVAVEDLAVKNMVRNRKLAKAISDCGWSEFRRQLEYKAERAGKIVVVVDRWYPSSKTCSNCGHLLKNLKLSVRHWTCPDCGTRHDRDHNAAKNILAAGRAVAGWKSGDACGAGVSRGELARAQSAMKQETQPVKVGFPRL

SEQ ID NO: 7785 - protein, 475 aa, Saccharopolyspora sp.
VGWCDHRASEDQYRLSLRCLGAEKTSLTRAIRAIEQRLAVPCGKRKRRVRGYADRDERVGKQRRVQILRARLARVQQRISEGRPSIVAGGRRLAHARHHLADVGLSLDQWRTKWDAARWFLTADGETGAPFGNYTITVHPDTGAVTIVLPEPLRHWANAPRGRYRLESTVRFHHRGQQWLDRVTTNTAVRYDIAFDADRDRWYLDASWSAPTSVLPTPSEITTHGGRLLAVDLNADHLAAIVVDSCGNPVGHPHTIPLDLTGPTSRRDGRLRAAITSLINLAREHDCVGIAIENLGFDDARSTGREHLGRGRRGKTFRRTVAGIPTQRFRERFRGMAHHSGLVVIAVDPAYTSRWGRQHWTTPLQQQTSVTVTRHHAASVAIGRRAHQHRLRCRPGVTRTRPADRDGRATGQTAPALTGTRATPAPRTAGTPHRGDKTMLDRGDQLVLFPDLHDRSGDHRISPASDDVTNNGHSP

SEQ ID NO: 7786 - protein, 131 aa, Saccharopolyspora sp.
MNHTIAKDVVAVAQRTERGIALEELGGIRERVTVRRDQRATQSSWPFAQLGDYIAYKARRVGVPVIEVDAHYTSQHCPLCGHTERANRPNRDFFSCRRCGLAGPADVVAGVNVRGRARSAWVFVSMPDPTG

SEQ ID NO: 7787 - protein, 309 aa, Saccharopolyspora sp.
MPTPHCAGTSATATLVSRVRNVAFRPDSKPVEFRENAAHTYDDRCLSWRYDMRTVSIWTVHGRIRNVTFTGSERDLKTLVDHRQGESDLLSRDGKWFIIATCDVPEEPQCEPVDWIGVDRGINNLATTSDAANYSGRRLNRYRRWQAKKKAEIQAKNTRSAARLLKKRAKREARHAAHMNHTIAKDVVAVAQRTERGIALEELGGIRERVTVRRDQRATQSSWPFAQLGDYIAYKAQRVGVPVIEVDAHYTSQHCPLCGHTERANGPNRDFFSCRRCGLAGPADVVAGVNVRDRARSAWVFVNMPDPTG

SEQ ID NO: 7788 - protein, 349 aa, Saccharopolyspora sp.
MPGRHANPGSEVGIDRGVAVAVATSDATGYDRVFITSGEEHRYLRLQRKLARQRKGSANRRKTLAKMRRIKRSERDRRADFCAQVAHRITTSNALVVLEDLPTRNMTRSARGSVEQPGSNVAQKAGLNRSILSKGWHAFELALRNAARTTGSTIVKTPATYTSQRCFVCRSVDPASRESQAVYRCTTCGHSGHADVNAARNILAAGRKEADVLQAVTACGDLQPLGGSAKQQALCPFRPPGFRGISRCQHRCRAHAQPAGLSYLVPRLRRSTTSGSPSPRPSRPPRPPCCSCEVSARTRSDAAREYLQRRTTEGRSKREIIRCLPRTLPSSGRLPNYPRCTHHARLTIR

SEQ ID NO: 7789 - protein, 455 aa, Saccharopolyspora sp.
VTNRAASAIVSIGMPERASFSLLVFSARPLEFAVRFFSIFKRGTPVLQGREESRNTTGTFSNDLRGSVCRMNIVVQVKLEPDARQVSVLESTLYALNEQANKVSEVAFDRDVKRNYDLRKLTYNDLREAGIGSQAAQHIIKKVCNAYVTLKANIKAGNLGTQGSQRRVKAESKPISFRLDSAHPYDARNLSFALEKKTISLWTLEGRMKNIPFTGSEHDLAKLARFKRGDCDLMRRDGMWLLAVTVDIPDTERYEPTGFIGVDLGIVNVATASSGYTAAGRGLNRHRKRQIALRAKLQAKQTKAAKRRLKARARKEARHVKNINHCISKTIVTEAKRTGRGISLEELKGIRDRVRLRKPERVTLHSWSFDQLGQFIVYKATMAGVPVVYVDPAYTSQMCAECGYTDKNNRVSHGSFTCRSCGHAQHADRNASRNIAQRGNAVWNAGRESRVPVGA

SEQ ID NO: 7790 - protein, 418 aa, Saccharopolyspora sp.
MPSNSAINQWYSALVQLRFNYRVYPTPGQQIELARAFRCARVVFNDGLRPRRQARDAHEKYISDSELSQRLITEAKLTPERAWLGEVSAVVLQQALADLNTAYRNFFHSITGKRKGRKVAPPRLRSRKDNQQAIRFTKNSRFKVLDNGRLRLPKVGDLEVRWSRQLPSDPSSVAIIKDAAGRYFASFVVQTGEDETLPPVDSEVGIDLGLTHFAVLSDGTKVAAPKFLRRAARKLKRLQQDLSRKQKGSANRKKAVTKVARAHARVADTRRDWQHKPSTTIIRENQAVYVEDLCVVGLGRTRLAKSVHDAGWAGKAARYGRTFGRVDRYFPSTRMCSACGRINDKMALTVRSWDCPCGSHHDRDVNAAKNVLAAGQADNGNDRGAHVRPGLVRAARREAVTHPDAARSTRSVERISVL

SEQ ID NO: 7791 - protein, 251 aa, Saccharopolyspora sp.
MYCFTTGRYFASFVVQTGEDETLPPVDSEVGIDLGLTHFAVLSDGTKVAAPKFLRRAARKLKRLQQDLSRKQKGSANRKKAVTKVARAHARVADTRRDWQHKPSTTIIRENQAVYVEDLCVVGLGRTRLAKSVHDAGWAGFTSMVEYKAARYGRTFGRVDRYFPSTRMCSACGRINDKMALTVRSWDCPCGSHHDRDVNAAKNVLAAGQADNGNDRGAHVRPGLVRAARREAVTHPDAARSTRSVERISVL

SEQ ID NO: 7792 - protein, 350 aa, unknown
  TnpB Polypeptide
MAVETLKREKKVYAPDLINSLPEWTHNCPRHIRVYAIMDAQKAYKQHGKNVDFRSKHKDAASMGIVAQFIRHDSVYIRLMGKIKFTEALPAELQGKGKKSERKTDVEIKDSRLKREGDNWYLVVPYIAKKKPRDSNGRIVAIDPGVRTFATFFSEDSFGWWGMNDIGRIIRLCYHADDLYSRASQVKRPLRRKLRQAANRIKKKIRNLVTELHHKFAYFLVTNFDIILLPKFEVSNMVKKAARRINKKSVRSMLTMSHYKFKVFLKQKAKEHRKVVLDVCEAYTSKTISWNGEIDWKLGGKKVITDTSGNSMERDLNGARGIFVKNVARALLVQPPDFSGATPGITGNIQ

SEQ ID NO: 7793 - protein, 765 aa, unknown
  TnpB Polypeptide
MFITHKGTINVPKNKELNENLVKNSPLNVDVSIYKSYRDNIGLKCNLLAFLTSNRYRQQVEAIRTVTDKKNRDNLKSKLPAVTVSGLFEPIRLDTNIKQHANLLCLDFDSLPADKLAELWQLLACQPFVAYIGYSVSGEGIFAVVPIASGDNLLQHFFALEAYFFSFGFRMDKTCKNLSRLRGASYTERPYINHTASTYTDVLSDSVVPAEKKDDTPPAAQTTPRPKHTTSSSTPADKAVQIATDAAAKKGLIFGDGSRTNYTVFVAGLLNRFGIEQNEAFYALDSAIGIGSYPDHKKRFFDVYGRYISEHNTAHFTPTYQQQPAKTIKSDAPPAVMVVGFLVELPLCCRLKRLLTWCRCGNGSWNFSRIDKTNKQTNKQMFKGYKYRIYPNNEQQKALAQMFGNTRYIYNWGLDLCIKAREAGEKKPSYFDLIKLLTSYKKEDGKEWLEQANVSSLRFPLKNLDEAYKKFFKEKKGFPVFKSKHDNNQSVGFAEGGKVDFEGGTFYVPNLGKIKTVYHRTFEGDVKTCVVSKVPSGKYYVSITVNNANFCEPEKKPILESTAVGIDTGIKTFAVLSDGTEIENPKHLQVAMTKLKKLQQRVSRKAKGSANRKKAINRLATMHEKVSNQRKDFANKLSHQIATNYDTVIVEDLNIAGMLKNDKLALSIASLGLGSFYTMLNYKVADRGGNYVKIGRFEPSSKMCSNCGNTYKDLKLSERNWTCAECQTTHDRDLNAAINIKNMGLKMHGCGGLQPAAAFLQKTLT

SEQ ID NO: 7794 - protein, 379 aa, unknown
  TnpB Polypeptide
LRRAFKFRLYPNRDQERELGVMVETHRRLYNACLEQRKLAYELDGVSLNYAHQSSWFKNQRLVNKWFEKLNFSSAQATMRRLDRSFQAFFRRIKTGDKPGYPRFKAQGRFDSVEFPSYGDGIRLLPTGKLRVQHVGLVKCKAHRPVEGEVKTATLKLEGDKWHVILSCDLGEVVMPASNNPPVGIDVGLESFLTTSDGHHEPNPRYLKSELPALRRAGRAVSRKKKGGKNRKKAAKNLRRLYAKVKNLRRDHGHKTALNLCRRYGFIAVEGLNIKGMVRNHRLSRAIADASWGGFLATLRHKAESAGVSVVEVNPCMTSQTCSGCGCEVRKKLSVRVHRCPHCGLVLHRDINAARNILARALRARTEPVGVNGKTVSVA

SEQ ID NO: 7795 - protein, 524 aa, unknown
  TnpB Polypeptide
MEKIGYRTLVLRYELSRLPPEVVGRIPELLLVQEEFRRWVSRWMRDPKKTPRPAENPLKRFVVVFLHILGNKWLDGVKKSGVEVRSTKMPLFFDTQLRLNGERDIGRGVFVDLPARQIRIRKWSSQRGAIVLQLNEESVKWILERVREGGRLKLAAVWVGESRRNRNAKLNVALMFSREVAPIKFKRLLVVDLNALHNGLVWAVVEGERMLKKGVLRPDISKVLHLQKIASRLDKLCAEDDRVCGEAVAVKSRIWRLLKTWEEKAVKELILVARKQKAAIVVDVPNDNSVRELKEGSYASEKKIFLNFGRLRRRLKGAAAWHGVPYCEERLYSTLCPRCGGKMMALPNRRVKCICGFEARRDDVPIFWAIKLYPQLISFSSSASGNCLERFSGGAAASVMPSEGAPAAGCPCSAALTSDKPAAWSWKKKNKGGKRGQQARHPHFSASPSYCGLAAPERLADAFLHHLMRLPLLRAGLLPAPAHGPRSLLETSSNTSPCASTSAASTRAKRKPGGCSASSEALVP

SEQ ID NO: 7796 - protein, 421 aa, unknown
  TnpB Polypeptide
VKYQMEVKRTVRVKLSVPDGRQSDLHQTIDQFNYACNYTVQHGRNDDGYLILTKSEIHDRVYHDLRDETDLPANLCVRAYSEAVEAMKSTVADWKKGNSRPLPRFTEPSSVYDKRTLTLKDRSATLSTINGRVAVDYVLGDHQKSYLDDDKYEKRMGTLHYREDEDAFYLHIVIKKQVEERDGNTVLGVDLNLKNVAVTSTGSFYDGGELLWGQNHFFRVRRSLQHKGTRSAKQVLRRLSGRETRFVLNRLHTISRRIVEEAVAYDCSFIAVERLTNIRERMDNQNDQVKRQLHNWAFRELQEMLAYKASEYGIRVEQIPPAFTSQTCSRCGHQSSTNRNSDGWFQCNECGYSIDGDYNAAKNIGLKLLTLPEGQRPSGLGDGHLALKSGMVNGNGDYTASDGSSADRESTDKPTTSEVGR

SEQ ID NO: 7797 - protein, 383 aa, unknown
  TnpB Polypeptide
MAIRHKSYKFRLYPTEEQMMMFEKTFGCSRFIWNQMLADKITYYKETGQTLKNTPAQYKKEYPWLKEVDSLALANVQMNLQKAYQLFFRNKNHFGFPNFKAKKKMAHQSYQTNNKLGTRTIRLSENNRKIKLPKVGWVKVKAHRKMTGLIKSATISKTSTGKYFVSILCEIEIEENNIKTKTILNSSIGIDLGLGHFAILSTGEKIENPRFLVSASKKLRREQKILSRRGLLAKQRGKSLDDCMNYQKQRLKVAKLHEKISNQRRDFLSKLSTHLIKNHDKICMEDLASKNLMKNHHLARAIGDASWSEFVRQLHYKADWYGKKIVTISRWYPSSQICSNCKVNSGKKPLHIREWTCESCGAHHDRDLNASVNILHEGLKLLA

SEQ ID NO: 7798 - protein, 426 aa, unknown
  TnpB Polypeptide
LYSFITQIYKKNIDIHKKNTIFLNDMRKINRTYKFRLYPNKAQTELLAKHFGCSRFVYNYFLNQRKEQYRLTGKSDNYYAQAKTLTTLKKQEETAWLKEVNSQTLQFAIRSLEAAYTNFFKKRAKFPKFKSKHSKNSFTVPQSASVAGGRLFIFKFKEGIKCRMHREIKGKIGKVTITKTPSGKYFVSVFTEEEYITPLKKTGKSIGVDMGLKNLLVTSEGENFKNNRYTRRYECKLAKAQQHLSRKKKGSRGFENQRLKVARLHEKISNCRADYLHKCSISLVRRYDTICIEDLNIKDMTKNHHLAKSISDASWGKFVSMLTYKAEWNNKKVVKVDRYFPSSQTCNVCGYVSKQIKDLSIREWVCPECHTKHNRDINAAINILRLGLNNISAGTADYTGGEEVSVNLSKDRSSVKPEANELKAHW

SEQ ID NO: 7799 - protein, 527 aa, unknown
  TnpB Polypeptide
MNIVDEDKLELKTFSVRERNPKIIRHAKKAIFTMKHLDNMLNIIIAEEYLYVKSKLSEDIIFEESDNVWQVFSLLLDPQIMKGVLSNNTGGQSTKDRIKIINDYYKNNQLMQSAKSLYEYLNDKNISELLKRIKTNWENYFKNKSLWFTQKEASGLTGCPQYPKPKKLKNVNQYSMQLSCDKFSLKRKNVLGLTFFKKQIQTRFLSNQYVNSKTIKSLNVSYSNGDIYYHFTYEVDKKLIKQNNKRAQRKIKQAGLDIGVLNLASIFINDEDTQSIIISGNEFISKNCFYNKLLSNYQEKISKEAIEFREVIKKDGTKIEIPTLYTNKGRKLKKEKSKLIEKRKRYFDDKMNQYSKKILEYLQKNKVTDLVISKNLSFTKTTGEIKMNKKTKQKFYQIPFGKLLNMIEEKSPMHNIFVHKEDEGYTSKTSCLSSDVNKNQEKKSKNEPILPNDLNGNRGSKGKKLSRGLFRDTVLNVIINSDLNGAANHVKLAFKKVRITDLKNYLWKLQQPKKIKSVFEFNCFLSN

SEQ ID NO: 7800 - protein, 369 aa, unknown
  TnpB Polypeptide
MRKAYKYRILPTKGQQRILNLMLEECRFVYNQTLAARREVWEQRHESLGLYDTQSLLPAWKAERPSLKTVHSQVLQNVQVRVDLAFKAFFRRVKAGQEEVGYPRFKGFGRYDSITYPQYGNGARLSGRTLILSKIGSIPVILHRSVEGQIKTVTIRRSSTGKWFACLSTEIEAQPLPPSDRAVGVDVGLSSFATLSNGEKVANPRFFRQDEHELVKAQRKLSKVEKGTSEPAKRRKVVSRIHERIANRRSNFAHQESRRLVDNFGTLAFENLNAQRMMGSHCLAKSIADAAWNQFVQYATSKAEEAGRRVVLIDPRNTSKRCSRCGQLVKKDLSVRVHSCPICGLVMDRDENAAINILALGLQCLGASP

SEQ ID NO: 7801 - protein, 319 aa, unknown
  TnpB Polypeptide
MDLDKAYVAFFKGNADFPTFKKKSQGGGFRYPQGCALEKSNSRIKLPKLGWVRYRNSRDIEGLVKNVTLSYKSNKWFMTVQTERSVVQEIHPAMSSIGIDVGITRFATLSDATFITPLNSFKQHQVKLTKYQRRMSRKKKFSKNWIKAKNKVAQVHADIAHARLDFLHKTSNIISKNHAMIFVEDLQISNMSKSSKGTIESPGRKVKQKSGLNRSILDQGWGEFRRQLEYKSNWNGGECMAVTPKNTSRTCPCCKHISGDNRPTQSMFLCVACGYTNHADVVGAINIKRAGHAQLTCEVNDALMSSATRTHRSELILTD

SEQ ID NO: 7802 - protein, 377 aa, unknown
  TnpB Polypeptide
MMRTLQTVIQDTPAQRAILNDNLAVMAKAQNFAVESCYKHKETNTFRMHHFNYSALRKRFKLPAQLAVVANKYACASVKTALHKSRSRHPKFLGTSIHYDGRSITLDLSKGIANILTVKGRVKLSFTIPKYFRKYLSWTPKECNLVRCRDGKFRLMVSIEAPTVESKRNGKLLGIDRGITNIIATSDGWLYDSFQALNIKKRYVNLRSRLNSKGTRSASRHLSKTRQKEQRFMRDVNHCISRRLVNSVGKDGVIVLEKLKGIREARHKRKQNWLFSNWSFFQLEQFLIYKGYDNGVAVEFVRAKDTSRTCSICGNIDRSQRRGSSFTCKSCGVILHADLNASVNILHRYSPTAPGCCQPAYCSSIESSKPSISMDGI

SEQ ID NO: 7803 - protein, 445 aa, Halosimplex sp.
MVIQAFRMLEVHRTHQAKIHNHSQVEDSLDRHGWSASKLWNVANYHSRQRWDEIGEIPDHGDLKDELKTHNKYNGLHSQSSQRVLEELAEAFNSWYGSDDERDNPPGYRKENYYDSEGRRVHEEHPRSTVTWKQNGIKHDAKNNRVRLSKGANHKEHPKAWEYILVEYETRPGVTVENLQQVRAVYDRAKGQWELHLVCKDEIETPAAPGEETVGIDLGICNFAAVAYSTEDADLYPGNRLKQDGYYFPKEIAKCDDSGSERATRLHAKWSERRTHFFHSLAKHIVEKCIERDVGRINVGTLAGVREDDNGESKNWGKHGNLDLHGWAFDRFTNILGYKAKVEGIEVVEVSERDTSKTCCVCGREDESQRVERGLYVCEEHDDAFNADVNGAENIRLNINNTSNSESSVSLGEDRSTGWLAQPGVYLYDLSSGFQPQEQVVDSKP

SEQ ID NO: 7804 - protein, 420 aa, Halosimplex sp.
MNYNYRYRLKPTENQRETLDYHRNTCRQLYNHALYRFNQIPESEGTVKQRVRKIRDELPDLKDWWDALIDVYSKVLQPTVMRLAKNIRALGKLKERGYNVGELRWKSPREFRSFTYNQSGFELDKKGGQTVLSLSKLADIPIELHRPIPDDATVKEVTLKKEKTGEWFAIFGIETDTEPPAKPSLENIDAGKMVGIDVGILTYAHDTDGTAVESLDLSVERDRLEREQRKLSRKEHGSNNWKSQRQRVAEYHLQIKRKRHDFLHRLSNYYARKYDLVAVEDLNVKGMMESPSDSRNTASAAWRTFLSLLEYKCEREGTHFVAVNPRGTTKECARCGVETDKPLWVREHSCPSCGFEADRDANAAWNILSRGLSELGVGHSEGTPVKTALPTDTNSVSAKCVLEAGSPCLKEPPKAASRQG

SEQ ID NO: 7805 - protein, 383 aa, Halosimplex sp.
MLEVHRTHQVKIRNHSQVAEMLNRHGWSASKLWNVANYHSREVWEETGEIPNHEALKDELKTHPKYKGLHSQSSQRVLEELAEAFNSWYGKRKSDDRANPPGYRKRNYYDNDGNRVHEEHPRTTVTWKQNGIRHDTKNNRVRLSKGANHKEHPRSWEYILVKYETRPGVTVENLQQVRAVYDNAKGRWELHLVCKDEIKTPTAPGNETAGIDLGISNFAAVAYSTEDADLYPGNRLKQDGYYFPKEIAKCDDSGGERATRLHAKWSERRTHFFHSLAKNIVQRCIEKGVGRVNVGNLEGVHEDENGDSKNWGKHGNLDLHGWAFDRFTNILEYKRRSRGSKSWKWTRVPRARRVVCAVERTTASASSVACTSARSAMGHSTRT

SEQ ID NO: 7806 - protein, 416 aa, Halosimplex sp.
MEVQRTVRVKLDVPDERRDHLHQTIEQFNTAVNYSIENGRTDDGYLITAKTNIHDEVYYDLREVTDLPANLCVRAYSKAVEMMKSTVADWKDGTSRPVPTFDQPTVVYDKRTLTINDRSATLSTVESRVEVDFDIGEYQADYLDDDDYEKRMGTLHYDEQEDDFYLHIVVQKEVEEREGGRVLGVDLNLKNVAVTSTGSFYDGGQLLWGQNHYFRVRRSLQDKGTRSAKQALARLSGRENRFVLDRLHTISRRIVEEAHNYDCSHIAVEDVTHIRERMDAYDDQLKRQMHQWAFRELQEMIRWKATEYGIRVESVNPAFSSQTCSKCGHQSSTNRDSDGWFECNECGYEVDGDYNASKNIGKRLVSLPESKRPSGLGDGHLALKSGTVTLNGDYTAYDNLSAEGESHAQAHGFSRG

SEQ ID NO: 7807 - protein, 375 aa, Halosimplex sp.
RPKGLHSQSSQRVLEELAEAFNSWYGKRKSDDRANPPGYRKKNYYDQQGNRVHEEHPHSTVTWKQNGIRHDTKNNRVRLSKGANHKEHPKAWEYILVEYETRPGVTVENLQQVRAVYDQQKERWELHLVCQDELETPNAPGNETAGIDLGISNFAAVAYSTDDADLYPGNRLKQDGYYFPKEIAKCDDSSGDRATRLHHKWSERRTHFFHSLAKHIVKRCVEKGVGRINVGDLEGVRDDENGESKNWGRHGNLDLHGWAFDRFSSILEYKAKVEGIEVVEVSERNTSKTCCVCGREDDSQRVEHGLYVCVACDSAFNADVNGAENIRLDLNQRNSESAPDLGGDRSTGWLAQPGVYLYDLSSGFQPQAQVVDCKP

SEQ ID NO: 7808 - protein, 418 aa, Halosimplex sp.
MEVRRTVSVTLDVDSDDATLLEDTVDTFLWSAQYVVDHAFEGEYVTTSKTTLDDETYDDVREATDGFNGGLVQAARNKAAEACKSVVAKWKQGKKASKPYFTSPHVVYDHRTATFHDDYVSLATTGGRIEADYVLPDEDSDTPHAEYLFSDEYETTGAELHYTNGNWMLHIHCKMDVQSDTLEQATTENGTVLGVDLGVNNLAVASTGTFWTGDEFDHWRREYEQRRGDLQEHGTRWAHENVQSVGRKEDGRFKMTLHRISNELVAEARDHECPVIAFEDLADIRERTGASWGHKWAFNRLYDYVEYKAAEYGIDVEQVAPENTSRRCSHCGFTHPDNRESESFECLKCGYQNHADYNAAKNIGLRYLRRNQTGGDGGAPLGVRLNSGTLNVNGEYEPPALTEARAGVHAESHPFTGG

SEQ ID NO: 7809 - protein, 419 aa, Halosimplex sp.
MPTTRRTYICRIRNHSQVKEALDRHGWSASKLWNVANYHARNVWDETGEIPDEKQLKSELKDHPKYRGLHSQSSQKVLEELSEAFSSWFGSNDDRDNPPGYRKTNYYDDEDNRVHEEHPRSTVTWKDKGIRHDTKHGRFRLSKGKNHKDGRDYILVEYDAPPAVELDRVQQVRAVWNSSKHRWELHVVCKEEIAAEPPGDDVAGVDLGICNPAAVAFPDDALLYPGNTLREDKHYFQREEYQTEGPHRPSQTVQWARAKLSKRKTHFLHALSKDIVERCIERDVGTLVVGDPSGVDDDDWGRHGNKRLDNWAYKRLLHLIDYKARERGIEVEMPDERGTSSSCSVCGHEDADSRVERGLWKCDRCGVVTHGDVNGADNIRQKSLTVTPPLGDSGNGCLAQPRVIHFSRTHGFQPRATAE

SEQ ID NO: 7810 - protein, 423 aa, Halosimplex sp.
MNIVEMLETTRTYVARITNHSQVRDDLDRCGFSASKLWNVGRYYIQQRWDETGEIPDDTGLKSELKDHERYSDLHSQSSQRVLEELAEAFTGWYNSDDGNNPPGYRKRGDDHPRSTVTWKQKAIKHDDKHNHVRLSKGWNLKESRSDFILAEYETRPDVEVENIQQVRAIWNGDEWELHFVCKKEIPVEDAPGNNTAGIDLGISNYLAIDYEGVLSELYPGNTLKEDKHYFTHEEYQTDGENGPSKRALTARQTLSRRKDHFLHTLSKHIVQRCVEEGVETIAVGDLSDIREDETGDPQNWGASGNKKLHGWEFDRFIRQLEYKAEEHGILVDRVNEENTSKTCSCCGQTRDANRVERGLYVCSSCETTMNADVNGAVNIRRKITQSPPTGDMSNGCLAQPGVYLFDRESGRFTPREQADCKP

SEQ ID NO: 7811 - protein, 404 aa, Halosimplex sp.
MVEVRRTVVVKLAVDDSDAALLQETIEEYLWAANYVVGDAWQDEYKPTSKQQLHERTYSDVREQTRLQANLVQSARNKAAEAIKGVVARWQAGKDASRPQFTTRSVRYDKRSATFHDDHVSLSTVDGRIEADYILPPEGDNPQTEYLRDDDYEITGATLQYREATDTFFLHIGTRAEVESEMPDTGDAEHSTVLGVDLGIEQLAVTSTGQFWSGGFLNHRRREYERIRGNLQQTGTESAHRTLEGLGDRETRWVEDYLHRISKAIVQEALAHDCETIVFEELTDIRERMPNAKQFHAWAFRRLYDYVAYKAEAEGIETTQVDPAYTSQRCSKCGTTLAENRSSQSRFCCQKCGYEVNADYNAAKNVGVRQLRAGQKSPHGGATRHLALKSGTLSVNGEYSPAAQ

SEQ ID NO: 7812 - protein, 323 aa, Trichormus sp.
MQVVERHIIQRNHPHYQEIDKLCFAAKNLYNFANFHIRQSFIFAQKYLDYNCLAKQLKSTEPYQAIPAKVAQQVLLGLHRNWLSFFAAIKAYAEDKSKFLGRPKLPKYKHKEKGRHLLIYTAQAVSKPKINVGLIHLSQTQIHIPTKVDYVNLNQVRIVPKIDHYVVEVVYEKEEIDYGLDPNYIAAIDLGIDNLATLTSNQPGFIPVLVSGRIIKSINRYYNQRKANLQALLPSHQKTSKRLQSLTKKRNFRVDDYLHKASRLIIDHLVKCGIGTLVIGQSPLWKQNANLGSRNNQNFVCIPHTRFVQQLSYKAKRDKCIGF

SEQ ID NO: 7813 - protein, 469 aa, unknown
  TnpB Polypeptide
MGQASRTTKLLLDLDDRAEGGANRAKRAYLEETAKLLDRARTFYVAFFLAHPDKLAERVPYFSEQHQEERERLISPNELLTWAESLTVATAAHPHPLSSYNFSEQFPEFPFIYRRSVIKDALGKARSYLSNLANWNASGAKKGQPGPPSARNHPTLYDEACCLDLDGTDLRPSPRTCFARLKVYTGTEWQWHNYPVKLSRYFEARWRDPAWESKSPKLILRKKRAALHFPQVKKVAAKKVKESKADPHLVTVAVDLNVKKLAVITVRQDERIIETVFVSDHGLDQARFRHLKRLAKKQWQSGKPVKSEHSNQQLWGHVRRMNEDAAHKVARSIANVCARYPGCVLLFERLRTIKPKGASKSRRMNRRQANQLRGKINRYAKDKAYVQGTVTVEVNPHGTSQYCSRCGAKGERFSYQGGKRIQVKWGKLFGCPVCHFEVDADWNASVNVHRSFYREWHWQPRKKPPPKAA

SEQ ID NO: 7814 - protein, 259 aa, Lactobacillus sp.
LDRRITVWPVLNHWRDYFDGTWKLGTAKVLTSGGKWYLHIGATKEVPDYTQDQTVHVVGVDRGLRFLATAFDETGRTIYRSGTRALNKRRRYKHLRAKLQAKGTKSAKRVLKRIRQRENRWVSNENHRAAKALADYYGPKTLFVLEDLTDVRFATEQVAKDRRYEQVSWPFYQLEQFLIYKAAAQGSLVLKVPSDYTSQRCPQCGAINKQQRDHDHHEYRCACGFQANDDQSAAMNIQQLGNQWLTGTAKPRYTRKRTG

SEQ ID NO: 7815 - protein, 418 aa, unknown
  TnpB Polypeptide
MLRLQAFKFELMPNGEQQRDMRRFDGACRFVFNKALALQKANHEAGEKFIGYVAMAKHLTDWRNGSETPWLKDAPCHPPQHALEDLERAYKNFFAKRADFPRFRRKGSSESFRYPDAQQFKLDQANPKMARIYLPKLGWMRLRLSREVLGALKNATVSLSAGKWYVSIQTEREVEQPVPTASTAIGIDMGITRFATLSDGTFFAPLNSFKKHEQRLARNQRAMSRKVKFSKNWLKAKRRVQRTHARIGNARRDYLHKTSTTISQNQAMVCIEDLRVRNMSKSAAGDLEAPGKNVRAKSGLNKAILDQGWFEFRRQLEYKLGWNGGTLVAVPAHNTSRTCPCCGHIAKENRLSQAKFLCALCGYEKNADVVGAMNVLARGHRVAACGEDGSGRGRKIMTKPASVKQEPTEATMREASHA

SEQ ID NO: 7816 - protein, 586 aa, unknown
  TnpB Polypeptide
MILNNSQNTYNQDIQDIELYKILDQDLITNEEGCVPFWNSQCKERSKKLWLPTKTDSVGLGLNSSNLLSKEMVEKSWFLTNLQSNHQMKNLSKTFSLSSTYFPVDSMGLENTKKKSKKILKRSKCLLCEEDSYMNVYCKEHYEEKRDNCSCNICIGINKSGKNKGLPCCKTTIRDTKLCNLHDSSLVKQKINDKKQEKNEYDTLCCKIKLKPTHSQKNVLKQWFGVGRKYYNNSVNHLKEKFETFKDLRPKIHDEIGNIDYCKIVPRVVRDDCVDDACKASSNNILKYQDKGTISSLRFRTKKDTTQSLNIDYRNCKIKKNNSIAIFPEKIMEGLKFNTSKRNKKTFKKTFNFIGLKDGLTVIDKSCRLTMKHNSVFYLCIPYLVEKQIKKTKRVDIICAIDPGIIDFVTFYSEKSCGSLGIEARQRILKLTKLSSILQNKMKKYKENGNKFKYTKVYQEYRKVITKPTRLVDEMHKKIALYLCRNFSTILIPDFPTKEIIKHIYNKDVKTSYMRLSHYKFRMFLIHKAKQYGTIVCTCNEAYTSQTCSSCGNIKKVKREYVCDCGLDLGRDINAARNIYIKYSTL

SEQ ID NO: 7817 - protein, 377 aa, unknown
  TnpB Polypeptide
  misc_feature (6)..(12): Xaa can be any naturally occurring amino acid
VDISPXXXXXXXGKLHLRITTGNREFIYAKVLREPSNSKDKWLTFMAMLSESWQTKNYFAYTIELKLRDGEVYGSVSFEIPTPEVKYTKENGVIAIDTNASPIHLAIAEVSKAGELVSYQTISLHHLLGLSQNSKNYQEWILAHQLLDLAIQKGKAIAIENLKKLKKGMRGDGKAELRKRLHQWNAKKFLQKLKRVAMLKGVEVIEVNPAYTSVIGMLKYAPQLSIDKDVAGAYVIGRRALGFKEDMPENYEKLLKDKAYLEFALKRYEKREKELKELLEKETNEYKRNALESELRSVENARKLITNFIQSLQSEPSSCEGAYGRNPEQGETQKVSSSSLASSEGSPSLPYPWKGFTKRPFSSEASVGGRVWDRVRC

SEQ ID NO: 7818 - protein, 407 aa, unknown
  TnpB Polypeptide
MKRQQACRYEIQPNGAQQRQMRRFAGSCRFVFNKALAMQKEHYEKGEKKLSYAGLCKTLTEWRKSLKTVWLADSPVHPLQQSLKDLERAYANFFARRAAFPRFKKKGRRDSFRYPDPKQFKIDQANSRLFLPKLGWLRYRNSRNIIGQAKNITVSANGDKWFVSIQTEREVEQPVHPATSIIGIDMGITRFATLSDGSHIEPLHTFRKHERRLAKYQRQMSHKQKFSHNWNKAKARVQTMHTRIANVRKDFLHKATTTISKTHAMVCIEDLQVRNMSRSAAGTGEAPGRNVKAKSGLNKSILDQGWFEFRRQLEYKQVWLGGDVLAVPARNTSRTCPACGHVSANNRLTQARFACVECGYENNADLVGAINVLARGHRVLACGELAQSGHSVKQEPAEATTQGLAHV

SEQ ID NO: 7819 - protein, 617 aa, Spiribacter sp.
VKPRAVTVLVTFAQGLFEALDERELVGAQAFLDLLTNPCGHAEAGLGDAAGNAGKRIRVGIQGQAVGHDGFKARRFAGDAQGRRDGSLAGLVVAGCLSQARDGLVEGVFMRFADRLENRLAVETLAGEGNGVRNRLRPADPLGVVVGDRSGAFGFYERLGFIASPEPDWAHPHGCPITQRAVKPRRSGRGYKAPIRGKIGDMQRLQAFKFELRPNGEQQRQMRRFAGSCRFVFNRALALQEARYEAGEKTLGYAGLCKELVAWKKTPDTEWLAQAPSQSLQQALKDLERAYTNFFEGRAAFPTFKKRGRNDAFRFPQGAKLDEGNSRIFLPKLGWIRYRNSRKVMGVIKNVTVSASGGKWFVSIQTEREVETPRHPASGIVGIDVGVANFATLSTGEIIDPVSALRKRQRQLARAQRAMSRKQKFSRNWIKAKARVQKIHTRIGNTRRDYLHKLTTGLSKNHAAVVIEDLQVRNMTQSASGMAEQPGRNVRAKAGLNRSILDQGWGEFRRQIAYKQAWRGGMVVAVPPQNTSRTCSACGHVASDNRRSQSRFECVACAHTAHADVNAARNILAAGHAVMACGGDVSPYPRQSAVEAAPIKQEPTEATGAGSMPAPAR

SEQ ID NO: 7820 - protein, 384 aa, Spiribacter sp.
MQRLQAFKFELRPNGEQQRQMRRFAGSCRFVFNRALALQEARYEAGEKTLGYAGLCKELVAWKKTPDTEWLAQAPSQSLQQALKDLERAYTNFFEGRAAFPTFKKRGRNDAFRFPQGAKLDEGNSRIFLPKLGWIRYRNSRKVMGVIKNVTVSASGGKWFVSIQTEREVETPRHPASGIVGIDVGVANFATLSTGEIIDPVSALRKRQRQLARAQRAMSRKQKFSRNWIKAKARVQKIHTRIGNTRRDYLHKLTTGLSKNHAAVVIEDLQVRNMTQSASGMAEQPGRNVRAKAGLNRSILDQGWGEFRRQIAYKQAWRGGMVVAVPPQNTSRTCSACGHVASDNRRSQSRFECVACAHTAHADVNAARNILAAGHAVMACGGDV

SEQ ID NO: 7821 - protein, 385 aa, Streptomyces sp.
MQLRYNFRVYPTSGQRAALARTFGCARVVYNDALRIRKDAHAAKMPFPRSGELSKTLITQAKRTPERAWLVNAPVGVMQQALRDLDAAYRNFFDSMSGKRKGPKVGEPRFRSKRDNRQVARYTKSDCFRVLPNGKLRLPKVGDVSVRWSRQLPSTPSSVTVIKDAAGRYFVSFVVQTNPSEVLSEAGGEVGIDLGLTHFAVLSDGRKVAAPKLFRRAEKRLRKAQQNLSRKAKGSSNRKKAVVKVARAHARTTDARRDFHHKLSTAIIRENQAVHVENLAVSGLGRTRLAKSVHDAGWSTFVGMLEYKATRYGRTFARVDRFFPSSQLCSACGFKDGPKPLKVRTWTCLNCGAVHDRDVNAARNIKTEGRKVAAGRAETVNACGG

SEQ ID NO: 7822 - protein, 394 aa, Filamentous sp.
MLVFEFKTYGKSSQFTAVDEAIRTAQFVRNSCLRYWMDNQKVDKYDLNKYLNKYCAELANNFPFAGELNSQARQASAERTWSAISRFYDNCKKGTPGKKGYPQFQKDCRSVEYKSTGWKLADDRKSIKFTDKKGIGKLKLKGTRDLHFYQITQIKRADGVYVQFCIDVNRKENIEPSGNTIGLDVGLKEYYTDSNGVMVENPRFLPQAEKVLKRCQRRTSRKIKGSKNRSKARQILGKRHLKISRQRKDHAIKLARCVIQSNDLIAYENLRIKNMVKNHCLAKSINDASWYQFRVWLEYFGKVFKRVTVAVNPAYTSQECSICGVIVKKTLSNRTQVCKCGCVMNRDFNAARNILNRGLGTVGHTGTFALDASNTLGDEASILAGEILPEQATS

SEQ ID NO: 7823 - protein, 326 aa, unknown
  TnpB Polypeptide
MRLELWDNGNASGVCYFRGHAVQIRVRKGEHLWLPLVVSEHHRLRYLEDWRDGKLKVGEITISLFKGRANVYVPFKREVEPRRVEGVCGVDINERSVDITILKPGQEPKHISLDVSKLPAIRHASQLKRKSIQRKLDVLPQRPVQKQRLWAKYRRRERNRTGQILHLVSKQIAGIAKHERVAVAFECIKGIRDSMRSKRKSKDGRVLRKDMRRRLNQWPFRKLQFYISYKVERLGLPTVEVSSYRKSKLCPICGEYNGPNGHTYRCQACGFEASRHLVASWNIAKDGASRVPADCWQMQQVAEEPVAPTKPPVEPERIPCRTGVTV

SEQ ID NO: 7824 - protein, 458 aa, Paenibacillus sp.
MCQDAKNLYNTTNFYIRQVFTALRQDKPLQPLQQQVMDTLLTNIGLMNVRQLEAHQARLQKQLLKPADQRKDSRCHLFELPTKASPYVDYPFLDCLFKTMEQADYRALPAQCSQWVMKRVFSNWQSFFASITDYRVRPDKYAGRPHIPGYARTKTKEVVFTNQDCEIKDRKYLKLPKTKQRLNIGKLGYTEGDLKQVRIVPKYGQYVVELVFACPVEATDVAKENALAIDLGIDQLATIVTNTDHRPVCVKGKPMKAINQYYNKLKAHYTGILRQGKQPQEGAFSSKRLNRLHLKRHRRIKDLFHKTSHYIVRLAAEQKIGTIVIGYNQGWKVESDMGRSNNQSFCYIPHQMLVSMIRYKAAALGIEVILTEEAYTSKVSFLDHDPLPKYEEGVTRAFSGKRIHRGLYRSRKGLIHADVNGAANIMRKVFPKASANGIAGLVGSQSVNVSTPLMLSIQ

SEQ ID NO: 7825 - protein, 263 aa, Paenibacillus sp.
MAQTITVKVKLLPTTEQIQRLKQSSNEYIGVVNMLIAEMVEEKKSKYSIVPILKKPVCVWNNQNYSFDFTHISIPLMVEGKSNRVKIRALFIDKDNRNIELLKHKLGTLRITQNSGKWVAQISVTIPTTEKTGTRVLGVDLGLKVSAVAITEDDKVRFFGNGRENKYRKRKFRSVRKILGKQKKVNAIRNLDDKEQRWMKDKDHKISREIVNFAVENKISVIRLEQLTKIRQTTRTSRKNEKNLHTWSFYRLSTLPMWIRESS

SEQ ID NO: 7826 - protein, 362 aa, Paenibacillus sp.
MLKAYKYRIYPNAEQRIFFAKTFGCVRFVYNKMLADRINSYQESQKNMDKSIKYPTPAQYKTEFPFLKEVDSLALANAQMNLSKAYANFFRDKSVGFPKFKSKKDNHKSYTTNNQKGTVSIGGGYLKIPKLKTLIKINQHRQFQGLIKSVTISQTPSNKYFISILVEENEQLFPRLDTSVGIDVGLKDFAILSNGTNYENPKWFRKAEQRLAFLQRSLSRKKKGSANRNKMRLKVAKLHEKINNQRNDYLHKVSHEITNDNQVMVIEDLRVKNMLQNRKLSKAISEVSWAKFRTMLEYKAQWKGRDIIVAPKNYASSQLCSNCGYQNKEVKNVNLREWDCPSCNAHHDRDFNASLNLLKLAN

SEQ ID NO: 7827 - protein, 359 aa, Paenibacillus sp.
MAQTITVKVKLLPTTEQIQRLKQSSNEYIQVINMLVAEMVEEKKSTKKTTKNVPANLPSAVKNQAIKDAKSVFSTKVKKSKYTIVPILKKPVCVWNNQNYSFDFTHISIPLMVEGKSNRVKIRALFIDKDNRNFDLLKHKLGTLRITQNSGKWVAQISVTIPTTEKTGTRVLGVDLGLKVPAVAITEDDKVRFFGNGRENKYRKRKFRNVRKMLGKQKKVNAIRNLDDKEQRWMKDKDHKISREIVNFAVENKISVIRLEQLTKIRQTTRTSRKNEKNQHTWSFYRLSTFIEYKANLVGIKVEYVNPANTSQSCPKCPERNKAQDRRYKCPCGFENHRDIVGAMNIRYATVVGGNSQSA

SEQ ID NO: 7828 - protein, 285 aa, Paenibacillus sp.
MAQTITVKVKLLPTTEQIQRLKQNSNEYIQVINMLVAEMVEEKKSTKKTTKDVPANLPSAVKNQAIKDAKSVFSTKVKKSKYTIVPILKKPVCVWNNQNYSFDFTHISIPLMVEGKSNRVKIRALFIDKDNRNFDLLKHKLGTLRITQNSGKWVAQISVTIPTTEKTGTRVLGVDLGLKVPAVAITEDDKVRFFGSGRENKYMKRKFRSVRKILGKQKKVNAIRNLDDKEQRWMKDKDHKISREIVNFAVENKISVIRLEQLTNIRQTTRTSRKNEKNLHTWCTR

SEQ ID NO: 7829 - protein, 391 aa, Thermoproteus sp.
MGKYRALVLKYNLLRLPPEVAEKIPALLRVQEEFRKWAAEWAKSGGSLPPPERPLKYFAEEFLHAGNALGLKGLKKNGIEVRGARPPLIFDAQLRLSKERDKSRGILVDIPRRGVRIRKWNNGNTITLPLTDKAVELILERTREGGKLVMAAVWIGRSRRSRAVKLYVALTFRREIAPMEAERLLVVDVNALHNGLAWAVVEGERIVEKGVLKPNISKILHLQKVIARLDSVCAEKDERCGEAMAVKSRIWRLLREWEDEAAKKIVGLARQYKAAVVVDMPNDESMRELKEGGYASEKKVFLNFGRIRRRLRGLAEWYGVPYREERLYSTVCPRCGRKMEELPNRRVKCQCGFEAHRDEVPIYWAQRRFPDLITPSFSSSSAVLRITAPAA

SEQ ID NO: 7830 - protein, 435 aa, Lactobacillus sp.
MDISLTIKAHIKVASSENAKSLIDSMEAYRQGCNFASEYIFEHDFELGQAKLNKAVYSDLRQKFNLRSQMAQSVLKTVIARYKSVKTQLGQKPYKFHDINAPKDKGYYTVQRDLDWLWEPIFFKRPQLDEVRDRDYSFKQNGKIVSVNTLNGRIECEIAMPGFEKYLDDEWTFGTAKILRSGKHWFMHISATKSFPDYEIEQTRHVVGVDRGLRQIVTCYDEKGKTFFHNGKTIARKRQHYKELRRHLQMTNTRNSKRRIRKIGQRENRWMSDYNHCLSKTLVNHYGADTLFVLEDLTDVTFDTVYSRKKENRYEHHSWSFYDLEQKLKYKAHQNGSEVVEVDAHYTSQRCPKCGRILKENRDHELHMYICDRCGYRSNDDRIAAMNIQMLGTMYVSGVPNPSYQSKHDTTDAKKAKGKKTKKQIRAVRKRAVLP

SEQ ID NO: 7831 - protein, 444 aa, unknown
  TnpB Polypeptide
MDILKYTTETRLYSKNNEDVIAYFDEVKEQYNYILRKVYYIIRNDPKVKENLLNTELQSKYNISKRTANSIIKTVQGKINSIKELKKTEVKQNQYKLERISKKLEKLMPVLLDLKLKARENDIKDLTKYRNLKIKVAFLKIRKDKLVNKIKSLNHQLETNKFKITFGTKKLLKQNLEEFLNKRDNLMIFLGSREETGCNNTFQLKYVSKINQFIMKVRKDFKYKNTKGEERYVYGRCFFNNHKKLLKEILKTKNSPLTYQIIKRNNKYYLQCTFEINNCNLSLTDNAQGVIGIDFNKGFVAISQTNKYGHLVSTDKITYRFRSGNKTKNDLLLIINKLAELAIHTGKDIVVEDLNFLKTKSKATKGESEKGRKYNKTIHSLAYRMFLDRTEQICNKRNVGLIKVNPAWTSWIAKNKFCDKMKLNVHTGAAFVIARRGMNIKDVV

SEQ ID NO: 7832 - protein, 246 aa, Nostoc sp.
VRISYQYRLKPTKEQALHIDKTLDMLRCQYNYQLAQRFDWYEQNRYPIDRCSLVLCHIPELKDKPNRFSQQATLTQLKKDRPWYKSIHSQVLQEVPKKVELAFDRWLKGDNTGNRSGKPRLKGKGQYKTFTYPQFKKEHFQNDKITLSKIGAVKVIVHRQMPEGFDIKTVAVTKKADGYYVTLSLEDKTVPTVKPDFDTNNIVGIDVGLIDFYVASDNTRIAAPKYLRKAERKLKSEKSIKTQKRL

SEQ ID NO: 7833 - protein, 291 aa, Ruminococcus sp.
MRLFCSEKQILAETEKLYCEAVAFYYELLKDRNELWTENLLTIQGQLEKLTVPGKDGRVPEYLPPGGKLPVKQENSDARTAKERMKEGCRVCGVRFTNTDSFEVCSVLDERSRPVSVKNCHGGNAYRYHCKTLLKKIEASKVFTDKDNVDQPNKKYYMRYKHLNEHYAHQVSREILDFCKENQAGIIVLPEYDEDFYRMTMYRSGNDSPLHLSTKIRNHLKYKAWAEGILVLELCADGTEKYCSICGSPGKKQSKLFICQNGHQINRFLNGSRNLACKCQQSFQKRSGSKS

SEQ ID NO: 7834 - protein, 406 aa, Oscillatoriales sp.
MQLFNLAYEFKLKPTTSQVPIFEDWLEQCRRVYNYALRERKDWYKSRSCRIDACSLHSEYIIPADTPRPTYSSQCKALTAYRKSSHQLKQVQSQVLQQTLRLLEKAFVSMWEQGHGFPRYKKVGAMRSFVFPQMGVGAIENSTVKLPVIGSVKFRQSRPIPSGATVKQARIVRRASGWFVMLTLQWDVSVPQAMPHGSFLGIDVGILHFLATSSGKTYPNPRPFQTLQRKLKLLQQRVSRKVKGSKNRKKAQVKVSNLHEKIASIRKDYYWKLAHELCDSAGSMFVENLNLVGLARGILGKHCLDAGWGQFFQILEQCCLKRGVFFLKVDARKTSQICPNCLTETDKKELSERVHSCGHCGYQTDRDVAAAQVVLIRGLAAVGHTVKMLSEGKAVALPVTKESPSL

SEQ ID NO: 7835 - protein, 459 aa, Micromonospora sp.
VKTMQAYRFALDLNPRQERAVLAHAGAARVAHNWALARVKAVMDQRAAERTYGIPDDQLTAAMSWSLPALRKAWNAAKADVAPWWAECSKEAFNTGLDALARALKNWADSRTGKRHGRTVGFPRYKSRRRTTPSVRFTTGTIRVEPDRTHVVLPRLGRLKLHESARKLARRLEAGTARILSATVRRDGGRWHVAFCVEADRADRRPNRPASVVGVDVGITHLAVLSTGELINNPRHFAAGQYRLRQLGRALSRKTGPDRRTGRRPSRRWQQAAARLGRAHARVANLRRDGLHKLTTRLAREHGTVVVEDLNVTGMLANRRLARRIADAGFAEIRRQLTYKTSWNGGRLLVADRWYPSSKTCSGCGTVKAKLALSEREYHCQTCGLIRDRDGNAAANLAALADQYDTAGSGPVAGRGADRKTHIGGQVATKRQPGTASAGQTGTVPPQGETANRVLTRAH

SEQ ID NO: 7836 - protein, 415 aa, unknown
  TnpB Polypeptide
MIRSTQTSIKFANTGRKDQVAKFVDEYLKVSQQIVDILWEKRSDSIPSLVPKEITDQAETWLSARAIQCSAKQASGIVRGTIKKQKDRLYRIGKLNSEGKFKHARKLQIVYDKHDMSKPNIKNITPELDSRFVVTDLESDTSFDGWVKISQLGNKEKIYLPFKKTSHFNKMLKCGIIKQGIRLSKRSLTFNFEIPDVEERTEGSVLGIDIGISDVLSCSNGYHSTKDNHGHNLLTIQQKLARRHKGSAGFRRAQSHRRNYTNRCIKKLDLSCIRQVNIEDIKNMNFGKSSGRFLNHFVASQILGQVEDFCVRHGVRVKRKSQTYTSQRCSKCGWVRKSNRKGKQFKCTSCGFAIDADLNAAINLTFDLPAISKAERLLKKNLKGFFWLPLGQPNESISQEPIVPGAIKLKNSYSS

SEQ ID NO: 7837 - protein, 303 aa, unknown
  TnpB Polypeptide
MIARGLEENSVLRELRRMLNKAYADSAYKAAKTMMEGCIFNGGNPLHIEVKKPFIVSEGESSRLGNRNVRLEDTCLVKVKYPYDGSWITLRAEFGEKYLPLLRELVDLAKQKKLSYTARIVFKEGDIYLHISIPIQLYLKYFKEGEARGQLIAGFDLNSDRVNLVIIDEHGEIVDARTAWFPETTSHGFPREKAKALRLNALARLLKYCYRHGVSVVVFEDLLSVKRKRFTRSRTANRKITRFAKKQLIQHGVVTALKYGFKVLLVDPKGSTNSREHDELMRKYRLDRHTASAYLIALRGLKH

SEQ ID NO: 7838 - protein, 254 aa, unknown
  TnpB Polypeptide
MRKVEADDPEPDTEHRTVLGVDLGVNNIIAVASTGTFWSADEFNHWRREYEKCRSSLQQHGTRAAHEAIEGVGRKEYGRFEIYLHGVANELIEEAVEYGCSHIVFEDLTHIRENIPKATWQHVWAFRRLFQYVEYKATEHGVGAVQVPPNHTSQRCSTCGCTREDNRDGEHFECLKCGYQNHADYNAAKNIGFRYLRRRQNAADGGAPVDVALNRGMLNVSGEYAPPATTDGGIERESTRKPSPQRARSSDRAK

SEQ ID NO: 7839 - protein, 248 aa, Clostridium sp.
MGIRIVPKGNIYILEIVYEKEVIETNDEISRILGVDLGVDNLATCVNNIGIKPIVINGKVLKSINQYYNKKLAALKSDLKKRHSKDWSNKLDRLQRKRDNKVDYYLHCSSRKIINHCIENNIDTIIIGLNKTWKQESSMNKKSNQNFISIPYDKFISQITYKAQDVGIKVITTEESYTSGCSFLDNEEIGKNTYNKSRRVYRGLFVSNKGIVINADCNGAYNITRKVVPEAFVDGIEGVDLHPIRVNI

SEQ ID NO: 7840 - protein, 413 aa, unknown
  TnpB Polypeptide
MWNGLNYARLVQFRESGEIDFRGTGYEFYHRYRDRLGVNAGQVVNLNNNAWKSYFELLGLYKQGKLPKFVNKPSPPGFWKDKVLGKRELRILVRNDRYYLEPINNSEGYLVLKDWGLKIKYAGRIKWSGKQGTLIIKLEDNRWFAYVPIEIGAKPAKSNPKGYVRGVYDRVQIEKPRGGNKAFIDIGLNNLFAVVFNHTDVAILIKGSTIKAEYYWWKREVKTYQSVRDWLRNHGFESWRKYHTYYLHAIYKQRERLRHYYRTAIRFLARTMHEMGVDEVFVGYPYLVNQNNGNEYNANVWWFNKIIKWLSEVLQEYGIKLHVVNEYGTSKQCSICNMEHENGRVKRGLYICPVTGIKINADINAARNIAKKAGYETPMPRKILTYIVTSNGVKPITPKEGVTPETPKVETPP

SEQ ID NO: 7841 - protein, 388 aa, unknown
  TnpB Polypeptide
MLILLKSFKTEINPTAEQIIKINKTIDVCRFIYNFYIAHNKELYESGEKFMSGRHFNVWLNNEYLPSNPDKMWIKDVYTKAVAKSMDNACVAFTRFFMHKSKFPRFKKKNKSDVKMYFVKNNKTDCLSERHRVKVPTLGWVRLKEKGYIPTSKNGFVIRSGTISCKAGRYYISVLVDIQRQDTEISNDFGIGIDLGLKSLAICSNGSVFHNINKTNRIRKISKKLVREQRKLSHKVISIKKGESTQKNFVKQRLEVQKLYQRLDNIRTDYINKTIHSIVKAKPYYIVIEDLNVSGMMKNRHLSKAVAQQKFFEFRTKLISKCKENGIELRVVDRFYPSSKTCHKCGHIKKDLKLSDRTYRCSECGYVEDRDINASLNLRDAKTYTVVH

SEQ ID NO: 7842 - protein, 336 aa, Salmonella sp.
  misc_feature (25)..(28): Xaa can be any naturally occurring amino acid
  misc_feature (307)..(310): Xaa can be any naturally occurring amino acid
MKRAYKYRFYPTTEQAELLAQTFGXXXXFAWLNDVSCVPLQQSLRHQQTAFANFFAGRAAYPAFKSKRHKQAAEFTASAFKYRDGKLYMAKNKIPLDVRWSRPLPSVPSTVTISKDAAGRYFVSCLCEFEPASLPITSSMVGIDVGLKDLFVTDTGFRSGNPRHTAKYAARLALLQRRLSKKAKGSKNRAKAHLKVARLHAKIADCRLDALHKATRKLINDNQVVCVESLKVRNMIRNPSLSKAIADASWGELVRQLRYKGEWAGRSVVAIDQFFPSSKRCSCCGFIMKKMPLDVRKWQCPECGTDXXXXARNIKAAGLAVLAHGEPVNPESLKAA

SEQ ID NO: 7843 - protein, 436 aa, unknown
  TnpB Polypeptide
LSFGVDIHTGSGDDLLTGCLEARRIRNEANRLDRQRWGWDDIKSTVVDNADHVKNTSQLIVDKALGELKTYHDNKDDGWGRPYPYIDELYPMVMNHGEGYRLFLKDDGTVRFRVTATRGTHVKGELRGSPDHFDRLQTAVNDEEWRVGTAEVVHKHDEWRLHVTVTHETHRVASKHDADTVVGVDVNEDCIALAAMNRSGSVKDSVVFEYPSVKEQRHEFFTKRKRMQQAKQSAFEAVVQTEERDYVHNCLHKVSRNVVEWVSQFNDPVIVFEDLKDMRDSIDYGTRMNRRLHSLPFAALQEMVSYKAARDGVPSDEVDPEYTSQRCPRTECQHTERANRRKKMFTCRQCGFQDHSDRKAAVCVVQNWFDEQENENVPSLETLPRVRTVRRAASGAGGGPDSHGAACASGVTSAREAQPAVEAREELTSVASAVPE

SEQ ID NO: 7844 - protein, 446 aa, Crocosphaera sp.
MYATQKNQLRRLSQQEFKALTVLCRLSKNLFNVALYECRQYFFIERERLTYESNYHICKSNENYRLLNTDIAQQTMKVVDRSMRSFLGLFKAISIGRYDQKPQLPKYLPKDGYFPLIIPRIKVKDGVFRIPMSRQFNKEYGEVKIQLPERLKDKDIKEVRIHPKYSARWFEIEYIYEDEKVETSVTPDKAMAIDLGVDNLAACFDTEGHQFLIDGKRLKSINQWYNKRNAELQSAKDKQRCDPADSQSAKESAPRQGIKSFTNQQARLYQWRNDRVRDYLNKTARIIINHCLTYQIGKLVVGYNPGIKHEINIGRSNNQTAVAPLGETPRPHYLNFVQIPFWQLRQKLKALCSRYGIEYLEQEESYSSKASFYDQDEIPVYNADNPGKQKFSGKRIKRGLYRTKDKHLVSSDINGSANILVKSKHRLSFERVSRGFLANPLRIFVS

SEQ ID NO: 7845 - protein, 180 aa, Neisseria sp.
LNAFKTHKGKLAKLQKRFKNKTKFSKNWQKLKAKIAKLHHKTANCRKDFLHQTSSKISKNHAMIYVEDLQVSAISKSAKGTAEEHGKNVKQKSGLNRAILDKSWFEFRRQLAYKLAWNGGFLFAVPPQNTSRTCPCCGYTAKENRQTQADFGCVECGYTENADVVGALNILERGRAIVQA

SEQ ID NO: 7846 - protein, 127 aa, Lyngbya sp.
MRTREDLTGIRNRTNTQPRNKIERRRSNSWAFYQLRQFLEYKGVKEGVEVVAISPRYTSQTCHKCLHIHPEQGKSYRSSKTFKCGHCGWKGDADVGGAKMISIVGQSVSLPVTRNPLSCSVLDSILD

SEQ ID NO: 7847 - protein, 430 aa, unknown
  TnpB Polypeptide
MSKEKNAQIKATLLATKERRKTQKCFVFSTKINYRKLNKLQKEQLQKLFVEAKWVYNDIINHLEANKLSSWSDKKKSVMVKQKDGVFVDKPLLYFKSSMMQGMKSLIGDSLNSLAEKKKKGYKVGKLKFKSSCNSIPLKQFGVTHRIKSLNKVGIQGINGCFRVHGLEQFADNPNAEIANAKLLKKSDGYYIHWTVYIAKNKLQAINRNDEVIGIDFGCGTSFTFSDGHKEDFKLKEPECLKKLQKSLARKRKTETNKKHSNQYKSVQRKLERVYQHLANIKNDKANKLCHKLMSYKQVVIQDENLRGWHKGGHGKAVQHSILGRVKKKLKTMDNVHVLSRFLPTTKLCFHCGEVHNEIKVWDRVFKCDCGVCEDRDIHAAKCMVWMYLNNFQIPTEHRNLMQTENKTSGKYSIKKKTKSCSLKFEAHPL

SEQ ID NO: 7848 - protein, 447 aa, unknown
  TnpB Polypeptide
MCQSKNIKIKQTLAETRKRRESQKCFVFKTKINKQKLNAVQKEQLYRLFIEAKWFYNHAISFMQTHKLSELGTKIKSVTTLDKNKQPVERKFTALSAAMKQSIKAKISDSLFALHELKQNGHKVGKLKFKKEINCIIYKQFGVTHRIKSLHRIKLQSIDGFLYVYGLDQFYTNPNAEIANAQLIRRNGDYYIHWTVYIDKKHIPSVEKNNENIGIDFGCATSFTLSDGRKIDFKLQETESMRKLHKKIARQKKDSKQYDKSCELLRKKYDKLGRIKDDFSYKFVNQLKHYNKVVIQDENLKAWHKGSHGKAVQHSVLGRVKNMLKQQANVHVLSRFAPTTKMCFNCGEIHKDIMLWDRVFECDCGVRMDRDVHAAQCMVWMADNGYDNILLNKKKKKNTAGRGDVEKQTSTVKSYDGNIIADPCCAYCSDSKFVSMKHETNVASARW

SEQ ID NO: 7849 - protein, 403 aa, unknown
  TnpB Polypeptide
MRTSYQYRLKPTKAQSAVIDNTLDMLRCQYNYQLAQRFNWYEQNRCPIDRCSLFVCHIPELLDKPSYYSQKASLTQLKKDRPWYKEIHSQVLQEVSKRVETTFDKWLASDSNGKKSGRPRFKATGQYKTFTYPQFKQHHFVNNKITLSKLGEVKVIVHRQIPDGFEIKTVSVTKKSNGYYVTLSLDDKTVPTIKPDFNPDNIVGIDVGLIDFYVASDNTKIVAPKFLRKAEHKLNSAQRKVSRRKKGSNRRKKAITALSQQHKKVADTRRDFHFKTANNLLKKYDVVAVEKLNVKGMVKSLHLGKSISDAGWSQFTTILKHKAENAGLKVIAVNPNGTSQECSGCGHKVKKPLSQRMHNCPVCHISLCRDLNASINIKNRGAHDLKAQVMSSLKRRMRSPHSL

SEQ ID NO: 7850 - protein, 407 aa, unknown
  TnpB Polypeptide
MLIYEYKLDANKAQYRAIDNAIRVVQFVRNKCIRLWMDSRGVGNNDLQVYCSMLAAQFPFAKCLNSQARQVAAERAWFSIQRFYDNCKAHIPGKKGYPKFQHNNRSVEYKTTGWTLASDGRHITFTDGCAIGRVRLIGCRDLATFPLPQIRRVRIVKRADGYYVQFSVHAHREVEHVPTGKRVGIDMGLNAYSTDSEGNTVSNPRYLRKAEKRLKRLSRKHSKCAKKSHNRKKAQKHLAKAHLKVQRQREDFARKQANALITSHDVVVYEKLSIRNMVKNHHLAKSIRDAAWGVFLRWVNYYGTIHNVPVIAVAPHFTSQDCSACGTRVKKSLSVRTHVCHNCGLVLDRDHNAALNILDKGLMVLSGRQEPVGHAAHATLLDRSTSTHTSKGVLSKSSGGKKNSPSF

SEQ ID NO: 7851 - protein, 389 aa, unknown
  TnpB Polypeptide
MIKAIKIKLYPTKEQESMLWKTANHARGAWNVGLGYIKDEYEKGNSVSTAQARQMITDAKKSNKDYLWLGEISADAWRNVFQDMTKAFKVFRENLKKGIPFPDAGYPQFKKKSKSKPSFYHDERKLKVYGNKVYLEKIGFVKMKDEGRLPQGNYKKDRIKVSNVRVGYDNKNWYLTCGIETPEEYWTPNQDLSIGIDLGIKELAVTNVEGLSFDNINKKREVKRLEKKHRRMSHKISRKYEANKDGKKFVKTNNIFKLERLRKRVDRRLTNIRDNHLHQATKTIIKQKPSKIVVEDLNVKGMMKNKHLAKLVANQKFFEFRRQLEYKAKFYLGIDVTVADRWFPSSKMCSCCGQIKSDLKLKDRVYRCDCGLKIDRDLNASINLANYSI

SEQ ID NO: 7852 - protein, 562 aa, Streptomyces sp.
VLVSQGDGFFDSGRAGGGGVGELRSIAAPFVVSGPAGVAVRTRLKQLTPGDEKVLRLVGGHLGSLASRDLKARCRDGLEYSGQAWAVRKRELTPASSSRWAGSITKATHDQWALARRCQLAHIQNLEAGIRAIGDRLALPVGERGTKRAPGGYRSRREWHAKSRRLRVLRDRLAAARADRDAGIVHVVRGGKRLARTRHHLETAQLTESAWRGRWEAERWFCQADGESGKRYGNETIRVSPDGQVSIKLPAPLAHLANAPHGRYVLAGRVVFAHRGTEWADRVAANRAVAYRIHHDTGRDRWYVTASWQIPPTPTLPIEVALAHGVIGVDMNADHLAAWRLDTHGNPTGSPRRFSYDLTGTAGHRDAQVRHALTRLLHWAKTCGVRAIAVEDLDFAAEKTREKHGRRTRFRQLLSGMPTGRLRARLASMADQTGIAIIAVDPAYTSRWGAQHWQKPLTSTTRQTTRHEAAAVAIGRRAQQHPIRRRTAPPPHDRSDRVGHRTAQARPGVAGREGTRPRIPGPRTRSVPPGCGANAGNQNAQHRPGRSAEHETWQQDSLPLSL

SEQ ID NO: 7853 - protein, 342 aa, unknown
  TnpB Polypeptide
MTVIKGYKIRLLPTKNQEMLIRKSMGVSRFVYNWCLDKQRKSDRFIRDNELRKDLTKLKKTNEYHWLNEVGSNVIKQAAKDLCIAYKMFFNHISNKPRFKKKSVHHSFYVNYESMRKTKHGVRCEKIGDIKTSERLPKLRKNMYYLNPHIVFDGKYYYITFAIKINVTPRRNTSEIIGIDLGIKSFVVCSNNMTYKNINKTHTIKKLNKKLRRLQRQVSKKYLKNKIGNKFIKTTNIIKLEHKIKLVYRRLHNIRENYIHQITAYLVKTKPSKFVVEDLNVTGMMKNKHLSKAIKEQCFYKFIDILKYKCEWNNIELIKADRFYPSSKLCSCCGNIKKRFKT

SEQ ID NO: 7854 - protein, 447 aa, Puniceicoccaceae sp.
MRIIRSDTFRIESCPEGRQALGGLLEQYRCLVRDLMTVINTHWPVLGALEGHRIIQSTEALMHPTSKRPVVKYGYFHRRYYKFPSYLRRAAIADAAGQVRSFHSRYNRWLDGERRRGDEKPPKLTCATSTFPSLYRGQCVRFSDDGRTAWIKVYWQRDWIWRAYRLTGTARYAGQGRAMSPLLRCKRGCWSLSVPIEIDIERRADTPGRVLAIDVGMNTTAAGAIVDVDGTVHARFFERRSDSDREHRLMARIRARARVAGRHGGRLQRGFCRATYRQLRHLADDQAHQISRRIVNRAIAGDCQAIVLEQLKGFRPTGGKRRSHLNARFHRWYHRMLTERIEAKAAEAGIRTIQVWPRGTSAQAFDGSGKVRRDRTNASLCVFPSGKRYNTDLNAAYNIAARGIIYLTQPGRRKSAGGASGQKSPAAPRSPVTLSSLWANQALNQVG

SEQ ID NO: 7855 - protein, 485 aa, unknown
  TnpB Polypeptide
VIVALRTCRQAAGVAELTGGVRLPGKPKPDGSQTLSRYVDVGRDFEAHRAAVQSVSVLFALYDGDAAGYAATGSPGKELPTGWMVTAARFEVQWPAEPARAGLVRSHFGARRFAFNWGLARVRADLHARQANPGHQSVGWDLGSLRWVWNRAKHQDAPWWAANSKECYSAGLADLARALSNWHASKNANRTGRRVGFPRFRSARRDAGRVRFTAGTMRLENDRRTITVPVIGGLRCKENTRRVQRHLASGRARILNMTLSQRWGRLFVSVNYALRTPQTVRTPAQPTARAGVDLGMRTLAAVATVDTATGAETIVEYENPAPLKATLAARRRAGRELSRRIPGSRGHRAAKAKLTRLDRRCVQLRREAAHQLTTELAGSYGQIVIEDLDLAAMKRSRGQRAYRRAVSDAAMGAIRPMLAYKTTRHSSTLIVADRWFASSQIHHGHTQPDGIPCRLVGKGRVDKHPLCPTTGEVVDRDHNAALNLP

SEQ ID NO: 7856 - protein, 361 aa, Okeania sp.
LKARYKYRIYPNRVQITKLNQLFGCCRYVWNSTLAHCNELYSDGQKKPSYVDLTKQFITQAKKELVWLKEVASTPLQQSLKDLDQAYKNFFDSCTGKRKGIKVKPPKFKSRKSRQTARFVGGNYKIGQDKIYLPKVGKIKIVWSRKLPSEPSSLTITKDSANRYFASFVVEINPELLPKTNNSIGIDLGISTFATLSNGDKINAPKPLKNNLKKLAKFQRKFAKTELGSKRREKARILIAKLHAKVKDIRTDFLHKLSTDLVKKYDKIVLEDLNVSGMVKNCKLARAISDLGWRQFRTLTEAKCEKYGKEFRTISRWEPTSQKCSNCGFKGGKKELNVREWTCLNCGTFHDRDVNAAVNIL

SEQ ID NO: 7857 - protein, 468 aa, Okeania sp.
LVSESKTLKARYKYRIYPNRVQITKLNQLFGCCRYVWNSTLAHCNELYSDGQKKPSYVDLTKQFITQAKKELVWLKEVASTPLQQSLKDLDQAYKNFFDSCTGKRKGIKVKPPKFKSRKSRQTARFVGGNYKIGQDKIYLPKVGKIKIVWSRKLPSEPSSLTITKDSANRYFASFVVEINPELLPKTNNSIGIDLGISTFATLSNGDKINAPKPLKNNLKKLAKFQRKFAKTELGSKRREKARILIAKLHAKVKDIRTDFLHKLSTDLVKKYDKIVLEDLNVSGMVKNCKLARAISDLGWRQFRTLTEAKCEKYGKEFRTISRWEPTSQKCSNCGFKGGKKELNVREWTCLNCGTFHDRDVNAAVNILNVIQPKTKVEIVEETVVEIPVQLSLFNEVAEGQRSIIFGRGGNVRLASQQILMMCQLALSFSSNLVCLNDGWESRAVSQSSVGRMSRAKSKSSNIRAAYL

SEQ ID NO: 7858 - protein, 396 aa, unknown
  TnpB Polypeptide
MIVLEFKLAGAASQYAALDEAIRTTQFIRNKCVRKWMDERGVKPYDLNRYCAILAKEYAFAGKLNSQARQAAAERAAAAIVRFYDNCRAKKPGTKGYPQFQKDCHSVEYKTTGWTLDAVRRAITFTDGFKAGRFTLKGTRDLVGYALAQIKRVRVIRKADGYYSQFCIDAERRASVEPSGRALGIDLGLSHFYTDSEGATVENPRHLRRSERALKPLHRHVSSKVKGSRNRAKARGRLSRKHLKVRRQRKDFAVKAARALIMSNGVIAYEDLQVSNMVKNRHLAKSIGDAGWRAFVTWLDYLAQVYGKVVVAVPPAYTSQECSGCGARVKKALSERTHVCPHCKTVLDRDHNAARNILTLGLRHLAETTAGHAESNAWGQSALYLPDASPEDKVAG

SEQ ID NO: 7859 - protein, 825 aa, Escherichia sp.
MAQVINTNSLSLITQNNINKNQSALSSSIERLSSGLRINSAKDDAAGQAIANRFTSNIKGLTQAARNANDGISVAQTTEGALSEINNNLQRIRELTVQASTGTNSDSDLDSIQDEIKSRLDEIDRVSGQTQFNGVNVLSKDGSMKIQVGANDGETITIDLKKIDSDTLNLAGFNVNGKGSVANTAATSDDLKLAGFTKGTTDTNGVTAYTNTISNDKAKASDLLANITDGSVITGGGANAFGVAAKNGYTYDAASKSYSFAADGADSAKTLSIINPNTGDSSQATVTIGGKEQKVNISQDGKITAADDNATLYLDKQGNLTKTNAGNDTAATWDGLISNSDSTGAVPVGVATTITITSGTASGMSVQSAGAGIQTSTNSQILAGGAFAAKVSIEGGAATDILVASNGNITAADGSALYLDATTGGFTTTAGGNTAASLDNLIANSKDATLTVTSGTGQNTVYSTTGSGAQFTSLAKVDTVNVTNAHVSAEGMANLTKSNFTIDMGGTGTVTYTVSNGDVKAAANADVYVEDGALSANATKDVTYFEQKNGALPKLGWMRYRNSRQVTGVVKNVTVSQSCGKWYISIQTESEVSTPVHPSASMVGLDAGVAKLATLSDGTVFEPVNSFQKNQKTLARLQRQLSRKVKFSNNWQKQKRKIQRLHSCIANIRRDYLHKVTTAVSKNHAMIVIEDLKVSNMSKSAAGTVSQPGRNVRAKSGLNRSILDQGWYEMRRQLEYKQLWRGGQVLAVPPAYTSQRCAYCGHTAKENRLSQSKFRCQVCGYTANADVNGARNILAAGHAVLACGEMVQSGRPLKQEPTEMIQATA

SEQ ID NO: 7860 - protein, 388 aa, unknown
  TnpB Polypeptide
MLSTAHQIELKPNNKQANYFARACGVARLAYNWGLANWQEKYQAHQQDNNLPKPNEQSLRKEFNAIKHEKYPFVLEVTKYASQQALKNLGTAFKRFFKGEASYPQFCKKGHHDSFYIGNDQFKVKDKQVWIPNLGWVKTKESYKYQGAGKINNAVISRQADRWYVSISVSLPIEQKPPRQPVEKQDCVGVDLGINCLATCSDGKEIDNPKALSKKLKKLKRLNQALSRKVKGSHNRYKAKLQLSKLHQRIKNIRKDALHKLSYYLTTRFNTVVLEDLNVKGMIQNRKLSRAIADVGFYELRRQVEYKAKYYGAKVVFADRFYPSSKLCSSCGFKHEGLTLKDREWQCPHCETSHDRDVNAALNLKQLGLTKIAASSTVTACGEFGSGV

SEQ ID NO: 7861 - protein, 317 aa, Spirochaetia sp.
MGASKEILSGLPEWAGEIPYQVKKMAIKECFDALSNGFRKMKKTKEKFSLSFRSRKNPKQSCFIPSTAIKEAGIYVKMSGKLKYAEGLPELPKDSRLMLENGRWFVSVPHVSVISTSENQGRVVALDPGIRTFLTGFSPEQIFKIGEGDFSRIARLCSFLDRLLSDISKAKGAKKARLKKAASKLRWKIRDLVDELHFKSVRFLVDQFDLILLPTFETKQMASKAKRKIRAKSVRAMLGFAFFRFGMRLESAAKAAGKTVLRVNEAYTSKTASWTGEIVKIGSAKKITSHGMTLDRDVNGARGIFLRALVDSPSLAC

SEQ ID NO: 7862 - protein, 416 aa, Actinomadura sp.
MYPTREQEEQMLLHCAHARYVWNLAVEQHSHWRKGHKAAPGFAEQCRQLTEARREHEWLGAGNQTVQVQALKDFAQAKNAKFTSGFGEPTWRKRHRHEGFRIIGDDRVPEFSDDGSPRVNVKTGKQVMGRKATVQKLNKRWAQVRVPGCGWVRFRLSAKGKGAALPDAKTFRITFKNGQWHAAFAVIPDPTPAPGTGEVIGIDRGVTITAAISDGRKLNCPQATTRERAQIRKHQRRAARAPRNSPAKTAEYAKVAKLKAREANRRKDWCEKTSTMLARTYDLIRFEKLRIRNMTAKAKPKPDPDLPGQYLKNSRAAKAGLNRAILAQGWGLLRQRTEHKAPGRVEDVPAPYTSLRCSPCGWIDKNSRKSQAEFVCTNCGFTCNADANAANNIAAGQDADIPRPRRTAGAGGTTTH

SEQ ID NO: 7863 - protein, 531 aa, unknown
  TnpB Polypeptide
MKRANTFEVVPQTEDDRECLRRLLDASASLWNELTYERRQNYFGDGDVWDTSEYRGCYNGVVGSATVQQVTRKNSEAWRSFFALTENGENATPPSYWGNEEDGRELRTYIRNDQYTIQWDKRSRLEIPVGEELKDEYGLGYHERLRLEIRGNPKWDGKQGRLELEYDEVSDTFRAFQPVTVPDSRLDSPLASHEAALDVGANNLVACSTTAGSQYIYAGRELFGRFRETTDEIAHLQSKLRGGRYSSKRIRKLYRQRTKCRDHAQNALVRDLVERLYDEGVATVYVGDLTDVLDAHWSVRVNEKTHNFWAFKKFITRLACLCEEYGICLEVESEAWTSQTCPECGDREETTRHRDTLTCPCEFEGHADLTASETFLRENSEMEVRPMARPVRFEWTTTIGRGNHTLTKVPKKCAQTRKLLPWVGRRTPQRRNPRASARGGCQSRSSSLAASEKGNHYYGRQTLTNCDGFRYQRQNRRRYWRCRTNRKRRLSNARGRGRRRRRPRRRRRRCLRSRRRGERNGRRRRRHPAAL

SEQ ID NO: 7864 - protein, 399 aa, unknown
  TnpB Polypeptide
VLIYEYKVAGTPKQYTAIDEAIRIVQFVRNKCVRKWMDESGVSANALQCYCAVLAKTYSFASLLNSQARQVAADRAWSAIQRFYEQCRSAKRGKKGYPQFQHDNRSVEYKTTGWKFDPDGKHIRFTDGCSIGRLRLVGNKKQKVASFPLHQIKRVRLLKRADGYYVQFAVKAERKVEHVSTGTQVGIDVGLKEFYTDSNGKTVANPRFLRKAEKKLKRLHRQVSRTHKKSVHHKKAQQKLGKAYLKVQRQREDFARKTANTLIISHDLVAFEDLKIANLVRNHHLARSISDAAWGRFLQWVSYYGLIHGVPIVAIAPHFTSQQCSGCGKIVKKSLSERTHVCVDCGLVMDRDENAARNILAKALQWFKEQGCTVGQTETGASAHVRNASGQQTTTASQR

SEQ ID NO: 7865 - protein, 217 aa, unknown
  TnpB Polypeptide
LREIRGRGITTSEHANTGYRWQGEVRCHIGLRTIPQIRLVYRRLSRNVRPCHYGNRRLTTVKEIKTRGGGNRYEKTSNLLKLEKGIRQVHKRLKDIRLNHTHQITSKLVKANPEYIVIEDLNVAGMMKNKHLARAIQEQKLYELRRQLGYKGVWYGVRLIIADRFYPSSKMCSKCGQINKNLKLSDRTYQCDCGLRMDRDLNASINLREYGRIKLAG

SEQ ID NO: 7866 - protein, 419 aa, unknown
  TnpB Polypeptide
MTKAERIKQTLKETKERRKRLSPVVYQLKIQNLSKIGEENLNIVFLEAKWLYNWFIADIGRLSIPTKEIKEVEIKVEDKFEKREIKLLGSKLKEAVQDGVKDNLRVLKGLKNKGYKIGKLKFKKFVSSIKLKQYKNSFDIDFKRNRVRVQGLGWFRVLGLHQVPRDCEIANAQLIKKPSGYYVYLTCYVKKEYFDRDKVRDSVGIDFGVANKITLSNGLCIDFEVKESKRLKRIQKELARKRKGSKNREKVLKKLQREYERLTNIRRDIHNKLLALFRRYGTVVYQDDNIKAWHEGWFGSQVQHAGIGTLKARLRNNLATIPVKRFEPTTQECCVCGHKQKLGLSYRIYRCSSCRNTINRDLNSAINILKKGLSLSPNQAVGLDRSELTPVERELVAKILGSNPYIKATSLVEAGSSRF

SEQ ID NO: 7867 - protein, 377 aa, Streptomyces sp.
MRLRYNYRAHPDAPQRRALAKAFGCARVVWNDCLRDRKEAHAAGLPYVTSAELSRLRITQAKRTEERAWLADVSAVVLQQSLRDLDTAYKNFFDSLTGKRKGRKAGPPRFKSKKDTRQSVRLNTNAFCLQENGTVYVAKVGNLKVTWSRRLPAAPTSVTVTKDSCGRYFLSFVVDTEPDILPEAGIDTGIDLGLSAFAVLSDGTKIASPRFLRRAEKKLRRLQRELSRKVKGSKNVEDLAVSGLARTRLAKSVHDAGWSAFTGMLEYKAARHGRTFVKVGRAFPSSQICSACGFRDGPKPLHIREWTCSACGTAHDRDHNAGRNVLFEGRRIVAAGRAETRNACGASVRRAPVPAQRGEAGSSRKGRRTAQAGIPGL

SEQ ID NO: 7868 - protein, 459 aa, Mycobacterium sp.
MGRFEVPEEWSVQAFRFTLDPTAEQSVALARHFGARRKAYNWTVAALKADIEAWHATRIETAKPSLRVLRKRWNTVKNDVCVNAETDAVWWPECSKEAYADGIAAAVDGYWNWQQSRSGKRAGKRVGFPRFKRKGRDADRMCFTTGAMRVEPDRRHVTLPVIGMVRTHENTRRIERLIRAGRARVLAISVRRNGTRLDASVRVLIQRPQQPSVRSPGSRVGVDVGVRRLATVADEDGAVLDQVPNPRPLEVALKELRRVSRARSRCTKGSRRYRERTIEISRLHRRVNDVRTHHLHCLTTRLAQTHGRIVVEGLDAAGMLRQKGLPGARARRRGLSDAALGAPRRHLSYKTVWYGSQLVVADRWFPSSKTCHACGHVQDIGWDEKWQCDDCSVIHQRDDNAAINLARYEETLSVVGPVGAAVKRGADRKTGPRPAGGCEARKGRSRKAAEQPRDGVQVA

SEQ ID NO: 7869 - protein, 273 aa, Hydrocoleum sp.
MSQIKIPTSQIEIREARIVPKSSCYIIEIVYEKSEETTKNQQVAGVDLGVNNLMAVTTNQTGIAPLLIKGRPLKAINTFYNKQRSYLQSELKNNHNQSHSRKLKKLTHKRNCRVENYLHTASKRVIDWCIKHEIGILIIGHNQTWKQEIKLGKKNNQQFVNIPHYRLIEMLKYKAQLRGIKVIITEESYTSQSSCLDRDNLPKYGEKKPEFSGKRVTRGLYKTRENKSLNADVNGSLNIIKKVIPDVFDQGIKGLPFNPVAIDPLRTTKFSDF

SEQ ID NO: 7870 - protein, 325 aa, Micromonospora sp.
LTAYRNFFASLSEERKGRKVAPPRFRSRKDNRQAIRFTRNSRFAVLDNGRLRLPKIGEVPVRWSRTLPAEPSSVTVIKDAVGRYFASFVVQTTDEPLPPVGFEVGIDLGLTHFAVLSNGKRITAPKFLRRAARKLKRLQQDLSRKQRGSNNRAKAVVKVARAHARVADSRRDWQHKLSTRIIRDSQAVYVEDLCVVGLGRTRLAKSVHDAGWAAFTDMLEYKAARYGRTFGRVDRFFPSTRMCSDCGRINEKLPLSVRSWTCPCGPVHDRDVNAAINILAAGRAERLNACGAQARPASVPAPRREAGIRPNAACSTRSVEGTSAL

SEQ ID NO: 7871 - protein, 286 aa, unknown
  TnpB Polypeptide
VEYKRTGWKLEPDGKHLTFTDGCGIGRVRLIGSRNIETFPVKHIKRVRIVKRADGYYCQFSVQADRTIEHVSTGKKLGIDMGLNAYYTDSEGNAIANPRFLRKAEKRLKRLARKHSKCAKKSKNRNKAQKRLARMHLKVSRQREDFARKQANALITSSDVIVYEKLSIRNMVKNHHLAKSISDASWGAFLRWVNYYGTIHNVPVIAVAPNFTSQDCSVCGTCVKKSLSVRTHVCHGCGMVLDRDHNAAINILNKAFCTVGQTGTARASTLDNASGHTASTSHSQEC

SEQ ID NO: 7872 - protein, 369 aa, unknown
  TnpB Polypeptide
MRRTFKFRIYLTKGQQRILVRQLEECRWAYNETLAERKKSYEERGASLRLYDTQALLPVWKLIRPALKLVHSQVLQNVQVRIDLAFQAFFRRVKAGESKAGFPRFKGVGRYDSITYPQYGNGVRLDGDRLILSKVGAVQVVLHRPLVGTPKTVTLTRSRTGKWFACFSTEIAARPLPPVSTVVGIDVGLASFATLSDGQKIANPRFYRKDESALKRAQQRKDVAKQAQDWPTNAKQQGILARIHARIANRRSDFAHKVSRDLVNHYQLMVFESLAPEAMGKSRGMRKSIKDVAWSQFIGMTLSKAAEAGRRVILVDARNTSKMCSRCGELVSKTLRDRTHTCPYCGLVMDRDRNAAINILHKGLQTLRT

SEQ ID NO: 7873 - protein, 316 aa, unknown
  TnpB Polypeptide
VQTRVLKLKCRTLNRAKAARVEALQAEFTACTVFHLDRIQALKTTSPTRVHQDCYRKARSRFALPASTLQRARDKAIAAQRSYLQRRKHDRGAKPSRFTKPLPIALAAENLRVFPDKRMVRVTTPDGFLWLPVLIPACFQTQARQPHGASELVRNGSDWYLMLTVSCEDVPTGEGERPHFGMDLGIANLAVLSGPGLVRFFDGKPLRFTRGRYFRYRQALQAKRKLGMVKRSKGRESRWVTNQNHQVSRQIVDIVAAAGGTLHVEKLMDIRDRTKGTTKVRRMLHSWPFAQLLTFIGYKAQAAGVPVIEEDPRHTS

SEQ ID NO: 7874 - protein, 477 aa, unknown
  TnpB Polypeptide
LKGGEKMGFRKMPDNEMNLVYKYYGNFTAKENYIFRQLVFNSSMIYNKVNWYFLNHKFNSKLQPQIVRYLTKYDEHGKYFIQQECGEIISGLINDWKSFFAAREEHKKNPKKFTGKPRRPKCKKVKDKMNEVIFDERTILGLPGIKHNRKNAKGVIKNNKISFSLSKKAKRKFKMKNLEVNLSNFKFPKGLNKNLSNLQQVRICYDKKNERFYLAFIYRIEASSLDANNNDIMAIDLGQNNLITGVFNKSSYRFILDGKELKSKIAYVNSRMARLQSKEMKKLKNSKKFKATKKMKKLYNYWKNYTWTYIHKCSNKTVKKALKNKCNTIVIGDFKGIKRNKKRMKYFATIPYITLINQIKYKAKKSGIKVVMINESYTSGCSCIDDYEISKECYNKKRRKKRGDFVTNNGFHINADVNGAYNILRKYLNNNIPQCLIEDTYKNLYLTYLNMYLGLKGNAALTSGVNRIIYSPVLRHL

SEQ ID NO: 7875 - protein, 428 aa, unknown
  TnpB Polypeptide
VRLLVSKAYRLKLYPNVAQREAFLRWTGSCRWLWNMFLQMEQEEYKKTGKFIFRYDLDKLIPGLKKDYPWLGETPYCCLQRVARHIDVALKRKFQAGAGFPRFKNRAGRRSCYLTNDKFRLDGTTHVVLPKAGRMRFRAGRIPEGKVMGGTIRLIGDAWYLVLQCKVEILDVTVAPDAETVLGGDLGLSKTAVLSDGTITRIANVLKRKERKVKREQRKMARQVKGSKNREKTRRRLAKAKAAETNARNDFRHKLSRAIVDKASVIVLEDLLVMAMAMALNFGRAVNEAGLAEIRRQVEYKAMWDGKTVVIADRFFPSTQKCSACGHVKTGSDKLKLSDRTYRCGACGHTADRDLNAAMNLRRYGLEALSLVKAETDNASGEGYSLELRQGDNACGGYVRREGESRSATAAETGIVACSQTVTTNQYE

SEQ ID NO: 7876 - protein, 413 aa, Streptomyces sp.
VYLRYSFRIEPTPRQRIALARTFGCARVVYNDALALRKAAWKADRSKISAGELARRVITEGKRTPQRAWLAEVSVDALQSSLRDLDAAYKNFFDSLSGKRRGRPMGLPTFKKRSDSRQAVRFSKNGFRLRNNGRLNLAKIGDVRVRWSRPLPSAPSSVTVIMDASGRYFAVFIVQAEPTSLEPVDTEVGIDLGLSTYAVLSNGKTIDNPRFLRRAERKLRKAQQNLSRKAKGSANRAKARTRLARAHARVADARKDWCHQTASRLLRENQAVYLEDLAVSGLARTRLAKSVHDAAWGLFRRVLEEKAARHGRHVGAVSRWLPSSQTCSVCWVVDGKKPLRVRTWTCGGCETVHDRDLNASRVILAAGQAERLNAPGGPVSPGVEIPHQARPVERGTHPKPAPGTTGRQAGSLP

SEQ ID NO: 7877 - protein, 378 aa, unknown
  TnpB Polypeptide
MNRAYKYRIYPTTEQCVLFAKTFGCCRKVYNLMLSDKIEGYKATGKFPAVTPAKYKKDYPYLKEVDSLALANKQLDLQAAFRNCFSKSRKKNTGFPKFKSAKRSRRSYATNNQKGTIAIMDGGFIKLPKAGKVKAVIHRMPGDGWAIKSATVSQESDGKYYISVLFEFETPVNTYTADKTNAIGLDYASDGLYVDSNGDIGTNHKFYRESHRNLARAQRRLSHMQGSHKNEVRSNNYIKQLRKINRIHRYIANQRLDNLHKISTGIANRYDVVCVESLNMRAMANKGFGNGKATLDNGYGMFLSMLEYKLADRNKYFVKVDKWFPSSQICHCCGFLHPEMKDLRIRTMKCDCGLTMGRDRNAAINILQEGLRTLTAAA

SEQ ID NO: 7878 - protein, 240 aa, unknown
  TnpB Polypeptide
LKTSCKFNKYSNICDSSITWNQRTNEYYLNFEDIEIPSNNILLNKKICSIDVGLKSFLTIYSDNSIDKIGIRDKIEKLCRDIDIIIIKQHHKKDGKYKYNYQKRSLRKVMHRKIKYLDNLKEELYNKSVKYLCNNYGKIIIPPFETQKMVTNIKLDSKTSRNLMCISYYKFLSKLKSRYIEYDIELVIRPEYYTLKTCTKCGNIKHDLKNADTYIYKNCNLKIDRDTNGARNILLRNLCN

SEQ ID NO: 7879 - protein, 457 aa, unknown
  TnpB Polypeptide
VKIPRRSLSISAVKTSRRYLVTKTKWTCIRNTQCLPWRISLSAIIGQAYHGRMQRLQAFKFELMPNGEQARNMRRFAGSCRFVFNKALALQKANHEAGGKFVGYVAMAKHLTEWRNGTETPWLKDAPGHPLQHALKDLERAYKNFFAKRADFPRFKKKGQGDSFRYPDAKQFKLDAGNGRIFLPKLGWIRLRLSREVLGAPKNATVSYSCGKWYVSIQTEREVEQPVAQATSAIGIDVGIARFATFSDGSFLAPLNSFRKHEQRLARYQRAMSRKVKFSNNWKKAKARVLRIHARIGNARRDFLHKATTTISQNHAMVCIEDLQVRNMSRSAAGSTEKPGKNVRAKAGLNKSILDQGWFEFRRQLEYKLNWNGGMLVAVPPQNTSRTCPACGHVSADNRRTQARFACIDCGFEENADLVGAINILARGHRVAACGEPVQSGRSVKQEPTEATAQITA

SEQ ID NO: 7880 - protein, 493 aa, Moorea sp.
MPIKTGTTKKISTQVVPVVGMTKSVELELFSTMKKLGIVRAESYNKLGSISHWGIDWKKAYPEVRSFRTPESLGLPSKLMEWTVSDTAKAITASQAACTEAVIKKLYKRFPGKENQKTRKELCKQFKTLAFLDNPLLHRLVRKEFQRGHSWVKNQIVYQQVGYNCKRLSRNTYQLELAGLIRGKRNIIMVRSNRKIKGQIRLIYNQLLERFEIHFLVDYGTIEIPDDRQSRAKGDRRSIGVDKGYTEAFYDSNGQAHGKNLGKTATNKSDRICAKNRNRGKLWALHRKLEKIDPAKSARILENNLTRKTENRRYRKNQSELTAIIGAASKSLFNGESLKVFAEDLTRPIKNKRQSKAMSRKLNSWMKGQMRDSLQKWADWTGSVVTEVQPSYTSQVDSVTGTLLGKRSGDSFTRFNGVVLQADHNAAKNILVRGTDKEISRYMNKTEVQAVLLRRTARFLKGMGLSLADAVELGWLDSKHSKTRAFKELLIGI

SEQ ID NO: 7881 - protein, 379 aa, Escherichia sp.
  misc_feature (332)..(365): Xaa can be any naturally occurring amino acid
MHQENTMLPRRISVSLFIDQSIIWPVKRLQAFKFQLRPGGQQEREMRRFAGACRFVFNRALALQNENHEAGNKYIPYGKMASWLVEWKNATETQWLKDSPSQPLQQSLKGLERAYKNFFQKRAAFPRFKKRGQNDAFRYPQGVKLDQENSRIFLPKLGWMRYRNSRQVTGVVKNVTVSQSCGKWYISIQTESEVSTPVHPSASMIGLDAGVAKLATLSDGTVFEPVNSFQKNQKTLARLQRQLSRKVKFSNNWQKQKRKIQRLHSCIANIRRDYLHKVTTTVSKNHAMIVIEDLKVSNMSKSAAGTVSLPGRNVRAKSGLNRSILDQGWYEXXXXXXXXXXXXXXXXXXXXXXXXXXXXXXXXXXNSDARYVDIQRTPM

SEQ ID NO: 7882 - protein, 553 aa, Shigella sp.
  misc_feature (360)..(360): Xaa can be any naturally occurring amino acid
VKRLQAFKFQLRPGGQQEREMRRFAGACRFVFNRALARQNENHEAGNKYIPYGKMASWLVEWKNATETQWLKDAPSQPLQQSLKDLERAYKNFFQNRAAFPRFKKRGQNDVFRYPQGVKLDQENSRIFLPKLGWMRYRNSRQVTGVVKNVTVSQSCGKWYISIQTESEVSTPVHPSASMVGLDAGVAKLATLSDGTVFEPVNSFQKNQKKLARLQRQLSRKVKFSNNWQKQKRKIQRLHSCIANIRRDYLHKVTTTVSKNHAMIVIEDLKVSNMSKSAAGTVSQPGRNVRAKSGLNRSILDQGWYEMRRQLEYKQLWRGGQVLAVPPAYTSQRCACCGHTAKENRLSQSKFRCQVCGYTXTLARLQRQLSRKVKFSNNWQKQKRKIQRLHSCIANIRRDYLHKVTTAVSKNHAMIVIEDLKVSNMSKSAAGTVSQPGRNVRAKSGLNRSILDQGWYEMHRQLEYKQLWRGGQVLAVPPAYTSQRCAYCGHTAKENRLSQSKFRCQVCGYTANADVNGARNILAAGHAVLACGEMVQSGRPLKQEPTEMIQATA

SEQ ID NO: 7883 - protein, 273 aa, unknown
  TnpB Polypeptide
MARFEIPQGWTAQAYRFALDPRPTQLRALASHAGAARFAHNHMLALVKAVMDQRAAERSYGVTESELTPVLGWSLPALRKAWNQRKDWCAPWWGENSKEAYNTGLDGLARGLDAWSSSRCGRRAGKPVGFPRFKTARAPRSVRFTTGVIRIEADRRHISLPRLGAVRTHESNRKLARRVEAGSARILSATVRQDSAGRWYCALHTIVEAKARPAHVRRSAHPVVGVDVGVKADSLLVIATPDGTERACQVFCVSRLCDFPGGCRYRYGSMRSG

SEQ ID NO: 7884 - protein, 489 aa, unknown
  TnpB Polypeptide
LIIISSRNLKNNINKDNKFYLTVKQQVSKYKYKQLYILFKELCKYSKNLYNSALYNIRQYFFNTNKYLNYTNNYHSIKNDINYKLCEAQTACNILHIVDESFQSFFALKQKGLKCNIPKYLDKNDYFISSTNKIYINKNNEWIIPLSKLILKKYNLNSKSKDRFRIKIPTILKDKKIKYIQIVPKYKGKIFEIHYTYEIEINDNIRVNNNYLAIDLGVKNLMTCINYNHNSKKKINSFILDGKELKSINQGYNRIISKLQEKNINKNLRYTKKMYNILKKRNNKINYYIHKTCKKLIDYCLQNNIKTIILGWNNDFQRKANLGKKNNQFFTSIPFSKIKDNLEYRCKMNNINFILQEESFTSKASFLDNDYMLNYKKDEKLGYVLRTIDDKVELRKQQFTGERVKRGLYKSKNGILINSDMNGALNILKKYLLNEEYKQLNKCKVVSRKISYEDLIESQDIHNLYEDIFTLYFRGALVAPIRIRVRESI

SEQ ID NO: 7885 - protein, 485 aa, unknown
  TnpB Polypeptide
MNNKNKFYGIVKQQVTKKNLDIYNLFKELTHISKNLYNQALYIIRQEYFNNKKYLNYINLDKRLKNDENYKLLQSGCSQQILKIVDQNFKSFFSLLKMKKQGKIKNKINMPKYLDKEGYFKICDAEGMKHIHNLNDNLYWTIPMSKEFLKGGMILYDGSIVQSHERIKIQIPNILKDKNIKQIWIIPKHKGNYFEIQYVYEIKKRVNLKKKNNNLLSIDLGINNLCTCVSYKENDKNKFKSFILDGKKLKSINQFYNKQISKLQQLAAKDSKAPYYTKKMYNITKKRNNRINEIINKTCKYIINYCSKTKGLSELASHCLMNRIDTIILGYNENIKQNINIGKRNNQNFVNIPFYRIKENLRYRSELNNIELVIQEESYTSKANFIKNDYIPIYGKVKLKKDVYDENKKYKFSGSRPNRGKYIFNKTFIKFKVNYINADMNGSLNIMRKYLDKSKVINSLKLVKDFRYILYHRGVLLTPIRIRVK

SEQ ID NO: 7886 - protein, 498 aa, unknown
  TnpB Polypeptide
MSNNKKMDITYSIFKQKLTYKKYKQYFNILKEMLHYSKNLFNEALYILRQNFFDNQNKEKKDRKYISYYDLYNMLKNSNNYKYIQAACAQQILKIVYETFKSFVALKKKKIKCNMPRYLDKDGYFQLIDSEDDKRINKINNKLYYTIPMSYQFLKEHDLMKINDRIKIQIFHILENKKIRQIRITPKYKAKYIEIHYYFEKEKDQIDPLAQVKENNNFNILSIDLGINNLTTCTIYKPYEKLKNKFRAFIIDGKKLKSYNQWYNKRIKFLKKKLNEDKNKNNQIHYSKQMYNITYKRNNRIYDYINKTCNYIVKYCLQNDIHIIILGYNQGMKQNIDLGKKSNQKITNIPFYKLKEQLIYRCEEKNIKLIMQEESYTSKANFINNDYIFTYDKNALRTIKNKVELKKIIFSGIRRKGLYKTNNNIKINADVNGSLNIMRKALLNKEISNIISNVVNEEHLICGEQIIDKKILSRLKEDVKKILDIRGGLVTPIRIKLV

SEQ ID NO: 7887 - protein, 408 aa, unknown
  TnpB Polypeptide
LCEAQIACNILHIVDESFQSFFEVKQKGYKVNTPKYLDKNDYFILPTNKIHINKNNEWIIPLSYQMLKEYNLAPRSKDRFRIKIPTILKDKKIKYIQVVPKYKGKIFEIHYTYEIEINKNIQENNNYLSIDLGIKNLMTCISYNHNSKKEINSFILNGKELKSINQGYNRIISKLQKKNTNKKLRYTKKMYNILKKRNNKINYYIHKTCKKLIDYCLPNNIKTIILGWNNDFQRNSNLGKKNNQHFTSMPFRKLKDNLEYRCKINNINLILQEESFTSKASFLDNDYILSYKKDEKLGYVLRTTDDKVELKKQQFTGKRIKRGLYKSNNGILINADMNSALNILKKYLLNKEYEKIKQLNKYKVVDRRISYKDLINSQDIHNLYEDISILYSRGVLIAPRRIRVRESI

SEQ ID NO: 7888 - protein, 425 aa, Synechococcaceae sp.
MLNMTWEFKLEPTAAQVLEIEHILDVCRNVWNFALRERKDWLDSRRSPVNACSIRQEFILPADTPFPNYARQCKSLTKAKAGFPRLKTVNAQVLQQVIRKLEAAWESWRLKRSGFPRFKKANRMRSFLFPQMLENCITSEGIKLPQLGLVRVRWSRQIPDLFEVKQARMVRKASGYFVMLSLQANVNVPAPQPHGHPVGIDVGLEYFLSTSDGVQVKRPRFFNNLHRKLKLLQRRLKTKQKGSSNWLKLQKKIARVHQRITETRKEWHFKLAHRLCDNAGMVFVEDLDFCIMAKGMLGKHTLDAGLGRFTNQILPWVCFKRDVYYGKVDARGTSQECPDCGAEVRKDLSTRIHHCQPCGSIKPRDVASAQVISSRGQRQIENACGDVLAGVGVTVPTARWREQPSQVSVKQELFGATQRISLHAR

SEQ ID NO: 7889 - protein, 241 aa, Synechococcaceae sp.
VFTGSDWVWTTVQISRLRERHEVLGNKILSPYLIFNSKACHLSVPFECDPPKRQSDENVVAVDLGINTTATLTVVRFDGTVIHREFIHPGRDIDRRDKRLKSVSMRASKTMGQGGKLHKGFCSNTYRKRRNINSQISHLVSKRIAYIATQFNSKAIIFEKLKDWKATGGRKRSTLRQRFHGWLKATIRDDTEMKWREVGGQVIEVVAAYTSKLAYDGSGRLQRERTTPLQNLLLASDTTAI

SEQ ID NO: 7890 - protein, 372 aa, Lentibacillus sp.
MLVHKAYKFRLYPTQEQAILIHKTIGCSRFVFNHFLSTWDDTYQETGKGLSYGNCSARLPALKADFPWLKEVDSIALQSSLKSLTNAFDQFFQEQSNYPRFKSKNNQIQSYTTKYTNDNIRITGNKLILPKLGAVKFAKSREVTGRILNATIRRNPSGKYFVSILAETEVHELPKTEATVGIDLGLKDFAILSTGEVFGNQRFFHKLEQKLIKAQRIMSRRAEGGANWHKARIKVARIYEKLTNARMDFLHKLSSNIIKNHDVIGLEDLQVVNMLKNHRLAKAISDVSWSTFKDMLTYKAEWYGRQVVTVSKTFPSSQLCSNCEYKNKDVKDLSIREWTCPECGIHHDRDVNAARNIRREAIRLTAGTAGLA

SEQ ID NO: 7891 - protein, 405 aa, Methylotenera sp.
MLRLQAYKFELRPNGAQMRDMARTAGSCRYVYNRALAMKQAKYAESAENLRVFDLINAMKIWKDDEATSWLKDAPSQALQQSIKDMDRAYQNFFSKRAAFPRFKKKGMSCSFRFPQGVKLEQDNNRVFLPKLGWIHYRNSREVLGVIKNATVSCVNGKWYVSLQTEREVAEALHPATSSISIDLGVARFATMSDGSFLSPLDSFRKKQSKLARYQRAMARKVKFSKNWHKAKQRVSKLHTHIANARRDFLHKASATISKNHALVFVEDLKVANMSKSASGTMDAPGRSVRAKSGLNKAILDQGWFEFRRQLEYKLAWQGGQLVAVPPHYTSQTCPRCGHVARDNRKTQSVFACVDCGYTNNADVVGAMNIKAAGHAVLAYGELAQSGHSMKYEPAEVATQEPAHA

SEQ ID NO: 7892 - protein, 397 aa, Cyanobacteria sp.
MIVIEFKVKGKSNQYQAIDEAIQTAQFVRNKCLRYWMDNKGISRAELYRYNTQLRSEFPFVEALNSHACQASVERAWSAIARFFDNCKKQIPGKKGFPKFKKHSRSVEYKTSGWKLSEERKRITFTDGKQIGKLKLIGSRDLNFYQPDQIKRIRLVKRADGYYCQFCIQVDVLIETTPTQKAIGIDLGLKYFLADSQGNTEPVPQFYRKAEKQLNRANRKKSQKYRQGAKPQSNNYHKARVRYARKHLRVSRQREEYCKRLAYSAIQSNDLVAYEDLNVKGLVKNRHLAKSISDAGWATFRKWLEHFGRKYGKATVAVAPHYTSQHCSSCGETVNKSLSVRTHVCLHCGYGADRDHNAAINILQKGLRTLGHRGTSTLGEFDPLALLEQSCGVTVGR

SEQ ID NO: 7893 - protein, 430 aa, unknown
  TnpB Polypeptide
MVVLNRAIKYRLKPTKEQIIFFEKNFGCSRFVWNQMLSVFKENFNNHENVVIPTPASLKKDYPFLKEVDSLALSNIQQRFNQTKNQFFKSLKGERKGEKLGFPKFKSKRQLKKTYTTNNQSGTIAIQDNKIKLPKIGQVKAVIHRLPKEDWVLRSATISCDVDGCYYISILFDFEQKTELKSEVNSAIGIDYTSNGFGITNFGDQLKYSNHFYENQEKLALEQQKLSRKSLHSKSWCRQLKRINKIHKKISNQRKDFSHKLSYLLAEEFDLVAVEGMNMKNIAQSLNLGKATNDNGFGMFRGFLKYKLAERGKHYYEVNQFTPTSTVCSYCGAYHKDIVNSLAVRSWTCPDCGTHHDRDVNAAKNILQHGLNALNELEIKIELGQGRPEGYADFVREVREHLQTTDSLRAVEQTPLNKEKSSVRKSYFLE

SEQ ID NO: 7894 - protein, 368 aa, unknown
  TnpB Polypeptide
MIDLMKQVIVLKLDETPKQHKALLETVEAFNRGCDYVAEVAFEKRMANKIALQPFVYGTLRADYGLSSQMAVRCISKAVEAYKRGKNIQPTFAPHGAMIYDERIMSFQGVSHVSLLTLTGRELIPLRFGDYQATRIDRRKGQADLILRDGVFYLYVTIDLPTPPPIKPVGVLGIDLGITEIATDSEGNQYSGLVVKTVRQRVKEHRRHLQKRKTRSAYKRLQTTRRRQSRFVRDTNHKISKELVQRASVQSKALALEDLSGIRERANGFGRQVRWLLGNWSFDQLKQFLVYKAAAAGILVVFVDPRNTSRTCHACGHCAKENRKSQSKFLCLSCGLDMNADKNAALNIMARAELSGSLLFHSQPALLA

SEQ ID NO: 7895 - protein, 368 aa, unknown
  TnpB Polypeptide
MQIFKDMVNHCIRIGLENNVSTLKKLSLLSYHKLSEYNIQSKYKLTAISQACGRLSQMKRDIKKGRVVKSPFVQKPFLVSCYGFKINGMLLSFPIANKQFTNILLNNHTVQKLSENGIKPRSFTITPTSLSISVRKDIQEIKPQNVIGIDRNLRNVTISTPEQIIMYKTNKILSIKENTMHVIASFRRNDRRVKGRFYVQKRGRRSRRIQQYLHKISKDIVARAVQQKAMIVFEDLKGIRKLYRKGNGQGNKYRRKLNSWSFYELQRQVEYKARWEGIPVRYVNPRRTSMLCPVCGDRLQEDKQNRRKLLCSNCMKSMDRDVVASMNIAYKGWSRFCHPRGLPEEAVKGNVDKPLILRVDGSKFAVGL

SEQ ID NO: 7896 - protein, 508 aa, unknown
  TnpB Polypeptide
MRKTCLVKQVVRIRLYPNKTQQIWLDCNFQNAIDYHNYLLANIYEDDVEIDEETGEEKDVIRINWDTINSKYGLATLQSKFHYALRNVTEDRIRTDRNNLKITQYYRGRTIENIYDQVCNDVKKNFCTFYRDGKGKPRFKSNRGRVTFRMPQNSRDLHLVRRKDEMNHDNGFDFKINRIEKKHSSKLSHNLGWLHIPSCGAGNDNADDFIKCFAPCNISKEDISSITFIREASGKYYATIVLRIGRVYLFKKQALDDMLCEKQVGVDINLSPKTRVVTSTFQGDVTEFKFEQKEEIIQAPTPYKDYFSKLRKEQRSLSRKVKFSKNWFKQKQKVAHIHEKIANIRLNFNRQTAAYLTKNYQSIAIEDLSITQMKRGQPRWFQKLYNDANLYQLRQCIRWSCLKTGRELNYVSPEHTSKTCHDCWYTNHDLKLGQSSWVCPNCGVIHHRDRNAARNIYSLAWAYDEVEGELLENQVTYDPFEERQPVNNLYFLENLSKRIGEEVTTVSA

SEQ ID NO: 7897 - protein, 537 aa, unknown
  TnpB Polypeptide
MADRYEFLQIVDNVLYYKNFGYDSKLNVLHYLLNAITLQHELLPIFHKVSSEEGFYSIYCTLNSKYYNVFLNGHRQKLLVSNGKKRFLNQIMGNCRLLYNRMVARNNYCIDHKEDTFVKKYAEYTNRGYKNYHDGYTLQYGEYLTYGRYDKKTESYSLLVSYPKEETFFNGYSSMYYNCVLQHFLEARNRAFKGLGKRPTFKSKHGSQSCQLSCNCSTDSYGYKNFNYFQLFSVGYNMHDYSGSNRTKVAKLFRVNEENNWRKPRCQHRLGLNLNKSCTTIQSRDKSYEINTLTFTMSKNRKPVSAYLKDDNFGAKTVTITREPNGKYYVSFPVWDCVEVPEPNDNVVAFDFGVKTFLTYSDGSTEEMPKFFDVYKKHLDRVNTALQGTTKNSKKHKKLQCKLANIHAKIKNSRRNFHHQLTHKMVSENQVIISEDLDIKEMLQNKSLPAEFHRHVADASWYEFTRQLEYKSKRYGRTYIKVPRHFASSQICSKCGKIHTEMKDLSNRQMICSCGNNIDRDHNAAINIEQLGLLMIS

SEQ ID NO: 7898 - protein, 404 aa, unknown
  TnpB Polypeptide
MNMRTYRYRIYPTRKQKTLLTNQMILAKTVYNILLHDSKQHYRTTGRTFTRNMMNIRLTKLKKEHPELASLHSQVLQNISDRVWKAYQNFFRRIKERKKGKKIKVGFPRIKKFVVSLTYPQSGFKLNGARLCLSKTGAVPIVLHRPIEGEVKTLTIKCTKSWDWYATLTAENGGTLVDPNGKPSVGIDLGLTNYATLSNGTIIQNMRFSKQNSAKARRLQRQISRKMKGSRNRRKAVLRFARFSNHTAQQRHDFLHKLSHQLVNSYGLIAYENLSIGNMVKNHRLAGAIQDAGWGGFASMLSYKAGKAGCRAIEVNPQDTTTTCSNCGAKHPMPLSKRTYKCGQCGLSLDRDLNSAKVILARGLSTVGQTGIHACEEAVSTFDPSKASGFIEAGTIRERNVHAQ

SEQ ID NO: 7899 - protein, 352 aa, Deinococcus sp.
MSHTDPDRYVTRLFRTDYPILQGLVASGRLRRVAVSLPGWGKATVFEPLVPVSVHGDHLLRLGHADLKAQIYALPSAAYAAVLRASGDYRQPDGIARLQACFDAPKIDAATFRAELRASLARPLILDSTPHLATADHGGCHATWRPGRTLIIQSGGDWFLALAFSLGVRVTRSPSTSVFGVDLNADPALCIAYSAGVARMIGPRHALLDCLRREHRDRPLSPEEVRVVRALGYASGRVPLEGALRDMLSRAAVVGIEKLDTRQLYATFVERSREQAALDWHVSWLPQALYRAGIRLHRVDPAFSTQACHRHPSHLGIVRGRTFDCPLCTELQHRDANAALNIRARTVIAHRR

SEQ ID NO: 7900 - protein, 428 aa, Streptomyces sp.
MAVLAIVSRDTLVKRQFGHRARLALSPAEVSRIAGQAHAARTLWNLLHAWWQMMPKEKRSLQHADAAIRQARKDIDFLAVLPAQAAQAVLKTYFRAWQNCWEHRADAPNFKGRIRTVMSVDIPQGRDLHIVRVHRRWGQVNIPKVGRVRFRWTKDLPVGKRATAENRITGARLVKDALGWHIAFRVQALEVEPGPHQGPDVGITVPLACSNGETYEHGAWLTPKEKARLLHLEQRAARRKQHRRPGERTSGRLHRTYDRIAGLRAKAKRRALDWQHKTTTTIARTYNAVVVEALTIPNMVKSARGTIETPGRNVARKSGLNRAISGEAWGRTVTLLTYKTARYGGTLVKVPAPHTSRRCSACGFTTPGSRESQAVFVCRNPDCGWSGNADHNAARNVLHLYRMGLALVPAAGRAVVRRAQRVKPAAAR

SEQ ID NO: 7901 - protein, 405 aa, unknown
  TnpB Polypeptide
MKLSLQVRLYPNKTMKRILDSLCDYRRYCWNEALSCWNEQYEARLIGLPKYLRDKLSNKAENLTDEEKDLVTQYPRSSHYSVRNELVANKEDWQYALSSRVLQLAIKDVATAWGRFFDSSITAGRPTFKTRKAPKQGFKTDRARIQNGRLLLDKPHGYRGSWQTIRFKGLDIPDGNITLCAITRVNGRYTATFTIEVEPVQLQRTDRKTAVDANIDHFDTTEGRTTLNREVLNPLYERVRHYHRILARKRHRNPGAIHSKGYQATRTKLQRTYERIANIQKDLLHKFTTSLCQQFDTVVIEDLNVRQMQMSKRVKNLHRSMFGRFRQMMKYKSQKFGKTLIIADKYYPSTQRCSACGFVKTGDDKITLRGNLKHGTRHDEYICYHCNYRDDRDHNAVLNLLALAK

SEQ ID NO: 7902 - protein, 252 aa, unknown
  TnpB Polypeptide
VFKIKLLHNKDYIRNFNGKKWYEVIISIDKRSRIWISIPFRWMYKPYKLRRLVSLDINLRKIVVYSGRGIRRVDTRYIDALSLKIHAEKLQKKYTKIWRHNERILGRVRSLHRRSRNIVIDWSRKFAKYIVLKAKRTKCAIVLEDLNKLWFNVSQKSSSLADKLSRFAYHKLQQAIITKAIEYNVPIIFVDPRNTSMICPRCRAKLVYNHRLAICRKCGFIGDRDTVGAVNIYLRTHRRMSPSKGEGGMLPQ

SEQ ID NO: 7903 - protein, 363 aa, Exiguobacterium sp.
MLKGYKYRLHPTAAQAEFLIKTIGCARFIYNKLLEDHITIHEEAKASGGPKRKPPTPASYKPLFPFLCEADSLALANAKLHLDAAFARFFAGTAGFPVFKSRRRSRASYTTNNQHGTIRIEAGKVRLPKVGFIRFTQHRGFDGEIRSATVSMTRTGRFFVSLLVEQADEPWVPAEHKIGIDLGLEHFATMTNDDLVTEKIPNPRNLRKAEARLKRAQRALARKKPGSRNREKARLLLAKRHEQVRNRRYDFLHKLSRRIVDENQVVVVETLRTREMMQDRRLSKSIGDAGWGEFVRQLEYKARFYGRTLVKADPWFASTQVCSACGENGGKKDLQTREWTCAACGAHHDRDVNASLNLLYLAD

SEQ ID NO: 7904 - protein, 403 aa, Microcoleus sp.
MYQAHKLRIYPTTEQQIYFAGAFGCCRWFWNYSLNLCQETYQNTGKGLTRGAIQGLLPHLKKEYPWLSNAYSQCLQVVALNLSTAYKNFFDKRAGYPSFKSKHGRQSISYPQNVKLGDSSIKLPIIGEVHCRIHRKIEGTIKTVTISKNTDGNYYACVLVDDGQETPEGRANGKAIGLDVGLIDFCVTSDGSKYANPKHLKQHSRNLKRKQQKLSRKEKGSNRRNKARRLVAKVHSKIKRVREDFLHKLSRKIVNENQVIAVENLNIKGMVRNHCLAKEISDAGWGMFGTMLKYKAKKVGKLYIEIDRFFPSSKTCNNCLHKVSSMPLNVRHWNCHKCGSCNDRDINAAKNIRDEALRIWALGTSASASGGNVSRGGKPSVLSDAIPVETGSSQHSGTPLADE

SEQ ID NO: 7905 - protein, 390 aa, Microcoleus sp.
MTQKAFKYRFYPTQSQENLLRRTMGCARLVYNKALALRTEAWYERQERVGYTETSAMLTEWKKQEDLQFLNEVSCVPVQQGLRHLQTAFTNFFAGRAKYPNFKKKHNGGNAEFTKSAFKWKNGQVYLAKCTEPLPIRWSREIPKNTEPSTITVKLAPSGRWTVSLLVDIEIEALPESPNQIGLDLGITSLIAMSNGEKVANPKGFKAKRHKLRQAQKALSRKKKGSNNRHKARLKVARVHAEISDARKDFLHKLTTQLVRENQTIAVEDLAVKNMVKNHKLALAISDASWGELVRQLEYKCGWYGRTFVKIDRWFPSSKRCGLCGHVVEKLPLNVREWKCPKCGTNHDRDINAARNILAAGLAVSVCGATVRPEQSKSVKASARKQKPKL

SEQ ID NO: 7906 - protein, 387 aa, Mycobacterium sp.
MNLTAAHTRLWGPAFRIRRANRTRELTWYSTGDLQQMLAYLDVLAADRSALVAVTHPDGKVSLIKGLGDPQAARVWLLQALTGRRASEILMLDYDPLQPIPGAERPTDSDDPDAFVAKLRYQQTKVDGVVPTILVEQAVVNVMGCVKTIQVKRQGRRWMLVLSCDDVPSDPLPTTGRQAGIDVGIASFATTSDGEHIDNPRWGRNAGDRLAAAQQRLQRAKRRSKNRERKRETVAARHRKIANQRKDFHHKQARTLVARYDLLAVEGLTITNMLRRAKPVPDPDNPGQYLANGAAAKSGLSRSISDAGWGRFVSILRAKAEEAGRIWIEVDPRHTSDGCEKCGYAAAENRVTQADFVCQRCSHRAHADEMAARNILRAGLALHAQAA

SEQ ID NO: 7907 - protein, 285 aa, Cyanobacteria sp.
  misc_feature (285)..(285): Xaa can be any naturally occurring amino acid
MLLGFKTELKVNNKQQTQLAKHCGVARHAWNWGLALTKNILDHNKTNPEDRIKFPSAIDLHKWLVAMVKPECPWYYEVSKCAPQYALRQLSEAWKQAFQKIKQPPRFKKKGRGDSFTVDGSLTVDHFRVKVPVIGWLKTYERLPVDQKPKSLTISRTADRWFVSWKIEVEPINQAKSMSVVGVDLGIKALVTLSTGEVMTGAKSYRKYEKKLSRLQWLNRNKVKSSNNWKKTQIQIARLHRKVANIRKDTLHKLTSYLAKNHGRIGIEDLNVSGMLANHKLAKAX

SEQ ID NO: 7908 - protein, 389 aa, unknown
  TnpB Polypeptide
VARIVKRAYKYRFYPTGEQAEELLRTFGCVRLVYNKALEERTRAYTMQGRRVSYAETSAMLTAWKRTQELAFLGEVSSVPLQQALRHLQAAFVHFFAKRAEYPTFKSRKKSRASAEYTRSAFRWRNGRLYLAKMDGPLNIVWSRPLPEGAEPSTVTVSRDNAGRWFVSILVEEKIRPLPPVEPAVGVDAGVTALVTLSTGEKIVNPQYERRERRRLAKAQRALSRKAPGSKNREKARRRVARIHARIADRRRDFLHKLSTRLVRENQTVVIEDLTVRTMVRNRSLARSISDAAWRGLRSMLEYKCDWYGRNLLVVDRWFPSSKLCSACGALRDTMPLNVRRWECACGAVHDRDVNAARNILAAGLAERRNACGAGVRPQESPLGRGDWL

SEQ ID NO: 7909 - protein, 399 aa, Acidimicrobiaceae sp.
MSEKPFRRCRTFKYRLHPTKHQEQALTRLLSFQRELYNAALEERIGAWKWEKRSVTFFDQCQTLSTLKDVRPEVLEAGVTLCRGTLQRVDRAYAAFFRRVRRGETPGFPRFKGAARFDSLEWGDRSGWKLTEEHRLRLLGVRVVTMNYHRPLAGTPKAITVKREGRKWWVSIRCVDVPAQPLAPTGRAVGLDLGIVNLLATSEGQLVDPERFAKRGRERLALAQRSLATKQRGSNRRARHVEEVARLHRKVRNQRSNAHHQLSRRLVNESDLIVVEDLRIKNMVRSPKPKPDPSDPSSFLPNGAAAKAGLNHSISDAGWGLLLSRIAYKAEEAGRTVVTVDPRYTSQRCVVCNHVAPSNRVSQAVFRCQRCGHEDHADVNAACNILWAGRAQLAVASVG

SEQ ID NO: 7910 - protein, 404 aa, Campylobacter sp.
MSKTNTICNTIRSVKFVLKPNSKQKEILELFFGLSRTIYNISLHNIKNSKFGDYEIQNGKNKGNIVPRIPTEFDLNKSLPKLKEEHNFLSLLPNDYAQAVMKNLSRGFNNFYKTFNYPKFKAKKSSIQSFNCYAGSRIKIDGDYIILIKPRCSDYTKEDLKIRFKSHKIKYNFDKVTGFTISRENNKYFISFTFHCNIASKETSGAVGIDLGIKDFAICSDGVIFENKRFLEKSLRKLKISQRKLSKKQKGSNNREKARLKLSKLHKKVKNQRNDYQHKVSREIADKYRTICLETLKVKNMVKNKKLAKYISDVSWSSFIEKLSYKVAENQGCLVKIDTYYPSSKTCSNCGCIKESLKLAERTYHCEECVFETDRDLNASINILNLGLKNIVATVTTTGTTLKN

SEQ ID NO: 7911 - protein, 443 aa, unknown
  TnpB Polypeptide
LIPTVTQAYRFSLDPTPAQRRALASHCGAARVAYNWGRGLVQARLQQGRAGKVVEVPWTLPALRREWNRTKHQVAPWWAENSKEAYSSGLDGLARALANWVASRNGQRRGRPMGFPRAKKKGRSRDACRFTTGQIKVLSDRKHIQLPRIGVLKTHESTRKLARRLEHGTARILAATITRTADHWFVSFTVEVERAIPTGNGNAGVVGVDVGIRHLAVLSTGLTIANPRALERSLHKLRRLNRELARRKPNSKRRNQSRRRLARTHARAANIRQDALHKLTTALAVEQGTVVVEHLNVAGMVRNRRLARAISDTGIGQLRRLLAYKTAWYGSRLVVADPFFPSSKTCSGCGWVKAKLTLAERTFRCEACGLVIDRDLNAARNLAKLVDHVARSGRETPNARGADRRTQQAGQVAMKREAGTGRCPDQTGTVGAQALAARPVVSP

SEQ ID NO: 7912 - protein, 293 aa, unknown
  TnpB Polypeptide
VILPYQGHAKHIAWLQAGAIMCGAKLWYDQVHKRFYLLVSLTIETPDPTPTDQKQIMGVDVGQRYLATVATLGNGAQFYSGKEVRSQSDHYARIQKRLQQKGTRSATRRRIAIGQRERRLKLNTNHTISKHLLDTHPHALIGLEDLSGIRERTKRKHGKKASLKQRTANRHASSWAFAELHAFIGYKAQQAGSVCIKADADYTSQACPKCGFTSKGNRPQKGLLFVCQNCHYTLHTDLVGARNISLRTLVIRQAWMATGQLSGAPDVTDREAKAARLARYAELRWSPVTSPLL

SEQ ID NO: 7913 - protein, 432 aa, Lactobacillus sp.
MTEQVKEAPAELIQTRVYELRPNKTMRKVLDEACDYRRYCWNQGLALWNEMYKARQTLKSSLSTDSKKLTEEQKVLLKDKPSPSERRVRNMLVADKKDWQYTQSARILQLAISDLGKAWNNFFDKAQPGWGKPKFRSKREARQGFKSDQSKIKDGILYLERAKESSVPKDQWRGFKLSEKPLSDEFGVVSYFKEKGRYYVAIPYKIKAEDIKLPDKTGKATAVDVNVGHFDYTGGRMNVLPKKLDKIYGKIKHYQRQLAKKQVKNGEAACESENYLKTKAKLQACYRKASNIQNDLMQKFTTELVNNYDKIVIENLSVKGMLMSHVASKGVHRSMFGKFKQFLTYKCDWYGKELILANNLYPSTQRCAACGNVKKGDDKITLYGNKKHGTKHNEYVCYNQKCPNYNKVVDRDKNAMLSLLALTEHPELNHAL

SEQ ID NO: 7914 - protein, 410 aa, Thermococcus sp.
MKRAKNETVVRAYSIPLQADETILEFIEEYHRMAKVVLQEILNAGKFTKVERKELRDNLLKDWSYAAHYVDSAINQMLGLVKSYRRKLKKGKKVRKPRLRKKFVYVKSTLFTLKGSTLKITIIPRKHYLEINLTNYLFILPFLKEIWAGRLKLGGLFLFPNKLVLNFVKTVEYLEPRDWMSVDINLTNVTVLAGLTVYRFDTRELYHIHRVYEEKRQKIQKISAWNKRLSEELLKKYSSRERNRAKDFLHKLANKIVEIAREKQVGIILEDLNGIKERVLKGSKSSNRKLSKWNARELQRLIEYKAKWLGVPVVYVNPKNSSKTCPVCGGWLIPQEGRLMKCSCGFVEDRDFIAVLNLRMWGSGVTPKGLEVSRASTPNEGPMKTNPYGIMAIEKQRIGIKFYEITLTSP

SEQ ID NO: 7915 - protein, 349 aa, Thermococcus sp.
MKRTVTVKLQASKQVERILFELADIGAKVWNEVNYLRRQQFFNHEKVDFNKTEKIVYEKYKGEIGSATVQQICRKNAESWKSFFFLIKKKKRGELPKWLKPKPPNYQKEDGKRKPLIVLRNDQYMIVGNKLILKGLGKYRKLEVQFKGRIHWKGKQGRLEIIYDDARKKFYAHITFHVEEKLSKNGWVKIPRQPKGNLTAGIDLGVNNLMAVYVENGESFLINGRPLKSIAFYWQKKISEYQSKINKSGVKRSRKLKRMHEKAKLQAKHYINTAVRQTVERLYKLGVSKIVVGYPKEIARNSNKGRKQNFILSHVWRFNTVIQRLKEVSEDLEKGRENHNPEPVGFIGR

SEQ ID NO: 7916 - protein, 371 aa, Romboutsia sp.
MILAKKVRLYPSEIQEQKLWKSVGTARFIYNWTLAKQEDNYKNGGKFIPDGFLRKEITQLKKNELSWLNEVSNNVAKQAVKDACDAYKRFFKGLSDKPRFKSKRKSKKSFYNDNIKLKVKEGKLVNIEKVGWIKTNEQLPIGVKYSNPRISYDNKYWYISVCIEQYEIQEELTDVSLGVDLGLKDLAICSDGTVYKNINKNYGVRKIEKRLQRLQRQVSRKYEKNKKGKEYVKTKNIVKLERQIQQIHRRLANIRNNYLHQTTTSIVKAKPYRVVIEDLDVSNMMKNKHLSDAIRKQGFYEFKRQLEYKCKFRGIELVVADRFYPSSKTCSHCGEIKKDLKLKDRVYKCRCGFTIDRDLNASINLSKYKLA

SEQ ID NO: 7917 - protein, 402 aa, unknown
  TnpB Polypeptide
VMALDNIFVDFEHFRLSLSDKEKLKLDKEFNFLERLVKFLTRKVETKFKIKKGMTVSPSSLRPFVYGILKRFKESERYDFSNYSYLDHFEFAAQQIFSRYETKKEKEGVLLHNFAFYNKVSIIRFNRDSFKFYWQEIEFLKSKIKGRIHPKNKNFRNFRYLYVERRNNQYYLFGQTYKEKSNEAKEEIEASIVISDFSAIKIYDSNNNFTTYNINLSRESYNVDRLSKIITYHNQTLKNNGGIISNNIVRLEKKIDDIYEKLRLKMRAKYTQVIIGIVQKYEYISIEKPANLNFSSKYSSSKVIESFLINEFYKSLKHYGEKYRCKLIYVDLGYSIKKICHKCGSFIFKDNGQAIVHCECGAVFDEDLNAAMNLLSYLINKCGLKNRLLFKQENASQLSLFG

SEQ ID NO: 7918 - protein, 471 aa, unknown
  TnpB Polypeptide
MSSSKFRVWLNHEYLPQYPEYLWIKEAYSKAVTQAVNHGQTAFKKFFNHESAFPKFKKKGRSDVKMYFVKNNPKDCRCERHRINIPSLGWVRIKEKGYIPTTKEGYIIKSGHVSMKAGRYYVSALIEIPDNKTADPSNEGIGIDLGLKDFAIVSNGKTYKNINKSARLKKLEKRLVREQRCLSRKYENLKKGESTQRANIQKQKLKVQKLHHKIDNIRTDYSKLRHLIRIDKTFGVNTSVIQQIVTEGSITAQISTSFPAEKLTDTENFKSLLFYFGMLSIQGTDFGSAILGIPNLTVREQLYTYLVEAYREAKMFDLDLSSFSGLVKGMALRGEWEAVFRFFARELERQSAIREFIDGEAHVKGFLLAYLGLTQGYVLFPEHESSKGYADFYMMPDLLHQPDIAYSYIVEVKYTKRDASEGEIASLKKEAAEQLVRYAADEKVLRTKGGTKLELITLVFKGWELIIAEKL

SEQ ID NO: 7919 - protein, 370 aa, unknown
  TnpB Polypeptide
MEADIIAAVAKVKLSIGEGSLRIVYGDHEFPVVVRNPNTQTGRYQQEALKCGVKYCRITRKWVRNKWKYYAQLVLEGYPPVKCDSNGVMRHPVNQGRVGLDIGTQTLAISSNDICDLRVLAPSARAQAKSLVNEITCTMRAMDRSRRATNPKYYNPNGTIKRLKRKHGQKQKRKWKYSKRYYRLRAKLRNLYRKLADIRKMEHNILANELLAYGNEFVVEDMNYKALQKRSKETKINAKTGRAHTKKRFGKSLSRCAPAMFISILNKKANRYGGSVIKVSTFETKASQFDHTDESYTKKRLSERMAHLSSGEVVQRDLYSAFLLEHIDIESLQYNMETLNSAFPAFLEMHENTKRRLQAVGSSLPASIGF

SEQ ID NO: 7920 - protein, 410 aa, unknown
  TnpB Polypeptide
MITKSYKIRLIPTEEQEKLLQKHVDAMRFVWNWGLALNMERFKQGEKHLNNAGMGKILTDLKNNDDNFKWLNEVSLHTLKMALIDLENAYQKFFTLQKKGEKFSKAKIKRAQRLKKKLTPYDMKGHPKFKSRLKAKPKFYARYESIYLTTESVNIEKIGKVKYKTNYDLPAVSKKRENATKYINPRIKFVNSKWILSFGIEYESTKKELNNFSVGIDLGVKDLAVISYSNGEKSKSFKNINKSKRVRRLKKRLKQKQRNVSRKYKQNGNYGKTAHILKEEAKVNKLHLKLANIRHNYTHHVTTEIINLNPSKIVLEDLNVTGMMKNKHLSEAIQEQNLNEFRRQIEYKSEWAGIEIVYADRFYPSSKKCSVCGAIKQDLKLKDRVYKCEECGTVIDRDLNAAKNLEKLAC

SEQ ID NO: 7921 - protein, 394 aa, unknown
  TnpB Polypeptide
MFQSRKVRLKPNKAQAEFFRQNFGAARFVYNWGLEQLTKHWEENKDKEKKDREKWPLIHLKSTEEKYVWLSTVDSQLFKYVFANLDNAFKRFFTGQAKYPKFKSKRDSRQSYSTKNGKVPRLKDSNHILLPKIGSVKFYNRNYLPEVEYKRATISTDGDYFYCSVLLEGEPKELPEPLHESVGIDLGVKTAVTTSHGTTFHLKRNHRLERRLKRAQRIVSRRKKDSRRRLKARKRLRNLYRKISNQRNDFINKTTSTLVSENQVIRMEDLNTKGMMKNHCLAASIAHASFFEIKRQLSYKCEWYGRSLQLVSRFYPSSQLCSHCGARNKEMKNLNKRTFTCPECGFTLDRDLNAAININNFCTRREWETGIKANDRRDSSSAKRRYSLSSVANR

SEQ ID NO: 7922 - protein, 412 aa, unknown
  TnpB Polypeptide
VEDVETRERIWVDVPLGGADVKPAVKDSQARLDCLWLACIPSPILSSCERVENTGWFAGLKRKKTSGGQVPGFRSRHKAPQYFVCWRNQSKTGNALYRRTGKRTGVVVITGSVARQYRREGENEARWRIAIHVRVSQPVREYTSVAVNWTNRTLVFTNSPLPISRTDTGMMVGLDRGCVHTLATSDNIFLDIPQPSVKEMDEYKRLQRKLARQDRTNEKRGGRNAKFTSKSRKRTLQAMRRIQRRIDNRKDDWIAKTTTTLVREYDFIAMERLNVKAMSRSVRPKPDPDNPGHYLHNGRKRKSGLNRSVLANRWTGILHCLEYKTKLAGTRLVQVPAYDTSRICNVCGYCGKNNRESQAVFHCHNCGHETNADVNASKNILDRALGTNGMDDAEEWRQQASTLVKTSGEQRR

SEQ ID NO: 7923 - protein, 472 aa, unknown
  TnpB Polypeptide
MRKQRRKRVKKGETQRITKAVTHIRLAETNQGKLAALDQLAHVFLPLVQQYVILFCTDEMPDAFYAPCFPTELSERWHRVVIQQAAGIAKSWRTNRANAYQSYLDELAEYQELQAKSEGENGAEEPTWREWDVPTLRETCIQGNYNVIKLEPSTDSCFDYWLKVSTLDKGHPLLVPVKLAEYHIEALTNPKTKQRHPINSGVILNRRDNAWWLTLSYDEVVKVETKPDAPVIGIDVGIANFITTSDGKQYGTFNGKLRERQKRDREKRRRKAKLRSCLEKKGMPKDKLPSTSSVTGQRLMRHVKQSINRAVNLCFEEHEGCQFAYEQLSVASMRFKARSMNAYMRASNLGHIPDQIAWNASKRGVAATRVKSAYSSQECSQCHYVDRKNRPNQQTFCCIVCQFTTHADRNASVNIAARLHDEELRACESRAIIKALLLRRHEQWKQKFSLVVVQAPVQLSLWASSPTSTDVG

SEQ ID NO: 7924 - protein, 361 aa, Paenibacillus sp.
MQRTYKFRLYPTKEEQGYIHFALERCRLLYNRLLAERIAAYEQTGQSLTYYEQKATLPKRKRYIPELKNIHSQVLQNVVERLDKAYQAFFRRVKNGEKAGFPRFKPESQYNSFTYPQSGFSIEGKQLVLSKIGDVRIRLHRQPQGTIKTCTIMVKNGKYYACFSCEVESKHLPASEKQIGIDLGVSQLAVTSDGERIESPKFLRKSEEKLKRKQRAVSKKKRGSNRRRKAVRDLARLHEKVANQRKNYAHKESRKLINKYGLIAFEDLNIQGMVKNHHLAKSIADSGWNQLIQFVTYKAESAGRQVVQVNPSGTSQRCSNCGEIVKKSLAVRVHQCPCGYVADRDENAAINILKLALQNVS

SEQ ID NO: 7925 - protein, 496 aa, Streptomyces sp.
VAIRARLRVSPADAAVLTAVGTFLGSLASRDLAARCRQGAESDAACWAARKRELTGLSSARWAGSVTKAVDDQWALARRGQAAETGRLRGQIDRIAARLARPLGAKADKGAGLPRGYATRAEWHAKSRRLHALRTRLAVVEAEWAAGRVSVVRGGRKLARLRHHVDEAGLSRETWRARWRSARMFLTADGETGKRWGNETIRVTEEGQLSLRLPGALAHLANAPHGRYVLDAEVTFTHRAGEWNDRIAANRSVAYRIHHDVQRGRWYLTASWKRPLVAVLPLRAALTRGVVAVDMNDDHLAAWYLDVHGNPVGAPRRWFYDLSGSAEHRDAQIRHALTRLLHYAGRCGAAAIAIEDLAFTEGASRERYGRNKRLRRLLSRFPTDRLRRRLVAMAAERQVTIVAVDPAYTPRWGAQHWQRPLSTGTRRITRHDAAAVAIGRRALGQPIRRRTAPPPHDRRDRAGHRTVQAGPETRGREGPRPRPPDRGRDPCRPEAT

SEQ ID NO: 7926 - protein, 545 aa, Streptomyces sp.
VTSVRGLREVAAPFVVPGPAGVAVRDRLKGLTSDDEKVLRLVGDHLGTLASRDLRVRCADGLEHGAGRWAERKRELTGESSSRWAGSITKATQDQWGLARRAQAAHIHSLEAGIGTIRRRLSLPIGARGTKKAAGGYRSEQEWFAKSRRLRMLEDRLERARSDQEAGRVRVVRGGKRLLTTRHHLQQAQLTQQEWRRRWEASRRFLQADGESGKRYGNETIRVSPDGQVSIKLPAPLAHLANTVHGRYVLAACVRFAHRGETWRDRITANRAVAYRIHEDTDRGRWYLTASWTIPPARAVPLATARANGLIGVDTNADHLAAWRLDEHGNPVGAPRRFDYDLTGTAAYRDAQVRHALVRLLHWARRHHLAIAIEDLNFTAETTREKHGRHKRFRKLISNMPVSRLRARLASMAAELGIPLVAVDPAYTSRWGAKYWQKPLTSKNRKTTCHDAAAVAIGRRALGHPIRRRTTPPPHDQSDRAGHRTVQAAPDTPGREGPRPRTPGPWTRSVGAGRGANAGDQNTHHRSGCSAEHEFWQQDSLPPSL

SEQ ID NO: 7927 - protein, 362 aa, unknown
  TnpB Polypeptide
MNKSFEVRIYPNLIQQAQINKTFGSVRYIYNFMLNLKQKLYEFFKINITYNHMCKILTELKKRNLWLYEVDNKSLQQCLKDLDFAYQRFFNGAGYPNFKSKRGKNSYRTAGYLLLDQENKKIRIPKVGWIKFRDKSNFNGLTKINNITISKSASGKYYASISAEVDITAFAKTKKNCGIDLGLKDFCILNDGTKFANPRFLVNNEKRLRLLHKSLDRKIYGSKNYEKARIKLAKFYGYIANCRKDYLHKISTQLVKEYDIICTETLQVKEMLMKKDNTKDISDVSWYEFVRQLEYKCLWYDKTLSKIDTYYPSSQLCSNCGYKNPAIKNTKIREYDCPKCGVHHDRDVNAAINILNEGLRLI

SEQ ID NO: 7928 - protein, 666 aa, unknown
  TnpB Polypeptide
MEMRTVKHQLKPLTIEQKTKFLDVVHVYQFEKNYFSDQLLNRSHEITNIQSSYIQIRDKLVKNNYQSKYRLSSRLWKMALKEAYDLHIRTHEAQIALIKRKLNNNIYQYCNYELIKNLKLNQEEAKVTLLIFENFEKLLYFVTNSLFYNFKTFCRFEAEYFSKKFKTARIYQRAKIILLDFLKSKAVDKEVLTKEEAKQLKQLFESSELNCSNDSETLLKSYETLGSETTQLFNRLFEHYCHVLVKTIQTFRSYKPIQSQINSTITLDGGCYDLYSQYDEKAQKNRWFLDIMSIESGKRIKGLELTGFHHAKQIMKHRKSANLTLSFDPTDVAAGVSAHFTFPVRKKTKNKSYAHKLRSCSKVKQSEAQLKTLTTIGGDFGLTECFTFSDGWIAGRTQRDILKKIADNTKKAIEKIQLNSPKSKAYFGLEKNNPTNRRNHTRNCFNHNSDLKNININYRKRQQRYNSYLKNYKHQISSSIIEHFTTNNKYGGYGCVYENKELHVTLVFEDLNYINLGRSKDDKRQINLIKGVLTSLKEKIKLYNLPIKIEYVNPAYTSQSCPNCYYVDRNNRNSSQSNFRCLHCGFTANEDERYKELTRVIQVKHEGLPSEDDFIAACNIAERLSVLPSSIKLHQRKIKELLMEKHEQVKGYCKMFTSVDIKCCST

SEQ ID NO: 7929 - protein, 416 aa, Rhodococcus sp.
VRISPYSVIDQWHGVGVHLRYQYRLYPTVGQQWALARAFGCARVVFNDALATRERARRDELPYVTDAELSKALTAVKKTPERAWLGEVSSVVLQQALADLNTAYRNFFASVTGKRKGPRLGPPRFRSRRDHRQTIRFTKNAQFRITAAGKLRLPKIGDVPVRWSRDLPSDPSSVTIIKDTAGRYFASFVVETTDDPLPECESEIGIDLGLTTFAVLSNGKTITSPRFFRQAERRLRKAQQNLSRKEKGSKNRAKARMQVARAHARVRDARLDFAHKQAATLIRENQAVYVEDLCVSGLARTRLAKSVHDAGWGIFTRMLEDKAARYGRTFVKVDRWFPSSRTCSTCGRVDGPKPLSVREWICPCGAVHDRDLNAARNILAAGRAERLNACGAQVRPERVPAQRGEAGTPESVTRRW

SEQ ID NO: 7930 - protein, 389 aa, Coleofasciculus sp.
MVASKRNKNLMKRTARVYLNDLNVSKFLIVREFLGQCHSIMQYFVDLFWQRQDFSGKLADLPTVHRAKKKFGITTRLGQALAKQASECVFSVHQKQRKRKPQLKWHTVTLFYHFVTISPFKKKGFDWCVKLIGSGAPKLVIPLKSTSVINQRLAQGWQMSKTIRMGLKKGRLWIDFIFEKVRPPLKTQGRVVGMDSNYKNGVVFSDSQVVGQDIYQRIQEFKKRQKNTHAEIKSRLGQALKKVDLSSTKVLSIEDLKKVKQGKRGTFSRLFNRRLSHWLYRTLVQLLERKCEEEGIQLVVKDPFKTSQFCSNCNRWDRRNRKGDRFRCVHCGYQSHADHNAAHNRRAFRLGGSLWSPFLLKFKKSKFWITIETSLKPCWVITEVSTPIF

SEQ ID NO: 7931 - protein, 389 aa, Xenorhabdus sp.
MLRATKVRIYPTPEQAEFLHAQFGAVRFAYNKALHLKKHADRHDGVSLSPRKDLKPLLAVAKKSRKYGWLKEYDSIALQQAIINLDVAFSNFFNPKLKARFPAFKSKHGKQSSYHCVGVKVLDNAVKIPKMTPIDACIHRELTGKVKSITLSRTATGKYYAAILCDDEAEVPAKPSLITTVTGLDMGLSHYAIKSDGDKVANPRHLINASRNLRRKQKALSRKKKGSANRRKARIQLAGVHERVANARADFQHKLSRAIVDESQAVIVETLKSANMMKNHHLARVIGDAGWRGFISKLEYKAAEKGVHLVRLDQWFASSKTCHCCGYKMSEMPLNKRIWKCPECRVEHDRDINAAINIRQKGVQELQAAGLVVSAHGGPCKSVTQTVAA

SEQ ID NO: 7932 - protein, 391 aa, Xenorhabdus sp.
MLYAIRVRLYPNAEQREFFAKTFGCCRWVFNNALAFCQQQYEAGEKRSSAYDLMKRMTLLKNEYLWLVDADSQALKYACTCVDTAYKNFFRRVKHGETPGFPRFKSKHRGDATYTATAAASIQLTDRALKLPKAGWVCCRGFRPFEGKIKRATVRQTPTGKYYATVLIDDGRDFPAQPTIDLRPMGIDVGCKTEGDFHQFAALSTGEIVHSPAAYKQIQKCLRRAQRKLARKQKGSANRLKQKYWIARLYERVAAVRRDFLHKFTHRLTRENQAVAVEDLNVKGMMARPKPKQDENGNYIANGASRKSGLNRSLSSVSLGEFFRQLEYKSLWRGVVFLKIDRWAPSSKTCCRCGHVNNELTLSIRQWKCGACGAEHHRDVNAAINIAAMAV

SEQ ID NO: 7933 - protein, 510 aa, Chloroflexi sp.
VSCGENDKSVKTLEEEAVMSISAKQEARKKSRVSKNPAEPRHVTRAVTHIGLEATNVGKLTALERLSPVYMALCQQYVTLFCTEETPNKLRDPLYETELSERWHRVTIMQAAGIARSWRSNRTNALREYQREQERYEERLAEYIEQQACEELNHDEKAMKEPKEPVWKEWNMPVLQQWCIQANVNVAKLEASEDSSFDYWLKISTLERGKPLLVPVKLSQYHREALTDAKTGKRREINSSVTLNKQNGVWWLMLSYDDEIAVQAEPDAAVVGIDVGIVNFITTSTGKQYGTMHGKLKAKHKRDRGKRRRKAKLRACLKKKGVKKLPSTSSRTGQRLIRQTKQEINRAVNECFSDPDHKSVQFAYEQLSVATMKFKARSMNAYLRASNLAHIPRQIKWNAEKRGVLATPVMSAYSSQECSKCHYTDRANRPNQQTFCCKACGCEAHADHNAAVNLSRRVGDRALQACRDRKAIKALLLSRHEQWQQQHGKGESQPIKRKRRGKSSSSVSST

SEQ ID NO: 7934 - protein, 433 aa, Chloroflexi sp.
MSISAKQEARKKSRVSKNPAEPRHVTRAVTHIGLEATNVGKLTALERLSPVYMALCQQYVTLFCTEETPNKLRDPLYETELSERWHRVTIMQAAGIARSWRSNRTNALREYQREQERYEERLAEYIEQQACEELNHDEKAMKEPKEPVWKEWNMPVLQQWCIQANVNVAKLEASEDSSFDYWLKISTLERGKPLLVPVKLSQYHREALTDAKTGKRREINSSVTLNKQNGVWWLMLSYDDEIAVQAEPDAAVVGIDVGIVNFITTSTGKQYGTMHGKLKAKHKRDRGKRRRKAKLRACLKKKGVKKLPSTSSRTGQRLIRQTKQEINRAVNECFSDPDHKSVQFAYEQLSVATMKFKARSMNAYLRASNLAHIPRQIKWNAEKRGVLATPVMSAYSSQECSKCHYTDRANRPNQQTFCCKACGCEAHADHNAA

SEQ ID NO: 7935 - protein, 407 aa, Moorea sp.
VKHKAVKVRIYPNQEQVQILAQHFGCARWWWNYALNQCIETYKETGKGLKQSALNSMLPKLKKQEETKWLKDCYSQVLQSVSLNLSRAYQNFFEGRAEYPRFKSYHHRQSIQYPQNVKQVGNCLKFPGKLGIVKAIIHRSLDREIKTVTVSKTPSGKYYASVLMEYEGASVESSTSGKVIGIDLGIKDFAISYDGEKTSKFSNPKHLAKYEKKLAKKQRIAARKKKGSSGRKKARKIVAKVYDRIGNVRQDYLHKLSRKIVDQNQVVVVENLNVKGMVRNHKLAKAISDLGWGTFVNFLSYKCEKEGKVLVEIDRWFPSSKTCSNCHYRIKELPLDVRTWTCPSCGTSHDRDGNAAKNIRAEGIRMLSSSGTGEVNANGEQVRPRRGRPSKLRHSSVKLEATTSTFA

SEQ ID NO: 7936 - protein, 396 aa, unknown
  TnpB Polypeptide
VLRSYRYQLQPTAKQTHILAEWVERTRELYNASLQERRDAWRMSQAKVTLYDQMAELPGVREVRPEYQKIPIIVLRGALRRLDRAYQNFFRRCRSSEKPGYPRFRGRGRFDSILIDDLGKTNPLNGNRIAVPFLGTIKTRVHRPLGGIPKAMRLTRDAGGRWFITLACEDVPAKPLPATGLEVGIDLGLTSFIATSDGDNVPRQGMSRDQSRKIARAQRRVSRRKRGSARRRRAVRLLRKEHARVAARRRERSILLARALVAKYDRIYVENLNVRGLASGMLAKSVNDAAWGDFLHWLRVKAEEAGRKVVEVDPRGTSQICSGCGSVVKKTLADREHRCPNCGLVLDRDVNAAINILTAGRAVRGAAPLTRGRRRSAKSKSPRRSEHTENEVACGN

SEQ ID NO: 7937 - protein, 364 aa, Vibrio sp.
MSIQTKTLSVRVKDKHAKLLKQMAYEVNQVFNFANELTMKASRNYSEVGAVKPVWMSAYDTQKPVLKFRQESRFIIPSHTAQEVCAKHAQARKQFKRSKLRWRVSSGSKRSLGYVPFKKGSAKWKNGQVMFAKHHFSVWDSYGLSQYEFTSGSFSEDARGRWYFNVCVQVEQSPVTEGKAAIGIDLGLKDTATCSNGIKLERGNFYRDLESDLGIAQRANKKKRVRAIHAKIKNRRKDALHKFSTQLVNNNAAIFVGDVNSTKLVKTKMAKSVLDAGWSTLKTQLEYKAIARSVVFEEVNESYSTQTCSCCGAISPNSPKGRAGLRIREWVCSECGAEHDRDFNAAKNILAAGHRRLAVGIPSV

SEQ ID NO: 7938 - protein, 425 aa, unknown
  TnpB Polypeptide
MEYSPKYRLFPSTAQRESLDWTRDIVRQTYNHALHEFNKIPEEDGTLRQRVWQVRDDLPSLKQQWTDLKQVYSTVLQKAVERIRTNINNLGKLKAKGYEVGSLNWKKPREYRSFTYRQSGFELDKKSGLRDRAILRLKKVRGETLEIPIRLHRDLPEHDALTEVTVKKEPTGAWYASFCISTEEPEKPDVDDIDAEDTVGLDLGVIKFIHDSNGLPVDRLDLTDERERLEREQRALSRKQYESRNWEKQRRRVAEVHARMSNKKRDYKHKLAHFYATEYDAVFVEDLNVKAMLESDGNARNKAEVGWSDFRQILEHHCDKHGTHYIEVNPRGTTKECAECGCASEKPLWVREHSCPSCGFETDRDWNAALNVKSRGLSKLGVVHSKSTPVETVTAVDSAQRESVSASHVVEAGSSVLKEAASAAE

SEQ ID NO: 7939 - protein, 415 aa, unknown
  TnpB Polypeptide
MEYSHRYAAYPTQTVAAELERHIDIHRQAYNYTRYEYEHVESDNIGSAYKHHYRLPGWKDEFPVFSEVNSKALQRTVTRFYQNLSNLSEQKQNGNNVGRLKWKSPHDFKSMTFSQSGFELKNTSGRHATLELSKIGDVRIRYHRDIPDEADIKEVTVKKETTDEWFVSLGLETDDEDLPEKPDVDSLDTSNSIGIDLGILNYIHTTDGLSVNWLDLDEEYERLRREQRKLSRKQEGSNNWEKQRVEVAKVKRRIRRKVLDFQQKLTTWLVREYDAVFVEDLDVKPMLEQSHNARNKQDAAWRQFITLLEYKAELYGVHVEQVEPRGTTKECASCGCESEKPLWVREHSCPSCGFECDRDANAALNVLQRGFESLGLGWPESTLVETALPVGTTAVPAKRVVETGSPTLNEAKAVA

SEQ ID NO: 7940 - protein, 257 aa, unknown
  TnpB Polypeptide
VYYLHVTVKTEFTVPDAEDADTVVGVDINERNVALTALDRDTQDTLGTLVVDYGSVKAERQRYHTITKRCQEHGKTSIHHVLQDKEERYTEWVLHCLSRLIIEFAERFENPVIVFEDLSGIREEMQYGSYMNRRLHKLPFHKLEKQVQYKALWRGIPCDDVEAKYNSQRCSCCGENGNRQGRRFTCTDDACELSQDHADRNSSVNVAVRALVKYDALDNYQTRKTQPFVRKVSLSGSGRVNRPTASSELADRGVLAG

SEQ ID NO: 7941 - protein, 396 aa, unknown
  TnpB Polypeptide
VSRCRTYRYLLQPTGRQRAGLETLLSVQCELYNAALEERRGVWQWEQRSVSYFGQCRDLTGLRALRPEVLACGVTVCRGTLQRLDRAFAAFHRRCRGGQRPGYPRFKSVRRFDSVQWEATNGWSLKTEQRRLALFGIGHVKVHLHRPIRGTPKAITVRREGRRWWVSIRCVDVPATPLAPTGRSVGIDLGVCWQVATSDGLLIAADRPLRRSAERLADAQGHLATKRRGSGHRARAAARVAAIHRLVANQRKEVAHQLSRALVNQYDLIVHEDLRVTNLVRRPKPRKDEDGTYLANGAKAKGGLNRAIHDAGWGQLLSYLAYKVEETGRELIAVDPRYTSQRCSSCGHVEAANRCSQAVFRCLACGYQAQADLNAALNILWAGRAQRGLVPVEGRN

SEQ ID NO: 7942 - protein, 351 aa, Exiguobacterium sp.
  misc_feature (82)..(114): Xaa can be any naturally occurring amino acid
MLKGYKYRLHPTPAQAEFLVRTIGCARFIYNKLLEDRIAIREEAKAGSGTRQKPATPASYKPLFPFLAEADSLALANAKLNXXXXXXXXXXXXXXXXXXXXXXXXXXXXXXXXXRLPKVGFVRFTQHRPFEGVIRSATVSMTRTGKFFISILVDQEDAPWIPAENKVGIDLGLKHFAIMTNDAMVSEKIDNPRFLRQSEAKVKKAQRALSRKKIGSKNREKSKLLLAKRHEKIANQRKDFLHKLSRRIVDENQVIVVETLKSKGMMKDHKVAKSIADVSWYEFVRQLAYKSNFFGRTLIKADQWFASTQICSTCGVKGEKKAMDVREWTCACGAHHDRDINASINLLMLAD

SEQ ID NO: 7943 - protein, 396 aa, Exiguobacterium sp.
  misc_feature (339)..(377): Xaa can be any naturally occurring amino acid
VGDESPDPNVFSPCDRYHEQKFVITSDSPPPRGYRMRRTHHNLLKGGWTDMLKGYTYRLHPTPAQADFLVRTIGCTRFIYNKLLEDRIAIREEAKAGSGTRRKPATPASYKPLFPFLAEADSLALANAKLNLDTAFAKFFAGMGGFPAFKSRRRSRASYTTNNQHGTIRIEAGKVRLPKVGFVRFTQHRPFEGVIRSATVSMTRTGKFFVSILVKQDDAPWIPAKNKVGIDLGLEHFAVMTNDEMVSEKIENPRFLRKSEAKVKKAQRALSRKKIGSKNREKARLILAKRHEKIANQRKDFLHKLSRRIVDENQVIVVETLKSKDMMQNHKVAKSIGDXXXXXXXXXXXXXXXXXXXXXXXXXXXXXXXXXXXXXXXDAHQGGSMVRIDADLFFLW

SEQ ID NO: 7944 - protein, 340 aa, unknown
  TnpB Polypeptide
LNKLVLPIKYDGRAKELAYVSEALENRLCFCRLVHRTIKGKNRWYVQLVLEGLPPIKEKHKKLFKQAQGKKVGIDTGPSKCAFFGEEKDQQAYLTLAERVDYQWKEVRRLQRKLDRSRRAMNPQNYDHKGSIKRGQKLVWHKLNRYLKLQQEYREMERILTAMRFTSHGELTNIVLMMGDQVYLENVSYKAWQKLYGRSAKVRGAGMFQARVIRKALSAGGHVSLINTYTTKLSQYCHMRNDYVKKTLNDRVHVFPDGNTAHRDLYSAFLTTCVVNNDTLDKDEVNKKWKAVNSRLNNPISKQALFGRKIAQSSKRRLDYKSYSGEIIADTVETRSEASY

SEQ ID NO: 7945 - protein, 255 aa, Clostridium sp.
MYPPSLRAFRSADYCGYPVFQGYIVPEEPFLFSAALEEQPVPLLRSGRYFPSLFGREYLSLSYFYFYNKEIARVQSQWGWIQAAREMEDLKTSKHLQKLYRKKNDCIKDYIHKMTRCITNYCVKNDIHTVVIGDIKGIRKERNQGRKTNQKLHSLPYARIYMQLEYKLKMKGICLIRQEESYSSQCPPQSEKVSHIYAEKRNRKKRGICIVDAVIYNADAVGAYNILRKYHAVSGKEIDMPVTGLSSTKTIKVAV

SEQ ID NO: 7946 - protein, 187 aa, unknown
  TnpB Polypeptide
MLPIAIKTRHTEINQVRIVPRSGFYVIEVVYEHKQPKSAVDSASYAGIDIGIDNLAALTSNQPGFVPVLVNGRPMKSVNQFYNKRKADLQSKLGHTGTTRRMERLTTTRNRRIEHYLHTASRWIIDDLVTHGIGTLVIGKNDGWKQEVKMGKRTNQNFVAIPHARFIAMLTYKTELAGIRVMLTEES

SEQ ID NO: 7947 - protein, 358 aa, Bacillus sp.
MSQTITVKIKLLPTKEQASILREMSQTYISTINTLVSEMVAEKRSTRKSSKDISASLPSAVKNQAIKDAKSVFKKAKKNKFNVVPMLKKPVCIWNNQNYSFDFTHILMPIMIDGKAAKTPIRALLVDKDNRNFDLLKHKLGTLRITQKSGKWIAQISVTIPTSEKTGTKIMGVDLGLKVPAVAVTDDDKVRFFGNGRQNKYIKRKFRSERKALGKKKKLNAIRRSRDKEQRWMKDQDHKVSRAIVTFAIENKISVIRLEQLANIRQTARTSRKNEKNLHIWSFYRLSQFIEYKANLEGIKVEYVKPAYTSQTCPKCHEKNKAQDRKYKCKCGFEKHRDLVGAMNIRYAPVVDGNSQPA

SEQ ID NO: 7948 - protein, 451 aa, Halovenus sp.
MEHSHRYHTYPTQEVAERLEHHLNVHRQLYNHIRWDYENSPEDNKPSEYDQNNKLPEWKRKWPVFSELHSKAAQATVARFHRNLSNLRKKKEKGYNVGRLKRQSSTEYRSVTYNQSGFDLDEKRGRDRFAYVRFSKIGWVKIRYHRPIPDCASVKEVTFKKERTGEWFVSFGLETDDANLPEKPDVNSLDASDSVGIDLGIQNYIHTSDGKTVDWLDLEDEYERLRREQRKLSRKEEGSNNYEKQRREVAKVKRHIKRKVLDYQHKITTWLVREYDAVFVEDLNVKGMLEQSHNARNKQDAAWRQFITLIEYKADLHGCHVKQVEARGTTKECASCGVETAKPIWVREHSCPSCGFETDRDANAAMNVLQRGFSELGLGWPESTSSESQGDSDGLRKSPCDFRTPVETVTATDTADFQRVSASRVVETGSLGVVRKTKSSVMTRRSASRTT

SEQ ID NO: 7949 - protein, 397 aa, unknown
  TnpB Polypeptide
MRLTFRYRIKDKHARRLNEQARAVNFVWNYCNEVQRLALQRNLKWPTGYDLWKLVAGCTKAGLDLHSHSAMRVCLQYEKSRRQHRRPWLRWRSKRSLGWIPFNTGHVQFRDSSFVFRGERYDVFLHRPLPESAKIGAGSFSQDTRGRWYINCPVEVAEATQAPLKRVGLDLGVKDLATLSTGEKIEMPSFYRKSEEKLAKSQCARKTKRVCAIHAKVANRRKDFLHKASNKLARKYGLVVVGDVSPSKLAQTDMAKSVLDAGWSRFKDMLSWKLRLRSGGMLLEVSERFTTQICSECGCVPPSRPKGIADLGIREWTCSVCGTRHDRDVNAARNILRVGLHTLVEGAHPSCLKFGSHRLQAGEQSLGGGAVSAQTVAGPQHLRVGFAYMIPAWSSRG

SEQ ID NO: 7950 - protein, 488 aa, Variovorax sp.
LRRRDQNARQPRPSGRGRKAWTPQASLPVRRCSVCNGVAGISKRSVFATLRVALTPLHTVPHMSIDSALRAYRFQLRPRPAQERQLARYAGMLRWLWNRALAEQQARRERGEPYANYVAMAKWLTAWRNAPETQWLADGPVHPQQQVLKRLDATFQTFFANMKAGKKPGYPRFKKRGEEPGIRFPDNKQFKLEAANGRLQLPKLGWVRMRMSRTVEGDLRNASITREGDRWYVAIQTLQPAVLPAADVAPTLGIDVGVTNFAGLSDERLIASLAALAAQQRRLARYQRSVSRKQKASCNRKKAIVKLRALHRRIAQQRSDWLHKLTSGLAAEHPVIAIEDLRVVAMSASARGSADRPGRNVRQKAGLNRSILDAAWGEFRRQLEYKLAAVGGQLVDVNPAYTSRTCRICGHESADNRKTQSVFACVACGHTEHADINAARNILAAGHAVWASTLKPDACGGVVRRAASARTKRAAPAKQEPSEGVTCA

SEQ ID NO: 7951 - protein, 375 aa, unknown
  TnpB Polypeptide
LLKSFKFRLYPNKEQTILINKHLGSNRFIYNYFLDKRINTYKETKQTLTYNQCSSTLTILKKEFKWLKEIDSVSLQQTLKNLDMAYQNFFRKIKKGNKNHGFPKFKSKKDNNKSYRTQCKYRDNSVPSIEIKENKIKLPKIGLVKFVKSREIIGQIKNVTVSQVPSGKYFISILCEIPEPIKLLKTDKGIGIDLGIKDFAITSEAEIIDNPKYYRKYEDKLAKLQRQLSKKQKGSNNRNKTRLKVARLHEKIANTRTDFLQKLSTRLINENQIICLEDLNIEGMVKNHNLAKSIADASWSSFVTMLNYKSIWYGREISVVDRYFPSSKLCNVCGWKYVNLDLSVRNWICPECGSNHNRDVNAAINIFKEGLRLIS

SEQ ID NO: 7952 - protein, 392 aa, Aliterella sp.
MAELTLTLKLPFYRLNKVKALEFERLTAVNTQIANNLLEFDKKERKKLTSAAFKHIEIGSMWINQTIRNTNAKTKVKHFKRMWLEVNNQGYEVLKAGDLYTLCFSLYRGRKGRIPLEVHSASYSETLDKLIARKAKLGSLKICKSKKGIWYALVSVSMDVPDTMPVESWIGVDRGQNNIAVAALPKGFGKFWKGGRVKGLRRRFQRTRKKLQQAKQLKEVKRLEQRERRIMTHINHVISKELVQFAQDFEMGLQFEELSAIRQTSKQRKKTKSDAANNRDNWAFYQLEKFTRYKAIRAGVPVQSVPAPYTSKSDHRNGVIGKRNGDWFKGFDGYRCNADWNASQNIGQWCGFSCHLSLQSAVAAMVMADSEGAVNDSPQSSEASNRADSSPA

SEQ ID NO: 7953 - protein, 269 aa, Okeania sp.
MAQHAGYSRWCYNWGLSLWNTAYTDGYKPNPRKLREVFTLHTKPLYPWMKNLSSKVYQYAFPTECCANINLGEAFKRFFQGLGKRPRFKKKGKHDSFTIDSCGKPIELNGWSHKLPFIGIVKTYEPIEATTQKITISRQAGDWYLSCSYEFTPTATSKTTEVVGVDLGIKTLATLSNGEVFKSVLPYRQAQNKLAKLQRQLSRKVKHSSNWYKAVVRLAKQDRRVANIRKDALHKLTTYLAKNHGIVVIEDLNVSGMLANHKLAKSVSR

SEQ ID NO: 7954 - protein, 417 aa, unknown
  TnpB Polypeptide
MFLSHEYKLKPTRQQREAFGVALEGQRQLYNAALQERRDAWRLGRHRVTKFAQMRSLTEIRANDAAYGALPATLSRWTLQKVDLAFAAFFQRAKVKKGRAGYPRFRGKASWRSFGFSEWSGIRLIDGRIVIKGLGAIRLHMHRPLPEGAVPRACAITRDGRSWRIAIQIAVPDFIGPHSCAASAIGLDLNVLNRATDSSGAKIDNPQHLAEELAALRTAQRSVARRKKGSSGRRKTIERAHRLHAKIARRRKTAMHQASAKIAREHGVIAVEKLAVANMTRSARGTLDQPGRNVRAKAGLNRALLDVAPATFKQMLVYKAERAGGRVVEVAPHGTSRDCSACGEPVPKTLKQRVHRCPHCGLTMDRDHNAARNILLRAQAVMGLWDANVDQSGGFSVAHRSCVVPEISFDIATAISN

SEQ ID NO: 7955 - protein, 135 aa, unknown
  TnpB Polypeptide
LGKDRLLLAKTYEKLANQRRDYLHKLSSKIINENQVIVLEDLKVKNMLKNHHLAKSISEASWYEFRQMLEYKAKWYGREIIIAPTKYASSQICSECGYKNTDVKNLALREWKCPNCGAIHDRDINAAKNLLKLAM

SEQ ID NO: 7956 - protein, 503 aa, unknown
  TnpB Polypeptide
MRKGLGLAPSVGECAGRMTQGGTIPRIVLTDGDPDPLRALREEIERRLNSNWRDVRLRLLPTEVEHGSLMGIGLTCVRLYNELNYEKRQAFFKGELTKKKMYEIDRKYYYKYNEVLGVNAQAVIQKNNEAWNSFFELLKLRKQGRLSPYIRKVSPPGYWKDRFTGKKEIHIFIRSDRYHLEPFDENGGYLVLEDFGLRIRYVGRIRWEGKQGRLEIVYVNGRWFAYVPIEVGREPPKSNKKGYVRPNYKDKKGRIVNPKSIKQRDPIGDERAFMDMGLNNLFAVVTTNGYVLLVKGGFIKSEYYWWKREIATYQAVRDLLRNAGFPTWITYHEKYLEAMRTRDERLRHLYLTSIRFIAETLWSRGVRKLYIGYPIMLSQDSGNEYNTNIWWYRKIVFWIVDVFREYGIEVELVPEYYTSRECSICGKIHDNGRVYRGLYICNKTGRRINADVNAALNMARRNGYRIKITRKIESYLVTHNGVKPLIPVRRANTQDPEVRNPAL

SEQ ID NO: 7957 - protein, 389 aa, unknown
  TnpB Polypeptide
VKAVNGVKFAYRPTPQTLELLSMFREMVNDAIRICLVENIKGRLKLRDRIYKGFQVRYGVVSCFGYSVAEVAWSIVKKHRHWQRKPHAKRLMFKMDASNFSLNYSILSLPFRKGERILIPLRYGEYQRSFLMDKTLKRGSVTMTESSIVIAFSKEALIVVPSRKVGYDLNEKSIVGSDGTRRDLSEVARLHTLYGIRRSRFYERHPRDRRLRKKFASSRREKERADQALHRVSTRIVEKARANNEAIVLERLKGIRYAHQKGNGEGKARRRRIALWPFRRLQSYIDYKASWAGVPVEYVSPSYTSKTCNVCGRINRKLKITERSWLCPCGAKLDRDLNAAINIERRGKIRCLGEVHPGARGTDEAMKGNETTMAPILRAEAPKSSLQIP

SEQ ID NO: 7958 - protein, 210 aa, unknown
  TnpB Polypeptide
MTVGNNVNLTPLIIKGQAQKSFNQYFNKKLAKLKSRLDTAKDFLKPSIRKKLDRLYQKSKHKVNDFLHKASHYLINHAAENHIDTIVIGYNKGWKQEIEIGKVNNQKFVNIPFATLNMITYKAKEKGIQVIITNENHTSKCSFLDDEPIQKQSTYKGKRIKRGLFKSSNGRLINADVNGAMNILKKVIGNFNYNPIQVCSTPKMINILKP

SEQ ID NO: 7959 - protein, 368 aa, unknown
  TnpB Polypeptide
MRYAYKYRLSPAPAVERELQRHIDICRQAYNHFLHELRGANGYLSRYEMQSMLPEMKEWWDDLSDVYSKVLQMVAKRLSDNLSGLQQLKENGYNVGGLRWKSPTEYRSLTYNQSGFDVDKNTGRDGWGELHLSKIGTIPIRLHRDIPKDATVKQVAVKKKKTGKWYATVAVEFDREPPAKPNNPERAVGIDAGIVKQTHDTDGVAVEPPDLSDERERLQREQRNLSRKEHGSNNWQKQRQTVARRYAGLKRKRRDFLHKLSNYYAWEYDLVAVEDLDAKGLMEEPGNSRSRASAAWAMFKRFLNTSASAKARISSRSSPPTPPKSAPRVASRRTSRYGYASTPARRVGSRPTAMRMPHGTSFLVDSTK

SEQ ID NO: 7960 - protein, 380 aa, unknown
  TnpB Polypeptide
MIKTTKVQLKPNNKQYTNLFGCAGTGRWAYNFAIAKIQEYYKETGKFLNDGEIRKQLTQLKQTDEFKWLYKYSNNITKQAIKDACDAYKKFFKGLSKFPKFKTRKRSKPSFYQDNVKIKFTEKHCQIEKVGKVKLAEFDRIPFSKDVKYMNPRVTFDGLHWWISVGIEVGDLTIEKEMSEPIGIDLGIKDLAIISNIDEPFKNINKTKAVRKLKKKLRRLQRQVSRKYENNKEGKNYKKTKNIIKLEDKIKSVHQRLTNIRTNYSHQITTALVKNKPEYIVLEDLNIQGMMKNRHLSKAIQEQCLYDFRVKIEYKCNWYGVKLIIANRFYPSSKMCSGCGSIDKGLKLSDREYVCKECGVILDRDKNASINLREYGRLAV

SEQ ID NO: 7961 - protein, 460 aa, Micromonospora sp.
LTVQAFRFALDLSPVQERAVLAHAGAARVAHNWALARVKAVMEQRAAERSYGVPEQLLTPSMSWTLPALRRAWNASKEQVAPWWRECSKEAFNTGLDQLARALKNWADSRSGTRAGRPVGFPRFKSRRRTTPSVRFTTGAIRVEPDRKHIVLPRLGRLKLHESARKLARRLEAGTARIMSATVRRDGGRWHVAFCVEVDRAERTPVRPGSVIGVDLGIRHLAVLSTGELVDNPRHLAAAHTRLRHLGRVLSRKVGPDRSTGQRASNRWQRTANQLARVHARVANLRRDGLHKLTTRLAREYGTVVVEDLNVTGMLRNRTLARHIADAGFAQIRRQLAYKTDWNGGQLITADRWYPSSKTCSGCGAVKAKLALSDRDYTCQACGLTIDRDHNASLNLAALAAEFKPAGSGPVAARGADRKTRARGQAAVKREPGTAPAGQTGTVPPQGGTTNRAQPRRAER

SEQ ID NO: 7962 - protein, 367 aa, Ruminococcus sp.
MLKAYKYRLYPNKEQRIQIAKTFGCCRFVYNQTLAYRRAMYEQEKKSLSKTDCNNYCNRELKVQYEWLKEVDKFALTNAIYNMDSAYQKFFREHAGYPKFKSKHDNRKSCTTNFTNGNIAVDFDGNKIKLPKLKWIKAKLHRQFTGNIKSATISQTPSGKYYVSFLVETIHEILPQADGKVGLDLGIKDFCITSDGDTYENPQNLRKYERLLIKLQRQLAHKKKGSNNYHKTRMKIAKCHEKITNLRKDYLHRISLKIVSENQVIVTENLRVQNMMKNHHLAKSVADVSWYEFTRQLAYKSEWNGRIYQKIGTFFPSSQLCSCCGYLNPETKDLSVRKWLCPSCKTIHDRDVNAAKNILSEGLKLLS

SEQ ID NO: 7963 - protein, 442 aa, Escherichia sp.
MVKNLALVFGDKDQVNMHQENTVPSASDISFFHRPKYNLPCETTTAFTFRLRPGGQQEREMRRFAGACRFVFNRALALQNENHEAGNKYIPYGKMASWLVEWKNATETQWLKDSPSQPLQQSLKDLERAYKNFFQKRAAFPRFKKRGQNDAFRYPQGVKLDQENSRIFLPKLGWMRYRNSRQVTGVVKNVTVSQSCGKWYISIQTESEVSTPVHPSASMVGLDAGVAKLATLSDGTVFEPVNSFQKNQKTLARLQRQLSRKVKFSNNWQKQKRKIQRLHSCIANIRRDYLHKVTTTVSKNHAMIVIEDLKVSNMSKSAAGTVSQPGRNVRAKSGLNRTILDQGWYEMRRQLEYKQLWRGGQVLAVPPAYTSQRCACCGHTAKENRLSQSQFRCQVCGYTANADVNGARNILAAGHAVLACGEMVQSGRPLKQEPTEMIQATA

SEQ ID NO: 7964 - protein, 379 aa, unknown
  TnpB Polypeptide
MRKSFKYRIYPSKSQTTILKQALETCRCLYNNNLACRKESYEKEKKNISYIGSTNLLKSQKEINPYLMKVHSQVLQEVLKRVDSAYMGFFRRVKSKKGKVGFPRFKGRGRYDSFTFPQSGWKLIEEKNLVRLSKIGSVKIRFHRPIEGIIKTCTVIKSSTNKWYVCFNCDVGEKLTVPINLKKSVGIDLGIKVFATMSDKTKIANPRFFKEFAERIAVAQQKLSNLEKGSNEREKQKKIISHIYEKLTNKRRDFAHKESLKLVKKYNTICLEKLNTTSMLENSVKDKPKVVSKNLHKAIVDVAWKRFINYVMYKAEYAGTNVVIVNPKNTSKMCSRCGRIVDKDLSVRTHNCSFCNLKIDRDLNASINILRLGTQSLKA

SEQ ID NO: 7965 - protein, 390 aa, Proteobacteria sp.
MEQIRTLVCKLQPTEEQELELHATLVRFAEACTYVHATLPPNMRNKDRMQALIYRDVRDRFQLSAHLAIQAIRRVAMHRKAAHETQSGVGTFAPTSIQYDARIFSFRERGHTVSLTLLHRRERLCLALGHYQRGKLKGATPTAAQLCRHGDGTYALHIQLHTPLTPPPMPDKAIGVDLGRRDIAHTSTGQSWSGDDMRRVRDHYARVRRGVQQHVSKGTRSTRRRGRQLLARLSGREKRFQRHTNHRISKTLVAEATAAQAMLVLEDLQGIRQRTNTQRRTKTERRRSNSWAFFQLRQFVAYKAAVASVLVVWHPPAYTSQMCHACLHLGHRQAKRFACTNAVCGWCGDADGHAAKNLAILGLNVAQARGPWVHSRWSGKSTGLLKAAGL

SEQ ID NO: 7966 - protein, 396 aa, Deinococcus sp.
MVLEYKLVAAEEQRRRMDKAIRTAQFVRNHCLRYWMDGENVGKNDIYKHTTKLRAEFEWAKKLNSTAVQAAGERAWSAISRFYDNHKRGIKPVGYPKFKKNVRSVEYKQSGWKLDAHNKRLTLTDGFKIGVMKLLGKWDLMLYRQEDIKRLRIVKRADGYYAQFLVDAQRHFDLEPSGKTIGLDVGLKSFYTDSRGYEEPNPRFYRKAERALKKLQRRISRKVKGSKNRQKAVMKLGRKHLKIQRQRKDHAVKLARCVVMSHDVVAFEDLKVRNMIKNRKLSKSIQDAGWREFRRWIESFAKIMGKIAIPVNPAYTSQMCSRCGVRVKKDLKTRMHMCGCGVVLDRDHNAAINILKVGLRMVGHTRTAGVIQETLVEMEEDLNSGASVDEARIPPL

SEQ ID NO: 7967 - protein, 370 aa, Hydrococcus sp.
MNTLSLTLKLPFYRLNQAKAIEFERLTSINTDVANSLLEIDRKERKKLTSADFKHIEIGSMWINQTIRNTNAKTQVKKFKRMWLEVNNQGFEIIKSGELYTLSFSLYRGRKSRIPLSVHPTSHTAVLDRIINKTAKLGSLKLCKSKKGIWYALVSVSMEVPDAGEVKGWIGVDRGQNNIAVAALTKGFGKFWKGGKIKNLRRRYQRIRKSLQKAKQLKEVIRLEQHEKRIMTHINHVISKQLVKFASDYGMGLRLEDLSGCRQTMKQRKKTKSDAANNRDSWAFYQLGQFITYKAVKSGIPVEFIPAPYTSKSDHRNGVMGKRNGDWFKGFDGYRCNADWNASQNIGQWLGFSCPLDLQKSVSVMDMADS

SEQ ID NO: 7968 - protein, 470 aa, Mycobacterium sp.
  misc_feature (376)..(432): Xaa can be any naturally occurring amino acid
MARLKVPEGWCVQAFRFTLNPTQTQAASLARHFGARRKAFNWTVTALKADIKAWRADGTESAKPSLRVLRKRWNTVKDQVCVNAQTGQVWWPECSKEAYADGIAGAVDAYWNWQSCRAGKRAGKTVGVPRFKKKGRDADRVCFTTGAMRVEPDRRHLTLPVIGTIRTYENTRRVERLIAKGRARVLAITVRRNGTRLDASVRVLVQRPQQRRVALPDSRVGVDVGVRRLATVADAEGTVLEQVPNPRPLDAALRGLRRVSRARSRCTKGSRRYCERTTELSRLHRRVNDVRTHHLHVLTTRLAKTHGRIVVEGLDAAGMLRQKGLPGARARRRALSDAALATPRRHLSYKTGWYGSSLVVADRWFPSSKTCHACRXXXXXXXXXXXXXXXXXXXXXXXXXXXXXXXXXXXXXXXXXXXXXXXXXXXXXXXXXGPAGGREARKGTGHPAGEQPRDGVLVAVTTKDHSLATV

SEQ ID NO: 7969 - protein, 419 aa, Moorea sp.
MLRLTYEFKLITTSEQITIIEEILVVCRKVWNYALRERKDWIKSRKCSVNACSLEQEYIIPADAPYPGYKQQAASLTKAKKAIPLLKNTNAQVLQQVLKTLDQAFKNMFDQGYGFPRFKNRYRMRSFVFPQFKTNPIINDWIKLPQIGWVRMRLSRPIPESFKLKQVRVVRRASGYFAMLALQSDVSLGDHPAWGHPLGIDVGLDKFLATSDGELVERPKFLKELQGKLKLLQRRLKLKKKGSANRHKLNQKIARLHQKISDTRKDFHFKLANHLCDKAGMIFVVGEACPKDIDLDFRTWAKGMLSKHTLDAGFGQFFNILAWVCWKRGVYFDKVDYRYTSQICPNCGAQTGKKDLSERIHKCPECQYEINRDVAAAQVICQRGITAVGQIVDEIDCLGVLSGERKLTDKCRKSSKPRS

SEQ ID NO: 7970 - protein, 544 aa, Escherichia sp.
  misc_feature (365)..(477): Xaa can be any naturally occurring amino acid
VKRLQAFKFQLRPGGQQECEMRRFAGACRFVFNRALALQNENHEAGNKYIPYGKMASWLVEWKNATETQWLKDAPSQPLQQSLKDLERAYKNFFQKRAAFPRFKKRGQNDAFRYPQGVKLYQENSRIFLPKLGWMRYRNSRQVTGVVKNVTVSQSCGKWYISIQTESEVSTPVHPSASMVGLDAGVAKLATLSDGTVFEPVNSFQKKQKTLARLQRQLSRKVKFSNNWQKQKRKIQRLHSRIANIRRDYLHKVTTTVSKKHAMIVIEDLKVSNMSKSAAGTVSQPGRNVRAKSGLNRSVLDQGWYEMRRQLEYKQLWRGGQVLAVPPAYTSQRCACCGHTAKENRLSQSQFRCQVCGYTANADVXXXXXXXXXXXXXXXXXXXXXXXXXXXXXXXXXXXXXXXXXXXXXXXXXXXXXXXXXXXXXXXXXXXXXXXXXXXXXXXXXXXXXXXXXXXXXXXXXXXXXXXXXXXXXXXXXCCGHTAKENRLSQSQFRCQVCGYTANADVNGARNILAAGHAVLACGGMVQSGRPLKQEPTEMIQATA

SEQ ID NO: 7971 - protein, 442 aa, unknown
  TnpB Polypeptide
MPDFLVTGKSGRSRKENLLRYNVVTSYRSYQERVNAANGESSKYVSQGWKRTVDASPPSYGEDYVNLGAVDRCYAVIENDPFTDGEIILKMVIQGTWHRLIFAFDNKRFREGKVTLPLIKVEDGHPVFIFTVVTDNPIVQFSGNYTIGVDVGINNYATVVVRNNATGRIAYETTLSQRVHSLWNSVRASEVQVRALRRKADGLLAHRQERMAALDEAQLHREAASRKKRELAILSAQEIADLSHLWGNAVVAVEDLSWIANTMQNGRWNRGALVQWLTHYVSQNGGWVVSVNPANTSQKCYVCGAKVTHPTHELSVCAEHGAMDRDVNAAANIAARAVPRVAKARVTRAKNRKLGPQAPLRTPVARNSLKYPGRDRTKSKPTPKRKKNRLISKEVILPVCPARAQTQCLEASVLADQDTRVTLGTSTAALKQGCVTYNCMLL

SEQ ID NO: 7972 - protein, 409 aa, unknown
  TnpB Polypeptide
MAISRSATKRHGLPTVVQLRLTPAPAQADALAAAVQVCNQAATVVSRLAFQHRTFAVVELHRLAYYGVRAQMPGLGAQAAVRAIARVAGAYANRRATKKRAHIFRPHGAIPYDARLLSFNRDARTVSLWTPTGRVTVPYTGRPDDLKAIDALPRGEADLICRRGVWLLQVSVTLPKPAVRGPVGGFVGVDQGVANLAVTSDGAVLPGPALPGSVGGNGHVRTLRERRHRQRQRLQRKGTSAARRVLRRLSGREHRMMTDLNHQISTFVVRAAERTGRGIALEDLQGIRGRIRAHRLQRRTLHNWAFAQQITFTRYKAARAGIAFILVDPAYTSQTCPECGNVTRANRPARGRFACTRCGLAGHADHIAARNIATRGIAGWAAINQPHATGLPSPRRDRESKPPTSTGDS

SEQ ID NO: 7973 - protein, 420 aa, Helicobacter sp.
MQINKGFKYRLFPTKEQKALLKHHFFIYNQAYNICLNLQQEQYNTNKTLEKSQRQWSSSSALDTKIKYHLKQRDLSFSSVVAQQSRINAQKALKSALTLKDRGFPRFKNSKIAKQSFNWNNQGYSIKDCNKRFKILRLMRQDFKVRWSRDLPKDCTIKQITFSCLNERYFVSFSVEYHRDITPLKTLSHQDKAIGLDLNIHDIALSDGTLIPTHSKTFNLAKYNLAFKRLQRKQSRRVLKSKQTKTKLGRNFYKCQNSLNAIFTKSKHKKEDRYHKITSGLSNKFELVAVENLQVKNMTKRAKLRNVKQKSGLNRSILNTSFYQIIKFLEYKQQHNGKLFVKVPPQYTSKTCHHCGNINRQLKLNHREYCCPVCEYTEHRDINAAKNILRAGLKSLGLGISLADSKQQSLSSSETLVSVS

SEQ ID NO: 7974 - protein, 285 aa, Helicobacter sp.
LQELVGRIDKAYKKFFKKQGRPPRFKKVANYQSFTFSQCGYKIQDNIISFNGYRFKFVKTYDLAGKPKTLTIKRDNLGDYFLCLVCETEDNLKPAGGNSVGLDFGLKTFLTCSNGTQIPSPLFFSKFLPLIRACSRSLSKKKRGSHNRLKARLKLARLHRKVQNLRKDFFYKIANSLAKQYATIFIEDLNLKGMVKLWGRKINDLAFGEFVAILERKTQVVKIDRFYPSSKTCSNCGALKEDLSLKDRFFHCPSCGFSLDRDLNTSINIHRVGASTLGGEAVRPA

SEQ ID NO: 7975 - protein, 265 aa, Helicobacter sp.
LDKYYLSISYEDNEPEPKPTTIRKAVGLDMGLESLVIASNGVFYPYKKFFQSLQTKLTKAQRRLSKKLKGSNNRKKQAKKVAQIHASIRNSREDYLHKISNEITNQYDLIAVETLKVRNLVKNHKLAKSIANASWSRLISLLEYKAGWKGKTLIKIDQYFPSSQICSTCGSNTGKKPLPIRNFIYPCCQTYHHRDLNASINIRNYALGMLDERHAIKVDKTRVGITRSYACGDSANGAVTKYGYILDTASYGSLKQEAHPSLAGG

SEQ ID NO: 7976 - protein, 350 aa, unknown
  TnpB Polypeptide
LNIAYRFRIYPTEEQKILLGKTFGCCRFLYNQMLNDKIREYKKTKKLLKNTPAMYKKEYSFLKEVDSLALANVQLHLEKAYKNFFRDPKVGFPRFKSKHHSKNSYTTNVVNGNILVEDKRIRLPKLKWISMKKHREPAENCCLKSVTVSMEPSGKYFASLLYEGYSCENQAADEDYSNAKILGIDYAMQGMAVFSEEIELEKAGFFRRNEKRLAREQRKLSRCVKESRNYVRQKKKVARCHEKIRNQRKDYLHKLSRRITDQYDIVAVEDIDMKAMGQCLHFGKSVQDNGYGMFRNMLDYKLAWKGKKLVKIDRFFPSSKKCSKCGKIKKELGLSERVYRCTCGNEMDRD

SEQ ID NO: 7977 - protein, 405 aa, unknown
  TnpB Polypeptide
MRRKPTLKAFKYRIYPTDAQMVFFAKTFGCCRFVWNKMLDEKLRAYKKKERIQRITPTKYKNEFSFLREVDSFALCNVQLQLEKAFKDHFRNRKQFKLPKFKKKRDKQSYTTNNVHNSIRIDFERRLLYLPKIREGVKIELHRKFEGKIKSVTVSRTNDGRYFASILVETANPRNKFVEPKSKACGIDLGLGHFATVTNDFGSYKVEHPKYLLKAEKQLRSLQKSLSRKQKDSKNSEKARLRIARQHAYISNARNDFLHKLSKAIIDENQVVVVEDINVKGLLKTRLAKSIADSGWSKFLTYLKYKAEWYGRTFIQVDRFFPSSKLCHRCGYKNEELTLNDRTWCCPSCGETHDRDVNASINLYFVGLGRPEVKPVEQALVDDRSLNGLPKKPSCDETGSSIAKG

SEQ ID NO: 7978 - protein, 441 aa, unknown
  TnpB Polypeptide
MQTTITGALYNLQQSEIDQIEFLIRKQNSAKRMIFQDLYKGKNWEEAIKRAQSLITGIPRRYIYSAKEQAKQILDSLRKHQKKVNNKAEKKSKREKIHYTPKILKVIFETKKLLEKRARGLISKEEWRNARNNQLYSEGWKEKKGNLNLRIIQNEGNFQLRITTGDHKWIFADLYIPEKFRALLLEHLNNEPKYTVKILRTKNTKRGSQYLVHITFEVAEAAIVSSFNNGAIGIDINPDRISYTEVDKEGNFISTREIDISNCLNMRTNKTINFLSNKLTELINYSLSMGKGLVFEDLKFKHDESYGKRLNRIFSNFSHRIIVSLLISKCLRKGIQFKQVNPAFTSNIGKLKYSKMYNLSIHQSAAYVIARRGLGFKERISKHFQSLLKRWKQEQVSNWKCWSFLSKKLLSSNKAVLTKRHSNAFKLKLRDQNNILAMEFT

SEQ ID NO: 7979 - protein, 428 aa, Streptomyces sp.
MLTLVKVVVQVKPVPGAGQLPAFERTLPAINEAASWVSAVSFEYFKLQGSVRELRKLCYGGLKARGFGAQAAQHIIKRVADAYSTLRANIRAGNLGPEGAKRRRKAESKPVVFRPHAAHTFDDRCLSWKYDTQTVIIWTLDGRIKNVRFACSPGALKQLAEHRQGESALVFRDGKWLLVATCEIPEAPRFEPKGFIGVDRGINNLATTSDGDNHTGRRLGRYRRWQARKKAELQARQTRSAKQLLKKRARREARHATHINHTIARTVVAVAQRTERGIALEQLKGIRERVTVSRDQRARQSSWPFHQLGSFIAYKAKRAGVPFIEVDPAYTSQRCPRCGHTERANRPTRDYFRCRRCGLAGPADHVAGANIAKRGATAWVFVNMPEPFPTSSGPVNVTRDRPVVGGSREHKQSRANRVNKLGRSRSSS

SEQ ID NO: 7980 - protein, 374 aa, unknown
  TnpB Polypeptide
LRFSVQDGKGKNVRIKGDVKPSVPAWPQKMAGESKEGYALRKKAFEPKRFAAAEELMRWEYRRIQACEKIKVSFMGKTIRLFNAHRLLNAYRLAMQGVGGLRSGNFAQDSVGDWYLNVVVDRVELPLAAVYGAESSIGLDPGQKVAMTGSDGSHYIMNDNGEIEPNVIPELRSKRYTEMESDIQQAQRRGHRRKAKRLHRKAARQRKNDRDVFCKEIVSLYQRIWIGNLSPRKMATSKLKGQAKSIMDAGIGMASTTLKSLGHRAGRVVETIDERYSTRRCSVCMKLSGPSGLESCDVRQWVCGVPVSHSIGDKAPIGMVTMGYFGCHTLHLRDVNGGENIRHSGELQWNGWSLQQRRENTVAPRYWRPFAGTR

SEQ ID NO: 7981 - protein, 419 aa, unknown
  TnpB Polypeptide
MPAVTKTLELRLINPNHHKERKLRETQAAYQQALHAAFEADCTTQSATNDVVVEYDLSAYAKNALKRYVPQLCGETYSATELHNLDDHPVKFTNEGPQIDHKPQNHYEWYVKIPHHRDYNCWLPAGINPEQRPWQEALYSGDATLGESRLFERDGTWYLHVTATREVASRSESGDPTPVGVDVGDAALATVCHRDEHGTPTEPVIYSDEASTVRHLRKTYFTATRRLQRRESTRISEEYGESLWERIDHILHCVSRRVVERAREVESPVLVLEDLQYIRENLEYGVYMNRRLHGWAFAKLHSQIRYKAEQVGIPVRTVNPRNTSIECHACGEKGIRSTQATFRCRNDACWVGEYQADINGALNIADRYRSGESQSRTDRESRQKATGNDSATDGASLTGPQDSHSEDKTCPETSGTYAS

SEQ ID NO: 7982 - protein, 537 aa, unknown
  TnpB Polypeptide
LKVRLFPSEKKQYDKRLLADCARQRWYYNACIDIFDWENLKGKLEEAKDKGLPCPSFSANEIRNRLAWHEYMEREEVWGDKNFILKSFAFREDCQQEQIEKAKLKLEKERKQAERNAANKIKRLKENEMMRSMSREEKYNFQAQLREERERLKEKAREKLQESKKINGNMAKNKRDYPQAEWIENCYGQKIEGRTLERIIRGACANFTSNLNSAIKNYYNGHISSFNLDFRRSKTINEFLSFDDGNYPTYIKNLTGYYGYRNGNRNLACNKRRVHLNLQEIISQHPQTAITITHDKQTKEWTLHFPVERDWFPSDDRRGENQAPQTVNGEAIGLDPGMRKFLTGYSTTGEILTVGNRAYKKLTPYLNRINTLACEMAQLRKRKAQLTDAKLLLEHEKIAAAKWREKFELWKHVKNMITDLHWKVATYLCRNYQYIFLENLSSKSCVKGNIAPFIKRILLQYSFHKFKQRLTYMCERYGCKLILVAPALTTKTCSNCGDINEVAKSETYNCPNCSFSCDRDVNSAKNILIKGMTIMFR

SEQ ID NO: 7983 - protein, 420 aa, unknown
  TnpB Polypeptide
MIVQRTEIHIIKESNPVYNWILEECLRSRNLYNRVLYVYRQAFTGKHDNIPEFKDIINHDKFIASFALVNRLNEIKDIDFCSMMKKNGAQQIVFQVDRTMKSWFAALKSYKRDSSKFRGRPRIPSYKKKDELNCLTYTTADAKLQKDGTINLRRDIKLPIHTNLSSFQQVRLIPKTGYIQVEIIYNKDINENHLDQARAIGIDLGLNNLMAITSNIGNISNLVNGRPLKSINQYYNKHKAHLMSLLLKGKLKSSRRLRRLEMKRMMKIKDYLHKTSRRIVELMEQNNIGTCFIGYNKGWKQEINIRKKNNQNFVSIPYSLLINMLKYKIEEKGGHLIELNEAYTSKCSFLDNEEVCKHETYKGKRIKRGLYLSNKKKVINADINGSLNILKRGMKFDFDFKDCFFRPEKIDIQKKLLNFA

SEQ ID NO: 7984 - protein, 280 aa, Lactobacillus sp.
MKSMAKMKYHYGLKMRCYPSDQQKQLIKINSDASRFIYNEMVAIGKELIQLRRVKLPIDTVQDRIKQLTMRQNAKQMSNHYQFLEDKRIDSLAKANAIQNYQKAWNAFRKVHTAGVPKFHRKSYRWRYQTNCQYPGQKTALLTNGTVCFLDNSHVKVPKIGLLRVAGSQARLLKRMCETRIGTVTLTKDPADHFFLSMQLASDKPFVKESKTNHGHIGIDLNTDNFLTDSEGNTVPNPQYYRTIKGKLAKEQRILSRRQRRAKKNIVLYETVKITKSNAC

SEQ ID NO: 7985 - protein, 520 aa, Azospirillum sp.
MARTKPEHPPVHRTDLLPSNLTVAKETAVLALLQAYRRGAVLLSREQWRLLFETGRFDKTFDEDKVTFAAIIGAANRVQMARWQVVGQLQGWISNRANEFRDAVNHSSLPPDTKHMLHTINVLGAWFRRGDVVMKETGEVIPDAVRRLARTIMRHCMARHRKPSLSRISMRLDHRAGNIAQPVKATQGGAVGWWVNLSTLEKGRKIAVPLLTYAYHDARPGRVTNGIQVNERDGRLTFGVVIDTGAVCATSRADYNGHGVLALDFGLSTLFATSDGQLLGQGWLKRLKRYDALISMIAASQQRAGRKPRDSRRYRALVEDVRGFLRTEVGRVLNRLVEQGKPRELVLERLDFRHSDLSKRLNAILRNCGRKVIQDKLRDLEEWFGITFTEVNAAYTSQTCSCCGYVDKRNRRNQKTFVCLWCGHELHADLNAAANIEARRARSIGWLFQGKAAILVDLVREFNERRVRAFGPCRSGSRGAPADPRSANPYFGGTLLAVVRSAERREASVKSSEAQALVAA

SEQ ID NO: 7986 - protein, 380 aa, Azospirillum sp.
MIQRSYKYRLYPSKAQSVVLTEMLGAFCDLYNAALQQRIEAYRRQHKTLRYIDQANELKAVRTVDERLAQFSYSAAQQVLRRLDKAFTAFFRRLKTKAKAGFPRFRAKSRFDSAELRVGDGLTIRKSKRLAITGIPGEIKVKWHRDLPAGATVGTAVLSRSAGKWFICFQIALPDQVVQPRDGASVGIDVGLTSLVATSDGNVVKTLQWTKHAAKKQRRLQRALARCKQGSRRRLKAKQRLARHKAHIANQRRDVLHKLAWSLVDRYALIALEDLDVDRLARSMLAKAVHNAAWGQLRRFLEYKAASAGTRVEVVDPRGTSQTCPQCGDRVTKTLSDRTHICLCGCVMDRDVAAAVIILQRAQGMGPGTGLRSPSQRVTA

SEQ ID NO: 7987 - protein, 312 aa, Nonomuraea sp.
LDKAFRAFFDRVKAGRTPGFPRFKGRGWFDTVEWPKDGDGCRWDSQPEHPAATYVRLQGIGHVRVHQHRRVLGSVKTISVKREGSRWFVVLSCDDVPAEQLPATGAAVGLDMGVASLFTTSDGAHVANPRHLAATADRLAAAQQDLARKRRGSKRRRKAAARVAVLHGRVGRQRLDGAHKAALALVRDYDVIVHEDLQIANMTRSASGTIDAPGRNVAQKSGLNRSVLDAGWGVFLRILAHKAESAGRELIAVAPRNTSRTCARCGHRARDNRVTQAEFACQACGHTAHADINAATNILRAGLALRRAAEAA

SEQ ID NO: 7988 - protein, 454 aa, unknown
  TnpB Polypeptide
MAVRRATFRLYPNSTQTKKLFEARRLHCYLYNACVAQRKTEYKHFHKSVKYFEQQNILPAFKEFWEDYQQLYSTTLQSTVKRVDIAFQRLFKGLSKRVKFQSIRDYSGWTYPSDAGWKTSTNGKHGTLSLNDLGVALRMRGETKRWGIPKTCTIVYRPSENAWYASISIEVAVVESITSVTSDLTFESAIAIDLGTATALTTYDGSEFREIENPRFIRKAEAAASKTSRKLKRKRAPNRKKKVLPSKRWKKARKQVSRLQRKVANSRKNWQHQITTEIARHNDIVVTEKLNTKGMTKKAQKRSQRKKQKAGLNKSILDVGFGTLNQMIQYKIEDKGGLVFELPTREVKPSQRCPNCGVVHKEWAELSQRHHHCLDCNFEVPRDRGSVLVMWGWLHNTLPGCGTRLDKRGCLSSTSEPKTRKSCGGQKQLGQLKRQKSQLIGNGVCKSPSSHQVG

SEQ ID NO: 7989 - protein, 233 aa, unknown
  TnpB Polypeptide
VVNGNILVKSKRIRLPKLKWIAMKKHREPAEDLRLKSVTVSMEPSGKYFASLLYEGYSCENQAAEPDYSTAKILGIDYAMQGMAVFSEKIETEEAGFFRKNEKRLAREQRKLSRCVRGSHNYELQKKKVARCHEKIRNQRRDHLHKLSRKIADSYDAVAVEDIDMKAMGQCLHFGKSVQDNGYGLFREMLDYKLAWQGKKMIKVDRFFPSSKKCCKCGRNKERAEIIRKSLSL

SEQ ID NO: 7990 - protein, 419 aa, Planktothrix sp.
MIYVNIVLGRKKEISMIVLEYKCKGKPNQYKAIDEAICTTQFIRNKAIRYWMDSSRDLKIDKFALNKYSTTLRNEFPFVADLNSMAVQSAAERGWSAISRFYDNCKLFGIWDILFCRKCFYCRSVEYKTSGWKLHPTKRQITLTDKNGIGKVKLLGKWDIHTYNVKDIKRVRLIRRADGYYAQFCLNINVTDIQPKTGKEIGLDVGIESFYTDSNGYKEPNPKFLRKAEKSIKQSQRQIYKKVKGSSGRRKVRKVYAKKHLKVSRQRIEHAKRIARNVCKSNDLVVYEDLSVRNLLKNHCLAKSITDASWYLFRKWVEYFAAKFDKLAIPVAPHYTSQKCSNCGVIVKKSLSTRTHVCNCGCELHRDTNAAINILNLGKQARGGHPQSNANGLETSTPLDESLVEQVSRLKLESQCLQT

SEQ ID NO: 7991 - protein, 223 aa, Planktothrix sp.
MLIVEIHQRLSKRHRKRQKQSSNYHKQRQKVAKLHLKVFRQRKDRAIKDALALVQSNDLVVYEALKVSNLVKNHKLAQSISDASWYQFTQWVNYFAKIHKITCIAVPPQFTTIDCSVCGAKVYKTLSTRTHQCPDCQTVLDRDWNAAINILKKGLKYLGEYLNGTVGQAETDPNDWGESGLWVFNRDVEDLSRLVEPVISRSDSGRIPRQARSLTVGVCQCTQ

SEQ ID NO: 7992 - protein, 243 aa, Planktothrix sp.
MHPSGRWHISIRFDDPTIKPLPVNDNAIGIDLGITSLIATSNGEKVSNPKQFKKHYKRLKRAQKNLSRKQKGSKNREKARIKVAKVHLKIADSRKDFLHKLTTNLVRENQTIAVESLAVKNMVKNHKLALAISDSGWSELIRQLDYKCLWYGRNLVKIDQWFPSSKRCGNCGHTMDKLPLNIREWKCPKCEVIHDRDLNASKNILAAGLAVSVCGATVRPEQSLNGYRGRLTSFWNLPRPSNI

SEQ ID NO: 7993 - protein, 331 aa, Planktothrix sp.
  misc_feature (26)..(121): Xaa can be any naturally occurring amino acid
LPLVVFTTIVRKTFPVKKDIPNSKKXXXXXXXXXXXXXXXXXXXXXXXXXXXXXXXXXXXXXXXXXXXXXXXXXXXXXXXXXXXXXXXXXXXXXXXXXXXXXXXXXXXXXXXXXXXXXXXXSGRRKARKVYSKKHLKVSRQRNEHAKRIARNVCTSNDVVVYEDLSVRNMVKNHCLAKSISDVSWYLLRKWIEYFAAKFDKSAIPVAPHYTSQKCSNCGVIVKKSLSTRTHVCNCGCELHRDTNAAINILNLGKQARGGHPQSNANGLETSTPLDESLVEQVSRLKLESSVSSDGESVNTSVFLTFLNVLNYCSSSFGPNTICTTMVSPPA

SEQ ID NO: 7994 - protein, 426 aa, Streptomyces sp.
VSQDTLVKRQLGHRARLALSPVEVLKADGQAHAARTLWNLLHAWWQMMPKEKRTLGHADVAVRQARKDIDFLAALPAQAAQAVLKTYFQAWKNCWDGRADAPNFKGRFRTVMSVDVPQGRDLNITRVHRRWGMVTIPKVGRVRFRWTKDLPVGKLADAENRITGARLIKDALGWHLAFRVQTLEAEPEPHQGPEVGIDVGVNVPIALSDGQTYEHGEWLTEKEKARLLHLEQRAARRKQHRKPGERTSRRLHRTYDQIAGLRAKAKRRALDWQHRTTTAIARTYGTVVVEALTITNMVKSAKGTIEEPGKNVVQKSGLNRSISGEAWGRTVTMLAYKTARHGGALHKVPAPNTSRRCSACGFITPGSRESQAVFVCKNPDCGWSGNADHNGARNVLHLYRMGHALIPAAGRAVVRRARRVKPTTAR

SEQ ID NO: 7995 - protein, 415 aa, unknown
  TnpB Polypeptide
MYLAVKQQLKHLNKEEYLILKELCHTAKNLYNQAVYNIRQHYFDEEKYLSYIENNKLLKSSENYKTLNSNMAQQILKEVDGAFKSFFRLLKLKSKGEYKEKVKLPNYLPKNSFTTLVVGFVRLNENSFILPYSQIYKKNHKPIKINIPPLLLDKNIKEIRIIPKFNARFFEIQYTYQVEREQRNLDKNNVLAIDLGVNNLATCVTNRGKSFIVDGKKLKSINQWFNKYNAKLQSIKDKQDYGKALTLKQKSIWNKRNNRVNDYLSKSARIIINYCLANSIGTLVCGYNNDFQRNSDIGKRNNQNFVNIPFSKLQSKLKYLCELYGIDFVLQEESYTSKGSFFDMDIIPEYKKGNTEEYSFSGRRVKRGIYKTSKGYVLNADVNGALNILRKSKVVDLEVLYSRGEVDTPVRIRVS

SEQ ID NO: 7996 - protein, 425 aa, unknown
  TnpB Polypeptide
MKNYHRKKNSCRISLQYYMCFLAGCMDFVSIRNKLKGMRKLLKSFKTEIDPTPEQKVKIRKTIGTCRFIYNFYLAHNKELHDSGQKFMSSNKFRVWLNHEYLPQHPERLWIKEAYSKAMTQAINNGQTAFTRFFNHKSAFPNFKKKGKSDVKMYFVKNNPKDCRCERHRMNIPSLGWVRIKEKGYIPTTKEGYVIKSGSVSIKADRFYVSVLIEIPDNKTTDHPNEEGIGIDLGLKDFAIVSNGKTYKNINKSARLKKLEKQLIREQRCLSRKYENLKKGEVTQRANIRKQKLKVQKLHHKIDNIRTDYMNKTIAEIVKTKPSYITIEDLNVKGMMKNAHLSKAVASQKFYEFRTKIQMKCNENGIELRVVDRWYPSSKICHCCGAIKKDLNLSDRIFKCGCGYMEDRDFNASLNLRDAKTYKIA

SEQ ID NO: 7997 - protein, 403 aa, unknown
  TnpB Polypeptide
MLVNRVEQHQIKKSNPLWKIIDDLCWKSKNVYNCANYIIRQEFINNHNYISCNELDKIMQNQDCYSILGSQASQKTLQLLDKNWKSFFVAIKDWSKRPEKYLGKPKLPKYKNVEKGRNPLMLKNIQCKIKDNYLTFSWKPLRKFKIPTNVKGKLMQVRFIPKTGYYAMEIVYQINVPEISIGSKNVVGIDIGINNFVTISNNIGVQPIIINDKGVKSINQYYNKKKAELQADLKTRHDQDWSNRLQNLTCKRNNKVINFLHNASRRIIDWCLFYGIDTIVIGKNDNWKQESMMSKKVNQNFVQIPHALFIEKLKYKAENVGIKVICTEESYTSGTSFLDDELPVKANYNKGRRIYRGLFKSNTGKLINADLNGAYQIIKKVFPNVFTNGIEGAGSHPVRLNVI

SEQ ID NO: 7998 - protein, 277 aa, Arthrospira sp.
LYPCEELHAVWKRWLAAYRWIYNYTIATWKHGYQWSCFDCQKLVINSDKPEWVKSLPVHQLQEAVADAFDAFKQANAAGVQVKFKSCRAPSQIIKFKVNNFRNGTWYTRLTKGLTFTSPQAIPKNCPYGTQLKYARGKWYGCFPEYQEPETTEQKRVIALDPGVRSFLVGYDGESITEFATNDIGKINRLCYHLDVLMSRISQCKIKRKRYQMRRAYHRMRERIRNLVDDLHKKVAHFLVNHYKLIFLPTFNSSKMVFKSRRNLNSKSVRNLLNWSH

SEQ ID NO: 7999 - protein, 516 aa, Bacillus sp.
VFQTYKTKLQNTNVLSSKGITINTYEYYQQFAKEFGRIERKLFVDLYVRGHNENQTKVRYCRLYDLTSRQYNSIKRQLDGRVKACRELQKLYIKETTEKIIHLQGVIIKKMEQKEKAHEKLLQMNGKEKNFTKKVRSYRKQKHTIHQKKRRLYRLELKLKRLQEDEKNKKIRICFGSKEWFHKQFHLEENKLTFKEWKQKWQEKRAAQFTFIGSSDEKNGNQTCMYDTDKHLRIRVDNQNETTYGTHFTVPNVVFPYGQEQLDVAKIGRVGYTKGKGNKVTYYRALTFKFIREEDNWYLCATVDVDMPDIQTIKGNGCIGIDCNANFLSVTETDRFGNPIHTFDVPFKGYNVSSEVAEQSLSVALKQVVEYALEKKKPIAYEDLDFKKKKLQLRESSKNGARLLSGFYYSRYKELLQHKCLKVGVEAIPVNPAYTSQIGHTVFMKRYGLSSHGSAACVIARRGMDLTFEKVPYACPLGYPKKFNRSMERKKQWASATKHWKKHTFQQKLYVLSKLG

SEQ ID NO: 8000 - protein, 488 aa, unknown
  TnpB Polypeptide
LTLNIDRCYDSTNQSQNPKTIVQTTYQYKFYPDTNQKLALNEWLRICRYWYNRQLGDRFDWWEMNRTYVNTCPLVSSIALVREKPNYYTQKKQLPIIKKDLAKVFHSGELLDFSGVDSTILQDVSKRVDKAFERFIVGDSNGGKSGKPRFKSEASFRTMTFATAKNSWIKLTRKNWLYLRLPKLGVVKVRMHRPIPDGFVVKQVSVTKKADGWFIQFVLEDVSVPTQGQDTIIPTWDNSLGLDAVLHEDVYLATSEGGKLPSLKPLRKNQAKLDRISTKRNQRKRGSKSRRKLAKREARLHQRIARLRKDFHYKTAHELVRTGKKVFFHEDLNLKGLKARNKSKQAEDGTFLPNGQSAKSGLNKSWSDAAFGNFFTTLDYIAGKAGAVVIAKNPAYTSMVLCYRDEIIFTDCSIRNYWDEQESLIVDRDINAAINLKKLGLDIFPSIKRRSGKLSVVGTMDESTAKEILYTLHRAAKKPTSQAVLSLM

SEQ ID NO: 8001 - protein, 397 aa, Microcoleus sp.
MYKAYKYRIYPTSEQETLLAKSFGCARWFWNYGLNLCQETYKNTGKGLSRAYIQGLLPALKKEYEWLKEPYSQCLQVVALNLSTAYKNFFDKRAMLPKFKSKHSRQSISYPQNVKFDGDYINLPKIGLVFCRRHRDFEGDIKTVTVSGNPDGKHFVSVLIDDGKEKPELVPVDKTIGIDVGLTHFAITSEGSKFDNPKHFVKRHSNLKRKQQKLSRKKKGSQNRKKARLVVAKVHSKIARCREDFLQKLSRKIVNENQVIAVENLNIKGMVKNHNLASSISDVGWGMFCTMLKYKSESEGKQYVEIDRWFPSSKTCNVCLNRVDNLTLDVRAWSCQRCGILHDRDVNAAINIRNEALRILALGTSASACGGDISRSGKTSVLLDAIPVESGSQRCTS

SEQ ID NO: 8002 - protein, 219 aa, unknown
  TnpB Polypeptide
MKPEEISSYILKKVVKDAEDTLRMEGKSDGLYADSNGKIGSNHRYFRESHKQLARAQRKLSRRVGSAKKECKSHNYIKQLARVNRIHRRIANQRLDNLHKISAMLARQYDIVCVEDLNMKSLSNKGFGNGKSTMDNGYGMFLVMLKYKLERKGGYLVKVSKWYPSSQLCSVCGKKHPEMKIVKRNPKQGYLVCDCGNRMQRDSNAAKNILSEGLRILTS

SEQ ID NO: 8003 - protein, 398 aa, unknown
  TnpB Polypeptide
VSLYSYKYRLNPTPKQEVLLNKHFGCVRYIYNHFLRQRIDLYEQNKTTQNYYDNATQIPSLKKELPWLKEAGSQALQYAVKQLQTGYDNFFRKVKQKTKGKKGFPKFKSKFGKQSFKVMQNVKIIDGKLVIPKFLKGINIVQHRELEGEIKFATISKNKAGQYFVSITTEREIEKLPKATKTVGYDLNVKHVVVSDGSRESNPLPETKHKQYLKFLAKEVSRKVKGSKERKKAQLRLNKWKLYCKNVREDFLHKLSSKIINENQVIVIEDLDVNGMLVNKQEKRKVARWKERKLHKQLQDCCFSSLVQKLTYKAEWYGRELIKVSRWFPSSQLCSECNYQNKELGEEKEWTCWNCFASHDRDENASVNICNEGIRTLGTRGIAYCPDVRPILNGLLVG

SEQ ID NO: 8004 - protein, 399 aa, unknown
  TnpB Polypeptide
MIIAHKIALDPNNAQATYFARAAGTARFAYNWALAEWQRQYAAWKQDNSLPKPSQAALRRQLNAIKREQFPWMLEVTKNAPQMAIIQLGEAFKNFFAGRAKYPKFRKKGVHDRFTLTNDQFSIDGSCIRIPHLGWVRMRESLRFAGKIMSATISRVADRWFVSITVDTEDPPKSRAENQGAVGVDLGVAALATLSTGETITGPKPHKALLDRLRRLSRSLSRKQKGSSNRRKAKAKLARLHARIANIRSDALHKLTTEITRRFHTIGIEDLNVRGMAKNRHLARSIADMGFFEFRRQLEYKATMRGGVVAVADRWFASSKTCSACGSVQEAMPLSVRQWICPDCGTRHDRDLNAAINLKNMAVSSTVSACGEEGAGRARKSTVKPASMKQEASSRFSQK

SEQ ID NO: 8005 - protein, 369 aa, unknown
  TnpB Polypeptide
MKQTLMVKLAPTTGQYNALLQTMERFNKACNYISQLAFDNHTSSQVKLHHLAYHYLREHYGLSAQMAVRVVGKVVEQYRRDKSRLHSFKPHSAMVYDQRILSWKGLDKVSMLTLQGRLIIPIRIGEYQQVRINRIVRQTDLVLRNDTFYLAVTVDAPEATPDDPIGTLGVDLGVIHLAVDSDGEFYSGEVVDKAREKTDAIKATLQSVGTKSAKRHLKKLAGRESRFRRSVNHVISKRIVSKAKDTHRQIALEDLKGIGDSTVRHSQRRRHKSWAFSQLRQFIEYKAKLAGVLISLVDPRNTSRTCPQCGFVSKSNRKSQSLFSCQQCGFASNADLVGATNIARRATVNWPIVSPTLAGMGQGQAVCFS

SEQ ID NO: 8006 - protein, 372 aa, Firmicutes sp.
MQTVTLKIKLLPPNKGKLAKMARMVETYRQACSWFLEQAETLNTTSRAKLNRDTYKQGCELFDLNRGTLQCAMLKALSAWRSYVSRKRSGKKASLPKFEKPVPAMVRQDCYSFHQLPSGRWIIKFPVSSGRSQIAVPLAVSEYHARRLQDLAGGSYRQGSMEIWQSKTGEWYVSISIVYQTNLNEPGGVIGVDFGIVKLAVLSNNVFFDGREIRWRKEHWAERRKALQQAGRLSRVKREAGRERRWMRYINHCLAKRIVEIAKAEGKAIALENLLGIRERAKGSRKFNRMMSGWSFRELASFIEYKAALAGVPVVYVDPKETSKACPRCGNVSRYNRKKQGWFKCAKCGYQSDADRVGALNIAAKALDALGA

SEQ ID NO: 8007 - protein, 240 aa, Staphylococcus sp.
MHQGHIKISLSKYFVSRLSKKDMKRIEVPNRLLKHYKRHPDKLINCKVKYIQKIDNYVKSNKVNIVGIDLGKYRYLAASNLDLTFTFRDEYNTFFHLFRKYESRLENKQVDNNKAYSKLKTGLKNHINQVINELIEQVNETNSYQTVFVLGDHGSSHLSFPSLVFDLTYFAIKQRKNENDEILIVDESFTSIECPICHDRHQHNRTNKNKFKCTKCGFRHQNNDIVAASNIAKKGKLLVF

SEQ ID NO: 8008 - protein, 379 aa, unknown
  TnpB Polypeptide
MANKAIKYRVYPTTEQSIMFAKTFGCCRKVYNLMLCDKIEGYKMTGKFPIVTPAKYKNKYPYLREVDSLALANKQIDLQEAFRNRFSKSRKKNNGFPKYKSAKHSRKTYTTNNQKGTISIIDNKYIKLPKIGKVKAVIHRNPDSCWVIKSATVSQESDGKYYISILFEFDNVVNTYIADKTNAIGLDYASDGLYVDNNGNIGTNHKYYHESHNKLAKEQRRLSRMQGAKKGEEKSNNYIKQLHKVNKIHRHIANQRLDNLHKLATEIANQYDVVCVESLNMRSMANSGFGNGKATFDNGYGMFLSILKYKLTDRNKYLVKVDKWFPSSQICHCCGMLHPEMKDLSIRKMKCSCGLIINRDQNAAINILQEGLRMLTEVA

SEQ ID NO: 8009 - protein, 280 aa, unknown
  TnpB Polypeptide
VEQGLLVLHQDRPVQPPRHGWAHQSESRMGQHSRPIPAWEVRNRTPHPQGDKWHLLIPVTIPTPDATEHPKTIVGIDLGIRFLATSYDGERTVFYDGKEVKHRRGKYKELRKQLQHRGTRSARKRLKAIGSRENRWMTDINHQVSKALVNQYGKDTLFTLEDLTGIRNTAETVKVQQRYVQVSWAFSQLRSFIEYKAARNGQATIAVDPAYTSQTCPRCGYVSRKNRNKETHTFRCRNCGYRSNDDRIAAMNLRHKGYDLTVMQCDANTLDVAGVQPTIP

SEQ ID NO: 8010 - protein, 375 aa, unknown
  TnpB Polypeptide
MNTFNHYIKKVKIYPNKNQKEVFDFWLRRCKILYNVSLEEKIEYYRKTGKYLNVYEQKKELVDIKDLDYSWKDIPNKSLQEIIFRIDKSFKSFFKGNGFPKFRNEINSIEFVKTDIRLKNNSLYLPKIKEEIKYKEEIKADWSSVRLIKDGNSFFLSFLYKEEFNIDINNGEILGIDLGLDSLYTDSTGNKCKRFSLRLIKSYRNRINDINKSLSSKKRGSKRYKKTKYNLNKAYKRLKRTKDDYLHKESLKLVRDSKESIIALGDINVNSIINNNKETKSKKGLIKSFYVNSLSIFKQFIIYKSLRYNKLCLLVDERNTSKTCSCCGNIKYDLSLKDRIYNCKSCNNSIDRDENSAINMKLLGSSLISKDICVL

SEQ ID NO: 8011 - protein, 428 aa, unknown
  TnpB Polypeptide
VIRTHCFPCSLAKPEADRLNQESGRLYTRALVEHYRVYRQTGHWLSPAGLEKLVDAYDAQDGQERILHAHSIDAAEQGFPKACKTAKANRANGAHLPHKRKHWRTTIWKNTGIRAKDGYLLLSLARGYAPIRVNLPSHWATWPPDSCVEMRLVWDGASRRYNWHLVVDDGQPSAESPGDRVMAGDLGEIHPITLTDGETATVISARALRATRQYTNKRLAEIQALQARKQKNSLQWRRLQRRKNRFLAQQKRRVRDIEHKVSRAVVDSAVEQQVGTLALGDVRDIANGKRLNPKSQQKVSNWSHGKVRAYLTYKAEAAGITVELVDEAHTTQTCPNHCGERHKPQGRLFRCPVCGFVSHRDVVGAANTRSVSRHRHGVLGKIKPPADIKYRHPFGKLAFGTGKRSRLDTAQVAWGGQHASSPKKPRGF

SEQ ID NO: 8012 - protein, 453 aa, Thermus sp.
VEEGLEVLLGAFGHHLHPAVGEVLRIAGKAKLQGLLLAKARYPTPCTLPLTKATRRGMGAFYKKRGGVGELCQPKGLPCFPWFLNRRYMDSPTCSEGAHTIVGGECASIRTCPKNAPHATIRTTMLKAFKYRLYPTKPQTRDLEKTLDLCRQLYNAALQERRGAYKKAGKTVGFYEQKRYLPEIRAELPEYRGIHSQVLQNVIKIRALPVTERVDKAFQGFFRRLKEKGKAGYPRFKGKGRYDSFTFPQAGATGVKLQKDGKRVLIYGIGSVKIKLHRPLEGKVKTATVKREGDHRYIVFTCEVEPKPLPPNERAVGIDLGTNPHFLITSDGKTVEAPRYFQKSQEKLANAQRELSRKKMGSYRYRQIQTRLARLHRKIANQRKDFHHKLARGLVKEYGTIVHEDLNILGLLVLTSPKGYWMPVGHSFSKSSPTKRRVSPAGLSLWLVGGSSG

SEQ ID NO: 8013 - protein, 393 aa, Geitlerinema sp.
MEQILTVVCQLKATAEQSAALDATAQAFAAACNLTNSVVRPAVTSKTTIQSLVYRQLRESFGLSANLAVRACARVAANRKTAKAKGREVNAFKPTSVDYDARVFSFREDDWTVSLSTTSGRVRVPIVAAPYQKGKLSEQKPTSAQLCKHRDGLYYLHIQVKRSAPEMCDSQSAVGVDLGRRDIAVTSKGQRWNGKDIQEKRDKYARVRASLQKKASKGTRSTRRRARQVLKRLSGKERRYQQWLNHNISRQIVDFAKQQGLFIAIEDLSGIRERTNQQPRNQTERRRSNSWAFYQLRQFLSYKGITEGVLVLAVPPAYSSQTCHHCLHIHPVKGKSYRQGKTFRCGNCGWLGDADDNGSKVIELIGVAVNRPGGSGLFCSLRATESHLSIAKR

SEQ ID NO: 8014 - protein, 379 aa, Ruminococcaceae sp.
VNLMLVEMHKNYSYKLYVTDRTRHLDDMIEIARQIWNHFLALQKRYYRIYGKYISANRMKTHLTKLKRLSRYQNWNQLGSQAAQDVVERLDRSYQAFFDWCKNRSGPKKSPPKFRKRWKYRSFTLKQAGWAIQDNVITIARKYRFKFWKHRDFKGEIKTITIKRLPSGDYYIYLSVIEQVFVPDAHAGNAVGIDFGLKTFLTLSDGTEVASPEWLKNSLSDIRKASRNLSRKELGSNNRKRARLQYEKIHENVANRRRDWFYKLARDLTIKYSVICIEDLNLDGMKRIWGRKVSDLAYSEFVKILEYEALINGCEIIKVDRWYPSSKTCSSCGFLNDDLSLKIRDWVCPSCGIQHRRDFNASVNILNQGLLTRYGTSIA

SEQ ID NO: 8015 - protein, 364 aa, unknown
  TnpB Polypeptide
MNKSFKVRIYPTKEQQVLLEKTFGASRFVYNHFLKLKQYLYQEFKIQITYNHTSKMLTELKRQKPWLKEVDSVSLQQTLRDLDNAYIKFYKGSGYPKFKRKDGKNSYRTGGYIKVSSQNITVPKIGMLRLRDNYRFEDKNILKIYSVTISKTTSGKYYASISADVYIPHFEKTNQSEGIDLGIKDFAILNTGEKVKNPRILKHLEDKYRRLAKSLSRKVRGSANYQKAKLKLAKFHEHIANIRKDFLHKLSTELVKEFDVICVETLKVKNMMKNHKLAKSFQDVSLCEFIRQLEYKSEWYGKTISKVDRFYPSSQICSNCGYKNSEVKHLSIREWICPECGTTHDRDINSAINILNEGLRLLEI

SEQ ID NO: 8016 - protein, 337 aa, Sphingobium sp.
MANRQHTALPWGINNWTLRCVDTAMTRYRDRLTANPNAGFPRFRSEERWRSFGVHGVRGCVVADSYLSVDGIVGKLRVRMHRPLPADARLAGLTFTRRARRWHVTILVDCKAGGQEHQNPGSACGVDLGIDHLASLSDGSLFNDTVRWTTQNAALRRAHRALARCQKNSRRSKMLRERRDRASQRVINLRSTRLHQISATITNRFETIVVEDLDLKQFPRPSRTRRPSDGIGAIATRENGQILAEVRPKRLLEMIRYKAEKAGGAVIIVDPRRIAPKCNACGSPSSESNDGERHICACGVDVPRGTNNAINILARGLSAHAAALGRRVGKALPNASV

SEQ ID NO: 8017 - protein, 413 aa, unknown
  TnpB Polypeptide
MNRTNTILLAPTEAEEQELHALADASAQLWNMANYERRQAYFTGSRVPSYENQWRTFKDSEPFKRIGTCKGQALLLKLREAWGSFSALKHLQKLGQLPPHIKRISPPKYMKDRNTRRRKAEAIYVRNDGYRQQDDTLVISKNLRIRFRAGDLWLGKQGRLELHYDPLRKKWYGHIPVKVKWPRKGKPHHSTLKRASIDLGICNLTTCVVEDGDRAYVYSGRAVLSDWRYWTKRVASCESTLKKTNGRDTSKHLSRLYRTRKRRLNHAVKSMLRDLYDRLETHGVTDLIVGDLKHIRDNTNHGKVGNQKLHNFWPFMQIRQRIRELGEEYGIRVRFKPERGASRRCSLCGEKHKNGRKHRGLYHCKTHSILMNADVNGAYNLLKPKVAAVSGSRPMAWPMLLKWNSQQWEVSAA

SEQ ID NO: 8018 - protein, 397 aa, Moorea sp.
MEFKAVVKETQKIAIKEAIRTAKFVRNKVLRYWMDNRGVGKKELYRYNTQLRDEFGFVKELNSHACQASVENVERAVARFYDNCKKKVPGKKGYPKFKKHCRSVEYKQSGWKLSPDKKSIKFTDNKGIGKVKIKGNWDLWRFEQKLIKRVRIVQRADGYYVQFCVKVDNHEQLEATGFTIGLDVGLKEFYTDSDGYAEPNPRFYRTNEKRIKFCQRRVSRKKKGSANRNKAINRLGRTHLKVSRQREEHAKRLARCVIRSNDLVAYEDLRVKNLVKNHCLAKSINDASWYQFREWLEYFGEKFGRITIAVNPAYTSQNCSNCGEVVKKSLSTRTHTCKCGCQLDRDHNAAKNILTRALSTVGHTATFQNAWGEDTSTLLGSGLDEQVTSLNQESPGF

SEQ ID NO: 8019 - protein, 677 aa, unknown
  TnpB Polypeptide
LGINLLLVYRAFKFVLDLNQKEKQTLEDMATASRFAYNFAVDMSQALYEADMPRADLDWFPEDLAQLTAQRLNNQSLVKDKPDSKAENHLSAMALDAENDPAALLANKPTSKKSKPKTKQVDLSNPKAGQSKADDKIPFNPTRGLNDFDLNRIWPRYWRYLASDLPAVAYGAGEIAYQAFSQYLDAKSNAIAQIIKNQTTSSTRKVSLPGFRSRWSPHQTFNLMRIKVLEANNLKNNSKCNLIKIPNDQKPLKVKGSTRRLLYFLKQYQGKIQVAHFTRKSTNREWEVSIVAELEIPVPDAELLSCSEPALPAEQSGSAIISNPPSVKDFLAISSDDIIGLDLGLTYLATLSSGEHIENPRFLKRYLSKLGRLQRAIARSEKERKLLEALLHEQNVLTGKQRIPKSQRRQAKEKQLSLLHQKIAAMRRSYFRTIAQGLVKRYKIIGIEDLAVANMVQNRKLSRAISDVAWATFISILEEEAAKVGTLIVKADRFYPSSQKCSNCGYLNKETKDLALRLWICPICQYLHNDRDVNAGINLIPTPEQITQALAEKTAKYQAEMKRRSLRKQIIAKTAETKKQKKERRRQETQKQEELNSLNTSNSSTIRPKNPSPGVAPERLNAPGEPQTPLSTQKLLKDRNATQNTNSILTERRIELSLLSSEKSSLESLFLEVGDTG

SEQ ID NO: 8020 - protein, 677 aa, unknown; identical to SEQ ID NO: 8019
  TnpB Polypeptide

SEQ ID NO: 8021 - protein, 262 aa, Klebsiella sp.
VKSSAKLKTSRSSSHAANGTLASRRNTKCLNRFIRQRQWSVWTPESRNLPRFLMAPYTSQSTASKHSQRKLAMLQRQLSRKVKFSASWQKQKKKIQRLHSHIANIRRDYLHKVTSEISKNHAMIVIEDLKVSNMSKSAKGTAERPGRNIRAKSGLNRSILDQGWYEMRRQLEYKQLWRGGQVLAIPPAYTSQRCACCGHTAKENRQKQSKFVCQVCGYNENADINGARNILAAGHAVLACGGMIQSGRPLKQEPTEASQAPV

SEQ ID NO: 8022 - protein, 395 aa, Komarekiella sp.
MEKAYRYRFYPTTEQEQILRRTIGCVRLVVNKALAARTEAWYEKQERTDYVQTSAMLTQWKKLEDLQFLNEVSCVPLQQGLRHLQTAFTNFFAGKAKYPNFKKKRSGSSAEFTKSAFRWKDGQVYLAKCAEPLPIKWSRQLPKDCQPTTITVRLEPSGRWFLSLRINDPIDETMQLVDNAVGLDVRVSSLVTLSTGEKIANPKAFGKHYQKLRKAQKSLSRKHKGSRNRDKARLKVARIQAKISDSRKDHLHKLTTRLIRENQTIVVEDLAVKNMVKNPKLARAISDAAWSELVRQLEYKSKWYGRNLVKIGRWFPSSKRYGHCGHVVEKLPLSIRKWDCLNCGTHHDRDVNAARNILAVGHTVTVCGANIRPLGHKSKGQLRKTRKGKKQKPES

SEQ ID NO: 8023 - protein, 379 aa, unknown
  TnpB Polypeptide
MANKAIKYRVYPTTEQCIMFAKTFGCCRKVYNLMLSDKIEGYKRTGKFSTVTPAKYKKDYPYLKEVDSLALANKQMDLQAAFRNRFSKSRKRANGFPKFKSAKHSRKAYTTNNQKGTVAIIENKYIKLPKVGKVKAVIHRIPDHNWIIKSATVSQESDGKYYISVLFEFDKAVDPYVADKTNAIGLDYASEGLYVDSNGNVGTNHKYYRESHDKLAKAQRKLSRMQGSKKGETKSSNYIKQLRKMNKIHRHIANQRLDNLHKLSTEIANQYDVVCVENLNMKAMSNKGFGNGKATLDNGYGMFLSMLGYKLSDRNKYLVKVDKWFPSSQICHCCGTLHPEMKNLAIRKMSCDCGLTISRDQNAAINILKEGLRLLSKAA

SEQ ID NO: 8024 - protein, 439 aa, Halorubrum sp.
MSEECKTLEAYLAPPTQHKQRKLHDEDERYEALLRESFNDECDTMSAVNEVVSGEDLNWHSKNALKQYVPNLLDKDTYDAKQLADTHPIRYANTAAVFDHDDDRHHEICWEVPLPGHGTNFWIPLQLNPEQEDWWHSLIDEDDDSVWAGELRLQRDGSRWVLHVAANYEVEPDHACSTTSDDVTPIGFDVGEAKLLVGCALRDNTPVDPLFVDGSRVRHLRQKQASAEDRLKPRYASKLLDDLVWGRWQDAIEDEIEKASTRAVEYASQFENPVIVLEFLEGITDEDIGKYWNRRLGKWLFSQLQSRIEDKAAERGIPVEYVHPHHTSKTCHACQHIGYRPHQGTFKCTNDECWVSEYQADLNAAAKIAQRLNPWGESLPWKSAGNDSPQSGGQWQAHEDTSSSERLLSERRALNDKVLSSSPAVGAGAEPETGDANTS

SEQ ID NO: 8025 - protein, 390 aa, Clostridium sp.
MKKLKRAYKIEIDPTAEQKSKIHQTIGVSRFIYNFYIAHNKEIYDREGKFVSGMDFSKWLNNEYIPNNKDMKWIKEVSSKATKQAIMNGDKSFRDFFKKAKGFPKFKKKKNQDVKAYFPKNNKTDWTIERHRVKIPTLGWIRLKEFGYIPVNSIVKSGTVSQKADRYYVSILVEENDKKVYKSTNEGVGIDLGVKEFVVCSDGIKFKNINKTSTVKKIEKKLKREQRKLSRKYESLKIRNKNIKEGRATRQNIQKQVVKVQKLHQRLTNIRTDYINKIVSSIIKQKPSYITIEDLNVKGMMKNKHLSKAIASQKFFEFKTKLTFKCKENHIELRIVDRFYPSSKTCSQCGKIKKDLKLSDRIYKCDCGLTIDRDLNASINLKNAKEYKIA

SEQ ID NO: 8026 - protein, 419 aa, Fischerella sp.
MIYQRLCIINQEVMQVFNLTYEFKLKPTQNQIALFEDWLELCRRVYNYALAERKDWFKSRSCQINACSLCCEYIIPSNASRPTYASQCRGLTQARAQYPELNAVSVHVLQQTLKRLEQAFVSMWERNHGFPRFKKQGRMRSFVFPQLGVNPLGQGQIKLPKIGWVKFRQSRDIPDGGVVKQARVVKRVSGWYVMLTLQWDVSVPQPMPHGEVLGIDVGLTSFVATSNGLLVKRPRFFAEAECKLKLLQKSVSRKRIGSNNWHKAHKKVAKLHEYVANCRKDWHRKLSHQICNHAGMVFVEDLNLVGLSRGMLGKHCLDAGFGQFFNILEQTCFKRGVYFQKVDSRKTSQICPSCGVETGKKELSERTHTCSNCGYTTDRDVAAAQVVAIRGLAAVGHTVKMLAEGKFIGIPVKQESPAF

SEQ ID NO: 8027 - protein, 433 aa, Streptomyces sp.
MQLRYSFRVYPSTGQRAALARAFGCARVVFNDALRIREEARAAGLPFVTSAELSKHLTAAKKTPERAWLGEVSAVILQQSLRDLDTAHRNFLDGLKGKRPKMGAPRFKSKRDNRQSIRFTANAAWRITPGGKLRLPKIGDLKVKWSRSLPSTPTTVTVVKDAAGRYFASFVVETDACEVLPETTSEIGIDLGLGHFAVLSDGTKVDSPRFLRRAEKSLKKAQRDLLRKEEGSSNRNKAKVKVARAHVRVADARREFHHQLSTKIIRENQAVAVENLAVKALARTRLAKSIHDAGWSAFVSMLEYKAARHGRTFVRIGRFEPTSQVCSVCGVKDGPKPLNVRKWTCGACGTVLDRDVNAAVNVAKAAGLAVSACGAQVRRASVPAPRREAGSHPKRPTPLAWEQAGIPGLRAREDVNRSSSPTPAPGEGRQLSS

SEQ ID NO: 8028 - protein, 335 aa, Enterococcus sp.
MLKAFKFRIYPTESQKQWLIQTFGCVRFTYNHLLKARQAYYLETKEIDYTLTPASLKKQYPFLKEVDSLALANAQLNLDRAFRNYFKGRASFPKLKNKKSIWQSYTTNNQKGTIYLEETSIKLPKLKEKIRIHAHRPIEGTIRSATISSRYNEIFYVSLLCEVPQKTMEASNKWIGIAYDPDRLVEMSTPLDIAIPKFKQVDQQLQRAKRKLVIKGRAAQHRRAHVERVKNYQKQKRKIKDLYLKQKFQREDYFEQISGTVIRHYDYLFVESIPADCREGDFSIQDWHKLLAKLQYKAQWYSKKLVLIDMKEQTNPSTTKKSLELVEIGKQVLFE

SEQ ID NO: 8029 - protein, 284 aa, Kingella sp.
MLILKAFKFELIPNGEQIRKLKQFCGCSRFVFNRALAYQNEQYQKDNSFKFSYAKIANLLPEWKRELVWLKDCHSQVLQQSLKDLEASFKNFFAKRSDFPKFKRKGEKDSFRFPQGCKLEQQNNRIYLPKMGWVRYRNSRAISGSLKNVTVSQKCGKWYVSIQTEFETETPKPNGGEIGIDMGIVRFATLSNGEYFEPINAFKNLKGKLAKLQKRFKNKTKFSKNWQKLKAKIAKLHHKIANIRKNYLHQISSQISQNHAIVYVEDLQVANMSKSAAPPQLPAK

SEQ ID NO: 8030 - protein, 490 aa, unknown
  TnpB Polypeptide
MVFVYTVGLKPTNQEKEQLNKRFNQSRAVYNFTLKELLKRFNKLKKDPLYKKAYKLPKGAERNAVLKELDSIYDLQGKFSASKITKEARKVLMLEDYLYSDLCIVIGFRAWNAFSKMKFANGANRINFSERMDSLVASRLNKGICVIDDTLLFGMKRKKDTLIKIKINFTNDDFEKEVFKNKLLYWQLIRKEFEGSFRYYLQAVMDGNPPTSKLEGGRGSVGIDIGTSTVAVSSDVQTELEELFPDKNRHYRETKIARLSRSLDRKRRATNPDNYNEDGTIKKGKKLWTFSPRYIKDRTRLSELKRKEALSRKLAHRTLAKKIVSYGDRFVVEEMNFSGLARRSKETKINETTGRFISKKRFGKTIGNRAPGLLISLIKEAAEREGKTFIVADTKSVKASQLDHTTGEYIKVPLSARTKTVDNFKVQRDLYSAFLLQHVKDDRKTVDLNLCAKNFERFLDNQYRTMKELETNLSSTGKKDFFREELLKTI

SEQ ID NO: 8031 - protein, 422 aa, unknown
  TnpB Polypeptide
MLRRQAYKFRIEPTGEQQRKLRQFAGACRCVFNEALTLQQRNREDGGKYIGYVAMAKQLTAWRNGALLPSGRLAPWLKVAPVHPLQHALKDLDRAYQNFFEKRADFPRFKKRGLHDSFRFPDSKQFKLDQGNNRIFLPKLGWLRYRNSRQVLGTLKNVTVSLSAGHWYVSIQTEREVAVPLHAAPLAVGIDLGVVRFATLWDGERETVLEPLNTFARHQHRLAKAQRQMARKTKHSRNWLKAKARVQRIQRQIANARADYLHKATTAISKSHALVIVEDLQVASMTRSASGTAEQPGSRVRQKAGLNRSILDQGWGEFRRQLDYKTAWEGGWLEAVPPHRTSQECPACGFTHADNRQSQAVFLCLACRHRENADTVAAKNIRERGLKQLEGQDHARIACGVNGAVRPSAAGTHRSDDAAKAA

SEQ ID NO: 8032 - protein, 425 aa, unknown
  TnpB Polypeptide
MDPVNITYSRKIRIYPNNEQKKLFNKCFDVSRFIYNKGVEVINKTYQDQLNNYKKQNENGCITCKAKTENNFFCDKHKKQKLKWKLPLTLPTLRPMVMKSDKDLTENELWQKEVPYDTRQLVLKSLITNYKSAISNKRFGNIKEFEFKFKRKDNPQQIMFVCKKAMIGGCIFKRRLKKKSKILFEKRHDIYSNYTPKHDFSIIKEHNKFYVIYSKERISSYKNAKYDVCSLDPGVRSFQTYYSPENCCGSIGDNVNSKLTTMNNKLDKLSSIINSVSGRTKHNIKKRCLSLRTKMKSFVRDLHWQTCSFLTKNFGTIIIPEFKSKNMVKKDKTRKIGKRTVREMLGLSHFSFLQKLKFKCSEYNRKLIITTEEYTSKTCGNCGELNQKLGSSKVFHCRKCNLHIDRDLNGARNILIKYLLKKSLN

SEQ ID NO: 8033 - protein, 380 aa, Saccharopolyspora sp.
VGVVCAQLQSNWDSGRISVVRGGRKLLHHRHHLGQAGLSEEQWRARWEAERWFFAADGEWGKKSGNETVRITPDGEVSIRLPAPLEHLANARNGRYVLTAIARFQHRGAEWAEHIAGDRAVAYRFQYDATRDRWYVGASWQRSPAPSVPLAVLRSGPVIGVDTNVDHIAAWKLDPHGNPTGRPKTLGYDLSGTADHRNAQLRHALSQVLRWARSEGVRAIAVEDLDFSDSTTREKHGRRKRLRQLISGMPTGKLRSRLVSMAAETGVGVIVVDPACTSKWGNEHWRAPLSRKKHEITRHHAASVAIGRRALGHGIRRRVTPPRHDQSDRVGHRTIQAQPRTRGCEGTRPDATGTRTRSVLSGRRANAGTQFVQHRSGGTQ

SEQ ID NO: 8034 - protein, 404 aa, unknown
  TnpB Polypeptide
MIRTTEHSLKYITDHKKQKLDILFEEYQRVVNEYIRLFWNQTSWKSKASSEEYNQVDSWLMGKIMKCAYAQAIQIIRSTKDKQKKLVYKQYKRVYSKAIKKHPNWNIVTQRFSEWSKGKTFRDRTKIPFFSGDSIELNSDLCKIYQDVNVSHFDMVIRLGSIWGNRLSLELPIRKHKHFNQLLESGFNVKSSLRLSRKNNKYSINLYLSKELEDVKDEGNIIGIDVGIKKLMSISDGSFIGTEIESIIKKYKRRKQNSKNSKKTLKQIKDYIGYCVNQLNFESTQCIVMEELKPSNMMKKGKSSKEFRKTLSKWNQNLLVDRIKNKCELNRVELQFILPHHTSQMCSQCGEIHRESRKGELYQCISCGYSLDADYNASLNIVNKFLNKESTVPSNTKTTIPIFS

SEQ ID NO: 8035 - protein, 443 aa, Bacillus sp.
  misc_feature (194)..(227): Xaa can be any naturally occurring amino acid
MEVNQIIINKAYKFRIYPNQAQTILINKTIGCSRFVFNHFLSLWDYAYKETGKGLTYGTCSAKLPAIKKEFVWLKEVDSIAIQSSVRNLADAYTRFFKKQNSAPRFKSKKNNIQSYTTKQTNENIAVVGNKIKLPKLGLVRFAKSREVEGRIVNATVRRNPSGRYFVSLLVETEVQELPKTHSYIGIDVGLKDXXXXXXXXXXXXXXXXXXXXXXXXXXXXXXXXXXGRYFVSLLVETEVQELPKTHSYIGIDVGLKDFAILSDGNPYKNPKFFRSLEDKLAKAQRVLSRRMKGSSRWNKQRVKVARIHEYISNARKDYLDKISTDIIKNHDVIGIEDLQVLNMLKNHKLAKAISEVSWSQFRTMLEYKAKWYGKQVIVVSKTFPSSQLCSCCGYQNKDVKNLNLREWDCPSCRTHHDRDINASINIKNEAIRLLTARTAGLA

SEQ ID NO: 8036 - protein, 445 aa, Bacillus sp.
MAFFMSLSIQEEFHLFAQELQQYLSPHILQQLAQETGFVKRKSKYGARDLAALCIWISQHVASDSLTRLCSQLYANTATLMSPEGLNQRFNRCAVLFLQRVFSLLIKSKLNDFSQISNQYTSYFQRIRILDATIFQVPNHLAPIYPGSGGCAQTAGIKIQLEYDLHSGKFLNFQMEPGKNNDKTFGTDCLDTLRPGDLCIRDLGYFSLKDLDQMDQRGVFYVSRLKLNNRVYVKNDYPEFFRDGTVKKQSLYVLLNLEDIMHQIKPGDTYENPKFFRSLEDKLAKAQRVLSRRLKGSSRWNKQRVKVSRIHEYISNTRKDYLDKISTEIIKNHDVIGIEDLHVSNMLKNHKLAKAISEVSWSQFRSMLEYKAKWYGKQVIVVSKTFASSQLCSCCGYQNKDVKNLNLREWDCFFCRTHHDRDINASINLKNEAIRLLTARTAGLA

SEQ ID NO: 8037 - protein, 380 aa, unknown
  TnpB Polypeptide
MHPTWRQGQALARQLDLQRELYNAALEERIGAWRRQRHRVTYVEQCRELTELRDDRPEVLASGTVLCRGTLKRLDRAYAAFFRRVRNGETPGFPRFKGARRFTTLQWEDRWGWKVKCGDHRLRLLGIGEIKVNFHRPFKGTPKTITVKREGKKWWLGVVCVDVPAEPLPATGREIGVDLGAVNLVATSEGEVIKGPQFGARTQQRLVSAQQRFARQQRGSKCRERQREVVARLHRKVANQRRNFAHQLSRRLVNDYDLIVIEDLKVREMTRAPKPKPDPEQPGEFLTNGAKRKANLNRSVHDAGWATLTALLSYKAESAVRTVVKVSAHHTSQTCAECGYVEAGNRVSQAAFRCLKCGHSDHADVNAARNILRAGRAQRA

SEQ ID NO: 8038 - protein, 396 aa, Lactobacillus sp.
  misc_feature (63)..(71): Xaa can be any naturally occurring amino acid
VDKMPEYYIKTKSYELFPNKQMKAVFDRNCDYRRFCWNEALALWNDEYDIRQLMLDKEIKAEXXXXXXXXXHLLQLAVQDLGKAWQNFFNKAQKDWGKPKFKSKRAPKQGFKSDQARIVNGKLVLEKPQGLKANWQPIKLSEKPFDYPTGTMSFYRVRDRYYVAIPYKIPKDRFEVKKKTGKATGVDINVGHFNYEDGQLLIIPKSLTKTYSKIKHYQKQLAKKRTVNGRIKGAQSKKYLKTRIKLQASYQRAQNIQTDLMHKFTTELVNNYDQIAIEDLEVKGMLMSHVASKGMHRSMFGLFRKLLTYKCEWYGKELIIANKLYPSTQRCAACGLVKKGDEKITLQGNKKHGTKHNEFVCYNPSCPNYNKKVDRDENAMANLTLLVKHPELNRAL

SEQ ID NO: 8039 - protein, 478 aa, unknown
  TnpB Polypeptide
MFVVFLPGGERMGQATRTTKLPLDLCQRTHGGANTDKRAFLDATVQVLNAARAFYVDFFLVHAEKLSERVSYYSEKHLEVRERAISANELLTWAEFHTVETKEHPHPWPTWNFSECFPDMPFVYRRSVIKDAIGKVRAYLSKRSTWEQTGKKRGEPGLPGASNHPSLYQGTIELTVGEADQHERFVRLKVYTGACWRWVNYPVHSSCYFERRHSEADWEQQSPKLVLRKKSAELHFSQTKEIQAKKVKESKQDPHLVTVAVDLNVKNLAVITVRQDGKIIETVFVTDRGLDHHRYRHLKRLAKKQWLSGKPIKGEHSNQQLWQHVRRMNEDAAHQVARIIANVCAKYPGSVLLFERLRKIKAKGASKSRRMNRRQANQLRGKINQHAKDKAFAQGVVTVEVNPHGTSQYCSRCGAKGERFSNLRGKRIKAKWGKLFWCPVCHYEANADLNASKNVHCSFYREWHWQPRKKAPKAAPSG

SEQ ID NO: 8040 - protein, 391 aa, unknown
  TnpB Polypeptide
MIKSIKVRLSPNNKQLTKLLRYAGCGRFAYNWAITREQENYKQGNKFLSDNDLRKEFTQLRKLQQYKWLNEVSNNVTKQAIKDACNNYKRFFKGQCKHPKFKSKKHSTPSFYQDTGKIQFTGTHVKVEGFSMSKKRNKQKLNWIKLCEKEKIPINCKYLNPRFTYDGLYWYVSVGIEVGGNIPPPSNDGIGIDLGIKDLAVCSDGNTYKNINKTQGVKKSEKRKRRLQRSVSRSYEKNKKGGNYCKTSNIIKREKELLKVTKRLTNIRQNYLHQTTSEITRRKPSFICIEDLNVSGIMKNKHLSKAVQQQCFYEFRRQLKYKSEWNNIKFIIADRFFPSSKLCSCCGKIKKDLKLSDRIYKCECGNIIDRDFQASLNLKQYGENVLKQSVI

SEQ ID NO: 8041 - protein, 224 aa, Photorhabdus sp.
ILCDDGKDAPEKPGVITRVTGCDMGLSHYLIESTEEKVNNPRHLINATRNLRRKQKSLSHKQKGSANRGKARLRLAAVHERVANARADFQHKLSRTRVDENQAVIVETLKSANMMKNRHLARAIRDAGWHGFLMKLEYKAAAAGVKLDQWFASSKTCHCCGHKMPELPLNKRIWQCPVCHVEHDRDINAAINIQRKGTTALQAAGLVVSAHGGQRKSVIKTGAA

SEQ ID NO: 8042 - protein, 353 aa, Paenibacillus sp.
MQPITVKIRFFPKDISGLKELSKEYIRIVNTLTERAEIEGSFPKVTTKNIEAALPSAVLNQVIRDAKSVFRITKKRKKRPVLKKPTYCINNQNYSLDQSSLAFPIMVNGKAKKTIFPALITERDKKILQAAKLGLMRVVEKSGKWFAQISLEVPTPSQKPTKEQLMGIDLGLKVPAVAVTNEGKTKFFGNGRENKFMKRKFRKTRKCLGEKKKLSTLRKLHDKEQRWMKDKDHKISREIVNFAVDNQVSIIRLEQLTNIRKTTRTSRKNEKNLHTWSFYRLAQFIEYKANMVGIKVEYVDPAYTSQKCPTCDSKNKVKDRKYACSCGYKTHRDRVGAINIIHAPVIGGNSQSA

SEQ ID NO: 8043 - protein, 391 aa, Lactobacillus sp.
MVLKAVKVRIYPNSAQRNQLWQTFGCVRFVWNQMLNMQIERRKNNPEAKFVNAFGMNNLLKQLKVEYPWLKQAESTALQSANRNLADAFQRFFKGQNKFPRFKSRKYSQSYNSKYVNGNIKVLDCHHIKLPKLGIVYFRAGRLPMGKIKNVTVRLNVAGQYYITVLVESENQTLPKTSKYIGGDLGLKSLLNLSDGCKEPINHFEDKYHKKLYRWEKLRSRRFLKAQQEIAWDHHNKVLVPRQLDDFKNYQKARIMVAKYRQKIANQRLDQLQKFTTKLVKKYDIIVLEKLNTKGMMKNHHLARAIANASWSKLVDMLQYKCDWYGKKLIQVNPSYTSQICANCGKNNYRLGLNKSEWLAVREWDCPNCGKHLDRDINAAQVILQKGLAIR

SEQ ID NO: 8044 - protein, 370 aa, unknown
  TnpB Polypeptide
MEHSYKFRIYPNKEQQNQIEQTFGCCRYVYNHYLTVRREAYEKDKTTLNYYDCTKDLTNHKKENDWLFLASNAALQQSLKDLDVAYKNFFRGIKQKKKVGYPKYKSKKNNRQSYRVTNVGNIIRICDNKINLPKLKLVKCKVSKKVEGRILNATISRNPAGQYYVSICCTDVEIKPFEKTGENVGIDLGIKDLAVCSNEIHYPNHKFYNKSEKKIAKLNRQLSRKSRGSNNKNKARIKLAKAYQKIADQRKDTIHKMTTELVKNYDVICIEDLNVSGMVRNHKLAKHISDGIFYEIRRQLEYKTKWYGKELVVIDRFYPSSQTCHCCGAKYEGTKDLSVRKWTCPECGTVHDRDTNAAKNILNEGLRLLA

SEQ ID NO: 8045 - protein, 444 aa, Okeania sp.
LKSRYKYRIYPNHIQITKLNQLFGCCRYVWNQSLVYCNQLYAGGQKKPSYVDLTKQFITQAKKELLWLKEVASTPLQQSLKDLDQAYKNFFDSCTEKRKGIQVKPPQFKSRKSRQAARFVGVNYKIGQDKIYLPKVGKIKIFWSRKLPSQPSSVTIIKDSSNRYFASFVVETGAENLPKSGHSIGIDLGISTFATLSNSEKFKLSLPLKKNLKKLAKFQRKLAKKTPGTNRREKARLRVAKLHRKIQDIRTDFLHKLSTDLVRKYDVIVLEDLNVSGMVSYGMLRKRNRKLAKAISDLGWRQFRTLTEAKCEKYGCKFRVIDRWEPTSQKCSHCGFKGGKKELNVREWTCLNCGTFHDRDINAAVNILNTQSVLETVNQPITKVETVKETVAKNPIQLSLFEEVAEGQRSIIYRTRRKRQTGLPADSNDVSTRPESFVQLSLFD

SEQ ID NO: 8046 - protein, 412 aa, unknown
  TnpB Polypeptide
MTVQRVEKHKIKPSNKYYAMLDNFCFLSKNLYNHANYILRQEFINGHKAVPYRDLDKILKSDEGYPDYRAMPTAQSAQQVLRLLDQNWKSFFKSIKDWSKNKGKYTGKPKLPKYKKKGGKNILILTNQNAKLKEGALRFPKKFEGFELQLNCCKKENFHAFNQVRFIPKQGYIVAEVVYSISICEAKTDNRRYCSIDLGIDNLAAVTTNAGHRAYIINGRGLKSVNKHYNKQMAHYREVAKRMNGADYTKRMGKITDKRNQKINDYMHKASRYIVEYCRERKINTIVAGYNNDWKRGAKLNKNVNQSFHGIPMQRLIEMIQYKAQEAGINVILTEESYTSGTSFIDGEKPDKMYYDKRRRIHRGLFNSNGGTKINADINASYQILKKVFPAAYANGIEGVVLHPVRVNAAFL

SEQ ID NO: 8047 - protein, 453 aa, unknown
  TnpB Polypeptide
MQQIITAKLKLVTTKEQFEALRKVQLAYRDALNAVSCYAFSCGKTSNVTRLHKGMYAELRTHYHLPSQLACSVERQVAATYKGLWTKLKKNVEHRRKKITKKRFKGLDKPPKYSSPTVQYTYERDYTFQCDSRVSVGTLNGRISLPYQGYDKHLALIQAGARIGDAKLWYDRPKKQFYLLVSLTIDLAEPTCEQFTEVVGVDVGVRYLAVTSTSTGKASFYPGKRTRHQANHYARLRKRLQHKGTRGSKRRLRRIEPRERRLKAQANHCVAKQIIEQHPHTLIGLEHLTDIRERTKRKRRRRKKNGKGTEPVSPKARKANRVSSQWSFAELHNLISYKAALSGSLAIKVDADYTSKRCPRCGHTEDANRPQKGLLFVCQNKRCGYTLHADLIGARNVTLRTLLVRHDWIRTGLLSMAPDASDREAKAARLQRYAELRWSPVVTSLRLLAGGAN

SEQ ID NO: 8048 - protein, 365 aa, unknown
  TnpB Polypeptide
MLEFDITNRMAKAVIKIAKKRLKLSKELSYYQYKRLYKRKRSLQKKIDKLKLSLNSNRLKRRKLAKVRLFWTQMKLNKVNQLISNGLKLNLTFGTKHLFKTNKNKFLAKRDNQVVYIGDKNETCGNQQFQVEFDSKCNHFKYKLRLDNQWVSGNNKYIFGSFILKNKEAKVNVLQTLSTKLSNPLTYHIIKRDDTLYLQILYRREIPNVTQNTNGVLGVDFNKGFISVSEINQNGKLQSLTRYNYLHKGKATKTKTSMLDLVSKLVTQAISVGKDIVIEDLVSLDLNKKQNKTTSKDYNNMLNSLKFGLFKRCLLSKAAKEGVSIHIVNPYNTSKIAKASYTNRMKLNVHDAASYVIARRFYKYD

SEQ ID NO: 8049 - protein, 447 aa, unknown
  TnpB Polypeptide
MQKHKFTVVTQLHEKNNLDLIKYIESSRSEYAKAVRKTFYALKASKNFNKSNFNTYLQSSYDITERTANSIILYTQERFNSFKGLKQYEIKQLKHKISYLEEQLIPKLVEKRNSNSKLFKAGMSISLTKQRNLRLKIVAKKAKLNRLKQKLNNLNYQLESGRLKLCFGTKQLLRQDYNRFVEQRDSQMTFIGAKAETCCNQNLQLTYNQRNNQFLIKLRKDLGGYKSAKGNNKYVYGKTYFNHHKDRIISILKNKNSPLSYKVIKKNGRYYLCCTFEIQTDTSNFFTCSDYGAIGLDFNKGFVTLSETNQYGHLVKTKLLPYRFRAGNKTKTDLQRIANDVVKLSQLTGKDICIENLDFKATKSKTETKYGKQYNEMIHSLAYRQFTDIIESAAYRNKVTLTKVNPAWTSWLAEKLYCPIMKLNVHVGASYVIARRGQGYKDTVKSL

SEQ ID NO: 8050 - protein, 426 aa, unknown
  TnpB Polypeptide
MSEEKNSKIKDTLRATKERRSQMDCRVFSFKVQENRLSRAKEEKLNRCFLEAKWLRNAVVATDSLSLEDTSNVQVKVNGSFETREIKCLSSQMKQSVVDGVKQDVYNLSKAKKKGLKVGRLQFKKECSEINLKQFGHTYSIKGKNKIRIEKIGVLTVNGLEQINLDEVEFANAKLIQKPSGFYIHITTYSKKQFQPQSSPEKEILGLDMGIKEQLTFSNGVKVNFYMEESEQLKGLMRKLSRQHKGSNQYKQTLNRIKRIYEHLNNKKNDVVNKLNSVLKQNYIICFQDELLNSWKRKKSKQKFSFGKQVQHGILGRVKDKLNKLKKNNSNYMLESSVPTTQTCPECGWLTKHSLDKRIYHCSHCGYENQDRDIHSAKNMILLSGYGTYRSLNTDTVSTERMISLLTNLSNLGVVVTTNSMEAHCL

SEQ ID NO: 8051 - protein, 381 aa, unknown
  TnpB Polypeptide
MTIVQKSIRVRLYPTEEQQVLINKTVGCCRFVYNQTLENCKQFYEQTQHFPSKNERSANLVPLKEIYDFLKEVDACALQQSVRDLDSALNNFFKNRSHFGFPKFKSKHTSKQSYRTPYSKSNAKILDNKHIKLPKVGRVKTKKFSMPKVYKIFNLTVEKTPTNKYYASICIETEVQPLPKTGKQVGFDLGLKDLLIGSDGTRYERPKFAYAYKDKLTKEQRKLSKMRTKLERANLNLDECKNYQKQKRKVAKLHEHIANCSKDFNHKLSRKLVNGYDFIAMENLNVRGLIKNHNLAYSIADVRWSQLLNFIRYKCVWYGKNFIQVDRFYASSKICSCCGTYHKDIVNSLKVREWVCPDCGTHHDRDVNAARNILNQALSVA

SEQ ID NO: 8052 - protein, 239 aa, Nocardia sp.
VGVDRGLSSFPVAATVDGTGVARMDNPPKPLARGLRRQRRLAKALSRKQKGSRNRTEAAAGLARHHHQIANMRRHFLHQVTNMLVKTHDRLVVEDLNVAGMLGNHRLARAIGDAAWGDFARILGYKQQWRSGEVVTADRWYASSKRCSACTKVNTELTLSDRVFACGCGFRADRDLNAAVNLAVWPTLRHEDSLRSPDPRAGGRVTNARRREGADRHPAGAGETVPDDAGTDVHTTAVA

SEQ ID NO: 8053 - protein, 347 aa, Thermoplasmata sp.
MPTTGHLMDTIRTYRAKILNHHQVKNDLDRCGFSASKLWNVGRHYIERVWEETGDIPNGYELKTELKYHERYRDLYSQSSQQVLEELAEAFKSWYNSNDEDDNPPGYRKRENQHPRSTVTWKKDAIWHDEHNNRLRLSKGFNHKTKRDDYILCEFETRPDVTVEGIQVVRSVWNGDVWELHIVCKEEIEIDENPNGKTAGIDLGINNYLAISYGNGGTTEIYPANTLKEDKHYFTLKEYKTEGENGPSEKALRLRRTLARRKKHFLHTLSKHIIERCVEEDIGKIAIGDLSYIRKQEDGESRTWGKSGNKKLHGWEFEKFTDLLEYKAEEEGITVERIDENNTSKTC

SEQ ID NO: 8054 - protein, 404 aa, Komarekiella sp.
MLDVLKVRIYPNKEQEISLTKSFGCSRFVWNFYLNKTNTQYEETGKGMTYCQMAKDLTQLKKLTNYEWLQEPTAAVLQQSLKNLESAFKNFFSKRTGFPKFKSKHSKQSIRFPESCSIKDSGLKLPQLGIVKASLSKNINDKIKSVTVSKTSTDKYFAAILFETKDLTNTKQGKISGIDLGLNSLVTVFDGEICYKVDPIKPTRKYAKRLRIRQKALSRKVKGSNNRRKAVRVVAKVHEKISNTRTDFLHKLSRKLCDDNQVIVAENLCVRGLARTKLAKSIHDAGFGMLLNFISYKLETEAGKFVQVDRFFPSSKLCSFCGHKNDFLNLSIREWICPSCQTPHDRDENASRNLRSEGIRILSTNTAGHAEIQACGEAVRLVGTCAKKRQCGLGEPVRSWGFPK

SEQ ID NO: 8055 - protein, 453 aa, unknown
  TnpB Polypeptide
MSNKLVSSAETQHRALKLRIYPSQSQEILINKTFGCCRQIYNNRLFERNQFYEQIIKPANPEEHKTLWKQAHFSTEKEMKVKFPYLAEVSSQALCSATMFAEAAYKNFFASVKGARAGSQVGKPKFKSKKSHDFSYRECMNIALIWNERKIKVPKLGLVKFRHSGNKKRKLDFFLAPGAELKSITIQKNPAGEYYAVLLFEREYCHKQKFYESGENQAIGLDFSPADFYIDSDGSSGKDFGYIAQKQANHKKLTKLQRNMMRKKKGSNNQEKARVKVARMEHYISECRNDWIEKETKRLVSTYQVIGIEDLNLRGMMKFSRNAKNYGDASWGTFVNKLLWKSSLNENNCQVIKADRFFASSQICHCCGFKNPITKNLSVRSWICPECGAEHVRDVNAAISLKENAIKQVRQGVSEFRSVKGVEDLASLALAIVGASDEAENLTGDGHNAFTLI

SEQ ID NO: 8056 - protein, 410 aa, unknown
  TnpB Polypeptide
MRSQKIRLKLTKEQERLAWWYSKVSRNFWNLLVDIDKRNNKGEFDEILNKNGNKTYYSKFYDREIYNLNPSDYLKLVKIVIANNYDEDKWSWYYQPNQSFIYNFLSRKLVKIRKQNKGRLKFRSIDKVQPNFNVRCDIFSNRKCPSRIYLKGNGKLQIPTIGEVHFGSIRKDFNLSCKKQVANISFDGKYWYLSYTEDIEIQVTDLPNYTDGVGIDLGIKILATVSDGTSVPNIKTFRRVRILNKRLKRLQRKVSRKYLINKCNKYNKTKNIIKLERQIKLIHRSIRNIRINHIRKFVSVLVKKQPQYIAIEDLNVKGLMKNKHLAKDIANCSFYTIREHLIRKAAERYIAVRLVDRFYPSSKTCSNCGNYQKDLKLSQRFYHCTNCQMNIDRDFNASLNIAKTDRYVLT

SEQ ID NO: 8057 - protein, 392 aa, unknown
  TnpB Polypeptide
MKAYKTEIKPTKKQIELIHQTFGNTRYVYNQFIKLNLDRIKKKQSVVSGYDYSKMINNDPERPDWLIKSSSKAIKQAIMNGNKAIWDYLNGNKGKPNFKKKTKDNSFYLIGTIKVERHRIYLPKLKWIRLKEFGYIPNNIKSVTVSMKNGRYYVSCLTHEVKDERISTSNKGIGIDFGLKDQFITKNEKIQSINKSSKIKKLEKKLKQKQRALSRKYESNMVNKEYYKTGKKKGQLKSFKWIRPLHECKNLNKQQLTVNKLYERITRIRTDYNQKALQSILKQKPRFVIIEDLNVKGLMKNKHLSKSISKAQWYMSRLFLTQQCEKLGIELRLAPRFYPSSKLCSKCGYKNKDLKLKDRSWTCPECNIVHDRDVNASLNLEQYENYTVLTTV

SEQ ID NO: 8058 - protein, 466 aa, unknown
  TnpB Polypeptide
LGGYSTKRWTWSSSPLLSTREASKSAQMVVKSVRSVSCAPSVSTFLRYFVTNTKCTCNAKTQCLPVRNVVDFSIHQLYTIPMQIRKGSKYRLKTNRTTGAQFVCFAGACRFVWNKILALNEGRYLAGVPRLSYNDAAALVAWWKESEEYGWLKNVHSQVLQQCLKDLERAYANLFAGRTAPPTYRKKFLADSFRYPQGFKLDGRRVYLPLIGWVEFWKSREIDGTIKHITVSRDGAHWCVSFQVEMAIDAPVHPATASVGIDLGIATFAAFSDGTLHPPLNAYRTAEKKKARMQRRLAGMVTYSAHWKKQQRRIAKLDSRTAHCRHDFLHKLSTETSKNHAVIVVEDLQVRNMSRSARGTVDEPGKNVAQKSGLNKSILDQGWGMFRRMLDYKQAWRGGEVMAVNPRSTSQTCPECGHVSKANRLQQALFSCVACGYTYHADVVAARNILALGHRERLNACSSREG

SEQ ID NO: 8059 - protein, 382 aa, Sulfobacillus sp.
MQGAFAMVLTLTAKMQLYPNPDQVTLLQQTVEAYRQGCNWVSGVVNTTHCLRQADLHTETYRPLRAQFGLRSQMAQSVIKTVIARYKSVLANGHPWTRVQFTKPALDLVWNRDYSLKAGRFSVNTLEGRVQVPFARQGMERFFDGTWQFGTAHLVHRHGRWFLHVPMTKDVAETGPAEIRQVVGLDFGLNFLVTAYDSQGQTTFFPGRAVKAQRAHFQILRQNLQRRQTPCARRRLKRLGQRENRWMTDVNHQVSKALVVRYGAKTLFVLEDLTGIRGATERVRRRDRYTSVSWAFYQLRHMIEYKAALGQARTIAVDPRYTSQTCPKCGHVARGNRDKRRHRFQCQQCHYRSNDDRIGAMNLHRQGIEYRVTGAIAAGPRS

SEQ ID NO: 8060 - protein, 390 aa, Actinoplanes sp.
VRAAYKCRAYPTPEQAVVFNRTFGCVRLVWNKTLADRHAAFYQRGERTSYKQTDAALTDWKKTEDLAFLSEVSSVPLQQTLRHQHTAYVNFFAGRARYPRFKSRTARQSAHYTRSGFRMKNGELHVAKTIGPVEVAWSWPDVDRAELDPTTVVVSRDTDGRWFVTFAVDTDQPTPLEATGHEVGVDLGIKDFAVISDGDRIANPRHLRRKARNLARYQRLLARCQRGSANRRKAKAKVARAHRKVRNARQDFLHRTSTRLVRRADLIVVEDLAVKNMVRNRGLAKAISDCGWGEFRRQLEYKTERYGRALVVIDRWFPSSKTCSACGHLLAKLDLSTRAWTCPGCRTRHDRDLNAAKNILAAGRAVARDNPGDACGADVRQQGSSLSAIG

SEQ ID NO: 8061 - protein, 345 aa, Bacteroides sp.
VWSLIHNLRKKRDNSGSFYIGGDQIALSFANFNSKRFKGIPHNERQKRQYLKVPNLGWVKMTEAVRFIGKINGVVISQEGNRYHASFSMEITEEEYRRTHPQTTRTKQRCLGIDLGVKSAILLSDGISIENPKHIKKQEKRITRLSRQLSKRGHARTKQERLLGVQKSSNYRKLSVRLCNVQRKVANMRRDFIQKVTTLFTVYYSHIVMEDLNVKGMMRNYRLARAISDVGFGEFRRQIEYKSASNGVTVTIADRFYPSSKTCSICGDVKVKLKLSERIFRCQKCGTVIDRDYNASLNLLSLITQKRVGTDYPELTPADLAALLFLFAKNGIITSKVETGMQHEL

SEQ ID NO: 8062 - protein, 417 aa, Gammaproteobacteria sp.
VHRNITYRLIPGTRAKAQKLSQIAGACRWVWNYFLGENKRRYREHVETERFCEDTLLGLMFEQPAKPPLTFFELGKQFTILRSQTGWLQELPFTVVRYTLKRQADAWQRAFAGGGFPKFKARDGNDSFTLPQDVRIRGGKLWIPRVGWLVLRRRGGNPYGGCKPVQAVVKRVLGRWYCTVCYAVPHSTQAHNGIVVGVDRNCGHVAVSDGRIFAHPDIQRLEARKRRYERMMCRREKGSKRRAVARYRLAKTHRKIATIRANWQHHVSCELADTAGTVVVEALRTKNMTLSAKGTADKPGVGVARKAALNRAILATGWAGLHAKLSYKAAEVIEVAPAYTSQRCNACGHTEAANRRSQSEFHCVVCGHAGNADINAALNVLALGTEAAGRRGAFSLETPKNRQETYPQGLAYAGLGM

SEQ ID NO: 8063 - protein, 374 aa, Thermotogaceae sp.
VKQLFWSRNYLGKGGLTLLRAYKYRIYPTKEQQEYFAKVFGCVRFIYNKMLYDKIEYYKQTGKMLHNTPAQYKQEYTFLKEVDSLALANAQLNLEKAYKNFFRNTSSGFPKYKKKKSRQSYTTNNQNGTVTLEDGFLKVPKLETKIKVKQHRTFTGKIKSVTISKTPTGKYYASILVETEEIEKLARVDRRIGIDLGIKEFAILSDGTKIENPKWLRKAEKRIKKVQRELSRKQKGSKNYEKTRLYLAKLHEKVANQRRDFLHKVSSKIINENQVIVLEDLSVRNMEQNHRLAKAISEVSWSMFRRMLEYKAAWYGREIIIAPQNYASSQICSECGYKNPDVKNLAIREWECPKCGAKHDRDINAAKNLVKLAI

SEQ ID NO: 8064 - protein, 412 aa, Coprothermobacter sp.
VASKAEKIKSTLQETKERRKTQRVVVYQLKLQNLSQHKEDLLSRAFAEAKWLYNWLVSDTERLTLAVNKINVVEVKVGKTFEERVLTVLGSQVKQEIADRLRDNLRALGKLKKNGHKVGALKPKAFINSILLKQYGVTYKLDFARNRVRIQNLGTFRALGLQQIPEKAEIANGVLVRKPSGYYLHVTCYIPREDTMPKHIGEAIGIDFGVDRKLTLTNGLQIRFELHETERLKRLQRDISRCKEGSNNREKLRGKLRKEYEKINNRRKDVQNKVLAYLKQYKVVVYQDDFIKGWEALFGRQIHASGIGGLKSRLSNSLETPIEVARYERTTQECFQCGRLHKLSLSERMMECECGWKSDRDVNAALVILRKGLGLDPKQAVGLDRPELKPLERETAARILGSNPYICVSFAR

SEQ ID NO: 8065 - protein, 408 aa, Halogranum sp.
MEVRRTVPVKLDVSDSDANLLSETIDEFLWAANYVVGVASNGDWVETRASKLQSLTYDDVRDATRLHSNHVQSARNQAVKALKSVIATWKRGEKASLPTFTSRFCEYNHRNVTFYDDYATLSTVEGRVTVNYVLPDETRHTPHAEYLHSDEWEKTGATLHHRNGSFYLHIRTKADVDTPDLPENGTVLGVDLGVKNIAVTSTGTFWTANEFNHWRREYEKRRGSLQQCGTRWAHENVQSVGQSETGRFEQYLHRVANELVTEAIDYGCSYIAFENLTHIRENIPEATWQHVWAFRRLYGYVEYKAAKHGITTTQVNPRNTSRRCSSCGFTHEDNLGNDTMCCQKCGYRNHRDYNAAKNIGLKLLRNQTGAEGGAPVGVRLNSGMLNANGLTSVPGLGRAGVHAESPRL

SEQ ID NO: 8066 - protein, 327 aa, Halogranum sp.
LNWKKPRKYRSFTYRQSGFELDKKSGPNGRGLLILKKLKGETREIPIRLHRNLPDHEQIKEVTLKKEPTGAWYVSFCIETDKPERPAVEDIEPGDTVGLDLGVLNFIHDSRGRSIGRLDLPNERERIEREQRSLSRKEYQSKNWGKQRRRVAEVHARMSNKKRDYKHKLAHFYTTEYDAVFVEDLNVKGMLESSENARNKAEVGWRNLITIFKHHGKKNGCHVVTVRPEKTTLECASCGTSVYKPLWVREHSCPSCGFELDRDWNASLNVLSRGLRKLGVVHSEETPVETATAVSTDGGSQAVVVDASRVVETGSPVLKEATRSVAE

SEQ ID NO: 8067 - protein, 299 aa, Escherichia sp.
VKRLQAFKFQLRPGGQQECEMRRFAGACRFVFNRALARQNENHEAGNKYIPYGKMASWLVEWKNATETQWLKDSPSQPLQQSLKDLERDYKNFFRKRAAFPRFKKRGQNDAFRYPQGVKLDQENSRIFLPKLGWMRYRNSRQVTGVVKNVTVSQSCGKWYISIQTESEVSTPAHPSASMVGLDAGVAKLATLSDGTVFEPVNSFQKNQKKLARLQRQLSRKVKFSNNWQKQKRKIQRLHSCIANIRRDYLHKVTTTVSKNHAMIVIEDLKVSSGYGQPAGAQCPGKIRFKPFDTGSGLV

SEQ ID NO: 8068 - protein, 185 aa, unknown
  TnpB Polypeptide
LPPDIGGVGGGKKFRKGQPQSNNYQKARKRYARKHLRVSRQRKGFVEKEALRVIKSNDFIAYENLNIQGMVKNSRLAKSINDVAWSTFRQWLEYFGFKYGKATVAVAPHNTSQNCSNCGQKVPKSLSTRTHICPHCGYVEDRDINAAINILKKGLSTVGHTETNTLGERFPLVWLDTSCQIKETQ

SEQ ID NO: 8069 - protein, 384 aa, unknown
  TnpB Polypeptide
VASSVAVVKMNRAIEYRAYPTDEQANLLARTFGCVRFVWNQMLNDAQDFEDAAGVFFVPTPAKYKKEFPFLKEVDSLALANTQLSLHEARSKFLKEPNVGAPKFKSKKKCKAKYTTNCQIHKTKNGAETQTIVLGHDFVHIPKVGDVKINKHRLPDKNWKVKAATIERTKTGKYFISVLFEFTKEVTPVAVKEENALGLDYSSHDFYVDSNGDVANYPRFYRKSEEKLAKEQRKLSRMKYGSKNYEKQKHKVQLLHEKIANQRKNFCHMLSAAIAKQYDAVYVEDLNLRNLAQTLKLGKSTNDNGFGMFRVMLQYKLEALGKTFAKVDKWYPSSKTCHVCGFVNDDLTLADRVWTCSGCGTTHNRDHNAAINIRHVGFLGAYPA

SEQ ID NO: 8070 - protein, 369 aa, unknown
  TnpB Polypeptide
MQVAYRFRLYPSKTAQEKLRFHIELCRWLYNRLLEELNRAREGKRKLTQKGTQALIVRLKEEKLELKEVHSKVLQMVNYQLWSNIKALAQLKKNGKKVGRLRFKGKGWFKTLNYNQSGFKLQGRKLTLSKIGEIPIKLHRRIEGKIKGVIIKRERSGKWYAIFQVEDEPKPLPKTNKAVGIDVGLKHFLTDSEGRKVENPKFYQRALERIKVIQHWLSKKKKGSKNREKQRIKLAKVYEKLTNQRNDFLHKLSRFYVNNYDVICVEELQIQNMVRYHNLAGRILDASWGKFLQMLAYKAERAGKQVLKVNPRGTSKGGSSPLDRDYNASLNILKRGLSGLGRPLEPAEVEPLLVEIPASFIVEAGSPLR

SEQ ID NO: 8071 - protein, 362 aa, Bacillus sp.
MKHMSQTLTVKVKLIPTKVQIRLLEQSSHEYIKVINTLVSEMVEAKKSTKKSTKDIKANIPSAVKNQAIKDAKSLFATKVKKSNYKTIPILKKPICVWNNQNYSFDYNHISIPLMINGKSTRLKVRALLVDKNNRNLNLLKHKLGTLRITKKSNKWMAQISVTLPTNEGVGTKILGIDLGLKVPAVAITDDDKVRFFGNGRQNKYKKRQFRSVRKKLGKDKKLNAIQQLDNKEQRWMQDKDHKISRKIINFAVDNHISVIRLEKLTNIRQTARTSRKNEKNLHTWSFYRLSRFIAYKAMLAGIQVEYVNPSYTSQSCPQCAEKNKARDRKYKCRCGFKTHRDIVGAMNIRYATVIDGNSQSA

SEQ ID NO: 8072 - protein, 451 aa, unknown
  TnpB Polypeptide
LIKSFKIALNPSSEQERAFESHAGGARACYNWCIRYAREKYLDGEKFSLRQIPLQNAWREHRNEIGAGTSVDRETGEINVWWDQNSKQVYEGACKAAGQAYSNFFDSLSGKRPGPRMGRPKTKKKGKAKLSFQFFEQVKLVGYHHISLPKISSEMKLGPIKTHESLRKIIGEKPVKIGTTTISKDSSGRWFASMVIYFADEAPVIPTPAETKAVGIDLGLKTLAVIADEAGKALWEEPNSRHLREAQIRLRRAQKALSRSKFNSGRYKAKKKKVGRIHARVRNLRKDQINKFTTKIADAFPVVVVEDLNVKGMVKNRKMAKAVSDAGFGEIRSQLSYKVNTLIVAGRWFASSKTCSGCGEVKAKLHLGERVYECEGCGLAMDRDVNAAVNLAGIRNRIPAVGYTVTGRGFPVSPSPGKARKVETSRPGNGSTLDGNAQVSTQMDLSNNVQE

SEQ ID NO: 8073 - protein, 366 aa, unknown
  TnpB Polypeptide
LEKAYKFRFYPTKIQIEKLSKTFGCVRYIYNYFLDLKQKLYETEKKSMSFNKCSKELTILKQKKEWLKEVDKYSLQNSLRDLDRAYKNFFSGNGYPKFKSKKDNRKSYRTSYTNNNIDFLDKWIKVPKLGKLKIRDKNFKPQGRILNATISQEPSGKYYISLCCTDVEIENLKTSNKEIGIDLGIKNFAVTSDETTIENSKYLQKSLEKLVLFQKRLSRKTNGSSNRNKARIKVAKCYERIANQRKDFLQKLSTKLIKENDTICIENLQVKNMVKNHKLARNILDVSWSEFTRMLEYKASWYGREIVKVDKFFASSQICNCCGYKNKKVKDLSIRKWTCPECNTSHNRDVNAAKNILKEGLRILEA

SEQ ID NO: 8074 - protein, 476 aa, unknown
  TnpB Polypeptide
MCFITKKEKDNRINKLCSQLRHIKNDIINVETTKYKSHHTYHNWINDIKKHIIPNKSFAKDSIHYDIHAKQFDYLPCMIYMMKYIEQEGISINNVFPLRSDIIPKHITLDSTTIVNLLLRKEQGNKGDYLTEGNLKKKKSEIWDFFFRTQRKCFKREGYSFHHMIETDGISCSILLIRNDLIDKFSKPKNTSLSKELYIDELDDYTKIQNKKIVAIDPGKCDIISCVDGCCKDASTFRYTQDSRRKETKSKKYNKLVLEFKKEQIDGKTIIEYETELSQYNKKSLDINKYKEYIKKKNEINNILFPFYEKYIFRKLKLNGYINRVRNEQKMINRFKKIFGDINDVVVCFGDFEQHKHMKYKEPIKGKGIRTLFKKSGYNTYLVDEFRTSCKCCNCEGGDCEKFIIRENPKPWKNNYALVHGLLRCKSGCGLWNRDVNGAKNIYKIAYNHINGLDKPLYLCRSKQSDTLHDVSNHNL

SEQ ID NO: 8075 - protein, 359 aa, Nostoc sp.
MLVFEAKLDGQDSQYRALDEAIRTARFVRNSCLRYWMDNKGIGRYDLNKFCAVLAASIEFPWVSKLNSMARQSSAERAWSAIARFFDNCKKGKPGKKGFPKFKKEQTHGSVEYKTCGWRLSDDHRHITFSDGFKAGTFKLWGTRDLHFYQLKQFKRVRVVRRADGYYCQFCIDQERIERREPTGKTIGIDVGLNHFYTDSNGDTVANPRHLRKSEKSLRRLQRRMSKTKKGSQNRIKFRNKLARKHLKVSRQRQDFAVKTARCVVRSNDLVAYEDLQVRNMVKNHRLAKSISDVSWSLFREWVKYFGKVFGVVTSRPTTPVKTARIVVKLSKRLLVPELMFVLIVDTPKTGIGMRHGTY

SEQ ID NO: 8076 - protein, 374 aa, unknown
  TnpB Polypeptide
VNKAYNFRLYPTKEQELLFAKTFGCVRFVYNKMLGERIEIYEQFKDDEAELKKYKSPTPAKYKAEFVWLKEVDSLALANAQMNLQTAYNNFFRDKSIGFPKFKAKHRDKNSYTTNNVNNNIRLEDKEIKLPKLGFVKLKQHRYLPSNQIIKSCTISKTPSGKYFVSILVEFFQDVQPISPTRENVLGLDFDMKNLYADSQCERAEYPRFYRKALEKLAREQRKLAKCTKGSNNRRKQTIKVAKVHEKVANCRKDFLHKRSRELVDRYDAIVIEDLNMKAMSQCLNFGKSVSDNAWGMFTTFLKYKLENEGKLLVKVDKWFPSSKTCHYCSEINKELELSDREWSCSSCGCTIDRDYNASKNIRDEGLRLLALIA

SEQ ID NO: 8077 - protein, 391 aa, unknown
  TnpB Polypeptide
MIKSIKVMLLPNNKQKTRLFQYANTARFAYNWAIARQQENYKSGGKFVSDNDLRKEFTQLKKQQDFQWLNEVSNNVTKQAIKDACNTYKRFFKGQCKYPKFKSKRKSTPSFYQDNCKIQFSETHIKVEGFTMSKKQNKQKINWIKLAEKNRIPVNSKYTNPRITFDELNWWISVGIEYEDCTTLPSKEGVGIDLGIKDLAICSDKNTYKNINKTSKVKKFKKKQRRLQRRVSRKYLKNKKGENYCKTSNIIKSEKKLLKVNRRLTNIRHNYIHQTTSEIINRKPMFIVLEDLNVKGMMKNKHLSKAIQEQCWYEFYRQIQYKSSWNNIKFIEADRFFPSSKLCSSCGCINKNLKLSDRIYICPDCGNEIDRDYQASLNLKQYGENVLQLAS

SEQ ID NO: 8078 - protein, 403 aa, unknown
  TnpB Polypeptide
MYKVTLLTKNIDFCIIMSMTITRGYRAKLYPNRSQEQILLRHIGACRFVYNHFLDKKKTTYLETGKNITYLAMSKELTKLRHETEWMQSVQFQPLQQSLRSLDVAYNRFFRKQAQFPNFHKKDGKQSMRKVTGWSITGNHVKIMDGVSVRFRGAFPTKREATLTISRDTCGSWWASTIATEERKTPKLKGAIGVDLGLNHLAVTSDGEKYDNERSLGGSLARIRSASKNLSKKQKGGANRRKAKTILARLHLKVANKRKNRLHHVSKEIVGKNHAMIALEDLSVKNMMTNRRLSRSIADVGWGELVRQIGYKQEWNGGETIKIDRFFPSSKTCSSCYFVIGTLPLSAREWTCPKCEMTHGRDENAAKNILKQAGELLDMEGKALARADARTKPSPVKYEYVQG

SEQ ID NO: 8079 - protein, 384 aa, unknown
  TnpB Polypeptide
MIKTHKIALRPNRDQVAWFYQQCGYAKFAYNSALSDFKAELGKANVISMYDLNKRFNQEKKAFAWTQAQDQRAAMYAVHNLGKAIENWKAKRAAFPRFKKRGCKHAYTTDEQAVRVEGKRIKLPKIGWIRTFEKLRFVGKLVSVTLSRTAHRWFASVSVEVPLPIDRCGVSSEFVDYFASTVDIGTPYQIERSIYPSIGIDVGISTLATLDDGTKYENPKALKGYERKLKREQRKLSRKVFLSENWYKQKRIVERIHYRIACIRKDAHDKATTALVKCAGRIGIETLLVANLLKNRKLAKALSDAALGGFLEKLRTKAESFGIPVVQADRFFASSKTCSTCGDKKDDLTLSDREYQCNRCGTSIDRDLNAAINLKNVAVGHTET

SEQ ID NO: 8080 - protein, 408 aa, Symploca sp.
MLVLEYKIKAKPAQYRAIDEAIRTVQFIRNKCIRYWMDAPKGTKIDKSALSRHSTELRNEFTFVKDLNSMACQASAERGWLAISRFYSNCKSKKADNKGYPRFQKDNRSVEYKTTGWKLHPTKRRVTFTDQKSIGQLKLLGKWDIHTYPVKAIKRVRLVHRADGYYCQFCVDTDCVDTQPKTGKEIGLDVGLESFYTDSNGYQEPNPRFLRKAESDIKKSQRRIYKKKKYSTGRRKARARYSRKHLRVSRQRNEHAKRVARNVCKSNDLVAYVRVACRRQDLRVSNMLKNHCLAKSINDASWYQFRQWIEYFASKFGKEAVAVPPHYTSIECSQCKRVVKKSLSTRTHVCQCGCTLHRDTNAAINILHKAKSRVGHTQSNAKGVATSTLVGATLLEQVATTNLESPSL

SEQ ID NO: 8081 - protein, 545 aa, unknown
  TnpB Polypeptide
MIIHSKHTKTFHSKDITRQKYDELYDFAVLTRNHKNVVSQHLNENLLHYLDYNKFQFAKEMRERFKGSVPSSFYDQIYTQVFTCYENKFKNIQCRLAFKVSAFKGFEYYKRDVKNHKKGDLKRVIVEKKQTKLSSCLTYLARYGNEGTIAYIKSNIDKCDEKKRDFYNNIIRCCEKFGSERLYALALLKRKRIVSKYANNPIEFRSLTFSGRCRKKKIIDYNHRFGSLINSFISLSGFSRKSFDIPVTFNKGWHGNMKDYKKNSPDYVYTLTFDEKKHQVTVNLCKDGERYVPEPNGKTIGIDVNCKHNLFSLSDETTYDYDRKLVNDFCKLSLEIDKLKEDRSYAIGKRKQLKLNKLKKKIIKNEQQTIAIMCKNEQAKGTGHIVMEDLNNGFGKCYVKDGDNEDINYNRKVKFLGLSSLKQEVEHIARKYDIAVSTVQASYTSKMCPVCGCIEDGNRPNQETFECVECGHKDNADFNAAKNIRNRVLVTVLRDNLLKQLDNGAFEPRMLSRDKVKEVLLSFRRSLPKVGSECIGSRMMTFEYV

SEQ ID NO: 8082 - protein, 401 aa, unknown
  TnpB Polypeptide
MRKINRTYRFRLYPNREQTELLSKHFGCSRFVYNYFLNQRKEQYRLTGKSDNYYVQANTLTALKKQEETAWLKEVNAQTLQFAIRSLEAAFNNFFKKRAKFPNFKSKHSKNSFTVPQYASVAGGRLFIRKFKEGIKCRVHREIKGKIGKVAITKTSSGKYFVSVFTTEEYVTPFKNTGKSVGIDLGLKDLLITSDGGTFNNNRYTRRYECKLAKAQQHLSRKKKGSRGFEDQRLKVARLHDKIANSRADYLHKCSITLVRRYDTICIEDLNVKGMTKNHHLAKSISDASWGKFVSMLTYKAEWNGKKVVKVDRYFPSSQTCNVCGYVNQQIKDLSIREWECPECHAHHDRDINAAINILHFGLNNTSAGTVDYTGGEEVRTDLLGSHSSVKPEAHEFLIHG

SEQ ID NO: 8083 - protein, 380 aa, unknown
  TnpB Polypeptide
MFRAIKVRLYPNKTQEQTLNKALGCYRFVYNHMLARKQNAYKTDKTNLSVTELSKWFHGTLLKDEQYAWLKEQNTKVMNQAIRQMDGAYQKFFKQHNGFPKFKSKKDKQSALFPYEAISKRNTFETKNISLTTSLKNIKFRCSDLYLKRLQKYNKDIRSATLSKTKSGIFFLSILVEMDDTELKKFGHTNKQVGIDLGVKDFVITSDGDVFENKHLFKKKEKQVRRLQRQLSRKQKGSNNRDKQRIRLAKVFESLTSQKIAYIHSVVNELLTYYDTVFMESLNVQGMLKNRHLAKAIQEVGFYKFKEILVSKSLVNDKRAVFIERFYPSSKTCSQCGYKKRDLKLSDRFWTCPVCGENHDRDINAATNILLEGQRMLAAV

SEQ ID NO: 8084 - protein, 404 aa, Escherichia sp.
  misc_feature (64)..(64): Xaa can be any naturally occurring amino acid
  misc_feature (271)..(271): Xaa can be any naturally occurring amino acid
VKRLQAFKFQLRPGGQQEREMRRFAGACRFVFNRALALQNENHEAGNKYIPYGKMASWLVEWKXLERAYKNFFRKRAAFPRFKKRGQNDAFRYPQGVKLDQENSRIFLPKLGWMRYLNSRQVTGVVKNVTVSQSCGKWYISIQTESEVSTPVHPSASMVGLDAGVAKLATLSDGTVFEPVNSFQKNQKKLARLQRQLSRKVKFSNNWQKQKRKIQRLHSCTANIRRDYLHKVTTTVSKNHAMIVIEDLKVSNMSKSAAGTVSQPGRNVRAXKVSNMSKSAAGTVSQPGRNVRAKSGLNRSILDQGWYEMRRQLEYKQLWRGGQVLAVPPAYTSQRCACCGHTAKKNRLSQSKFRCQVCGYTANADVNGARNILAAGHAVLACGEMVQSGRSLKQEPTEMIQATA

SEQ ID NO: 8085 - protein, 235 aa, Oscillatoriales sp.
MQLFNLAYEFKLKPTTSQVPIFEDWLEQCRRVYNYALRERKDWYKSRSCRIDACSLHSEYIIPADTPRPTYSSQCKALTAYRKSSHQLKQVQSQVLQQTLRLLEKAFVSMWEQGHGFPRYKKVGAMRSFVFPQMGVGAIENSTVKLPVIGSVKFRQSRPIPSGATVKQARIVRRASGWFVMLTLQWDVSVPQAMPHGSFLGIDVGILHFLATSSGKTYPNPRPFKMLQRKLKLLQ

SEQ ID NO: 8086 - protein, 405 aa, Streptomyces sp.
MVIDVQLRYSFRLYPSAGQRSALSRAFGCARVVYNDALRARETARAAGLPFIPSGELSKQLTASKKTPGRAWLAEVSSVVLQQSLRDLDTAYKNFFDGLRGKRPKTGPPRFKSRKDTRQSVRFTANAGWKITTGGKLRLPKVGDLAVKWSRSLPSTPSTVTVVKDSAGRYFASFVVETGPEETLPETTPEVGIDLGLKHFAVLSDGTKIDSPRFLRRAEKRLNKAQRALSRKEKGSKNRDKARIRVARAHARVADARREFHHRLSTRLIRENQAVAVEDLAVKGLARTRLAKSVHDAGWSAFVSMLEYKAARYGRTLIRIGRFEPTSQVCSQCGVQDGPKPLHIRVWTCSACGAVLDRDINAAVNVAKAAGLAVSACGAQVRPGLVPAPRSEAGTHPTPQPSTAR

SEQ ID NO: 8087 - protein, 282 aa, Escherichia sp.
VKRLQAFKFQLRPGGQQECEMRRFAGACRFVFNRALARQNENHEAGNKYIPYGKMASWLVEWKNATETQWLKDSPSQPLQQSLKDLERAYKNFFRKRAAFPRFKKRGQNDAFRYPQGVKLDQENSRIFLPKLGWMRYRNSRQVTGVVKNVTVSQSCGKWYISIQTESEVSTPVHPSASMVDQGWYEMRRQLEYKQLWSGGQVLAVPPAYTSQRCACCGHTAKENRLSQSQFRCQVCGYTANADVNGARNILAAGHAVLACGEMVQSGRSLKQEPTEMIQATA

SEQ ID NO: 8088 - protein, 442 aa, unknown
  TnpB Polypeptide
MLRLQAFKFQLMPNDEQVRQLRQFAGSCRFIYNKALALNIERYEKKEKRLGYARLCALLPNWKMEHEFLSDVPAQALQQALKNLERAYTNFFQKRADFPKFKKKGPRESFRIPQGFEVHSENGRVQLPKIGWMRYRKSQDVLGEPKNITISESCGKWYVSVQTEREVEMPQHPSTSAVGLDWGVVNFVVLSNGEVVDQCQPLKKFLPKLGKLQRRMTRKIKFSKNWGKAKAKVTKLHTKVANIRKNFVHKVSNDISKNHVVVVVEDLQVGSMSKRATKKVAQKSGLNRSLLDASPFELRRQLEYKTQWQGGLLVAVPPQNTSRKCPECGHTSAENRKTQSKFVCVECGFSANADFVGAVNIREPGRISRIHLRGLPCQTHFEKIVLSKTQEIACPKCAGKKNAIQLSVFSAANGSGNGASAKSSGGFSGGGGSCCGGGCGCN

SEQ ID NO: 8089 - protein, 687 aa, unknown
  TnpB Polypeptide
MDDNYMSSSSTYQAEKFALNSYNRVADRNGKGKGPDPSFSTRGPRHDGEVLSELVTGRKCSDIDLQTLEQHFDRYVHAVNLVLGEVYSTPDRAQHVGQRLHSSRGQGYVVLRNESFLEWKQDNKFGRLVYERMYRNALETAARIILADYTRRTLVNSLITILASDNKHLKQLMGLKRIPAPLVRTVRASVHERSGSYYHYALAACRQVRRVLDEHLLERLGESTSIRRLARSRVRDLLDTQSPGSIEVLNAASGKVQEWLKTGFPFTAPSFRQTTMEFAASTENSTSQGYWFAQDPKREDEFILYIKTPPGVTRHESTPDSPYRGHALRFRFLDWLPRKAARAQRKAEESRAQGHFRRAVELEYRAARFKDMSQQLRNTIALQSLTRQLSSVASKNDTDVQRISELRAQTRALKEARRCAPPILSLRGHTVTLIIPFLCPDEEMLKRVLPAVPRNGRAGVDRGLRHPVVLSVENGGNGYDETKIGRAESFERRERLRQRTRVLMSQIVRRRNNWDRKRPMLQPPSSILKRERELEAVWAKVRRIDREISHQLAAETVWFCEHRGVKTVYFEDLRYFQPQGGFKTHSWELSSNLWGKIIEGIRYRRQALGHKYGGVWTVNPAMTSQRCSTCGERGVRVRDSDSTEEEHGGEFFYCPSCDLRLHADVNAARNILMVQQPKPSAVSGRTA

SEQ ID NO: 8090 - protein, 403 aa, unknown
  TnpB Polypeptide
MRNTKHKLFYDRSLKHLHDDLNICGAVRNHFIALSMRYYRRYGKGLSYSKMSTHLTKLKKLEKYRHWNIPYSWALQNILKRLAQSFKEMRTLGRGHPQFKSCKKHKGMTFRGEQVKFEYLLPKQKHERNHATFQIRLNGRWYRFALHRSIEGKITQVQVTRDTLGDVYITLTEECREVKPEPKTGKAEGFDMGIKDFLTGSDGERYASPMFYKQNATDLAKAQKAYSGKVKGSKNQERERKRIARMHKKTANQRTDHHWKLAIELCQKFDIMFFEDLNLRGMKSLFGKHVSDVAFGEFLEKLRHQSGKRLKSVHKIGRWTASTKCCSVCGFETETLTLAIREWQCRSCGTHLDRDHNAAVNILKEGLASFGLGDVRPIVLFNKMVGCSVEASSRLLKSTNAFA

SEQ ID NO: 8091 - protein, 418 aa, unknown
  TnpB Polypeptide
MPAVTKTLILRLVDPNAHKERKLRETRETYQGALEAAFEESPTTRSATNDIVVEFELSGYAKNALKRYVPQLCGESYDAEELSDDHPVKFTNNGVRLDHQPQNCYEWYVKIPHHDDYTLWMPAATNPDQRPWLEALYAGDAEMGESRLLERGGDWYLHMSATLEVEERPASEAERTPVGVDIGDAALATVCHRDEHGAPTAPEIYSDEASTVHRLRETYFTTTRRLKRRGSERISEEYGDSIWDRIDHIIHSVSRSVVERARQVEQPVVVLENLQYIREEMDFGAFMNRRLHGWAFAKLHAQIRYKAEEAGIPVETVNPRNTSIECHACGGEGTRPEQATFRCTNDDCWVEEYQADINAALNIADRYRSGERQSQNDRTDGQKATVNDSATDGASLTGPQDTQSDAETQQTTIGTYAS

SEQ ID NO: 8092 - protein, 226 aa, Natrinema sp.
LGRSVGGTASRETTFYGEEIRQLRRHHQELRTRLQEKGAYDTLVSAKDSEWRAIDDRLHKISREIVEDAKERNALIVIGNLEGIQNQDKGSEMNRRLHSMPHYTLKQYIEYKARFAGIGVKVVNEYNTSQTCWRCGEKENTERVGQGRHLCDECGLDDNADKNGATNIGKKGLGKDIQSPLSSLGGVYEPSLELGDNDETAAQVRVRLRDDSETPPSTSESAGRAK

SEQ ID NO: 8093 - protein, 501 aa, unknown
  TnpB Polypeptide
MQAYRVQKVHIGERHPLYGWCHQVTALANNLSNAVRFRQRQLLTASRKEEGEWTENEKEVIQEFRGYLGEEAVIPSSPGYKTIYNVLYATGNPDYFAKGLPKQSAQGVIQKCVQDMDSYFALMKRYQAGAGDRPSLPGYKRKGGHTSVYVSNQDCTIRQDGKGGLLAGLPFAKKTPLRIGNPAGYLKQVEVCPDHRGYMICFTFEVTLPDIPLPAASSRIAAIDFGVNNLMAVTNNCGLPLLLYKGGIVKSVNQYYNKRIAAVMAEEMAKPDCPKNRKGIPRFIPTPESRSATFHRNQKIQDFIHKAAKHLLAWCVENRIDTILAGVNPGWKQGANLGKVNNQNFVQIPFAYLRHCIQYQAEVSGILYLEQEESYTSRASFLDGDPIPTYGVDDKDAGFSGKRGPSRYAGMYKKDGFRGLYRTADGTFINADLNGSANILRKAFPDAFLKGSMPDFTDVVIVKDPDREFIAANQREQAEKRQGHHALSHAKASRLRRKLDS

SEQ ID NO: 8094 - protein, 441 aa, unknown
  TnpB Polypeptide
MPAIPVLKRTITVELIPTKEQEEELKELGDLCSKLWNQVNYERRRQFFNGERGVDIKGTYNKWYNEYKEKVGTITAQQVLNKNNEAWRSFFSLLRAKKEEKLLPFINKINPPGYWKDKKKRKLIIVLRKDQYKIDKEKQEIELRHLGQFKDLKIKYKGEIYYRGEQGRLEIIYNDVLGKWYAHITLKASKKLDRKNDEWVKVPLTLKGNLVGGIDIGINNLLAVYISDGTQMLIKTRVLKSISYYYRKLISMKQKLLSLYNQLFSNKVRRLYIKWKRELTTIIDATVRKVVEFLYNKGVSLIKVGYPKNISQKKGNFLVVNVWSYKQVMDKLRDVAEEHGITVKFVNEAYTSTTCPIHGKGCGERIHRGLFKCTTSNKVFNADLVGAFNISIILSPNDGGITRGIGISWGKTTPLVYTWTRGSGLVASYDSMRMKRMDQNL

SEQ ID NO: 8095 - protein, 432 aa, Haloferacaceae sp.
MNYNYRYRLRPSDALAEQLAWTIDTCRQVYNHFLHRLNRNGDTSAYSEQKLLPGLKKWWTDLKQVHSKVLQKVVQRLYDNLSTLRGRKENGYRVGTLKWKAPGEYRSFTYSQSGFKLKNTSGRTKLWLSKLGEIPITFHCDLSDDAEIKTVTVKREPTGKWYAILGVETPDDPPEKPENPEEYVGIDVGILKYVHDTDGIAVESLDLSDERERLERAQRDLSRKEHGSANWEKQQKVVAERHAELKNKRRDFLHKLSNYYAREYDFVAVEDLDAKGLVELPGNSRNRVGVAWGTFLRMLDYKCEREGTHFVAVNPRETTKECAACGVSTKKPLWVREHSCPACAFEADRDANAAWNILSRGIKQIGVGHSESTSLESRCDSDGLRKSRSDFRTPVETALPVDTSVSAKRVVETGSPPLKREPSGEREGGVAH

SEQ ID NO: 8096 - protein, 296 aa, Haloferacaceae sp.
VAIVLYAQKKGEANGKPGFWGNVEDGRELRTYIRNTSYSVEWGEYSRLEILVGHDLKDEYGLGRQERLRVEVRGDPNWKEYDKQGRLELYYDENAQAFRAFQPVTIDTSRLAHPLADETAALDIGANNLVACTTTTGTQLLYEGRDLFERFRETTRKIARLQSLLDDGRYSSHRIRSLYRRRTRRRDHAQDALARDLIERLHAEGVSTVYVGALTDVLDTHWSVEANAKTHNFWTFRAFIDRLACTAEEYGMTVEVRSEAWTSQECPQCGSTDRTTRHRDTLTCPCGRSKGAERLS

SEQ ID NO: 8097 - protein, 430 aa, Haloferacaceae sp.
MGTRLLRRDDGSRIQRNSREIHPTAEGGCMTEVTETLELKLVEPNAHKHRKLSETKMAHQQALEAAFGAECTTQSAANDVVVNYNLSGYAKNALKKYVPQLCGGSYDSKELHDDHPVRFTNEGVRLDHKPQNAIGWYVKIPHHDDYHLWLPAQPNPEQRAWLEALHAGDAKMGECRLFDRGGEWYLHVVATRDVEERSTSSSASETPIGVDIGEASLVTVCHRDECGSPTTPNLWNDEGKQVRQLRETYFTATRRLQKRGSERIAESYGDSLWRQIDDILHTVTSEVVAYAAQFENPVLVLEDLTHIRENIDYGSFMNRRLHGWGFAKMYAQLRYKAAEMGIRVETVNPAYTSKSCHCCGERGTRPAQATFRCTNPECWVREYQADVNAALNIADRYLNGESHLREHTGDDDSVGDGGPFDRPARLPSRC

SEQ ID NO: 8098 - protein, 285 aa, Haloferacaceae sp.
MLETTRTYRAKIVNHQQVQDNIDQCGFSASKLWNVARYYTQGRWNEDGEIPDDGELKSELKEHERYRDLHSQSSQRVLEELAESFTSWYKARQRGDEDANPPGYRKHGDEHPRSTVTWKQKGIKHDSKHNHLRLSKGFNHKASPSDFILCEYGTRPDVTVENIQQVRAVWNGDRWELHLVCKVEIPVEDAPGDNTAGIDLGIKNYLAIAYDDGDAELYPGNVLKQDKHYFTRDEYDTEGENGPSRRALRARQKLSRRKDHFLHALSKHVVEQCIDHEADASLLAT

SEQ ID NO: 8099 - protein, 425 aa, Haloferacaceae sp.
MKRTNTFDVVPQSDADEELLRRLLDASAALWNEINYERRENYADPDGNVWDISEYRGRYGGVLGASTVQQIERKNREAWRSFFALQKKGEANGKPGYWGNAEDGRELRTYIRNTSYSVEWGEYSRLEILVGHDLKDEYGLGYRERLRLEVQGDPNWKEYDKQGQLELYYDENAQRFRAFQPVTVDDSRLAHPLADETAALDIGANNLVACTTTTGTQLLYEGRDLFDRFHETTREIARLQSLLDDGRYNSHRIRSLHRRRTRRRDHAQDALARDLIERLHAEGVSTVYVGALTNVLDTHWSVQANEKTHNFWAFRAFIKRLACTAEEYGVTVEVRSEAWTSQECPQCGSTDRTTRHRDTLTCPCGFDGHADLTASETFLKRQTTVSRPMARPVCLKWDDHTWSESPRSHRPNEEHANPQVASVGR

SEQ ID NO: 8100 - protein, 409 aa, Haloferacaceae sp.
MRYNYRYRLDPSDTLRGTLDRHRDLYRQVYNHFLHRLKRIDGTTKYGEVNELPSIKKWWSDLSDLYSRTLQNAVERLYDNLSRLKDAKENGRKVGSLKWKAPNEYRSFTYRQSGFKLKNTSGRTVLRLSKIGEIPVRLHRELPDSARIKQVTVKKEPTGEWFAVLGIETENDAPPKPENPDRCVGIDVGILSYTHDSDGFSVGSLDLSEERERLERAQRDLSRKEHGSANYRTQQRVVAQRHTDLKRKRRDFLHRLSAYYAREYDLVAVEDLDAKGLMELPSNSRNRASASWGTFLRMLEYKCEREGTHFVAVDPRGTTKECSQCGVSTEKPLWAREHSCPSCGFTADRDANAALNILFRGLDQVGVVYSDSMPVETALPTGTTAVPAKRVMEAGSSGLTERTAQAVSE

SEQ ID NO: 8101 - protein, 410 aa, Haloferacaceae sp.
MYYAYKYRLEPSDTHREELDRHRDICRQLYNHALYRFNQIPDDVGTVKQRVRSIRDELPSLKQWWDGLTGVYSTVLQTAVMRIADNIKRLGILKRNGKRVGQLKWKPPREFRSFTYSQSGFELKNTSGRTLLSLSKLGDIPIRLHRAIPDDAKLKQVTLKKEPTGEWFASFGVETPDDPPEKPENPTRCVGIDVGILSYTHDTSGTSVGSLDLADERDRLEREQRKLSRKEHGSKNYETQRRRVAECHADRKNKRRDFLHKLSNYYAKEFDLVAVEDLNVAGMMQFNSNSRNRASAAWSTFLRMLEYKCKREGTHFVRVDPRNTTKECAACGVKTDKPLWVREHSCPACGFTANRDWNAAWNILRRGIKLLGAGRSESTPVETALPTGTVAVPAKRVLEAGSPVLNARSA

SEQ ID NO: 8102 - protein, 406 aa, Haloferacaceae sp.
VSATVQPLPLRTQQIRRRYPGPLRPSGPTPQPQEVVERPERRSLESPSDGCQARLRQPFDAQSTERQRTYRRHVEMETSSGYRSLTYNQTGFKLKNTSGRTQLWLSKIGDVPIRLHREIPDNSTVKQVTVKREPTGEWFAVLGIETENDAPPKPENPEKCVGIDVGILSYTHDSDGFSVGSLDLSEERERLEREQRKLSRKEHGSANYRKQQCVVARRHADLKRKRRDFLHRLSAYYAREYDLVAVEDLDAKELMELPSNSRNRASAAWGTFLRMLEYKCERKGTHFVAVDPRGTTKECSQCGVSTDKPLWVREHSCPLCGFEADRDANAALNILSRGITEVGVVHSESTSSEPRRDSAGLRKSLRDFRTPVETALATGTHSVSAKRVVEAGSPGLTERTASAVSE

SEQ ID NO: 8103 - protein, 364 aa, Haloferacaceae sp.
MYNHFLYRLNRVDGTTKYGKINQLPSIKEWWTELSDLYSQTLQNAVERLYDDPSRLKDAKDNGRSVGLLEWKAPNEYRSFTYRQSDFELKNTSGQPVLRLSKIGEIPVRLHREVPDDAAIKQVTVKKEPTGEWFAIFGIETEDEAPAKPETPEKCVGIDVGILKYTHDTDGIAVGSLDLSTERERLEREQRLDQQLEPPSLDHPLGTDELGRDVLRASFTVENLARNRTRRLVVVRTPRSRERALRERTRVRHGVPAPRRFTLRVSVRHVLPNVAIPVVVLATLDLGGVILATAGLSFLRLGAQPPTPERGTMLASGRNYLREAWWLVNAPGAAIMLTVLGFNFLGDGLRDLLDPKQTTRIERL

SEQ ID NO: 8104 - protein, 415 aa, unknown
  TnpB Polypeptide
MEVRRTAVVKLAVSDEQRDALHTTAEQYLHCANRTAEFCWDSTDYRKCRTHKRNVRDALYDDFRNETELQAQLVQAAIRRGVEAVKGCVQRWKKGRRVSRPVFTSETIDYDRRCATFRRRELSLSTVEGRVACPFVLPSDSPTPYEKYVLVEDYEFRQSTVRYDDATDEFYAHITTRRYDRDENETADGSADSEHRSVLGIDLGVNSLAVASTGTFWQSNDYDHWVREFEKRRAKMQQRKTQAGHRAVKRLGRRERAWRKQYLHTLANEIVTEAVENDCSTVVFEELDGIRDRLPQAEWHHIWAFRRLYEYVTYKGPERGVSVETVDPNHTSQRCSRCGFTHEDNRDGDGFACLSCGYELHADYNGAKNIGLRYARNEHHRLRSSQMSSGGDAPVDVRLNRGTMTDDGPRQIAGD

SEQ ID NO: 8105 - protein, 396 aa, unknown
  TnpB Polypeptide
MLIQRTYKFRLKPTPQQEQQLVFLAGCRRFVWNWALRTFGEDFRYPKAARALTAFKQTEEGAFLKEAVAQTLQQVLQDLERAFVNQRQGRSRWPRFKSRKSTPHALRFPQDVRIENGAIFLPKLGAIAATLHRLVEGQIKSATVKQTPRGRWNITLVAHSEIEVKPYTQDTPVGIDVGLESFLTLSSGEKIAPPRFYRKQEAKLRKVQRRVSRKHKGSKNRTKARRRLAAVYERVGNQRENFLHQLTHRLVERHDVICIEDLNLSALTRTKLRGHAKSWTDAALGEFRRQLEYKALWRSRQLVLVSRFYPSSQLCCDCGFREPHALSVRRWICPCCQTEHDRDVCAARNILTEGLRQLTVGTTAAMPVEEIVRPLDAGACSEEAGKVPARAGSPQL

SEQ ID NO: 8106 - protein, 412 aa, Lyngbya sp.
MLMMNYKYRIYPNTDQQAKILDWLETCRGVYNYALRELKDWIASRKCDVDRCSLSKEYIIPADTPFPSYHLQQNNLPKAKKINPKLKEVHSQVLQTTIRRLHDTWDAFRSRSFGFPRFKKFGQFKSFLYPQFKENPLKDGCIKLSKIGEVAINLHRPIPDGFTIKQVRVLSRARHTQWYVVITIALDVEIPENPPIGRAIGVDLGLEKFVTTSDNFTVERPKFLKDLKGKLKSLQKRASRKHKGSKSWEKAQIKVARLHHKIANTRKDFHLKTAHLLCDQAETIFAEDLNTVGLNRGMLRKECIDASFGQFLDLLKWVCWKRGCYFQKVDPRGTSATCPECGATVQKALKEREHICPECNYKTHRDHAAAQMVRLRGLESVPKDFGERKLSGNGGLSGVNSLDKCLSRNAQL

SEQ ID NO: 8107 - protein, 408 aa, Halorubrum sp.
MRYNDEDGFGGSVWDADTGRLEGRYKGVLGASTAQQVIRKNSEAWRAFFGLKEQYHDASNKSVTDHPEPPGFRGNEDDGRQLRTVIRNTSYTVEWSERSRLEILVGRELKDRYDHTGRLRLEVVGEPNWPDYEKQGRLDLWYDETASTFRASQPVTVSDETRATPLATETAALDIGANNLVACTTTTGEQYLYEGHDLFARFRETTQEIARLQSKLEAGRHSSERIRRLYRKRTRRRDHAQEALCRHLVEQVCAAGVDTVYVGDLTGVLETHWSVEANAKTHNFWAFRKFVDRLACTAEEYGIAVEVRSEAWTSQECPQCGSTDRTTRHQETLACLCGFEGHADLTASRTFLERQTEQEVRPMARPVRFEWDDHDWSGQPHPHDSPKEVRTDRSTVNSNGKIASGETV

SEQ ID NO: 8108 - protein, 548 aa, Caldisericum sp.
LVEKRIPMRKKKDKDKKPNLRSILYTSKYFNTGKGEEVKQLLRTISNYKNVLSQYVYENRNLLLTSDGIKTLKANYNIVHNDTILAWNIQKEHHMIVDKYANTLKKHMKNLKLSIQDKMVIARYSKNGKRHKKGDTKYFEIKFRTTKLTKLIKYLVYLDFSKNIEPQITNGAVKDLLNYYKTKPYFDRILNLAKDMQNRLLSKIKFIDFSNDYSIRLTSSNENKARIEIDNTNSLYKHWFIFKMKGDREYRLPLEINKDYHNKDIIAKEFLLYLSKKGNKINISTIYEGEEPVFKQFNKAIGVDVNIKHNFAKLSDDKEIDYDRDFFKNIVKDLSKLDKIGYQNLSEKELKKLQKLYRRLDWYVKLLIHNILDYCEQNGITDLVVEDLRLKDKSNTINEEFNMKYSRLVKLLHLSNVKNMLLRQGEKRGIRVHIVHSEWTSLGCPECGNIDKDNRTTQESFKCSACEYEDNADHVGSTNVLDRFNLFYWLGVQANRLYSVDEYGRISPKKVSRYYLRNVLNKYYEARGFLHHPVLPSNVNSVRTVVKV

SEQ ID NO: 8109 - protein, 669 aa, unknown
  TnpB Polypeptide
VPFVAVVAGVRRRGPNRAAAWSYDGPVSVLRLPLDVHDPQTRRHVERVFSAAFAVRRAVQRDAQTRLAAYRAAHHERAVAGPAAVRDRLGLTLSGLERAAYRHLDGAPHLRRHVTKALVMHGADGVWQAVHRHLFPDATGRRHGPPRVGDWWSFHTIPGRARSHTRPRKWETFRLVGSLGGHRAAFDRGGRLWQPRRMPAVTATGGGRAVRSWWDHDGPFAIVLTGTGCRDLVLPVRLPQGPARTPVLEHYLADPGCWHKIDLVRHRDPGAVGGWRYEARLMILGPGYTSPSTAARRAAAAGLSRRGGVDVNVSNLAVVSVLTTGVAADGLRATCVARSGPDADRLAAERLRQRRRNRALQRSRRAANPHQYQLSARQQHRADRRRAAGLPPVTVTTPTGPRIATAAGVPVQAYRRDQLSAGYRRLRAQTAADGAARTRAGRTRAQTVAATIVATHGAELVIEAADLRAWAARWGRGLHAFTPGMVVAALRHETSKVAALGGGAGLVRAGTRHTAWTQHCLCGTRTPKQLHHRRHHCTTCGLAGDRDLMAALVGAHTVLTEPGAPGSARIDWPAARTTLAVYGVDVINERLQGAVTESTGHHRPHQRTCVGARRPPRSPGHDGRGRRARRTTGTVPPTTPDETHTGTAPERRDAHPDCFNTNNGVRNRP

SEQ ID NO: 8110 - protein, 407 aa, Streptomyces sp.
MQLRYAFRLYPDRVQRAALARAFGCARVVFNDVVRARLDARAAGLPFPKAGELSRRLITEAKRSAARSWLGEVSAVVLQQSLRDAETAYRNFFASIKGERKGSRVGAPRFKSRKDARQSIRFTANARWSVTGSGRLSLPKIGAVKVKWSRTLPSTPTSVTVIKDAAGRYFASFVIDTNQDADATRMPDSDQSVGIDLGLTHFAILDNGTKIDSPRFLRRAEKKLKKAQRALSRKQKRSKNREKARLKVARAHAQVADARREFHHQLSTKLIRENQAIAVEDLAVNGLARTRLAKSVHDAGWAQFVAMLVYKAERYGRTLIKIGRFEPTSQTCSNCGHRDGPKPLHVREWTCPACGALLDRDINSARNVKQAAGLAVSACGAPIRPEPVLAQRHEAGSHGYPPEVRAA

SEQ ID NO: 8111 - protein, 229 aa, unknown
  TnpB Polypeptide
MVKIKQHRLFKGEIKSVTVSKNPMGQYFVSVLVDTENIKLPKVDKKIGVDVGLKEFAICSDGYRVPNPKHLRKSEKRLRKLQKDLSRKQKGSSNRNKIRLKVAKLHQKIADQRKDFLHKLSTKLIRENQSIAIEDLKVSNMMKNHKLAKVISEASWYEFRVMLEYKAKWYERNIIVAPSNYASSQLCSCCRYKNSDVKNLGLRNWVCPNCGTEHDRDINASKNLEMLIA

SEQ ID NO: 8112 - protein, 394 aa, unknown
  TnpB Polypeptide
MIQKGYKYRIYPNREQETFLMKSFGCSRFVYNWALALKNQEYAATKKSSNYFVLEKKMYDLKQEFPWLTEVGAQSLQASLRNLDNAFTRFFKKQGKYPQFKKKFKNDYSYQIPQNAVIENNKLWIPKVKSGIKIKIDRPFDGKIKTVTISKNAYGQFFVTLLIEPNENIKEPEAFDPERTLGIDLGIKDFAVFSDGTRIENPKLLRKKLKKLKKIQRKHAKKQKGANNRNKYRKKVAKCHLQIANQRRDFLHKLTHNLTHNNQVSSIVIEDLAVANMIKNHKLALSISDVGWGEFRRQLDYKCKWYGKNLIVISRWAPSSKLCPECGQLNDKLTLADREWICECGAKHDRDFLAANNIRSFGIEQYRRNYGNLKKACGENLAQAELDETGISSL

SEQ ID NO: 8113 - protein, 394 aa, unknown
  TnpB Polypeptide
LFKALDNYAFLAKNLYNSVLYRHTQDYKSGKKRISWMTLIKEFRATNQPDFRAIPSNMGASIIKAVDAEYKSCFGKRKVGMKAKLPRYKDPIEGRYKLIFNEKLISKKALKRGFLKLYTPEAIKEELKFKLPKNIVIATIKEVTVTKFNDGYMINIICKVEDEIGAKQGNNVAAIDLGLSNLVACVSNTDLKPFLISGKPINSTNHNWNKKVANLKSKLDTSKDEGEKKAIKTKINKLNRKRNFKVNDYLHKASTLLVNHLDSNQINSLVIGYNQGWKQDINLGKRVNQKFYGLPFYKFLNMLKYKCADKGIAVKIQEESYTSKCSFLDGEYPEKHDSYKGRRVKRGLFRSSNGVEINADINGAYNILVKAIGKFNYSPIQVCGLPSTLRVGFK

SEQ ID NO: 8114 - protein, 290 aa, unknown
  TnpB Polypeptide
LSDKFLKQGILKLPAPKSFTKELKFKIPKNIIGKIIKEVTVTKFNDGYMVIICYKDEAEVKTKEGNNVASIDLGLNNLVACVSNNEMKPFLISGKPINAFNHYWNKKIAKLRSKLDTSKDEGEKKALKDKINKLNRKRNFKVNDYLHKASTKLVNHLDSNQINSLVIGYNQGWKQDINLGKKVNQKFGLMPFYKFLDMLKYKCITKGITVKIQEESYTSKCSFLDNEEVCKHDSYLGKRVKRGLFRSKNGAEINADINGAYNILVKAIGKFNYRPIQVCGLPSTLRVESK

SEQ ID NO: 8115 - protein, 267 aa, unknown
  TnpB Polypeptide
MKFKCSKKYLKLLKAHESRSSTVKLEAGKWYVSILIEDNTVPQPAVVPSKIVGIDLGIKKYAVLSTGHSISAPNILNKLKEIDRLKSYLSKKVKGSNASKKLQLKIQRKQKYLNDLKEDFLNKLVDYLIKNHDCVILEDLNIRNMIKKLGGWKKNFNRLMTMIPMYEFRRKLEYKTMLAGKYCIAVNPAYTSQMCSSCGNVDRRNRKSQSEFECTSCGFSANADLNAAINIHNAGVSHLLAAGHAVKNACKKANLSAVSPSSFDFSA

SEQ ID NO: 8116 - protein, 384 aa, unknown
  TnpB Polypeptide
MDTIKICVKGVISSRDKALQVLQKELKNYKKVLIPKVQKAVRKIAKDRSIKVYAQQKWMLDKKITGYVKNLPFHPMTFHNQSVWLERTEKGHFLIHFKTRQEEKEAVCHLQVPKKYRNQIEKACGKDNPVLGQVELIEDNKYGWINVHTTLRLPKPKPYEPKGWIGVDVGWSKLATSILVTANPHLHFTNPTVHGKDFKTRIIQLKYLLKQYARKGKSWKKWSFRLKQTVKYAVGTVAKEIVAKAKKHKAGVAMENLTFQSQTKRWLIPRYKLMIAVKTLCERKGIPFKLVSPRNTSITCPKCGYINAENRNGERFNCRKCGYQADSDIAAAMNIAAIGMGFTPMSKGVRLNAEASGHVARPLSTDETDDLYKGRCKPNIIEER

SEQ ID NO: 8117 - protein, 402 aa, unknown
  TnpB Polypeptide
VQVTKAHKILLYTTPELEATFVSWCGAARWAYNMGLERKITIHREGEKTPSLYTLMHEVVTLKKTDNNYAWLKDIPDSVPRLSLWHLELAYANFYRRVKGGATQKGFPCFKSKKKSKMAFHLENGTSIVNGNSVRIPKLGWIRMHQAIRFSGTLVGPVCISLRAGKWYASFSVKVEMPDPIENQEKVSSVGLDVGIKHLAILSDGKKFDNPRAFYHLEKLLRRAQRQMVHKHKDSHRKQDARLRVQRIHKRISDVRSNATHQASAYIANNYGRVALEDLNTAGMVRNRRMAKAILDANFCEMHRQLVYKMAWAGGEVRRVDRFFPSSKLCSACGCINNNLTLDDREWDCKCGAHHDRDVNAAINLATKCFGRGLTVTAREGTGVVRPTYEARTTPNNLVGIR

SEQ ID NO: 8118 - protein, 481 aa, unknown
  TnpB Polypeptide
MVRQTVSTYARLNKTQFKIVDTLCFLSKNLYNVGLYNERQHYHAIQQATLDMEKLRPDIIGTRFELTSSFIPFIRSKHDPHKDFSNYNLSRQNENYKLLHSDVANQTLKSVDEEYKSFFELLKMKMKGEYDKPVNPPHYLDKNGRYKIDYPKAHMVIKGNMVTLGMSTAFRKLNGYTGKELTFKIPSSIKPHQIREVTLLPIHNGRCYKLLFSYEIKKLPEVVLDYSKNLSIDLGVDNFATILDDATGTATIIDGKYLKSINRWYNKENARLQSIKDKQGITGITQRQHKMLVKRENRINEALNRYTKYIIDYAVKNHIGNIILPTWDGIKNKREAYKKDNQNFIQIPYDKIRKKLKGKCKLYSINYNDEKDEAYTSRTDALAFDAIKKQPYGKTRRIKRGLYKSITGQLINADVNSSMNHIRNVAGDSPVKEIISRGLFNRPVRIRLAYEQTNFSKQQRIVLPVTQVTLSCNPLSLGRGY

SEQ ID NO: 8119 - protein, 402 aa, unknown
  TnpB Polypeptide
VAKHRKVYRFRMKPTKEQAHALGRMAGARRWVWNWALRRWKEHYAATGKSIPLKQLSAELTALKQQAETAWLRDANAQALQQAIADLHRAFTNFFETRARYPKFKSRKRDGARFRIPQGVKIKDGKVSIPTISDTTIGDAKIGDVRIFRSRDVVEQTKSATFKRAADGKWYVSLVVEFEIPDIPIPTPDPVKTTGIDVGLIDFATFSDPTAEPIPAPKFFRTGQRRLRKAQRTVSRRKHGSRRRAKAVRKAAAVHRKLADQRRDFQHKLSTKIVGQYAAVCVETLSLKGLARTKLAKSFNDAAFGEFFRQLRYKCLWNCKHFIAIDRFFPSSQMCNVCGALNERLTLSDREWGCACGTHHRRDFLAACTIRDEGLRRLAAGQADSLNAQGDSVRPGMPGSCR

SEQ ID NO: 8120 - protein, 398 aa, Roseofilum sp.
MERAFNYRFYPTSEQESLLRRTLGCVRLVYNKAIHERTQAWYERQERVDYAQTSSMLTAWKKQEELDLLNEVSSVPLQQGLRHLQSAFTNFFAARAKYPKFRKKNQGGSAEFTKSAFKFKDGQIYLAKCKEPLAIRWSRQIPSGCVPSSVTVKLHRSGRWHISIRFDDPTIKPLPAKDKAVGIDLGISRLLTTSDGEKIANPKALKKHYHKLRRLQKSLSRKQKGSNNRYKARVKLARVHQKIVDTRGDHLHKLTTQLVRENQTIGVEDLAVKNMVKNRKLAQAISDASWGEITRQLSYKCRWYGRNTIEIDRWFPSSKRCSNCGYIVEKMPLNIRQWKCPECGSDHDRDINASKNILAAGLAVSVCGASVRPDQSKSVKATAKKQKPKASCGGTSLT

SEQ ID NO: 8121 - protein, 450 aa, Ruminobacter sp.
MSQVLSHKIRIEANNKFKTYCRKAFGCSRKAYNWGLAEYKKELEKYKEAMSLYRKELGRYEEAPLQFSQVPEKPRLPSVLDLKKRFNSIKAKDFPYMYEVTKYASQQPFIFLGKALNRYYDAKKKKIGKVGFPVFKKRSETSGSFYLGGDQVELQRFKTCSGAEKKSGKLFLRIPNFGWVKLTEELRFSGHVNNVTISQDGDEFFASFSISVQEESIEKKPAPKNTGVGIDLGLDAAITLSDGIKIYAPKPLKKNINKIKALQRKLSRKQHPKTKDDQTKFSKSYMRLLRKIKKLHTKISHLRKDFINKAASVIARNYRYVVLENLSVTGMMSNHRLARSLADVSFGRLKTAIVNKVQMNDGKIIEADRFYPSSKTCCKCGAVKKELKLSDRIYRCDSCGNEIDRDEQASINLLNLIKKSGVANAVRSPELRSILADFNKNQLANLAMKA

SEQ ID NO: 8122 - protein, 266 aa, unknown
  TnpB Polypeptide
MSSSKFRVWLNHEYLPQYPEYLWIKEAYSKAVTQAVNHGQTAFKKFFDHESAFPKFKKKGRSDVKMYFVKNNPKDCRCERHRVNIPSLGWVRIKEKGYIPTTKEGYTIKSGHVSMKAGRYYVSALIEIPDNKTADPSNEGIGIDLGLKDFAIVSNGKTYKNINKSARLKKLEKRLVREQRCLSRKYENLKKGESTQRANIQKQKLKVQKLHHKIDNIRTDYINKTIAEIVKTKPSYITIEDLNVSGMMKNKHLSRAVASQSFTNSE

SEQ ID NO: 8123 - protein, 387 aa, unknown
  TnpB Polypeptide
MRKLLKSFKTEINPTEEQKTKIRKTIGTCRYIYNFYLAQNKELHENGKKFMSSNQFRVWLNNEYLSKHPEYFWIREAYSKAVTQAVNNGQTAFTRFFKHQSDFPRFKKKSKSDVKMYFVKNNPKDCRCERHRINIPSLGWVRIKEKGYIPTTKDGYAIKSGHVSIKAGRYYISVLIEIPNNKIANNSNEGIGIDLGLKDFAIVSNGKTYKNINKSAKLKKLEKQLIQKQRSLSRKYENLKKGEFTQKANIQKQRLKVQKLHHRIDNNRTDYINKTIAEIVKTKPSYITIENLNVSGMMKNKHLSKAVASQKFYEFRIKLQAKCNENGIELRVVDRWFPSSKTCHCCGAIKKDLKLSDRIFKCDCGYTEDRDFNAALNLKDATTYEVA

SEQ ID NO: 8124 - protein, 483 aa, unknown
  TnpB Polypeptide
VKITIKAILVNETQEQKQIIDNMMLVFSTAIRYSFKRLLENVNIRQLEKDVAYKYNLNIRQAKDAVEAARQTILSQKELVKMNYQEYQKKAKAIEKILNDKTKKLSDKKKNALLSKLAKRQRKLEYFKSFIDTNTIPSVVFGTKNMFLKRCKGLISNEEWKECRNNRFYSRGDKSKNGNPNLRVIINNNMSFLEISTLEKTKTNRAVKIQVPIYLPQKLSKKTGKINGINYRELFLNHLQTGEAYQVEMIKKNGKYYCHITFELPKTETIYTGHNGIIGIDTNPNGFALTMIDNKGNYMWHTYLKQHELLYVKGNCRENLCGELVKQVTSIAKTYGCGIVIENLKFKNDKDVNSKFARIKNNFIYSKLLTMLESACYREGIELIKVHPAYTSKIGLYKYCHQFGMVVHNGAAMVIARRSYKFKERVPQILIDKYVDKKYKDKFNYYHEWKKWSMIDKNIKKKEEVKRPDFWIANRKKLLGLVS

SEQ ID NO: 8125 - protein, 380 aa, unknown
  TnpB Polypeptide
MIRTYKYRLYPTHAQARALDFLLWQGRLLYNAALEQRITVTEQTGHGVSYYQQCAHFRNQRRANPDTLGQLNATSVQQMLRRLDKAFTAYFRRLKAGETPGFPRFKGRDRFNSLEYRYADGCKVRFGRRVMFYVQNVGEVKIKYHRPLPDDATLKHVILKRHNRKWHVCLQAEQPDPVPAEHPGPAVGIDMGLHSLLALSDGTTVDNPRWLRRSLAQLRVAQRRLARRKKGSARRRKAAFQVTRLHEHIANQRRDFWHKLTHTLTDSYGLIALEDLKLAFMTANHHLALSAHDAGLGLFQQLLAYKAESAGTQVVTVNPAYTSQACSGCGAMVEKDLSVRVHRCPDCGLTLDRDVNAARNILCLAVNPARTGPPERNVAR

SEQ ID NO: 8126 - protein, 387 aa, unknown
  TnpB Polypeptide
MILRRVYRFKLEPNPTQTQKLYQQAGSRRFVYNWALARRDAHYKATGEGLTLAGLCLELTQLKKQEETLWLKEADSQMLQQALKDLDKACSNFFAKRSRFPKFASKNKGHFAFRIPQRVRVESGKVYCPKIGWIRIRQSQEVEGKTKSATFKRNACGEWFVALTAEFEMPDTALPAPKKPIGLDMGLSDFITRSDGEAVEAPKFYRKSAKKLRKAQRKLSRAKIGSNRRQGAKLRVAKVHRKIANCRADFLHKLTTGLVREFDHVGIEDLNVKALAKTKLRGHAKAWNDAAMGEFVRQLTYKAVWNRVHLVKVGRFFPSSKLCGACGVVNGALTLSDREWSCECGVKHERDLNAAMNVLKESLAGGQPDNPNAQGATVRPTSVGALL

SEQ ID NO: 8127 - protein, 379 aa, Lactobacillus sp.
MTLKAIKTRIYPNEVQKQFIIDNFGYCRKVWNLLLDMQSQRHDNGGSYVNEFGMNYLIKQLKAENPYLKKAESTSLLHVSRDLNHGFQKLFKEHKGYPKFKSRKYPKQSYQSNSVNGNIQVMGTNKIKLPKLGIMRFRCGREITGKIKNVTIRLSATGKYYAILLVDTEIEELPKTTNAVGIDMGVADLMITSNGVKYPTIRFDKILGKKKHYWEKRLARRRALAKQEIAWDRHNKVLEPRELSDFKNYQKAKIMVAKYSEKIANQRSNYLHNLSKSLVEQYDVIKIEDLKSKNLMKNHKLSRAIANQSWGALRTQLEYKCAWYGKQLVTVSPYKTSQICSSCGYDDGKHTLDIRAWTCPNCHAEHDRDVNAAKNILVA

SEQ ID NO: 8128 - protein, 403 aa, unknown
  TnpB Polypeptide
MTYKGYKYRAYPTKEQAEFLNQNFGCVRLLWNKLVSAFHSWSPVGPNPFVSEKTLKNNPEYDFMNDAISYALQQKRIDFDETKKQYFNKKRKVKIGKMKFKSKHSNRDSFKIPGQALGYNSCIDFEKGSIKLTKMTPMKLVIDREFSGRLISVTVSRNPSGQYFVSVLVEEEIELKQNTGRSIGIDLGLTHLGILSNGMKINNPRWFRESQAKLKKAQQHLSRKTKGSNRRNKQRLKVAQIYQKITNQRNWFHHNLSSWLIDNFDVICMEDLSVKNMIKNHSLAKSISDASWSSLASMISYKSNWYGRTFHKIDRWYPSSKTCSCCGVKLEAMDLTVREWTCSSCGTHHDRDINAAQNIRNKGLADLYSLTSDELADYRRREEVRPEVELPKASSMKRLVDHY

SEQ ID NO: 8129 - protein, 403 aa, unknown
  TnpB Polypeptide
MAHQKIFRFRLYPSNEQKKMLEKQMDLLCHTYNKLLEMKREQYKQNKKSLTEYDLNKHIRQITDTRDVHSQSLQNISKRISEGYKLFFALRKQGVKKAGLPRFKKREDYKSITYPQPQALFRDNKLIVPKVGLIEIRQHRKLLGRTKTLTIKKLPTGKWFACFVQNCDREYDILPKTGKVVGIDLGLNHFIATSDNELFEHPKPLARIEKRRKMLNKRFSKKEKGSRNKNKARLRLARLEERISNIRENYNWQVANYLVKNYDGICIEKLHIKNMMQNHHLAKAITDVSWGDFVGKLSYKAESAGRKLIEVNPRNTSQECHNCGAIVKKELWNRTHKCKCGIEMDRDINSAKVILNKGLLPEWQDVKPVEMIPLQTTHRIGLQELSRKQEDSSAMAVGSHLNC

SEQ ID NO: 8130 - protein, 150 aa, Geobacillus sp.
VLSRRRKGSNRWHKQRLKVAKLHEKIANQRKDFLHKESRKLAKRYDCVVIEDLNMKGMSQALHFGQRVHDNGWGMFITFLRYKLEEQGKKLIKIDKWFPSSKTCSCCGQVRESLSLSERTFRCECGFESDRDVNAAINIKHEGMKRFAIV

SEQ ID NO: 8131 - protein, 413 aa, unknown
  TnpB Polypeptide
MNLTKKYLLNLSKKDQDHLLSAMKEGARLWNDLVYICRNEYKQGRWITAVELQKQVQSQYNLHSDIITSLCQRIDSNRKTARIMIKQNPKFKYPYKKKEEVTISGKNRQILNNNYLSLNKNIKIKIDDSIDLSKCTMFHIVHKKSTFYLYMPEEQPEAEIKSTGVQCAIDMGEIHAIATICTNSDKLILTGRVARSFKRFRNKSHAKLNKDMKKCQRDSRRHKRLIKAKDKLSKKSKNKLRNFYHHLTNKFVETCIDNNVDTVYLGNLKNIGQNTKRRLRHESRQKMSQFEVGTIRDLVSYKCEMLGIKVEVVSEKWTTQTCPACGKRYKPKGRVYKCSKCGFVGHRDIVGCYNILSNDVEIDLSLIDGKIRGRHPIKISTQKRSRRFRLNPCISDNISSLSNQESPQFIAGE

SEQ ID NO: 8132 - protein, 135 aa, Geobacillus sp.
LKVAKLHEKIANCRNDFLHKLSTRLIRENQVVCVEDLRVQNMQKNRKLAKRISDSAWGRLLRMLEYKAKWYGRTLVRVGRTFPSSQLCSCCGRRHVEVKSLGIREWVCPNCGAEHDRDENAARNILQEGLRLLSL

SEQ ID NO: 8133 - protein, 368 aa, Geobacillus sp.
MHKAYSFRLYPTKEQHIRRTIGCCRFVFNHFLARRKQVYEQDGTTLNQYACMRELPQLKQQHPWLQEVDSTALQRAVEGLNDAFQRFFREKKGYPRFKSKKHPKQSYTSKRNGKEDDKATIRIEGSRIRLPKVGWVKFAKSCEVQGRILSATVRLAPSGTFFVSVLVDTEIQPLKPNSNAVGIDLGLKSFAVLSTGETIPNPRHLQKHEKKLKRWQRILSRRKPGGKNREKARLKVARLHEKVRNARLDFLHKLSSRLIRENQVICLEDLRVRNMQQNHRLAGSIADASWSEFRRQLEYKAKWCGRQVVIVSSVFPSSQLCSCCGHRNTGTKDLSVRQWTCPECGETHDRDVNAARNILHEGLRILSA

SEQ ID NO: 8134 - protein, 289 aa, Geobacillus sp.
LAEALDRFFDGTANAPRFKSKKHPNQSYTAQCNYPKKGRPSIEVDGHRLKLPKLGWVAFSKSREVEGRILSATIRRNRTGKYFVSILVETEIPPLPPTDKQVGVDLGLKHMVVLSTGEKIEHPQYWRRYEEKLAYWQRGMARRKPGGSNWRKARLKVAKLHETIANCRNDFLHKLSTRLIRENQVVCVEDLRVQNMQKNRKLAKRLSDSAWGRLLRMLEYKAKWYGRTLVRVGRTFPSSPWCSCCGRRHVEVKSLDIREWVCPNCGAEHDRDENAARNILQEGLRLLSL

SEQ ID NO: 8135 - protein, 191 aa, Geobacillus sp.
MGVDLGLRYIAVASVGTKSLFFKGNPCAFIRRRYAALRRTLGQAKKLHMIRKIGRKESRWMKDMNHKISRQIVRFALANGVGVIRMEDLAGIRKRAASAKEAGRNLHSWAFHQLQTMIAYKAEMAGIRVEWVNPTYTSQTCRCGHREKANRNGIHFRCQKCGYTVHADLNGAINIAKAISGLAAQPRRMVI

SEQ ID NO: 8136 - protein, 188 aa, Geobacillus sp.
VGVDLGLKHMVVLSTGEKVEHPQYWRRYEEKLAYWQRVMARRKPGGSNWRKARLKVAKLHEKIANCRNDFLHKLSTRLIRENQVVCVEDLHVQNMQKNRKLAKRISDSAWGRLLRMLEYKAKWYGRTLVRVGRTFPSSPWCSCCGRRHVEVKSLDIREWVCPNCGAEHDRDENAARNILQEGLRLLSS

SEQ ID NO: 8137 - protein, 401 aa, unknown
  TnpB Polypeptide
MIILGQRIRLDLNNVQATFFDRCAGASRFTFNWGLARWQEIYKAGSKPNWRTINAEVNSRKNNDLVWLKELPWAVPNNALQDLNNAFQHFFRRVKAGEKPGYPRFKSKKHTKPAFCIEGRAIQFNNKRIKLPKLGWIKTRQELRFPGKVLSARFSKQSGNWYLSVQVEVDEFWIYPNRCETQAVCGVDLGVVDLAVVSDGTSVAAPRIFRQLEKRLRMLNKRLSRRTKGGKNWIKAKAQIGKLHERIACIRRDVTHNLTARLIRDFRWIGIEDLNIKGMAANHHLAKSVMDAAMAEVSRQILYKAPLAGSNVAVADRWYPSSKTCSDCGAIFSELKLGVESWVCQSCGSVHDRDKNASINLRNIALTQRDRALSQGSSGFDLAVGVKLPFVRESSSYVNQG

SEQ ID NO: 8138 - protein, 399 aa, Scytonema sp.
METILTISCKLITQDNQVTLLEKTLVNFAAACNWINQSVDSKLTNNVRIQSLVYEQVRQQFDLSANLAIRAINRVAGNRKTAKQKGRPVTDFKPTSVDYDARIFAYNEKNQTVSLKLVGGREKFKLSLGSYQIGKLKGKKPTSATLVKTKKGEYFINIQIKDEAPQPIESKDVLGIDLGRTDICVTTQGFKASGKQVTKIRNHHSNLRAALQQKASKGTRSSRRRCRQLLERLSGKERRFQKHVNHVVSKTLVQQALATNSVIALENLEGIRERTNQLPCSKKERRLSNSWSFFELRQFVSYKALAAGVEVILVDPRYTSKTCQLCHVIGDRRGKTFKCLNSCCNWIGDADENGCANIKKLGAVIVNQPRGSELFCSLEQVVLGLPKSPHYNDEAKLVV

SEQ ID NO: 8139 - protein, 493 aa, Betaproteobacteria sp.
  misc_feature (478)..(478): Xaa can be any naturally occurring amino acid
LSSKACCCAWSSGSRKAKDPPSRIDQFARQTPFFRAGKDSADGGAVIGQSGLTALGLNYRSKGSNVVVRAVRTDDNSCMERLQAYQFELRPNGAQQRDLRRFAGACRFVFNKALALQQANHAAGEKFIGYVAMAKHLTAWRNGPETPWLMAAPCHPLQHALKDLERAYKHFFAQRADFPRFRRKGVDEAFRYPDPKQIKLDQANSRIFLPKLGWLRYRNSRDALGEVRNVTVRRVGDKWLMAVQTRREVATPVPTATSAIGIDVGIARFATLSDGAFIAPRNSFKQQQARLARYQRSMRRKVKFSNNWKKAQTRVQRLHTTIGNTRRDFLHKTTTTLSKNHALVCVEDLQVRNMSKSAKGTKEQPGTHVRQKAGLNRAILDQGWGEFRRQLAYKVPWQGATLLAVTPHNTSRTCPCCGHVAAENRLTQAGFCCVGCGYENHADVVGAINILERGHRLLACGELAQSGRSMKQEPTEVXKQEPTEATAHELAHG

SEQ ID NO: 8140 - protein, 316 aa, unknown
  TnpB Polypeptide
MNGKVPIWFDSRFGAIEQSEHMKLCGYVARVSTLRRGVKLTIPLNPAKHHLDILTRGTVKSFQLVKRYGKYYVHVNVEYVVPTQPVYAVRGIDLGVKRSTASVMLKPNQPLRSSDFSIQTDGLKRDQLNRLEKRVAELRRAKKWAPLKQIRHKRLHVSEYYDRLAAKQVATTSQDCLVAVGYSKGIKYTNPKGNGSPRQRRMLAHWTYARMIRYIQEECAKVGVPAEALDERWSSRTCHRCGSRNTERITQSIFHCWNCELIYNADYNATINIGSPFLPVATTRRATDDLAYTGDEQAREIVACEPRSPHPFMGGS

SEQ ID NO: 8141 - protein, 368 aa, Erysipelotrichaceae sp.
MKKNIALKVRIYPNKQQKIMIDKTFGCNRYMYNHLLAMYNETGKVENYTKIYNEDNKWLLESDTSSYANTRLNLKKAIDNHYKNPSHFGLPIYKSKHSKKQSFSTSVTNNNSRVIDNKHIRLPKVGILNAKVHRMFSSDYKLKSVTISRESDYKYYASLLYEYEIELVEDQTDKPFTFMVGIDYSQDYFGVLSNGRFISYPKYLINNMEKLILLQEKLSRCTPYSNNWYKRKKDLARLHIKIRNQRKDFINKLAKEMSDSFDIVAVENLNLQEMSKNNHLGKKIYDNSFGMFITKLSYKLEQGGKRLIKVDKYYPSSKRCSNCGNIKKGLKLSDRTYTCNCGNIIDRDYNASLNIAMEGLRLLREETI

SEQ ID NO: 8142 - protein, 375 aa, Erysipelotrichaceae sp.
MYLAYKFRMYPDEIQKKKINSIFDGQRYAYNYYLSEIKEKGNKYANYYIQDSMNNLKKTNELVAPVRQTYINKIIFRLQDNLKKCKNSKFGFPRYKSYLERNSFTINENDYIKVNLKIRKIKLPDLGEIKIRGYRDRTSIDGMVRNATVSREKNGKYYVSVLVYLPDVKSIEPTNIVGIDLGIKMLATLSDGNIYENNRYIEKYEKRIKRCHKELSRKQKGSNNYYKCRKKLNILYTELSNARKYYLHKITKEITDNYDIITCEKLRTQEMIENTNLSKKISDVEFSEILRQLQYKSKRKGKHFYQASEYYPSSQTCSVCGHIDKKYKDLGERTYECNYCQNILDRDLNASINIMFEGLKLFMKNRYLKKAYKRI

SEQ ID NO: 8143 - protein, 379 aa, Moraxella sp.
  misc_feature (279)..(325): Xaa can be any naturally occurring amino acid
MKTLKLRIRDKHTDQLNRLSGSVNFVWNYVNDLSYKHLQRTGKFFSAYDLNEYTKGSGEFLGLHLQTIQAINETHAKSRRQCKKAKLSWRTNNPNSKRQSLGWLPFKQSAIKHIATHQTGKKGLKSTLQLSLAKGQKLLIDVWDSYNLSLYQINTCQIVQDSRNRWYACITVKEYLKPTCGTGSVGIDLGLKDSATASNGDKLQIKQTLKYAKDLAIAQRAKNKQRVKAIHAKIKNTRQDLIHKFTTGLVKNNALIVVGDVKTTQFSSKKGKLAKSVYXXXXXXXXXXXXXXXXXXXXXXXXXXXXXXXXXXXXXXXXXXXXXXXARSRLVLSVAHGMIEILTPVGTFLRSGLTVWEQQSPNDREGRKSKSQHAFCQLI

SEQ ID NO: 8144 - protein, 321 aa, unknown
  TnpB Polypeptide
MLRIHQLCIKKRNSFLKEVDSLALANVQLHLEKAYKNFFRDPKVGFPRFKSKHHSKNSYTTNVVNGNILVEGNRIRLPKLKWISMKKHREPAENCRLKSVTVSMEPSGKYFASLLYEGYSCENQAADKDYSNAKILGIDYAMQGMAVFSEEIELEKAGFFRKNEKRLAREQRKLSRCVKGSHNYVRQKKKAARCHEKIRSQRRDYLHKLSRRITDQYDIVAVEDIDMKAMSQCLHFGKSVQDNGYGMFRNMLDYKLAWKGKELVKVDRFFPSSKKCSKCGKIKKELKLSERVYRCTCGNEMDRDRNAAINIREEARRMLAV

SEQ ID NO: 8145 - protein, 337 aa, unknown
  TnpB Polypeptide
MKQGNICEIKVSKKDWIEYEIIFPSSIDERFTGRIAKPRFIKRKRDNQYIGICSYEYEVGDYGLEDKILGVDIGKIKLFSSVVVDRKGNFSNEFVNTKRSQETEYKINKLYENKQILYDKLKSYEALRLTNQSKYKIWKNLYSNISNKIINTKDYQAKLLSNEIVNLALEQKCKTIHIEDLSWLNSQGGKWNHSQIHSKIIEKATMYGIEVKKVSAFNTSKEHPITKEVGVIQDRTVEFTTGKIDRDLLAAINIAIRSTNIKLKKSLPKKAKTKRVKPKSKKKEIKEKVNKIKGNGQIVSFLTNVLDSTIQVELGVRPLHEVLPYNSLIHYYNKLKE

SEQ ID NO: 8146 - protein, 540 aa, Streptomyces sp.
LRELAASFVLPGPTGVAIRTRLRQLAPADEKVLALVGAHLGSLAARDLKVRCSQGLEHSAETWAARKRGLTPVSSSRWAGSLTKATHDQWALARRGRLAHIQSLEAGIRMIAHRLSLPVGAKGSKRMPGGYRSAREWHAKSRRLRVLEDRLERARADWEAGTVHVVRGGRHLARTRHHLSDAQLTEAQWRRLWEAERWFLQADGESGKRFGNETIRISPDGEVSIKLPVPLAHLANAPHGRYVLACRVGFSHRGQEWGDRVAANRAVAYRIHLDVERGRWYVTASWQIPVSRTVPMGAALAHGVIGVDMNADHLAAWRLDIHGNPTGSPRRFFFDLTGTADHRDAQVRHALTRLLHWVRTCGVKAIAVENLDFTREKTREKHGCRKRFRQLISGMPTGRLRARLTSMADQTGITIIAVDPAYTSRWGAQHWQKPLTHDHRRTTRHEAAAVAIGRRAQGHPIRRRTAPPPHDQSDRAGHRTVQADRRAPGGEGPRPPLPGPRTRCVPPDRGANAGDQNVQHRSGRSAEHESWQQDSLPLSP

SEQ ID NO: 8147 - protein, 404 aa, unknown
  TnpB Polypeptide
LQRTYKFRLYPNTEQWKKLDDTLSTCRWTYNKMIEFLKKNKEKFQTRNDLNYFLTELKESESWLYSCHSKMLQMISTQIDGAQKAIMQLHKNGHKTGSLKFAKYEEYRTFIYNQSGFRITQNMLYLSKIGKIKIILHRSIPENTCVKQVMVIKSKSGKWYTCITYDLDVELPKINLTKSTGIDVGIKNFAYDSDGHQTPNPLNLQKMLKPLARVQRKIARRQIGSQNRKKTMRFYRIIHERIKNRRKDFLHKISTQYAKKYNIVFVEKLQKLNMVKNHKFARNILDSSWGIFTKMLDYKCVVIEVPAKNTSVECSRCGNMVPKSPSIRIHRCNVCNLILDRDHNAAINILKKGLEIFGITNYDIMLPQELWEVTPVKIPERSMKQEEVTGRPVMVHKQIFEYKS

SEQ ID NO: 8148 - protein, 410 aa, unknown
  TnpB Polypeptide
MSHNSKGKFINLSYIDKNMGRGKDKLMITYKFRAYPTPEQEKKLHEIFVIEAQLYNEMIKKVNEINTYDLKTTEKTLRQVIHDLESLWKGKIYSKAIYAVEEKLIANLKGLAQLKKKGKKVGSLKPKEKFTFLFYRQHGFKIDIDGVELSKFGKIKVLFHRPIEGKIKGVGIKLDKDNKWYVYVVSEITPKPLPKTGKVVAIDWGIEKLLTTSDGIAIQNPLILDKLEEKIKRLQKALSRKKKGSKNYEKTRIKLAKLYKYARNLINDYLHKVTTWLIENYDVIYVENIRVEKLIQINKAKKLRRHILQANYYKFLELLEYKAKLYGKQVIKVSPKNTSKKCSRCGYVNQKLTLNDRIFKCPKCGLEIDRDYNAALNILNAGVGRPKVPVERKPLLYISFSEGVYSKFPQ

SEQ ID NO: 8149 - protein, 468 aa, unknown
  TnpB Polypeptide
VSSQPQRTNEYTAEPTTERYRQCLFEWLAAHAPLWNQINYRRRQQYFQNDADVWDAEYTDLYDNYAPILGKATCQQVARKNSEAWRSHFRLLTKYHDDDDPSVTEKPSPPCYWGNRDDGYELHGLVRNDLYTLDWDENRSTLEFGVGDALEEKYDFDHNERITLEVRGKPQWNGDDSRLELVYDDAADTLRVKHPVRIRPDQVREQRLDAFTHTLHPENTTHAAAIDVGANNTLAIVTTTGETAVYHARPEFERFRALSGVIATLQSQLPDNRYTSKRIQRVYDERGEKRDHSRDAAVKHAAEWLLSRNVDTVYVGDLTDVLEAHWSASVNEKTHAFWSHRQLVERIELTLGDVGIGVEAVSESNSSSECPECGSDDVVRDGDEFRCHSCELDAHSDVAGAWNLLQSEVGPMARPAALSAERDRDASLDNEGAYWEWDGHDWTPASFGEQSSPVDQTSVGKPASSQPG

SEQ ID NO: 8150 - protein, 380 aa, unknown
  TnpB Polypeptide
MFRAIKIRLYPNKAQEQELNKVLGAYRFVYNHMLDRRKTAYETDKTSLSENDLSKYFHGTLLKDEQYAWLREQNTKVMNQAIKQMVGAYQNFFNHHKGFPKFKSKKDKQSALFPRNAISKRNTFETKHITLITSLKNLRFRCSDLYHKRLQKYKDSIRSVTLSKTKSGNFFLSILIDIPEAECARFEKTNKQVGIDLGVKDFVITSDGFVFENKHFFKKEEKKIIKLHRQLSRKIKGSNNSNKQRIRLAKVIANITNKKENYIHQVVNEILKSYDMVFMEDLNVQGMLGNRYLANAIQESGFYRFKSILQDKAVVNGKQVILVDRFYPSSKTCSCCGYKKKDLKLGDRFWTCPECGEHHDRDINASKNILIEGQRKLQTG

SEQ ID NO: 8151 - protein, 435 aa, unknown
  TnpB Polypeptide
MGSYEAVEVRLDPTPRQERLMASHAGAARFAYNAGLAHVKEALESGEHDDWSHYALRRWWNANKDELAVNQTTGVVWWSQNSKEAYSGGLRSLAQGLSNWSKSRKGQHKGKRGGFPKSKSKNTAMRFAYSTGFTAPKASDPYGLKLPRIGRVHCMESVYERVAGARVIRISVSRRAGHWYASLTVEREPTAPATAPKLGAVGVDLGVKHLATLSDGTVIPNPRALGTKLKALRKAQQALSRKVKGSARRGKAKVRVAKLHARVADVRADAIHKATTMIASNYSVVCIEDLNVTGMVKNRSLARSVSDAALGEFRRQLEYKTARTGAALRVVDRWYPSSKTCSNCGTVKAKLSLSERVFNCDACGLSLDRDLNAAINIRVAGSAPETLNARGEDVRRTGLVSGDAGLGEARTKRAQKSAVRLGAGLGNEAMQPRVN

SEQ ID NO: 8152 - protein, 227 aa, unknown
  TnpB Polypeptide
MIFSCKVEEEALPLCEDAVGIDLGLLRFATLSTGEIIENPRLYRKGLKCLKVLSQAKDRKKRGSRRRKRATLALTKAHRRVRNQRRDFQHKAARALVNRFGLIVFEDLKITNMSQAPEPKPDPEHEGAYLPNGAAAKAGLNQSILDAGWEQFQQFCVAKAASAGRQVLFVNPHMTSQLCSGCGQVVHKELDERWHSCECGCSLDRDHNAALNILFRGQEVAHRLTGL

SEQ ID NO: 8153 - protein, 314 aa, Khelaifiella sp.
  misc_feature (314)..(314): Xaa can be any naturally occurring amino acid
MKKLKKAYKIEIKPTEEQITKIHQTIGVSRFIYNFYIAHNKEVYEKEKKFISGMDFSKWLNNKYIPHHPDKAWIKEVSSKATKQAIMNGEKAFKKFFDGKANFPKFKKKKNQDVKAYFPKNNKTDWTIERHRVKVPTLGWIRLKEFGYIPVNSIVKSGIVSQKADRYFVSILVEEAINLDNKPYSEGIGVDLGLKNFAICNNGLTKKNINKTKTVKKAEKKLKREQRKLSRKYESLKLRNKKEKGEATRQNIQKQIVKVQKLHQRLTNIRTDYINKTVNELIKQKPSFITIEDLNVSGMMKNRHLAKVIAGQKX

SEQ ID NO: 8154 - protein, 257 aa, unknown
  TnpB Polypeptide
MIIKDNMANMCAKVTSTYMEFTLAFGPKPELGINTDAVCTIMRADGTVLGRRFIDHPSEKDRMYRTLGRIRRFQREHGSAQTQGRWAYTKRLNTELGKKIAGAIVRYAEENHADVIVFEYLEMQGKISGKKKQKLHLWRKRDIQKCCEHQAHRKGMRVSRICAWNTSRLAYDGSGAVTRDWENHSLCTFQTGKRYNCDLSASYNIGARYFIRELLKPLPATERSLLEAKVPPVKRRTSCVYADLRKLHSEMELLKAA

SEQ ID NO: 8155 - protein, 414 aa, unknown
  TnpB Polypeptide
VARFEVPEGWTAQAYRFALDPSPARERAFRSHAGAARKAYNTMLGLVKAVMGQRAAERSYGIAEADLTPALNWSLAGLRKEWNRRKDEVAPWWAENSKEAYNTGLDALARGFEAWRKSRTGERAGAAAGFPVFKSARSRRSVRFTTGTIRVEADRHHLTLPRVGTIGTHESTRKLARRAEAGTARILSATLAEESSGRWFCSFQVIVRRCVSVPGHVGAGVPAVGVDVGVKAGSLLVIAALDGREIGRIPAPKSLAAAQARLRALQRRAARQQGAWDPETRTRRLPSKRWARTSRRIGRVHARAAAVRRDVLHKATTSLAQQHQVIGGDAERLRDAVSRRRPQARPEPRPRRRLPRPGAAHAPLQVHVVRLHPGGGRPVFPVEQAVLGLRQAKAKPHPGRPDLHVRPLRPEDRP

SEQ ID NO: 8156 - protein, 514 aa, unknown
  TnpB Polypeptide
MNKTIKSVRFHINESNKEKLKLIDQTFTDYKNLVNEHIKKYLNSVLYEDVYLNNSRSKKLNNVIKNIKYFDSHYSQQANKKAINILSKYYNNIFDKIDFSEEKKLNKHLLHWINSFTQLRFYLNFNEKEKFFNKLKSLEDKFEDKNIKDIFEYCENNYDNLHKIFNESYIKSKANFKIPEYKANSIQLDARIAEMQRGNNTFDYWFKLKTSKTLKQSGKTHFNQIIYLPFKINDYIRNKLKIAKSFVLKKDEYNNYFFQGVYQIDSIKNVSTKEVGIDIGYKKLVNTSDGYQSSKLYNSKMNKLDKVISLLRKNLQQQGITNSKKLQRLENKRKQLQKCFIGQEVNKILDKGYKTIVVENLDFKKKHNHNFKRKHSKVMIRRLSIHKKMYLLKLLRSHATEKETSVIGVNPAYTSQLCSRCGYLHEDNRVNQWLFICKHCGLRINADINASNNILRRSKDSELLNCTDIGEIKSILIRRFESNHGRNNNPLDLDIVSKEMESLKSIKSEVVNVY

SEQ ID NO: 8157 - protein, 281 aa, unknown
  TnpB Polypeptide
MQIISSYGVELRKQNIPIRQTLEIYRSAVSYLIGIYVQVWEELAEIPDAKRRFNAAEHLVHTTKKNHACFDFDIRFPKMPSYLRRSAIQHALGTVSSYKTRLDLWEKTDGKSGKPKLVYENHAMPVFYRDVMYREGAEGKDEAYLKLYDGHDWKWSCVRLDHTDMEYLRKCWSGKKASAPTLEKRHQKYFLRFSYKEEVTLTKTPVKEQIICSVDLGINTDAVCTIMRADGTVLGRRFIDHPVKKTGCTHTGTDPQIPEGTWLCADTGKMGIYETSEHRTG

SEQ ID NO: 8158 - protein, 384 aa, unknown
  TnpB Polypeptide
MIRGHIIELKPNNVQANHFARACGVARKAYNWALHEWQRQYREDKAYRDACLLAGIEIDSKNLNRPSQAKLRRELNAIKRELFPWMTEVTKCAPQAAIMQLGDAYNNFFKGLAEYPVTRKRGKDDRFSLSNDQFAIKGKSIRIPNLGWVRMKEALRFDGKIMAATISKRGGKWFVSVAVDLDHRVKKIIKTGKSVGIDLGITDLLVLSDGTKIKAPKPLAKYLSKLRTLNKNLSRTKKGSKNREKAKTKLSRLHYKIRGIRQDSLHKITSSLVREFDVIAIESLNVKGMVKNRKLSRAISDLGFFEFKRQLIYKANEQGKVVKSVGRFYPSSKTCSNCNHILGKDELTLKMREWTCPECQSKHDRDLNASINILNNATVILTVA

SEQ ID NO: 8159 - protein, 289 aa, unknown
  TnpB Polypeptide
MKTLKLRIKDKHTVQLNILAGSVNFVWNYVNDLSFKHLQRTGKFFSAYDLSAYTKGSGEYLNLHSQTIQAISETHAKARKPFKKAKLNWRTNNPKASRKNLGWIPFKKSAIKPLATRQTGKKSLKSTIQFSLTTGKKLVIDLWDSYHLALYTINTCERVQDSRGRWYACITVKDFPKIECGANDVGIDLGCKESATTSEGQTLTAKITHKYAEKLATAQRAKNKKRVRSIHAKIKNTRQDLIHKFTTGLIKTNNLIVVGKLHSKSFTSSNLAKSVYDAGWFEIKRHERG

SEQ ID NO: 8160 - protein, 435 aa, unknown
  TnpB Polypeptide
MKINKAYKFRLEPNSEQEVILNNLVGSARFVWNQMLAISLEMFAKNEFINATNLVNKIMNLKNNPDFGFLKTHSNAVSLQQKVRDLAAAWSRFFDPKVHARLKENKKKPRKPKFFKRADGSEIQLRALMPRFKHKSDGCDSIRLVQFDKYCRVEGNRVKLPNGIGLVKFRKSQAIIGTIKNVTLSKKSGHWYVSFGTEKALLENPIHPSKSALGLDMGITKLLTTSSGQYIKPKNSFKANQIKLAKLQRRLSKKVKFSENWKKQNRKIQKLHHHIANIRHDYLHKVTTTLSKSHAMIVVEDLKVANMSKSASGTTAQKGRNVKAKSGLNKSILDQGWHMMTVMLEYKQQWRGGLLIKVNPRYTSQTCSKCKHVAKENRRTQAKFECVKCMYVANADFNAARNVLAAGHAVLSVEGGCSKGRPLKQKTCDNREDVT

SEQ ID NO: 8161 - protein, 441 aa, unknown
  TnpB Polypeptide
LKYTTETKLYTKNNEDVITYFDEVKEQYNYILRRVYYIIRNNPKLKINLLNTELQNKYNISKRTANSIIKTVQGKFNAIKELKKTEIRQSQYRLERISKKLEKLIPTLLELKLKAKENDIKDLVKYKNLKTKVAFLKIRKDKLVNKIKSLNYQLETNKFKITFGTKKLLKQSLEEFLNKRDNWMIFVGSKEETGCNSTFQLKYVPKINQFVIKIRKDFKYKNTKGEERYVYGKCFFNNHKKLLKEILKSKNSPLTYQIIKRNNKYYLQCTFEINSCNLSLTDNTQGVIGVDFNEGFVAISQINKYGHLVSIDKMTYRFGSGNKTENDLLLIINRLMELAIHTGKDIVVEDLNFLKTKSKAIKAESKKGKKYNKMTHSLAYRTFLDKVEQICNRENVGLIKVNPAWTSWIAKNKFCDKMKLNVHTGAAFVIARRGMNIKDVV

SEQ ID NO: 8162 - protein, 391 aa, unknown
  TnpB Polypeptide
LEATNFSRLEEKTAFLLKKTIDFWFQYRYIKYMKLTLMIKLAPTETQHKALLETMECFNKACNRIADTAFELKTANKIKLQQCIYQDIRKDFKLSAQLTIRAISKVCEAYKKDKKIQPIFKPHGAVVYDQRILSFKGLDKVSILTLQGRQIIPIKIGAYQEARLDRIIRQTDLIYRDKAFYLATVVDVPEPPTNKPDEFIGVDLGIKNIAFDSDGIQYSGNKVNALRKRYAKLRTKLQSKKTRSAKCLLKKRKRKEARFARDVNHVISKKIVEKAKDTGRGIALEDLKGIRSRTVVRKSQRRQHHSWGFYQLRNFIEYKAQLIGVLVKLVDPRNTSRTCPECGCIDKHNRKTQSVFSCVNCGFSSIADYIAAVNISRGVSVNMPNVAVNFS

SEQ ID NO: 8163 - protein, 418 aa, unknown
  TnpB Polypeptide
MYLTQSNVIRSLSKEEYAMLREMCQYSNNLYNVALYHIRQYFFQEKKFLRYEENYHVCKVNENYRLLQAGISQQILKVVDRSFKSFFNLIKKAKSGEYRFKDINLPHYREKGGLFNLILSTNAISIKDGFLTIPMSRAFLKEHDGKKIKVPFPSRLSGKTIKEVRICPDRRGTYFKIQYCYEQEKEPAIVDKNRVLAVDIGLENLAACVTNIGTSFLMDGRKLKSINQYWNKRKARLQSIADKQGVKTTNQILRLTRKRNNRAKDCIRKTARYIIDYCIDQRIGTVVCGYNGDFKRSMNLGRVTNQQFTQISFGSLRETLANLCERYGLQYIEQEESYTSKASCLDLDDIPVYNPEQPYTGTFSGKRIKRGLYRFSNGHITNADINGAANILRKSKQNFDFKELCKGLLASPLRIRLD

SEQ ID NO: 8164 - protein, 395 aa, Nostoc sp.
VRISYQYRLKPTKEQALHIDKTLDMLRCQYNYQLAQRFDWYEQNRCPIDRCSLVLCHIPELKDKPNRFSQQATLTQLKKDRPWYKSIHSQVLQEVPKKVELAFDRWLKGDNTGNRSGKPRLKGKGQYKTFTYPQFKKEHFENDKITLSKIGAVKVIVHRQMPEGFDIKTVAVTKKADGYYVTLSLEDKTVPTVKPDFDTNNIVGIDVGLIDFYVASDNTRIAAPKYLRKAERKLKSAQRRVSRRKKGSNRRKKAIRKLGIQHKKVADTRKDFHFKAANNLLKKYDVIAVEKLNIKGLAKSRLAKSVNDAGWGQFISILTVKAENAGLKVVAVNPNGTSQECSNCGTKVIKPLSERTHNCPNCKVSLCRDLNASLNIKARGAHALKAQIMSSLKSL

SEQ ID NO: 8165 - protein, 418 aa, Streptomyces sp.
VTVKLVVQIRLLPSPVQAAALEATLCACNEAATWVSNVAFERGESRNFALRKHTYEQVKSRWGLGAQAAQHVIKKTCDAYTTLRANLRAGNLGRPGSKRRRQASDRPIAFRPGGGQPYDDRMLSWQISERTVSIWTIQGRLKGMTFTASPEQLSTLARYRRGESDLVHRDGMWFLNATCEVPEAEPNTGPVDFLGIDLGIVNIATTSDGQIMAGRQLNRIRVRERGLRQKLQKKNTPSARRRLKKRRRKEARRAKDINHKIAKHVVAEAERTGRGIALEDLTGIRERVRLRKPQRATLHSWAFQQLGEFIAYKARRAGVPVVYVDPAYTSRTCAQCGHIDKANRVSQAFFACRSCGFVDHADRNGSRNIRARGLELWRRGAKSTAPAVPRSRSAAGRKRGSTASDATLCKPGTSVPGS

SEQ ID NO: 8166 - protein, 403 aa, Escherichia sp.
VKRLQAFKFQLRPGGQQECEMRRFAGACRFVFNRALARQNENHEAGNKYIPYGKMASWLVEWKNATDETQWLKDSPSQPLQQSLKDLERAYKNFFRKRAAFPRFKKRGQNDAFRYPQGVKLDQENSRIFLPKLGWMRYRNSRQVTGVVKNVTVSQSCGKWYISIQTESEVSTPVHPSASMIGLDAGVAKLATLSDGTVFGPVNSFQKNQKTLARLQRQLSRKVKFSNNWQKQKRKIQRLHSRIANIRRDYLHKVTTTVSKNHAMIVIEDLKVSNMSKSAAGTVSQPGRNVRAKSGLNRSILDQGWYEMRRQLEYKQLWSGGQVLAVPPAYTSQRCACCGHTAKENRLSQSQFRCQVCGYTANADVNGARNILAAGHAVLACGEMVQSGRSLKQEPTEMIQATA

SEQ ID NO: 8167 - protein, 349 aa, Tychonema sp.
VSRFVYNTTIKYLQERGAKANWMTIKTGILNSLPEWAKPVPFQIKSIAIKDACSAVKAAKQGFKKDGQLRQCKFRSRKDTKQSIYVPKSAVKNCGVYHSILGKCQLTESLPTNFSDGRLTLTYGEYYLIVSEEVQPTKTDKQGRVVALDPGVRTFMTFFSEDSYGWLGNDSNLYIQKLCFRLDKLVSKISKAPSRQKRRFKKAASRLRCKIKNLSRELHHKVAKFLVDNFDVILLPTFETSQMVSKSRRKLRNKTVRQMLTLSHYEFKNFLKWKAWENSQLVIDCNEAYTSKTVSWTGEIVKNLGGARTIKSAATGLKMDRDLNGARGIFLRALVDTPLLRDSLNLYVC

SEQ ID NO: 8168 - protein, 445 aa, unknown
  TnpB Polypeptide
VVRTVLKQKKDPGLYEYLDHHMHLSNNLYNATLFRIRQNFTSRKKEHPTENELEVQREIEETLELCPHLKRPKSVLGYKFLERMMRVMDNPDFFAGLPSQTAEECQKAAVHDFRSWLASLREYKKHPEKYLEKPKMPHYKKKRSISTITFSNQGCKIKEGNILRFALTNETIHLPYQPEGRLKEVKVKPYYGDLLLVCTFECPDPEEKVKGSGACAIDLGVENIAAIVSSKGDCWLYKGGVLKEKNQWYNKQMARLRSIAMKGHDTKEAAKMGLLNTKQMRRLHQKRDLFFHNAMHKISSRIVQECMDHGITTIVIGVNERWKQSIELGKNTQSFVQMPFYQLRKMIEYKAERVGIEVISQEESYTSKADLTAGDHIPTYGVDDEKAKFSGIRVKRGLYQNKEGNLFNADLIGAGNILRKKFPETFSKITDFSFLQNIKVIQVFS

SEQ ID NO: 8169 - protein, 365 aa, Clostridiales sp.
MLKNKAYKYRIYPTEEQKVFFAKTFGSVRFIYNVMLHDKIKHYEAHGEMLYNTPAQYKKEHAFLKEVDSLALANAQLNLEKAYKNFFRELKKGNKDQGFPKFRKKSYAQSYTTNNQNGTVSLVDNKYLNIPKLKTLVRIKLHRQIPANTEIKSVTVERTSSGKFYASILVIESILPLEPLSTKVAIDLGLKTFATLSNSDSIPNPKYLRQREDRLKRLQRALSRKVKGSKNYYKNKRLIAIQHEKISNQRKDFLHKRSKELINKNQVINIESIKVKNMIKNHKLAKSIADASWSIFTEMLTYKSDWYGRTLNKADAYYASSQLCHVCNYKNIEVKDLAVRKWTCPQCSSYHDRDDNASQNLLKIG

SEQ ID NO: 8170 - protein, 457 aa, unknown
  TnpB Polypeptide
MGLDLKIKHSILKDHEQIFRSCQIKFVHPSKNDASLTVIKFENYKALYIEIQKYCNQLFDQIWIKHFESKDIYSKYDKLLMLKYADFNIETKLTSSFRQSCIKHVVGIFNSFIEGHNFTLSKNDKNLLIKKSTKPEIKEFEISFVWCDINTNRKICFIQINGCGEYGIKHKTDVYHPNSMVLRLPFKFSKYHRSKFKNWEFCSPNLCKDGIRLNFVRLIPKRLNQKQNSKSKKFISGQVGCDQGINSVITLACKDENDVIHSFQSPSKDRQGWSLSKIIKRMKRCKKGSKQYARYQKLRANFIRWSINQSKQFIEGNDIKVIALEDIRFLGKGSNIGGFLSKFEHSLIRSKLNMLCEDCGASLLLQTNSYRSQRCSKCGFVHKLNRKKGTKQFICINCGFELDADLNAALNHSVNLEPKKFGQIDNERGEFWKEIKSGSQLGVNLVPNDPEPLVETL

SEQ ID NO: 8171 - protein, 409 aa, unknown
  TnpB Polypeptide
VRTAYKCRAYPAPEQASVLNRTFGCVRVVWNRTLAWRHARYHGERIRTNFTQANAYLTEMKASEDLDWLNEVSSVPLQQVIRHQQVAFSNFFAGRAGYPRYKSRTGRQSAKYTRSGFRYRSGHLFLAKMSTSLTFTWSWPDIDPASIGPTTVTVSRDPCGRWYVSFAVDVADPVQLPPTGAVVGVDLGIKDFAVTSDGEKIPNPRKLARRERALARYQRRLAHCQNRSANRAKAKAKVARAHRKVRASRADFLHRTSAGLVRDHDVIVAEDLAVKNMARNRSLAKGISDCGWGEFRQQLEYKAANAGRHLIVIDRWYPSSKTCSSCGHLLAELSLSTRHWTCPACRTRHDRDVNAAKNILAAGLAVARNNLGDACGADVRHSGSSRMRSAVKQEPQPVTAGIPVLQGGE

SEQ ID NO: 8172 - protein, 386 aa, Proteobacteria sp.
MRKTFSYKLYRSKRNKRLHRQIGGGGAIHNHCIALHRRYYRLYKKSLSLYALQAHLAKSKKLPKYAWWKQLGAQAIQNIAARIDQGYQAFFANVKARKAGKISRRVGPPSFRKVRNAKSFTLSQTGWKLLDGNRLKIGSTIYKYAKSREIDGTIKTVTIKRDPLGDLYVYFSCILDDQPPIDRVMTGKSAGFDFGLTTYLTGSDRNEYHAPQPLKHHLKALAKANRQLASKKRGSHNLKQALRNLARVHKRVANQRQAFHWELAYTLCAQYDCIALETLHLSGMKALWGRKVSDLGFATFVGRLHYVASKTGTVVQHIGTWFPSTKLCSACGCIHQAITLRDRVWTCPDCGITHQRDHNAAVNIFREGASSHGGHLVSQASACMDG

SEQ ID NO: 8173 - protein, 402 aa, Escherichia sp.
VKRLQAFKFQLRPGGQQEREMRRFAGACRFVFNRALALQNENHEAGNKYIPYGKMASWLVEWKNATETQWLKDAPSQPLQQSLKDLERAYKNFFRKRAAFPRFKKRGQNDAFRYPQGVKLDQENSRIFLPKLGWMRYRNSRQVTGVVKNVTASQSCGKWYISIQTENEVSTPVHPSALMVGLDAGVAKLATLSDGTVFGPVNSFQKNQKTLARLQRQLSRKVKFSNNWQKQKRKIQRLHSCTANIRRDYLHKVTTTVSKNHAMIVIEDLKVSNMSKSAAGTVSQPGRNVRAKSGLNRSILDQGWYEMRRQLEYKQLWRGGQVLAVPPAYTSQRCACCGHTAKENRLSQSKFRCQVCGYTANADVNGARNILAAGHAVLACGEMVQSGRSLKQEPTEMIQATA

SEQ ID NO: 8174 - protein, 483 aa, unknown
  TnpB Polypeptide
MHNQLVRYATNRLNALFHDKEYVGARKAYGEAEFSKKKVSELSASEKKKKKELSNIMRFKQKEYDLTKTSLCKFVSKEQKKYKNYINSHQAQAEAEAVYKGVEKVLFEDGRHLHYRRYNSFDCIKQKCAATGVRLSRWDTICFMKHYYKVRVPKNEYIQNIISSVDLKEDVVYSFLKRIEFNSGFKYYVVITLRGDTPKQIKLSEDGGHRTGVDFGTSTIATVSNNEVHLEELAPESAKYEKEIRHKQNLVDASMRKHNPENYNKNGTVKKGKHKWKTTKRCRRLKRQVRVLYRKQSAYIKTSHHTFINRVVQNTSEFILEPMNFKALQKRSKKTERKDEVTAVKQKDGSLKMACKYKRKKRYGHSIKNRSPGLMQADLKTKATQYGIPYYEIDIHQYRASQLHHDTGEYIKPTLSERFKTIEGHKVQRDLYSAFLICHTDDTLTAPDFKTCHLDFPHFVKMQDTLILKMKKCGHTMKHCFGF

SEQ ID NO: 8175 - protein, 226 aa, unknown
  TnpB Polypeptide
VETDWKITSKQKLHDQTYYDVRDESPLPANLVQAARNRAAEAVKGCVERWKKGKKASKPHFTSRFASYDARTGTVNDDHATLATIDGRVTADFILPDERRDTPHSAYLFNDDYDVNGATLHYDEVEDCFYLHVRTKPAVENDEAEQGDAKHVSVLGVDLGITNIATTSTGRFWSGGELNHWHREYEKRRGDLQQTGTRWAHENVQRVGRKQLGASSSFFTRSRTNL

SEQ ID NO: 8176 - protein, 328 aa, Lactobacillus sp.
MKKVLDELVADKSDWQYQLSARCLQLAVSDLGKAWKNFLNKAQPDWGEPQFKSKKAPRQGFKTDRAKIVNGKLRLDKPRGIKKWYDIRLKGAAFLKGELKVVSIYRENGKYWASLPFEVEIKPKAKTGKQTAVDVNVGHFNYTEGQIKTLPNNLKFLYKRIKHYQRSLARKRKANGKKAARSNNYVETKAKLQRDYRKVANIQHDIVQKFTTELVNNYDEIVIEDLDVKRMQMSHVASKGLQRSLFGCFRQVLAYKCQWYGKELFLADKFYPSTQRCSRCGFVKTGDDKIGLDGNMKHKTKHNEYVCYECGATMDRDENAVMNLLALI

SEQ ID NO: 8177 - protein, 396 aa, unknown
  TnpB Polypeptide
LDSWIALREDEFRKTVNGSTLSPDLKHALHRINLRHAWWESVADDAHKMARRIIKHLRERVPFPDMRRCRTMSMDGKIARVGTPVNAFHFQYWAVVSTLDKGHPVRIPLTVDPRMNENTLHGDEQAANHLQARINRDGSIDLHLMTVKAKARKRSSGMVIGMDWGLKSLFATSQGQLHGLKLYTWLQQRDKELTALTRALAKSGIRYRQSRRYRNLNKRIRDYTRNEVNRILNLLSRQEIREIVVEELDFRNGGLSKKMNRIISRAGRNAVKAKLKDLEDNKGITVTKVNPAYTSQECPSCGYVNPRNRPTQEHFRCTCCGYRSQADINASHNILARRSREDGWRRIGRRQILAMLLREHDERFHPTGGHAAKSAATPRVVSTTPRVKATSGRKYH

SEQ ID NO: 8178 - protein, 579 aa, unknown
  TnpB Polypeptide
MAFGSKNSTPSFVLTLPFDISLNEQDYLYKEFKKCGVIYNQLVSATTKMWHQLRKTRKYRELMAAIAKATPDSDEQKTLFKQREKMLKEYRFSEDAFHKLVVPYAKHYAINSHIAQAVASDVWKAWSTFFFSKGKEVHYKRLDDLAAISGKNNFTGIVLRPANLTTSNIESAKRKAQKAVEKRYDDMYGQPDPKDDKKVVLPDEVKPQMEAEIAAAIAKIKPTIGKGNLRIVYEKHEFLVKVRNPDTQTGWYQQEALKCGVKYCRIIRKWVGTKWKYYAQLVLEDYPPIKCDSNGVAKHPVKQGRIGIDIGTQTIAFCGKDVCDLRVLAPSAIAETRNGLTKEIARVMRQMDRSRRAMNPQYYNENGTIKRLKRKNGHKQIRHWNYSKNYYRLLYKLRDLNRKLAAVRKTEHYILANEMLTYGNEFVVEDMNYKALQKRSKKTKINPKTGRAHTKKRFGKTIGRCAPALFITILGQKASRYGGSVIKVSTFETKASQFDHTDDSYTKKKLSQRFAKLSNGTIVQRDLYSAFLLLHLRKNLQSYNKKTIKKDFPQFKKLHNETKERLQNNHEWLPASVGF

SEQ ID NO: 8179 - protein, 387 aa, Chloroflexi sp.
MIKAHKIRLHPMPEQATYFAKAAGTARFVWNWALAEWNRHYEAGEKPSALGLKKQFNEIRREQFPWTWEVTKNASDQPILDLGKAFTAFFEGRARHPRFKSKKRSKPSFYLANDQFELGDHRIWIPKLGWVNMAENLRFKGKVMGARITKTADWWFVSIQVEIPDAVPVNKPAAVGIDVGLNRLATLSTGEGVENQAFLKTALKKLRLANKRLHRRKPGSNNREKARKQVARLHYRITCMRDDVLHKLTTRLATCYGIIGIEDLNLKGLLKNRRLSRAFSDAALGKLLNLLEVKVEQRGGQIIKVGRFFPSSKTCHCCGWKWEDMKLSDRLFLCQNPTCAYYQVAQDRDHNAALSILHEALRLIGLVDQAVSGTGSDADVNLAVDAG

SEQ ID NO: 8180 - protein, 415 aa, Halorussus sp.
LAVAEDFDHRTAITRLEVTEDDRQLLEETIDHWRQGCQIATNLAWDSCEDKRAIQSLAYDDIRAKTNLGSQHAILATHQVSEAISTCLEQREKGTRPSKPQFTAPTVRYDSRTMTLFDDYSVSLTTVESRVRCDLALPADPDGYQFNYLEDSSWELTESTLTVRDGEFFLHLGFRRPTTNDQKTAENGTVLGVDLGVENLAVTSTAKFLSGRKLDHERRQFEKRRGRIQQKGTRSARRTLKQVGEREERYVRDYLHRVAKNLVTEARRYDCTIIAFEDLTDIRENVPKANWFHLWAFRRLYEYVAYKAKDRDIETVQVRSEYTSQRCSKCSHTSRRNRPRRDHFQCEKCGNEANADYNAAKNVGLRCVRRGQQSSLRTGASQCALKSGTLTPNEGFVSYPDERGAEFADKSLVDS

SEQ ID NO: 8181 - protein, 390 aa, unknown
  TnpB Polypeptide
LEELAEAFNSWYRKPKNDSRANPPGYRKRKYDDDHGNRVHEEHPRSTVTWKQKGIRHDTKHNRVRLSKGPNHKDHPRDWDYILVEYETRPEVTGENLQQVRAVYDNSKGRWEIHLVCKHEVETPDAPGSGTAGIDLGVCNFAGVSYSTEDAELYPGNRLKQDGYYFPKEIAQYDDSGGQEVTRLHHKWSERRTHFFHSLAKHIVEQCVERGVGRINVGKLAGIREDENGNSKNWGKHGNLDLHGWAFDRFTKVLTYKAKVEGVDVVEVPEWNTSQTCCVCGRDREDESQRVERGLYVCKPCDTAFNADVNGAENIRLNINTGSNSESSASLDADTSTGWLAQPAVSLHELSSGFQPQEQVVDCKLSDPTARDSRVDETEGLVRTPEISDF

SEQ ID NO: 8182 - protein, 321 aa, Ruminococcus sp.
MWLNNYSNNIAKQAVKDACNAYLNFFNGITEFPNYKSRRKSKPSFYVDTDKISFTDTHVKLEKLTTSKRANKQRFNHIRLAEKGRIPVNAKYSNPRVTFDGINWYISVGIEIPENTNKPLNDGIGIDIGIKTLAVCSDKAEYKNINKTAKVRKLKKKKRRLQRRISKKYSKNKKGVCYCKTRNIIKNEKQLLKINHKLTNIRHDHIHKATSEIVSRQPKFIVMEDLNVKGMMKNKHLAKAVQEQCFYEFYRQIQYKCRWNHIEFITADRYYPSSKKCICCGSIKKNLKLSDRIYHCDNCGNTVDRDYQASVNLMRYYHLTA

SEQ ID NO: 8183 - protein, 274 aa, unknown
  TnpB Polypeptide
MILWISKRIPKQKQYKPRDAIDIDINEEKVYGDDRINKDIDTAVDRSYRCKILAESLQRRYSSPRYPAWRRRDILNRIRSYLWKAKNVLEDRTRKPSLKIVRLAMRLQQAVGREDLTGLVEALRKLSKNHRAKLTIMGYARLGRWIDWQGMKHGAPLAIVDPRGTSSECPLCDSKLEEGGHRILKCPRCGFEADREVIGKLSIRKRALKMLGISGEFWLPHYPPDDRCMIVRPETPVSAGGVEIERGRGQSVYSVANVWVILRRLAPQYPQYPL

SEQ ID NO: 8184 - protein, 413 aa, Streptomyces sp.
MDEQAHAARTLWNLLHDWWTMQPKDKRSLATADTAIRQARGEIDWLAVLPAQAAQAVLKTYFQAWKNCWDGRADAPNFKARIRTVMSVDIPQGRDLNITRVHRRWGMANIPKIGRVRFRWTKDLPVGKHADKEDRITGARLAKDALGWHIAFRVQTLEARPEPHQGTEVGIDAGVSLPLALSDGDHQDHGRPPRLPDGRADRDKWLNPQEKAKLLGLEQRAAQRKQHRGRGENTSRRLRHTYDQIKQLRATATRRAVDWQHKTTTNIARRYGTVVVEQLNIKNMVKSARGTIEEPGRNVAQKSGLNRSISQEAWGRTVTMLTYKTARHGGTLHKVPAPGTSLRCSACGSTTPGSREDQAPFVCKNPDCGWSGNADWNAARNILHLYRMGHALIPAAGRAVVRRPRGVKPATAR

SEQ ID NO: 8185 - protein, 323 aa, Streptomyces sp.
VPATGLPPTPKKVVDAYTTLKANLRAGSLGPSTSKRYRKAVGTPIVFRPEAAQPFDDRCLSWQHDARTVSLWTVDGRMKGIGYTGHPDQLKTLATHRKGESDLVQRGGKWFLVATCEIPDPELYEPADWIGVDRGIVNLATTSDGTNYQGRRLSRYRRWQARKRAELQHKQTRSATRRLARRAKREQRHAAHVNHRISKEIVSVAQRTGRGIAVEELGGIRERVRLRRDQRATLSSWPFHQLAQHLAYKAKRAGVPFLEVDAAHTSQRCPRCGHTERANRPDRDHFRCRRCGLAGPADHVAGVNVRDRARSAWVLVTAPAPLP

SEQ ID NO: 8186 - protein, 571 aa, Streptomyces sp.
MKDLHAVGRGRAVGGLRELSAPFVVPGPAGVAIRTRLRVSSADALVLTEVGLFLGSLASRDLGARSGRRQAGESDSRAARKRALTGASSARWAGSVTRATDDQWALARRGQADELVWLRREIARIEARLARPLAAKADHRAGLVRGLSSSSEWHAKSRRLGALRDRLAALETDWAAGRVRVVRGGKRLARSSHRLGEAGLSREAWRELWQAARMFLAADGETGKGWGNETIRVTDTGQLSIRLPAALAHLANAPHGRYAATATVAFTHRGEEWQDRILADRAVAYRIHHDPVRGRWYLTAAWKRTPAPAPPLRTALAQGVLAVDMNDDHLAAWHLDRHGNPVGEPRRFPYDLSRDTQHRDAQIRHALTRLLHSARSSAVAAIAVEDLDFTASTSRERHGRGKRFRRLVSRFPTARLRARLVCMAAEQNLAVVAVDPAYTSRWGAQHWQQPLMTSTRKTTRHDAAAVAIGRRALGHPIRRRTAPPPHDRRDRAGHRTAQAGPETRWREGPRPRMPDHGHDPCRPDTERKRATSMPNTTRGMRLSAFPLSPQEVSHPPPPAEIPDCGTGPGTM

SEQ ID NO: 8187 - protein, 415 aa, Streptomyces sp.
LTIVKLVVQVRLLPTPVQAAALEATLLACNEAATWASAVAFEKDVKRNFALREHTYTEIKARWGLGAQAAQHVIKKVCDAYTVLKASLKAGNLGKPGSKRYRRAVEEPVAFRPKGAQPYDDRMLSWQIDQRRISIWTVSGRVKDVAFTAGPEQLATLALYRRGESDLLCRDGMWFLNATCDVPEAPLNTDPVDFLGIDLGIVNIATTSDGEIMAGRELNRIRVRERKLRTKLQKKNTPSAKRRLKKRRRKEARRAKDINHKIAKHVVAEAERTGRGIALEDLTGIRERVRLRKPQRATHSSWAFAQLGQFIAYKARRAGVPVVYVDPAYTSRTCAECGHVDRANRVSQAWFACRSCGFVDHADRNSSRNIRARAWQLWRRGAQSTAPAPPPRQRGRAGRKRSATPSDARCANPSH

SEQ ID NO: 8188 - protein, 536 aa, Streptomyces sp.
LAAPFVVPGPSGVAVRGRLKHLTAADEGVLRRVGDHLGSLASRDLKARCTAGVEHEGGRWAERKRALSQESSSRWAGSITKSTHDQWALARRGQCAHIQGLEAGVRTITHRLSLPVGAKGSSKAPGGYGSRQEWFAKSRRLRVLEDRLDAVRADREAGVVHVVRGGKRLLNTRHHLEAAQLTEVQWRQRWEAGRRFLAADGESGKRFGNETIRVTPDGEVSIKLPAPLAYLANAPHGRNTLCVRVSFAHRGGQWADRVSANRSVAYRIHEDVQRSRWYVTASWTVPPVKTVPLEAARAGGMVGVDTNADHLAAWRLDAHGNPVGAPHRFGYDLTGTAAHRDAQVRHALIHLLHWAARHGLAIAVEDLDFQAEKTREKHGRQKRFRKLISGMPVARLRARLVSMAAELDIPLVAVDPAYTSRWGAQHWQKPLTAKTRKTTRHDAAAVAIGRRALGHPIRRRTAPPPAHRSDEQGHRTVQAALVAPGREETRPRIPGPRTRSVPPGHGAKAGNQCAQHRSGHTAEHGSWQQDSLPLSL

SEQ ID NO: 8189 - protein, 456 aa, Streptomyces sp.
MNQERRVIVVSELGLLKRQFGHRARLALSPAEIRLIDDQAHAARTLWNCLHSWWQMTPKSDTKLSVADAAIRQARKDLDYLAVLPAQAAQAVLKTYLRAWVNCWEGRADEPNYKGRFRSSMSVDIPQGRDLNIVRVHRRWGMVNIPKVGRVRFRWTKDLPVGKRADKENRITGARLVKETNGWHIAFRVQSLERAPEPHQGPAVGIDTGLNIPLALSNKDHQDHGRPPRLADGTADRDKWLTGKEKAKLLKLERQAAHRRTFRKRGKKTSKRLQHTYDQIKQLRAKATRRALDWQHQTTTHLARTYGVLVVEQLNILGMTKSPAPKPAPDHEGAFLRNGARAKAGLNRSIAQEAWGRTVTLLTYKTARYGGRLVKVPAPHTSQRCSACGFTTPRSRESQGLFFCKNPDCGWTANADWNAARNILHLYRIGHVVVEVPAAGRRGRRAGKTVKPVTAR

SEQ ID NO: 8190 - protein, 407 aa, Streptomyces sp.
MQLRFAFRLYPEPGQRSALARAFGCARVVFNDAVRAREDARRAGRPFPRAGELSRALITEAKRTSERSWLGEVSAVVLQQSLRDAETAYRNFFASLKGTRKGPKAGAPRYKSRKDARQSIRFTANARWNITDGGRLNLPKIGAVKVKWSRTLPATPSSVTVIKDAAGRYFASFVIDTDPAADAARMPGTDRTIGIDLGLTHFAVLSDGTKIDSPRFLRRAEKKLKKAQRELSRKQKGSKNREKARVKVARAHAKVADARREFHHQLSTRLISENQGIAVEDLSVAGLARIRLARSVHDAGWAQFVSMLEYKAKRYARTLVQVGRFEPTSQVCSACGRRDGPKPLHVRERTCAACGTVHDRDHNAAMNVRSAAGLAVTACGVQVRPEPVLAQHDEAGSLGSPRDAGAA

SEQ ID NO: 8191 - protein, 353 aa, Massilia sp.
MNLVYRYRVKSLTGLLNQQARAVNFVWNYCNDRQKDALRFNRPWHSGFDLIRLTTGCSKELKLHSGTVNDVCQQYAKSRSQSRRPYLRYRGRKSLGWVPLKGRELKREGNAFRFAGNTFRVFYSRPLPEGKILDGTNFSRDLLGNWFLNIVLDVAEPPARMPVRGVGIDLGLMDLATLSDGEKIAAPQIYREAEAALAVAQRARKTRRVKAIHARIANRRRDFLHKLSTRMVRACDYIVVGNVHAAALARTSMAKSVLDAGWSSFRNQLAYKAVKHGAWFEEVDERLTTHICSTCEKPFQTLAPRRGPKGIADLGVREWRCGDCGAEHDRDLNAALNILRRGRATLSAGISLL

SEQ ID NO: 8192 - protein, 418 aa, unknown
  TnpB Polypeptide
MLLSRRSSIKFTEDQANFIGHMCYAASKLWNVCNYERYHYKELGLEQYPDWYYQKKVHKNELWYKQLPAQTAQEVCKQLDKAWKSFYALKKSGGIQAPKPPRFKKENIPVAYMQMGIVHEQGSGSVRLSLPKALKIYMEKTFGIHEKFLYLENKIFRSMDQIKQIRIYPPEKGTSRIIVVYEIPDPEILPDKGHYLAIDLGLHNLMTCYDSGNGNTFILGRRYLALERYFHKEIARVQAQWYGQQSVKGIKHPVTSKHIRRLYQKKQNSVTDYLHKITRYFAKYCREQGITCVVAGDIRNIRKGKDLGHRTNQKFHNLPYNRLYSMMEYKLKMYGIRFVRQEESYTSQCSPLSPEVEKRYAQPCNRKQRGLYRDRNRKYNADAVGAYNILRKYLSVSGEKKELSVTGLKTPEIIKVAV

SEQ ID NO: 8193 - protein, 308 aa, unknown
  TnpB Polypeptide
MNYAGTPKKVRKAQAEENASKSKKKPSDRHPRLHIPLKGKPKLEGTLRVYLHEDIGYLSIHYHRSIPCQDKKLRKDGITLGFDAGLSEGGYDSKGRCIAKNLGKMSAAISDRRMLKDQRRQPLIAKVKLLKASNDAEDRAKARRIEHNNLRNKKETKKRAAEREQLVNYVRRELKKKVFVKPKQPAKTLVIENLGPMGGQKFGKRMNRHVSAWNRGDIITAFEELCPLYGVELVKVNPAYTSRKCSRCGHIEKANRQGDKFKCRKCGLEEHADVNAAKNILASYLSSTSIPLSASPEDVLEIEKANQI

SEQ ID NO: 8194 - protein, 275 aa, unknown
  TnpB Polypeptide
MCTGRTPRALDAILDGAAMKGGLTLWRSRRGIWYALLSATMDVPVAEASGGWVGVDRGQNHLAVASTPTGRPRFWTFGVVRQARRHDAAKRRRLQKAGKRKTITRLGHKEARLVRHVNHVISKQVVRFAVDHGCGIRLEELRGIRQTARQRADTKRQADQNRDYWSYVDLETKIVYKAALVGVPVEKAPAAYTSKSCCRCGAIGQRERHRFRCPRCGYRGHADHNASRNVGRWIGVACPVVRERGASVMGASVPPGAVYDSPQAPYATDPVRGTA

SEQ ID NO: 8195 - protein, 438 aa, Vibrio sp.
LSTRGFSINISERLTPNQAHFFAQWIGAANVMRNQKISEFKGQIAANDGDEFPTFSQGYAPIKGKEELFFLREVPVQIEAYQDTNKAKNQLVKFPRVKNKFKKRSVVITKELFQVEPFGDGSMLTIMAHAKKKPRKVFSIRLPHKPEQLSNQFRISRQGRKFSLSGSYNNGLADRKVEQVLADCAHLPEDELLGLVTGVDRGIALHLCSSDGYAVKYSPEEVERKKERARRKAHYQRILARKKRLNGNKSKSCESSRQEKLRRKIARIDTKNSDCRTNHNHHISKELVAHSREIIGLEKLNLKGMTCKAKPKRDASGRKFMKNHARAKSGLNRSLLDVSLGQLATFIEYKALDAGKVAINDINPVNSSRECSCCGSLNTDRPTQAEFICLDCGNKQNADENASFVLRKRTVIYIKEEMFADKAKTRKKVVHRRKKLAA

SEQ ID NO: 8196 - protein, 420 aa, unknown
  TnpB Polypeptide
MGSYEAVKVRLDPTPRQGRLMASHAGAARFAYNAGLAHVKEALDNGESPDWSHYALLRWWNANKDTLAVNPDTGVVWWGQNSKESYNMALYGLARGFSNWSKSRKGQRKGRRIGFPRFKSKNAVAKFAYSTGFTAPKASDPYGLKLPRIGRVHCMENVYRLLAGARLIRITVSRRAGCWYASLTVEREQSPSPVCTPKGGAVGVDLGVKNLATLSDGTVIPNPRALGTRLKALRKAQKALSRKVKGSARREKAKERVARLHARVADVRADAIHKATTMIARNYSVVCVEDLHVAGMVKNRHLAKSISDAAFGEFRRQLEYKTARSGAALHVVDRWYRSSKTCSGCGEVKAKLSLSERTYRCDSCGLVLDRDLNAAINICVAGSAPETLNAHGATVRRGGHTGRATRVSVKCEPSRRRKAP

SEQ ID NO: 8197 - protein, 382 aa, Larkinella sp.
LKDFSCLNAVKLTAKIKLLPTSEQAQNLLDTLVRANQACNALSEMAWENKQFKQFGLHKLAYYPIKEQFGLSAQMIVRCIAKVVDAYKLDKKTKRELRPTGAIAYDSRILSYNTKKKTASIWTLTGREAIPYVGGEHNEDLLKFQQGESDLLYRKGKWFLLATCDVPDEQTFRIDSILGVDLGIVDLATDSDGQRFAGSEIRKYRKKRSAIRASVQAKKNAKASKSTIKNTRRLLKRISKRERTTSTIINHTISKRLVEKAQSSGRGIALENLKGIRDRTVPRLRKKQRSEHSSWPFFQLRQFIAYKAQLAGVPLVIVPPAYTSKTCHECNHLGHRSGKSFICTNCGNRCDADHNGARNIAAVGASVTWPENSTLYCALHRC

SEQ ID NO: 8198 - protein, 402 aa, Methanosaeta sp.
  misc_feature (39)..(152): Xaa can be any naturally occurring amino acid
MPGRKKANPSQNTRLTTFFQLGKRLNQNSVVSFPKPFRXXXXXXXXXXXXXXXXXXXXXXXXXXXXXXXXXXXXXXXXXXXXXXXXXXXXXXXXXXXXXXXXXXXXXXXXXXXXXXXXXXXXXXXXXXXXXXXXXXXXXXXXXXXXXXXXXXIGNIKIKLHRPIEGKIKRLTVRRAATGKWFACFTVEMEDQPKPPWKDGSLVGVDVGLESFATFSNGEKIANPRFFREEEKELTRVQRKLSKAPKGTLERRSASKVVERVHERIANKRYEFAHQVSRDLVNRFGLIAFEDLSIQNMLKNHCLAKSISDVAWNMLVTLTSYKAASAGSVVILVDPRNTSKMCSRCGILVEKTLSDRVHNCPHCGLSVDRDWNAAINILRLGLQSVGIKTVEACPFKGAGVVT

SEQ ID NO: 8199 - protein, 431 aa, Oscillatoriales sp.
MLKPQKGFSIATKSVKAKLLRSGFDMQPTKAAYNEIVHFYFLLIAEAPQGILTKENGGWRYYELLTANHPFVKGFPSGMKRAAIRQAIGAYKSWNSTYQKWLNRPKRLKHHKPPLHQGAFNFNPQYDAGMWKEDDGFSIVLKMLVGDSWKWIKHQYQCPDVPTQWVKGSPRVQVQNGSLWIVFPLEKYVPATGGIKGIMAKSTFRTCGIDMDLDKFIVIASILETNDRGETTEVARHFINQSRHVARRKRNLGNIAIKMGKTGIISRGFAKKAWDSLSAVEIEYSRAVSRELVELANHWRANVISFEHLGNLRPKRGKYSRRSNQKRAYWLKGKIYEQVKRIAYQDYAILTTRVSPMNTSRLTPWGEPVWRGCKFPSSPTEFDSYRPGAALVATVDGYKAHSGLNAARNVALKAIKRHLSEVMLHQKSLQQ

SEQ ID NO: 8200 - protein, 466 aa, unknown
  TnpB Polypeptide
MYHTIRYVVKESHPLHAYFGELAHLTNNLHNATLFRIRQVLSAVGKDTPTPNEQEVLNEIKAALPVMNETRAKANAKRRASGKPESAPFEMPAFGTSFLSYPFLDALLKATKNVDYYAPLPRQTAQLVVKEARGDVKNYFAALRAYKMKPGAFLGQPKIPHYRKSGGMRDIPFTNQDCTLRNGVLKFPGTKDVLNLGRSIPEQVKVKQVEVKPYYGAFQVCVTYDDIKTKIVIPDTAPKRVIAIDFGVDNIAAIANNIGECGLLFKGGIIKSANQWFNKRRAQIVSGITSGRPTDFCPSSKSLDRLSMWRDGVLSTELHTCAKKIVKQCVEWNIDTIVMGVNSGWKQKSNIGRKNNQSFIGIPHYKLQQYITYMAEWEGILVIEQEESYTSKASFLDMDFIPVYGQPEATEAKFSGYRKRRGLYKSLNHTRFVNADLNGAGNILRKAFPDAIDCTQDRFLREIIVM

SEQ ID NO: 8201 - protein, 389 aa, Brasilonema sp.
MAELSLTLKLPFYRLNQSKALEFERLTVVNTEIANDLLCVDKKERKKLTSAAFRHVEIGSMWINQTIRNTNTKTKVKHFKRMWLEVNNQGFEIVKSGELYTVCFCLYRGRKGRIPLSIHGASHSQVLNKIIQGTANLGSLKLCKSKKGIWYALVSVSMEVPDAISVEHWIGVDRGQNNIAVAALPKGFGKFWKGGRVKGLRRQFQRTRAQLQSAKQFKEVKRLEQRERRIMTHINHVISKQLVQFAQDFGMGLRFEDLSGCRQTMRQHKKTKSDAANNRDSWAFYQLELFTRYKAIRYGVPVESVPAPYTSKSDHRNGVIGKRNGDWFKGFDGYRCNADWNASQNIGQWLGFSCPLNLWRYRATLRYQTAATAMVAADVEGGVDSSPFN

SEQ ID NO: 8202 - protein, 383 aa, Coleofasciculus sp.
MIVYEFKVKGKGSQYNAIDEAIRTSQFIQNKCLRYWMDNEKVGKNELNKYCAVLASEFPFADELNSMARQSAAERTWSAIARFYDNCKKKKKGLKGFPKFKKTCRSVEYKTSGWKLSPNRKAINFRDKKHIGTLKLKGTYELNYYDLDQIKRVRIVRRADGYYAQFAIDVKVRVETEPTAQATGIDLGLKFFIADNKGNVEECPKFYRKAERRLNRANRKKSKKFNKSAKPQSNNYRKARNRYARKHLRVSRQRKEYCKRVAYSVIQSNDLIAYEDLNVKGLVRNRHLAKSISDAGWSTFRQWLEYFGFKYGKVTIAVPPYNTSQNCSKCGKKVKKSLSTRTHVCPHCRFVEDRDVNAAMNILKLALSTVGHTGTYAWGDLPN

SEQ ID NO: 8203 - protein, 346 aa, unknown
  TnpB Polypeptide
MAKIMKTEESFKAIKSNSGQHTLKILERNWKSFFVAIKDWSKNPSKYLGRPRLPNYLDKDKGRFICVLTNTQTLIKGNNLYFSFKPFHPYNGLIKTKIQGKHIQTRIIPKNGYYVIEVVYEIEVPEINEVSSRIIGIDLGLNNLMTVQNTFGEVPFVINGKPLKSMNQYYNMRKARIQSELKKVNGLNWSNKISQLTLKRDNKIDNYIHKATKYLVNYCKAFNVDVVVIGKNKTWKQSSKRKRNFIQLPFEKVILQLQYKLKDIGIKMILIEESYTSKASFIDNDDMYKGVKFSGKRVKRGLYQSKDGLFINADINGASNIIRKVFPNAFADGIKGVDFHPVIINL

SEQ ID NO: 8204 - protein, 456 aa, Moorea sp.
MKAPTKVIRTDKWTLNPTTEQRVLLAETVEVYRRACRYLVGIIYTHWGDLGGLTADQLTPAVERLMHKTAKRPNIRYPQFNKTFYKFPSYLRRAAMLRRSRFANAFSAGQVSSFVTRYRDWQSGRRKRKSAKPPRLNANTGCYPSLYKGQCYKLHGFNAIEIKVFNGSDWVWADVQITGLRERHLVASNKMMSPSLVMNAKGYYLSVPFTCKPEKRKPEANVTAVDLGINTTATIAVVTHSGTVIHREFVHPGRDIDRRDKRLKSISMRASKTMGKGGKLHKGFCSKTYEKCRRINNQIGQIVSKRIVEIAKEFNSEAIVFENLKGWKPKGGKKRSNLRQRFHGWLKAKIRNFTEMKWTELGGKVIEVVAAYTSKLACDGSGTVKRDSKNYSLATFPSAKRFNADLNGAYNIGARGVLKLVRRNSNEGRFSKSSGRPPRSWACLCDLWTSGSSKLA

SEQ ID NO: 8205 - protein, 419 aa, Moorea sp.
MLTLTYEYKLIPSQQQIAVIEDILKVCRKVWNYALRERKDWYKSRKCAVNYCSLQQEYIIPADEPYPNYKLQAAKLTKAKKTNPELKRTNAQVLQQVLKNLDRAFNNMREQRYGFPRFKNKYRMRSFVFPQFKTNPMKNEWLKLPQIGLVKMRLSRPIPDGFKIKQVRIVKRASGYFAMLSLQSEVSIPDIPAWGHPLGIDIGLDKFLATSDNELIERPRFLTKLHGKLKLLQRRLKLKKKGSANRHKLNCKIARLHQKISDTRKDFHFKLAHHLCDQAGMIFVVGEACPKDIDLDFRTWAKGMLGKHTLDAGFGQFFNILVWVCWKRGVYFGKVDHRYTSQICPNCATHTGKKDLSERIHFCPECHYEINRDVSAAQVICQRGITAVGQIVGKIDCVGGLSGVGNNLDKCLRSSKPRS

SEQ ID NO: 8206 - protein, 478 aa, Lentzea sp.
VQGCRRRPSAGHHRTPTGASRLRQPWRCASSELLRGDPVIQGGEETDPCGAGQGQLCRHQRDIASAAHPCGATQRLDILKTVNGQVKRAFRYRFYPTDAQEAELSRTFGCVRKDYNLALQARAEAWAQRGEQVRYAATSAMLTEWKRTEELAFLGEVSSVPLQQALRHLQAAFCNFWAKRARYPRFKSRKKSRPSAEYTRSAFRWRDGVLILAKMSEPLDIRWSRTLPDGMTPSTVTVSRDAAGRWFVSMLCEDPGVLPLPAGDSAVGIDLGLDHLLTLSTGEKIANPRHERRDRHALAKTQRALSRKHIDSKNRAKARVKVARVHARIADRRTDHLHKITTRLVRENQTLVIENLTVSTMVGNRSLARAISDAGWRKFRQMLEYKASWYGRDVIVIDRWFPSSKLCSTCGALAASMPLHVRTWTCGCGATHDRDVNAARNILAAGLAVTVCGAGVSPQRSTPGGRSATKQKSLRREP

SEQ ID NO: 8207 - protein, 231 aa, unknown
  TnpB Polypeptide
MIRSGTVSVKAGRFYVSVLVEIPDVNIDNSSNEGIGIDLGLKDFAIISNGKTYRNINKSAGLKKLEKQLIREQRSLSRKYESLKKGESTQRANIQKQKLKVQKLHHKMDNIRTDYINKTIAEIVKTKPSYITIEDLNVKGMMKNRCLSKAVASQKFYEFRARLKAKCDENGIELRIVDRFYPSSKTCHHCGSVKKNLKLSDRIYRCECGYVADRDFNAALNLKDAKTYKIA

SEQ ID NO: 8208 - protein, 425 aa, Nakamurella sp.
MVVGRIFRLRVTPEQDAALHDWAGICRAVWNTGLEQRREYRRRDGWVNYPQQARELAQAKTDPDLAWLTQAPSHVLQQTLMDLDRACRAVGTWRVRWRSKDRWSPSMRFPDGPRMRVQRLSKRWGRVNLPKLGWVKFRWTRDLDGRVRSATVNVRDGQWHVTFLVEDGILEVQPPVSDPRPAVGVDRGVKIAAALSDGRMLDQTFITAAEQDRLVRLQQRLGRQHGPRSKPSKDRQRKNPKARGRRQQPSARYLRTKKRIAAVQGKVRRRRDDWLTKTARQLVREHSLVAIENLNTKGMTRSPAAKPDPDRPGAFLANQRSQKAGLNRAILGKGWGRFALTLAHQARYTGCRIVQVLAAFTSQRCHQCSHTEAGNRESQADFRCTKCGWRGNADINAACNILAAGLAVAGRASPTPVGSVNPQAA

SEQ ID NO: 8209 - protein, 337 aa, unknown
  TnpB Polypeptide
MSSNRFRVWLNNEYLSEHPEYSWIKEAYSKAVTQSVNNGQTAFTRFFNHESAFPKFKKKGRSDVKMYFVKNNPKDCRCERHRINIPSLGWVRIKEKGYIPTTKDGYVVKSGTVSMKADRYYVSVLVEISDNKIADNSNAGIGIDLGLKDFAIVSNGKTYKNINKSARLKKLEKQLIREQRCLSRKYENLKKGEVTQRANIQKQKLKVQKLHHKIDNIRTDYINKTIAEIVKTKPSYITIEDLNVNGMMKNRHLSKAVASQKFYEFRTKLQIKCNENGIELRIVDRWYPSSKTCHCCGAIKKDLKLSDRIFKCSCGYVEDRDLNAALNLRDAITYEVA

SEQ ID NO: 8210 - protein, 372 aa, Brasilonema sp.
MLLSIKTKLKLSKTQEIIMSKHAGIARFTYNWGLATWNSLFKDGLKPNKYILKKFFNNHVKPEFEWIKEKGICQKITQYAFDNLGDAFSRFFTGIGGYPNFKKKGRHDSFTIDAGGQPIPVGGKSIKLPTIGWVKTYEGLPHTTCKSITISRTADSWFIAFAYEQEHEPTTSQYDVVGLDLGVKELATLSTGVVFPNPKHYKTHLEKLRRLSRKFAIKTKGSSNRNKAKIQLARHHARVANLRKDTLHQITTFLCKNHAKIVVEDLNVSGMLSNHKLAQVIADCGFHELKRQLEYKAKKFGCEIIIADRWFPSSKTCSNCGHIQDMPLKERTYNCKSCGHSMDRDLNAAINLSRLAKACCKSVRSANKLTEG

SEQ ID NO: 8211 - protein, 511 aa, unknown
  TnpB Polypeptide
VIIIKAKMYVSLQFKLQLNSLDRKKLLELMRKQSSVIKSAYKLLKDKNSHNQIYQKLRQRFPDLPTKYIDSAIYKAKQYSTDKKVVFGGKALFERLCKNRDEKSREKLKRKWKEQRQGTLISVGSKADKGNRLLRFESINGKLHLRITTGNREFIYAKVLREPSSEKDKWNTFLAMLWESSKSNVYFPYTVELKLRDGEIYGNISFEVPAPDIWLTKEYGVIAIDTNASPLHLALAEVNPDGNLLSYQTISLHELIGLSKNKKEYQEWLIAHKVVEIAKEKGKAIAIENLKKVNKVFRGDGKAKLRKRLHYWNFKSLLSKIERTAKLNGIEVVKVNPAFTSVIGSLKYAPQLGIDKDIASAYVIGRRALGFKEEIPENYLKLLSDKEYLEYAIYTYTEKEEELKEQLKKETNQYKRNAINSELKQVQKAKDLLLEKLKSLQGEPSWEKEADGRNSNFHQKAWQVLKVAFLFPVLGKVLPRDLSPLKPLLVEGVWNRVRRRLVPLEVGGTSR

SEQ ID NO: 8212 - protein, 690 aa, unknown
  TnpB Polypeptide
MKHLLNYKYEIFPTKPQREQLNRTFRQTKIQWNKAVTIRKKLKSALMSGQFEHVIKTYLSAAADKSNTSSNRKKAILKVQQSLPQIDFETAAKLYDIKNLVGKVLGELTPRHADIAFLVNELKTSHSKELAERKAAIANGATGKSLPKLKTYWQMITAIGQLAGFKAKTFMDDSFESPSGMALSAIRFNVSGTKNAVRWNQAVQPKPGQRTYGATGEPRYKRRSDGFAYQIHDAAPADLIRSKKKNGHQIHLKALHKGNAWVDFAYHRPVPVDGKIKQFTVMTKAGRYFIALSTEVPTSAWAIAPMEAGWHAGIDPGAQTALTVGLVNSTSGEIKHLAIHYEFLEKSLTKLETLQQALSLKQGPRRKRTEVEIQEALTQYSKKRAVQKLTNAEKEKTLAKERERLERRMVFQGASRKWRQGAKSVSSLMLKIANQRQDVLHKISRALAEGCDVVGIGHWEPEREVSFRKKLRLLKKQVKAGVAGATATLKEHIEEKSKEGPKGIKKRRRGGRDRSIATLRMLINEKAVRSGVKAFTDINESYSTMTCSSCGEATGPTGIVNLGIREWQCGNCNVSHHRDLNSAFNILKKTELELAAAQAAAPATGSTATRTDAQGAQSTPGSDSGSGYLATGHHGRGGSFFYEHAEVSLPDLWKEEVPRALKSLIQMGVVRALTLQRADEKSSKSPPAQT

SEQ ID NO: 8213 - protein, 429 aa, Nitrospiraceae sp.
MQSGVKFRCYPGNSLSTPLSQWIGCQRYIYNAKVGEDKYFRTFRNHSLSLTGLHTPTDQQYSQFKDKDLTPFLYDVPSQVLRNGAYRYIQGYSRFRQGLSDRPTRRKKHGRQTVMITRELFRFVPTGKITKSKDGDIIEHKLIIGTEKSPVGELKFKAHRPYGLPNSITVSRHNGEWHVSFNYAVANLSYNMEPMTEDKLLEYFSGLTVEELERITKGGDRGVAIPLATSDGVNYDFTETEKKRLTKAKEQRKKLQKRLAKQQKESNRRAVTKGKIGRTHTKERNIRQDCAHKISHAIVESEARVFVHEDLPVKNMTKKAKPKQDENGKYIKNGAAAKSGHNDAILSSMWGMVVVFIRYKGLKKEKLTIKISPHGTSQECSQCGHTHPGNRETQAEFICQNCGFTANADYNAALVIKKRGIKALLARLW

SEQ ID NO: 8214 - protein, 443 aa, Nitrospiraceae sp.
MATLWQTSYICKDVWNILNDENQRNGLGYYDLKKMLPELKKDCPRLKEPCSQTLQEVVKSLTGAWRMYFTKKRQGNTEVRPPRFKSYKYFFTQKYPQQGISFEIVGNTLRLAHGKNKAEWIEIELPGLDYASETIKTVTIAYDKVSKAWSASFTHEVSCADAMTVSKEMAGQMSSLSPETFCPLPIAYNPFTRKPVHLLYFDPGCKTALTGIKTDGTICEYDINPLRQLNLNHYILIDQLKSRRDKKKRGSRQWRRLSSKIRNIYARIDGQTKHYLHRMANQILADHPDVIGFYVGDWDKSQTLADTGYKFIDKRINRQVQNNNPIMTLVGYLCYKATMRCKEVRKFNERGTTRTCSCCGHVIAEGLSPSVRTFTCSECGFTISRDINSTLNFLNIYQFAVWYSLRALQCLSIARLLLNPSSSKNRRVSSRTCILNYQDARSI

SEQ ID NO: 8215 - protein, 126 aa, Okeania sp.
VGWYNKQIATIKDNKPQGFWSNKLACITEKRNRQMRDAVNKAARLVINHCLKHGISRIIFAWNKRQKDSINIGAKNNQKFVQIPTAKLKEKIIQLCELYGIEFIETEESYTSQASFLDDDFLPNRA

SEQ ID NO: 8216 - protein, 408 aa, Okeania sp.
MVEKAYKFRFYPTPEQENLLRRTLGCVRLIYNLALAARTQAWYERKERVSYKETSTMLTAWKKQGDLDFLTEVSSVPLQQGLRHLQIAFTNFFSGRAKYPNFKKKRNGGSAEFTRSAFKWKDGQVYLAKCSDPLPIRWSRQLPQNSVPSTITVKLEPSGRWSVSLRVNDPRNLSLAPVKKQVGIDLGITSLLTTSDGEKVANPKNLNKLHKKLRLAQKSLSRKTKGSSNYQKARLKVARIHAKIKDSRLDYTHKLTTQLIRENQTVVVEDLAVKNMVKNHKLARAINDANWGELVRQLEYKAEWYGRELIKIDRYFPSSKRCSNCGHVVEKLPLKIREWDCPECAAHHDRDINASINILAAGLAVSVCGATVRPEESKSPFAEHSVGKAGAKKQKAPSSDARESRAVS

SEQ ID NO: 8217 - protein, 490 aa, Okeania sp.
MLLKYKYKLKPQKTQEVIISNWLSMARKQYNYRLAERLNWFEATRTPVNSCPLNVSVVPLERIYQNIPEFRIQTRDGRKKDSNGNPLTRKGDKHPNIINGYVVWETVQLADLGKTKKLFPEYKSMHSQVLQDVIQRVQTTMDNFTKPDKNGKTSGRPKFKGKHYYNSFSYPQLSNTNIIKNANGRYCVNLPKIGLVPLVYNRSIPLGFKVKAGTVIGEADGWYISFTIEDKTVPVEVAEIQPSLDNSKGIDLGLLHYAVTSDGEFVEVPKFFRLCERRLSKLQVRLAKKQKHSKPWKILKRKIAKLHQLIARQRVDWQFKLAYHLFSDVSVIFLEDLQIANLVRRCKAKLGDNGQFLPNGQSAKSGLNKSLQDAAFGQFIQVLEYVAWKLGKRVIKVDPKGTSQYCWECLRKVSKSLSQRWHSCPHLGQELDRDYNSPTPLAPLPGGDGGGLDCYQHRRRTSLLLKQRSGFPRLKNPALSRKGNVGSMSK

SEQ ID NO: 8218 - protein, 404 aa, Microcoleus sp.
VFHLTYEFKLKPTVAQVIIFEDWLEQCRRVYNWALAERKDWFKSRSCQINACSIRAEYIIPASVPRPTYASQCKGLTQARATIPALKAVQVHVLQQTLKRLERAFVNMWEQKHGFFRFKKVGKMRSLVFPQMGVEPIKNSAVKLPKIGWVQFRQSREVPSEAILKQVRVVKRVSGWYAMLALQWDVSIPDIIPHGNPVGLDVGLTNFIATSDGLLIKRPKFFIDAERKLKLLQQSVSRKRIGSNNWKKAQKKVALLHEYVANCRKDWHRKLSHKICNDAGMVFVENLNLVGLSRGILGKHCLDAGFGQFFNILEQTCFKRGAYFQKVDARKTSQICPNCGTETGKKDLSERTHSCSSCGYITDRDVASAQVVLIRGLAAVGHTVKMLGEGKFIGIPVKQESPGF

SEQ ID NO: 8219 - protein, 383 aa, unknown
  TnpB Polypeptide
VFALQKYKSYKYRIYPSKNQEQLIQRTFGCCRFVYNQILALQNSRYADSLPYMSWMNANKHCNNVLKRDYPFLREVDKFALTNSIRSLDRAFRSFFDKNTNYPRFKTKHRSKKSYTTNFSNGNIALMENGIKLPKLKVVKAKIHRLPPNDSILKSATISQNSIGEYYCSLLFEFDVLTPTKDLDTAKAVGLDFKIDGLYVDSNGSICGSPRFYSKSCERLAFEQRKLSKKRPGSKNYLKQKKKVAKISQHVLNQRKDFLHKETHLLSEKWDIVCVENIDLKSMASKNQRMGKAVMDNGYGLFLHYLQYKMEDRNKALIKVDRYYPSSQICSCCQNRNVEVKTKMMRRWECPICGAKLDRDINAAINIKYEGVRLYNDNKPVEV

SEQ ID NO: 8220 - protein, 386 aa, unknown
  TnpB Polypeptide
MEQAVTAKVKLAESCEELDRTIESFSRAVQHCIDTAWNNNLHSKKEIRESCYYEIREEYSLHSQLAVTAIDQTYEMIQEAGSKPEVSDRLSIRYNFPRSASVSGDWTELSLATLNGRKKFNIQIPECYQQYLDAEVCESNLIHEDGAYYFCFVFAIQVEEPSVRRDSRVLGVDLGVNKTAVTSDGSFYGTEIKKKRKQRDNLVAEIQSKGTHEAHNLLQRIGSRWKRFTDWKNHNISRKIVDSVEPGDVIVMEDLTHIRETNDNATEWVHKWSFRDLQDKIEYKAHLKGVRVVYINPENTSNECSNCSHVDSDSRHGGFYRCVNCGFTLDADLNAARNIARRYTRNTGQAGRPVNRPNDSGNYEADVARTFEAENTRKPLPHEATA

SEQ ID NO: 8221 - protein, 389 aa, unknown
  TnpB Polypeptide
MKKAYTFRIYPGRNQEVKLIRTLDTCRHLYNDSLEERRRQAELNRLCSEFQVYPWGKPEWISYENQANELASSKTPIQKEVYSQVLQNVLKRLDRSFKNFFNGFGYPRFQGRNRYNTFTYPQSGFEIRDGKIKLSRIGNVRIFQHREIEGKIKTCTIKKDVDQWYAIFTTEIDRHIKKVPVESMIGIDVGLSSLLILSNGDKIEPPEYLRKSEKKLAKEQIRLSRKKKGSKNRNKQRIRVARVHKKIRNQRKDFAHKTSRELVNNYDLIAFENLNIKGMVQNHHLAKSISDAGWSQLQTFTAYKAEDAGKQCEFVVANGTSQECYICGNVEHLTLANRVFRCSRCGNIEDRDVNASFNILKRAVGTDCAELTPVESTYKGLVEVGSPLR

SEQ ID NO: 8222 - protein, 195 aa, Okeania sp.
  misc_feature (179)..(179): Xaa can be any naturally occurring amino acid
MKSIRTKLKLNNQQKTLLAQHAGYSRWCYNWGLSLWNAAYTDGYKPNARKLREVFTNHTKPLYPWMKNLSSKVYQYAFINLGEAFKRFFQGLGKRPRFKKKGKSDSFTIDNCGKPIELNGWNHNIPFIGWVKTYEPIEATTQKITISRQAGDWYLSLAFDQRATPTPKTTDVVGVDLGXVLAEADMDEAEVRMSA

SEQ ID NO: 8223 - protein, 451 aa, unknown
  TnpB Polypeptide
METTQRTLVTHPRNHQQVKRQVDPHAWDASKLWNVGLYHLYEWLNNDNLPAGDLDHALKEQLKTHDKYNGLHSQSSQQVLEELATAFSNWLSSNDTRDSPPGYRKENYYDQDGNRVHEEHPRSTVTWKQSAIRHDEQNHRLRLSKGANHKSSPRACEYILVNYNTPDYTDIGDITQVRAVWNGDKYEIHIVHEVEIPDDSPGERVAGVDLGICVPAAVAYPDEAAIYPGNTLHEDRHYFSREEYQTEGPNGPSTRAERARETLSRRTDDFRHKLSHEIAETCVEKNVGQVIIGDPSGVEDDDWGRHGNKRLQNWAFSKLAGLIEYKCRERGIEVELVDERGTSSSCSRCGHEADACRVERGLWECSSCGVVMHGDVNGADNIRQKSISAIPPLAETVDSANGCVAQPVVYLFDRTRGFQPRHSEGSCKPNHSNSVSSSPNNATRETGSPPL

SEQ ID NO: 8224 - protein, 327 aa, unknown
  TnpB Polypeptide
MILQSDLPQWVKEVPCHIKQNAVMEAWQAFRQSKEARFRSVRDKTHTLQFNNSNFSQGRWYPRLTKGLSFTASEAVPQKCAYGTKLMRVKDRWYAIFPEPVNEQCSLARGVMALDPGIRSFLTGFDGTGFVDIAKGDFGRITRLCYYLDDLQSRMSKAPRQKRRRMRQAAFRLRERIRNLVDECHRKVAAFLTDHYRLIFLPTFESARMVAKAGRKFGSKTARTMLTWAHYRFQQFLKFQAKKKNVVVVDVSEAYTSKTCTKCGHIHTKLGGAKVFVCPRCGHKLPRDWQGALGILLRALRDTAFLFSNGQNAIAAPLSGEVQQCSA

SEQ ID NO: 8225 - protein, 426 aa, Halogranum sp.
MAKQVVTRTYTASIRNQQRVSDDLDSLGFSASKLWNVGRWTCDRVWSEIGYIPGHNELTSYLKSHERYDDLHSQSSQRVLQELAEAFNGWYGKRRNGDTGANPPKYRKHGDDHPRSTVTFKAAGFKLDTNHERVRLSKGSNLKEYWSDFILCKYQTRPDVNLSTVENVQQVRAVWTGDEWELHFVCKVEIEVADAPGEKTVGVDLGINNFAALAYETGHSELYPLNCLKQDDYYFSKRIAQCDDSDSNQATRLNQKKSARRTHYLHTLSKHIVERCVDEGVGTIVVGDLSGTREDEENGESKNWGKHGNLDLHSWAFDRFTSMLEYKADMEGITVAQVSERDTSKSCSCCGQKREVNRVERGLYVCDSCETVANADVNGAENIRQKVSPSLATDGGDRSNGWLAQPSRFLFDKETGAFAPQEHVTS

SEQ ID NO: 8226 - protein, 421 aa, unknown
  TnpB Polypeptide
MRVNQAFRFELDPNALQRRALAQHVGAARFAWNWALVLCLKALEEGKKLPTAAELHKAWNLWKRENAPWWTEVSKCAPQEAIRDLERAFKAWRKGKARLPRFKRKKLTLDNKARLTGSVRVFPRHVQLPRIGKVRSKEPTEKLLRLLEEGKARVLSATVSREADRWYVSLSCEVERPEPKPRGVRSEGDVVGIDLGLSSFAVLSDGTRIEAPKPLAKKLRLLKRRSKQLSRKEKGSNNGKKAALRLARLHRKVKNLRQDFLHKLTTELAKTKPVIVVEDLNVKGLARGRLSRSVADVGWGAFRRMLTYKAEWYGATLIVAPKSFPSTRLCSRCGHLQGKMPLSQRVFRCEACGLELDRDLNAALNLRAYGLAHLTGPTGSSPGSDACGDPSGGGTAPYGGRSTSYGSWKQEVARGLHSLGE

SEQ ID NO: 8227 - protein, 421 aa, unknown; identical to SEQ ID NO: 8226
  TnpB Polypeptide

SEQ ID NO: 8228 - protein, 412 aa, Ktedonobacter sp.
MSNLKAYKYRLYPNKQQTEKLQWTLDRARELYNAALQERRDAYRMCRVSISYNQQAAQLPEVKEIRPEYNDIHSQVLQDVLRRVKKAYDNFFRRVKEGKTPGYPRFQGYGRYDSVTYPQSGFSLTEDDRVCLSKIGTIKVKMPKGKKANPPVGEMKTCTVKREGQHWFIVFTCEVEQEVVYHPSEEAVGIDLGLLHFAALSDGSTIENPRHLRSSEQKLKKLQEALSRKKRGSKRRRKAAQRVGKVHRHIRNQRKDFHHKQARKLVTQYQTIVFEKLAPSNMSKRPKLKQDETTGRYLPNGASAKAGLNKSILDAGWGMFQQLCKNKAECAGSRVLFVSPKYTSQVCSGCGAIVQKELEERWHECSCGCSLDRDHNAAKNILRLGLQALEKEFRARTERSEDAPLRSPAIHS

SEQ ID NO: 8229 - protein, 372 aa, Paenibacillus sp.
MQITITAKIQIKPTEEQIALLNETVSAYKQGSNHVSGIVFETKNLNQISLHKLTYENLRTQYDLRSQMAQSVMKTVIAKYKTNKSNGHDWSLVTFKKPEYDLVWNRDYSLSKGLFSLNTLKGRVKVPFETKGMEPYFDGGWSFGTAKLVNKHGKWFLHIPVTKEVEVTSDLDFKQVVGIDLGINFVATTYDSQGHTTFFNGRPIKHRRAKYKHLRKQLQMKQTPSSRKRLKAVGSRENRWMTDVNHTISKALVNRYGSRTLFVVEDLTGIRNATEKVKVNDRYVSVSWSFLQFRQMLAYKAVMNGAKIVAVSPKYTSQTCPKCGHTEKTNRNKKKHIFCCKTCTYTSNDDRIGAMNLQRKGIEYIVEVTKGA

SEQ ID NO: 8230 - protein, 251 aa, unknown
  TnpB Polypeptide
MDCHEKTQGACRKLLSEIREPVEGLRLKSVTVSMEPSGKYFASLLYEGYSCENQAAEPDYSTAKILGIDYAMQGMAVFSEKIEMEEAGFFRKNEKKLAREQRKLSRCVRGSHNYELQKKKVARCHEKIRNQRRDHLHKLSRKIADSYDAVAVEDIDMKAMGQCLHFGKSVQDNGYGLFREMLDYKLAWQGKKMVKVDRFFPSSKKCCKCGRIKKELRLSERVYHCECGNEMDRDRNAAINIREEARRMLTA

SEQ ID NO: 8231 - protein, 372 aa, unknown
  TnpB Polypeptide
MLKTYRYRLYPTKAQITALIRTFELCRKVYNNTLALRRDSWDYDQKNLTYFDTVNELVRWKREFPDLRDVHSQVLQNVQVRVDLAFKAFFRRVKIGDNPGYPRFKGRNRYDSITYPQSGFSISGSVLHVSKIGDISIILHRPIDGTIKTMTIRRSSAGKWYVSFAVEYEPGIHDHPGTEIVGIDLGLSSFATFSTGETIANPRFFRSEEKELARVQRKLSKAEKGTLERRNRRLIVAKVHARIANKRSNFIHQISRDFVDRFKLIAFEDLQIINMQKNSHLAKSIADVAWGMMIQTTRNKAVDAGSQVILINPRNTTQTCSRCNQIIRKEMSDRIHSCPFCGLVMDRDQNAAINILRLGTQSLRKSAGSSCL

SEQ ID NO: 8232 - protein, 368 aa, unknown
  TnpB Polypeptide
MIKQKSYKFRLFPNLKQRISFEKTFGCSRFIWNQMLADKIAHYEETGKTLNNTPAQYKDEFPWLKEVDSLALCNVQLNLNKAYKSFFQSKFGFPNFKSKKTAQSYKTNNKKGTIALLDGKVKLPKIGWVKVKAHRQVKGLIKSATISKTATGKYYISILCEEEIVPLPKTDSNLGIDLGLENFAILSIGEKIENPKFLASLSKKLAKEQKVLSRRGFLAKKKGMKLSESANYQKQKLKVARLHEKIAHQRKDFLHKLSTNLIKNHDVICVEDLASRNLMKNHHLARAIGDVSWSEFIRQLHYKADWYGKKIVTISRWFPSSQLCSSCGVNSGKKPLSVREWTCEGCGTHHDRDINASLNILKEGLSLA

SEQ ID NO: 8233 - protein, 432 aa, unknown
  TnpB Polypeptide
MKLAENFILKPNKTQQIILGCLGYASARLYNVGNYERRNYSKDSDKDFPDWYNQKKELKDHFWYKNLPSQTAQETLKILSDNWKSYFKSLKDYKSNPNKYTGKPKPPSYKPKDDKFNFRFLNHGFKVIDNKLRLSIPKQLKDYLKDEYSINQKFLWIKVPKELLSDDREHILNNTTRLEFKPLVNDNYKLILTYKVDTPQIKPDNGNYLSIDLGINNLAACYSNKTKESFILDGGQYLSISRYFNKKIKHFQSILNSQGKQTSKRLKQLYQKRDRQIRHLIHCVTKKVVDYCIDHNINRVIVGNIKGIRDDNNMGKVNNQKLHQLPYEEIYHQLEYKLKLKSINLIKKNEDYTSQCSPYTKKVTKKYAQGSNRKKRGLYVTENKTFNADTVGAFNILRKYLYERSKGPDIALKVEGLNNLIKYSWNKNQFVA

SEQ ID NO: 8234 - protein, 386 aa, unknown
  TnpB Polypeptide
MEQPSLRKTFKYKLKPTPDQEQALALVLRRCRELYNAAVQERRDAWQKCGVSITAASQSAQLPEIKDACPEYGDINAQVLQDVLTRLDRAFQAFFRRVKAGETPGYPRFQSANRYNSFTYKQFGNSVTLDNGCLVLSKFGRLAVRWSCPLEGRPKTVTITREADGWYVCFSCAGVPIAPLPLRGQNTGIDVGLESFATLADGSQIANPRIFRVAELNLKRAQRRVSRRKKGSNRRKKAVKLLAKAHQQVRRARQDFHYKTALALVRQYDTLFHENLQTANMLKNHHLAKSIADAGWSTFLSILSFKAACAGRSVVAVPPAYTSQACSGCGIIVVKSLSVRWHSCPDCGIRLHRDHNAALNILQLGQQSGLGQSPQALTQPSGAYVA

SEQ ID NO: 8235 - protein, 393 aa, unknown
  TnpB Polypeptide
MKRRWTFRAYPTPEQAEHLAQTFGCCRLVYNGMLAARTMAFQRGERLTYAGSDKKLTALKHDPEMAFLNDVSAVPLQQALRHLQTAFTNFFAMRSAYPTFKKKGRTRDSATYQRNAFQFNRVSQRLTLAKLGVLTLRVSRCVEVDPSTVTVSRHPSGRYYVSMVVEVQPVKRIKTGLSVGIDFGVSRLATLSTGETIPNPTHLFHRTALLARAQRRLSRKTKGSNRRQEQARRVARLHEKIADARRDSLHKLSTMLARRFDIIYVEDLNLRGMTQNHCLARSLSDASIGTAIRLIEGKADAVVKIDRWFPSSKLCAACGHLLDTLSLSVRQWTCPRCGIEHDRDVNAARNILAVGQTVSARGGGVRAVRTSVRKARPRRNVNHSKSKHAHVSS

SEQ ID NO: 8236 - protein, 406 aa, Nodularia sp.
MLNVDEQMKGGDSRVLVLEYKAVVKFNQVKAIDEAIRTSQFVRNKVLRYWIDHRGVGKKQLYQYNTQLRAEFGFVKDLNSHACQSSVENVERAINRFFDNCQTKKLGKKGYPRFKKHSRSVEYKVSGWKLHPSKRRITFTDKKGIGELKLLGKWDIHAYPIELIKRVRIVRRADGYYVQFCVKIDHQQEAPSTTSEIGIDVGLEYFYSDSNGKHEENPRYLRKAEKNIKRVQRHIYKKKKGSSGRRKARGVYARKHLKVTRQREEHAKGLARNLCLANAKVVLEDLNVSGLVRNHKLAKSISDASWYNFRRWLEYFGEKFVREIIAVPPHFSSQECSNCGARIQKSLSTRTHSCPHCGYTEQRDVNAAKVILSRANARGGHPQSNASGVVASTSVGRKTCKGKQQL

SEQ ID NO: 8237 - protein, 383 aa, unknown
  TnpB Polypeptide
MLLSKKTSIKVSQEYANLIGHMCYAASKLWNVCNYERQHYKETGMEQYPDWYYQKKAHKEDLWYKQLPSQTAQEVCKLLDKAWKSFYALKRSGGIETPRPPRFKQESIPITYLQMGIVHERDTDRVRLSLPKALKKYMEETYQIHENFLYLENKIFRGMDQIKQLRIYPPEKGNCKIIVVYEIPDQEELPQNGHELSIDLGLHNLMTCYDSKNGKTFILGRKYLGLERYFHKEIARVQAQWYGQQSGKGVKHPTTSKHIRKLYKRKHDSVTDYLHKVTRYLAEYCREQGITCVIAGDIRNIRREKDLGHRTNQKFHSLPYNRIYIMLEYKLKRYGIRFIKQEESYTSQCSPLSPKVEKDMQSRPNGKREGCTEMETEPITQMP

SEQ ID NO: 8238 - protein, 282 aa, unknown
  TnpB Polypeptide
  misc_feature (1)..(3): Xaa can be any naturally occurring amino acid
XXXIKLEDNRWFAYMPIEVGGKPAKTNPKGYVMGVYDRVQIEKPRGSNKAFIDVGLNNLFAVVFNHSDTAILIKGSTIKAEYYWWKREIGTYQSIRDWLRNHGFNAWRKYHMFYLHAEYKQHERLRHYYRTAIRFLAKILWQMSIDEVFIGYPYMVSQNNSNEYNANIWWFSKIINWLGDVLEEYGIKLNIVNEYGTSKQCSICSMKHENGRVKRGLYVCELTGIKINADLNAARNIAKRVGYEVPMPTKILSYIVTTNGVKPLTPKEGVTIETPTMKTPSL

SEQ ID NO: 8239 - protein, 480 aa, Moorea sp.
MILSYIYKLRPSGSQSDKMESWLNMLRSHFNWCLADRIETYHQQFIQGAYCSLRTKAEADPLTCCIVKNGATGNPWQNSGKKRNAGTIQDAGLVELKAARPWYKSIDSDVLQRNVARLNTAYQNFFDGRGFPKFKNRSNFRSFEYKPRRVKFNENKVYLPKIGWMRFFNSRPIPNGFAVRSVTIRKKTDGWFMSVRLEDKSIPLPPVLPTFEIKTAVGLDMGLIKLVHCSDGSDIPNPRFATNKKTKRTLKKRQRRLSRTKKGSRNRNKRVAQVAKLHLIIANRRNAYQWQVANKLVKKADAIVVENLNIKGMVKRCKPKREENTGRFVSNGQAAKRGLNRSILDASWGELIAKIEYLAAKSGKVLLKVNPRHTSMECSACGHIDQANRDRERFICTKCSHIDHADKQAARNIKQKAVVEYGLKLIKVRRDSAEPKQLSLFETPSTESTVAIRRQSGADKGKRRVPGNLARQLELFSQDI

SEQ ID NO: 8240 - protein, 344 aa, Moorea sp.
VRIAYQYRLKLTKDQKAKIDHWLSMLCAQYNYLLADRFYWYDQNRCPINACPLVCHSPELRNNPDYYSQKKTLPNLKKTHPWYKEIHSQVLQDVVKRVKLAFDRFIKGDSNGKRSGRPRFKKKQRYRTFTYPQMKEGCLEGNLINLPKIGKVKIVLHRPIPDGFKIKTASITKKCDGYYLVLSLEDKTVPEVKPDINPDSIIGIDVGLKEFLTTSEGETVNIPQYYRRSQKRLRVIQKRLSRRKKGGKNTLKAIKQLGKQHKKVADKRKDFHFKTANYLLSKYDVIAHENLNIKGLAKSRLAKSVLDAGWSSFLTILASKAVRVAWPTAINAGLLAIPVSAQNT

SEQ ID NO: 8241 - protein, 284 aa, Moorea sp.
VKHKSVKVRIYPNQEQVQILAQHFGCARWWWNYALNQCIETYKETGKGLKQSALNSMLPKLKKQEETKWLKDCYSQVLQSVSLNLSRAYQNFFESRAKYPRFKSYHHRQSIQYPQNVKQVRDCLKFPGKLGVVKAVIHRPLDGEIKTVTVSKTPSGKYYASVLMEYESGSLKSSTEVRPVANLIRQRKAHLGKVVGIDLGIKDFAITYDGEKISKFSNPKHLAKYEKKLAKKQRIAARKKKGSSGCKKARKIVAKVYERIGNVRQDYLHKLSRKIVDQNQVVVV

SEQ ID NO: 8242 - protein, 456 aa, Moorea sp.
LVGYAKRGATRGEFNYGSSAPLVKTVVNWLHYSYGNFKKLMIILEFKAKGKRHQYSAINEAIRTVQFIRNSCLRYWMDNKGVNKFDLNKYSAVLAKNFPFANELNSTARQSSAERSWSSIVRFFDNCKKKVPGKKGFPKFQKNCRSVEYKQSGWKLSPDKKSITFTDKKGIGKLKLKGTWDLWRFDKKLIKRVRIVRRADGYYVQFCVSVDIKEELEPTGTAIGLDVGVKDFYTDSAGKTESNPRFYRTGEKRLKFYQRRVSRKKKGSSNRKKAVNRLGRQHLKISRQREEHAKRLARCVIRSNDLVAYEDLRVRNLVKNHCLAKSINDAGWHQFRKWMEHFGTKFGKVTVAVNPAYTSQNCSDCGEEVKKSLSTRTHTCKCGCQLDRDHNAAINILKRALGTVGHTGTWILKDLNTCGESTSTLLDSGLVEQVGSLKQESPRLMTGECQLGLISV

SEQ ID NO: 8243 - protein, 477 aa, Moorea sp.
LSTSLFGVILILEQLSTDCTQGGETEVVTLRQTFRLYPTASQKNKLFYARSLHQLLYNACLAHRRYEWKVNRKSVGYLDQQNILPAYKDCWPDYKGLYSTSLQGTVKRVDLAYNSFLKGLRKFPRFKSIRDYSGWTYPSTSGWKVNSNGKHGTLVLNDLKIQIRMRGKAKHWGKPTTLTVVYKPRLNQWFASITVKVDVPEPKYGSESDLNYESVVAYDLGTQTAITTFDGSEFNEIKNQRFIRALEPLLKTAGKDKRRKRAPNRKQRVKPSSRWKKANKRESQIKRKIGNQRKDWQHKVTSDLSSRYDIGVTEKLNTKGMTRKAKKGSKRKNQKVGLNKSILDVGFGSLNKMLSYKIELKGGIVLHLPTKQLKPSQRCPKCGKIHKHWANLSNRYHVCDQCGFRLSRDKTSAMVMYNAALGNQPGYGNDLDKRGFPSSTSKTSKHTGSMKQLGKMKRQKSRSSDGSAETPSLYRAG

SEQ ID NO: 8244 - protein, 451 aa, Moorea sp.
VRANLSDGEKAFWEFQCQQANSLFNCAIYYAKQKHYAWLEEQEAYTTFWRGDELRCGWKTYKCSTKYPELYKALKLSPHYKGMAAQSAQQTLKTVGEAITSYNQLVSLYYKGQVDRPKFPRYRKKGGLAAVTFPKQALTFKEGVFYPSVSKESKPELITKIALELPDFIDSDWVKEVTIRPYYGQFWIDWVINDGREPIKENPNLDYSQALGIDHGEDNWLTCVSTKGKSFIVDGRKLKSINQGYCRLVAKHKKGKPEFYWDKNLDRIQIKRNNQMRDAVNKAARFIINHCLCDRIGNLVVGWNEGQKKCSNMGKDGNQRFVAIPTGRLIERLKQLCPEYGINLIVTEESYTSKASFLDEDPLPKIGEKPKGWSPSGKRVKRGLYKTSKGKLINADCNGAANIIRKVTTQLIDLAKVGRGVLTLPHRYDPFESLSRSYRTRSEAVRVYPTA

SEQ ID NO: 8245 - protein, 420 aa, Moorea sp.
MLGCQQNLINNPEVLPVLEFICSESNKLTNCGIYHARQLFFKTKRFINKFELNYEMKTTKNPHYQFMHSQAAQQALISVAESFRSFVGLLKAYTEKKIDKPPQLPKYRTKGGLEVVSYPKQALKLTDQGIRIPLGKRVKACFGMQYFYLPMPANLEFKKIRELRILPRNGCYYAEFVYNTEEIQADVDVDNCLGIDAGVDNWLTCVSNLGDSFIINGRKLKSQNRWYNKEVARLKTGQPQDFWSSRLAAITEKRNRQMRDSRNKTARLLLNYCLEHRIGRVVWGHNKQQKQKCNIGDKNTQNFVEIPTARLKDRFQQLCEQHGIEFVETEESYTSKASFLDGDELPVFGDKPEGWKPSGRRVKRGLYKTSQGWLVNSDANGAANIITKVATRLGIDLTRVGRAVLTQPRRIQLYASTTSV

SEQ ID NO: 8246 - protein, 420 aa, Moorea sp.
MSLTMNYTYRVYPDAAQQELMLSWLETCRRLYNRCLRDLKDWMNSRKCPIDRCSINREYIMSPDIPFPGERSQKRQLTQWKKTDSSLKEVHSQVTQDVVKRLHNSWESFRKRGRGFPRFKKSGRYQSFLFPQFSTNPLKGSQIKLPKIGLVDINLHREIPDGFKIKGVRVVSRCRGTKWFVVITIQADVSVPDIPFFGRAIGVDVGLIDFLATSDGLRIPRPKFFVDLQRKLKLLQRRATRKQKRSKNYEKSQIKVARLHHKIADTRKDFHLKIAHQLCDQADSIFVEDIDYTVMAKGFLGKHILDAGFGQFRELLKWVCWKRGKFFATVDHKGTSKQCPECGYQWENNLSIRWHTCAECGYSNNRDVASAQVICNRGIDKYPRTIGERKLPANGVLSGVLCLDKCYAGTLNCEVEKPAP

SEQ ID NO: 8247 - protein, 497 aa, Moorea sp.
MPRKVGVAKRISTQIVPVVGMTKSVELELLQVMKKLGVVRAESYNKLGSINHWGLDWKKAIPGVKSFRTPDTLGLPAKLMDWTINDVAKAITAQQAASIDAVTKKIYRRFTGIENQKTRKELCQQIKTLAFLDNPLLHRLVRKEFQRGHSWVKNQIVYQQVGYSCKRLSRNTYQLEVAGLIRGKRNKIIVRSNRKIKGQIRIIYNQLLPRFEVHFLVDNGTVDAPYSRRSIGVDKGYTEAFFDSDGQAHGKGLGKAATKKSDRICEKNRNRGKLWALHRKLEKIDPAKSARILRNNLTRKTENKRYRQDQSVLKAIIGAASKSLFNGESLKVFAVREAWPTALDLTQPIKTKRQSKAMSRKLNSWMKGVMRNSLQKWADWTGSVVTEVQPSYTSQVDSVTGTLLGKRSGDNFTRFNGVVLQADHNAAKNVLSRGTDKDITRYMSKTEVQAVLLRRTARFLEGMGLSLLDAVELGWLDSKHELCSGFQATPDRDVRNV

SEQ ID NO: 8248 - protein, 452 aa, Moorea sp.
LLESVKTPTKIIRTDKWQLNPTPDQKLLFGETVKVYRRACRYLVGIIYTHWSELGELTADQLTPAVERLMHETQSRPNIKYPQFNKAFYKFPSYYRRAAIAFAAGQVSSYVTRYREWQSGTRKRRNASPPRINSDTGCYPALYKGQCYKLHGFDQVEIKVFNGSDWVWTTVQITGLRERHQVASNKMLSPSLIFNERVCHLSVPFSCKPEKRKPEANVTAVDLGINTTATISVVTHSGTVIHREFIHPGRDIDRRDKRLKSVSMRASKTMGKGGQLYKGFCSKTYLKAARINNKIGHVVSKRIVQIAERFNSEAIVFENLKGWKPKGGRKRSNLRQRFHGWLKGKIREFTEMKWAELGGKVIEVVAAYTSKLAYDGSGTVKRNSNNYALATFPSGKRFNADLNGAYNIGARGILKLTRRNDSGGRSSKSTGRSPRSWACLCDLWTLRSSKLA

SEQ ID NO: 8249 - protein, 422 aa, Moorea sp.
MDGFLDSLFILSYSLRIVVPRQMVVLEFKVKGNKTQYAAIDDAIRTGQFVRNKCLRYWMDNKGVGQKDLYRHNTWLRSEFAFVKDLNSHACQASVERAYNSISRFYNNCKKQIPGKKGYPKFKKFSRSVEYKTSGWKLSPDTKSISFIDKKGIGKLKLKGTWELWRYDQKLIKRVRLVRRADGYYVQFCVKVDIKESLDPSHTNVGLDVGLKEFYTDSKGNTESNPRFYRKGEKRLKFYQRRVSRKKKGSANRKKAINRLGRTHLKISRQREEHAKRLARCVIRSNDLVAYEDLRVKNLVKNHCLAKSINDAGWYQFREWLEYFGQKFGRVTVAVNPAYTSQNCSNCGEVVNKSLSTRTHVCKCGCRLDRDHNAAKNILTRALSTVGHTGTLLNARGDLSSTLFGSDLKGQDESLNRESPSF

SEQ ID NO: 8250 - protein, 457 aa, Moorea sp.
MYRTIPVKATFTDEENAFWVFQCEQANSLFNCAIYYAKQKHYQWLQDQEAYTTFWREDELKCGWKTYKCSTRYPELDKALKLSPHYKGMAAQSAQQTLKTVGEAIASYNQLVGLYYKGSVDRPKFPRYRKKGGLAAVTFPRQALTYKEGLFYPSVSKESKPELLTKIYLELPEFIDPDWVKEVTIRPCYGQLWIDWVIDDGKQSVEENPNLDYSQALGIDHGGDNWLTCVSTLGKSFIIDGRKLKSMNQGYCRLVAKYKEDKPDFYWDSNLDRIQLKRNNQMRDAINKTARFIINRCLSDHIGNLVIGWNEGQKNKANMGKRGNQKFVAIPTKRLIERLKQLCLEYGINLIVTEESYTSKASFLDGDSLPKYGEKPKGWKPSGKRVRRGLYEVPNGKLINADCNGAANIIKKVTTQLIDLAKVGRGVLTLPHRYDLFSSLKKSYRMRSETARVYPAV

SEQ ID NO: 8251 - protein, 449 aa, unknown
  TnpB Polypeptide
MQVTIQGRLYPKESQKQEINKLMRLQSSCMRYAYNRLCEGKSKSKIERDLKEKFSRINSRYRRGGYFRARDNFKSAKKLVKSGKLESEEKIVFGGRKNLKKREQGEITNKEWKKLRNNQIYARGDKSKQGNLNLRFIEKDKELYLRINVGNYEWIEVSAYLPDEKEKFLSGEEAYGVRILRRDGKYELRVSFEKEKEEKIDFEKGSIGVDFNHDTIDLAVIDEYGQLKDTKTIQCSNLTSAGRNKREWLIGHYAKKVVEYAKYWDRGINTENLDDVARKQSNQHEFAHNKFLEALERRAEKEGVALRGVNPAFTSIIGEWKFSDSYNITIHQASAFVIARRGNGIHEKLRGLKTLAFEAMEAGEGSESASNRRVHSWSLWSLIGNLPSHQGAEHTNPEPRPQHQLDWRSNHESRGLESSGTSAPTKRSSDKGDLSEGKIVKPGNGPPKA

SEQ ID NO: 8252 - protein, 466 aa, unknown
  TnpB Polypeptide
MEEDNIFKYKTLNTIYPHKRREVKRTIMSIEQHSQETKDRIKKAIKETRKRRSTMHCATYIVKVDPTFLKKNPTLDEKITRLFLEAKWFKNHILSHNLIFSDKPHSLKKAEVVMKDKSIETRDLKTLGSHMKQSIVSSMKDDIKGLSVLKKNGHKVGRLKPCKEVSSIGLKEHGNTYRVDIKNNRVHIQKVGWLRVNGVKQLPETVDFSTACLVHKPDGYYIHITAYSAKDTERVFVKDTYVGIDMGLKTSITLSDGEKFDFYVEEPDRLKKLRRKLSRQHKGSNNYVKTLNEIKKIEQHLTNKKKDMAYKLVSDLSHFEHVFFQDEMISSWKRKTCYVKGGKKIQYGILGRVKSLLKEKDWATMIGKHHATTQTCVCGAKNKHQLDERIYFCSHCGYSDDRDVHAAKNMVRFATHDVRYKIDSPQGLGIAPVEETTSAIHFNVIDIAQNSKWFLMKQETNSSLVS

SEQ ID NO: 8253 - protein, 266 aa, unknown
  TnpB Polypeptide
MVFQSDCKVFCGKGWKSIPSFYQNKDLFCIGKASLYIGLRYVKTEIKPQHGCYLILVTFDDGIELPKVPEKPKRVIGIDPGVDNLAAVVNNFGVHPFLIKGGAVKAANQRFNKKRASLFSAVTTGSDSRHSVKNSHSLSALSRKRDDLLRDIFYRAAWYICRFAVRHQVDVIVIGHNKDQKQEINLGKQNNQSFVSIPFVRFEQILTNTAAKCGIPVVVQEESYTSKASVLDGDVIPTYGIDDDHVHFSGKRVKRGLYRSADGDFP

SEQ ID NO: 8254 - protein, 374 aa, Scytonema sp.
MLLSIKTKLKLTSEQKTAMSRHAGIARFTYNWGLATWQNLYNDGYKPNKFLLKKFFNNEVKTRLEWIKEKGICQKITQYAFDQLGAAYDRFFKGLGGYPKFKKKGQNDSFTIDASGKPIPVGGVRVKLPTIGWVKTYEGLPHTTTSKLSISRIAGDWYIAFASCVETESTPKSVDVVGVDLGIKELATLSTGVTFPNPKAYKKNIQKLKRLSKAHSRKTKGSSNRHKSKIKLAKHHNRVSNIRKDALHKVTNYLCKNHAVIVIENLNVLGMMQNHKLAQSIADCGFYEFKRQLEYKYKKFGSKLVLADRWYPSSKTCSNCGCKKESLSLSERVYSCEHCGHVIDRDLNAAINLSQCVARVPRVEAPGVSRLAKA

SEQ ID NO: 8255 - protein, 317 aa, Proteus sp.
LERAYKNFFQKRTAFPRFKKRGKNDAFRYPQGVKLDQSNSRISLPKLGWMRYRNSREVVGEVRNVTVSQSCGKWYVSIQTEHEATEPQHGSTSIVGLDAGVTKLATLSDGTVYPPVSSFKVNQRKLARLQRKLSRKIKFSANWQKQKRKIQRLHSHIANIRKDYLHKVTSEISKNHAMIVIEDLKVSNMSKSAKGTTERPGRNVKAKSGLNRSILEQGWYEMRRQLEYKQLWRGGQVLAIPPAYTSQKCAYCGHTAKENRQSQSQFECLECGYTANADINGARNILAAGHAVLACGGRVQSDRPSKQEPAEVIQTSV

SEQ ID NO: 8256 - protein, 178 aa, unknown
  TnpB Polypeptide
MLYKKRSLLLKNAREGLAREIVETLYDKGVGEIYIGYPKGIAQDKGNERNSNFWSYLAIIKLIKNVAQEYGIKVKLVDEENTSKACSLCGEIHENGRIERGLFRCPYTGKVINADLNGAINILHIPKSVKDRGKWLKAQPVVYRWTSEAGWVTTSYEVMKMKAVNHEPMIHLEGTIAF

SEQ ID NO: 8257 - protein, 222 aa, unknown
  TnpB Polypeptide
LQGKETKAKLTALGKAFVDSWNEVNKLRLEQYKKHEPVDFAKTEKIVYEKYKAVLHGANVQQVTRKNMGAWKSFFELSKKKKEGELPKWMKPKPPHKKKEDLFLLIRHDRYKIEGNEIYLLDFNLRLKFNGKLKWVGKQGTLEIFYDSARRKWYARIPMSVKVDNKPKGKMKAGIDLGIANLATVAVDDGSWMLFKGSSALSEFKKITKSISIEEKRLARHG

SEQ ID NO: 8258 - protein, 535 aa, unknown
  TnpB Polypeptide
MYEQPGTRKNSRLQCQLPHCLVHEVPRGCTDRRYRSRSQGSYCRNSHRKRFHHQEYGGHARPRSCFCIGPSQDSTVVHDKDAQGRIGEKTSSGVSCLEKNHVPRAFVEPIHVRRNHRPHLGRHHTALHRGPEEEMIITKAFKYRIYPTREQREFFARHFGACRFVYNYFLDLRSTEYKENRRSISGLECKRMLVPLKAGNTWLKEMNSQSLQEAVLNLDRAYQGFFRGLAKYPAFKKKRGAQSFTVPQHFRIDGQALHIPKLRTGIRMKLHRPMESIPLSLVVSCTASGKYYVSFVCEAIVPERNNRPAATIGIDLGLTSFIATSEGEKIASPRHLGKSEERLARLQRSLSRKKKGSRNKNRQRIKVALLHEKVANQRQDFLHKLSRKIVDENQTVYLEDLNVKGMIRNRHLSKSIADAGWSEFTRQLEYKGEWCGTRVVRIGRFYPSTRTCSVCGFVNRELTLKARSWLCPSCGVVHDRDINAAQVIKKVGQDMPDIKPVEKKTSVLSFKRKDKFSSVKQEARASFEMHGISIP

SEQ ID NO: 8259 - protein, 416 aa, unknown
  TnpB Polypeptide
MQLSLQVRLYPNKTMQNVLDSLCDYRRYCWNQGLELWNDLYEQRIEMVPAGLRKKSQLAIKDKTIMFTKEEKELLDMFPSPSERVVRDLMVKDKEDWQYLLSSKVLQLAVRDLAQAWSKFFDSKKSKTKTQKVGKPSFRSKKNLRQGFKTYGARIKKGKLVLDKPWAYKGDWYGISFKGYDLPDSKIKHCSVTKINNTYYASLTVDTPIELLPKTGKNTAIDANVNHFDYTDGSFAVCPKQLDALYVQIKHYQRLLARKRKVNGKKATQSKQYFEVRTKLQRCYKRVTNIQNDLLHKFTTMIYHNYDTAVIEDLDVQAMQMSKKAKNLHRSLFGKFRHQMEYKANKFDKDLILADRYYPSTQRCSNCEHVKTGDDKITLQGNAKHGTKHNEYICYECGFKADRDYNAVLNLLALAN

SEQ ID NO: 8260 - protein, 420 aa, Archaeoglobus sp.
MFLEIKNFRDVPVKKEVQLTVVGKVFRPNKKKVLALNKCLEEYFRLVNWYLNFNSTSKTFLHKNSYESAKKLFNLNTALIQTARDKAVEIVKSFNEKKKEGKVKTERPKLKRISIRFDKRCYSFAKTTNKLTPYWLTLSLNRKERVTLPVVFGERQRKFIEEALQGKWQFCTVEMVKKNGEWYAHFVLKKEIELIEPETVIGVDLGEWNIATTVAVSKQNSKPMKGKFWSGARIREIRGKYAHLRRNLQRKKRLDLVRKIGRKEERIVNQQLHIIANEIVAHAKQFEKPVIAMEKLDGIRENMNSSAKLNRRLHAWSFRKLQQYIEYKANLEGIPVVYVNPKNSSKSCHRCGHVARTKSREFRCSKCGLVYNRDLNAAINLAHALMRGMGWGSCEPPKLPDEVLTQSQDGTGEAPSVRAG

SEQ ID NO: 8261 - protein, 500 aa, unknown
  TnpB Polypeptide
MKTKIKEETLPVKYYLKPNKKGRKYLSQCFGNTRFIYNWILGFQNDYYEAVSAYSKEQNSEYLTSLPRDTEVQSKFYASEFKRLRDELILPYDKGVEILKTIRPNIDELETERCLLKKVKDEKTKKLVEAVPKQANKAIAVINAKRQIKFLRTEYKWLNDAPSGPYYHAALNLEEAWKAFFDKRQSDTGKPTKKKHWAKQSCTFDGVKVDFENNTVIFPLLKKSPQKFKAHRIIDGELKTATVERTKTGKYFIIMNFRQSVAFPEPPTEATPEKTLGIDLGIGDNYLIKATGKSEDKGEIINNPRFFKAMFRKKKRLDRNVSRKKHNSKNWLKAKKKSDKLSEKLANLRDNFQHQLSHKITNNDNYSHIVMETLDLKGMSAKKKAVKDESGAYAKNGQGLKRAFNRATLDASLGSLVQKLKYKSKRRGRLFTQVANNFASTQLCNSCGYQNRGLAVSTKEFDCGECGTHLYRDVNACKNLVKEGLRMVNPTPKKKKSKAK

SEQ ID NO: 8262 - protein, 459 aa, Mycobacterium sp.
MARFEVPDGWCVQAFRFTLDPTEGQARALTRHFGARRKAFNWTVATLKADIEAWHATGIATAKPSLRVLRKRWNTVKDEVCVNAETGAVWWPECSKEAYADGIDGAVEAYWNWQTSRAGTRAGKRVGFPRFKKKGRDADRVSFSTGAMRVEPDRRHLTLPVIGAVRTHENTRRVERLIAKGRARVLAITVRRNGTRLDAGVRVLVQRPQHPMVAQPDSRVGVDVGVRRLATVADADGVVIERVENPRPLDAALRQMRHVSRARSRCVKGSRRYRERTTELSRLHRRVNDVRTHHLHVLTTRLAKTHGRIVVEGLDAAGMLRQKGLSGARARRRGLSDAALGTPRRHLYYKTGWYGSQLVVADRWFPSSKTCHQCGHVQDIGWDEHWLCDACLARHQRDDNAAVNLARYEETISVVGPVGAAVKRGADHKTGPRPAGGCEARKGRSRKAAEQPRDGVQVA

SEQ ID NO: 8263 - protein, 465 aa, Ligilactobacillus sp.
MVKKKSNKFGYTRQYHISLSYQQIELYEKAIKTQNELYQFALKYLYKTYGRKHIGRPLPFGQGINYLNNKIKAMFIKEKYDLKRWNAKKLGLSSHAADEFLKTIFTNFSQYRKRLEQAGQMSDVEKYNLRMNITKDKNGKHKNPKHRSWYRKGSMNFLRNNKTFRTITSQKLPNGNTKLVSPHHLNVADFGEIIVFENLKNINFEEIALTKIKRLPDNTFRLQITFAREKKRIFQNKVVGADWNMFNNEVFRTSENKIIAIPKDIVKKANDLEAEKDKFKSLRDSEYNKRGKTALWQKYQRKQAKLSAKRANILTEKYRELAHKLVDDFDTIIIEKIDAFEMRKRSLSMNKAQNTGKNKRLALIKPYELSKIVESLVNKQNKTLIKVDPYKTSQVEYGTEYEEKHELRETNKDGKRIYVSAYTGKEVDRDYNAALNIKEWGLHPEKHIKLRDYPKLKASNLVEII

SEQ ID NO: 8264 - protein, 247 aa, Caldalkalibacillus sp.
LWAGDADMANKAYKFRLYPTQEQEQLLAKTFGCVRFVYNKMLEERIQIYEKFKDDKEALKQHKFPTPAKYKRDFPWLRANYPRFYRQALEKLARAQRVLSRRRKGSNRWHKQRLTVAQLHEKIANQRQDFLHQAARQLANRYDAVVIEDLNMKGMSQALHFGQSVHDNGWGMFTSFLQYKLAEQGKQLIKIDKWFPSSKMCSCCGRVKVSLSLSERLFCCECGFVADRDTNAAINIKKEGLKQLGTA

SEQ ID NO: 8265 - protein, 356 aa, unknown
  TnpB Polypeptide
LKLKRSSKCTLKFATQAKRQTLKTILTEYGKVVNFFIEQFWINTPTKAELLKDIVNLPNTWLSARLRKVAAREAIDMVKAVKEAGKTTKPVHRGKRMHVSSTIASLQIRGKAKEFDCWLHLASMGNNIILDLPIRGHKHINRLMAAGKQLASYIITENYVQFCFEIETGPKTQEGEVVGIDTGINALASLSNGQQLGTKVKEQIEVIKNKKYGSNKQKKARRALKQYMDETAKVAVSGKKLVVVEGLKKMNHKTKLTRRVSKSIRRSLGAWCYRYWLNRIQMACENNRVSFRTVNPAYTSQRCHACGHTESGNRHREMFSCLSCGHTDNADLNAGKNILWRFLSGPYGAAYKPSIA

SEQ ID NO: 8266 - protein, 423 aa, Sutterellaceae sp.
MLQRLAYQFRIEPNGHQCSLLKRFCGCVRATYNHFLEQQNTRYEQYRKDLAEAHKSNSEANVDKPFISYAEMTRELAGSFKKDKPWLNECHSQALQQVLKDLYRGYANFFSGRAEHPKFKAKGIHDAFRYPQGVKLDEQNSRIWLPKIGWVRYRNSRSVIGKIKNTTVSLVCGHWYVSIQTEFQEEISVPEGLDCGIDRGVIHSATTDEGKMYDLPVTEIDRLHARIAVYQNQLKNKVKGSNNSRKLKQKITRAHHRIACIRRDFLHKTTTDICKNHAVVHVEALNVAGMTKSASGTVENPGKNVKQKSGLNRAILEQGWGEMLRQLEYKMRRKGGLLVKVSPAYTSQTCPLCGHVSQGNRISQASFVCEACGFSLNADVVGAMNIKRAGRAQLACEVNGIGRQQQEPAEATKCLLFERLAKQ

SEQ ID NO: 8267 - protein, 407 aa, Micromonospora sp.
VKVTRIAYSARLNPGKYAALVEQARRLGRVRSEVWQRYGSILGVGSGLRDRQVRDRWLADGTYASFGVLANAWKETVRDAMADIAANMEAAKVDVRRAICRRTKDPAERKRMFTALKADQWASDPFLARQMRKHWKRGRNRTHDQIVVRADKYNTAVDGRGRLWLAVPGLEPRKLVRIPLSTTVAPAGTLRLILRRGRVEVHYQIDASQMRSSRRPCGEATVGVDKGYTEALTDSDGQPHGEQLGELLTLESDRLKERNRRRAKLRSIANTAAARGDHAKAHRIKANNLGTAKRDRQAARHRARVRSEIFTAVHEVVDKAATIVAEDLTKRFTGRKKLPKNINRRLAAWTKGVTAEALKVCRSVEVLRSFPSTPPTPHKPATAAATSAAVAGTGFTALGAGWCGRQT

SEQ ID NO: 8268 - protein, 575 aa, Micromonospora sp.
VGDRAEPAGVAGGDRGRIRTERAPQKVPRPAARPDGHDHRRGTPRQVHPLRCRVRRGGADRAGPQAVGGRPGGGRRRPGPGRHGDFDVDVRASVRPSGCCGSGASGGRGGHHAGPAVVKVIQAYRFALDLTPFQERAVLAHAGAARVAYNWALARVKAVMDQRAAERSYGVPEELLTPTVGWSLAKLRKAWNQAKPEVAPWWPECSKEAYNTGLDNLACGLKNWSDSRAGKRAGRRVGFPRFKSRRRATPSVRFTTGAIRVEADRKHVVLPRLGRLKLHESARKLARRLEAGTARILSATVRRDGGRWHVAFCVEVERAERTPKRPQAVVGVDVGITHLAVLSTGKLVPNPRHLDEAAQRMRRLARQMSRRVGPDRRTGQRPSNRWEHARQQVARAHARVANLRRDGLHKLTTRLAGKYGTIVVEDLNVAGMLRNRRLARQIADAGFGEIRRQVAYKAERNGGRRILADRWYPSSKTCSDCGAVKAKLPLRVRTYICDSCGLTLDRDLNAARNLAAIAREATTAGSGPVAGRGADRKTRPGGSVATKRQPGPAQADKTGTVPPQGGTCRSVATTH

SEQ ID NO: 8269 - protein, 448 aa, unknown
  TnpB Polypeptide
MKRTNTFAVRPLSKQDGQVLRDLLDASAALWNETNYERLMRYNDEDGFEDEEVWDSDTGRLEGTYKDILGASTAQQVIAKNSEAWTSFFENKNAYYDESNTSVTQHPEPPGFRGNKDDGRVLKGVIRKDAYSVEWGDRSRLEIVVGEELRDRHNSPKSRLRLEIVGDPNWSDYEDQSRLDLWYDETDCTFRASQSVTVSTDARDTPLAAETAALDIGAKNLVACTTTTGEQYLYEGRELFQQFRETTREIARLQSKLGEGRYSSKRIRRLYRTRTRRRDHAQEALCRDLLERLYDDGVDTVYIGGLTDVLETHWSVETNAKTHNFWTFRKFTKRLACTAEEYGISVKVRSEAWTSQECPQCGSTERTTRHQDTLTCECGFEGHADLTASETFLERQTEQAVRPMARSVRFKWDDHEWSGISYPHESPNEQRTNLSTVHCDGNVAFGES

SEQ ID NO: 8270 - protein, 411 aa, unknown
  TnpB Polypeptide
MKNADLYITYNAEMVFPNEECRSHFIALLLQVRDAYNECAKIIYENNVPLDIKSVHNAVYSHIRNAYPKLTSNAVIAIYKNVMGAIRSIKSNKHEDAKIPEKTHLSHKLNKFLYNHLTAEGIWLTTNTKRIRSRITFKSYPRLQEMFQKYIPGDPTIFVREGKFYMSIPFKVPEIPLQNDTCIGVDMGERRFAITSDGLMLNDKDYNARRRKIRYLKRCLQKKGTKSANRHKRKLSHKEQNQSTDMCNHISNAIIGSTTASIIVLEDLNNIKKKTSKTKDGKKRKDHNRRISQVPFYKFKQILSYKALLNGKRVETVSPFMTSQIDCTTGKKEGTRKNRRFYCKNGTILDSDWNAAINIARKSKHPFSFKIPLDGTLKTWKAGCESTTQSYCKPSLATTEALQAHLPLGGG

SEQ ID NO: 8271 - protein, 403 aa, unknown
  TnpB Polypeptide
MRNTKHKLFYDKTLKSLHTDFDICGIVRNHFLGLCMRYKRRYGKGLSYSKMSAHLTKLKKLEKYEHWNIPYAWSLQNVLKRLAQSFCEMKTLGRGHPKFRSCKKHKGMTFSGKQVKIEKVLDKQKHKRNHPTYRIRLNRRWYRFALHRKIAGEITQVQVTRDALGDVYITLTEDYSEVKPEPKTGQAEGFDMGIKDFLTGSDGHRYTSPMFYKQNADKLAKAQKVHSRKVKGSNNRERERKNVARIHKKTENQRTDHHWKLAIDLCQKFDILFFEDLNLRGMKALFGKQVSDLAFGEFMRKLKHQSNKRNRFVFTIGRWTPTTKCCCVCNHKNDDLTLEDRDWTCPKCDTHLDRDQNAAMNILKEGVASFGLGVVRPIVLLGKIVGTSVEATSPLLKSTNAFA

SEQ ID NO: 8272 - protein, 479 aa, Pantoea sp.
MQIGHRFRCYPTPAQAQTLLQWIGCQRFIYNAKVGEDRYFRRFARKSLAHTGQFAPVDQQYSHFKTELTPWLSEVPSQILRNGAVLWKQAYSRYFRKLGGRPTMHKKHGRQAVWLTSELFEFKPVVDRATGEITGHQLCIGTRKHPVGVLAFKAHRACQPPASLHISIHAGQWHVSFNGDDGLMEPSDKETTAWLMQFDAPELLAMTLGLDRGVALPLAGSDGQQFDFLPIQVKRLAAQEKHRKRWQKRQARRTRGSSNWVKARRKVARYQRYGADARRELAHQTSHVLATDTRYKLFVFEALKIKNMTQKAKPQQDAQGRWLRNGAAAKSGLNKAILASAWGRTQVFLQYKARRQGKLVIEVPAFYSSQECGACGHIHQGNRVSQSGFVCQSCGHTAHADHNAASVIAGRGVRQLLAGKSVEKEKKTCRIARQKVGVEGSEPGVEMRPTLGETGVSRWGGNTPAHWSLTQETPAITPV

SEQ ID NO: 8273 - protein, 398 aa, Actinobacteria sp.
MSRYRLVPAPAQEAVLRGHCSHARYVWNLAVEQHGHWRPGYKGAPGYLEQWRQLTRARAEQPWLAAGSQMVQQQALRDFARAMAGFFDPANPAGRPSWRKAGRDEGFRIVGRRGRQWDVRRLSRKTGQVWVPKAGWVRFRWSRDVPPGAKSYRVTRDRAGRWHVAFAVIPGPVPAPGNGQTVGIDRGVAVSAALSTGQLLHAPALTAQERAGLRRMQRTLARAARGSNRRARVKYAIARLRARETDRRKDWAEKVSTDIARRFGVIRVEDLNIASMTRSAKGTRENPGRNVRAKAGLNREILGSGWGLLVRRLQDKAPGRVQKISPAFTSQRCSACGQVDRDSRESQAVFRCTACGFACHADVNAAINIAAGHAVTARGGDGDTRPVNREPQLLLPSA

SEQ ID NO: 8274 - protein, 410 aa, unknown
  TnpB Polypeptide
VADDFVRRTAITRLSVDQEQRNALETTITEWKRGCQIATNLAWGKCNSKSDVQPLAYDDVREQTDLGSQHSILATHQAAQCITGCIERKAKGKKATKPQFTAPTVKYDSRTMTVFDDETVSLSTTDKRVRVGLVLPEDEDGYQRQYLDSDEWNVTESTLTARDGGFYLHLGFRRYRNGEERNTAEDGTVLGVDLGVENIAVTSTARFFSGRKLTHDINHFEDVRGGLQRTGTRSAHRTLGQLSGRQERYSRDVLHQVANGILEEAIDYNCDVIAFEDLTDIRERIPYAQWQHRWAFRQLYSYVEYKAEEHGLLVRQVSPRGTSRRCSQVGCGFTVDENRPTRDHFRCQKSECEHEANADYNAARNIGLRYIRRGHQSSRRTGDGQLALKSGTLTPKSGFTAYSDTSTLAV

SEQ ID NO: 8275 - protein, 347 aa, unknown
  TnpB Polypeptide
MQLTVKFKILPTKEQEKYLEQTLNEYINTVNNIVQIIINNKNIKLTSKNIQANLPSAVKNQAIRDAKSVYRKYKKTNKLPIAKKPVCIWNNQNYKINDYLSIPVIIKGKTQRIKVKAILTDYQRQQLNNKLGTLRITKKSGKWIAQIAVEKLEKQTNGHNKMGVDLGLKVPAVAVTSNGKTKFFGNGRQNKYIRRKYKTLRQKLGRAKKLKKIKQIADKEQRWMKDQDHKISRQIINFAIENNVSVIRLEKLTNIRNTARTSRKNEKNLHSWSFYRLAKYIEYKAKLEGIKIEYINPEYTSQKCPRCGTLNKAKDRKYVCKSCGYTTHRDRLGAMNVMLAPVVDGVA

SEQ ID NO: 8276 - protein, 482 aa, Streptomyces sp.
VKKFQVQPGFVVQAFRFALDPNAAQEQALRSHCGAARAAYNWAVGWVEAAWWQRRAEASYGIFETGLTPWRPWSLPALRRAFNAVKHTDPRFAAWWQENSKEAYSTGLANAAAAFDNYAKSKQGKRRGRVVGMPRFKSKRKARLACRFTTGTIRVETDGRHVTLPRLGTIRVHEPTGKLLGRVQAGSARILSATVRHERGRWFVSFQAEVKRDLVRVARPDVAVGIDLGIKTLAVMADSTGEIREVPNPHHLDAALKELCRASRTVSRRRGPDRRTGQKPSRRWEKANVTRNKVQHRVANLREDALHKLTSAVAAEYGTVVVEDLNVAGMLRNRRLARRIAEAGFGEIRRQLAYKGKRNGCRLVAADRWFPSSKTCSGCGAVKAKLPLHIRTYHCDACGLVTDRDANAAHNLAALAAAAVTGTGVAGDPDARKASKPRGADRKTRTTPSGRRAERGRAGGATLPHQQQTETRDRPQIEALTL

SEQ ID NO: 8277 - protein, 393 aa, unknown
  TnpB Polypeptide
MAQGNRGRPVMKRTYKFRLYPTASQRATFTQWLTSCRLLYNTALAERKEAWETQKRSVTYGEQARQLKDAKKANPLLKAVHSQVLQDVLRRLDKTFKNFFRRIKKGEKAGYPRFKGKYRYDSFTYPQSGFVLDYQKKKLRLSKIGCITIILHRPIPAEGEIKTCTINRDVDHWYACFSVALPNPGPESQRDIQKAVGVDVGLKSLLTLNNGDTIDNPRWLRHSEKKLAIEQRKKDRKVKGSCNRHKQNMKVARVHRKIRNQRKDFHHKLSRKLVNSYDLIVYEKLTITNMVKNHHLAKSISDAGCGQLMRFTEYKAEEAGTLVEYVSAYNTTQLCSRCGKLVPKTLATRIHRCPYCGLVLARDYNSAITVLHRSTHYLDARLSSGQELPVEPG

SEQ ID NO: 8278 - protein, 367 aa, unknown
  TnpB Polypeptide
MIRLTYHCNLKGNKEKLEFFEKQYKYAQIIARYYLWYVKANKEYRKTEIHKATYKKIRSKYPFLYSKLIQHVRDKVLASVKARKLYKVKKLNIPLIFDYQNFNIEFKEGYYNAWIRFCKRNYPLEGLRTLNKLKEVVKIKEIQIKKINKDWRIYFVCEVEENNNVKGNQRLGIDINIKNITLSNSKRFNLKQYVHKKIEYRKHKNRDKIEKYSKDFFHKMTSELVKYLIEMGGSQIILENLTNIRKSSSRKEGTSKGKNVNYLINNVFPFKMFQTFLEYKCKLNGIDVKYINPENTSKTCGLCGSLDTYRPKQSLLVCKSCGRRLNADLNGARNILRFSLQDGLLNHSNPSELLKQTDKPIDLVEGR

SEQ ID NO: 8279 - protein, 482 aa, unknown
  TnpB Polypeptide
MQIGNKFRCYPTTAQAKILLQWIGCQRNIYNAKVREDQYFRRFAHKSLNHAGQYAPIDQQYSQFKSELAPYLSEVPSVLLRNGAVLWKQAYGRYFSKLGGRPTIHNKHGKQSVWLTSELFKFAPMVDTNTGEVTGYQLHIGIKKFPVGLLAFKAHKAFKPPASLHVSIHGGRWHVSFNYNDNVPEPTDKDTTDWLSQFDKVELRKMTVGLDRGVTIPLAGSDYQQFGFTEVQDRRLLAQERHKKRWQRRQARRKLGSSGWIKAKRKVARYQRYGADVRRDVAHKTSHMLAKDLRYKLFVFEALKVKNMTKKAKPKQDEQGKHIRNGATAKSGLNKSILASTWGQTKTYLQYKARRQGKLVIEVSPFYSSQECAACGHVHQDNRVSQAEFVCLSCGNTDHADHNAAKVIALRGVKQLLAGKCIQKEKKRCRITHSKVGAEGSELVAATQSTLSETVVSRMGGNTPALWSLTLETPAATPVFGV

SEQ ID NO: 8280 - protein, 381 aa, unknown
  TnpB Polypeptide
MLHAAKFRLYPTKEQEKFLWGQWGAVRFVWNKALALKQRFYKRGGTNLSVIHDLKPLLAVAKKSRKYSWLKLYDSIALQEAVRHLDGAFNRFFKQEAGFPRWKSRRGEQSSYHCTCVSAGDGWIRVPKIGRIKAVTHRPVEGKVKSITLSADATGAYYAAVLYEDGKPETEQITKIYEDKIEGIDVGITYLVIESDGKKTANPKHIKRAQKNLRRKAKKLSRTTKGSRRREKARKQLAKAHKRVANARTDALHKISKRLIDENQAVCAESLKIKNMLKNHHLAKAIADAGWGTLCSMLAYKARQAGKVFVQIDTFYASSKTCHACGYKREALSLSTRQWACPKCGQQHDRDVNAACNIRAEGIRKLKAAGQTVLKRAATHV

SEQ ID NO: 8281 - protein, 189 aa, Geitlerinema sp.
LKNKQKGSANWLKLQKKIARVHQRIADTRKDWHFKLAHHLCDGAGMIFVEDLIPPTPLSKGGEGGIGMLGKHTLDSGLGQFTNQILPWVCWKRDVYYEKVDARGTSQECPDCGTQVRKDLSVRVHQCPECGSTKPRDVAAAQVICTRGQRGIENACGVKAAGAEVTQSSWRAVKQEIFGATQGISQHTH

SEQ ID NO: 8282 - protein, 417 aa, Geitlerinema sp.
MLTMNYRYRIYPDSAQQETLFEWMETCRNAYNYALREIKDWCNSRKCPVDRCSIEQEYILPADLKFPSEVQQLNALPNAKKEFPRLGDVPSQVLQQAIKQLHRAWEGFQGRGFGFPRFKKYGQFKSLLFPQFKDSPITELHLKLPKIGLIPINLHRPIPDGFVVKQVRILKKADRWYALVNIQCDVSVRDPMPHGHPVGVDVGLEKFLATSDGVLVKPPKFFKQKQSKLKLLQRRLSRKQKRSKNYEKQRIKVARMHHEIDNTRKDFHFKQAHALCDTADMVFMEDLDYRVSAKGMLGKHMLDAAFGQFRSITRYVCWKRGKFFAEVDANGTSQTCPECGARVQKDLSVRVHHCPECDYTTDRDVASGQVIRNRGLSLLSTPGLGGIESVCAGVLPGSETTRQVPKSRKGVTRKAKK

SEQ ID NO: 8283 - protein, 449 aa, Geitlerinema sp.
MIVREAKLLNGSKAQYKALDEAIRTAQFIRNKAVRLWRDESKVDKARLSLLCKELAREFPFAKKLNSMARQASSERAWNSISSFYRRCREGAKQKGYPQFKKHSRSVEYKTSGWKLSEDCLAINFTDGFKAGKFSVFCDRETREDLFRLKINRVRVIRRADGYYAQFCFDATRKEIGNYTGNAIGIDLGLKYFYKDQNDNATTYPKYLRRSEKRIKKLQRRLSRKFVKGKKPQSNNYQKARIRLGKAHLKVQRQRKDWAVKLRCDPAPSHGRGLQGADAGSAHSPSARERAPREARCVVASNDVVAYEDLKIQNLVKNHHLAKSISDASWYQFTQWLDYFGKVWDKTVIAVAPNYTSQDCFNCGHRVKKSLSTRTHQCPQCKIEICRDTNAALNILKKGMNVLGIEWNHSTQGHWETAGEPGTLEETTTPAVDRQLETVSGVDESRITL

SEQ ID NO: 8284 - protein, 344 aa, Geitlerinema sp.
  misc_feature (13)..(46): Xaa can be any naturally occurring amino acid
  misc_feature (304)..(337): Xaa can be any naturally occurring amino acid
LHPPFAPYLPLPXXXXXXXXXXXXXXXXXXXXXXXXXXXXXXXXXXRVRWSRKIPDLFQVKQARIVRKASGYFVMLSLQADIDLPDTIPHGHPVGIDVGLEYFLSTSDGEQVKRPRFFNNLHRQLKSLQRRLKKKQKGSANWLKLQKKIARVHQRIADTRKDWHFKLAHHLCDGAGMIFVEDLDFRIMAKGMLGKHTLDAGLGQFVNQILPWVCWKRDVYYGKVDARGTSQECPDCGAEVRKDLSTRIHHCHNCGSTKPRDVASGQVICSRGQRQIENACGVEATGDRVTDSSWLAVKQEIFGXXXXXXXXXXXXXXXXXXXXXXXXXXXXXXXXXXMKCASSC

SEQ ID NO: 8285 - protein, 268 aa, Geitlerinema sp.
LPATPSSVTVIKDCANRYFLSFVVEGKPTNIEAENQSIGIDLGLKTFAVMSDGEKVESPDYSKLDRRIRQRQRQLARQLKGSKRRNKTRLRIAKLHNKIADTRLDFLHKLSTQVVSENQTIVLEDLNVSGMVKNRRLARAISQQGWREFRILCEAKSEKFGRDFRVINRWEPTSQVCSECGFKWGKLDLSVRSVVCLSCETEHDRDENAARNIETVGMGHRHDRSAELTAEALNGRGATVRPLRRRVAGHRQESRPASAGVSMSRYIS

SEQ ID NO: 8286 - protein, 367 aa, Firmicutes sp.
VLKAYKYRIYPNKEQKVQIAKTFGCCRFVYNQTLAYRKEAYEKEKKSVSRIDCNNYCNRILKQTYTWLREIDKFALTNAIYNMDFAYRKFFKEHAGYPKFKSKHDHHKSYTTNFTNGNIAADFENGKIKLPKLKEVKAKLHRVFEGQIKSATVLQVPNGKYYVSILVETNHCEISHTDKKIGMDLGIKDLCITSDGKKYENPKTIRKYEKKLAKLQRKLAHKEKRSKNYYKQKKKIALCHEKIRNTRKDDLHKVSHGMISENQVIVSENLQIKNMVKNHYLAKAISDVSWYELTKQLEYKAVWNGRQYIKIDTFYASSQMCSDCGHQNVDTKDLSVREWICPACGAYHDRDINAAKNILAEGLRQIA

SEQ ID NO: 8287 - protein, 448 aa, Halobacteriales sp.
MRYAYKYRLSPTPTVERELQRHIDICRQAYNHFLHELQEADEYLSRHEMQSMLPEMKNWWDDLSDVYSKVLQMVVKRLSDNLSGLRKLKENGHNVGELRWKSPTEYRSLTYNQSGFDVDRNTGRDEGGELHLSKIGTIPIRLHRDIPEDATVKQVTVKKEKTGKWYTTVAVEFDREPPAKPDDPERVVGIDAGIIKQTHDTDGVAVKPPDLSDERNRLEREQRNLSRKEHGSNNWQKQRQTVARRYADLKRKRRDFLHKLSNYYAREYDLVAVEDLDAKELMEEPGNSRSRGSAAWATFKRFLEYKCEREGTHFVAVSPRGTTKECASCGVPTEKPLWVREHSCPACGFEADRDANAVVRLRLTGSKREAFATAWNVLSRGLDQVGAGRSESTSSESLRDSDVRTRASLSLTPPETALPADTVVSAKRVIERGSPCLKEPPTAASRQG

SEQ ID NO: 8288 - protein, 621 aa, unknown
  TnpB Polypeptide
MFFMNNKVSKKEEEWIRKAYLLKLDLTYEQRKKIDFLIKRMKDCTNKYIEVIIQKVFPNFKKYGKFPFKIDDPNILLENKEILKKEYSRCPLCKGDKKELNFILENFVIEDYTIGKKECKRVIFKEGSKINVCDCFSGNSSNSHKIMRMFVNKTKNRKPIDEFDVIKMVEPLPKRSYYDACLQKAMETIKSKTEKNKENYKKIKYLEERIKHNKEWINGKVKDKELNKYNNSPNKIKSWRKKDNKLIEKLKRKTTGKVSYHNDTARLYSSDYTIKKGENDYIIKLRDPENQKVWMNIKFFGENYQKKVIENQKNKKETETEIMRKENGDYYLCYIIKKKFDKIDINENMTAIGIDLGITNIMCTTSMKKDLKPFDVSIINGKKLINKRMKFAKIRRIWGTKKRIDKIKQSKNKERRYGKDVIHWHTTKLINKIKEYENPVIVMENLINISDYINKAKKISKSDINKLNINKKRKARRFRKLNYMLSSWNRGMVKNYFEYKAQHCNIPIVYIPPKDTSKMCSKCGYKDWKNRISRNIFKCQNCGSMYNADVNASINIAKRFFELIKTNKFKIMTKTKEDNKKIEEYKCELNDKGRGMFYFKLKQENENENKRRIKKRSLGRI

SEQ ID NO: 8289 - protein, 393 aa, Hydrococcus sp.
MKQLLTLVCKLNPTPEQVVKIEATLKAFADACNYANEQVKPSITSKITIQGIAYEDMRSRFGLAANLAIRACARVGANRLTAKQKGKPVKTFKPTSADYDQRIFAFREKDWTVSLTTIDGREHIKLDAGNYQRGKLKGRTPTSAQLCKHRDGKYYIHIQLKDEAPSPVKSTNVIGVDFGRRDIALTSNGDKWDGKKLTETRDKYSRTRASLQRKASTRTRSSRRRCRRILVRLSGRERRFQQWMNHNISKAIIEQAKQQNALIAIEDLTGIRERTNKKTRNQTERRRSNSWSFFQLRTFLEYKGLREGVEVIAVSPAYTSQTCHCCLHIGLRSDKKFKCGNCNWSGDADLNGAKMISLLGQSVNLPRGSSYLCCSLSTDSSGLLKSPAMESLG

SEQ ID NO: 8290 - protein, 440 aa, Streptomyces sp.
VTTERVLEKRQFGHRARLALTPAQTRLVDDQAHAARAMWNQLHDLWQMTPKCQRSLTRMDQTLRQARKEIDLYAVLPAQAAQAVLKTYVQAWKNCWDGRAEEPTFKARIRAVMSVDIPQARDLHIKRVHRRWGMVNIPKIGRVRFRWTKDLPVGKNADRENRITGARLVKDALGWHIAFRVQTLEPRPEPHTGPEVGIDAGVNLPLALSDGNHQDHGRPPRLPDGTADRDKWLNPDEKAKLLRLEQRAAHRKSFRKPKERSSNRLHATYDQIKQLRARATRRALDWQHKTTTALARQYGTVVVEALTITNMTKSAQGTVEEPGRNVAQKSGLNRSISQEAWGRTVTMLTYKTARQGGTLHKVPAPNTSRRCSACGFITPGSREDQATFVCKNPDCGWEGNADHNAARNVLHLYRMGHGLIPAAGRAVVRRTRGVKPATAR

SEQ ID NO: 8291 - protein, 388 aa, unknown
  TnpB Polypeptide
MIKTIKVMLIPNNKQRTKLFQSAGISRFAYNWCLAKQQENYKNGGKFISDCDLRKELTQLKKTDEYSWLNNYSNNITKQAIKDACNSYMRFFKHQSNFPQFKSKRKSRPSFYVDTVKIEFSGTHVKLEKIADSTRKNRAKANWIRLAEQNRIPTNVKYSNPRVTFDGIDWFISVGVEYEENTEQPTNQGIGIDIGIKDLAICSDNYTYININKTQKIKKLKKKKRRLQRKISRKYLKNKKGGSYCKTSNIIKSEKELLKLNHRLTNIRHNYLHQTTSEIINRKPKFIVLEDLNVKGMMKNKHLAKAIQEQCFYEFYRQIEYKCNWNNIKFITSDRYFPSSKLCSVCGNVKKELKLSDRIYHCSECGNVIDRDYQAALNLAEYGRKLII

SEQ ID NO: 8292 - protein, 377 aa, unknown
  TnpB Polypeptide
MNKAIKYRLYPTTEQAIMFVKTFGCCRKVYNLMLADKVESYKATGKFATVTPAKYKTEYPFLKEVDSLALANVQMNLQSAFRSRFSKSRKKKNGFPKFKSAKHSRKSYTTNNQKGTVAIIGNAVKLPKIGLVKAKIHRQPEADWIIKSATISQESDGTFYVSVLFEFEQDINAVPISDNAIGLDYASDGLYVDNKGNVGTNHKYYRESHKKLAKAQRKLSRKVGSKKDEIKSNNYMKQHRKVNKIHRHIVNQRLDNLHKISTEIANRYDVVCVESLNMRSMSNKGFGNGKATLDNGYGLFLNMLKYKLADRGKYLVKVDKWFPSSQICHCCGIVHPEMKDLRIRTMTCDCGLIISRDQNAAINIKIEGLRILREEVA

SEQ ID NO: 8293 - protein, 204 aa, Cyanobacteria sp.
APESGKTAGFDFGLKDFLTCSEGFKIKSPLFLKQSIKDVRKASQTLSSKKKGSRNWNKARRNLARKHEAIVNRRRDWQWKLAHELTDRFDVLYFETLNLKGMQRLWGRKIGDLALAEFLSILEWVAAKKSKRVVYIDQWFPSSKTCSECGYVLNELKLKERQWSCPSCSTEHDRDLNAALNIKSVGASTDSLGDVRQSQTAIAV

SEQ ID NO: 8294 - protein, 446 aa, unknown
  TnpB Polypeptide
MSIEKNKKIKQTLAETKERRKSQKCFVFKTKINKQKLNAMQREQLYRLFVEAKWFYNHAINFMQTHKLSELDTKVKSVTTLDKNKQPVERKFTALKSSYKQGIKDKIGDSLNALHQLKLNGYKVGRLKFKKETNCINLKQFGITHRIKSLHRVELQGFKQSFYVYGLDQFYTNPNAEIANAQLIRRNGEYYIHWTVYIDKKHIPSIDKNGKTIGIDFGCATSFSLSDGRKIDFKLQETESMRKLHKKIARQKKDSKQYNKSCELLRKKYDKLGRIKDDFADKFVKELKSYDKVVIQDENLKGWHKGSHAKAVQNSVLGRVKDRLKKQSNTHILSRFAPTTKMCFNCGEIHKDIMLWDRVFECECGVNMDRDIHAAQCMVWMADNGYDNILLNKKKKKNTAGRGDVEKQTSTVKSYDGDIIADPCCLCGDSKPVSRKHETHRSLDRV

SEQ ID NO: 8295 - protein, 280 aa, unknown
  TnpB Polypeptide
VRGLPNLVEKSFRVRLYPIQKQEVWFSKTFGCSRWAYNHFLAQRIEVYQTEKRTLNYNQCSAILTGLKEAPETKRLAEVDKFALQNSLKDLDAAFVNFFEGRAGFPKFKSKRKAKQSYKTNFTNDNIRIDRERRLLRLPKVGWVKYAHDGREIPGSIVNVTVTRTPSGKYFASILCQVAVEELPLADKETGIDMGLKKFVILSSGEVVENPRYYVKAQKKLARLQRALSKKKKGSKNREKVRLKAAWQHEKVANQRRTFSTSSPKGWWSRTKSSAWRICG

SEQ ID NO: 8296 - protein, 430 aa, Planktothrix sp.
VRTAYQYRLRPTKQQVIELDRWLAMLCAQYNYLLADRFDWYERNRSRINACPLVCHLPELRDNPDYYSQKKTLPHLKKTHPWYGEIYSQVLQDVVKRVKVTFDRFLKGDNKGKCSGKPRFKTLNRYRTFTYPQMKEGCLQGKLINLPMFGKVKVVWHRPLPDGFKIKTASITKKADGFYLTLSLEDKAVPDIKPDFNPDKITGIDVGLKEFLTTSEGETVAIPQHYRKSQKRLRVIQKRISRRKKGSNRRERAVKQLGRQHKKVADKRKDFHFKTANWLLSKYDIVAHEDLNVKGLANTRLAKSVLDAGWSSFLSILTNKAENAGLLVIPVSAHNSSQDCSNCGEKVPKELHIRWHDCPLCGCSLDRDHNAAINIKNRAVGQSVLKGAIRSAEILYGGMAGFSRVTQKVEYALSSSADDNLISMQVKLVS

SEQ ID NO: 8297 - protein, 409 aa, unknown
  TnpB Polypeptide
MPLITIRAQIQADKETEEILKDAMRCATKVYNGLLWHLREEQKQTGAVDISRKNLNKILRKLPRANSYYSMSVQLTRDEVRAAYKSFFTLKNKGLTKHDAPSFRPKEQLSPIKYVQSGFTVKGEEVTISLGRKRNDGIEKVSFRISHRPDVEYKNVRELSIIYDKDSGRMEARLVVEAVPQQNNGVGRAAVDIGETILMAAAFDDGTVILYSGRMIKSVRRYWNKVRSKLERNSRRWKEIAHKEKRQVEHLLHIATSHFIRECLKRGVREISVGQLAGIQESTNYSKEINQRLHAWPYRKLVQMLKYKGALVGISVNDNVDERFTSITCHVCGKALSSNRKHRGLYSCSCGWKAQADVNAALNIYERAYNVSPVKWSSGQVARPAVVSFRLGWHGVVEPKFKLKGVCAS

SEQ ID NO: 8298 - protein, 415 aa, unknown
  TnpB Polypeptide
MQLVEQHCIDRHDPRYSVIDEAAFKSKNLYNAALYQIRQAFIHEGKYLDYNEMDRRMQPHEAYKALPAKVSQQILLLLDKNWKAFFEARKAYEEDSSTFTGRPHLPKYKHKLEGRNILVYTLQAISRGKKGLQRGIIKPSQLAITVRTNQDPATIDQVRIVPRNGYYMVEVIYNKEPAQAKVDPSFCVGIDLGVTNLAAIASNREGFIPHLVNGRPVKAWNQWYNKRVKELKKRLPKADRERVTKQMERITTTRNRRIDHYLHTASKRIIDFLVKEGVGTVIIGKNPLWKQEAGMGRKNNQNFVSIPHARFIDMLTYKAALVGIQVEVQEESYTSQASFLDLDPIPNYKPNDEEEHIFSGKRIGRRNRLYRTKDGRKICADVNGAYNILRKSRPDAFSKAKGVAAYVVQPVRLAV

SEQ ID NO: 8299 - protein, 380 aa, unknown
  TnpB Polypeptide
MRFKGVKIKLKPNENQKNQIDINLDLRRFVKNKLLNMQQVRYANGGNYISKFGMIYCLKALKIEFPFLKQAESTCLEYACADLDQSYQRFFKKQNDCPNFESRKRPHNSYKSKCINNNIQVVDNHLIKLPKLGLVKAYGLNRIQGRIKSVVIRKESSGGYTATIQVEHEPIELTKTNKRVGLDLGLTDLVIQSDGFKLKNKKFERYLSEKRRIWERKLSRRRLQAKQKIESAKKAGIDLEWSSFKNVEKARRMVAKINRKIANQREDYLQKYTTALVKEFDLIVMEDLKTKNLMKNNRLSRSIADASWAKIRMMLQYKCDWYEKELILVEPQYTSQTCSSCGKNTGKKPLHIREFTCPHCGVHHDRDINASINILNKAFA

SEQ ID NO: 8300 - protein, 444 aa, unknown
  TnpB Polypeptide
MQKRKFTVVAQLHEMNNKDLIEYVESSRGDYAKAVRETFHGIKNDIEFNKSQFNTYLQDKYGIVKRTANSIISDAQGRYNALNELKVYEKTQLERKITYLEDKVIPKLVDERDNNSAMLRAKLTISLVKHRNLRRKIVAKQAKLNKLKQKLATLTWQIETGNLKLCFGTKCLLQRDYDKFVAQRDSQMSFVGTKTETSGNQLFQLSYNPKNNQFYIKLRKDFGGFKTAKGDAKYVTGQVYFRHHKDKIISILRNGNSPLSYKIIKKNNRFYLYCTFEIQVDEDDFITRSSYGTIGLDFNKGFVTLSETNQYGHLVRTRFLPYRFRLGTKTKTDLQELANHVVNLALTVGKDICIENLNFKVTKARTESKRGKKYNEMLHSLAYRQFVDTIESVAYWNFVTVNRVNPAWTSWLAKKLYCPTMKLNVHVGASYVIARRGQGYKDTI

SEQ ID NO: 8301 - protein, 381 aa, unknown
  TnpB Polypeptide
MKAYKFRIYPNKEQIEKLEFALDTCRQAYNILLSELNDQVVIDRNMIQATLPDLKICEPRFKDIYSKTLQYECYRLFSNLSALKALKQNKKKVGRLRFKGKGWFKTINYNQSGFTLDSKNKKLSLSKIGNIKIKLHRIVEGNIKQVTIKKSIDKWYVTLITDAIIKTKCGKKIIGIDLGIQDFIVDSENNVIKNPLNYTSNLTKIKKAHKNLSRKKKGSNNRKKAKIKLSKIYEKINNSRDDFLHKTSTDLIRKSKIIVLEKLNIKQMMEQKYFNAKNIADSSWGKFVQFLTYKAESAGCEIVKIDPKNTSKMCSNCGSLQDMPLWKRTYECENCGIVIQRDYNSAINILNKFSGSERACVEINPSVSQGLSLKQEATSFR

SEQ ID NO: 8302 - protein, 288 aa, Acidimicrobiaceae sp.
VSKIVVPIKINANRKITDDLGATLRLCNATANYISTVAWETREFSRFAIHRLTYSKAKEEFRLGAQATVRTIAKVADAYNSGDKKFRRTRKRQFSWSSAQPFDARNMSWCLEAKTLSIWTINGRAKSAPFVCADWQLELLKHTQIAESDLVFRKGSFYVYATIDVTDEIMNESPDGFLGVDLGIINIATLSDGTNFSGKHLNHVRNRNMKLRCRLQKKGRRSAKRLLIKRSECEARFVKNTNHCISKKIVTEAKRTGYAIALEDLEGIRNRARLPKPQRVALNSWGFH

SEQ ID NO: 8303 - protein, 459 aa, Mycobacterium sp.
MARFEVPEGWCVQAFRFTLDPTEEQAGLLARHFGARRKAYNWAVAALKTDIAQWHATGVETEKPSLRVLRKRWNTVKDEVCVNAETGAVWWRECSKEAYADGITGAVNAYWNWQSSRAGKRAGKRVGFPRFKRKGRDHDRVSFTTGAMRVEPDRRHVTLPVIGTVRTHENTRRLERLIRAGRARVLAISVRRNGARVDASVRVLVQRPQHPGVAVSGSRVGVDVGVRRLATVATTDGVVIERVENPRPLETAPRELRHVSRARSRCVKGSRRYRERTTKLSRLHRRVTDVRTHHLHVLTTRLAKTHGRIVVEGLDAAGMLRQRGLSGARARRRGLSDAALGTPGRHLSYKAGWYGSALVVADRWFPSSKTCHACGHVQDIGWAQQWQCDACSASHQRDDNAAINLARYEEPVSVVGPVGAAVKRGADRKTGPRPAGGREARKGPGHLAGEQPRDGVRVA

SEQ ID NO: 8304 - protein, 493 aa, Sutterella sp.
MRAVTDSYCITFEVKVNSSDLSEIDRRMECARQIYNTCLGQCQKRWRLIRSLPEWRSCLGQLQTLNRKTELSSDEKSRQKALRQQLKAIEQTEGFSEYALHAYALTINRHFGSSLGSNELQKAATFAWRTFERYRFGNAKKVRFKRRNDPITIENKSNSFGLRLKDDKVLWASKYTRTLVFPLIVRRNDTYAQQTFLDKTKFIRFFERTIRGERRFFIQAVKEGTPPPKKRQYGEGKPAVGIDLSPSTLVAYSPAVAVIEELAKDCEDIEASLRRVNRAIDRSYRATNPEAYNENGTIKKDCHLVPSKRCRKLQAKRKELFRKQAAVRKHSHEKAANELIAQSTDIKVEDTAVASWTARSKEITVNPKNGKIRSKKRFGKTVARRAPAMLLAIIDRKLKYRGYALKRVVSQKVKASQFDHSTGQYRKKRLCDRWCVIDGHRVQRDLYSAFLVSHVMGKNLDTIDRKACCNDWMNFLSLQQEVLKTCDKNLGIF

SEQ ID NO: 8305 - protein, 464 aa, Sutterella sp.
MKIISTYPAKIKESSGAFEATAVLYRQAVDYFIGIMLKHWDGSFSAITNSTFVVRATELLCWPTAKRPLTKYDFGKSFYKFPCYLRRAAINEAYGLVSSYQTRLKQWQTNPQGKEPGLPKAGRTFPAMYRDVMFKNTTDRYTVRIKVFIRNTWDWTEVKLRKSDMDYIAKYCPLRKACVPTLRRRGKKWSLDFPFEEEKKLTNVPICEQTVVSVDLGINNACVCSVMNSEGTILARRFLRLSCEKDSLNRALQRIKNAQKQGNRKMPRLWAKAKGINDSIAVKTANFIMDTAVYYSAHVIVMEKLDLKGRKRGSKKQRLHHWRAQYVQQMVEDKAHRNGQRVSRVCAWNTSKLAFDGSGKVIRDEKKHSLCTFKNGKRYHCDLSASYNIGARYFVREIFKSLSVTTGQRIAAKVPECVKRSTCTLSSLIRLHAELGSTERQLSECSPHRTEAVPPITNEGSLRL

SEQ ID NO: 8306 - protein, 368 aa, unknown
  TnpB Polypeptide
MEAARLWADLVARHHRLRRMNWRWPSKARFQQWAKGRYPGLSAQATQQIIGEFIEAVDATRQLRKNGHDDARYPWRRPRYRDVVYTNQDARIRGHRLLLPNGKSGTLRIPLPADRPLPGRLMEVRLCLGHVLLTYEIPDEARHQRTVVGVDLGVNTLIAATDGKKAVLISGREAKATVQWRNKRLASAVRRQSKMVKGSGRWRRVQRRKAKMLAKARRRMNDLIHKATHQVATAFPHATCYVGKPFNEAAQKMNGVWAQQVSQASNGKIMRHLDYKTSGAIQVDEHYSSQTCPRCGTRHKCRRVYRCRNCGIVAPRDVVGSTNILCIGQHGAMRIGQSLATEVVYARPVKVFRREPNSSPGHGGNSSV

SEQ ID NO: 8307 - protein, 544 aa, unknown
  TnpB Polypeptide
LAKNQTYKAFTTRPTHILNLDGELLDSATVLAQLASEVCNISAYATFVTRNDTVLGDELAKITAPRPADAGRLAGIKMPDFLVPDKKDKEGNPLTDKKSGKPIKNKTGRSRKEKIIRYNVVTAYRSWQERTKAMNGESSKYVSQGWKRTANATPPSYGEDYINLGAADRNYALIENDPFIDGEIILKMVICGEWYRLFFKFDSTRFAVGKVTLPVVKVENGMPVFIFTVATDNPVVQFSGKYIVGVDVGINNYATVVVRDMKTGKITYQTTLSQRVHSLWNSVRASEKQVRQLREKASQLLDNHPYERQTIMAALDEAQLHRKAASRKKRELAILAAQEIAYLSHFYGNAVVAVEDLSWITNTMRNGRWNRGTFVQWLTHYVSQNGGWVVAVNAANTSQMCHACGMEVEHPEHKVSRCPAHGDKDRDVNAAANIAARAVLVVEKARKTKAKNPKLQEKQAPLKTPIARVSLKYPGRDRTKNIPTPKRKKKCQGVKTLSSPARAQDSYLDARVLADCGAYGVMGTSQAAINQGNIIYTCRLCNLN

SEQ ID NO: 8308 - protein, 455 aa, Moorea sp.
MKYTYQYKALPTTDQKLEINLWLRICQYWYNRQLGERFDWWEHNRTSVNSCPLVCHLPELRDRPNYYSQKKLLPGLKKGKVTVEWSGEDLDFSRVPANTLQQVCKRVEKAFDRFISGDTNGKRSGKPRFKSQPRYRSFIVEGAGLTLHSCSTGGKFLYLKIPKIGLLKIRSHRHLPDGAILKQVQFINKSDGWFVNLKLDDPTVPGITPDVIVANWENSLGMDAVLHQEYYLATSLGVKLPSAKFLRRNQSKLAKISKKKNARKRGSKARRKLAKKEGRQHQKIARARKDFQYKTAHSLVSTGKKVFFHENLNLKGLSKRNAPLRDKEGKYLPNGQSAKSGLNLSWADAAFGEFFVILGHIAAKAGAVVVAKNPAYTSQLLSYRDQVIFTDCGIRKYWDEIENLWVDRDINAAINIKRVGLDVFPTIKRRKGSIKIVDSITDDTSKEVLRTLRGA

SEQ ID NO: 8309 - protein, 420 aa, Okeania sp.
MSKKTKNMGCQQVLLHPEQNLLAILEYLCGEANKVFNCSVYYARQVWFKENQFLTQGKLCGQMKRNIHFNAMYASSAQQICNGIVESFRSFKQLLKLFRKGELANKPKPPKYRKPGLFTVSYPKKWLKLTDKGIKVPLGRKVKAWFGLDAFYIPMASNLDWDLIKEIRILPRNRCFYTELIYEIKTQPVQLDFNQALSIDHGLDNWLTCVDTQSHSFIIDGKHLKSKNKYYNKQIATLKEHKPQGFWSKRLAKITEKRNRQMRDAVNKTAKLVINHCLKYGIGTVVFGWNKGQKQSIELGTKTNQKFVQIPTARLKERIEQLCNLYGLQFVETEESYTSQSSFLDNDILPKYGEKPDNWEASGKRIKRGLYKSAMGFLINADCNGAANILRKVSGRLKLNLSQLSRGALTTPLRVRFWTA

SEQ ID NO: 8310 - protein, 594 aa, Fischerella sp.
  misc_feature (9)..(102): Xaa can be any naturally occurring amino acid
MRCHIRRYXXXXXXXXXXXXXXXXXXXXXXXXXXXXXXXXXXXXXXXXXXXXXXXXXXXXXXXXXXXXXXXXXXXXXXXXXXXXXXXXXXXXXXXXXXXXXXYVYKLRPKQVQVVKMDNWLDMLRANYNWSLADRIDTYQQRFNRGEYCDLKTKSVAVPLTCCVSNYGASGEPWRDNGKRRSAGEIQITALPELKKVRPWYKDIDSTVLQQNIKRLDKAFENFFVGRGFPKFKNRSTMRSFTFTTGLKLDKNKIYLPKLGWMRFYNSRNIPEGFKIKSATVRKKADGYYVSIRIEDTSVPIFPVKTNSEINTVVGLDMGLGKLIYCSDGSVIDNPRFGTNKKTKRLQRIRQRRVSRKKKRSGNRRKAQQKLSIFQHRIATKRESYQWQVAKKIVKKADAIAVEDLNISGMMKRCKPKYDQTKGRFLPNGQSAKRALSRSIADASWYALISKIEYMASLSGKVVLKINPRHTSQTCSACGHVDADSRDGEKFICTNCGHVDDANLQAARNIKVKAVNQYGLILKQIRKVRQDLSKPKQLSLFETPNPESTGSKRRQHHAQSSKRGVPGNLGTQLDLFFQDNNNGTIVEVVNLLTL

SEQ ID NO: 8311 - protein, 464 aa, unknown
  TnpB Polypeptide
LYGDTEDKAKRKNFANQLNEMQKQYNVTWDYCRVAMIPIGKKYGINTIFALTKAEDIWRGIEKCLYSNGKTIHFSKYGELPCIRAKQINRGIPMSVKDNQLHFKLGKSTFGIQMKDKFQNDEVNAILKYLSESEIVNNKAIRALLDKGYCIDTYRPCYATLVPKLIRGKYRIYLHLTIEGKAKPKYDRFWNPRHKFGKGVIGADIGTQTVAYTSDTEVGLKNLSERGNSIQKSERLERLYYRAMDRSRRAMNPQNYNDDGTIKKVHKAWKYSNHYKKLKAKHAELCRINAINRQLAINEDASHLRSLGNVFITEPKNACKLMKRPKETTVNNRGKFNKKKRFGKSIKNRCPSGFLVTVANKFNVSGGTYIEVPNDYRASQYDHTADNYIKKKLSDRLYKLADGTLVQRDWYSSFLLYCYDYKTQNIDKIKCIARYEDCYDKEKVLIEKIKENKIKILNSVIKIA

SEQ ID NO: 8312 - protein, 460 aa, Parageobacillus sp.
MEKASKAEKVKTIQNKIISHGKKTFEDTLIIFRDALTFIVDVVDREFDALEHLSTKEAVPAVERLIHRTKTNPHPKYDFSSKFYKFPSYFRRSAISKALGIVKSHRSNLKNWEKERGQALDEGKKFKKKPPVLRIDHEAFPVFYKGNMFKRLSENQAQIKVYKNGDWVWETITFQTKNLKNRGITDWRESNPIIVKKGKKYFIHFSYSKKIKLKNTKLENQVIVAVDLGLTNSAVCSVMLSDGTVIGRKFINQPIEKDRMKSKINKLKKAQRQSGWISASNYWRRINGLQKHIIFNTASEIIKFAEKHHADVIVFEYLGKMKMPKDYDGAKKLRHKLHHWCKIGIQNKVEQMAHYRGMRIRRVNAKNTSALTFDGSGEVKRNNKRDLATFPNGKVYHADLNASYNIGARYFIREFLKSFSEKKRLQWEAKVPSLAARTRQTLSSLISLHQAMNTEGVTLA

SEQ ID NO: 8313 - protein, 450 aa, unknown
  TnpB Polypeptide
MKIVSSYKVKIKHYNNIFSGMVDIYRRAVAFFIDVCDKHWQEIQGLTAKKRNNYVEKLTIKTIRNSNVKYDFSMNFHKMPSYLRRAAIQQAIGAYSSYTSNLTNWENSDKNGKKPTLTTIRNIMPTLYKNNCYIRTSTNTCKIKIFHKNDWIWLNIDLREQDVKYIDKNCTLSRELVPTLKKQGKVWFLTFPFEENIKLVAVPTNQKIICAVDLGLNNNAVCSIMQSDGTVVARKFINLATEKDHLQKALNRQKKAQQNGNRKTPIKWQHVNDINTDISRKTAKNIIDFATLHKADTIVFEYLDMKGKKKGSEKQRLHLWRKREIQKLVEHKAHKLGMRISRVNAWNTSRLAYDGSGRVERGDPSARRAGYKIDGVKKCNYSICVFANKKIYNCDLNASYNIGSRYFIREILKSDPVMARLPNETKVFRFGTGTTRTLSTLIRLNAELAA

SEQ ID NO: 8314 - protein, 373 aa, Methanosalsum sp.
MLKAYKYRMYPTKEQEDLFFKHFGACRFIYNWALEQKIKTYEQDGKSISRFDLNKGITMLKRDGEHEWLKDVNSQSLQGATLNLDNAFTKFFREKKGFPKFKSRKNPVQAYNVPQNYKVDSENNNIYLPKIGNVKTILHRPLGDGDLRTATVSRTSTGRYYISILVDDGVKIPEKAEFSVDDTIGVDVGIKDFAITSNGDKIDNPRHLKNSMKRLKVLSKRLSRKKKGSSNRNKARQQVAKLHEKIANQRHDFQHKVSSKLVSENQAIAVETLNVSGMLKNHCLAQHIADASWPSFITQLEYKAEWYGKTILRIGRFEPSTKICNVCGYYNGSITLADREWQCPDCNTNHDRDINAAINIKKFALQEQNLIGI

SEQ ID NO: 8315 - protein, 370 aa, Methanosalsum sp.
MLKAYKYRLYPNKNHEEMISQHIGASRFIYNWALENKIKSYEAEGNSISRFALNKMIPELKIEHVWLKNINSQSLQGATLNLDNAFTKFFREKKGFPKFKSRKNPVQSFSVPQHYKVDFENNKIKLPKIGWINAKLHRRYEGKEKTATVSRTSTGKYYISILIDDEKENPVNKSFNIDTTVGVDVGIKDFAITSIGEKIDNPKYLKNSMKRMKVLQKRLSKKKKGSANRQRAKVAVAKLYEKIANQRNDFQHKLSSKLISENQAVALETLNVSGMLKNHCLTQSIADASWSSFVKKLEYKAEWYGKTILRIGRFEPSTKICNVCGYHNGKLTLTDRKWQCPDCKTNHDRDINAAINIKKFALDKQNLIGI

SEQ ID NO: 8316 - protein, 162 aa, Methanosalsum sp.
MKRLKVLSKRLSRKQKGSNNRNKSRQQVARLHEKISNQRHDFQHKVSTKLVSENQAVAVDTLNVSGMLKNHYLAQHIADASWSSFITKLEYKAEWYAKTVLRIARFEPSTKICNVYGYYNSSMTLADRKWKCPECNTNNDRDINASINIKKFALQEQNLIGI

SEQ ID NO: 8317 - protein, 433 aa, Nitrospirae sp.
MPPKPSNPEVAMKETKILCMKRRQAFKYELVPTGEQQRQMRRFASSCRFVYNKALALQKTNHDAGGKFIGYVAMAKQLTAWRNNSETGWLADTPAQPLQQALKDLEQAYKNFFAKRADFPRFKKKGRHESFRYPQGCKLDQANNCLFLPKLGWLRYRNSRVVLGAVKNVTVSQSGGKWYVSIQTEREVPEPVHPSRSIVGIDVGVARFATLSDGVVFTPRNSFKRHERALAKVQRAMSRKRKFSNNWKKAKTKVTKLHQKIANVRRDFLHKTSHEICKNHAIIVIEDLQVRNMSKSAAGTKEKPGRNVRAKSGLNKSILDQGWFEFRRQLEYKQAWRGGQVIAVPPQNTSRTCPVCGHIAKENRKDQARFKCVRCGFEGNADVVGAMNILRAGHARLACEVNGAVRPSAAGTHRSDSRGGSIPRLSTVGIPQL

SEQ ID NO: 8318 - protein, 423 aa, unknown
  TnpB Polypeptide
MLGSTAALFIKFSIFVKMLRAYKYRIYPTDEQKVLLAKTFGCCRFVYNWALNLKITAYQERKETLGNVYLANLMKSELKVEHEWLSEVNSQSLQSALRNLDTAYTNFFRNTKAVGFPRFKSRKGRQSFLCPQHCRVDFEKGTITIPKAKDVPAVLHRKFKGAVKTVTISMTPSRKYFASVLVDTDIEELPVTPIQGDTCLGIDLGIKSLAVCSDGRTFDNPKNLRRSLDRLKLLQKRLSRKKKGSANRNKARIRVARLHEHIANCRKDNLHKITYALTHDSQVRTICMEDLNVKGMMQNHHLAQAVGDTSFGMFLTLLKYKCSWYGVNLIQINRFAPSSKTCGKCGYVYKGLKLSERSWVCPECGTHHDRDFNAACNIKEFGLKALPTERGKVKPVDCPKSNDRKKQEKRGCIRISEAAKSLV

SEQ ID NO: 8319 - protein, 417 aa, unknown
  TnpB Polypeptide
VGEEEWRVVFARTTYSGVAGKRSLRVRYNIVIVQKAYKFRLEPTREQEQSFVHFAGCRRWLWNWALSRKQEAYKATGEGIYTKSLCQELTALRRELPWLAECQAQLLQQTLRDLDKAFKAFFERRSRFPRFKSRKHSPPAFRFAQFARVEDGCVVLPKIGRVKARLHRPMEGIIKSATIKQESDGHWYVVFVSHAEIPDVAPVCDRPCGIDVGLSSFVTLDSGAKVEPPKFFRRGQRKLKRLQRQSSRCQEASRNRAKAKARVAHQHSRIANRRNDFLHKLSHRLVARYDTICTEDLSLSALVRTKLSGHAKSWNDAAVGSFLRMLEYKSLWNGGQVVKVGRWFPSSKTCHCCQRIQHLELSDRRWTCASCGAVHDRDHNAAINLLSEGLRIVMAGSARTLTASGGSVRPATAGGSC

SEQ ID NO: 8320 - protein, 396 aa, Tolypothrix sp.
MLLGFKTELKLNNQQRTELLKHCGVARHAWNWGLGLTKQILDWNEENPTEKIKFPTAIDLHKWLVALVKSECPWYYECSKSTPQGALRALRIAWKYCFEKKKGVPQFKKKGQHDNFTLEGTVKILGNCKIQVPKIGVLKTYERLPFGFAVPYGGFPACRAVSPQVQPKSVTISREADRWFISLRFDVPREALRVEDSIRQTSQQESLNVSIVGVDLGVLNLATLSTGEIIEGAKSYKKYKDKLARMQWLNRHKIQGLANWKKAQMQVARLHRKIANIRKDTLHKLTTLLAKNHGVIVIEDLNVSGMMANGKLAASIQDMGFFEFRRQLTYKCELYGSKLVIADRWFPSSKTCSKCGTVKKELSLKERTFECDCGLSLNRDLNAAINLKNYSSIAAS

SEQ ID NO: 8321 - protein, 449 aa, Tolypothrix sp.
MLQARRDHAYLYNACIAHRRYEWKANKKNVTYLEQQNCLPEFKKEWVEFDYLHSQAMQATVKRVDLAYNSFFKGLRKKPKFKSIHKYSGWTYPAKSGWKANTEGEHGTVTLNDLGITVRMRGKAKDWGIPTTLTISYKPSKNQWFASFSVDIEVEAPKFGSESDLKYEKIVAFDLGTATALTLYDGREFAEVKNPQFTKKAELQIKHLSKALRRKRAPNHKKKVKASRRWQKARKQISKLQAKVATQRKDWQHKITSDIASRYDIGVTEELNTKGMTRKAKKGSKREARRMESSTRQTSRKKQKAGLNKSILSVGFGALNQMIAYKIEHKGGLMIVLPTKEIKPSQRCPSCGKVNKEWAELSNRHHVCECGFEIARDRGSAMVMYNVATNQQTGFGTSLADCGCFSTTSGSKKRKQTGSMKHLGQVKRQKRSQVGDGVFFETPSAYAAE

SEQ ID NO: 8322 - protein, 193 aa, Tolypothrix sp.
MHPDVGVDLGVKALATLSTGKVFEGVKADKQHQAKLSRMQWLHRNKVKGSANWKKAQMQIARLHRRVANLRKDYLHKLTTYIAKNHSFVTIEDLNVRGMMANHKLAAAVQDMSFYELRRQLEYKCKLVGTKLIVADRFYPSSKSCSKCGHLKKSLTLDERIYHCEVCNFKCDRDLNAAINLWKYAFTTESSSG

SEQ ID NO: 8323 - protein, 520 aa, Tolypothrix sp.
VQVRWNFKFKPNQSQKIQMSQWLVTLRKHRNFALRQREIGYSTNNQNAETPVIYAIGSWCDIETRVEYGSCCPLTCPVLKHGVIPENLDLALKTANGVVKWDNASGIQMKVTTRLRHERESFANINSDVLQRNIAKLDSAFNNFWKNGRSFPRYLRVLDCFEYKPEQVKLISVKKSYGIVYLPCVGHVKFHNSRDFSVIKKIRTCTVKRSGGYWFISMLVDIPGELPKVKSLDEVKSVVGVDVGVNVLVALSNGSFVENIRPATNDRTKRRLTIRQRAINRKKNGSNNKKKIAEKLARTTHKIALKRDGYNWQAASQVVKTADAIGRENLNIKGMVKRAKPKHDGKGGYKKNGRSRKSGLNKAILDCAWGDLFNKIAWLAAKSGKPVVAVNPKNSSRECPKCGHIDKANREGQKFICTNCQYTEHADTKASRTIAQRVGLVFPKNVKTTLPADCGKVMPVKMSQCSARVSQLEATGVSLPMGGESRNHACGVIGTQLTLFDLAGYTKPDNRKSKRYGRNS

SEQ ID NO: 8324 - protein, 511 aa, Tolypothrix sp.
MVTLTYCKGLPTPEYELNNLGFTDFEMFLAAYSPIVHKATCETVNHLLTGKKFNKADWNTYLQKTYNINKRHANGIISDATGRVDSAKKCRLHHINQLEAKLKSALDWVKAAEKRLFNAQKFYTKKNWQKSKMGCKFPLSCSLQFKSTNWRYLKFILHNKNRYIYQTKQQLKYLKNAPLQVFVPRNNVFVVGSKDESFGNQTCQWDGDKIRFRVPYCLEPKFGKYVETKLGNFDRNINRLPDDGAKTWHFYRQDGKSKGQKLLSGELSGKWVAAIQFTPKTVERVSRPIQYGCIGIDINPGSIGWAYVDCQGNLKAKGAIPLQMGLPQNKQTRQIVKVCLQLAELAKKYACPIICEELDFSSKKAELREKGRKYARMLSSWAYNRFYELKTSILSNRGISLIQKNPAFTSLIGLVKYSRMYGVSSEIAAAIVIARRGMNLSERLPRAMSAYLEMNSRKHVWHGWVKVNNFVKQCDVIRSRHSYYTVSNWSPLVKDYAERVATGKSRASSKR

SEQ ID NO: 8325 - protein, 515 aa, Cenarchaeum sp.
MVDVLLDSVKYVIEPYYMMALIKNSRTVTRQYTKNLGMQHVFEHVRKVVEVAYIIANNTGKDTYGVNALMYGTMRGPDPKVRSSITQTAIRDGVAAHKTYNTKTAQGMKVSEPVFCNPVVKLKNQNWRLNPIAGGYMAIANVGSSKHPHMIAIPVSSDVVRKIGQNELGELWITPTTYTITYYNKVPKVEKPHPHGKSEIIELLTDVGYVGGTPKDVIGVDINEKNITVGDKNTMVRFDLSDTIQAIEEAKTEDANNTYTRTHDNAAYAARTGRCITHKKEGERRERQQVTHGGPKLHSKLKRRYRKLKRAAEIKKQMSRCILSIPHNHTKSKKNDKKRRVAKAMRRHEHVLNVIALCIAQWAAQSGCLVMLEDLTHMSHNWQKGGKFGRSIRRRLYSAMMRKASNLIYEKSQFLGAEALHMRPHNTSKFCAACRTPLTGTYHKKDCTHCRTVGVDRDVNAVENIRRTSAVSRYGRKVSASLGEVRRGVDVILDPTPLIQGCWSNWADRLSRMVM

SEQ ID NO: 8326 - protein, 356 aa, Acinetobacter sp.
MKTLKLRIKDKHCKVLDQLASEVNFVWNYVNDLGFKHLKQKGEFLSAYDIAKYTKGTSKECNLHSQTIQAVTEELVTRQKQFKKAKLRWRVSNKKSARRSLGWIPFKKVAIKYADGYVQYGKHQLKVWDSYGLSQYSVRTGSFVEDARGRWYVCLVVDSPKQDKPTATKAIGIDLGLKDIATCSDGTVISNPKFYRKYEQKLGIAQRAKNKKRVRALHAKIANCRKDHLHKASTMLVRENALIVVGDLSAKKLVKTKMAKSVLDTGFSALKTMLKYKCENASVLFEEVNESFTTQTCSCCGEITVSSPKGRTGLGIRVWECENCLSVLDRDLNSAKNILALGHKRLAVGIPHLAKA

SEQ ID NO: 8327 - protein, 244 aa, unknown
  TnpB Polypeptide
MLNYYVIEVVYEAQEEEMRTGVVVGAIDLGLNNIATIVTNDKKNPLILSGRKLKSINQYFNKNVADRQEKLPKEVYTSKEIERLWTKRRNKIDYETHKISKYIVELMDERNVSKLIIGNNGGWKEGINLGKRNNQNFVNIPYRKIIDQIIYKCQMKGIEVIVREESYTSKASFLDYDYIPTINEDDEVKDFSGKRVKRGLYRTNKGKRINADVNGAYNIMAKESLDYIKTKREELSFSPKLIRL

SEQ ID NO: 8328 - protein, 427 aa, unknown
  TnpB Polypeptide
MQLTQQIRIFPTLEQEEVLWVLSEKCRLIYNFALAERRDAYKNGVKGVTYRKQQNDLPIIKEQYPEYKWVYSKVLQCVLRTLNADYKSFFALRKNGYKDAQLPKFKGKHYFTTMVYNQSGFKVENKKVAVSHFYNDIPLEFIIPEKFSFIEDTCIKQLSIFNKDGRYFVSITYEVEYPPYIDNGRYQAIDLGINNIVTAVNTAGKFLVVKNKRPDKYWHPRIIKLQARRDKCIKCSNRWKHFNRIVKHYQKKCADQTKDFQHKLSKKLVENTKARTIIVGDLKVKSMAQATKIPKHMRKGLNRATQNTGSLGRFVHFLTYKAKRVGKSAIEFDERNTSKECCVCGKLHDMPIWKRIMNCDCGNVLARDKNSCVVLMKRYLSQNAKWTGYQEFLDNLRYTAKGKTRVPSPKFEYGLEDSQEAPSLRVG

SEQ ID NO: 8329 - protein, 392 aa, Paenibacillus sp.
MLVNKAYKFRIYPNKKQMELINKTIGCTRFVFNFFLGKQKDKDAYWYITEEMVQKGQLQANNWKGKFLNKYETVKSVKELKKQYSFLKEVDSIALQKSVENLADSFNRYYKKQTKYPRFKSKKNPVQSYTTKHTNGNIAVIDNYMKLPKLGLVRFAKSREVEGRILNATIRRNPSGKYFVSLSTETEVFELPKTNSAIGIDLGLKDFAILSNGITYSNPRFFRTLEEKLAKAQRMMNRRTIGSANWHKAKKKVACIHEKMTNARNDYLHKISIEIVKNHDIIGMEDLAVSSMLKNRNLAKAISEASWSTFKTMIGYKAKWYGKQVVTVRKNYPSSQLCSSCGYQNKDVKNLALREWECPTCQTYHANRDINAGINIKNEAIRLLTAGTAGIA

SEQ ID NO: 8330 - protein, 420 aa, Moorea sp.
MVLLTYCYRIKPNAEQIATMERWLELLRRHWNYALGQRLDWLNRTRCRVDRCSIVSEAIGDIAEPVTYYSQQAALKETKKLFPKYKQIYAETQQVNLQRLNKAWDRWRKPDASGKRGGRPRFKKPGDLRSFVFPRVNNTRAGAHLIDGVLKLSRIGSMPVVMHRPLPSGFTLKQCTIIKKADGWYCCISIKDDTVPELLPVDSVKSAVGIDVGLEKFLTTSDGEAVPIPQFYRKAQNKLAQAQRLMSRRVKGSKNWQKAKQKVALLHLHLTRCRKEFHYQVAHWLCSSYDLIAHEDLNIKGLARTKLAKSIHDAAWGSFLEILQAVAVKRGLLVEKVNPRGTSIECFNCGARVEKDLSDRVHHCPICGVKIDRDWNSGLNILNRALMAVGLPLNGCGKSIQDIEEQQVSFVNLRSPHHNL

SEQ ID NO: 8331 - protein, 467 aa, Eubacterium sp.
MSAGYVITTYKIQLNYMHLDWFKQTQSLFDAVLAFYYKLLEKQPEALSLSNQNLLRHLELQTIKQRDGTPPETPLPFEKIPLYFRRAAINAAISMYRSYTSKLREWEDKQIENGKLKMENAGTESQSDSDSDQIGDADLHHNFPPSTFNFSPESAKKGRPSRSKNLHMSMLYYKGMYKDFDEKSILLKLYTGKAWAWVKHRYTGRPFPENAELMSPTIVIKKKKVMLHIPVKEIVEDSRTAKERVQQNEKFVAVALTGSDNLAVCTTIEADGRATAPYFIKGGKELAHRRKLLLGYTKRRTVGNDALVIPQGAQPGRPNAKYYEKITRLTDHYAHEVSRKIVDYALKQGAKLIVLPELKESFNQVKKPYLGKTPYDFIGRRIARYVQYKAWQKGLVAMTSKPYYASTRCYHCDAPIAKHNTEYQNPSANFYGGKNFVCKEGHRGSTALNSARNLGKGFYKRFYAGAA

SEQ ID NO: 8332 - protein, 556 aa, unknown
  TnpB Polypeptide
MKKTVNADKRYYIDEGLLVNPGSFLKTLEVFNNAKICLYNLLYDKEYGTSDPFAKRSYVSILKEKFHIDDYYCGAVYKEAAACLSSQKELRKLYLKTTAAEIDTRQRKLDDTLDQLEKKQAVKASIKTYAKTGKWIKPYPKCRLKVSGQTISGDGIKPTPIEEYEIRVEESIRSLKNRAKMVAHGLKRKQHKLHCLETLPPRRIVFGTRKMYSAKDAEGADRAAWKEGFWFRRHSIMMLPGRRDSKYGNFQCRLINGDLYVACTDGQEAVFKDFMPVLFEDTFFGAFQKPRADRKAVAYSFRLCKDEDGRPYIIPFVVLDMEAECSADYSEGCVGADINWDRIDLTDIGKNGERLDAKTIRISLEGKTTGQITNEIGRAMKEVQEYCLERQKNLVMEDIDLVIKRHTLQYSSPTGNRHISLFAYRKIAECAKNQSLKTGLGIRFVDPAYTSQAGKHLFMRRFGISIHSAASYAIGLVGLSIYGKLMPDIRIQELMKDEPYFPVPGDYKKAWRKVTNAFKGIRTHRFYGRLPYQEMKEKPLATIKTLANAMKQPAFT

SEQ ID NO: 8333 - protein, 444 aa, unknown
  TnpB Polypeptide
MKLTSSYAIKLNGDLKALENSIIIYRSALRFIIPIVNTHWDELKEYEFMNQRMAHTEKLIHSTNENKAYYNFDEEFPKFPSYLRRAVINRALGIVSSYRSNLANWEKESKGQAPQLSLTHYDYPAYCKGNLFRNFDPVKQTIELKVFKNGDWVYEVYQLKTSDCRYYQTHLTGKKQNVPIIQKKGRRFYATFSYEENVALVPEDSISKICAVDLGLGTDATCSVMDQDGTVYARKFISFSKEHDRLHTQLGRIKRNQKRGSRHNKTLWRKVAGISQDIADKTVKAILDFGNEHGVDAFVLEYLDFKGKNTVKRAHFWRYKRIYKVLAQKAHQYGLRMARVNARYTSRLAFDGSGWSKRGREIAPETPYALMEFPSGKTYNADLNASYNIGARYFIKHLLKTVTATQRLALEAKVPQVAKRSTCTLSDLINLRSEFVALTTKTQA

SEQ ID NO: 8334 - protein, 407 aa, unknown
  TnpB Polypeptide
MKLTRRVVLKPNKVMRQVLDSLCDYRRYCWNESLELWNTLYEQRLIGLTEEERSTIQELVKSKQPLTDELQELNTLYPFPSDYTVRKILVSQKEDWQYLLSSRTLQLAVKDLADAWSRFYKNSKEFGKPTYKSSKLPKQGFKTDRSRIINGKLVLDKPQPYKGEWYSISFKGASLPDGKISLCYVTCVNGKYYASLVVEVEHLNLTKTGKINAVDLNVDHFDTLDGRFNLQSKLLNKLYNKVNYYQRALARKRLESSDYKNSKGYQATRTKLQATYERIRNIQDDLLHKFTTSLFVNYDTLVIEDLDVKKMQMKKQAKKLQRSLFGRFRQYMEYKAIKFNKTLVIADRFYPSTQRCSHCGFVKTGEDKVTLEGNRKHGTKHHEYVCYKCGFTADRDYNAVLNLLALA

SEQ ID NO: 8335 - protein, 491 aa, Acetobacteraceae sp.
MIRADTVRHSANAGKVERVLGFTRRYRACGAAIAAREWRAFFEAGAFSGKYGNVSAFNAYCGAAPAQMARAQVMAMLGSFLANRQNDFRDAVTRSSLASEIKHALHTINRRQAWFDRHDVTIKGQTAPIPAEIRRLARCIMRGVLRRHRRPNARGIAPVLDTRSVTVAPAASARHSDLWASFKLVGQPVFSIPLHTHAHWRTRQGKRCNVLQVVPDASGTGFSVRLMTDMAEAFAESRAAYLPRTERIGVDFGLATLMATDRGDLLGRGFLDAMRRLDGQLVAIARHRMRSGGKPRESERYRGLVDRVRGIVKTRINTALNRIVSLHAPAEIVVERLDFRMPGLSRRLNRIITNCGRAVFKSKLADLKDKFGIEAVEINPAYTSQECSRCGYVARENRLSQSRFRCVHCGHTAHADVDGAKVITARRSRGLDFRFTHRRHVLAELQRRFGERPRRHHHDVPRGTKASSRQPIPLGQSQPGRTEMRLSHESQ

SEQ ID NO: 8336 - protein, 401 aa, unknown
  TnpB Polypeptide
MYKQILKKTYKYRLYPTERQQDILEKQLSLCRWLYNHFLEERKTLYEKSKTKITCFDQIREIPELKKGKPELGEVYSQTLQDVVRRLDKAFQNFFRRVKKNKNGEKQNPGYPRFKGYWRYDSIVYPQSGFQLKEDKLNLSKIGNLKIELHRPVEGNVKILTLRRTSTNKWYACFSVEINKELPKKKKIKKVLGIDVGLNSFLTTNQGEKIDNPRYLIKSEEKLSQIQRWHSRKKLKSNNRSKSRLKVAKLHEKITNQRIDFLHKLSHKLVKNFRLIAFEKLNIKGMTKNKYLAKSIIDTSWAHFLQQLTYKAAEAGVWAVGVNPKNTTQVCSGCKNIVPKTLATRKHKCPLCGLTIDRDVNAARNILQLALDTVGTTEINACGVRRILPTMKQEATGFNRW

SEQ ID NO: 8337 - protein, 524 aa, unknown
  TnpB Polypeptide
MFITTSFKLTVNKEEKEQILKLMRNFSSAVRFSYKRLLESFTPSQAYKITRQKFPELNSHYVNCAIERAREIFQSCKARGQNPKKLVFGGRALFEKLKKNHLQGKRLKELKRKWREKRQGTLISIGTKHITHKGNLNLRFIPIEKGKSNLWLRIALKNRKFILAKVKRDLSGKSDKWALFLAKIISGEQFPYTVELKLKDGQIYGFVSFSLDVPPQTITKEKGVIGIDVNARPFHLALAEISPDGNLQSYKSIYLSHLLKYKSRNRKEYGEWLIAHEIVRFAKEKGKAIAIEDIKKLPKGKRGDGKAKRRKVLQFFSYRRILKKIESLANQEGIEVVKVNPAFTSLIGMMKYCPQYFIDKDVAGAYVIGRKALGLQEKIPENYKKLLKSQVYIQYALWRLGKMEEELKNKLNQEKNKYKAYSIKRDLRRLKREKKFLERFLIEVSKESSQSEPETQEQGNLRKEPVRGEKSSQKLWRVLRVAFAIPLLGKSFVRDFSPLRPVMVQGKWERIAMKLGPDGFAGPP

SEQ ID NO: 8338 - protein, 357 aa, unknown
  TnpB Polypeptide
MPSAASAQRQTQIIQEQFVAWREARKAYFADPSKFQAMPHLPGYSKKYRTFVVGRNGYKIVSGVLSLTDKSASPFPPLKVRSCENQAFNATKEETIAGDVRIVPHGNAFFIELTYKIEDYDPSIIALDRSRSCLVDIGLRNIVTLASTASGINPVVVKGSALKSINALYNKDAASLQSHGKSSHRQSKVMKRTCRINDLLHKTSRFVVDFCVRNDLGKIIIGHNPGWKQEVNLGRVNNQHFVCIPFNRLIDMIRYKAESNGIEVTVREESYTSRQSALDFDPLPAYGDKGANQVKSSGRRIRGLFIRRNGQKINADVNGCLNIGRKELGDEWLKRLLETDEGRLMRPIAVQIGQRLG

SEQ ID NO: 8339 - protein, 232 aa, unknown
  TnpB Polypeptide
LQQYIESGWKLGKASLFYKKGKWYFAVTIKIENKETKDLNVMGIDIGLRQLAVGSVKTPQGKEINRQFHNGNQAGFIRKKYRSLRRKLAQAKKIDVIKTINDKEQRWMTDLNHKISSQLINLAVQEQVGTIIMENLENIRNTAKSLNRADRNLHSWTFYQLQHFIEYKAELAGIKVEYINPKYTSQSCSKCNKIKKSNRKANLYFCECGNHIHADLNASRNIANKYLEQQSA

SEQ ID NO: 8340 - protein, 419 aa, Halodesulfurarchaeum sp.
VSNQVVTRTVKASIQNQPQVRDDLDSHAYAASKLWNVGRWTVQRVWDAIGYIPEATELTSYLKGHARYDDLHSQSSQKVLQELSDAFHSWYEQDNPDHNPPGYRKRGDAHPRSTVTWKNNGFKLDTDNNRVRLSKGANMKPSRYAADYILCEYEEQADYSLDDIDRVQTVRAVWTGEKWELHFVSKLPMETAESGGEKTAGIDLGISNTAAVSVGDETLLYPGNALKEDAHYFRQIEYDTEGEDGPSQTAEWARQKKARRQEHFLHAVSKDIVQECDERNVGTIAVGHPKNIRQDGDWGRHGNKRLHDWAFETLIQQIEYKAEERGIEAERVDEGSLKTSKTCCECGMVSDSNRVERGLYVCEACGLVANSDLNAAENMRATVTPNPSQDRSNGCLAQPSVRLFDKQTGQIAPQEQVVP

SEQ ID NO: 8341 - protein, 427 aa, Halodesulfurarchaeum sp.
MSTVRCWRQLAHIEGKIVNHQQVSDDLDDCGFAASKLWNVARYYTQGRWDKGGEIPDDGELKSELKEHERYSDLHSQSSQRVLEELAESFTSWYKARQRGDENANPPGYRKHGDEHPRSTVTWKQKGIKHDAKHNQLRLSKGFNLKQHRSDFILAEYETRPDVTVENIQQVRAVWNGDRWELHLVCKVEIPAEDAPGDNTAGIDLGIKNYLAIAYDDGDAELYPGNVLKQDKHYFTRDEYDTEGENGPSRRVLRARQKLSRRKDHFLHALAKHVVEQCIDHEVGRIAIGDLSRIREDENGDSRNWGRSGNKKLHGWEFDRFTTLLEYKAEEHGILVDRTSERNTSKTCSCCGRKREANRVERGLYVCESCGATMNADVNGAVNIRRKITQSPPTGDMSNGRLARPVAYLFNQTSGRFAPSEQVGCKP

SEQ ID NO: 8342 - protein, 233 aa, Fusobacterium sp.
QRELNKENVLGIDLGIDNLCTCVTNTGASFIIDGRKLKSINQYYNKINAKLQSIKDKQKIERTTLRQKRITRKRNNRINDYLSKAARTIVNYCLNNDIGKLVLGYNEDFQRKSNIGSINNQNFVNIPYGKLRDKLIYLCKLYGIEFKLQEESYTSKASFFDGDEIPIYDKENLQEYIFSGKRIKRGLYQTSAGKLINADCNGALNILRKSKVVDLSVLYNRGELNTPKRIRVV

SEQ ID NO: 8343 - protein, 494 aa, unknown
  TnpB Polypeptide
MDLDTNNHSVFKLSYHLVLVIKYRRKVIDDDISNRLKEIFEYISPKYNVTLEEWNHDKDHVHLLFRGSPNTEISKFLNAYKSASSRLIKKEYPTIKKQLWKEYFWSRSYCLLTTGGAPIEVVRKYIENQGEMMLKAYKYRIYPTNEQKLYFAKTFGCTRFVYNQMLADRIKFYEENKDLDIKAIKYPTPAQYKKEYEWLKEVDSLALANAQMNLDKAYKNFFRDKSVGFPKYKSKKTNRFSYTTNNQNGTIYIDGNYIKIPKLKSKIKIVLHRKFKGLIKSATISKTPMNQYYISILVDTENIQLPKNNNKIGIDLGLKEFAICSNGDKFDNPKNLRKSEMKLIKLQKDLSRKQKGSNNRNKARLKVAKLHQKIANQRKDFLHKLSTKIISENQTIVLEDLRVKNMLKNHNLAKAISEVSWAEFRTMLEYKAIWNDREIIIAPSSYASSQLCSECGYKNSDVKNLALRNWTCPECGANHDRDINASINLLKLAI

SEQ ID NO: 8344 - protein, 363 aa, Streptomyces sp.
LSAEQAQLTEEQWRTRWRAGRRFLTADGESGRRFGNESIRVTGDGEVSVKLPAPLVHLANAPHGRYVLATRVSFAHRGEQWADRVAANRAVAYRIHEDTDRGRWYLTTSWTMPPVQAVPLVAARARGLIGVDTNADHLAAWRLDAHGNPLGRPLRFGYDLTGTAQHRDAQVRHALTRLLHWAKHHGLSIAIEDLDFTAETTREKHGRRKRFRNLVSGLPVSRLRARLVSMAAELGITVVAVDPAYTSRWGAQHWQGPLTSKNNKTTRHDAAAVAIGRRALGHPIRRRTAPPPHDRSDHAGHRTVQATSVTPQREGNRPRIPGPRTRSVRAGHEANAVDQNAQHRSARSAEHKFWQQDPLPLSL

SEQ ID NO: 8345 - protein, 228 aa, Rhodococcus sp.
MRNNFVASGAVRPRRVGPDRRTGQQPSRRWLRTQEQIRAVRIRIANSRRDHLHKLTTRLVRDFDTVVVEDLNVAGMTRSGGAYKRGLNRALQDAAFAEIRRQLTYKCEWAGTGLQVADRWYPSSKTWSNCQVVKAKLPLKVRVFTCDACGFRADRDHNAALNLAALAAVDGGASSASCGRDVKDARQKPTIRPAARWADGIAAGTPLSGERDRGNPDTHAECTKQHSA

SEQ ID NO: 8346 - protein, 441 aa, unknown
  TnpB Polypeptide
MQSISSYGVEINRQNLPICHTLKVYRQAVSYLIQAYARVWDSLSIISNQQKRFNEAEHLVHGTKKNRAQFDFDHVFPKMPSYLRRSAIQHALGSVGSYETRMELWEKGKLSGKPKLVSENHAMPVFYRDVMYKKAEGEEDAADLKLFDGHDWKWFRVKLKHTDLEYLRRKWAGKKASAPTLEKRHHKYFLRFSYKEEVTLSKTPVKEQIICSVDLGINTDVVCVIMQSDGTVLGRKFIDFPSDKDRMYRVVGRISRFQRTCGSRQIQSRWSYARRLNKELARKISSAITEYAGENHADVIIFEHLEMDGKRSGKRKQRLHLWKKQDIQNLCEHQAHRKGIRISRICARNTSRLAYDGSGTVIRAPKNHSLCTFPTGKQYNCDLSAAYNIGARYFIRELLKPLPATERSLLEAKVPSVKRRTSCVYADLLQLTERMQLKESI

SEQ ID NO: 8347 - protein, 168 aa, Rhodococcus sp.
MRTTLQKVGTKSAKRKLKTRRRKEQRFATDINHQLSKTIVAQAQRTDRGIAIEDLSGIRDRVRLAKKQRAQVHSWAYAQLRNFVTYKAEMAGVTVQVINPRNTSRTCSRCGFCDVRNRRSQAVFVCRECGWAGHADHNAALNIAALGHEKYWAAQSTVPIAATALASS

SEQ ID NO: 8348 - protein, 432 aa, Rhodococcus sp.
MQNMSVGVTSSLELGDPPSRSVTRAFVYVLDPTPAQVNVLRSHCGAQRFAYNWALSHVAANLDQRTAEKSYDIPVTALTPAMSWSASGLRKHWNTVKDVVAVNPESGQVWWPENSKEAYSSGIANCIAALWNWWDARTGKRKGSMGFPRFKSKRAVLSCRFTTGSFGLVTGGDDRRHVQLPRIGVVRTAESTRKLARKTVSGSARIRSATISFRRGRWQVSFSVETIIPSRALPPLRSGGGGRDAGTVVGVDVGVKHLAVLSTGEMIERPKHARKQAKSLRRLQRQASRRTGPDRRTDQQPSKRWLRTQVKVRRVHARITNGRRDYLHKLTTRLVEEFDTVVVEDLNVAGMTRSGGAYKKGLNRALHDAALGEIRRQVTYKTDWTGTGLVVADRWFPSSKTCSNCSVVKAKLAVPDPECMNSISGDPSRHKM

SEQ ID NO: 8349 - protein, 234 aa, Rhodococcus sp.
MKRIVMVKLVPTPEQFAALESTLMLCNDVANEVAELAQLMKLRSRRALQVAMYPIVKARGLSAQPSLHVLRKVADAYTTRTANLVNGNCGRPGSKRYAAVSDTTIEFRSNAAQPFDDRCLSWQLDGATVSIWTVSGRMRGVSFVCAPWQRTLLADRKGESDLVLRDGSFYLYATVDQPAPTPVVPAKDPSAGWLGVDLGIVNLAVTTDDDPNVLDVRWSGGPVVPSPRAGKRTR

SEQ ID NO: 8350 - protein, 407 aa, Rhodococcus sp.
MSIVQRVYPAEGAQLDALTMHCDHARYVYNLGLEQRSWWTPSRRHFRQKITAASQMRDLTEARREFDWLRAGSTVVQQGALRDLDRAFTNFFARRSGYPTFKKRSGSRQGFVVRDLVVRRINRKWGEILVPKAGWVRFRISRAWTDICAASSARIALANGRWTVSLTTTPVPRREASTTAVVVGIDRGVANSVATSDGRMFHAPGFSAGEQVRFVALQRQLSRQQKGSANLDRTKAKLGRMRLRLADRRGDWIEQTTTVLANTYSGAAVENLPIRNMTRRAKPKPDPDNPGVFLPNGGRAKSGLNRAILASCWGKFAQRLDHKMSVIAVPAAYTSQECSNCGHICPENRESQAVFRCRGCGFEHHADTNAAINIRDRGFDLEYQPGGILGDRVCQSRKRAASTVSVV

SEQ ID NO: 8351 - protein, 388 aa, Rhodococcus sp.
VAAVSVSGMATGVVKRAYKYRFYPTDGQAEQLARTFGCTRYVYNRALAERSQAWQQEKRRVSYADTSKMLTGWKREPDTTWLAEPSKGPLQEALRQLQGAFDKFWRKQTRYPTFKKKGVSKDSATYFSNCFTYRCGVIRLAKQSEPLDIRWSRPLPDGVVPSQVTVSRNSRGQYHISILVETEIAALPPTEQTVGVDAGITSLFTLSTGEKIDNPRHEAKDRVRLAKAQRALAKKQKGSANRAKARLKVAKIYGRVADRRRDHLHKLSTRLVRENQVIAIEDLAVPNMLKNRNLSRAISDAAWSEFRSMLDYKADWYGRQVIAIDRFYPSSKTCSVCGVVVESLPLDVREWTCRCGAVHDRDVNAAINILAVGLAVSACGDGVSPLLS

SEQ ID NO: 8352 - protein, 400 aa, Rhodococcus sp.
VKRIVVVKLVPTPEQFAALESTLVLCNDVANEVAGLAQSMKLRSRRALQVAMYPMVKARGLSAQPSLHVLRKVADAYVARAANLTNGNYGRPGSKRYVSVADTAIGFRSNAAQPFDDWCLSWKIDSSTVSIWTSSGRMQGVRFVCALWQHKLLADRQGESDLVYRDGAFYMYATVDQPAPTPGVPVKDPIDGWLGVDLGIVNLAVTTDDDPKALDVRWSGGAVTARRKKNQVMRTALQKVGTKSAKRKLKTRRRKEQRFATDINHQLSKTIVAAAQRTDRGIAIEDLSGIRDRVRLAKKQRAQVHSWAYAQLRDFVTYKAEMTGVPVQVINPRNTSRTCSQCGFCDEKNRRSQARFECRECGWTAHADHNAARNIAALGHEKHWAAQSTVPIAATALASS

SEQ ID NO: 8353 - protein, 279 aa, unknown
  TnpB Polypeptide
MIARELKLKLTKKQEKAFEEYLRVLTGVYNWTIRKIKLSAKEGIYYTYEDLQNIVTGHAKKIGIHSQVLQQIVRQAHNAWERCFKKLAKKPKLKSVHNKLKSFSFPQFDRKKLLLKTIKLPAFGEIRYFKQEIPKGKIKIVRIKKKASGWYAQLTIDAKHVFPVKNTEEKVGIDTGFKHLAILSDGIKIENARNYIKGQERLAQAQRGNRTKLAARLHERIANKRKDYSHKKSRTIIENYKYIAIGEDKLVPMAKKLGKSVGDAGIAQLRNFIVYKGGI

SEQ ID NO: 8354 - protein, 479 aa, unknown
  TnpB Polypeptide
MQEPTIMCGVSIHASVSDNGRGRMKIIRGYKTELDPTVKQRSLLCQCAGTARFAYNYGLARKLAACKATGASLSAIDLQKELTARKHSDLPWLRGMSKWIVQNALRDLDTAYTHFFRRVREKKAGKKHQSLGFPHFKSKGQGRGSFRLDKPIRVCEDRLQLPRLGTIRLKEHSYIPTSGVKVLSATVSERAGKWFVSVLVEEEGPRVVKASGQPMGVDVGIASLAVCSDGRPPLKNPKALQKKLKRLKRLQRHLSRCKKGSANRQKARQQVARLHARVANTREDTLHKATSSLVHAPLSPSECISLKAHLASLLPRPKTKAEQKKVKKQVKKLLHQTTEINAPLRPQVIALEDLYVEGMKRNRKLARAVSDVGMGEFRKQMEYKSVWNGEMLLFADRFFPSSKKCHWCSWKWEDMELSDRIFLCQNPVCRLFQVPQDRDTNASENLAELAHEYLRVYGELHRTEKVCGEPEHWLVGNDQ

SEQ ID NO: 8355 - protein, 392 aa, Marinithermofilum sp.
MIRAKRVSFQASKKDLDRLFTCNRESALVWNECLQLSKQYYMDHKKWISKSELQKATKGRFNLHSQSIQAVCHKYLFARDSAYQAIQKGIKTVFYPYKNKKHYNTKWAKDGFRIFPNGKIELSMGIHEGKRQKPIVLHTSDLPEGQIKEIELCYDQRLYLTVSFEDGVENQTYTSQQVAGVDLGEIHTLSSFCENGEALIVTGRKMRSIHRLRNKKLAEIGRLQSKCKKGSRQWEKYQRAKRYILSKSEKQLRDALHKTTKQFVDWCVKQSISDVYMGNPEGVQRNTRKKKKANRKQAGRLSNWSFGRAKRYLKYKLTQKGIELHEVDEAYTSQTCPVCQKRRKVSSRNYYCSCGYQEHRDIHGARNILSKSLFGKITYMDVPTKQTYLRIA

SEQ ID NO: 8356 - protein, 394 aa, unknown
  TnpB Polypeptide
MVIRADTGTVSDKKGHIAYKYRIYPDSDQAVFLAQSFGCVRFVYNFYLDVCIQCREYGFKHPSKTECNDDCNQKLKDAYPWLRVPDKFALTNAIFALDDAFSRFFSGQNNYPVFKKKGVSRDSYKTDYTNGNIEIGDNYIKLPKAGKVKAVIHRRPEYSRYNGLKLKSATVSREKDGSYYCSVLFAYDAGETVIPDIPLEECAGLDYKSDGLYVDHEGYMPGSPKFFRKMQKKLAREQRRLSCMEKDSSNYKKQKLRIARIHRAIANARQAFLRQAAAAIAKRFHLVCVEDLDMKAMSNKGFGLGKSTMDNGWGMFLKYLEEALAKRGGMLVKISRWYPSTQTCSHCGSRKIMQLDERTYVCPHCGAAINRDWNSAINIREEGYRLYCEVRQAA

SEQ ID NO: 8357 - protein, 367 aa, unknown
  TnpB Polypeptide
LNIAYRFRIYPTEEQKILLGKTFGCCRFLYNQMLNDKIQEYEKTKKMLKNTPAMYKKEYPFLKEVDSLALANVQLHLEKAYKNFFREPKIGFPRFKSKHHSRNSYTTNVVNGNILVESKRIRLPKLKWIAMKKHREPVEDFRLKSVTVSMEPSGKYFASLLYEGYSCENQADEPDYSTAKILGIDYAMQGMAVFSEKIETEEAGFFKKNEKRLAREQRKLSRCVRGSHNYELQKKKVARCHEKIRNQRRDYLHKLSRKIADSYDAVAVEDIDMKAMGQCLHFGKSVQDNGYGMFREMLDYKLAWKGKKMVKVDRFFPSSKKCCKCGRIKKELKLSERVYRCACGNEMDRDCNAAINIREEARRMLTA

SEQ ID NO: 8358 - protein, 415 aa, Thermus sp.
LSWTPTALPASPWPSTWAPPASPTTGASTSARRPWKRARLFPTPPNSTGSGTGGNGRTLPGGPRSPSAPPRRFIWGRGPTEAFRDLEKALRNWRQKRARFPRFKRKKHMDDNTARLTGSIRVFPRHVQLPRIGKVRTKEWTDKLLALLESNKARILSATISREADRWYVSLTCEVERPDPPQREGEPMGIDLGLSAFLVLSDGTRIEAPKPLAKSLRLLRRRSRQLFRKQRGSKNWQKASLRLARLHRRVQNIRRDFLHQVTTWLAKTKPVMVVEDLNVRGLARGPLSRPVADVGWGTFRRMLEYKAGWYGARVIVAPTHFPSTKRCSGCGWVAPRMPLSLRTFRCPWCGLEIDRDLNAALNLRQYGLAVLSGPTGSSPGSDACGDRLCGGTVGNSRSTSTRSLKQEAGTGRLFW

SEQ ID NO: 8359 - protein, 485 aa, Bifidobacterium sp.
MSQKVRIDGVKHNGASIFLGVDHCGNPRWTRNPERIMVWLCNGWRTRFNQRREQRTHNIPVKDEAGGIIDWRKEPLGGSNVAELLPDKEARLQCSWMAGIPAPILSSTDRIESVEWSAGLKRKKTVGGRIPGFKSRHRGLGFVCWRNASKTGNALFHRTGRKSGVVVITGMNPTRWRKPGEKLHWRIVIHVRVSQPIRPYTSVHVDWTHRSLVFVNMPSPLPGMGNGMVGLDRGCVHTLASSDGAFMDAPKPTKKETARLGYLQRRMSRQDRVNEARGGRTAKFASKRCQRTLTEFNTLQGRIVRRRNDWIEKTTTSLAKANVLVAMEDLDVRAMTKRPKPKLDSDKPGQYLHNGAKAKAGLDRSILSNNWSRLMKRLNDKMDANGGRLVLVPAAYTSQACHKCGHVAKENRDSQAVFHCVRCGHRANADANAAKNILGRALIQTGGGTASDVEEPRWRSGEASTPSTQAGSSVGVRSAKGIPRL

SEQ ID NO: 8360 - protein, 365 aa, unknown
  TnpB Polypeptide
MQKGIKFRIYPNREQQNLINQTLGCCRLIYNKGLAMRNEAFRNGSKIGYSQTSAMLTELKKCEDFAFLKVVDSIALQQSLRDLDRGFVNFFQKRAAHPTFKSKHNHHQSYRTVNQGGKIRIAGKYIKLPKLGYVRIRQSMEVGKIKNVTIEHTPAGRYFAVLNVEFEPQPRPNNGGCIGIDVGIKEFYSDSNGSSVSNPKYLEKSMRKLIREQRKLSRKQKNSNNRNRQRIKVALVHERITNQRNDFLQKQSTMLIRENQTICIEDLKVKNMMRNHKLAQHIGSASWSKFFDMLAYKSVWYGNDVIKVPTLYPSSQTCSCCGYKNPLIKNLAVREWECPYCHAVHNRDTNASINILNKGLQMQSA

SEQ ID NO: 8361 - protein, 191 aa, unknown
  TnpB Polypeptide
VEFADQFSNPVIVFEDMSGIREEMQYGSYMNRQLYKLPFDKFETFVSYKATWREIPTDTVAAYYNSQTCSCYGERGYRQGRRCRCPNEECDVVQDHADRNASVNIVWREKATLDGNESNSRTYKTHPQVRLVRLSGCRVGARRVSRPPSSRSLAEQGVRAHRTAEEITKPSGHRARGCLQTLISYFRSKYS

SEQ ID NO: 8362 - protein, 440 aa, unknown
  TnpB Polypeptide
MEYAYRFQAYPDRTGVTSEIEQHLDIHRQAYNHTRYEYNNKQNQSNIGSAYKHQKRLTDWKREFSVFSKVHSKALQKTVERFYDNLSNLSKRKDKDYKVGELKWKSPRDYQSITYSQSGFELKNTSGQKTNTATLWLSKIGDIPIRYHRPVPDHATIKEVTLKKETTDEWYVSLSVEVEDERVPNKTPAKELESDDCIGIDLGVLNYIHTSDGVSVDGLDSEDQYERLEREQQKLSRKQNGSNNWEKQRKRVAKIKRHIRRKVLDFQHKITSWLTTEYEAVFVEDLDVKPMMEQSHNARNKQDAAWSQFIDLLEYKADLNGCYIEKVKPEGTSKVCSECGAESDKPVWVREHSCPACGFELDRDWNASINVLERGLELLGDRLGLGQSEVERLMETGLPVGKIRSESVPAKTVVETGSPCENKGSPILKSGTETAVSVSD

SEQ ID NO: 8363 - protein, 260 aa, unknown
  TnpB Polypeptide
VTVENIQQARAVWNGNCWGIHLVCNNQISVEDAPGDNTAEIDLGISNYLAIDYEDGASELYPGNKLKEDKHYFTQNEYQTEGENGPSDRALKARRTLLGRKDHFLHTLSKYIVEQCVANDIGEIAVGDLSVSDIREDSGESRNWGHAGNKELHGWEFARFTDLLEYKAEEHGILVTRTDEEHTSKTCSCCGQISDSNRVERGLYVCDSCGVPMNADVNGAVNIRRKITQSPPTRDMSNGRLARSGVFLFDRESGSFNTRE

SEQ ID NO: 8364 - protein, 210 aa, unknown
  TnpB Polypeptide
VDGSLAVTSTGTFIGNADEMNHRRREFEKTRGSMQQTGTRSAQLSIQSMQDHEHSWMQDELHRASNHILEEARDHGCTHVAFENLTGIRDRMAGAKRFHAWAFRRLYQYVEYKAEMFGPEVTQVNPAYTSQRCSSCGLTDDSNRRSKHQFVCQKCEDELNADYNASKNIARKLLKRLRSGQKSSSGGAPCQCALPSGTLNLNGDYTASVH

SEQ ID NO: 8365 - protein, 376 aa, unknown
  TnpB Polypeptide
MIEVHKTYRAKICNHSQVKESLDQHAWSASKLWNVANYHSREVWDETGEIPNHGELKDELKSHSKYGGLHSQSSQRVLEELAEAFNSWYGSDDNRDNPPGYRKQNYYDDNGNRVHEEHPRSTVTWKQRGIKHDAENNRVRLSKGKNHKEYPRAREYILVEYETRPRVVIENLKQVRAVYDQQAETWELHFVCKNEIATPEPPGNETAGIDLGICNFATVAYSSEKADLYPGNRLKQDAYYYPKEIAKCDSSDGDESIRLHHEWSERRTHFFHGLAKHIVERCVENNVGLINVGELSGVRQKDNEAKDWGKHGNLDLHMWAFDRFTDILEYKAKVKGIELAEVSEQDSSKTCSARGRDDSNQRVDAACTCVKRAMQR

SEQ ID NO: 8366 - protein, 350 aa, unknown
  TnpB Polypeptide
VRQSTTTSNSTRRATRDRTHEDARTQTGRAERPQAEETPRDARGVPERPPRRFRRRMYHATQAGANDVVVDSDLSGYAKNALKKYVPQLKTTYNAGELHDDHPVRFTNEGLRLDHKPENAIEWYVKIPHHEDYHLWMPAQPNPEQRDWLEALNAGDAEMGESRLFERDGTWYLHVTATRDVEERSEVSAEERTPIGVDIGEASLVTVCHRDDHGSPTSPELWTDEGKTVRRLRKTHFTATRRLQQRGSERIADSFGDGIWNQIDDVFHTVTSEVVEYAESVENPVLVLEDLTYIRESMDYGEYMNRRLHGWGFAKLHAQIRYKAVEKGIPVETVNPRNTSKECHACGEVR

SEQ ID NO: 8367 - protein, 387 aa, Lactobacillus sp.
MIKGVKIRLYPSKHQQNQLLQMFGNDRFVWNQMLAMAKARYKNNPSSKFVNEYGMNYLLKQLKQEYSFLKESDSSSLQVSNHNLAQAFKTLFKHQGGYPRFKSRHSAKQSYTGKSTCKIVAKRRVKLPKLGSIRTSKTNILNGCKIKRYTLILEPTGRYYLSLTVEDNSIKPLEKTGAVVGVDLGVADLAITSDGKKYESFKPTYLDKQVRSWQSKFSKRKYIATTEVRQWNHNHNDYKMLVEDYHNWQRAKRIKACYQAKIANKRKDYLHKITTELVEKYDVIAMEDLRTKNLLKNHHLAKSISNQSWREFRTILEYKCKWYGKQLIVVKPNYTSQICSSCGYHSGKKPLEIREWTCYKCGTHHDRDVNAAVNILNKGLEKLKVKG

SEQ ID NO: 8368 - protein, 340 aa, unknown
  TnpB Polypeptide
MIRNDHVRFLGEGAMVTSRPLPDTKNASDQPFLDLGKAFTAFFEGKARRPRFKSKKRSKASFYLANDQFELGDHRVWIPKLGWVNMAENLRFTGKITGARVTRTADWWCISITVAVPDARSATRTAAVGIDVGLNRLATLSTGEEYENQAFLKTALRKLRQANKRLHRRKLGSTNREKARRQVARLHYRISCLRDDVLHKLTTRIASCYGMVGIEDLNLKGLLKNRHLSRSFSDAALGKLLTLLTSKVEQRGGRAIKVGRFFPSSKTCHACGWKWEDMKLSDRVFICQNPHCAYHQCEQDRDYNAALNILREALRLIGLSDQAVDGIGSDDDVNLAADAG

SEQ ID NO: 8369 - protein, 327 aa, unknown
  TnpB Polypeptide
MVDVAWQYNVKTRNQLHKLAYKELRKLYPNVPAILIPTFYSKALGIVKSARSNSGSKPTIKKFFALLHKRMYRLSLENRSISILGLEYQINASSYLEKFKNGWNPKEATLHLRRGKLWMNIVFEKLVKVAKPKAVMGIDLNLKNLAITVLDFKGKVLHQEKLPFKGLVKALTHKIFQEGIQRRYGKSWRFVEGIKKAISRHGFRQHSRCLAEIHLIANRIVGLAEKFQAFLSMENLKGLRIGNDVEKVHLWAYRKQQFVLGYKALLKGLRSLLVSAKGTSSKCPICDRRLRQKTYEGLECPEHGLMDRDLLASWNIAKKGLKLVGKM

SEQ ID NO: 8370 - protein, 415 aa, unknown
  TnpB Polypeptide
MSLEVTQTVPFKYEKTIEIDRLLKGYKDIVNLCIQELIRLRKTSLKALHDAVYRKLKAKYSYQTSFYVTAYRVAIQTVKAWRKTGGETPRIEKLFAKVSPLAYKFDGETLRISIKPKQFVYLKLKYGSYQRKFIEAWKRGELKIGEIILNERYVIIPFKRVVELTKPEGYIALDLNENCIVGVSDKGEVKRWDCSYIGRTRAKYEAIRAKIQRNVANHTRKFKRLMAKYGAREANKVKDFLHKLAKQIVKDTKKYNLILEDLKGLRSSTNKRKKKFNRFNGKVQSCSVNPKGFKHRWNSFPYRKIQFLLDYKKRLNGLETHYVDRAYTSARCSVCGSEIKPKEHLCPKCGLNRHVNACLNLLKRFGVAFSPTPQPRNDSMSHALTIQPKAGMRTSMARGEREVGRHLNLSNLPTG

SEQ ID NO: 8371 - protein, 416 aa, Megavirus sp.
MNKSSWIPEKNINYINLKTNSWFDILKTSRKINKDYNKIVCTPDVLRCEKIRIYPTDKQRDILHKWFNLHRKMYNVTTKFLENKLWKNDVFVKKNISKYVNFRILRTKYLKSDKEKLCKHKVNKHLLDQAISRCVAMYKSAITNYKKKNIKNFRIRPLKKNKRYKNLIIEGCLFSKTKNSFCTSIIGEINSEKPFNNTKKTCILSYDKYKSTYTLNIPRDSGKGTFTTRKLVCGIDPGVRTFLTVYSKKDCYQICNNPNFKKYYKRMDRLNEIFTSEESCQTRKYKKSIGKMFDKINNKVKDMHFKVAKYLCSRFQILKLGNISTNKIVSKETGNIGKSTRRLLYSLSHFRFREILTHQAEKYGCKLKIVSEYLTTKTCSNCGNKKDVGKSKVYECNKCELYVDRDINAAKNIRYV

SEQ ID NO: 8372 - protein, 480 aa, Carboxydocella sp.
MITIQTKLVFDSEEDKQEVLDLMRRWSSCARFAYNRLLEGKNRNTLKKELQGIFNLNSRYVDDAIMKAKSVLESCKEREENPTKVVFGGRSLFDKLKKRHINGRAYKKLKLEWQERRKGNLYSRGDKSKKGNLNTRIEIDEYGTRLRINVGDRKYVYPKIQAGWKKGRSREELLQAISTCEEPYSVELKLKNGKIYAYFTIRENFPEVVVTKENGVIGIDVNAYPNHIAWSETDENGKLVSYGRIPMPELTSGNSNKREYYRWQHAHEVVRLAEEKKKAIAIERLDIRDKGKRGDFSGRKSRRIRHSFSYRSLLEKIKVLAKRKGIQVIEVNPAYTSVIGMLKYAPQYMISKDIAASYVVARRGLGLKEQIPEGYIAILKDLDASELEELKEHVKRTVKNKHLKERQLKEIDRVIKSLGSELGKVLIPLGGTSISACSASYNLWRVLKVAVVTPLSPEKVLRDVSVLKRVLHSGHVGRPG

SEQ ID NO: 8373 - protein, 396 aa, unknown
  TnpB Polypeptide
MLSKKVKIKLDYNQELIINTLSNEHRLLYNHLLDFTKNNKLDFKLLNNCYKNYRNDRNLTINSKSSQNTCIGFINNIKSFYALHKKDITAKFPYKFKSYKYFTSFTYDNNNGQGGFKLIDNTLIINLLSSSNIAKKLIIKLPKYCNDMNMNNIKQFTIKKENDEYYIIFVYSEKENDKILNKDNYISIDLGYTNLVNGVTKEENIKIENYRQKKLDNKIKDLQSKKDKKVKYSNNYKKLNKKLNKYKKKHTNKLKDYQHKVSKKIIDYCINNDIGSIIIGDLKVKKVINKDNKVINGESKLTSIGRFKTYLEYKAKNAKIDYKLINEFNTSKTNCLSGLLEFNSSLKNREFIYNNIKIDRDFNSCINILTKSGKWLSQDDKIHLLNNKINYFYYSN

SEQ ID NO: 8374 - protein, 386 aa, unknown
  TnpB Polypeptide
MKRTYQFRLYPTTPQAIILTQWLTTCRLLYNNSLAERKNAWDTQKHSVTYGEQASQLKDAKQTNPFLQTVHSQVLQDVLRRLDKTFKNFFRRIKKGEKAGYPRFKGKYRYDSFTYPQSGFALDYHHKKLRLSKIGAITIKLHRSIPAEGEIKTCTIKRDVDYWYACFSIALPTPDPESQQRAIQSAIGVDVGLKSLLTLHTGDTIDNPRWLRHSEKQLAKEQRRKDRKVKGSCNRHKQNRKVAQLHRKIRNQRKDFHHKLSRKLVDSYDLIVYETLTITNMVKNHHLAKSISDAGWGQLMCFTEYKAEEAGTVVEYVSAYNTTQRCSRCGKLVPKTLATRIHRCPYCGLVLARDHNSAITVLHRSTHYVKASCSSLPGQELPVEPG

SEQ ID NO: 8375 - protein, 436 aa, Calothrix sp.
MQVITAKLKLNPTAEQKEALRGVSLAYRDALNYASQVAFDLNKTSSGNKLQKAVYNELRARFGLGAQMACNVPRQVSATYKGLWTKVKQNVAAIKAGYTKKRYKGLDKAPKYVSRTVTLNYQRDYSFKTEQRVSINTLNGRVVVSYEGYNKHLQLIVSCARIGAAKIVYQRSSKTYYLMVSLEIETPIIEPTNITRISGVDVGQRYLAVEVDLQNKAKFYSGSAARHKANRYNKARKTLQRKGTRSAKRRLIALSGRERRFIADTNHQIAKQIAKPNSLIGLEDITGIRERTKSKSGKKVSKKQRKANRNKAKWSFAELHGYIDYKANLVGSLATKVPAHYTSQSCVRCGHTSKANRPNKGLLFRCECCGFELHSDLIGARNIALRTLLVRQDWMSTGALSVRPHGTKDETKAEILQRFSELRWTSVPSPTLADEC

SEQ ID NO: 8376 - protein, 141 aa, unknown
  TnpB Polypeptide
MVRKHPTASFVFEDLTGVRKQGIGRNKKFKGILNNWPYYKLQNMVEYKSNNKTLYIDPLGTSSECPVCGDRLKHPEWKISKCKTCDRDYERDRLASLSIALRGLDLCGDPLPVSVSAALPMMMDEYLYTGDLPEAPQSGLD

SEQ ID NO: 8377 - protein, 360 aa, unknown
  TnpB Polypeptide
MKLVAAIKLLPTREQAAVLKATLKRCNDACTALAAKGFATDTFRQFDLHKMGYSWLKSEFGLTAQAAVRSIAKVADAFKINKKVAPVFRDDAAQPYDDRILSFKSDSILSIWTVEGRMKLGFVAGPKQLELLKFRKGEADLCFVRGKWLLACTCDIPETIEFKASDWLGVDMGIVAVAATSDGRVYTGAAVERVRARLANRRKGLQKCGTKAAKRRLRKLSGKQARFQAHTNHCVSKAIVLDAERTGRGIAIEELNGIRTQVTARRAQRARLGNWSFGQLRAFLEYKAKRAGVQIVAVDPRNTSKGCSACGCVDAKNRPNQATFSCIACNHTELADLNAARNIRARAIVSMLENSQACTA

SEQ ID NO: 8378 - protein, 360 aa, unknown; identical to SEQ ID NO: 8377
  TnpB Polypeptide

SEQ ID NO: 8379 - protein, 394 aa, unknown
  TnpB Polypeptide
MAGIASLAMFDETVYIDRAEAVLSARAPALCESPMKPDNAPETHIQRQTITFKFRLRDRHAAELNRQARAVNYVWNYVNETQQKAARAHRKWLTAFDLQRLTNGASKELDIHAHTIQRVCRAYDDARKTHKKAWLRWRGRKSLGWVPFNTGHVSFDGADFKFRGVAYTPMHLRDLKPGVKIGAGSFNQDACGHWFLNIPVEVECALSAPLSSVGIDLGLHTMATLSTGEKIEAPRLYRASEEKLGTAQRARKTKRARAIHAKVANRRKDFLHKASAKIAKQFGLIIVGDVSPSKLAKTNMAKSVLDAGWSGFKNMLSYKANYRGGAMVEVSERYSSQTCSACGSLPPSRPKGIAGLGIRRWTCDECGAIHDRDVNAARNIVRAGLRTLVGGAHV

SEQ ID NO: 8380 - protein, 394 aa, unknown; identical to SEQ ID NO: 8379
  TnpB Polypeptide

SEQ ID NO: 8381 - protein, 397 aa, Halomonas sp.
MHQWRTMLKATKVRLYPTTEQAEFLNRQFGAVRFVYNTGLRIISHRHKRHGQSLSAKHDIKKLLPVAKKSRKYGWLKEADSIALQQACLNLDHAFQRFFDPAQKAGYPRFKSKRGKQSSYHCVGVKAGDDWIKVPKLGPIKARMHRQVEGRLKSITLTRTVTGKHYASLLYETEQVAPAPLKDVDAAKVVGLDMGLSHLAIDSRGRKIANPRFLRQAAANLRRKQQALSRCQKGSRRRAKARLLVAKAHERLANARNDFQHKLSRQLVDDNQAVIVEALKVRNMMKNARLAKHIGDASWHALVTKLDYKAKEQGKHLVKIDPWFASSKTCHICHHKVDAMPLSVRSWECPSCHTHHDRDINAALNIKHQGIVKLKAEGLSVSAHGGLRKSGTSPVAA

SEQ ID NO: 8382 - protein, 416 aa, unknown
  TnpB Polypeptide
MGLKGEEFKIKLKDTRDRRKSMDCKVFEIKFDKSKFSTEKKKYLNRLFNEAKWLYNSILGSQDQFLYRTKCKSVEVLNKDKEWEERDFQAISSQMKQGLGRRLIDSITGLSQLKKKGHKVGRLKFKSQINSIPLVQSGVTYKIINDKYIKLQGFKKPFRVKGLHQIPIGAELANANLVRKAGDLYLKITCFVEKDKKVKTGNMLGLDFGIETNVTTSYGEKLNFYLPETKAIKKASRKFNKLKKGSRNKFKAKINLQKKYSKLDNQKKDIKNKVVSKLIKENDVVAIQDESLAEWHKNKLCSKKVQHSIMGGIISGLKKHPETLVVVDKYFPSTQLCPECGKKNKHTLDKRTYNCSCGYSCDRDIHAAKNILTEGMKQVGTERINPILVESPASISKPVAKIQARLCEARSLYVLA

SEQ ID NO: 8383 - protein, 328 aa, unknown
  TnpB Polypeptide
MLSNRDLKSSKYYKEIPCVVAKSLISKYQKNKKIKEVKNLVLPICGDKGKQVRVVENGLCIPSLFKKEVIPVTYPKPIVGFIRQVEFFKRDGVWFMSYFYSTPVEGAKEPLGFLGVDRNAVGNVVFCAEAEAGVARKIGPDVSSLTKIFRNRRSKLQRKGAKNALVKIKRKQSRVVRDINHKVARSLVNFAKDHRLAIVLEDLGKISKKGKAKRFVQKSQWAFFQLETFILYKAALLGIPVIKVNPAYTSQACSRCGQINKPNGKHYKCSCGYFAHRDANAAFNISALGKQLYEQPSVQNVIDGRHIGGPLNWRIVKAIQPESSGGAR

SEQ ID NO: 8384 - protein, 374 aa, Gammaproteobacteria sp.
MSSSRPTAVRVLRLRVKDTHAPWLSGLAREVNTVFNYCNELSVKVFERERRFLSGFDFWPFLKGVTRGECALHLPVQAVQEIAEEYARRRRQHRKVRLAWRKSGGARRSLGWVPFKVRTIRYRGGQVSFAGRWLSLWDSYGLGQYQLRAGCFSEDSRGRWYLNVCVPRVQRVPDGNEKPSVGSILGRSVASVGIDLGLKSFAAFSDEAQPPIEAERFYRDLEPVLARAQRARHRNRSRAIHAKIANRRKDFLHKLSTRLVKANGAIFVGNVNASALAKTRQAKSVLDAGWSAFRTMLLYKCEDASVWFTEVDEAFSTQTCSVCHSRAGPKGWEGLGIRRWNCPVCGAIHDRDVNAAHNILAAGHRRLAEGILGP

SEQ ID NO: 8385 - protein, 1054 aa, Kurthia sp.
VKIREVFLLFLRKICPTCHTTLDRDINANCNILAEGLRLSSQQTGFAYYKSVQLQVWHSYIDSQSKGSFFLEYEMVNSLRFAFFIMRRVVMKRFLAIFLFTIIGCLVPLHAQAEDTFQTDLFRYKIVDGEVEITKYLSNYTIDVVVPKTIDGKPVTRIGDSVFESKSIKSVTLPEGLISIGAKAFYRTTDIGELKLPSTLKEIGEMSFSSAGVTAVTIPKGLTTISFSAFGFNQIKSVTIPSTVREIGRGAFAYNALTDITIEPGVTVIGAKAFEGTKLTTVTIPDTVVSIGELGFGNTPLTTIKLSSALETIEKRAFYKTKLTNVTFPKTIELIGDEAFSETLLENIHFTRSANTTIGKKAFYKTKLTALTLPEGVKEIGSQAFMKVSSLTTISLPQSLKKIGAKAFYELPIEKVTLPKQLTEIGDAAFYKSNLTSIAIPGTLQIMGESAFANNQLNDVTIGEGVPLIAKSAFKNNQIKTITLPDSVTMIGESAFEYNTLTALTLPKHVTAIHARAFKDNLLSTLILPNTLTELGVSAFENNGIESLILPASMPVIPAGAFQRNSIRTLILPSDVKEIGKAAFEENGLKVVTLPSAVEAIGDDAFQKNDIEQINWNTKLQTIGANAFRKNNLTAVTLPANVQIIKEFAFAQNLIDELALPVSLTAVAPTILGNATTNSETENHFYRSIKEIYTDAAKTKLWDGQQLGVILYVKWHHLARFEHLTYPYIPVNSTFDPLKVIQVEDEEDGDITTRTTVLGTVDTTKIGSYTVHYQVTTSTGYTSVKSRTFYVTRNAKPVISGEAIQTIHLGDKLYVRQNITVSDEEDGDLLQQTRISIPTIKSPGRYEVHYSVTDSNNNTTTFTRVIYVIPSRVQALVVTSNPTSLYMKWADQKGVTAYKVKLYDAKGKLIRTVNTAEADVILDKLPPGTNYRVKVLAYLKLPGKTMLSDYSETISTITAPATSNVMSLKVVNQTSFKATWRKSTTASGYKLQYATSKSFKDGKTVTLRSSKTLAKTINGLKKGQTYYVRVKPYQTFNKKNIFGLWCTAKKVTVK

SEQ ID NO: 8386 - protein, 413 aa, unknown
  TnpB Polypeptide
MLVKGVVFRLTSDLPPEAISLLHDFRLAVNKAVRASLEARVSSRNGIAKLFYRTFREEHPGMYAKHLLSSFEVAAVILKNYRKRLRHGRPCGIPFAKRLMMRAENQAYKLDRTEGIIDLPIRAGCHVELRLVVSRYHRRYLDDETLSLGSLTVLPDRVIVAFRKEPPKPIAASSVLSLDTNERSLDGIFVEGGGKGDGSCVQVKAAFPEVATIQQRHHERRRRLQKKKAHDRRLTRVLCGREGEREHHRVDYRLHRVANAVLEFAEGHKSAIVLEDLRGIRSNKNKDLNRRLSLWPRRKLHQIIEYKAAWKGIQVIKVDPRYSSRRCPACGRISDSRMGTNREFVCDCGWHLDRHINASMNLLQTAISKGLEVAGGLWFSPGAFQHDVVMTLYEPAMAARSEPNGTSHIGMTS

SEQ ID NO: 8387 - protein, 385 aa, unknown
  TnpB Polypeptide
MTSNLFVDRTITIRLEPSEAIGQTVRIFNEATNFFLRLGFHNRTHSKRKLQALGYYAARDKWPALQSSLVQGARDCAADMLKRERCRRRPFKKPDSSARFNQRTFKAFLDSGSLSLTTVEGRLKVPLRIPEYFRKYAGGKVKALRVRDVDHDLMADLVVELPDVPIRDVTNPRVVGIDRGINNIAVTSDGGFFNSKHLRNVRGRYAYLRGELQSAGTRSAKRHLKRLSGRERRFQADVNHSIAKEIVGTDFDVLAVEDLSIRKDKRLGREFNRKLGRWAFAQFEAFLRYKSEECGKQVVSVPPEYTSQMCSRCGDIGIREGHSFRCPVCGSSLNADLNAARNIASLGKALVGRPTVNGPIVATGDAEHRTSVEVSYKPPISMGGG

SEQ ID NO: 8388 - protein, 373 aa, unknown
  TnpB Polypeptide
VIKRHLKFKQPSMRRSSRVYLNNLNVGKAQTLTEFLHLCHDVTQYFVDLFWQRQDFSSKLADLDTVHRGCERFSITTRLAQALAKQAKETVRSSHELDGGYPEGKKHFATLYSHFVNIEKFEGREFNYAVRLIGSGAPRMIIPCRSTSHLNSKLADGWQMSKTIRLGLNNERLFVDFILEKPRPVLKDEGKIIGMDNNYKHGLVFSDKQVIGESAYARIQEFSKRQKHTHAEVNSLVGKELKSIDFSDIKVLAIEDLKNVKSDTRGTFPRIFNRRLSHWAYALIRERLQQDCEEHGVRLVLKNPAYTSQTCAVCGWCERANRQGDKFKCKRCGHEDQADHNASMNLEHLAVAGVYGLRSLPNFTYVAKSNRRK

SEQ ID NO: 8389 - protein, 405 aa, unknown
  TnpB Polypeptide
MRVTRAWKYRLYPSKSQEKLLNHHFYECKTLWNSLLEYTKKYYEETKKFPTRKQLYLLAKDTELYSQVAQNVADRLVKSLWGLIARKRTGLKAGFPRFKSIERVKSLTYPQSGFKLTDRLELSRIGSLSIRKHREINGEVKTLTVKKSASGKWHAIFTTEYERTAFERNKMPKVGIDLGIETYAYLSDGSRIENPRNLRLAEERLKLVQRRMSNKKKSSSNRARNRKEVAIAYEKLTNKRRDFLHKASRALVENHSLIAMEALNNEGLARGFLAKEVLDCSWAEFANMISYKAEEAGCEVVLVDPAHTSQRCSNCGLIRKKTLAERWHDCPCGASMHRDLNAAINILRRAIANSRERVWQSESTSDSATGGTPGSKTCGEGTATNYKHNWQVSSMKQEAHAFKHG

SEQ ID NO: 8390 - protein, 417 aa, Natronomonas sp.
MEVRRTVPVSLDVDSDDAALLEDTVDTFLWSAQYVVDHAFEGEYVTTSKTTLDDETYDDVREKTDEFNGGLVQAARNKAAEACKSVVARWKNDKKASKPTFTSPHVVYDHRTATFHDDYVSLATTDGRIEADYVLPDEDSDTPHSEYLFSDEYETTGAELHSHDGDWVLHVHCKKEVESDTSEQPTTENGTVLGVDLGVNNLAVASTGTFWTGDEFDHWRREYEKRRGSLQQCGTRWAHENIQSVGRKEEGRFKQMLHRISNELVSEARENECSVIAFEDLTDIRERTGASWGHKWAFNRLYDYVEYKAEEYGISVEQVDPENTSRRCSHCGFTHPDNRDDEDFECLKCGYENHADYNAAKNIGLRYLRRNQTGGDGGAPLGVRLNSGTLNVNGGYSPAEESARTGVHAESHRFSGG

SEQ ID NO: 8391 - protein, 412 aa, Natronomonas sp.
MKHTLRFRAYLPDDVASEAWRHIDILRQIRNHAVRDYYNADYNDRPSDYDQHSKLKDWTDQWPTFADPSQHAAQQAISQIHSDIETLQERRNEGYDVGRLQWQGAGEFRSVSYNQASRFNVDYNTGDDRFVRLRLEKIGWFKIRADRDVPPEEDIDEVILKKETTGEWYVSLVTTVEDTPEKPPLSEIEAEDCVGVDLGITSYIHTSENLSVDTLDLSDEYDRYAREQRKLDRKEHGSANWEKQRQKVAQAKRKIKRKVRDYQHKLTTWLVTEHDVVAVEDLDVKPMLEASQNAKNKQDAAWSQFIELLEYKADLHGTHVETVKPGGTTKECAVCGVETAKPIWVREHSCPACGHTEARDLNAAKNILYRGLKQLGAGRSESTPVQTALPTLTPHREAVSAKRVVEAGSPGA

SEQ ID NO: 8392 - protein, 420 aa, Natronomonas sp.
VAVVRNLEIKLDVDEDAHSVLDETFEQFRQAAQHAADYGWSDDPTQIIDSKSKLHDATYSDVREKTDLTANHVQAARSLAANALENCKDRILEDGKKASKPEFRGTVVFYDGRTITYNDDHCTLSTTEDRVTAEYIVPEDTRGTPFEEYWENDEWERGESTLHKRDGTYYLHVSMKKEREEDEASTSEYGAVLGVDLNVDGYLAVTSTGAFLGNADYLNHKRAEYERRRGKLQQTGTRSAHLTLKSIGDRFSNWSEDYLHRVALAVVLEARRHDCDAIAFENLKHIRGRISNASKFQQWAFNKLQSLVEYKAEEYGILVDDVKPQYTSQRCSHSKCGFTHEDNRDGDEFECLKCGKELHADYNAARNVGWRLVQHWLKSGAGRADCQVALKSGMVNANGEFSPTTGSSGQSGSPLTSPPL

SEQ ID NO: 8393 - protein, 422 aa, Natronomonas sp.
MKYSPRYRLFPTEEQRQAMDWQRDTVRQLYNHALREFNKIPEDAGTLRQRVWMVRDSIPELKDWWPDLKQVYSTVLQKAVERIRDNINSLGELKEQGYDVGALNWKAPREFRSFTYRQSGFELNKKSGPDGHALLQLKKLKGESREIPVRLHRDLPDHNGIKEVALKKDATGEWYASFTIDTDTPEKPEPGNIDAEDTVGLDLGVCNFIHDSDGRCVDRLNLSGDRERLEREQRSLSRKQKGSNNWEKQRQRVAEVHARMSNKKQDFKHKLAHFYTTEYDAVFVEDLDVKRMLESQQNARNKAEVGWRDFLTILEHHGDKNGCHVVEVEARGTTKECAECGVETAKPLWVREHSCPSCGFELDRDWNAALNVQQRGWNRLGVVHSEATPAETATAVDTLAVSASRVVETGSPCLKEAAQAAE

SEQ ID NO: 8394 - protein, 456 aa, Natronomonas sp.
MVESNRTVVIPLWVPEESRSDFHQTILPYAYCQQEAVNHCWPDTPKQPDDLQTSKRDVEDALYDRLREDTNEQLHSNLVQKAIKDATSAISSCKTSWENGDRISKPDFYDRDRAGYTMTYDKRAATYGRYEATLSTLNGTVTCRYELPAELEGTPYGEYVLDKRWSFSTSKLVFDGDRFWLHAVMQRQFRDDPVYTPQTDESGSDTHEDTHRVLGVDLNVDGATAVTSTGQFYGNADALNAYRSEQEQLRGELQQTGTRSAHLRFQQRRGVEWRYYDQYAHHVANSIKQEALRVRATHVAFENLTRIRKRISNLPKFQQWLFKKVRKYTEYKLERSGVTVDTTKPAHTSQACSRTDCDCVDEDNRDGKHFECLECGYTVNSDYNAAKNIGFRYLCEELSSPASRTCSSGQATSQLALVSGTLSPTGDFAEHEWVSTDKPHPQQASESSDSERSRVG

SEQ ID NO: 8395 - protein, 414 aa, Natronomonas sp.
MEKRRTVPVKLDVDSHSAALLEDTVDEFLWAANYTTRHAFKGEYVTTSKTTLHDDTYEDVRDQTALHSNHVQAARNKAAEACKSVVARWKNGKKASMPHFTSPHLVYDHRTATFHDEYVSLATVDGRIETDYVLPDKTRDTPHTDYFFSDEYETAGAELHYTNGNWMLHIHCKTDVESNTPEQATPENGTVLGVDLGVNNLAVASTGTFWTGDEFDHWRREYEKRRGDLQECGTRWAHENMQAVGRKEEGRFKQTLHRISNELVAEAHKYECSVIAFEELTDIRERTGASWGHKWAFNRLYEYVEYKTKEYGITVAQVDPENTSRRCSTCGFTHPDNRESESFECLKCGYENHADYNAAKNIGLRYLRRNQTGGDEGAPVGVRLNSGMLNANGEYESPADDSARAGVHAESQRL

SEQ ID NO: 8396 - protein, 423 aa, Natronomonas sp.
MQKSLTKTLVFQLDPDESGQQLLDDAFLEARRVYNETIRRTKNGDDWDEIRQDLESDADLVNNTAQLVVQKSLEAMENYYEYDDYNQPSHTKDGAYPLRSNYEEGYNLFLEDDSIRYRISAKPYNPVKGTLQGSLDVLKQLRTAIESETWRVGTAEAMKRNGNYELHINITHTEAEVRDKQDSRTVVGVDINEDCVALASLHEDDIVNSVVIDYPEIKEERHRYFTMRKRMQNSGKSSFDRAFEQQEERFVHDQLHKVSRQVVEWVPRFENPVIVFEDLKEMRDSIDYGTRMNRRLHSLPFRKLREFITYKAAFQGIPSEEINPEYTSQACSLTECEHTTRANRNKKRFKCVECGRQDHADRNAAINIAKKGLEKLNRNVPALNSLPQVRKVRRQASGCVNQPTVTHDTATGHQADGVVGVSD

SEQ ID NO: 8397 - protein, 414 aa, Natronomonas sp.
MEVRRTLPVKLLVADSNRDALLETIDQYKDCANETSDHCWDENDYKKTAKYAVKDELYHDLKAEHDLTANLVQQAIFQAVEAVKAGVERLEKNEDTSQPEFTADTARYDKRAATFHDDHVSLSTVDGRIEADYVLPVDETNTPFEEYLNGDEWEFRTSTLHYKPFDDEFWLHIGFKRNKEATDSTQPDAAVPEHNTVLGIDLGVENLAVASTGTFWTGDELDHWHREFQQRRGNLQQVGSQEAHRTLQRVSKKETAYYKQYLHVVANEIVEEAVEHDCSVIAFEDLTDIRKRAQGATWHHRWRFNRLYEYVEYKAKAYGIDVEELERSPQAKTVPAYYTSQRCSSCGLTHEDNRPTQAHFECQKCGYENHADYNAAKNVAVRCCRRLLRRNQTGGDGGAPVDVALNGGTMTVNV

SEQ ID NO: 8398 - protein, 442 aa, Natronomonas sp.
MRPLTADDEQVLRDLLDASAALWNEINYQRLMRYNDKDGFEDEDVWDADTGALEGKYKAVLGASTAQTVRRANTEAWRSFFRLKKQFHDESNTSVTEHPEPPGFRGNKDDGRVLKGVVRKDAYSVEWGDRSRLEMVVGEQLRDRHNSPKSRLRLEIVGDPNWSDYEDQGRLELWYDETDCTFRASQPVTVSDDARATPLANEKAALDIGANNLVACTTTTGQQYLYEGRELFQRFRETTREIARLQSKLPEGRYSSKRIRRLYRKRTRRRDHAQETLCRDLLEQLYGEGVDTVYIGGLTDVLETHWSAETNAKTHNFWAFKQFTERLAWTADEYGISVEVRSEAWTSQECPQCGSTDRTTRQQDTLTCPCGFEGHADVTASETFLERHTEKAVRPMARPVRFEWDDHEWSESPRSPARESPKEQRTDPSTVPRDGNVVSGDS

SEQ ID NO: 8399 - protein, 259 aa, Thermoflavimicrobium sp.
MCKPNIKIKGNKIRLPKLGWVKFAKSREVEGKIVSATIRRNPTGKYFVSILCEMNYCPYKPVDKEKAIGVDLGLRDFAILSNSEKINAPKIFRKYEKELAKWQRKMSRRQKGGSNWNKARIKVARIHEKIVNARHDFLHKLSTRLIRENQTICLEDLQVKNMVKNHKLAKSITDASWSEFVAMLEYKAKWFGRTIVKVGKAFPSSQLCSKCGHRHKEVKNLNLREWTCPECQTHHDRDINASINILQEGMRLIADGLSV

SEQ ID NO: 8400 - protein, 395 aa, Methanoculleus sp.
MFISYKYRAYPDATVETRLNVALDTCRWLYNNLLEECTAARENGITPTMRETQARIVTLKDENPALKEVYSKVLQMVNATLWSNIAALSESKKKGRKIGKLRFKSASRYRTLNYNQSGFKIDREHSTITFSKIGTVPFTLHRPYAGMVKGVLITRSGERWYVIIQAEIEVSEPKREGRSVGIDVGLNSFAVDSDGMVIENPRFYEHSLAKIRKLQQSVTRKQRFSQNWKKAKRKLEKVYDHITNQKKDFLHKLSRHYVDTHATICVEDLDIRGLKEKGNFTGLHRSIHDASWGRFYSYLSYKAESAGTNLIKVDPRNTSQICSNCGSIVKKALSERVHNCPYCGFVADRDYNAAVNIHRTGMEQPFEPVESIPLHHVSVMQVLAMKQEATPFRPG

SEQ ID NO: 8401 - protein, 397 aa, Methanoculleus sp.
MQSVTKLRLYASPEDREKLFATMERYNAACTFVSPVAFSEKQFSNIGLQKQMYSTVRERFGLSAQMAQLAIRKVAGSYRSTREAIKAKNKILKALGEPLQVLSEISFREHGAVCYDARVLSLGKNRANIWTLDGRIKLRYSRPDYFPPVAAVKQTDLVYRDGAFWLYATVESPDSEIPEPAEYLGVDLGVVTIATTSDGIAYSGAATEKVRKRYGNLRAALQQKGTKDAKEKLRKISGRERRFKTDVNHVISKQIVRAAEGTKRGVALEDLTGILQRTTVTKQYRERHHKWAFHQLRTFIAYKARKAGVLVKVIDGAYTSQQCSVCGYTDSGNRPDQATFVCLQCRHAGNADLNAAKNIAARALVNEPIAVCSLPGERLNRKPVKSMKPIKAPCPRF

SEQ ID NO: 8402 - protein, 415 aa, unknown
  TnpB Polypeptide
MALAKKSIKQRFNPSARLLSLMEDFRQMTNDCIRIGMGFEKEHHRTPSRNRLSLLSYGELRRRHLGGYSGYLLCANTKAAGILSARRKSIMRGFPTRAPYLSRSVLVSCYGFKIEDGNLLIHLDANTLESIPLNTHTKTALSDPTMRVRSFTLTEESVSLCVSKDVKEIMDREVIGTIGVDRNLRNLTVGNAQMVKHYDMTKVVDVGANTRSIIRSFKRADVRIRKRISSKYGKRRSDRTKELLNLISKSVVREAKTNRQAIIFEEIANIRRLYRRGNGQGRSYRARMNSWPFYEIKRQIEYKAAWEGVPVVTLTKSETRGTTMDCPRCGERLQVPIRGDKEHFRQLWCEGCKGWRDRDLIAVLNISRRGWLRFDHSSKEGEATEAVKGNAEHEGEPLILRVDASKLRHATRQTQ

SEQ ID NO: 8403 - protein, 400 aa, unknown
  TnpB Polypeptide
MLQALEASRRLWNDALHQRKIRWEKERKSTSYNLQASVLTFERKQDASLSELYSQTGQDVLRRLDKAFKSFFANRSCHPKFKKFSQAGSFTYPQAYNGSVKLDALRKRLFLSKIGNVRVVLHRDLPKDARLKTCTLTREADGKWFASLVFEEVVPLQNLDIASMSGKTALGIDLGLLSSITTSDGENVEHPHFLRKAETRLKCLQQALSRKKQGSKNRFKARQRVASQHAKVKRQRLDFNQELSTRLVRQHNFIAFENLKVKNMVRNHRLAKSISDAGWGQLVTLTERKASGMGSRVVRAPAAYSTQECFRCGALNKVSLETREVVCLGCGHNFLRDPNAAKVVLKRGLAIAGLTIKVGQDMPELKPVETEPLLVQTTGWAKSVGESGTTCSPELEAHGL

SEQ ID NO: 8404 - protein, 375 aa, Meiothermus sp.
MSLLSVRCKLIPDASTADKLSRTVDQFANACNYALAVARRENAWNKFALQRLVYREIRERFGLSANLAVRAIARVGKRKGHKVGGFKATSVDYDQRILSLNIADEVVSLSTVEGRVKVPMRIAGYQRHLLRTAKSIQGGQLVRGRDSSWYIHLWCEYDDPPVLDPQGILGVDLGIVNIATDSDGETYSGSHLNSVRHRHRRLRKKLQKKGTKGAKRRLKKLSGKERRFANHTNHALSKRIVAKAQRTGRGIAIEALGGIRDRVRLRRPQRAALHSWAFFDLGQKLRYKAERAGVVLVQVDPRNTSRTCPACGHCEKLNRVSQAQFVCRSCGLVGHADHFAAVNIAVRGWAAVNQPYLGEAESAIRHNPVPGSPRL

SEQ ID NO: 8405 - protein, 307 aa, unknown
  TnpB Polypeptide
VIKKQAFKFLLEPNQSQLADFLLFAGSCRFVYNKGLALLNENYNLGKKFMGYNQLASELVGWKSEGSLSWLKLAPSQCLQQSLKDLDRAFRNFFVGKSKYPKFKKKGRHDSFRIPCQRVRVDQEKKMVSLPKVGWVKYRKSREIIGDLKNVTISMKQGKWYVSFSTEQSVPDPIHPSDIKTTIVLNDECKFTVQSGSRIESTHRLDEAKKLILLNRILKRKIKHSNNWLKTKGKIDRIKAKSARCRLDNIHKLTTAICKNHAVVEVLSLMDSVSDKNDISMNMRYEFVRQLNYKQEWLGGKVILRDS

SEQ ID NO: 8406 - protein, 229 aa, unknown
  TnpB Polypeptide
MMQASLLLNIIGYLLYCTQFLKASKRFTAGMANIKTMLTTFLVGNDGTAIQSPQPLLMVLKTLRKASRRLSRKKKGSNGRKKARLALARLHRRVANIRRDWQFKIALELARTLDVTCIEDLSLAGMKALWGRKVSDLAWSNFVKILAWQCKKHGSTLVKVDRFFPSYKLCSQCGHVNEQLELKDRQWVCLSCGARHDRDKTAAVNIKREGLRLLALEHEAGCRLMEKAA

SEQ ID NO: 8407 - protein, 229 aa, unknown; identical to SEQ ID NO: 8406
  TnpB Polypeptide

SEQ ID NO: 8408 - protein, 218 aa, unknown
  TnpB Polypeptide
MDDPVPVEIKTKTGIDVGLSSLITMSNGEQIKPPEFLRASEKKLTREQIRLSRKKKLSNNRIRQKTIVARTHRTIRNQRKDFAHKISRMLADTYNHIVFEGLQIKNMTQNHHLAKSISDAGWYQLIQFTNYKAAYAGNVVELVNPRNTSQNCSGCHSPVPKDLKVRIHSCPFCGLILDRDHNAAINILKRSSTAGTAGINACLSGLNRAMMTQDAPCL

SEQ ID NO: 8409 - protein, 383 aa, Clostridioides sp.
MSSRVYSKGGEFMSNRIKNIHYGTQRQQLKNLTKKEYQALREMCFLAKNLYNVGTYNVRQHYFNQGEHLNYEANYHVCKENENYKLLNSNIAQQILKEVDSSFRSFFGLIKLAKEGKYDFRGIKSPKYLDKEGFFSIIIGQIRIKEDGILNVPMSPAFKKLYGKVSIKVPQNILEKKIKEIRIIPKHKARFFEIQYCYEIPKSEEVSNQKNALAIDLGLENLCTCVTNLGDSFIIDGKRLKSVNQWANKQNDKIEALKLKKNITAITRKQFKVWNKRNNQVKDYVNKTCFYIIDYCVKNNIGNLIVGYNAKLEKSDNMERKIYRNFIRIPFGEIKGKLEYLCKIKNINFIRQEESYTSKSDFFADDFLPDINVDNVKKYDFKG

SEQ ID NO: 8410 - protein, 337 aa, unknown
  TnpB Polypeptide
MRGQFLQWGSPSTLTIVYKPSKNQWFASITVDVITVETKFGSGSNNSYESIVAFDLGTETALTLYDGENFTELENPRFTKKSEVKIKHKSKALRRKRAPNRKKKIKASRRWKKAKKLISNLQGKVADQRKDWQHKVTSDIASRHDIGVTEQLSTKNMVRKARAGSKRKKQKAGLNKSILSVGFGSLNKMITYKIEQKGGLMLMLPTKQIKPSQRCPQCGKVHKYWAELSNRYHVCDGCGFETPRDRGSVMVMYNVATNQQPGLGMSLVDCGCSSSTNSTKKRKHTGSMKQLGQMKRQKPKPKARGFGNPPLAQQGRVVHLVSTLRSEDRGFDSRRSD

SEQ ID NO: 8411 - protein, 413 aa, Thermococcus sp.
MKRVNKFRLRPTKEQEKVLFSLCEMSAVLWNKLNYVRRQALFKGRFDWKEGIDELYNEFKKIIGSATAQQIIRKNNEAWRSFFALLKLQKQGKLTPHIRKVSPPHYWKDRLLNKRRFMTVIRNDCYRIEEVREKKWLVLPKGLKIRITGEIRWKGKQGRLEIFYDDLTGRWYAYQSVEVDQSRRTISPEKRAFVDLGVVNIITAWIEGEKQPIAFSGKSLLADWWYWTKKIAYHQSIAMKANKHHTTKRIRKYYRKRQLRLRHAVNTIVFRFVKLCYEKGVTEIIVGDIKGIRQNNDKNAKVNAMIHNFWSFRYIINRLITTAENFGIKVKLVKEEYTSSVCPRCGSTNTYKHKRLFKCLNCELEAHRDVVGVLNIARLSIRTGGFNGGLTLPELPRVHPLVAQTSPSGILAL

SEQ ID NO: 8412 - protein, 416 aa, unknown
  TnpB Polypeptide
MGGIMKKDKPNNNLNKDLPIPSYHAMIDHDSKEEFGLKIGIIDADLLSNNSHRFPNLALMKISAYHKYRRSDKVTLLMNYNDIEKYDMVYLSKVFDYTEIPIDIMKYDNLYYGGTGFHYDLMPDLPDFMEHMKPDYILYHSWIGDMMREGAKRKEFEYYLDYSIGFMTRGCFRKCEFCVNKKYDKVQLHSPVKEFLDEDKPYICLLDDNLFGYPKWKDIIEELVTTKKIQSELQLRHKQHWSNKLNTITLKRGNKIKNIIHHTSHYIIDYCNKNKINTLVVGLNKTWKQNCKLNGSATQNFVFIPYDMLIKQLEYKCQDVGVRLIMTEESYTSGTSFLDNETPKKQNYNKSRRVHRGLFKSNNGQLINSDVNGAYQIMKKVFPNAYADGIKGCLTPVIINVVKTTRDIKNGKENFR

SEQ ID NO: 8413 - protein, 421 aa, unknown
  TnpB Polypeptide
MKLNRAIKVRLYPNQEQKEMLNKTFGCCRFIYNKMLEERIKVYEELKDDKQALYDHRYKTEKEYKEEFEFLKEVDAKALQSEWSNLKSAYTNFFNRLKKRRRAGFPRFKSKKSRQSYTTYNINNNCKVDFSTSKLKLPKIRKWIDYRDDRTFNEKIRHITVSKTRSGKYYASILVEFESDIQPKREIQESKIVAFDMSAHDFLVTKRFRLTNPRFYRTEHLKLRKFHKEVSRRKKGSNNRNRSKIQLSRCYDKINNRKNDWVHKVTHLLSEHFDCVILEDLNIRGMQKFNSGVSKSVSLDFSWNQFFTILKYKMEQKGKHLVLVDRFFPSSKLCSNCGYKKEDLKLNDREWTCPQCHTHHDRDINASINIEREGKRILRENDITIISNNDTAVGTTVDAFGEDVRLSFGEQFSMNYEIIAH

SEQ ID NO: 8414 - protein, 326 aa, Chloroflexi sp.
MQLTEQHVIDRNDQRYAVIDAAAFKSKNLYNAALYLIRQAYIFEGRYIGSYEKAISKKGLKQGVIQPSMLPISIKTQHKHIDQVRIVPRNGYYVVEVIYTKEPIQANVDSSFCVGIDLGVTNLAAIASNREGFVPRLVNGRPVKAWNQWYNKRMKELKKKLPKEDRERVTKQMERITNTRNRRIDHYLHTASKRIVDFLVENGIGTVLIGKNPLWKQESGMSRQNNQNFVSIPHARFIDMLTYKAALVGIQVEIREESYTSKASFLDLDPIPTYTPHDEEEHIFSGKRIGRRNRLYRTKDGRKICADINGNRKISEKLRLTQKRLA

SEQ ID NO: 8415 - protein, 235 aa, unknown
  TnpB Polypeptide
MAQSVLKTVIARYRTILENQNEWIQPTFKKPQYDLVWNRDYSLTQNCFSVNTLNGRVKLPYFAEGMSKYFDHTIYKFGTAKLTNKHGKYYLHIPATYDVEESNISDICNVVGIDRGINFVVATYDSKHKSGFVSGKTIKQKRANYSKLRKKLQMRQTPSSRRRLKAIGQRENRWMQDVNYCVSKALVENNPKHTLFVLEDLSGIRNVIERVRIKDRYVSVSWSFYDLEQKHNLQG

SEQ ID NO: 8416 - protein, 619 aa, unknown
  TnpB Polypeptide
MVFISRSLRPANIHGMFGPEIIVKTYRMPIAATPAQISAFCQISGCCRLVYNWALDWRKAHIATSPRDENGKISPLSKNDQLNGLPALRKIRTFLKDCPSQALQAAIGDLHEGVSRYLSGQNEAPTWRRKSDPESFRFPQGDQFSIRKIPREVIAAGGIISRGGARFRARYLHAPKFGMTRSDNGPIEIVVHQPIKGKMKTCTIKRSGDRFYACITTEIRRKDIGSSADRLTGVERMIETDPTLGAQTRKPPPKKKSDAQRAKWLADRNERKAKSKRSRAAQSKVVAERAKSLGRIDARALADLRVMSIDRNVTYPFVTSDGDIFGEIALTPQMKRRMAKLQRAIARKEEAMRKANGRAPGASLRGLATSVALKRARRKLAELHAHIARKRKDAIHKITSWMVERADIFAIEDLEIASMTASARGTTEEPGKNVSQKSGLNTAILDRGWGEFVRQLEYKCRWASRRHGAKKILLRVRPAYTSQRCFACKSVDGESRSGGIYHCTTCGHTDHADINAARNIRELGLEDLARACDLDLEDLPADLLGRDPVEQDEVPADGRCKLLEGEAVRLPLSTDLVAKEERYPSRSSPAVQQRPPLEPPGFSPRRKAARFFPVLVCRK

SEQ ID NO: 8417 - protein, 353 aa, Alcanivorax sp.
MIQTKTLKVRVKDKHAAELNRMAHSVNFAWNYVNELSSRSIHERGVFLSAYDIQKYTNGAAKELGLHSHTVQEVGREYTIRRQQFRKTRLAWRKSRGVRRSLGWVPFKSGAAKWKNGQVTFNGQHFKVWDSFGLSQYTFRAGNFNEDARGRWYFNVVVEVEVQPSSGQGAVGIDLGLKDVAICSNGEKLENGRFYRSLENKLAAAQRARNKRRVKAIHAKIKNRRKDALHKFSRRLVNQHGGIYVGDVSSTKLAKTRMAKSVYDAGWSQLKTMLEYKCDHAGIVFREVRESNTSRTCSSCGSLSGPQGVNGLRVRDWECVECGVLHDRDVNAARNILSLGAGRCPPGVGISVL

SEQ ID NO: 8418 - protein, 247 aa, unknown
  TnpB Polypeptide
MQFAKGEADLVFIRGKFYIYQTIEIPDERENDVDDFIGVDMGITDIVSISDGTNISSNEVKNIRDKYNKVRASIQSKGTRNCHKLLKRLRGREGGFATIVNHSISKWLVAKAKKENKGIAIEDLKNIRFGMNSKKRNKTFRRRSNSWSFYQLRSFLEYKCKMNGVKIIAVPPAYTSQTCHECKHIGIRNGKRFHCKYCGNIADADINAAMNIATWGYVNTHERWELLSCSIHDDVSTSKTHKSLVYG

SEQ ID NO: 8419 - protein, 455 aa, unknown
  TnpB Polypeptide
VEQAISKAKKVISKTKNKSKLHQRLANLETRLSALIAQKESEDPRICFGSRKLFRKQFNLEINGYRNHDEWLADWRAKRDSQFYVLGSKDETAGCQGCIATENPDGTFDLRLRLTGSLSEYGKYLHLRGIRFGYGADELSQALKSEQALSYRFIRDEKGWRVMVTTDLPEIKTVSIRQAGAVGVDINENCLAVTEIDRFGNMVATRVIPLVTYGKSSDQAKAIIGDAVKDLVTQAVEARKPIIIEKLDFRKKKAQLEGEHPGRSRMLSSLGYNKIMQCIHSAGYRSGIEVIEVNPAYTSTIGAVNFSKINGISIHQGAALAIARRGAGFRERPTTEEACLPTPRGDHVTFPLPVRNRGEHVCSFWSGVKNIQKAVLAAHLRPPQGEPLRPERPLKSRVVKPALSKVPRFTVRPRDASRRQNCSANAMDDIPWCGNICLYFRNGMAATNMVNVRMV

SEQ ID NO: 8420 - protein, 367 aa, unknown
  TnpB Polypeptide
MKLTLQLQLMPTPDQKANLLATMERFNEAAAFAAKVGFEAGVCGQVMIHKLAYHQIRERFGLSAQLAVRAIAKAVECFQRDKTKCPVFKPRSAICYDQRVLSFKGLTTVSIWSLSGRLLIPLVCGAYQKDRRGRIKGQADLVYRQGKFYLLCTIDMPENAPVEPTDVLGVDLGIVNLATDSSGEEFIGEKVDKVRQRYSKRRAGLNKCGTKSARRRLSKIRKREANFRRNENHRISKQVVAKAKATGCAIALEDLKGIRDRVSVKKPQRNRHAGWSFNQLRSFLEYKAQLVGVPIVLVDPRNTSRTCPECGHCEKTNRKSQAEFECRHCGYSANADFVGARNIRARGCVKALKVGVVEAKTGLRDCG

SEQ ID NO: 8421 - protein, 451 aa, unknown
  TnpB Polypeptide
VTKRFNLGFKYRIYPTKGQIELLNHQIFVYNQAYNICLNLWQKEQEKNRNLPKEQRKYRKTQSYDAVVKRALKFRKIPFKTVVTQQARINFLKAVNRFFSKDVVAQRLKAIEKTQTAKEKVKALKLGMPKFKSSKDVEQSFNWNNQGYSIIDIDNKRFKILRVMKQNFKIRWHRDLPNKAKIKSITFSKDVIGYYVSFNIEFEKEIDLEVSIDTFDISKSIGIDLNGYNIAISQPINNTHLIDNGANNRKVIQNSRIIKIPQRKQSRRVRKGKIGKNFKKTQKKLNKRYKKISNQKIDTYHKISKTLTDKFELIAVEDLKIKNMSKSAKGNEINHGKNVKAKAGLNKTILNASFYQFQSMLEYKSKLNGKLFVKVDPKYTSLECSMCGNRDKANRPRQDYFKCTKCGYETNPDIQASKTILKRALESFGIGTILMDLKQKAFRSVSLEIVS

SEQ ID NO: 8422 - protein, 328 aa, unknown
  TnpB Polypeptide
MEQITITAKVQIVATDTDKVLLNKTMSVYCDACNYVSDYVFRTHDLKQFSLNKILYSTLREKFSLKSQMAQSVFKTVIARYKTILENQNEWIKPSFKKPQYDLVWNRDYSLTQNCFSVNTLNGRVKLPYFAEGMSKYFNHSIYKFGTAKLVNKHGKYYLHIPVTYEVEESNISDICNVVGIDRGINFVVATYDSKHKSGFVSGKAIKQKRANYSRLRKELQMRHTPSSRRRLKAIGQRENRWMQDINHQVSKALATGNPKHTLFVLEDLTGIRNVTERVKTKNRYVSVSWSFYDLEQKLILQSEAESIFCNKGGSSLYQSMLSCLWTY

SEQ ID NO: 8423 - protein, 363 aa, unknown
  TnpB Polypeptide
VILTYKYRIKDRSAKKRLREHAYAVNQVWNYAVAQQRDTEGRYRAGAKPRRWASHFDLQRLCKGVGKELGLHQQSVGGVCKTFSQARDKLKHAPRFRASFGTKKAVGWIPFESQSRQIDGNSVVYLGKRYRWFGNKRRPLPETAKGGAFIEDALGRWWVCFHVEVPDNVLIGNSEIGIDLGLKTLAALSDGLKIENLRHRATWAQKLARAQRARNKRRTAAIHARIANARKDHLHKTTTELARSNALIAVGNVNSKRLARTRMAKSVLDAGWSTFRSFLRYKSPGYVEVDERFTTQMCSCCGSIPGSSPKGMGALGMREWVCSECGERHDRDVNSARNILKLGRSAAPRVDESRSNTMGCANV

SEQ ID NO: 8424 - protein, 390 aa, unknown
  TnpB Polypeptide
MQSYKFKLLPNKEQQKKLNAMFGCSRFVWNYFLDLNNKIYLEAKEKDLKKKHLTYYDCANKLTGLKKENEWLKEANSQALQQTLKDLDTAYNRFFQKKSGFPKFKSKKNKQSFRIPQFFELKSNHSCFPKFKKGIRTVVHRQMEGNIKYATIIKTKTGKYFVSITTDFEVKKKRISDNQIGIDLGIKDFAVLSNGKKHSLKIKETNIRFLHKRVSKKMKGSNNRNKERLKLARQYEKIDNQKQDFQHKLSDKICKENKLIAIEDLNIKGMVKNHCLAKSISNQSWYSFITKLEYKAKRYGGEVVKTKRFYPSSKTCSCCGFVNQDLTFADRYWQCPRCKRKLDRDINASQNILAQVLRELNTGGGRNYRLKPVELSSLDEAMKQEAFLGL

SEQ ID NO: 8425 - protein, 449 aa, unknown
  TnpB Polypeptide
MEQHCGRRIELKLTKKQERLCRQSCAVARHAYNWQLAIQNTRYDEAKRNVPDGQKVKCKLGSPIDWHKEWCVYKKQPGNEWITKLSKCCGQEALRDLGVAWQKFFKGLGKHPRFHKYGINDSFRMGGSVFIGYDFVQLPILGKVKLKEKEYIKIPKGTIKVPIAMATVSREADRWFVSFAYVTDVDPVNADTEVVTDDEYDIVGVDLGVKDLAITSCGEVIANPAAYRKQMQRLRRYQRSVSRKKKGSKNRKKAVAKLAKLHRRIANIRKNSAHQCTTLLTRKLAPKVLVIETLKPKNMARNRKLACSIMDANFGRIREQLEYKCRWHNIHLVKAPQFYPSSQICSNCGCYQKKDLKLTDREWTCPHCGCHHDRDVNAAKNLRFYGLWLYGIVLPTPTARYADNACLDGIRRREGNGSEPCPRDLRLQFFETQEQCKSLKQELNSMLLS

SEQ ID NO: 8426 - protein, 354 aa, unknown
  TnpB Polypeptide
MIKTYTYKLKPNKSIERKFNEWCGITRFVYNCAKDLSEQSYKKGVSLSGFEICNQLVPAKKEILWLNKVHSQTLQAVIERYCTSLKKFFKGSGYPKWATKRKWKSIPFKSIKTTHNAFKLPMFGVVKVFNFKVPNGILKTATIIREADGLYLKIVVKKEDIAEVENQNICGIDMGIKYFLTTSDGVFVENPKHLFKKISQLRIENRHLSRMKKGGKNFYKQVNQLQRLYQKVSRTRKDFLHKESRKLANEYGTVIRENLNIKGMSKNSKLSKHILDCGWGGFFEMLEYKTKVIKVDAKYTSQQCNKCQHTCKENRKTQSLFECVKCGHIDNADLNATFNILQRGQSLIEANLSH

SEQ ID NO: 8427 - protein, 381 aa, unknown
  TnpB Polypeptide
MMELIRTYKYRLYPNKSQSESLDEMLAQHRYAYNRALGLRIMAYKEFGVSLSAYDQCKLLKGMRRKKLSRIPAHSFQNTLKRLDKSYKSFFRRVKSGQEKAGFPRFKSYHRFKSFVFVYDIGATVVNTGVKHKLRIQNIGLVNTKWHRELPEGAEPKCLIVKRSSSGKWYVCVQFKYEKHIPKRETKTVGIDVGLSHLVATSDGEFFDSPKYYRTSQKKLRVIQRRVSKRKKGSIRRRKAVKLLAIQHEYIANQRLDFIHKVSRQLVNNYSHIALEKLPLRFMTKNKHLAKTTHDVAIGKFRELLCYKAEEAGGMVVFVNPKDTSQMCSNCGCIVKKGLSIRTHNCPHCGFVEDRDVNAAINIKVRSDRAFRHQRKSLDYA

SEQ ID NO: 8428 - protein, 374 aa, unknown
  TnpB Polypeptide
MNKAYRYRLYPSAEQAILINKTFGCVRFIYNQMLANRKTIYEQYKDDQEVLKQQRYSLPADYKKDFEWLKEVDSLALANAQLNLNTAYKNFFRDKSVGFPNFKRKHRDRKSYTTNNQKGSIRLIDSKTIRLPKLKDVRIKLHRQLPPNSIIKSATLSQTPTGKYYIAILVEFEAKIESITPTVETTLGLDYSSKSLVVDSEARSADYPRFYRKVEAKLQKAQRKLSKRLKGGKNRNKQRQKVAKLHEKVANQRKDFLHKVSRQITNAYTAVAIEDLNMRTIAQCLKLAKSTNDNGFGMLKTFLAYKLAEQGKQLVTIDKWYPSSKLCRYCKNINMELTLADRTWSCKHCGSKIDRDINAAINIRNEGCRILGIA

SEQ ID NO: 8429 - protein, 229 aa, unknown
  TnpB Polypeptide
MEQPLTGGEPVGIDLGITTFAALSTGALVAAPDYSGLERRIAKAQRVLARRQKGSKRRARAKCRVAVLHAKIGDTRHDFLHKLSTSLVREHSMIALEDLNVSGMVKNHHLARAISRQGWRALRTMLEDKAARHGRDLRVVDRWEPTSQVCSECGHRWGKLGLEVRTIRCERCGVVHDRDVNAARNIVAAGLAETQNGRGERVRRAVPSGTGATLGEASTTGAVPGISVL

SEQ ID NO: 8430 - protein, 410 aa, Streptomyces sp.
VIVMQLRYSFRLYPDTGQQTALAKAFGCARVVFNDVVRAREDARRAGQPFPTAGHLSRKLITEAKRTAGRSWLGEVSAVVLQQSLRDAETAYRNFFASLRGTRKGPKLAAPRFKSRKDKRQSIRFTANARWNITGSGRLSLPKIGAVKVKWSRPLPAAPTSVTVVMDAAGRFFASFVIDTDPAADQARMPETDGTIGIDLGLTHFAVLSDGTKIVSPRFLRRAEKKLKKTQRELSRKQQGSKNRTKARLKVARAHAQVADARREFLHQLSTKLISENQGIAVEDLSVAGLARTRLAKSVYDAGWSAFISMLEYKAERYGRTLVKIGRFTPTSQICSTCGVKDGPKPLSVREWTCSACGTVQDRDHNAAINVKTAAGLAVSACGAPVGPGAIPAQREETGSHGFPAGNRAA

SEQ ID NO: 8431 - protein, 380 aa, Paraburkholderia sp.
MLAKRAYKFRYYPTPAQEQALAQHFGCVRFVYNYVLARRQQRHQDGQRSSYGDDAAALTLLKRAPGYEWLRDVSIVALQASLQHLDTAYRNFFAKRTKFPRFKRKHAAQSYSLMRNGFTLREGQLTLAKMKEPLDLRWSRALPGVPSSVTVSRDPAGRYFVSLLFEEDVAAHRLTDKVAAGDLGLSTFLTFADQRPSIEPPRFLAEMLHRVRRLSQALSRKAKGSKNRDKARRRLVRLHARVADARKDFLHKLSTQLIRENQAVFMEDLCIKGLMRTNLARSIGDAAWGGTAAAARLQGEMVRADILAGQPVLRVEQDLSRMRVQAQGIAAQRTRVDVSGVRRNPRQRQKRREEHPRGRTDCDSYRGTRGKLSLWSEQKT

SEQ ID NO: 8432 - protein, 242 aa, Paraburkholderia sp.
MKEPLDLRWSRALPGVPSSVTVSRDPAGRYFVSLLCEEDVAAHRLTDKVAAGDLGLSTFLTFADQRPSIEPPKFLAEMLHRVRRVSQALSRKAKGSKNQDKAGRRLARLHARVADARKDFLHKLSTQLIRENQAVFMEDLCIKGLMRTNLARSIGDAAWGELLRQLACKAKWYGRTYWQADRYFASSRTCHACGFKLRALPLSVRGWTCPECGEIHDRDKNAAKNILAAGLIATATAGRAVS

SEQ ID NO: 8433 - protein, 391 aa, unknown
  TnpB Polypeptide
MERGFKYRIYPNASQRDQIARTLGCCRFVYNRALDVKKSAYAKTGKTVSWAELSRMLPAWKRDSETSWLAQADSMALQQSVRDLDRAYKNFFRRVREGGKPGFPKFKSRRHARQSYRTNGGKVLDHNHIALPKLGTVRAKVSRPLQGRFMSVTVSLDAAGRYFATFLCTNVPSKDTTATDREVGIDLGVETLATLSDGTKIENPRHLKKYERKLAREQRRLSRRKGARRGEKPSGRYMKQRKRVSRIHAKIADARTDALHKVTTMLADENQVLCMEDLNAKGMMKNHHLAKAVTDASFGEFAQLLEYKCAERGRSLVKIGRFYPSSKTCSACGHRLDALPLSVRSWDCPACGAHHDRDVNAARNILTEGKRILSNTEGTAGHAGTVAATTA

SEQ ID NO: 8434 - protein, 555 aa, unknown
  TnpB Polypeptide
MKVKSQSSISFFSDGLNQEKYDALLVKANLIRDFKNQISLKISANYSDYISMSKFDFMKQENTHIEGLTGQEIQLALVDVYTMYQNKFDKINNLIKFRIVDKVEETYYKINTKTKKKGDLKETKVKYKSTPLCSVLGYIAKTKFTEKEEVITYIQMRIEKVKQEEETKKTKNTLGLYAEIIKELTGDRADKVMRVSVKKRNLVFKRNQEPIEFKSLTYRSLNRLSKQIIDKCMNKSSVKEIWISLGGFNGRKSMDIPVTYSKKYHGKLSDYWIEKDGQKQISYLVSFVNDRVRIILTKEVEREYCLYELDDSKILGVDVNIKHNVFACSDETEIDLDRDKLGGFARLLKRYDSKRKQCNTQEEKDEVIETFSQRMDKWLLRYKGELQELGNKLVTHAISINCNHIVMEDLEQMGRMFSKEEDTGIKYSRLARIIHLNTLNDIVGSICSKKGLQFSLVQASYTSQECICGFVDKGNRTSQEDFTCLECGHTENADTKSAKIIKRRVVSDVHRNKLLKTNSNGWFIPRLGSYKQIKSWLLDLFEMNSVVTKPTLVVG

SEQ ID NO: 8435 - protein, 714 aa, unknown
  TnpB Polypeptide
MKDGVVRFRLMKKRTRRHPRVGKTTSSNQETMDGNYYSVSSTHLVQKFSLNSINRQVARKGLGRKPDPSFKRRSGRVTKQLVTRLSGKKCSEIDLQTLGQHFGKYIEAVNLVLNRVYSLKQRAESMGMKLEDSKGQGYVVLREEPFLEWKRTNEFGQLVFERMYRNVLETSARIIHSDYTRRKLVNALLEILSNDLKQLRRLVSLKRIPADLVRSVRKSGGKKKGSYYHYALAACRQVCRALDIQLLKDTDSSSSVRSIQRRRVRDLIKSGAGTAAIVSMASRVNDWMSNGYPFIQPVFRQTTMEFAASTENTTGQGYWFKEDPEREDEIIVYIKTPPGITGHERTPDSPYRSQTLRFRFLDWLPRRAARARNKASEAKKKGNEWKSTELEYRAERFEDMSLQLRNTIRLQQVTRKLTSLRSRKDPDSEKILKLKEEMEGLKKSRRCAPPVLKVRGHRVTLLIPFKSPDDKMLRRVLPKTLRTRRAGVDRGLRHPVVLSVRNGGNSYDETKIGRDRLYKKREVLRQRTRVLMSELGLKRNNWEKKRAMVPPPNFILKKERELGAVWAKVRRIDREISHQLAAETVWFCEHRGVKTIYFEDLRFFQPSGGFRTHSWNLSTNLWGRIIEGVRYRRQALGHKYGGVWTVNPAMTSQNCSACGERGLRVKEHDSREEERGGEFFYCSSCESRLHADVNAARNILKIQKKPTAVGGRTA

SEQ ID NO: 8436 - protein, 435 aa, unknown
  TnpB Polypeptide
VVLEAVRVALDPSPAQERLLLSHAGGARFAFNAGLAHVKEALDAGDKPEWSLYSLRKWWNSNKDTLAVDADGTPWWAENSKEAYSSGLEALAKGLLNWSKSRKGVRKGRRMGFPRFKAKDRATPRFAYTTGRFGLIEGDTKALKLPKVGRVHCLENVAERVDGARVLRMTVSRRAGRWYAALTVEREEPAAAKETPRGGAVGIDLGIKTLATLSDGTVIKNPRYLRKAERKLKRAQKVLSRKTTESKRRAKARAKVARLHARVANQRGDAIHKATTWLTQTYSEICIEDLNAAGMVKNHHLAKAIVDASFGEFRRQLDYKTARTGARLHVVDRWFASSKTCSKCGRVKAKLSLSERVFHCDGCGLVIDRDLNAAINIKVAGSAPETLNAHGETGRRNDLSGRATLDPVKCEPSRGDNRVRLGADSRKAILQTAAR

SEQ ID NO: 8437 - protein, 450 aa, unknown
  TnpB Polypeptide
VYYRSVTHREKGKEGRVALEAVKVALDPSPTQERLLLSHAGASRFAFNAGLAHVKEALEAGEKPEWSFYSLRKWWNANKDTLAVGDDGAIWWAENSKEAYSSGLEALAKGLSNWAKSRRGERRGRRVGFPKFKSKDKAVPKFTYRTGSFGLVQGDPKALKLPRIGRVHCMEDVAERVGGARVLRMTVSQRAGRWYAALTVERDTPTAKRAPKGGAVGIDLGIKTLATLSDGTVIPNPRALNARLKALRKAQQALSRKTKGSARRRKAQERVARLHARVADVRADAINKATTMIARTYSTVCIEDLHVAGMVKNHRLARSVSDASLGEFRRQLEYKTARTGAALRVIDRWYPSSKTCSTCGAVKAKLSLSERVYRCDGCGLSIDRDLNAAVNILVAGSAPETVNAHRETVKRGDLSDRATLDSVKCEPSVRPSAVRLGAGARKDTPQATVM

SEQ ID NO: 8438 - protein, 361 aa, unknown
  TnpB Polypeptide
MQLPNSGISATMNGIIIKSWDWKNILTGIIRKKHIKENCGINSFRHRQGNIPVTYMQMGIRHEKGSDQLRLSLPKDLKSYMEETYGIHDKFLYLENKIFRNMDHIKQLRIYPPENGKCDLIVIYEMEEPEQLSQNGHYLSIDPGLHNLMTCYDSGNGRAFILGRKYLSLERYFHKEIARVQSVWYAQQSERGIKYPKTSEHIQRLYRKKQNAVKDYLHKVTRWIAEYCRKEDIRCVVVGDIRNIRKEKDMGHKTNQKLHSLPYNRLYIMLEYKLKRYGIQLIKQEESYTSQCSPLSPEVSKRYAEASNRKARGMYMTDGERYNADAVGAFNILRKYLSVSGKHKKLSVAGLKNPEIVKVAA

SEQ ID NO: 8439 - protein, 393 aa, unknown
  TnpB Polypeptide
MKAYKTEIDPTKFQIELIHKTFGCTRYIYNQFVFENLENLRLGNKFISAFDYSKRTNNDPETPRWLKEVPSKAIKQSLIYADRAFRDYFSKRKGKPKFKKKGSNESFYLIGTIKVERHRIFVPVLKWIKLKEFGYIPKNISSVTISMKNGRYYISCLCKDEIDERIPLSNYIMGIDFGLKDQFITEDRIIPSINRTPHIKKLEQLLRREQRKLSRKYEANMFGKVYYKTGTKKGQLKSYKQLKPLSDCKNIQKQKLKVARIYERLTRIRTEYNRKALHSLVLERKPSSIVIEDLAVRNLMKNRHLSKAISKAQWYQSRLYLENLCKRLGIELRVVDRFYPSSKLCSDCGFKYKDLKLSERFWTCSNCGSEHDRDVNAAINLGQCKQYTVLTTV

SEQ ID NO: 8440 - protein, 385 aa, unknown
  TnpB Polypeptide
VCVYEYKIVGSQQQYAAIEEAIRIVQFIRNKCLRKWMDEKGVDKNDLQCYCAVLAQEYSFVYLLNSQARQASADRAWFAISRFYKNCRNHKSGKKGYPQFQHDNRSVEYKTSGWKLDPDGKHITFTDGCNIGRVRLIGSRDLATRPIPDIKRVRIIRRADGYYCQFVITAERHVQHQPTGKHIGVDVGLKAYYTDSDGKTIENPRYLRKAEKRLKRLHREFSRKQKKSNNRKKAQKRLAKVHLKVQRQREDFARKQANALVISSDMVAYEDLKIANMVRNRHLSKSISDASWGMFLQWVEYYGGIHDIPVIGITPSYTTQDCSVCGTRVKKSLSVRTHICPNCGVVLDRDQNAAINIREAGLIVWRKSQSKHRTVGHTETGSQTV

SEQ ID NO: 8441 - protein, 485 aa, Moorea sp.
MPKKVGVTKKISTQIVPVVGMAESVRTELLSTMKKLGIVRAESYNKLGSINYWGIDWKKAYPEVRSFRTPESLGLPSKLMEWTVSDVAKAITASQAACTEAIVKRIYKKFSGKKNQDKRKKFCKQLKTLAFLDNPLLHRLVRKEFQRGHSWVKNQIIYQQAGYKCKRLSRNTYQLELAGVKSRKRNKILVRSNRKIKGQIRLIYNQLLPRFEIHFFVDHGVVEVPSERRSIGVDKGYTEAFYDSDGKAHGKGLGRAATKKSDRICAKNRNRGKLWALHRRLEKLDPAKSARILKNNLTRKTENRRYRRNQAELTSIIGAASKSLFNGESLKVFSEDLTQPIGGKRQSKAMSRKLNSWLKGVMRDSLQKWANWTGSVVTEVQPSYTSQVDSVTGTLLGERNGDSFTRFNGVVLQADHNAAKNILARGTDEEITRYMSRAEVQAVLLRRTARWLQGWGLDLVDAVELEWLDSKHTKNQAFNQLLNGI

SEQ ID NO: 8442 - protein, 370 aa, unknown
  TnpB Polypeptide
MQQNPQSYNPAMKVHRTVRYRLHPGSSHKHQQLHGTAGACRFVWNHMVGKLKDEYEFGIKPDFRHYSLCHVFTVMRRDDGTTKWLQDYPSKVVRISLKPIETAYKEFFKDRKAGGKLNRQLPRFHGRHAIEPSFPIDYQSAKVAGDSLYVQKIGWMKMNGNNPYPDGEFKSGRVRYECGHWYAYLSYEVQAEASLPHSIREVGIDRNVSDGNWAVLSDGTRHGGPDLEKKVARRKRYQRKLARQVKGSNRRKVMKLRLQKAFRAERFARLNWAHHVSKDIASRYDVAYIEKLNIRGMTKSAKGTKEKSGLNRQILASAWGTLEVCLNYKAEVRKVHPAYTSQTCHQCGHVDKDNRKQSSAPLAGMRTMRT

SEQ ID NO: 8443 - protein, 440 aa, unknown
  TnpB Polypeptide
MKLQKTLKVKLGKLSNNKTNVLDRTINKNTKAINFCLKKAKKGDLITHHLVYKDLRKLNLPATIIHGARAKSVEIIKSYKKKKGKKTFPELKNGAIRYDNVNVKLRKTDNKLYKYFISLLYKAGTKGKTNSRIELPLIINSDYQTEIMKEIGNKFKLGSTELLKKNNDFFIHISYSKEIDIPIPDKSFSPVGVDIGINNLAVSVAQSSVKFHNGERTKWKNEFFRRQKAILQSNFAIKEVKRLRGRQTRYNDFEINNIANNIIKQAKQELRPVIVMEDLKDILKTAKVNKKQRTRLHNWVFRRLQTTIEYKANWEGIPVEYIDPKYTSQTCSKCGELNKRTRHTYKCKSCGYEANADYNAGRNIQQVFLAKCQEEQATINIASNDTIPEPQAKKDGSLLCTPLKEDNKPSVRNFKRKEVSIPHTESVCILEKVLWELNSS

SEQ ID NO: 8444 - protein, 390 aa, unknown
  TnpB Polypeptide
MELRMYEYRLYPSHKQKERLINSFKTCKHIYNELLALSIDSYKFGKVSLSGFDCNKYLTGKYSNIHSQIKQNVSDRVNKAFQNFFRRVKENAKEKGFPRFKSRINSITYPQSGFKFVNERRLYASKIGNIPIVLHRVPKGKVKTLTIKQNKAGQWFAIFSCELPDVKVVHPSKERIGIDVNSRDNICFLSNGESVDNPKFLVNSEKKLKRLHRQLSRKKKGSNNRSKARFRLSKQYVKVTNQRTDFLHKLSRSLTIKYGIIAVEDLDIKSMINNSYNAKFINDVSWGTFINMLSYKAVTSGGQLFKNPKTRGSSHRCSKCGFYVEDMPLSRKIFKCPKCGFVCHRDFNASNNHLKDTVGLTEISTPVNIEPLPSKLKASLVVESGTTHGK
